(19) United States
(12) Patent Application Publication
(10) Pub. No.: US 2006/0046246 A1
(43) Pub. Date: Mar. 2, 2006

(54) Genus, group, species and/or strain specific 16S rDNA sequences

(76) Inventors: Qiandong Zeng, Belmont, MA (US); Sonia Chatellier, Amberieu (FR); Donald T. Moir, Lexington, MA (US); Bruno LaCroix, Saint Genis-Laval (FR); Darrell Childress, Auburn, AL (US)

Correspondence Address: BUCHANAN INGERSOLL PC;(INCLUDING BURNS, DOANE, SWECKER & MATHIS), POST OFFICE BOX 1404, ALEXANDRIA, VA, 22313-1404, US

(21) Appl. No.: 10/831,286

(22) Filed: Apr. 26, 2004

Related U.S. Application Data
(60) Provisional application No. 60/464,955, filed on Apr. 24, 2003.

(51) Int. Cl. C12Q 1/70; C12M 1/34; C12Q 1/68

(52) U.S. Cl. 435/5; 435/287.2; 435/6

(57) ABSTRACT

Materials and methods for identifying unique sites in bacterial 16S and 23S rDNA are provided, as well as specific unique sequences of 16S rDNA in select bacteria. The distinguishing moieties will enable rapid differentiation between families, genera, groups, species, strains, subspecies, and isolates of microorganisms. Such differentiation can be performed by using rapid screening kits in combination with in silico analysis for diagnostic, prognastic, epidemiologic, phylogenetic, and other purposes.

### APPENDICES

[0001] Sequence Listing is submitted in triplicate on CD-ROM and is herein incorporated by reference in its entirety. Five tables (14, 15, 19, 20, and 21) submitted on CD-ROM are also incorporated into the specification by reference in their entirety. The files bmx_{—}2003_seq_list.txt, Table 14.txt, Table 15.txt, Table 19.txt, Table 20.txt, and Table 21.txt were saved on Apr. 23, 2004, and are respectively 5138, 3150, 4003, 2049, 1346, and 3517 kilobytes.

### BACKGROUND OF THE INVENTION

[0002] Microorganisms are classically identified by their ability to utilize different substrates as a source of carbon and nitrogen through the use of biochemical tests such as the API20E™ system (bioMérieux). For susceptibility testing, clinical microbiology laboratories use methods including disk diffusion, agar dilution and broth microdilution. Although identifications based on biochemical testing and antibacterial susceptibility tests are cost-effective, generally two days are required to obtain preliminary results due to the necessity of two successive overnight incubations to identify the bacteria from clinical specimens as well as to determine their susceptibility to antimicrobial agents. There are some commercially available automated systems (i.e., the MicroScan™ system from Dade Behring and the Vitek™ system from bioMérieux) which use sophisticated and expensive apparatus for faster microbial identification and susceptibility testing (Stager et al., 1992, Clin. Microbiol. Rev. 5: 302-327). These systems require shorter incubations periods, thereby allowing most bacterial identifications and susceptibility testing to be performed in less than 6 hours. Nevertheless, these faster systems always require the primary isolation of the bacteria or fungi as a pure culture, a process which takes at least 18 hours for a pure culture or 2 days for a mixed culture.

[0003] Most clinical samples are in the form of blood or urine samples. The remaining samples are in the form of such biological fluids as sputum, pus, cerebrospinal fluid, synovial fluid and the like. The biochemical and susceptibility testing for a urine sample typically requires 18-24 hours of incubation and for blood upwards of 6 to 7 days.

[0004] Thus there exists an obvious need for rapid and accurate diagnostic tests for the detection and identification of pathogens. DNA tests are preferred because these tests can be performed more rapidly and accurately than the standard biochemical and susceptibility tests. Thus new DNA tests capable of discriminating between microorganisms are needed.

[0005] Bacterial ribosomes contain at least three distinct RNA molecules: 5S, 16S and 23S rRNAs. Historically, these names were chosen with reference to their sedimentation rate, which is reflective of the size of the molecule. However, the true size of the ribosomes from one organism to another varies substantially. Nevertheless, the terminology of 5S, 16S and 23S rRNA is used to describe the ribosomes of all bacteria.

[0006] A genetic comparison of the 16S subunits of various bacterial species has shown that there are highly conserved regions intercalated with regions of average and low homology, even in cases of related species. In fact, 16S RNA genes have been used for analyzing the evolutionary relationship between microorganisms. Research groups have used differentially hybridizing DNA probes in order to identify unknown microorganisms based on the hybridization patterns of ribosomal RNA. However, nucleic acid hybridization is an imprecise technique and is ill suited for distinguishing between closely related species and strains of organisms.

[0007] Methods of distinguishing between genera and strains for purposes of identification and classification differ and there is no set method. Classification at the genus or species level may be based on DNA/DNA hybridization, whereas identification of the subject organism may be based on a phenotypic character of the organism. Serological reactions, which have only limited value in classification, have enormous value for identification of a particular organism. Serological methods include slide agglutination tests, fluorescent antibody techniques and other serological methods. Although these methods can be performed simply and rapidly, their specificity is frequently not absolute and additional confirmation by physiological or biochemical tests is usually required.

[0008] Recently, an effort has been made to identify probes which will differentiate genera, groups, species and strains based on the genetic make-up of the organism. The ability to find probes that distinguish between related species and strains is further complicated by the fact that public databases, such as GenBank, possess accuracy and completeness problems. These problems arise at least because of DNA sequencing errors, and because many bacteria have two or more 16S ribosomal RNA loci in their genomes. Sequence variations may occur between the different copies of the gene present in the same genome, i.e. polymorphisms.

[0009] In view of these issues, a great need remains for methods and reagents which can be used to differentiate bacteria based on genus, species and strain for diagnostic, prognostic, environmental, agricultural, and research purposes. Herein are provided reagents and methods for systematically using such reagents to identify bacteria based on genus, species and strain.

### SUMMARY OF THE INVENTION

[0010] One aspect contemplates a plurality of 16S polynucleotides immobilized to a solid support, wherein the plurality of 16S polynucleotides are subsequences of 16S rDNA and each 16S polynucleotide individually comprises at least one distinguishing moiety, which differentiates between microorganisms by genus, group, species, strain and/or isolate. The polynucleotide is preferably an oligomer of about 11 to about 45 nucleotides, and more preferably between 15-30 nucleotides. The plurality can include 10-100 or 5 to 1×10⁶ or more polynucleotides, and any number inbetween.

[0011] Another aspect contemplates a method of detecting the presence of a microorganism and determining an isolate, a strain, a species, a group, or a genus of a microorganism in a sample suspected of containing the microorganism comprising the steps of: (A) selecting at least one primer pair to amplify at least a portion of a 16S rDNA of the sample; (B) amplifying the 16S rDNA of the sample with the at least one primer pair; (C) contacting the amplified rDNA with at least one isolated nucleic acid comprising at least one distinguishing moiety; (D) incubating the amplified rDNA and the isolated nucleic acid under hybridizing conditions which allow hybridization in a sequence-specific manner between the sample and the at least one isolated nucleic acid to form a hybridization product; (E) detecting presence of the hybridization product and thereby one or more distinguishing moieties of the microorganism; and (F) determining the isolate, strain, species, group, and/or genus of the microorganism by the presence of the one or more distinguishing moieties.

[0012] In yet another aspect, a kit is contemplated. The kit is for the detection and identification of at least one microorganism by genus, group, species, strain and/or isolate in a sample and comprises: (A) at least one primer pair for amplification of at least a portion of a 16S rRNA of the microorganism; (B) two or more nucleic acids comprising at least two critical residues of a 16S rDNA which distinguish the microorganism by genus, group, species, strain or isolate; (C) a hybridization buffer to allow sequence-specific hybridization between the probes and the nucleic acids present in the sample, or to allow sequence-specific hybridization between the probes and the nucleic acids of amplified products of the sample; and (D) a detection moiety.

[0013] Another embodiment is a composition comprising a plurality of probes of Table 14 and/or Table 15, (or Table 20 and/or Table 21), wherein each probe comprises at least one distinguishing moiety and wherein the plurality of probes are immobilized on a substrate. The substrate can be a bead, plate, slide, microtube, in the form of an affinity column, and the like. Preferably, the plurality of probes comprises probes that are about 15 to about 45 and more preferably 20 to about 30 nucleotides in length.

[0014] Another aspect of the invention contemplates a method of diagnosing a subject and determining the microorganism causing an infection in the subject comprising the steps of: (A) obtaining a sample from the subject; (B) screening the sample for the microorganism using a kit described herein.

[0015] Yet a further aspect of the invention contemplates a method of identifying distinguishing moieties in a 16S bacterial rRNA or rDNA comprising the steps of: (A) obtaining a nucleotide sequence of a genetic locus shared by two or more different bacterial strains, species, or genera; (B) dividing the nucleotide sequence into a set of oligomers of length “n” which overlap by “x” nucleotides, wherein “x” is at least one nucleotide less than “n” and wherein said overlapping oligomers span the length of the sequence of the genetic locus; (C) comparing an oligomer using a comparative algorithm against at least one database of nucleotide sequences for that locus from a plurality of bacterial strains, species, or genera, wherein the nucleotide sequences are stored in at least one database; and (D) determining whether the oligomer has a nucleotide sequence which matches, or has no more than one mismatch with, a portion of all available nucleotide sequences for the locus of the strain, species, or genus of origin, or whether the nucleotide sequence has at least two mismatches when aligned with any other strain, species, or genus, wherein the at least two mismatches when aligned correspond to distinguishing moieties which differentiate between strain, species or genus.

[0016] This invention provides new methods for identifying genera, group, species, strain, and isolate specific markers based on bacterial rRNA and rDNA sequences. Preferred bacterial rRNA or rDNA is 16S rRNA or rDNA, however in all instances when discussing 16S rRNA or rDNA, unless otherwise noted, 23S rRNA or rDNA is also contemplated.

[0017] It is a further object of the invention to provide a method a method of identifying a distinguishing moiety in a 16S or a 23S bacterial rRNA or rDNA comprising:
[0018] (A) obtaining a nucleotide sequence of a genetic locus shared by two or more different bacterial strains, species, or genera; (B) computationally dividing the nucleotide sequence into a set of short oligomers of length “n” which overlap by “x” nucleotides, wherein “x” is at least one nucleotide less than “n” and wherein said overlapping short oligomers span the length of the sequence of the genetic locus; (C) analyzing the set of short oligomers using a comparative algorithm against at least one database of nucleotide sequences for that locus from a plurality of bacterial strains, species, or genera; and (D) identifying one or more short oligomers of the set of short oligomers having a nucleotide sequence which matches, or has no more than one mismatch with, a portion of all available nucleotide sequences for the locus of the strain, species, or genus of origin and having at least two mismatches when aligned with any other strain, species, or genus. The locus is preferably that of a bacterial 16S or 23S ribosomal locus.

[0019] In a preferred embodiment of the invention “n” is 30 nucleotides and “x” is 15 nucleotides or alternatively “n” is 20 nucleotides and “x” is 19 nucleotides. However “x” can be 9 to 19 nucleotides and “n” is 10 to 30 nucleotides.

[0020] The method further comprises analyzing the short oligomers by identifying short oligomers that require the largest number of nucleotide changes to match a different strain, species, or genus than that from which the oligomer derived. The mismatch is preferably one or more. The sequences thus identified can be genus, group, species, strain or isolate specific.

[0021] Another embodiment of the invention includes nucleic acids identified by the above method which are isolate, strain, species, group or genus specific. Some of these nucleic acids may be in the forms of probes of sufficient length to bind in a sequence-specific manner to a polynucleotide in a sample or to a polynucleotide amplified from a sample. Optimally such probes will comprise a detectable label and range from 15 to about 60 nucleotides or any number in between.

[0022] Another aspect of the invention comprises a method of detecting the presence of and determining the strain, species, group, or genus identity of a microorganism in a sample suspected of containing said microorganism. Such a method can comprise the following steps: (i) optionally selecting and using at least one primer pair to amplify at least a portion of a 16S rDNA of the sample; (ii) contacting the amplified or unamplified sample DNA with at least one of the isolated nucleic acid discussed above; (iii) incubating the amplified or unamplified sample DNA and the isolated nucleic acid under hybridizing conditions which allow hybridization in a sequence-specific manner between the sample and said at least one isolated nucleic acid to form a hybridization product; and (iv) detecting presence of the hybridization product as an indication of the identity of said microorganism. The microorganisms are preferentially from Table 1, but can be any human bacterial pathogen. Alternatively, the sample can be obtained from food or is a biological sample taken from a subject, an environmental sample, or a plant.

[0023] Another aspect of the invention contemplates a kit for the detection and identification of at least one microorganism from a set of microorganisms of Table 1 in a sample. The kit comprises comprising: (i) at least one primer pair for amplification of at least a portion of a 16S or a 23S rRNA of a microorganism of Table 1; (ii) a composition comprising at least one probe having at least one distinguishing moiety; (iii) a hybridization buffer to allow sequence-specific hybridization between the probes in said composition and the nucleic acid present in the sample or amplified products of the sample nucleic acid; and (iv) a detection moiety. In a preferred example, the microorganisms are from Table 1.

[0024] A further aspect of the invention contemplates a method of using a probe of Tables 14, 15, 20, or 21 (all of which are attached to the specification as separate documents) comprising at least one 16S rRNA distinguishing moiety to detect the presence of a bacterium in a sample. The sample can be an environmental sample, food sample, or a biological sample obtained from an animal. Alternatively, the probes can be used in a method to determine a treatment protocol in a subject believed to suffer from a bacterial infection.

[0025] Yet another aspect of the invention includes a database comprising nucleic acid sequences with distinguishing moieties which distinguish a microorganism based on genus, species, or strain and wherein the database comprises at least one sequence from Tables 2, 14, 15, 20, or 21 (all of which are attached to the specification as separate documents). Another database contemplated is a reference database which comprises Table 14 and/or Table 15 or Table 20 and/or Table 21 (in a relational form with a means for querying said reference database).

[0026] In another embodiment of the invention, a computerized storage and retrieval system of biological information, comprising: a data entry means; a display means; a programmable central processing unit; and a data storage means having oligomers comprising 16S rRNA sequences with distinguishing moieties and annotated information on attributes of the rRNA sequences electronically stored in a relational database.

[0027] Another object of the invention provides for a computerized storage and retrieval system of biological information, comprising: a data entry means; a display means; a programmable central processing unit; and a data storage means having oligomers comprising 16S rRNA sequences with distinguishing moieties and annotated information on attributes of the rRNA sequences electronically stored in a relational database.

### BRIEF DESCRIPTION OF THE DRAWINGS

[0028] The patent or application file contains at least one drawing executed in color. Copies of this patent or patent application publication with color drawing(s) will be provided by the Office upon request and payment of the necessary fee.

[0029] FIG. 1. 16S PCR Sequencing Procedure. In order to determine the DNA sequence of the 16S rDNA locus of bacterial samples, a total of six PCR products were generated for use as sequencing templates. Three PCR products comprised a first set of minimally-tiled fragments that cover the entire length of 16S, and two PCR products (Tier 2, Nos. 4-5; see Tables 4-6) comprise a backup tier that also covers the full length of 16S. The third tier covers the entire 16S sequence with a single amplicon. Thirteen 16S specific sequencing primers (walking primers in Table 6) were generated and used on the full-length amplicon in addition to the M13 based end reads. In the high throughput schema, all 6 PCR products were amplified from each bacterial genomic DNA sample, and were sequenced from both ends. These PCR primers were tailed with M13 primer binding sites to provide for robust sequencing of resulting products with standard M13 sequencing primers. Twelve of the thirteen walking primers, excluding 16-514F, were used to generate reads from the full-length amplicon at this time. Primer 16-514F was only used on assemblies remaining incomplete after initial sequencing attempts. All sequence reads were clipped to remove untemplated extraneous bases and assembled by polyphred (Univ. Washington) into a single assembly group for each sample. Sequences were only termed “final” and ready for release if they met the minimum length (i.e., 1380 nt for 16S) and coverage requirements (i.e., 3.5-fold average coverage with bases at ≧Phred 20 quality). In some cases, even more sequence reads will be required to fill all sequence gaps and to provide adequate coverage. Primers chosen to fill gaps and provide coverage for some 16S loci may not anneal or prime in other species due to unpredictable sequence variations. Thus, these primers may have to be re-designed as needed for specific samples based on the sequences obtained for those samples.

[0030] FIG. 2. Signature Sequence Analysis Model of 16S rDNA using overlapping oligonucleotides. The depicted embodiment uses 30-mers with 15 nucleotide (nt) overlaps. For a 1.5 kb region, one uses approximately 100 30-mer oligonucleotides. The 30-mers are then analyzed against a database using BLAST, e.g., GenBank, RDP, or an internal database. Alternative lengths of oligomers are also contemplated herein.

[0031] FIG. 3. TaqMan® Assay Results at Different Template DNA Concentrations. The diagram shows the average of a triplicate of experiments for each point. Serial dilutions of genomic DNA from one Bacteroides stercoris isolate were used as templates for real-time PCR. FIG. 3 represents the relative fluorescence obtained for each PCR cycle and for each DNA concentration tested. The threshold cycle (Ct) is defined as the PCR cycle at which a fluorescence signal passes a preset value (threshold). The fastest Ct was obtained with the highest DNA amount used (50 ng). However, a concentration of 10 ng is a suitable minimum amount, since the Ct had a similar value (around 18) to the Ct obtained with DNA tested at 25 and 50 ng. Furthermore, the slope of the curves was also similar. In the studies described herein, all DNA samples were tested at 10 ng per reaction.

[0032] FIG. 4. TaqMan® Probe Specific to C. septicum. FIG. 4 illustrates results from a TaqMan® real-time PCR test of seven strains—two strains identified as C. septicum by phenotypic testing and 5 strains identified as different, but related species. The TaqMan® test results showed that both of the strains phenotypically identified as C. septicum had a positive amplification signal (Ct value of about 15 cycles) clearly distinguishable from the response of the 5 other strains belonging to other species. Two strains belonging to 2 other species did not have an amplification signal and the 3 remaining samples that harbor a 16S rDNA sequence with only two mismatches with the probe sequence had a delayed response.

[0033] FIG. 5. TaqMan® Probe Specific to Clostridium difficile. FIG. 5 illustrates results from a TaqMan® real-time PCR test of five bacterial strains, two C. difficile strains and three strains representing other species from the Clostridium genus. The test clearly distinguished between the C. difficile strains (#06H01 and 06H02) and the non C. difficile isolates, since only the isolates belonging to C. difficile species had a positive amplification signal detected after 18 PCR cycles (CT value of about 18 cycles).

[0034] FIG. 6. TaqMan® Assay for Bacteroides vulgatus. FIG. 6 illustrates results from a TaqMan® real-time PCR test of 12 strains of B. vulgatus. All twelve B. vulgatus strains had similar Ct values of about 15 cycles, consistent with the fact that all twelve contain the probe SSO sequence within their 16S rDNA sequence.

[0035] FIG. 7. Representative LightCycler assay for Staphylococcus simulans. FIG. 7 illustrates results from a LightCycler test of 15 strains (10 Staphylococcus simulans, 4 Staphylococcus chromogenes, 2 Staphylococcus hyicus, 2 Staphylococcus schleiferi, 2 Staphylococcus intermedius, 2 Staphylococcus caprae, and 1 Staphylococcus cohnii) and a negative control (sample 1). All thirteen strains of Staphylococcus simulans had a positive amplification signal represented by Ct values of about 16 cycles, consistent with the fact that all these strains harbor the probe sequences within their 16S rDNA sequence.

[0036] FIG. 8. Pyrosequencing assay for two Enterococcus species. Each peak represents the incorporation of the nucleotide mentioned on the X-axis during the sequencing reaction. The size of the peak determines the number of nucleotides incorporated. The software also gives a schematic representation of the pyrogram for each possibility of the single-nucleotide polymorphism also called SNP (C or T in this example). In this example, the strain of Enterococcus faecalis differs from that of Enteroccocus durans by a C (cytosine) instead of a T (thymidine) in the target sequence TG(C or T)AGGCGAGTTG.

### DETAILED DESCRIPTION OF THE INVENTION

[0037] The methods and reagents disclosed herein are for use in differentiating bacteria by genus, group, species and strain. Bacteria are described as single cells or simple associations of similar cells forming a group defined by cellular and not organismal properties. The nucleoplasm (genophore) of a bacterium is never separated from the cytoplasm by a unit-membrane system (nuclear membrane). The super kingdom of bacteria is classified in descending order by phylum, class, family, genus, group, species and strain.

[0038] There are four major identification categories of bacteria: (1) Gram-negative eubacteria that have cell walls, (2) Gram-positive eubacteria that have cell walls, (3) eubacteria lacking cell walls such as mycoplasmas, and (4) archaeobacteria. The preferred bacterial targets of the methods and reagents of this invention are 1 through 3.

[0039] Of the preferred categories, these can then be subdivided again into groups, any of which can be subjected to the methods and reagents derived therefrom using the methods of the application. For Category 1, the groups include (a) the spirochetes, (b) aerobic/microaerophilic, motile helical/vibroid gram-negative bacteria, (c) non-motile (or rarely motile), gram-negative curved bacteria, (d) gram-negative aerobic/microaerophilic rods and cocci, (e) facultatively anaerobic Gram-negative rods, (f) gram-negative anaerobic straight, curved and helical rods, (g) dissimilatory sulfate- or sulfur-reducing bacteria, (h) anaerobic gram-negative cocci, (i) the rickettsias and chlamydias, (j) anoxygenic phototrophic bacteria, (k) oxygenic phototrophic bacteria, (l) aerobic chemolithotrophic bacteria and associated organisms, (m) budding and/or appendaged bacteria, (n) sheathed bacteria, (o) nonphotosynthetic, non-fruiting gliding bacteria, and (p) fruiting gliding bacteria: the myxobacteria. Of these groups, the preferred groups that include, among others, bacteria of medical importance, are: (a), (b), (c), (d), (e), (f), and (h).

[0040] Category 2 can be divided into 6 groups as follows: (a) gram-positive cocci, (b) endospore-forming gram-positive rods and cocci, (c) regular, non-sporing gram-positive rods, (d) irregular, non-sporing gram-positive rods, (e) the mycobacteria, and (f) actinomycetes. Of these groups, the preferred groups that include, among others, bacteria of medical importance are (a), (b), (c), and (d). Category 3 consists of mycoplasmas. For a breakdown and further description of the groups and the members of the groups and descriptions of each, see Bergey's Manual of Determinative Bacteriology (9^{th} ed., John G. Holt et al., eds. Philadelphia, 1994). More preferred organisms are presented infra.

1. Definitions

[0041] The “sample” may be any biological material taken either directly from the infected human being (or animal), or after culturing (enrichment), a sample taken from food or feed, an environmental sample comprising a mixture of bacteria, or a plant sample. Biological material may be, e.g., expectorations of any kind, broncheolavages, blood, skin tissue, biopsies, lymphocyte blood culture material, urine, fecal samples, sputum, and the like. Said samples may be prepared or extracted according to any of the techniques known in the art. Sample is also meant to include samples from food, environmental samples or plant samples.

[0042] By “subject” is meant to include any vertebrate or invertebrate capable of being infected by a bacterium. Preferred subjects include agricultural animals (e.g., birds, pigs, cattle, sheep, goats, bison, horses and the like), and mammals (e.g., dogs, cats, etc.) including primates (humans).

[0043] By “distinguishing moiety” is meant a nucleic acid(s) sequence difference in the sequence of mature 16S rRNA, or in the portion of rDNA which encodes it, that differentiates a bacterium's 16S rRNA or rDNA from another bacterium's 16S rRNA. The distinguishing moiety may be family or genus specific. More preferably the distinguishing moiety is group, species, subspecies or strain specific.

[0044] The probes of the invention preferably distinguish between genus, species and strains of bacteria. However, the probes may also be used to distinguish between families and classes of bacteria for classification purposes. By “family specific” is meant a characteristic, preferably at the nucleic acid level, which distinguishes families of bacteria based on their ribosomal DNA or RNA.

[0045] By “genus-specific” is meant to include a distinguishing characteristic of a genus which allows differentiation between genera of bacterium based on their ribosomal DNA or RNA. It would be understood that such a genus-specific moiety would also identify the family of a bacterium of that particular genus. Such genus specific moieties may or may not be capable of identifying all members in that family.

[0046] By “group specific” is meant an oligonucleotide sequence which is specific towards two or more members of a species. “Group specific” may include species from different genera. By “microorganism group” is meant at least two members of a genus (e.g., Bacteroides) or even members of at least two different genera (e.g., Bacteroides and Prevotella), provided that the species involved are clinically and therapeutically similar. For example, probes, which identify members of a group consisting of Streptococcus pneumoniae, Haemophilus influenzae, and Moraxella catarrhalis, would be useful, because these members of the group all exhibit a similar clinical outcome (namely, pneumonia), which is treated similarly. Thus, knowledge that a bacterium is a member of this group would provide clinicians with useful information. Probes, which identify a microorganism group, will typically hybridize to rRNA or rDNA of a plurality of microorganism species tested.

[0047] By “species-specific” is meant to include a distinguishing characteristic of a genus, which allows differentiation between species of bacterium based on their ribosomal DNA or RNA (e.g., Cedecea davisaes, Cedecea lapagei and Cedecea neteri). It would be understood that such a species-specific moiety would also identify the genus of a bacterium of that particular species, but may not necessarily be capable of identifying all members of that genus.

[0048] By “strain specific” is meant to include distinguishing characteristics of a bacterium which allows differentiation between strains of bacterium. It would be understood that such a strain-specific moieties would also identify the species of that particular strain, but may not necessarily be capable of identifying all members of that species.

[0049] By “rRNA” and “ribosomal RNA” is meant the structural RNA components of the ribosome. Prokaryotes such as bacteria have 5S rRNA and 23S rRNA species in the large subunit and a 16S rRNA species in the small subunit. The large subunit in, for example, E. coli is known to sediment at 50S due to the presence of 23S rRNA, 5S rRNA and 31 proteins. The small subunit, in E. coli, is 30S due to the presence of the 16S rRNA and 21 ribosomal proteins. In E. coli the 16S rRNA is 1,542 nucleotides. This rRNA is synthesized like mRNA using a RNA polymerase that uses DNA as a template.

[0050] By “rDNA” is meant typically to refer to the DNA coding for ribosomal RNA. However, in certain instances “rDNA” may refer to recombinant DNA.

[0051] By “r-proteins” and “ribosomal proteins” is meant the proteins that associate with the large and small ribosomal subunits.

[0052] As used throughout the application and claims, the term “probe” will refer to synthetic or biologically produced nucleic acids, between 10 and 250 bases in length, which by design or selection, contain specific nucleotide sequences that allow specific and preferential hybridization under predetermined conditions to target nucleic acid sequences, and optionally contain a moiety for detection or for enhancing assay performance. A minimum of ten nucleotides is generally necessary in order to statistically obtain specificity and form stable hybridization products, and a maximum of 250 nucleotides generally represents an upper limit for sequences in which reaction parameters can be adjusted to determine mismatched sequences and preferential hybridization. Therefore, in general, a preferred length of a probe will be between 10 and 250 nucleotides. A more preferred length of probe is between 15 and 60 oligonucleotides (i.e., 15-mers and 60-mers and any range in between). Probes may optionally contain certain constituents that pertain to their proper or optimal functioning under certain assay conditions. For example, probes may be modified to improve their resistance to nuclease degradation (e.g., such as by end-capping), to carry detection ligands (e.g., such as fluorescein, ³²P, biotin, and like labeling) or to facilitate their capture onto a solid support (e.g., poly-deoxyadenosine “tails”).

[0053] “Preferential hybridization” or “hybridizing preferentially” means that hybridization with the intended target nucleic acid results in a hybridization reaction product which is more stable than any hybridization reaction products resulting from hybridization with a non-target nucleic acid under identical conditions. It is well within the skill of the ordinary artisan to compare stability of hybridization reaction products and evaluate which one is more stable, i.e., determine which one has bound “preferentially”. By “specific hybridization” is meant that a nucleotide sequence will hybridize to a predetermined target sequence and will not substantially hybridize to a non-target sequence.

[0054] “Specifically discriminate” means that a probe will substantially hybridize to a predetermined target sequence and will not substantially hybridize to a non-target sequence.

[0055] “Hybridization” is a process by which, under predetermined reaction conditions, two partially or completely complementary strands of nucleic acids are allowed to come together in an antiparallel fashion to form a double stranded nucleic acid with specific and stable hydrogen bonds, following explicit rules pertaining to which nucleic acids bases may pair with one another. “Substantial hybridization” means that the amount of hybridization observed will be such that one observing the results would consider the result positive in a clinical setting. Data which is considered “background noise” is not substantial hybridization.

[0056] “Stringent hybridization conditions” means approximately 35° C. to 65° C. in a salt solution of approximately 0.9 M NaCl. Stringency may also be governed by such reaction parameters as the concentration and type of ionic species present in the hybridization solution, the types and concentrations of denaturing agents present, and the temperature of hybridization. Generally as hybridization conditions become more stringent, probes of greater length and/or containing fewer mismatched nucleotides are preferred if stable hybrids are to be formed. As a rule, the stringency of the conditions under which a hybridization is to take place will dictate certain characteristics of the preferred probes to be employed. Such relationships are well understood and can be readily manipulated by those skilled in the art.

[0057] As used herein, the terms “homology” and “homologous to” are meant to refer to the degree of similarity between two or more nucleic acid sequences, and is not meant to imply any taxonomic relatedness between organisms. The degree of similarity is expressed as a percentage, i.e., 90% homology between two sequences will mean that 90% of the bases of the first sequence are identically matched to the bases of the second sequence.

[0058] “Target” or “target molecule” as used herein in the diagnostic sense, refers to a molecule of interest, i.e., the molecule whose presence one wishes to determine. In a therapeutic sense, the term “target” or “target molecule” refers to a molecule associated with a disease or with an organism causing a disease.

[0059] “Biological binding pair” as used herein refers to any pair of molecules, which exhibit mutual affinity or binding capacity. A biological binding pair is capable of forming a complex under binding conditions. For the purposes of the present application, the term “ligand” will refer to one molecule of the biological binding pair; and the terms “antiligand” or “receptor” will refer to the opposite molecule of the biological binding pair. For example, without limitation, embodiments of the present invention have application in nucleic acid hybridization assays where the biological binding pair includes two complementary nucleic acids. One of the nucleic acids is designated the ligand and the other nucleic acid is designated the antiligand or receptor. One of the nucleic acids may also be a target molecule. The designation of ligand or antiligand is a matter of arbitrary convenience. The biological binding pair may include antigens and antibodies, drugs and drug receptor sites, and enzymes and enzyme substrates, to name a few.

[0060] The term “label” refers to a chemical moiety which is capable of detection including, by way of example, without limitation, radioactive isotopes (e.g., ³²P), enzymes (e.g., horseradish peroxidase), luminescent agents (e.g., luciferase), precipitating agents, and dyes (e.g., FAM which is derived from fluoresceine and TAMRA which is derived from rhodamine). The term “agent” is used in a broad sense, including any chemical moiety, which participates in reactions that lead to a detectable response. The term “cofactor” is used broadly to include any chemical moiety, which participates in reactions with the label.

[0061] The term “amplify” is used in the broad sense to mean creating an amplification product, which may include by way of example, additional target molecules, or target-like molecules, capable of functioning in a manner like the target molecule, or a molecule subject to detection steps in place of the target molecule, which molecules are created by virtue of the presence of the target molecule in the sample. In the situation where the target is a polynucleotide, additional target, or target-like molecules, or molecules subject to detection can be made enzymatically with DNA or RNA polymerase.

[0062] The term “support” when used alone, includes conventional supports such as filters, dipsticks, microarrays, beads and membranes as well as retrievable supports.

2. Method of Identifying Group, Genus, Species and Strain Specific Polymorphisms

[0063] 2.1 In Silico Methods. A systematic method is described herein for identifying regions of a 16S sequence, for any bacterial organism, as being specific to particular genera or species, and in some instance, specific to a particular strain or isolate. As illustrated in FIGS. 2A and 2B, this method involves dividing each of one or more full-length 16S rRNA gene sequences into a number of nucleotide fragments (i.e., oligomers). Each full-length sequence comprises, for example, 1500 nucleotides, where each nucleotide fragment has a predefined length of “n” nucleotides (e.g., between 10 and 30 nucleotides) and a nucleotide overlap with an adjacent fragment of “x” nucleotides, where “x” is greater than or equal to zero and less than or equal to n−1 (see e.g., FIG. 1).

[0064] As illustrated in FIG. 2A, each nucleotide fragment is then compared using an algorithm, such as BLAST, against other 16S sequences of length “n” stored in one or more databases, possibly including any one of a number of publically accessible databases, such as GenBank, the Ribosomal Database Project database or other like databases. The algorithm ultimately generates one or more reports which contain data reflecting the results of each comparison. The resultant data is then processed using additional algorithms to identify those oligomers exhibiting one or fewer (0-1) nucleotide mismatches when compared to nucleotide fragments associated with zero through Z (0-z) number of species. Oligomers exhibiting 0-1 nucleotide mismatches when compared to nucleotide sequences associated with greater than z number of species may be ignored for purposes of this exemplary method.

[0065] Oligomers exhibiting 0-1 nucleotide mismatches when compared to nucleotide sequences associated with 0-z number of species are categorized as either species-specific oligomers or group-specific oligomers, as shown in FIG. 2B. Species-specific oligomers are those exhibiting 0-1 nucleotide mismatches when aligned with 0-1 species, whereas group-specific oligomers are those exhibiting 0-1 nucleotide mismatches when aligned with 2-z number of species. Species-specific oligomers may be further validated by recategorizing certain ones of these oligomers as being strain or isolate specific, and by removing certain ones that containing sequence errors. In turn, the group-specific oligomers may be ranked in order of robustness, as indicated in FIG. 2B (see e.g., Tables 14, 19, and 20).

[0066] More specific examples of the aforementioned method are described below (see Example 2 and Example 3). Example 2 specifically provides an example where n equals 30 and x equals 15. Example 3 specifically provides an example where n equals 20 and x equals 19.

[0067] 2.2 Experimental verification. Experimental verification can then be performed using, for example, real time PCR (TaqMan®), spot format assays (e.g., a single hybridization test on a membrane) or low-density DNA microarray format (e.g., multiple probes spotted on a chip). The TaqMan® technique was developed by Perkin-Elmer Applied-Biosystems and relies on fluorescence resonance energy transfer (FRET). It requires the use of two primers and a fluorescent probe. The TaqMan® probes possess a fluorescent reporter at the 5′ end and a fluorescent quencher at the 3′ end. When irradiated, the excited fluorescent dye transfers energy to the nearby quenching dye molecule rather than fluorescing, resulting in a non-fluorescent substrate. When the probe hybridizes to its complementary sequence on the target DNA, the Taq DNA polymerase starts to digest the probe separating the reporter and the quencher so that no FRET occurs and the fluorescent signal of the reporter can be detected and measured. The more PCR product formed, the higher the fluorescent signal observed.

[0068] To accurately test the specificity of a TaqMan® probe, the PCR primers used in the TaqMan® assay must represent sequences that are present in all species to be tested. In order to verify the presence of conserved sequences upstream and downstream from the 30-mer oligonucleotide sequence from which to select PCR primers, each 30-mer was extended by 60 bases on each side to generate a 150-mer oligonucleotide. A multiple sequence alignment using CLUSTALW was generated using the particular 150-mer oligonucleotide to be tested and the 20-40 closest sequences in the selected database(s). CLUSTALW is the more recent version of CLUSTAL, with the W standing for weighting to represent the ability of the program to provide weights to the sequence and program parameters (Higgins et al., 1996, Meth. Enz. 266: 383-402). Another program that can be used is for multiple sequence alignment is PILEUP, and the like.

3. Organisms

[0069] The methods described infra can be utilized with any bacteria, such as those discussed in John G. Holt et al., Bergey's Manual of Determinative Bacteriology (Philadelphia, Pa., 9^{th} ed., 1994). The approximately 600 species and about 80 genera, whose rDNA sequences were analyzed to discover the markers of this invention, are provided in Table 7. Preferred genera include Actinobacillus spp., Actinomyces spp., Bacteroides spp., Campylobacter spp., Cardiobacterium spp., Clostridium spp., Eikenella spp., Enterobacter spp., Enterococcus spp., Escherichia spp., Fusobacterium spp., Haemophilus spp., Kingella spp., Klebsiella spp., Moraxella spp., Neisseria spp., Oligella spp., Prevotella spp., Propionibacterium spp., Pseudomonas spp., Staphylococcus spp., Streptococcus and Wolinella spp. Any of the species within these individual groups of species can be analyzed using the methods, reagents, and the like described herein. Preferred species, include the following:

TABLE 1
Most common species found in blood cultures,
plus anaerobesand fastidious species

Actinobacillus spp.
A. actinomycetemcomitans
A. ureae
Actinomyces spp.
A. bovis
A. israelii
A. meyeri
A. naeslundii
Bacteroides spp.
B. fragilis
B. thetaiotaomicron
B. vulgatus
Campylobacter spp.
C. fetus
C. jejuni
Cardiobacterium spp.
C. hominis
Cedecea spp.
C. davisae
C. lapagei
C. neteri
Clostridium spp.
C. botulinum
C. difficile
C. perfringens
C. septicum
C. sordellii
C. tetani
Eikenella spp.
E. corrodens
Enterobacter spp.
E. cloacae
Enterococcus spp.
E. faecalis
Escherichia spp.
E. coli
Fusobacterium spp.
F. moriferum
F. necrogenes
F. necrophorum
F. varium
Haemophilus spp.
H. aegyptius
H. aphrophilus
H. ducreyi
H. haemolyticus
H. influenzae
H. parahaemolyticus
H. parainfluenzae
Kingella spp.
K. denitrificans
K. kingae
Klebsiella spp.
K. pneumoniae
Moraxella spp.
M. catarrhalis
M. lacunata
M. osloensis
M. nonliquefaciens
Neisseria spp.
N. gonorrhoeae
N. meningitidis
Oligella spp.
O. urethralis
Pantoea spp.
P. agglomerans
P. dispersa
Prevotella spp.
P. bivia
Propionibacterium spp.
P. acnes
Proteus spp.
P. mirabilis
P. myxofaciens
P. penneri
P. vulgaris
Providencia spp.
P. alcalifaciens
P. heimbachae
P. rettgeri
P. rustigianii
P. stuartii
Pseudomonas spp.
P. aeruginosa
Staphylococcus spp.
S. aureus
S. haemolyticus
S. epidermidis
S. saprophyticus
Streptococcus spp.
S. bovis
S. intermedius
Wolinella spp.
W. curva
W. recta
W. succinogenes
Yokinella spp.
Y. regensburgei

[0070] Actinomyces species occur mainly in the oral cavity and on mucous membranes of warm-blooded vertebrates. Actinomyces spp. commonly cause pyogenic infections in association with other concomitant bacteria. Differentiation of the genus Actinomyces is difficult because of variable test reactions and because some species are best differentiated by protein gel electrophoresis, which requires culture and thus slows analysis.

[0071] Bacteroides are isolated from a wide range of anaerobic habitats including gingival crevices, the intestinal tract, sewage sludge and infective and purulent conditions in humans and animals.

[0072] Campylobacter is found in the reproductive organs, intestinal tract and oral cavity of humans and animals.

[0073] Cardiobacterium are associated with endocarditis in humans.

[0074] Cedecea were first thought to be intermediate between typical Serratia species and S. fonticola. They also are similar to Ewingella and thus can be hard to distinguish by traditional phenotypic methods.

[0075] Clostridum species are widespread in the environment. Many species produce potent endotoxins and some are pathogenic for animals, because of either wound infections or the absorption of toxins. There are over 100 species in this genus and differentiation between the species needs to be carried out only with well trained personnel because of the exacting growth conditions and test procedures required for distinguishing the species.

[0076] Eikenella can be opportunistic pathogens that cause infections in the human mouth and intestine.

[0077] Enterobacter species are widely distributed in nature, occurring in fresh water, soil, sewage, plants, vegetables and animal and human feces. Several species, most notably E. cloacae, E. sakazakii, E. aerogenes, E. agglomerans, and E. gergoviae are opportunistic pathogens causing urinary tract infections and occasionally septicemia and meningitis.

[0078] Enterococcus species occur widely in the environment, particularly in feces of vertebrates. Enterococcus species are also sometimes the cause of pyogenic infections.

[0079] Although Escherichia species are part of the normal intestinal flora of warm-blooded animals and in the case of E. blattae, of cockroaches, Escherichia are also responsible for diarrheal disease, and are major contributors to urinary tract infections and nosocomial infections, including septicemia and meningitis.

[0080] Fusobacterium is found principally in the gingival sulcus and in the intestinal and genital tracts. Species have also been isolated from blood cultures and various purulent lesions in humans and animals and from tropical ulcers. Because the typical fusiform or spindle-shaped appearance of these organisms is not shown by all fusobacteria, it causes difficulty in distinguishing some species from strains of Bacteroides, Clostridium and Eubacterium where the cells are easily decolorized. Differentiation of the species belonging to the Fusobacterium genus is also difficult because of the general lack of reactivity in conventional tests. This is especially true for subspecies of F. nucleatum: subsp. nucleatum, subsp. polymorphym and subsp. vincentii.

[0081] The genus Haemophilus includes H. influenzae, which is the leading cause of meningitis in children. It also is known to cause septicemic conditions, otitis media, sinusitis, and chronic bronchitis. H. influenzae biovar aegyptius is mainly responsible for conjunctivitis, a highly transmissible eye infection. H. ducreyi is the causative agent of the venereal disease soft chancre or chancroid.

[0082] Kingella species are Gram-negative cells, but because they have tendency to resist decolorization, they are difficult to characterize clinically. These organisms occur in human mucous membranes of the upper respiratory tract and are known to be susceptible to penicillin. Consequently, rapid identification of Kingella spp. would allow clinicians to prescribe drugs such as penicillin over more pharmacologically toxic antibiotics.

[0083] Klebsiella species can be found in human feces, clinical specimens, soil, water, grain, fruits and vegetables. K. pneumoniae and K. oxytoca are opportunistic pathogens that can cause bacteremia, pneumonia and urinary tract and other human infections. Klebsiella species are also known for causing nosocomial infections in urological, neonatal, intensive care and geriatric patients.

[0084] Species of Moraxella are Gram-negative, but as with other microorganisms often have a tendency to resist decolorization of the dye, thus making a clinical diagnosis difficult. Diagnosis of a Moraxella spp. infection is useful, as they are usually highly sensitive to penicillin. These organisms are responsible for parasitic infections of mucous membranes of humans and other warm-blooded animals.

[0085] Species of Neisseria are also Gram-negative, and also have a tendency to resist decolorization of the dye, thus making a clinical diagnosis difficult. These organisms typically are inhabitants of the mucous membranes of mammals. Some species are primary pathogens for humans.

[0086] The Oligella genus was not created until 1987 (Rossaue et al., 1987, Int. J. Syst. Bacteriol. 37: 198-210) and contains two species: O. urethralis and O. ureolytica. These bacterium are isolated mainly from the genitourinary tract of humans.

[0087] Pantoea is a genus that was not created until 1989 by Gavini et al. (Int. J. Syst. Bacteriol. 39: 337-45). It included two species at that time, Pantoea agglomerans (also known as Enterobacter agglomerans, Erwinia herbicola, and Erwinia milletiae) and Pantoea dispersa. Since its creation, the Pantoa genus has grown to include at least seven species. The species of Pantoea are isolated from plant surfaces, seeds, soil, and water, as well as from animals and human wounds, blood and urine. These microorganisms are also considered opportunistic human pathogens.

[0088] The genus Prevotella was created in 1990 by Shah and Collins (Int. J. Syst. Bacteriol. 40: 205-208) with the species P. melaninogenica (formerly Bacteroides melaninogenicus). At least fifteen other species have been added to the Prevotella genus from the genus Bacteroides. Consequently, discrimination between at least these two genera is difficult. Additional classification based on species is required and would be aid by species specific probes.

[0089] Propionibacterium species are found mainly in cheese and dairy food products and on the human skin. Propionibacterium are readily confused with some species of Cornebacterium or Clostridium.

[0090] Proteus is a Gram-negative genus of organisms that occur in intestines of humans and a wide variety of animals. Species are also found in manure, soil and polluted waters. P. myxofaciens has been isolated from gypsy moth larvae. Species, which are human pathogens, cause urinary tract infections. Certain species also act as secondary invaders causing septic lesions often in burn patients. The species, Proteus penneri, was first created in 1982 by Hickman et al., J. Clin. Microbiol. 15: 1097-1102 and Int. J. Syst. Bacteriol. 33: 438-440.

[0091] The genus, Providencia, consists of microorganisms that have been isolated from human diarrhetic stools, urinary tract infections, wounds, burns and bacteremias, and from penguins. It is thus considered to include human pathogen species. The species Providencia heimbachae was created in 1986 by Muller et al., (Int. J. Syst. Bacteriol. 36: 252-6) and Providencia rustigianii (formerly known as biogroup 3 of Providencia alcalifaciens) was created in 1983 by Hickman-Brenner et al., (J. Clin. Microbiol. 17: 1057-60; and Int. J. Syst. Bacteriol. 33: 672-4).

[0092] Pseudomonas spp. are widely distributed in nature. Some species are pathogenic for humans, animals or plants.

[0093] Staphylococcus species are mainly associated with the skin and mucous membranes of warm-blooded vertebrates but are often isolated from food products, dust and water. Some species are opportunistic pathogens in humans and animals or are known to produce extracellular toxins. Consequently, subspecies and strain determination is important for clinical diagnosis, prognosis and treatment of Staphylococcus infections.

[0094] Streptococcus is a complex genus. The genus in Bergey's Manual of Systematic Bacteriology included microorganisms that were members of the Enterococcus, Lactococcus and Streptococcus genera. These genera broadly encompass enterococci, the lactic streptococci and the pyrogenic, oral and anaerobic streptococci. Additionally, the genus Melissococcus (q.v.) contains an organism previously known as Streptococcus pluton. Additionally, most of the anaerobic streptococci (whose speciation is currently confused) will be transferred to genera such as Peptostreptococcus, but they are currently included in the Streptococcus genus. Streptococci are parasites of vertebrates that mainly inhabit the mouth and upper respiratory tract. Some species are pathogenic for humans and animals. Various antigens associated with Lancefield serological groups are characteristic of some of the species and are required for accurate identification of Streptococcus species. There is difficulty in differentiating the strains that belong to the pyrogenic, oral and anaerobic groups of Streptococcus especially. For example, many species especially in the oral group are undergoing active study, with consequent rearrangement of taxonomy and continuing emendation of description so that a number of areas are still not very clear. See John G. Holt et al., Bergey's Manual of Determinative Bacteriology (9^{th} ed., Lippincott Williams & Wilkins 1994).

[0095] Wolinella species are isolated from the bovine rumen, human gingival sulcus, dental root canal infections and other clinical material.

[0096] The genus Yokenella was not included in Bergey's Manual of Systematic Bacteriology. The genus was created in 1984 by Kosako et al., (Japan. J. Med. Sci. Biol. 37: 117-24; Int. J. Med. Sci. Biol. 35: 223-5, 1985). It included one species, Y. regensburgei. The genus Koserella with its single species, K. trabulsii, was created in 1985 by Hickman-Brenner et al., (J. Clin. Microbiol. 21: 39-42; Int. J. Syst. Bacteriol. 35: 223-5, 1985). Y. regensburgei and K. trabulsii were shown to be subject synonyms in 1987 by Kosako et al., (Int. J. Syst. Bacteriol. 37: 127-9). Other synonyms for this organism are Hafnia hybridization group 3, Enteric Group 45 (CDC), and NIH biogroup 9 (Japan). Today, the predominant name is J. regensburgei. The organism is isolated from human wounds, urine, sputum and stool and insect intestine, although its clinical significance is unknown. However, there is difficulty characterizing the microorganism. Both human and insect strains of Yokenella were first thought to be Hafnia alvei or a Hafnia-like species. Yokenella is also somewhat similar to species in the genera Citrobacter and Escherichia. Finally, it is further difficult to characterize Yokenella because several strains frequently give delayed (i.e. 3-7 days) positive reactions for several biochemical tests. Thus, a method of positively identifying this organism will be helpful clinically.

[0097] Novel sequences have been identified for the following species using the methods described herein.

TABLE 2

| | Other Names For | |
|---|---|---|
| Species | Species | SEQ ID NOS |
| Cedecea lapagei | | 48667, 48668 |
| Citrobacter youngae | | 48671, 48672 |
| Moellerella wisconsensis | | 48680, 48682 |
| Pantoea dispersa | | 48681, 48683 |
| Proteus penneri | | 48675, 48678 |
| Providencia rettgeri | Proteus rettgeri | 48677 |
| Providencia rustigianii | Providencia | 48684, 48685 |
| | friedericiana | |
| Streptococcus urinalis | | 48688 |
| Yokenella regensburgei | Koserella trabulsii | 48686, 48687 |

4. Amplification

[0098] Amplification of genes (or DNA and RNA) can be performed using polymerase chain reaction (PCR) and other rapid amplification procedures known in the art, such as ligase chain reaction (LCR), transcription-mediated amplification (TMA), self-sustained sequence replication transcription, self-sustained sequence replication (3SR), nucleic acid sequence-based amplification (NASBA), strand displacement amplification (SDA), branched DNA (bDNA), cycling probe technology (CPR), solid phase amplification (SPA), rolling circle amplification technology (RCA), solid phase RCA, anchored SDA and nuclease dependent signal amplification (DNSA) (Lee et al., 1997, Nucleic Acid Amplification Technologies: Application to Disease Diagnosis, Eaton Publishing, Boston, Mass.; Persing et al., 1993 Diagnostic Molecular Microbiology: Principles and Applications, Amer. Soc. Microbiol., Washington, D.C.; Westin et al., 2000, Nat. Biotechnol. 18:199-204). In the instance of amplifying rRNA, the transcripts can first be reverse-transcribed using RT-PCR and then any of the above cited amplification methods can be used to amplify the DNA transcripts obtained from RT-PCR. Any of these methods of rapid amplification can be used according to the basic concept of identifying sequence specific changes which discriminate microorganisms bases on genus, species, group, family and the like.

[0099] For DNA amplification by the widely used PCR (polymerase chain reaction) method, primer pairs are derived either from the DNA sequences surrounding the probe (e.g., TaqMan® primer design) or from data bank sequences. Prior to synthesis, the potential primer pairs can be analyzed by using the program Oligo™ 4.0 (National Biosciences, Plymouth, Minn.) to verify that they are likely candidates for PCR amplifications.

[0100] During DNA amplification by PCR, two oligonucleotide primers binding respectively to each strand of the denatured double-stranded target DNA from the bacterial genome are used to amplify exponentially in vitro the target DNA by successive thermal cycles allowing denaturation of the DNA, annealing of the primers and synthesis of two new DNA strands of the target DNA at each cycle (Persing et al, 1993, Diagnostic Molecular Microbiology: Principles and Applications, American Society for Microbiology, Washington, D.C.). Briefly, the PCR protocols may be as follows. Clinical specimens or bacterial colonies or extracted genomic DNA were added directly to the 50 uL PCR reaction mixtures containing 50 mM KCl, 10 mM Tris-HCl pH 8.3, 1.5 mM MgCl₂, 0.4 uM of each of the two primers, 200 uM of each of the four dNTPs and 1.25 Units of Taq DNA polymerase (Perkin Elmer).

[0101] PCR reactions can then subjected to thermal cycling (e.g., 3 min at 95° C. followed by 30 cycles of 30 sec at 95° C., 30 sec at 55° C. and 45 sec at 72° C.) using, for example, a Perkin Elmer Gene Amp System 2400 thermal cycler. Amplified DNA products can then be analyzed by standard ethidium bromide-stained agarose gel electrophoresis. It is clear that other methods for the detection of specific amplification products, which may be faster and more practical for routine diagnosis, may be used. Such methods may be based on the detection of fluorescence signal after amplification (e.g., TaqMan® system from Perkin Elmer or Amplisensor™ from Biotronics Technology Corp., Lowell, Mass.) or liquid hybridization with an oligonucleotide probe binding to internal sequences of the specific amplification product. These novel probes can be generated preferably from genus-specific or species-specific fragment probes. Methods based on the detection of fluorescence are particularly useful for utilization in routine diagnosis as they are, very rapid and quantitative and can be automated.

[0102] To assure PCR efficiency, glycerol or dimethyl sulfoxide (DMSO) or other related solvents, can be used to increase the sensitivity of the PCR and to overcome problems associated with the amplification of target with a high GC content or with strong secondary structures. The concentration ranges for glycerol and DMSO are about 5-10% (v/v) and about 3-10% (v/v), respectively. For the PCR reaction mixture, the concentration ranges for the amplification primers and the MgCl₂ are about 0.1-1.0 μM and about 1.5-3.5 mM, respectively. Modifications of the standard PCR protocol using external and nested primers (i.e., nested PCR) or using more than one primer pair (i.e., multiplex PCR) may also be used (see Persing et al., 1993, Diagnostic Molecular Microbiology: Principles and Applications, American Society for Microbiology, Washington, D.C.).

[0103] The person skilled in the art of DNA amplification knows the existence of other rapid amplification procedures such as ligase chain reaction (LCR), transcription-based amplification systems (TAS), self-sustained sequence replication (3SR), nucleic acid sequence-based amplification (NASBA), strand displacement amplification (SDA) and branched DNA (bDNA) (Persing et al., 1993). The scope of this invention is not limited to the use of amplification by PCR, but rather includes the use of any rapid nucleic acid amplification methods or any other procedures, which may be used to increase rapidity and sensitivity of the tests. Any oligonucleotides suitable for nucleic acid amplification can also use approaches other than PCR and are contemplated for use herein.

[0104] Amplification products are classically detected by standard ethidium bromide-stained agarose gel electrophoresis. It is clear that other methods for the detection of specific amplification products, which may be faster and more practical, can be used. Such methods may be based on detection of fluorescence after or during amplification. One simple method for monitoring amplified DNA is to measure its rate of formation by measuring the increase in fluorescence of intercalating agents such as ethidium bromide or SYBR® Green I (Molecular Probes). If more specific detection is required, fluorescence-based technologies can monitor the appearance of a specific product during the reaction. The use of dual-labeled fluorogenic probes such as in the TaqMan® system (Applied Biosystems), which utilizes the 5′ to 3′ exonuclease activity of the Taq polymerase, is a good example (Livak et al., 1995, PCR Methods Appl. 4: 357-62). TaqMan® can be performed during amplification and this “real time” detection can be done in a single closed tube, which eliminates post-PCR sample handling and consequently prevents the risk of amplicon carryover. Several other fluorescence-based detection methods can be used in real-time.

[0105] Fluorescence resonance energy transfer (FRET) is the principle behind the use of adjacent hybridization probes (Wittwer et al., 1997 BioTechniques 22: 130-1, 138-8) and molecular beacons (Tyagi et al., 1996, Nature Biotech. 14: 303-8). Adjacent hybridization probes are designed to be internal to the amplification primers. The 3′ end of one probe is labeled with a donor fluorophore while the 5′ end of an adjacent probe is labeled with an acceptor fluorophore. When the two probes are specifically hybridized in close proximity (spaced by 1 to 5 nucleotides) the donor fluorophores, which has been excited by an external light source emits light that is absorbed by a second acceptor that emit more fluorescence and yields a FRET signal.

[0106] Molecular beacons possess a stem-and-loop structure where the loop is the probe and at the bottom of the stem a fluorescent moiety is at one end while a quenching moiety is at the other end. The beacons undergo a fluorogenic conformation change when they hybridize their targets hence separating the fluorochrome from its quencher. The FRET principle is also used in an air thermal cycler with a built-in fluorometer (Wittwer et al., 1997). The amplification and detection are extremely rapid as reactions are performed in capillaries; it takes only 18 min. to complete 45 cycles. Those techniques are suitable especially in the case where few pathogens are searched for. Boehringer-Roche Inc. sell the LightCycler™, and Cepheid makes the SmartCycler. These two apparatus are capable of rapid cycle PCR combined with fluorescent SYBR® Green I or FRET detection.

[0107] Microbial pathogen detection and identification may also be performed by solid support or liquid hybridization using, e.g., genus-, species-, and/or strain-specific internal DNA probes, which hybridize to an amplification product. Such probes may be generated from any sequence discussed herein and designed to specifically hybridize to DNA amplification products that are objects of the present invention. The oligonucleotide probes may be labeled with biotin or with digoxigenin or with any other suitable reporter molecule. Hybridization on a solid support is amenable to miniaturization.

[0108] Preferred methods include oligonucleotide microarray technology. Currently, low to medium density arrays are available and can be used to capture fluorescent labeled amplicons (Heller et al., “An integrated microelectronics hybridization system for genomic research and diagnostic applications,” in Harrison et al., 1998, Micrototal Analysis Systems '98 (Kluwer Academic Publisher, Dordrecht). Detection methods of hybridization are not limited to fluorescence. Potentiometry, colorimetry and plasmon resonance are some examples of alternative detection methods. In addition to detection by hybridization, nucleic acid microarrays could be used to perform rapid sequencing by hybridization.

[0109] 4.1 Amplification Primers. Amplification primers need to be designed in order to amplify the DNA regions that contain probes (i.e., species-specific oligonucleotide sequences) of interest. Multiple sequence alignments are made using the 16S (or 23S) rDNA sequence of the target species and 16S sequences of other species phylogenetically related to the target species, as well as species phylogenetically distant from the target species.

[0110] A typical PCR amplification requires the use of two primers, one called a Forward primer (typically designated by “F”) and the other one called a Reverse primer (typically designated by “R”). The Forward primer is located upstream of the probe sequence, the Reverse primer is located downstream of the probe sequence.

[0111] Suitable primers strongly depend on the type of applications/technologies used for probe testing. If the species-specificity exclusively relies on the probe sequence, regions suitable for amplification primers should be as conserved as possible among all species included in the multiple sequence alignment. If, on the other hand, the user wishes to use the locus amplification process to achieve some of the specificity of the diagnostic test, then the regions suitable for amplification primers should be conserved for the target species and different for all the other species from which the target species should be differentiated.

[0112] Once the regions for amplification primers are selected, several characteristics need to be checked to ensure the formation of a good PCR product. These characteristics include one or more of the following:
[0113] Primers should contain at least 18-20 nucleotides.
[0114] Primers with long runs of a single base (e.g., a run of A's) should generally be avoided. It is especially important to avoid 3 or more G's or C's in a row.
[0115] The percentage of Guanine (G) and Cytosine (C) (i.e. GC %) in the primer sequence should be around 50%. G's and C's at 3′ end of the primers should be avoided as they increase the chance of forming primer dimers.
[0116] The melting temperature of primers (Tₘ) should be close to 70° C.
[0117] The annealing temperature (Tₐ) used during PCR amplification should be about 5° C. below the lowest Tₘ of the pair of primers to be used.
[0118] Primers should not contain palindromic sequences, because palindromic sequences may lead to the formation of hairpins that reduce the efficiency of priming of the primer to the DNA to amplify.
   All these primer design guidelines can be easily evaluated for a particular pair of primer using standard computer software for primer design, such as but not limited to GCG (Genetics Computer Group, Madison, Wis.) or Oligo (Molecular Biology Insights, Inc, Cascade, USA).
   5. Hybridization

[0119] Probes are classified as primers and/or probes for use in amplifying and/or isolating genus-, species- and strain-specific moieties. Then there are the probes used for diagnostic, prognostic, and research purposes that allow the categorization of the bacterium based on phylum, family, genus, species and strain. The latter probes will contain a distinguishing moiety that will allow the probe to distinguish between families, genera, species and/or strains of bacteria. However, regardless of the category of probe, most will share similar characteristics and will follow the similar guidelines for their preparation and selection.

[0120] In general, “primers” as used herein are oligonucleotides that are used for amplifying the regions containing the differentiation moieties. “Probes” are oligonucleotides that are used to distinguish between genera, groups, species, and strains of bacteria. For the instant invention, primers can range in size from 15 nucleotides to 50 nucleotides, and more preferably from 17 nucleotides to 30 nucleotides, and most preferably from 20 nucleotides to 25 nucleotides. Probe size can range in size from 10 to 100 nucleotides, and more preferably from 15 nucleotides to 30 nucleotides, and most preferably from 20 nucleotides to 25 nucleotides.

[0121] Because the extent and specificity of hybridization reactions such as those described herein are affected by a number of factors, manipulation of one or more of those factors will determine the exact sensitivity and specificity of a particular probe, whether perfectly complementary (i.e., an oligonucleotide chain in which all of the bases are able to form base pairs with a sequence of bases in another polynucleotide chain) to its target or not. The importance and effect of various assay conditions, explained further herein, are known to those skilled in the art.

[0122] First, the stability of the [probe:target] nucleic acid hybrid should be chosen to be compatible with the assay conditions. This may be accomplished by avoiding long A and T rich sequences, by terminating the hybrids with G:C base pairs, and by designing the probe with an appropriate Tₘ. The beginning and end points of the probe should be chosen so that the length and % GC result in a Tₘ about 2-10° C. higher than the temperature at which the final assay will be performed. The base composition of the probe is significant because G-C base pairs exhibit greater thermal stability as compared to A-T base pairs due to additional hydrogen bonding. Thus, hybridization involving complementary nucleic acids of higher G-C content will be stable at higher temperatures. Probe selection for use in the in silico method is dependent on the overlapping nature of the oligomers (e.g., 30-mer) used. Once the distinguishing moiety is identified, then suitable diagnostic, prognostic and research probes can be prepared, according to these guidelines and what is generally known in the art, which comprise the distinguishing moiety (e.g., one or more nucleotides which distinguish, for example, different species of bacteria).

[0123] Conditions such as ionic strength and incubation temperature under which a probe will be used should also be taken into account in constructing a probe. It is known that hybridization will increase as the ionic strength of the reaction mixture increases, and that the thermal stability of the hybrids will increase with increasing ionic strength. On the other hand, chemical reagents, such as formamide, urea, DMSO and alcohols, which disrupt hydrogen bonds, will increase the stringency of hybridization. Destabilization of the hydrogen bonds by such reagents can greatly reduce the Tₘ. In general, optimal hybridization for synthetic oligonucleotide probes of about 10-50 bases in length occurs approximately 5° C. below the melting temperature (Tₘ) for a given duplex. Incubation at temperatures below the optimum may allow mismatched base sequences to hybridize and can therefore result in reduced specificity.

[0124] It is desirable to have probes that hybridize only under conditions of high stringency. Under high stringency conditions, only highly complementary nucleic acid hybrids will form; hybrids without a sufficient degree of complementarity will not form. Accordingly, the stringency of the assay conditions determines the amount of complementarity needed between two nucleic acid strands forming a hybrid. Stringency is chosen to maximize the difference in stability between the hybrid formed with the target and the non-target nucleic acid. In some examples of the current invention, it may be necessary to detect single base pair changes. In those instances, conditions of very high stringency are needed.

[0125] Second, probes should be positioned so as to minimize the stability of the [probe:non-target] nucleic acid hybrid. This may be accomplished by minimizing the length of perfect complementarity to non-target organisms, avoiding GC rich regions of homology to non-target sequences, and by positioning the probe to span as many destabilizing mismatches as possible. Whether a probe sequence is useful to detect only a specific type of organism depends largely on the thermal stability difference between [probe:target] hybrids and [probe:non-target] hybrids. In designing probes, the differences in these Tₘ values should be as large as possible (e.g., at least about 2° C. and preferably about 5° C.).

[0126] The length of the target nucleic acid sequence and, accordingly, the length of the probe sequence can also be important. In some cases, there may be several sequences from a particular region, varying in location and length, which will yield probes with the desired hybridization characteristics. In other cases, one sequence may be significantly better than another which differs merely by a single base. While it is possible for nucleic acids that are not perfectly complementary to hybridize, the longest stretch of perfectly complementary base sequence will normally primarily determine hybrid stability. While oligonucleotide probes of different lengths and base composition may be used, oligonucleotide probes preferred in this invention are between about 10 to about 50 bases in length, and most preferred 20-30 bases in length, and are sufficiently homologous to the target nucleic acid.

[0127] Third, regions in the target DNA or RNA that are known to form strong internal structures inhibitory to hybridization are less preferred. In the preferred embodiment, the probe will hybridize to an rDNA. However, hybridization between probes and rRNA, DNA prepared from rDNA, and cDNA prepared from rRNA are also contemplated. Likewise, probes with extensive self-complementarity should be avoided. As explained above, hybridization is the association of two single strands of complementary nucleic acids to form a hydrogen bonded double strand. It is implicit that if one of the two strands is wholly or partially involved in a hybrid that it will be less able to participate in formation of a new hybrid. There can be intramolecular and intermolecular hybrids formed within the molecules of one type of probe if there is sufficient self-complementarity. Such structures can be avoided through careful probe design. By designing a probe so that a substantial portion of the sequence of interest is single stranded, the rate and extent of hybridization may be greatly increased. Computer programs are available to search for this type of interaction. However, in certain instances, it may not be possible to avoid this type of interaction.

[0128] The probes of the present invention are designed for attaining optimal performance under the same hybridization conditions so that they can be used in sets for simultaneous hybridization; this highly increases the usability of these probes and results in a significant gain in time and labor. Evidently, when other hybridization conditions should be preferred, all probes should be adapted accordingly by adding or deleting a number of nucleotides at their extremities. It should be understood that these concomitant adaptations should give rise to essentially the same result, namely that the respective probes still hybridize specifically with the defined target. Such adaptations might also be necessary if the amplified material should be RNA (e.g., rRNA) in nature and not DNA.

[0129] The hybridization conditions can be monitored relying upon several parameters, such as the nature and concentration of the components of the media, and the temperatures under which the hybrids are formed and washed.

[0130] The hybridization and wash temperature is limited in upper value depending on the sequence of the probe (i.e., its nucleic acid composition, kind and length). The maximum hybridization or wash temperature of the probes described in the present invention ranges from about 40° C. to about 60° C., more preferably from about 45° C. to about 55° C., in the specific hybridization and wash media as described in the Examples section. At higher temperatures, duplexing (i.e., formation of the hybrids) competes with the dissociation (i.e., or denaturation) of the hybrid formed between the probe and the target.

[0131] In a preferred hybridization medium of the invention, containing 3×SSC and 20% formamide, hybridization temperatures can range from about 45° C. to about 55° C., with a preferred hybridization temperature of 50° C. A preferred wash medium contains 3×SSC and 20% formamide, and preferred wash temperatures are the same as the preferred hybridization temperatures, i.e., preferably between 45° C. and 55° C., and most preferably 50° C.

[0132] However, when modifications are introduced, be it either in the probes or in the media, the temperatures at which the probes can be used to obtain the required specificity should be changed according to known relationships, such as those described in the following reference: B. Hames and S. Higgins (eds.), Nucleic Acid Hybridization—A Practical Approach, IRL Press, Oxford, U.K., 1985.

[0133] The selected nucleic acid probes derived from the 16S rRNA using the in silico methods and provided herein include SEQ ID NOS: 1-48664. As described in the examples section, some of these probes show a better sensitivity and/or specificity than others, as reflected in the overall quality score for each probe (see Tables 14 and Table 20 which are attached to the specification as a separate document) which incorporates the estimated robustness of the probe and its predicted ability to detect most strains of a species. The better probes are therefore preferentially used in methods to detect the organism of interest in a biological sample. However, it is possible that for certain applications (e.g., epidemiology, substrain typing, and groups which comprise two or more species and potentially even spanning genera) a set of probes including the less specific and/or less sensitive probes may be very informative.

[0134] Preferably said probes share at least 70% or 80% identity with the complementary sequence. More preferably, the probes share at least 90% identity (e.g., 3 mismatches in a 30 base probe). More preferably the probes are at least about 95%, 96%, 97%, 98%, or 99% identital to the exact complement of the target sequence to be detected. Most preferred, the probe is homologous to the target sequence (i.e. has 100% sequence identity). Preferably, the target sequences are either ribosomal RNA or ribosomal DNA or amplified versions thereof. A probe with an apparent mismatch at one nucleotide position in its matching species rDNA sequence is still considered specific for the purposes of this invention because (1) available sequence databases contain occasional sequence errors (i.e., the apparent mismatch may not be an actual mismatch), and (2) in practice the hybridization conditions and the method determine the actual specificity of a probe. Therefore, it is important to maintain some flexibility in selecting probes for potential use, and to qualify them practically by testing them under actual hybridization conditions.

[0135] Preferably, these probes are about 5 to 60 nucleotides long, more preferably from about 10 to 30 nucleotides. The nucleotides as used in the present invention may be ribonucleotides, deoxyribonucleotides and modified nucleotides such as inosine or nucleotides containing modified groups, which do not essentially alter their hybridization characteristics. Also contemplated is the use of peptide nucleic acid probes (PNA). Moreover, it is obvious to one skilled in the art that any of the below-specified probes can be used as such, or in their complementary form, or in their RNA form (wherein T is replaced by U).

[0136] The probes according to the invention can be formed by cloning of recombinant plasmids containing inserts including the corresponding nucleotide sequences, if need be by cleaving the latter out from the cloned plasmids upon using the requisite nucleases and recovering them, e.g., by fractionation according to molecular weight. The probes according to the present invention can also be synthesized chemically, for instance by the conventional phosphotriester method.

[0137] The term “polynucleic acid” as used herein corresponds to either double-stranded or single-stranded DNA, rDNA, cDNA or genomic DNA or RNA, containing at least 5, 10, 15, 20, 25, 30, 40, 45 or 50 contiguous nucleotides or any length in between. A polynucleic acid that is smaller than 100 nucleotides in length is often also referred to as an oligonucleotide. Thus, in some instances polynucleotides greater than 100 bases are contemplated. Additionally the terms oligonucleotide and polynucleotide may be used interchangeably. Single stranded polynucleic acid sequences are always represented in the current invention from the 5′ end to the 3′ end.

[0138] The term “sensitivity” refers to the number of false negatives: i.e. if 1 of 100 strains to be detected is not detected, the test shows a sensitivity of [(100−1)/100]%=99%.

[0139] The term “specificity” refers to the number of false positives: i.e. if out of 100 strains detected, 2 actually belong to species for which the test is not designed, the specificity of the test is [(100−2)/100]%=98%.

[0140] The probes selected as being “preferential” show a sensitivity and specificity of more than 80%, preferably more than 90% and most preferably more than 95%. The higher the robustness number (i.e., the number of nucleotide changes required for a species-specific oligonucleotide sequence to match a second species), the more likely the probe will have a high specificity score. The precise relationship between robustness number and specificity depends on the method used to apply the species-specific oligonucleotide sequences of this invention. In general, probes with a robustness number of 2 or more are useful in hybridization-based methods that can distinguish 1-2 nucleotide differences such as the Affymetrix Gene Chip System. However, use of probes with higher robustness numbers increases the likelihood of achieving high specificity in a diagnostic test.

[0141] The term “primer” refers to a single stranded DNA oligonucleotide sequence capable of acting as a point of initiation for synthesis of a primer extension product which is complementary to the nucleic acid strand to be copied. The length and the sequence of the primer must be such that they allow to prime the synthesis of the extension products. Preferably the primer is about 5-50 nucleotides long. Specific length and sequence will depend on the complexity of the required DNA or RNA targets, as well as on the conditions of primer use such as temperature and ionic strength. The fact that amplification primers do not have to match exactly with the corresponding template sequence to warrant proper amplification is amply documented in the literature. Methods of amplifying products using primers are known in the art.

[0142] The oligonucleotides used as primers or probes may also comprise nucleotide analogues such as phosphorothioates, alkylphosphorothioates or peptide nucleic acids or may contain intercalating agents.

[0143] As most other variations or modifications introduced into the nucleic acid sequences of the invention, these variations may necessitate adaptions with respect to the conditions under which the oligonucleotide should be used to obtain the required specificity and sensitivity. However, the eventual results of hybridization will be essentially the same as those obtained with the unmodified oligonucleotides.

[0144] The introduction of these modifications may be advantageous in order to positively influence characteristics such as hybridization kinetics, reversibility of the hybrid-formation, biological stability of the oligonucleotide molecules, etc.

[0145] The term “solid support” can refer to any substrate to which an oligonucleotide probe can be coupled, provided that it retains its hybridization characteristics and provided that the background level of hybridization remains low. Usually the solid substrate will be a microtiter plate, a membrane (e.g. nylon or nitrocellulose), slide or microarray, or a microsphere (bead). Prior to application to the membrane or fixation it may be convenient to modify the nucleic acid probe in order to facilitate fixation or improve the hybridization efficiency. Such modifications may encompass homopolymer tailing, coupling with different reactive groups such as aliphatic groups, —NH₂ groups, —SH groups, carboxylic groups, or coupling with biotin, haptens or proteins.

[0146] The term “labeled” refers to the use of labeled nucleic acids. Labeling may be carried out by the use of labeled nucleotides incorporated during the polymerase step of the amplification or by the use of labeled primers, or by any other method known to the person skilled in the art. The nature of the label may be isotopic (e.g., ³²P, ³⁵S, etc.) or non-isotopic (e.g., biotin, digoxigenin, etc.).

6. Preparation of Samples

[0147] In other embodiments of the invention, the sequences identified by these methods can be used in the form of probes and in kits for the identification of a specific family, genus, group, species or strain of a bacterium in a sample.

[0148] Typically, detection of the microorganism is performed by first isolating DNA from the sample. The sample can be, for example, from food, a mixed environmental sample or a biological sample from a subject (e.g., urine or blood). The cells from a sample are typically pelleted and resuspended in a lysis buffer (e.g., 10 mM Tris-HCl, 10 mM NaCl, 50 mM EDTA at pH 8.0). The cells are subjected to an enzymatic digest which can comprise, e.g., 25 U Lysostaphin, 30 μg N-Acetylmuramidase, 400 μg Achromopeptidase, and 600 μg lysozyme in a final volume of 306 μL of lysis buffer. The digestion is carried out for 30-45 minutes at 37° C. Lysates are extracted with chloroform/phenol, then ethanol precipitated. The DNA is redissolved in a Tris/EDTA buffer and the final concentration is determined by spectrophotometric measurement. Variations of this method would by known to the skilled artisan.

[0149] 6.1 Amplification and Labeling of DNA. An amplification reaction is generally described in PCR PROTOCOLS: A GUIDE TO METHODS AND APPLICATIONS (Michael Innis et al., ed., 1990); PCR STRATEGIES, (David H. Gelfand et al., eds., 1998); Ausubel et al., CURRENT PROTOCOLS IN MOLECULAR BIOLOGY, (Greene Publishing Co., NY, 1995), and Schweitzer and Kingsmore, “Combining nucleic acid amplification and detection” (Current Opinion in Biotechnology, 2001; 12: 21-27).

[0150] Alternatively, rRNA from a sample can be used by first processing it using RT-PCR to produce DNA, or probes can be allowed to directly hybridize to the rRNA once it is isolated from the sample. Different labeling techniques for hybridization probe have been developed. In the past, labeling of nucleic acids by the enzymatic incorporation of radioactive isotopes (³²P, ³³P, ³⁵S, ³H, and ¹²⁵I) was the method of choice. However, in an effort to move away from the drawbacks associated to the use of radioactive products, DNA labeling techniques with non-radioactive products have been successfully developed. These non-isotopic labeling alternatives include among others the biotin-avidin/streptavidin system, the digoxigenin (DIG)/enzyme-labeled anti-DIG antibodies, the use of fluorescent dyes such as fluorescein, rhodamine, and cyanine dyes (Cy3 and Cy5). Nucleic acid labeling can be done by nick translation, random prime labeling, end-labeling reactions, and PCR. Several direct labeling kits are commercially available from different companies (Amersham Pharmacia Biotech Inc, Piscataway, N.J.; Molecular Probes Inc, Eugene, Oreg.; Vysis Inc, Downers Grove, Ill.) and make DNA labeling relatively easy. Labeled nucleic acid probes have been used in a wide range of applications in medicine, food industry, and environmental studies. For instance, probes labeled with fluorophore tags have been used in Fluorescent In Situ Hybridization (FISH) assay to detect bacteria in hemocultures (Oliveira et al., J Clin Microbiol. 2002, 40: 247-51).

[0151] To facilitate identification of a strain of a microorganism from a pattern of amplification products generated from the genome of that organism, the pattern should contain elements common to all members of the species in conjunction with elements which differentiate the unique strains within that species This only needs to be performed if it is necessary to distinguish strains. In the event that it is not necessary to distinguish between the strain of pathogen, this step can be omitted. This step is not necessary for the identification of many types of pathogens. In most cases, it will be preferable to include all strains in the species identification test.

[0152] This attribute makes it possible to identify a new strain of a species, which is not contained within the reference pattern database, providing that the common elements of that species pattern are contained within the reference database. If different strains of the same species each generate completely unique patterns with no common species elements, then the patterns themselves will not identify the species of an unknown strain. However, again typically there will not be a need to identify the strain. Additional methods of amplifying and labeling DNA are described infra and would be known to the artisan of ordinary skill.

[0153] 6.2 Assays for Use with Plants Bacteria also cause problems in agriculture. For example, the bacterium, Acidovorax avenae, is a seed borne pathogen of several hosts including oats, corn, millet, wheat, sugarcane, rice and melons. It causes bacterial stripe of rice, leaf blight of oats, red stripe disease of sugarcane and millet and brown stripe of Setaria italica. It is an example of an organism which is hard to test for as it can be overgrown by other plant pathogens, such as the rice pathogens of Pantoea (Erwinia) herbicola, Burkholdera (Pseudomonas) glumae, B. fuscovaginae, or P. Syringae pv. syringae. Although these pathogens are known to produce distinct disease symptoms, field diagnosis remains difficult. Isolation of a pathogen is difficult in the presence of coexisting epiphytes. Thus, more sensitive testing methods are needed. Differentiation of microorganisms based on phyla, genus and species is important as well as testing of seed lots to determine whether seed batches are contaminated. Preferred bacteria include, but are not limited to, Pseudomonas fluorescens, Pseudomonas syringae species of the Burkholderia cepacia complex (Bcc), Erwinia species, Xanthomonas Species, Agrobacterium species and Clavibacter species.

[0154] DNA amplification and biological sample testing can be carried out generally as follows. In brief, the DNA amplification process is carried out by (a) providing a biological sample comprising bacterial cells or extracted DNA for standard PCR or cells amplified by growing on an agar medium for BIO-PCR; (b) amplifying a target sequence of the DNA to provide DNA amplification products carrying the selected target DNA sequence; and (c) detecting the presence of the DNA amplification products as an indication of the presence of, e.g., A. avenae.

[0155] The biological sample may either be bacteria cells or extracted genomic DNA. The biological sample may be a test sample suspected of containing bacterial cells, and thus the DNA of the bacterial cells, or a test sample containing extracted DNA.

[0156] The BIO-PCR method combines biological pre-amplification of the PCR target organism with enzymatic amplification of the PCR target. Briefly, the advantages of the BIO-PCR method, over those of the standard PCR assay, include the detection of live cells only, a 100-1000 fold increase in sensitivity, and elimination of PCR inhibitors associated with plant samples thereby eliminating false negatives. Sample processing can be further simplified by directly processing the samples comprising the expanded cells without further DNA extraction. However, even if a DNA extraction step is included, an advantage of the BIO-PCR methodology is that the DNA is extracted from a growing, viable population of cells or microorganisms. The enhanced sensitivity of the BIO-PCR method is particularly valuable, for example, in those screening situations where the monetary value of a particular seed type is high, and thus it is desirable to test the smallest quantity of seeds possible.

[0157] The preamplification step involves a plating step on an agar growth medium (or a liquid medium) prior to PCR analysis. A single cell per 0.1 ml can be detected because the single cell multiplies into a colony containing over 1000 cells on the agar medium.

[0158] Bacteria are recovered from suspect seeds of rice and watermelon by first soaking 1000-2000 seeds in 0.02% TWEEN 20 solution (ratio of 5 ml/g) for 4 hours at 40° C., pipetting aliquots of 0.1 ml of the bacterial extracts either onto plates of general purpose agar media, such as, KB or nutrient agar (NA), or onto a semi-selective medium such as EBB, described below, and then cloning. For BIO-PCR, each of five plates is washed three times with 1.0 ml of water and the resulting 14-15 ml of wash solution can be used for PCR-amplification with or without further DNA extraction or sample processing. Similarly, for standard PCR, either the DNA can be extracted or intact cells can be used. Since only pinpoint-size colonies are needed, incubation time ranges from only 10-15 hr for fast growing bacteria to 24-48 hrs for most plant pathogenic bacteria, depending on the media. Since the incubation time is short, few other bacterial colonies are present.

[0159] EBB medium is a preferred, semi-selective medium to use for the preamplification step. The protocol for preparing the EBB Medium is as follows:
[0160] (1) Mix, per liter: 1.0 g NH₄PO₄, 0.2 g MgSO₄.7H₂O, 0.2 g KCl, 0.3 g Yeast Extract, 0.5 g boric acid, 1.0 mL Brilliant blue R (10 mg/ml Stock), 0.6 ml Bromcreosol purple (15 mg/ml Stock), and 16.0 g agar;
[0161] (2) Autoclave and add, per liter: 10.0 ml 95% ethanol, 1.0 ml cycloheximide (200 mg/ml 95% ethanol Stock);
[0162] (3) Adjust pH carefully to 5.2 using 0.2 M HCl just before autoclaving. (If the pH falls below 5.0, do not use NaOH to readjust to a pH of 5.2 as NaOH will neutralize brilliant blue R).

[0163] In the preferred method, the enzymatic amplification of the DNA sequence is by polymerase chain reaction (PCR), as described herein.

[0164] For the binding and amplification, the biological sample (bacterial cells or extracted DNA) is provided in an aqueous buffer formulated with an effective amount of a divalent cation, which is preferable MgCl₂, preferably at a concentration of about 0.05-5 mM; an effective amount of DNA polymerase with Taq DNA polymerase being preferred in the form of native purified enzyme or a synthesized form such as AMPLITAQ® (Perkin-Elmer), an effective amount of dNTPs as a nucleotide source, including, dATP, dCTP, dGTP, and dTTP, preferably in a saturating concentration, preferably about 200 FM per dNTP; and an effective amount of one or a pair of oligonucleotide primers. The reaction mixture containing the annealed primer(s) is reacted with a DNA polymerase in a thermocycler. Each PCR cycle begins with a DNA denaturation step of 94° C. for 30 s, followed by a primer annealing step at 60° C. for 30 s, and a DNA elongation step at 72° C. for 45 s.

[0165] If designed properly, a single product results. This product is preferably about 450-550 kb in size, whose termini are defined by the oligonucleotide primer(s), and whose length is defined by the distance between the two primers or the length of time of the amplification reaction. The gene sequence then serves as a template for the next amplification cycle.

[0166] The amplified DNA product is optionally separated from the reaction mixture and then analyzed. The amplified gene sequence may be visualized, for example, by electrophoresis in an agarose or polyacrylamide gel or by other like techniques, known and used in the art.

[0167] The amplified gene sequence may be directly or indirectly labeled by incorporation of an appropriate visualizing label, as for example, a radioactive, calorimetric, fluorometric or luminescent signal, or the like. In addition, the gel may be stained during or after electrophoresis with a visualizing dye such as ethidium bromide or silver stain, wherein the resulting bands by be visualized under ultraviolet light. The amplification of the gene sequence can be performed using PCR as described herein, or as would be known in the art.

[0168] To prove the identity of the amplified DNA product, a Southern blot assay should be conducted. The amplified products are separated by electrophoresis on a polyacrylamide or agarose gel, transferred to a membrane such as a nitrocellulose or nylon membrane, reacted with an oligonucleotide probe, and stained as above. The amplified products may also be detected by reverse blotting hybridization (dot blot) in which an oligonucleotide probe specific to the gene sequence is adhered to a nitrocellulose or polyvinylchloride (PVC) support, such as a multi-well plate, and then the sample containing labeled amplified product is added, reacted, washed to remove unbound substance, and a labeled amplified product attached to the probe or the gene sequence imaged by standard methods. A major advantage of TaqMan® PCR is that the technology is based on hybridization; therefore, a Southern blot assay is not needed.

[0169] The detection of amplified gene product in the sample is evidence of the presence of the bacterium, e.g., A. avenae subspecies, in the biological sample. When combined with BIO-PCR, the method is useful in diagnosing presence of viable cells of, e.g., A. avenae.

[0170] The primers and amplification method can further be useful for evaluating and monitoring the efficacy of any treatments utilized to eliminate the pathogen. In this method, biological samples are obtained from seeds, or other biological samples, prior to treatment and from seeds, or other biological samples that have undergone treatment with a treatment protocol. In addition, biological samples can be obtained from seeds at several time points during treatment. DNA amplification products of a target sequence of pathogen from all samples are analyzed for the presence of the pathogen. Results from samples obtained prior, during and after treatment are compared in order to determine efficacy of the treatment protocol.

7. Diagnostic, Prognostic and Classification Assays

[0171] It is also contemplated that the distinguishing family-, genus-, species- and/or strain-specific moieties be used in kits, such as a diagnostic kit. Additionally these probes can be used in kits helpful identifying a strain, which can be useful for classification or determining the appropriateness of a particular drug regimen to be administered to a subject. These kits may comprise any one or more of the following components:
[0172] (1) Unique components in accordance with the present invention:
   [0173] (a) An oligonucleotide complementary to rDNA or rRNA which comprises a distinguishing moiety (e.g., a family-, genus-, group-, species- and/or strain specific nucleotide(s) or combination of nucleotides),
   [0174] (b) Oligonucleotide primers for use in amplification (e.g., PCR) designed to amplify a sequence, where a first primer has a sequence 5′ to a region comprising a distinguishing moiety, and a second primer that has a sequence 3′ to the distinguishing moiety.
   [0175] (c) A negative control to confirm the identity of a sequenced test fragment. Preferably, the negative control is a species whose rDNA is mismatched with the positive control by varying numbers of nucleotides.
   [0176] (d) A positive control, such as a strain known to be a member of the family, genus, group, species being tested.
[0177] (2) Commercially available reagents:
   [0178] (a) Components of an amplification protocol, such as PCR.

[0179] Herein is provided a list of the genus-, group-, species- and strain-specific rRNA moieties thus identified (see Tables 14, 15, 20, and 21 which are attached to the specification as separate documents).

8. 16S Nucleic Acid Microarrays

[0180] 8.1. Nucleic Acid Microarrays. The present invention provides for compositions comprising a plurality of polynucleotide probes which contain preferably two or more ribosomal moieties, e.g., SEQ ID NOS: 1-48664. The microarrays can be prepared for entire phylum, families, genera, species, groups, strains, or isolates of bacteria. Alternatively, diagnostic microarrays can be prepared based on infection phenotypes, e.g., all bacteria that produce skin lesions or particular types of skin lesions.

[0181] In one embodiment, the arrays can be prepared based on the origin of the biological sample, which would indicate only a certain grouping of organisms. Thus, microarrays can be created for screening body fluids, bronchial aspirates, cerebrospinal fluid, genital swabs, nares swabs, wounds, sputum, stool (e.g., for enteric pathogens, Yersinia, Aeromonas and Pleisomonas for example), throat samples, urine, miscellaneous sterile sites (e.g., surgical specimens), and blood culture (e.g., for aerobes, anaerobes, yeast, fungus, Mycobacteria). Arrays can also be created to screen cultures obtained from such biological samples. Preparations of such cultures and for obtaining such biological samples are known and routine in the art.

[0182] Biological samples can be obtained and screened based on clinical symptoms as determined by a health worker. For example, specific microarrays may be prepared based on inflammatory response, immune response or complement response, such as described in Table 3 below, which differentiate infectious diseases from conditions not linked to infection.

TABLE 3

| | | |
|---|---|---|
| | Examples of diseases or | |
| | therapies associated with | Common etiological |
| Host Defect | defects | agents of infection |

INFLAMMATORY RESPONSE

| | | |
|---|---|---|
| Neutropenia | Hematologic malignancies, | Gram-negative enteric |
| | cytotoxic chemotherapy, | bacilli, Pseudomonas spp., |
| | aplastic anemia | Staphylococcus spp., |
| | | Candida spp. Aspergillus |
| | | spp. |
| Chemotaxis | Chédiak-Higashi syndrome, | Staphylococcus aureus, |
| | Job's syndrome, protein- | Streptococcus pyogenes, |
| | calorie malnutrition | Haemophilus influenzae, |
| | | Gram-negative bacilli |
| Phagocytosis (cellular) | Systemic lupus | Streptococcus pneumoniae, |
| | erythematosus, chronic | Haemophilus influenzae |
| | myelogenous leukemia, | |
| | megaloblastic anemia | |
| Microbicidal defect | Chronic granulomatous | Catalase positive bacteria |
| | disease | and fungi, staphylococci, E. coli, |
| | | Klebsiella spp., |
| | | Pseudomonas aeruginosa, |
| | | Aspergillus spp., Nocardia |
| | | spp. |
| | Chédiak-Higashi syndrome | Staphylococcus aureus, |
| | | Streptococcus pyogenes |

COMPLEMENT SYSTEM

| | | |
|---|---|---|
| C3 | Congenital liver disease, | Staphylococcus aureus, |
| | systemic lupus | Streptococcus pneumoniae, |
| | erythematosus | Pseudomonas spp., Proteus |
| | | spp. |
| C5 | Congenital | Neisseria spp., |
| | | Gramnegative rods |
| C7, C7, C8 | Congenital, systemic lupus | Neisseria meningitides, |
| | erythematosus | Neisseria gonorrhoeae |
| Alternate pathway | Sickle cell disease | Streptococcus pneumoniae, |
| | | Salmonella spp. |

[0183] Microarrays can also be prepared based on means by which an organism is introduced into a host (e.g., bites, scratches, burns and environmental organisms), associated with surgery (e.g., prosthetic devices, infectious complications of solid organ transplantation) or result from suppressed immunity (e.g. AIDS).

[0184] Additional microarrays can be prepared for organisms common for causing sepsis, which results in 300,000 to 500,000 incidences a year, and about 100,000 deaths per year in the United States alone. Such microarrays would typically comprise nucleic acids as discussed herein from Gram-positive cocci (10-20% of the cases), Gram-negative, bacteria and fungi. Treatment of sepsis must be rapid and specific in order to eradicate the organisms from the blood stream and thus there is a continued need to develop faster and more accurate diagnostic screening methods.

[0185] Arrays can be prepared which are specific towards infectious diseases of the upper respiratory tract. These arrays would comprise nucleic acids identified by the methods described herein of organisms which cause nasal infections (commonly caused by Mycobacterium tuberculosis, M. leprae, Pseudomonus malleli, K. rhinoscleromatis, Rhinospordium seeberi, Actinomyces israelii, Cryptococcus neoformans, Blastomyces hominis), paranasal sinus infections (e.g., commonly caused by S. pneumoniae, Haemophilus influenazae, streptococci, and Moraxella), ear infections (commonly caused by S. pneumoniae, H. influenzae, Branhamella catarrhalis, Streptococcus and S. aureus). Similar arrays can be prepared to identify the microorganism causing an intraabdominal infection or abscess, acute infectious diarrheal disease and bacterial food poisoning (e.g., common infectious causing agents include Vibrio cholerae, E. coli, Clostridium perfringens, Bacillus cereus, Staphylococcus aureus, Aeromonas hydrophila, Plesiomonas shigelloides, Giardia lamblia, Cryptosporidum, Shigella spp., Salmonella enteritidis, Campylobacter jejuni, Vibrio parahemolyticus, Clostridium difficile, Entaemoeba histolytica, Salmonella typhi, Yersinia enterocolitica). Additional arrays may be prepared that are directed towards screening for microorganisms responsible for a sexually transmitted infection (e.g., commonly caused by Neisseria gonorrhoeae, Chlamydia trachomatis, Treponema palidum, Calymmatobacterium granulomatis, Ureaplasma urealyticum, Mycoplasma hominis, Gardnerella vaginalis, Shigella spp., and Campylobacter spp.), pelvic inflammatory disease, urinary tract infections (e.g., commonly caused by Gram-negative bacilli) and pyelonephritis. Additionally, arrays may be prepared to screen for the microorganism responsible for infectious arthritis in a host (such as Gram-postive cocci induced arthritis, gonococcal arthritis, chronic monarticular arthritis, viral arthritis, and spirochetal arthritis).

[0186] Alternatively, microarrays can be prepared based on, for example, bacterial classification. For example, arrays can be prepared for diseases that are caused by Gram-postive bacteria. Such infectious diseases include pneumococcal infections (e.g., caused by Streptococcus pneumoniae, and include such conditions as pneumococcal pneumonia, pneumococcal meningitis, pneumococcal peritonitis, and pneumococcal endocarditis), staphylococcal infections (e.g., commonly caused by S. saprophyticus, S. aureaus, S. epidermidis and include conditions such as staphylococcal scalded-skin syndrome, toxic shock syndrome, bacteremia, endocarditis, osteomyelitis, pneumonia and urinary tract infections), streptococcal infections (e.g., caused commonly by S. pyogenes, S. agalactiae, S. faecalis, S. equi, S. bovis, S. canis, S. mutans, S. anguis, S. milleri and include conditions such as pharyngitis, cellulitis, urinary tract infections, bacteremia, endocarditis, sinusitis, pneumonia, and meningitis), corynebacterial infections (C diphtheriae which causes diphtheria), anthrax (Bacillus anthracis), Listeria monocytogenes infections (e.g., contributes to conditions including sepsis, central nervous system infections, and endocarditis).

[0187] Also contemplated are microarrays, which distinguish diseases caused by Gram-negative bacteria. Gram-negative bacterial infections include, but are not limited to, meningococcal infections (e.g., Neisseria meningitides and N. lactamica), gonococcal infections (e.g., Neisseria gonorrhoeae), Moraxella (also known as Branhamella) infections (e.g., M. catarrhalis, M. osloensis, M. nonliquefaciens, M. osloensis and M. lacunata), Haemophilus infections (e.g., including H. influenzae, and Hacek group infections which include infections by H. phrophilis, H. paraphrophilis, H. parainfluenzae, Actinobacillus actinomycetemcomitans, Cardiobacterium hominis, Eikenella corrodens and Kingella kingae), and Legionella infections (e.g., Legionnaire's disease). Another embodiment contemplates microarrays that distinguish between diseases caused by Gram-negative enteric bacilli (e.g., E. coli, Klebsiella, Enterobacter, Serratia, Proteus, Morganella, Providencia and Acinetobacter).

[0188] Microarrays for distinguishing Pseudomonas species may also be prepared. The common Pseudomonas organisms that infect humans include P. aeruginosa, P. cepacia, Xanthoomonas maltophilia, P. pseudomallei, and P. mallei. These organisms are responsible for bacteremia, endocarditis, central nervous system infections, ear infections, eye infections, bone and joint infections, gastrointestinal infections, urinary tract infections, and skin/tissue infections.

[0189] Arrays for distinguishing Salmonella organisms are also contemplated, as these organisms are responsible for a large variety of human infections including typhoid (or enteric) fevers, focal systemic infections, septicemias, and gastroenteritis. S. typhi, S. paratyphi A, S. paratyphi B, S. typhimurium, and S. enteritidis are the most common species responsible for infection.

[0190] Also contemplated are arrays for distinguishing Shigella, which is responsible to Shigellosis and which is closely related to E. coli such that they cannot normally be distinguished by DNA hybridization methods. Common species involved in human disease include S. flexneri type 2A, S. dysenteriae, and S. sonnei.

[0191] Another embodiment contemplates an array that screens for mycobacterial diseases, which have become a problem, for example in patiesnts who are immune suppressed (e.g., AIDS patients). Mycobacteria are also responsible for leprosy (also known as Hansen's disease; M. leprae) and tuberculosis (caused by M. tuberculosis). Other Mycobacteria responsible for diseases include M. haemophilum, M. kansasii, M. marinum, M. scrofulaceum, M. szulgai, M. ulcerans, M. xenopi, M. asiaticum, and M. simiae. Also contemplated are microarrays that distinguish between the various species and strains of mycobacteria.

[0192] Microarrays can also be prepared which can distinguish between different spirochetes. Spirochetes are responsible for a wide range of infectious diseases including syphilis (caused by Treponema pallidum), leptospirosis (caused by Leptospira and which encompass Weil's disease and canicola fever), relapsing fever (caused by Borrelia), and Lyme borreliosis. In the instance of leptospirosis, Leptospira has only one species, L. interrogans, but has two complexes, interrogans and biflexa. The interrogans complex contains the pathogenic strains while the biflexa complex includes saphrophytic strains. Thus microarrays are preferred which can distinguish between the two complexes and potentially also the strains found in each of those complexes.

[0193] For Borrelia induced infections, there are several organisms responsible for the infections that are introduced either by louses or ticks. The most common Borrelia organisms include B. recurrentis, B. duttoni, B. hermsii, B. parkeri, and B. tuicatae. Borrelia are also responsible for Lyme disease (specifically B. burgdorferi). Thus preferred microarrays may contain nucleic acids for both Lyme disease and relapsing fever inducing microorganisms.

[0194] Microarrays can be prepared for use in distinguishing members of the genus of Chlamydia. Although classifed as bacteria, Chlamydia has its own order, Chlamydiales. The Chlamydia genus includes three species: C. psittaci, C. trachmatis and C. pneumoniae. C. psittaci can be found in numerous avian and mammalian species, but only the avian strains have been shown to infect humans causing a condition known as psittacosis. C. trachmatis is exclusively a human pathogen and is recognized to cause trachoma (a contagious form of conjunctivitis). It is also known to be one of the most common bacterial sexually transmitted diseases in the United States with an estimated 3 to 4 million cases annually. Such genital infections are responsible for urethritis, proctits, epididymitis in men, and mucopurulent cervicitis, acute salpingitis, bartholinitis and Fitz-Hugh-Curtis syndrome in women. C. pneumoniae is a fastidious species that appears to be a frequent cause of upper respiratory tract infections and pneumonia primarily in children and young adults.

[0195] Other organisms contemplated for use in such microarrays are provided in Tables 2 and 7. Microarrays using any of these organisms would preferentially be prepared based on any of the above-described compilations (e.g., distinguishing between strains and species, diagnostic screening based on origin of introduction, similar clinical presentation between infectious organisms, or similarity based on relative proximity on the phylogenic tree).

[0196] Preferably, the plurality of polynucleotide probes comprise at least a portion of one or more of the sequences of Tables 14, 15, 20, or 21 (attached to the specification as separate documents) or a fragment thereof.

[0197] A microarray can be used for large scale genetic or gene expression analysis of a large number of target polynucleotides. These microarrays can also be used in the diagnosis and/or prognosis of diseases and in the monitoring of treatments.

[0198] When the composition of the invention is employed as hybridizable array elements in a microarray, the array elements are organized in an ordered fashion so that each element is present at a specified location on the substrate. Because the array elements are at specified locations on the substrate, the hybridization patterns and intensities can be interpreted in terms of the presence or absence of particular nucleic acid sequences and can be correlated with, for example, a particular bacterial infection or for classification, a particular group or strain of bacterium.

[0199] The composition comprising a plurality of polynucleotide probes can also be used to purify a subpopulation of rRNAs or rDNAs, DNAs, genomic fragments and the like, in a sample. Typically, samples will include target polynucleotides of interest and other nucleic acids which may enhance the hybridization background. Therefore, it may be advantageous to remove these nucleic acids from the sample. One method for removing the additional nucleic acids is by hybridizing the sample containing target polynucleotides with immobilized polynucleotide probes under hybridizing conditions. Those nucleic acids that do not hybridize to the polynucleotide probes are washed away. At a later point, the immobilized target polynucleotide probes can be released in the form of purified target polynucleotides.

[0200] 8.1.1. Method for Selecting Polynucleotide Probes. This section describes the selection of probe sequences for the plurality of polynucleotide probes. In one embodiment, the probe sequences are selected based on robustness and likelihood of being species-specific.

[0201] The resulting composition can comprise polynucleotide probes that are not redundant, i.e., there is no more than one polynucleotide probe to represent a particular distinguishing moiety for any particular rRNA and/or rDNA. Alternatively, and preferably, the composition can contain polynucleotide probes that are redundant, i.e., a rDNA is represented by more than one polynucleotide probe, because there are multiple combinations of distinguishing moieties known for that bacterium's rDNA.

[0202] The selected polynucleotide probes may be manipulated further to optimize their performance as hybridization probes. Probes that may not hybridize effectively under hybridization conditions due to secondary structure are avoided. To optimize probe selection, the sequences are examined using a computer algorithm to identify portions of genes without potential secondary structure. Such computer algorithms are well known in the art, such as Oligo® 4.06 software (National Biosciences) LASERGENE® software (DNASTAR®), and more preferably Primer 3 (Whitehead Institute and Howard Hughes Institute). These programs can search nucleotide sequences to identify stem-loop structures and tandem repeats and to analyze G+C content of the sequence; those sequences with a G+C content greater than 60% are preferably excluded from use in microarray compositions. Alternatively, the probes can be optimized by trial and error. Experiments can be performed to determine whether probes and complementary target polynucleotides hybridize optimally under experimental conditions.

[0203] 8.1.2. Polynucleotide Probes. This section describes the polynucleotide probes for use in a nucleic acid microarray. The polynucleotide probes can be genomic DNA or amplified fragments of genomic DNA, which includes portions the bacterial genome responsible for producing rRNA, preferably rDNA, or rRNA, or DNA or cDNAs derived from rRNA, or complements of any thereof. The probes can also include peptide nucleic acids, branched DNAs and the like. The polynucleotide probes can be sense or antisense polynucleotide probes to the 16S rRNA or rDNA sequences of the subject bacterium. Where target polynucleotides are double stranded, the probes may be either sense or antisense strands. Where the target polynucleotides are single stranded, the nucleotide probes are complementary single strands. The preferred lengths of the probes will range between 12 and 60 nucleotides, more preferably between 12 and 50 nucleotides, more preferably between 15 and 35 nucleotides and most preferably between 20 and 30 nucleotides, and any range in between.

[0204] In another embodiment, the polynucleotide probes are plasmids. In this case, the size of the DNA sequence of interest, i.e., the insert sequence excluding the vector DNA and its regulatory sequences, may vary from about 15 to 2,000 nucleotides, more preferably from about 15 to 150 nucleotides.

[0205] The polynucleotide probes can be prepared by a variety of synthetic or enzymatic schemes that are well known in the art. The probes can be synthesized, in whole or in part, using chemical methods well known in the art. Alternatively, the probes can be generated, in whole or in part, enzymatically.

[0206] Nucleotide analogues can be incorporated into the polynucleotide probes by methods well known in the art. The only requirement is that the incorporated nucleotide analogues must serve to base pair with target polynucleotide sequences. For example, certain guanine nucleotides can be substituted with hypoxanthine which base pairs with cytosine residues. However, these base pairs are less stable than those between guanine and cytosine. Alternatively, adenine nucleotides can be substituted with 2,6-diaminopurine which can form stronger base pairs than those between adenine and thymidine.

[0207] Additionally, the polynucleotide probes can include nucleotides that have been derivatized chemically or enzymatically. Typical chemical modifications include derivatization with acyl, alkyl, aryl or amino groups.

[0208] The polynucleotide probes can be immobilized on a substrate. Preferred substrates are any suitable rigid or semi-rigid support including membranes, filters, chips, slides, wafers, fibers, magnetic or nonmagnetic beads, glass or plastic beads, gels, tubing, microtubes, plates, polymers, microparticles and capillaries. The substrate can have a variety of surface forms, such as wells, trenches, pins, channels and pores, to which the polynucleotide probes are bound. Preferably, the substrates are optically transparent.

[0209] Probes can be synthesized, in whole or in part, on the surface of a substrate using a chemical coupling procedure and a piezoelectric printing apparatus, such as that described in PCT publication WO95/251116 (Baldeschweiler et al.). Mechanical coupling is also an option. See U.S. Pat. No. 5,143,854 and PCT Application Nos. WO 90/15070 and WO 92/10092. Alternatively, the probe can be synthesized on a substrate surface using a self-addressable electronic device that controls when reagents are added (Heller et al. U.S. Pat. No. 5,605,662).

[0210] The arrays can have any density of oligonucleotide probes. Arrays can have probes of greater than about 100, preferably greater than about 1,000, more preferably greater than about 15,000, and most preferably greater than about 25,000 different oligonucleotide probes. Arrays with 50,000, 65,000, 200,000 or even 1,000,000 or more different probes are also contemplated. Such arrays generally comprise a probe density of typically greater than about 60, more generally greater than about 100, most generally greater than about 600, often greater than about 1,000, more oftren greater than about 5,000, preferably more than about 10,000 probes per cm. Some arrays may be preferred wherein the density is about 100,000 to 400,000 probes per cm².

[0211] DNAs corresponding to rRNA or rDNA can be arranged and then immobilized on a substrate. The probes can be immobilized by covalent means such as by chemical bonding procedures or using ultraviolet (UV) light. In one such method, a DNA is bound to a glass surface, that has been modified to contain epoxide or aldehyde groups. In another case, a cDNA probe is placed on a polylysine coated surface and then UV cross-linked (Shalon et al., PCT publication WO95/35505). In yet another method, a DNA is actively transported from a solution to a given position on a substrate by electrical means (Heller et al. U.S. Pat. No. 5,605,662). Alternatively, individual DNA clones can be gridded on a filter. Cells are lysed, proteins and cellular components degraded, and the DNA coupled to the filter by UV cross-linking or other method known in the art.

[0212] Furthermore, the probes do not have to be directly bound to the substrate, but rather can be bound to the substrate through a linker group. The linker groups are typically about 6 to 50 atoms long to provide exposure to the attached polynucleotide probe. Preferred linker groups include ethylene glycol oligomers, diamines, diacids and the like. Reactive groups on the substrate surface react with one of the terminal portions of the linker to bind the linker to the substrate. The other terminal portion of the linker is then functionalized for binding the polynucleotide probe.

[0213] The polynucleotide probes can be attached to a substrate by dispensing reagents for probe synthesis on the substrate surface or by dispensing preformed DNA fragments or clones on the substrate surface. Typical dispensers include a micropipette delivering solution to the substrate with a robotic system to control the position of the micropipette with respect to the substrate. There can be a multiplicity of dispensers so that reagents can be delivered to the reaction regions simultaneously.

8.2 Hybridization Array Design

[0214] One of skill in the art will appreciate the enormous number of array options that are suitable for use with the disclosed methods and compositions. An array, including high density arrays, will typically include a number of probes that specifically hybridize to the target nucleic acid of interest. Such arrays should also preferably include one or more control probes. Such probes include but are not limited to test probes, normalization controls, mismatch controls, and sample preparation/amplification controls.

[0215] Test probes are oligonucleotide probes having sequences complementary to particular microorganism sequences whose expression they are designed to detect. Such test probes are typically from 5 to about 50 nucleotides, more preferably from about 10 to about 40 nucleotides and most preferably from about 15 to about 40 nucleotides in length.

[0216] Normalization controls are oligonucleotide probes that are perfectly complementary to labeled reference oligonucleotides that are added to the nucleic acid sample. The signals obtained from the normalization controls after hybridization provide a control for variations in hybrization conditions, label intensity, reading efficiency and other factors that may cause the signal of the hybridization to vary between arrays. In one embodiement, signals (e.g., fluorescence intensity) read from all other probes in the array are divided by the signal from the control probes thereby normalizing the measurements. Although any probe may be used as a normalization control, it is recognized that hybridization efficiencies vary with base composition and probe length. Thus, preferred normalization probes are selected to reflect the average length of the other probes present in the array. Normalization probes can be localized at any position in the array or at multiple positions throught the array to control for spatial variation in hybridization efficiency.

[0217] Mismatch controls can also be used in the array. Mismatch controls are oligonucleotide probes identical to their corresponding test or control probes except for the presence of one or more mismatched bases. A mismatched base is a base selected so that it is not complementary to the corresponding base in the target sequence to which the probe would otherwise specifically hybridize. One or more mismatches are selected such that under appropriate hybridization conditions the control probe would be expected to hybridize with its target sequence, but the mismatch probe would not hybridize (or would hybridize to statistically significant lesser extent). Preferred mismatch probes contain a central mismatch. For example, with a 20-mer probe, a corresponding mismatch probe will have the identical sequence except for a single base mismatch at any of positions 6 to 14.

[0218] Sample preparation and amplification controls are probes that are complementary to sequences of control genes or gene subsequences because they do not normally occur in the nucleic acids of the particular biological sample being analyzed. For example, the use of a eukaryotic gene in a sample believed to contain a microorganism. The sample is then spiked with a known amount of the nucleic acid to which the sample preparation/amplification control probe is directed before processing.

8.3 Labeling Nucleic Acids

[0219] Hybridized nucleic acids can be detected using one or more labels attached to the sample nucleic acids. The labels may be incorporated by any of a number of means known in the art. Preferred embodiments include incorporating the label during the amplification step in preparing the sample nucleic acids.

[0220] Alternatively, a label may be added directly to the original nucleic acid sample (e.g., mRNA, polyA mRNA, cDNA, etc.) or to the amplification product after the amplification is completed. Means of attaching labels are well known and include, but are not limited to, nick attachment (ligation) of a nucleic acid linker joining the sample nucleic acid to a label (e.g, a fluorophore).

[0221] Detection labels suitable for use include any composition detectable by means of spectroscopic, photochemical, biochemical, immunochemical, electrical, optical, or chemical means. Commonly preferred labels include biotin for staining with labeled strepavidin conjugates, magnetic beads (e.g., Dynabeads™), fluorescent dyes (e.g., fluorescein, Texas red, rhodamine, green fluorescent protein and the like), radiolabels (e.g., ³H, ¹²⁵I, ³²P, or ¹⁴C), enzymes (e.g., horseradish peroxidase, alkaline phosphatase and the like), and calorimetric labels such as colloidal gold.

[0222] 8.4 Hybridization and Detection

[0223] Hybridization of the probes is preferably at low stringency. Hybridization stringency includes for example, 20° C. to about 50° C., more preferably 30° C. to about 40° C., and most preferably about 37° C. and 6×SSPE-T buffer (0.9 M NaCl, 60 mM Na₂HPO₄, 6 mM EDTA, 0.005% Triton X-100, pH 7.6) or less. Optimally washes can be performed thereafter at high stringency or progressively increasing stringency until a desired level of hybridization specificity is reached.

[0224] As the number of probes on a chip can be quite large, preferred chips may include only thoe probes that are needed, e.g, those probes relating to 16S or 23S. This will reduce the total number probes and the necessary size of the chip. This may also result in a different tiling strategy used for a particular chip design. For conceptual simplicity, probes are often arranged in order of the sequence in a lane across the chip. However, this tiling strategy is not required. Probes can be randomly placed on the chip. For discussion on tiling, see U.S. Pat. No. 6,228,575.

[0225] Probe length can vary. Probes usually have a single complementary segment having a length of at least 3 nucleotides, and more usually at least 5, 6, 7, 8, 9, 10, 11, 12, 13, 14, 15, 16, 17, 18, 19, 20, 21, 22, 23, 24, 25, 26, 27, 28, 29, or 30 bases exhibiting complimentarity.

[0226] In some chips, it may be optimal to have the probes all the same length, while in others it may be optimal to have probe sets of varying lenth. The probe length may vary by group or may vary by individual probe. For example, some chips may contain gour groups of probes having sizes of 20-mers, 22-mers, 25-mers and 30-mers. Other chips may have different size probes within the same group of four probes. Additional methods of designing chips comprising the distinguishing moieties or of the present invention would be known in the art. See e.g., U.S. Pat. No. 6,228,575.

[0227] Additionally, the arrays are also contemplated as having other components than probes, for example linkers attaching the probes to a support.

[0228] 8.5 Microarrays and Kits for Their Use

[0229] Many of these microarrays can be used as research tools, as diagnostics to determine the presence of a microorganism in a sample (e.g., food sample or patient sample), as a means of following a patient's response to therapy and so forth. Thus these microarrays can be used in the form of kits. Kits can include an array of immobilized oligonucleotide probes complementary to subsequences of 16S and/or 23S. The kit may also include instructions describing the use of the array for the detection and/or quantification of expression levels of these sequences. The kit may optimally contain one or more of the following: buffers, hybridization mix, wash and read solutions, labels, labeling reagents (e.g., enzymes), control nucleic acids, and software for probe selection, array reading or data analysis.

9. Spot Tests and Other High Through-Put Testing

[0230] Potential high through put testing methods include but are not limited to (a) The Nanosphere Spot Assay (Nanosphere Inc.) that uses proprietary gold nanoparticle probe technology for a colorimetric detection of amplified DNA sequences; (b) a new fluorescence in situ hybridization (FISH) method with peptide nucleic acid (PNA) probes for identification of bacteria, which is based on a fluorescein-labeled PNA probe that targets a species-specific sequence of the 16S rRNA of the target species (e.g., S. aureus) (Oliveira et al., 2002 J. Clin. Microbiol. 40(1): 247-51); and c) a low-density microarray, in which a set of up to 1,000 probes are spotted on an array and tested with PCR products. Modifications of these would be readily apparent to the artisan of ordinary skill.

10. 16S Database Management System

[0231] Other aspects of the present invention involves a database management system for storing, maintaining, accessing and processing information relating to 16S rDNA sequences, where the information may be used to associate or distinguish moieties or residues from other moieties or residues based, for example, on nucleic acid sequence, location, relative position or any of a number of other characteristics.

[0232] Databases have been employed for storing, organizing and accessing biological data for quite some time. A database is a collection of information which has been organized in such a way that retrieval of the information stored therein is relatively quick and easy. In order to retrieve the information, however, a database management system is needed. A database management system is actually a collection of programs (i.e., computer programs) that enables one to enter, organize, select and access the information. For the purposes of the present invention, the term database and database management system are used interchangeably. Also, for purposes of the present invention, the information entered, organized, selected and accessed, as stated above, relates to 16S rDNA sequences, and in particular see Tables 14, 15, 19, 20, and 21.

[0233] Databases are traditionally organized into fields, records and files. A field is a space, e.g., a location in a memory device associated with one or more computer systems which make up the database management system, that has been allocated for a particular data item or piece of information. In general, a field is the smallest unit of information of data that one can access. A field may contain, for example, text information, such as a particular nucleic acid sequence; graphical information, such as data defining a three dimensional molecular representation of the nucleic acid sequence; or numeric information, such as the molecular weight of the nucleic acid sequence.

[0234] A collection of fields is generally referred to as a record. In the present invention, a single record may pertain to a particular full-length 16S rRNA/rDNA sequence or fragments thereof. The record may, in turn, contain several fields. As suggested above, one field may contain the nucleic acid sequence itself. Another field may contain the molecular weight of the sequence. Still another may contain data that defines a three dimensional molecular representation of the sequence. Yet another may define the classification of the microorganism (e.g., the bacterium) from which the 16S rRNA/rDNA sequence was isolated (i.e., the family, genus, species and/or strain of the microorganism). Still another may contain data that identifies the source of the sequence. In no way, however, is this list of examples intended to be exhaustive. In a relational database management system, records are often called tuples.

[0235] Generally speaking, a file is a collection of data or information that has been given a particular name, called a filename. In a database management system, a file may contain a collection of records. The records contained in that file may have a common attribute. For example, each record may contain 16S rRNA/rDNA data pertaining to or associated with a particular strain of bacteria.

[0236] The database management system of the present invention may be a relational database management system or, what is referred to as a flat-file database. A relational database is one that comprises multiple tables of data and/or information, where the word table simply refers to data arranged in rows and columns, and where the records contained in each table may have a different format. In a flat-file database, the data is contained in a single table. In accordance with exemplary embodiments of the present invention, the 16S rRNA/rDNA sequence data and/or information may be contained in a single table or spread across multiple tables. In one specific instance, one table may contain newly isolated 16S rRNA/rDNA sequences, or fragments thereof, where the sequence data associated with this table may be referred to as an internal database. Another table may contain 16S rRNA/rDNA sequences retrieved from one or more publically available or external databases, such as GenBank or the Ribosomal Database Project (RDP) database.

[0237] A more detailed description will now follow, with respect to generating, analyzing, annotating, storing, organizing and utilizing the 16S rRNA/rDNA sequence data and/or information in the database management system of the present invention.

[0238] 10.1 Generating Raw Sequence Data. Raw sequence data refers to unedited nucleic acid sequence information. Raw sequence data may be obtained by sequencing isolated or amplified 16S rDNA or rRNA that has been subjected to PCR or RT-PCR and made into DNA or cDNA respectively. Raw sequence data may also be obtained through a variety of other methods, including the acquisition of sequence data from external sources. The preferred method for generating raw sequence data from a biological sample includes the steps of: isolating genomic DNA, preparing a template by PCR and, therefrom, generating a corresponding nucleic acid sequence.

[0239] 10.2 Automated Bioanalysis. Once raw sequence data is generated for a given sample, as described in section 10.1 above, the raw sequence reads are preferably edited and annotated before the information is entered (i.e., stored) in the database. More specifically, the process maybe divided into two levels of processing: 1) editing raw sequence data and 2) annotating and organizing the edited sequences data. These processing steps are collective referred to herein as automated bioanalysis.

[0240] 10.2.1 Editing. Automated bioanalysis processing of the 16S rRNA/rDNA sequence data prior to annotating and storing the data in the database according to exemplary embodiments of the present invention may involve, for example, sequence editing, sequence masking, clipping portions of sequences, and removing artifacts associated with cloning and sequencing, as would be apparent to one skilled in the art. Furthermore, the editing process may include the functional arrangement of sequences, for instance, through clustering and master clustering. Still further, the editing process may involve the use of existing sequences, that have been previously edited, to extend a sequence and identify other existing sequences related thereto.

[0241] 10.2.2 Annotating and Organizing. After edited the raw sequences, the additional information related to a given sequence may be introduced by way of annotations. Annotations may include, as suggested above, information relating to the classification of the microorganism (e.g., the bacterium) from which the 16S rRNA/rDNA sequence was isolated (i.e., the family, genus, species and/or strain of the microorganism), the molecular weight of the sequence and the name(s) associated with the group responsible for isolating the sequence. Additionally, annotations may include information that relates a given sequence to other sequences within a given classification or classifications, disease/phenotype or disease relationship, pathology, histology or epidemiology relationships and methods used in editing the sequence.

[0242] The sequence information and the associated annotations pertaining to a given sequence are stored in the database. The annotations, assigned through the automated bioanalysis, may contain information on the bacterium from which the genes encoding the rRNA are expressed, the relationship of the bacterium to other members of the genus, species and/or strain, and preparation techniques. The sequences from rDNA libraries are preferably organized by bacterium category.

[0243] 10.3 Database Organization. The database of the present system utilizes the capabilities of modern computers by storing genetic information in association with a large amount of related information. In a preferred embodiment, the information on essentially all the steps of isolating and amplifying DNA, and identifying rRNA or rDNA sequences comprising distinguishing moieties are stored in various relational tables. The database can also allow a user to access information pertinent to the sequences.

[0244] Both sequences and information annotating the sequences are stored in a database such as a relational database. Data is stored in the database in a functional arrangement that allows the user to store, track, and manipulate the rRNA or rDNA sequences and annotated information comprising information regarding distinguishing moieties. Users can access one or more databases via an integrated network, e.g. an Ethernet network. The workstations are typically computers, preferably personal computers, that include data entry means, output devices, display, CPU, memory (i.e., RAM and ROM) and interfaces to the network.

[0245] In the preferred embodiment of the present invention the relational database is stored at a file server connected to network. Computers are linked, via an integrated network, to a computer that grants access to the storage unit of the internal database of the present invention. The access computer preferably includes CPU, a memory means, interfaces to the network, and input and output devices. Reference databases illustrate sources of data that, for example, may be searched during use of the database. See for example, Table 7, which can be used as a reference database. Such a database is preferably in a relational form with a means, typically computerized, for querying the reference database. Tables 12, 14, 15, 20, and 21 comprise data that can be related within the database

[0246] 10.4 Access to the Curated Database. The curated database preferably has a user-friendly interface, which is preferably created in HTML for access with Web browsers (e.g., Netscape® or Internet Explorer®).

[0247] 10.5 Exemplary Full-length Sequences Stored in the Database. The sequences stored within the database provide information useful for designing probes to reveal the identity of various bacteria. Information of this nature is extremely powerful, as it can be utilized in clinical diagnostics, prognostics, patient treatment, etc. For example, certain types of bacterial species and/or strains may be resistant to some antibiotics, but may respond to other antibiotics. Determining this information would be clinically useful in prescribing the correct drug to treat the animal subject.

[0248] 10.6 Use of the Internal Database. The structure and methods of data entry of the database allow many different types of analysis to be performed, both within the internal database and between sequences in the internal database and sequences in publicly available databases. The automated bioanalysis of the sequences enhances this analysis by masking or removing sequence elements that may hinder meaningful comparisons. The organization of the database facilitates analysis by providing mechanisms by which queries may be done quickly and efficiently, both within the internal database and with other external databases. The relational nature of the internal database thus provides a more comprehensive analysis, without the need to reformulate each search for each separate database.

[0249] 10.6.1 Query Sequence Comparison. DNA sequence comparisons can involve comparing sequences within the internal database or comparing sequences with those in external databases.

[0250] Data relating to sequence comparison is organized and stored in the sequence comparison portion of the database. This storage area includes tables containing information about the quality of the sequence matches in sequence match logs, as well as tables containing information about other features of compared sequences. The sequence comparison portion also contains information found during accession of external databases (e.g., GenBank, RDP, PathoGenome™ (Genome Therapeutics Corp.), GenSeq (Derwent)). These databases may provide information on similarity, or rRNA domains, of the compared sequences that may be predictive of activity.

[0251] A sequence comparison results in a text file with details and summaries with respect to the possible relationships between the query sequence and any database sequences identified through the comparison. Preferably, comparisons are done with the aid of algorithms and software such as BLAST, FASTA, Boyer-Moore, or Smith-Waterman. Most preferably, parameters are used which permit the identification of highly related sequences with 0, 1, or more mismatches with the query sequence as discussed herein.

[0252] 10.6.2 Species and Group Specific Oligonucleotide Generation. The full-length gene sequence can be split into various segment sizes with a given overlap length. These segments are then compared by, for example, BLAST against sequence databases. The databases that can be used for the pairwise comparisons of the oligonucleotides include GenBank, Ribosomal Database Project (RDP), PathoGenome™ and the internal reference database as described herein and in the Examples. The reports produced by the BLAST comparisons are then parsed to determine which oligonucleotides are either species or group-specific. The criterion for a species-specific oligonucleotide is that it exhibit only 0 or 1 mismatch when its sequence is aligned with at least one sequence from a single species (or no species if no additional sequences are available for the particular species under study) and exhibit two or more mismatches when its sequence is aligned with those from any other species. In other words, to be recognized as a “species-specific oligonucleotide” for a first species, an oligonucleotide hit to a second species must contain at least two mismatches. Likewise, a group-specific oligonucleotide is defined using the same mismatch criteria, but permitting 0 or 1 mismatch for five or fewer species. To better determine the validity of the species or groups-specific oligonucleotides, one can use multiple database comparisons because the content of different databases may not overlap entirely. The validity of the group- or species-specific oligonucleotide sequence is improved by comparison to a larger number of sequences from different databases.

[0253] Although the present invention has been described in detail with reference to examples below, it is understood that various modifications can be made without departing from the spirit of the invention, and would be readily known to the skilled artisan.

### EXAMPLES

### Example 1

### Sequencing of 16S rRNA

[0254] Direct sequencing of uncloned PCR generated template for variant sequence discovery is described by, for example, Wrischnik et al., 1987 Nuc. Acids Res. 15(2): 529-42; Gibbs et al., 1989 Proc. Nat'l Acad. Sci. USA 86(6): 1919-23; and Rogall et al., 1990 J. Gen. Microbiol. 136(Pt 9): 1915-20. This method has been applied to both prokaryotic and eukaryotic systems. Software to support this process is widely available (Nickerson et al., 1997 Nuc. Acids Res. 25(14): 2745-51). We have adapted this strategy for discovery of 16S RNA variation in numerous bacterial species.

[0255] PCR primers for amplification of the 16S rRNA gene were designed using the E. coli (ATCC11775) and S. aureus (ATCC12066) 16S rDNA sequences. Three tiers of amplicons were designed for complete coverage of the 16S gene as demonstrated in FIG. 1. Tier one has three overlapping fragments. Tier two has two fragments, and tier three has a single fragment. Primer sequences are noted in Tables 4-6 below.

TABLE 4
PCR Fragment Defining Primers

| PCR Fragment | Defining Primers |
|---|---|
| Tier 1 #1 | 0008MF and 0522MR |
| Tier 1 #2 | 0514MF and 1073MR |
| Tier 1 #3 | 1062MF and 1540MR |
| Tier 2 #4 | 0008MF and 0800MR |
| Tier 2 #5 | 0775MF and 1540MR |
| Tier 3 #6 | 0008MF and 1540MR |

[0256] TABLE 5

Primer Sequences

| | Primer | |
|---|---|---|
| 16S PCR | SEQ ID | |
| primers | NO | M13-tail + Sequence |
| 0008MF2 | 48752 | 5′-CTGTAAAACGACGGCCAGTAGAGTTTGATCMTGGCTCAG-3′ |
| 16_0008MF | 48753 | 5′-CTGTAAAACGACGGCCAGTAGAGTTTGATCATGGCTCAG-3′ |
| 16_0505MF | 48754 | 5′-CTGTAAAACGACGGCCAGTGCTAACTMCGTGCCA-3′ |
| 16_0514MF | 48755 | 5′-CTGTAAAACGACGGCCAGTGTGCCAGCAGCCGCGGTA-3′ |
| 16_0522MR | 48756 | 5′-AGGAAACAGCTATGA CCATGTGCTGGCACKGAGTT-3′ |
| 0534MF | 48757 | 5′-AGGAAACAGCTATGACCATGTATTACCGCGGCTGCTGG-3′ |
| 16_0775MF | 48758 | 5′-CTGTAAAACGACGGCCAGTGAGCRAACAGGATTAG-3′ |
| 16_0800MR | 48759 | 5′-AGGAAACAGCTATGA CCATGACCAGGGTATCTAATC-3′ |
| 16_1062MF | 48760 | 5′-CTGTAAAACGACGGCCAGTCGTCAGCTCGTGTYGT-3′ |
| 16_1073MR | 48761 | 5′-AGGAAACAGCTATGACCATGCACGAGCTGACGACA-3′ |
| 16_1088MRA | 48762 | 5′-AGGAAACAGCTATGA CCATGCCCAACATTTCACAAC-3′ |
| 16_1540MR | 48763 | 5′-AGGAAACAGCTATGA CCATGAAGGAGGTGATCCAACCGCA-3′ |

[0257] TABLE 6

16 S Walking Primer Sequences

| 16S | | |
|---|---|---|
| Walking | Primer SEQ | |
| Primers | ID NO | Sequence |
| 16-116F | 48694 | 5′-GCGGACGGGTGAGTAA-3′ |
| 16-321F | 48695 | 5′-ACTGAGACACGGTCCAGAC-3′ |
| 16-514F | 48697 | 5′-GTGCCAGCAGCCGCGGTA-3′ |
| 16-558F | 48698 | 5′-GAWTYAYTGGGCGTAAAG-3′ |
| 16-758F | 48699 | 5′-CAAACAGGATTAGATACC-3′ |
| 16-946F | 48701 | 5′-GCATGTGGTTTAATTCGA-3′ |
| 16-1168F | 48703 | 5′-AAGGTGGGGATGACGTCAA-3′ |
| 16-282R | 48705 | 5′-CACCAACTAGCTAAT-3′ |
| 16-358R | 48696 | 5′-ACTGCTGCCTCCCGTAG-3′ |
| 16-531R | 48706 | 5′-TACCGCGGCTGCTGGCAC-3′ |
| 16-806R | 48700 | 5′-TGGACTACCAGGGTATCT-3′ |
| 16-964R | 48702 | 5′-TCGAATTAAACCACATG-3′ |
| 16-1230R | 48704 | 5′-CATTGTAGCACGTGTGTAG-3′ |

[0258] Forward PCR primers are tailed with the M13-21 sequence and reverse primers with the M13-28 sequence to facilitate production sequencing. In addition, fourteen walking primers are available for use on the tier three amplicon. These primers are used to generate sequence reads directly from the 1,400 nucleotides (nt) fragment. All sequence reads are generated with BigDye Terminator chemistry (Applied Biosystems, Foster City, Calif.) run on MegaBACE 1000 instruments (Amersham, Piscataway, N.J.). Sequence reads representing the 16S sequence of individual bacterial isolates and passing Phred (Ewing et al., 1998, Genome Res. 8: 175-185; and Ewing et al., 1998 Genome Res. 8: 186-194) quality criteria of 175 total 30-quality bases, or 75 contiguous 30-quality bases, are assembled using polyphred. The assemblies are considered complete when a consensus sequence of at least 1,380 nt with an average of at least 3.5-fold Phred 20-quality data coverage is achieved.

[0259] A summary of all sequences that meet the above criteria was generated, along with information on the origin of the isolate from which each sequence was generated (the “source species”), and is represented in Table 7. Each strain, from which 16S rDNA sequence was obtained, was either a clinical isolate from the bioMérieux bacterial collection or was obtained from a reference collection center such as the ATCC. For all “type strains”, a “T” has been added after the strain collection number (e.g., ATCC 25238T).

TABLE 7

| Source Name | Assembly ID | Collection ID | Collection # |
|---|---|---|---|
| Klebsiella oxytoca | 01A01 | ATCC | 43863 |
| Escherichia coli | 01A02 | ATCC | 11775T |
| Citrobacter freundii | 01A03 | ATCC | 8090T |
| Klebsiella pneumoniae | 01A04 | ATCC | 13883T |
| Enterobacter cloacae | 01A05 | ATCC | 13047T |
| Pseudomonas aeruginosa | 01A06 | ATCC | 10145T |
| Serratia marcescens | 01A07 | ATCC | 13880T |
| Klebsiella pneumoniae | 01A08 | ATCC | 35657 |
| Klebsiella pneumoniae | 01A09 | ATCC | 11296T |
| Citrobacter koseri | 01A10 | ATCC | 27156 |
| Morganella morganii ssp morganii | 01A11 | ATCC | 25830T |
| Staphylococcus haemolyticus | 01B02 | ATCC | 29970T |
| Citrobacter freundii | 01B03 | ATCC | 43864 |
| Streptococcus dysgalactiae ssp. Equisimilis | 01B04 | ATCC | 35666 |
| Streptococcus agalactiae | 01B05 | ATCC | 13813T |
| Achromobacter xylosoxidans spp. Denitrificans | 01B06 | ATCC | 15173T |
| Achromobacter xylosoxidans spp. xylosoxidans | 01B07 | ATCC | 27061T |
| Kocuria rosea | 01B08 | ATCC | 35658 |
| Streptococcus sanguinis | 01B09 | ATCC | 10556T |
| Kocuria rosea | 01B10 | CCM | 2607 |
| Streptococcus pneumoniae | 01B11 | ATCC | 33400T |
| Enterococcus avium | 01B12 | ATCC | 14025T |
| Enterobacter amnigenus | 01C02 | ATCC | 33072T |
| Stenotrophomonas maltophilia | 01C03 | CCM | 2656 |
| Moraxella osloensis | 01C04 | ATCC | 19976T |
| Streptococcus oralis | 01C05 | ATCC | 35037T |
| Fusobacterium necrophorum | 01C06 | ATCC | 25286T |
| Leclercia adecarboxylata | 01C07 | ATCC | 23216T |
| Stenotrophomonas maltophilia | 01C08 | ATCC | 17666T |
| Pantoea agglomerans | 01C09 | ATCC | 27155T |
| Staphylococcus epidermidis | 01C10 | ATCC | 14990T |
| Staphylococcus hominis ssp. Hominis | 01C11 | ATCC | 27844T |
| Prevotella melaninogenica | 01C12 | none | none |
| Staphylococcus haemolyticus | 01D01 | none | none |
| Staphylococcus aureus ssp. Aureus | 01D02 | ATCC | 12600T |
| Klebsiella pneumoniae | 01D03 | none | none |
| Campylobacter jejuni | 01D04 | ATCC | 33560T |
| Streptococcus iniae | 01D05 | ATCC | 29178T |
| Streptococcus ferus | 01D06 | ATCC | 33477T |
| Comamonas testosteroni | 01D07 | ATCC | 11996T |
| Pseudomonas fluorescens | 01D08 | none | none |
| Providencia alcalifaciens | 01D09 | none | none |
| Clostridium clostridiiforme | 01D10 | ATCC | 25537T |
| Campylobacter jejuni | 01D11 | ATCC | 29428 |
| Escherichia hermannii | 01D12 | none | none |
| Serratia marcescens | 01E01 | none | none |
| Klebsiella oxytoca | 01E03 | ATCC | 2170 |
| Klebsiella oxytoca | 01E04 | ATCC | 2263 |
| Staphylococcus epidermidis | 01E05 | CDC | 2007 |
| Klebsiella oxytoca | 01E06 | ATCC | 13182T |
| Proteus mirabilis | 01E07 | ATCC | 29906T |
| Providencia stuartii | 01E08 | ATCC | 29914T |
| Stenotrophomonas maltophilia | 01E09 | ATCC | 13637T |
| Acinetobacter lwoffii | 01E11 | ATCC | 15309T |
| Pantoea agglomerans | 01E12 | none | none |
| Pseudomonas stutzeri | 01F01 | ATCC | 17588T |
| Pasteurella multocida ssp multocida | 01F02 | ATCC | 43137T |
| Bacillus cereus | 01F03 | ATCC | 14579T |
| Salmonella choleraesuis | 01F04 | ATCC | 19940 |
| Acinetobacter haemolyticus | 01F05 | none | none |
| Citrobacter freundii | 01F06 | none | none |
| Citrobacter youngae | 01F07 | ATCC | 29935T |
| Klebsiella pneumoniae | 01F08 | CDC | 30 |
| Klebsiella pneumoniae | 01F09 | CDC | 31 |
| Klebsiella pneumoniae | 01F10 | CDC | 40 |
| Klebsiella oxytoca | 01F11 | CDC | 44 |
| Klebsiella oxytoca | 01F12 | CDC | 46 |
| Citrobacter freundii | 01G01 | CDC | 85 |
| Enterobacter cloacae | 01G02 | aide diagnostic | none |
| Enterobacter sp. | 01G03 | aide diagnostic | none |
| Pseudomonas aeruginosa | 01G04 | aide diagnostic | none |
| Citrobacter freundii | 01G05 | aide diagnostic | none |
| Pasteurella sp. | 01G06 | aide diagnostic | none |
| Escherichia coli | 01G07 | aide diagnostic | none |
| Pasteurella sp. | 01G08 | aide diagnostic | none |
| Brevibacillus thermoruber | 01G09 | aide diagnostic | none |
| Citrobacter freundii | 01G10 | aide diagnostic | none |
| Klebsiella pneumoniae | 01G11 | aide diagnostic | none |
| Raoultella planticola | 01H01 | ATCC | 33531T |
| Listeria seeligeri | 01H02 | aide diagnostic | none |
| Citrobacter freundii | 01H03 | aide diagnostic | none |
| Escherichia coli | 01H04 | aide diagnostic | none |
| Vibrio hollisae | 01H05 | aide diagnostic | none |
| Raoultella planticola | 01H06 | none | none |
| Streptococcus ssp. | 01H07 | aide diagnostic | none |
| Enterococcus faecalis | 01H08 | aide diagnostic | none |
| Staphylococcus aureus ssp. aureus | 01H09 | aide diagnostic | none |
| Salmonella enteritidis | 01H10 | none | none |
| Salmonella typhimurium | 01H11 | none | none |
| Fusobacterium mortiferum | 01H12 | ATCC | 25557T |
| Citrobacter freundii | 03A01 | none | none |
| Enterobacter aerogenes | 03A02 | none | none |
| Escherichia coli | 03A03 | ATCC | 35421 |
| Vibrio cholerae | 03A04 | none | none |
| Aeromonas caviae | 03A05 | ATCC | 15468T |
| Aeromonas hydrophila | 03A06 | none | none |
| Aeromonas sobria | 03A07 | none | none |
| Enterobacter cloacae | 03A08 | none | none |
| Staphylococcus epidermidis | 03A09 | none | none |
| Campylobacter jejuni | 03A10 | none | none |
| Enterococcus durans | 03A11 | NCDO | 1724 |
| Enterococcus hirae | 03A12 | none | none |
| Citrobacter koseri | 03B01 | none | none |
| Myroides odoratus | 03B02 | none | none |
| Pseudomonas aeruginosa | 03B03 | CDC | none |
| Vibrio cholerae | 03B04 | none | none |
| Aeromonas caviae | 03B05 | none | none |
| Aeromonas caviae | 03B06 | none | none |
| Aeromonas hydrophila | 03B07 | none | none |
| Aeromonas hydrophila | 03B08 | ATCC | 7966T |
| Streptococcus bovis | 03B09 | none | none |
| Clostridium perfringens | 03B10 | none | none |
| Enterococcus faecalis | 03B11 | none | none |
| Streptococcus bovis | 03B12 | ATCC | 33317T |
| Enterobacter cloacae | 03C01 | none | none |
| Citrobacter freundii | 03C02 | none | none |
| Citrobacter freundii | 03C03 | none | none |
| Citrobacter koseri | 03C04 | none | none |
| Citrobacter koseri | 03C05 | none | none |
| Enterobacter aerogenes | 03C06 | ATCC | 13048T |
| Enterobacter aerogenes | 03C07 | none | none |
| Escherichia coli | 03C08 | CDC | 2039 |
| Streptococcus equinus | 03C09 | none | none |
| Enterococcus durans | 03C10 | none | none |
| Enterococcus faecium | 03C11 | none | none |
| Corynebacterium jeikeium | 03C12 | none | none |
| Escherichia coli | 03D01 | none | none |
| Myroides odoratus | 03D02 | none | none |
| Pseudomonas aeruginosa | 03D03 | ATCC | 35422 |
| Stenotrophomonas maltophilia | 03D04 | none | none |
| Acinetobacter baumannii | 03D05 | none | none |
| Acinetobacter baumannii | 03D06 | none | none |
| Acinetobacter baumannii | 03D07 | ATCC | 19606T |
| Aeromonas sobria | 03D08 | none | none |
| Enterococcus faecalis | 03D09 | ATCC | 19433T |
| Enterococcus faecalis | 03D10 | none | none |
| Enterococcus faecium | 03D11 | none | none |
| Streptococcus equinus | 03D12 | ATCC | 9812T |
| Aeromonas sobria | 03E01 | ATCC | 43979T |
| Burkholderia cepacia | 03E02 | none | none |
| Burkholderia gladioli | 03E03 | ATCC | 10248T |
| Chryseobacterium meningosepticum | 03E04 | ATCC | 13253T |
| Myroides odoratus | 03E05 | ATCC | 4651T |
| Pseudomonas aeruginosa | 03E06 | none | none |
| Pseudomonas fluorescens | 03E07 | none | none |
| Stenotrophomonas maltophilia | 03E08 | none | none |
| Corynebacterium jeikeium | 03E09 | none | none |
| Enterococcus faecium | 03E10 | ATCC | 19434T |
| Haemophilus influenzae | 03E11 | ATCC | 33391T |
| Streptococcus bovis | 03E12 | none | none |
| Stenotrophomonas maltophilia | 03F01 | none | none |
| Vibrio cholerae | 03F02 | ATCC | 14035T |
| Burkholderia cepacia | 03F03 | none | none |
| Burkholderia cepacia | 03F04 | ATCC | 25416T |
| Burkholderia gladioli | 03F05 | none | none |
| Haemophilus parainfluenzae | 03F08 | ATCC | 33392T |
| Corynebacterium jeikeium | 03F09 | none | none |
| Enterococcus hirae | 03F10 | ATCC | 8043T |
| Haemophilus parainfluenzae | 03F11 | none | none |
| Streptococcus equinus | 03F12 | NCTC | 10386 |
| Neisseria meningitidis | 03G01 | none | none |
| Pseudomonas fluorescens | 03G02 | none | none |
| Pseudomonas fluorescens | 03G03 | ATCC | 13525T |
| Haemophilus influenzae | 03G04 | none | none |
| Haemophilus paraphrophilus | 03G05 | ATCC | 29241T |
| Haemophilus paraphrophilus | 03G06 | none | none |
| Haemophilus paraphrophilus | 03G07 | none | none |
| Neisseria meningitidis | 03G08 | ATCC | 13077T |
| Enterococcus hirae | 03G09 | none | none |
| Haemophilus influenzae | 03G10 | none | none |
| Clostridium perfringens | 03G11 | ATCC | 13124T |
| Staphylococcus aureus ssp. aureus | 03H01 | none | none |
| Staphylococcus aureus ssp. aureus | 03H02 | none | none |
| Staphylococcus epidermidis | 03H03 | none | none |
| Staphylococcus epidermidis | 03H04 | none | none |
| Neisseria meningitidis | 03H05 | ATCC | 13090 |
| Campylobacter coli | 03H06 | ATCC | 33559T |
| Campylobacter coli | 03H07 | none | none |
| Campylobacter coli | 03H08 | none | none |
| Enterococcus durans | 03H09 | ATCC | 19432T |
| Staphylococcus aureus ssp. aureus | 03H10 | none | none |
| Clostridium perfringens | 03H11 | none | none |
| Achromobacter piechaudii | 04A01 | ATCC | 43552T |
| Achromobacter xylosoxidans spp. denitrificans | 04A02 | N/A | N/A |
| Achromobacter xylosoxidans spp. xylosoxidans | 04A03 | N/A | N/A |
| Acinetobacter calcoaceticus | 04A04 | ATCC | 14987 |
| Acinetobacter calcoaceticus | 04A05 | ATCC | 23055T |
| Acinetobacter haemolyticus | 04A06 | ATCC | 17906T |
| Acinetobacter johnsonii | 04A07 | N/A | N/A |
| Acinetobacter johnsonii | 04A08 | ATCC | 17909T |
| Acinetobacter junii | 04A09 | N/A | N/A |
| Acinetobacter junii | 04A10 | ATCC | 17908T |
| Acinetobacter lwoffii | 04A11 | none | none |
| Actinobacillus ureae | 04A12 | ATCC | 25976T |
| Actinobacillus ureae | 04B01 | ATCC | 29692 |
| Aeromonas schubertii | 04B02 | ATCC | 43700T |
| Aeromonas schubertii | 04B03 | ATCC | 43701 |
| Aeromonas veronii | 04B04 | ATCC | 35624T |
| Aeromonas veronii | 04B05 | N/A | N/A |
| Alcaligenes faecalis | 04B06 | ATCC | 8750T |
| Alcaligenes faecalis | 04B07 | N/A | N/A |
| Bordetella avium | 04B11 | ATCC | 35086T |
| Bordetella bronchiseptica | 04B12 | ATCC | 19395T |
| Bordetella bronchiseptica | 04C01 | ATCC | 10580 |
| Bordetella trematum | 04C02 | LMG | 5894 |
| Bordetella trematum | 04C03 | LMG | 13506T |
| Brevundimonas diminuta | 04C04 | N/A | N/A |
| Brevundimonas diminuta | 04C05 | ATCC | 11568T |
| Brevundimonas vesicularis | 04C06 | N/A | N/A |
| Brevundimonas vesicularis | 04C07 | ATCC | 11426T |
| Budvicia aquatica | 04C08 | ATCC | 51341 |
| Budvicia aquatica | 04C09 | ATCC | 35567T |
| Buttiauxella agrestis | 04C10 | ATCC | 33320T |
| Buttiauxella agrestis | 04C11 | CUETM | 78-27 |
| Cedecea davisae | 04C12 | ATCC | 33431T |
| Cedecea davisae | 04D01 | ATCC | 43024 |
| Cedecea lapagei | 04D02 | ATCC | 33432T |
| Cedecea lapagei | 04D03 | ATCC | 43028 |
| Cedecea neteri | 04D04 | ATCC | 33856 |
| Cedecea neteri | 04D05 | ATCC | 33855T |
| Chromobacterium violaceum | 04D06 | ATCC | 12472T |
| Chromobacterium violaceum | 04D07 | ATCC | 7461 |
| Citrobacter amalonaticus | 04D10 | ATCC | 25405T |
| Citrobacter amalonaticus | 04D11 | N/A | N/A |
| Citrobacter braakii | 04D12 | N/A | N/A |
| Citrobacter braakii | 04E01 | ATCC | 51113T |
| Citrobacter farmeri | 04E02 | ATCC | 51112T |
| Citrobacter farmeri | 04E03 | CDC | 2604-78 |
| Citrobacter sedlakii | 04E04 | ATCC | 51115T |
| Citrobacter sedlakii | 04E05 | CDC | 3659-74 |
| Citrobacter werkmanii | 04E06 | ATCC | 51114T |
| Citrobacter werkmanii | 04E07 | CDC | 631-77 |
| Citrobacter youngae | 04E08 | ATCC | 29935T |
| Citrobacter youngae | 04E09 | CDC | 6440-59 |
| Comamonas testosteroni | 04E10 | N/A | N/A |
| Delftia acidovorans | 04E11 | ATCC | 15668T |
| Delftia acidovorans | 04E12 | ATCC | 51340 |
| Edwardsiella hoshinae | 04F01 | ATCC | 33379T |
| Edwardsiella hoshinae | 04F02 | ATCC | 35050 |
| Edwardsiella tarda | 04F03 | ATCC | 15947T |
| Empedobacter brevis | 04F05 | ATCC | 43319T |
| Empedobacter brevis | 04F06 | N/A | N/A |
| Enterobacter amnigenus | 04F07 | ATCC | 33072T |
| Enterobacter amnigenus | 04F08 | CUETM | 78-70 |
| Enterobacter asburiae | 04F09 | N/A | N/A |
| Enterobacter asburiae | 04F10 | ATCC | 35953T |
| Enterobacter cancerogenus | 04F11 | CDC | 4641-84 |
| Enterobacter gergoviae | 04F12 | ATCC | 33028T |
| Enterobacter gergoviae | 04G01 | N/A | N/A |
| Enterobacter intermedius | 04G02 | ATCC | 33110T |
| Enterobacter intermedius | 04G03 | ATCC | 33422 |
| Moraxella nonliquefaciens | 04G05 | ATCC | 17975 |
| Ochrobactrum anthropi | 04G06 | N/A | N/A |
| Ochrobactrum anthropi | 04G07 | ATCC | 49188T |
| Proteus mirabilis | 04G08 | ATCC | 35659 |
| Proteus vulgaris | 04G09 | ATCC | 13315T |
| Proteus vulgaris | 04G10 | ATCC | 6380 |
| Providencia stuartii | 04G11 | N/A | N/A |
| Pseudomonas stutzeri | 04G12 | N/A | N/A |
| Ralstonia pickettii | 04H01 | ATCC | 27511T |
| Ralstonia pickettii | 04H02 | N/A | N/A |
| Salmonella choleraesuis | 04H03 | ATCC | 13314T |
| Salmonella choleraesuis | 04H04 | N/A | N/A |
| Serratia liquefaciens | 04H05 | ATCC | 27592T |
| Serratia liquefaciens | 04H06 | N/A | N/A |
| Shewanella algae | 04H07 | N/A | N/A |
| Klebsiella pneumoniae | 04H08 | N/A | N/A |
| Klebsiella pneumoniae | 04H09 | N/A | N/A |
| Klebsiella pneumoniae | 04H10 | N/A | N/A |
| Klebsiella pneumoniae | 04H11 | N/A | N/A |
| Klebsiella pneumoniae | 04H12 | N/A | N/A |
| Staphylococcus arlettae | 05A01 | ATCC | 43957T |
| Staphylococcus arlettae | 05A02 | CCUG | 33610 |
| Staphylococcus arlettae | 05A03 | DSM | 20673 |
| Staphylococcus auricularis | 05A04 | ATCC | 33753T |
| Staphylococcus auricularis | 05A05 | none | none |
| Staphylococcus auricularis | 05A06 | ATCC | 33752 |
| Staphylococcus capitis ssp. capitis | 05A07 | ATCC | 27840T |
| Staphylococcus capitis ssp. capitis | 05A08 | none | none |
| Staphylococcus capitis ssp. capitis | 05A09 | ATCC | 27841 |
| Staphylococcus capitis ssp. ureolyticus | 05A10 | ATCC | 49326T |
| Staphylococcus capitis ssp. ureolyticus | 05A11 | ATCC | 49325 |
| Staphylococcus capitis ssp. ureolyticus | 05A12 | none | none |
| Staphylococcus caprae | 05B01 | ATCC | 35538T |
| Staphylococcus caprae | 05B02 | CCUG | 38378 |
| Staphylococcus caprae | 05B03 | none | none |
| Staphylococcus carnosus ssp. carnosus | 05B04 | ATCC | 51365T |
| Staphylococcus carnosus ssp. carnosus | 05B05 | LMG | 13567 |
| Staphylococcus carnosus ssp. carnosus | 05B06 | none | none |
| Staphylococcus chromogenes | 05B07 | ATCC | 43764T |
| Staphylococcus chromogenes | 05B08 | none | none |
| Staphylococcus chromogenes | 05B09 | none | none |
| Staphylococcus cohnii ssp cohnii | 05B10 | ATCC | 29974T |
| Staphylococcus cohnii ssp cohnii | 05B11 | none | none |
| Staphylococcus cohnii ssp cohnii | 05B12 | none | none |
| Staphylococcus cohnii ssp urealyticum | 05C01 | ATCC | 49330T |
| Staphylococcus cohnii ssp urealyticum | 05C02 | ATCC | 49331 |
| Staphylococcus cohnii ssp urealyticum | 05C03 | none | none |
| Staphylococcus equorum | 05C04 | ATCC | 43958T |
| Staphylococcus equorum | 05C05 | none | none |
| Staphylococcus equorum | 05C06 | none | none |
| Staphylococcus gallinarum | 05C07 | ATCC | 35539T |
| Staphylococcus gallinarum | 05C08 | none | none |
| Staphylococcus gallinarum | 05C09 | none | none |
| Staphylococcus haemolyticus | 05C10 | CDC | 2233 |
| Staphylococcus haemolyticus | 05C11 | none | none |
| Staphylococcus haemolyticus | 05C12 | none | none |
| Staphylococcus hominis ssp hominis | 05D01 | none | none |
| Staphylococcus hominis ssp. novobiosepticus | 05D02 | CCUG | 42399T |
| Staphylococcus hominis ssp. novobiosepticus | 05D03 | none | none |
| Staphylococcus hominis ssp. novobiosepticus | 05D04 | none | none |
| Staphylococcus hyicus | 05D05 | ATCC | 11249T |
| Staphylococcus hyicus | 05D06 | none | none |
| Staphylococcus hyicus | 05D07 | none | none |
| Staphylococcus intermedius | 05D08 | ATCC | 29663T |
| Staphylococcus intermedius | 05D09 | none | none |
| Staphylococcus intermedius | 05D10 | none | none |
| Staphylococcus kloosii | 05D11 | ATCC | 43959T |
| Staphylococcus kloosii | 05D12 | none | none |
| Staphylococcus kloosii | 05E01 | none | none |
| Staphylococcus lentus | 05E02 | ATCC | 29070T |
| Staphylococcus lentus | 05E03 | none | none |
| Staphylococcus lentus | 05E04 | none | none |
| Staphylococcus lugdunensis | 05E05 | ATCC | 43809T |
| Staphylococcus lugdunensis | 05E06 | none | none |
| Staphylococcus lugdunensis | 05E07 | none | none |
| Staphylococcus pasteuri | 05E08 | ATCC | 51129T |
| Staphylococcus pasteuri | 05E09 | CCUG | 32422 |
| Staphylococcus pasteuri | 05E10 | CCUG | 32421 |
| Staphylococcus pulvereri | 05E11 | ATCC | 51698T |
| Staphylococcus pulvereri | 05E12 | CCUG | 33939 |
| Staphylococcus saccharolyticus | 05F01 | NCDO | 1260 |
| Staphylococcus saccharolyticus | 05F02 | none | none |
| Staphylococcus saccharolyticus | 05F03 | none | none |
| Staphylococcus saprophyticus ssp. bovis | 05F04 | CCM | 4410T |
| Staphylococcus saprophyticus ssp. bovis | 05F05 | CIP | 105264 |
| Staphylococcus saprophyticus ssp. bovis | 05F06 | none | none |
| Staphylococcus saprophyticus ssp. saprophyticus | 05F07 | ATCC | 15305T |
| Staphylococcus saprophyticus ssp. saprophyticus | 05F08 | none | none |
| Staphylococcus saprophyticus ssp. saprophyticus | 05F09 | none | none |
| Staphylococcus schleiferi ssp. coagulans | 05F10 | CCUG | 37248T |
| Staphylococcus schleiferi ssp. schleiferi | 05F11 | ATCC | 43808T |
| Staphylococcus schleiferi ssp. schleiferi | 05F12 | none | none |
| Staphylococcus schleiferi ssp. schleiferi | 05G01 | none | none |
| Staphylococcus sciuri ssp. sciuri | 05G02 | ATCC | 29062T |
| Staphylococcus sciuri ssp. sciuri | 05G03 | ATCC | 29061 |
| Staphylococcus sciuri ssp. sciuri | 05G04 | none | none |
| Staphylococcus simulans | 05G05 | ATCC | 27848T |
| Staphylococcus simulans | 05G06 | none | none |
| Staphylococcus simulans | 05G07 | none | none |
| Staphylococcus vitulinus | 05G08 | none | none |
| Staphylococcus vitulinus | 05G09 | ATCC | 51145T |
| Staphylococcus warneri | 05G10 | ATCC | 27836T |
| Staphylococcus warneri | 05G11 | none | none |
| Staphylococcus warneri | 05G12 | none | none |
| Staphylococcus xylosus | 05H01 | ATCC | 29971T |
| Staphylococcus xylosus | 05H02 | none | none |
| Staphylococcus xylosus | 05H03 | none | none |
| Staphylococcus capitis | 05H04 | none | none |
| Staphylococcus pulvereri | 05H05 | CCUG | 33940 |
| Staphylococcus caprae | 05H06 | none | none |
| Staphylococcus spp. | 05H07 | none | none |
| Staphylococcus spp. | 05H08 | none | none |
| Staphylococcus spp. | 05H09 | none | none |
| Streptococcus mitis | 05H10 | none | none |
| Streptococcus oralis | 05H11 | none | none |
| Staphylococcus spp. | 05H12 | none | none |
| Bacteroides eggerthii | 06A01 | none | none |
| Bacteroides thetaiotaomicron | 06A02 | none | none |
| Clostridium histolyticum | 06A03 | ATCC | 19401T |
| Clostridium botulinum | 06A04 | none | none |
| Clostridium butyricum | 06A05 | ATCC | 19398T |
| Clostridium septicum | 06A06 | ATCC | 12464T |
| Clostridium subterminale | 06A07 | ATCC | 25774T |
| Fusobacterium varium | 06A08 | ATCC | 8501T |
| Porphyromonas gingivalis | 06A09 | ATCC | 33277T |
| Prevotella melaninogenica | 06A10 | ATCC | 25845T |
| Prevotella oris | 06A11 | ATCC | 33573T |
| Bacteroides distasonis | 06A12 | ATCC | 8503T |
| Actinomyces odontolyticus | 06B01 | ATCC | 17929T |
| Actinomyces odontolyticus | 06B02 | none | none |
| Bacteroides caccae | 06B03 | none | none |
| Bacteroides caccae | 06B04 | ATCC | 43185T |
| Bacteroides distasonis | 06B05 | none | none |
| Bacteroides eggerthii | 06B06 | ATCC | 27754T |
| Bacteroides fragilis | 06B07 | none | none |
| Bacteroides merdae | 06B08 | none | none |
| Bacteroides ovatus | 06B09 | none | none |
| Bacteroides ovatus | 06B10 | ATCC | 8483T |
| Bacteroides stercoris | 06B11 | none | none |
| Actinomyces bovis | 06B12 | none | none |
| Actinomyces meyeri | 06C01 | none | none |
| Actinomyces naeslundii | 06C02 | none | none |
| Actinomyces viscosus | 06C03 | ATCC | 15987T |
| Actinomyces viscosus | 06C04 | none | none |
| Bacteroides stercoris | 06C07 | ATCC | 43183T |
| Bacteroides thetaiotaomicron | 06C08 | none | none |
| Bacteroides uniformis | 06C09 | none | none |
| Bacteroides uniformis | 06C10 | ATCC | 8492T |
| Bacteroides ureolyticus | 06C11 | ATCC | 33387T |
| Bacteroides vulgatus | 06C12 | none | none |
| Bacteroides vulgatus | 06D01 | ATCC | 8482T |
| Arcanobacterium pyogenes | 06D10 | ATCC | 19411T |
| Arcanobacterium pyogenes | 06D11 | none | none |
| Clostridium barati | 06D12 | ATCC | 27638T |
| Clostridium botulinum | 06E01 | none | none |
| Clostridium glycolicum | 06E02 | none | none |
| Clostridium histolyticum | 06E03 | none | none |
| Clostridium innocuum | 06E04 | ATCC | 14501T |
| Clostridium perfringens | 06E05 | none | none |
| Clostridium paraputrificum | 06E06 | none | none |
| Clostridium ramosum | 06E07 | none | none |
| Clostridium tertium | 06E09 | none | none |
| Clostridium tetani | 06E10 | ATCC | 19406T |
| Clostridium tetani | 06E11 | none | none |
| Collinsella aerofaciens | 06E12 | ATCC | 25986T |
| Collinsella aerofaciens | 06F01 | none | none |
| Eggerthella lenta | 06F02 | none | none |
| Eggerthella lenta | 06F03 | ATCC | 25559T |
| Eubacterium limosum | 06F04 | ATCC | 8486T |
| Lactobacillus acidophilus | 06F05 | ATCC | 4356T |
| Lactobacillus casei | 06F07 | ATCC | 393T |
| Bacteroides capillosus | 06F08 | none | none |
| Bacteroides capillosus | 06F09 | ATCC | 29799T |
| Fusobacterium mortiferum | 06F10 | none | none |
| Fusobacterium necrophorum | 06F11 | none | none |
| Fusobacterium nucleatum ssp nucleatum | 06F12 | none | none |
| Fusobacterium varium | 06G01 | none | none |
| Leptotrichia buccalis | 06G02 | none | none |
| Porphyromonas gingivalis | 06G04 | none | none |
| Porphyromonas levii | 06G05 | ATCC | 29147T |
| Porphyromonas maccae | 06G06 | ATCC | 33141T |
| Clostridium hastiforme | 06G07 | ATCC | 33268T |
| Clostridium innocuum | 06G08 | none | none |
| Clostridium septicum | 06G09 | none | none |
| Clostridium sporogenes | 06G10 | none | none |
| Clostridium sporogenes | 06G11 | ATCC | 3584T |
| Clostridium subterminale | 06G12 | none | none |
| Clostridium difficile | 06H01 | none | none |
| Clostridium difficile | 06H02 | ATCC | 9689T |
| Capnocytophaga gingivalis | 06H03 | none | none |
| Capnocytophaga gingivalis | 06H04 | ATCC | 33624T |
| Capnocytophaga ochracea | 06H05 | none | none |
| Capnocytophaga spp. | 06H06 | none | none |
| Eubacterium limosum | 06H07 | none | none |
| Peptoniphilus asaccharolyticus | 06H08 | none | none |
| Peptoniphilus asaccharolyticus | 06H09 | ATCC | 14963T |
| Peptostreptococcus anaerobius | 06H10 | none | none |
| Peptostreptococcus anaerobius | 06H11 | ATCC | 27337T |
| Peptoniphilus indolicus | 06H12 | none | none |
| Peptoniphilus indolicus | 07A01 | ATCC | 29427T |
| Finegoldia magna | 07A02 | none | none |
| Micromonas micros | 07A03 | ATCC | 33270T |
| Micromonas micros | 07A04 | none | none |
| Anaerococcus prevotii | 07A05 | none | none |
| Anaerococcus prevotii | 07A06 | ATCC | 9321T |
| Anaerococcus tetradius | 07A07 | none | none |
| Anaerococcus tetradius | 07A08 | ATCC | 35098T |
| Propionibacterium acnes | 07A09 | none | none |
| Propionibacterium granulosum | 07B01 | ATCC | 25564T |
| Propionibacterium propionicus | 07B03 | none | none |
| Rhodococcus equi | 07B04 | none | none |
| Porphyromonas asaccharolytica | 07B06 | none | none |
| Leptotrichia buccalis | 07B07 | ATCC | 14201T |
| Prevotella buccae | 07B09 | ATCC | 33574T |
| Prevotella corporis | 07B10 | none | none |
| Prevotella corporis | 07B11 | ATCC | 33547T |
| Prevotella denticola | 07B12 | none | none |
| Prevotella disiens | 07C03 | ATCC | 29426T |
| Clostridium clostridiiforme | 07C05 | none | none |
| Propionibacterium propionicus | 07C06 | ATCC | 14157T |
| Bacteroides ureolyticus | 07C08 | none | none |
| Prevotella oralis | 07C10 | none | none |
| Prevotella oris | 07C11 | none | none |
| Clostridium cadaveris | 07C12 | none | none |
| Clostridium butyricum | 07D01 | none | none |
| Clostridium sordellii | 07D02 | none | none |
| Fusobacterium necrogenes | 07D03 | none | none |
| Porphyromonas endodontalis | 07D04 | ATCC | 35406T |
| Prevotella intermedia | 07D05 | ATCC | 25611T |
| Prevotella oralis | 07D08 | ATCC | 33269T |
| Veillonella parvula | 07D09 | none | none |
| Veillonella parvula | 07D10 | ATCC | 10790T |
| Veillonella spp | 07D11 | none | none |
| Prevotella bivia | 07D12 | none | none |
| Cardiobacteriurn hominis | 07E01 | none | none |
| Haemophilus actinomycetemcomicans | 07E02 | none | none |
| Haemophilus aegyptius | 07E03 | none | none |
| Haemophilus aegyptius | 07E04 | ATCC | 11116T |
| Haemophilus aphrophilus | 07E05 | none | none |
| Haemophilus aphrophilus | 07E06 | ATCC | 33389T |
| Haemophilus ducreyi | 07E07 | none | none |
| Haemophilus haemolyticus | 07E08 | none | none |
| Haemophilus influenzae | 07E09 | none | none |
| Haemophilus influenzae | 07E10 | none | none |
| Haemophilus influenzae | 07E11 | none | none |
| Haemophilus paraphrophilus | 07E12 | none | none |
| Haemophilus paraphrophilus | 07F01 | none | none |
| Haemophilus parainfluenzae | 07F02 | none | none |
| Haemophilus parainfluenzae | 07F03 | none | none |
| Haemophilus segnis | 07F04 | none | none |
| Haemophilus segnis | 07F05 | ATCC | 33393T |
| Kingella denitrificans | 07F06 | none | none |
| Kingella denitrificans | 07F07 | none | none |
| Kingella kingae | 07F08 | none | none |
| Moraxella (Branhamella) catarrhalis | 07F09 | none | none |
| Moraxella (Branhamella) catarrhalis | 07F10 | none | none |
| Neisseria cinerea | 07F11 | ATCC | 14685T |
| Neisseria cinerea | 07F12 | none | none |
| Neisseria elongata | 07G01 | none | none |
| Neisseria flavescens | 07G02 | ATCC | 13120T |
| Neisseria flavescens | 07G03 | none | none |
| Neisseria gonorrhoeae | 07G04 | none | none |
| Neisseria gonorrhoeae | 07G05 | ATCC | 19424T |
| Neisseria lactamica | 07G06 | ATCC | 23970T |
| Neisseria lactamica | 07G07 | none | none |
| Neisseria meningitidis | 07G08 | none | none |
| Neisseria meningitidis | 07G09 | none | none |
| Neisseria mucosa | 07G10 | none | none |
| Neisseria mucosa | 07G11 | ATCC | 19696T |
| Neisseria subflava | 07G12 | none | none |
| Neisseria sicca | 07H01 | none | none |
| Neisseria weaveri | 07H02 | none | none |
| Suttonella indologenes | 07H03 | none | none |
| Cardiobacterium hominis | 07H04 | ATCC | 15826T |
| Suttonella indologenes | 07H05 | ATCC | 25869T |
| Cellulosimicrobium cellulans | 07H06 | ATCC | 12830T |
| Corynebacterium amycolatum | 07H09 | ATCC | 49368T |
| Corynebacterium amycolatum | 07H10 | none | none |
| Achromobacter piechaudii | 08A01 | LMG | 6002 |
| Rhizobium radiobacter | 08A02 | none | none |
| Proteus penneri | 08A03 | ATCC | 33519T |
| Enterobacter hormaechei | 08A04 | ATCC | 49162T |
| Escherichia vulneris | 08A05 | ATCC | 33821T |
| Klebsiella pneumoniae | 08A06 | none | none |
| Kluyvera cryocrescens | 08A07 | ATCC | 14239 |
| Moraxella atlantae | 08A08 | ATCC | 29525T |
| Morganella morganii ssp. sibonii | 08A09 | ATCC | 49948T |
| Enterococcus gallinarum | 08A10 | ATCC | 49573T |
| Oligella ureolytica | 08A11 | ATCC | 43534T |
| Providencia rettgeri | 08A12 | CDC | 2163 |
| Acinetobacter genospecies 3 | 08B01 | ATCC | 17922 |
| CDC group EF-4B | 08B02 | none | none |
| Proteus penneri | 08B03 | none | none |
| Enterobacter hormaechei | 08B04 | none | none |
| Escherichia vulneris | 08B05 | CCUG | 23001 |
| Klebsiella pneumoniae | 08B06 | ATCC | 13884T |
| Leclercia adecarboxylata | 08B07 | none | none |
| Moraxella atlantae | 08B08 | none | none |
| Morganella morganii ssp. sibonii | 08B09 | none | none |
| Enterococcus gallinarum | 08B10 | none | none |
| Oligella ureolytica | 08B11 | ATCC | 35578 |
| Pasteurella multocida ssp. multocida | 08B12 | none | none |
| Acinetobacter genospecies 3 | 08C01 | ATCC | 19004 |
| CDC group EF-4B | 08C02 | none | none |
| Enterobacter sakazakii | 08C04 | ATCC | 29544T |
| Ewingella americana | 08C05 | ATCC | 33852T |
| Klebsiella pneumoniae | 08C06 | none | none |
| Mannheimia haemolytica | 08C07 | ATCC | 33396T |
| Moraxella bovis | 08C08 | ATCC | 10900T |
| Enterococcus avium | 08C09 | ATCC | 49602 |
| Enterococcus raffinosus | 08C10 | ATCC | 49427T |
| Oligella urethralis | 08C11 | ATCC | 17960T |
| Pasteurella multocida ssp. gallicida | 08C12 | ATCC | 51689T |
| Acinetobacter radioresistens | 08D01 | none | none |
| CDC group EO-2 | 08D02 | none | none |
| Enterobacter sakazakii | 08D04 | ATCC | 51329 |
| Ewingella americana | 08D05 | CDC | 4048-83 |
| Raoultella terrigena | 08D06 | ATCC | 33257T |
| Mannheimia haemolytica | 08D07 | none | none |
| Moraxella bovis | 08D08 | ATCC | 17947 |
| Enterococcus casseliflavus | 08D09 | ATCC | 25788T |
| Enterococcus raffinosus | 08D10 | CDC | 2226 |
| Oligella urethralis | 08D11 | CCUG | 994 |
| Pasteurella trehalosi | 08D12 | ATCC | 29703T |
| Acinetobacter radioresistens | 08E01 | none | none |
| CDC group EO-2 | 08E02 | none | none |
| Comamonas terrigena | 08E03 | CCUG | 15848 |
| Escherichia fergusonii | 08E04 | ATCC | 35469T |
| Hafnia alvei | 08E05 | ATCC | 13337T |
| Raoultella terrigena | 08E06 | none | none |
| Moellerella wisconsensis | 08E07 | ATCC | 35017T |
| Moraxella lacunata | 08E08 | ATCC | 17967T |
| Enterococcus casseliflavus | 08E09 | none | none |
| Enterococcus saccharolyticus | 08E10 | ATCC | 43076T |
| Pantoea dispersa | 08E11 | ATCC | 14589T |
| Photobacterium damselae | 08E12 | ATCC | 33539T |
| Aeromonas salmonicida ssp salmonicida | 08F01 | ATCC | 33658T |
| CDC group VB-3 | 08F02 | none | none |
| Comamonas terrigena | 08F03 | CCUG | 15850 |
| Escherichia fergusonii | 08F04 | none | none |
| Hafnia alvei | 08F05 | none | none |
| Kluyvera ascorbata | 08F06 | ATCC | 33433T |
| Moellerella wisconsensis | 08F07 | ATCC | 35621 |
| Moraxella lacunata | 08F08 | none | none |
| Enterococcus cecorum | 08F09 | ATCC | 43198T |
| Enterococcus saccharolyticus | 08F10 | NCDO | 2614 |
| Pantoea dispersa | 08F11 | LMG | 2770 |
| Photobacterium damselae | 08F12 | CIP | 100540 |
| Aeromonas salmonicida ssp. salmonicida | 08G01 | none | none |
| CDC group VB-3 | 08G02 | none | none |
| Enterobacter cancerogenus | 08G03 | ATCC | 35317 |
| Escherichia hermannii | 08G04 | ATCC | 33650T |
| Raoultella ornithinolytica | 08G05 | ATCC | 31898T |
| Kluyvera ascorbata | 08G06 | none | none |
| Moraxella (Branhamella) catarrhalis | 08G07 | ATCC | 25238T |
| Moraxella osloensis | 08G08 | none | none |
| Enterococcus cecorum | 08G09 | none | none |
| Staphylococcus hominis ssp. hominis | 08G10 | none | none |
| Pasteurella aerogenes | 08G11 | ATCC | 27883T |
| Plesiomonas shigelloides | 08G12 | ATCC | 14029T |
| Rhizobium radiobacter | 08H01 | ATCC | 23308T |
| CDC group VB-3 | 08H02 | none | none |
| Providencia alcalifaciens | 08H03 | ATCC | 9886T |
| Providencia rettgeri | 08H04 | ATCC | 29944T |
| Raoultella ornithinolytica | 08H05 | none | none |
| Kluyvera cryocrescens | 08H06 | ATCC | 33435T |
| Moraxella (Branhamella) catarrhalis | 08H07 | none | none |
| Morganella morganii ssp. morganii | 08H08 | none | none |
| Enterococcus dispar | 08H09 | CCUG | 33309T |
| Ochrobactrum intermedium | 08H10 | LMG | 3301T |
| Pasteurella aerogenes | 08H11 | none | none |
| Plesiomonas shigelloides | 08H12 | none | none |
| Aeromonas salmonicida ssp. achromogenes | 09A01 | ATCC | 33659T |
| Weeksella virosa | 09A02 | CIP | 81.91 |
| Pasteurella multocida ssp. septica | 09A03 | ATCC | 51687T |
| Pseudomonas luteola | 09A04 | ATCC | 43273T |
| Pseudomonas putida | 09A05 | ATCC | 12633T |
| Ralstonia paucula | 09A06 | none | none |
| Serratia odorifera | 09A07 | none | none |
| Serratia rubidaea | 09A08 | none | none |
| Yersinia pseudotuberculosis | 09A09 | none | none |
| Vibrio alginolyticus | 09A11 | none | none |
| Vibrio metschnikovii | 09A12 | CCUG | 7491 |
| Aeromonas salmonicida ssp. achromogenes | 09B01 | none | none |
| Xanthomonas campestris | 09B02 | ATCC | 33913T |
| Pasteurella pneumotropica | 09B03 | ATCC | 35149T |
| Pseudomonas luteola | 09B04 | none | none |
| Pseudomonas putida | 09B05 | none | none |
| Serratia ficaria | 09B06 | ATCC | 33105T |
| Serratia plymuthica | 09B07 | ATCC | 183T |
| Shewanella algae | 09B08 | ATCC | 51192T |
| Shigella flexneri | 09B09 | ATCC | 29903T |
| Vibrio fluvialis | 09B11 | ATCC | 33809T |
| Vibrio mimicus | 09B12 | ATCC | 33653T |
| Aeromonas salmonicida ssp. masoucida | 09C01 | ATCC | 27013T |
| Xanthomonas campestris | 09C02 | ATCC | 35938 |
| Pasteurella pneumotropica | 09C03 | ATCC | 12555 |
| Pseudomonas mendocina | 09C04 | ATCC | 25411T |
| Psychrobacter phenylpyruvicus | 09C05 | ATCC | 23333T |
| Serratia ficaria | 09C06 | ATCC | 4092-83 |
| Serratia plymuthica | 09C07 | none | none |
| Shewanella algae | 09C08 | none | none |
| Shigella flexneri | 09C09 | none | none |
| Yersinia bercovieri | 09C10 | ATCC | 43970T |
| Vibrio fluvialis | 09C11 | none | none |
| Vibrio mimicus | 09C12 | CCUG | 13176 |
| Aeromonas salmonicida ssp. masoucida | 09D01 | none | none |
| Yersinia aldovae | 09D02 | ATCC | 35236T |
| Pasteurella trehalosi | 09D03 | none | none |
| Pseudomonas mendocina | 09D04 | none | none |
| Rahnella aquatilis | 09D05 | ATCC | 33071T |
| Serratia fonticola | 09D06 | ATCC | 29844T |
| Yersinia bercovieri | 09D07 | CIP | 103327 |
| Shewanella putrefaciens | 09D08 | ATCC | 8071T |
| Shigella sonnei | 09D09 | ATCC | 29930T |
| Sphingomonas paucimobilis | 09D10 | ATCC | 29837T |
| Vibrio harveyi | 09D11 | ATCC | 14126T |
| Vibrio parahaemolyticus | 09D12 | ATCC | 17802T |
| Citrobacter gillenii | 09E01 | ATCC | 51117T |
| Yersinia aldovae | 09E02 | CIP | 104234 |
| Providencia rustigianii | 09E03 | ATCC | 33673T |
| Pseudomonas oryzihabitans | 09E04 | ATCC | 43272T |
| Rahnella aquatilis | 09E05 | ATCC | 33392 |
| Serratia fonticola | 09E06 | ATCC | 29846 |
| Yersinia enterocolitica ssp. enterocolitica | 09E07 | ATCC | 9610T |
| Shewanella putrefaciens | 09E08 | none | none |
| Shigella sonnei | 09E09 | none | none |
| Sphingomonas paucimobilis | 09E10 | none | none |
| Vibrio harveyi | 09E11 | ATCC | 33867 |
| Vibrio parahaemolyticus | 09E12 | none | none |
| Citrobacter gillenii | 09F01 | none | none |
| Myroides odoratimimus | 09F02 | CCUG | 39352T |
| Providencia rustigianii | 09F03 | CIP | A253 |
| Pseudomonas oryzihabitans | 09F04 | CCUG | 9468 |
| Ralstonia gilardii | 09F05 | LMG | 5886T |
| Serratia grimesii | 09F06 | ATCC | 14660T |
| Yersinia enterocolitica ssp. enterocolitica | 09F07 | none | none |
| Shigella boydii | 09F08 | ATCC | 8700T |
| Sphingobacterium multivorum | 09F09 | ATCC | 33613T |
| Tatumella ptyseos | 09F10 | ATCC | 33301T |
| Vibrio hollisae | 09F11 | ATCC | 33564T |
| Vibrio vulnificus | 09F12 | ATCC | 27562T |
| Citrobacter murliniae | 09G01 | ATCC | 51118T |
| Myroides odoratimimus | 09G02 | CCUG | 41717 |
| Pseudomonas alcaligenes | 09G03 | ATCC | 14909T |
| Pseudomonas pseudoalcaligenes | 09G04 | ATCC | 17440T |
| Ralstonia gilardii | 09G05 | LMG | 5888 |
| Serratia grimesii | 09G06 | ATCC | 35478 |
| Yersinia frederiksenii | 09G07 | ATCC | 33641T |
| Shigella boydii | 09G08 | none | none |
| Sphingobacterium multivorum | 09G09 | none | none |
| Tatumella ptyseos | 09G10 | CCUG | 30112 |
| Vibrio hollisae | 09G11 | none | none |
| Vibrio vulnificus | 09G12 | CDC | C7184 |
| Citrobacter murliniae | 09H01 | none | none |
| Psychrobacter phenylpyruvicus | 09H02 | none | none |
| Pseudomonas alcaligenes | 09H03 | none | none |
| Pseudomonas pseudoalcaligenes | 09H04 | none | none |
| Yokenella regensburgei | 09H05 | none | none |
| Serratia odorifera | 09H06 | ATCC | 33077T |
| Serratia rubidaea | 09H07 | ATCC | 27593T |
| Yersinia ruckeri | 09H08 | CUETM | 80-110 |
| Vibrio alginolyticus | 09H10 | ATCC | 17749T |
| Vibrio metschnikovii | 09H11 | ATCC | 700040T |
| Corynebacterium cystitidis | 10A01 | ATCC | 29593T |
| Corynebacterium diphtheriae | 10A02 | ATCC | 27010T |
| Corynebacterium diphtheriae | 10A03 | none | none |
| Corynebacterium jeikeium | 10A05 | ATCC | 43734T |
| Corynebacterium kutscheri | 10A06 | ATCC | 15677T |
| Corynebacterium kutscheri | 10A07 | none | none |
| Corynebacterium macginleyi | 10A08 | none | none |
| Corynebacterium matruchotii | 10A09 | none | none |
| Corynebacterium matruchotii | 10A10 | ATCC | 14266T |
| Corynebacterium pilosum | 10B01 | none | none |
| Corynebacterium pilosum | 10B02 | ATCC | 29592T |
| Corynebacterium propinquum | 10B03 | none | none |
| Corynebacterium pseudodiphtheriticum | 10B04 | ATCC | 10700T |
| Corynebacterium pseudotuberculosis | 10B05 | ATCC | 19410T |
| Corynebacterium pseudotuberculosis | 10B06 | none | none |
| Corynebacterium renale | 10B07 | ATCC | 19412T |
| Corynebacterium renale | 10B08 | none | none |
| Corynebacterium striatum | 10B09 | ATCC | 6940T |
| Corynebacterium striatum | 10B10 | none | none |
| Corynebacterium urealyticum | 10B11 | none | none |
| Corynebacterium urealyticum | 10B12 | ATCC | 43043 |
| Corynebacterium xerosis | 10C01 | none | none |
| Corynebacterium pseudodiphtheriticum | 10C02 | none | none |
| Leifsonia aquatica | 10C03 | none | none |
| Leifsonia aquatica | 10C04 | ATCC | 14665T |
| Corynebacterium ulcerans | 10C05 | none | none |
| Corynebacterium group ANF | 10C06 | none | none |
| Corynebacterium cystitidis | 10C07 | none | none |
| Corynebacterium group F1 | 10C08 | none | none |
| Rothia dentocariosa | 10C09 | none | none |
| Clostridium bifermentans | 10C10 | none | none |
| Clostridium sordellii | 10C11 | ATCC | 9714T |
| Clostridium limosum | 10C12 | none | none |
| Lactococcus lactis ssp cremoris | 10D01 | ATCC | 19257T |
| Leuconostoc mesenteroides ssp mesenteroides | 10D02 | ATCC | 8293T |
| Neisseria polysaccharea | 10D03 | none | none |
| Haemophilus parahaemolyticus | 10D04 | none | none |
| Haemophilus parahaemolyticus | 10D05 | ATCC | 10014T |
| Eikenella corrodens | 10D06 | none | none |
| Clostridium barati | 10D08 | none | none |
| Fusobacterium necrogenes | 10D09 | ATCC | 25556T |
| Wolinella succinogenes | 10D10 | none | none |
| Eubacterium moniliforme | 10D11 | ATCC | 25546T |
| Arcanobacterium haemolyticum | 10D12 | none | none |
| Actinomyces naeslundii | 10E01 | ATCC | 12104T |
| Arcanobacterium haemolyticum | 10E02 | ATCC | 9345T |
| Leuconostoc lactis | 10E03 | ATCC | 19256T |
| Streptococcus gallolyticus | 10E04 | ATCC | 9809 |
| Streptococcus uberis | 10E05 | ATCC | 19436T |
| Streptococcus uberis | 10E06 | none | none |
| Aerococcus viridans | 10E07 | none | none |
| Streptococcus uberis | 10E08 | none | none |
| Aerococcus viridans | 10E09 | ATCC | 11563T |
| Streptococcus equi ssp. zooepidemicus | 10F01 | none | none |
| Macrococcus caseolyticus | 10F02 | ATCC | 29750 |
| Streptococcus pyogenes | 10F03 | ATCC | 19615 |
| Streptococcus pyogenes | 10F04 | ATCC | 12344T |
| Kocuria kristinae | 10F05 | none | none |
| Lactococcus lactis ssp. lactis | 10F06 | ATCC | 19435T |
| Streptococcus vestibularis | 10F07 | none | none |
| Streptococcus salivarius | 10F08 | ATCC | 9758 |
| Streptococcus mitis | 10F09 | none | none |
| Brevibacterium linens | 10F11 | ATCC | 9174 |
| Brevibacterium epidermidis | 10G01 | ATCC | 35514T |
| Streptococcus equi ssp zooepidemicus | 10G02 | ATCC | 43079T |
| Gemella morbillorum | 10G03 | none | none |
| Streptococcus acidominimus | 10G04 | none | none |
| Rhodococcus equi | 10G05 | ATCC | 6939T |
| Streptococcus agalactiae | 10G06 | none | none |
| Aerococcus urinae | 10G07 | none | none |
| Streptococcus gordonii | 10G08 | none | none |
| Lactococcus lactis ssp. lactis | 10G09 | none | none |
| Leuconostoc lactis | 10G10 | none | none |
| Dermabacter hominis | 10G11 | none | none |
| Streptococcus constellatus ssp. constellatus | 10G12 | none | none |
| Staphylococcus saccharolyticus | 10H01 | ATCC | 14953T |
| Streptococcus mutans | 10H02 | none | none |
| Streptococcus anginosus | 10H03 | none | none |
| Streptococcus oralis | 10H04 | none | none |
| Streptococcus intermedius | 10H05 | ATCC | 27335T |
| Streptococcus intermedius | 10H07 | none | none |
| Pseudoramibacter alactolyticus | 10H08 | ATCC | 23263T |
| Fusobacterium mortiferum | 10H09 | none | none |
| Clostridium innocuum | 10H10 | none | none |
| Clostridium botulinum | 10H11 | ATCC | 25763T |
| Streptococcus mutans | 10H12 | ATCC | 25175T |
| Aerococcus urinae | 11A01 | ATCC | 51268T |
| Dolosigranulum pigrum | 11A02 | CCUG | 31310 |
| Yersinia mollaretii | 11A03 | CIP | 103328 |
| Facklamia hominis | 11A04 | none | none |
| Streptococcus thoraltensis | 11A05 | LMG | 14714 |
| Helcococcus ovis | 11A06 | CCUG | 37441T |
| Lactococcus lactis ssp. cremoris | 11A07 | ATCC | 9596 |
| Listeria ivanovii ssp. ivanovii | 11A08 | none | none |
| Listeria welshimeri | 11A09 | none | none |
| Streptococcus anginosus | 11A10 | ATCC | 33397T |
| Streptococcus gallolyticus | 11A12 | ACM | 3611T |
| Aerococcus christensenii | 11B01 | CCUG | 28831T |
| Eremococcus coleocola | 11B02 | CCUG | 38207T |
| Yersinia pseudotuberculosis | 11B03 | ATCC | 29833T |
| Facklamia ignava | 11B04 | ATCC | 700631T |
| Methylobacterium extorquens | 11B05 | ATCC | 14718 |
| Helcococcus ovis | 11B06 | CCUG | 39041 |
| Lactococcus raffinolactis | 11B07 | ATCC | 43920T |
| Listeria ivanovii ssp londoniensis | 11B08 | ATCC | 49954T |
| Macrococcus caseolyticus | 11B09 | ATCC | 13548T |
| Streptococcus canis | 11B10 | ATCC | 43496T |
| Streptococcus downei | 11B11 | none | none |
| Streptococcus gordonii | 11B12 | ATCC | 10558T |
| Aerococcus christensenii | 11C01 | none | none |
| Yersinia frederiksenii | 11C02 | none | none |
| Yersinia ruckeri | 11C03 | ATCC | 29473T |
| Facklamia languida | 11C04 | CCUG | 37842T |
| Gemella sanguinis | 11C05 | ATCC | 700632T |
| Ignavigranum ruoffiae | 11C06 | ATCC | 700630T |
| Lactococcus raffinolactis | 11C07 | LMG | 14169 |
| Listeria ivanovii ssp. londoniensis | 11C08 | none | none |
| Streptococcus canis | 11C10 | none | none |
| Methylobacterium mesophilicum | 11C11 | ATCC | 29983T |
| Streptococcus hyointestinalis | 11C12 | ATCC | 49169T |
| Dermacoccus nishinomiyaensis | 11D01 | ATCC | 29093T |
| Yersinia intermedia | 11D02 | ATCC | 29909T |
| Yokenella regensburgei | 11D03 | ATCC | 35313T |
| Facklamia languida | 11D04 | none | none |
| Gemella sanguinis | 11D05 | CCUG | 37821 |
| Ignavigranum ruoffiae | 11D06 | NCIMB | 700637 |
| Listeria grayi | 11D07 | ATCC | 19120T |
| Listeria monocytogenes | 11D08 | ATCC | 15313T |
| Streptococcus constellatus ssp. constellatus | 11D10 | ATCC | 27823T |
| Streptococcus vestibularis | 11D11 | ATCC | 49124T |
| Streptococcus hyointestinalis | 11D12 | none | none |
| Methylobacterium mesophilicum | 11E01 | none | none |
| Yersinia intermedia | 11E02 | none | none |
| Eremococcus coleocola | 11E03 | CCUG | 39488 |
| Facklamia sourekii | 11E04 | ATCC | 700629T |
| Globicatella sanguinis | 11E05 | ATCC | 51173T |
| Kytococcus sedentarius | 11E06 | ATCC | 14392T |
| Listeria grayi | 11E07 | none | none |
| Listeria monocytogenes | 11E08 | ATCC | 19115 |
| Methylobacterium extorquens | 11E09 | ATCC | 43645T |
| Streptococcus criceti | 11E10 | ATCC | 19642T |
| Streptococcus dysgalactiae ssp. equisimilis | 11E11 | NCFB | 1356T |
| Streptococcus hyovaginalis | 11E12 | ATCC | 700866T |
| Dolosicoccus paucivorans | 11F01 | CCUG | 39307T |
| Yersinia kristensenii | 11F02 | ATCC | 33638T |
| Erysipelothrix rhusiopathiae | 11F03 | ATCC | 19414T |
| Gemella bergeri | 11F04 | ATCC | 700627T |
| Globicatella sanguinis | 11F05 | CCUG | 33000 |
| Kytococcus sedentarius | 11F06 | ATCC | 27573 |
| Listeria innocua | 11F07 | ATCC | 33090T |
| Listeria seeligeri | 11F08 | ATCC | 35967T |
| Streptococcus acidominimus | 11F09 | ATCC | 51725T |
| Streptococcus criceti | 11F10 | LMG | 14511 |
| Streptococcus equi ssp. equi | 11F11 | ATCC | 33398T |
| Streptococcus hyovaginalis | 11F12 | LMG | 14843 |
| Dolosicoccus paucivorans | 11G01 | CCUG | 41592 |
| Yersinia kristensenii | 11G02 | none | none |
| Erysipelothrix rhusiopathiae | 11G03 | none | none |
| Gemella bergeri | 11G04 | CCUG | 37818 |
| Helcococcus kunzii | 11G05 | ATCC | 51366T |
| Lactococcus garvieae | 11G06 | ATCC | 43921T |
| Listeria innocua | 11G07 | none | none |
| Listeria seeligeri | 11G08 | none | none |
| Streptococcus alactolyticus | 11G09 | ATCC | 43077T |
| Streptococcus cristatus | 11G10 | DSM | 8249T |
| Streptococcus equi ssp. equi | 11G11 | CCUG | 22971 |
| Streptococcus infantarius ssp. infantarius | 11G12 | ATCC | BAA-102 |
| Dolosigranulum pigrum | 11H01 | ATCC | 51524T |
| Yersinia mollaretii | 11H02 | ATCC | 43969T |
| Facklamia hominis | 11H03 | ATCC | 700628T |
| Gemella haemolysans | 11H04 | ATCC | 10379T |
| Helcococcus kunzii | 11H05 | CCUG | 31742 |
| Lactococcus garvieae | 11H06 | LMG | 9472 |
| Listeria ivanovii ssp. ivanovii | 11H07 | ATCC | 19119T |
| Listeria welshimeri | 11H08 | ATCC | 35897T |
| Streptococcus alactolyticus | 11H09 | NCDO | 2603 |
| Streptococcus cristatus | 11H10 | CCUG | 43158 |
| Streptococcus ferus | 11H11 | ATCC | 33477 |
| Streptococcus infantis | 11H12 | DSM | 12462T |
| Streptococcus infantis | 12A01 | CCUG | 39818 |
| Streptococcus peroris | 12A02 | DSM | 12493T |
| Streptococcus sanguinis | 12A03 | none | none |
| Aneurinibacillus aneurinilyticus | 12A04 | LMG | 17164 |
| Bacillus atrophaeus | 12A05 | none | none |
| Bacillus circulans | 12A06 | none | none |
| Bacillus halodurans | 12A07 | ATCC | 27557T |
| Brevibacillus agri | 12A08 | none | none |
| Brevibacillus borstelensis | 12A09 | LMG | 16103 |
| Bacillus sphaericus | 12A10 | ATCC | 14577T |
| Paenibacillus azotofixans | 12A11 | ATCC | 35681T |
| Brevibacillus formosus | 12A12 | ATCC | 51669T |
| Streptococcus iniae | 12B01 | none | none |
| Streptococcus peroris | 12B02 | CCUG | 39815 |
| Streptococcus sobrinus | 12B03 | ATCC | 33478T |
| Aneurinibacillus migulanus | 12B04 | ATCC | 9999T |
| Geobacillus stearothermophilus | 12B05 | ATCC | 7953 |
| Bacillus coagulans | 12B06 | ATCC | 7050T |
| Brevibacillus agri | 12B07 | ATCC | 51663T |
| Bacillus megaterium | 12B08 | ATCC | 14581T |
| Brevibacillus centrosporus | 12B09 | ATCC | 51661T |
| Bacillus sphaericus | 12B10 | ATCC | 10208 |
| Paenibacillus glucanolyticus | 12B11 | DSM | 5162T |
| Brevibacillus formosus | 12B12 | LMG | 16101 |
| Paenibacillus macerans | 12C01 | ATCC | 8244T |
| Streptococcus pneumoniae | 12C02 | none | none |
| Streptococcus sobrinus | 12C03 | CCUG | 27644 |
| Aneurinibacillus migulanus | 12C04 | LMG | 16098 |
| Bacillus azotoformans | 12C05 | LMG | 15444 |
| Bacillus coagulans | 12C06 | none | none |
| Bacillus laevolacticus | 12C07 | ATCC | 23492T |
| Bacillus megaterium | 12C08 | ATCC | 11562 |
| Bacillus pumilus | 12C09 | ATCC | 7061T |
| Geobacillus stearothermophilus | 12C10 | ATCC | 12980T |
| Paenibacillus pabuli | 12C11 | LMG | 14016 |
| Brevibacillus laterosporus | 12C12 | ATCC | 64T |
| Streptococcus macacae | 12D01 | none | none |
| Streptococcus porcinus | 12D02 | ATCC | 43138T |
| Paenibacillus polymyxa | 12D03 | ATCC | 842T |
| Bacillus alcalophilus | 12D04 | ATCC | 27647T |
| Bacillus badius | 12D05 | ATCC | 14574T |
| Bacillus firmus | 12D06 | ATCC | 14575T |
| Paenibacillus alvei | 12D07 | ATCC | 6344T |
| Bacillus mycoides | 12D08 | ATCC | 6462T |
| Bacillus pumilus | 12D09 | none | none |
| Paenibacillus thiaminolyticus | 12D10 | LMG | 16908 |
| Brevibacillus brevis | 12D11 | ATCC | 8246T |
| Brevibacillus laterosporus | 12D12 | ATCC | 6457 |
| Streptococcus mitis | 12E01 | ATCC | 49456T |
| Streptococcus porcinus | 12E02 | none | none |
| Streptococcus thermophilus | 12E03 | none | none |
| Bacillus alcalophilus | 12E04 | none | none |
| Bacillus badius | 12E05 | none | none |
| Bacillus firmus | 12E06 | ATCC | 8247 |
| Bacillus lentus | 12E07 | ATCC | 10840T |
| Bacillus mycoides | 12E08 | ATCC | 21929 |
| Brevibacillus centrosporus | 12E09 | LMG | 15602 |
| Geobacillus thermoglucosidasius | 12E10 | ATCC | 43742T |
| Brevibacillus brevis | 12E11 | none | none |
| Brevibacillus parabrevis | 12E12 | ATCC | 10027T |
| Streptococcus parasanguinis | 12F01 | ATCC | 15912T |
| Streptococcus ratti | 12F02 | ATCC | 19645T |
| Streptococcus thoraltensis | 12F03 | DSM | 12221T |
| Bacillus amyloliquefaciens | 12F04 | ATCC | 23350T |
| Bacillus cereus | 12F05 | ATCC | 14579T |
| Bacillus flexus | 12F06 | ATCC | 49095T |
| Bacillus lentus | 12F07 | ATCC | 10841 |
| Bacillus niacini | 12F08 | DSM | 2923T |
| Bacillus simplex | 12F09 | ATCC | 49097T |
| Bacillus thuringiensis | 12F10 | ATCC | 10792T |
| Paenibacillus pabuli | 12F11 | ATCC | 43899T |
| Brevibacillus parabrevis | 12F12 | none | none |
| Streptococcus parasanguinis | 12G01 | none | none |
| Streptococcus ratti | 12G02 | none | none |
| Virgibacillus pantothenticus | 12G03 | ATCC | 14576T |
| Bacillus amyloliquefaciens | 12G04 | none | none |
| Bacillus cereus | 12G05 | none | none |
| Bacillus fusiformis | 12G06 | ATCC | 7055T |
| Bacillus licheniformis | 12G07 | ATCC | 14580T |
| Bacillus subtilis | 12G08 | ATCC | 9372 |
| Paenibacillus peoriae | 12G09 | LMG | 16108 |
| Paenibacillus amylolyticus | 12G10 | ATCC | 9995T |
| Brevibacillus choshinensis | 12G11 | ATCC | 51359T |
| Brevibacillus reuszeri | 12G12 | ATCC | 51665T |
| Streptococcus parauberis | 12H01 | DSM | 6631T |
| Streptococcus salivarius | 12H02 | ATCC | 7073T |
| Aneurinibacillus aneurinilyticus | 12H03 | ATCC | 12856T |
| Bacillus atrophaeus | 12H04 | ATCC | 49337T |
| Bacillus circulans | 12H05 | ATCC | 4513T |
| Bacillus fusiformis | 12H06 | LMG | 17347 |
| Bacillus licheniformis | 12H07 | none | none |
| Brevibacillus borstelensis | 12H08 | ATCC | 51668T |
| Paenibacillus polymyxa | 12H09 | ATCC | 21551 |
| Paenibacillus apiarius | 12H10 | ATCC | 29575T |
| Brevibacillus choshinensis | 12H11 | LMG | 106096 |
| Brevibacillus reuszeri | 12H12 | LMG | 16105 |
| Streptococcus macacae | 13A01 | ATCC | 35911T |
| Abiotrophia defectiva | 13A02 | ATCC | 49176T |
| Staphylococcus delphini | 13A03 | ATCC | 49171T |
| Staphylococcus piscifermentans | 13A04 | ATCC | 51136T |
| Gemella morbillorum | 13A06 | ATCC | 27824T |
| Bacillus smithii | 13A07 | DSM | 4216T |
| Leuconostoc gelidum | 13A08 | ATCC | 49366T |
| Neisseria elongata | 13A09 | ATCC | 25295T |
| Paenibacillus validus | 13A10 | ATCC | 43897T |
| Pediococcus pentosaceus | 13A11 | LMG | 10478 |
| Salmonella paratyphi B | 13A12 | none | none |
| Paenibacillus alvei | 13B01 | ATCC | 10871 |
| Paenibacillus macerans | 13B02 | none | none |
| Staphylococcus delphini | 13B03 | ATCC | 49172 |
| Staphylococcus piscifermentans | 13B04 | ATCC | 51137 |
| Corynebacterium group ANF | 13B05 | none | none |
| Kocuria rosea | 13B07 | ATCC | 186T |
| Leuconostoc mesenteroides ssp. cremoris | 13B08 | ATCC | 19254T |
| Neisseria sicca | 13B09 | ATCC | 29256T |
| Paenibacillus validus | 13B10 | LMG | 14019 |
| Prevotella bivia | 13B11 | ATCC | 29303T |
| Salmonella paratyphi B | 13B12 | none | none |
| Paenibacillus amylolyticus | 13C01 | none | none |
| Geobacillus thermoglucosidasius | 13C02 | none | none |
| Staphylococcus felis | 13C03 | ATCC | 49168T |
| Staphylococcus piscifermentans | 13C04 | ATCC | 51138 |
| Bacillus azotoformans | 13C05 | ATCC | 29788T |
| Gracilibacillus dipsosauri | 13C06 | ATCC | 700347T |
| Kocuria varians | 13C07 | CCM | 1414 |
| Leuconostoc mesenteroides ssp. cremoris | 13C08 | NCDO | 1388 |
| Neisseria subflava | 13C09 | ATCC | 49275T |
| Pediococcus acidilactici | 13C10 | ATCC | 33314T |
| Salmonella typhimurium | 13C12 | ATCC | 13311T |
| Lactobacillus acidophilus | 13D07 | none | none |
| Leuconostoc mesenteroides ssp. dextranicum | 13D08 | ATCC | 19255T |
| Campylobacter fetus ssp. fetus | 13D09 | ATCC | 27374T |
| Pediococcus acidilactici | 13D10 | LMG | 10632 |
| Campylobacter lari | 13D11 | none | none |
| Clostridium hastiforme | 13D12 | none | none |
| Alloiococcus otitis | 13E01 | ATCC | 51267T |
| Staphylococcus aureus ssp. anaerobius | 13E02 | ATCC | 35844T |
| Staphylococcus lutrae | 13E03 | ATCC | 700374 |
| Staphylococcus schleiferi ssp. coagulans | 13E04 | CIP | 104366 |
| Corynebacterium propinquum | 13E05 | ATCC | 51488T |
| Granulicatella adiacens | 13E06 | CCUG | 35135 |
| Bacillus smithii | 13E07 | LMG | 6327 |
| Leuconostoc mesenteroides ssp. dextranicum | 13E08 | none | none |
| Paenibacillus apiarius | 13E09 | LMG | 17434 |
| Clostridium glycolicum | 13E11 | ATCC | 14880T |
| Corynebacterium accolens | 13E12 | CDC | F3883 |
| Paenibacillus lautus | 13F01 | ATCC | 43898T |
| Staphylococcus carnosus ssp. utilis | 13F02 | DSM | 11676T |
| Staphylococcus muscae | 13F03 | ATCC | 49910T |
| Staphylococcus sciuri ssp. rodentium | 13F04 | ATCC | 700061T |
| Corynebacterium seminale | 13F05 | none | none |
| Granulicatella elegans | 13F06 | DSM | 11693T |
| Streptococcus parauberis | 13F07 | DSM | 6631 |
| Leuconostoc mesenteroides ssp. mesenteroides | 13F08 | CCUG | 39992 |
| Paenibacillus glucanolyticus | 13F09 | none | none |
| Pediococcus dextrinicus | 13F10 | ATCC | 33087T |
| Salmonella choleraesuis | 13F11 | ATCC | 13312T |
| Paenibacillus azotofixans | 13G01 | none | none |
| Staphylococcus carnosus ssp. utilis | 13G02 | DSM | 11677 |
| Staphylococcus muscae | 13G03 | ATCC | 49912 |
| Staphylococcus sciuri ssp. rodentium | 13G04 | ATCC | 700063 |
| Dermacoccus nishinomiyaensis | 13G05 | CCUG | 33029 |
| Granulicatella elegans | 13G06 | CCUG | 27554 |
| Leuconostoc citreum | 13G07 | DSM | 5577T |
| Leuconostoc pseudomesenteroides | 13G08 | DSM | 20193T |
| Paenibacillus lautus | 13G09 | none | none |
| Pediococcus inopinatus | 13G10 | ATCC | 49902T |
| Salmonella paratyphi A | 13G11 | none | none |
| Streptococcus infantarius ssp. coli | 13G12 | none | none |
| Leuconostoc citreum | 13H07 | LMG | 9824 |
| Leuconostoc pseudomesenteroides | 13H08 | CCUG | 27119 |
| Pediococcus pentosaceus | 13H10 | ATCC | 33316T |
| Salmonella paratyphi A | 13H11 | none | none |
| Staphylococcus capitis ssp. capitis | 14A01 | none | none |
| Pseudoramibacter alactolyticus | 14A02 | none | none |
| Staphylococcus cohnii ssp. urealyticum | 14A03 | none | none |
| Streptococcus suis I | 14A04 | none | none |
| Virgibacillus pantothenticus | 14A05 | LMG | 17342 |
| Shigella dysenteriae | 14A06 | none | none |
| Alloiococcus otitis | 14A08 | none | none |
| Staphylococcus saprophyticus ssp. bovis | 14A09 | CIP | 105261 |
| Streptococcus dysgalactiae ssp. dysgalactiae | 14A10 | ATCC | 43078T |
| Streptococcus urinalis | 14A11 | CCUG | 41590T |
| Corynebacterium macginleyi | 14A12 | DSM | 44284T |
| Staphylococcus cohnii ssp. urealyticum | 14B03 | none | none |
| Streptococcus suis I | 14B04 | none | none |
| Weissella paramesenteroides | 14B05 | ATCC | 33313T |
| Bacillus thuringiensis | 14B07 | none | none |
| Corynebacterium group F1 | 14B08 | none | none |
| Staphylococcus saprophyticus ssp. bovis | 14B09 | CIP | 105264 |
| Streptococcus dysgalactiae ssp. dysgalactiae | 14B10 | none | none |
| Clostridium cadaveris | 14B11 | DSM | 1284T |
| Actinomyces neuii ssp. anitratus | 14B12 | CCUG | 43734 |
| Corynebacterium coyleae | 14C01 | none | none |
| Brevibacterium casei | 14C02 | none | none |
| Staphylococcus gallinarum | 14C03 | CCM | 4506 |
| Streptococcus suis II | 14C04 | ATCC | 43765T |
| Weissella paramesenteroides | 14C05 | NCDO | 1567 |
| Paenibacillus peoriae | 14C07 | ATCC | 51925T |
| Gemella haemolysans | 14C08 | none | none |
| Staphylococcus capitis ssp. ureolyticus | 14C09 | none | none |
| Bacillus subtilis | 14C10 | none | none |
| Clostridium ramosum | 14C11 | DSM | 1402T |
| Burkholderia multivorans | 14C12 | CCUG | 43127 |
| Haemophilus haemolyticus | 14D01 | ATCC | 33390T |
| Staphylococcus carnosus ssp. carnosus | 14D02 | none | none |
| Staphylococcus gallinarum | 14D03 | CCUG | 28809 |
| Streptococcus suis II | 14D04 | none | none |
| Brevibacterium epidermidis | 14D05 | none | none |
| Paenibacillus thiaminolyticus | 14D07 | DSM | 7262T |
| Granulicatella adiacens | 14D08 | ATCC | 49175T |
| Staphylococcus capitis ssp ureolyticus | 14D09 | none | none |
| Staphylococcus condimenti | 14D10 | DSM | 11675 |
| Clostridium bifermentans | 14D12 | CCUG | 36626T |
| Leuconostoc argentinum | 14E01 | DSM | 8581T |
| Staphylococcus hominis ssp. novobiosepticus | 14E03 | none | none |
| Streptococcus thermophilus | 14E04 | ATCC | 19258T |
| Cellulosimicrobium cellulans | 14E05 | none | none |
| Staphylococcus condimenti | 14E07 | DSM | 11674T |
| Bacillus psychrosaccharolyticus | 14E08 | ATCC | 23296T |
| Serratia proteamaculans ssp. proteamaculans | 14E09 | ATCC | 19323T |
| Pediococcus dextrinicus | 14E10 | DSM | 20293 |
| Clostridium tertium | 14E11 | DSM | 2485T |
| Corynebacterium auris | 14E12 | CCUG | 33428 |
| Leuconostoc carnosum | 14F01 | ATCC | 49367T |
| Abiotrophia defectiva | 14F02 | CCUG | 27805 |
| Staphylococcus hominis ssp. novobiosepticus | 14F03 | none | none |
| Tetragenococcus halophilus | 14F04 | ATCC | 33315T |
| Salmonella typhi | 14F05 | ATCC | 19430T |
| Staphylococcus lutrae | 14F07 | ATCC | 700373T |
| Serratia proteamaculans ssp. proteamaculans | 14F09 | none | none |
| Tetragenococcus halophilus | 14F10 | DSM | 20338 |
| Clostridium paraputrificum | 14F11 | DSM | 2630T |
| Actinomyces meyeri | 14F12 | LMG | 16161T |
| Staphylococcus simulans | 14G01 | none | none |
| Corynebacterium urealyticum | 14G02 | ATCC | 43042T |
| Staphylococcus hominis ssp. novobiosepticus | 14G03 | CIP | 105720 |
| Vagococcus fluvialis | 14G04 | ATCC | 49515T |
| Salmonella typhi | 14G05 | none | none |
| Staphylococcus muscae | 14G07 | ATCC | 49911 |
| Staphylococcus hyicus | 14G08 | none | none |
| Serratia proteamaculans ssp. quinovora | 14G09 | ATCC | 33765T |
| Pasteurella multocida ssp. septica | 14G10 | CCUG | 38669 |
| Burkholderia vietnamiensis | 14G12 | LMG | 10929T |
| Nocardia asteroides | 14H01 | none | none |
| Staphylococcus cohnii ssp. cohnii | 14H02 | none | none |
| Staphylococcus hyicus | 14H03 | none | none |
| Vagococcus fluvialis | 14H04 | LMG | 11735 |
| Shigella dysenteriae | 14H05 | ATCC | 13313T |
| Staphylococcus schleiferi ssp. coagulans | 14H07 | CCUG | 37249 |
| Staphylococcus lugdunensis | 14H08 | none | none |
| Serratia proteamaculans ssp. quinovora | 14H09 | CCL | 4705 |
| Pediococcus parvulus | 14H10 | CCUG | 41976 |
| Arcanobacterium bernardiae | 14H11 | DSM | 9151 |
| Burkholderia vietnamiensis | 14H12 | LMG | 11347 |
| Pasteurella multocida ssp gallicida | 15A01 | CCUG | 26980 |
| Comamonas terrigena | 15A02 | CCM | 2409T |
| Turicella otitidis | 15A03 | CCUG | 39347 |
| Brochothrix campestris | 15A04 | CCM | 4218T |
| Arcanobacterium bernardiae | 15A05 | CCM | 4571T |
| Corynebacterium confusum | 15A06 | CCUG | 38268 |
| Actinomyces turicensis | 15A07 | LMG | 14329 |
| Paenibacillus larvae ssp. pulvifaciens | 15A08 | LMG | 15974T |
| Clostridium limosum | 15A09 | DSM | 1400T |
| Microbacterium testaceum | 15A10 | DSM | 20526 |
| Dietzia maris | 15A11 | DSM | 43984 |
| Corynebacterium group F1 | 15A12 | N/A | N/A |
| Facklamia ignava | 15B01 | CCUG | 43733 |
| Enterobacter cancerogenus | 15B02 | CCM | 2421T |
| Campylobacter lari | 15B03 | LMG | 8846T |
| Staphylococcus sciuri ssp. sciuri | 15B04 | CCM | 4232 |
| Neisseria weaveri | 15B05 | CCM | 4587T |
| Corynebacterium glucuronolyticum | 15B06 | CCUG | 44228 |
| Arthrobacter globiformis | 15B07 | LMG | 3813T |
| Tissierella praeacuta | 15B08 | LMG | 8203T |
| Bacillus psychrosaccharolyticus | 15B09 | DSM | 2270 |
| Corynebacterium argentoratense | 15B11 | DSM | 44202T |
| Aneurinibacillus thermoaerophilus | 15B12 | LMG | 17166 |
| Burkholderia stabilis | 15C01 | LMG | 14294T |
| Citrobacter koseri | 15C02 | CCM | 2537T |
| Staphylococcus saprophyticus ssp. saprophyticus | 15C03 | CCM | 2204 |
| Leuconostoc fallax | 15C04 | CCM | 4303T |
| Actinomyces radingae | 15C05 | CCM | 4741T |
| Corynebacterium hoagii | 15C06 | CCUG | 37875 |
| Bacillus oleronius | 15C07 | LMG | 17882 |
| Virgibacillus proomii | 15C08 | LMG | 12370T |
| Corynebacterium mycetoides | 15C10 | DSM | 20632T |
| Corynebacterium seminale | 15C11 | DSM | 44288T |
| Cellulomonas turbata | 15C12 | CCM | 4094 |
| Burkholderia stabilis | 15D01 | LMG | 14295 |
| Kytococcus sedentarius | 15D02 | CCM | 314T |
| Microbacterium testaceum | 15D03 | CCM | 2299T |
| Paenibacillus larvae ssp. larvae | 15D04 | CCM | 4483 |
| Actinomyces turicensis | 15D05 | CCM | 4742T |
| Eubacterium moniliforme | 15D06 | CCUG | 37327A |
| Bacillus pallidus | 15D07 | LMG | 19006T |
| Virgibacillus proomii | 15D08 | LMG | 17368 |
| Corynebacterium mycetoides | 15D09 | DSM | 20148 |
| Veillonella dispar | 15D10 | DSM | 20735T |
| Corynebacterium falsenii | 15D11 | DSM | 44352 |
| Aneurinibacillus thermoaerophilus | 15D12 | CCM | 4597T |
| Eikenella corrodens | 15E01 | LMG | 15557T |
| Pediococcus parvulus | 15E02 | CCM | 3450T |
| Leuconostoc fallax | 15E03 | DSM | 10614 |
| Kingella kingae | 15E05 | CCM | 5679T |
| Corynebacterium coyleae | 15E06 | DSM | 44185 |
| Corynebacterium xerosis | 15E07 | CCUG | 27544T |
| Marinibacillus marinus | 15E08 | DSM | 1298 |
| Corynebacterium hoagii | 15E09 | DSM | 20295T |
| Veillonella atypica | 15E10 | DSM | 20739T |
| Corynebacterium falsenii | 15E11 | DSM | 44353T |
| Burkholderia multivorans | 15E12 | CCM | 4863T |
| Enterococcus dispar | 15F01 | LMG | 13590 |
| Pediococcus damnosus | 15F02 | CCM | 3454 |
| Paenibacillus larvae ssp. pulvifaciens | 15F03 | CCM | 38 |
| Corynebacterium glucuronolyticum | 15F04 | CCM | 4567T |
| Sporosarcina ureae | 15F05 | CCM | 684T |
| Fusobacterium nucleatum ssp. animalis | 15F06 | CCUG | 32879T |
| Dietzia maris | 15F07 | LMG | 5361T |
| Bacillus flexus | 15F08 | DSM | 1316 |
| Atopobium parvulum | 15F09 | DSM | 20469T |
| Staphylococcus carnosus ssp. utilis | 15F10 | CCM | 4752 |
| Corynebacterium confusum | 15F11 | DSM | 44384T |
| Ralstonia paucula | 15F12 | CCM | 4867T |
| Pseudomonas citronellolis | 15G01 | LMG | 18378T |
| Acinetobacter radioresistens | 15G02 | CCM | 3588T |
| Bacillus subtilis | 15G03 | ATCC | 6051T |
| Actinomyces neuii ssp. anitratus | 15G04 | CCM | 4569T |
| Sporosarcina ureae | 15G05 | CCM | 860 |
| Fusobacterium nucleatum ssp. fusiforme | 15G06 | CCUG | 32880T |
| Leuconostoc carnosum | 15G07 | LMG | 18865 |
| Bacillus simplex | 15G08 | DSM | 1317 |
| Finegoldia magna | 15G09 | DSM | 20470T |
| Gordonia bronchialis | 15G10 | DSM | 43341 |
| Corynebacterium ulcerans | 15G11 | DSM | 46325T |
| Corynebacterium accolens | 15G12 | ATCC | 49725T |
| Staphylococcus felis | 15H02 | CCM | 4197 |
| Brevibacterium casei | 15H03 | CCM | 4100T |
| Actinomyces neuii ssp neuii | 15H04 | CCM | 4570T |
| Fusobacterium nucleatum ssp. fusiforme | 15H05 | CIP | 60.39 |
| Actinomyces radingae | 15H06 | LMG | 15955 |
| Paenibacillus larvae ssp. larvae | 15H07 | LMG | 9820T |
| Veillonella atypica | 15H08 | DSM | 1399 |
| Fusobacterium nucleatum ssp. polymorphum | 15H09 | DSM | 20482T |
| Rothia dentocariosa | 15H10 | DSM | 43762T |
| Propionibacterium freudenreichii | 15H11 | CCM | 1857T |
| Bacillus halodurans | 15H12 | N/A | N/A |
| Dermacoccus nishinomiyaensis | 16A01 | CCM | 2140T |
| Campylobacter sputorum ssp. sputorum | 16A02 | CCM | 3960T |
| Anaerobiospirillum succiniciproducens | 16A03 | CCUG | 24194T |
| Facklamia sourekii | 16A04 | CCUG | 28783T |
| Campylobacter curvus | 16A05 | CCUG | 11644 |
| Anaerococcus prevotii | 16A06 | none | none |
| Kocuria kristinae | 16A07 | ATCC | 27570T |
| Paenibacillus popilliae | 16A08 | CCUG | 28881T |
| Leclercia adecarboxylata | 16A09 | ATCC | 23216T |
| Staphylococcus succinus | 16A10 | ATCC | 700337T |
| Prevotella intermedia | 16A11 | none | none |
| Bacillus lentus | 16A12 | none | none |
| Streptococcus constellatus ssp. pharyngis | 16B01 | NCTC | 13122T |
| Arthrobacter globiformis | 16B02 | none | none |
| Alicyclobacillus acidocaldarius | 16B03 | CCM | 2855 |
| Neisseria polysaccharea | 16B04 | CCUG | 18030T |
| Campylobacter concisus | 16B05 | LMG | 7968 |
| Enterobacter hormaechei | 16B09 | ATCC | 49162T |
| Proteus vulgaris | 16B10 | CIP | 104989T |
| Prevotella melaninogenica | 16B11 | none | none |
| Brevibacillus brevis | 16B12 | none | none |
| Streptococcus infantarius ssp. infantarius | 16C01 | NCIMB | 700599T |
| Streptococcus infantarius ssp. infantarius | 16C02 | none | none |
| Sporosarcina pasteurii | 16C03 | CCM | 2056T |
| Bacillus schlegellii | 16C05 | LMG | 7133T |
| Micrococcus luteus | 16C07 | none | none |
| Streptococcus equi ssp. equi | 16C08 | ATCC | 33398T |
| Escherichia vulneris | 16C09 | ATCC | 33821T |
| Campylobacter rectus | 16C10 | DSM | 3260T |
| Propionibacterium avidum | 16C11 | none | none |
| Bacillus sp. | 16C12 | none | none |
| Streptococcus infantarius ssp. coli | 16D01 | NCIMB | 702620T |
| Marinibacillus marinus | 16D02 | ATCC | 29841T |
| Sporosarcina pasteurii | 16D03 | CCM | 2879 |
| Raoultella ornithinolytica | 16D04 | CIP | 103364T |
| Bacillus schlegellii | 16D05 | DSM | 9129 |
| Ochrobactrum intermedium | 16D06 | CCUG | 43465 |
| Nocardia asteroides | 16D07 | CCM | 2754T |
| Prevotella bivia | 16D08 | ATCC | 29303T |
| Morganella morganii ssp. sibonii | 16D09 | ATCC | 49948T |
| Bacteroides forsythus | 16D10 | ATCC | 43037T |
| Bacillus sp. | 16D12 | none | none |
| Microbacterium terregens | 16E01 | CCM | 2634 |
| Streptococcus parauberis | 16E02 | ATCC | 13386 |
| Anaerobiospirillum succiniciproducens | 16E03 | CCUG | 37578 |
| Haemophilus ducreyi | 16E04 | DSM | 8925T |
| Actinomyces bovis | 16E05 | none | none |
| Bacteroides thetaiotaomicron | 16E06 | DSM | 2079T |
| Prevotella denticola | 16E07 | ATCC | 35308T |
| Paenibacillus glucanolyticus | 16E08 | DSM | 5162T |
| Providencia alcalifaciens | 16E09 | ATCC | 9886T |
| Bifidobacterium adolescentis | 16E10 | none | none |
| Prevotella loescheii | 16E11 | ATCC | 15930T |
| Brevibacillus brevis | 16E12 | none | none |
| Pediococcus inopinatus | 16F01 | CCM | 3452 |
| Dermabacter hominis | 16F02 | CCM | 4122T |
| Campylobacter concisus | 16F03 | LMG | 7788T |
| Bacillus oleronius | 16F04 | LMG | 17952T |
| Clostridium subterminale | 16F05 | none | none |
| Rothia mucilaginosa | 16F07 | ATCC | 25296T |
| Paenibacillus popilliae | 16F08 | ATCC | 53256 |
| Staphylococcus sciuri ssp. carnaticus | 16F09 | ATCC | 700058T |
| Propionibacterium acnes | 16F11 | ATCC | 6919T |
| Paenibacillus macerans | 16F12 | none | none |
| Kingella denitrificans | 16G01 | CCUG | 9125 |
| Campylobacter curvus | 16G02 | LMG | 7609T |
| Haemophilus actinemycetemcomitans | 16G03 | CCUG | 13227T |
| Actinomyces neuii ssp. neuii | 16G04 | LMG | 14790 |
| Morganella morganii ssp. morganii | 16G08 | ATCC | 25830T |
| Staphylococcus sciuri ssp. carnaticus | 16G09 | ATCC | 700059 |
| Corynebacterium afermentans | 16G10 | none | none |
| Bacteroides capillosus | 16G11 | ATCC | 29799T |
| Bacillus coagulans | 16G12 | none | none |
| Staphylococcus succinus | 16H01 | CCUG | 43571 |
| Microbacterium hominis | 16H02 | DSM | 12509T |
| Campylobacter sputorum ssp. bubulus | 16H03 | LMG | 6447 |
| Campylobacter gracilis | 16H04 | LMG | 7616 |
| Clostridium clostridiiforme | 16H05 | none | none |
| Corynebacterium auris | 16H06 | CCM | 4566T |
| Enterobacter amnigenus | 16H08 | ATCC | 33072T |
| Staphylococcus sciuri ssp. carnaticus | 16H09 | ATCC | 700060 |
| Bacillus sp. | 16H11 | none | none |
| Bacillus sp. | 16H12 | none | none |

### Example 2

### Identification of Species-specific Oligonucleotide Sequences Computationally Using 30-mers with 15 Nucleotide Overlaps

[0260] DNA sequences of the 16S ribosomal loci of 1,214 bacterial samples representing 545 different species were generated and stored in an internal database. As outlined in the schematic diagram of FIG. 2, these sequences were processed in silico to yield 132,325 fragments of 30 nucleotides (nt) in length with a 15 nt (n=15) overlap. These fragments were compared against sequence databases, and the BLAST reports were parsed to discover oligonucleotides that matched a portion of the 16S rDNA sequence of a bacterial species with a criterion of permitting no more than 1 mismatch. Fragments that met this criterion and only matched one or zero species (or unidentified/uncultured/unknown entries) within that criterion were called “species-specific oligos”. This examination was conducted on three databases, the internal database described above, GenBank, and RDP. The results indicated that 2,935 oligonucleotides were species-specific (i.e., SSOs) with respect to all three databases examined. Of these species-specific oligonucleotides, 2,723 were unique and specific for 325 different species, including 38 out of the 81 priority species of Table 1, above.

[0261] In order to identify conserved sequences upstream and downstream from the 30-mer species-specific oligonucleotide sequences, each 30-mer oligonucleotide was extended by 60 bases on each side to generate a 150-mer oligonucleotide. A multiple sequence alignment using CLUSTALW was generated using the particular 150-mer oligonucleotide to be tested and the 20 and 40 closest sequences in the GenBank database and in the internal database described above, respectively. This information was used to design primers for TaqMan®.

[0262] Superimposition of the species-specific regions on the structure of 16S revealed that they fall in non-base-paired loops with considerable tolerance for nucleotide differences. These hypervariable regions are known, but no systematic examination of 16S segments to identify those that are species specific has been reported.

### Example 3

### Identification of Species-specific Oligonucleotide Sequences Computationally Using 20-mers with 19 Nucleotide Overlaps

[0263] DNA sequences of the 16S ribosomal loci of 1,324 bacterial samples representing 585 different species were processed in silico to yield 1,859,805 fragments of 20 nucleotide (nt) each, with an overlap of 19 nt (n=19). A pair-wise comparison was conducted using BLAST on the fragments against the Ribosomal Database Project (RDP) database. The BLAST reports generated from the comparisons were parsed using PERL programming language to identify oligonucleotides that matched a portion of the 16S rDNA sequence of a bacterial species with a criterion of permitting no more than 1 mismatch. Fragments that met this criterion and only matched one or zero species (or unidentified/uncultured/unknown entries) within that criterion were called “species-specific oligos”. The analysis discovered 90,079 fragments that met this criterion in RDP database. These 90,079 fragments were then blasted against the GenBank database to further qualify these oligonucleotides as being species-specific, i.e., to identify those which matched one or zero species (or unidentified/uncultured/unknown entries) by this criterion. Of these, only 37,072 remained species-specific after the comparison with GenBank. Of these species-specific oligonucleotides, 25,346 were unique and specific for 648 different species, including 68 out of the 81 priority species denoted in Table 1.

[0264] In order to identify conserved sequences upstream and downstream from the 20-mer species-specific oligonucleotide sequences, each 20-mer oligonucleotide was extended by 60 bases on each side to generate a 140-mer oligonucleotide. A multiple sequence alignment using CLUSTALW was generated using the particular 140-mer oligonucleotide to be tested and the 20 and 40 closest sequences in the GenBank database and the internal database, respectively.

[0265] Overlapping species specific oligonucleotides (SSO's) were converted into species specific regions (SSR's) as follows. Apparently species-specific oligonucleotide (20-mers) that were consecutively overlapping (e.g., nucleotides 1-20 and nucleotides 2-21, etc. of a 16S rDNA sequence) were combined into a large segment (i.e., 1-21 nucleotides) and termed a “species-specific region” (“SSR”). Any 20-mer oligonucleotide sequence selected from such an SSR will itself be species-specific for the particular species.

### Example 4

### Further Selection of Species-Specific Oligonucleotides for Specificity and Robustness

[0266] In order to distinguish strain- and species-specific oligonucleotides, a curated database was constructed from Ribosomal Database Project (RDP) 16S rDNA sequences. The RDP database consisted of aprroximatedly 30,000 16S rDNA sequences, but the majority of these sequences (i.e., ˜20,000) were not full length. Accordingly the RDP sequences were mapped to the same E. coli rDNA sequence as used to assign nucleotide numbers to the SSOs and the GSOs. Once the sequences were mapped, a comparison was performed to determine if each species-specific oligonucleotide was present at the same nucleotide coordinate positions in all entries for the species. The results indicated that 9,879 SSOs representing 232 species were species-specific using the prioritization ranking of 1-25. The other 18,191 SSOs were in the last ranking of 25-30, therefore being strain specific. The resulting curated RDP database (cRDP) was used to further predict the degree of species-specificity of probes.

[0267] A count of the number of entries for each species was conducted and the number stored in a table. Oligonucleotides that had been identified as being species-specific using the methods disclosed herein were compared using BLASTN2 (Washington University, St. Louis, Mo.) (default parameters except that “expectation value”=1000) against the sequences in this database. The results obtained using the BLAST algorithm were then parsed and examined for the number of species hit and compared with the entries for a given species represented. If a putative species-specific oligonucleotide hit all entries for a given species, then it was designated a species-specific oligonucleotide (SSO); but if the oligonucleotide did not hit all of the entries, then it was designated as a putative strain-specific oligonucleotide and placed on lower priority for further analysis. Species-specific oligonucleotides that are identified can then be used in, for example, diagnostic testing of bacterial infection or bacterial contamination. For example, if the number of E. coli entries in the database were five, then to be a species-specific oligonucleotide for the species E. coli, an oligonucleotide would have “hit” all 5 E. coli entries in the database by using BLAST or using a similar algorithm. Alternatively, if the oligonucleotide hit only 4 of the 5 entries, then the oligonucleotide would be a putative strain-specific oligonucleotide. Further analysis would be required to verify whether or not the oligonucleotide might be species-specific. For example, sequence errors in the database sequences in some cases could result in artificial designation of an oligonucleotide as a putative strain-specific oligonucleotide. 16S rDNA sequences would have to be obtained from additional strains of the species in question and then compared by BLAST or similar algorithm to the putative species-specific oligonucleotide in order to determine whether it is truly species-specific.

[0268] Species Specific Oligonucleotide “Robustness”. To prioritize the species-specific oligonucleotides according to their expected utility in a diagnostic test, BLAST reports from comparisons of the species-specific oligonucleotides with the database sequences were parsed, and a table was constructed indicating the number of mismatched nucleotides (i.e., distinguishing moieties) observed (up to a total of 5) in the BLAST alignment with 16S rDNA sequences from other bacterial species. The number of nucleotide changes required for a species-specific oligonucleotide to perfectly match the 16S rDNA sequence of another species is defined as its “robustness” in a diagnostic test. The larger the number of nucleotide changes required for a probe to perfectly align with a different species, the more robust the resulting diagnostic test. In other words, there is a greater margin of error or more tolerance in such a test. For example, hybridization conditions need not be as rigidly defined for an SSO with a high robustness number as for a species-specific oligonucleotide whose sequence is only 1 nucleotide change away from a perfect match with a second species.

[0269] Species Specific Oligonucleotide Quality Score. To further prioritize the species specific-oligonucleotides, a quality score was generated using information from both the “robustness” number and the predicted species-specificity. A scoring rating system was created based on 5 different robustness scores combined with 6 levels of predicted species-specificity. This generated a scoring rating system of scores ranging from 1 to 30, with 1 being the most preferred species-specific oligonucleotide and 30 being the least preferred. The 6 levels of predicted species-specificity are calculated based on the total number of entries and the total hits percentage, which is the percentage of the total full length cRDP database entries for a species which are “hit” (i.e., align, permitting no more than 1 mismatch) by the probe in question. The first specificity level represents oligonucleotides with greater than two full-length entries and a 100% total hits percentage. The second level represents oligonucleotides with only one full-length entry and a 100% total hits percentage. The third level contains oligonucleotides lacking any full-length entries; therefore, their species-specificity cannot be predicted at this time. Level four represents oligonucleotides with more than 10 entries and a total hits percentage of at least 85%. The fifth level contains entries from 4 to 9 and a total hits percentage of at least 75%. The sixth level represents oligonucleotides that are most likely strain-specific rather than species-specific and do not meet the above criteria. The “robustness” score indicates the number of nucleotide changes required for the probe to match another species sequence in either RDP or GenBank (i.e. MM2 is a mismatch of two nucleotides between the probe and the rDNA sequence of the next best species match, i.e., two nucleotide changes would be required for a perfect match to the next best species; MM>5 indicates that more than 5 nucleotide changes are required for the probe to match another species). In general, a probe with a robustness score of MM>5 is more preferred than a probe with a score of MM2. Therefore, a species-specific olignucleotide with a quality score of 1 would exhibit a “robustness” score of MM>5 and be at level one in predicted species-specificity. Table 8 summarizes the different quality scores according to “robustness” and predicted species-specificity, and Table 9 shows specific examples for each quality score. Table 14 provides the quality score information for all of the species-specific markers (attached to the specification as a separate document). Table 15 (attaches to the specification as a separate document) provides the number and identity of the species that each group-specific oligonucleotide marker identifies. This data was further refined a discussed in Example 17 below. All group-specific markers were chosen to match no more than five different species in either the GenBank or RDP databases, with the criterion that each marker exhibits no more than one mismatch when its sequence is aligned with the 16S rDNA sequence of each matching species. Table 15 lists the species that each group-specific oligonucleotide marker identifies. All group-specific markers were chosen to match no more than five different species in GenBank or RDP databases, with the criterion that each marker exhibits no more than one mismatch when its sequence is aligned with the 16S rDNA sequence of each matching species. Shown in Table 15 are the names of the species, which each group-specific marker matches as compared to 16S rDNA sequences in GenBank and RDP.

TABLE 8

| | | Total Hits | Total Full |
|---|---|---|---|
| | | Percentage | Length Entries |
| Quality Score | Robustness | in cRDP | in cRDP |
| 1 | MM > 5 | 100% | >=2 |
| 2 | MM5 | 100% | >=2 |
| 3 | MM4 | 100% | >=2 |
| 4 | MM3 | 100% | >=2 |
| 5 | MM2 | 100% | >=2 |
| 6 | MM > 5 | 100% | 1 |
| 7 | MM5 | 100% | 1 |
| 8 | MM4 | 100% | 1 |
| 9 | MM3 | 100% | 1 |
| 10 | MM2 | 100% | 1 |
| 11 | MM > 5 | N/A | N/A |
| 12 | MM5 | N/A | N/A |
| 13 | MM4 | N/A | N/A |
| 14 | MM3 | N/A | N/A |
| 15 | MM2 | N/A | N/A |
| 16 | MM > 5 | >=85% | >=10 |
| 17 | MM5 | >=85% | >=10 |
| 18 | MM4 | >=85% | >=10 |
| 19 | MM3 | >=85% | >=10 |
| 20 | MM2 | >=85% | >=10 |
| 21 | MM > 5 | >=75% | 4-9 |
| 22 | MM5 | >=75% | 4-9 |
| 23 | MM4 | >=75% | 4-9 |
| 24 | MM3 | >=75% | 4-9 |
| 25 | MM2 | >=75% | 4-9 |
| 26 | MM > 5 | <75% | >=1 |
| 27 | MM5 | <75% | >=1 |
| 28 | MM4 | <75% | >=1 |
| 29 | MM3 | <75% | >=1 |
| 30 | MM2 | <75% | >=1 |

[0270] TABLE 9

| | | | | | | | |
|---|---|---|---|---|---|---|---|
| | | | | | Total Full | | |
| | | | | Robutstness | Length | Total Hits | |
| SEQ ID | | GenBank | | in GenBank | Entries in | Percentage | Quality |
| NO | Species Name | Best Hit | RDP Best Hit | and RDP | cRDP | in cRDP | Score |

Quality Score 1-5:

| | | | | | | | |
|---|---|---|---|---|---|---|---|
| 7 | Enterococcus | Enterococcus | Enterococcus faecalis | MM > 5 | 5 | 100% | 1 |
| | faecalis | faecalis | | | | | |
| 27 | Haemophilus | Haemophilus | Haemophilus ducreyi | MM4 | 4 | 100% | 3 |
| | ducreyi | ducreyi | | | | | |
| 2836 | Streptococcus | Streptococcus | Streptococcus | MM2 | 32 | 100% | 5 |
| | dysgalactiae | dysgalactiae | dysgalactiae | | | | |

Quality Score 6-10:

| | | | | | | | |
|---|---|---|---|---|---|---|---|
| 3564 | Streptococcus | Streptococcus | Streptococcus | MM > 5 | 1 | 100% | 6 |
| | thoraltensis | thoraltensis | thoraltensis | | | | |
| 3648 | Prevotella disiens | Prevotella | Prevotella disiens | MM4 | 1 | 100% | 8 |
| | | disiens | | | | | |
| 4293 | Atopobium | Atopobium | Atopobium parvulum | MM3 | 1 | 100% | 9 |
| | parvulum | parvulum | | | | | |

Quality Score 11-15:

| | | | | | | | |
|---|---|---|---|---|---|---|---|
| 11987 | Corynebacterium | No Hits | No Hits | MM > 5 | 0 | 0% | 11 |
| | renale | | | | | | |
| 13192 | Plesiomonas | Plesiomonas | Plesiomonas | MM3 | 0 | 0% | 14 |
| | shigelloides | shigelloides | shigelloides | | | | |
| 14499 | Bacteroides | Bacteroides | Bacteroides stercoris | MM2 | 0 | 0% | 15 |
| | stercoris | stercoris | | | | | |

Quality Score 16-20:

| | | | | | | | |
|---|---|---|---|---|---|---|---|
| 25330 | Streptococcus | Streptococcus | Streptococcus | MM3 | 32 | 94% | 19 |
| | dysgalactiae | dysgalactiae | dysgalactiae | | | | |
| 25341 | Streptococcus | Streptococcus | Streptococcus suis | MM2 | 34 | 85% | 20 |
| | suis | suis | | | | | |
| 25350 | Streptococcus | Streptococcus | Streptococcus | MM2 | 32 | 94% | 20 |
| | dysgalactiae | dysgalactiae | dysgalactiae | | | | |

Quality Score 21-25:

| | | | | | | | |
|---|---|---|---|---|---|---|---|
| 25352 | Enterococcus | Enterococcus | Enterococcus | MM > 5 | 4 | 75% | 21 |
| | saccharolyticus | saccharolyticus | saccharolyticus | | | | |
| 25359 | Streptococcus | Streptococcus | Streptococcus suis | MM3 | 34 | 82% | 24 |
| | suis | suis | | | | | |
| 25424 | Aerococcus | Aerococcus | Aerococcus urinae | MM2 | 9 | 78% | 25 |
| | urinae | urinae | | | | | |

Quality Score 26-30:

| | | | | | | | |
|---|---|---|---|---|---|---|---|
| 25686 | Paenibacillus | Paenibacillus | Paenibacillus | MM > 5 | 3 | 67% | 26 |
| | azotofixans | azotofixans | azotofixans | | | | |
| 25793 | Streptococcus | Streptococcus | Streptococcus | MM3 | 32 | 31% | 29 |
| | dysgalactiae | dysgalactiae | dysgalactiae | | | | |
| 27568 | Campylobacter | Campylobacter | Campylobacter | MM2 | 9 | 11% | 30 |
| | sputorum | sputorum | sputorum | | | | |

[0271] The system of naming species represented by species-specific oligonucleotides was done as follows. To further evaluate the species for which the oligonucleotide probe was specific, BLAST searches were run against GenBank and RDP for each oligonucleotide probe, and the name of the species exhibiting the best BLAST hit was compared to the species name of the isolate from which the oligonucleotide probe was derived, (i.e., the species name of this isolate in the internal database, SNID). In most cases, the same species name was found in the internal database, the RDP database, and the GenBank database. However, the species name for an rDNA sequence may vary in various databases for several reasons including, for example, systematic nomenclature changes as well as identification errors. In case of discrepancies in the species names between the three databases, the following criteria were used to select the species name for the purposes of this invention. The following definitions are helpful for describing the set of criteria: (1) let “SNIDseq” and “SNIDprobe” be the species name in the internal database (i.e., that assigned by diagnostic tests to the isolate from which the 16S rDNA sequence was determined and the probe was derived) for the 16S rDNA sequence and the probe, respectively, (2) let “BLASTseq” and “BLASTprobe” be the names of the species among the top 10 GenBank and RDP BLAST hits for the 16S rDNA sequence and the probe, respectively, and (3) let “bestBLASTseq” and “bestBLASTprobe” be the name of the species which is the best GenBank and RDP BLAST hits for the 16S rDNA sequence and the probe, respectively; and (4) let a single isolate be designated as “A” and multiple probes derived from the 16S rDNA sequence of isolate “A” be designated as “A1”, “A2”, etc. The following criteria serve as useful guides for assigning a species name to each probe, but one skilled in the art will recognize that confirmation must be obtained experimentally by use of the probes for hybridization-based testing. This naming criteria was also utilized in preparation of the attached Sequence Listing for the Source Identifier
[0272] 1) If no BLAST hits were obtained for the oligonucleotide probe in GenBank and RDP, the species name of the internal database was selected.
[0273] 2) If BLAST hits were obtained for the oligonucleotide probe in only one public database (GenBank or RDP), the species name of the internal database was selected.
[0274] 3) If the oligonucleotide probe was obtained from a species not represented in GenBank or RDP, the species name of the internal database was selected.
[0275] 4) If the discrepancy in species names was caused by nomenclature changes, the most up-to-date species name to our knowledge was selected
[0276] 5) If the best BLAST hits in Genbank and RDP for the oligonucleotide probe were obtained with the same species, but that species name did not match the species name in the internal database and:
   [0277] a) If SNIDseq is identical to bestBLASTseq, then the species name of the internal database was selected.
   [0278] b) If SNIDseq is within BLASTseq but SNIDprobe is not within BLASTseq, then the species name of the internal database was selected.
   [0279] c) If SNIDseqA is not within BLASTseqA, but bestBLASTprobeA1 is not the same as bestBLASTprobeA2, then the species name of the internal database was selected.
   [0280] d) If SNIDseq is not within BLASTseq at the species level, but is within BLASTseq at the Genus level and SNIDprobe is not within BLASTseq, then the species name of the internal database was selected.
   [0281] e) If only one or few 16S rDNA sequences of short length or poor quality for SNIDseq were found in GenBank, then the species name of the internal database was selected
   [0282] f) If SNIDseq is within BLASTseq, but bestBLASTprobe is a different but higher quality hit in BLASTseq, then the species name of GenBank and RDP was selected.
   [0283] g) SNIDseq is not within BLASTseq (and the strain was obviously mistyped), then the species name of GenBank and RDP was selected.
   [0284] h) If the species name in the internal database was poorly described (at the genus level for instance), the name obtained in GenBank and RDP was selected.

### Example 5

### Selection of TagMan® Probes and Primers

[0285] TaqMan® probes and primers were designed from the 150-mer oligonucleotide sequence using PrimerExpress software (version 1.5, Applied Biosystems, Foster City, Calif.). Probes and primers were designed with the following characteristics (as recommended by Applied Biosystems):
[0286] The choice of probe is made first; then the primers are designed to be as close as possible to the probe without overlapping the probe.
[0287] G+C content of TaqMan® probes should be between 30 and 80%.
[0288] Probe melting temperature (Tₘ) should be approximately 68° C. to approximately 70° C.
[0289] TaqMan® probes should not begin with G's at the 5′ end as it tends to quench the fluorescence.
[0290] The probes should not have runs of identical nucleotides.
[0291] Strands that give the probe more Cs than Gs should be selected to get a better signal.
[0292] Primers should have a melting temperature (Tₘ) of 58-60° C. Probes need to have a Tₘ value of 10° C. higher. The Tₘ difference between the forward and reverse primers should not exceed 2° C.
[0293] Primer optimal length is 20 nucleotides.
[0294] The G+C content of primers should be between 30 and 80%.
[0295] The same nucleotide (G, A, T, or C) should not be repeated several times in a row in the sequence.
[0296] The total number of Gs and Cs in the last five nucleotides at the 3′ end of the primer should not exceed two.
[0297] Maximum amplicon size should be 150 bp (ideally 50-150 bases).

[0298] The choice of TaqMan® probes can be done using PrimerExpress software or manually by the user; in which case, the user indicates to the software the TaqMan® probe sequence location, and the software searches for primers fitting the characteristics described above. If no primers corresponding to the criteria described above are found, the PrimerExpress software parameters are adjusted. For instance, the appropriate Tₘ may not be found surrounding some TaqMan® probe unless the requirements for Tₘ are adjusted (preferably, using a Tₘ between 53° C. and 60° C. and more than 2° C. difference between the Tₘs of the forward and reverse primers).

[0299] Using this method, twenty sets of probes and primers were designed for the following species: Bacteroides merdae, Bacteroides stercoris, Bacteroides thetaiotaomicron, Bacteroides vulgatus, Cardiobacterium hominis, Clostridium botulinum, Clostridium difficile, Clostridium septicum, Clostridium tetani, Eikenella corrodens, Enterococcus faecalis, Haemophilus ducreyi, Kingella denitrificans, Morganella morganii, Neisseria gonorrhoeae, Oligella urethralis, Proteus mirabilis, Providencia stuartii, and Streptococcus agalactiae.

### Example 6

### Species-Specificity in a Set of GSOs

[0300] Using sets of GSOs, rDNA sequences were identified to the species level as described further below.

[0301] Number of species covered by SSOs, GSOs or sets of GSOs. For species that were lacking a SSO (i.e., 76 species), the 20,594 GSOs were analyzed to determine if sets of GSOs could identify a particular species. The following table represents the 46 species in which species-specificity could be determined by using sets of GSOs.

TABLE 10
Species using combinations of GSOs for species identity

| | | Number |
|---|---|---|
| | | of |
| Species | GSO SEQ ID NOS | GSOs |
| Acinetobacter baumannii | 36686, 30934, 48435, 33884 | 4 |
| Acinetobacter calcoaceticus | 39848, 36113, 30934, 44459 | 4 |
| Acinetobacter junii | 29479, 30108, 42845 | 3 |
| Aeromonas veronii | 47193, 42352 | 2 |
| Aneurinibacillus migulanus | 44900, 38378, 32010 | 3 |
| Arcanobacterium bernardiae | 39338, 46134, 44988 | 3 |
| Bacillus amyloliquefaciens | 33959, 42090 | 2 |
| Bacillus atrophaeus | 35155, 44448 | 2 |
| Bacillus halodurans | 43844, 31450, 43257, 28281 | 4 |
| Bacillus pallidus | 46080, 47414, 30578 | 3 |
| Bacillus pumilus | 45259, 32582 | 2 |
| Bacillus simplex | 34319, 34826, 42979 | 3 |
| Bacillus sphaericus | 28338, 34282, 37717 | 3 |
| Bacillus subtilis | 45687, 42090, 44487 | 3 |
| Brevibacillus borstelensis | 35138, 47275, 34276, 46030 | 4 |
| Brevibacillus parabrevis | 31941, 28198 | 2 |
| Brevundimonas diminuta | 31958, 29543, 29067, 28720 | 4 |
| Burkholderia multivorans | 37454, 37447 | 2 |
| Burkholderia vietnamiensis | 37447, 30138, 37454 | 3 |
| Campylobacter fetus ssp. fetus | 36610, 47208 | 2 |
| Campylobacter gracilis | 34520, 40897, 41548 | 3 |
| Chryseobacterium | 35999, 48268, 38975, 46309 | 4 |
| meningosepticum | | |
| Clostridium paraputrificum | 35968, 33115 | 2 |
| Clostridium sporogenes | 36468, 45611, 43243, 32088 | 4 |
| Corynebacterium amycolatum | 31320, 46952, 29055 | 3 |
| Gemella bergeri | 36461, 47995, 47328 | 3 |
| Moraxella nonliquefaciens | 43598, 32706 | 2 |
| Porphyromonas levii | 35301, 47513, 34027, 36791 | 4 |
| Pseudomonas aeruginosa | 41019, 46306, 30201, 34876 | 4 |
| Raoultella planticola | 43294, 37670, 43050 | 3 |
| Rhodococcus equi | 37186, 28975, 45409 | 3 |
| Salmonella enteritidis | 45117, 41157, 31333 | 3 |
| Salmonella typhimurium | 32964, 32896, 41157 | 3 |
| Staphylococcus caprae | 36775, 35000, 34734 | 3 |
| Staphylococcus gallinarum | 28303, 47437 | 2 |
| Staphylococcus hominis | 37181, 29913, 37005 | 3 |
| Staphylococcus pasteuri | 33774, 37181 | 2 |
| Staphylococcus pulvereri | 47140, 42760, 39045 | 3 |
| Staphylococcus vitulinus | 39045, 47140 | 2 |
| Staphylococcus xylosus | 47173, 29349, 38773 | 3 |
| Streptococcus downei | 43822, 34565, 30088 | 3 |
| Streptococcus hyovaginalis | 34828, 36951 | 2 |
| Streptococcus intermedius | 29499, 34917, 33594 | 3 |
| Streptococcus parauberis | 36715, 31995, 40921 | 3 |
| Xanthomonas campestris | 33160, 46608, 45341 | 3 |
| Yersinia intermedia | 39077, 33902 | 2 |

Of the 567 species represented by the 1,324 completed 16S rDNA, 491 of these species had at least one SSO. Another 46 species were identified at the species level using a combination of two or more GSOs, as reflected in the third column of Table 10. Twenty species could only be characterized as belonging to a subset containing multiple species. Only 10 species were not able to be determined using the above analysis: Cedecea neteri, Citrobacter gillenii, Citrobacter murliniae, Enterobacter asburiae, Enterobacter intermedius, Kluyvera ascorbata, Kluyvera cryocrescens, Moraxella (Branhamella) catarrhalis, Pantoea dispersa, and Pseudomonas alcaligenes. Thus the probes utilized were able to discriminate 557 out of 567 species tested.

### Example 7

### Verification of the Species Specificity and Robustness of Species-Specific Oligonucleotides by TaqMan® Assay

[0302] The species-specificity and robustness of probes was evaluated by bioinformatic analysis. Each 30-mer oligonucleotide was compared by BLASTN2 (Washington University, St. Louis, Mo.) (default parameters except that “expectation value”=1000) to sequences present in proprietary or public databases. The number of mismatches was derived from the BLAST report (see Example 4). As discussed, the robustness of the 30-mer increases as the number of mismatches increases. Table 11 below illustrates the number of mismatches needed for the probes to hit the next closest species in RDP database.

TABLE 11
Number of mismatches required to eliminate species-specificity of a probe. The
probe sequences were compared to those available in Ribosomal Database Project (RDP) and
in GenBank.

| | | | | | # of mismatches |
|---|---|---|---|---|---|
| | | | | | needed to eliminate |
| | | | | | species-specificity |
| | | | | | (according to |
| | Probe | | Probe | Primer | RDP & GenBank |
| Species | SEQ ID NO | OligoID | Name | SEQ ID NO | databases) |
| Bacteroides merdae | 48727 | 06B08-0095 | PB01 | 48707, 48732 | 3 |
| Bacteroides stercoris | 48729 | 06C07-0095 | PB03 | 48708, 48733 | 3 |
| Bacteroides thetaiotaomicron | 26757 | 06A02-033 | PB14 | 48717, 48742 | 2 |
| Bacteroides vulgatus | 48728 | 06C12-0051 | PB02 | 48709, 48734 | 5 |
| Cardiobacterium hominis | 7089 | 07E01-071 | PB15 | 48718, 48743 | 2 |
| Clostridium botulinum | 26916 | 06A04-065 | PB17 | 48719, 48744 | 2 |
| Clostridium difficile | 273 | 06H02-0037 | PB12 | 48716, 48741 | 3 |
| Clostridium septicum | 5711 | 06A06-008 | PB18 | 48720, 48745 | 2 |
| Clostridium tetani | 15516 | 06E10-00065 | PB07 | 48711, 48736 | 2 |
| Eikenella corrodens | 25477 | 10D06-0086 | PB08 | 48712, 48737 | 2 |
| Enterococcus faecalis | 388 | 03D09-00030 | PB05 | 48710, 48735 | 3 |
| Haemophilus ducreyi | 2414 | 07E07-0071 | PB11 | 48715, 48740 | 3 |
| Haemophilus ducreyi | 3308 | 07E07-034 | PB19 | 48721, 48746 | 2 |
| Kingella denitrificans | 36 | 07F07-0065 | PB09 | 48713, 48738 | 4 |
| Morganella morganii | 19649 | 01A11-017 | PB20 | 48722, 48747 | 2 |
| Neisseria gonorrhoeae | 495 | 07G04-0067 | PB10 | 48714, 48739 | 3 |
| Oligella urethralis | 23485 | 08C11-059 | PB21 | 48723, 48748 | 2 |
| Proteus mirabilis | 15260 | 01E07-070 | PB22 | 48724, 48749 | 2 |
| Providencia stuartii | 15473 | 01E08-032 | PB23 | 48724, 48750 | 2 |
| Streptococcus agalactiae | 3454 | 01B05-071 | PB24 | 48725, 48751 | 3 |
| Staphylococcus chromognes | 6024 | 05B07-11 | PB25 | 48764, 48770 | 2 |
| Prevotella oralis | 3935 | 07D08-09 | PB26 | 48765, 48771 | 3 |
| Staphylococcus simulans | 4333 | 05G07-12 | PB27 | 48766, 48772 | 3 |
| Moraxella atlantae | 9336 | 08B08-46 | PB28 | 48767, 48773 | 2 |
| Kocuria rosea | 24018 | 01B08-11 | PB29 | 48768, 48774 | 2 |

### List of New TagMan® Probes and Primers

[0303]

| | | |
|---|---|---|
| primer | | |
| or | | |
| probe | | SEQ ID |
| name | Sequence (5′->3′) | NO |

| | | |
|---|---|---|
| F25 | AGA CTG GAA TAA CTC CGG GAA AC | 48764 |
| R25 | TGA CAG CAA GAC CGT CTT TCA | 48770 |
| PB25 | 5′- 6FAM-gcc gga taa cat atc gaa ccg | 6024 |
| | cat ggt tcg - TAMRA-3′ | |
| F26 | GCA CGG GTG AGT AAC GCG | 48765 |
| R26 | TTA GGC CGC CTT TCA ACG | 48771 |
| PB26 | 5′- 6FAM-atc caa cct tcc cat tac tac | 3935 |
| | ggc ata - TAMRA-3′ | |
| F27 | GGC TAA TAC CGG ATA ACA CAT GAA AC | 48766 |
| R27 | CGC GGG TCC ATC TAT AAG TGA | 48772 |
| PB27 | 5′- 6FAM-gca tgg ttt cat gat gaa aga | 4333 |
| | cgg ttt - TAMRA-3′ | |
| F28 | AAA TGC GTA GAG ATC TGG AGG AA | 48767 |
| R28 | GCT TTC GGG TCT GAG TGT CAG | 48773 |
| PB28 | 5′- 6FAM-acc gat ggc gaa ggc agc ttt | 9336 |
| | ctg gca caa - TAMRA-3′ | |
| F29 | CTA ATA CTG GAT ACT ACC TCT TAC CGC A | 48768 |
| R29 | AGC TGA TAG GCC GTG AGC C | 48774 |
| PB29 | 5′- 6FAM-ggt ggg tgg tgg aaa ggg ttt | 24018 |
| | tac tgg ttt- TAMRA-3′ | |

The species-specificity of probes was also verified at the experimental level using the TaqMan® method.

[0304] For each probe, one or several isolates from the target species and several isolates of related species were tested. The isolates tested in TaqMan® assays were obtained from the internal database described above. These isolates represented clinical strains obtained from different clinical laboratories and collection strains obtained from the American Type Culture Collection (ATCC) or other reference institutes. Identification of these strains was done by phenotypic methods, which included classical biochemical reference tests and/or commercial tests. The TaqMan® results, number of isolates and species tested for each probe are shown in Table 12.

TABLE 12

| | | | Species targeted by the probe | | | | |
|---|---|---|---|---|---|---|---|
| | | | | No. of positive | | | |
| | | | | strains | No. of | | Explanation |
| | | Probe | No. of | (rapid | isolates with a | No. of | for isolates |
| | Probe | SEQ ID | isolates | Cycle | weak or late | negative | with late or no |
| Species | name | NO | tested | threshold) | amplification | isolates | amplification* |
| Bacteroides merdae | PB01 | 48727 | 8 | 4 | 0 | 4 | A |
| Bacteroides stercoris | PB03 | 48729 | 13 | 9 | 0 | 4 | A |
| Bacteroides | PB14 | 26757 | 4 | 1 | 2 | 1 | B |
| thetaiotaomicron | | | | | | | |
| Bacteroides vulgatus | PB02 | 48728 | 12 | 12 | 0 | 0 | |
| Cardiobacterium | PB15 | 7089 | 10 | 9 | 1 | 0 | C |
| hominis | | | | | | | |
| Clostridium botulinum | PB17 | 26916 | 16 | 2 | 0 | 14 | B |
| Clostridium difficile | PB12 | 273 | 10 | 10 | 0 | 0 | |
| Clostridium septicum | PB18 | 5711 | 2 | 2 | 0 | 0 | |
| Clostridium tetani | PB07 | 15516 | 2 | 2 | 0 | 0 | |
| Eikenella corrodens | PB08 | 25477 | 2 | 2 | 0 | 0 | |
| Enterococcus faecalis | PB05 | 388 | 13 | 12 | 0 | 1 | C |
| Haemophilus ducreyi | PB11 | 2414 | N/A | N/A | N/A | N/A | D |
| Haemophilus ducreyi | PB19 | 3308 | 2 | 2 | 0 | 0 | |
| Kingella denitrificans | PB09 | 36 | 2 | 2 | 0 | 0 | |
| Morganella morganii | PB20 | 19649 | 6 | 3 | 3 | 0 | E |
| Neisseria gonorrhoeae | PB10 | 495 | 1 | 1 | 0 | 0 | |
| Oligella urethralis | PB21 | 23485 | 11 | 1 | 10 | 0 | |
| Oligella urethralis | PB21A | | 2 | 2 | 0 | 0 | |
| | 29 | | | | | | |
| Oligella urethralis | PB21B | | 2 | 2 | 0 | 0 | |
| | 28 | | | | | | |
| Proteus mirabilis | PB22 | 15260 | 2 | 2 | 0 | 0 | |
| Providencia stuartii | PB23 | 15473 | 2 | 2 | 0 | 0 | |
| Streptococcus | PB24 | 3454 | 1 | 1 | 0 | 0 | |
| agalactiae | | | | | | | |
| Staphylococcus | PB25 | 6024 | 3 | 3 | 0 | 0 | |
| chromognes | | | | | | | |
| Prevotella oralis | PB26 | 3935 | 10 | 2 | 0 | 8 | B |
| Staphylococcus | PB27 | 4333 | 3 | 3 | 0 | 0 | |
| stimulans | | | | | | | |
| Moraxella atlantae | PB28 | 9336 | 10 | 6 | 3 | 1 | A, B |
| Kocuria rosea | PB29 | 24018 | 3 | 2 | 0 | 1 | A |

| | Other species tested | | | | | |
|---|---|---|---|---|---|---|
| | | | No. of | No. of | | |
| | | | positive | isolates with | | Explanation |
| | | No. of | strains (rapid | a weak or | No. of | for isolates |
| | No. of | isolates | Cycle | late | negative | with late or no |
| Species | species | tested | threshold) | amplification | isolates | amplification* |
| Bacteroides merdae | 17 | 27 | 0 | 0 | 27 | |
| Bacteroides stercoris | 18 | 26 | 0 | 0 | 26 | |
| Bacteroides | 12 | 14 | 0 | 1 | 13 | F |
| thetaiotaomicron | | | | | | |
| Bacteroides vulgatus | 16 | 25 | 0 | 1 | 24 | F |
| Cardiobacterium | 2 | 3 | 0 | 0 | 3 | |
| hominis | | | | | | |
| Clostridium botulinum | 14 | 14 | 0 | 2 | 12 | G |
| Clostridium difficile | 4 | 4 | 0 | 0 | 4 | |
| Clostridium septicum | 11 | 11 | 0 | 3 | 8 | G |
| Clostridium tetani | 3 | 3 | 0 | 0 | 0 | |
| Eikenella corrodens | 3 | 3 | 0 | 0 | 3 | |
| Enterococcus faecalis | 8 | 8 | 0 | 2 | 6 | H |
| Haemophilus ducreyi | N/A | N/A | N/A | N/A | N/A | |
| Haemophilus ducreyi | 10 | 10 | 0 | 2 | 8 | H |
| Kingella denitrificans | 3 | 3 | 0 | 0 | 3 | |
| Morganella morganii | 1 | 1 | 0 | 1 | 0 | H |
| Neisseria gonorrhoeae | 4 | 4 | 0 | 0 | 4 | |
| Oligella urethralis | 2 | 3 | 2 | 0 | 1 | I |
| Oligella urethralis | 1 | 2 | 0 | 2 | 0 | I |
| Oligella urethralis | 1 | 2 | 1 | 1 | 0 | I |
| Proteus mirabilis | 3 | 6 | 0 | 0 | 6 | |
| Providencia stuartii | 5 | 8 | 0 | 0 | 8 | |
| Streptococcus | 8 | 10 | 0 | 0 | 10 | |
| agalactiae | | | | | | |
| Staphylococcus | 5 | 9 | 0 | 0 | 9 | |
| chromognes | | | | | | |
| Prevotella oralis | 1 | 1 | 0 | 0 | 1 | |
| Staphylococcus | 6 | 8 | 0 | 0 | 8 | |
| stimulans | | | | | | |
| Moraxella atlantae | 1 | 1 | 0 | 1 | 0 | |
| Kocuria rosea | 8 | 8 | 0 | 0 | 8 | |

*Explanation for isolates with late or no amplification:

[0305] Reason A: The 16S sequence of negative isolates does not match the probe sequence suggesting that these strains might have been mistyped by phenotypic methods.
[0306] Reason B: The Probe is strain-specific rather than species-specific (few mismatches with other isolates from the same species or other species).
[0307] Reason C: Mistyped strain.
[0308] Reason D: No PCR product because of a TaqMan® probe that does not fit the TaqMan® probe design guidelines.
[0309] Reason E: Possible split of isolates at sub-species level.
[0310] Reason F: Non-specific late amplification for isolates with >6 mismatches for the probe sequence.
[0311] Reason G: Non-specific late amplification for isolates with 1-3 mismatches for the probe sequence.
[0312] Reason H: Non-specific late amplification for isolates with 3-5 mismatches for the probe sequence.
[0313] Reason I: The probe PB21B28 is the same as PB21 minus the 2 bases in 5′ that gives the species specificity. PB21A29 is the same as PB21 minus 1 base. The location of critical nucleotides for species-specificity at the 5′ end might not be optimal.

[0314] Some of the discrepancies between TaqMan® results and the expected identification (i.e. the species the isolate belongs to) Were further investigated by sequencing of 16S rDNA. For instance, all isolates labeled as Bacteroides vulgatus were positive in a TaqMan® assay using a probe specific to B. vulgatus (see FIG. 6). By contrast, some isolates identified phenotypically as B. merdae or B. stercoris were negative when tested with the appropriate TaqMan® probes. Four out of eight strains labeled B. merdae and 4 of 13 strains labeled B. stercoris did not have a positive reaction in the TaqMan® assay. To determine whether these results were due to failure of the TaqMan® assay, intra-species strain variation, or a wrong identification call based on phenotypic testing, the 16S rDNA of the strains labeled as B. vulgatus or B. merdae or B. stercoris were sequenced. The sequence alignment was obtained using ClustalX. The samples that were negative by TaqMan® assay did not contain the TaqMan® probe sequence in their 16S rDNA. Thus, the TaqMan® results were consistent with the DNA sequence of those isolates, and the species identity of the isolates was apparently mis-typed using phenotypic methods. These results emphasize the need to develop rapid diagnostic tests based on molecular methods to complement and/or replace some phenotypic tests in order to improve the diagnostics of bacterial infections and move towards more appropriate and efficient antibiotic therapy.

### Example 8

### TaqMan® Probes Specific to Clostridium difficile

[0315] TaqMan® reactions were conducted in 50 μL volumes in 96-well optical-grade plate (PE Applied Biosystems) using a ABI7700 sequence detector (PE Applied Biosystems). Each 50 μL reaction mix contained 900 nM forward primer (Seq ID 48716), 900 nM reverse primer (Seq ID 48741), 250 nM TaqMan® probe (Seq ID 273) labeled with FAM in the 5′ direction and TAMRA in the 3′ direction, and 25 μL of TaqMan® universal PCR master mix at a concentration of 2× (PE Applied Biosystems) that contained MgCl₂, AmpErase® uracil-N-glycosylase (UNG), AmpliTaq Gold® DNA polymerase, reference dye ROX, and a mix of dNTP including dUTP, and 10 ng of DNA sample.

[0316] A typical TaqMan® reaction consisted of three steps: (1) 2 min. at 50° C. to activate the UNG enzyme that prevents the reamplification of carryover-PCR products by removing any uracyl present in double-stranded DNA; (2) 10 min at 95° C. to activate the AmpliTaq Gold® enzyme; and (3) 40 cycles of 15 sec at 95° C. (denaturation) and 1 min at 60° C. (annealing and extension).

[0317] Data analysis was conducted using the ABI 7900 Prism software (Applied Biosystems). The baseline fluorescence was determined by the software between the 3^{rd} and 15^{th} PCR cycles. The baseline can be recalculated between different cycles (3 and 12 for example) if the first positive samples have a Ct of less than 15. Once the baseline is set correctly, the software automatically sets the threshold at 10 standard deviations above the mean baseline fluorescence. The threshold can also be adjusted manually by the user. The cycle threshold (Ct) represents the cycle number at which there is a significant increase of fluorescence above threshold.

[0318] The software examines the fluorescence intensity of reporter and quencher dyes and calculates the increase in normalized reporter emission intensity over the course of the amplification. The ΔRn is calculated as follows:
[0319] Rn⁺ is the Rn value of a reaction containing all components
[0320] Rn⁻ is the Rn value of an unreacted sample (baseline value or the value detected in non-template control).
[0321] ΔRn is the difference between Rn⁺ and Rn⁻. It is an indicator of the magnitude of the signal generated by the PCR.
   The results expressed as ΔRn are then plotted versus time, represented by cycle number, to produce a continuous measure of PCR amplification.

[0322] A non-template control was used as a negative control.

[0323] FIG. 5 illustrates results from the TaqMan® real-time PCR test of five bacterial strains, two C. difficile strains and three strains representing other species from the Clostridium genus. The test clearly distinguished between the C. difficile strains (#06H01 and 06H02) and the non C. difficile isolates, since only the isolates belonging to C. difficile species had a positive amplification signal detected after 18 PCR cycles (CT value of about 18 cycles).

### Example 9

### Probes Specific to Clostridium septicum

[0324] TaqMan® reactions were conducted in 50 μL volumes in 96-well optical-grade plate (PE Applied Biosystems) using an ABI7700 sequence detector (PE Applied Biosystems). Each 50 μL reaction mix contained 900 nM forward primer (Seq ID 48720), 900 nM reverse primer (Seq ID 48745), 250 nM TaqMan® probe (Seq ID 5711) labeled with FAM in the 5′ direction and TAMRA in the 3′ direction, 25 μL of TaqMan® universal PCR master mix at a concentration of 2× (PE Applied Biosystems) that contained MgCl₂, AmpErase® uracil-N-glycosylase (UNG), AmpliTaq Gold® DNA polymerase, reference dye ROX, and a mix of dNTP including dUTP, and 10 ng of DNA sample. The results expressed as ΔRn (indicator of the magnitude of the signal generated by the PCR) were then plotted versus time, represented by cycle number, to produce a continuous measure of PCR amplification.

[0325] A non-template (no DNA) control was used as a negative control. As shown in FIG. 4, the two isolates of Clostridium septicum gave the expected positive results with the fastest Ct (˜15). A partial multiple sequence alignment of 16S sequences of all samples tested in this assay is presented in Table 13. The region containing the probe for the C. septicum species is shaded; the nucleotides that differ from the probe sequence for the other Clostridium species tested are underlined. Interestingly, three samples belonging to other species gave a delayed Ct with a value of 17 to 19. Although this TaqMan® assay was able to clearly differentiate the C. septicum isolates from other samples, it also suggests that other DNA-based tests more robust and specific than TaqMan® assays need to be developed to reach the in vitro diagnostic market.

[image]

### Example 10

### Optimization of DNA Concentration to Use in TaqMan® Assay

[0326] The TaqMan® assay for detecting DNA sequence differences is based on real-time PCR which can be also be used to quantify the amount of target DNA originally present in a sample to test. Therefore, it is important to determine the optimal DNA concentration to use in each test, and different isolates should be tested at the same DNA concentration in order to make an accurate comparison of their threshold cycles (Ct). The threshold cycle (Ct) is defined as the PCR cycle at which a fluorescence signal passes a preset value (threshold). The concentration of DNA stock solutions was first determined using a spectrophotomer, reading DNA absorbance at 260 nm. Serial dilutions of genomic DNA from one Bacteroides stercoris isolate were used as templates for real-time PCR. FIG. 3 shows the relative fluorescence obtained for each PCR cycles and for each DNA concentration tested. The fastest Ct was obtained with the highest DNA amount used (50 ng). However, a concentration of 10 ng represents a suitable compromise between optimizing Ct and conserving DNA since the Ct had a similar value (approximately 18) to the Ct obtained with DNA tested at 25 and 50 ng. Furthermore, the slope of the curves was also similar. It thus may be preferred to test the DNA samples at about 10 ng per reaction.

### Example 11

### Correlation Between the Identification Obtained by Phenotypic Testing with Identification Based on 16S rDNA Sequence

[0327] Each of 1,241 16S sequences has been subjected to a search for homologous sequences in the GenBank database using the BLAST algorithm. In order to determine if the phenotypic identification was supported by the 16S rDNA sequence information, the species represented by the first ten BLAST hits were compared to the species name assigned to the samples as a result of phenotypic characterization. The following categories: CORRECT TYPE, PROBABLY CORRECT, CLOSE MATCH, MISTYPED, POSSIBLE MISTYPE, NOVEL SEQUENCE, and VAGUE SAMPLE NAME were defined based on the presence of 16S rDNA sequences for the expected species in GenBank and/or RDP and the Blast hit position obtained for this given species (Table 16A).

TABLE 16A

| | Percent | |
|---|---|---|
| | of | |
| TYPING | isolates | GenBank and RDP hits |
| CORRECT | 69 | Hit #1, 2, or 3 in GenBank and/or RDP |
| TYPE | | |
| PROBABLY | 7 | No hit in top 10 in one database but hit #1 to #4 |
| CORRECT | | in the other database |
| CLOSE | 4 | Hit #4 to #10 in GenBank and RDP. |
| MATCH | | |
| MISTYPED | 10 | No hit in top 10 in GenBank and RDP, but |
| | | species represented in both databases. |
| POSSIBLE | 4 | No hit in top 10 in GenBank and/or RDP, but |
| MISTYPE | | species represented in GenBank or RDP. |
| NOVEL | 4 | No hit in top 10 in GenBank and RDP because of |
| SEQUENCE | | “novel sequences”. |
| VAGUE | 2 | Unclear name |
| SAMPLE | | |
| NAME | | |

[0328] BLAST result hits 4 to 10 were further investigated to determine whether or not a clear assignment can be made from the additional information obtained.

[0329] Only 69% of the isolates had a 16S sequence that gave the best sequence homology with the 16S sequence of the expected species. In other words, the identification of the isolate by 16S rDNA sequencing agreed with the identification results obtained by phenotyping for about two-thirds of all the isolates tested. For as many as 31% of the isolates, the species name defined by phenotypic methods did not match the information obtained using a BLAST analysis, at least at the level of the top three hits obtained.

[0330] There are several possible explanations for these findings including (1) the species not represented in public databases, (2) sequencing errors, (3) some 16S sequences are too short in the public databases, (4) nomenclature changes not integrated, (5) closely related species not differentiated by 16S rDNA, (6) species not claimed as identifiable with the phenotypic identification products used, (7) unclear identification based on phenotypic analysis, and/or (8) wrong phenotypic identification.

[0331] These results underscore the need to check a reference database for accuracy. These results also emphasize the need to develop rapid diagnostic tests based on molecular method in complement and/or in replacement of some phenotypic tests in order to improve the diagnostic of bacterial infections and orient towards an appropriate and efficient antibiotherapy.

### Example 12

### An Apibio Low Density Chip

[0332] The 16S rDNA probes described in this patent can serve as the basis for the design of research and commercial kits for bacterial identification. The probes are suitable to be tested in low-density microarray systems, such as those developed by Apibio (Grenoble, France). Several probes (up to 1,000) can be spotted on a solid substrate. The substrate or support actually contains several wells and several probes (up to 16) can be spotted in each well of the support. Depending on the number of probes specific to a particular species, one well can be dedicated to a particular bacterial species. Biotinylated PCR products will be prepared for each of the bacterial strains to be identified. The resulting PCR products will then be hybridized to the species-specific oligonucleotide (SSO) probes in each well of the solid support. The probe-target hybridization will be evaluated by a streptavidin-coupled detection with colorimetry or fluorescence. A positive signal is expected when the DNA target tested and the probes spotted on the support belong to the same species. Negative and positive controls preferably are both adhered or spotted on each DNA chip or chip substrate.

### Example 13

### Use of Microarray for the detection of Streptococcus agalactiae

[0333] The 16S rDNA probes described in this application can be used on a high-density DNA chip system, such as GeneChip® (Affymetrix). Since the length of probes, the Tₘ and secondary structures of probes are important for preparing a GeneChip® array, the probes can be derived from 20-mer, 30-mer and species-specific regions (SSR), such as those disclosed herein. The species-specific oligonucleotides (SSOs) and group-specific oligonucleotides (GSOs) covering clinically relevant species were used to build a GeneChip® (Affymetrix) chip. One of these species was Streptococcus agalactiae, which is responsible for severe infections in neonates. For a given species-specific oligonucleotide or group-specific oligonucleotide, the original 20-mer sequence and four 17-mer probes derived from the 20-mer were included onto the chip. Each probe called a perfect match (PM) cell was associated to another probe called a mismatch (MM) cell that differs from the PM by just one nucleotide (probe substitution position). The pair of PM and MM cells defines an atom on the chip. For Streptococcus agalactiae species, twenty 20-mer species-specific oligonucleotides (SEQ ID NOS: 274, 393, 665, 703, 1076, 1173, 1409, 1508, 1576, 1614, 1838, 2199, 2213, 2541, 2839, 2857, 2914, 3078, 3157, and 3232) and thirty-two 20-mer group-specific oligonucleotides (SEQ ID NOS: 28304, 28306, 29325, 29448, 29632, 30338, 30633, 32212, 33065, 33324, 33370, 34524, 34870, 35688, 35949, 36303, 36583, 36647, 37293, 37551, 39226, 39998, 41902, 42485, 42884, 43386, 43488, 43620, 44569, 45263, 45776, 46945, 47112, and 47975) and their 17-mer derivatives were used on the chip.

[0334] The assay was conducted as follows. A Streptococcus agalactiae isolate was cultured on a blood agar plate overnight. After culture, cells (600 μl of a 0.5 McFarland suspension) were mechanically lysed with beads. Cell lysate (2 μL) was used to amplify 16S rDNA gene by PCR. Each 50 μL reaction mix contained 300 nM forward primer (5′-AGA GTT TGA TCA TGG CTC AG-3′), 300 nM reverse primer (5′-GAA GGA GGT GAT CCA ACC GCA-3′), 1×PCR buffer (Expand High Fidelity Buffer Roche) that contained 1.5 mM MgCl₂, a mix of 200 nM dNTP, 1.75 unit of Taq DNA polymerase (Expand High Fidelity Taq DNA Polymerase, Roche), and 2 μL of DNA lysate. The 16S rDNA amplified fragment with a size of about 1,500 bp was then labeled with a biotinylated compound (bioPMDAM, bioMerieux), and cleaved with 0.1N HCl in order to obtain small fragments (i.e., less than 100 bp) to hybridize with the probes on the chip.

[0335] Labeled and cleaved PCR samples were then hybridized on the Affymetrix chip at 45° C. for 30 min in a hybridization buffer containing 7× saline-sodium phosphate-EDTA (SSPE), 3 M betaine, 0.01 M dodecyltri-methylammonium bromide (DTAB), and antifoam. Hybridized chips were then washed in 4×SSPE buffer containing 0.01% Triton, followed by washes in 6×SSPE buffer with 0.01% Triton. The hybridized chip was then stained with Streptavidine-phycoerythrin (DAKO) and laser scanned at 570 nm on a scanner (Hewlet Packard). The scan was recorded as a pixel image.

[0336] Data were analyzed using a bioMerieux software similar to GeneChip Analysis Suite, version 3.3 (Affymetrix). Average background noise was substracted from all the cells. A probe was scored as positive when 1) the intensity of the hybridization signal of the perfectly matched probe cell (PM) was greater than or equal to 1.2 times the intensity of the mismatch control cell (MM); and 2) the intensity of the PM was 8 times higher than the noise value. Data analysis was based on the comparaison of the hybridization signals. The full length 16S rDNA sequences of the species represented on the chip are stored into a reference database. Since each probe on the chip is derived from one 16S rDNA sequence of this database, it can easily be matched to the relevant 16S rDNA sequence and species.

[0337] In the present example, the reference database used contained 40 full-length 16S rDNAs sequences from 20 species (i.e., Burkholderia cepacia, Burkholderia gladioli, Burkholderia multivorans, Cardiobacterium hominis, Enterobacter sakazakii, Enterococcus faecalis, Gemella morbillorum, Granulicatella adiacens, Kocuria rosea, Mannheimia haemolytica, Pantoea agglomerans, Proteus penneri, Providencia stuartii, Pseudomonas aeruginosa, Ralstonia pickettii, Sphingobacterium multivorum, Staphylococcus chromogenes, Staphylococcus simulans, Streptococcus agalactiae, and Vibrio cholerae). All the positive hybridization signals of the test samples are then correlated to species that contain the probes on the chip with the highest sequence homology. These sequences are full length 16S rDNA sequences without SEQ ID NO and are included in Table 16B. Each species is represented on the chip by its different species-specific and group-specific oligonucleotides. Since some species have a higher number of species-specific oligonucleotides than others and some species lack group-specific oligonucleotides, the number of nucleotide positions tested on the chip varies from one species to species. Below is the percent homology ranking obtained for the type strain of Streptococcus agalactiae (ATCC 13813T).

TABLE 16B

| | % | |
|---|---|---|
| Species | Homology | probe* |
| Streptococcus agalactiae | 100 | SSO |
| Streptococcus agalactiae | 94.29 | GSO + SSO |
| Streptococcus agalactiae | 87.50 | GSO |
| Burkholderia cepacia | 84.62 | SSO |
| Burkholderia cepacia | 84.62 | GSO + SSO |
| Ralstonia pickettii | 80.00 | SSO |
| Ralstonia pickettii | 80.00 | GSO + SSO |
| Staphylococcus chromogenes | 70.00 | SSO |
| Staphylococcus chromogenes | 70.00 | GSO + SSO |
| Mannheimia haemolytica | 66.67 | SSO |
| Mannheimia haemolytica | 66.67 | GSO + SSO |
| Sphingobacterium multivorum | 52.63 | SSO |
| Granulicatella adiacens | 50.00 | GSO |
| Sphingobacterium multivorum | 50.00 | GSO |
| Staphylococcus simulans | 49.32 | SSO |
| Staphylococcus simulans | 49.32 | GSO + SSO |
| Burkholderia gladioli | 47.83 | GSO |
| Sphingobacterium multivorum | 47.37 | GSO + SSO |
| Kocuria rosea | 47.19 | SSO |
| Kocuria rosea | 47.19 | GSO + SSO |
| Enterococcus faecalis | 43.68 | SSO |
| Enterococcus faecalis | 43.68 | GSO + SSO |
| Enterobacter sakazakii | 42.86 | SSO |
| Gemella morbillorum | 42.17 | GSO |
| Burkholderia gladioli | 41.76 | GSO + SSO |
| Gemella morbillorum | 41.71 | GSO + SSO |
| Proteus penneri | 41.67 | SSO |
| Granulicatella adiacens | 40.96 | GSO + SSO |
| Granulicatella adiacens | 39.44 | SSO |
| Proteus penneri | 39.13 | GSO |
| Gemella morbillorum | 38.89 | SSO |
| Cardiobacterium hominis | 38.24 | SSO |
| Vibrio cholerae | 37.21 | GSO |
| Burkholderia gladioli | 36.73 | SSO |
| Proteus penneri | 36.36 | GSO + SSO |
| Providencia stuartii | 35.71 | SSO |
| Vibrio cholerae | 35.51 | GSO + SSO |
| Pantoea agglomerans | 35.29 | SSO |
| Cardiobacterium hominis | 31.71 | GSO + SSO |
| Pantoea agglomerans | 28.00 | GSO + SSO |
| Enterobacter sakazakii | 25.00 | GSO + SSO |
| Pantoea agglomerans | 25.00 | GSO |
| Providencia stuartii | 22.22 | GSO + SSO |
| Vibrio cholerae | 11.11 | SSO |
| Enterobacter sakazakii | 11.11 | GSO |
| Kocuria rosea | 11.11 | GSO |
| Burkholderia multivorans | 0.00 | GSO + SSO |
| Burkholderia multivorans | 0.00 | GSO |
| Cardiobacterium hominis | 0.00 | GSO |
| Providencia stuartii | 0.00 | GSO |

*“SSO”: species-specific oligonucleotide; “GSO”: group-specific oligonucleotide

[0338] Species-specific probes and group-specific probes were analyzed separately as well as in combination. In all cases, the best homology score was obtained for Streptococcus agalactiae. These results confirm that the 52 probes cited above and specific to Streptococcus agalactiae or to a group of species including S. agalactiae can be used on a microarray for the detection of Streptococcus agalactiae in a sample. This methodology can be applied to a large range of species. Such microarrays can be used to diagnose the cause of a bacterial infection.

### Example 14

### Verification of the Species Specificity and Robustness of Species-Specific Oligonucleotides by Light Cycler Assay

[0339] The LightCycler method is a real-time PCR method. It uses two different species-specific oligonucleotide (SSO) probes that are labeled with different dyes. These two hybridization probes hybridize to their complementary DNA template in a head-to-tail arrangement; i.e., the two probes are just separated by one or two nucleotides. Because of this close proximity and after excitation by a blue light source, the donor dye (fluorescein) located on the first probe transfers its energy to the acceptor dye (Red640) located on the second probe. The transfer of energy causes fluorescent light to be emitted. When the probes cannot find their complementary sequence on the DNA template, no hybridization occurs such that no fluorescent signal is produced. The intensity of the fluorescent signal is proportional to the amount of PCR product generated during the cycle. Similar to the TaqMan® assay, a cycle threshold (Ct) is obtained.

[0340] In Example 13, the 16S rDNA sequence of Staphylococus simulans strains was used to select two species-specific hybridiztion probes spaced by 1 nucleotide. At the same time, two non-species-specific PCR primers were designed as controls and used in a LightCycler assay with the two hybridization probes. Sequences of these probes and primers are presented in Table 17.

TABLE 17

Probes and primers designed from the sequence of S. simulans
(sample #05G06)

| | | | | |
|---|---|---|---|---|
| Starting | | | | |
| position | Length | Tₘ | GC % | Seqeunce 5′ to 3′ |

| | | | | | |
|---|---|---|---|---|---|
| Forward | 29 | 20 | 63.08 | 55 | CATGCAAGTCGAGCGAACAG |
| primer | | | | | |
| Reverse | 337 | 20 | 63.12 | 65 | GCTGCCTCCCGTAGGAGTCT |
| Primer | | | | | |
| Probe #1 | 168 | 30 | 73.32 | 43. | GCATGGTTTCATGATGAAAGACGGTTTTGC |
| Probe #2 | 199 | 30 | 71.76 | 50 | GTCACTTATAGATGGACCCGCGGCGTATTA |

Real-time PCR data obtained with this combination of probes and primers on different Staphylococcal species are presented in FIG. 7. The results clearly show that only strains belonging to Staphylococcus simulans species gave a positive signal with a Ct of around 16.

### Example 15

### Verification of the Species Specificity of Species-Specific Oligonucleotides by Pyrosequencing

[0341] The pyrosequencing method is a simple and easy-to-use sequencing method by synthesis. This method uses a mixture of four enzymes and specific substrates. At first, a sequencing primer is hybridized to a single-stranded PCR product (e.g., DNA template). With an enzyme cascade system, light is produced whenever a nucleotide is incorporated and forms a base pair with a complementary nucleotide located on the DNA template (as discussed in Example 13 above). Each peak represents the incorporation of the nucleotide mentioned on the X-axis during the sequencing reaction. The size of the peak determines the number of nucleotides incorporated. The software also gives a schematic representation of the pyrogram for each possibility of the single nucleotide polymorphism (SNP).

[0342] In this example, six species of Enterococcus (i.e., Enterococccus faecalis, E. durans, E. faecium, E. avium, E. gallinarum, and E. saccharolyticus) were selected to determine if pyrosequencing was a suitable method to validate (at the experimental level) the species specificity of some SSOs (signature sequences). A multiple sequence alignment of 16S rDNA sequences of the six different species of Enteroccci was performed using ClustaIX and GeneDoc softwares. Variable regions that contained SSOs were identified. Variation at one nucleotide position between the different species defines a distinguishing moiety also known as a single nucleotide polymorphism (SNP). Four SNP positions were selected to test the pyrosequencing method.

[0343] PCR primers and sequencing primers were designed to amplify and sequence the 16S rDNA areas that contain a SNP. The size of PCR product should not exceed 500 bp in order to minimize the risk of mispriming for the sequencing primer. The pyrosequencing primer needs to be localized just upstream of the SNP site as the maximum length of the sequence obtained by pyrosequencing is about 40-50 bases. Pyrosequencing was done on a Pyrosequencer using the SNP detection software.

[0344] Two isolates per species for the six different species of Enterococci were tested. An example of pyrogram is presented in FIG. 8. Table 18 illustrates the results obtained for 4 SNP for 6 different species of Enterococci.

TABLE 18
Summary of SNP screening by pryrosequencing for 6 species
of Enterococci.

| | | | | 1321 |
|---|---|---|---|---|
| Species | 272 G/T | 310 G/A | 1131 A/G | C/T |
| Enterococcus faecalies | G | G | A | C |
| Enterococcus durans | G | A | ? | T |
| Enterococcus faecium | G | A | G | C |
| Enterococcus avium | T | A | A | T |
| Enterococcus gallinarum | G | G | A | T |
| Enterococcus saccharolyticus | T | G | A | T |

Interestingly, by testing only 4 SNPs, it was possible to differentiate six species of Enterococci. These results underscore the high potential of pyrosequencing for bacterial typing and rapid evaluation of signature sequences, provided that adequate PCR and sequencing primers are designed and used for the group of species to screen.

### Example 16

### Identification of Nucleotide Positions Comprising “Distinguishing Moieties”

[0345] To identify nucleotides that are critical for distinguishing species (i.e., distinguishing moieties), comparisons with the GenBank sequence database were made using BLAST for each of the 28,070 Species Specific Oligonucleotides. For each SSO, the top GenBank BLAST hits were compared with the SSO sequence, and the number of variations at each nucleotide position counted. The higher the count at any position of the 30-mer (e.g., Position 1 being represented by the column entitled “pos_{—}01”; Postion 2 being represented in the column entitled “pos_{—}02” and so forth), the more critical th distinguishing moiety is in discriminating other species. These counts are represented in Table 19, which is attached to the specification as a separate document. For certain sequences, only a 20-mer was used and analyzed, consequently no information is provided for certain sequences at postions 21-30.

[0346] The results acquired through this method may change over time due to the entry of new sequence information into the public domain. Thus, one skilled in the art will recognize that the assignment of robustness of distinguishing moieties is a process that should be updated periodically by methods such as the one described here. Even if the status of some of the distinguishing moieties described here changes from species-specific to genus-specific or group-specific, a sufficient number of probes containing distinguishing moieties are provided to maintain the diagnostic utility of the invention.

### Example 17

### Further Analysis of the SSOs and GSOs

[0347] The data from Example 4 was analyzed further in view of additional sequence information released to the public. Sequences from a total of 567 different bacterial species were examined. No sequence could be obtained for 7 isolates representing 4 species: Corynebacterium minutissimum (2 isolates), Kocuria kristinae (1 isolate), Micrococcus lylae (3 isolates), and Sphingobacterium spiritivorum (1 isolate). The 16 S loci of these 7 isolates could not be amplified using the 16S universial primers as discussed above.

[0348] From the collection of 1,325 16S rDNA sequences, 2,724 30-mer SSOs, 25,346 20-mer SSOs, and 20,954 20-mer GSOs were identified in silico using the methods discussed above. The 30-mer and 20-mer SSos were specific for 325 and 648 different species respectively. At least one SSO was identified for each of 491 of the 567 total species examined. Another 46 species were identified as the species level using a combination of two or more GSOs. Tweny species could only be characterized by using GSOs as belonging to a subset containing multiple sepces. Only 10 species were not identifiable at all using any combination of the SSOs and GSOs (i.e., Cedecea neteri, Citrobacter gillenii, Citrobacter murliniae, Enterobacter asburiae, Enterobacter intermedius, Kluvera ascorbata, Kluyvera cryocrescens, Moraxella (Branbamella) catarrhalis, Pantoea dispersa, and Pseudomonas alcaligenes.). The SSO and GSO probes developed were capable of discriminating 557 out of the 567 species.

[0349] To ensure the elimination of SSOs that were merely strain specific, further comparisons using all sequences for a given species in both public and properiteary 16S databases was performed. A total of 15,127 SSOs were found to be species-specific for 271 species after comparison to the proprietary sequence data and to publicaly available 16S rDNA sequences in GenBank. When the analysis was extended to include partial 16S rDNA sequences in RDP, a total of 9,879 SSOs representing 232 species were species specific. The information based on this further analysis is provided in Tables 20 and 21, which are similar to Tables 14 and 15 respectively.

[0350] All references cited herein as well as U.S. Ser. No. 60/464,955 filed Apr. 24, 2003 are herein incorporated in their entirety for all purposes.

We claim:

1. A plurality of 16S polynucleotides immobilized to a solid support, wherein the plurality of 16S polynucleotides are subsequences of 16S rDNA and each 16S polynucleotide individually comprises at least one distinguishing moiety, which differentiates between microorganisms by genus, group, species, strain, and/or isolate.

2. The plurality of 16S polynucleotides of claim 1, wherein the 16S polynucleotide is an oligomer of 11 to 45 nucleotides.

3. The plurality of 16S polynucleotides of claim 2, wherein the 16S polynucleotide is an oligomer of 15, 16, 17, 18, 19, 20, 21, 22, 23, 24, 25, 26, 27, 28, 29, or 30 nucleotides.

4. The plurality of 16S polynucleotides of claim 3, wherein the solid support is a bead, slide, chip, microtube, or plate.

5. The plurality of 16S polynucleotides of claim 4, wherein the bead is glass or plastic.

6. The plurality of 16S polynucleotides of claim 1, wherein at least 5 to 1×10⁶ 16S polynucleotides are immobilized to the solid support.

7. The plurality of 16S polynucleotides of claim 1, wherein at least 5 to 100 16S polynucleotides are immobilized to the solid support.

8. A method of detecting the presence of a microorganism and determining an isolate, a strain, a species, a group, or a genus of a microorganism in a sample suspected of containing the microorganism comprising the steps of:
(A) selecting at least one primer pair to amplify at least a portion of a 16S rDNA of the sample;
(B) amplifying the 16S rDNA of the sample with the at least one primer pair;
(C) contacting the amplified rDNA with at least one isolated nucleic acid comprising at least one distinguishing moiety;
(D) incubating the amplified rDNA and the isolated nucleic acid under hybridizing conditions which allow hybridization in a sequence-specific manner between the sample and the at least one isolated nucleic acid to form a hybridization product;
(E) detecting the hybridization product and thereby one or more distinguishing moieties of the microorganism; and
(F) determining the isolate, strain, species, group, and/or genus of the microorganism by the presence of the one or more distinguishing moieties.

9. The method of claim 8, wherein the sample is a food, a biological sample taken from a subject, an environmental sample, or a plant.

10. The method of claim 9, wherein the subject is an agricultural animal or a mammal.

11. A kit for the detection and identification of at least one microorganism by genus, group, species, strain, and/or isolate in a sample comprising:
(A) at least one primer pair for amplification of at least a portion of a 16S rRNA of the microorganism;
(B) two or more nucleic acids comprising at least two critical residues of a 16S rDNA which distinguish the microorganism by genus, group, species, strain, or isolate;
(C) a hybridization buffer to allow sequence-specific hybridization between the probes and the nucleic acids present in the sample, or to allow sequence-specific hybridization between the probes and the nucleic acids of amplified products of the sample; and
(D) a detection moiety.

12. The kit of claim 11, wherein the kit further comprises a detection means, instructions for use of the kit, a wash buffer, and/or a hybridization buffer or any combination thereof.

13. The kit of claim 11, wherein the sample is a plant sample, an environmental sample, a food, or a biological sample obtained from a subject.

14. The kit of claim 11, wherein the 16S rDNA distinguishing moiety is a distinguishing moiety of Table 20 and/or Table 21.

15. A composition comprising a plurality of probes of Table 20 and/or Table 21, wherein each probe comprises at least one distinguishing moiety, and wherein the plurality of probes are immobilized on a substrate.

16. The composition of claim 15, wherein the substrate is a bead, a microarray plate, or a microarray slide.

17. The composition of claim 16, wherein the bead is glass or plastic.

18. The composition of claim 16, wherein the composition comprises a plurality of beads forming a matrix and the matrix is in the form of an affinity column.

19. The composition of claim 15, wherein the plurality of distinguishing moieties are genus specific, group specific, species specific, strain specific, isolate specific, or any combination thereof.

20. The composition of claim 15 further comprising a linker bound to each probe.

21. The composition of claim 15, wherein the plurality of probes are individually at least 15 nucleotides to 30 nucleotides.

22. A database comprising a plurality of distinguishing moieties which differentiate a microorganism by genus, group, species, strain, or isolate, and wherein the database comprises at least two distinguishing moieties from Tables 2, 20, or 21.

23. The database of claim 22, wherein the database further differentiates the microorganism by genus and species.

24. A reference database comprising a plurality of distinguishing moieties, wherein the distinguishing moieties include distinguishing moieties of Table 20 and/or Table 21 in relational form with a means for querying the reference database.

25. A computerized storage and retrieval system of critical residues comprising: a data entry means; a display means; a programmable central processing unit; and a data storage means having 16S rRNA distinguishing moieties and annotated information on attributes of the 16S rRNA distinguishing moieties electronically stored in a relational database.

26. The computerized storage and retrieval system of claim 25, wherein the stored 16S rRNA critical residues are selected from Tables 2, 20, and 21.

27. A method of identifying distinguishing moieties in a 16S bacterial rRNA or rDNA comprising the steps of:
(A) obtaining a nucleotide sequence of a genetic locus shared by two or more different bacterial strains, species, or genera;
(B) dividing the nucleotide sequence into a set of oligomers of length “n” which overlap by “x” nucleotides, wherein “x” is at least one nucleotide less than “n” and wherein said overlapping oligomers span the length of the sequence of the genetic locus;
(C) comparing an oligomer using a comparative algorithm against at least one database of nucleotide sequences for that locus from a plurality of bacterial strains, species, or genera, wherein the nucleotide sequences are stored in at least one database; and
(D) determining whether the oligomer has a nucleotide sequence which matches, or has no more than one mismatch with, a portion of all available nucleotide sequences for the locus of the strain, species, or genus of origin, or whether the nucleotide sequence has at least two mismatches when aligned with any other strain, species, or genus, wherein the at least two mismatches when aligned correspond to distinguishing moieties which differentiate between strain, species or genus.

28. A method of diagnosing a subject and determining the microorganism causing an infection in the subject comprising the steps of:
(A) obtaining a sample from the subject; and
(B) screening the sample for the microorganism using the kit of claim 11.

The application's sequence listing, which the Patent Office published only in electronic form, follows.

SEQUENCE LISTING (48788 sequences)

SEQ ID NO: 1 - DNA, 30 bp, Prevotella intermedia
cctaatacccgatgttgtccacatatggca

SEQ ID NO: 2 - DNA, 30 bp, Prevotella intermedia
tctgacgtggaccaaagattcatcggtgga

SEQ ID NO: 3 - DNA, 30 bp, Pediococcus dextrinicus
ccaactgatttaaaaataaacgagtggcgg

SEQ ID NO: 4 - DNA, 20 bp, Prevotella corporis
gcccaaccgctgccctgcgg

SEQ ID NO: 5 - DNA, 20 bp, Campylobacter rectus
gagagatgatcagtcacact

SEQ ID NO: 6 - DNA, 30 bp, Pediococcus dextrinicus
agtttgcttttaatgaaggcggtgcttgca

SEQ ID NO: 7 - DNA, 30 bp, Pediococcus parvulus
tgaattagaggtgcttgcaccgaagatgat

SEQ ID NO: 8 - DNA, 30 bp, Listeria grayi
gaatgaccttaggagcttgctcctttggtc

SEQ ID NO: 9 - DNA, 30 bp, Enterococcus faecalis
cataacagtttatgccgcatggcataagag

SEQ ID NO: 10 - DNA, 20 bp, Campylobacter rectus
agagatgatcagtcacactg

SEQ ID NO: 11 - DNA, 30 bp, Propionibacterium propionicus
ttcagacctttaggcatcttttggtttgga

SEQ ID NO: 12 - DNA, 30 bp, Enterococcus faecalis
aacagtttatgccgcatggcataagagtga

SEQ ID NO: 13 - DNA, 30 bp, Propionibacterium propionicus
tgctaataccggatattcagacctttaggc

SEQ ID NO: 14 - DNA, 30 bp, Pediococcus pentosaceus
attatgacgtacttgtactgattgagattt

SEQ ID NO: 15 - DNA, 30 bp, Corynebacterium pilosum
ttttgttggaaagcctttgggcggtatggg

SEQ ID NO: 16 - DNA, 30 bp, Clostridium ramosum
ggcggctacaggaaatggtagccgagtgac

SEQ ID NO: 17 - DNA, 30 bp, Pasteurella aerogenes
ccagagaagagcgcagagatgtgcttgtgc

SEQ ID NO: 18 - DNA, 30 bp, Clostridium ramosum
aacggcggctacaggaaatggtagccgagt

SEQ ID NO: 19 - DNA, 30 bp, Prevotella intermedia
tgtccacatatggcatctgacgtggaccaa

SEQ ID NO: 20 - DNA, 20 bp, Prevotella corporis
cgtgaaaagcagcggcccaa

SEQ ID NO: 21 - DNA, 30 bp, Neisseria elongata
aaaaaggagcggttaatacccgtttctgct

SEQ ID NO: 22 - DNA, 20 bp, Prevotella corporis
cctgcggcgcgaactgcttg

SEQ ID NO: 23 - DNA, 30 bp, Propionibacterium granulosum
aaacttgatgcttaacgttgagcgtgcttt

SEQ ID NO: 24 - DNA, 30 bp, Pediococcus dextrinicus
ggagaagaacgtatttggtagtaactggcc

SEQ ID NO: 25 - DNA, 30 bp, Prevotella intermedia
gcagacgcaggatacagagatgttgactcc

SEQ ID NO: 26 - DNA, 20 bp, Prevotella melaninogenica
gcttgcactcaatggacgtc

SEQ ID NO: 27 - DNA, 20 bp, Listeria grayi
gtcgaacgaatgaccttagg

SEQ ID NO: 28 - DNA, 30 bp, Haemophilus ducreyi
aggaaggcagttttgttaatagcaaaattg

SEQ ID NO: 29 - DNA, 20 bp, Bacillus azotoformans
ctcttcgaacctcatggttc

SEQ ID NO: 30 - DNA, 30 bp, Pediococcus dextrinicus
tggtagtaactggccagatagtgacggtat

SEQ ID NO: 31 - DNA, 30 bp, Bacillus badius
gacggaagcttgcttccgttcaagttagcg

SEQ ID NO: 32 - DNA, 30 bp, Paenibacillus larvae
cagaggtgggcactctaagatgactgccgg

SEQ ID NO: 33 - DNA, 30 bp, Propionibacterium propionicus
tgtaagggttagcgaatctgtaaaagccgg

SEQ ID NO: 34 - DNA, 30 bp, Enterococcus dispar
tgctaataccgcataatattaatgaactca

SEQ ID NO: 35 - DNA, 30 bp, Pediococcus dextrinicus
taaaaaccacatggtttttaattgaaagac

SEQ ID NO: 36 - DNA, 30 bp, Kingella denitrificans
tgacatgtacggaagaactcagagacgagt

SEQ ID NO: 37 - DNA, 20 bp, Haemophilus ducreyi
tctttaagactggcgcccga

SEQ ID NO: 38 - DNA, 30 bp, Propionibacterium propionicus
atcttttggtttggaaagttctggcggtgg

SEQ ID NO: 39 - DNA, 30 bp, Enterococcus faecalis
atggcataagagtgaaaggcgctttcgggt

SEQ ID NO: 40 - DNA, 30 bp, Granulicatella adiacens
aaagaggcgcaagcttctgctgatggatgg

SEQ ID NO: 41 - DNA, 30 bp, Listeria grayi
ataccgaataataatcagctccgcatggag

SEQ ID NO: 42 - DNA, 30 bp, Listeria grayi
caggtttgaaaggcggcttcggctgtcact

SEQ ID NO: 43 - DNA, 30 bp, Granulicatella adiacens
agaggcgcaagcttctgctgatggatggac

SEQ ID NO: 44 - DNA, 30 bp, Pediococcus dextrinicus
aaggcggtgcttgcaccaactgatttaaaa

SEQ ID NO: 45 - DNA, 30 bp, Enterococcus faecalis
cgcatggcataagagtgaaaggcgctttcg

SEQ ID NO: 46 - DNA, 20 bp, Propionibacterium propionicus
cgcgtcgaaagtgtaaactc

SEQ ID NO: 47 - DNA, 30 bp, Bacillus badius
tgacggaagcttgcttccgttcaagttagc

SEQ ID NO: 48 - DNA, 30 bp, Prevotella intermedia
tccactcggggataccccgttgaaagacgg

SEQ ID NO: 49 - DNA, 30 bp, Pediococcus dextrinicus
gtagtaactggccagatagtgacggtatcc

SEQ ID NO: 50 - DNA, 30 bp, Pediococcus damnosus
cgcataataaaatgaaccgcatggtttatt

SEQ ID NO: 51 - DNA, 30 bp, Listeria ivanovii
agtagtgacgcatgtcatcactttgaaaga

SEQ ID NO: 52 - DNA, 30 bp, Pediococcus dextrinicus
tattaaaaaccacatggtttttaattgaaa

SEQ ID NO: 53 - DNA, 30 bp, Streptococcus equi
acagtgatgggagtggaaagtccatcatgt

SEQ ID NO: 54 - DNA, 30 bp, Propionibacterium propionicus
agtcagttgcgagcctgtaagggttagcga

SEQ ID NO: 55 - DNA, 30 bp, Streptococcus hyointestinalis
atgtgggagtggaaaatccatgtcgtgacg

SEQ ID NO: 56 - DNA, 30 bp, Streptococcus uberis
acatgtaccctatttaaaaggggcaaatgc

SEQ ID NO: 57 - DNA, 30 bp, Bacillus azotoformans
gaacctcatggttcgaagataaaagatggt

SEQ ID NO: 58 - DNA, 30 bp, Listeria ivanovii
catcactttgaaagatggtttcggctatcg

SEQ ID NO: 59 - DNA, 30 bp, Lactococcus garvieae
tgggaaatctgccgagtagcgggggacaac

SEQ ID NO: 60 - DNA, 30 bp, Listeria ivanovii
gataagtagtgacgcatgtcatcactttga

SEQ ID NO: 61 - DNA, 30 bp, Clostridium ramosum
aaatggtagccgagtgacggtactttatta

SEQ ID NO: 62 - DNA, 30 bp, Bacillus lentus
ttctttcttctcctggagaaaggttgaaag

SEQ ID NO: 63 - DNA, 30 bp, Listeria ivanovii
tagtgacgcatgtcatcactttgaaagatg

SEQ ID NO: 64 - DNA, 30 bp, Propionibacterium propionicus
tgtaaactcagtgcttaacgctgagcctgc

SEQ ID NO: 65 - DNA, 30 bp, Lactococcus garvieae
tagcttgctatttttatgaagagcggcgaa

SEQ ID NO: 66 - DNA, 30 bp, Prevotella intermedia
gtatccaaccttccctccactcggggatac

SEQ ID NO: 67 - DNA, 30 bp, Lactococcus garvieae
taaagatagcttgctatttttatgaagagc

SEQ ID NO: 68 - DNA, 20 bp, Bacillus lentus
tcttctcctggagaaaggtt

SEQ ID NO: 69 - DNA, 20 bp, Campylobacter curvus
ttttcggtaatggatagggc

SEQ ID NO: 70 - DNA, 20 bp, Prevotella intermedia
aatacccgatgttgtccaca

SEQ ID NO: 71 - DNA, 20 bp, Paenibacillus macerans
ccggataatcaagtcttccg

SEQ ID NO: 72 - DNA, 20 bp, Corynebacterium pilosum
gttggaaaggcctttgggcg

SEQ ID NO: 73 - DNA, 20 bp, Paenibacillus macerans
gagacttgggaaaggcggag

SEQ ID NO: 74 - DNA, 20 bp, Listeria grayi
aatcagctccgcatggagca

SEQ ID NO: 75 - DNA, 20 bp, Listeria welshimeri
gcatgccacggctttgaaag

SEQ ID NO: 76 - DNA, 20 bp, Porphyromonas maccae
aattgctatcagataggcat

SEQ ID NO: 77 - DNA, 20 bp, Prevotella intermedia
tccactcggggataccccgt

SEQ ID NO: 78 - DNA, 30 bp, Propionibacterium propionicus
cgtctagagataggcgccccgtaaggtcgg

SEQ ID NO: 79 - DNA, 20 bp, Haemophilus ducreyi
gggggttggtctttaagact

SEQ ID NO: 80 - DNA, 20 bp, Porphyromonas maccae
ctaagttatgactgacactg

SEQ ID NO: 81 - DNA, 20 bp, Propionibacterium granulosum
gtgagttgcgacatcgtaag

SEQ ID NO: 82 - DNA, 30 bp, Lactococcus garvieae
cgaacgctaataccgcataacaatgagaat

SEQ ID NO: 83 - DNA, 20 bp, Propionibacterium propionicus
gacctttaggcatcttttgg

SEQ ID NO: 84 - DNA, 20 bp, Fusobacterium mortiferum
gagggagaggttaccttcgg

SEQ ID NO: 85 - DNA, 20 bp, Corynebacterium cystitidis
atacactggattgccatgga

SEQ ID NO: 86 - DNA, 20 bp, Aerococcus urinae
accttgtgaaagcaagcgaa

SEQ ID NO: 87 - DNA, 30 bp, Lactococcus garvieae
aatacatgcaagtcgagcgatgattaaaga

SEQ ID NO: 88 - DNA, 20 bp, Porphyromonas maccae
aatttagcggactatgtatg

SEQ ID NO: 89 - DNA, 20 bp, Prevotella intermedia
atggcatctgacgtggacca

SEQ ID NO: 90 - DNA, 20 bp, Vibrio hollisae
ggcagcgacatgaacaatcc

SEQ ID NO: 91 - DNA, 20 bp, Kocuria rosea
atactacctcttaccgcatg

SEQ ID NO: 92 - DNA, 30 bp, Propionibacterium propionicus
cgtctaatgttgccagcaagttatgttggg

SEQ ID NO: 93 - DNA, 20 bp, Porphyromonas maccae
cacgttgtcagttactatcg

SEQ ID NO: 94 - DNA, 30 bp, Paenibacillus macerans
agctaataccggataatcaagtcttccgca

SEQ ID NO: 95 - DNA, 20 bp, Prevotella corporis
ccgcgaccaagggataacct

SEQ ID NO: 96 - DNA, 20 bp, Actinomyces neuii
gcgtctagcgtttaaggctc

SEQ ID NO: 97 - DNA, 20 bp, Enterococcus faecalis
gccgcatggcataagagtga

SEQ ID NO: 98 - DNA, 30 bp, Pediococcus acidilactici
gatcatgacgtgcttgcactgaatgagatt

SEQ ID NO: 99 - DNA, 20 bp, Pediococcus parvulus
gcatggtttacttttaaaag

SEQ ID NO: 100 - DNA, 20 bp, Alicyclobacillus acidocaldarius
cggcccaattgggccttccc

SEQ ID NO: 101 - DNA, 30 bp, Vibrio hollisae
cgggcctcacgctattcgagcggccgacgt

SEQ ID NO: 102 - DNA, 20 bp, Propionibacterium propionicus
cagtcagttgcgagcctgta

SEQ ID NO: 103 - DNA, 20 bp, Prevotella corporis
atctgacgaggagcaaagat

SEQ ID NO: 104 - DNA, 20 bp, Propionibacterium granulosum
gtcggaagtggaaacttgat

SEQ ID NO: 105 - DNA, 20 bp, Prevotella corporis
cgcatgcaagtgcgggcgaa

SEQ ID NO: 106 - DNA, 30 bp, Dermabacter hominis
aaactcgaggcttaaccttgggcgtgcggt

SEQ ID NO: 107 - DNA, 20 bp, Bacteroides forsythus
cggagagtgagagctttctt

SEQ ID NO: 108 - DNA, 20 bp, Enterococcus faecalis
gcttctttcctcccgagtgc

SEQ ID NO: 109 - DNA, 20 bp, Prevotella corporis
ctcctttgaaggcatctgac

SEQ ID NO: 110 - DNA, 20 bp, Prevotella intermedia
ctgacgtggaccaaagattc

SEQ ID NO: 111 - DNA, 20 bp, Propionibacterium propionicus
gtcagttgcgagcctgtaag

SEQ ID NO: 112 - DNA, 20 bp, Propionibacterium granulosum
taacctgcccacaactttgg

SEQ ID NO: 113 - DNA, 20 bp, Propionibacterium propionicus
tgtaagggttagcgaatctg

SEQ ID NO: 114 - DNA, 20 bp, Listeria grayi
tggaaactgggagacttaga

SEQ ID NO: 115 - DNA, 20 bp, Bacteroides forsythus
gtgggctgttaagtccgcgg

SEQ ID NO: 116 - DNA, 30 bp, Enterococcus cecorum
caatggagagtacaacgagtcgcaaagccg

SEQ ID NO: 117 - DNA, 30 bp, Enterococcus cecorum
catggcagatggatgaaaggcgcttttgcg

SEQ ID NO: 118 - DNA, 20 bp, Enterococcus faecalis
acgcttctttcctcccgagt

SEQ ID NO: 119 - DNA, 20 bp, Bacillus badius
agcttgcttccgttcaagtt

SEQ ID NO: 120 - DNA, 20 bp, Propionibacterium propionicus
tagagataggcgccccgtaa

SEQ ID NO: 121 - DNA, 20 bp, Campylobacter curvus
atctatataagtagatacgg

SEQ ID NO: 122 - DNA, 20 bp, Prevotella intermedia
ctaatacccgatgttgtcca

SEQ ID NO: 123 - DNA, 20 bp, Bacteroides forsythus
gtagacgacggagagtgaga

SEQ ID NO: 124 - DNA, 20 bp, Propionibacterium propionicus
accggatattcagaccttta

SEQ ID NO: 125 - DNA, 20 bp, Listeria grayi
agcgggtttgaaaggcggct

SEQ ID NO: 126 - DNA, 20 bp, Porphyromonas maccae
tcttgggttattgcatgatg

SEQ ID NO: 127 - DNA, 20 bp, Prevotella intermedia
caagtagcgtgcaggattga

SEQ ID NO: 128 - DNA, 20 bp, Campylobacter curvus
cattactaagggacaacagt

SEQ ID NO: 129 - DNA, 20 bp, Enterococcus faecalis
ccgcatggcataagagtgaa

SEQ ID NO: 130 - DNA, 20 bp, Porphyromonas maccae
taacttgcctgatagaaagg

SEQ ID NO: 131 - DNA, 20 bp, Rothia mucilaginosa
cttaaccccgtgtattgcag

SEQ ID NO: 132 - DNA, 20 bp, Bacteroides forsythus
atgtaacctgcccgcaacag

SEQ ID NO: 133 - DNA, 20 bp, Lactococcus lactis
gggagtacccgaagtaggtt

SEQ ID NO: 134 - DNA, 20 bp, Listeria grayi
ccgaataataatcagctccg

SEQ ID NO: 135 - DNA, 20 bp, Propionibacterium propionicus
agtcagttgcgagcctgtaa

SEQ ID NO: 136 - DNA, 20 bp, Pediococcus pentosaceus
cttctgacagtctaagagat

SEQ ID NO: 137 - DNA, 20 bp, Prevotella intermedia
ttgactcccttcggggcgtc

SEQ ID NO: 138 - DNA, 20 bp, Listeria ivanovii
gtagtgacgcatgtcatcac

SEQ ID NO: 139 - DNA, 20 bp, Enterococcus faecalis
ctgaacgtcccctgacggta

SEQ ID NO: 140 - DNA, 20 bp, Lactococcus garvieae
aaatctgccgagtagcgggg

SEQ ID NO: 141 - DNA, 20 bp, Prevotella corporis
ccgcatgcaagtgcgggcga

SEQ ID NO: 142 - DNA, 30 bp, Pediococcus dextrinicus
agaagaacgtatttggtagtaactggccag

SEQ ID NO: 143 - DNA, 20 bp, Enterococcus faecalis
aacgtcccctgacggtatct

SEQ ID NO: 144 - DNA, 30 bp, Pediococcus pentosaceus
aattgattatgacgtacttgtactgattga

SEQ ID NO: 145 - DNA, 20 bp, Prevotella corporis
tccgcatgcaagtgcgggcg

SEQ ID NO: 146 - DNA, 20 bp, Bacillus azotoformans
aactcttcgaacctcatggt

SEQ ID NO: 147 - DNA, 20 bp, Propionibacterium granulosum
acagtgagttgcgacatcgt

SEQ ID NO: 148 - DNA, 20 bp, Prevotella corporis
gtgcaagcgtgccgtgaaaa

SEQ ID NO: 149 - DNA, 20 bp, Clostridium ramosum
aaatggtagccgagtgacgg

SEQ ID NO: 150 - DNA, 30 bp, Corynebacterium pilosum
cgcgcagcgagatcgtgaggttgagctaat

SEQ ID NO: 151 - DNA, 20 bp, Bacillus azotoformans
actcttcgaacctcatggtt

SEQ ID NO: 152 - DNA, 20 bp, Porphyromonas maccae
tgtcacaaggccgctaagta

SEQ ID NO: 153 - DNA, 20 bp, Streptococcus uberis
gtaccctatttaaaaggggc

SEQ ID NO: 154 - DNA, 30 bp, Lactococcus garvieae
taagtagagtggaaaattacttaagtgacg

SEQ ID NO: 155 - DNA, 20 bp, Paenibacillus larvae
cgggagacgccaggttagcg

SEQ ID NO: 156 - DNA, 30 bp, Propionibacterium granulosum
tcgcgtcggaagtggaaacttgatgcttaa

SEQ ID NO: 157 - DNA, 20 bp, Campylobacter curvus
tatagctaacttgcccatta

SEQ ID NO: 158 - DNA, 20 bp, Campylobacter curvus
ggtaatggatagggctatat

SEQ ID NO: 159 - DNA, 20 bp, Propionibacterium granulosum
cagtgagttgcgacatcgta

SEQ ID NO: 160 - DNA, 20 bp, Lactococcus garvieae
aaaattacttaagtgacggt

SEQ ID NO: 161 - DNA, 30 bp, Lactococcus garvieae
atttttatgaagagcggcgaacgggtgagt

SEQ ID NO: 162 - DNA, 20 bp, Prevotella corporis
cgtgcaagcgtgccgtgaaa

SEQ ID NO: 163 - DNA, 20 bp, Actinomyces neuii
agagggttgctattccgtga

SEQ ID NO: 164 - DNA, 20 bp, Vibrio hollisae
aacctgggagtggcattttg

SEQ ID NO: 165 - DNA, 20 bp, Porphyromonas maccae
aaatttagcggactatgtat

SEQ ID NO: 166 - DNA, 20 bp, Prevotella corporis
gcgaccaagggataacctgc

SEQ ID NO: 167 - DNA, 20 bp, Rothia mucilaginosa
gtagtggttatagatgggct

SEQ ID NO: 168 - DNA, 30 bp, Listeria welshimeri
aagtggtggcgcatgccacggctttgaaag

SEQ ID NO: 169 - DNA, 20 bp, Pediococcus dextrinicus
agtaactggccagatagtga

SEQ ID NO: 170 - DNA, 20 bp, Propionibacterium propionicus
tgggtttgaaatataccgga

SEQ ID NO: 171 - DNA, 20 bp, Listeria grayi
tccgcatggagcgggtttga

SEQ ID NO: 172 - DNA, 20 bp, Corynebacterium pilosum
ttggaaagcctttgggcggt

SEQ ID NO: 173 - DNA, 20 bp, Fusobacterium mortiferum
gaggttaccttcgggtaacc

SEQ ID NO: 174 - DNA, 20 bp, Campylobacter curvus
ttgcccattactaagggaca

SEQ ID NO: 175 - DNA, 20 bp, Paenibacillus macerans
ggagacttgggaaaggcgga

SEQ ID NO: 176 - DNA, 30 bp, Propionibacterium granulosum
agtgagttgcgacatcgtaaggtggagcga

SEQ ID NO: 177 - DNA, 20 bp, Propionibacterium granulosum
gtacagtgagttgcgacatc

SEQ ID NO: 178 - DNA, 20 bp, Actinomyces neuii
gagggttgctattccgtgag

SEQ ID NO: 179 - DNA, 20 bp, Listeria grayi
gcaggtttgaaaggcggctt

SEQ ID NO: 180 - DNA, 30 bp, Prevotella intermedia
cagcgcgaactggcggacttgagtgcacgc

SEQ ID NO: 181 - DNA, 30 bp, Lactococcus garvieae
gaagaacgttaagtagagtggaaaattact

SEQ ID NO: 182 - DNA, 20 bp, Lactococcus lactis
ggagtacccgaagtaggttg

SEQ ID NO: 183 - DNA, 20 bp, Propionibacterium granulosum
aaacttgatgcttaacgttg

SEQ ID NO: 184 - DNA, 30 bp, Propionibacterium granulosum
ctaacactttttgtgggggagctgtcgaag

SEQ ID NO: 185 - DNA, 20 bp, Serratia ficaria
tgtcttaatacggcagcgca

SEQ ID NO: 186 - DNA, 20 bp, Porphyromonas maccae
ctgtcacaaggccgctaagt

SEQ ID NO: 187 - DNA, 20 bp, Lactococcus garvieae
gggaaatctgccgagtagcg

SEQ ID NO: 188 - DNA, 20 bp, Propionibacterium propionicus
tcggtacagtcagttgcgag

SEQ ID NO: 189 - DNA, 20 bp, Campylobacter curvus
ttcggtaatggatagggcta

SEQ ID NO: 190 - DNA, 20 bp, Corynebacterium cystitidis
acactggattgccatggaga

SEQ ID NO: 191 - DNA, 20 bp, Granulicatella adiacens
aaaaccgcataggtcttcga

SEQ ID NO: 192 - DNA, 20 bp, Corynebacterium pilosum
agcctttgggcggtatggga

SEQ ID NO: 193 - DNA, 20 bp, Prevotella corporis
atgtcctcctttgaaggcat

SEQ ID NO: 194 - DNA, 20 bp, Prevotella intermedia
accaaagattcatcggtgga

SEQ ID NO: 195 - DNA, 30 bp, Lactococcus garvieae
agcgatgattaaagatagcttgctattttt

SEQ ID NO: 196 - DNA, 20 bp, Listeria grayi
agtcgaacgaatgaccttag

SEQ ID NO: 197 - DNA, 20 bp, Prevotella corporis
catctgacgaggagcaaaga

SEQ ID NO: 198 - DNA, 20 bp, Lactococcus lactis
cgagtcgcgagacagtgatg

SEQ ID NO: 199 - DNA, 20 bp, Streptococcus equi
gaagaacagtgatgggagtg

SEQ ID NO: 200 - DNA, 20 bp, Corynebacterium pilosum
gcctttgggcggtatgggat

SEQ ID NO: 201 - DNA, 20 bp, Campylobacter curvus
tatctatataagtagatacg

SEQ ID NO: 202 - DNA, 20 bp, Kingella denitrificans
actcagagacgagtttgtgc

SEQ ID NO: 203 - DNA, 20 bp, Prevotella intermedia
tttgcatttacccttcgaat

SEQ ID NO: 204 - DNA, 20 bp, Kocuria rosea
gatactacctcttaccgcat

SEQ ID NO: 205 - DNA, 30 bp, Haemophilus ducreyi
tctttaagactggcgcccgaagctaacgtg

SEQ ID NO: 206 - DNA, 30 bp, Paenibacillus larvae
ataccggatagctggtttcttcgcatgaag

SEQ ID NO: 207 - DNA, 20 bp, Listeria welshimeri
aataccgaataataagtggt

SEQ ID NO: 208 - DNA, 20 bp, Porphyromonas maccae
gtatgctcctgagcgaaagc

SEQ ID NO: 209 - DNA, 20 bp, Campylobacter curvus
atagctaacttgcccattac

SEQ ID NO: 210 - DNA, 20 bp, Haemophilus ducreyi
gtctttaagactggcgcccg

SEQ ID NO: 211 - DNA, 20 bp, Pediococcus parvulus
tgaatgaattagaggtgctt

SEQ ID NO: 212 - DNA, 20 bp, Porphyromonas maccae
tgaaatttagcggactatgt

SEQ ID NO: 213 - DNA, 20 bp, Corynebacterium pilosum
gtgttggaaaggcctttggg

SEQ ID NO: 214 - DNA, 20 bp, Pediococcus dextrinicus
aacgtatttggtagtaactg

SEQ ID NO: 215 - DNA, 20 bp, Bacteroides ovatus
cgataactccggaatagcct

SEQ ID NO: 216 - DNA, 20 bp, Porphyromonas maccae
gtgtcagggtaataccggtg

SEQ ID NO: 217 - DNA, 20 bp, Prevotella corporis
gaaaagcagcggcccaaccg

SEQ ID NO: 218 - DNA, 20 bp, Kocuria rosea
actacctcttaccgcatggt

SEQ ID NO: 219 - DNA, 20 bp, Listeria grayi
tcctttggtcgttagtggcg

SEQ ID NO: 220 - DNA, 30 bp, Neisseria gonorrhoeae
ggctgttgccaatatcggcggccgatgacg

SEQ ID NO: 221 - DNA, 30 bp, Streptococcus hyointestinalis
cataagaggtaataacacatgttattagtt

SEQ ID NO: 222 - DNA, 20 bp, Prevotella corporis
gcatctgacgaggagcaaag

SEQ ID NO: 223 - DNA, 20 bp, Bacteroides forsythus
tgggctgttaagtccgcggt

SEQ ID NO: 224 - DNA, 20 bp, Prevotella buccae
atgaagtccctcgggactcc

SEQ ID NO: 225 - DNA, 20 bp, Prevotella corporis
taaagttgcccacgcgtggg

SEQ ID NO: 226 - DNA, 20 bp, Prevotella intermedia
tgttgtccacatatggcatc

SEQ ID NO: 227 - DNA, 20 bp, Pediococcus dextrinicus
aagccggtggagtaacccgt

SEQ ID NO: 228 - DNA, 20 bp, Campylobacter curvus
agctaacttgcccattacta

SEQ ID NO: 229 - DNA, 30 bp, Streptococcus hyointestinalis
tgttattagtttaaaaggggcaactgctcc

SEQ ID NO: 230 - DNA, 20 bp, Enterococcus faecalis
cgcatggcataagagtgaaa

SEQ ID NO: 231 - DNA, 20 bp, Prevotella corporis
tcctttgaaggcatctgacg

SEQ ID NO: 232 - DNA, 20 bp, Bacillus badius
gcggacttgacggaagcttg

SEQ ID NO: 233 - DNA, 20 bp, Clostridium ramosum
gagcacttgtgctcgagtgg

SEQ ID NO: 234 - DNA, 30 bp, Enterococcus dispar
atattaatgaactcatgtttattaattgaa

SEQ ID NO: 235 - DNA, 30 bp, Streptococcus equi
agaacagtgatgggagtggaaagtccatca

SEQ ID NO: 236 - DNA, 20 bp, Enterococcus dispar
aatgaactcatgtttattaa

SEQ ID NO: 237 - DNA, 30 bp, Neisseria elongata
cttttgttagggaagaaaaaggagcggtta

SEQ ID NO: 238 - DNA, 20 bp, Clostridium ramosum
gttggatgtcaaagttcagt

SEQ ID NO: 239 - DNA, 20 bp, Streptococcus uberis
taccctatttaaaaggggca

SEQ ID NO: 240 - DNA, 20 bp, Citrobacter koseri
ccacggaaggtctcagagat

SEQ ID NO: 241 - DNA, 20 bp, Enterococcus faecalis
ggcataagagtgaaaggcgc

SEQ ID NO: 242 - DNA, 20 bp, Enterococcus faecalis
taagagtgaaaggcgctttc

SEQ ID NO: 243 - DNA, 20 bp, Pediococcus acidilactici
cgtgcttgcactgaatgaga

SEQ ID NO: 244 - DNA, 20 bp, Prevotella corporis
ttgaaggcatctgacgagga

SEQ ID NO: 245 - DNA, 20 bp, Porphyromonas maccae
ataccttatggtcttgggtt

SEQ ID NO: 246 - DNA, 20 bp, Fusobacterium mortiferum
gggtaaccaaaaccggcgca

SEQ ID NO: 247 - DNA, 20 bp, Paenibacillus larvae
agacgccaggttagcggcgg

SEQ ID NO: 248 - DNA, 30 bp, Streptococcus hyointestinalis
cacatgttattagtttaaaaggggcaactg

SEQ ID NO: 249 - DNA, 20 bp, Porphyromonas maccae
ttgcctgatagaaagggata

SEQ ID NO: 250 - DNA, 20 bp, Prevotella intermedia
atatcatgacgaactccgat

SEQ ID NO: 251 - DNA, 20 bp, Rothia mucilaginosa
ttaaccccgtgtattgcagt

SEQ ID NO: 252 - DNA, 30 bp, Kingella denitrificans
cttcggaccttgcgctatttgagcagccaa

SEQ ID NO: 253 - DNA, 20 bp, Prevotella intermedia
ggacttgagtgcacgcaacg

SEQ ID NO: 254 - DNA, 30 bp, Pediococcus pentosaceus
acttgtactgattgagattttaacacgaag

SEQ ID NO: 255 - DNA, 20 bp, Corynebacterium pilosum
aagcctttgggcggtatggg

SEQ ID NO: 256 - DNA, 20 bp, Prevotella corporis
ggcccaaccgctgccctgcg

SEQ ID NO: 257 - DNA, 20 bp, Streptococcus uberis
tgtaccctatttaaaagggg

SEQ ID NO: 258 - DNA, 20 bp, Enterococcus faecalis
gaacgtcccctgacggtatc

SEQ ID NO: 259 - DNA, 20 bp, Corynebacterium cystitidis
cactggattgccatggagac

SEQ ID NO: 260 - DNA, 30 bp, Listeria grayi
acatgcaagtcgaacgaatgaccttaggag

SEQ ID NO: 261 - DNA, 20 bp, Haemophilus ducreyi
ttaagactggcgcccgaagc

SEQ ID NO: 262 - DNA, 30 bp, Vibrio hollisae
attagctgttgggggttagaatccctggta

SEQ ID NO: 263 - DNA, 20 bp, Listeria seeligeri
gaatgataaggagtgacgca

SEQ ID NO: 264 - DNA, 20 bp, Bacteroides forsythus
ggaataaaatgagatacgtg

SEQ ID NO: 265 - DNA, 20 bp, Pasteurella aerogenes
gtgtcgagagacgaaagacc

SEQ ID NO: 266 - DNA, 20 bp, Propionibacterium propionicus
catcttttggtttggaaagt

SEQ ID NO: 267 - DNA, 20 bp, Clostridium ramosum
ttggatgtcaaagttcagtg

SEQ ID NO: 268 - DNA, 30 bp, Propionibacterium propionicus
gaaatataccggaaacgtctagagataggc

SEQ ID NO: 269 - DNA, 20 bp, Kingella denitrificans
acggaagaactcagagacga

SEQ ID NO: 270 - DNA, 20 bp, Prevotella intermedia
tgacgtggaccaaagattca

SEQ ID NO: 271 - DNA, 20 bp, Prevotella intermedia
gcagacgcaggatacagaga

SEQ ID NO: 272 - DNA, 20 bp, Kocuria rosea
ctacctcttaccgcatggtg

SEQ ID NO: 273 - DNA, 30 bp, Clostridium difficile
gacatctccttaatcggagagttcccttcg

SEQ ID NO: 274 - DNA, 20 bp, Streptococcus agalactiae
acgttggtaggagtggaaaa

SEQ ID NO: 275 - DNA, 20 bp, Pasteurella aerogenes
cagagaagagcgcagagatg

SEQ ID NO: 276 - DNA, 20 bp, Pediococcus dextrinicus
tttgcttttaatgaaggcgg

SEQ ID NO: 277 - DNA, 20 bp, Aneurinibacillus aneurinilyticus
accggatacgtttttcagac

SEQ ID NO: 278 - DNA, 20 bp, Prevotella intermedia
ctccactcggggataccccg

SEQ ID NO: 279 - DNA, 20 bp, Actinomyces neuii
gggttgctattccgtgaggt

SEQ ID NO: 280 - DNA, 20 bp, Prevotella corporis
tttgaaggcatctgacgagg

SEQ ID NO: 281 - DNA, 20 bp, Porphyromonas maccae
tcacaaggccgctaagtagg

SEQ ID NO: 282 - DNA, 20 bp, Bacillus azotoformans
ggataactcttcgaacctca

SEQ ID NO: 283 - DNA, 20 bp, Lactococcus garvieae
ggaaaattacttaagtgacg

SEQ ID NO: 284 - DNA, 20 bp, Prevotella corporis
ctgacgaggagcaaagatcc

SEQ ID NO: 285 - DNA, 20 bp, Alicyclobacillus acidocaldarius
gcccaattgggccttccccc

SEQ ID NO: 286 - DNA, 30 bp, Clostridium ramosum
ttaaaagtgcctcaaagcactggtagagga

SEQ ID NO: 287 - DNA, 30 bp, Actinomyces viscosus
cgcatggtgggcctgggaaaggtttgttcc

SEQ ID NO: 288 - DNA, 20 bp, Clostridium ramosum
gcctcaaagcactggtagag

SEQ ID NO: 289 - DNA, 20 bp, Lactococcus garvieae
gaaatctgccgagtagcggg

SEQ ID NO: 290 - DNA, 30 bp, Listeria welshimeri
aataagtggtggcgcatgccacggctttga

SEQ ID NO: 291 - DNA, 20 bp, Corynebacterium mycetoides
aggagctgcatgttggtgtg

SEQ ID NO: 292 - DNA, 30 bp, Bacillus lentus
tctttcttctcctggagaaaggttgaaaga

SEQ ID NO: 293 - DNA, 20 bp, Enterococcus faecalis
ataagagtgaaaggcgcttt

SEQ ID NO: 294 - DNA, 20 bp, Prevotella intermedia
gtccacatatggcatctgac

SEQ ID NO: 295 - DNA, 20 bp, Prevotella corporis
gcgggcgaatccccaaatcc

SEQ ID NO: 296 - DNA, 20 bp, Propionibacterium granulosum
gtggcctaacactttttgtg

SEQ ID NO: 297 - DNA, 20 bp, Campylobacter curvus
tagctaacttgcccattact

SEQ ID NO: 298 - DNA, 20 bp, Clostridium ramosum
tggatgtcaaagttcagtgc

SEQ ID NO: 299 - DNA, 30 bp, Pediococcus pentosaceus
acatcttctgacagtctaagagattagagg

SEQ ID NO: 300 - DNA, 20 bp, Prevotella intermedia
ttgtccacatatggcatctg

SEQ ID NO: 301 - DNA, 20 bp, Prevotella corporis
ctgtccggcccgtacggtct

SEQ ID NO: 302 - DNA, 20 bp, Porphyromonas maccae
gtatgaaagtacatatcctg

SEQ ID NO: 303 - DNA, 20 bp, Listeria welshimeri
cgaataataagtggtggcgc

SEQ ID NO: 304 - DNA, 20 bp, Propionibacterium propionicus
gtcgaaagtgtaaactcagt

SEQ ID NO: 305 - DNA, 20 bp, Listeria ivanovii
atgtcatcactttgaaagat

SEQ ID NO: 306 - DNA, 30 bp, Clostridium ramosum
gtattaaaagtgcctcaaagcactggtaga

SEQ ID NO: 307 - DNA, 20 bp, Corynebacterium cystitidis
actggattgccatggagaca

SEQ ID NO: 308 - DNA, 30 bp, Neisseria elongata
gaagaaaaaggagcggttaatacccgtttc

SEQ ID NO: 309 - DNA, 20 bp, Porphyromonas maccae
cagttactatcgggtaaagc

SEQ ID NO: 310 - DNA, 20 bp, Porphyromonas maccae
atgaaagtacatatcctgtc

SEQ ID NO: 311 - DNA, 30 bp, Enterococcus faecalis
gtgctaataccgcataacagtttatgccgc

SEQ ID NO: 312 - DNA, 20 bp, Propionibacterium propionicus
ctgggtttgaaatataccgg

SEQ ID NO: 313 - DNA, 20 bp, Pediococcus dextrinicus
tttggtagtaactggccaga

SEQ ID NO: 314 - DNA, 20 bp, Propionibacterium propionicus
taggcatcttttggtttgga

SEQ ID NO: 315 - DNA, 20 bp, Prevotella corporis
taccttatgtcctcctttga

SEQ ID NO: 316 - DNA, 20 bp, Fusobacterium mortiferum
ccttcgggtaaccaaaaccg

SEQ ID NO: 317 - DNA, 30 bp, Corynebacterium cystitidis
ttttgtgctggtatgggatgagcttgcggc

SEQ ID NO: 318 - DNA, 20 bp, Prevotella corporis
cgcgaccaagggataacctg

SEQ ID NO: 319 - DNA, 20 bp, Pediococcus dextrinicus
tttaaaagtaaacgagtggc

SEQ ID NO: 320 - DNA, 30 bp, Kingella denitrificans
cgagtttgtgccttcgggagccgtaacaca

SEQ ID NO: 321 - DNA, 20 bp, Prevotella corporis
tggcttgagtgcgccggaag

SEQ ID NO: 322 - DNA, 20 bp, Rothia mucilaginosa
tatgtagtggttatagatgg

SEQ ID NO: 323 - DNA, 30 bp, Neisseria elongata
gttaatacccgtttctgctgacggtaccta

SEQ ID NO: 324 - DNA, 20 bp, Pediococcus parvulus
gaatgaattagaggtgcttg

SEQ ID NO: 325 - DNA, 20 bp, Prevotella corporis
gtgcgggcgaatccccaaat

SEQ ID NO: 326 - DNA, 20 bp, Campylobacter curvus
cccattactaagggacaaca

SEQ ID NO: 327 - DNA, 30 bp, Listeria ivanovii
agtgacgcatgtcatcactttgaaagatgg

SEQ ID NO: 328 - DNA, 30 bp, Pasteurella aerogenes
tccagagaagagcgcagagatgtgcttgtg

SEQ ID NO: 329 - DNA, 20 bp, Prevotella corporis
tctgacgaggagcaaagatc

SEQ ID NO: 330 - DNA, 20 bp, Prevotella intermedia
catctgacgtggaccaaaga

SEQ ID NO: 331 - DNA, 30 bp, Prevotella intermedia
acccgggcttgaattgcagacgcaggatac

SEQ ID NO: 332 - DNA, 20 bp, Propionibacterium propionicus
accctcgtctaatgttgcca

SEQ ID NO: 333 - DNA, 20 bp, Enterococcus faecalis
ataacagtttatgccgcatg

SEQ ID NO: 334 - DNA, 20 bp, Prevotella corporis
ggataaagttgcccacgcgt

SEQ ID NO: 335 - DNA, 20 bp, Bacteroides forsythus
ggagagtgagagctttcttc

SEQ ID NO: 336 - DNA, 30 bp, Granulicatella adiacens
atggtttgaagaggaaaagaggcgcaagct

SEQ ID NO: 337 - DNA, 20 bp, Serratia ficaria
atgtcttaatacggcagcgc

SEQ ID NO: 338 - DNA, 20 bp, Enterococcus cecorum
ctacaccggaagaaaatgag

SEQ ID NO: 339 - DNA, 30 bp, Streptococcus hyointestinalis
agaggtaataacacatgttattagtttaaa

SEQ ID NO: 340 - DNA, 20 bp, Listeria grayi
accgaataataatcagctcc

SEQ ID NO: 341 - DNA, 20 bp, Listeria ivanovii
agtgacgcatgtcatcactt

SEQ ID NO: 342 - DNA, 20 bp, Porphyromonas maccae
cttgcctgatagaaagggat

SEQ ID NO: 343 - DNA, 30 bp, Lactococcus garvieae
aactctgttgttagagaagaacgttaagta

SEQ ID NO: 344 - DNA, 20 bp, Prevotella intermedia
gattgacggccctatgggtt

SEQ ID NO: 345 - DNA, 20 bp, Pediococcus dextrinicus
gccagatagtgacggtatcc

SEQ ID NO: 346 - DNA, 20 bp, Bacillus azotoformans
tcttcgaacctcatggttcg

SEQ ID NO: 347 - DNA, 20 bp, Bacteroides forsythus
agatacgtgtattttattgc

SEQ ID NO: 348 - DNA, 20 bp, Prevotella intermedia
ccactcggggataccccgtt

SEQ ID NO: 349 - DNA, 20 bp, Staphylococcus carnosus
gataatatgcagaaccgcat

SEQ ID NO: 350 - DNA, 30 bp, Haemophilus ducreyi
cgatttgggggttggtctttaagactggcg

SEQ ID NO: 351 - DNA, 20 bp, Corynebacterium mycetoides
ggataggagctgcatgttgg

SEQ ID NO: 352 - DNA, 20 bp, Bacteroides forsythus
ggtgggctgttaagtccgcg

SEQ ID NO: 353 - DNA, 20 bp, Propionibacterium propionicus
tcgcgtcgaaagtgtaaact

SEQ ID NO: 354 - DNA, 20 bp, Paenibacillus larvae
ggagacgccaggttagcggc

SEQ ID NO: 355 - DNA, 20 bp, Lactococcus garvieae
gaagaacgttaagtagagtg

SEQ ID NO: 356 - DNA, 30 bp, Lactococcus garvieae
aacgcgtgggaaatctgccgagtagcgggg

SEQ ID NO: 357 - DNA, 20 bp, Listeria ivanovii
cgcatgtcatcactttgaaa

SEQ ID NO: 358 - DNA, 20 bp, Alicyclobacillus acidocaldarius
ccaattgggccttcccccgc

SEQ ID NO: 359 - DNA, 30 bp, Lactococcus garvieae
gtagcgggggacaacgtttggaaacgaacg

SEQ ID NO: 360 - DNA, 20 bp, Prevotella intermedia
cgatgttgtccacatatggc

SEQ ID NO: 361 - DNA, 30 bp, Fusobacterium necrophorum
tatggttttttcgcatggaggaatcatgaa

SEQ ID NO: 362 - DNA, 20 bp, Campylobacter curvus
taatggatagggctatatcg

SEQ ID NO: 363 - DNA, 30 bp, Granulicatella adiacens
ggtttgaagaggaaaagaggcgcaagcttc

SEQ ID NO: 364 - DNA, 20 bp, Listeria welshimeri
aataataagtggtggcgcat

SEQ ID NO: 365 - DNA, 20 bp, Campylobacter curvus
acttgcccattactaaggga

SEQ ID NO: 366 - DNA, 20 bp, Bacteroides forsythus
cgatggtagcaatacctgtc

SEQ ID NO: 367 - DNA, 30 bp, Corynebacterium renale
gtgtcggtggtggaaagcttttgcggtacg

SEQ ID NO: 368 - DNA, 20 bp, Rothia mucilaginosa
cgtgtattgcagtgggtacg

SEQ ID NO: 369 - DNA, 20 bp, Prevotella intermedia
cagacgcaggatacagagat

SEQ ID NO: 370 - DNA, 30 bp, Lactococcus garvieae
tgccgagtagcgggggacaacgtttggaaa

SEQ ID NO: 371 - DNA, 20 bp, Aerococcus urinae
gcagcgaccttgtgaaagca

SEQ ID NO: 372 - DNA, 20 bp, Streptococcus equi
agaagaacagtgatgggagt

SEQ ID NO: 373 - DNA, 20 bp, Clostridium ramosum
cgaacgcgagcacttgtgct

SEQ ID NO: 374 - DNA, 20 bp, Actinomyces viscosus
gggcctgggaaaggtttgtt

SEQ ID NO: 375 - DNA, 20 bp, Bacillus badius
cttgcttccgttcaagttag

SEQ ID NO: 376 - DNA, 30 bp, Propionibacterium propionicus
ttgtcgcgtcgaaagtgtaaactcagtgct

SEQ ID NO: 377 - DNA, 20 bp, Listeria welshimeri
ataataagtggtggcgcatg

SEQ ID NO: 378 - DNA, 20 bp, Bacteroides forsythus
gcaacagagggataacccgg

SEQ ID NO: 379 - DNA, 20 bp, Shewanella putrefaciens
atccacagaatctttccaga

SEQ ID NO: 380 - DNA, 20 bp, Listeria seeligeri
aatgataaggagtgacgcat

SEQ ID NO: 381 - DNA, 30 bp, Listeria grayi
cttgctcctttggtcgttagtggcggacgg

SEQ ID NO: 382 - DNA, 20 bp, Propionibacterium granulosum
tacagtgagttgcgacatcg

SEQ ID NO: 383 - DNA, 20 bp, Fusobacterium mortiferum
gttaccttcgggtaaccaaa

SEQ ID NO: 384 - DNA, 30 bp, Neisseria elongata
atacccgtttctgctgacggtacctaaaga

SEQ ID NO: 385 - DNA, 20 bp, Alicyclobacillus acidocaldarius
ggcccaattgggccttcccc

SEQ ID NO: 386 - DNA, 20 bp, Enterococcus cecorum
gctacaccggaagaaaatga

SEQ ID NO: 387 - DNA, 20 bp, Bacteroides forsythus
taacctgcccgcaacagagg

SEQ ID NO: 388 - DNA, 30 bp, Enterococcus faecalis
ttagagaagaacaaggacgttagtaactga

SEQ ID NO: 389 - DNA, 20 bp, Listeria grayi
cgaacgaatgaccttaggag

SEQ ID NO: 390 - DNA, 20 bp, Clostridium ramosum
acaggaaatggtagccgagt

SEQ ID NO: 391 - DNA, 20 bp, Corynebacterium renale
tttgcggtacgggatgagct

SEQ ID NO: 392 - DNA, 20 bp, Pediococcus damnosus
atgaaccgcatggtttattt

SEQ ID NO: 393 - DNA, 20 bp, Streptococcus agalactiae
ttggtaggagtggaaaatct

SEQ ID NO: 394 - DNA, 20 bp, Propionibacterium propionicus
cgtcgaaagtgtaaactcag

SEQ ID NO: 395 - DNA, 20 bp, Porphyromonas maccae
tatgaaagtacatatcctgt

SEQ ID NO: 396 - DNA, 20 bp, Prevotella intermedia
agatgttgactcccttcggg

SEQ ID NO: 397 - DNA, 20 bp, Prevotella intermedia
ggcctaatacccgatgttgt

SEQ ID NO: 398 - DNA, 30 bp, Propionibacterium propionicus
gcaagttatgttggggactcgttagagacc

SEQ ID NO: 399 - DNA, 30 bp, Lactococcus garvieae
aagtcgagcgatgattaaagatagcttgct

SEQ ID NO: 400 - DNA, 20 bp, Porphyromonas maccae
cttatggtcttgggttattg

SEQ ID NO: 401 - DNA, 20 bp, Vibrio hollisae
ggttagaatccctggtagcg

SEQ ID NO: 402 - DNA, 20 bp, Enterococcus cecorum
ccggaagaaaatgagtggcg

SEQ ID NO: 403 - DNA, 30 bp, Prevotella buccae
gagatgatgaagtccctcgggactcctgtg

SEQ ID NO: 404 - DNA, 20 bp, Propionibacterium propionicus
taccggatattcagaccttt

SEQ ID NO: 405 - DNA, 20 bp, Enterococcus faecalis
cataacagtttatgccgcat

SEQ ID NO: 406 - DNA, 20 bp, Corynebacterium cystitidis
tacactggattgccatggag

SEQ ID NO: 407 - DNA, 20 bp, Clostridium ramosum
atggagagatagctatatga

SEQ ID NO: 408 - DNA, 20 bp, Prevotella corporis
ctgtccgcatgcaagtgcgg

SEQ ID NO: 409 - DNA, 20 bp, Neisseria elongata
gagcggttaatacccgtttc

SEQ ID NO: 410 - DNA, 20 bp, Porphyromonas maccae
ctgatagaaagggataaccc

SEQ ID NO: 411 - DNA, 20 bp, Prevotella corporis
tgacgaggagcaaagatccg

SEQ ID NO: 412 - DNA, 30 bp, Paenibacillus alvei
gacatctgaatgaccgctctagagataggg

SEQ ID NO: 413 - DNA, 20 bp, Bacteroides forsythus
cgcaacagagggataacccg

SEQ ID NO: 414 - DNA, 20 bp, Campylobacter curvus
gctaacttgcccattactaa

SEQ ID NO: 415 - DNA, 20 bp, Pediococcus dextrinicus
tttttaattgaaagacggcg

SEQ ID NO: 416 - DNA, 20 bp, Listeria ivanovii
gaatgataagtagtgacgca

SEQ ID NO: 417 - DNA, 30 bp, Prevotella intermedia
agagatgttgactcccttcggggcgtctgt

SEQ ID NO: 418 - DNA, 20 bp, Prevotella intermedia
ggcggacttgagtgcacgca

SEQ ID NO: 419 - DNA, 20 bp, Propionibacterium granulosum
ggtacagtgagttgcgacat

SEQ ID NO: 420 - DNA, 30 bp, Enterococcus dispar
tgtttattaattgaaaggcgcttttgcgtc

SEQ ID NO: 421 - DNA, 30 bp, Propionibacterium granulosum
ctcgaagccggtggcctaacactttttgtg

SEQ ID NO: 422 - DNA, 20 bp, Bacillus azotoformans
ccggataactcttcgaacct

SEQ ID NO: 423 - DNA, 20 bp, Porphyromonas maccae
atgtatgaaagtacatatcc

SEQ ID NO: 424 - DNA, 20 bp, Clostridium ramosum
cctcaaagcactggtagagg

SEQ ID NO: 425 - DNA, 20 bp, Aerococcus urinae
agcgaccttgtgaaagcaag

SEQ ID NO: 426 - DNA, 30 bp, Granulicatella adiacens
ctagagtaactgttagcgccttgacggtat

SEQ ID NO: 427 - DNA, 20 bp, Haemophilus ducreyi
tttaagactggcgcccgaag

SEQ ID NO: 428 - DNA, 20 bp, Enterococcus faecalis
gtttatgccgcatggcataa

SEQ ID NO: 429 - DNA, 20 bp, Streptococcus hyointestinalis
aatccatgtcgtgacggtat

SEQ ID NO: 430 - DNA, 20 bp, Enterococcus faecalis
cgcttctttcctcccgagtg

SEQ ID NO: 431 - DNA, 20 bp, Bacteroides forsythus
gtatgtaacctgcccgcaac

SEQ ID NO: 432 - DNA, 20 bp, Enterococcus faecalis
tgaacgtcccctgacggtat

SEQ ID NO: 433 - DNA, 20 bp, Propionibacterium propionicus
gcgtcgaaagtgtaaactca

SEQ ID NO: 434 - DNA, 30 bp, Neisseria gonorrhoeae
agggaagaaaaggccgttgccaatatcggc

SEQ ID NO: 435 - DNA, 20 bp, Enterococcus faecalis
tgccgcatggcataagagtg

SEQ ID NO: 436 - DNA, 20 bp, Porphyromonas maccae
tgatagaaagggataacccg

SEQ ID NO: 437 - DNA, 20 bp, Porphyromonas maccae
tgtatgaaagtacatatcct

SEQ ID NO: 438 - DNA, 20 bp, Prevotella intermedia
gaattgcagacgcaggatac

SEQ ID NO: 439 - DNA, 20 bp, Prevotella corporis
gataaagttgcccacgcgtg

SEQ ID NO: 440 - DNA, 20 bp, Corynebacterium renale
acaacgcgtgtgctacttcg

SEQ ID NO: 441 - DNA, 20 bp, Lactococcus garvieae
cgagcgatgattaaagatag

SEQ ID NO: 442 - DNA, 20 bp, Streptococcus porcinus
agtagaacgcagaggacagg

SEQ ID NO: 443 - DNA, 20 bp, Streptococcus uberis
acatgtaccctatttaaaag

SEQ ID NO: 444 - DNA, 20 bp, Serratia ficaria
aggaagggcgatgtcttaat

SEQ ID NO: 445 - DNA, 20 bp, Campylobacter lari
caactaatctcttagagata

SEQ ID NO: 446 - DNA, 20 bp, Enterococcus faecalis
tggcataagagtgaaaggcg

SEQ ID NO: 447 - DNA, 30 bp, Enterococcus faecalis
caggtgctaataccgcataacagtttatgc

SEQ ID NO: 448 - DNA, 20 bp, Propionibacterium granulosum
agtgagttgcgacatcgtaa

SEQ ID NO: 449 - DNA, 20 bp, Lactococcus garvieae
gaaaattacttaagtgacgg

SEQ ID NO: 450 - DNA, 20 bp, Enterococcus faecalis
taacagtttatgccgcatgg

SEQ ID NO: 451 - DNA, 20 bp, Campylobacter curvus
tctatataagtagatacggg

SEQ ID NO: 452 - DNA, 20 bp, Porphyromonas maccae
tttagcggactatgtatgaa

SEQ ID NO: 453 - DNA, 20 bp, Corynebacterium cystitidis
ctggattgccatggagacat

SEQ ID NO: 454 - DNA, 20 bp, Listeria grayi
tgggagacttagagtgcaga

SEQ ID NO: 455 - DNA, 20 bp, Porphyromonas maccae
ccacagtcttgccttcgaaa

SEQ ID NO: 456 - DNA, 20 bp, Propionibacterium granulosum
gagttgcgacatcgtaaggt

SEQ ID NO: 457 - DNA, 20 bp, Lactococcus garvieae
aagaacgttaagtagagtgg

SEQ ID NO: 458 - DNA, 30 bp, Enterococcus faecalis
ttgttagagaagaacaaggacgttagtaac

SEQ ID NO: 459 - DNA, 20 bp, Clostridium ramosum
cgtattaaaagtgcctcaaa

SEQ ID NO: 460 - DNA, 20 bp, Haemophilus ducreyi
taagactggcgcccgaagct

SEQ ID NO: 461 - DNA, 20 bp, Pediococcus parvulus
ttagaggtgcttgcaccgaa

SEQ ID NO: 462 - DNA, 20 bp, Listeria grayi
gaatgaccttaggagcttgc

SEQ ID NO: 463 - DNA, 20 bp, Pasteurella aerogenes
agagaagagcgcagagatgt

SEQ ID NO: 464 - DNA, 20 bp, Prevotella corporis
atggatacccgctgtccggc

SEQ ID NO: 465 - DNA, 20 bp, Porphyromonas maccae
tagaaagggataacccggtg

SEQ ID NO: 466 - DNA, 20 bp, Corynebacterium pilosum
ggcctttgggcggtatggga

SEQ ID NO: 467 - DNA, 20 bp, Prevotella intermedia
cctccactcggggatacccc

SEQ ID NO: 468 - DNA, 20 bp, Campylobacter curvus
cttatactccgtatctatat

SEQ ID NO: 469 - DNA, 20 bp, Macrococcus caseolyticus
cgagcgaacggacgagagtg

SEQ ID NO: 470 - DNA, 20 bp, Prevotella intermedia
gatatcatgacgaactccga

SEQ ID NO: 471 - DNA, 20 bp, Corynebacterium cystitidis
ccggatattcacgtatcttt

SEQ ID NO: 472 - DNA, 20 bp, Enterococcus faecalis
cataagagtgaaaggcgctt

SEQ ID NO: 473 - DNA, 30 bp, Paenibacillus larvae
ttcgggagacgccaggttagcggcggacgg

SEQ ID NO: 474 - DNA, 20 bp, Listeria welshimeri
ccgaataataagtggtggcg

SEQ ID NO: 475 - DNA, 20 bp, Listeria welshimeri
gaataataagtggtggcgca

SEQ ID NO: 476 - DNA, 20 bp, Listeria ivanovii
agtagtgacgcatgtcatca

SEQ ID NO: 477 - DNA, 20 bp, Prevotella intermedia
acatatggcatctgacgtgg

SEQ ID NO: 478 - DNA, 20 bp, Fusobacterium mortiferum
taccttcgggtaaccaaaac

SEQ ID NO: 479 - DNA, 20 bp, Paenibacillus alvei
ctgaatgaccgctctagaga

SEQ ID NO: 480 - DNA, 20 bp, Prevotella intermedia
tgcagacgcaggatacagag

SEQ ID NO: 481 - DNA, 20 bp, Prevotella corporis
ataaagttgcccacgcgtgg

SEQ ID NO: 482 - DNA, 20 bp, Prevotella corporis
cttatgtcctcctttgaagg

SEQ ID NO: 483 - DNA, 20 bp, Porphyromonas maccae
acaaggccgctaagtaggtg

SEQ ID NO: 484 - DNA, 20 bp, Porphyromonas gingivalis
aaggaagacagtcctaagga

SEQ ID NO: 485 - DNA, 20 bp, Clostridium ramosum
tggagagatagctatatgag

SEQ ID NO: 486 - DNA, 20 bp, Bacteroides forsythus
tatgtaacctgcccgcaaca

SEQ ID NO: 487 - DNA, 20 bp, Campylobacter curvus
gtaatggatagggctatatc

SEQ ID NO: 488 - DNA, 20 bp, Paenibacillus larvae
gggagacgccaggttagcgg

SEQ ID NO: 489 - DNA, 30 bp, Propionibacterium propionicus
gactcgttagagaccgccgaggtcaactcg

SEQ ID NO: 490 - DNA, 20 bp, Lactococcus garvieae
gcgtgggaaatctgccgagt

SEQ ID NO: 491 - DNA, 20 bp, Propionibacterium granulosum
aacctgcccacaactttggg

SEQ ID NO: 492 - DNA, 30 bp, Corynebacterium mycetoides
cggataggagctgcatgttggtgtgtggtt

SEQ ID NO: 493 - DNA, 20 bp, Lactococcus garvieae
tgctatttttatgaagagcg

SEQ ID NO: 494 - DNA, 30 bp, Streptococcus hyointestinalis
atccatgtcgtgacggtatcttaccagaaa

SEQ ID NO: 495 - DNA, 30 bp, Neisseria gonorrhoeae
gttgccaatatcggcggccgatgacggtac

SEQ ID NO: 496 - DNA, 20 bp, Prevotella intermedia
atatggcatctgacgtggac

SEQ ID NO: 497 - DNA, 20 bp, Haemophilus ducreyi
ctttaagactggcgcccgaa

SEQ ID NO: 498 - DNA, 20 bp, Paenibacillus alvei
ataccagataggcattttcc

SEQ ID NO: 499 - DNA, 30 bp, Pediococcus dextrinicus
catgcaagtcgaacgagtttgcttttaatg

SEQ ID NO: 500 - DNA, 20 bp, Pediococcus pentosaceus
tcttctgacagtctaagaga

SEQ ID NO: 501 - DNA, 20 bp, Prevotella intermedia
gcggacttgagtgcacgcaa

SEQ ID NO: 502 - DNA, 20 bp, Propionibacterium granulosum
acttgatgcttaacgttgag

SEQ ID NO: 503 - DNA, 20 bp, Enterococcus faecalis
cgcataacagtttatgccgc

SEQ ID NO: 504 - DNA, 20 bp, Campylobacter curvus
cttgcccattactaagggac

SEQ ID NO: 505 - DNA, 20 bp, Listeria grayi
gcgggtttgaaaggcggctt

SEQ ID NO: 506 - DNA, 20 bp, Rothia mucilaginosa
tgtagtggttatagatgggc

SEQ ID NO: 507 - DNA, 20 bp, Campylobacter curvus
ttatactccgtatctatata

SEQ ID NO: 508 - DNA, 20 bp, Paenibacillus larvae
gagacgccaggttagcggcg

SEQ ID NO: 509 - DNA, 30 bp, Bacillus azotoformans
accggataactcttcgaacctcatggttcg

SEQ ID NO: 510 - DNA, 20 bp, Listeria ivanovii
gtgacgcatgtcatcacttt

SEQ ID NO: 511 - DNA, 20 bp, Porphyromonas maccae
gtcacaaggccgctaagtag

SEQ ID NO: 512 - DNA, 20 bp, Citrobacter koseri
tccacggaaggtctcagaga

SEQ ID NO: 513 - DNA, 20 bp, Clostridium ramosum
ctcataaaggctccagagat

SEQ ID NO: 514 - DNA, 20 bp, Porphyromonas maccae
tagcggactatgtatgaaag

SEQ ID NO: 515 - DNA, 20 bp, Listeria ivanovii
tgacgcatgtcatcactttg

SEQ ID NO: 516 - DNA, 20 bp, Prevotella corporis
cgaggagcaaagatccgtcg

SEQ ID NO: 517 - DNA, 20 bp, Neisseria gonorrhoeae
aatatcggcggccgatgacg

SEQ ID NO: 518 - DNA, 20 bp, Campylobacter lari
ctaatctcttagagataaga

SEQ ID NO: 519 - DNA, 20 bp, Propionibacterium propionicus
cagtgcttaacgctgagcct

SEQ ID NO: 520 - DNA, 20 bp, Pediococcus dextrinicus
aattgaaagacggcgtaagc

SEQ ID NO: 521 - DNA, 30 bp, Fusobacterium necrophorum
tggaccgcaagtctgatccagcaattctgt

SEQ ID NO: 522 - DNA, 20 bp, Propionibacterium propionicus
aggcgccccgtaaggtcggt

SEQ ID NO: 523 - DNA, 20 bp, Prevotella corporis
gcttgagtgcgccggaagcg

SEQ ID NO: 524 - DNA, 20 bp, Corynebacterium cystitidis
gacatacactggattgccat

SEQ ID NO: 525 - DNA, 20 bp, Streptococcus hyointestinalis
taccgcataagaggtaataa

SEQ ID NO: 526 - DNA, 20 bp, Enterobacter amnigenus
gtagcacagagagcttgttt

SEQ ID NO: 527 - DNA, 20 bp, Prevotella corporis
atgccggttgcttgcaaccg

SEQ ID NO: 528 - DNA, 20 bp, Propionibacterium propionicus
ccccctctctgggataacag

SEQ ID NO: 529 - DNA, 20 bp, Pediococcus acidilactici
ttgatcatgacgtgcttgca

SEQ ID NO: 530 - DNA, 20 bp, Propionibacterium granulosum
ttggaaagctccggcggttg

SEQ ID NO: 531 - DNA, 20 bp, Pasteurella aerogenes
tcagactgggcagctagagt

SEQ ID NO: 532 - DNA, 20 bp, Clostridium ramosum
taagtgttggatgtcaaagt

SEQ ID NO: 533 - DNA, 20 bp, Fusobacterium mortiferum
aagtcgagggagaggttacc

SEQ ID NO: 534 - DNA, 20 bp, Pediococcus dextrinicus
accacatggtttttaattga

SEQ ID NO: 535 - DNA, 30 bp, Granulicatella adiacens
aggtcttcgaaccgcatggtttgaagagga

SEQ ID NO: 536 - DNA, 20 bp, Prevotella corporis
ataccttatgtcctcctttg

SEQ ID NO: 537 - DNA, 20 bp, Prevotella corporis
cgctgccctgcggcgcgaac

SEQ ID NO: 538 - DNA, 20 bp, Propionibacterium granulosum
gtaacctgcccacaactttg

SEQ ID NO: 539 - DNA, 20 bp, Haemophilus ducreyi
agactggcgcccgaagctaa

SEQ ID NO: 540 - DNA, 20 bp, Prevotella intermedia
tccctccactcggggatacc

SEQ ID NO: 541 - DNA, 20 bp, Enterococcus faecalis
accgcataacagtttatgcc

SEQ ID NO: 542 - DNA, 20 bp, Staphylococcus felis
gcgaactgaagaggagcttg

SEQ ID NO: 543 - DNA, 20 bp, Enterococcus faecalis
gagaagaacaaggacgttag

SEQ ID NO: 544 - DNA, 20 bp, Bacillus azotoformans
acctcatggttcgaagataa

SEQ ID NO: 545 - DNA, 20 bp, Bacillus badius
ttgcttccgttcaagttagc

SEQ ID NO: 546 - DNA, 20 bp, Porphyromonas maccae
gggattgaaatttagcggac

SEQ ID NO: 547 - DNA, 20 bp, Corynebacterium pilosum
gggcggtatgggatgagctt

SEQ ID NO: 548 - DNA, 20 bp, Neisseria gonorrhoeae
gaacgtaccgggtagcgggg

SEQ ID NO: 549 - DNA, 20 bp, Dermabacter hominis
ctcgaggcttaaccttgggc

SEQ ID NO: 550 - DNA, 20 bp, Propionibacterium propionicus
ctcgttagagaccgccgagg

SEQ ID NO: 551 - DNA, 20 bp, Granulicatella adiacens
atggtttgaagaggaaaaga

SEQ ID NO: 552 - DNA, 20 bp, Neisseria gonorrhoeae
gaagaaaaggccgttgccaa

SEQ ID NO: 553 - DNA, 20 bp, Granulicatella adiacens
taggtcttcgaaccgcatgg

SEQ ID NO: 554 - DNA, 30 bp, Pediococcus dextrinicus
gctaataccgcataatattaaaaaccacat

SEQ ID NO: 555 - DNA, 20 bp, Bacillus azotoformans
aacaagtaccagttaactgc

SEQ ID NO: 556 - DNA, 20 bp, Propionibacterium propionicus
gggactcgttagagaccgcc

SEQ ID NO: 557 - DNA, 20 bp, Lactococcus garvieae
gagtagcgggggacaacgtt

SEQ ID NO: 558 - DNA, 20 bp, Corynebacterium diphtheriae
gaaaggcctagcttgctagg

SEQ ID NO: 559 - DNA, 20 bp, Kingella denitrificans
cggaagaactcagagacgag

SEQ ID NO: 560 - DNA, 30 bp, Pediococcus dextrinicus
ggtttttaattgaaagacggcgtaagctgt

SEQ ID NO: 561 - DNA, 20 bp, Clostridium ramosum
gtgttggatgtcaaagttca

SEQ ID NO: 562 - DNA, 20 bp, Prevotella corporis
gccgtgaaaagcagcggccc

SEQ ID NO: 563 - DNA, 20 bp, Enterococcus raffinosus
cagtgaaagatggccttgct

SEQ ID NO: 564 - DNA, 20 bp, Prevotella intermedia
gtggaccaaagattcatcgg

SEQ ID NO: 565 - DNA, 20 bp, Paenibacillus alvei
gctaataccagataggcatt

SEQ ID NO: 566 - DNA, 20 bp, Prevotella intermedia
aacatctaccttgcagcgcg

SEQ ID NO: 567 - DNA, 20 bp, Alicyclobacillus acidocaldarius
cccaattgggccttcccccg

SEQ ID NO: 568 - DNA, 20 bp, Prevotella corporis
agggctgtccgcatgcaagt

SEQ ID NO: 569 - DNA, 20 bp, Clostridium ramosum
tgtcaaagttcagtgctgca

SEQ ID NO: 570 - DNA, 20 bp, Prevotella corporis
agatgatgaagtcccctcgg

SEQ ID NO: 571 - DNA, 20 bp, Pasteurella aerogenes
acgaaagaccgggaccgcaa

SEQ ID NO: 572 - DNA, 20 bp, Bacillus smithii
gcaagctgccgcttgcagat

SEQ ID NO: 573 - DNA, 20 bp, Propionibacterium granulosum
acactttttgtgggggagct

SEQ ID NO: 574 - DNA, 20 bp, Lactococcus lactis
gtttattaagtctggtgtaa

SEQ ID NO: 575 - DNA, 20 bp, Streptococcus hyointestinalis
gtgggagtggaaaatccatg

SEQ ID NO: 576 - DNA, 20 bp, Granulicatella adiacens
tagagtaactgttagcgcct

SEQ ID NO: 577 - DNA, 20 bp, Prevotella buccae
gatgaagtccctcgggactc

SEQ ID NO: 578 - DNA, 20 bp, Alicyclobacillus acidocaldarius
ctttccatcccccatgccgc

SEQ ID NO: 579 - DNA, 20 bp, Corynebacterium cystitidis
tgtggaaaggttttgtgctg

SEQ ID NO: 580 - DNA, 20 bp, Pediococcus dextrinicus
agtttgcttttaatgaaggc

SEQ ID NO: 581 - DNA, 20 bp, Bacillus azotoformans
tggttcgaagataaaagatg

SEQ ID NO: 582 - DNA, 20 bp, Enterococcus dispar
tattaatgaactcatgttta

SEQ ID NO: 583 - DNA, 20 bp, Fusobacterium necrophorum
atggaggaatcatgaaagct

SEQ ID NO: 584 - DNA, 20 bp, Prevotella corporis
atccaaccttcccgcgacca

SEQ ID NO: 585 - DNA, 20 bp, Staphylococcus piscifermentans
cgcatggttccgcaatgaaa

SEQ ID NO: 586 - DNA, 20 bp, Corynebacterium pilosum
ttggaaaggcctttgggcgg

SEQ ID NO: 587 - DNA, 20 bp, Corynebacterium pilosum
aaggcctttgggcggtatgg

SEQ ID NO: 588 - DNA, 20 bp, Neisseria elongata
gaaaaaggagcggttaatac

SEQ ID NO: 589 - DNA, 20 bp, Comamonas terrigena
gaccttgcgcaactggagcg

SEQ ID NO: 590 - DNA, 20 bp, Neisseria elongata
aaaaggagcggttaataccc

SEQ ID NO: 591 - DNA, 20 bp, Lactococcus lactis
gagtgctagatgtagggagc

SEQ ID NO: 592 - DNA, 20 bp, Enterococcus dispar
taatgaactcatgtttatta

SEQ ID NO: 593 - DNA, 20 bp, Vibrio hollisae
ttagctgttgggggttagaa

SEQ ID NO: 594 - DNA, 20 bp, Propionibacterium propionicus
acaatggtcggtacagtcag

SEQ ID NO: 595 - DNA, 20 bp, Propionibacterium propionicus
ctctctgggataacagttgg

SEQ ID NO: 596 - DNA, 20 bp, Corynebacterium pilosum
ttgagctaatcgcacaaagc

SEQ ID NO: 597 - DNA, 20 bp, Clostridium ramosum
gaaatggtagccgagtgacg

SEQ ID NO: 598 - DNA, 20 bp, Haemophilus ducreyi
tttgttaatagcaaaattga

SEQ ID NO: 599 - DNA, 20 bp, Bacillus badius
tgcttccgttcaagttagcg

SEQ ID NO: 600 - DNA, 20 bp, Enterococcus dispar
tcatgtttattaattgaaag

SEQ ID NO: 601 - DNA, 20 bp, Serratia ficaria
cgaggaggaagggcgatgtc

SEQ ID NO: 602 - DNA, 20 bp, Porphyromonas maccae
cctgatagaaagggataacc

SEQ ID NO: 603 - DNA, 20 bp, Lactococcus garvieae
ttagagaagaacgttaagta

SEQ ID NO: 604 - DNA, 30 bp, Serratia ficaria
atgtcttaatacggcagcgcattgacgtta

SEQ ID NO: 605 - DNA, 20 bp, Bacteroides ovatus
aacctgccgataactccgga

SEQ ID NO: 606 - DNA, 20 bp, Listeria welshimeri
catgccacggctttgaaaga

SEQ ID NO: 607 - DNA, 20 bp, Listeria grayi
tcgaacgaatgaccttagga

SEQ ID NO: 608 - DNA, 20 bp, Enterococcus cecorum
caccggaagaaaatgagtgg

SEQ ID NO: 609 - DNA, 20 bp, Porphyromonas maccae
aagttatgactgacactgaa

SEQ ID NO: 610 - DNA, 20 bp, Porphyromonas maccae
cttgggttattgcatgatga

SEQ ID NO: 611 - DNA, 20 bp, Prevotella corporis
gcaggccgccgtgcaagcgt

SEQ ID NO: 612 - DNA, 20 bp, Prevotella corporis
ttcccgcgaccaagggataa

SEQ ID NO: 613 - DNA, 20 bp, Corynebacterium cystitidis
catacactggatcgccatgg

SEQ ID NO: 614 - DNA, 20 bp, Kingella denitrificans
cttgcgctatttgagcagcc

SEQ ID NO: 615 - DNA, 20 bp, Streptococcus hyointestinalis
acggatgtgggagtggaaaa

SEQ ID NO: 616 - DNA, 30 bp, Granulicatella adiacens
gtcttcgaaccgcatggtttgaagaggaaa

SEQ ID NO: 617 - DNA, 20 bp, Porphyromonas maccae
cgaggggcgtgtcagggtaa

SEQ ID NO: 618 - DNA, 30 bp, Dermabacter hominis
gctaatactggatatgaccttggcccgcat

SEQ ID NO: 619 - DNA, 30 bp, Streptococcus equi
gaaagtccatcatgtgacggtaactaacca

SEQ ID NO: 620 - DNA, 20 bp, Neisseria elongata
cccgtttctgctgacggtac

SEQ ID NO: 621 - DNA, 20 bp, Propionibacterium granulosum
tgatgcttaacgttgagcgt

SEQ ID NO: 622 - DNA, 20 bp, Prevotella corporis
ttcagagatgatgaagtccc

SEQ ID NO: 623 - DNA, 20 bp, Clostridium ramosum
tgttggatgtcaaagttcag

SEQ ID NO: 624 - DNA, 20 bp, Streptococcus equi
aagtccatcatgtgacggta

SEQ ID NO: 625 - DNA, 20 bp, Fusobacterium mortiferum
gtaaccaaaaccggcgcacg

SEQ ID NO: 626 - DNA, 20 bp, Propionibacterium propionicus
taggcgccccgtaaggtcgg

SEQ ID NO: 627 - DNA, 20 bp, Lactococcus garvieae
tatttttatgaagagcggcg

SEQ ID NO: 628 - DNA, 20 bp, Prevotella corporis
aagtgcgggcgaatccccaa

SEQ ID NO: 629 - DNA, 20 bp, Campylobacter curvus
agggctatatcgtatcagct

SEQ ID NO: 630 - DNA, 20 bp, Clostridium ramosum
aaggaagaacggcggctaca

SEQ ID NO: 631 - DNA, 20 bp, Campylobacter curvus
agtagatacgggaaagtttt

SEQ ID NO: 632 - DNA, 20 bp, Porphyromonas maccae
taattgctatcagataggca

SEQ ID NO: 633 - DNA, 20 bp, Staphylococcus kloosii
tctacagtgaaagatggctt

SEQ ID NO: 634 - DNA, 20 bp, Granulicatella adiacens
aaccgcataggtcttcgaac

SEQ ID NO: 635 - DNA, 20 bp, Prevotella corporis
acagagggctgtccgcatgc

SEQ ID NO: 636 - DNA, 20 bp, Actinomyces neuii
ctacagagggttgctattcc

SEQ ID NO: 637 - DNA, 20 bp, Dermabacter hominis
atactggatatgaccttggc

SEQ ID NO: 638 - DNA, 20 bp, Propionibacterium propionicus
aatataccggaaacgtctag

SEQ ID NO: 639 - DNA, 20 bp, Prevotella corporis
ctgcggcgcgaactgcttgg

SEQ ID NO: 640 - DNA, 20 bp, Enterococcus faecalis
ttagtaactgaacgtcccct

SEQ ID NO: 641 - DNA, 20 bp, Neisseria gonorrhoeae
tttgacatgtgcggaatcct

SEQ ID NO: 642 - DNA, 20 bp, Vibrio hollisae
gtctagaaccgtggctttcg

SEQ ID NO: 643 - DNA, 30 bp, Enterococcus faecalis
acgtcccctgacggtatctaaccagaaagc

SEQ ID NO: 644 - DNA, 20 bp, Propionibacterium avidum
accggataggaatccttgct

SEQ ID NO: 645 - DNA, 20 bp, Clostridium ramosum
ttaaaagtgcctcaaagcac

SEQ ID NO: 646 - DNA, 20 bp, Enterococcus faecalis
taactgaacgtcccctgacg

SEQ ID NO: 647 - DNA, 20 bp, Macrococcus caseolyticus
actctctgatgttagcggcg

SEQ ID NO: 648 - DNA, 20 bp, Alicyclobacillus acidocaldarius
ttccatcccccatgccgctc

SEQ ID NO: 649 - DNA, 20 bp, Paenibacillus larvae
agcacgcagaggtgggcact

SEQ ID NO: 650 - DNA, 20 bp, Porphyromonas maccae
gatagaaagggataacccgg

SEQ ID NO: 651 - DNA, 20 bp, Lactococcus garvieae
gcataacaatgagaatcgca

SEQ ID NO: 652 - DNA, 20 bp, Prevotella intermedia
ccgatgttgtccacatatgg

SEQ ID NO: 653 - DNA, 20 bp, Vibrio hollisae
gggttagaatccctggtagc

SEQ ID NO: 654 - DNA, 20 bp, Pediococcus damnosus
taataaaatgaaccgcatgg

SEQ ID NO: 655 - DNA, 20 bp, Lactococcus garvieae
gtgggaaatctgccgagtag

SEQ ID NO: 656 - DNA, 20 bp, Macrococcus caseolyticus
gagagtgcttgcactctctg

SEQ ID NO: 657 - DNA, 20 bp, Porphyromonas maccae
aactgtttggcttgagtata

SEQ ID NO: 658 - DNA, 20 bp, Propionibacterium propionicus
tggtcggtacagtcagttgc

SEQ ID NO: 659 - DNA, 20 bp, Bacteroides forsythus
agacgacggagagtgagagc

SEQ ID NO: 660 - DNA, 20 bp, Lactococcus garvieae
ccgcataacaatgagaatcg

SEQ ID NO: 661 - DNA, 20 bp, Porphyromonas maccae
cgttgtcagttactatcggg

SEQ ID NO: 662 - DNA, 20 bp, Prevotella intermedia
acgcaggatacagagatgtt

SEQ ID NO: 663 - DNA, 20 bp, Pediococcus parvulus
gtgcttgcaccgaagatgat

SEQ ID NO: 664 - DNA, 20 bp, Brevibacillus laterosporus
agcgaaacggaaagatggcg

SEQ ID NO: 665 - DNA, 20 bp, Streptococcus agalactiae
gaacgttggtaggagtggaa

SEQ ID NO: 666 - DNA, 20 bp, Bacteroides forsythus
aggtgggctgttaagtccgc

SEQ ID NO: 667 - DNA, 20 bp, Paenibacillus larvae
ccaaggaagaacggccaggg

SEQ ID NO: 668 - DNA, 20 bp, Enterococcus dispar
ccgcataatattaatgaact

SEQ ID NO: 669 - DNA, 20 bp, Actinomyces neuii
acgcatgctacattggtgtc

SEQ ID NO: 670 - DNA, 20 bp, Serratia ficaria
ggcgatgtcttaatacggca

SEQ ID NO: 671 - DNA, 20 bp, Kocuria rosea
gagcgaactgacgagagtgc

SEQ ID NO: 672 - DNA, 20 bp, Aneurinibacillus aneurinilyticus
tacgtttttcagaccgcatg

SEQ ID NO: 673 - DNA, 20 bp, Bacillus badius
ttgacggaagcttgcttccg

SEQ ID NO: 674 - DNA, 20 bp, Alicyclobacillus acidocaldarius
acccctcatctctgagggtg

SEQ ID NO: 675 - DNA, 20 bp, Streptococcus equi
gaacagtgatgggagtggaa

SEQ ID NO: 676 - DNA, 20 bp, Granulicatella adiacens
gtttgaagaggaaaagaggc

SEQ ID NO: 677 - DNA, 20 bp, Pasteurella aerogenes
gacatccagagaagagcgca

SEQ ID NO: 678 - DNA, 30 bp, Corynebacterium diphtheriae
tgtgtggtggaaagtttttcggtacgagat

SEQ ID NO: 679 - DNA, 20 bp, Brevibacillus laterosporus
gcctgaagcgaaacggaaag

SEQ ID NO: 680 - DNA, 20 bp, Kocuria rosea
tgacgagagtgcttgcactc

SEQ ID NO: 681 - DNA, 20 bp, Lactococcus garvieae
ggaaatctgccgagtagcgg

SEQ ID NO: 682 - DNA, 20 bp, Propionibacterium granulosum
tgtgctcctgctgcatggtg

SEQ ID NO: 683 - DNA, 20 bp, Corynebacterium mycetoides
actagatcgctgtagagata

SEQ ID NO: 684 - DNA, 20 bp, Clostridium ramosum
aggaaatggtagccgagtga

SEQ ID NO: 685 - DNA, 20 bp, Corynebacterium cystitidis
aataccggatattcacgtat

SEQ ID NO: 686 - DNA, 20 bp, Pediococcus damnosus
aataaaatgaaccgcatggt

SEQ ID NO: 687 - DNA, 20 bp, Prevotella intermedia
ccacatatggcatctgacgt

SEQ ID NO: 688 - DNA, 20 bp, Propionibacterium propionicus
tagagaccgccgaggtcaac

SEQ ID NO: 689 - DNA, 20 bp, Corynebacterium falsenii
tcgctagggaagaagccatg

SEQ ID NO: 690 - DNA, 20 bp, Fusobacterium necrophorum
aactccgtatggcgttggaa

SEQ ID NO: 691 - DNA, 20 bp, Actinomyces viscosus
ctgggaaaggtttgttccgg

SEQ ID NO: 692 - DNA, 20 bp, Porphyromonas maccae
gatgattcaagtaaagatta

SEQ ID NO: 693 - DNA, 20 bp, Prevotella corporis
gtacggtctgggcggccaag

SEQ ID NO: 694 - DNA, 20 bp, Corynebacterium mycetoides
gataggagctgcatgttggt

SEQ ID NO: 695 - DNA, 20 bp, Kocuria rosea
atactggatactacctctta

SEQ ID NO: 696 - DNA, 20 bp, Alicyclobacillus acidocaldarius
gctggctcccctaaggggtt

SEQ ID NO: 697 - DNA, 20 bp, Bacillus lentus
cttctcctggagaaaggttg

SEQ ID NO: 698 - DNA, 20 bp, Vibrio hollisae
ttaatacctgcgttacttga

SEQ ID NO: 699 - DNA, 20 bp, Serratia ficaria
agggcgatgtcttaatacgg

SEQ ID NO: 700 - DNA, 20 bp, Sphingobacterium multivorum
tgaccggcatcggttggata

SEQ ID NO: 701 - DNA, 20 bp, Prevotella corporis
ggcagcatgccggttgcttg

SEQ ID NO: 702 - DNA, 20 bp, Macrococcus caseolyticus
cgcatgaagcaatagtgaaa

SEQ ID NO: 703 - DNA, 20 bp, Streptococcus agalactiae
tggtaggagtggaaaatcta

SEQ ID NO: 704 - DNA, 30 bp, Moraxella bovis
cataccaagaattcgctagagatagcttag

SEQ ID NO: 705 - DNA, 20 bp, Porphyromonas maccae
aaagcacgtaaccgcgaggg

SEQ ID NO: 706 - DNA, 20 bp, Actinomyces neuii
ctacattggtgtctacagag

SEQ ID NO: 707 - DNA, 20 bp, Granulicatella adiacens
gagtaactgttagcgccttg

SEQ ID NO: 708 - DNA, 20 bp, Bacillus azotoformans
accggataactcttcgaacc

SEQ ID NO: 709 - DNA, 20 bp, Neisseria subflava
aggagcccgcttacccggta

SEQ ID NO: 710 - DNA, 20 bp, Enterococcus faecalis
cgaacgcttctttcctcccg

SEQ ID NO: 711 - DNA, 20 bp, Neisseria elongata
gcggttaatacccgtttctg

SEQ ID NO: 712 - DNA, 20 bp, Corynebacterium cystitidis
taataccggatattcacgta

SEQ ID NO: 713 - DNA, 30 bp, Lactococcus garvieae
caaccattgtgtgcattggaaactgggaga

SEQ ID NO: 714 - DNA, 20 bp, Lactococcus garvieae
agcgatgattaaagatagct

SEQ ID NO: 715 - DNA, 20 bp, Prevotella corporis
gcggcccaaccgctgccctg

SEQ ID NO: 716 - DNA, 20 bp, Streptococcus hyointestinalis
ttagtttaaaaggggcaact

SEQ ID NO: 717 - DNA, 20 bp, Propionibacterium propionicus
ggtggggctgataattagga

SEQ ID NO: 718 - DNA, 20 bp, Neisseria gonorrhoeae
cgggtagcgggggataactg

SEQ ID NO: 719 - DNA, 20 bp, Bacteroides ovatus
tagtttgcttgcaaactgaa

SEQ ID NO: 720 - DNA, 20 bp, Streptococcus hyointestinalis
gttattagtttaaaaggggc

SEQ ID NO: 721 - DNA, 20 bp, Prevotella corporis
ctgcttggcttgagtgcgcc

SEQ ID NO: 722 - DNA, 20 bp, Bacillus smithii
taacatcttccttcgcatga

SEQ ID NO: 723 - DNA, 20 bp, Propionibacterium propionicus
ccctctctgggataacagtt

SEQ ID NO: 724 - DNA, 20 bp, Propionibacterium propionicus
tttgtcgcgtcgaaagtgta

SEQ ID NO: 725 - DNA, 20 bp, Brevibacillus laterosporus
gcgaaacggaaagatggcgc

SEQ ID NO: 726 - DNA, 20 bp, Corynebacterium pilosum
acagcgcgcagcgagatcgt

SEQ ID NO: 727 - DNA, 20 bp, Neisseria elongata
atacccgtttctgctgacgg

SEQ ID NO: 728 - DNA, 20 bp, Porphyromonas maccae
ttattgcatgatgattcaag

SEQ ID NO: 729 - DNA, 20 bp, Streptococcus hyointestinalis
ttattagtttaaaaggggca

SEQ ID NO: 730 - DNA, 20 bp, Paenibacillus larvae
ggtttcttcgcatgaagaag

SEQ ID NO: 731 - DNA, 20 bp, Lactococcus garvieae
ttaaagatagcttgctattt

SEQ ID NO: 732 - DNA, 20 bp, Prevotella intermedia
gaccaaagattcatcggtgg

SEQ ID NO: 733 - DNA, 30 bp, Kingella denitrificans
ggaagaactcagagacgagtttgtgccttc

SEQ ID NO: 734 - DNA, 20 bp, Pasteurella aerogenes
gagagacgaaagaccgggac

SEQ ID NO: 735 - DNA, 30 bp, Listeria welshimeri
gggctaataccgaataataagtggtggcgc

SEQ ID NO: 736 - DNA, 20 bp, Clostridium ramosum
gacagggggataactattgg

SEQ ID NO: 737 - DNA, 20 bp, Enterococcus cecorum
tggcagatggatgaaaggcg

SEQ ID NO: 738 - DNA, 20 bp, Prevotella corporis
aagatccgtcggtcacggat

SEQ ID NO: 739 - DNA, 20 bp, Kingella denitrificans
catgtacggaagaactcaga

SEQ ID NO: 740 - DNA, 20 bp, Vibrio hollisae
gttacttgacgttagcggca

SEQ ID NO: 741 - DNA, 20 bp, Corynebacterium pilosum
cgcagcgagatcgtgaggtt

SEQ ID NO: 742 - DNA, 20 bp, Prevotella corporis
caggagaatgattcagagat

SEQ ID NO: 743 - DNA, 20 bp, Neisseria gonorrhoeae
gctgttgccaatatcggcgg

SEQ ID NO: 744 - DNA, 20 bp, Streptococcus equi
gtggaaagtccatcatgtga

SEQ ID NO: 745 - DNA, 20 bp, Enterococcus cecorum
atggcagatggatgaaaggc

SEQ ID NO: 746 - DNA, 20 bp, Prevotella intermedia
tatccaaccttccctccact

SEQ ID NO: 747 - DNA, 20 bp, Enterococcus faecalis
ccgcataacagtttatgccg

SEQ ID NO: 748 - DNA, 20 bp, Listeria grayi
acgaatgaccttaggagctt

SEQ ID NO: 749 - DNA, 20 bp, Listeria grayi
tgctcctttggtcgttagtg

SEQ ID NO: 750 - DNA, 20 bp, Propionibacterium propionicus
ggttagcgaatctgtaaaag

SEQ ID NO: 751 - DNA, 20 bp, Haemophilus actinemycetemcomitans
attggggtttagccctggtg

SEQ ID NO: 752 - DNA, 20 bp, Paenibacillus alvei
ggcaatgtaagttgggtgtt

SEQ ID NO: 753 - DNA, 20 bp, Propionibacterium propionicus
gttgcgagcctgtaagggtt

SEQ ID NO: 754 - DNA, 20 bp, Streptococcus anginosus
atgcaagtaggacgcacagt

SEQ ID NO: 755 - DNA, 20 bp, Paenibacillus alvei
ccagataggcattttcctcg

SEQ ID NO: 756 - DNA, 20 bp, Listeria ivanovii
catcactttgaaagatggtt

SEQ ID NO: 757 - DNA, 30 bp, Streptococcus hyointestinalis
taaccattgtacgctttggaaactgtgaga

SEQ ID NO: 758 - DNA, 20 bp, Clostridium ramosum
aaagtgcctcaaagcactgg

SEQ ID NO: 759 - DNA, 20 bp, Macrococcus caseolyticus
tgaagcaatagtgaaagacg

SEQ ID NO: 760 - DNA, 20 bp, Prevotella intermedia
attcatcggtggaggatggg

SEQ ID NO: 761 - DNA, 20 bp, Bacillus smithii
tttttgaaagttagcggcgg

SEQ ID NO: 762 - DNA, 20 bp, Pediococcus acidilactici
tgcttgcactgaatgagatt

SEQ ID NO: 763 - DNA, 20 bp, Kingella denitrificans
atattggaatgtaccgagta

SEQ ID NO: 764 - DNA, 20 bp, Macrococcus caseolyticus
ccggataatatctagcttcg

SEQ ID NO: 765 - DNA, 20 bp, Aneurinibacillus thermoaerophilus
atggaaaggcctttgagccg

SEQ ID NO: 766 - DNA, 30 bp, Lactococcus garvieae
gagtggaaaattacttaagtgacggtatct

SEQ ID NO: 767 - DNA, 20 bp, Corynebacterium pilosum
ctttgggcggtatgggatga

SEQ ID NO: 768 - DNA, 20 bp, Pediococcus dextrinicus
cgagtttgcttttaatgaag

SEQ ID NO: 769 - DNA, 20 bp, Campylobacter curvus
ttaaccattgaactgcttga

SEQ ID NO: 770 - DNA, 20 bp, Streptococcus anginosus
tgcaagtaggacgcacagtt

SEQ ID NO: 771 - DNA, 20 bp, Bacillus azotoformans
gaacaagtaccagttaactg

SEQ ID NO: 772 - DNA, 20 bp, Pediococcus damnosus
agatgatttcaactataaag

SEQ ID NO: 773 - DNA, 30 bp, Prevotella intermedia
tgcgggtaacggcccaccaaggctacgatc

SEQ ID NO: 774 - DNA, 20 bp, Prevotella corporis
gtccggcccgtacggtctgg

SEQ ID NO: 775 - DNA, 20 bp, Myroides odoratimimus
aaggcaggttactacgtatt

SEQ ID NO: 776 - DNA, 20 bp, Propionibacterium granulosum
aatactggatatgtgctcct

SEQ ID NO: 777 - DNA, 30 bp, Granulicatella adiacens
tgctagagtaactgttagcgccttgacggt

SEQ ID NO: 778 - DNA, 20 bp, Aneurinibacillus aneurinilyticus
acgtttttcagaccgcatgg

SEQ ID NO: 779 - DNA, 20 bp, Corynebacterium pilosum
ggttgagctaatcgcacaaa

SEQ ID NO: 780 - DNA, 20 bp, Streptococcus equi
ggagtggaaagtccatcatg

SEQ ID NO: 781 - DNA, 20 bp, Prevotella corporis
agatccgtcggtcacggatg

SEQ ID NO: 782 - DNA, 30 bp, Pediococcus parvulus
ccgcataacaaagtaaaccgcatggtttac

SEQ ID NO: 783 - DNA, 20 bp, Propionibacterium granulosum
taatactggatatgtgctcc

SEQ ID NO: 784 - DNA, 30 bp, Pasteurella aerogenes
acctactcttgacatccagagaagagcgca

SEQ ID NO: 785 - DNA, 20 bp, Comamonas terrigena
tgaggttgaaagcaggggat

SEQ ID NO: 786 - DNA, 20 bp, Enterococcus faecalis
agagtgaaaggcgctttcgg

SEQ ID NO: 787 - DNA, 20 bp, Corynebacterium cystitidis
tttgtgctggtatgggatga

SEQ ID NO: 788 - DNA, 20 bp, Vibrio hollisae
actgcgtttggaactgtcag

SEQ ID NO: 789 - DNA, 20 bp, Vibrio hollisae
taacctgggagtggcatttt

SEQ ID NO: 790 - DNA, 20 bp, Propionibacterium propionicus
tcgttagagaccgccgaggt

SEQ ID NO: 791 - DNA, 20 bp, Lactococcus lactis
tgtatcgcagctaacgcaat

SEQ ID NO: 792 - DNA, 20 bp, Macrococcus caseolyticus
catgaagcaatagtgaaaga

SEQ ID NO: 793 - DNA, 20 bp, Serratia ficaria
tacggcagcgcattgacgtt

SEQ ID NO: 794 - DNA, 20 bp, Pediococcus dextrinicus
ttaattgaaagacggcgtaa

SEQ ID NO: 795 - DNA, 20 bp, Corynebacterium pilosum
ttgggcggtatgggatgagc

SEQ ID NO: 796 - DNA, 20 bp, Prevotella corporis
gatgaagtcccctcgggact

SEQ ID NO: 797 - DNA, 20 bp, Aneurinibacillus aneurinilyticus
ggatacgtttttcagaccgc

SEQ ID NO: 798 - DNA, 20 bp, Actinomyces neuii
atcttggttcggatcgcagt

SEQ ID NO: 799 - DNA, 20 bp, Propionibacterium avidum
taccggataggaatccttgc

SEQ ID NO: 800 - DNA, 20 bp, Macrococcus caseolyticus
gcttcgcatgaagcaatagt

SEQ ID NO: 801 - DNA, 20 bp, Bacteroides forsythus
gctgttaagtccgcggtgaa

SEQ ID NO: 802 - DNA, 20 bp, Neisseria elongata
aatacccgtttctgctgacg

SEQ ID NO: 803 - DNA, 30 bp, Streptococcus equi
taagaagttacttcggtacattggagacag

SEQ ID NO: 804 - DNA, 20 bp, Propionibacterium propionicus
cctgcccccctctctgggat

SEQ ID NO: 805 - DNA, 20 bp, Prevotella corporis
gccggttgcttgcaaccggt

SEQ ID NO: 806 - DNA, 20 bp, Prevotella intermedia
acatctaccttgcagcgcga

SEQ ID NO: 807 - DNA, 20 bp, Macrococcus caseolyticus
gagcgaacggacgagagtgc

SEQ ID NO: 808 - DNA, 20 bp, Rothia mucilaginosa
atgtagtggttatagatggg

SEQ ID NO: 809 - DNA, 20 bp, Pediococcus pentosaceus
ttctgacagtctaagagatt

SEQ ID NO: 810 - DNA, 20 bp, Neisseria gonorrhoeae
ttgccaatatcggcggccga

SEQ ID NO: 811 - DNA, 20 bp, Listeria ivanovii
taagtagtgacgcatgtcat

SEQ ID NO: 812 - DNA, 20 bp, Neisseria elongata
aagaaaaaggagcggttaat

SEQ ID NO: 813 - DNA, 20 bp, Alicyclobacillus acidocaldarius
agcggcccaattgggccttc

SEQ ID NO: 814 - DNA, 20 bp, Bacteroides forsythus
cgtatgtaacctgcccgcaa

SEQ ID NO: 815 - DNA, 20 bp, Alicyclobacillus acidocaldarius
attgggccttcccccgcaag

SEQ ID NO: 816 - DNA, 20 bp, Rothia mucilaginosa
aaagcgttatgtagtggtta

SEQ ID NO: 817 - DNA, 20 bp, Macrococcus caseolyticus
atatttagcttcgcatgaag

SEQ ID NO: 818 - DNA, 20 bp, Lactococcus lactis
acaacgagtcgcgagacagt

SEQ ID NO: 819 - DNA, 20 bp, Propionibacterium propionicus
gactcgttagagaccgccga

SEQ ID NO: 820 - DNA, 20 bp, Macrococcus caseolyticus
agcgaacggacgagagtgct

SEQ ID NO: 821 - DNA, 20 bp, Prevotella corporis
actaataccttatgtcctcc

SEQ ID NO: 822 - DNA, 20 bp, Granulicatella adiacens
cttcgaaccgcatggtttga

SEQ ID NO: 823 - DNA, 20 bp, Corynebacterium urealyticum
tcgggtgacggtacctggat

SEQ ID NO: 824 - DNA, 20 bp, Campylobacter lari
tatccaactaatctcttaga

SEQ ID NO: 825 - DNA, 20 bp, Lactococcus garvieae
cataacaatgagaatcgcat

SEQ ID NO: 826 - DNA, 20 bp, Listeria grayi
gcaagtcgaacgaatgacct

SEQ ID NO: 827 - DNA, 20 bp, Porphyromonas maccae
ctatcagataggcatgcgtt

SEQ ID NO: 828 - DNA, 20 bp, Porphyromonas maccae
acagtcttgccttcgaaact

SEQ ID NO: 829 - DNA, 20 bp, Pasteurella aerogenes
gaagagcgcagagatgtgct

SEQ ID NO: 830 - DNA, 20 bp, Propionibacterium granulosum
cgttgagcgtgctttcgata

SEQ ID NO: 831 - DNA, 20 bp, Kingella denitrificans
gtacggaagaactcagagac

SEQ ID NO: 832 - DNA, 20 bp, Enterococcus dispar
atgaactcatgtttattaat

SEQ ID NO: 833 - DNA, 20 bp, Propionibacterium propionicus
tctgtaaaagccggcctcag

SEQ ID NO: 834 - DNA, 20 bp, Pediococcus dextrinicus
aaccacatggtttttaattg

SEQ ID NO: 835 - DNA, 20 bp, Prevotella corporis
ccgccgtgcaagcgtgccgt

SEQ ID NO: 836 - DNA, 20 bp, Eubacterium moniliforme
cacggaagttgggagcaccc

SEQ ID NO: 837 - DNA, 20 bp, Prevotella intermedia
catctaccttgcagcgcgaa

SEQ ID NO: 838 - DNA, 20 bp, Pediococcus parvulus
ggttgatttttaaaagatgg

SEQ ID NO: 839 - DNA, 20 bp, Listeria innocua
tgccacgctcttgaaagatg

SEQ ID NO: 840 - DNA, 20 bp, Listeria ivanovii
catgtcatcactttgaaaga

SEQ ID NO: 841 - DNA, 20 bp, Clostridium ramosum
agatggagagatagctatat

SEQ ID NO: 842 - DNA, 20 bp, Prevotella corporis
aagcagcggcccaaccgctg

SEQ ID NO: 843 - DNA, 20 bp, Vibrio hollisae
cgttacttgacgttagcggc

SEQ ID NO: 844 - DNA, 20 bp, Vibrio hollisae
taatacctgcgttacttgac

SEQ ID NO: 845 - DNA, 20 bp, Prevotella corporis
tcgaggggcagcatgccggt

SEQ ID NO: 846 - DNA, 20 bp, Paenibacillus larvae
atcctcaaaagccgatctca

SEQ ID NO: 847 - DNA, 20 bp, Lactococcus garvieae
tacttaagtgacggtatcta

SEQ ID NO: 848 - DNA, 30 bp, Clostridium ramosum
gattgtaaacttctgttataaaggaagaac

SEQ ID NO: 849 - DNA, 20 bp, Corynebacterium mycetoides
agctgcatgttggtgtgtgg

SEQ ID NO: 850 - DNA, 20 bp, Corynebacterium pilosum
ggaaaggcctttgggcggta

SEQ ID NO: 851 - DNA, 20 bp, Bacillus smithii
acatcttccttcgcatgaag

SEQ ID NO: 852 - DNA, 20 bp, Granulicatella adiacens
gaaaagaggcgcaagcttct

SEQ ID NO: 853 - DNA, 20 bp, Bacillus smithii
gataatatcttccttcgcat

SEQ ID NO: 854 - DNA, 20 bp, Prevotella corporis
tgatgaagtcccctcgggac

SEQ ID NO: 855 - DNA, 20 bp, Lactococcus garvieae
acttaagtgacggtatctaa

SEQ ID NO: 856 - DNA, 20 bp, Pediococcus dextrinicus
taatgaaggcggtgcttgca

SEQ ID NO: 857 - DNA, 20 bp, Bacteroides forsythus
caagccatcgatggttaggg

SEQ ID NO: 858 - DNA, 20 bp, Corynebacterium pilosum
aaagcctttgggcggtatgg

SEQ ID NO: 859 - DNA, 20 bp, Kocuria rosea
tggatactacctcttaccgc

SEQ ID NO: 860 - DNA, 20 bp, Propionibacterium granulosum
tggatatgtgctcctgctgc

SEQ ID NO: 861 - DNA, 20 bp, Comamonas terrigena
agaccttgcgcaactggagc

SEQ ID NO: 862 - DNA, 30 bp, Streptococcus porcinus
gtagaacgcagaggacaggtgcttgcacca

SEQ ID NO: 863 - DNA, 20 bp, Campylobacter curvus
ctatataagtagatacggga

SEQ ID NO: 864 - DNA, 20 bp, Paenibacillus macerans
ataatcaagtcttccgcatg

SEQ ID NO: 865 - DNA, 20 bp, Prevotella corporis
caagcgtgccgtgaaaagca

SEQ ID NO: 866 - DNA, 20 bp, Porphyromonas maccae
caaggccgctaagtaggtgc

SEQ ID NO: 867 - DNA, 20 bp, Lactococcus lactis
ctgtatcgcagctaacgcaa

SEQ ID NO: 868 - DNA, 20 bp, Propionibacterium granulosum
acaactttgggataacgcta

SEQ ID NO: 869 - DNA, 30 bp, Corynebacterium diphtheriae
ggcctagcttgctaggtactcgagtggcga

SEQ ID NO: 870 - DNA, 30 bp, Streptococcus agalactiae
agctctgttgttagagaagaacgttggtag

SEQ ID NO: 871 - DNA, 20 bp, Fusobacterium necrophorum
actccgtatggcgttggaaa

SEQ ID NO: 872 - DNA, 20 bp, Bacteroides forsythus
ttaaagatttattggttgcg

SEQ ID NO: 873 - DNA, 20 bp, Kingella denitrificans
ggaagaactcagagacgagt

SEQ ID NO: 874 - DNA, 20 bp, Corynebacterium mycetoides
gtggggatcggcgattgggg

SEQ ID NO: 875 - DNA, 20 bp, Bacillus badius
gagcggacttgacggaagct

SEQ ID NO: 876 - DNA, 20 bp, Streptococcus uberis
accctatttaaaaggggcaa

SEQ ID NO: 877 - DNA, 20 bp, Bacteroides forsythus
ccaagccatcgatggttagg

SEQ ID NO: 878 - DNA, 20 bp, Propionibacterium propionicus
aataccggatattcagacct

SEQ ID NO: 879 - DNA, 20 bp, Prevotella intermedia
catcggtggaggatggggat

SEQ ID NO: 880 - DNA, 20 bp, Pediococcus dextrinicus
aaggcggtgcttgcaccaac

SEQ ID NO: 881 - DNA, 20 bp, Pseudomonas luteola
agctttgacgttaccagcag

SEQ ID NO: 882 - DNA, 20 bp, Neisseria gonorrhoeae
accgggtagcgggggataac

SEQ ID NO: 883 - DNA, 20 bp, Campylobacter curvus
agtttttcggtaatggatag

SEQ ID NO: 884 - DNA, 20 bp, Pediococcus dextrinicus
ccaactgatttaaaaataaa

SEQ ID NO: 885 - DNA, 20 bp, Porphyromonas maccae
aataccttatggtcttgggt

SEQ ID NO: 886 - DNA, 30 bp, Macrococcus caseolyticus
acatgcaagtcgagcgaacggacgagagtg

SEQ ID NO: 887 - DNA, 20 bp, Campylobacter curvus
tacgggaaagtttttcggta

SEQ ID NO: 888 - DNA, 20 bp, Enterobacter sakazakii
ggagcagcttgctgctctgc

SEQ ID NO: 889 - DNA, 20 bp, Propionibacterium avidum
gataggaatccttgctgcat

SEQ ID NO: 890 - DNA, 20 bp, Propionibacterium avidum
ggataggaatccttgctgca

SEQ ID NO: 891 - DNA, 20 bp, Staphylococcus capitis
tgcacgtcttgacggaccta

SEQ ID NO: 892 - DNA, 20 bp, Corynebacterium falsenii
cgctagggaagaagccatgt

SEQ ID NO: 893 - DNA, 20 bp, Bacillus smithii
ataacatcttccttcgcatg

SEQ ID NO: 894 - DNA, 20 bp, Moraxella osloensis
tagagatgattagtggcgga

SEQ ID NO: 895 - DNA, 20 bp, Bacillus smithii
atcttccttcgcatgaagga

SEQ ID NO: 896 - DNA, 20 bp, Enterococcus cecorum
ttccatttaccgcatggtag

SEQ ID NO: 897 - DNA, 20 bp, Clostridium ramosum
aggaagaacggcggctacag

SEQ ID NO: 898 - DNA, 20 bp, Prevotella corporis
tgagtgcgccggaagcgggc

SEQ ID NO: 899 - DNA, 30 bp, Enterococcus faecalis
aaggacgttagtaactgaacgtcccctgac

SEQ ID NO: 900 - DNA, 20 bp, Porphyromonas maccae
gagtacctaaagcacgtaac

SEQ ID NO: 901 - DNA, 20 bp, Enterococcus cecorum
cttgctacaccggaagaaaa

SEQ ID NO: 902 - DNA, 20 bp, Fusobacterium mortiferum
aaactgtcagtcttgaatga

SEQ ID NO: 903 - DNA, 20 bp, Streptococcus hyointestinalis
atgttattagtttaaaaggg

SEQ ID NO: 904 - DNA, 20 bp, Prevotella intermedia
gctcaacatctaccttgcag

SEQ ID NO: 905 - DNA, 30 bp, Aerococcus urinae
cttgtgaaagcaagcgaatctcttaaagcc

SEQ ID NO: 906 - DNA, 20 bp, Propionibacterium propionicus
tagcgaatctgtaaaagccg

SEQ ID NO: 907 - DNA, 20 bp, Eubacterium moniliforme
caccacggaagttgggagca

SEQ ID NO: 908 - DNA, 20 bp, Enterococcus faecalis
gcataacagtttatgccgca

SEQ ID NO: 909 - DNA, 20 bp, Propionibacterium propionicus
tctaatgttgccagcaagtt

SEQ ID NO: 910 - DNA, 20 bp, Lactococcus garvieae
tttatgaagagcggcgaacg

SEQ ID NO: 911 - DNA, 20 bp, Neisseria gonorrhoeae
tggttttgacatgtgcggaa

SEQ ID NO: 912 - DNA, 20 bp, Propionibacterium propionicus
gcgaatctgtaaaagccggc

SEQ ID NO: 913 - DNA, 20 bp, Kingella denitrificans
tttgagcagccaatatctga

SEQ ID NO: 914 - DNA, 20 bp, Propionibacterium propionicus
tcttttggtttggaaagttc

SEQ ID NO: 915 - DNA, 20 bp, Vibrio hollisae
acctgcgttacttgacgtta

SEQ ID NO: 916 - DNA, 20 bp, Prevotella corporis
agcgtgccgtgaaaagcagc

SEQ ID NO: 917 - DNA, 20 bp, Bacillus azotoformans
gcttgctcctttagattcag

SEQ ID NO: 918 - DNA, 20 bp, Porphyromonas maccae
actaagttatgactgacact

SEQ ID NO: 919 - DNA, 20 bp, Enterococcus faecalis
gcataagagtgaaaggcgct

SEQ ID NO: 920 - DNA, 20 bp, Prevotella corporis
gcaagcgtgccgtgaaaagc

SEQ ID NO: 921 - DNA, 20 bp, Fusobacterium mortiferum
cagagatgcttttgtgcccc

SEQ ID NO: 922 - DNA, 20 bp, Streptococcus canis
agtgcttaacacatgttaag

SEQ ID NO: 923 - DNA, 20 bp, Lactococcus lactis
gtatgcattggaaactggta

SEQ ID NO: 924 - DNA, 30 bp, Macrococcus caseolyticus
caagtcgagcgaacggacgagagtgcttgc

SEQ ID NO: 925 - DNA, 20 bp, Campylobacter lari
ctgggcttgatatccaacta

SEQ ID NO: 926 - DNA, 20 bp, Clostridium ramosum
tcgaacgcgagcacttgtgc

SEQ ID NO: 927 - DNA, 20 bp, Bacteroides forsythus
ggggcagcgatggtagcaat

SEQ ID NO: 928 - DNA, 20 bp, Lactococcus garvieae
gattaaagatagcttgctat

SEQ ID NO: 929 - DNA, 20 bp, Porphyromonas maccae
ggctcaaccacagtcttgcc

SEQ ID NO: 930 - DNA, 20 bp, Pediococcus dextrinicus
gtcgaacgagtttgctttta

SEQ ID NO: 931 - DNA, 20 bp, Moraxella bovis
taccaagaattcgctagaga

SEQ ID NO: 932 - DNA, 20 bp, Corynebacterium renale
actgcttgcagtggtactcg

SEQ ID NO: 933 - DNA, 20 bp, Prevotella corporis
ggccgccgtgcaagcgtgcc

SEQ ID NO: 934 - DNA, 20 bp, Serratia ficaria
cggcagcgcattgacgttac

SEQ ID NO: 935 - DNA, 20 bp, Alicyclobacillus acidocaldarius
atggggctttccatccccca

SEQ ID NO: 936 - DNA, 20 bp, Corynebacterium cystitidis
cactggatcgccatggagac

SEQ ID NO: 937 - DNA, 20 bp, Campylobacter lari
gatatccaactaatctctta

SEQ ID NO: 938 - DNA, 20 bp, Campylobacter curvus
actaagggacaacagttgga

SEQ ID NO: 939 - DNA, 20 bp, Fusobacterium necrophorum
ctacgaacggagcagagatg

SEQ ID NO: 940 - DNA, 30 bp, Pediococcus damnosus
gcactttcgttgattgaattagagatgctt

SEQ ID NO: 941 - DNA, 20 bp, Paenibacillus larvae
agctggtttcttcgcatgaa

SEQ ID NO: 942 - DNA, 20 bp, Paenibacillus larvae
agaccttttccttcggggac

SEQ ID NO: 943 - DNA, 20 bp, Fusobacterium necrophorum
gccggtgccctttcggggga

SEQ ID NO: 944 - DNA, 20 bp, Pediococcus dextrinicus
gcttgcaccaactgatttaa

SEQ ID NO: 945 - DNA, 20 bp, Enterococcus faecalis
tagagaagaacaaggacgtt

SEQ ID NO: 946 - DNA, 20 bp, Pediococcus dextrinicus
ttgcaccaactgatttaaaa

SEQ ID NO: 947 - DNA, 20 bp, Pediococcus parvulus
cgaacgcactttcgttaatt

SEQ ID NO: 948 - DNA, 20 bp, Propionibacterium propionicus
agtgtaaactcagtgcttaa

SEQ ID NO: 949 - DNA, 20 bp, Vibrio hollisae
attagctgttgggggttaga

SEQ ID NO: 950 - DNA, 20 bp, Bacteroides forsythus
atgagatacgtgtattttat

SEQ ID NO: 951 - DNA, 20 bp, Enterococcus cecorum
cgaaagaaaatgagtggcga

SEQ ID NO: 952 - DNA, 20 bp, Vibrio hollisae
tggtctagaaccgtggcttt

SEQ ID NO: 953 - DNA, 20 bp, Listeria grayi
aacgaatgaccttaggagct

SEQ ID NO: 954 - DNA, 20 bp, Neisseria elongata
ggttaatacccgtttctgct

SEQ ID NO: 955 - DNA, 20 bp, Staphylococcus warneri
caatagtgaaagacggcctt

SEQ ID NO: 956 - DNA, 20 bp, Lactococcus lactis
ttctctgtatcgcagctaac

SEQ ID NO: 957 - DNA, 20 bp, Campylobacter curvus
aacttgcccattactaaggg

SEQ ID NO: 958 - DNA, 20 bp, Bacteroides forsythus
agagctttcttcccttcggg

SEQ ID NO: 959 - DNA, 20 bp, Streptococcus hyointestinalis
agaagaacggatgtgggagt

SEQ ID NO: 960 - DNA, 20 bp, Bacillus smithii
cggataatatcttccttcgc

SEQ ID NO: 961 - DNA, 20 bp, Clostridium ramosum
ggctacaggaaatggtagcc

SEQ ID NO: 962 - DNA, 20 bp, Lactococcus garvieae
gtagagtggaaaattactta

SEQ ID NO: 963 - DNA, 20 bp, Clostridium ramosum
agtgttggatgtcaaagttc

SEQ ID NO: 964 - DNA, 20 bp, Dermabacter hominis
tggatatgaccttggcccgc

SEQ ID NO: 965 - DNA, 20 bp, Paenibacillus macerans
aagtcttccgcatgggagac

SEQ ID NO: 966 - DNA, 20 bp, Campylobacter lari
tccaactaatctcttagaga

SEQ ID NO: 967 - DNA, 20 bp, Porphyromonas maccae
atagaaagggataacccggt

SEQ ID NO: 968 - DNA, 20 bp, Granulicatella adiacens
aaagaggcgcaagcttctgc

SEQ ID NO: 969 - DNA, 30 bp, Clostridium ramosum
agagatggagagatagctatatgagataca

SEQ ID NO: 970 - DNA, 30 bp, Corynebacterium cystitidis
ggatgagcttgcggcctattagtttgttgg

SEQ ID NO: 971 - DNA, 20 bp, Actinomyces viscosus
tgggaaaggtttgttccggt

SEQ ID NO: 972 - DNA, 20 bp, Propionibacterium granulosum
aacgttgagcgtgctttcga

SEQ ID NO: 973 - DNA, 20 bp, Fusobacterium necrophorum
ttcgcatggaggaatcatga

SEQ ID NO: 974 - DNA, 20 bp, Granulicatella adiacens
agtaactgttagcgccttga

SEQ ID NO: 975 - DNA, 20 bp, Porphyromonas maccae
atggtcttgggttattgcat

SEQ ID NO: 976 - DNA, 20 bp, Alicyclobacillus acidocaldarius
ctctgccccgaagggacccc

SEQ ID NO: 977 - DNA, 20 bp, Propionibacterium propionicus
tcgtctaatgttgccagcaa

SEQ ID NO: 978 - DNA, 20 bp, Propionibacterium propionicus
tcagacctttaggcatcttt

SEQ ID NO: 979 - DNA, 20 bp, Bacillus smithii
catgaaggaaggttgaaagg

SEQ ID NO: 980 - DNA, 20 bp, Pasteurella aerogenes
catccagagaagagcgcaga

SEQ ID NO: 981 - DNA, 20 bp, Enterococcus cecorum
gatggatgaaaggcgctttt

SEQ ID NO: 982 - DNA, 20 bp, Porphyromonas maccae
cgtaaccgcgaggggcgtgt

SEQ ID NO: 983 - DNA, 20 bp, Paenibacillus thiaminolyticus
gcgacggtttccttcgggaa

SEQ ID NO: 984 - DNA, 20 bp, Enterococcus dispar
ttaatgaactcatgtttatt

SEQ ID NO: 985 - DNA, 20 bp, Propionibacterium propionicus
ataggcgccccgtaaggtcg

SEQ ID NO: 986 - DNA, 20 bp, Corynebacterium renale
ggccactgcttgcagtggta

SEQ ID NO: 987 - DNA, 20 bp, Bacteroides forsythus
acgacggagagtgagagctt

SEQ ID NO: 988 - DNA, 20 bp, Listeria grayi
taccgaataataatcagctc

SEQ ID NO: 989 - DNA, 20 bp, Bacteroides ovatus
gcagcattttagtttgcttg

SEQ ID NO: 990 - DNA, 20 bp, Paenibacillus larvae
agcgaatcctcaaaagccga

SEQ ID NO: 991 - DNA, 20 bp, Kingella denitrificans
aactcagagacgagtttgtg

SEQ ID NO: 992 - DNA, 20 bp, Bacteroides forsythus
gggctgttaagtccgcggtg

SEQ ID NO: 993 - DNA, 20 bp, Clostridium ramosum
ctacaggaaatggtagccga

SEQ ID NO: 994 - DNA, 20 bp, Corynebacterium renale
aaggccactgcttgcagtgg

SEQ ID NO: 995 - DNA, 20 bp, Lactococcus lactis
gtggtttattaagtctggtg

SEQ ID NO: 996 - DNA, 20 bp, Granulicatella adiacens
tttgaagaggaaaagaggcg

SEQ ID NO: 997 - DNA, 20 bp, Pediococcus parvulus
tgcaccgaagatgattttag

SEQ ID NO: 998 - DNA, 20 bp, Macrococcus caseolyticus
cttcgcatgaagcaatagtg

SEQ ID NO: 999 - DNA, 30 bp, Corynebacterium cystitidis
cgtgtaaagccggtcgtagttcggattggg

SEQ ID NO: 1000 - DNA, 20 bp, Porphyromonas maccae
tattgcatgatgattcaagt

SEQ ID NO: 1001 - DNA, 20 bp, Pasteurella aerogenes
gcgcagagatgtgcttgtgc

SEQ ID NO: 1002 - DNA, 20 bp, Streptococcus hyointestinalis
agtttaaaaggggcaactgc

SEQ ID NO: 1003 - DNA, 20 bp, Serratia ficaria
gaggaagggcgatgtcttaa

SEQ ID NO: 1004 - DNA, 20 bp, Streptococcus hyointestinalis
catgtcgtgacggtatctta

SEQ ID NO: 1005 - DNA, 20 bp, Bacteroides forsythus
gtaggtgggctgttaagtcc

SEQ ID NO: 1006 - DNA, 20 bp, Prevotella corporis
cagcccgctgtggcgccact

SEQ ID NO: 1007 - DNA, 20 bp, Pediococcus damnosus
cataataaaatgaaccgcat

SEQ ID NO: 1008 - DNA, 20 bp, Prevotella corporis
cgccggaagcgggcggaatt

SEQ ID NO: 1009 - DNA, 20 bp, Corynebacterium cystitidis
agcttgcggcctattagttt

SEQ ID NO: 1010 - DNA, 20 bp, Actinomyces neuii
tgtctacagagggttgctat

SEQ ID NO: 1011 - DNA, 20 bp, Corynebacterium cystitidis
ggggcgctaggtgtgagatc

SEQ ID NO: 1012 - DNA, 20 bp, Corynebacterium pilosum
cacaaagccagccgtagttc

SEQ ID NO: 1013 - DNA, 20 bp, Bacillus azotoformans
cctttagattcagcggcgga

SEQ ID NO: 1014 - DNA, 20 bp, Bacteroides forsythus
aaacaggggttccgcatggg

SEQ ID NO: 1015 - DNA, 20 bp, Prevotella intermedia
tttaggtgctcaacatctac

SEQ ID NO: 1016 - DNA, 20 bp, Paenibacillus macerans
agtcttccgcatgggagact

SEQ ID NO: 1017 - DNA, 20 bp, Lactococcus garvieae
tgattaaagatagcttgcta

SEQ ID NO: 1018 - DNA, 30 bp, Streptococcus hyointestinalis
gggagtggaaaatccatgtcgtgacggtat

SEQ ID NO: 1019 - DNA, 20 bp, Anaerobiospirillum succiniciproducens
taaagcactttcagggggag

SEQ ID NO: 1020 - DNA, 20 bp, Kocuria rosea
gtcgagcgaactgacgagag

SEQ ID NO: 1021 - DNA, 20 bp, Propionibacterium granulosum
tactggatatgtgctcctgc

SEQ ID NO: 1022 - DNA, 20 bp, Prevotella corporis
gcatgcaagtgcgggcgaat

SEQ ID NO: 1023 - DNA, 20 bp, Propionibacterium propionicus
ttgcgagcctgtaagggtta

SEQ ID NO: 1024 - DNA, 20 bp, Prevotella corporis
aaccttcccgcgaccaaggg

SEQ ID NO: 1025 - DNA, 20 bp, Porphyromonas maccae
attgcatgatgattcaagta

SEQ ID NO: 1026 - DNA, 20 bp, Pasteurella aerogenes
agaccgggaccgcaaggccg

SEQ ID NO: 1027 - DNA, 20 bp, Pediococcus damnosus
taaaatgaaccgcatggttt

SEQ ID NO: 1028 - DNA, 30 bp, Corynebacterium renale
tgtcggtggtggaaagcttttgcggtacgg

SEQ ID NO: 1029 - DNA, 20 bp, Pediococcus dextrinicus
acgagtttgcttttaatgaa

SEQ ID NO: 1030 - DNA, 20 bp, Granulicatella adiacens
accgcatggtttgaagagga

SEQ ID NO: 1031 - DNA, 20 bp, Pasteurella aerogenes
gactgggcagctagagtatt

SEQ ID NO: 1032 - DNA, 20 bp, Corynebacterium cystitidis
gtgctggtatgggatgagct

SEQ ID NO: 1033 - DNA, 20 bp, Streptococcus hyointestinalis
cacatgttattagtttaaaa

SEQ ID NO: 1034 - DNA, 20 bp, Haemophilus ducreyi
ggtctttaagactggcgccc

SEQ ID NO: 1035 - DNA, 20 bp, Prevotella intermedia
tgcatttacccttcgaataa

SEQ ID NO: 1036 - DNA, 20 bp, Corynebacterium diphtheriae
aggcctagcttgctaggtac

SEQ ID NO: 1037 - DNA, 30 bp, Pseudomonas luteola
tacgttgcagctttgacgttaccagcagaa

SEQ ID NO: 1038 - DNA, 20 bp, Lactococcus garvieae
taacaatgagaatcgcatga

SEQ ID NO: 1039 - DNA, 20 bp, Campylobacter curvus
taccttatactccgtatcta

SEQ ID NO: 1040 - DNA, 20 bp, Propionibacterium avidum
ataggaatccttgctgcatg

SEQ ID NO: 1041 - DNA, 20 bp, Kingella denitrificans
ccttgcgctatttgagcagc

SEQ ID NO: 1042 - DNA, 20 bp, Paenibacillus macerans
taatcaagtcttccgcatgg

SEQ ID NO: 1043 - DNA, 20 bp, Corynebacterium pilosum
tttgggcggtatgggatgag

SEQ ID NO: 1044 - DNA, 20 bp, Listeria grayi
aataataatcagctccgcat

SEQ ID NO: 1045 - DNA, 20 bp, Pediococcus parvulus
gatgattttagctataaagt

SEQ ID NO: 1046 - DNA, 20 bp, Macrococcus caseolyticus
tatctagcttcgcatgaagc

SEQ ID NO: 1047 - DNA, 20 bp, Pseudomonas fluorescens
aagctaatatcttgctgttt

SEQ ID NO: 1048 - DNA, 20 bp, Fusobacterium mortiferum
gcttttgtgccccttcgggg

SEQ ID NO: 1049 - DNA, 20 bp, Propionibacterium propionicus
ctttaggcatcttttggttt

SEQ ID NO: 1050 - DNA, 20 bp, Streptococcus hyointestinalis
tattagtttaaaaggggcaa

SEQ ID NO: 1051 - DNA, 20 bp, Propionibacterium granulosum
gcttaacgttgagcgtgctt

SEQ ID NO: 1052 - DNA, 20 bp, Pediococcus dextrinicus
gtttttaattgaaagacggc

SEQ ID NO: 1053 - DNA, 20 bp, Paenibacillus larvae
aagaacggccaggggagtaa

SEQ ID NO: 1054 - DNA, 20 bp, Propionibacterium propionicus
aatctgtaaaagccggcctc

SEQ ID NO: 1055 - DNA, 20 bp, Prevotella intermedia
ccaaagattcatcggtggag

SEQ ID NO: 1056 - DNA, 20 bp, Pediococcus dextrinicus
aaagtaaacgagtggcggac

SEQ ID NO: 1057 - DNA, 20 bp, Paenibacillus alvei
tttcctcgcatgagggagat

SEQ ID NO: 1058 - DNA, 20 bp, Bacteroides forsythus
ttacaggggaataaaatgag

SEQ ID NO: 1059 - DNA, 20 bp, Prevotella corporis
cggggataaagttgcccacg

SEQ ID NO: 1060 - DNA, 20 bp, Clostridium ramosum
aaaggctccagagatggaga

SEQ ID NO: 1061 - DNA, 20 bp, Enterococcus cecorum
atggtagatggatgaaaggc

SEQ ID NO: 1062 - DNA, 20 bp, Bacillus lentus
cctggagaaaggttgaaaga

SEQ ID NO: 1063 - DNA, 20 bp, Prevotella intermedia
ggagtaaagcggggcacgtg

SEQ ID NO: 1064 - DNA, 20 bp, Neisseria gonorrhoeae
aacgtaccgggtagcggggg

SEQ ID NO: 1065 - DNA, 20 bp, Prevotella intermedia
ggcatctgacgtggaccaaa

SEQ ID NO: 1066 - DNA, 20 bp, Staphylococcus piscifermentans
gcatggttccgcaatgaaag

SEQ ID NO: 1067 - DNA, 20 bp, Porphyromonas maccae
gaaagggataacccggtgaa

SEQ ID NO: 1068 - DNA, 20 bp, Prevotella corporis
ccaaccgctgccctgcggcg

SEQ ID NO: 1069 - DNA, 20 bp, Dermabacter hominis
cgtgaaaactcgaggcttaa

SEQ ID NO: 1070 - DNA, 20 bp, Bacillus circulans
gagcggactttaaaagcttg

SEQ ID NO: 1071 - DNA, 20 bp, Enterococcus faecalis
agaagaacaaggacgttagt

SEQ ID NO: 1072 - DNA, 20 bp, Actinomyces neuii
catcttggttcggatcgcag

SEQ ID NO: 1073 - DNA, 20 bp, Prevotella corporis
cctttgaaggcatctgacga

SEQ ID NO: 1074 - DNA, 20 bp, Listeria grayi
ttggaaactgggagacttag

SEQ ID NO: 1075 - DNA, 20 bp, Listeria welshimeri
taccgaataataagtggtgg

SEQ ID NO: 1076 - DNA, 20 bp, Streptococcus agalactiae
taggagtggaaaatctacca

SEQ ID NO: 1077 - DNA, 20 bp, Pediococcus pentosaceus
ttgacatcttctgacagtct

SEQ ID NO: 1078 - DNA, 20 bp, Pediococcus dextrinicus
ttttaattgaaagacggcgt

SEQ ID NO: 1079 - DNA, 20 bp, Kingella denitrificans
atgtacggaagaactcagag

SEQ ID NO: 1080 - DNA, 20 bp, Moraxella bovis
caagaattcgctagagatag

SEQ ID NO: 1081 - DNA, 30 bp, Propionibacterium granulosum
tgggggttggaaagctccggcggttgtgga

SEQ ID NO: 1082 - DNA, 20 bp, Propionibacterium propionicus
gttagagaccgccgaggtca

SEQ ID NO: 1083 - DNA, 20 bp, Corynebacterium pilosum
ggttggtacagcgcgcagcg

SEQ ID NO: 1084 - DNA, 20 bp, Bacillus azotoformans
taactcttcgaacctcatgg

SEQ ID NO: 1085 - DNA, 20 bp, Listeria grayi
gagcgggtttgaaaggcggc

SEQ ID NO: 1086 - DNA, 30 bp, Kocuria rosea
tctaatactggatactacctcttaccgcat

SEQ ID NO: 1087 - DNA, 20 bp, Porphyromonas maccae
ctaaagcacgtaaccgcgag

SEQ ID NO: 1088 - DNA, 20 bp, Actinomyces viscosus
gggaaaggtttgttccggtg

SEQ ID NO: 1089 - DNA, 20 bp, Gemella haemolysans
cgagagtaagcaaacctcac

SEQ ID NO: 1090 - DNA, 20 bp, Prevotella corporis
aggcagcccgctgtggcgcc

SEQ ID NO: 1091 - DNA, 20 bp, Corynebacterium cystitidis
atcgtgtaaagccggtcgta

SEQ ID NO: 1092 - DNA, 20 bp, Prevotella corporis
cgtcggtcacggatggggat

SEQ ID NO: 1093 - DNA, 20 bp, Actinomyces neuii
acctttttggggggagtggt

SEQ ID NO: 1094 - DNA, 20 bp, Porphyromonas maccae
gcatgatgattcaagtaaag

SEQ ID NO: 1095 - DNA, 20 bp, Propionibacterium granulosum
caactttgggataacgctag

SEQ ID NO: 1096 - DNA, 20 bp, Paenibacillus macerans
aatcaagtcttccgcatggg

SEQ ID NO: 1097 - DNA, 20 bp, Pediococcus dextrinicus
aggcggtgcttgcaccaact

SEQ ID NO: 1098 - DNA, 20 bp, Campylobacter curvus
tgcccattactaagggacaa

SEQ ID NO: 1099 - DNA, 30 bp, Prevotella intermedia
gtgaaatttaggtgctcaacatctaccttg

SEQ ID NO: 1100 - DNA, 20 bp, Streptococcus hyointestinalis
gatgtgggagtggaaaatcc

SEQ ID NO: 1101 - DNA, 20 bp, Pediococcus dextrinicus
ggcggtgcttgcaccaactg

SEQ ID NO: 1102 - DNA, 20 bp, Bacillus azotoformans
ttcgaacctcatggttcgaa

SEQ ID NO: 1103 - DNA, 20 bp, Corynebacterium pilosum
gaaaggcctttgggcggtat

SEQ ID NO: 1104 - DNA, 20 bp, Lactococcus garvieae
aagttgggagtacccaaagt

SEQ ID NO: 1105 - DNA, 20 bp, Prevotella corporis
atgaagtcccctcgggactc

SEQ ID NO: 1106 - DNA, 20 bp, Fusobacterium mortiferum
accaaaaccggcgcacgggt

SEQ ID NO: 1107 - DNA, 20 bp, Pediococcus dextrinicus
gagtttgcttttaatgaagg

SEQ ID NO: 1108 - DNA, 20 bp, Paenibacillus larvae
gctggtttcttcgcatgaag

SEQ ID NO: 1109 - DNA, 20 bp, Bacillus lentus
ctttcttctcctggagaaag

SEQ ID NO: 1110 - DNA, 20 bp, Bacteroides forsythus
acctgtcggcgaccggcgca

SEQ ID NO: 1111 - DNA, 30 bp, Vibrio hollisae
gccgtgaggaaggtagcgtagttaatacct

SEQ ID NO: 1112 - DNA, 20 bp, Propionibacterium propionicus
acctttaggcatcttttggt

SEQ ID NO: 1113 - DNA, 20 bp, Propionibacterium propionicus
agttatgttggggactcgtt

SEQ ID NO: 1114 - DNA, 30 bp, Aneurinibacillus aneurinilyticus
taataccggatacgtttttcagaccgcatg

SEQ ID NO: 1115 - DNA, 20 bp, Lactococcus garvieae
gagcgatgattaaagatagc

SEQ ID NO: 1116 - DNA, 20 bp, Porphyromonas maccae
actatgtatgaaagtacata

SEQ ID NO: 1117 - DNA, 20 bp, Propionibacterium granulosum
ccggtacagtgagttgcgac

SEQ ID NO: 1118 - DNA, 20 bp, Haemophilus ducreyi
tgggggttggtctttaagac

SEQ ID NO: 1119 - DNA, 20 bp, Paenibacillus larvae
tgccaaggaagaacggccag

SEQ ID NO: 1120 - DNA, 20 bp, Aerococcus urinae
cagcgaccttgtgaaagcaa

SEQ ID NO: 1121 - DNA, 20 bp, Prevotella oralis
ttatgcggggataaagttgg

SEQ ID NO: 1122 - DNA, 20 bp, Neisseria elongata
agaaaaaggagcggttaata

SEQ ID NO: 1123 - DNA, 20 bp, Corynebacterium pilosum
ttttgttggaaagcctttgg

SEQ ID NO: 1124 - DNA, 20 bp, Pasteurella aerogenes
cgaaagaccgggaccgcaag

SEQ ID NO: 1125 - DNA, 20 bp, Prevotella intermedia
tccaaccttccctccactcg

SEQ ID NO: 1126 - DNA, 30 bp, Corynebacterium mycetoides
cttgacatacactagatcgctgtagagata

SEQ ID NO: 1127 - DNA, 20 bp, Streptococcus equi
gagaagaacagtgatgggag

SEQ ID NO: 1128 - DNA, 20 bp, Sphingobacterium multivorum
catggcccttacgcttcggg

SEQ ID NO: 1129 - DNA, 20 bp, Bacillus azotoformans
cgaagataaaagatggtttc

SEQ ID NO: 1130 - DNA, 20 bp, Neisseria elongata
aggagcggttaatacccgtt

SEQ ID NO: 1131 - DNA, 20 bp, Listeria grayi
tggagcaggtttgaaaggcg

SEQ ID NO: 1132 - DNA, 20 bp, Prevotella buccae
agatgatgaagtccctcggg

SEQ ID NO: 1133 - DNA, 20 bp, Enterococcus raffinosus
ttctacagtgaaagatggcc

SEQ ID NO: 1134 - DNA, 20 bp, Lactococcus lactis
tatgcattggaaactggtag

SEQ ID NO: 1135 - DNA, 20 bp, Campylobacter curvus
gggaaagtttttcggtaatg

SEQ ID NO: 1136 - DNA, 20 bp, Propionibacterium propionicus
ggggactcgttagagaccgc

SEQ ID NO: 1137 - DNA, 20 bp, Pediococcus damnosus
aaaatgaaccgcatggttta

SEQ ID NO: 1138 - DNA, 20 bp, Fusobacterium mortiferum
actgtcagtcttgaatgatt

SEQ ID NO: 1139 - DNA, 20 bp, Lactococcus garvieae
agcttgctatttttatgaag

SEQ ID NO: 1140 - DNA, 20 bp, Clostridium ramosum
gctacaggaaatggtagccg

SEQ ID NO: 1141 - DNA, 20 bp, Prevotella intermedia
gcctaatacccgatgttgtc

SEQ ID NO: 1142 - DNA, 20 bp, Prevotella corporis
gcaggagaatgattcagaga

SEQ ID NO: 1143 - DNA, 20 bp, Enterobacter sakazakii
cagggagcagcttgctgctc

SEQ ID NO: 1144 - DNA, 20 bp, Porphyromonas maccae
ctcaaccacagtcttgcctt

SEQ ID NO: 1145 - DNA, 20 bp, Actinomyces neuii
gttgctattccgtgaggttg

SEQ ID NO: 1146 - DNA, 20 bp, Propionibacterium granulosum
ccacaactttgggataacgc

SEQ ID NO: 1147 - DNA, 20 bp, Prevotella intermedia
attgcagacgcaggatacag

SEQ ID NO: 1148 - DNA, 20 bp, Actinomyces neuii
tgcaccgcgagactgcagag

SEQ ID NO: 1149 - DNA, 20 bp, Prevotella corporis
aggcatctgacgaggagcaa

SEQ ID NO: 1150 - DNA, 20 bp, Haemophilus ducreyi
gggttggtctttaagactgg

SEQ ID NO: 1151 - DNA, 20 bp, Dermabacter hominis
tcgaggcttaaccttgggcg

SEQ ID NO: 1152 - DNA, 20 bp, Propionibacterium propionicus
ggcatcttttggtttggaaa

SEQ ID NO: 1153 - DNA, 20 bp, Pediococcus parvulus
gatttttaaaagatggcttc

SEQ ID NO: 1154 - DNA, 20 bp, Corynebacterium cystitidis
aggttttgtgctggtatggg

SEQ ID NO: 1155 - DNA, 20 bp, Vibrio hollisae
tagttaatacctgcgttact

SEQ ID NO: 1156 - DNA, 20 bp, Bacillus smithii
tatcttccttcgcatgaagg

SEQ ID NO: 1157 - DNA, 20 bp, Macrococcus caseolyticus
atatctagcttcgcatgaag

SEQ ID NO: 1158 - DNA, 20 bp, Corynebacterium cystitidis
gctaatcgtgtaaagccggt

SEQ ID NO: 1159 - DNA, 20 bp, Paenibacillus alvei
cagataggcattttcctcgc

SEQ ID NO: 1160 - DNA, 20 bp, Kingella denitrificans
tgagcagccaatatctgatt

SEQ ID NO: 1161 - DNA, 20 bp, Pediococcus parvulus
gaggtgcttgcaccgaagat

SEQ ID NO: 1162 - DNA, 20 bp, Propionibacterium propionicus
aagtgtaaactcagtgctta

SEQ ID NO: 1163 - DNA, 20 bp, Corynebacterium mycetoides
ctgcatgttggtgtgtggtt

SEQ ID NO: 1164 - DNA, 20 bp, Corynebacterium pilosum
gaaagcctttgggcggtatg

SEQ ID NO: 1165 - DNA, 20 bp, Prevotella corporis
ccgtgaaaagcagcggccca

SEQ ID NO: 1166 - DNA, 20 bp, Clostridium ramosum
agaacggcggctacaggaaa

SEQ ID NO: 1167 - DNA, 20 bp, Prevotella corporis
tggcgccactgacgctgagg

SEQ ID NO: 1168 - DNA, 20 bp, Listeria grayi
cctttggtcgttagtggcgg

SEQ ID NO: 1169 - DNA, 20 bp, Paenibacillus larvae
gccaaggaagaacggccagg

SEQ ID NO: 1170 - DNA, 20 bp, Enterococcus faecalis
cactcaattggaaagaggag

SEQ ID NO: 1171 - DNA, 20 bp, Clostridium ramosum
cgcataggtacggacactgc

SEQ ID NO: 1172 - DNA, 20 bp, Prevotella corporis
aagtcccctcgggactcctg

SEQ ID NO: 1173 - DNA, 20 bp, Streptococcus agalactiae
gttggtaggagtggaaaatc

SEQ ID NO: 1174 - DNA, 30 bp, Lactococcus garvieae
ctaataccgcataacaatgagaatcgcatg

SEQ ID NO: 1175 - DNA, 20 bp, Campylobacter lari
taatctcttagagataagag

SEQ ID NO: 1176 - DNA, 20 bp, Pasteurella aerogenes
tgacatccagagaagagcgc

SEQ ID NO: 1177 - DNA, 20 bp, Dermabacter hominis
atatgaccttggcccgcatg

SEQ ID NO: 1178 - DNA, 20 bp, Corynebacterium renale
caacgcgtgtgctacttcgt

SEQ ID NO: 1179 - DNA, 20 bp, Pediococcus parvulus
accgaagatgattttagcta

SEQ ID NO: 1180 - DNA, 20 bp, Corynebacterium pilosum
cagcgcgcagcgagatcgtg

SEQ ID NO: 1181 - DNA, 20 bp, Pediococcus damnosus
gattgaattagagatgcttg

SEQ ID NO: 1182 - DNA, 20 bp, Lactococcus garvieae
gtggaaaattacttaagtga

SEQ ID NO: 1183 - DNA, 20 bp, Vibrio hollisae
caattagctgttgggggtta

SEQ ID NO: 1184 - DNA, 20 bp, Bacillus azotoformans
atggttcgaagataaaagat

SEQ ID NO: 1185 - DNA, 20 bp, Propionibacterium granulosum
aacttgatgcttaacgttga

SEQ ID NO: 1186 - DNA, 20 bp, Prevotella corporis
atccccaaatccggtcccag

SEQ ID NO: 1187 - DNA, 20 bp, Pediococcus dextrinicus
aaaaccacatggtttttaat

SEQ ID NO: 1188 - DNA, 20 bp, Listeria grayi
gaataataatcagctccgca

SEQ ID NO: 1189 - DNA, 20 bp, Prevotella corporis
tgcggggataaagttgccca

SEQ ID NO: 1190 - DNA, 20 bp, Prevotella corporis
ttatgtcctcctttgaaggc

SEQ ID NO: 1191 - DNA, 20 bp, Enterococcus avium
tcggtttgaaaggcgctttt

SEQ ID NO: 1192 - DNA, 20 bp, Paenibacillus macerans
ggataatcaagtcttccgca

SEQ ID NO: 1193 - DNA, 20 bp, Bacteroides forsythus
cgcggtgaaagtttgtcgct

SEQ ID NO: 1194 - DNA, 20 bp, Prevotella intermedia
agacgcaggatacagagatg

SEQ ID NO: 1195 - DNA, 20 bp, Neisseria elongata
aaaaaggagcggttaatacc

SEQ ID NO: 1196 - DNA, 20 bp, Granulicatella adiacens
aggtcttcgaaccgcatggt

SEQ ID NO: 1197 - DNA, 20 bp, Lactococcus garvieae
ttaagtagagtggaaaatta

SEQ ID NO: 1198 - DNA, 20 bp, Porphyromonas maccae
ctatgtatgaaagtacatat

SEQ ID NO: 1199 - DNA, 20 bp, Clostridium ramosum
gcataggtacggacactgca

SEQ ID NO: 1200 - DNA, 30 bp, Clostridium ramosum
tccagagatggagagatagctatatgagat

SEQ ID NO: 1201 - DNA, 20 bp, Campylobacter curvus
cgggaaagtttttcggtaat

SEQ ID NO: 1202 - DNA, 20 bp, Rothia mucilaginosa
agcagggaagaagagagatt

SEQ ID NO: 1203 - DNA, 20 bp, Paenibacillus larvae
cttcgggagacgccaggtta

SEQ ID NO: 1204 - DNA, 20 bp, Streptococcus hyointestinalis
ccatgtcgtgacggtatctt

SEQ ID NO: 1205 - DNA, 20 bp, Rothia mucilaginosa
ggccggggcttaaccccgtg

SEQ ID NO: 1206 - DNA, 20 bp, Enterococcus dispar
accgcataacaatagtaaac

SEQ ID NO: 1207 - DNA, 20 bp, Prevotella corporis
gccctgcggcgcgaactgct

SEQ ID NO: 1208 - DNA, 20 bp, Porphyromonas maccae
agcggactatgtatgaaagt

SEQ ID NO: 1209 - DNA, 20 bp, Granulicatella adiacens
aggaaaagaggcgcaagctt

SEQ ID NO: 1210 - DNA, 20 bp, Lactococcus garvieae
tagcgggggacaacgtttgg

SEQ ID NO: 1211 - DNA, 20 bp, Pediococcus dextrinicus
cggtatccaatcagaaagcc

SEQ ID NO: 1212 - DNA, 20 bp, Lactococcus garvieae
gtcgagcgatgattaaagat

SEQ ID NO: 1213 - DNA, 20 bp, Streptococcus hyointestinalis
ataacacatgttattagttt

SEQ ID NO: 1214 - DNA, 20 bp, Bacteroides forsythus
catcgatggttaggggttct

SEQ ID NO: 1215 - DNA, 20 bp, Listeria ivanovii
gacgcatgtcatcactttga

SEQ ID NO: 1216 - DNA, 20 bp, Kingella denitrificans
gaccttgcgctatttgagca

SEQ ID NO: 1217 - DNA, 30 bp, Neisseria elongata
aggacttttgttagggaagaaaaaggagcg

SEQ ID NO: 1218 - DNA, 20 bp, Propionibacterium granulosum
atactggatatgtgctcctg

SEQ ID NO: 1219 - DNA, 20 bp, Corynebacterium pilosum
tggaaaggcctttgggcggt

SEQ ID NO: 1220 - DNA, 30 bp, Corynebacterium urealyticum
ccttcgggtgacggtacctggataagaagc

SEQ ID NO: 1221 - DNA, 20 bp, Alicyclobacillus acidocaldarius
catctctgagggtgtcagag

SEQ ID NO: 1222 - DNA, 20 bp, Bacteroides ovatus
cctgccgataactccggaat

SEQ ID NO: 1223 - DNA, 30 bp, Lactococcus garvieae
gttagagaagaacgttaagtagagtggaaa

SEQ ID NO: 1224 - DNA, 20 bp, Prevotella intermedia
gtgctcaacatctaccttgc

SEQ ID NO: 1225 - DNA, 20 bp, Bacteroides forsythus
tgagagctttcttcccttcg

SEQ ID NO: 1226 - DNA, 20 bp, Prevotella intermedia
tgctcaacatctaccttgca

SEQ ID NO: 1227 - DNA, 20 bp, Clostridium ramosum
aacggcggctacaggaaatg

SEQ ID NO: 1228 - DNA, 20 bp, Prevotella corporis
gaggggcagcatgccggttg

SEQ ID NO: 1229 - DNA, 20 bp, Pediococcus damnosus
cgcataataaaatgaaccgc

SEQ ID NO: 1230 - DNA, 20 bp, Pediococcus dextrinicus
aaaccacatggtttttaatt

SEQ ID NO: 1231 - DNA, 20 bp, Campylobacter curvus
tggatagggctatatcgtat

SEQ ID NO: 1232 - DNA, 20 bp, Prevotella corporis
agtgcgccggaagcgggcgg

SEQ ID NO: 1233 - DNA, 20 bp, Bacteroides forsythus
ctcaccaagccatcgatggt

SEQ ID NO: 1234 - DNA, 20 bp, Porphyromonas maccae
gagtcgggagtacctaaagc

SEQ ID NO: 1235 - DNA, 20 bp, Porphyromonas maccae
gcggactatgtatgaaagta

SEQ ID NO: 1236 - DNA, 20 bp, Prevotella corporis
aattgcaggagaatgattca

SEQ ID NO: 1237 - DNA, 20 bp, Porphyromonas maccae
ttatggtcttgggttattgc

SEQ ID NO: 1238 - DNA, 20 bp, Pediococcus parvulus
aatgaattagaggtgcttgc

SEQ ID NO: 1239 - DNA, 20 bp, Lactococcus garvieae
tgtgtgcattggaaactggg

SEQ ID NO: 1240 - DNA, 20 bp, Porphyromonas maccae
gctatcagataggcatgcgt

SEQ ID NO: 1241 - DNA, 20 bp, Pediococcus dextrinicus
acatggtttttaattgaaag

SEQ ID NO: 1242 - DNA, 20 bp, Paenibacillus larvae
tagttgccagcacgcagagg

SEQ ID NO: 1243 - DNA, 20 bp, Prevotella intermedia
ggaccaaagattcatcggtg

SEQ ID NO: 1244 - DNA, 20 bp, Prevotella corporis
gcagcccgctgtggcgccac

SEQ ID NO: 1245 - DNA, 20 bp, Pediococcus dextrinicus
aataaacgagtggcggacgg

SEQ ID NO: 1246 - DNA, 20 bp, Granulicatella adiacens
gtaactgttagcgccttgac

SEQ ID NO: 1247 - DNA, 20 bp, Streptococcus hyointestinalis
tgtgggagtggaaaatccat

SEQ ID NO: 1248 - DNA, 20 bp, Neisseria gonorrhoeae
cgttgccaatatcggcggcc

SEQ ID NO: 1249 - DNA, 20 bp, Corynebacterium mycetoides
ataccggataggagctgcat

SEQ ID NO: 1250 - DNA, 20 bp, Neisseria gonorrhoeae
aaggccgttgccaatatcgg

SEQ ID NO: 1251 - DNA, 20 bp, Macrococcus caseolyticus
atttagcttcgcatgaagca

SEQ ID NO: 1252 - DNA, 20 bp, Pediococcus pentosaceus
catcttctgacagtctaaga

SEQ ID NO: 1253 - DNA, 20 bp, Clostridium ramosum
ccgtattaaaagtgcctcaa

SEQ ID NO: 1254 - DNA, 20 bp, Bacteroides forsythus
gatggtagcaatacctgtcg

SEQ ID NO: 1255 - DNA, 20 bp, Staphylococcus capitis
acgtcttgacggacctaatc

SEQ ID NO: 1256 - DNA, 30 bp, Listeria welshimeri
ctaataccgaataataagtggtggcgcatg

SEQ ID NO: 1257 - DNA, 20 bp, Listeria grayi
gctcctttggtcgttagtgg

SEQ ID NO: 1258 - DNA, 20 bp, Aneurinibacillus aneurinilyticus
taccggatacgtttttcaga

SEQ ID NO: 1259 - DNA, 20 bp, Streptococcus criceti
gcaccactatcagatggacc

SEQ ID NO: 1260 - DNA, 20 bp, Haemophilus ducreyi
tggtctttaagactggcgcc

SEQ ID NO: 1261 - DNA, 20 bp, Enterococcus faecalis
gtcgaacgcttctttcctcc

SEQ ID NO: 1262 - DNA, 20 bp, Prevotella corporis
gacgaggagcaaagatccgt

SEQ ID NO: 1263 - DNA, 20 bp, Actinomyces neuii
cgcatgctacattggtgtct

SEQ ID NO: 1264 - DNA, 20 bp, Porphyromonas maccae
ttagcggactatgtatgaaa

SEQ ID NO: 1265 - DNA, 30 bp, Comamonas terrigena
gcaagaccttgcgcaactggagcggccgat

SEQ ID NO: 1266 - DNA, 20 bp, Campylobacter curvus
ccttatactccgtatctata

SEQ ID NO: 1267 - DNA, 20 bp, Prevotella corporis
cacggatggggatgcgtccg

SEQ ID NO: 1268 - DNA, 20 bp, Fusobacterium mortiferum
ctaatggtatataagagcgg

SEQ ID NO: 1269 - DNA, 20 bp, Bacteroides forsythus
gagagctttcttcccttcgg

SEQ ID NO: 1270 - DNA, 20 bp, Brevibacillus laterosporus
cctgaagcgaaacggaaaga

SEQ ID NO: 1271 - DNA, 20 bp, Fusobacterium mortiferum
taagagcggcatcgttttta

SEQ ID NO: 1272 - DNA, 30 bp, Corynebacterium falsenii
taaacctctttcgctagggaagaagccatg

SEQ ID NO: 1273 - DNA, 20 bp, Campylobacter curvus
gcccattactaagggacaac

SEQ ID NO: 1274 - DNA, 20 bp, Bacteroides forsythus
tgaaatgtagacgacggaga

SEQ ID NO: 1275 - DNA, 20 bp, Propionibacterium granulosum
ggagcttccagagatggttg

SEQ ID NO: 1276 - DNA, 20 bp, Haemophilus ducreyi
aaggcagttttgttaatagc

SEQ ID NO: 1277 - DNA, 20 bp, Alicyclobacillus acidocaldarius
aattgggccttcccccgcaa

SEQ ID NO: 1278 - DNA, 20 bp, Neisseria gonorrhoeae
aggctgttgccaatatcggc

SEQ ID NO: 1279 - DNA, 20 bp, Enterococcus faecalis
gtaactgaacgtcccctgac

SEQ ID NO: 1280 - DNA, 20 bp, Alicyclobacillus acidocaldarius
ttgggccttcccccgcaaga

SEQ ID NO: 1281 - DNA, 20 bp, Staphylococcus kloosii
tacagtgaaagatggctttg

SEQ ID NO: 1282 - DNA, 20 bp, Macrococcus caseolyticus
aatatttagcttcgcatgaa

SEQ ID NO: 1283 - DNA, 20 bp, Prevotella intermedia
aattgcagacgcaggataca

SEQ ID NO: 1284 - DNA, 20 bp, Prevotella corporis
ccgctgccctgcggcgcgaa

SEQ ID NO: 1285 - DNA, 20 bp, Porphyromonas maccae
cccacgttgtcagttactat

SEQ ID NO: 1286 - DNA, 20 bp, Enterococcus cecorum
tacaccggaagaaaatgagt

SEQ ID NO: 1287 - DNA, 20 bp, Propionibacterium propionicus
ctaataccggatattcagac

SEQ ID NO: 1288 - DNA, 20 bp, Vibrio hollisae
cgtagttaatacctgcgtta

SEQ ID NO: 1289 - DNA, 20 bp, Propionibacterium granulosum
taacgttgagcgtgctttcg

SEQ ID NO: 1290 - DNA, 20 bp, Corynebacterium cystitidis
aaggttttgtgctggtatgg

SEQ ID NO: 1291 - DNA, 20 bp, Propionibacterium propionicus
ctgtaagggttagcgaatct

SEQ ID NO: 1292 - DNA, 20 bp, Vibrio hollisae
gggggttagaatccctggta

SEQ ID NO: 1293 - DNA, 20 bp, Prevotella intermedia
gttgtccacatatggcatct

SEQ ID NO: 1294 - DNA, 20 bp, Campylobacter curvus
ataccttatactccgtatct

SEQ ID NO: 1295 - DNA, 20 bp, Enterococcus faecalis
acgtcccctgacggtatcta

SEQ ID NO: 1296 - DNA, 20 bp, Prevotella intermedia
catatggcatctgacgtgga

SEQ ID NO: 1297 - DNA, 20 bp, Prevotella intermedia
tgactcccttcggggcgtct

SEQ ID NO: 1298 - DNA, 20 bp, Porphyromonas maccae
gggttattgcatgatgattc

SEQ ID NO: 1299 - DNA, 20 bp, Macrococcus caseolyticus
atgaagcaatagtgaaagac

SEQ ID NO: 1300 - DNA, 20 bp, Listeria grayi
ggagcgggtttgaaaggcgg

SEQ ID NO: 1301 - DNA, 30 bp, Gemella haemolysans
agctcgcgagagtaagcaaacctcacaaaa

SEQ ID NO: 1302 - DNA, 30 bp, Lactococcus garvieae
ttgtgtgcattggaaactgggagacttgag

SEQ ID NO: 1303 - DNA, 20 bp, Lactococcus lactis
ggtttattaagtctggtgta

SEQ ID NO: 1304 - DNA, 20 bp, Propionibacterium propionicus
cccccctctctgggataaca

SEQ ID NO: 1305 - DNA, 20 bp, Pasteurella aerogenes
gctaatcgattgacgttaat

SEQ ID NO: 1306 - DNA, 20 bp, Pasteurella aerogenes
agaagagcgcagagatgtgc

SEQ ID NO: 1307 - DNA, 20 bp, Bacteroides forsythus
cagagggataacccggcgaa

SEQ ID NO: 1308 - DNA, 20 bp, Macrococcus caseolyticus
ataatatttagcttcgcatg

SEQ ID NO: 1309 - DNA, 20 bp, Prevotella corporis
ggggcagcatgccggttgct

SEQ ID NO: 1310 - DNA, 20 bp, Pediococcus pentosaceus
cttgtactgattgagatttt

SEQ ID NO: 1311 - DNA, 30 bp, Streptococcus hyointestinalis
gagaagaacggatgtgggagtggaaaatcc

SEQ ID NO: 1312 - DNA, 20 bp, Lactococcus garvieae
gagtgctagctgtagggagc

SEQ ID NO: 1313 - DNA, 20 bp, Bacteroides forsythus
aacagagggataacccggcg

SEQ ID NO: 1314 - DNA, 20 bp, Granulicatella adiacens
gaaccgcatggtttgaagag

SEQ ID NO: 1315 - DNA, 20 bp, Porphyromonas maccae
taagttatgactgacactga

SEQ ID NO: 1316 - DNA, 20 bp, Corynebacterium mycetoides
gaggtggggctaatcgctga

SEQ ID NO: 1317 - DNA, 20 bp, Porphyromonas maccae
tgcatgatgattcaagtaaa

SEQ ID NO: 1318 - DNA, 20 bp, Porphyromonas maccae
taaagccgaggactctgaca

SEQ ID NO: 1319 - DNA, 20 bp, Campylobacter curvus
gtttttcggtaatggatagg

SEQ ID NO: 1320 - DNA, 20 bp, Neisseria elongata
ccgtttctgctgacggtacc

SEQ ID NO: 1321 - DNA, 20 bp, Bacteroides forsythus
cgcgtatgtaacctgcccgc

SEQ ID NO: 1322 - DNA, 20 bp, Macrococcus caseolyticus
ttcgcatgaagcaatagtga

SEQ ID NO: 1323 - DNA, 20 bp, Pediococcus parvulus
gtcgaacgcactttcgttaa

SEQ ID NO: 1324 - DNA, 20 bp, Prevotella intermedia
tccacatatggcatctgacg

SEQ ID NO: 1325 - DNA, 20 bp, Corynebacterium urealyticum
cgctagggaagaagccttcg

SEQ ID NO: 1326 - DNA, 30 bp, Prevotella intermedia
atgacgaactccgattgcgaaggcagcgta

SEQ ID NO: 1327 - DNA, 20 bp, Staphylococcus carnosus
ataatatgcagaaccgcatg

SEQ ID NO: 1328 - DNA, 20 bp, Propionibacterium propionicus
ttttggtttggaaagttctg

SEQ ID NO: 1329 - DNA, 20 bp, Eubacterium moniliforme
accacggaagttgggagcac

SEQ ID NO: 1330 - DNA, 20 bp, Paenibacillus macerans
gagatggacctgcggtgcat

SEQ ID NO: 1331 - DNA, 20 bp, Pediococcus dextrinicus
atttaaaagtaaacgagtgg

SEQ ID NO: 1332 - DNA, 20 bp, Porphyromonas maccae
ggttattgcatgatgattca

SEQ ID NO: 1333 - DNA, 20 bp, Neisseria elongata
agcggttaatacccgtttct

SEQ ID NO: 1334 - DNA, 20 bp, Enterococcus faecalis
tcgaacgcttctttcctccc

SEQ ID NO: 1335 - DNA, 20 bp, Corynebacterium pilosum
gtacagcgcgcagcgagatc

SEQ ID NO: 1336 - DNA, 20 bp, Porphyromonas maccae
agttactatcgggtaaagcc

SEQ ID NO: 1337 - DNA, 20 bp, Streptococcus canis
gtgcttaacacatgttaaga

SEQ ID NO: 1338 - DNA, 20 bp, Prevotella corporis
gtcctcctttgaaggcatct

SEQ ID NO: 1339 - DNA, 20 bp, Bacillus smithii
catcttccttcgcatgaagg

SEQ ID NO: 1340 - DNA, 20 bp, Pediococcus damnosus
aatgaaccgcatggtttatt

SEQ ID NO: 1341 - DNA, 20 bp, Gemella morbillorum
catgacatttagcttaaaag

SEQ ID NO: 1342 - DNA, 20 bp, Enterococcus cecorum
tgctacaccggaagaaaatg

SEQ ID NO: 1343 - DNA, 20 bp, Campylobacter curvus
ctaagggacaacagttggaa

SEQ ID NO: 1344 - DNA, 20 bp, Listeria ivanovii
tcatcactttgaaagatggt

SEQ ID NO: 1345 - DNA, 30 bp, Fusobacterium necrophorum
gggaatattggacaatggaccgcaagtctg

SEQ ID NO: 1346 - DNA, 20 bp, Pediococcus parvulus
aggtgcttgcaccgaagatg

SEQ ID NO: 1347 - DNA, 30 bp, Corynebacterium pilosum
caatggttggtacagcgcgcagcgagatcg

SEQ ID NO: 1348 - DNA, 20 bp, Clostridium ramosum
gagatagctatatgagatac

SEQ ID NO: 1349 - DNA, 20 bp, Listeria ivanovii
gtcatcactttgaaagatgg

SEQ ID NO: 1350 - DNA, 20 bp, Propionibacterium propionicus
gtaaactcagtgcttaacgc

SEQ ID NO: 1351 - DNA, 20 bp, Enterococcus dispar
catgtttattaattgaaagg

SEQ ID NO: 1352 - DNA, 20 bp, Campylobacter lari
tgggcttgatatccaactaa

SEQ ID NO: 1353 - DNA, 30 bp, Propionibacterium propionicus
gagcttgtaggcggtttgtcgcgtcgaaag

SEQ ID NO: 1354 - DNA, 20 bp, Listeria welshimeri
ataagtggtggcgcatgcca

SEQ ID NO: 1355 - DNA, 20 bp, Pediococcus parvulus
agaggtgcttgcaccgaaga

SEQ ID NO: 1356 - DNA, 20 bp, Propionibacterium propionicus
gtggggctgataattaggac

SEQ ID NO: 1357 - DNA, 20 bp, Prevotella corporis
ggccggcacagagggctgtc

SEQ ID NO: 1358 - DNA, 20 bp, Enterococcus faecalis
tcctcccgagtgcttgcact

SEQ ID NO: 1359 - DNA, 20 bp, Enterococcus faecalis
gaacgcttctttcctcccga

SEQ ID NO: 1360 - DNA, 20 bp, Corynebacterium cystitidis
accggatattcacgtatctt

SEQ ID NO: 1361 - DNA, 20 bp, Pediococcus pentosaceus
acatcttctgacagtctaag

SEQ ID NO: 1362 - DNA, 20 bp, Bacteroides forsythus
gtaacctgcccgcaacagag

SEQ ID NO: 1363 - DNA, 20 bp, Propionibacterium granulosum
acgttgagcgtgctttcgat

SEQ ID NO: 1364 - DNA, 20 bp, Clostridium ramosum
atgtcaaagttcagtgctgc

SEQ ID NO: 1365 - DNA, 20 bp, Bacteroides forsythus
tcaccaagccatcgatggtt

SEQ ID NO: 1366 - DNA, 20 bp, Prevotella corporis
acgatggatacccgctgtcc

SEQ ID NO: 1367 - DNA, 20 bp, Pasteurella aerogenes
gagaagagcgcagagatgtg

SEQ ID NO: 1368 - DNA, 20 bp, Bacteroides forsythus
aaatgtagacgacggagagt

SEQ ID NO: 1369 - DNA, 20 bp, Moraxella bovis
acataccaagaattcgctag

SEQ ID NO: 1370 - DNA, 20 bp, Rothia mucilaginosa
gtgtattgcagtgggtacgg

SEQ ID NO: 1371 - DNA, 20 bp, Prevotella corporis
aaggcatctgacgaggagca

SEQ ID NO: 1372 - DNA, 30 bp, Comamonas terrigena
catgagaactgaggttgaaagcaggggatc

SEQ ID NO: 1373 - DNA, 20 bp, Prevotella intermedia
gactcccttcggggcgtctg

SEQ ID NO: 1374 - DNA, 20 bp, Propionibacterium propionicus
cagacctttaggcatctttt

SEQ ID NO: 1375 - DNA, 20 bp, Enterococcus dispar
tattatttgaaaggcgcttt

SEQ ID NO: 1376 - DNA, 20 bp, Enterococcus faecalis
acagtttatgccgcatggca

SEQ ID NO: 1377 - DNA, 20 bp, Prevotella intermedia
ctaccttgcagcgcgaactg

SEQ ID NO: 1378 - DNA, 20 bp, Bacillus badius
tccgttcaagttagcggcgg

SEQ ID NO: 1379 - DNA, 20 bp, Granulicatella adiacens
tgctaaaaccgcataggtct

SEQ ID NO: 1380 - DNA, 30 bp, Neisseria gonorrhoeae
aacgtaccgggtagcgggggataactgatc

SEQ ID NO: 1381 - DNA, 20 bp, Corynebacterium cystitidis
ctagcttgctagggtgctcg

SEQ ID NO: 1382 - DNA, 20 bp, Streptococcus hyointestinalis
agtggaaaatccatgtcgtg

SEQ ID NO: 1383 - DNA, 20 bp, Campylobacter curvus
taatactccatactccattt

SEQ ID NO: 1384 - DNA, 20 bp, Paenibacillus larvae
acgcagaggtgggcactcta

SEQ ID NO: 1385 - DNA, 20 bp, Paenibacillus alvei
catctgaatgaccgctctag

SEQ ID NO: 1386 - DNA, 20 bp, Paenibacillus alvei
accagataggcattttcctc

SEQ ID NO: 1387 - DNA, 30 bp, Macrococcus caseolyticus
gaacggacgagagtgcttgcactctctgat

SEQ ID NO: 1388 - DNA, 20 bp, Clostridium ramosum
agagatagctatatgagata

SEQ ID NO: 1389 - DNA, 20 bp, Pediococcus dextrinicus
taccgcataatattaaaaac

SEQ ID NO: 1390 - DNA, 20 bp, Bacteroides forsythus
tagcaatacctgtcggcgac

SEQ ID NO: 1391 - DNA, 20 bp, Corynebacterium mycetoides
ataggagctgcatgttggtg

SEQ ID NO: 1392 - DNA, 30 bp, Neisseria gonorrhoeae
cctggttttgacatgtgcggaatcctccgg

SEQ ID NO: 1393 - DNA, 20 bp, Streptococcus macacae
cccctatcagatggacctgc

SEQ ID NO: 1394 - DNA, 20 bp, Prevotella corporis
ccaaccttcccgcgaccaag

SEQ ID NO: 1395 - DNA, 20 bp, Pediococcus dextrinicus
tgcttttaatgaaggcggtg

SEQ ID NO: 1396 - DNA, 20 bp, Listeria grayi
tcagctccgcatggagcagg

SEQ ID NO: 1397 - DNA, 20 bp, Propionibacterium propionicus
ttagcgaatctgtaaaagcc

SEQ ID NO: 1398 - DNA, 20 bp, Lactococcus garvieae
ccgagtagcgggggacaacg

SEQ ID NO: 1399 - DNA, 20 bp, Enterococcus dispar
tttattaattgaaaggcgct

SEQ ID NO: 1400 - DNA, 20 bp, Propionibacterium propionicus
tacaatggtcggtacagtca

SEQ ID NO: 1401 - DNA, 30 bp, Bacillus badius
tccgttcaagttagcggcggacgggtgagt

SEQ ID NO: 1402 - DNA, 20 bp, Prevotella corporis
cgcaggccgccgtgcaagcg

SEQ ID NO: 1403 - DNA, 20 bp, Serratia ficaria
gaggaggaagggcgatgtct

SEQ ID NO: 1404 - DNA, 20 bp, Pediococcus parvulus
attagaggtgcttgcaccga

SEQ ID NO: 1405 - DNA, 20 bp, Enterococcus faecalis
ttatgccgcatggcataaga

SEQ ID NO: 1406 - DNA, 20 bp, Bacteroides forsythus
tcataaaacaggggttccgc

SEQ ID NO: 1407 - DNA, 20 bp, Serratia ficaria
ggaagggcgatgtcttaata

SEQ ID NO: 1408 - DNA, 20 bp, Porphyromonas maccae
cagtcttgccttcgaaactg

SEQ ID NO: 1409 - DNA, 20 bp, Streptococcus agalactiae
agaacgttggtaggagtgga

SEQ ID NO: 1410 - DNA, 20 bp, Enterococcus dispar
tgggtaacctaccctcaagc

SEQ ID NO: 1411 - DNA, 20 bp, Pediococcus acidilactici
attgatcatgacgtgcttgc

SEQ ID NO: 1412 - DNA, 20 bp, Streptococcus equi
agaacagtgatgggagtgga

SEQ ID NO: 1413 - DNA, 20 bp, Vibrio hollisae
gctgtggtctagaaccgtgg

SEQ ID NO: 1414 - DNA, 20 bp, Porphyromonas maccae
tgtcagttactatcgggtaa

SEQ ID NO: 1415 - DNA, 20 bp, Bacteroides forsythus
acaggggttccgcatggggc

SEQ ID NO: 1416 - DNA, 20 bp, Prevotella corporis
tgcttggcttgagtgcgccg

SEQ ID NO: 1417 - DNA, 20 bp, Bacteroides forsythus
tattgcatgtaccttgtgaa

SEQ ID NO: 1418 - DNA, 20 bp, Fusobacterium mortiferum
taatggtatataagagcggc

SEQ ID NO: 1419 - DNA, 30 bp, Corynebacterium urealyticum
agcacgttgtggtggggactcacaagagac

SEQ ID NO: 1420 - DNA, 20 bp, Serratia ficaria
aggaggaagggcgatgtctt

SEQ ID NO: 1421 - DNA, 20 bp, Alicyclobacillus acidocaldarius
tccgccgctggcctccgaag

SEQ ID NO: 1422 - DNA, 20 bp, Haemophilus ducreyi
ttttgttaatagcaaaattg

SEQ ID NO: 1423 - DNA, 20 bp, Enterococcus cecorum
ttgctacaccggaagaaaat

SEQ ID NO: 1424 - DNA, 20 bp, Bacillus azotoformans
ttcgaagataaaagatggtt

SEQ ID NO: 1425 - DNA, 20 bp, Prevotella intermedia
catttacccttcgaataagg

SEQ ID NO: 1426 - DNA, 20 bp, Prevotella corporis
cgggcgaatccccaaatccg

SEQ ID NO: 1427 - DNA, 20 bp, Propionibacterium propionicus
agggttagcgaatctgtaaa

SEQ ID NO: 1428 - DNA, 20 bp, Clostridium ramosum
gaacggcggctacaggaaat

SEQ ID NO: 1429 - DNA, 20 bp, Kocuria rosea
gaactgacgagagtgcttgc

SEQ ID NO: 1430 - DNA, 20 bp, Corynebacterium pilosum
atcgcacaaagccagccgta

SEQ ID NO: 1431 - DNA, 20 bp, Rothia mucilaginosa
gttatgtagtggttatagat

SEQ ID NO: 1432 - DNA, 20 bp, Pediococcus dextrinicus
tggccagatagtgacggtat

SEQ ID NO: 1433 - DNA, 20 bp, Aneurinibacillus aneurinilyticus
cgtttttcagaccgcatggt

SEQ ID NO: 1434 - DNA, 20 bp, Porphyromonas maccae
attgctatcagataggcatg

SEQ ID NO: 1435 - DNA, 20 bp, Corynebacterium cystitidis
gctggtatgggatgagcttg

SEQ ID NO: 1436 - DNA, 20 bp, Prevotella corporis
cgatggatacccgctgtccg

SEQ ID NO: 1437 - DNA, 20 bp, Prevotella corporis
ggcagcccgctgtggcgcca

SEQ ID NO: 1438 - DNA, 20 bp, Bacillus smithii
cggataacatcttccttcgc

SEQ ID NO: 1439 - DNA, 20 bp, Brevibacillus laterosporus
atgctacttcgcgagaagat

SEQ ID NO: 1440 - DNA, 20 bp, Prevotella corporis
tgcgaaggcagcccgctgtg

SEQ ID NO: 1441 - DNA, 20 bp, Prevotella intermedia
actcccttcggggcgtctgt

SEQ ID NO: 1442 - DNA, 20 bp, Lactococcus garvieae
gttaagtagagtggaaaatt

SEQ ID NO: 1443 - DNA, 20 bp, Alicyclobacillus acidocaldarius
caattgggccttcccccgca

SEQ ID NO: 1444 - DNA, 30 bp, Vibrio hollisae
acctgcgttacttgacgttagcggcagaag

SEQ ID NO: 1445 - DNA, 20 bp, Kingella denitrificans
tacggaagaactcagagacg

SEQ ID NO: 1446 - DNA, 20 bp, Granulicatella adiacens
ttgaagaggaaaagaggcgc

SEQ ID NO: 1447 - DNA, 20 bp, Lactococcus lactis
tggtttattaagtctggtgt

SEQ ID NO: 1448 - DNA, 20 bp, Bacteroides forsythus
ccgcaacagagggataaccc

SEQ ID NO: 1449 - DNA, 20 bp, Paenibacillus larvae
agaggtgggcactctaagat

SEQ ID NO: 1450 - DNA, 20 bp, Streptococcus equi
tagagaagaacagtgatggg

SEQ ID NO: 1451 - DNA, 20 bp, Prevotella corporis
gggataaagttgcccacgcg

SEQ ID NO: 1452 - DNA, 20 bp, Granulicatella adiacens
ggtttgaagaggaaaagagg

SEQ ID NO: 1453 - DNA, 20 bp, Bacillus badius
gcttccgttcaagttagcgg

SEQ ID NO: 1454 - DNA, 20 bp, Corynebacterium mycetoides
taccggataggagctgcatg

SEQ ID NO: 1455 - DNA, 20 bp, Streptococcus hyointestinalis
aaatccatgtcgtgacggta

SEQ ID NO: 1456 - DNA, 20 bp, Alicyclobacillus acidocaldarius
ctgagggtgtcagagggatg

SEQ ID NO: 1457 - DNA, 20 bp, Prevotella buccae
cctagggcaaaaccgggatt

SEQ ID NO: 1458 - DNA, 20 bp, Corynebacterium mycetoides
tagatcgctgtagagatacg

SEQ ID NO: 1459 - DNA, 20 bp, Porphyromonas maccae
taaagattaattgctatcag

SEQ ID NO: 1460 - DNA, 20 bp, Corynebacterium mycetoides
ggagctgcatgttggtgtgt

SEQ ID NO: 1461 - DNA, 20 bp, Paenibacillus larvae
ccggagcgaatcctcaaaag

SEQ ID NO: 1462 - DNA, 30 bp, Corynebacterium urealyticum
tttcgctagggaagaagccttcgggtgacg

SEQ ID NO: 1463 - DNA, 20 bp, Enterococcus cecorum
ccgcatggtagatggatgaa

SEQ ID NO: 1464 - DNA, 30 bp, Prevotella intermedia
ctgcttttgttggggagtaaagcggggcac

SEQ ID NO: 1465 - DNA, 20 bp, Bacteroides forsythus
gggcagcgatggtagcaata

SEQ ID NO: 1466 - DNA, 20 bp, Pediococcus damnosus
gcataataaaatgaaccgca

SEQ ID NO: 1467 - DNA, 20 bp, Brevibacillus laterosporus
aaacggaaagatggcgcaag

SEQ ID NO: 1468 - DNA, 20 bp, Prevotella corporis
cgcgaactgcttggcttgag

SEQ ID NO: 1469 - DNA, 20 bp, Enterococcus cecorum
attccatttaccgcatggta

SEQ ID NO: 1470 - DNA, 20 bp, Actinomyces neuii
gctacattggtgtctacaga

SEQ ID NO: 1471 - DNA, 20 bp, Propionibacterium avidum
aggaatccttgctgcatggt

SEQ ID NO: 1472 - DNA, 20 bp, Pediococcus damnosus
ttcgttgattgaattagaga

SEQ ID NO: 1473 - DNA, 30 bp, Bacillus circulans
gaggaaaagctgaaagacggtttacgctgt

SEQ ID NO: 1474 - DNA, 20 bp, Pediococcus damnosus
accgcataataaaatgaacc

SEQ ID NO: 1475 - DNA, 20 bp, Propionibacterium propionicus
ataccggatattcagacctt

SEQ ID NO: 1476 - DNA, 20 bp, Prevotella corporis
attgcaggagaatgattcag

SEQ ID NO: 1477 - DNA, 30 bp, Pseudomonas luteola
gcagctttgacgttaccagcagaataagca

SEQ ID NO: 1478 - DNA, 20 bp, Pediococcus damnosus
ataccgcataataaaatgaa

SEQ ID NO: 1479 - DNA, 30 bp, Pasteurella aerogenes
gctaatcgattgacgttaatcacagaagaa

SEQ ID NO: 1480 - DNA, 20 bp, Eubacterium moniliforme
ccacggaagttgggagcacc

SEQ ID NO: 1481 - DNA, 20 bp, Vibrio hollisae
gttaatacctgcgttacttg

SEQ ID NO: 1482 - DNA, 20 bp, Bacillus smithii
atatcttccttcgcatgaag

SEQ ID NO: 1483 - DNA, 20 bp, Pediococcus dextrinicus
caagctaatctctaaaagct

SEQ ID NO: 1484 - DNA, 20 bp, Streptococcus hyointestinalis
gaacggatgtgggagtggaa

SEQ ID NO: 1485 - DNA, 20 bp, Granulicatella adiacens
ataggtcttcgaaccgcatg

SEQ ID NO: 1486 - DNA, 20 bp, Prevotella corporis
tgaattgcaggagaatgatt

SEQ ID NO: 1487 - DNA, 20 bp, Porphyromonas maccae
gcaacccacgttgtcagtta

SEQ ID NO: 1488 - DNA, 20 bp, Prevotella corporis
aatgattcagagatgatgaa

SEQ ID NO: 1489 - DNA, 20 bp, Bacillus smithii
aatatcttccttcgcatgaa

SEQ ID NO: 1490 - DNA, 20 bp, Prevotella buccae
tgaagtccctcgggactcct

SEQ ID NO: 1491 - DNA, 20 bp, Paenibacillus alvei
gataggcattttcctcgcat

SEQ ID NO: 1492 - DNA, 20 bp, Fusobacterium necrophorum
tttttcgcatggaggaatca

SEQ ID NO: 1493 - DNA, 30 bp, Pasteurella aerogenes
aataccgcgtagtgtcgagagacgaaagac

SEQ ID NO: 1494 - DNA, 20 bp, Pediococcus dextrinicus
actgatttaaaaataaacga

SEQ ID NO: 1495 - DNA, 20 bp, Neisseria gonorrhoeae
tatcggcggccgatgacggt

SEQ ID NO: 1496 - DNA, 20 bp, Brevibacterium linens
gttctggaaacagttcctcc

SEQ ID NO: 1497 - DNA, 20 bp, Enterococcus dispar
cgcataatattaatgaactc

SEQ ID NO: 1498 - DNA, 20 bp, Propionibacterium propionicus
cctctctgggataacagttg

SEQ ID NO: 1499 - DNA, 20 bp, Pediococcus dextrinicus
acgtatttggtagtaactgg

SEQ ID NO: 1500 - DNA, 20 bp, Actinomyces viscosus
gtgggcctgggaaaggtttg

SEQ ID NO: 1501 - DNA, 20 bp, Propionibacterium granulosum
agtggaaacttgatgcttaa

SEQ ID NO: 1502 - DNA, 20 bp, Streptococcus hyointestinalis
ggagtggaaaatccatgtcg

SEQ ID NO: 1503 - DNA, 20 bp, Pasteurella aerogenes
tccagagaagagcgcagaga

SEQ ID NO: 1504 - DNA, 20 bp, Vibrio hollisae
cgggtgcgttcatgggcggc

SEQ ID NO: 1505 - DNA, 30 bp, Aneurinibacillus aneurinilyticus
gagctaataccggatacgtttttcagaccg

SEQ ID NO: 1506 - DNA, 30 bp, Listeria innocua
agagtgtggcgcatgccacgctcttgaaag

SEQ ID NO: 1507 - DNA, 20 bp, Prevotella corporis
ggcatctgacgaggagcaaa

SEQ ID NO: 1508 - DNA, 20 bp, Streptococcus agalactiae
ggtaggagtggaaaatctac

SEQ ID NO: 1509 - DNA, 20 bp, Prevotella intermedia
gatgttgactcccttcgggg

SEQ ID NO: 1510 - DNA, 20 bp, Prevotella intermedia
ttgaattgcagacgcaggat

SEQ ID NO: 1511 - DNA, 20 bp, Fusobacterium necrophorum
tacgaacggagcagagatgc

SEQ ID NO: 1512 - DNA, 20 bp, Enterococcus cecorum
acaccggaagaaaatgagtg

SEQ ID NO: 1513 - DNA, 20 bp, Propionibacterium avidum
ttcagcaggggcgaagcttt

SEQ ID NO: 1514 - DNA, 20 bp, Propionibacterium granulosum
ggcctaacactttttgtggg

SEQ ID NO: 1515 - DNA, 20 bp, Listeria grayi
caagtcgaacgaatgacctt

SEQ ID NO: 1516 - DNA, 20 bp, Prevotella intermedia
attgacggccctatgggttg

SEQ ID NO: 1517 - DNA, 30 bp, Corynebacterium diphtheriae
caagtcgaacggaaaggcctagcttgctag

SEQ ID NO: 1518 - DNA, 20 bp, Campylobacter curvus
gtatctatataagtagatac

SEQ ID NO: 1519 - DNA, 20 bp, Enterococcus faecalis
ctttcctcccgagtgcttgc

SEQ ID NO: 1520 - DNA, 20 bp, Comamonas terrigena
aagaccttgcgcaactggag

SEQ ID NO: 1521 - DNA, 20 bp, Bacillus azotoformans
tcgaacctcatggttcgaag

SEQ ID NO: 1522 - DNA, 20 bp, Paenibacillus macerans
atcaagtcttccgcatggga

SEQ ID NO: 1523 - DNA, 20 bp, Clostridium ramosum
gggtctgtggtgaaagcctg

SEQ ID NO: 1524 - DNA, 20 bp, Clostridium ramosum
ggtagccgagtgacggtact

SEQ ID NO: 1525 - DNA, 20 bp, Aerococcus urinae
gaccttgtgaaagcaagcga

SEQ ID NO: 1526 - DNA, 20 bp, Alicyclobacillus acidocaldarius
atcccccatgccgctctccc

SEQ ID NO: 1527 - DNA, 20 bp, Moraxella bovis
gacataccaagaattcgcta

SEQ ID NO: 1528 - DNA, 20 bp, Clostridium ramosum
gaagaacggcggctacagga

SEQ ID NO: 1529 - DNA, 20 bp, Enterococcus cecorum
ttaccgcatggtagatggat

SEQ ID NO: 1530 - DNA, 20 bp, Corynebacterium cystitidis
ttgcggcctattagtttgtt

SEQ ID NO: 1531 - DNA, 30 bp, Lactococcus garvieae
atgaagagcggcgaacgggtgagtaacgcg

SEQ ID NO: 1532 - DNA, 20 bp, Prevotella corporis
gcggggataaagttgcccac

SEQ ID NO: 1533 - DNA, 20 bp, Pediococcus pentosaceus
tgacatcttctgacagtcta

SEQ ID NO: 1534 - DNA, 20 bp, Brevibacillus laterosporus
aagcgaaacggaaagatggc

SEQ ID NO: 1535 - DNA, 20 bp, Actinomyces neuii
atgctacattggtgtctaca

SEQ ID NO: 1536 - DNA, 20 bp, Propionibacterium propionicus
ttagagaccgccgaggtcaa

SEQ ID NO: 1537 - DNA, 20 bp, Streptococcus hyointestinalis
aagagaagaacggatgtggg

SEQ ID NO: 1538 - DNA, 20 bp, Proteus vulgaris
gacgtctacggaccaaagca

SEQ ID NO: 1539 - DNA, 20 bp, Campylobacter curvus
ctaatactccatactccatt

SEQ ID NO: 1540 - DNA, 20 bp, Rothia mucilaginosa
gttagcagggaagaagagag

SEQ ID NO: 1541 - DNA, 20 bp, Paenibacillus larvae
gaggtgggcactctaagatg

SEQ ID NO: 1542 - DNA, 20 bp, Propionibacterium granulosum
ttaacgttgagcgtgctttc

SEQ ID NO: 1543 - DNA, 20 bp, Anaerobiospirillum succiniciproducens
aaagcactttcagggggagg

SEQ ID NO: 1544 - DNA, 20 bp, Corynebacterium cystitidis
acatacactggattgccatg

SEQ ID NO: 1545 - DNA, 20 bp, Porphyromonas maccae
ctaataccttatggtcttgg

SEQ ID NO: 1546 - DNA, 20 bp, Corynebacterium mycetoides
ctagatcgctgtagagatac

SEQ ID NO: 1547 - DNA, 20 bp, Pasteurella aerogenes
agtgtcgagagacgaaagac

SEQ ID NO: 1548 - DNA, 20 bp, Propionibacterium propionicus
tattcagacctttaggcatc

SEQ ID NO: 1549 - DNA, 20 bp, Corynebacterium pilosum
cagccgtagttcggattggg

SEQ ID NO: 1550 - DNA, 20 bp, Streptococcus equi
tggaaagtccatcatgtgac

SEQ ID NO: 1551 - DNA, 20 bp, Lactococcus garvieae
gttagagaagaacgttaagt

SEQ ID NO: 1552 - DNA, 20 bp, Porphyromonas maccae
atgggagtcgggagtaccta

SEQ ID NO: 1553 - DNA, 20 bp, Listeria grayi
atggagcgggtttgaaaggc

SEQ ID NO: 1554 - DNA, 20 bp, Pediococcus parvulus
tgaattagaggtgcttgcac

SEQ ID NO: 1555 - DNA, 20 bp, Brevibacillus laterosporus
cgcctgaagcgaaacggaaa

SEQ ID NO: 1556 - DNA, 20 bp, Actinomyces neuii
ggtgtctacagagggttgct

SEQ ID NO: 1557 - DNA, 20 bp, Porphyromonas maccae
aagtaaagattaattgctat

SEQ ID NO: 1558 - DNA, 20 bp, Bacteroides forsythus
caggggttccgcatggggct

SEQ ID NO: 1559 - DNA, 20 bp, Neisseria elongata
agggaagaaaaaggagcggt

SEQ ID NO: 1560 - DNA, 20 bp, Bacteroides forsythus
atgtaccttgtgaataagca

SEQ ID NO: 1561 - DNA, 20 bp, Pasteurella aerogenes
ccgcaaggccggttgccata

SEQ ID NO: 1562 - DNA, 20 bp, Granulicatella adiacens
aagcttctgctgatggatgg

SEQ ID NO: 1563 - DNA, 20 bp, Pediococcus pentosaceus
tgtactgattgagattttaa

SEQ ID NO: 1564 - DNA, 20 bp, Clostridium ramosum
ctccagagatggagagatag

SEQ ID NO: 1565 - DNA, 20 bp, Porphyromonas maccae
ctgtttggcttgagtataga

SEQ ID NO: 1566 - DNA, 20 bp, Prevotella corporis
tgtggcgccactgacgctga

SEQ ID NO: 1567 - DNA, 20 bp, Clostridium ramosum
ggatgtcaaagttcagtgct

SEQ ID NO: 1568 - DNA, 20 bp, Propionibacterium propionicus
ttggggactcgttagagacc

SEQ ID NO: 1569 - DNA, 20 bp, Fusobacterium mortiferum
tgcttttgtgccccttcggg

SEQ ID NO: 1570 - DNA, 20 bp, Alicyclobacillus acidocaldarius
gcggcccaattgggccttcc

SEQ ID NO: 1571 - DNA, 20 bp, Aneurinibacillus aneurinilyticus
atacgtttttcagaccgcat

SEQ ID NO: 1572 - DNA, 20 bp, Actinomyces neuii
ggcatcttggttcggatcgc

SEQ ID NO: 1573 - DNA, 20 bp, Pediococcus dextrinicus
gtttgcttttaatgaaggcg

SEQ ID NO: 1574 - DNA, 20 bp, Bacteroides forsythus
ggctgttaagtccgcggtga

SEQ ID NO: 1575 - DNA, 20 bp, Alicyclobacillus acidocaldarius
tcgcatggggctttccatcc

SEQ ID NO: 1576 - DNA, 20 bp, Streptococcus agalactiae
tggaaaatctaccaagtgac

SEQ ID NO: 1577 - DNA, 20 bp, Bacteroides forsythus
acagagggataacccggcga

SEQ ID NO: 1578 - DNA, 20 bp, Paenibacillus larvae
gcacgcagaggtgggcactc

SEQ ID NO: 1579 - DNA, 20 bp, Corynebacterium pilosum
tgaggttgagctaatcgcac

SEQ ID NO: 1580 - DNA, 20 bp, Porphyromonas maccae
ggattgaaatttagcggact

SEQ ID NO: 1581 - DNA, 20 bp, Pediococcus dextrinicus
gatttaaaaataaacgagtg

SEQ ID NO: 1582 - DNA, 20 bp, Porphyromonas maccae
gtcagttactatcgggtaaa

SEQ ID NO: 1583 - DNA, 20 bp, Enterococcus dispar
actcatgtttattaattgaa

SEQ ID NO: 1584 - DNA, 20 bp, Fusobacterium necrophorum
ccggtgccctttcgggggaa

SEQ ID NO: 1585 - DNA, 30 bp, Propionibacterium propionicus
ggagctgtcgaaggtggggctgataattag

SEQ ID NO: 1586 - DNA, 20 bp, Actinomyces neuii
cgcgtctagcgtttaaggct

SEQ ID NO: 1587 - DNA, 20 bp, Prevotella corporis
gcagcatgccggttgcttgc

SEQ ID NO: 1588 - DNA, 20 bp, Brevibacillus laterosporus
tgaagcgaaacggaaagatg

SEQ ID NO: 1589 - DNA, 20 bp, Corynebacterium cystitidis
ttttgtgctggtatgggatg

SEQ ID NO: 1590 - DNA, 20 bp, Bacillus smithii
gtcgagcggactttcaagaa

SEQ ID NO: 1591 - DNA, 20 bp, Corynebacterium pilosum
tgggcggtatgggatgagcc

SEQ ID NO: 1592 - DNA, 20 bp, Listeria grayi
ctaataccgaataataatca

SEQ ID NO: 1593 - DNA, 20 bp, Pediococcus acidilactici
atcatgacgtgcttgcactg

SEQ ID NO: 1594 - DNA, 20 bp, Prevotella corporis
gcacagagggctgtccgcat

SEQ ID NO: 1595 - DNA, 30 bp, Brevibacillus laterosporus
aaagcccgaggctcaacctcggttcgcatt

SEQ ID NO: 1596 - DNA, 30 bp, Corynebacterium diphtheriae
tagtgatacgttttcccttgtggtctgtat

SEQ ID NO: 1597 - DNA, 20 bp, Prevotella corporis
aacgatggatacccgctgtc

SEQ ID NO: 1598 - DNA, 20 bp, Porphyromonas maccae
tatgtatgaaagtacatatc

SEQ ID NO: 1599 - DNA, 20 bp, Propionibacterium propionicus
ctagagataggcgccccgta

SEQ ID NO: 1600 - DNA, 20 bp, Propionibacterium granulosum
tggaaacttgatgcttaacg

SEQ ID NO: 1601 - DNA, 20 bp, Haemophilus ducreyi
gcagttttgttaatagcaaa

SEQ ID NO: 1602 - DNA, 20 bp, Pediococcus dextrinicus
aaaagtaaacgagtggcgga

SEQ ID NO: 1603 - DNA, 30 bp, Lactococcus garvieae
acaccacggaagttgggagtacccaaagta

SEQ ID NO: 1604 - DNA, 20 bp, Listeria grayi
ctccgcatggagcgggtttg

SEQ ID NO: 1605 - DNA, 20 bp, Actinomyces neuii
agggttgctattccgtgagg

SEQ ID NO: 1606 - DNA, 20 bp, Bacteroides ovatus
aaggcagctcactagactgt

SEQ ID NO: 1607 - DNA, 20 bp, Listeria welshimeri
agtggtggcgcatgccacgg

SEQ ID NO: 1608 - DNA, 20 bp, Bacteroides forsythus
aataaaatgagatacgtgta

SEQ ID NO: 1609 - DNA, 20 bp, Granulicatella adiacens
gaggaaaagaggcgcaagct

SEQ ID NO: 1610 - DNA, 20 bp, Pediococcus pentosaceus
tactgattgagattttaaca

SEQ ID NO: 1611 - DNA, 20 bp, Porphyromonas maccae
cgcgaggggcgtgtcagggt

SEQ ID NO: 1612 - DNA, 20 bp, Pediococcus acidilactici
ttgcactgaatgagatttta

SEQ ID NO: 1613 - DNA, 20 bp, Prevotella corporis
cgctgtggcgccactgacgc

SEQ ID NO: 1614 - DNA, 20 bp, Streptococcus agalactiae
aggagtggaaaatctaccaa

SEQ ID NO: 1615 - DNA, 20 bp, Campylobacter curvus
accttatactccgtatctat

SEQ ID NO: 1616 - DNA, 20 bp, Pediococcus dextrinicus
taaaaataaacgagtggcgg

SEQ ID NO: 1617 - DNA, 20 bp, Serratia ficaria
ggcagcgcattgacgttact

SEQ ID NO: 1618 - DNA, 20 bp, Porphyromonas maccae
ccttatggtcttgggttatt

SEQ ID NO: 1619 - DNA, 20 bp, Prevotella intermedia
gcatctgacgtggaccaaag

SEQ ID NO: 1620 - DNA, 20 bp, Paenibacillus larvae
tagctggtttcttcgcatga

SEQ ID NO: 1621 - DNA, 30 bp, Propionibacterium propionicus
cccctctctgggataacagttggaaacggc

SEQ ID NO: 1622 - DNA, 20 bp, Listeria seeligeri
taaggagtgacgcatgtcac

SEQ ID NO: 1623 - DNA, 20 bp, Enterococcus faecalis
taataccgcataacagttta

SEQ ID NO: 1624 - DNA, 30 bp, Clostridium ramosum
actcataaaggctccagagatggagagata

SEQ ID NO: 1625 - DNA, 20 bp, Fusobacterium necrophorum
tggttttttcgcatggagga

SEQ ID NO: 1626 - DNA, 20 bp, Enterococcus dispar
atattaatgaactcatgttt

SEQ ID NO: 1627 - DNA, 20 bp, Bacteroides forsythus
ataaaatgagatacgtgtat

SEQ ID NO: 1628 - DNA, 20 bp, Pseudomonas fluorescens
taagctaatatcttgctgtt

SEQ ID NO: 1629 - DNA, 20 bp, Aneurinibacillus aneurinilyticus
cggatacgtttttcagaccg

SEQ ID NO: 1630 - DNA, 20 bp, Prevotella corporis
tacccgctgtccggcccgta

SEQ ID NO: 1631 - DNA, 20 bp, Serratia ficaria
ggaggaagggcgatgtctta

SEQ ID NO: 1632 - DNA, 20 bp, Prevotella intermedia
caacatctaccttgcagcgc

SEQ ID NO: 1633 - DNA, 20 bp, Listeria grayi
ttgctcctttggtcgttagt

SEQ ID NO: 1634 - DNA, 20 bp, Lactococcus garvieae
attacttaagtgacggtatc

SEQ ID NO: 1635 - DNA, 20 bp, Listeria grayi
cgaataataatcagctccgc

SEQ ID NO: 1636 - DNA, 20 bp, Comamonas terrigena
cttgcgcaactggagcggcc

SEQ ID NO: 1637 - DNA, 20 bp, Prevotella corporis
ggcacagagggctgtccgca

SEQ ID NO: 1638 - DNA, 30 bp, Lactococcus garvieae
aagttgggagtacccaaagtaggttgccta

SEQ ID NO: 1639 - DNA, 20 bp, Bacillus smithii
accggataatatcttccttc

SEQ ID NO: 1640 - DNA, 20 bp, Fusobacterium mortiferum
gggagaggttaccttcgggt

SEQ ID NO: 1641 - DNA, 20 bp, Prevotella corporis
ccgtgcaagcgtgccgtgaa

SEQ ID NO: 1642 - DNA, 20 bp, Prevotella intermedia
cgcaggatacagagatgttg

SEQ ID NO: 1643 - DNA, 20 bp, Pediococcus acidilactici
cttgcactgaatgagatttt

SEQ ID NO: 1644 - DNA, 20 bp, Aerococcus urinae
gctaataccgcataggaaac

SEQ ID NO: 1645 - DNA, 20 bp, Campylobacter lari
ttgatatccaactaatctct

SEQ ID NO: 1646 - DNA, 20 bp, Listeria ivanovii
atcactttgaaagatggttt

SEQ ID NO: 1647 - DNA, 20 bp, Prevotella intermedia
acgtggaccaaagattcatc

SEQ ID NO: 1648 - DNA, 20 bp, Listeria seeligeri
aaggagtgacgcatgtcact

SEQ ID NO: 1649 - DNA, 20 bp, Fusobacterium necrophorum
tcgcatggaggaatcatgaa

SEQ ID NO: 1650 - DNA, 20 bp, Corynebacterium mycetoides
ccggataggagctgcatgtt

SEQ ID NO: 1651 - DNA, 20 bp, Prevotella intermedia
gcatttacccttcgaataag

SEQ ID NO: 1652 - DNA, 20 bp, Macrococcus caseolyticus
cttgcactctctgatgttag

SEQ ID NO: 1653 - DNA, 20 bp, Prevotella corporis
agtgcgggcgaatccccaaa

SEQ ID NO: 1654 - DNA, 20 bp, Prevotella corporis
tcacggatggggatgcgtcc

SEQ ID NO: 1655 - DNA, 20 bp, Neisseria gonorrhoeae
atatcggcggccgatgacgg

SEQ ID NO: 1656 - DNA, 20 bp, Prevotella corporis
gagatgatgaagtcccctcg

SEQ ID NO: 1657 - DNA, 20 bp, Bacteroides forsythus
aactggtagtcttgagtata

SEQ ID NO: 1658 - DNA, 20 bp, Lactococcus garvieae
cggaagttgggagtacccaa

SEQ ID NO: 1659 - DNA, 20 bp, Paenibacillus larvae
ccggagccaatcctcaaaag

SEQ ID NO: 1660 - DNA, 30 bp, Bacillus badius
aagtcgagcggacttgacggaagcttgctt

SEQ ID NO: 1661 - DNA, 20 bp, Propionibacterium propionicus
aactcagtgcttaacgctga

SEQ ID NO: 1662 - DNA, 20 bp, Porphyromonas maccae
cttgccttcgaaactgtttg

SEQ ID NO: 1663 - DNA, 20 bp, Granulicatella adiacens
accgcataggtcttcgaacc

SEQ ID NO: 1664 - DNA, 20 bp, Pediococcus dextrinicus
aaaataaacgagtggcggac

SEQ ID NO: 1665 - DNA, 20 bp, Prevotella intermedia
caaccttccctccactcggg

SEQ ID NO: 1666 - DNA, 20 bp, Listeria grayi
ataatcagctccgcatggag

SEQ ID NO: 1667 - DNA, 20 bp, Propionibacterium propionicus
gtcgcgtcgaaagtgtaaac

SEQ ID NO: 1668 - DNA, 20 bp, Porphyromonas maccae
aaggccgctaagtaggtgct

SEQ ID NO: 1669 - DNA, 20 bp, Pediococcus dextrinicus
gtatttggtagtaactggcc

SEQ ID NO: 1670 - DNA, 20 bp, Listeria innocua
atgccacgctcttgaaagat

SEQ ID NO: 1671 - DNA, 20 bp, Prevotella intermedia
ggggagtaaagcggggcacg

SEQ ID NO: 1672 - DNA, 20 bp, Pediococcus dextrinicus
ggtatccaatcagaaagcca

SEQ ID NO: 1673 - DNA, 30 bp, Streptococcus agalactiae
ggtaggagtggaaaatctaccaagtgacgg

SEQ ID NO: 1674 - DNA, 20 bp, Propionibacterium granulosum
cggtacagtgagttgcgaca

SEQ ID NO: 1675 - DNA, 20 bp, Streptococcus hyointestinalis
gtggaaaatccatgtcgtga

SEQ ID NO: 1676 - DNA, 20 bp, Lactococcus garvieae
aagtagagtggaaaattact

SEQ ID NO: 1677 - DNA, 20 bp, Prevotella intermedia
gcttgaattgcagacgcagg

SEQ ID NO: 1678 - DNA, 20 bp, Streptococcus hyointestinalis
agaggtaataacacatgtta

SEQ ID NO: 1679 - DNA, 20 bp, Enterococcus faecalis
aacgcttctttcctcccgag

SEQ ID NO: 1680 - DNA, 20 bp, Propionibacterium propionicus
gaaatataccggaaacgtct

SEQ ID NO: 1681 - DNA, 20 bp, Porphyromonas maccae
ttgtcagttactatcgggta

SEQ ID NO: 1682 - DNA, 20 bp, Bacteroides forsythus
atacctgtcggcgaccggcg

SEQ ID NO: 1683 - DNA, 20 bp, Streptococcus equi
acagtgatgggagtggaaag

SEQ ID NO: 1684 - DNA, 20 bp, Corynebacterium renale
ggaaaggccactgcttgcag

SEQ ID NO: 1685 - DNA, 20 bp, Paenibacillus thiaminolyticus
ttcgggaaaccattagctta

SEQ ID NO: 1686 - DNA, 20 bp, Paenibacillus thiaminolyticus
ccttcgggaaaccattagct

SEQ ID NO: 1687 - DNA, 20 bp, Pediococcus acidilactici
acgtgcttgcactgaatgag

SEQ ID NO: 1688 - DNA, 20 bp, Bacteroides forsythus
caatacctgtcggcgaccgg

SEQ ID NO: 1689 - DNA, 20 bp, Porphyromonas maccae
atttagcggactatgtatga

SEQ ID NO: 1690 - DNA, 20 bp, Listeria grayi
atcagctccgcatggagcag

SEQ ID NO: 1691 - DNA, 20 bp, Kocuria rosea
actgacgagagtgcttgcac

SEQ ID NO: 1692 - DNA, 20 bp, Campylobacter lari
gggcttgatatccaactaat

SEQ ID NO: 1693 - DNA, 20 bp, Actinomyces neuii
ttgctattccgtgaggttga

SEQ ID NO: 1694 - DNA, 20 bp, Pseudomonas citronellolis
gagcttgcttctggattcag

SEQ ID NO: 1695 - DNA, 20 bp, Vibrio hollisae
gcagcgacatgaacaatcct

SEQ ID NO: 1696 - DNA, 20 bp, Listeria ivanovii
aatgataagtagtgacgcat

SEQ ID NO: 1697 - DNA, 20 bp, Porphyromonas maccae
accacagtcttgccttcgaa

SEQ ID NO: 1698 - DNA, 20 bp, Porphyromonas maccae
tgattcaagtaaagattaat

SEQ ID NO: 1699 - DNA, 20 bp, Vibrio hollisae
cctgcgttacttgacgttag

SEQ ID NO: 1700 - DNA, 20 bp, Serratia ficaria
gatgtcttaatacggcagcg

SEQ ID NO: 1701 - DNA, 20 bp, Corynebacterium diphtheriae
ggcctagcttgctaggtact

SEQ ID NO: 1702 - DNA, 30 bp, Pasteurella aerogenes
cgggaccgcaaggccggttgccataagatg

SEQ ID NO: 1703 - DNA, 20 bp, Prevotella corporis
aggagcaaagatccgtcggt

SEQ ID NO: 1704 - DNA, 20 bp, Pediococcus acidilactici
agaaaaccgcctggttttct

SEQ ID NO: 1705 - DNA, 20 bp, Prevotella corporis
agaatgattcagagatgatg

SEQ ID NO: 1706 - DNA, 20 bp, Campylobacter lari
cttgctagaaagttgagaca

SEQ ID NO: 1707 - DNA, 20 bp, Listeria welshimeri
taataagtggtggcgcatgc

SEQ ID NO: 1708 - DNA, 20 bp, Alicyclobacillus acidocaldarius
gctttccatcccccatgccg

SEQ ID NO: 1709 - DNA, 20 bp, Streptococcus equi
aacagtgatgggagtggaaa

SEQ ID NO: 1710 - DNA, 20 bp, Lactococcus garvieae
tgttagagaagaacgttaag

SEQ ID NO: 1711 - DNA, 30 bp, Pediococcus dextrinicus
gtcaagctaatctctaaaagctagtctcag

SEQ ID NO: 1712 - DNA, 20 bp, Porphyromonas maccae
ttgccttcgaaactgtttgg

SEQ ID NO: 1713 - DNA, 30 bp, Paenibacillus larvae
tagaccttttccttcggggacagaggagac

SEQ ID NO: 1714 - DNA, 20 bp, Neisseria elongata
cggttaatacccgtttctgc

SEQ ID NO: 1715 - DNA, 30 bp, Clostridium ramosum
ctgttataaaggaagaacggcggctacagg

SEQ ID NO: 1716 - DNA, 20 bp, Pediococcus dextrinicus
cgaacgagtttgcttttaat

SEQ ID NO: 1717 - DNA, 20 bp, Paenibacillus larvae
atagaccttttccttcgggg

SEQ ID NO: 1718 - DNA, 20 bp, Enterococcus cecorum
ccgcatggcagatggatgaa

SEQ ID NO: 1719 - DNA, 20 bp, Listeria grayi
cgggtttgaaaggcggcttc

SEQ ID NO: 1720 - DNA, 20 bp, Streptococcus equi
gagtggaaagtccatcatgt

SEQ ID NO: 1721 - DNA, 20 bp, Propionibacterium propionicus
gctaataccggatattcaga

SEQ ID NO: 1722 - DNA, 30 bp, Propionibacterium granulosum
tccggcggttgtggatggactcgcggccta

SEQ ID NO: 1723 - DNA, 20 bp, Propionibacterium propionicus
ggatattcagacctttaggc

SEQ ID NO: 1724 - DNA, 20 bp, Propionibacterium granulosum
ggaaacttgatgcttaacgt

SEQ ID NO: 1725 - DNA, 20 bp, Prevotella corporis
aggccgccgtgcaagcgtgc

SEQ ID NO: 1726 - DNA, 20 bp, Brevibacillus laterosporus
gatgctacttcgcgagaaga

SEQ ID NO: 1727 - DNA, 20 bp, Bacillus badius
ttccgttcaagttagcggcg

SEQ ID NO: 1728 - DNA, 20 bp, Fusobacterium mortiferum
gtcagtcttgaatgattgtg

SEQ ID NO: 1729 - DNA, 20 bp, Bacillus smithii
tcttccttcgcatgaaggaa

SEQ ID NO: 1730 - DNA, 20 bp, Prevotella corporis
ggcgccactgacgctgaggc

SEQ ID NO: 1731 - DNA, 20 bp, Prevotella corporis
gactaataccttatgtcctc

SEQ ID NO: 1732 - DNA, 20 bp, Listeria grayi
cttgctcctttggtcgttag

SEQ ID NO: 1733 - DNA, 20 bp, Listeria welshimeri
taataccgaataataagtgg

SEQ ID NO: 1734 - DNA, 20 bp, Bacillus azotoformans
gttcgaagataaaagatggt

SEQ ID NO: 1735 - DNA, 20 bp, Propionibacterium propionicus
aaagtgtaaactcagtgctt

SEQ ID NO: 1736 - DNA, 30 bp, Enterococcus faecalis
tacatgcaagtcgaacgcttctttcctccc

SEQ ID NO: 1737 - DNA, 20 bp, Pediococcus dextrinicus
ccagatagtgacggtatcca

SEQ ID NO: 1738 - DNA, 20 bp, Kocuria rosea
actggatactacctcttacc

SEQ ID NO: 1739 - DNA, 20 bp, Granulicatella adiacens
agaggcgcaagcttctgctg

SEQ ID NO: 1740 - DNA, 20 bp, Pediococcus dextrinicus
cgaacgagttttcttttaat

SEQ ID NO: 1741 - DNA, 20 bp, Streptococcus hyointestinalis
aataacacatgttattagtt

SEQ ID NO: 1742 - DNA, 20 bp, Corynebacterium cystitidis
tcgtgtaaagccggtcgtag

SEQ ID NO: 1743 - DNA, 30 bp, Clostridium ramosum
taagtgttggatgtcaaagttcagtgctgc

SEQ ID NO: 1744 - DNA, 20 bp, Fusobacterium mortiferum
gtatataagagcggcatcgt

SEQ ID NO: 1745 - DNA, 30 bp, Kingella denitrificans
tatttgagcagccaatatctgattagctag

SEQ ID NO: 1746 - DNA, 20 bp, Actinomyces neuii
agatgtggttgccttcgggg

SEQ ID NO: 1747 - DNA, 20 bp, Corynebacterium mycetoides
taggagctgcatgttggtgt

SEQ ID NO: 1748 - DNA, 20 bp, Kingella denitrificans
cgctatttgagcagccaata

SEQ ID NO: 1749 - DNA, 20 bp, Lactococcus lactis
aacgagtcgcgagacagtga

SEQ ID NO: 1750 - DNA, 20 bp, Paenibacillus larvae
tcttagttgccagcacgcag

SEQ ID NO: 1751 - DNA, 20 bp, Serratia ficaria
gtcttaatacggcagcgcat

SEQ ID NO: 1752 - DNA, 20 bp, Campylobacter curvus
tccgtatctatataagtaga

SEQ ID NO: 1753 - DNA, 20 bp, Bacteroides forsythus
ttattgcatgtaccttgtga

SEQ ID NO: 1754 - DNA, 20 bp, Prevotella buccae
gaagtccctcgggactcctg

SEQ ID NO: 1755 - DNA, 20 bp, Kingella denitrificans
tgacatgtacggaagaactc

SEQ ID NO: 1756 - DNA, 20 bp, Bacteroides forsythus
ggggaataaaatgagatacg

SEQ ID NO: 1757 - DNA, 30 bp, Pediococcus dextrinicus
agatagtgacggtatccaatcagaaagcca

SEQ ID NO: 1758 - DNA, 20 bp, Lactococcus garvieae
tggaaaattacttaagtgac

SEQ ID NO: 1759 - DNA, 20 bp, Paenibacillus thiaminolyticus
tccttcgggaaaccattagc

SEQ ID NO: 1760 - DNA, 20 bp, Pediococcus dextrinicus
ttggtagtaactggccagat

SEQ ID NO: 1761 - DNA, 20 bp, Campylobacter curvus
atggatagggctatatcgta

SEQ ID NO: 1762 - DNA, 20 bp, Vibrio hollisae
ggtctagaaccgtggctttc

SEQ ID NO: 1763 - DNA, 20 bp, Macrococcus caseolyticus
agcttcgcatgaagcaatag

SEQ ID NO: 1764 - DNA, 20 bp, Pediococcus dextrinicus
gctaatctctaaaagctagt

SEQ ID NO: 1765 - DNA, 20 bp, Prevotella corporis
ctttgaaggcatctgacgag

SEQ ID NO: 1766 - DNA, 20 bp, Porphyromonas maccae
accgcgaggggcgtgtcagg

SEQ ID NO: 1767 - DNA, 20 bp, Porphyromonas maccae
agtcgggagtacctaaagca

SEQ ID NO: 1768 - DNA, 20 bp, Alicyclobacillus acidocaldarius
ctcgcatggggctttccatc

SEQ ID NO: 1769 - DNA, 20 bp, Corynebacterium pilosum
acaaagccagccgtagttcg

SEQ ID NO: 1770 - DNA, 20 bp, Enterococcus cecorum
tccatttaccgcatggtaga

SEQ ID NO: 1771 - DNA, 30 bp, Bacillus badius
ccgttcaagttagcggcggacgggtgagta

SEQ ID NO: 1772 - DNA, 20 bp, Corynebacterium cystitidis
gagcttgcggcctattagtt

SEQ ID NO: 1773 - DNA, 20 bp, Pediococcus dextrinicus
gatagtgacggtatccaatc

SEQ ID NO: 1774 - DNA, 20 bp, Lactococcus lactis
ggtggtttattaagtctggt

SEQ ID NO: 1775 - DNA, 20 bp, Bacillus smithii
tcgagcggactttcaagaag

SEQ ID NO: 1776 - DNA, 30 bp, Clostridium ramosum
tgccctagacagggggataactattggaaa

SEQ ID NO: 1777 - DNA, 20 bp, Bacteroides ovatus
ggcagcattttagtttgctt

SEQ ID NO: 1778 - DNA, 20 bp, Fusobacterium mortiferum
aagagcggcatcgtttttat

SEQ ID NO: 1779 - DNA, 20 bp, Streptococcus uberis
catgtaccctatttaaaagg

SEQ ID NO: 1780 - DNA, 20 bp, Prevotella corporis
cccgcgaccaagggataacc

SEQ ID NO: 1781 - DNA, 20 bp, Prevotella intermedia
cttgaattgcagacgcagga

SEQ ID NO: 1782 - DNA, 20 bp, Granulicatella adiacens
tgttagcgccttgacggtat

SEQ ID NO: 1783 - DNA, 20 bp, Macrococcus caseolyticus
ataatatctagcttcgcatg

SEQ ID NO: 1784 - DNA, 20 bp, Pasteurella aerogenes
ttgacatccagagaagagcg

SEQ ID NO: 1785 - DNA, 20 bp, Enterococcus avium
cggtttgaaaggcgcttttg

SEQ ID NO: 1786 - DNA, 20 bp, Enterococcus avium
catggtttcggtttgaaagg

SEQ ID NO: 1787 - DNA, 20 bp, Corynebacterium cystitidis
catacactggattgccatgg

SEQ ID NO: 1788 - DNA, 20 bp, Propionibacterium propionicus
atctgtaaaagccggcctca

SEQ ID NO: 1789 - DNA, 20 bp, Granulicatella adiacens
gcgcaagcttctgctgatgg

SEQ ID NO: 1790 - DNA, 20 bp, Prevotella corporis
ggcgaatccccaaatccggt

SEQ ID NO: 1791 - DNA, 20 bp, Vibrio hollisae
gcggcagcgacatgaacaat

SEQ ID NO: 1792 - DNA, 20 bp, Neisseria gonorrhoeae
ggccgttgccaatatcggcg

SEQ ID NO: 1793 - DNA, 20 bp, Clostridium ramosum
ctagacagggggataactat

SEQ ID NO: 1794 - DNA, 20 bp, Vibrio hollisae
gagcggcagcgacatgaaca

SEQ ID NO: 1795 - DNA, 20 bp, Haemophilus ducreyi
taatagcaaaattgattgac

SEQ ID NO: 1796 - DNA, 20 bp, Corynebacterium cystitidis
cctatctttgtgagggagct

SEQ ID NO: 1797 - DNA, 20 bp, Dermabacter hominis
tatgaccttggcccgcatgg

SEQ ID NO: 1798 - DNA, 20 bp, Porphyromonas maccae
gttgtcagttactatcgggt

SEQ ID NO: 1799 - DNA, 20 bp, Granulicatella adiacens
aagaggaaaagaggcgcaag

SEQ ID NO: 1800 - DNA, 20 bp, Pediococcus damnosus
tttcgttgattgaattagag

SEQ ID NO: 1801 - DNA, 20 bp, Propionibacterium granulosum
gatgcttaacgttgagcgtg

SEQ ID NO: 1802 - DNA, 30 bp, Serratia ficaria
aatacggcagcgcattgacgttactcgcag

SEQ ID NO: 1803 - DNA, 20 bp, Bacteroides forsythus
ggcagcgatggtagcaatac

SEQ ID NO: 1804 - DNA, 20 bp, Porphyromonas maccae
gtaaccgcgaggggcgtgtc

SEQ ID NO: 1805 - DNA, 30 bp, Pediococcus dextrinicus
aggtcaagctaatctctaaaagctagtctc

SEQ ID NO: 1806 - DNA, 20 bp, Prevotella intermedia
cggacttgagtgcacgcaac

SEQ ID NO: 1807 - DNA, 30 bp, Corynebacterium urealyticum
cctctttcgctagggaagaagccttcgggt

SEQ ID NO: 1808 - DNA, 20 bp, Bacteroides forsythus
gtattttattgcatgtacct

SEQ ID NO: 1809 - DNA, 20 bp, Pediococcus damnosus
ataaaatgaaccgcatggtt

SEQ ID NO: 1810 - DNA, 20 bp, Propionibacterium propionicus
cggtacagtcagttgcgagc

SEQ ID NO: 1811 - DNA, 20 bp, Alicyclobacillus acidocaldarius
ggctttccatcccccatgcc

SEQ ID NO: 1812 - DNA, 20 bp, Clostridium ramosum
gatgtcaaagttcagtgctg

SEQ ID NO: 1813 - DNA, 20 bp, Pediococcus acidilactici
tcatgacgtgcttgcactga

SEQ ID NO: 1814 - DNA, 20 bp, Streptococcus uberis
cctatttaaaaggggcaaat

SEQ ID NO: 1815 - DNA, 30 bp, Clostridium difficile
ggtatgctaatacgggataatatatttgag

SEQ ID NO: 1816 - DNA, 20 bp, Propionibacterium propionicus
tgcgagcctgtaagggttag

SEQ ID NO: 1817 - DNA, 20 bp, Streptococcus hyointestinalis
atgtgggagtggaaaatcca

SEQ ID NO: 1818 - DNA, 20 bp, Propionibacterium propionicus
tgtcgcgtcgaaagtgtaaa

SEQ ID NO: 1819 - DNA, 20 bp, Prevotella corporis
agcgcaggccgccgtgcaag

SEQ ID NO: 1820 - DNA, 20 bp, Macrococcus caseolyticus
gataatatctagcttcgcat

SEQ ID NO: 1821 - DNA, 20 bp, Enterococcus dispar
ctcatgtttattaattgaaa

SEQ ID NO: 1822 - DNA, 20 bp, Prevotella buccae
tcagagatgatgaagtccct

SEQ ID NO: 1823 - DNA, 20 bp, Enterococcus cecorum
tagatggatgaaaggcgctt

SEQ ID NO: 1824 - DNA, 20 bp, Pediococcus parvulus
ccgaagatgattttagctat

SEQ ID NO: 1825 - DNA, 20 bp, Rothia mucilaginosa
gccggggcttaaccccgtgt

SEQ ID NO: 1826 - DNA, 20 bp, Granulicatella adiacens
gttagcgccttgacggtatc

SEQ ID NO: 1827 - DNA, 20 bp, Prevotella corporis
gagaatgattcagagatgat

SEQ ID NO: 1828 - DNA, 20 bp, Streptococcus equi
agtgatgggagtggaaagtc

SEQ ID NO: 1829 - DNA, 20 bp, Listeria grayi
accttaggagcttgctcctt

SEQ ID NO: 1830 - DNA, 20 bp, Kingella denitrificans
acatgtacggaagaactcag

SEQ ID NO: 1831 - DNA, 20 bp, Porphyromonas maccae
tcagttactatcgggtaaag

SEQ ID NO: 1832 - DNA, 20 bp, Pediococcus pentosaceus
gattatgacgtacttgtact

SEQ ID NO: 1833 - DNA, 30 bp, Paenibacillus larvae
tccggagcgaatcctcaaaagccgatctca

SEQ ID NO: 1834 - DNA, 20 bp, Dermabacter hominis
atgaccttggcccgcatggg

SEQ ID NO: 1835 - DNA, 20 bp, Propionibacterium propionicus
cagttgcgagcctgtaaggg

SEQ ID NO: 1836 - DNA, 20 bp, Haemophilus ducreyi
gactggcgcccgaagctaac

SEQ ID NO: 1837 - DNA, 20 bp, Serratia ficaria
atacggcagcgcattgacgt

SEQ ID NO: 1838 - DNA, 20 bp, Streptococcus agalactiae
gagaagaacgttggtaggag

SEQ ID NO: 1839 - DNA, 20 bp, Actinomyces neuii
tctacagagggttgctattc

SEQ ID NO: 1840 - DNA, 20 bp, Prevotella corporis
aatccccaaatccggtccca

SEQ ID NO: 1841 - DNA, 20 bp, Propionibacterium propionicus
ttggtttggaaagttctggc

SEQ ID NO: 1842 - DNA, 20 bp, Lactococcus lactis
caacgagtcgcgagacagtg

SEQ ID NO: 1843 - DNA, 20 bp, Campylobacter curvus
atatagctaacttgcccatt

SEQ ID NO: 1844 - DNA, 20 bp, Propionibacterium propionicus
ccagcaagttatgttgggga

SEQ ID NO: 1845 - DNA, 20 bp, Actinomyces neuii
gctattccgtgaggttgagc

SEQ ID NO: 1846 - DNA, 20 bp, Prevotella corporis
ttgcaggagaatgattcaga

SEQ ID NO: 1847 - DNA, 20 bp, Listeria grayi
gggagacttagagtgcagaa

SEQ ID NO: 1848 - DNA, 20 bp, Staphylococcus warneri
accggataagattttgaacc

SEQ ID NO: 1849 - DNA, 20 bp, Corynebacterium mycetoides
aggtggggctaatcgctgaa

SEQ ID NO: 1850 - DNA, 20 bp, Pediococcus dextrinicus
agccggtggagtaacccgta

SEQ ID NO: 1851 - DNA, 20 bp, Propionibacterium avidum
ataccggataggaatccttg

SEQ ID NO: 1852 - DNA, 20 bp, Prevotella intermedia
cccgatgttgtccacatatg

SEQ ID NO: 1853 - DNA, 20 bp, Bacillus azotoformans
aacctcatggttcgaagata

SEQ ID NO: 1854 - DNA, 20 bp, Fusobacterium necrophorum
gaccgcaagtctgatccagc

SEQ ID NO: 1855 - DNA, 20 bp, Listeria ivanovii
tcactttgaaagatggtttc

SEQ ID NO: 1856 - DNA, 30 bp, Pediococcus parvulus
cgcactttcgttgaatgaattagaggtgct

SEQ ID NO: 1857 - DNA, 20 bp, Alicyclobacillus acidocaldarius
cctctgccccgaagggaccc

SEQ ID NO: 1858 - DNA, 20 bp, Bacteroides forsythus
gaaatgtagacgacggagag

SEQ ID NO: 1859 - DNA, 20 bp, Campylobacter curvus
tatataagtagatacgggaa

SEQ ID NO: 1860 - DNA, 20 bp, Bacteroides forsythus
gagtgagagctttcttccct

SEQ ID NO: 1861 - DNA, 20 bp, Pediococcus pentosaceus
attatgacgtacttgtactg

SEQ ID NO: 1862 - DNA, 20 bp, Comamonas terrigena
caagaccttgcgcaactgga

SEQ ID NO: 1863 - DNA, 20 bp, Granulicatella adiacens
cgcataggtcttcgaaccgc

SEQ ID NO: 1864 - DNA, 20 bp, Pediococcus pentosaceus
gacagtctaagagattagag

SEQ ID NO: 1865 - DNA, 20 bp, Comamonas terrigena
accttgcgcaactggagcgg

SEQ ID NO: 1866 - DNA, 20 bp, Porphyromonas maccae
gaggggcgtgtcagggtaat

SEQ ID NO: 1867 - DNA, 30 bp, Corynebacterium mycetoides
cgacactgtgaggtggggctaatcgctgaa

SEQ ID NO: 1868 - DNA, 20 bp, Enterococcus faecalis
atggcataagagtgaaaggc

SEQ ID NO: 1869 - DNA, 20 bp, Fusobacterium necrophorum
ttttcgcatggaggaatcat

SEQ ID NO: 1870 - DNA, 20 bp, Bacteroides forsythus
ctgcccgcaacagagggata

SEQ ID NO: 1871 - DNA, 20 bp, Pediococcus pentosaceus
acgtacttgtactgattgag

SEQ ID NO: 1872 - DNA, 20 bp, Prevotella intermedia
aaccttccctccactcgggg

SEQ ID NO: 1873 - DNA, 20 bp, Actinomyces neuii
gtctacagagggttgctatt

SEQ ID NO: 1874 - DNA, 20 bp, Prevotella intermedia
ccaaccttccctccactcgg

SEQ ID NO: 1875 - DNA, 20 bp, Prevotella corporis
gcgtgccgtgaaaagcagcg

SEQ ID NO: 1876 - DNA, 20 bp, Alicyclobacillus acidocaldarius
tttccatcccccatgccgct

SEQ ID NO: 1877 - DNA, 20 bp, Porphyromonas maccae
tcaagtaaagattaattgct

SEQ ID NO: 1878 - DNA, 20 bp, Fusobacterium necrophorum
catggaggaatcatgaaagc

SEQ ID NO: 1879 - DNA, 20 bp, Enterococcus faecalis
gaagaacaaggacgttagta

SEQ ID NO: 1880 - DNA, 20 bp, Aneurinibacillus thermoaerophilus
tggaaaggcctttgagccgc

SEQ ID NO: 1881 - DNA, 20 bp, Pediococcus dextrinicus
caccaactgatttaaaaata

SEQ ID NO: 1882 - DNA, 20 bp, Lactococcus garvieae
agatagcttgctatttttat

SEQ ID NO: 1883 - DNA, 20 bp, Enterococcus cecorum
taccgcatggtagatggatg

SEQ ID NO: 1884 - DNA, 20 bp, Bacteroides forsythus
caggggaataaaatgagata

SEQ ID NO: 1885 - DNA, 20 bp, Moraxella bovis
ccaagaattcgctagagata

SEQ ID NO: 1886 - DNA, 30 bp, Clostridium ramosum
cggcagcaagggtctgtggtgaaagcctga

SEQ ID NO: 1887 - DNA, 20 bp, Pediococcus dextrinicus
agtcgaacgagttttctttt

SEQ ID NO: 1888 - DNA, 20 bp, Vibrio hollisae
tgggggttagaatccctggt

SEQ ID NO: 1889 - DNA, 30 bp, Bacillus lentus
gagaaaggttgaaagacggcttcggctgtc

SEQ ID NO: 1890 - DNA, 20 bp, Neisseria gonorrhoeae
cggaacgtaccgggtagcgg

SEQ ID NO: 1891 - DNA, 20 bp, Clostridium ramosum
tccagagatggagagatagc

SEQ ID NO: 1892 - DNA, 20 bp, Rothia mucilaginosa
tgagtaacctacctttaact

SEQ ID NO: 1893 - DNA, 20 bp, Pediococcus damnosus
gaaccgcatggtttattttt

SEQ ID NO: 1894 - DNA, 20 bp, Corynebacterium renale
gccactgcttgcagtggtac

SEQ ID NO: 1895 - DNA, 20 bp, Paenibacillus alvei
agataggcattttcctcgca

SEQ ID NO: 1896 - DNA, 20 bp, Leuconostoc lactis
tttgaagcttctagagatag

SEQ ID NO: 1897 - DNA, 20 bp, Prevotella intermedia
tgtccacatatggcatctga

SEQ ID NO: 1898 - DNA, 20 bp, Haemophilus ducreyi
ttaatagcaaaattgattga

SEQ ID NO: 1899 - DNA, 20 bp, Prevotella corporis
gcgcgaactgcttggcttga

SEQ ID NO: 1900 - DNA, 20 bp, Enterococcus cecorum
ccatttaccgcatggtagat

SEQ ID NO: 1901 - DNA, 20 bp, Haemophilus ducreyi
gcaaaattgattgacgttag

SEQ ID NO: 1902 - DNA, 20 bp, Corynebacterium cystitidis
ctaatcgtgtaaagccggtc

SEQ ID NO: 1903 - DNA, 30 bp, Brevibacillus laterosporus
cgcgcgcaggtggctatgtaagtctgatgt

SEQ ID NO: 1904 - DNA, 20 bp, Corynebacterium cystitidis
acatacactggatcgccatg

SEQ ID NO: 1905 - DNA, 20 bp, Vibrio hollisae
cggcagcgacatgaacaatc

SEQ ID NO: 1906 - DNA, 20 bp, Paenibacillus larvae
gaatcctcaaaagccgatct

SEQ ID NO: 1907 - DNA, 20 bp, Sphingomonas paucimobilis
ggggaacctgcgggggatca

SEQ ID NO: 1908 - DNA, 20 bp, Prevotella corporis
ttgagtgcgccggaagcggg

SEQ ID NO: 1909 - DNA, 20 bp, Pasteurella aerogenes
cgagagacgaaagaccggga

SEQ ID NO: 1910 - DNA, 20 bp, Comamonas terrigena
ccttgcgcaactggagcggc

SEQ ID NO: 1911 - DNA, 20 bp, Pediococcus dextrinicus
gcttttaatgaaggcggtgc

SEQ ID NO: 1912 - DNA, 20 bp, Prevotella corporis
gcatgccggttgcttgcaac

SEQ ID NO: 1913 - DNA, 20 bp, Prevotella corporis
atgcggggataaagttgccc

SEQ ID NO: 1914 - DNA, 30 bp, Propionibacterium granulosum
ctaggaaactggtgctaatactggatatgt

SEQ ID NO: 1915 - DNA, 20 bp, Brevibacillus laterosporus
gaaacggaaagatggcgcaa

SEQ ID NO: 1916 - DNA, 20 bp, Prevotella corporis
tggatacccgctgtccggcc

SEQ ID NO: 1917 - DNA, 20 bp, Neisseria gonorrhoeae
ggtagcgggggataactgat

SEQ ID NO: 1918 - DNA, 20 bp, Porphyromonas maccae
gttactatcgggtaaagccg

SEQ ID NO: 1919 - DNA, 20 bp, Pediococcus pentosaceus
ttatgacgtacttgtactga

SEQ ID NO: 1920 - DNA, 20 bp, Fusobacterium necrophorum
gacaatggaccgcaagtctg

SEQ ID NO: 1921 - DNA, 20 bp, Pediococcus pentosaceus
gtactgattgagattttaac

SEQ ID NO: 1922 - DNA, 20 bp, Lactococcus garvieae
cgatgattaaagatagcttg

SEQ ID NO: 1923 - DNA, 20 bp, Clostridium ramosum
ggaagaacggcggctacagg

SEQ ID NO: 1924 - DNA, 30 bp, Pasteurella aerogenes
tttcagactgggcagctagagtattttagg

SEQ ID NO: 1925 - DNA, 20 bp, Alicyclobacillus acidocaldarius
tccatcccccatgccgctct

SEQ ID NO: 1926 - DNA, 20 bp, Brevibacillus laterosporus
gcgcgcaggtggctatgtaa

SEQ ID NO: 1927 - DNA, 20 bp, Prevotella intermedia
tgaattgcagacgcaggata

SEQ ID NO: 1928 - DNA, 20 bp, Prevotella intermedia
acccgatgttgtccacatat

SEQ ID NO: 1929 - DNA, 20 bp, Streptococcus hyointestinalis
gcataagaggtaataacaca

SEQ ID NO: 1930 - DNA, 20 bp, Prevotella buccae
aagtccctcgggactcctgt

SEQ ID NO: 1931 - DNA, 20 bp, Prevotella corporis
ggatacccgctgtccggccc

SEQ ID NO: 1932 - DNA, 20 bp, Porphyromonas maccae
taccttatggtcttgggtta

SEQ ID NO: 1933 - DNA, 20 bp, Actinomyces viscosus
tgggcctgggaaaggtttgt

SEQ ID NO: 1934 - DNA, 20 bp, Corynebacterium cystitidis
ctctagcttgctagggtgct

SEQ ID NO: 1935 - DNA, 20 bp, Pediococcus pentosaceus
tgattatgacgtacttgtac

SEQ ID NO: 1936 - DNA, 20 bp, Actinomyces viscosus
ggcctgggaaaggtttgttc

SEQ ID NO: 1937 - DNA, 30 bp, Clostridium ramosum
ttataaaggaagaacggcggctacaggaaa

SEQ ID NO: 1938 - DNA, 20 bp, Neisseria elongata
aaggagcggttaatacccgt

SEQ ID NO: 1939 - DNA, 20 bp, Propionibacterium propionicus
tgttggggactcgttagaga

SEQ ID NO: 1940 - DNA, 20 bp, Porphyromonas maccae
caagtaaagattaattgcta

SEQ ID NO: 1941 - DNA, 20 bp, Streptococcus equi
agtccatcatgtgacggtaa

SEQ ID NO: 1942 - DNA, 20 bp, Macrococcus caseolyticus
ataccggataatatttagct

SEQ ID NO: 1943 - DNA, 20 bp, Neisseria gonorrhoeae
gggtagcgggggataactga

SEQ ID NO: 1944 - DNA, 30 bp, Enterococcus faecalis
cgcttctttcctcccgagtgcttgcactca

SEQ ID NO: 1945 - DNA, 20 bp, Porphyromonas maccae
acctaaagcacgtaaccgcg

SEQ ID NO: 1946 - DNA, 20 bp, Streptococcus hyointestinalis
gggagtggaaaatccatgtc

SEQ ID NO: 1947 - DNA, 20 bp, Lactococcus garvieae
atctgccgagtagcggggga

SEQ ID NO: 1948 - DNA, 20 bp, Pediococcus parvulus
ttgatttttaaaagatggct

SEQ ID NO: 1949 - DNA, 20 bp, Prevotella corporis
gtgcgccggaagcgggcgga

SEQ ID NO: 1950 - DNA, 20 bp, Neisseria subflava
agaagtaggtaggataccgc

SEQ ID NO: 1951 - DNA, 20 bp, Pediococcus parvulus
tcgttgaatgaattagaggt

SEQ ID NO: 1952 - DNA, 20 bp, Aerococcus urinae
gtttggaaagacggctttgc

SEQ ID NO: 1953 - DNA, 20 bp, Campylobacter lari
ccaactaatctcttagagat

SEQ ID NO: 1954 - DNA, 20 bp, Comamonas terrigena
gcaagaccttgcgcaactgg

SEQ ID NO: 1955 - DNA, 20 bp, Corynebacterium cystitidis
tctagcttgctagggtgctc

SEQ ID NO: 1956 - DNA, 20 bp, Prevotella corporis
ccgctgtggcgccactgacg

SEQ ID NO: 1957 - DNA, 20 bp, Neisseria gonorrhoeae
gtaccgggtagcgggggata

SEQ ID NO: 1958 - DNA, 20 bp, Pediococcus pentosaceus
ttgtactgattgagatttta

SEQ ID NO: 1959 - DNA, 20 bp, Moraxella bovis
cataccaagaattcgctaga

SEQ ID NO: 1960 - DNA, 20 bp, Corynebacterium diphtheriae
gaaagtttttcggtacgaga

SEQ ID NO: 1961 - DNA, 20 bp, Streptococcus hyointestinalis
agaacggatgtgggagtgga

SEQ ID NO: 1962 - DNA, 20 bp, Granulicatella adiacens
actgttagcgccttgacggt

SEQ ID NO: 1963 - DNA, 20 bp, Bacteroides forsythus
aggggaataaaatgagatac

SEQ ID NO: 1964 - DNA, 20 bp, Streptococcus equi
aaagtccatcatgtgacggt

SEQ ID NO: 1965 - DNA, 20 bp, Pediococcus damnosus
cgttgattgaattagagatg

SEQ ID NO: 1966 - DNA, 20 bp, Pediococcus dextrinicus
cataatattaaaaaccacat

SEQ ID NO: 1967 - DNA, 20 bp, Streptococcus hyointestinalis
acacatgttattagtttaaa

SEQ ID NO: 1968 - DNA, 20 bp, Aneurinibacillus aneurinilyticus
gatacgtttttcagaccgca

SEQ ID NO: 1969 - DNA, 20 bp, Pediococcus parvulus
aaccgcatggttgattttta

SEQ ID NO: 1970 - DNA, 20 bp, Macrococcus caseolyticus
tcgcatgaagcaatagtgaa

SEQ ID NO: 1971 - DNA, 30 bp, Granulicatella adiacens
gctaaaaccgcataggtcttcgaaccgcat

SEQ ID NO: 1972 - DNA, 20 bp, Neisseria gonorrhoeae
ggctgttgccaatatcggcg

SEQ ID NO: 1973 - DNA, 20 bp, Enterococcus faecalis
tagtaactgaacgtcccctg

SEQ ID NO: 1974 - DNA, 20 bp, Prevotella intermedia
tggcatctgacgtggaccaa

SEQ ID NO: 1975 - DNA, 20 bp, Neisseria gonorrhoeae
caatatcggcggccgatgac

SEQ ID NO: 1976 - DNA, 30 bp, Serratia rubidaea
gcgaacctgcgaaggcaagcggacctcata

SEQ ID NO: 1977 - DNA, 20 bp, Pediococcus dextrinicus
ttgcttttaatgaaggcggt

SEQ ID NO: 1978 - DNA, 20 bp, Prevotella corporis
actgcttggcttgagtgcgc

SEQ ID NO: 1979 - DNA, 20 bp, Propionibacterium propionicus
ggtacagtcagttgcgagcc

SEQ ID NO: 1980 - DNA, 20 bp, Prevotella corporis
agcatgccggttgcttgcaa

SEQ ID NO: 1981 - DNA, 20 bp, Paenibacillus larvae
gcgaatcctcaaaagccgat

SEQ ID NO: 1982 - DNA, 20 bp, Prevotella corporis
cccctcgggactcctgtgaa

SEQ ID NO: 1983 - DNA, 20 bp, Paenibacillus alvei
acatctgaatgaccgctcta

SEQ ID NO: 1984 - DNA, 30 bp, Kingella denitrificans
atattggaatgtaccgagtagtgggggata

SEQ ID NO: 1985 - DNA, 20 bp, Prevotella corporis
tgattcagagatgatgaagt

SEQ ID NO: 1986 - DNA, 20 bp, Pediococcus parvulus
tagaggtgcttgcaccgaag

SEQ ID NO: 1987 - DNA, 20 bp, Pediococcus dextrinicus
ttaaaagtaaacgagtggcg

SEQ ID NO: 1988 - DNA, 20 bp, Neisseria gonorrhoeae
tgccaatatcggcggccgat

SEQ ID NO: 1989 - DNA, 20 bp, Corynebacterium cystitidis
tatctttgtgagggagctgt

SEQ ID NO: 1990 - DNA, 30 bp, Enterococcus cecorum
tagcttgctacaccggaagaaaatgagtgg

SEQ ID NO: 1991 - DNA, 20 bp, Bacteroides forsythus
agagtgagagctttcttccc

SEQ ID NO: 1992 - DNA, 20 bp, Paenibacillus larvae
ttagttgccagcacgcagag

SEQ ID NO: 1993 - DNA, 30 bp, Propionibacterium propionicus
atctgtaaaagccggcctcagttcggattg

SEQ ID NO: 1994 - DNA, 20 bp, Prevotella corporis
cgtacggtctgggcggccaa

SEQ ID NO: 1995 - DNA, 20 bp, Bacteroides forsythus
tgcccgcaacagagggataa

SEQ ID NO: 1996 - DNA, 20 bp, Pasteurella aerogenes
agagacgaaagaccgggacc

SEQ ID NO: 1997 - DNA, 20 bp, Bacteroides forsythus
acaggggaataaaatgagat

SEQ ID NO: 1998 - DNA, 20 bp, Neisseria gonorrhoeae
atcggaacgtaccgggtagc

SEQ ID NO: 1999 - DNA, 20 bp, Enterococcus faecalis
ttcctcccgagtgcttgcac

SEQ ID NO: 2000 - DNA, 20 bp, Alicyclobacillus acidocaldarius
gggacccctcatctctgagg

SEQ ID NO: 2001 - DNA, 30 bp, Clostridium ramosum
cgatagctaagaccgcataggtacggacac

SEQ ID NO: 2002 - DNA, 20 bp, Porphyromonas maccae
atgattcaagtaaagattaa

SEQ ID NO: 2003 - DNA, 20 bp, Propionibacterium avidum
ggaatccttgctgcatggtg

SEQ ID NO: 2004 - DNA, 20 bp, Kingella denitrificans
catattggaatgtaccgagt

SEQ ID NO: 2005 - DNA, 20 bp, Pediococcus dextrinicus
atttggtagtaactggccag

SEQ ID NO: 2006 - DNA, 20 bp, Pasteurella aerogenes
aagagcgcagagatgtgctt

SEQ ID NO: 2007 - DNA, 20 bp, Bacillus smithii
taccggataatatcttcctt

SEQ ID NO: 2008 - DNA, 20 bp, Actinomyces neuii
taacctttttggggggagtg

SEQ ID NO: 2009 - DNA, 20 bp, Streptococcus uberis
ccctatttaaaaggggcaaa

SEQ ID NO: 2010 - DNA, 20 bp, Neisseria meningitidis
taccgggtaagcgggctcct

SEQ ID NO: 2011 - DNA, 20 bp, Bacteroides ovatus
ttgcaaactgaagatggcga

SEQ ID NO: 2012 - DNA, 20 bp, Bacteroides forsythus
catgtaccttgtgaataagc

SEQ ID NO: 2013 - DNA, 20 bp, Paenibacillus thiaminolyticus
cttcgggaaaccattagctt

SEQ ID NO: 2014 - DNA, 20 bp, Enterococcus cecorum
cggaagaaaatgagtggcga

SEQ ID NO: 2015 - DNA, 20 bp, Granulicatella adiacens
aaaccgcataggtcttcgaa

SEQ ID NO: 2016 - DNA, 20 bp, Lactococcus garvieae
tctgccgagtagcgggggac

SEQ ID NO: 2017 - DNA, 20 bp, Prevotella corporis
ccggttgcttgcaaccggtg

SEQ ID NO: 2018 - DNA, 20 bp, Enterococcus faecalis
gcatggcataagagtgaaag

SEQ ID NO: 2019 - DNA, 20 bp, Propionibacterium propionicus
cccctctctgggataacagt

SEQ ID NO: 2020 - DNA, 20 bp, Prevotella corporis
aataccttatgtcctccttt

SEQ ID NO: 2021 - DNA, 20 bp, Pediococcus damnosus
taataccgcataataaaatg

SEQ ID NO: 2022 - DNA, 20 bp, Pediococcus dextrinicus
atattaaaaaccacatggtt

SEQ ID NO: 2023 - DNA, 20 bp, Bacteroides forsythus
caacagagggataacccggc

SEQ ID NO: 2024 - DNA, 30 bp, Pasteurella aerogenes
tgcttaagtgaggtgtgaaatccccgggct

SEQ ID NO: 2025 - DNA, 20 bp, Pediococcus pentosaceus
attgattatgacgtacttgt

SEQ ID NO: 2026 - DNA, 20 bp, Actinomyces neuii
gcaccgcgagactgcagaga

SEQ ID NO: 2027 - DNA, 30 bp, Streptococcus equi
tgttgttagagaagaacagtgatgggagtg

SEQ ID NO: 2028 - DNA, 20 bp, Enterococcus cecorum
accgcatggtagatggatga

SEQ ID NO: 2029 - DNA, 30 bp, Streptococcus hyointestinalis
gtaagagaagaacggatgtgggagtggaaa

SEQ ID NO: 2030 - DNA, 20 bp, Listeria grayi
ctttggtcgttagtggcgga

SEQ ID NO: 2031 - DNA, 20 bp, Fusobacterium mortiferum
agcggcatcgtttttatatt

SEQ ID NO: 2032 - DNA, 20 bp, Lactococcus garvieae
agtggaaaattacttaagtg

SEQ ID NO: 2033 - DNA, 20 bp, Corynebacterium pilosum
aatggttggtacagcgcgca

SEQ ID NO: 2034 - DNA, 20 bp, Moraxella bovis
gtcttgacataccaagaatt

SEQ ID NO: 2035 - DNA, 30 bp, Enterococcus faecalis
atgcaagtcgaacgcttctttcctcccgag

SEQ ID NO: 2036 - DNA, 20 bp, Lactococcus garvieae
ttttatgaagagcggcgaac

SEQ ID NO: 2037 - DNA, 20 bp, Enterococcus cecorum
tggtagatggatgaaaggcg

SEQ ID NO: 2038 - DNA, 20 bp, Paenibacillus larvae
tcgggagacgccaggttagc

SEQ ID NO: 2039 - DNA, 20 bp, Corynebacterium cystitidis
tgtgctggtatgggatgagc

SEQ ID NO: 2040 - DNA, 20 bp, Prevotella intermedia
ttccctccactcggggatac

SEQ ID NO: 2041 - DNA, 30 bp, Propionibacterium granulosum
aactttgggataacgctaggaaactggtgc

SEQ ID NO: 2042 - DNA, 20 bp, Granulicatella adiacens
tgaagaggaaaagaggcgca

SEQ ID NO: 2043 - DNA, 20 bp, Pediococcus parvulus
gttgatttttaaaagatggc

SEQ ID NO: 2044 - DNA, 20 bp, Pediococcus damnosus
ccgcataataaaatgaaccg

SEQ ID NO: 2045 - DNA, 20 bp, Porphyromonas maccae
tcggactaataccttatggt

SEQ ID NO: 2046 - DNA, 30 bp, Vibrio hollisae
atgaacaatccttcgggtgcgttcatgggc

SEQ ID NO: 2047 - DNA, 20 bp, Prevotella corporis
atccgtcggtcacggatggg

SEQ ID NO: 2048 - DNA, 20 bp, Bacillus smithii
taatatcttccttcgcatga

SEQ ID NO: 2049 - DNA, 20 bp, Prevotella intermedia
atctaccttgcagcgcgaac

SEQ ID NO: 2050 - DNA, 20 bp, Corynebacterium cystitidis
taatcgtgtaaagccggtcg

SEQ ID NO: 2051 - DNA, 20 bp, Pasteurella aerogenes
agcgacgagaccgcgaggtg

SEQ ID NO: 2052 - DNA, 20 bp, Enterococcus cecorum
catggtagatggatgaaagg

SEQ ID NO: 2053 - DNA, 20 bp, Enterococcus cecorum
accggaagaaaatgagtggc

SEQ ID NO: 2054 - DNA, 20 bp, Paenibacillus larvae
ttcgggagacgccaggttag

SEQ ID NO: 2055 - DNA, 30 bp, Pediococcus acidilactici
gaacttccgttaattgatcatgacgtgctt

SEQ ID NO: 2056 - DNA, 20 bp, Neisseria gonorrhoeae
cgtaccgggtagcgggggat

SEQ ID NO: 2057 - DNA, 20 bp, Paenibacillus thiaminolyticus
cggtttccttcgggaaacca

SEQ ID NO: 2058 - DNA, 20 bp, Enterococcus dispar
tattaattgaaaggcgcttt

SEQ ID NO: 2059 - DNA, 20 bp, Propionibacterium granulosum
ggtggcctaacactttttgt

SEQ ID NO: 2060 - DNA, 20 bp, Enterococcus faecalis
gagtgaaaggcgctttcggg

SEQ ID NO: 2061 - DNA, 20 bp, Neisseria elongata
cgtttctgctgacggtacct

SEQ ID NO: 2062 - DNA, 30 bp, Corynebacterium urealyticum
cacgttgtggtggggactcacaagagactg

SEQ ID NO: 2063 - DNA, 20 bp, Propionibacterium granulosum
agttgcgacatcgtaaggtg

SEQ ID NO: 2064 - DNA, 20 bp, Propionibacterium propionicus
gttatgttggggactcgtta

SEQ ID NO: 2065 - DNA, 20 bp, Vibrio hollisae
tgaggtagaaagtgggggac

SEQ ID NO: 2066 - DNA, 30 bp, Prevotella intermedia
tgattagcttgttggtgcgggtaacggccc

SEQ ID NO: 2067 - DNA, 20 bp, Neisseria gonorrhoeae
tgttgccaatatcggcggcc

SEQ ID NO: 2068 - DNA, 20 bp, Porphyromonas maccae
gaaccagccacgtcgcgtga

SEQ ID NO: 2069 - DNA, 20 bp, Prevotella corporis
atacccgctgtccggcccgt

SEQ ID NO: 2070 - DNA, 20 bp, Lactococcus garvieae
agtcgagcgatgattaaaga

SEQ ID NO: 2071 - DNA, 20 bp, Enterococcus cecorum
gtcgcaaagccgcgaggcta

SEQ ID NO: 2072 - DNA, 20 bp, Propionibacterium granulosum
aagtggaaacttgatgctta

SEQ ID NO: 2073 - DNA, 20 bp, Lactococcus garvieae
gccgagtagcgggggacaac

SEQ ID NO: 2074 - DNA, 20 bp, Pasteurella aerogenes
atccagagaagagcgcagag

SEQ ID NO: 2075 - DNA, 20 bp, Prevotella intermedia
ctcaacatctaccttgcagc

SEQ ID NO: 2076 - DNA, 20 bp, Propionibacterium avidum
aataccggataggaatcctt

SEQ ID NO: 2077 - DNA, 20 bp, Comamonas terrigena
tcgcaagaccttgcgcaact

SEQ ID NO: 2078 - DNA, 20 bp, Paenibacillus macerans
cggataatcaagtcttccgc

SEQ ID NO: 2079 - DNA, 20 bp, Streptococcus equi
aagaacagtgatgggagtgg

SEQ ID NO: 2080 - DNA, 20 bp, Macrococcus caseolyticus
agagtgcttgcactctctga

SEQ ID NO: 2081 - DNA, 20 bp, Brevibacillus laterosporus
gaagcgaaacggaaagatgg

SEQ ID NO: 2082 - DNA, 20 bp, Tissierella praeacuta
ccagtgagctaaccatttgg

SEQ ID NO: 2083 - DNA, 20 bp, Bacteroides forsythus
ggtagcaatacctgtcggcg

SEQ ID NO: 2084 - DNA, 20 bp, Prevotella corporis
acccgctgtccggcccgtac

SEQ ID NO: 2085 - DNA, 20 bp, Corynebacterium cystitidis
gcttgcggcctattagtttg

SEQ ID NO: 2086 - DNA, 20 bp, Bacillus lentus
tttcttctcctggagaaagg

SEQ ID NO: 2087 - DNA, 30 bp, Leuconostoc lactis
taaccttatggagggagccgtctaaggcag

SEQ ID NO: 2088 - DNA, 20 bp, Streptococcus hyointestinalis
aagaacggatgtgggagtgg

SEQ ID NO: 2089 - DNA, 20 bp, Corynebacterium pilosum
gagctaatcgcacaaagcca

SEQ ID NO: 2090 - DNA, 20 bp, Staphylococcus kloosii
ttctacagtgaaagatggct

SEQ ID NO: 2091 - DNA, 20 bp, Propionibacterium propionicus
gagataggcgccccgtaagg

SEQ ID NO: 2092 - DNA, 20 bp, Bacillus azotoformans
aagaacaagtaccagttaac

SEQ ID NO: 2093 - DNA, 20 bp, Bacillus badius
cgagcggacttgacggaagc

SEQ ID NO: 2094 - DNA, 20 bp, Bacteroides forsythus
ttttattgcatgtaccttgt

SEQ ID NO: 2095 - DNA, 20 bp, Clostridium ramosum
ggagagatagctatatgaga

SEQ ID NO: 2096 - DNA, 30 bp, Bacteroides ovatus
cagcattttagtttgcttgcaaactgaaga

SEQ ID NO: 2097 - DNA, 30 bp, Pediococcus pentosaceus
tgggtaagagtaactgtttacccagtgacg

SEQ ID NO: 2098 - DNA, 20 bp, Porphyromonas maccae
ttactaagttatgactgaca

SEQ ID NO: 2099 - DNA, 20 bp, Kingella denitrificans
tgctatttgagcagccaata

SEQ ID NO: 2100 - DNA, 20 bp, Porphyromonas maccae
cgtgtcagggtaataccggt

SEQ ID NO: 2101 - DNA, 20 bp, Pediococcus pentosaceus
gcccagaagtaggggataac

SEQ ID NO: 2102 - DNA, 20 bp, Granulicatella adiacens
agagtaactgttagcgcctt

SEQ ID NO: 2103 - DNA, 20 bp, Corynebacterium pilosum
aggttgagctaatcgcacaa

SEQ ID NO: 2104 - DNA, 20 bp, Propionibacterium propionicus
atattcagacctttaggcat

SEQ ID NO: 2105 - DNA, 20 bp, Pediococcus dextrinicus
tgcttgcaccaactgattta

SEQ ID NO: 2106 - DNA, 20 bp, Enterococcus faecalis
cagtttatgccgcatggcat

SEQ ID NO: 2107 - DNA, 20 bp, Propionibacterium propionicus
cggatattcagacctttagg

SEQ ID NO: 2108 - DNA, 20 bp, Prevotella intermedia
cgtgcaggattgacggccct

SEQ ID NO: 2109 - DNA, 20 bp, Pediococcus damnosus
ttgaattagagatgcttgca

SEQ ID NO: 2110 - DNA, 20 bp, Paenibacillus larvae
atcttagttgccagcacgca

SEQ ID NO: 2111 - DNA, 20 bp, Porphyromonas maccae
tactatcgggtaaagccgag

SEQ ID NO: 2112 - DNA, 20 bp, Neisseria gonorrhoeae
aaggctgttgccaatatcgg

SEQ ID NO: 2113 - DNA, 20 bp, Pediococcus dextrinicus
gtcgaacgagttttctttta

SEQ ID NO: 2114 - DNA, 20 bp, Porphyromonas maccae
tgtttggcttgagtatagat

SEQ ID NO: 2115 - DNA, 20 bp, Granulicatella adiacens
taaaaccgcataggtcttcg

SEQ ID NO: 2116 - DNA, 20 bp, Listeria grayi
aagtcgaacgaatgacctta

SEQ ID NO: 2117 - DNA, 30 bp, Pediococcus damnosus
aacagatgctaataccgcataataaaatga

SEQ ID NO: 2118 - DNA, 20 bp, Prevotella intermedia
gagtaaagcggggcacgtgt

SEQ ID NO: 2119 - DNA, 20 bp, Gemella morbillorum
tttagcttaaaaggtgcaat

SEQ ID NO: 2120 - DNA, 20 bp, Propionibacterium propionicus
gtttgtcgcgtcgaaagtgt

SEQ ID NO: 2121 - DNA, 20 bp, Lactococcus garvieae
cgcataacaatgagaatcgc

SEQ ID NO: 2122 - DNA, 20 bp, Corynebacterium pilosum
caatggttggtacagcgcgc

SEQ ID NO: 2123 - DNA, 20 bp, Prevotella intermedia
atccaaccttccctccactc

SEQ ID NO: 2124 - DNA, 20 bp, Prevotella corporis
tgcgggcgaatccccaaatc

SEQ ID NO: 2125 - DNA, 20 bp, Campylobacter curvus
ctccgtatctatataagtag

SEQ ID NO: 2126 - DNA, 20 bp, Alicyclobacillus acidocaldarius
ctcagcggcccaattgggcc

SEQ ID NO: 2127 - DNA, 20 bp, Propionibacterium granulosum
cgggagcttccagagatggt

SEQ ID NO: 2128 - DNA, 20 bp, Aerococcus urinae
gcgaccttgtgaaagcaagc

SEQ ID NO: 2129 - DNA, 20 bp, Porphyromonas maccae
tatggtcttgggttattgca

SEQ ID NO: 2130 - DNA, 20 bp, Clostridium ramosum
ctaagtgttggatgtcaaag

SEQ ID NO: 2131 - DNA, 20 bp, Corynebacterium pilosum
tggtacagcgcgcagcgaga

SEQ ID NO: 2132 - DNA, 20 bp, Serratia ficaria
cttaatacggcagcgcattg

SEQ ID NO: 2133 - DNA, 20 bp, Prevotella intermedia
cacatatggcatctgacgtg

SEQ ID NO: 2134 - DNA, 20 bp, Listeria grayi
gaccttaggagcttgctcct

SEQ ID NO: 2135 - DNA, 20 bp, Corynebacterium cystitidis
atacactggatcgccatgga

SEQ ID NO: 2136 - DNA, 20 bp, Paenibacillus thiaminolyticus
ggtttccttcgggaaaccat

SEQ ID NO: 2137 - DNA, 20 bp, Granulicatella adiacens
ttcgaaccgcatggtttgaa

SEQ ID NO: 2138 - DNA, 20 bp, Bacillus badius
cgttcaagttagcggcggac

SEQ ID NO: 2139 - DNA, 30 bp, Vibrio hollisae
tcgagcggcagcgacatgaacaatccttcg

SEQ ID NO: 2140 - DNA, 20 bp, Enterococcus cecorum
gcatggcagatggatgaaag

SEQ ID NO: 2141 - DNA, 20 bp, Prevotella corporis
atgatgaagtcccctcggga

SEQ ID NO: 2142 - DNA, 20 bp, Fusobacterium mortiferum
cgggtaaccaaaaccggcgc

SEQ ID NO: 2143 - DNA, 20 bp, Enterococcus dispar
ttaattgaaaggcgcttttg

SEQ ID NO: 2144 - DNA, 20 bp, Porphyromonas maccae
cccgggattgaaatttagcg

SEQ ID NO: 2145 - DNA, 20 bp, Propionibacterium granulosum
actttttgtgggggagctgt

SEQ ID NO: 2146 - DNA, 20 bp, Campylobacter curvus
cggtaatggatagggctata

SEQ ID NO: 2147 - DNA, 20 bp, Achromobacter xylosoxidans
cctaaacgatgtcactagct

SEQ ID NO: 2148 - DNA, 20 bp, Bacteroides forsythus
atacgtgtattttattgcat

SEQ ID NO: 2149 - DNA, 20 bp, Alicyclobacillus acidocaldarius
ctggcctccgaagagacccg

SEQ ID NO: 2150 - DNA, 20 bp, Streptococcus hyointestinalis
gagtggaaaatccatgtcgt

SEQ ID NO: 2151 - DNA, 20 bp, Enterococcus faecalis
tctttcctcccgagtgcttg

SEQ ID NO: 2152 - DNA, 20 bp, Kocuria rosea
tactacctcttaccgcatgg

SEQ ID NO: 2153 - DNA, 20 bp, Prevotella corporis
atgattcagagatgatgaag

SEQ ID NO: 2154 - DNA, 20 bp, Brochothrix campestris
tgagatggacccgcgctgga

SEQ ID NO: 2155 - DNA, 30 bp, Vibrio hollisae
gcgttacttgacgttagcggcagaagaagc

SEQ ID NO: 2156 - DNA, 20 bp, Propionibacterium propionicus
tatgttggggactcgttaga

SEQ ID NO: 2157 - DNA, 20 bp, Macrococcus caseolyticus
taatatctagcttcgcatga

SEQ ID NO: 2158 - DNA, 20 bp, Lactococcus garvieae
gtagcgggggacaacgtttg

SEQ ID NO: 2159 - DNA, 20 bp, Streptococcus equi
agagaagaacagtgatggga

SEQ ID NO: 2160 - DNA, 20 bp, Porphyromonas maccae
atcagataggcatgcgttcc

SEQ ID NO: 2161 - DNA, 20 bp, Propionibacterium propionicus
agtgcttaacgctgagcctg

SEQ ID NO: 2162 - DNA, 20 bp, Prevotella intermedia
tacccgatgttgtccacata

SEQ ID NO: 2163 - DNA, 20 bp, Enterococcus faecalis
cctcccgagtgcttgcactc

SEQ ID NO: 2164 - DNA, 20 bp, Clostridium ramosum
ggcggctacaggaaatggta

SEQ ID NO: 2165 - DNA, 30 bp, Corynebacterium diphtheriae
agtgatacgttttcccttgtggtctgtata

SEQ ID NO: 2166 - DNA, 20 bp, Pediococcus dextrinicus
taatattaaaaaccacatgg

SEQ ID NO: 2167 - DNA, 20 bp, Prevotella corporis
ttggcttgagtgcgccggaa

SEQ ID NO: 2168 - DNA, 20 bp, Porphyromonas maccae
ttactatcgggtaaagccga

SEQ ID NO: 2169 - DNA, 20 bp, Bacillus badius
agcggacttgacggaagctt

SEQ ID NO: 2170 - DNA, 20 bp, Bacteroides forsythus
aatgtagacgacggagagtg

SEQ ID NO: 2171 - DNA, 20 bp, Paenibacillus larvae
tttcttcgcatgaagaagtc

SEQ ID NO: 2172 - DNA, 20 bp, Kingella denitrificans
gacatgtacggaagaactca

SEQ ID NO: 2173 - DNA, 20 bp, Lactococcus garvieae
accgcataacaatgagaatc

SEQ ID NO: 2174 - DNA, 20 bp, Prevotella intermedia
tatggcatctgacgtggacc

SEQ ID NO: 2175 - DNA, 20 bp, Vibrio hollisae
gttgggggttagaatccctg

SEQ ID NO: 2176 - DNA, 20 bp, Lactococcus garvieae
cgagtagcgggggacaacgt

SEQ ID NO: 2177 - DNA, 20 bp, Enterobacter gergoviae
tacttggaggctgtggtcct

SEQ ID NO: 2178 - DNA, 20 bp, Porphyromonas maccae
tgtaacttgcctgatagaaa

SEQ ID NO: 2179 - DNA, 20 bp, Prevotella corporis
cgaaggcagcccgctgtggc

SEQ ID NO: 2180 - DNA, 20 bp, Pediococcus dextrinicus
gtagtaactggccagatagt

SEQ ID NO: 2181 - DNA, 20 bp, Listeria welshimeri
ataccgaataataagtggtg

SEQ ID NO: 2182 - DNA, 20 bp, Prevotella corporis
acgaggagcaaagatccgtc

SEQ ID NO: 2183 - DNA, 20 bp, Porphyromonas maccae
tgctatcagataggcatgcg

SEQ ID NO: 2184 - DNA, 20 bp, Campylobacter curvus
gtagatacgggaaagttttt

SEQ ID NO: 2185 - DNA, 20 bp, Granulicatella adiacens
ggaaaagaggcgcaagcttc

SEQ ID NO: 2186 - DNA, 20 bp, Bacillus smithii
caagctgccgcttgcagatg

SEQ ID NO: 2187 - DNA, 20 bp, Lactococcus garvieae
tagagtggaaaattacttaa

SEQ ID NO: 2188 - DNA, 20 bp, Porphyromonas maccae
cgggagtacctaaagcacgt

SEQ ID NO: 2189 - DNA, 20 bp, Listeria grayi
ccgcatggagcgggtttgaa

SEQ ID NO: 2190 - DNA, 20 bp, Porphyromonas maccae
gcgtgtcagggtaataccgg

SEQ ID NO: 2191 - DNA, 20 bp, Bacillus azotoformans
gataactcttcgaacctcat

SEQ ID NO: 2192 - DNA, 20 bp, Listeria grayi
aataatcagctccgcatgga

SEQ ID NO: 2193 - DNA, 30 bp, Pediococcus dextrinicus
atggctagtacaacgagttgcgagaccgcg

SEQ ID NO: 2194 - DNA, 20 bp, Leuconostoc argentinum
agaaatgctagaatagggaa

SEQ ID NO: 2195 - DNA, 20 bp, Lactococcus garvieae
tagagaagaacgttaagtag

SEQ ID NO: 2196 - DNA, 20 bp, Corynebacterium pilosum
tgttggaaagcctttgggcg

SEQ ID NO: 2197 - DNA, 20 bp, Propionibacterium propionicus
aggcatcttttggtttggaa

SEQ ID NO: 2198 - DNA, 20 bp, Macrococcus caseolyticus
gcttgcactctctgatgtta

SEQ ID NO: 2199 - DNA, 20 bp, Streptococcus agalactiae
aacgttggtaggagtggaaa

SEQ ID NO: 2200 - DNA, 20 bp, Bacteroides forsythus
agcgatggtagcaatacctg

SEQ ID NO: 2201 - DNA, 20 bp, Clostridium ramosum
tgcctcaaagcactggtaga

SEQ ID NO: 2202 - DNA, 30 bp, Brevibacillus laterosporus
tgtaagtctgatgttaaagcccgaggctca

SEQ ID NO: 2203 - DNA, 20 bp, Actinomyces neuii
ctattccgtgaggttgagcg

SEQ ID NO: 2204 - DNA, 20 bp, Corynebacterium mycetoides
accggataggagctgcatgt

SEQ ID NO: 2205 - DNA, 30 bp, Serratia rubidaea
tatacaaagagaagcgaacctgcgaaggca

SEQ ID NO: 2206 - DNA, 20 bp, Bacteroides forsythus
aatacctgtcggcgaccggc

SEQ ID NO: 2207 - DNA, 20 bp, Corynebacterium renale
aaaggccactgcttgcagtg

SEQ ID NO: 2208 - DNA, 20 bp, Macrococcus caseolyticus
ataccggataatatctagct

SEQ ID NO: 2209 - DNA, 20 bp, Clostridium ramosum
aatggtagccgagtgacggt

SEQ ID NO: 2210 - DNA, 20 bp, Lactococcus garvieae
tgccgagtagcgggggacaa

SEQ ID NO: 2211 - DNA, 20 bp, Prevotella corporis
gctgtccgcatgcaagtgcg

SEQ ID NO: 2212 - DNA, 20 bp, Fusobacterium necrophorum
gttttttcgcatggaggaat

SEQ ID NO: 2213 - DNA, 20 bp, Streptococcus agalactiae
gaagaacgttggtaggagtg

SEQ ID NO: 2214 - DNA, 20 bp, Listeria grayi
tccgcatggagcaggtttga

SEQ ID NO: 2215 - DNA, 20 bp, Actinomyces neuii
aacctttttggggggagtgg

SEQ ID NO: 2216 - DNA, 20 bp, Bacteroides forsythus
gacgacggagagtgagagct

SEQ ID NO: 2217 - DNA, 20 bp, Corynebacterium mycetoides
tgtgaggtggggctaatcgc

SEQ ID NO: 2218 - DNA, 20 bp, Pediococcus dextrinicus
ccggtggagtaacccgtaag

SEQ ID NO: 2219 - DNA, 20 bp, Prevotella intermedia
ttaggtgctcaacatctacc

SEQ ID NO: 2220 - DNA, 20 bp, Pasteurella aerogenes
gaccgggaccgcaaggccgg

SEQ ID NO: 2221 - DNA, 20 bp, Bacteroides forsythus
gttaaagatttattggttgc

SEQ ID NO: 2222 - DNA, 20 bp, Corynebacterium pilosum
cttccacgttttctgtgccg

SEQ ID NO: 2223 - DNA, 20 bp, Propionibacterium propionicus
tcgaaagtgtaaactcagtg

SEQ ID NO: 2224 - DNA, 20 bp, Corynebacterium pilosum
tgtgttggaaaggcctttgg

SEQ ID NO: 2225 - DNA, 20 bp, Pediococcus parvulus
caccgaagatgattttagct

SEQ ID NO: 2226 - DNA, 20 bp, Propionibacterium propionicus
aatggtcggtacagtcagtt

SEQ ID NO: 2227 - DNA, 20 bp, Actinomyces neuii
acattggtgtctacagaggg

SEQ ID NO: 2228 - DNA, 20 bp, Bacillus badius
cttccgttcaagttagcggc

SEQ ID NO: 2229 - DNA, 20 bp, Haemophilus ducreyi
tagcaaaattgattgacgtt

SEQ ID NO: 2230 - DNA, 20 bp, Alicyclobacillus acidocaldarius
ccatcccccatgccgctctc

SEQ ID NO: 2231 - DNA, 20 bp, Bacillus badius
gaagcttgcttccgttcaag

SEQ ID NO: 2232 - DNA, 20 bp, Neisseria gonorrhoeae
acgtaccgggtagcggggga

SEQ ID NO: 2233 - DNA, 20 bp, Listeria grayi
gaacgaatgaccttaggagc

SEQ ID NO: 2234 - DNA, 20 bp, Prevotella corporis
cagagggctgtccgcatgca

SEQ ID NO: 2235 - DNA, 20 bp, Lactococcus garvieae
agagtggaaaattacttaag

SEQ ID NO: 2236 - DNA, 30 bp, Lactococcus garvieae
attacttaagtgacggtatctaaccagaaa

SEQ ID NO: 2237 - DNA, 20 bp, Pediococcus dextrinicus
gaacgagtttgcttttaatg

SEQ ID NO: 2238 - DNA, 20 bp, Macrococcus caseolyticus
ccggataatatttagcttcg

SEQ ID NO: 2239 - DNA, 20 bp, Bacteroides ovatus
ttagtttgcttgcaaactga

SEQ ID NO: 2240 - DNA, 20 bp, Corynebacterium pilosum
gttgagctaatcgcacaaag

SEQ ID NO: 2241 - DNA, 20 bp, Paenibacillus larvae
taccggatagctggtttctt

SEQ ID NO: 2242 - DNA, 20 bp, Prevotella corporis
agagggctgtccgcatgcaa

SEQ ID NO: 2243 - DNA, 30 bp, Enterococcus dispar
tgtttattatttgaaaggcgcttttgcgtc

SEQ ID NO: 2244 - DNA, 20 bp, Prevotella corporis
ccgtcggtcacggatgggga

SEQ ID NO: 2245 - DNA, 20 bp, Listeria grayi
tggagcgggtttgaaaggcg

SEQ ID NO: 2246 - DNA, 20 bp, Rothia mucilaginosa
agcgttatgtagtggttata

SEQ ID NO: 2247 - DNA, 20 bp, Macrococcus caseolyticus
agcaatagtgaaagacggtt

SEQ ID NO: 2248 - DNA, 20 bp, Macrococcus caseolyticus
gcgaacggacgagagtgctt

SEQ ID NO: 2249 - DNA, 20 bp, Alicyclobacillus acidocaldarius
ctctcagcggcccaattggg

SEQ ID NO: 2250 - DNA, 20 bp, Propionibacterium granulosum
cccacaactttgggataacg

SEQ ID NO: 2251 - DNA, 20 bp, Prevotella corporis
ctgccctgcggcgcgaactg

SEQ ID NO: 2252 - DNA, 20 bp, Aerococcus urinae
gggggcgcaggcggtttctt

SEQ ID NO: 2253 - DNA, 20 bp, Rothia mucilaginosa
tagcagggaagaagagagat

SEQ ID NO: 2254 - DNA, 20 bp, Porphyromonas maccae
ttgctatcagataggcatgc

SEQ ID NO: 2255 - DNA, 20 bp, Streptococcus hyointestinalis
aagaggtaataacacatgtt

SEQ ID NO: 2256 - DNA, 20 bp, Bacteroides ovatus
ctgccgataactccggaata

SEQ ID NO: 2257 - DNA, 20 bp, Fusobacterium necrophorum
accgcaagtctgatccagca

SEQ ID NO: 2258 - DNA, 20 bp, Bacteroides ovatus
ccgataactccggaatagcc

SEQ ID NO: 2259 - DNA, 20 bp, Propionibacterium granulosum
gagcttccagagatggttgt

SEQ ID NO: 2260 - DNA, 20 bp, Lactococcus garvieae
tcgagcgatgattaaagata

SEQ ID NO: 2261 - DNA, 20 bp, Prevotella corporis
cgaggggcagcatgccggtt

SEQ ID NO: 2262 - DNA, 20 bp, Propionibacterium granulosum
gttgagcgtgctttcgatac

SEQ ID NO: 2263 - DNA, 20 bp, Bacteroides forsythus
aaatgagatacgtgtatttt

SEQ ID NO: 2264 - DNA, 20 bp, Granulicatella adiacens
cgaaccgcatggtttgaaga

SEQ ID NO: 2265 - DNA, 20 bp, Pediococcus acidilactici
tgcactgaatgagattttaa

SEQ ID NO: 2266 - DNA, 20 bp, Corynebacterium pilosum
ttggtacagcgcgcagcgag

SEQ ID NO: 2267 - DNA, 20 bp, Clostridium ramosum
aagtgttggatgtcaaagtt

SEQ ID NO: 2268 - DNA, 20 bp, Pediococcus dextrinicus
gccggtggagtaacccgtaa

SEQ ID NO: 2269 - DNA, 20 bp, Pediococcus damnosus
aagatgatttcaactataaa

SEQ ID NO: 2270 - DNA, 20 bp, Pediococcus dextrinicus
caactgatttaaaaataaac

SEQ ID NO: 2271 - DNA, 20 bp, Prevotella intermedia
atctgacgtggaccaaagat

SEQ ID NO: 2272 - DNA, 20 bp, Corynebacterium pilosum
cgcacaaagccagccgtagt

SEQ ID NO: 2273 - DNA, 20 bp, Neisseria gonorrhoeae
gccgttgccaatatcggcgg

SEQ ID NO: 2274 - DNA, 20 bp, Vibrio hollisae
ggcctcacgctattcgagcg

SEQ ID NO: 2275 - DNA, 20 bp, Granulicatella adiacens
ctgttagcgccttgacggta

SEQ ID NO: 2276 - DNA, 30 bp, Lactococcus garvieae
cgggtgagtaacgcgtgggaaatctgccga

SEQ ID NO: 2277 - DNA, 20 bp, Propionibacterium propionicus
actcagtgcttaacgctgag

SEQ ID NO: 2278 - DNA, 20 bp, Prevotella intermedia
gaaggcagcgtacgggagtg

SEQ ID NO: 2279 - DNA, 20 bp, Listeria welshimeri
aataagtggtggcgcatgcc

SEQ ID NO: 2280 - DNA, 20 bp, Prevotella corporis
ggctgtccgcatgcaagtgc

SEQ ID NO: 2281 - DNA, 20 bp, Alicyclobacillus acidocaldarius
ttattccggcctgaaaggca

SEQ ID NO: 2282 - DNA, 20 bp, Bacillus lentus
tcctggagaaaggttgaaag

SEQ ID NO: 2283 - DNA, 20 bp, Corynebacterium mycetoides
gagctgcatgttggtgtgtg

SEQ ID NO: 2284 - DNA, 20 bp, Porphyromonas maccae
caagtaccctatgaataagc

SEQ ID NO: 2285 - DNA, 20 bp, Prevotella intermedia
atacccgatgttgtccacat

SEQ ID NO: 2286 - DNA, 20 bp, Pediococcus dextrinicus
aaataaacgagtggcggacg

SEQ ID NO: 2287 - DNA, 20 bp, Propionibacterium avidum
tcagcaggggcgaagctttt

SEQ ID NO: 2288 - DNA, 20 bp, Corynebacterium cystitidis
cgtgtaaagccggtcgtagt

SEQ ID NO: 2289 - DNA, 20 bp, Actinomyces neuii
tacagagggttgctattccg

SEQ ID NO: 2290 - DNA, 20 bp, Corynebacterium pilosum
tttgttggaaagcctttggg

SEQ ID NO: 2291 - DNA, 20 bp, Kingella denitrificans
tatttgagcagccaatatct

SEQ ID NO: 2292 - DNA, 20 bp, Enterococcus dispar
cataatattaatgaactcat

SEQ ID NO: 2293 - DNA, 20 bp, Corynebacterium diphtheriae
ggaaagtttttcggtacgag

SEQ ID NO: 2294 - DNA, 20 bp, Enterobacter gergoviae
acggtagcagaaagaagctt

SEQ ID NO: 2295 - DNA, 20 bp, Propionibacterium granulosum
tttttgtgggggagctgtcg

SEQ ID NO: 2296 - DNA, 30 bp, Corynebacterium cystitidis
tgaggtggagctaatcgtgtaaagccggtc

SEQ ID NO: 2297 - DNA, 20 bp, Prevotella corporis
gaaggcatctgacgaggagc

SEQ ID NO: 2298 - DNA, 20 bp, Bacteroides forsythus
ggtagtcttgagtatagatg

SEQ ID NO: 2299 - DNA, 20 bp, Prevotella corporis
tatgtcctcctttgaaggca

SEQ ID NO: 2300 - DNA, 20 bp, Alicyclobacillus acidocaldarius
ccgaagagacccgctcgact

SEQ ID NO: 2301 - DNA, 20 bp, Pediococcus parvulus
taccgcataacaaagtaaac

SEQ ID NO: 2302 - DNA, 20 bp, Listeria grayi
gagcaggtttgaaaggcggc

SEQ ID NO: 2303 - DNA, 20 bp, Streptococcus hyointestinalis
cgcataagaggtaataacac

SEQ ID NO: 2304 - DNA, 20 bp, Bacteroides forsythus
gatacgtgtattttattgca

SEQ ID NO: 2305 - DNA, 20 bp, Lactococcus garvieae
aaattacttaagtgacggta

SEQ ID NO: 2306 - DNA, 20 bp, Propionibacterium propionicus
aagggttagcgaatctgtaa

SEQ ID NO: 2307 - DNA, 20 bp, Campylobacter curvus
tatactccgtatctatataa

SEQ ID NO: 2308 - DNA, 20 bp, Prevotella intermedia
ttacccttcgaataaggacc

SEQ ID NO: 2309 - DNA, 20 bp, Porphyromonas maccae
ttgaaatttagcggactatg

SEQ ID NO: 2310 - DNA, 20 bp, Paenibacillus larvae
tggtttcttcgcatgaagaa

SEQ ID NO: 2311 - DNA, 20 bp, Citrobacter amalonaticus
agcggggaggaagggtgaat

SEQ ID NO: 2312 - DNA, 20 bp, Granulicatella adiacens
gcaagcttctgctgatggat

SEQ ID NO: 2313 - DNA, 20 bp, Bacteroides forsythus
cctgcccgcaacagagggat

SEQ ID NO: 2314 - DNA, 20 bp, Propionibacterium propionicus
tgcttaacgctgagcctgct

SEQ ID NO: 2315 - DNA, 20 bp, Vibrio hollisae
agcggcagcgacatgaacaa

SEQ ID NO: 2316 - DNA, 20 bp, Bacteroides forsythus
cccgcaacagagggataacc

SEQ ID NO: 2317 - DNA, 20 bp, Vibrio hollisae
ctgttgggggttagaatccc

SEQ ID NO: 2318 - DNA, 20 bp, Prevotella corporis
cagcatgccggttgcttgca

SEQ ID NO: 2319 - DNA, 20 bp, Propionibacterium granulosum
gcctaacactttttgtgggg

SEQ ID NO: 2320 - DNA, 20 bp, Enterococcus raffinosus
gtcgaacgccttttctttca

SEQ ID NO: 2321 - DNA, 20 bp, Enterococcus cecorum
gcatggtagatggatgaaag

SEQ ID NO: 2322 - DNA, 30 bp, Brevibacillus laterosporus
cgtaaagttctgttgttagggaagaaacag

SEQ ID NO: 2323 - DNA, 20 bp, Pseudomonas luteola
tgcagctttgacgttaccag

SEQ ID NO: 2324 - DNA, 20 bp, Bacteroides forsythus
actaatacctcataaaacag

SEQ ID NO: 2325 - DNA, 20 bp, Serratia ficaria
cgatgtcttaatacggcagc

SEQ ID NO: 2326 - DNA, 20 bp, Paenibacillus larvae
cgaatcctcaaaagccgatc

SEQ ID NO: 2327 - DNA, 20 bp, Pediococcus dextrinicus
atagtgacggtatccaatca

SEQ ID NO: 2328 - DNA, 20 bp, Haemophilus ducreyi
caaaattgattgacgttagt

SEQ ID NO: 2329 - DNA, 20 bp, Prevotella corporis
tgaaaagcagcggcccaacc

SEQ ID NO: 2330 - DNA, 20 bp, Prevotella corporis
ggcgcgaactgcttggcttg

SEQ ID NO: 2331 - DNA, 20 bp, Prevotella intermedia
cctaatacccgatgttgtcc

SEQ ID NO: 2332 - DNA, 20 bp, Enterococcus raffinosus
tctacagtgaaagatggcct

SEQ ID NO: 2333 - DNA, 20 bp, Macrococcus caseolyticus
atctagcttcgcatgaagca

SEQ ID NO: 2334 - DNA, 20 bp, Pediococcus parvulus
ttgaatgaattagaggtgct

SEQ ID NO: 2335 - DNA, 20 bp, Haemophilus ducreyi
aatagcaaaattgattgacg

SEQ ID NO: 2336 - DNA, 30 bp, Listeria ivanovii
taccgaatgataagtagtgacgcatgtcat

SEQ ID NO: 2337 - DNA, 20 bp, Macrococcus caseolyticus
aacggacgagagtgcttgca

SEQ ID NO: 2338 - DNA, 20 bp, Pasteurella aerogenes
gagcgcagagatgtgcttgt

SEQ ID NO: 2339 - DNA, 20 bp, Neisseria gonorrhoeae
ctgttgccaatatcggcggc

SEQ ID NO: 2340 - DNA, 20 bp, Paenibacillus larvae
cagaggtgggcactctaaga

SEQ ID NO: 2341 - DNA, 20 bp, Staphylococcus warneri
aatagtgaaagacggccttg

SEQ ID NO: 2342 - DNA, 20 bp, Corynebacterium cystitidis
tagcttgctagggtgctcga

SEQ ID NO: 2343 - DNA, 20 bp, Propionibacterium propionicus
gtaagggttagcgaatctgt

SEQ ID NO: 2344 - DNA, 20 bp, Prevotella corporis
tgccggttgcttgcaaccgg

SEQ ID NO: 2345 - DNA, 20 bp, Prevotella corporis
gtcggtcacggatggggatg

SEQ ID NO: 2346 - DNA, 20 bp, Propionibacterium propionicus
atgttggggactcgttagag

SEQ ID NO: 2347 - DNA, 20 bp, Haemophilus ducreyi
ttgttaatagcaaaattgat

SEQ ID NO: 2348 - DNA, 20 bp, Clostridium ramosum
ctcaaagcactggtagagga

SEQ ID NO: 2349 - DNA, 30 bp, Enterococcus cecorum
cgagtcgcaaagccgcgaggctaagccaat

SEQ ID NO: 2350 - DNA, 20 bp, Alicyclobacillus acidocaldarius
ctccctttgttccgcccatt

SEQ ID NO: 2351 - DNA, 20 bp, Alicyclobacillus acidocaldarius
cgcatggggctttccatccc

SEQ ID NO: 2352 - DNA, 20 bp, Streptococcus equi
gaaagtccatcatgtgacgg

SEQ ID NO: 2353 - DNA, 20 bp, Porphyromonas maccae
actatcgggtaaagccgagg

SEQ ID NO: 2354 - DNA, 20 bp, Pediococcus dextrinicus
agatagtgacggtatccaat

SEQ ID NO: 2355 - DNA, 20 bp, Enterococcus dispar
tttattatttgaaaggcgct

SEQ ID NO: 2356 - DNA, 20 bp, Pediococcus parvulus
atggttgatttttaaaagat

SEQ ID NO: 2357 - DNA, 20 bp, Paenibacillus larvae
ggcaacctgtcacttacaga

SEQ ID NO: 2358 - DNA, 20 bp, Porphyromonas maccae
gttattgcatgatgattcaa

SEQ ID NO: 2359 - DNA, 20 bp, Pediococcus parvulus
atgattttagctataaagtg

SEQ ID NO: 2360 - DNA, 20 bp, Prevotella corporis
cttcccgcgaccaagggata

SEQ ID NO: 2361 - DNA, 20 bp, Lactococcus garvieae
cgtgggaaatctgccgagta

SEQ ID NO: 2362 - DNA, 20 bp, Vibrio hollisae
ttgggggttagaatccctgg

SEQ ID NO: 2363 - DNA, 20 bp, Bacillus badius
ggaagcttgcttccgttcaa

SEQ ID NO: 2364 - DNA, 20 bp, Propionibacterium avidum
cggataggaatccttgctgc

SEQ ID NO: 2365 - DNA, 20 bp, Prevotella intermedia
gatgttgtccacatatggca

SEQ ID NO: 2366 - DNA, 20 bp, Prevotella intermedia
tcatcggtggaggatgggga

SEQ ID NO: 2367 - DNA, 20 bp, Serratia ficaria
gaagggcgatgtcttaatac

SEQ ID NO: 2368 - DNA, 20 bp, Propionibacterium granulosum
aacactttttgtgggggagc

SEQ ID NO: 2369 - DNA, 20 bp, Clostridium ramosum
taaaggctccagagatggag

SEQ ID NO: 2370 - DNA, 20 bp, Alicyclobacillus acidocaldarius
tggggctttccatcccccat

SEQ ID NO: 2371 - DNA, 20 bp, Pediococcus dextrinicus
ctaatctctaaaagctagtc

SEQ ID NO: 2372 - DNA, 20 bp, Gemella haemolysans
taagcaaacctcacaaaact

SEQ ID NO: 2373 - DNA, 20 bp, Rothia mucilaginosa
gagtaacctacctttaactc

SEQ ID NO: 2374 - DNA, 20 bp, Prevotella oralis
tttatgcggggataaagttg

SEQ ID NO: 2375 - DNA, 20 bp, Propionibacterium propionicus
cctttaggcatcttttggtt

SEQ ID NO: 2376 - DNA, 20 bp, Corynebacterium cystitidis
gtgtgtgacggtacctagag

SEQ ID NO: 2377 - DNA, 20 bp, Corynebacterium pilosum
ggaaagcctttgggcggtat

SEQ ID NO: 2378 - DNA, 20 bp, Bacillus badius
cggacttgacggaagcttgc

SEQ ID NO: 2379 - DNA, 30 bp, Granulicatella adiacens
agagaagaacaagtgctagagtaactgtta

SEQ ID NO: 2380 - DNA, 20 bp, Prevotella intermedia
ttcatcggtggaggatgggg

SEQ ID NO: 2381 - DNA, 20 bp, Leuconostoc lactis
ttgaagcttctagagataga

SEQ ID NO: 2382 - DNA, 20 bp, Prevotella intermedia
cactcggggataccccgttg

SEQ ID NO: 2383 - DNA, 30 bp, Bacillus badius
caagtcgagcggacttgacggaagcttgct

SEQ ID NO: 2384 - DNA, 20 bp, Bacteroides forsythus
tggtagcaatacctgtcggc

SEQ ID NO: 2385 - DNA, 20 bp, Pediococcus pentosaceus
gacatcttctgacagtctaa

SEQ ID NO: 2386 - DNA, 20 bp, Bacillus lentus
tctcctggagaaaggttgaa

SEQ ID NO: 2387 - DNA, 20 bp, Prevotella intermedia
ttgcatttacccttcgaata

SEQ ID NO: 2388 - DNA, 20 bp, Bacillus azotoformans
ctcatggttcgaagataaaa

SEQ ID NO: 2389 - DNA, 20 bp, Bacteroides forsythus
aagccatcgatggttagggg

SEQ ID NO: 2390 - DNA, 20 bp, Lactococcus garvieae
tgagtgctagctgtagggag

SEQ ID NO: 2391 - DNA, 20 bp, Porphyromonas maccae
tcgggagtacctaaagcacg

SEQ ID NO: 2392 - DNA, 20 bp, Corynebacterium pilosum
gcacaaagccagccgtagtt

SEQ ID NO: 2393 - DNA, 20 bp, Bacteroides forsythus
ctggtagtcttgagtataga

SEQ ID NO: 2394 - DNA, 30 bp, Propionibacterium granulosum
tacaatggccggtacagtgagttgcgacat

SEQ ID NO: 2395 - DNA, 20 bp, Granulicatella adiacens
gcatggtttgaagaggaaaa

SEQ ID NO: 2396 - DNA, 20 bp, Pseudomonas citronellolis
ggagcttgcttctggattca

SEQ ID NO: 2397 - DNA, 20 bp, Bacteroides forsythus
gcgatggtagcaatacctgt

SEQ ID NO: 2398 - DNA, 20 bp, Enterococcus faecalis
aacagtttatgccgcatggc

SEQ ID NO: 2399 - DNA, 20 bp, Propionibacterium granulosum
tgcttaacgttgagcgtgct

SEQ ID NO: 2400 - DNA, 20 bp, Kingella denitrificans
tattggaatgtaccgagtag

SEQ ID NO: 2401 - DNA, 20 bp, Dermabacter hominis
tactggatatgaccttggcc

SEQ ID NO: 2402 - DNA, 20 bp, Propionibacterium propionicus
agcgaatctgtaaaagccgg

SEQ ID NO: 2403 - DNA, 20 bp, Enterococcus cecorum
ggcagatggatgaaaggcgc

SEQ ID NO: 2404 - DNA, 20 bp, Porphyromonas maccae
aaccacagtcttgccttcga

SEQ ID NO: 2405 - DNA, 20 bp, Enterococcus faecalis
agtttatgccgcatggcata

SEQ ID NO: 2406 - DNA, 30 bp, Pasteurella aerogenes
atttcagactgggcagctagagtattttag

SEQ ID NO: 2407 - DNA, 20 bp, Propionibacterium propionicus
gtcggtacagtcagttgcga

SEQ ID NO: 2408 - DNA, 20 bp, Clostridium ramosum
gagagatagctatatgagat

SEQ ID NO: 2409 - DNA, 20 bp, Prevotella corporis
agtcccctcgggactcctgt

SEQ ID NO: 2410 - DNA, 20 bp, Dermabacter hominis
ctggatatgaccttggcccg

SEQ ID NO: 2411 - DNA, 20 bp, Actinomyces neuii
cattggtgtctacagagggt

SEQ ID NO: 2412 - DNA, 20 bp, Enterococcus cecorum
gtagatggatgaaaggcgct

SEQ ID NO: 2413 - DNA, 20 bp, Pediococcus dextrinicus
ttttaatgaaggcggtgctt

SEQ ID NO: 2414 - DNA, 30 bp, Haemophilus ducreyi
ttaatagcaaaattgattgacgttagtcac

SEQ ID NO: 2415 - DNA, 20 bp, Pediococcus parvulus
aattagaggtgcttgcaccg

SEQ ID NO: 2416 - DNA, 20 bp, Prevotella intermedia
ggaggatggggatgcgtctg

SEQ ID NO: 2417 - DNA, 20 bp, Streptococcus hyointestinalis
atccatgtcgtgacggtatc

SEQ ID NO: 2418 - DNA, 30 bp, Vibrio hollisae
gcgtagttaatacctgcgttacttgacgtt

SEQ ID NO: 2419 - DNA, 20 bp, Prevotella corporis
agcagcggcccaaccgctgc

SEQ ID NO: 2420 - DNA, 20 bp, Enterococcus dispar
gggtaacctaccctcaagcg

SEQ ID NO: 2421 - DNA, 20 bp, Pediococcus dextrinicus
cgtatttggtagtaactggc

SEQ ID NO: 2422 - DNA, 20 bp, Vibrio hollisae
tacctgcgttacttgacgtt

SEQ ID NO: 2423 - DNA, 20 bp, Prevotella corporis
tgtcctcctttgaaggcatc

SEQ ID NO: 2424 - DNA, 20 bp, Brevibacillus laterosporus
ggatgctacttcgcgagaag

SEQ ID NO: 2425 - DNA, 20 bp, Dermabacter hominis
actcgaggcttaaccttggg

SEQ ID NO: 2426 - DNA, 20 bp, Propionibacterium propionicus
actcgttagagaccgccgag

SEQ ID NO: 2427 - DNA, 20 bp, Bacillus smithii
aacatcttccttcgcatgaa

SEQ ID NO: 2428 - DNA, 20 bp, Paenibacillus larvae
caatcctcaaaagccgatct

SEQ ID NO: 2429 - DNA, 20 bp, Campylobacter curvus
tcggtaatggatagggctat

SEQ ID NO: 2430 - DNA, 20 bp, Streptococcus uberis
atgtaccctatttaaaaggg

SEQ ID NO: 2431 - DNA, 20 bp, Prevotella corporis
catgccggttgcttgcaacc

SEQ ID NO: 2432 - DNA, 20 bp, Bacillus azotoformans
cgaacctcatggttcgaaga

SEQ ID NO: 2433 - DNA, 20 bp, Enterococcus raffinosus
tacagtgaaagatggccttg

SEQ ID NO: 2434 - DNA, 20 bp, Bacteroides forsythus
aaaatgagatacgtgtattt

SEQ ID NO: 2435 - DNA, 20 bp, Porphyromonas maccae
tcctgtcacaaggccgctaa

SEQ ID NO: 2436 - DNA, 20 bp, Pediococcus damnosus
ataataaaatgaaccgcatg

SEQ ID NO: 2437 - DNA, 20 bp, Pasteurella multocida
cgggggcgtttaccacggat

SEQ ID NO: 2438 - DNA, 20 bp, Rothia mucilaginosa
aggccggggcttaaccccgt

SEQ ID NO: 2439 - DNA, 20 bp, Macrococcus caseolyticus
tctagcttcgcatgaagcaa

SEQ ID NO: 2440 - DNA, 20 bp, Streptococcus hyointestinalis
gaaaatccatgtcgtgacgg

SEQ ID NO: 2441 - DNA, 30 bp, Propionibacterium propionicus
tacaatggtcggtacagtcagttgcgagcc

SEQ ID NO: 2442 - DNA, 30 bp, Propionibacterium granulosum
cgttgagcgtgctttcgatacgggttgact

SEQ ID NO: 2443 - DNA, 20 bp, Neisseria gonorrhoeae
acgttcatgtccgaaagcgt

SEQ ID NO: 2444 - DNA, 30 bp, Clostridium ramosum
tgcatggtgaccgtattaaaagtgcctcaa

SEQ ID NO: 2445 - DNA, 30 bp, Enterococcus faecalis
ttctttcctcccgagtgcttgcactcaatt

SEQ ID NO: 2446 - DNA, 20 bp, Neisseria elongata
gtttctgctgacggtaccta

SEQ ID NO: 2447 - DNA, 20 bp, Corynebacterium cystitidis
gtggaaaggttttgtgctgg

SEQ ID NO: 2448 - DNA, 20 bp, Bacteroides forsythus
cgaggggcagcgatggtagc

SEQ ID NO: 2449 - DNA, 20 bp, Neisseria elongata
gaagaaaaaggagcggttaa

SEQ ID NO: 2450 - DNA, 20 bp, Prevotella corporis
ccttatgtcctcctttgaag

SEQ ID NO: 2451 - DNA, 30 bp, Granulicatella adiacens
ttagagaagaacaagtgctagagtaactgt

SEQ ID NO: 2452 - DNA, 20 bp, Campylobacter lari
gcttgatatccaactaatct

SEQ ID NO: 2453 - DNA, 20 bp, Prevotella corporis
aggagaatgattcagagatg

SEQ ID NO: 2454 - DNA, 20 bp, Enterococcus cecorum
gcagatggatgaaaggcgct

SEQ ID NO: 2455 - DNA, 20 bp, Propionibacterium propionicus
gtgcttaacgctgagcctgc

SEQ ID NO: 2456 - DNA, 20 bp, Propionibacterium propionicus
gttagcgaatctgtaaaagc

SEQ ID NO: 2457 - DNA, 20 bp, Porphyromonas maccae
cctgtcacaaggccgctaag

SEQ ID NO: 2458 - DNA, 20 bp, Prevotella corporis
gatggatacccgctgtccgg

SEQ ID NO: 2459 - DNA, 20 bp, Listeria grayi
ggagcaggtttgaaaggcgg

SEQ ID NO: 2460 - DNA, 30 bp, Corynebacterium pilosum
tttgggcggtatgggatgagcttgcggcct

SEQ ID NO: 2461 - DNA, 20 bp, Pediococcus parvulus
gcaccgaagatgattttagc

SEQ ID NO: 2462 - DNA, 20 bp, Pediococcus damnosus
tcgttgattgaattagagat

SEQ ID NO: 2463 - DNA, 20 bp, Pasteurella aerogenes
gacgaaagaccgggaccgca

SEQ ID NO: 2464 - DNA, 20 bp, Haemophilus ducreyi
ggggttggtctttaagactg

SEQ ID NO: 2465 - DNA, 20 bp, Pasteurella aerogenes
gagacgaaagaccgggaccg

SEQ ID NO: 2466 - DNA, 20 bp, Propionibacterium avidum
taggaatccttgctgcatgg

SEQ ID NO: 2467 - DNA, 20 bp, Prevotella intermedia
tggcggacttgagtgcacgc

SEQ ID NO: 2468 - DNA, 20 bp, Granulicatella adiacens
ctagagtaactgttagcgcc

SEQ ID NO: 2469 - DNA, 30 bp, Streptococcus porcinus
ggtgcttgcaccagtctaatgagttgcgaa

SEQ ID NO: 2470 - DNA, 30 bp, Bacteroides ovatus
ggcagcattttagtttgcttgcaaactgaa

SEQ ID NO: 2471 - DNA, 20 bp, Porphyromonas maccae
gtttggcttgagtatagatg

SEQ ID NO: 2472 - DNA, 20 bp, Enterococcus faecalis
aagagtgaaaggcgctttcg

SEQ ID NO: 2473 - DNA, 20 bp, Prevotella intermedia
agattcatcggtggaggatg

SEQ ID NO: 2474 - DNA, 20 bp, Corynebacterium diphtheriae
cctagcttgctaggtactcg

SEQ ID NO: 2475 - DNA, 20 bp, Comamonas terrigena
aggttgaaagcaggggatcg

SEQ ID NO: 2476 - DNA, 20 bp, Corynebacterium cystitidis
tggaaaggttttgtgctggt

SEQ ID NO: 2477 - DNA, 20 bp, Porphyromonas maccae
ccacgttgtcagttactatc

SEQ ID NO: 2478 - DNA, 20 bp, Prevotella corporis
cacagagggctgtccgcatg

SEQ ID NO: 2479 - DNA, 20 bp, Corynebacterium pilosum
acttccacgttttctgtgcc

SEQ ID NO: 2480 - DNA, 20 bp, Pediococcus dextrinicus
gcaccaactgatttaaaaat

SEQ ID NO: 2481 - DNA, 20 bp, Pediococcus parvulus
accgcatggttgatttttaa

SEQ ID NO: 2482 - DNA, 20 bp, Lactococcus lactis
tgtatgcattggaaactggt

SEQ ID NO: 2483 - DNA, 20 bp, Bacteroides forsythus
tggtagtcttgagtatagat

SEQ ID NO: 2484 - DNA, 20 bp, Corynebacterium pilosum
taatcgcacaaagccagccg

SEQ ID NO: 2485 - DNA, 20 bp, Granulicatella adiacens
tggtttgaagaggaaaagag

SEQ ID NO: 2486 - DNA, 20 bp, Bacillus azotoformans
agaacaagtaccagttaact

SEQ ID NO: 2487 - DNA, 20 bp, Brevibacillus laterosporus
tcgcctgaagcgaaacggaa

SEQ ID NO: 2488 - DNA, 20 bp, Bacteroides forsythus
gagctttcttcccttcgggg

SEQ ID NO: 2489 - DNA, 20 bp, Bacillus badius
gtcgagcggacttgacggaa

SEQ ID NO: 2490 - DNA, 20 bp, Clostridium ramosum
tgaccgtattaaaagtgcct

SEQ ID NO: 2491 - DNA, 20 bp, Pediococcus dextrinicus
aaaaataaacgagtggcgga

SEQ ID NO: 2492 - DNA, 20 bp, Porphyromonas maccae
accttatggtcttgggttat

SEQ ID NO: 2493 - DNA, 30 bp, Lactococcus lactis
ggagttgggagtacccgaagtaggttgcct

SEQ ID NO: 2494 - DNA, 20 bp, Pediococcus dextrinicus
attaaaaaccacatggtttt

SEQ ID NO: 2495 - DNA, 20 bp, Porphyromonas maccae
ggtggcctgataagtcgggg

SEQ ID NO: 2496 - DNA, 20 bp, Corynebacterium mycetoides
gctgcatgttggtgtgtggt

SEQ ID NO: 2497 - DNA, 20 bp, Corynebacterium pilosum
aatcgcacaaagccagccgt

SEQ ID NO: 2498 - DNA, 30 bp, Corynebacterium cystitidis
ctctagcttgctagggtgctcgagtggcga

SEQ ID NO: 2499 - DNA, 20 bp, Neisseria gonorrhoeae
ggaacgtaccgggtagcggg

SEQ ID NO: 2500 - DNA, 20 bp, Streptococcus hyointestinalis
gagaagaacggatgtgggag

SEQ ID NO: 2501 - DNA, 20 bp, Clostridium ramosum
gcggctacaggaaatggtag

SEQ ID NO: 2502 - DNA, 20 bp, Propionibacterium propionicus
taataccggatattcagacc

SEQ ID NO: 2503 - DNA, 20 bp, Pasteurella aerogenes
tgtcgagagacgaaagaccg

SEQ ID NO: 2504 - DNA, 30 bp, Corynebacterium urealyticum
agccttcgggtgacggtacctggataagaa

SEQ ID NO: 2505 - DNA, 30 bp, Serratia rubidaea
gaacctgcgaaggcaagcggacctcataaa

SEQ ID NO: 2506 - DNA, 20 bp, Porphyromonas maccae
tgcctgatagaaagggataa

SEQ ID NO: 2507 - DNA, 20 bp, Macrococcus caseolyticus
tcgagcgaacggacgagagt

SEQ ID NO: 2508 - DNA, 20 bp, Kingella denitrificans
accttgcgctatttgagcag

SEQ ID NO: 2509 - DNA, 20 bp, Fusobacterium mortiferum
aatggtatataagagcggca

SEQ ID NO: 2510 - DNA, 20 bp, Haemophilus ducreyi
gttttgttaatagcaaaatt

SEQ ID NO: 2511 - DNA, 20 bp, Prevotella corporis
tcccgcgaccaagggataac

SEQ ID NO: 2512 - DNA, 20 bp, Pediococcus dextrinicus
aatattaaaaaccacatggt

SEQ ID NO: 2513 - DNA, 20 bp, Moraxella bovis
tgacataccaagaattcgct

SEQ ID NO: 2514 - DNA, 20 bp, Macrococcus caseolyticus
gaagcaatagtgaaagacgg

SEQ ID NO: 2515 - DNA, 20 bp, Kocuria rosea
aatactggatactacctctt

SEQ ID NO: 2516 - DNA, 20 bp, Bacillus smithii
gataacatcttccttcgcat

SEQ ID NO: 2517 - DNA, 20 bp, Streptococcus equi
ggaaagtccatcatgtgacg

SEQ ID NO: 2518 - DNA, 20 bp, Vibrio hollisae
cgtcggaacgtgccgagtag

SEQ ID NO: 2519 - DNA, 20 bp, Propionibacterium granulosum
tcgggagcttccagagatgg

SEQ ID NO: 2520 - DNA, 20 bp, Campylobacter curvus
taacttgcccattactaagg

SEQ ID NO: 2521 - DNA, 20 bp, Macrococcus caseolyticus
acggacgagagtgcttgcac

SEQ ID NO: 2522 - DNA, 20 bp, Porphyromonas maccae
ttgggttattgcatgatgat

SEQ ID NO: 2523 - DNA, 20 bp, Bacteroides forsythus
gtagcaatacctgtcggcga

SEQ ID NO: 2524 - DNA, 30 bp, Listeria ivanovii
cactttgaaagatggtttcggctatcgctt

SEQ ID NO: 2525 - DNA, 20 bp, Bacteroides forsythus
gtcgaggggcagcgatggta

SEQ ID NO: 2526 - DNA, 20 bp, Pediococcus pentosaceus
tatgacgtacttgtactgat

SEQ ID NO: 2527 - DNA, 20 bp, Prevotella corporis
cttgcaaccggtgatggcga

SEQ ID NO: 2528 - DNA, 20 bp, Vibrio hollisae
tgttgggggttagaatccct

SEQ ID NO: 2529 - DNA, 20 bp, Serratia ficaria
acggcagcgcattgacgtta

SEQ ID NO: 2530 - DNA, 30 bp, Clostridium ramosum
catactcataaaggctccagagatggagag

SEQ ID NO: 2531 - DNA, 20 bp, Porphyromonas maccae
tggcctgataagtcgggggt

SEQ ID NO: 2532 - DNA, 20 bp, Paenibacillus larvae
tgccagcacgcagaggtggg

SEQ ID NO: 2533 - DNA, 20 bp, Prevotella corporis
gccggaagcgggcggaattc

SEQ ID NO: 2534 - DNA, 30 bp, Corynebacterium urealyticum
tgccagcacgttgtggtggggactcacaag

SEQ ID NO: 2535 - DNA, 20 bp, Neisseria gonorrhoeae
aggccgttgccaatatcggc

SEQ ID NO: 2536 - DNA, 20 bp, Pasteurella aerogenes
gagcgacgagaccgcgaggt

SEQ ID NO: 2537 - DNA, 20 bp, Prevotella corporis
cgccgtgcaagcgtgccgtg

SEQ ID NO: 2538 - DNA, 20 bp, Campylobacter rectus
gagatgatcagtcacactgg

SEQ ID NO: 2539 - DNA, 20 bp, Bacteroides ovatus
tgccgataactccggaatag

SEQ ID NO: 2540 - DNA, 20 bp, Neisseria gonorrhoeae
ctggttttgacatgtgcgga

SEQ ID NO: 2541 - DNA, 20 bp, Streptococcus agalactiae
ttagagaagaacgttggtag

SEQ ID NO: 2542 - DNA, 30 bp, Streptococcus porcinus
agaacgcagaggacaggtgcttgcaccagt

SEQ ID NO: 2543 - DNA, 20 bp, Enterococcus dispar
gtttattatttgaaaggcgc

SEQ ID NO: 2544 - DNA, 30 bp, Pediococcus pentosaceus
tcttgacatcttctgacagtctaagagatt

SEQ ID NO: 2545 - DNA, 20 bp, Porphyromonas maccae
ggcgtgtcagggtaataccg

SEQ ID NO: 2546 - DNA, 20 bp, Listeria grayi
ctcctttggtcgttagtggc

SEQ ID NO: 2547 - DNA, 20 bp, Prevotella corporis
caaccttcccgcgaccaagg

SEQ ID NO: 2548 - DNA, 30 bp, Clostridium difficile
gtagtacagagggttgccaagccgtaaggt

SEQ ID NO: 2549 - DNA, 20 bp, Enterococcus dispar
ttattaattgaaaggcgctt

SEQ ID NO: 2550 - DNA, 20 bp, Prevotella corporis
cgaccaagggataacctgcc

SEQ ID NO: 2551 - DNA, 20 bp, Bacteroides forsythus
tttattgcatgtaccttgtg

SEQ ID NO: 2552 - DNA, 20 bp, Prevotella corporis
cctcctttgaaggcatctga

SEQ ID NO: 2553 - DNA, 20 bp, Bacillus badius
tgacggaagcttgcttccgt

SEQ ID NO: 2554 - DNA, 30 bp, Kingella denitrificans
ggtcttgacatgtacggaagaactcagaga

SEQ ID NO: 2555 - DNA, 20 bp, Campylobacter curvus
tactaagggacaacagttgg

SEQ ID NO: 2556 - DNA, 30 bp, Aneurinibacillus aneurinilyticus
acgtttttcagaccgcatggtctgaaagag

SEQ ID NO: 2557 - DNA, 20 bp, Fusobacterium mortiferum
gagcggcatcgtttttatat

SEQ ID NO: 2558 - DNA, 20 bp, Pediococcus dextrinicus
ggtagtaactggccagatag

SEQ ID NO: 2559 - DNA, 20 bp, Neisseria gonorrhoeae
taccgggtagcgggggataa

SEQ ID NO: 2560 - DNA, 20 bp, Bacteroides forsythus
agccatcgatggttaggggt

SEQ ID NO: 2561 - DNA, 20 bp, Porphyromonas maccae
attgaaatttagcggactat

SEQ ID NO: 2562 - DNA, 30 bp, Serratia ficaria
gaagggcgatgtcttaatacggcagcgcat

SEQ ID NO: 2563 - DNA, 20 bp, Pasteurella aerogenes
acatccagagaagagcgcag

SEQ ID NO: 2564 - DNA, 20 bp, Campylobacter curvus
acgggaaagtttttcggtaa

SEQ ID NO: 2565 - DNA, 20 bp, Corynebacterium mycetoides
cggataggagctgcatgttg

SEQ ID NO: 2566 - DNA, 20 bp, Corynebacterium accolens
catgacatttacttaaaagg

SEQ ID NO: 2567 - DNA, 20 bp, Porphyromonas maccae
ggactatgtatgaaagtaca

SEQ ID NO: 2568 - DNA, 20 bp, Prevotella corporis
tgcaagcgtgccgtgaaaag

SEQ ID NO: 2569 - DNA, 20 bp, Corynebacterium pilosum
aggcctttgggcggtatggg

SEQ ID NO: 2570 - DNA, 20 bp, Propionibacterium granulosum
ccggcggttgtggatggact

SEQ ID NO: 2571 - DNA, 20 bp, Pediococcus damnosus
aaatgaaccgcatggtttat

SEQ ID NO: 2572 - DNA, 20 bp, Eubacterium moniliforme
atagagatatatgttccctt

SEQ ID NO: 2573 - DNA, 30 bp, Serratia ficaria
actttcagcgaggaggaagggcgatgtctt

SEQ ID NO: 2574 - DNA, 20 bp, Paenibacillus larvae
cgcagaggtgggcactctaa

SEQ ID NO: 2575 - DNA, 20 bp, Corynebacterium diphtheriae
gcctagcttgctaggtactc

SEQ ID NO: 2576 - DNA, 20 bp, Pediococcus dextrinicus
tcgaacgagtttgcttttaa

SEQ ID NO: 2577 - DNA, 30 bp, Kingella denitrificans
gtaacatattggaatgtaccgagtagtggg

SEQ ID NO: 2578 - DNA, 20 bp, Neisseria gonorrhoeae
ccaatatcggcggccgatga

SEQ ID NO: 2579 - DNA, 20 bp, Lactococcus garvieae
ataacaatgagaatcgcatg

SEQ ID NO: 2580 - DNA, 30 bp, Aerococcus urinae
aagacggctttgctgtcacttatcgatggc

SEQ ID NO: 2581 - DNA, 20 bp, Propionibacterium granulosum
gcccacaactttgggataac

SEQ ID NO: 2582 - DNA, 20 bp, Fusobacterium mortiferum
agaggttaccttcgggtaac

SEQ ID NO: 2583 - DNA, 20 bp, Pediococcus parvulus
tggttgatttttaaaagatg

SEQ ID NO: 2584 - DNA, 20 bp, Prevotella corporis
ggcccgtacggtctgggcgg

SEQ ID NO: 2585 - DNA, 20 bp, Clostridium ramosum
ggctccagagatggagagat

SEQ ID NO: 2586 - DNA, 20 bp, Pasteurella aerogenes
ccagagaagagcgcagagat

SEQ ID NO: 2587 - DNA, 20 bp, Bacteroides forsythus
tcgaggggcagcgatggtag

SEQ ID NO: 2588 - DNA, 20 bp, Listeria grayi
catggagcgggtttgaaagg

SEQ ID NO: 2589 - DNA, 20 bp, Kocuria rosea
aactgacgagagtgcttgca

SEQ ID NO: 2590 - DNA, 20 bp, Prevotella intermedia
tgttggggagtaaagcgggg

SEQ ID NO: 2591 - DNA, 20 bp, Prevotella intermedia
accttccctccactcgggga

SEQ ID NO: 2592 - DNA, 20 bp, Propionibacterium propionicus
agacctttaggcatcttttg

SEQ ID NO: 2593 - DNA, 20 bp, Clostridium ramosum
tagacagggggataactatt

SEQ ID NO: 2594 - DNA, 20 bp, Clostridium ramosum
taaaagtgcctcaaagcact

SEQ ID NO: 2595 - DNA, 20 bp, Prevotella corporis
gggctgtccgcatgcaagtg

SEQ ID NO: 2596 - DNA, 20 bp, Alicyclobacillus acidocaldarius
gggctttccatcccccatgc

SEQ ID NO: 2597 - DNA, 20 bp, Granulicatella adiacens
gaagaggaaaagaggcgcaa

SEQ ID NO: 2598 - DNA, 20 bp, Paenibacillus macerans
caagtcttccgcatgggaga

SEQ ID NO: 2599 - DNA, 20 bp, Prevotella corporis
gtgaaaagcagcggcccaac

SEQ ID NO: 2600 - DNA, 20 bp, Haemophilus actinemycetemcomitans
gcccaagtgtgattaggtag

SEQ ID NO: 2601 - DNA, 20 bp, Bacteroides forsythus
taggtgggctgttaagtccg

SEQ ID NO: 2602 - DNA, 20 bp, Listeria grayi
ctccgcatggagcaggtttg

SEQ ID NO: 2603 - DNA, 20 bp, Propionibacterium granulosum
ctaacactttttgtggggga

SEQ ID NO: 2604 - DNA, 20 bp, Corynebacterium cystitidis
gggggcgctaggtgtgagat

SEQ ID NO: 2605 - DNA, 20 bp, Corynebacterium pilosum
ttgttggaaagcctttgggc

SEQ ID NO: 2606 - DNA, 20 bp, Pediococcus dextrinicus
taaaagtaaacgagtggcgg

SEQ ID NO: 2607 - DNA, 20 bp, Porphyromonas maccae
taaagcacgtaaccgcgagg

SEQ ID NO: 2608 - DNA, 20 bp, Corynebacterium cystitidis
gaaaggttttgtgctggtat

SEQ ID NO: 2609 - DNA, 20 bp, Paenibacillus macerans
agacttgggaaaggcggagc

SEQ ID NO: 2610 - DNA, 20 bp, Propionibacterium granulosum
aactttgggataacgctagg

SEQ ID NO: 2611 - DNA, 20 bp, Enterococcus dispar
taccgcataatattaatgaa

SEQ ID NO: 2612 - DNA, 20 bp, Porphyromonas maccae
taaccgcgaggggcgtgtca

SEQ ID NO: 2613 - DNA, 20 bp, Listeria welshimeri
ctaataccgaataataagtg

SEQ ID NO: 2614 - DNA, 20 bp, Listeria welshimeri
tggtggcgcatgccacggct

SEQ ID NO: 2615 - DNA, 20 bp, Lactococcus garvieae
aagatagcttgctattttta

SEQ ID NO: 2616 - DNA, 20 bp, Bacillus badius
aagcttgcttccgttcaagt

SEQ ID NO: 2617 - DNA, 30 bp, Listeria innocua
atagagtgtggcgcatgccacgctcttgaa

SEQ ID NO: 2618 - DNA, 20 bp, Macrococcus caseolyticus
gataatatttagcttcgcat

SEQ ID NO: 2619 - DNA, 20 bp, Haemophilus ducreyi
gttaatagcaaaattgattg

SEQ ID NO: 2620 - DNA, 20 bp, Prevotella corporis
aagcgtgccgtgaaaagcag

SEQ ID NO: 2621 - DNA, 20 bp, Fusobacterium mortiferum
atgcttttgtgccccttcgg

SEQ ID NO: 2622 - DNA, 20 bp, Streptococcus hyointestinalis
tgggagtggaaaatccatgt

SEQ ID NO: 2623 - DNA, 20 bp, Prevotella intermedia
ttgcagacgcaggatacaga

SEQ ID NO: 2624 - DNA, 20 bp, Corynebacterium pilosum
tcgcacaaagccagccgtag

SEQ ID NO: 2625 - DNA, 30 bp, Clostridium ramosum
acctgccctagacagggggataactattgg

SEQ ID NO: 2626 - DNA, 30 bp, Enterococcus cecorum
catggtagatggatgaaaggcgcttttgcg

SEQ ID NO: 2627 - DNA, 20 bp, Vibrio hollisae
gtagttaatacctgcgttac

SEQ ID NO: 2628 - DNA, 30 bp, Neisseria gonorrhoeae
cttacctggttttgacatgtgcggaatcct

SEQ ID NO: 2629 - DNA, 20 bp, Bacteroides forsythus
cgacggagagtgagagcttt

SEQ ID NO: 2630 - DNA, 20 bp, Pediococcus dextrinicus
gagtaacccgtaagggagct

SEQ ID NO: 2631 - DNA, 20 bp, Propionibacterium propionicus
gtgtaaactcagtgcttaac

SEQ ID NO: 2632 - DNA, 20 bp, Prevotella intermedia
gacgtggaccaaagattcat

SEQ ID NO: 2633 - DNA, 20 bp, Corynebacterium cystitidis
ggctctagcttgctagggtg

SEQ ID NO: 2634 - DNA, 20 bp, Streptococcus porcinus
agaggacaggtgcttgcacc

SEQ ID NO: 2635 - DNA, 20 bp, Prevotella buccae
agagatgatgaagtccctcg

SEQ ID NO: 2636 - DNA, 20 bp, Pediococcus dextrinicus
cttgcaccaactgatttaaa

SEQ ID NO: 2637 - DNA, 20 bp, Kocuria rosea
ctggatactacctcttaccg

SEQ ID NO: 2638 - DNA, 20 bp, Prevotella intermedia
atgttgtccacatatggcat

SEQ ID NO: 2639 - DNA, 20 bp, Alicyclobacillus acidocaldarius
cgctggcctccgaagagacc

SEQ ID NO: 2640 - DNA, 20 bp, Leuconostoc argentinum
gaaatgctagaatagggaat

SEQ ID NO: 2641 - DNA, 20 bp, Actinomyces neuii
gtgtctacagagggttgcta

SEQ ID NO: 2642 - DNA, 20 bp, Aerococcus urinae
gctaataccgcataggaaag

SEQ ID NO: 2643 - DNA, 20 bp, Porphyromonas maccae
catgatgattcaagtaaaga

SEQ ID NO: 2644 - DNA, 20 bp, Streptococcus porcinus
gtagaacgcagaggacaggt

SEQ ID NO: 2645 - DNA, 20 bp, Granulicatella adiacens
aaaagaggcgcaagcttctg

SEQ ID NO: 2646 - DNA, 20 bp, Kocuria rosea
tactggatactacctcttac

SEQ ID NO: 2647 - DNA, 20 bp, Paenibacillus macerans
accggataatcaagtcttcc

SEQ ID NO: 2648 - DNA, 20 bp, Porphyromonas maccae
tggcttgagtatagatgaag

SEQ ID NO: 2649 - DNA, 20 bp, Porphyromonas maccae
ccgggattgaaatttagcgg

SEQ ID NO: 2650 - DNA, 20 bp, Paenibacillus larvae
cgccaggttagcggcggacg

SEQ ID NO: 2651 - DNA, 20 bp, Propionibacterium granulosum
tgagttgcgacatcgtaagg

SEQ ID NO: 2652 - DNA, 20 bp, Prevotella corporis
accttatgtcctcctttgaa

SEQ ID NO: 2653 - DNA, 20 bp, Lactococcus garvieae
ctgccgagtagcgggggaca

SEQ ID NO: 2654 - DNA, 20 bp, Clostridium ramosum
ccagagatggagagatagct

SEQ ID NO: 2655 - DNA, 20 bp, Propionibacterium granulosum
tggcctaacactttttgtgg

SEQ ID NO: 2656 - DNA, 20 bp, Porphyromonas maccae
gtcgggagtacctaaagcac

SEQ ID NO: 2657 - DNA, 20 bp, Prevotella corporis
gatccgtcggtcacggatgg

SEQ ID NO: 2658 - DNA, 20 bp, Propionibacterium propionicus
acagtcagttgcgagcctgt

SEQ ID NO: 2659 - DNA, 20 bp, Paenibacillus larvae
ccagcacgcagaggtgggca

SEQ ID NO: 2660 - DNA, 20 bp, Enterobacter gergoviae
ttaataacctcattcattga

SEQ ID NO: 2661 - DNA, 20 bp, Corynebacterium pilosum
atggttggtacagcgcgcag

SEQ ID NO: 2662 - DNA, 20 bp, Pediococcus acidilactici
ggacgtgcttgcactgaatg

SEQ ID NO: 2663 - DNA, 20 bp, Bacteroides forsythus
tacaggggaataaaatgaga

SEQ ID NO: 2664 - DNA, 20 bp, Prevotella intermedia
taggtgctcaacatctacct

SEQ ID NO: 2665 - DNA, 20 bp, Neisseria elongata
gggaagaaaaaggagcggtt

SEQ ID NO: 2666 - DNA, 20 bp, Porphyromonas maccae
ttatgactgacactgaagca

SEQ ID NO: 2667 - DNA, 20 bp, Clostridium ramosum
ggaaatggtagccgagtgac

SEQ ID NO: 2668 - DNA, 20 bp, Prevotella corporis
tatgcggggataaagttgcc

SEQ ID NO: 2669 - DNA, 20 bp, Serratia ficaria
gcgatgtcttaatacggcag

SEQ ID NO: 2670 - DNA, 20 bp, Streptococcus porcinus
gtgcttgcaccagtctaatg

SEQ ID NO: 2671 - DNA, 20 bp, Paenibacillus larvae
gtttcttcgcatgaagaagt

SEQ ID NO: 2672 - DNA, 20 bp, Vibrio hollisae
gtcggaacgtgccgagtagt

SEQ ID NO: 2673 - DNA, 20 bp, Lactococcus garvieae
ctatttttatgaagagcggc

SEQ ID NO: 2674 - DNA, 20 bp, Pediococcus dextrinicus
tgcaccaactgatttaaaaa

SEQ ID NO: 2675 - DNA, 20 bp, Fusobacterium mortiferum
ttaccttcgggtaaccaaaa

SEQ ID NO: 2676 - DNA, 20 bp, Haemophilus ducreyi
aggcagttttgttaatagca

SEQ ID NO: 2677 - DNA, 20 bp, Enterococcus faecalis
tttatgccgcatggcataag

SEQ ID NO: 2678 - DNA, 20 bp, Listeria grayi
agcaggtttgaaaggcggct

SEQ ID NO: 2679 - DNA, 20 bp, Prevotella intermedia
gtaaagcggggcacgtgtgc

SEQ ID NO: 2680 - DNA, 20 bp, Bacillus azotoformans
cctcatggttcgaagataaa

SEQ ID NO: 2681 - DNA, 20 bp, Prevotella intermedia
cttccctccactcggggata

SEQ ID NO: 2682 - DNA, 20 bp, Aerococcus urinae
cgaccttgtgaaagcaagcg

SEQ ID NO: 2683 - DNA, 20 bp, Corynebacterium pilosum
agccgtagttcggattgggg

SEQ ID NO: 2684 - DNA, 20 bp, Pediococcus dextrinicus
tatttggtagtaactggcca

SEQ ID NO: 2685 - DNA, 20 bp, Corynebacterium cystitidis
gacatacactggatcgccat

SEQ ID NO: 2686 - DNA, 20 bp, Kocuria rosea
tacctcttaccgcatggtgg

SEQ ID NO: 2687 - DNA, 20 bp, Alicyclobacillus acidocaldarius
catcccccatgccgctctcc

SEQ ID NO: 2688 - DNA, 30 bp, Streptococcus equi
ctctgttgttagagaagaacagtgatggga

SEQ ID NO: 2689 - DNA, 20 bp, Propionibacterium propionicus
attcagacctttaggcatct

SEQ ID NO: 2690 - DNA, 20 bp, Paenibacillus alvei
tgaatgaccgctctagagat

SEQ ID NO: 2691 - DNA, 20 bp, Vibrio hollisae
tctagaaccgtggctttcgg

SEQ ID NO: 2692 - DNA, 20 bp, Campylobacter curvus
atactccgtatctatataag

SEQ ID NO: 2693 - DNA, 20 bp, Bacteroides forsythus
ctcataaaacaggggttccg

SEQ ID NO: 2694 - DNA, 20 bp, Propionibacterium propionicus
aaatataccggaaacgtcta

SEQ ID NO: 2695 - DNA, 20 bp, Paenibacillus alvei
atctgaatgaccgctctaga

SEQ ID NO: 2696 - DNA, 20 bp, Moraxella bovis
tcttgacataccaagaattc

SEQ ID NO: 2697 - DNA, 20 bp, Pasteurella aerogenes
agacgaaagaccgggaccgc

SEQ ID NO: 2698 - DNA, 30 bp, Bacillus azotoformans
aagataaaagatggtttcggctatcactta

SEQ ID NO: 2699 - DNA, 20 bp, Porphyromonas gingivalis
gaaggaagacagtcctaagg

SEQ ID NO: 2700 - DNA, 30 bp, Granulicatella adiacens
atgctaaaaccgcataggtcttcgaaccgc

SEQ ID NO: 2701 - DNA, 20 bp, Enterococcus raffinosus
acagtgaaagatggccttgc

SEQ ID NO: 2702 - DNA, 20 bp, Alicyclobacillus acidocaldarius
tgagggtgtcagagggatgt

SEQ ID NO: 2703 - DNA, 20 bp, Prevotella corporis
tacggtctgggcggccaagc

SEQ ID NO: 2704 - DNA, 20 bp, Neisseria gonorrhoeae
ttgacatgtgcggaatcctc

SEQ ID NO: 2705 - DNA, 20 bp, Lactococcus garvieae
acgttaagtagagtggaaaa

SEQ ID NO: 2706 - DNA, 20 bp, Macrococcus caseolyticus
gagtgcttgcactctctgac

SEQ ID NO: 2707 - DNA, 20 bp, Prevotella corporis
gatacccgctgtccggcccg

SEQ ID NO: 2708 - DNA, 20 bp, Kingella denitrificans
tgtacggaagaactcagaga

SEQ ID NO: 2709 - DNA, 20 bp, Streptococcus hyointestinalis
ataccgcataagaggtaata

SEQ ID NO: 2710 - DNA, 20 bp, Porphyromonas maccae
gtaaagccgaggactctgac

SEQ ID NO: 2711 - DNA, 20 bp, Bacillus azotoformans
cttcgaacctcatggttcga

SEQ ID NO: 2712 - DNA, 20 bp, Dermabacter hominis
actggatatgaccttggccc

SEQ ID NO: 2713 - DNA, 20 bp, Macrococcus caseolyticus
accggataatatctagcttc

SEQ ID NO: 2714 - DNA, 20 bp, Corynebacterium renale
ttttgcggtacgggatgagc

SEQ ID NO: 2715 - DNA, 20 bp, Pediococcus pentosaceus
ctgacagtctaagagattag

SEQ ID NO: 2716 - DNA, 20 bp, Fusobacterium necrophorum
ggttttttcgcatggaggaa

SEQ ID NO: 2717 - DNA, 20 bp, Propionibacterium granulosum
cgtcggaagtggaaacttga

SEQ ID NO: 2718 - DNA, 20 bp, Porphyromonas maccae
agttatgactgacactgaag

SEQ ID NO: 2719 - DNA, 20 bp, Enterococcus dispar
aactcatgtttattaattga

SEQ ID NO: 2720 - DNA, 30 bp, Pediococcus pentosaceus
tactgattgagattttaacacgaagtgagt

SEQ ID NO: 2721 - DNA, 20 bp, Pediococcus damnosus
gttgattgaattagagatgc

SEQ ID NO: 2722 - DNA, 20 bp, Listeria ivanovii
cactttgaaagatggtttcg

SEQ ID NO: 2723 - DNA, 20 bp, Vibrio hollisae
gaggtagaaagtgggggacc

SEQ ID NO: 2724 - DNA, 20 bp, Haemophilus actinemycetemcomitans
agcccaagtgtgattaggta

SEQ ID NO: 2725 - DNA, 20 bp, Listeria grayi
gcttgctcctttggtcgtta

SEQ ID NO: 2726 - DNA, 20 bp, Listeria welshimeri
taagtggtggcgcatgccac

SEQ ID NO: 2727 - DNA, 30 bp, Vibrio metschnikovii
atggcgcatacagagggcggcgagctagcg

SEQ ID NO: 2728 - DNA, 20 bp, Actinomyces neuii
gcatcttggttcggatcgca

SEQ ID NO: 2729 - DNA, 20 bp, Bacillus badius
ccgttcaagttagcggcgga

SEQ ID NO: 2730 - DNA, 20 bp, Macrococcus caseolyticus
taatatttagcttcgcatga

SEQ ID NO: 2731 - DNA, 20 bp, Bacillus badius
gacggaagcttgcttccgtt

SEQ ID NO: 2732 - DNA, 20 bp, Moraxella bovis
ataccaagaattcgctagag

SEQ ID NO: 2733 - DNA, 20 bp, Vibrio hollisae
ggggttagaatccctggtag

SEQ ID NO: 2734 - DNA, 20 bp, Bacillus badius
gacttgacggaagcttgctt

SEQ ID NO: 2735 - DNA, 20 bp, Haemophilus ducreyi
ttgggggttggtctttaaga

SEQ ID NO: 2736 - DNA, 30 bp, Vibrio hollisae
tggaggctgtggtctagaaccgtggctttc

SEQ ID NO: 2737 - DNA, 20 bp, Dermabacter hominis
gatatgaccttggcccgcat

SEQ ID NO: 2738 - DNA, 20 bp, Pediococcus parvulus
ttcgttgaatgaattagagg

SEQ ID NO: 2739 - DNA, 20 bp, Prevotella intermedia
caaagattcatcggtggagg

SEQ ID NO: 2740 - DNA, 20 bp, Lactococcus lactis
acgagtcgcgagacagtgat

SEQ ID NO: 2741 - DNA, 20 bp, Bacteroides forsythus
tgagatacgtgtattttatt

SEQ ID NO: 2742 - DNA, 20 bp, Prevotella corporis
aaaagcagcggcccaaccgc

SEQ ID NO: 2743 - DNA, 20 bp, Pediococcus acidilactici
gtgcttgcactgaatgagat

SEQ ID NO: 2744 - DNA, 20 bp, Listeria ivanovii
tagtgacgcatgtcatcact

SEQ ID NO: 2745 - DNA, 30 bp, Kocuria rosea
tacctcttaccgcatggtgggtggtggaaa

SEQ ID NO: 2746 - DNA, 20 bp, Propionibacterium propionicus
tcagtgcttaacgctgagcc

SEQ ID NO: 2747 - DNA, 30 bp, Aerococcus urinae
aagggggcgcaggcggtttcttaagtctga

SEQ ID NO: 2748 - DNA, 20 bp, Pasteurella aerogenes
gtcgagagacgaaagaccgg

SEQ ID NO: 2749 - DNA, 20 bp, Serratia ficaria
ttaatacggcagcgcattga

SEQ ID NO: 2750 - DNA, 20 bp, Streptococcus macacae
cggtgagtcgcgaacgggtg

SEQ ID NO: 2751 - DNA, 20 bp, Bacillus azotoformans
ataccggataactcttcgaa

SEQ ID NO: 2752 - DNA, 20 bp, Lactococcus garvieae
caagtcgagcgatgattaaa

SEQ ID NO: 2753 - DNA, 20 bp, Pediococcus dextrinicus
tttttaattgaaagacggcc

SEQ ID NO: 2754 - DNA, 20 bp, Paenibacillus larvae
ctggtttcttcgcatgaaga

SEQ ID NO: 2755 - DNA, 20 bp, Lactococcus garvieae
gagtggaaaattacttaagt

SEQ ID NO: 2756 - DNA, 20 bp, Porphyromonas maccae
gggagtacctaaagcacgta

SEQ ID NO: 2757 - DNA, 20 bp, Corynebacterium cystitidis
cttgcggcctattagtttgt

SEQ ID NO: 2758 - DNA, 20 bp, Pediococcus damnosus
ttgattgaattagagatgct

SEQ ID NO: 2759 - DNA, 30 bp, Propionibacterium granulosum
taatactggatatgtgctcctgctgcatgg

SEQ ID NO: 2760 - DNA, 20 bp, Campylobacter lari
ttgctagaaagttgagacag

SEQ ID NO: 2761 - DNA, 20 bp, Bacteroides forsythus
aatgagatacgtgtatttta

SEQ ID NO: 2762 - DNA, 30 bp, Vibrio hollisae
cgacatgaacaatccttcgggtgcgttcat

SEQ ID NO: 2763 - DNA, 20 bp, Macrococcus caseolyticus
taccggataatatctagctt

SEQ ID NO: 2764 - DNA, 20 bp, Bacteroides ovatus
gataactccggaatagcctt

SEQ ID NO: 2765 - DNA, 20 bp, Corynebacterium mycetoides
gtggggctaatcgctgaaag

SEQ ID NO: 2766 - DNA, 20 bp, Bacillus lentus
ttcttctcctggagaaaggt

SEQ ID NO: 2767 - DNA, 20 bp, Brevibacillus laterosporus
cgcgcgcaggtggctatgta

SEQ ID NO: 2768 - DNA, 20 bp, Enterobacter sakazakii
gagcagcttgctgctctgct

SEQ ID NO: 2769 - DNA, 20 bp, Propionibacterium propionicus
gaaagtgtaaactcagtgct

SEQ ID NO: 2770 - DNA, 20 bp, Lactococcus garvieae
aagtcgagcgatgattaaag

SEQ ID NO: 2771 - DNA, 20 bp, Porphyromonas maccae
aaagggataacccggtgaaa

SEQ ID NO: 2772 - DNA, 20 bp, Propionibacterium propionicus
cgttagagaccgccgaggtc

SEQ ID NO: 2773 - DNA, 20 bp, Prevotella corporis
tgaaggcatctgacgaggag

SEQ ID NO: 2774 - DNA, 20 bp, Prevotella corporis
ctaataccttatgtcctcct

SEQ ID NO: 2775 - DNA, 20 bp, Corynebacterium mycetoides
tggggctaatcgctgaaagc

SEQ ID NO: 2776 - DNA, 20 bp, Propionibacterium propionicus
ttcagacctttaggcatctt

SEQ ID NO: 2777 - DNA, 20 bp, Campylobacter curvus
atatatagctaacttgccca

SEQ ID NO: 2778 - DNA, 20 bp, Propionibacterium granulosum
cttaacgttgagcgtgcttt

SEQ ID NO: 2779 - DNA, 20 bp, Alicyclobacillus acidocaldarius
tcatctctgagggtgtcaga

SEQ ID NO: 2780 - DNA, 20 bp, Pediococcus acidilactici
cactgaatgagattttaaca

SEQ ID NO: 2781 - DNA, 20 bp, Corynebacterium pilosum
gcgcagcgagatcgtgaggt

SEQ ID NO: 2782 - DNA, 20 bp, Alicyclobacillus acidocaldarius
ctcatctctgagggtgtcag

SEQ ID NO: 2783 - DNA, 20 bp, Streptococcus hyointestinalis
taagaggtaataacacatgt

SEQ ID NO: 2784 - DNA, 20 bp, Pediococcus dextrinicus
ttaaaaaccacatggttttt

SEQ ID NO: 2785 - DNA, 20 bp, Porphyromonas maccae
acgttgtcagttactatcgg

SEQ ID NO: 2786 - DNA, 20 bp, Enterococcus raffinosus
agtcgaacgccttttctttc

SEQ ID NO: 2787 - DNA, 20 bp, Streptococcus hyointestinalis
aacacatgttattagtttaa

SEQ ID NO: 2788 - DNA, 20 bp, Prevotella intermedia
gacgcaggatacagagatgt

SEQ ID NO: 2789 - DNA, 20 bp, Prevotella corporis
tcagagatgatgaagtcccc

SEQ ID NO: 2790 - DNA, 20 bp, Rothia mucilaginosa
gcgttatgtagtggttatag

SEQ ID NO: 2791 - DNA, 20 bp, Bacteroides forsythus
gaataaaatgagatacgtgt

SEQ ID NO: 2792 - DNA, 20 bp, Macrococcus caseolyticus
taccggataatatttagctt

SEQ ID NO: 2793 - DNA, 20 bp, Bacteroides forsythus
ccgcggtgaaagtttgtcgc

SEQ ID NO: 2794 - DNA, 20 bp, Brevibacillus laterosporus
ctgaagcgaaacggaaagat

SEQ ID NO: 2795 - DNA, 20 bp, Enterococcus dispar
atgtttattaattgaaaggc

SEQ ID NO: 2796 - DNA, 20 bp, Clostridium ramosum
aaaagtgcctcaaagcactg

SEQ ID NO: 2797 - DNA, 20 bp, Bacteroides forsythus
ctgttaagtccgcggtgaaa

SEQ ID NO: 2798 - DNA, 20 bp, Lactococcus garvieae
attaaagatagcttgctatt

SEQ ID NO: 2799 - DNA, 20 bp, Bacillus badius
gcttgcttccgttcaagtta

SEQ ID NO: 2800 - DNA, 20 bp, Propionibacterium propionicus
ttaggcatcttttggtttgg

SEQ ID NO: 2801 - DNA, 20 bp, Enterococcus dispar
gaactcatgtttattaattg

SEQ ID NO: 2802 - DNA, 20 bp, Listeria grayi
ccttaggagcttgctccttt

SEQ ID NO: 2803 - DNA, 20 bp, Clostridium ramosum
caggaaatggtagccgagtg

SEQ ID NO: 2804 - DNA, 20 bp, Enterococcus cecorum
agagtacaacgagtcgcaaa

SEQ ID NO: 2805 - DNA, 20 bp, Pediococcus parvulus
ggtgcttgcaccgaagatga

SEQ ID NO: 2806 - DNA, 20 bp, Paenibacillus larvae
ttgccaaggaagaacggcca

SEQ ID NO: 2807 - DNA, 30 bp, Corynebacterium urealyticum
tcgctagggaagaagccttcgggtgacggt

SEQ ID NO: 2808 - DNA, 20 bp, Lactococcus garvieae
cttaagtgacggtatctaac

SEQ ID NO: 2809 - DNA, 20 bp, Enterococcus cecorum
cgcatggcagatggatgaaa

SEQ ID NO: 2810 - DNA, 30 bp, Streptococcus dysgalactiae
actttcccttcggggcaggagtgacaggtg

SEQ ID NO: 2811 - DNA, 20 bp, Clostridium ramosum
cagagatggagagatagcta

SEQ ID NO: 2812 - DNA, 20 bp, Bacillus smithii
cttccttcgcatgaaggaag

SEQ ID NO: 2813 - DNA, 20 bp, Prevotella corporis
taataccttatgtcctcctt

SEQ ID NO: 2814 - DNA, 20 bp, Bacteroides forsythus
tgtagacgacggagagtgag

SEQ ID NO: 2815 - DNA, 20 bp, Enterococcus faecalis
gacgttagtaactgaacgtc

SEQ ID NO: 2816 - DNA, 20 bp, Propionibacterium propionicus
agagataggcgccccgtaag

SEQ ID NO: 2817 - DNA, 20 bp, Granulicatella adiacens
aaccgcatggtttgaagagg

SEQ ID NO: 2818 - DNA, 30 bp, Clostridium ramosum
cgagcaacgccgcgtgaaggaagaaggttt

SEQ ID NO: 2819 - DNA, 20 bp, Clostridium ramosum
gctccagagatggagagata

SEQ ID NO: 2820 - DNA, 20 bp, Lactococcus garvieae
cgttaagtagagtggaaaat

SEQ ID NO: 2821 - DNA, 20 bp, Pediococcus dextrinicus
ttttaattgaaagacggcct

SEQ ID NO: 2822 - DNA, 20 bp, Corynebacterium propinquum
aggtgtaggggccttttggg

SEQ ID NO: 2823 - DNA, 20 bp, Bacteroides forsythus
atggtagcaatacctgtcgg

SEQ ID NO: 2824 - DNA, 20 bp, Streptococcus hyointestinalis
aaaatccatgtcgtgacggt

SEQ ID NO: 2825 - DNA, 20 bp, Pediococcus dextrinicus
aacgagtttgcttttaatga

SEQ ID NO: 2826 - DNA, 20 bp, Lactococcus garvieae
gctatttttatgaagagcgg

SEQ ID NO: 2827 - DNA, 20 bp, Paenibacillus alvei
tctgaatgaccgctctagag

SEQ ID NO: 2828 - DNA, 20 bp, Macrococcus caseolyticus
aatatctagcttcgcatgaa

SEQ ID NO: 2829 - DNA, 20 bp, Kocuria rosea
ggatactacctcttaccgca

SEQ ID NO: 2830 - DNA, 20 bp, Serratia ficaria
aagggcgatgtcttaatacg

SEQ ID NO: 2831 - DNA, 20 bp, Corynebacterium renale
aggccactgcttgcagtggt

SEQ ID NO: 2832 - DNA, 20 bp, Bacillus azotoformans
gaagataaaagatggtttcg

SEQ ID NO: 2833 - DNA, 20 bp, Paenibacillus alvei
cggcaatgtaagttgggtgt

SEQ ID NO: 2834 - DNA, 20 bp, Streptococcus uberis
gtacacatgtaccctattta

SEQ ID NO: 2835 - DNA, 20 bp, Clostridium difficile
cttaatcggagagttccctt

SEQ ID NO: 2836 - DNA, 20 bp, Corynebacterium pilosum
tacagcgcgcagcgagatcg

SEQ ID NO: 2837 - DNA, 20 bp, Porphyromonas maccae
gctcaaccacagtcttgcct

SEQ ID NO: 2838 - DNA, 20 bp, Bacteroides forsythus
tacctgtcggcgaccggcgc

SEQ ID NO: 2839 - DNA, 20 bp, Streptococcus agalactiae
agagaagaacgttggtagga

SEQ ID NO: 2840 - DNA, 20 bp, Listeria ivanovii
gcatgtcatcactttgaaag

SEQ ID NO: 2841 - DNA, 20 bp, Actinomyces neuii
tcacgcatgctacattggtg

SEQ ID NO: 2842 - DNA, 30 bp, Corynebacterium renale
aggccactgcttgcagtggtactcgagtgg

SEQ ID NO: 2843 - DNA, 20 bp, Bacteroides forsythus
acctgcccgcaacagaggga

SEQ ID NO: 2844 - DNA, 20 bp, Porphyromonas maccae
gttatgactgacactgaagc

SEQ ID NO: 2845 - DNA, 20 bp, Propionibacterium propionicus
tttggtttggaaagttctgg

SEQ ID NO: 2846 - DNA, 30 bp, Pediococcus parvulus
tgcaccgaagatgattttagctataaagtg

SEQ ID NO: 2847 - DNA, 20 bp, Campylobacter curvus
tttttcggtaatggataggg

SEQ ID NO: 2848 - DNA, 20 bp, Prevotella corporis
agactaataccttatgtcct

SEQ ID NO: 2849 - DNA, 20 bp, Enterococcus faecalis
aagaacaaggacgttagtaa

SEQ ID NO: 2850 - DNA, 20 bp, Streptococcus hyointestinalis
aacggatgtgggagtggaaa

SEQ ID NO: 2851 - DNA, 20 bp, Enterococcus faecalis
actgaacgtcccctgacggt

SEQ ID NO: 2852 - DNA, 30 bp, Pasteurella aerogenes
tacctactcttgacatccagagaagagcgc

SEQ ID NO: 2853 - DNA, 20 bp, Campylobacter curvus
attactaagggacaacagtt

SEQ ID NO: 2854 - DNA, 20 bp, Corynebacterium cystitidis
aaaggttttgtgctggtatg

SEQ ID NO: 2855 - DNA, 20 bp, Paenibacillus larvae
cttagttgccagcacgcaga

SEQ ID NO: 2856 - DNA, 20 bp, Prevotella corporis
gctgtccggcccgtacggtc

SEQ ID NO: 2857 - DNA, 20 bp, Streptococcus agalactiae
gttagagaagaacgttggta

SEQ ID NO: 2858 - DNA, 30 bp, Paenibacillus alvei
gctaataccagataggcattttcctcgcat

SEQ ID NO: 2859 - DNA, 20 bp, Lactococcus lactis
tttattaagtctggtgtaaa

SEQ ID NO: 2860 - DNA, 20 bp, Pediococcus damnosus
gcatggtttatttttaaaag

SEQ ID NO: 2861 - DNA, 20 bp, Streptococcus hyointestinalis
agagaagaacggatgtggga

SEQ ID NO: 2862 - DNA, 20 bp, Lactococcus garvieae
aatctgccgagtagcggggg

SEQ ID NO: 2863 - DNA, 20 bp, Pediococcus dextrinicus
tttaattgaaagacggcgta

SEQ ID NO: 2864 - DNA, 20 bp, Lactococcus garvieae
atgattaaagatagcttgct

SEQ ID NO: 2865 - DNA, 20 bp, Macrococcus caseolyticus
tttagcttcgcatgaagcaa

SEQ ID NO: 2866 - DNA, 20 bp, Propionibacterium granulosum
ttgatgcttaacgttgagcg

SEQ ID NO: 2867 - DNA, 20 bp, Porphyromonas maccae
agtacctaaagcacgtaacc

SEQ ID NO: 2868 - DNA, 20 bp, Listeria welshimeri
gtggtggcgcatgccacggc

SEQ ID NO: 2869 - DNA, 30 bp, Enterococcus avium
catggtttcggtttgaaaggcgcttttgcg

SEQ ID NO: 2870 - DNA, 20 bp, Prevotella corporis
aaagcagcggcccaaccgct

SEQ ID NO: 2871 - DNA, 20 bp, Rothia mucilaginosa
ttatgtagtggttatagatg

SEQ ID NO: 2872 - DNA, 20 bp, Granulicatella adiacens
ccgcatggtttgaagaggaa

SEQ ID NO: 2873 - DNA, 20 bp, Listeria grayi
gctaataccgaataataatc

SEQ ID NO: 2874 - DNA, 20 bp, Paenibacillus alvei
taataccagataggcatttt

SEQ ID NO: 2875 - DNA, 20 bp, Prevotella corporis
ggagaatgattcagagatga

SEQ ID NO: 2876 - DNA, 20 bp, Prevotella corporis
gatgatgaagtcccctcggg

SEQ ID NO: 2877 - DNA, 20 bp, Serratia ficaria
tcttaatacggcagcgcatt

SEQ ID NO: 2878 - DNA, 20 bp, Pediococcus dextrinicus
ccgcataatattaaaaacca

SEQ ID NO: 2879 - DNA, 20 bp, Prevotella corporis
accttcccgcgaccaaggga

SEQ ID NO: 2880 - DNA, 30 bp, Serratia ficaria
cgaggaggaagggcgatgtcttaatacggc

SEQ ID NO: 2881 - DNA, 30 bp, Clostridium ramosum
cactgcatggtgaccgtattaaaagtgcct

SEQ ID NO: 2882 - DNA, 20 bp, Listeria grayi
caggtttgaaaggcggcttc

SEQ ID NO: 2883 - DNA, 20 bp, Streptococcus hyointestinalis
taagagaagaacggatgtgg

SEQ ID NO: 2884 - DNA, 20 bp, Prevotella corporis
agcccgctgtggcgccactg

SEQ ID NO: 2885 - DNA, 20 bp, Prevotella corporis
gagcgcaggccgccgtgcaa

SEQ ID NO: 2886 - DNA, 20 bp, Bacillus firmus
aagctgaaagatggcatctc

SEQ ID NO: 2887 - DNA, 20 bp, Streptococcus hyointestinalis
ataagaggtaataacacatg

SEQ ID NO: 2888 - DNA, 20 bp, Propionibacterium propionicus
atcttttggtttggaaagtt

SEQ ID NO: 2889 - DNA, 20 bp, Lactococcus garvieae
ttaagtgacggtatctaacc

SEQ ID NO: 2890 - DNA, 30 bp, Pediococcus pentosaceus
gaacgtgggtaagagtaactgtttacccag

SEQ ID NO: 2891 - DNA, 20 bp, Corynebacterium cystitidis
taccggatattcacgtatct

SEQ ID NO: 2892 - DNA, 20 bp, Gemella morbillorum
agatgttgcatgacatttag

SEQ ID NO: 2893 - DNA, 20 bp, Kocuria rosea
gcgaactgacgagagtgctt

SEQ ID NO: 2894 - DNA, 20 bp, Propionibacterium propionicus
gtacagtcagttgcgagcct

SEQ ID NO: 2895 - DNA, 20 bp, Bacteroides forsythus
tcttttacaggggaataaaa

SEQ ID NO: 2896 - DNA, 20 bp, Macrococcus caseolyticus
cgagagtgcttgcactctct

SEQ ID NO: 2897 - DNA, 20 bp, Corynebacterium diphtheriae
atcggcgtagtgatacgttt

SEQ ID NO: 2898 - DNA, 20 bp, Bacillus smithii
gagggcttccaccctttagt

SEQ ID NO: 2899 - DNA, 20 bp, Prevotella corporis
gagggctgtccgcatgcaag

SEQ ID NO: 2900 - DNA, 20 bp, Bacteroides forsythus
aacctgcccgcaacagaggg

SEQ ID NO: 2901 - DNA, 20 bp, Streptococcus hyointestinalis
gaagaacggatgtgggagtg

SEQ ID NO: 2902 - DNA, 20 bp, Prevotella corporis
gcagcggcccaaccgctgcc

SEQ ID NO: 2903 - DNA, 20 bp, Enterococcus cecorum
catggcagatggatgaaagg

SEQ ID NO: 2904 - DNA, 20 bp, Lactococcus garvieae
agtagagtggaaaattactt

SEQ ID NO: 2905 - DNA, 20 bp, Clostridium ramosum
accgtattaaaagtgcctca

SEQ ID NO: 2906 - DNA, 20 bp, Prevotella intermedia
tttgttggggagtaaagcgg

SEQ ID NO: 2907 - DNA, 20 bp, Bacteroides forsythus
gtgagagctttcttcccttc

SEQ ID NO: 2908 - DNA, 20 bp, Streptococcus hyointestinalis
catgttattagtttaaaagg

SEQ ID NO: 2909 - DNA, 20 bp, Prevotella corporis
gggcagcatgccggttgctt

SEQ ID NO: 2910 - DNA, 20 bp, Actinomyces neuii
cctttttggggggagtggtc

SEQ ID NO: 2911 - DNA, 20 bp, Bacteroides forsythus
cagcgatggtagcaatacct

SEQ ID NO: 2912 - DNA, 20 bp, Paenibacillus macerans
gtcttccgcatgggagactt

SEQ ID NO: 2913 - DNA, 20 bp, Actinomyces neuii
gagatgtggttgccttcggg

SEQ ID NO: 2914 - DNA, 20 bp, Streptococcus agalactiae
gtggaaaatctaccaagtga

SEQ ID NO: 2915 - DNA, 30 bp, Enterobacter sakazakii
ggtaacagggagcagcttgctgctctgctg

SEQ ID NO: 2916 - DNA, 20 bp, Enterococcus dispar
catgtttattatttgaaagg

SEQ ID NO: 2917 - DNA, 20 bp, Paenibacillus thiaminolyticus
cgacggtttccttcgggaaa

SEQ ID NO: 2918 - DNA, 20 bp, Bacteroides forsythus
gagagtgagagctttcttcc

SEQ ID NO: 2919 - DNA, 20 bp, Porphyromonas maccae
tgatgattcaagtaaagatt

SEQ ID NO: 2920 - DNA, 20 bp, Lactococcus garvieae
tgggaaatctgccgagtagc

SEQ ID NO: 2921 - DNA, 20 bp, Actinomyces neuii
tgctacattggtgtctacag

SEQ ID NO: 2922 - DNA, 20 bp, Bacillus lentus
ttctcctggagaaaggttga

SEQ ID NO: 2923 - DNA, 20 bp, Porphyromonas maccae
agaaagggataacccggtga

SEQ ID NO: 2924 - DNA, 20 bp, Kingella denitrificans
atttgagcagccaatatctg

SEQ ID NO: 2925 - DNA, 20 bp, Lactococcus garvieae
taccgcataacaatgagaat

SEQ ID NO: 2926 - DNA, 20 bp, Paenibacillus larvae
gccagcacgcagaggtgggc

SEQ ID NO: 2927 - DNA, 30 bp, Lactococcus garvieae
ttcttaagtctgatgtaaaaggcagtggct

SEQ ID NO: 2928 - DNA, 20 bp, Porphyromonas maccae
gattcaagtaaagattaatt

SEQ ID NO: 2929 - DNA, 20 bp, Corynebacterium diphtheriae
tggaaagtttttcggtacga

SEQ ID NO: 2930 - DNA, 20 bp, Pediococcus dextrinicus
ttaaaaataaacgagtggcg

SEQ ID NO: 2931 - DNA, 20 bp, Porphyromonas maccae
aggtggcctgataagtcggg

SEQ ID NO: 2932 - DNA, 20 bp, Porphyromonas maccae
aaccagccacgtcgcgtgaa

SEQ ID NO: 2933 - DNA, 20 bp, Porphyromonas maccae
gtggcctgataagtcggggg

SEQ ID NO: 2934 - DNA, 20 bp, Propionibacterium propionicus
ggtcggtacagtcagttgcg

SEQ ID NO: 2935 - DNA, 20 bp, Kingella denitrificans
gctatttgagcagccaatat

SEQ ID NO: 2936 - DNA, 30 bp, Brevibacillus laterosporus
gtaaagttctgttgttagggaagaaacagt

SEQ ID NO: 2937 - DNA, 20 bp, Clostridium ramosum
gtgcctcaaagcactggtag

SEQ ID NO: 2938 - DNA, 20 bp, Pediococcus pentosaceus
acttgtactgattgagattt

SEQ ID NO: 2939 - DNA, 20 bp, Haemophilus ducreyi
agcaaaattgattgacgtta

SEQ ID NO: 2940 - DNA, 20 bp, Enterococcus dispar
tgaactcatgtttattaatt

SEQ ID NO: 2941 - DNA, 20 bp, Propionibacterium granulosum
ccagagatggttgtgcctct

SEQ ID NO: 2942 - DNA, 30 bp, Clostridium ramosum
cagcaagggtctgtggtgaaagcctgaagc

SEQ ID NO: 2943 - DNA, 20 bp, Propionibacterium propionicus
ctaatgttgccagcaagtta

SEQ ID NO: 2944 - DNA, 30 bp, Listeria grayi
cgggtttgaaaggcggcttcggctgtcact

SEQ ID NO: 2945 - DNA, 20 bp, Propionibacterium propionicus
gataggcgccccgtaaggtc

SEQ ID NO: 2946 - DNA, 20 bp, Actinomyces viscosus
gcctgggaaaggtttgttcc

SEQ ID NO: 2947 - DNA, 20 bp, Actinomyces neuii
acagagggttgctattccgt

SEQ ID NO: 2948 - DNA, 20 bp, Porphyromonas maccae
cacagtcttgccttcgaaac

SEQ ID NO: 2949 - DNA, 20 bp, Paenibacillus larvae
agaacggccaggggagtaac

SEQ ID NO: 2950 - DNA, 20 bp, Streptococcus infantarius
actcacccgttcgcaatctt

SEQ ID NO: 2951 - DNA, 20 bp, Prevotella intermedia
tctaccttgcagcgcgaact

SEQ ID NO: 2952 - DNA, 20 bp, Campylobacter curvus
ccgtatctatataagtagat

SEQ ID NO: 2953 - DNA, 20 bp, Porphyromonas maccae
agtcttgccttcgaaactgt

SEQ ID NO: 2954 - DNA, 20 bp, Prevotella corporis
aggggcagcatgccggttgc

SEQ ID NO: 2955 - DNA, 20 bp, Propionibacterium granulosum
cttgatgcttaacgttgagc

SEQ ID NO: 2956 - DNA, 20 bp, Kocuria rosea
agcgaactgacgagagtgct

SEQ ID NO: 2957 - DNA, 20 bp, Granulicatella adiacens
tcgaaccgcatggtttgaag

SEQ ID NO: 2958 - DNA, 30 bp, Corynebacterium renale
ggccactgcttgcagtggtactcgagtggc

SEQ ID NO: 2959 - DNA, 20 bp, Pediococcus damnosus
taccgcataataaaatgaac

SEQ ID NO: 2960 - DNA, 20 bp, Pediococcus dextrinicus
aagtaaacgagtggcggacg

SEQ ID NO: 2961 - DNA, 20 bp, Neisseria gonorrhoeae
tcggaacgtaccgggtagcg

SEQ ID NO: 2962 - DNA, 20 bp, Clostridium ramosum
agtgcctcaaagcactggta

SEQ ID NO: 2963 - DNA, 20 bp, Bacillus smithii
ataccggataatatcttcct

SEQ ID NO: 2964 - DNA, 30 bp, Streptococcus hyointestinalis
cattgtacgctttggaaactgtgagacttg

SEQ ID NO: 2965 - DNA, 20 bp, Campylobacter curvus
aagtagatacgggaaagttt

SEQ ID NO: 2966 - DNA, 20 bp, Granulicatella adiacens
agaggaaaagaggcgcaagc

SEQ ID NO: 2967 - DNA, 20 bp, Comamonas terrigena
cgcaagaccttgcgcaactg

SEQ ID NO: 2968 - DNA, 20 bp, Listeria grayi
cgaatgaccttaggagcttg

SEQ ID NO: 2969 - DNA, 20 bp, Pediococcus dextrinicus
tttaaaaataaacgagtggc

SEQ ID NO: 2970 - DNA, 20 bp, Prevotella intermedia
gacttgagtgcacgcaacgt

SEQ ID NO: 2971 - DNA, 20 bp, Eubacterium moniliforme
tatagagatatatgttccct

SEQ ID NO: 2972 - DNA, 20 bp, Haemophilus actinemycetemcomitans
ttggggtttagccctggtgc

SEQ ID NO: 2973 - DNA, 20 bp, Paenibacillus alvei
gcggcaatgtaagttgggtg

SEQ ID NO: 2974 - DNA, 20 bp, Clostridium ramosum
tacaggaaatggtagccgag

SEQ ID NO: 2975 - DNA, 20 bp, Propionibacterium propionicus
taagggttagcgaatctgta

SEQ ID NO: 2976 - DNA, 20 bp, Prevotella intermedia
atcggtggaggatggggatg

SEQ ID NO: 2977 - DNA, 20 bp, Comamonas terrigena
atcgcaagaccttgcgcaac

SEQ ID NO: 2978 - DNA, 20 bp, Vibrio hollisae
aattagctgttgggggttag

SEQ ID NO: 2979 - DNA, 20 bp, Moraxella bovis
ttgacataccaagaattcgc

SEQ ID NO: 2980 - DNA, 20 bp, Propionibacterium granulosum
cactttttgtgggggagctg

SEQ ID NO: 2981 - DNA, 20 bp, Bacteroides forsythus
gactaatacctcataaaaca

SEQ ID NO: 2982 - DNA, 20 bp, Prevotella corporis
gggcgaatccccaaatccgg

SEQ ID NO: 2983 - DNA, 20 bp, Corynebacterium diphtheriae
tcggcgtagtgatacgtttt

SEQ ID NO: 2984 - DNA, 20 bp, Vibrio hollisae
atacctgcgttacttgacgt

SEQ ID NO: 2985 - DNA, 20 bp, Bacillus azotoformans
agcttgctcctttagattca

SEQ ID NO: 2986 - DNA, 20 bp, Neisseria elongata
aaaggagcggttaatacccg

SEQ ID NO: 2987 - DNA, 20 bp, Prevotella intermedia
ccttccctccactcggggat

SEQ ID NO: 2988 - DNA, 20 bp, Corynebacterium renale
ccactgcttgcagtggtact

SEQ ID NO: 2989 - DNA, 30 bp, Prevotella intermedia
tcaacatctaccttgcagcgcgaactggcg

SEQ ID NO: 2990 - DNA, 20 bp, Propionibacterium avidum
gaatccttgctgcatggtgg

SEQ ID NO: 2991 - DNA, 20 bp, Bacillus badius
acttgacggaagcttgcttc

SEQ ID NO: 2992 - DNA, 20 bp, Alicyclobacillus acidocaldarius
cagcggcccaattgggcctt

SEQ ID NO: 2993 - DNA, 20 bp, Enterococcus faecalis
gttagtaactgaacgtcccc

SEQ ID NO: 2994 - DNA, 20 bp, Listeria grayi
tgaccttaggagcttgctcc

SEQ ID NO: 2995 - DNA, 20 bp, Corynebacterium pilosum
gttggaaagcctttgggcgg

SEQ ID NO: 2996 - DNA, 20 bp, Clostridium ramosum
gaccgtattaaaagtgcctc

SEQ ID NO: 2997 - DNA, 20 bp, Lactococcus garvieae
gggagtacccaaagtaggtt

SEQ ID NO: 2998 - DNA, 20 bp, Porphyromonas maccae
tactaagttatgactgacac

SEQ ID NO: 2999 - DNA, 20 bp, Listeria ivanovii
acgcatgtcatcactttgaa

SEQ ID NO: 3000 - DNA, 20 bp, Paenibacillus larvae
cacgcagaggtgggcactct

SEQ ID NO: 3001 - DNA, 20 bp, Bacteroides forsythus
aggggcagcgatggtagcaa

SEQ ID NO: 3002 - DNA, 20 bp, Pediococcus parvulus
atgaattagaggtgcttgca

SEQ ID NO: 3003 - DNA, 20 bp, Pediococcus dextrinicus
tttaatgaaggcggtgcttg

SEQ ID NO: 3004 - DNA, 20 bp, Bacteroides forsythus
gggaataaaatgagatacgt

SEQ ID NO: 3005 - DNA, 20 bp, Bacillus azotoformans
acaagtaccagttaactgct

SEQ ID NO: 3006 - DNA, 20 bp, Aerococcus urinae
ccttgtgaaagcaagcgaat

SEQ ID NO: 3007 - DNA, 20 bp, Bacillus badius
cggaagcttgcttccgttca

SEQ ID NO: 3008 - DNA, 20 bp, Bacteroides forsythus
aacaggggttccgcatgggg

SEQ ID NO: 3009 - DNA, 20 bp, Propionibacterium propionicus
taatgttgccagcaagttat

SEQ ID NO: 3010 - DNA, 20 bp, Streptococcus hyointestinalis
tgttattagtttaaaagggg

SEQ ID NO: 3011 - DNA, 20 bp, Prevotella corporis
cggttgcttgcaaccggtga

SEQ ID NO: 3012 - DNA, 20 bp, Prevotella corporis
cttgagtgcgccggaagcgg

SEQ ID NO: 3013 - DNA, 20 bp, Alicyclobacillus acidocaldarius
tctcagcggcccaattgggc

SEQ ID NO: 3014 - DNA, 20 bp, Campylobacter curvus
actccgtatctatataagta

SEQ ID NO: 3015 - DNA, 20 bp, Vibrio hollisae
gcgttacttgacgttagcgg

SEQ ID NO: 3016 - DNA, 20 bp, Enterococcus faecalis
aactgaacgtcccctgacgg

SEQ ID NO: 3017 - DNA, 20 bp, Pasteurella aerogenes
tcgagagacgaaagaccggg

SEQ ID NO: 3018 - DNA, 20 bp, Lactococcus garvieae
gcgatgattaaagatagctt

SEQ ID NO: 3019 - DNA, 20 bp, Rothia mucilaginosa
ctgttagcagggaagaagag

SEQ ID NO: 3020 - DNA, 20 bp, Corynebacterium accolens
atgacatttacttaaaaggt

SEQ ID NO: 3021 - DNA, 20 bp, Corynebacterium diphtheriae
aaggcctagcttgctaggta

SEQ ID NO: 3022 - DNA, 20 bp, Fusobacterium necrophorum
atggttttttcgcatggagg

SEQ ID NO: 3023 - DNA, 20 bp, Paenibacillus macerans
taccggataatcaagtcttc

SEQ ID NO: 3024 - DNA, 20 bp, Actinomyces neuii
cagagggttgctattccgtg

SEQ ID NO: 3025 - DNA, 20 bp, Prevotella corporis
ggggataaagttgcccacgc

SEQ ID NO: 3026 - DNA, 20 bp, Lactococcus garvieae
ggagtacccaaagtaggttg

SEQ ID NO: 3027 - DNA, 20 bp, Corynebacterium cystitidis
ctatctttgtgagggagctg

SEQ ID NO: 3028 - DNA, 20 bp, Enterococcus dispar
gtttattaattgaaaggcgc

SEQ ID NO: 3029 - DNA, 20 bp, Campylobacter curvus
tactccgtatctatataagt

SEQ ID NO: 3030 - DNA, 20 bp, Propionibacterium granulosum
gaagtggaaacttgatgctt

SEQ ID NO: 3031 - DNA, 20 bp, Pasteurella aerogenes
caggcggttgcttaagtgag

SEQ ID NO: 3032 - DNA, 20 bp, Porphyromonas maccae
ccgcgaggggcgtgtcaggg

SEQ ID NO: 3033 - DNA, 20 bp, Porphyromonas maccae
tatcagataggcatgcgttc

SEQ ID NO: 3034 - DNA, 20 bp, Porphyromonas maccae
gtaacttgcctgatagaaag

SEQ ID NO: 3035 - DNA, 20 bp, Corynebacterium propinquum
ggaaaggccttttcggaggt

SEQ ID NO: 3036 - DNA, 20 bp, Prevotella corporis
caaccgctgccctgcggcgc

SEQ ID NO: 3037 - DNA, 20 bp, Streptococcus hyointestinalis
tagtttaaaaggggcaactg

SEQ ID NO: 3038 - DNA, 20 bp, Porphyromonas maccae
gggcgtgtcagggtaatacc

SEQ ID NO: 3039 - DNA, 20 bp, Clostridium ramosum
tcataaaggctccagagatg

SEQ ID NO: 3040 - DNA, 20 bp, Pediococcus pentosaceus
tgacagtctaagagattaga

SEQ ID NO: 3041 - DNA, 20 bp, Listeria ivanovii
aagtagtgacgcatgtcatc

SEQ ID NO: 3042 - DNA, 20 bp, Porphyromonas maccae
ttgcatgatgattcaagtaa

SEQ ID NO: 3043 - DNA, 20 bp, Porphyromonas maccae
cctaaagcacgtaaccgcga

SEQ ID NO: 3044 - DNA, 20 bp, Porphyromonas maccae
ttcaagtaaagattaattgc

SEQ ID NO: 3045 - DNA, 30 bp, Corynebacterium urealyticum
aagaagccttcgggtgacggtacctggata

SEQ ID NO: 3046 - DNA, 30 bp, Clostridium ramosum
gtgttggatgtcaaagttcagtgctgcagt

SEQ ID NO: 3047 - DNA, 30 bp, Serratia rubidaea
cgtatacaaagagaagcgaacctgcgaagg

SEQ ID NO: 3048 - DNA, 20 bp, Streptococcus equi
ttagagaagaacagtgatgg

SEQ ID NO: 3049 - DNA, 20 bp, Pediococcus dextrinicus
ctggccagatagtgacggta

SEQ ID NO: 3050 - DNA, 20 bp, Enterococcus faecalis
tttcctcccgagtgcttgca

SEQ ID NO: 3051 - DNA, 20 bp, Pseudomonas luteola
cagctttgacgttaccagca

SEQ ID NO: 3052 - DNA, 20 bp, Propionibacterium propionicus
tcagttgcgagcctgtaagg

SEQ ID NO: 3053 - DNA, 20 bp, Pediococcus pentosaceus
cgtacttgtactgattgaga

SEQ ID NO: 3054 - DNA, 20 bp, Clostridium ramosum
cggctacaggaaatggtagc

SEQ ID NO: 3055 - DNA, 30 bp, Streptococcus hyointestinalis
cgatagctaataccgcataagaggtaataa

SEQ ID NO: 3056 - DNA, 20 bp, Lactococcus lactis
ttaagtctggtgtaaaaggc

SEQ ID NO: 3057 - DNA, 20 bp, Clostridium ramosum
gatggagagatagctatatg

SEQ ID NO: 3058 - DNA, 20 bp, Paenibacillus alvei
aataccagataggcattttc

SEQ ID NO: 3059 - DNA, 20 bp, Alicyclobacillus acidocaldarius
gctggcctccgaagagaccc

SEQ ID NO: 3060 - DNA, 20 bp, Enterococcus dispar
attaattgaaaggcgctttt

SEQ ID NO: 3061 - DNA, 20 bp, Campylobacter curvus
ttactaagggacaacagttg

SEQ ID NO: 3062 - DNA, 20 bp, Paenibacillus larvae
gcagaggtgggcactctaag

SEQ ID NO: 3063 - DNA, 20 bp, Corynebacterium pilosum
tggaaagcctttgggcggta

SEQ ID NO: 3064 - DNA, 20 bp, Campylobacter curvus
tataagtagatacgggaaag

SEQ ID NO: 3065 - DNA, 20 bp, Bacteroides forsythus
taaaatgagatacgtgtatt

SEQ ID NO: 3066 - DNA, 20 bp, Prevotella intermedia
ttttgttggggagtaaagcg

SEQ ID NO: 3067 - DNA, 20 bp, Campylobacter lari
atccaactaatctcttagag

SEQ ID NO: 3068 - DNA, 20 bp, Prevotella intermedia
agtaaagcggggcacgtgtg

SEQ ID NO: 3069 - DNA, 20 bp, Streptococcus hyointestinalis
cggatgtgggagtggaaaat

SEQ ID NO: 3070 - DNA, 20 bp, Corynebacterium cystitidis
ggaaaggttttgtgctggta

SEQ ID NO: 3071 - DNA, 30 bp, Pediococcus dextrinicus
aataccgcataatattaaaaaccacatggt

SEQ ID NO: 3072 - DNA, 20 bp, Streptococcus equi
agtggaaagtccatcatgtg

SEQ ID NO: 3073 - DNA, 20 bp, Porphyromonas maccae
aggccgctaagtaggtgctg

SEQ ID NO: 3074 - DNA, 20 bp, Clostridium ramosum
agggtctgtggtgaaagcct

SEQ ID NO: 3075 - DNA, 20 bp, Porphyromonas maccae
atgatgattcaagtaaagat

SEQ ID NO: 3076 - DNA, 20 bp, Campylobacter lari
tgatatccaactaatctctt

SEQ ID NO: 3077 - DNA, 30 bp, Paenibacillus larvae
ttagttgccagcacgcagaggtgggcactc

SEQ ID NO: 3078 - DNA, 20 bp, Streptococcus agalactiae
gtaggagtggaaaatctacc

SEQ ID NO: 3079 - DNA, 20 bp, Corynebacterium cystitidis
actggatcgccatggagaca

SEQ ID NO: 3080 - DNA, 30 bp, Paenibacillus larvae
tccggagccaatcctcaaaagccgatctca

SEQ ID NO: 3081 - DNA, 20 bp, Enterococcus raffinosus
ctacagtgaaagatggcctt

SEQ ID NO: 3082 - DNA, 20 bp, Kingella denitrificans
ttgagcagccaatatctgat

SEQ ID NO: 3083 - DNA, 20 bp, Granulicatella adiacens
ccgcataggtcttcgaaccg

SEQ ID NO: 3084 - DNA, 20 bp, Corynebacterium propinquum
gaaaggccttttcggaggta

SEQ ID NO: 3085 - DNA, 20 bp, Prevotella corporis
gcgaaggcagcccgctgtgg

SEQ ID NO: 3086 - DNA, 20 bp, Rothia mucilaginosa
gcagggaagaagagagattg

SEQ ID NO: 3087 - DNA, 20 bp, Actinomyces neuii
tgctattccgtgaggttgag

SEQ ID NO: 3088 - DNA, 20 bp, Fusobacterium mortiferum
ttcgggtaaccaaaaccggc

SEQ ID NO: 3089 - DNA, 20 bp, Corynebacterium cystitidis
gcctatctttgtgagggagc

SEQ ID NO: 3090 - DNA, 20 bp, Neisseria elongata
tacccgtttctgctgacggt

SEQ ID NO: 3091 - DNA, 20 bp, Prevotella corporis
ccttcccgcgaccaagggat

SEQ ID NO: 3092 - DNA, 20 bp, Fusobacterium necrophorum
ttttttcgcatggaggaatc

SEQ ID NO: 3093 - DNA, 20 bp, Bacteroides ovatus
acctgccgataactccggaa

SEQ ID NO: 3094 - DNA, 20 bp, Bacteroides forsythus
caccaagccatcgatggtta

SEQ ID NO: 3095 - DNA, 20 bp, Campylobacter lari
cctgggcttgatatccaact

SEQ ID NO: 3096 - DNA, 20 bp, Aneurinibacillus aneurinilyticus
ccggatacgtttttcagacc

SEQ ID NO: 3097 - DNA, 20 bp, Bacteroides forsythus
agcaatacctgtcggcgacc

SEQ ID NO: 3098 - DNA, 20 bp, Brevibacillus laterosporus
cgaaacggaaagatggcgca

SEQ ID NO: 3099 - DNA, 20 bp, Bacillus firmus
aaagctgaaagatggcatct

SEQ ID NO: 3100 - DNA, 20 bp, Corynebacterium cystitidis
aaggctctagcttgctaggg

SEQ ID NO: 3101 - DNA, 20 bp, Neisseria gonorrhoeae
cctggttttgacatgtgcgg

SEQ ID NO: 3102 - DNA, 20 bp, Prevotella intermedia
tggaccaaagattcatcggt

SEQ ID NO: 3103 - DNA, 20 bp, Kingella denitrificans
gtgctatttgagcagccaat

SEQ ID NO: 3104 - DNA, 20 bp, Pediococcus parvulus
gttgaatgaattagaggtgc

SEQ ID NO: 3105 - DNA, 20 bp, Propionibacterium granulosum
gtggaaacttgatgcttaac

SEQ ID NO: 3106 - DNA, 20 bp, Macrococcus caseolyticus
aagcaatagtgaaagacggt

SEQ ID NO: 3107 - DNA, 20 bp, Streptococcus hyointestinalis
cataagaggtaataacacat

SEQ ID NO: 3108 - DNA, 20 bp, Pediococcus dextrinicus
gtaactggccagatagtgac

SEQ ID NO: 3109 - DNA, 20 bp, Corynebacterium cystitidis
gctctagcttgctagggtgc

SEQ ID NO: 3110 - DNA, 20 bp, Prevotella intermedia
ccaagtagcgtgcaggattg

SEQ ID NO: 3111 - DNA, 20 bp, Listeria grayi
cttaggagcttgctcctttg

SEQ ID NO: 3112 - DNA, 30 bp, Enterococcus faecalis
tgaacgtcccctgacggtatctaaccagaa

SEQ ID NO: 3113 - DNA, 20 bp, Moraxella bovis
cttgacataccaagaattcg

SEQ ID NO: 3114 - DNA, 20 bp, Corynebacterium urealyticum
gctagggaagaagccttcgg

SEQ ID NO: 3115 - DNA, 20 bp, Pediococcus dextrinicus
cttttaatgaaggcggtgct

SEQ ID NO: 3116 - DNA, 20 bp, Actinomyces neuii
ttaaagggcatcttggttcg

SEQ ID NO: 3117 - DNA, 20 bp, Bacillus azotoformans
catggttcgaagataaaaga

SEQ ID NO: 3118 - DNA, 20 bp, Bacillus azotoformans
ggttcgaagataaaagatgg

SEQ ID NO: 3119 - DNA, 20 bp, Prevotella corporis
cccaaccgctgccctgcggc

SEQ ID NO: 3120 - DNA, 20 bp, Prevotella intermedia
ccctccactcggggataccc

SEQ ID NO: 3121 - DNA, 20 bp, Granulicatella adiacens
catggtttgaagaggaaaag

SEQ ID NO: 3122 - DNA, 20 bp, Prevotella corporis
caggccgccgtgcaagcgtg

SEQ ID NO: 3123 - DNA, 20 bp, Vibrio hollisae
agtcgagcggcagcgacatg

SEQ ID NO: 3124 - DNA, 20 bp, Propionibacterium propionicus
cgtctaatgttgccagcaag

SEQ ID NO: 3125 - DNA, 20 bp, Lactococcus lactis
attaagtctggtgtaaaagg

SEQ ID NO: 3126 - DNA, 20 bp, Enterococcus faecalis
catggcataagagtgaaagg

SEQ ID NO: 3127 - DNA, 20 bp, Enterococcus cecorum
gagagtacaacgagtcgcaa

SEQ ID NO: 3128 - DNA, 20 bp, Listeria grayi
taatcagctccgcatggagc

SEQ ID NO: 3129 - DNA, 20 bp, Pediococcus pentosaceus
atcttctgacagtctaagag

SEQ ID NO: 3130 - DNA, 20 bp, Prevotella intermedia
tggggagtaaagcggggcac

SEQ ID NO: 3131 - DNA, 20 bp, Prevotella corporis
tgaagtcccctcgggactcc

SEQ ID NO: 3132 - DNA, 20 bp, Campylobacter curvus
aagtttttcggtaatggata

SEQ ID NO: 3133 - DNA, 20 bp, Porphyromonas maccae
cgggattgaaatttagcgga

SEQ ID NO: 3134 - DNA, 20 bp, Listeria ivanovii
tgtcatcactttgaaagatg

SEQ ID NO: 3135 - DNA, 20 bp, Macrococcus caseolyticus
gatggacccgcgggtattag

SEQ ID NO: 3136 - DNA, 20 bp, Bacteroides forsythus
gtccgcggtgaaagtttgtc

SEQ ID NO: 3137 - DNA, 20 bp, Streptococcus hyointestinalis
tccatgtcgtgacggtatct

SEQ ID NO: 3138 - DNA, 20 bp, Clostridium ramosum
cggcggctacaggaaatggt

SEQ ID NO: 3139 - DNA, 20 bp, Bacteroides forsythus
gcaatacctgtcggcgaccg

SEQ ID NO: 3140 - DNA, 20 bp, Pediococcus acidilactici
cgttaattgatcatgacgtg

SEQ ID NO: 3141 - DNA, 20 bp, Propionibacterium propionicus
gggttagcgaatctgtaaaa

SEQ ID NO: 3142 - DNA, 20 bp, Pediococcus damnosus
tgattgaattagagatgctt

SEQ ID NO: 3143 - DNA, 20 bp, Enterococcus dispar
tgtttattaattgaaaggcg

SEQ ID NO: 3144 - DNA, 20 bp, Propionibacterium propionicus
tttgaaatataccggaaacg

SEQ ID NO: 3145 - DNA, 30 bp, Corynebacterium pilosum
cgcacaaagccagccgtagttcggattggg

SEQ ID NO: 3146 - DNA, 20 bp, Vibrio hollisae
agttaatacctgcgttactt

SEQ ID NO: 3147 - DNA, 20 bp, Listeria grayi
gctccgcatggagcaggttt

SEQ ID NO: 3148 - DNA, 20 bp, Prevotella corporis
gaagtcccctcgggactcct

SEQ ID NO: 3149 - DNA, 20 bp, Prevotella intermedia
cggcctaatacccgatgttg

SEQ ID NO: 3150 - DNA, 20 bp, Corynebacterium pilosum
cctttgggcggtatgggatg

SEQ ID NO: 3151 - DNA, 20 bp, Kingella denitrificans
ctatttgagcagccaatatc

SEQ ID NO: 3152 - DNA, 20 bp, Propionibacterium granulosum
tcggaagtggaaacttgatg

SEQ ID NO: 3153 - DNA, 20 bp, Rothia mucilaginosa
tgttagcagggaagaagaga

SEQ ID NO: 3154 - DNA, 20 bp, Prevotella corporis
gagcaaagatccgtcggtca

SEQ ID NO: 3155 - DNA, 20 bp, Prevotella corporis
tgtccgcatgcaagtgcggg

SEQ ID NO: 3156 - DNA, 20 bp, Prevotella corporis
cgctgtccggcccgtacggt

SEQ ID NO: 3157 - DNA, 20 bp, Streptococcus agalactiae
aagaacgttggtaggagtgg

SEQ ID NO: 3158 - DNA, 20 bp, Porphyromonas maccae
gcctgatagaaagggataac

SEQ ID NO: 3159 - DNA, 20 bp, Paenibacillus thiaminolyticus
gacggtttccttcgggaaac

SEQ ID NO: 3160 - DNA, 20 bp, Clostridium ramosum
gtattaaaagtgcctcaaag

SEQ ID NO: 3161 - DNA, 20 bp, Granulicatella adiacens
aggcgcaagcttctgctgat

SEQ ID NO: 3162 - DNA, 20 bp, Prevotella corporis
gcccgctgtggcgccactga

SEQ ID NO: 3163 - DNA, 20 bp, Corynebacterium cystitidis
ggttttgtgctggtatggga

SEQ ID NO: 3164 - DNA, 20 bp, Propionibacterium propionicus
ttatgttggggactcgttag

SEQ ID NO: 3165 - DNA, 30 bp, Streptococcus porcinus
caggtgcttgcaccagtctaatgagttgcg

SEQ ID NO: 3166 - DNA, 20 bp, Corynebacterium pilosum
gttggtacagcgcgcagcga

SEQ ID NO: 3167 - DNA, 20 bp, Campylobacter curvus
tagggctatatcgtatcagc

SEQ ID NO: 3168 - DNA, 20 bp, Haemophilus ducreyi
tgttaatagcaaaattgatt

SEQ ID NO: 3169 - DNA, 20 bp, Propionibacterium granulosum
cacaactttgggataacgct

SEQ ID NO: 3170 - DNA, 20 bp, Enterococcus faecalis
ttctttcctcccgagtgctt

SEQ ID NO: 3171 - DNA, 30 bp, Paenibacillus larvae
gctctgttgccaaggaagaacggccagggg

SEQ ID NO: 3172 - DNA, 20 bp, Pediococcus dextrinicus
accaactgatttaaaaataa

SEQ ID NO: 3173 - DNA, 20 bp, Propionibacterium granulosum
cctgcccacaactttgggat

SEQ ID NO: 3174 - DNA, 20 bp, Prevotella corporis
gtccgcatgcaagtgcgggc

SEQ ID NO: 3175 - DNA, 20 bp, Prevotella corporis
gccgccgtgcaagcgtgccg

SEQ ID NO: 3176 - DNA, 20 bp, Corynebacterium cystitidis
ataccggatattcacgtatc

SEQ ID NO: 3177 - DNA, 20 bp, Streptococcus uberis
taataccgcatgacaatagg

SEQ ID NO: 3178 - DNA, 20 bp, Propionibacterium granulosum
acctgcccacaactttggga

SEQ ID NO: 3179 - DNA, 20 bp, Porphyromonas maccae
gattgaaatttagcggacta

SEQ ID NO: 3180 - DNA, 20 bp, Pediococcus dextrinicus
taactggccagatagtgacg

SEQ ID NO: 3181 - DNA, 20 bp, Propionibacterium granulosum
cctaacactttttgtggggg

SEQ ID NO: 3182 - DNA, 20 bp, Enterococcus faecalis
agagaagaacaaggacgtta

SEQ ID NO: 3183 - DNA, 20 bp, Granulicatella adiacens
gtcttcgaaccgcatggttt

SEQ ID NO: 3184 - DNA, 20 bp, Bacillus azotoformans
taccggataactcttcgaac

SEQ ID NO: 3185 - DNA, 20 bp, Kingella denitrificans
tgcgctatttgagcagccaa

SEQ ID NO: 3186 - DNA, 20 bp, Propionibacterium granulosum
atgcttaacgttgagcgtgc

SEQ ID NO: 3187 - DNA, 20 bp, Corynebacterium urealyticum
cgggtgacggtacctggata

SEQ ID NO: 3188 - DNA, 20 bp, Neisseria gonorrhoeae
gggaagaaaaggccgttgcc

SEQ ID NO: 3189 - DNA, 20 bp, Lactococcus garvieae
atttttatgaagagcggcga

SEQ ID NO: 3190 - DNA, 20 bp, Listeria welshimeri
accgaataataagtggtggc

SEQ ID NO: 3191 - DNA, 20 bp, Prevotella corporis
cttggcttgagtgcgccgga

SEQ ID NO: 3192 - DNA, 20 bp, Prevotella corporis
cagcggcccaaccgctgccc

SEQ ID NO: 3193 - DNA, 20 bp, Prevotella corporis
tccgtcggtcacggatgggg

SEQ ID NO: 3194 - DNA, 20 bp, Propionibacterium propionicus
cgaatctgtaaaagccggcc

SEQ ID NO: 3195 - DNA, 20 bp, Neisseria elongata
tagggaagaaaaaggagcgg

SEQ ID NO: 3196 - DNA, 20 bp, Propionibacterium propionicus
cgaaagtgtaaactcagtgc

SEQ ID NO: 3197 - DNA, 20 bp, Porphyromonas maccae
gcgaggggcgtgtcagggta

SEQ ID NO: 3198 - DNA, 20 bp, Propionibacterium granulosum
gaaacttgatgcttaacgtt

SEQ ID NO: 3199 - DNA, 20 bp, Pediococcus dextrinicus
agtaaacgagtggcggacgg

SEQ ID NO: 3200 - DNA, 20 bp, Enterococcus faecalis
taccgcataacagtttatgc

SEQ ID NO: 3201 - DNA, 20 bp, Brevibacillus laterosporus
aacggaaagatggcgcaagc

SEQ ID NO: 3202 - DNA, 20 bp, Clostridium ramosum
gtagccgagtgacggtactt

SEQ ID NO: 3203 - DNA, 30 bp, Prevotella intermedia
tttacccttcgaataaggaccggctaattc

SEQ ID NO: 3204 - DNA, 20 bp, Paenibacillus alvei
ctaataccagataggcattt

SEQ ID NO: 3205 - DNA, 20 bp, Enterococcus dispar
aatattaatgaactcatgtt

SEQ ID NO: 3206 - DNA, 30 bp, Vibrio hollisae
ggctgtggtctagaaccgtggctttcggag

SEQ ID NO: 3207 - DNA, 20 bp, Propionibacterium propionicus
aatgttgccagcaagttatg

SEQ ID NO: 3208 - DNA, 20 bp, Propionibacterium propionicus
caatggtcggtacagtcagt

SEQ ID NO: 3209 - DNA, 20 bp, Propionibacterium avidum
ccggataggaatccttgctg

SEQ ID NO: 3210 - DNA, 20 bp, Propionibacterium propionicus
gcatcttttggtttggaaag

SEQ ID NO: 3211 - DNA, 20 bp, Paenibacillus macerans
gataatcaagtcttccgcat

SEQ ID NO: 3212 - DNA, 20 bp, Prevotella buccae
agtccctcgggactcctgtg

SEQ ID NO: 3213 - DNA, 20 bp, Lactococcus garvieae
aacaatgagaatcgcatgat

SEQ ID NO: 3214 - DNA, 20 bp, Pediococcus acidilactici
gcttgcactgaatgagattt

SEQ ID NO: 3215 - DNA, 20 bp, Porphyromonas maccae
ttggcttgagtatagatgaa

SEQ ID NO: 3216 - DNA, 20 bp, Actinomyces neuii
tattccgtgaggttgagcga

SEQ ID NO: 3217 - DNA, 20 bp, Granulicatella adiacens
aagaggcgcaagcttctgct

SEQ ID NO: 3218 - DNA, 20 bp, Clostridium ramosum
aagtgcctcaaagcactggt

SEQ ID NO: 3219 - DNA, 20 bp, Serratia rubidaea
cttgcttcctcgccggcgag

SEQ ID NO: 3220 - DNA, 20 bp, Enterococcus raffinosus
gttctacagtgaaagatggc

SEQ ID NO: 3221 - DNA, 20 bp, Aneurinibacillus aneurinilyticus
ataccggatacgtttttcag

SEQ ID NO: 3222 - DNA, 30 bp, Listeria ivanovii
tcactttgaaagatggtttcggctatcgct

SEQ ID NO: 3223 - DNA, 20 bp, Vibrio hollisae
gcctcacgctattcgagcgg

SEQ ID NO: 3224 - DNA, 20 bp, Lactococcus garvieae
gtgtgcattggaaactggga

SEQ ID NO: 3225 - DNA, 20 bp, Enterococcus cecorum
cagatggatgaaaggcgctt

SEQ ID NO: 3226 - DNA, 20 bp, Actinomyces neuii
cacgcatgctacattggtgt

SEQ ID NO: 3227 - DNA, 20 bp, Corynebacterium cystitidis
gttttgtgctggtatgggat

SEQ ID NO: 3228 - DNA, 20 bp, Rothia mucilaginosa
ccggggcttaaccccgtgta

SEQ ID NO: 3229 - DNA, 20 bp, Corynebacterium mycetoides
tgaggtggggctaatcgctg

SEQ ID NO: 3230 - DNA, 20 bp, Corynebacterium pilosum
tgggcggtatgggatgagct

SEQ ID NO: 3231 - DNA, 20 bp, Lactococcus garvieae
taagtagagtggaaaattac

SEQ ID NO: 3232 - DNA, 20 bp, Streptococcus agalactiae
cgttggtaggagtggaaaat

SEQ ID NO: 3233 - DNA, 30 bp, Lactococcus lactis
aatggatggtacaacgagtcgcgagacagt

SEQ ID NO: 3234 - DNA, 20 bp, Pediococcus parvulus
accgcataacaaagtaaacc

SEQ ID NO: 3235 - DNA, 20 bp, Corynebacterium mycetoides
gtgcgacactgtgaggtggg

SEQ ID NO: 3236 - DNA, 20 bp, Pediococcus dextrinicus
actggccagatagtgacggt

SEQ ID NO: 3237 - DNA, 20 bp, Pasteurella aerogenes
agagcgcagagatgtgcttg

SEQ ID NO: 3238 - DNA, 20 bp, Prevotella intermedia
gggagtaaagcggggcacgt

SEQ ID NO: 3239 - DNA, 20 bp, Pediococcus damnosus
attgaattagagatgcttgc

SEQ ID NO: 3240 - DNA, 20 bp, Macrococcus caseolyticus
gcatgaagcaatagtgaaag

SEQ ID NO: 3241 - DNA, 20 bp, Lactococcus garvieae
acggaagttgggagtaccca

SEQ ID NO: 3242 - DNA, 20 bp, Campylobacter curvus
ccattactaagggacaacag

SEQ ID NO: 3243 - DNA, 20 bp, Comamonas terrigena
ttgcgcaactggagcggccg

SEQ ID NO: 3244 - DNA, 20 bp, Actinomyces viscosus
cctgggaaaggtttgttccg

SEQ ID NO: 3245 - DNA, 20 bp, Actinomyces neuii
agcgaatctcttaaagggca

SEQ ID NO: 3246 - DNA, 20 bp, Lactococcus garvieae
acaccacggaagttgggagt

SEQ ID NO: 3247 - DNA, 20 bp, Prevotella corporis
gaggagcaaagatccgtcgg

SEQ ID NO: 3248 - DNA, 20 bp, Prevotella corporis
ccgctgtccggcccgtacgg

SEQ ID NO: 3249 - DNA, 20 bp, Comamonas terrigena
gaggttgaaagcaggggatc

SEQ ID NO: 3250 - DNA, 20 bp, Porphyromonas maccae
ggagtacctaaagcacgtaa

SEQ ID NO: 3251 - DNA, 20 bp, Prevotella corporis
tcctcctttgaaggcatctg

SEQ ID NO: 3252 - DNA, 30 bp, Pediococcus dextrinicus
ggctagtacaacgagttgcgagaccgcgag

SEQ ID NO: 3253 - DNA, 20 bp, Campylobacter lari
cttgatatccaactaatctc

SEQ ID NO: 3254 - DNA, 20 bp, Macrococcus caseolyticus
accggataatatttagcttc

SEQ ID NO: 3255 - DNA, 20 bp, Bacteroides stercoris
ccgataactccgggatagcc

SEQ ID NO: 3256 - DNA, 20 bp, Prevotella corporis
gcccgtacggtctgggcggc

SEQ ID NO: 3257 - DNA, 30 bp, Pediococcus dextrinicus
agccggtggagtaacccgtaagggagctag

SEQ ID NO: 3258 - DNA, 20 bp, Bacteroides forsythus
tccgcggtgaaagtttgtcg

SEQ ID NO: 3259 - DNA, 20 bp, Streptococcus mitis
ttgcttctccggatgagttg

SEQ ID NO: 3260 - DNA, 20 bp, Bacillus lentus
tctttcttctcctggagaaa

SEQ ID NO: 3261 - DNA, 20 bp, Bacillus azotoformans
tcgaagataaaagatggttt

SEQ ID NO: 3262 - DNA, 20 bp, Corynebacterium pilosum
ggtacagcgcgcagcgagat

SEQ ID NO: 3263 - DNA, 20 bp, Streptococcus equi
gtccatcatgtgacggtaac

SEQ ID NO: 3264 - DNA, 20 bp, Prevotella corporis
gcttggcttgagtgcgccgg

SEQ ID NO: 3265 - DNA, 20 bp, Listeria grayi
tttggtcgttagtggcggac

SEQ ID NO: 3266 - DNA, 30 bp, Clostridium ramosum
gagcacttgtgctcgagtggcgaacgggtg

SEQ ID NO: 3267 - DNA, 20 bp, Propionibacterium propionicus
ccggatattcagacctttag

SEQ ID NO: 3268 - DNA, 20 bp, Lactococcus garvieae
tttttatgaagagcggcgaa

SEQ ID NO: 3269 - DNA, 20 bp, Pediococcus parvulus
gaattagaggtgcttgcacc

SEQ ID NO: 3270 - DNA, 20 bp, Granulicatella adiacens
taactgttagcgccttgacg

SEQ ID NO: 3271 - DNA, 20 bp, Enterococcus dispar
accgcataatattaatgaac

SEQ ID NO: 3272 - DNA, 30 bp, Aerococcus urinae
caaattggagagtaactgctccagtcttga

SEQ ID NO: 3273 - DNA, 20 bp, Propionibacterium propionicus
gatattcagacctttaggca

SEQ ID NO: 3274 - DNA, 20 bp, Pasteurella aerogenes
cgcaaggccggttgccataa

SEQ ID NO: 3275 - DNA, 20 bp, Paenibacillus thiaminolyticus
agcgacggtttccttcggga

SEQ ID NO: 3276 - DNA, 20 bp, Pediococcus dextrinicus
aaaaaccacatggtttttaa

SEQ ID NO: 3277 - DNA, 20 bp, Brevibacillus laterosporus
gggatgctacttcgcgagaa

SEQ ID NO: 3278 - DNA, 20 bp, Neisseria elongata
gttaatacccgtttctgctg

SEQ ID NO: 3279 - DNA, 20 bp, Lactococcus garvieae
gatgattaaagatagcttgc

SEQ ID NO: 3280 - DNA, 20 bp, Streptococcus equi
cagtgatgggagtggaaagt

SEQ ID NO: 3281 - DNA, 20 bp, Clostridium ramosum
aggctccagagatggagaga

SEQ ID NO: 3282 - DNA, 20 bp, Granulicatella adiacens
tcttcgaaccgcatggtttg

SEQ ID NO: 3283 - DNA, 30 bp, Gemella haemolysans
aagagaagcgagctcgcgagagtaagcaaa

SEQ ID NO: 3284 - DNA, 20 bp, Prevotella buccae
cagagatgatgaagtccctc

SEQ ID NO: 3285 - DNA, 20 bp, Prevotella intermedia
cttttgttggggagtaaagc

SEQ ID NO: 3286 - DNA, 30 bp, Bacillus lentus
agaaaggttgaaagacggcttcggctgtca

SEQ ID NO: 3287 - DNA, 20 bp, Bacteroides ovatus
gccgataactccggaatagc

SEQ ID NO: 3288 - DNA, 20 bp, Prevotella corporis
gccggcacagagggctgtcc

SEQ ID NO: 3289 - DNA, 20 bp, Campylobacter curvus
aatggatagggctatatcgt

SEQ ID NO: 3290 - DNA, 20 bp, Prevotella corporis
cccgctgtggcgccactgac

SEQ ID NO: 3291 - DNA, 20 bp, Corynebacterium pilosum
tggttggtacagcgcgcagc

SEQ ID NO: 3292 - DNA, 20 bp, Serratia ficaria
gggcgatgtcttaatacggc

SEQ ID NO: 3293 - DNA, 20 bp, Prevotella corporis
atgcaagtgcgggcgaatcc

SEQ ID NO: 3294 - DNA, 30 bp, Clostridium ramosum
tggacttatggcgcattagctggttggcgg

SEQ ID NO: 3295 - DNA, 20 bp, Dermabacter hominis
ggatatgaccttggcccgca

SEQ ID NO: 3296 - DNA, 20 bp, Bacillus smithii
ctttttgaaagttagcggcg

SEQ ID NO: 3297 - DNA, 20 bp, Propionibacterium granulosum
taacactttttgtgggggag

SEQ ID NO: 3298 - DNA, 20 bp, Prevotella intermedia
cgtggaccaaagattcatcg

SEQ ID NO: 3299 - DNA, 20 bp, Bacteroides forsythus
gcgtatgtaacctgcccgca

SEQ ID NO: 3300 - DNA, 20 bp, Enterococcus cecorum
cgcatggtagatggatgaaa

SEQ ID NO: 3301 - DNA, 20 bp, Pediococcus parvulus
catggttgatttttaaaaga

SEQ ID NO: 3302 - DNA, 20 bp, Prevotella intermedia
tctgacgtggaccaaagatt

SEQ ID NO: 3303 - DNA, 20 bp, Campylobacter curvus
aataccttatactccgtatc

SEQ ID NO: 3304 - DNA, 20 bp, Bacillus badius
cttgacggaagcttgcttcc

SEQ ID NO: 3305 - DNA, 20 bp, Lactococcus lactis
gttctctgtatcgcagctaa

SEQ ID NO: 3306 - DNA, 20 bp, Alicyclobacillus acidocaldarius
cccctcatctctgagggtgt

SEQ ID NO: 3307 - DNA, 20 bp, Kingella denitrificans
ttgcgctatttgagcagcca

SEQ ID NO: 3308 - DNA, 30 bp, Haemophilus ducreyi
gtttgtgccttcgggaactatgtgacaggt

SEQ ID NO: 3309 - DNA, 20 bp, Campylobacter curvus
tatatagctaacttgcccat

SEQ ID NO: 3310 - DNA, 20 bp, Brevibacillus laterosporus
tagggaagaaacagtgctat

SEQ ID NO: 3311 - DNA, 20 bp, Pediococcus pentosaceus
acagtctaagagattagagg

SEQ ID NO: 3312 - DNA, 20 bp, Bacillus smithii
ccttcgcatgaaggaaggtt

SEQ ID NO: 3313 - DNA, 20 bp, Clostridium ramosum
attaaaagtgcctcaaagca

SEQ ID NO: 3314 - DNA, 20 bp, Enterococcus faecalis
agtaactgaacgtcccctga

SEQ ID NO: 3315 - DNA, 20 bp, Kocuria rosea
cgaactgacgagagtgcttg

SEQ ID NO: 3316 - DNA, 20 bp, Streptococcus mitis
cttgcttctccggatgagtt

SEQ ID NO: 3317 - DNA, 20 bp, Neisseria gonorrhoeae
atcggcggccgatgacggta

SEQ ID NO: 3318 - DNA, 20 bp, Propionibacterium propionicus
tacagtcagttgcgagcctg

SEQ ID NO: 3319 - DNA, 20 bp, Streptococcus porcinus
ggtgcttgcaccagtctaat

SEQ ID NO: 3320 - DNA, 20 bp, Porphyromonas maccae
taataccttatggtcttggg

SEQ ID NO: 3321 - DNA, 20 bp, Bacteroides stercoris
cgataactccgggatagcct

SEQ ID NO: 3322 - DNA, 20 bp, Porphyromonas maccae
aaagccgaggactctgacaa

SEQ ID NO: 3323 - DNA, 30 bp, Vibrio hollisae
acctgggagtggcattttgaactggcaggc

SEQ ID NO: 3324 - DNA, 30 bp, Brevibacillus laterosporus
gcgcgcaggtggctatgtaagtctgatgtt

SEQ ID NO: 3325 - DNA, 20 bp, Paenibacillus larvae
aggaagaacggccaggggag

SEQ ID NO: 3326 - DNA, 20 bp, Granulicatella adiacens
caagcttctgctgatggatg

SEQ ID NO: 3327 - DNA, 20 bp, Porphyromonas maccae
gaaatttagcggactatgta

SEQ ID NO: 3328 - DNA, 20 bp, Campylobacter curvus
ctaacttgcccattactaag

SEQ ID NO: 3329 - DNA, 20 bp, Prevotella buccae
tgatgaagtccctcgggact

SEQ ID NO: 3330 - DNA, 20 bp, Neisseria elongata
acccgtttctgctgacggta

SEQ ID NO: 3331 - DNA, 20 bp, Prevotella corporis
gaaggcagcccgctgtggcg

SEQ ID NO: 3332 - DNA, 20 bp, Enterobacter sakazakii
agggagcagcttgctgctct

SEQ ID NO: 3333 - DNA, 30 bp, Streptococcus hyointestinalis
atgtcgtgacggtatcttaccagaaaggga

SEQ ID NO: 3334 - DNA, 20 bp, Paenibacillus larvae
cagcacgcagaggtgggcac

SEQ ID NO: 3335 - DNA, 20 bp, Pediococcus dextrinicus
ataatattaaaaaccacatg

SEQ ID NO: 3336 - DNA, 20 bp, Bacteroides forsythus
tagacgacggagagtgagag

SEQ ID NO: 3337 - DNA, 20 bp, Vibrio hollisae
aatacctgcgttacttgacg

SEQ ID NO: 3338 - DNA, 20 bp, Prevotella corporis
caagtgcgggcgaatcccca

SEQ ID NO: 3339 - DNA, 20 bp, Pediococcus dextrinicus
tcgaacgagttttcttttaa

SEQ ID NO: 3340 - DNA, 30 bp, Moraxella bovis
cttacctggtcttgacataccaagaattcg

SEQ ID NO: 3341 - DNA, 20 bp, Pediococcus pentosaceus
ttgattatgacgtacttgta

SEQ ID NO: 3342 - DNA, 20 bp, Alicyclobacillus acidocaldarius
tcagcggcccaattgggcct

SEQ ID NO: 3343 - DNA, 20 bp, Paenibacillus larvae
aatcctcaaaagccgatctc

SEQ ID NO: 3344 - DNA, 20 bp, Corynebacterium diphtheriae
tagcttgctaggtactcgag

SEQ ID NO: 3345 - DNA, 20 bp, Neisseria gonorrhoeae
ggaagaaaaggccgttgcca

SEQ ID NO: 3346 - DNA, 30 bp, Propionibacterium granulosum
gagtaacctgcccacaactttgggataacg

SEQ ID NO: 3347 - DNA, 20 bp, Clostridium ramosum
agacagggggataactattg

SEQ ID NO: 3348 - DNA, 20 bp, Fusobacterium necrophorum
tttcgcatggaggaatcatg

SEQ ID NO: 3349 - DNA, 20 bp, Enterococcus dispar
ttattatttgaaaggcgctt

SEQ ID NO: 3350 - DNA, 20 bp, Prevotella buccae
gagatgatgaagtccctcgg

SEQ ID NO: 3351 - DNA, 20 bp, Porphyromonas maccae
tttggcttgagtatagatga

SEQ ID NO: 3352 - DNA, 20 bp, Enterobacter sakazakii
gggagcagcttgctgctctg

SEQ ID NO: 3353 - DNA, 20 bp, Bacillus circulans
agcggactttaaaagcttgc

SEQ ID NO: 3354 - DNA, 20 bp, Corynebacterium pilosum
gaggttgagctaatcgcaca

SEQ ID NO: 3355 - DNA, 20 bp, Propionibacterium propionicus
gaatctgtaaaagccggcct

SEQ ID NO: 3356 - DNA, 20 bp, Granulicatella adiacens
cgcaagcttctgctgatgga

SEQ ID NO: 3357 - DNA, 20 bp, Bacillus smithii
gaaggaaggttgaaaggcgg

SEQ ID NO: 3358 - DNA, 20 bp, Neisseria gonorrhoeae
gttgccaatatcggcggccg

SEQ ID NO: 3359 - DNA, 30 bp, Neisseria gonorrhoeae
tcggaacgtaccgggtagcgggggataact

SEQ ID NO: 3360 - DNA, 20 bp, Enterococcus cecorum
tggatgaaaggcgcttttgc

SEQ ID NO: 3361 - DNA, 20 bp, Lactococcus garvieae
aattacttaagtgacggtat

SEQ ID NO: 3362 - DNA, 20 bp, Pediococcus dextrinicus
tagtaactggccagatagtg

SEQ ID NO: 3363 - DNA, 20 bp, Streptococcus hyointestinalis
taataacacatgttattagt

SEQ ID NO: 3364 - DNA, 20 bp, Macrococcus caseolyticus
tatttagcttcgcatgaagc

SEQ ID NO: 3365 - DNA, 20 bp, Prevotella corporis
tccggcccgtacggtctggg

SEQ ID NO: 3366 - DNA, 20 bp, Haemophilus ducreyi
aagactggcgcccgaagcta

SEQ ID NO: 3367 - DNA, 20 bp, Listeria grayi
catggagcaggtttgaaagg

SEQ ID NO: 3368 - DNA, 30 bp, Prevotella intermedia
agattcatcggtggaggatggggatgcgtc

SEQ ID NO: 3369 - DNA, 30 bp, Pediococcus dextrinicus
atagtgacggtatccaatcagaaagccacg

SEQ ID NO: 3370 - DNA, 20 bp, Alicyclobacillus acidocaldarius
cgaagagacccgctcgactt

SEQ ID NO: 3371 - DNA, 20 bp, Enterococcus dispar
attaatgaactcatgtttat

SEQ ID NO: 3372 - DNA, 20 bp, Gemella haemolysans
gtaagcaaacctcacaaaac

SEQ ID NO: 3373 - DNA, 20 bp, Corynebacterium cystitidis
ttgtgctggtatgggatgag

SEQ ID NO: 3374 - DNA, 20 bp, Bacillus azotoformans
aagataaaagatggtttcgg

SEQ ID NO: 3375 - DNA, 20 bp, Bacillus azotoformans
cggataactcttcgaacctc

SEQ ID NO: 3376 - DNA, 20 bp, Pediococcus dextrinicus
aactggccagatagtgacgg

SEQ ID NO: 3377 - DNA, 20 bp, Bacteroides forsythus
atgtagacgacggagagtga

SEQ ID NO: 3378 - DNA, 20 bp, Enterococcus dispar
taccgcataacaatagtaaa

SEQ ID NO: 3379 - DNA, 20 bp, Clostridium ramosum
acggcggctacaggaaatgg

SEQ ID NO: 3380 - DNA, 20 bp, Corynebacterium diphtheriae
ggaaaggcctagcttgctag

SEQ ID NO: 3381 - DNA, 20 bp, Enterococcus faecalis
agtgaaaggcgctttcgggt

SEQ ID NO: 3382 - DNA, 20 bp, Porphyromonas maccae
tggtcttgggttattgcatg

SEQ ID NO: 3383 - DNA, 20 bp, Actinomyces neuii
tacattggtgtctacagagg

SEQ ID NO: 3384 - DNA, 20 bp, Corynebacterium diphtheriae
ctagcttgctaggtactcga

SEQ ID NO: 3385 - DNA, 20 bp, Campylobacter lari
aactaatctcttagagataa

SEQ ID NO: 3386 - DNA, 20 bp, Porphyromonas maccae
tatgctcctgagcgaaagcg

SEQ ID NO: 3387 - DNA, 20 bp, Alicyclobacillus acidocaldarius
cctcatctctgagggtgtca

SEQ ID NO: 3388 - DNA, 20 bp, Lactococcus garvieae
cgcgtgggaaatctgccgag

SEQ ID NO: 3389 - DNA, 20 bp, Neisseria elongata
ggagcggttaatacccgttt

SEQ ID NO: 3390 - DNA, 20 bp, Streptococcus hyointestinalis
tggaaaatccatgtcgtgac

SEQ ID NO: 3391 - DNA, 20 bp, Bacteroides forsythus
gagatacgtgtattttattg

SEQ ID NO: 3392 - DNA, 20 bp, Porphyromonas maccae
cacaaggccgctaagtaggt

SEQ ID NO: 3393 - DNA, 20 bp, Clostridium ramosum
tggtagccgagtgacggtac

SEQ ID NO: 3394 - DNA, 20 bp, Pediococcus dextrinicus
atttaaaaataaacgagtgg

SEQ ID NO: 3395 - DNA, 20 bp, Actinomyces viscosus
ggtgggcctgggaaaggttt

SEQ ID NO: 3396 - DNA, 20 bp, Granulicatella adiacens
aactgttagcgccttgacgg

SEQ ID NO: 3397 - DNA, 20 bp, Campylobacter curvus
cgtatctatataagtagata

SEQ ID NO: 3398 - DNA, 20 bp, Enterococcus faecalis
cttctttcctcccgagtgct

SEQ ID NO: 3399 - DNA, 30 bp, Streptococcus hyointestinalis
agctaataccgcataagaggtaataacaca

SEQ ID NO: 3400 - DNA, 20 bp, Propionibacterium propionicus
atggtcggtacagtcagttg

SEQ ID NO: 3401 - DNA, 20 bp, Staphylococcus kloosii
ctacagtgaaagatggcttt

SEQ ID NO: 3402 - DNA, 20 bp, Bacillus smithii
tccttcgcatgaaggaaggt

SEQ ID NO: 3403 - DNA, 20 bp, Lactococcus lactis
gagtcgcgagacagtgatgt

SEQ ID NO: 3404 - DNA, 20 bp, Streptococcus hyointestinalis
attagtttaaaaggggcaac

SEQ ID NO: 3405 - DNA, 20 bp, Vibrio hollisae
gggcctcacgctattcgagc

SEQ ID NO: 3406 - DNA, 20 bp, Paenibacillus alvei
ggcggcaatgtaagttgggt

SEQ ID NO: 3407 - DNA, 20 bp, Actinomyces neuii
ggttgctattccgtgaggtt

SEQ ID NO: 3408 - DNA, 20 bp, Prevotella intermedia
ttgttggggagtaaagcggg

SEQ ID NO: 3409 - DNA, 20 bp, Prevotella intermedia
gttgactcccttcggggcgt

SEQ ID NO: 3410 - DNA, 20 bp, Enterococcus faecalis
ttagagaagaacaaggacgt

SEQ ID NO: 3411 - DNA, 20 bp, Actinomyces neuii
cttaaagggcatcttggttc

SEQ ID NO: 3412 - DNA, 20 bp, Clostridium ramosum
atggtagccgagtgacggta

SEQ ID NO: 3413 - DNA, 20 bp, Macrococcus caseolyticus
cgaacggacgagagtgcttg

SEQ ID NO: 3414 - DNA, 20 bp, Propionibacterium propionicus
tgtaaactcagtgcttaacg

SEQ ID NO: 3415 - DNA, 20 bp, Propionibacterium granulosum
atgtgctcctgctgcatggt

SEQ ID NO: 3416 - DNA, 20 bp, Bacteroides forsythus
gcccgcaacagagggataac

SEQ ID NO: 3417 - DNA, 20 bp, Listeria grayi
agcttgctcctttggtcgtt

SEQ ID NO: 3418 - DNA, 20 bp, Porphyromonas maccae
aaccgcgaggggcgtgtcag

SEQ ID NO: 3419 - DNA, 20 bp, Haemophilus ducreyi
cagttttgttaatagcaaaa

SEQ ID NO: 3420 - DNA, 20 bp, Bacteroides forsythus
gcagcgatggtagcaatacc

SEQ ID NO: 3421 - DNA, 20 bp, Fusobacterium mortiferum
gatgcttttgtgccccttcg

SEQ ID NO: 3422 - DNA, 30 bp, Lactococcus lactis
ccacgggagttgggagtacccgaagtaggt

SEQ ID NO: 3423 - DNA, 20 bp, Pasteurella aerogenes
agcgcagagatgtgcttgtg

SEQ ID NO: 3424 - DNA, 30 bp, Neisseria gonorrhoeae
tgagtaacatatcggaacgtaccgggtagc

SEQ ID NO: 3425 - DNA, 20 bp, Streptococcus hyointestinalis
ggaaaatccatgtcgtgacg

SEQ ID NO: 3426 - DNA, 30 bp, Streptococcus agalactiae
ttagagaagaacgttggtaggagtggaaaa

SEQ ID NO: 3427 - DNA, 20 bp, Prevotella intermedia
tttacccttcgaataaggac

SEQ ID NO: 3428 - DNA, 20 bp, Rothia mucilaginosa
tagtggttatagatgggctc

SEQ ID NO: 3429 - DNA, 30 bp, Propionibacterium propionicus
taacgctgagcctgctttcgatacgggctg

SEQ ID NO: 3430 - DNA, 20 bp, Propionibacterium avidum
taataccggataggaatcct

SEQ ID NO: 3431 - DNA, 30 bp, Pediococcus dextrinicus
ccggtggagtaacccgtaagggagctagcc

SEQ ID NO: 3432 - DNA, 20 bp, Haemophilus ducreyi
atagcaaaattgattgacgt

SEQ ID NO: 3433 - DNA, 20 bp, Pediococcus damnosus
tgaaccgcatggtttatttt

SEQ ID NO: 3434 - DNA, 20 bp, Clostridium ramosum
aagaacggcggctacaggaa

SEQ ID NO: 3435 - DNA, 30 bp, Streptococcus equi
gtggaaagtccatcatgtgacggtaactaa

SEQ ID NO: 3436 - DNA, 20 bp, Pediococcus dextrinicus
accgcataatattaaaaacc

SEQ ID NO: 3437 - DNA, 20 bp, Campylobacter curvus
tttcggtaatggatagggct

SEQ ID NO: 3438 - DNA, 20 bp, Neisseria gonorrhoeae
gacgttcatgtccgaaagcg

SEQ ID NO: 3439 - DNA, 20 bp, Listeria grayi
atggagcaggtttgaaaggc

SEQ ID NO: 3440 - DNA, 30 bp, Enterococcus faecalis
gacgttagtaactgaacgtcccctgacggt

SEQ ID NO: 3441 - DNA, 20 bp, Bacteroides forsythus
gccatcgatggttaggggtt

SEQ ID NO: 3442 - DNA, 20 bp, Corynebacterium propinquum
ggtgtaggggccttttgggg

SEQ ID NO: 3443 - DNA, 20 bp, Porphyromonas maccae
gataagtcgggggtgaaaag

SEQ ID NO: 3444 - DNA, 20 bp, Listeria grayi
tggtcgttagtggcggacgg

SEQ ID NO: 3445 - DNA, 20 bp, Alicyclobacillus acidocaldarius
gcatggggctttccatcccc

SEQ ID NO: 3446 - DNA, 20 bp, Aerococcus urinae
ggggcgcaggcggtttctta

SEQ ID NO: 3447 - DNA, 20 bp, Prevotella corporis
gcgccggaagcgggcggaat

SEQ ID NO: 3448 - DNA, 20 bp, Prevotella corporis
ggagcaaagatccgtcggtc

SEQ ID NO: 3449 - DNA, 20 bp, Campylobacter lari
atatccaactaatctcttag

SEQ ID NO: 3450 - DNA, 20 bp, Propionibacterium propionicus
agataggcgccccgtaaggt

SEQ ID NO: 3451 - DNA, 20 bp, Enterococcus cecorum
tttaccgcatggtagatgga

SEQ ID NO: 3452 - DNA, 20 bp, Bacteroides forsythus
ccatcgatggttaggggttc

SEQ ID NO: 3453 - DNA, 20 bp, Clostridium ramosum
tcaaagcactggtagaggat

SEQ ID NO: 3454 - DNA, 30 bp, Streptococcus agalactiae
gaagaacgttggtaggagtggaaaatctac

SEQ ID NO: 3455 - DNA, 20 bp, Propionibacterium propionicus
tgtcgaaggtggggctgata

SEQ ID NO: 3456 - DNA, 20 bp, Prevotella intermedia
atttacccttcgaataagga

SEQ ID NO: 3457 - DNA, 20 bp, Pediococcus dextrinicus
ggtttttaattgaaagacgg

SEQ ID NO: 3458 - DNA, 20 bp, Pediococcus dextrinicus
ggccagatagtgacggtatc

SEQ ID NO: 3459 - DNA, 30 bp, Vibrio hollisae
caagtcgagcggcagcgacatgaacaatcc

SEQ ID NO: 3460 - DNA, 20 bp, Prevotella corporis
cggtctgggcggccaagcga

SEQ ID NO: 3461 - DNA, 20 bp, Streptococcus equi
gggagtggaaagtccatcat

SEQ ID NO: 3462 - DNA, 20 bp, Prevotella corporis
catgcaagtgcgggcgaatc

SEQ ID NO: 3463 - DNA, 20 bp, Kocuria rosea
ctgacgagagtgcttgcact

SEQ ID NO: 3464 - DNA, 20 bp, Prevotella corporis
tgtccggcccgtacggtctg

SEQ ID NO: 3465 - DNA, 20 bp, Bacteroides forsythus
tgtaacctgcccgcaacaga

SEQ ID NO: 3466 - DNA, 20 bp, Pediococcus pentosaceus
tctgacagtctaagagatta

SEQ ID NO: 3467 - DNA, 20 bp, Pediococcus damnosus
aataccgcataataaaatga

SEQ ID NO: 3468 - DNA, 20 bp, Prevotella corporis
gaattgcaggagaatgattc

SEQ ID NO: 3469 - DNA, 20 bp, Haemophilus ducreyi
ggttggtctttaagactggc

SEQ ID NO: 3470 - DNA, 20 bp, Prevotella intermedia
taatacccgatgttgtccac

SEQ ID NO: 3471 - DNA, 20 bp, Propionibacterium granulosum
agtaacctgcccacaacttt

SEQ ID NO: 3472 - DNA, 30 bp, Vibrio hollisae
ggtagcgtagttaatacctgcgttacttga

SEQ ID NO: 3473 - DNA, 30 bp, Corynebacterium pilosum
tgaggttgagctaatcgcacaaagccagcc

SEQ ID NO: 3474 - DNA, 20 bp, Paenibacillus macerans
ataccggataatcaagtctt

SEQ ID NO: 3475 - DNA, 20 bp, Enterococcus cecorum
agtcgcaaagccgcgaggct

SEQ ID NO: 3476 - DNA, 20 bp, Bacillus badius
tcgagcggacttgacggaag

SEQ ID NO: 3477 - DNA, 20 bp, Anaerobiospirillum succiniciproducens
cgggccttgacacaccgccc

SEQ ID NO: 3478 - DNA, 30 bp, Peptoniphilus indolicus
gaagacataacagacaccttcgggaagaag

SEQ ID NO: 3479 - DNA, 20 bp, Enterococcus faecium
cacaccacgagagtttgaac

SEQ ID NO: 3480 - DNA, 30 bp, Staphylococcus lutrae
gggaagaacacatgtgtaagtcactatgca

SEQ ID NO: 3481 - DNA, 30 bp, Bacteroides vulgatus
taaattgcagatgaattacggtgaaagccg

SEQ ID NO: 3482 - DNA, 30 bp, Prevotella oralis
ggcatcatggaggttgttttcaacttttga

SEQ ID NO: 3483 - DNA, 30 bp, Actinomyces radingae
ttcgctcgtgtgcaagccgctatttgggta

SEQ ID NO: 3484 - DNA, 20 bp, Shigella dysenteriae
gctcagattgacgctggcgg

SEQ ID NO: 3485 - DNA, 30 bp, Ignavigranum ruoffiae
cgcctgactcattggggaaagatggttttg

SEQ ID NO: 3486 - DNA, 30 bp, Facklamia languida
agcgacttgaacttgttcaagtcaatgtta

SEQ ID NO: 3487 - DNA, 20 bp, Klebsiella pneumoniae
cttcgggttgtaaagacttt

SEQ ID NO: 3488 - DNA, 30 bp, Alloiococcus otitis
aacacggataggagtcactgcctatccctt

SEQ ID NO: 3489 - DNA, 30 bp, Prevotella disiens
tttgtttgggaataatcgacattacgtgta

SEQ ID NO: 3490 - DNA, 30 bp, Alloiococcus otitis
acggataggagtcactgcctatcccttgac

SEQ ID NO: 3491 - DNA, 30 bp, Bacteroides distasonis
gaggtggaaacaccttttctaggcaatagc

SEQ ID NO: 3492 - DNA, 30 bp, Actinomyces radingae
gcaagccgctatttgggtagtggtgagtgt

SEQ ID NO: 3493 - DNA, 30 bp, Alloiococcus otitis
aaatcttcctgcttgcaggaagaggcggag

SEQ ID NO: 3494 - DNA, 20 bp, Shewanella algae
tgcccggtgaatacgttccc

SEQ ID NO: 3495 - DNA, 30 bp, Bacteroides vulgatus
taatacaagatggcatcatgagtccgcatg

SEQ ID NO: 3496 - DNA, 30 bp, Pseudoramibacter alactolyticus
gcagaatcgcatgactttgctgtcaaaact

SEQ ID NO: 3497 - DNA, 20 bp, Shigella dysenteriae
ggctcagattgacgctggcg

SEQ ID NO: 3498 - DNA, 30 bp, Bacteroides eggerthii
aagtggagtatgcatactcctttgtatgta

SEQ ID NO: 3499 - DNA, 20 bp, Klebsiella pneumoniae
ccttcgggttgtaaagactt

SEQ ID NO: 3500 - DNA, 20 bp, Shigella dysenteriae
tggctcagattgacgctggc

SEQ ID NO: 3501 - DNA, 30 bp, Moraxella atlantae
gagaaacacactggtggtgacgttacctgc

SEQ ID NO: 3502 - DNA, 30 bp, Facklamia sourekii
ttaagctcgcatgagtttaagttgaaagac

SEQ ID NO: 3503 - DNA, 20 bp, Burkholderia gladioli
agccggattaatccgcatac

SEQ ID NO: 3504 - DNA, 30 bp, Streptococcus thoraltensis
taaaaggagctaacccatgttagcttttta

SEQ ID NO: 3505 - DNA, 30 bp, Bacteroides distasonis
ggggggcttgagtatgtttgaggcaggcgg

SEQ ID NO: 3506 - DNA, 30 bp, Prevotella oralis
taattccgtatgcagtccgaagcagtcatc

SEQ ID NO: 3507 - DNA, 30 bp, Moraxella atlantae
gtggagaaacacactggtggtgacgttacc

SEQ ID NO: 3508 - DNA, 20 bp, Anaerobiospirillum succiniciproducens
cccgggccttgacacaccgc

SEQ ID NO: 3509 - DNA, 30 bp, Peptoniphilus indolicus
accttcgggaagaagttaagtcggattagc

SEQ ID NO: 3510 - DNA, 30 bp, Bacteroides vulgatus
cctgccgtctactcttggacagccttctga

SEQ ID NO: 3511 - DNA, 30 bp, Alloiococcus otitis
accgcataagttttcccagtgcatgctggg

SEQ ID NO: 3512 - DNA, 30 bp, Bacteroides distasonis
aaactggggggcttgagtatgtttgaggca

SEQ ID NO: 3513 - DNA, 30 bp, Suttonella indologenes
tgggcacttaagtgctcggtaccgcagcta

SEQ ID NO: 3514 - DNA, 30 bp, Helcococcus kunzii
tttcttcggaatgaaaccgaaaaaggaaag

SEQ ID NO: 3515 - DNA, 30 bp, Bacteroides vulgatus
tactcttggacagccttctgaaaggaagat

SEQ ID NO: 3516 - DNA, 30 bp, Bacteroides distasonis
ggaccgaggtggaaacaccttttctagcaa

SEQ ID NO: 3517 - DNA, 30 bp, Weeksella virosa
taataccgtatataaagctaggtggcatca

SEQ ID NO: 3518 - DNA, 30 bp, Ignavigranum ruoffiae
atcctgtattaactgtacaggacttgacgg

SEQ ID NO: 3519 - DNA, 20 bp, Streptococcus constellatus
atcatggctcaggacgacgc

SEQ ID NO: 3520 - DNA, 20 bp, Leuconostoc mesenteroides
tcatggctcaggatgacgct

SEQ ID NO: 3521 - DNA, 30 bp, Dolosigranulum pigrum
taggtggattggtcgcatgacgaattcatt

SEQ ID NO: 3522 - DNA, 20 bp, Bacteroides uniformis
ggcttaagtgccatacgagc

SEQ ID NO: 3523 - DNA, 20 bp, Pseudomonas luteola
tcgggaggacggtaccacgg

SEQ ID NO: 3524 - DNA, 20 bp, Clostridium barati
aggagaacctgcggtggatc

SEQ ID NO: 3525 - DNA, 30 bp, Streptococcus thoraltensis
catttataactaccgtagcttgctacaatt

SEQ ID NO: 3526 - DNA, 30 bp, Suttonella indologenes
gtagctagcttatcagggcggttaccacgg

SEQ ID NO: 3527 - DNA, 30 bp, Leuconostoc fallax
gctagtcgcggacctgatcacttcggtgag

SEQ ID NO: 3528 - DNA, 30 bp, Bacteroides distasonis
caccttttctagcaatagccgtttgcgagg

SEQ ID NO: 3529 - DNA, 30 bp, Bacteroides vulgatus
aagatggcatcatgagtccgcatgttcaca

SEQ ID NO: 3530 - DNA, 20 bp, Prevotella bivia
cgcgggaatacgttcccggg

SEQ ID NO: 3531 - DNA, 20 bp, Bacillus alcalophilus
ttgacggacctaaccagaaa

SEQ ID NO: 3532 - DNA, 20 bp, Anaerobiospirillum succiniciproducens
cttgacacaccgcccgtcac

SEQ ID NO: 3533 - DNA, 20 bp, Streptococcus equinus
gatcatggctcaggcgaacg

SEQ ID NO: 3534 - DNA, 20 bp, Citrobacter freundii
tactcgcagaagaagcccgg

SEQ ID NO: 3535 - DNA, 30 bp, Actinomyces radingae
gccgctatttgggtagtggtgagtgtagcg

SEQ ID NO: 3536 - DNA, 30 bp, Prevotella bivia
cgaatagatagcttgctatttatgtcggcg

SEQ ID NO: 3537 - DNA, 30 bp, Dolosigranulum pigrum
atatcactgcttgcagtgattgattagtgg

SEQ ID NO: 3538 - DNA, 30 bp, Virgibacillus proomii
aatacgttttcttgcataaggagacgttaa

SEQ ID NO: 3539 - DNA, 20 bp, Bacillus alcalophilus
gacggacctaaccagaaagc

SEQ ID NO: 3540 - DNA, 30 bp, Actinomyces radingae
gccctgagcgcctagagataggtgtgcatt

SEQ ID NO: 3541 - DNA, 30 bp, Streptococcus thoraltensis
cgcataaaaggagctaacccatgttagctt

SEQ ID NO: 3542 - DNA, 30 bp, Alloiococcus otitis
ttgttggggaagaacacggataggagtcac

SEQ ID NO: 3543 - DNA, 30 bp, Atopobium parvulum
aatacttcgagacttccgcatggaagactc

SEQ ID NO: 3544 - DNA, 30 bp, Streptococcus thoraltensis
tagcttgctacaattggtataaatgagtcg

SEQ ID NO: 3545 - DNA, 30 bp, Facklamia languida
cgacttgaacttgttcaagtcaatgttagt

SEQ ID NO: 3546 - DNA, 30 bp, Dolosigranulum pigrum
tggattggtcgcatgacgaattcattaaag

SEQ ID NO: 3547 - DNA, 30 bp, Dolosigranulum pigrum
ctaataccccataggtggattggtcgcatg

SEQ ID NO: 3548 - DNA, 30 bp, Bacteroides vulgatus
aagtcgggtatggatacccgtttgcatgta

SEQ ID NO: 3549 - DNA, 20 bp, Leclercia adecarboxylata
aatacggaggggcaagcgtt

SEQ ID NO: 3550 - DNA, 20 bp, Citrobacter youngae
tccggccagcagccgcggta

SEQ ID NO: 3551 - DNA, 30 bp, Leuconostoc fallax
cgcatttcgcatgaagtgtgtttaaaaggg

SEQ ID NO: 3552 - DNA, 20 bp, Anaerobiospirillum succiniciproducens
gcgggaatacgttcccgggc

SEQ ID NO: 3553 - DNA, 30 bp, Leuconostoc fallax
gagacgtaaagcatatggctagagtggcga

SEQ ID NO: 3554 - DNA, 20 bp, Leuconostoc mesenteroides
gctcaggatgacgctggcgg

SEQ ID NO: 3555 - DNA, 30 bp, Ignavigranum ruoffiae
cataggccagtgagtcgcctgactcattgg

SEQ ID NO: 3556 - DNA, 20 bp, Bacillus alcalophilus
tgacggacctaaccagaaag

SEQ ID NO: 3557 - DNA, 30 bp, Leuconostoc fallax
cctgatcacttcggtgagacgtaaagcata

SEQ ID NO: 3558 - DNA, 30 bp, Dolosigranulum pigrum
ttgggggctttccggccctcggtgctggag

SEQ ID NO: 3559 - DNA, 30 bp, Alloiococcus otitis
gccaaatcttcctgcttgcaggaagaggcg

SEQ ID NO: 3560 - DNA, 30 bp, Leuconostoc fallax
acgtaaagcatatggctagagtggcgaacg

SEQ ID NO: 3561 - DNA, 30 bp, Bacteroides vulgatus
tcatgagtccgcatgttcacatgattaaag

SEQ ID NO: 3562 - DNA, 30 bp, Bacteroides eggerthii
gcggaatgtagtggaaacattacagccttc

SEQ ID NO: 3563 - DNA, 30 bp, Corynebacterium group ANF
actagatgaggcgagagatcgtctgtccct

SEQ ID NO: 3564 - DNA, 30 bp, Prevotella bivia
ccttatgtattcgtttgatctcatgagatt

SEQ ID NO: 3565 - DNA, 30 bp, Dolosigranulum pigrum
catgacgaattcattaaaggtggctttgct

SEQ ID NO: 3566 - DNA, 20 bp, Leuconostoc mesenteroides
ctcaggatgacgctggcggc

SEQ ID NO: 3567 - DNA, 20 bp, Burkholderia gladioli
cagattgacgctggcggcat

SEQ ID NO: 3568 - DNA, 30 bp, Prevotella oralis
gtaaatgcggtccaatccttaaaacgtgcc

SEQ ID NO: 3569 - DNA, 30 bp, Corynebacterium group ANF
cagggtggtgcctgtggtggaaaacgtttt

SEQ ID NO: 3570 - DNA, 30 bp, Atopobium parvulum
ccgtggataataccgaatacttcgagactt

SEQ ID NO: 3571 - DNA, 30 bp, Bacillus marinus
cggataaccctgactctctcctgagagtca

SEQ ID NO: 3572 - DNA, 20 bp, Bacillus alcalophilus
cggacctaaccagaaagcca

SEQ ID NO: 3573 - DNA, 20 bp, Bacillus alcalophilus
ccttgacggacctaaccaga

SEQ ID NO: 3574 - DNA, 20 bp, Leuconostoc mesenteroides
caggatgacgctggcggcgt

SEQ ID NO: 3575 - DNA, 30 bp, Bacillus marinus
ctctcctgagagtcagttgaaagatggttt

SEQ ID NO: 3576 - DNA, 20 bp, Anaerobiospirillum succiniciproducens
tcccgggccttgacacaccg

SEQ ID NO: 3577 - DNA, 30 bp, Vagococcus fluvialis
ataaaagacgcttcggtgtcactgttggat

SEQ ID NO: 3578 - DNA, 20 bp, Shewanella algae
atgcccggtgaatacgttcc

SEQ ID NO: 3579 - DNA, 20 bp, Bacillus alcalophilus
acggacctaaccagaaagcc

SEQ ID NO: 3580 - DNA, 30 bp, Bacteroides distasonis
ggtttgaacgcattcggaccgaggtggaaa

SEQ ID NO: 3581 - DNA, 30 bp, Bacteroides vulgatus
gatgaattacggtgaaagccgtaagccgca

SEQ ID NO: 3582 - DNA, 30 bp, Prevotella oralis
taatttggacgaaaggtatattctatcggt

SEQ ID NO: 3583 - DNA, 30 bp, Brevibacillus thermoruber
atagggcaccttctcgcatgagagggtgcg

SEQ ID NO: 3584 - DNA, 30 bp, Moraxella atlantae
agggaggaagagctagtggagaaacacact

SEQ ID NO: 3585 - DNA, 30 bp, Leuconostoc fallax
agaatagttaatgtaggaaatgatgttaat

SEQ ID NO: 3586 - DNA, 30 bp, Bacillus marinus
ggagttagagaagcttgcttctctaactta

SEQ ID NO: 3587 - DNA, 30 bp, Helcococcus kunzii
atgcaagttgaacgagaatttttcagtcga

SEQ ID NO: 3588 - DNA, 30 bp, Dolosigranulum pigrum
gggctttccggccctcggtgctggagctaa

SEQ ID NO: 3589 - DNA, 30 bp, Prevotella oralis
cgttgaaaggcggcctaattccgtatgcag

SEQ ID NO: 3590 - DNA, 30 bp, Alloiococcus otitis
cactgcctatcccttgacggtacccaacca

SEQ ID NO: 3591 - DNA, 30 bp, Ignavigranum ruoffiae
tgttagagaagaaccatcctgtattaactg

SEQ ID NO: 3592 - DNA, 30 bp, Streptococcus thoraltensis
aattggtataaatgagtcgcgaacgggtga

SEQ ID NO: 3593 - DNA, 30 bp, Weeksella virosa
ttgggttttcgggctcagtggttaagcgaa

SEQ ID NO: 3594 - DNA, 30 bp, Bacteroides vulgatus
ttttataaaggaataaagtcgggtatggat

SEQ ID NO: 3595 - DNA, 30 bp, Myroides odoratus
aatgtaattacgtgtaattatttgacggta

SEQ ID NO: 3596 - DNA, 30 bp, Suttonella indologenes
taacgtataggaatctaccttggggtgggg

SEQ ID NO: 3597 - DNA, 30 bp, Weeksella virosa
agctaggtggcatcatttagttttgaaaga

SEQ ID NO: 3598 - DNA, 30 bp, Bacteroides vulgatus
gcctgctaagctgcaactgacattgaggct

SEQ ID NO: 3599 - DNA, 30 bp, Virgibacillus proomii
tcttgcataaggagacgttaaaaggcggcg

SEQ ID NO: 3600 - DNA, 30 bp, Dolosigranulum pigrum
gtcgaacgatgatatcactgcttgcagtga

SEQ ID NO: 3601 - DNA, 30 bp, Suttonella indologenes
ttaatacctgtgaatttgacattagctaaa

SEQ ID NO: 3602 - DNA, 30 bp, Bacteroides caccae
atgaattatggggaaacccatacgccgcaa

SEQ ID NO: 3603 - DNA, 30 bp, Streptococcus acidominimus
ataagagttgacaacacatgttgttaattt

SEQ ID NO: 3604 - DNA, 30 bp, Leuconostoc fallax
gatcacttcggtgagacgtaaagcatatgg

SEQ ID NO: 3605 - DNA, 30 bp, Bacteroides vulgatus
ttcacatgattaaaggtattccggtagacg

SEQ ID NO: 3606 - DNA, 30 bp, Bacteroides vulgatus
ttacggtgaaagccgtaagccgcaaggcat

SEQ ID NO: 3607 - DNA, 30 bp, Suttonella indologenes
aactaggtgttgggcacttaagtgctcggt

SEQ ID NO: 3608 - DNA, 30 bp, Ignavigranum ruoffiae
aacgaaggagcttgcttcttccgcgtgagt

SEQ ID NO: 3609 - DNA, 30 bp, Bacillus psychrosaccharolyticus
ttgttgagtttactcaacaattagcggcgg

SEQ ID NO: 3610 - DNA, 30 bp, Weeksella virosa
gatggatacttgctgttgggttttcgggct

SEQ ID NO: 3611 - DNA, 30 bp, Bacteroides vulgatus
tggatatcttgagtgcagttgaggcaggcg

SEQ ID NO: 3612 - DNA, 30 bp, Prevotella oralis
ctgccattgacttgaatagagatattcatt

SEQ ID NO: 3613 - DNA, 30 bp, Vagococcus fluvialis
gcataatttgttttcccgcatgggagaata

SEQ ID NO: 3614 - DNA, 30 bp, Bacteroides vulgatus
aaggcagcctgctaagctgcaactgacatt

SEQ ID NO: 3615 - DNA, 30 bp, Sphingobacterium multivorum
gagagcttgctcgaagacggtgagagtggc

SEQ ID NO: 3616 - DNA, 30 bp, Kingella kingae
gaagaaaaggttgatgctaatatcattaac

SEQ ID NO: 3617 - DNA, 30 bp, Bacteroides caccae
aaatgaattatggggaaacccatacgccgc

SEQ ID NO: 3618 - DNA, 30 bp, Suttonella indologenes
tagtgaagaaaggtttatggttaatacctg

SEQ ID NO: 3619 - DNA, 30 bp, Suttonella indologenes
tatggttaatacctgtgaatttgacattag

SEQ ID NO: 3620 - DNA, 30 bp, Empedobacter brevis
cgcgtatgcaacttgccctactgaaaagga

SEQ ID NO: 3621 - DNA, 30 bp, Brevibacillus thermoruber
ttacgctaataccggatagggcaccttctc

SEQ ID NO: 3622 - DNA, 30 bp, Streptococcus thoraltensis
accgtagcttgctacaattggtataaatga

SEQ ID NO: 3623 - DNA, 30 bp, Suttonella indologenes
gcactttcgttagtgaagaaaggtttatgg

SEQ ID NO: 3624 - DNA, 30 bp, Streptococcus thoraltensis
tagagatagaacttttcttaggaacactgg

SEQ ID NO: 3625 - DNA, 30 bp, Actinomyces radingae
gtgggaaaggggcctttgtggtttctggag

SEQ ID NO: 3626 - DNA, 30 bp, Bacteroides vulgatus
gtccgcatgttcacatgattaaaggtattc

SEQ ID NO: 3627 - DNA, 30 bp, Facklamia languida
gacataggatgcataacctagagataggtg

SEQ ID NO: 3628 - DNA, 30 bp, Pseudoramibacter alactolyticus
tttgctgtcaaaactccggtgccgatagat

SEQ ID NO: 3629 - DNA, 30 bp, Clostridium cadaveris
aagattaataccgcatattatgatttttct

SEQ ID NO: 3630 - DNA, 30 bp, Prevotella disiens
aatacccaatgatattcattgatgacatct

SEQ ID NO: 3631 - DNA, 30 bp, Bacteroides distasonis
tttctaggcaatagccgtttgcgaggtgct

SEQ ID NO: 3632 - DNA, 30 bp, Atopobium parvulum
tgcccctttcattgggatagccacgggaaa

SEQ ID NO: 3633 - DNA, 30 bp, Clostridium limosum
atcatttcaatgcatgttgaaatgattaaa

SEQ ID NO: 3634 - DNA, 30 bp, Suttonella indologenes
tgcaccagaagtagctagcttatcagggcg

SEQ ID NO: 3635 - DNA, 30 bp, Dolosigranulum pigrum
acgaattcattaaaggtggctttgctacca

SEQ ID NO: 3636 - DNA, 30 bp, Helcococcus kunzii
agataggatagtcttttcggagacttgtat

SEQ ID NO: 3637 - DNA, 30 bp, Suttonella indologenes
gtgagtaacgtataggaatctaccttgggg

SEQ ID NO: 3638 - DNA, 30 bp, Prevotella disiens
tcattgatgacatctgatttgaattaaaga

SEQ ID NO: 3639 - DNA, 30 bp, Prevotella oralis
ttacccgggcttgaactgccattgacttga

SEQ ID NO: 3640 - DNA, 30 bp, Moraxella atlantae
gtcataagattgtaaagcactttaagcagg

SEQ ID NO: 3641 - DNA, 30 bp, Empedobacter brevis
acaagatgcgaatctcgaaaacttatctca

SEQ ID NO: 3642 - DNA, 30 bp, Streptococcus thoraltensis
tcccggtgccggttctagagatagaacttt

SEQ ID NO: 3643 - DNA, 30 bp, Streptococcus acidominimus
cgagcagcgaactggtgacagtaagccaat

SEQ ID NO: 3644 - DNA, 30 bp, Clostridium cadaveris
gcatgggaaagtcatgaaaggagcaatccg

SEQ ID NO: 3645 - DNA, 30 bp, Pseudoramibacter alactolyticus
aaaccgcataacacagcagaatcgcatgac

SEQ ID NO: 3646 - DNA, 30 bp, Bacteroides vulgatus
acccgtttgcatgtactttatgaataagga

SEQ ID NO: 3647 - DNA, 30 bp, Streptococcus thoraltensis
tttaaaaggtgcaacagcatcacttaaaga

SEQ ID NO: 3648 - DNA, 30 bp, Prevotella bivia
acctgcccataactaagggataacccagcg

SEQ ID NO: 3649 - DNA, 30 bp, Prevotella bivia
gggaacgtgttcccttttgcaggtaccata

SEQ ID NO: 3650 - DNA, 30 bp, Veillonella atypica
ggacgaatggttcttgtgcgaatagtgcga

SEQ ID NO: 3651 - DNA, 30 bp, Eubacterium moniliforme
tattgtactttcgcatgaaagaacaattaa

SEQ ID NO: 3652 - DNA, 20 bp, Streptococcus ratti
ccgtgttttcttgagtcgcg

SEQ ID NO: 3653 - DNA, 30 bp, Helcococcus kunzii
gtaaatgttaaagaatttcggtgaaagatg

SEQ ID NO: 3654 - DNA, 30 bp, Moraxella atlantae
gcgtaaagcgggtgcaggtggtgcactaag

SEQ ID NO: 3655 - DNA, 30 bp, Alloiococcus otitis
cccgaagccggccgggcaaccatttggagc

SEQ ID NO: 3656 - DNA, 30 bp, Bacteroides eggerthii
gggcagcatgattgaagcttgcttcaatcg

SEQ ID NO: 3657 - DNA, 30 bp, Actinomyces radingae
cctgcctttttctttgggataacgctcaga

SEQ ID NO: 3658 - DNA, 30 bp, Peptoniphilus indolicus
caaccctcgtaagcatttgaaacttctaaa

SEQ ID NO: 3659 - DNA, 20 bp, Prevotella bivia
ctcaacttctagattgcagc

SEQ ID NO: 3660 - DNA, 30 bp, Bacteroides caccae
acccatacgccgcaaggcatttgtgaaggt

SEQ ID NO: 3661 - DNA, 30 bp, Moraxella atlantae
gaggaagagccagtggagaaacacactggt

SEQ ID NO: 3662 - DNA, 30 bp, Peptoniphilus indolicus
tcaaccctcgtaagcatttgaaacttctaa

SEQ ID NO: 3663 - DNA, 30 bp, Dolosigranulum pigrum
aggtaactactagcgccttgacggtatcta

SEQ ID NO: 3664 - DNA, 30 bp, Leptotrichia buccalis
tcaaccgcaggcctgccccggaaactacag

SEQ ID NO: 3665 - DNA, 30 bp, Dolosigranulum pigrum
actgacagacttgaatgtagaagaggaaaa

SEQ ID NO: 3666 - DNA, 20 bp, Prevotella oralis
gtccgaagcagtcatctaat

SEQ ID NO: 3667 - DNA, 20 bp, Corynebacterium macginleyi
tctacgattctcgtgccgta

SEQ ID NO: 3668 - DNA, 30 bp, Facklamia languida
caagtcaatgttagtggcgcacgggtgagt

SEQ ID NO: 3669 - DNA, 30 bp, Weeksella virosa
ggatagttgaaggtagcatatgaataagca

SEQ ID NO: 3670 - DNA, 30 bp, Bacteroides distasonis
cctgccaagccattactgacgctgatgcac

SEQ ID NO: 3671 - DNA, 30 bp, Suttonella indologenes
tgggtaactagagtatgtcagaggaaggcg

SEQ ID NO: 3672 - DNA, 30 bp, Bacteroides vulgatus
atccaacctgccgtctactcttggacagcc

SEQ ID NO: 3673 - DNA, 20 bp, Corynebacterium group ANF
attcccgataggactgcagg

SEQ ID NO: 3674 - DNA, 30 bp, Staphylococcus simulans
ataacacatgaaaccgcatggtttcatgat

SEQ ID NO: 3675 - DNA, 30 bp, Moraxella atlantae
ggcgagagcttttgctataagatgtgccta

SEQ ID NO: 3676 - DNA, 30 bp, Suttonella indologenes
agtcgaacgagggaagcagcttgctgcgga

SEQ ID NO: 3677 - DNA, 30 bp, Alloiococcus otitis
tgcaagtcgaacgccaaatcttcctgcttg

SEQ ID NO: 3678 - DNA, 30 bp, Facklamia languida
ttgacataggatgcataacctagagatagg

SEQ ID NO: 3679 - DNA, 30 bp, Bacteroides distasonis
taccgcatgaagcagggatcccgcatggga

SEQ ID NO: 3680 - DNA, 30 bp, Virgibacillus proomii
ataaggagacgttaaaaggcggcgcaagct

SEQ ID NO: 3681 - DNA, 30 bp, Bacteroides eggerthii
atagtttttccgcatggtttcactattaaa

SEQ ID NO: 3682 - DNA, 20 bp, Bacteroides vulgatus
atacccgtttgcatgtactt

SEQ ID NO: 3683 - DNA, 30 bp, Abiotrophia defectiva
tgctaataccgcataggacatgggatcaca

SEQ ID NO: 3684 - DNA, 30 bp, Alloiococcus otitis
agtggcgaaagcgactttctgggctatgat

SEQ ID NO: 3685 - DNA, 30 bp, Prevotella oralis
tactacggcataccccgttgaaaggcggcc

SEQ ID NO: 3686 - DNA, 30 bp, Prevotella disiens
gttgaaagacggactaatacccaatgatat

SEQ ID NO: 3687 - DNA, 30 bp, Streptococcus thoraltensis
aacccatgttagctttttaaaaggtgcaac

SEQ ID NO: 3688 - DNA, 30 bp, Prevotella bivia
ctgtcagacttgagtgcgcacaacgtaggc

SEQ ID NO: 3689 - DNA, 20 bp, Corynebacterium kutscheri
tgcttgcaagagagtactcg

SEQ ID NO: 3690 - DNA, 30 bp, Bacteroides vulgatus
aaggaagattaatacaagatggcatcatga

SEQ ID NO: 3691 - DNA, 30 bp, Helcococcus kunzii
aacgagaatttttcagttgatttcttcgga

SEQ ID NO: 3692 - DNA, 30 bp, Weeksella virosa
tttatcgctataagatagacatgcgtaaga

SEQ ID NO: 3693 - DNA, 30 bp, Alloiococcus otitis
ttgcaggaagaggcggagtggcgaacgggt

SEQ ID NO: 3694 - DNA, 20 bp, Facklamia sourekii
accttaagctcgcatgagtt

SEQ ID NO: 3695 - DNA, 30 bp, Helcococcus kunzii
gaatttttcagtcgatttcttcggaatgaa

SEQ ID NO: 3696 - DNA, 30 bp, Streptococcus thoraltensis
catgttagctttttaaaaggtgcaacagca

SEQ ID NO: 3697 - DNA, 30 bp, Clostridium cadaveris
gagggagcaccttcgggtgtgaactagcgg

SEQ ID NO: 3698 - DNA, 30 bp, Dolosigranulum pigrum
cactgcttgcagtgattgattagtggcgaa

SEQ ID NO: 3699 - DNA, 20 bp, Streptococcus ratti
caagtgggacgcaagggaac

SEQ ID NO: 3700 - DNA, 30 bp, Suttonella indologenes
acttaagtgctcggtaccgcagctaacgca

SEQ ID NO: 3701 - DNA, 20 bp, Streptococcus thoraltensis
gaacttttcttaggaacact

SEQ ID NO: 3702 - DNA, 30 bp, Gemella morbillorum
tatttctcgcatgagagatatttaaaagtt

SEQ ID NO: 3703 - DNA, 30 bp, Alloiococcus otitis
ctgttgttggggaagaacacggataggagt

SEQ ID NO: 3704 - DNA, 20 bp, Leuconostoc fallax
gtttaaaaggggcttcggcc

SEQ ID NO: 3705 - DNA, 30 bp, Dolosigranulum pigrum
aagtcggccggccaaccctatgggaggcag

SEQ ID NO: 3706 - DNA, 30 bp, Prevotella bivia
tgatctcatgagattacgaataaagattta

SEQ ID NO: 3707 - DNA, 30 bp, Suttonella indologenes
aagaaaggtttatggttaatacctgtgaat

SEQ ID NO: 3708 - DNA, 30 bp, Facklamia sourekii
tcggaaacggtagctaataccgcataaacc

SEQ ID NO: 3709 - DNA, 30 bp, Dolosigranulum pigrum
cggccggccaaccctatgggaggcagccgt

SEQ ID NO: 3710 - DNA, 30 bp, Bacillus psychrosaccharolyticus
tgcaagtcgagcgaattgttgagtttactc

SEQ ID NO: 3711 - DNA, 30 bp, Myroides odoratus
aatcttatagcttaactataaaattgccgt

SEQ ID NO: 3712 - DNA, 30 bp, Prevotella oralis
tccttaaaacgtgcctcagttcggactggg

SEQ ID NO: 3713 - DNA, 30 bp, Bacteroides distasonis
cgtggacaaagggaggccacctggcgacag

SEQ ID NO: 3714 - DNA, 30 bp, Leuconostoc fallax
ggaagaatagttaatgtaggaaatgatgtt

SEQ ID NO: 3715 - DNA, 30 bp, Bacteroides vulgatus
ttctgaaaggaagattaatacaagatggca

SEQ ID NO: 3716 - DNA, 30 bp, Suttonella indologenes
tagcttatcagggcggttaccacggtgtga

SEQ ID NO: 3717 - DNA, 30 bp, Alloiococcus otitis
cgggcaaccatttggagccagccgtcgaag

SEQ ID NO: 3718 - DNA, 20 bp, Empedobacter brevis
gccctactgaaaaggatagc

SEQ ID NO: 3719 - DNA, 30 bp, Moraxella atlantae
ctacgggagaaaggaggcgagagcttttgc

SEQ ID NO: 3720 - DNA, 30 bp, Peptoniphilus indolicus
gtgaaaggcgagggctcaaccctcgtaagc

SEQ ID NO: 3721 - DNA, 30 bp, Streptococcus sobrinus
taactgtttaaaagaagccattgcttcact

SEQ ID NO: 3722 - DNA, 30 bp, Dolosigranulum pigrum
gatgctaataccccataggtggattggtcg

SEQ ID NO: 3723 - DNA, 20 bp, Streptococcus thoraltensis
gctaacccatgttagctttt

SEQ ID NO: 3724 - DNA, 20 bp, Myroides odoratus
gctacgatgattaggggtcc

SEQ ID NO: 3725 - DNA, 30 bp, Paenibacillus apiarius
tagacattttcctcgcctgagggaaatggg

SEQ ID NO: 3726 - DNA, 30 bp, Actinomyces radingae
ctttttctttgggataacgctcagaaatgg

SEQ ID NO: 3727 - DNA, 30 bp, Staphylococcus simulans
acacatgaaaccgcatggtttcatgatgaa

SEQ ID NO: 3728 - DNA, 20 bp, Granulicatella elegans
cataggttctagagtcgcat

SEQ ID NO: 3729 - DNA, 30 bp, Bacteroides caccae
aaacccatacgccgcaaggcatttgtgaag

SEQ ID NO: 3730 - DNA, 30 bp, Facklamia languida
ttcaagtcaatgttagtggcgcacgggtga

SEQ ID NO: 3731 - DNA, 20 bp, Anaerobiospirillum succiniciproducens
tgggttggtcattctaaact

SEQ ID NO: 3732 - DNA, 30 bp, Alloiococcus otitis
tgcctatcccttgacggtacccaaccagaa

SEQ ID NO: 3733 - DNA, 30 bp, Prevotella oralis
gtatattctatcggtaatggatggggatgc

SEQ ID NO: 3734 - DNA, 30 bp, Bacteroides vulgatus
caacccttgttgtcagttactaacaggttc

SEQ ID NO: 3735 - DNA, 30 bp, Suttonella indologenes
tgaatttgacattagctaaagaagaagcac

SEQ ID NO: 3736 - DNA, 30 bp, Peptoniphilus indolicus
tgaaaggcgagggctcaaccctcgtaagca

SEQ ID NO: 3737 - DNA, 30 bp, Veillonella atypica
atacgatccaatctcggcatcgagactgga

SEQ ID NO: 3738 - DNA, 20 bp, Prevotella disiens
ttgtaggagcacgatacaga

SEQ ID NO: 3739 - DNA, 30 bp, Clostridium glycolicum
ccttttgggaagcgagtgtcgaaggtgaaa

SEQ ID NO: 3740 - DNA, 30 bp, Brevibacterium epidermidis
atacgaccacctgacgcatgttgggtggtg

SEQ ID NO: 3741 - DNA, 20 bp, Prevotella bivia
acgtgttcccttttgcaggt

SEQ ID NO: 3742 - DNA, 30 bp, Dolosigranulum pigrum
agcgatcccgcaagggctagctaatctttc

SEQ ID NO: 3743 - DNA, 30 bp, Dolosigranulum pigrum
atgggaggcagccgtcgaaggtgggttgaa

SEQ ID NO: 3744 - DNA, 30 bp, Alloiococcus otitis
acacccgaagccggccgggcaaccatttgg

SEQ ID NO: 3745 - DNA, 30 bp, Prevotella disiens
ggttgcatgtaaatgtaatctaatctttaa

SEQ ID NO: 3746 - DNA, 30 bp, Clostridium clostridiiforme
aattaagatgaagttttcggatggaatctt

SEQ ID NO: 3747 - DNA, 30 bp, Bacteroides vulgatus
aagccgtaagccgcaaggcatctgtgaagg

SEQ ID NO: 3748 - DNA, 30 bp, Moraxella atlantae
agctttctggcacaatactgacactcagac

SEQ ID NO: 3749 - DNA, 30 bp, Bacteroides distasonis
ggcagcctgccaagccattactgacgctga

SEQ ID NO: 3750 - DNA, 30 bp, Clostridium cadaveris
tattatggtttttctgcatgggaaagtcat

SEQ ID NO: 3751 - DNA, 30 bp, Helcococcus kunzii
ttatgatacattaatatcgcatgatgtaaa

SEQ ID NO: 3752 - DNA, 20 bp, Dolosigranulum pigrum
caagggctagctaatctttc

SEQ ID NO: 3753 - DNA, 30 bp, Dolosigranulum pigrum
aagggctagctaatctttcaaagccattct

SEQ ID NO: 3754 - DNA, 30 bp, Suttonella indologenes
atgtcaactaggtgttgggcacttaagtgc

SEQ ID NO: 3755 - DNA, 30 bp, Bacteroides distasonis
gaacgcattcggaccgaggtggaaacacct

SEQ ID NO: 3756 - DNA, 30 bp, Sphingobacterium multivorum
gcttgctcgaagatggtgagagtggcgcac

SEQ ID NO: 3757 - DNA, 30 bp, Clostridium cadaveris
tattatgatttttctgcatgggaaagtcat

SEQ ID NO: 3758 - DNA, 30 bp, Bacteroides vulgatus
ccgattgcgaaggcagcctgctaagctgca

SEQ ID NO: 3759 - DNA, 30 bp, Actinomyces radingae
agtttctggagggagatgggctcgcggctt

SEQ ID NO: 3760 - DNA, 30 bp, Moraxella atlantae
tgggcgtaaagcgggtgcaggtggtgcact

SEQ ID NO: 3761 - DNA, 30 bp, Moraxella atlantae
atactggtgaactagagtatatgagaggaa

SEQ ID NO: 3762 - DNA, 30 bp, Abiotrophia defectiva
gcttgcactaggtcaaggtgagtggcgaac

SEQ ID NO: 3763 - DNA, 30 bp, Paenibacillus apiarius
attttcctcgcctgagggaaatgggaaaga

SEQ ID NO: 3764 - DNA, 30 bp, Staphylococcus simulans
ggatgtaagtaactatgcatcccttgacgg

SEQ ID NO: 3765 - DNA, 20 bp, Weeksella virosa
ttgggttttcgggctcagtg

SEQ ID NO: 3766 - DNA, 30 bp, Dolosigranulum pigrum
agaagaacacgtgctaggtaactactagcg

SEQ ID NO: 3767 - DNA, 30 bp, Campylobacter lari
gatgaagcgactagcttgctagttgtggat

SEQ ID NO: 3768 - DNA, 30 bp, Actinomyces radingae
ctctttcgctcgtgtgcaagccgctatttg

SEQ ID NO: 3769 - DNA, 30 bp, Alloiococcus otitis
ggcgaaagcgactttctgggctatgattga

SEQ ID NO: 3770 - DNA, 30 bp, Pasteurella multocida
ggtattttaatagaatacttgattgacgtt

SEQ ID NO: 3771 - DNA, 30 bp, Helcococcus kunzii
accgggattaataccttatgatacattaat

SEQ ID NO: 3772 - DNA, 30 bp, Streptococcus thoraltensis
aacgcatttataactaccgtagcttgctac

SEQ ID NO: 3773 - DNA, 30 bp, Suttonella indologenes
cataacacttacgagtcaaagcgggggatc

SEQ ID NO: 3774 - DNA, 30 bp, Bacteroides distasonis
accttacccgggtttgaacgcattcggacc

SEQ ID NO: 3775 - DNA, 30 bp, Actinomyces radingae
catgcgccctgagcgcctagagataggtgt

SEQ ID NO: 3776 - DNA, 30 bp, Actinomyces radingae
aatgggtgctaatactggatgttctgcgct

SEQ ID NO: 3777 - DNA, 30 bp, Facklamia languida
aagtcgaacgaacagcgacttgaacttgtt

SEQ ID NO: 3778 - DNA, 30 bp, Clostridium cadaveris
aagattaataccgcatattatggtttttct

SEQ ID NO: 3779 - DNA, 20 bp, Bacteroides vulgatus
aagtcgggtatgcatacccg

SEQ ID NO: 3780 - DNA, 20 bp, Pseudoramibacter alactolyticus
aggagcgattcggagcgaat

SEQ ID NO: 3781 - DNA, 30 bp, Corynebacterium kutscheri
ggctttcttgcttgcaagagagtactcgag

SEQ ID NO: 3782 - DNA, 20 bp, Prevotella disiens
atcgacattacgtgtaatgt

SEQ ID NO: 3783 - DNA, 20 bp, Dolosigranulum pigrum
ccccataggtggattggtcg

SEQ ID NO: 3784 - DNA, 20 bp, Weeksella virosa
ttgctgttgggttttcgggc

SEQ ID NO: 3785 - DNA, 20 bp, Helcococcus kunzii
ccacggttcggtttagaaac

SEQ ID NO: 3786 - DNA, 20 bp, Prevotella oralis
ccttcggggcattggtggag

SEQ ID NO: 3787 - DNA, 20 bp, Pseudoramibacter alactolyticus
tttgctgtcaaaactccggt

SEQ ID NO: 3788 - DNA, 30 bp, Leuconostoc lactis
cactctcgtttagattgaaggagcttgctc

SEQ ID NO: 3789 - DNA, 20 bp, Suttonella indologenes
aagcagcttgctgcggacct

SEQ ID NO: 3790 - DNA, 20 bp, Globicatella sanguinis
actagaacttgttctggtta

SEQ ID NO: 3791 - DNA, 20 bp, Leptotrichia buccalis
ggcggccctgtaagtctagg

SEQ ID NO: 3792 - DNA, 20 bp, Actinomyces turicensis
aactttgttggggtggatta

SEQ ID NO: 3793 - DNA, 20 bp, Suttonella indologenes
cactttcgttagtgaagaaa

SEQ ID NO: 3794 - DNA, 20 bp, Brevibacterium epidermidis
acctgacgcatgttgggtgg

SEQ ID NO: 3795 - DNA, 20 bp, Actinomyces radingae
cccgaagcttgtggcttaac

SEQ ID NO: 3796 - DNA, 20 bp, Actinomyces radingae
tggtttctggagggagatgg

SEQ ID NO: 3797 - DNA, 20 bp, Weeksella virosa
aataccgtatataaagctag

SEQ ID NO: 3798 - DNA, 20 bp, Corynebacterium group ANF
ttcccgataggactgcaggg

SEQ ID NO: 3799 - DNA, 20 bp, Globicatella sanguinis
ctactagaggaaatgttagt

SEQ ID NO: 3800 - DNA, 30 bp, Bacteroides distasonis
caacccttgccactagttactaacaggtta

SEQ ID NO: 3801 - DNA, 20 bp, Myroides odoratus
ccagtacagaaagcagctac

SEQ ID NO: 3802 - DNA, 20 bp, Anaerobiospirillum succiniciproducens
ggaggaaacactgacgttac

SEQ ID NO: 3803 - DNA, 30 bp, Suttonella indologenes
taccttggggtgggggataacgtatggaaa

SEQ ID NO: 3804 - DNA, 20 bp, Anaerobiospirillum succiniciproducens
ggggaggaaacactgacggt

SEQ ID NO: 3805 - DNA, 20 bp, Haemophilus segnis
atgtttaataggcatcacga

SEQ ID NO: 3806 - DNA, 20 bp, Actinomyces radingae
cgcctgtcgtgtaatcctct

SEQ ID NO: 3807 - DNA, 20 bp, Streptococcus mutans
gggacgcaaggaaacacact

SEQ ID NO: 3808 - DNA, 30 bp, Alloiococcus otitis
cattggaaactggcggacttgaatgtagca

SEQ ID NO: 3809 - DNA, 30 bp, Bacillus marinus
aaccggggctaataccggataaccctgact

SEQ ID NO: 3810 - DNA, 20 bp, Bacteroides vulgatus
gtctactcttggacagcctt

SEQ ID NO: 3811 - DNA, 20 bp, Myroides odoratus
ttaatgctccatggtttata

SEQ ID NO: 3812 - DNA, 20 bp, Prevotella bivia
tgctatttatgtcggcgacc

SEQ ID NO: 3813 - DNA, 20 bp, Prevotella oris
gcttgcttccccgggcgtcg

SEQ ID NO: 3814 - DNA, 20 bp, Dolosigranulum pigrum
tttgctaccactcatggata

SEQ ID NO: 3815 - DNA, 20 bp, Bacteroides thetaiotaomicron
attcggtatgagatggggat

SEQ ID NO: 3816 - DNA, 20 bp, Pseudoramibacter alactolyticus
attgacccttcggggggata

SEQ ID NO: 3817 - DNA, 20 bp, Moraxella atlantae
tcgaacgatggaacctagct

SEQ ID NO: 3818 - DNA, 20 bp, Suttonella indologenes
ttgggcacttaagtgctcgg

SEQ ID NO: 3819 - DNA, 20 bp, Prevotella bivia
agcttgctatttatgtcggc

SEQ ID NO: 3820 - DNA, 20 bp, Lactococcus raffinolactis
cgacatttgaaagtaccaaa

SEQ ID NO: 3821 - DNA, 20 bp, Haemophilus segnis
gcatcacgattgacgttaat

SEQ ID NO: 3822 - DNA, 20 bp, Leuconostoc fallax
cttcggtgagacgtaaagca

SEQ ID NO: 3823 - DNA, 30 bp, Sphingobacterium multivorum
ctaaaagccattcacaggtcggattggggt

SEQ ID NO: 3824 - DNA, 20 bp, Staphylococcus lutrae
acatgtgtaagtcactatgc

SEQ ID NO: 3825 - DNA, 30 bp, Virgibacillus proomii
aaccccttcgggggtgacgcatgtggaacg

SEQ ID NO: 3826 - DNA, 20 bp, Alloiococcus otitis
ggagtcactgcctatccctt

SEQ ID NO: 3827 - DNA, 20 bp, Bacteroides distasonis
aatccccaaaccacgtctca

SEQ ID NO: 3828 - DNA, 20 bp, Bacteroides vulgatus
aggcagcctgctaagctgca

SEQ ID NO: 3829 - DNA, 20 bp, Atopobium parvulum
gacttccgcatggaagactc

SEQ ID NO: 3830 - DNA, 20 bp, Bacillus marinus
cctgagagtcagttgaaaga

SEQ ID NO: 3831 - DNA, 30 bp, Streptococcus thoraltensis
catgcaagtggaacgcatttataactaccg

SEQ ID NO: 3832 - DNA, 30 bp, Facklamia sourekii
tttaagttgaaagacggcttttgctgtcac

SEQ ID NO: 3833 - DNA, 20 bp, Peptoniphilus indolicus
ctcaaccctcgtaagcattt

SEQ ID NO: 3834 - DNA, 20 bp, Streptococcus acidominimus
ataagagttgacaacacatg

SEQ ID NO: 3835 - DNA, 20 bp, Bacteroides distasonis
gcttgagtatgtttgaggca

SEQ ID NO: 3836 - DNA, 20 bp, Weeksella virosa
tgttgggttttcgggctcag

SEQ ID NO: 3837 - DNA, 20 bp, Clostridium histolyticum
ttcaatactccggtgccgca

SEQ ID NO: 3838 - DNA, 30 bp, Suttonella indologenes
taccacataacacttacgagtcaaagcggg

SEQ ID NO: 3839 - DNA, 20 bp, Corynebacterium confusum
gcttgctggagtactcgagt

SEQ ID NO: 3840 - DNA, 30 bp, Cardiobacterium hominis
tcgcggcaagagatgagcccatgttggatt

SEQ ID NO: 3841 - DNA, 30 bp, Prevotella oralis
aatcttgagtacgcagtaagcaggcggaat

SEQ ID NO: 3842 - DNA, 20 bp, Weeksella virosa
ctggatagttgaaggtagca

SEQ ID NO: 3843 - DNA, 20 bp, Atopobium parvulum
ccccgctcgctctcgatacc

SEQ ID NO: 3844 - DNA, 20 bp, Bacillus schlegellii
ggggcaaggaaaggggcgac

SEQ ID NO: 3845 - DNA, 20 bp, Alloiococcus otitis
tctgctaccttcagagatga

SEQ ID NO: 3846 - DNA, 20 bp, Actinomyces radingae
tctttcgctcgtgtgcaagc

SEQ ID NO: 3847 - DNA, 20 bp, Peptoniphilus indolicus
aagacataacagacaccttc

SEQ ID NO: 3848 - DNA, 20 bp, Leuconostoc fallax
gacgtaaagcatatggctag

SEQ ID NO: 3849 - DNA, 20 bp, Prevotella oralis
agtcggccgtatgtaaatgc

SEQ ID NO: 3850 - DNA, 20 bp, Leptotrichia buccalis
ggcctgccccggaaactaca

SEQ ID NO: 3851 - DNA, 20 bp, Atopobium parvulum
tgcccctttcattgggatag

SEQ ID NO: 3852 - DNA, 20 bp, Prevotella oralis
ccgaagcagtcatctaattt

SEQ ID NO: 3853 - DNA, 30 bp, Streptococcus acidominimus
acatgttgttaatttaaaaggagcaacagc

SEQ ID NO: 3854 - DNA, 20 bp, Campylobacter coli
ccgtaggagaacctgcgttg

SEQ ID NO: 3855 - DNA, 20 bp, Corynebacterium macginleyi
gggtttttctacgattctcg

SEQ ID NO: 3856 - DNA, 20 bp, Suttonella indologenes
acctgtgaatttgacattag

SEQ ID NO: 3857 - DNA, 20 bp, Bacteroides caccae
aattatggggaaacccatac

SEQ ID NO: 3858 - DNA, 20 bp, Corynebacterium kutscheri
ttgcaagagagtactcgagt

SEQ ID NO: 3859 - DNA, 20 bp, Empedobacter brevis
ctactgaaaaggatagccct

SEQ ID NO: 3860 - DNA, 30 bp, Prevotella bivia
aggagctcaacttctagattgcagcgcgaa

SEQ ID NO: 3861 - DNA, 20 bp, Staphylococcus simulans
cggataacacatgaaaccgc

SEQ ID NO: 3862 - DNA, 20 bp, Bacteroides eggerthii
cggaatgtagtggaaacatt

SEQ ID NO: 3863 - DNA, 20 bp, Veillonella atypica
aatagtgcgaggatttgacg

SEQ ID NO: 3864 - DNA, 20 bp, Anaerobiospirillum succiniciproducens
ctggctttctagagtattgc

SEQ ID NO: 3865 - DNA, 20 bp, Moraxella atlantae
gaacgatggaacctagcttg

SEQ ID NO: 3866 - DNA, 20 bp, Bacteroides thetaiotaomicron
ccgatagcatatatttcccg

SEQ ID NO: 3867 - DNA, 20 bp, Empedobacter brevis
acttgccctactgaaaagga

SEQ ID NO: 3868 - DNA, 20 bp, Comamonas terrigena
gcaagaccttgtgctactag

SEQ ID NO: 3869 - DNA, 20 bp, Facklamia sourekii
gcataaaccttaagctcgca

SEQ ID NO: 3870 - DNA, 20 bp, Dolosigranulum pigrum
ggtcgcatgacgaattcatt

SEQ ID NO: 3871 - DNA, 20 bp, Prevotella disiens
gacattacgtgtaatgtttt

SEQ ID NO: 3872 - DNA, 20 bp, Streptococcus thoraltensis
aaggagctaacccatgttag

SEQ ID NO: 3873 - DNA, 20 bp, Helcococcus kunzii
accacggttcggtttagaaa

SEQ ID NO: 3874 - DNA, 20 bp, Sphingobacterium multivorum
agttagtgaagagtgcagag

SEQ ID NO: 3875 - DNA, 20 bp, Vagococcus fluvialis
taaaagacgcttcggtgtca

SEQ ID NO: 3876 - DNA, 20 bp, Alloiococcus otitis
tgttggggaagaacacggat

SEQ ID NO: 3877 - DNA, 30 bp, Prevotella oralis
gcagcgcgaactgggaatcttgagtacgca

SEQ ID NO: 3878 - DNA, 20 bp, Myroides odoratus
tccatggtttatatgaatgg

SEQ ID NO: 3879 - DNA, 20 bp, Bacteroides distasonis
acaaagggaggccacctggc

SEQ ID NO: 3880 - DNA, 20 bp, Leuconostoc fallax
atgatgttaatgtgacggta

SEQ ID NO: 3881 - DNA, 20 bp, Brevibacillus thermoruber
cttctcgcatgagagggtgc

SEQ ID NO: 3882 - DNA, 20 bp, Moraxella atlantae
ctggtgaactagagtatatg

SEQ ID NO: 3883 - DNA, 20 bp, Gemella morbillorum
tatacatgtaagagacggta

SEQ ID NO: 3884 - DNA, 20 bp, Empedobacter brevis
aacttgccctactgaaaagg

SEQ ID NO: 3885 - DNA, 20 bp, Alloiococcus otitis
aagcgactttctgggctatg

SEQ ID NO: 3886 - DNA, 30 bp, Bacteroides vulgatus
gatggatgtttaagtcagttgtgaaagttt

SEQ ID NO: 3887 - DNA, 20 bp, Bacteroides vulgatus
cccacctagtcttcgatgga

SEQ ID NO: 3888 - DNA, 30 bp, Facklamia sourekii
atggtacagcgagcagcgaagtcgtgaggc

SEQ ID NO: 3889 - DNA, 30 bp, Moraxella atlantae
ggggctcatgaagccttagtggcgcagcta

SEQ ID NO: 3890 - DNA, 20 bp, Prevotella loescheii
ccccttgggtcggtgaccaa

SEQ ID NO: 3891 - DNA, 20 bp, Clostridium tetani
tgcctgggtgaaccaggagg

SEQ ID NO: 3892 - DNA, 20 bp, Ochrobactrum intermedium
accctatacgaccgagaggt

SEQ ID NO: 3893 - DNA, 20 bp, Corynebacterium macginleyi
tgtgagggtttttctacgat

SEQ ID NO: 3894 - DNA, 20 bp, Pseudoramibacter alactolyticus
tgctgtcaaaactccggtgc

SEQ ID NO: 3895 - DNA, 20 bp, Streptococcus thoraltensis
caattggtataaatgagtcg

SEQ ID NO: 3896 - DNA, 20 bp, Facklamia sourekii
agctcgcatgagtttgagtt

SEQ ID NO: 3897 - DNA, 20 bp, Sporosarcina pasteurii
gcatagccgtctttcagagt

SEQ ID NO: 3898 - DNA, 20 bp, Prevotella disiens
gttagcacctggtgttagcg

SEQ ID NO: 3899 - DNA, 20 bp, Moraxella atlantae
agaaacacactggtggtgac

SEQ ID NO: 3900 - DNA, 20 bp, Myroides odoratus
atgtaattacgtgtaattat

SEQ ID NO: 3901 - DNA, 20 bp, Moraxella atlantae
acactggtggtgacgttacc

SEQ ID NO: 3902 - DNA, 20 bp, Atopobium parvulum
ggaagactcgagaaagctcc

SEQ ID NO: 3903 - DNA, 20 bp, Alloiococcus otitis
gactttctgggctatgattg

SEQ ID NO: 3904 - DNA, 20 bp, Bordetella avium
ctaataccttgcgcaaatga

SEQ ID NO: 3905 - DNA, 20 bp, Facklamia languida
acataggatgcataacctag

SEQ ID NO: 3906 - DNA, 20 bp, Bacillus marinus
actctctcctgagagtcagt

SEQ ID NO: 3907 - DNA, 20 bp, Moraxella atlantae
aggtggtgcactaagtcata

SEQ ID NO: 3908 - DNA, 20 bp, Anaerobiospirillum succiniciproducens
gtcgattaggagcttgaact

SEQ ID NO: 3909 - DNA, 20 bp, Prevotella oralis
ggcttgaactgccattgact

SEQ ID NO: 3910 - DNA, 30 bp, Cardiobacterium hominis
cgcggcaagagatgagcccatgttggatta

SEQ ID NO: 3911 - DNA, 20 bp, Prevotella oralis
ggtccaatccttaaaacgtg

SEQ ID NO: 3912 - DNA, 20 bp, Ignavigranum ruoffiae
catcctgtattaactgtaca

SEQ ID NO: 3913 - DNA, 30 bp, Dolosigranulum pigrum
tgaatgtagaagaggaaaatggaattccaa

SEQ ID NO: 3914 - DNA, 20 bp, Ignavigranum ruoffiae
gagaagaaccatcctgtatt

SEQ ID NO: 3915 - DNA, 20 bp, Weeksella virosa
cctgaagttggcgaccgtaa

SEQ ID NO: 3916 - DNA, 20 bp, Prevotella oralis
gaatcttgagtacgcagtaa

SEQ ID NO: 3917 - DNA, 20 bp, Leuconostoc fallax
aacacatttcgcatgaagtg

SEQ ID NO: 3918 - DNA, 30 bp, Dolosigranulum pigrum
ccctcggtgctggagctaacgtattaagca

SEQ ID NO: 3919 - DNA, 30 bp, Myroides odoratus
ctataaaattgccgttgatactgcttgact

SEQ ID NO: 3920 - DNA, 20 bp, Bacteroides distasonis
tctagcaatagccgtttgcg

SEQ ID NO: 3921 - DNA, 20 bp, Streptococcus bovis
catttgaaagtaccaactgg

SEQ ID NO: 3922 - DNA, 20 bp, Staphylococcus simulans
gtttcatgatgaaagacggt

SEQ ID NO: 3923 - DNA, 20 bp, Facklamia sourekii
acagcgagcagcgaagtcgt

SEQ ID NO: 3924 - DNA, 20 bp, Anaerobiospirillum succiniciproducens
aagacttcggttgctatcag

SEQ ID NO: 3925 - DNA, 20 bp, Bacillus schlegellii
tttcccgcgagggacggcgg

SEQ ID NO: 3926 - DNA, 20 bp, Lactococcus raffinolactis
aacaatgttggatgcatatt

SEQ ID NO: 3927 - DNA, 20 bp, Corynebacterium confusum
cgcttaaagttggccttagt

SEQ ID NO: 3928 - DNA, 20 bp, Facklamia languida
ttgaacttgttcaagtcaat

SEQ ID NO: 3929 - DNA, 20 bp, Lactococcus raffinolactis
atgttggatgcatattcgac

SEQ ID NO: 3930 - DNA, 20 bp, Actinomyces turicensis
ccaactttgttggggtggat

SEQ ID NO: 3931 - DNA, 20 bp, Prevotella loescheii
cgaactggggcgcttgagtg

SEQ ID NO: 3932 - DNA, 20 bp, Streptococcus thoraltensis
agaacttttcttaggaacac

SEQ ID NO: 3933 - DNA, 20 bp, Anaerobiospirillum succiniciproducens
tcggttgctatcagatgagc

SEQ ID NO: 3934 - DNA, 20 bp, Brevibacillus thermoruber
cgcatgagagggtgcggaaa

SEQ ID NO: 3935 - DNA, 30 bp, Prevotella oralis
atccaaccttcccattactacggcataccc

SEQ ID NO: 3936 - DNA, 20 bp, Atopobium parvulum
atggaagactcgagaaagct

SEQ ID NO: 3937 - DNA, 20 bp, Streptococcus sobrinus
gttactaatgagtcgcgaac

SEQ ID NO: 3938 - DNA, 20 bp, Leuconostoc fallax
gcatttcgcatgaagtgtgt

SEQ ID NO: 3939 - DNA, 20 bp, Atopobium parvulum
ttcattgggatagccacggg

SEQ ID NO: 3940 - DNA, 20 bp, Anaerobiospirillum succiniciproducens
ttcggttgctatcagatgag

SEQ ID NO: 3941 - DNA, 20 bp, Bacteroides vulgatus
aattacggtgaaagccgtaa

SEQ ID NO: 3942 - DNA, 20 bp, Alloiococcus otitis
aagaacacggataggagtca

SEQ ID NO: 3943 - DNA, 20 bp, Streptococcus ratti
aagatgcaagcgcatcacta

SEQ ID NO: 3944 - DNA, 30 bp, Paenibacillus apiarius
aaccttgggtcgcatccaaaactgcatgac

SEQ ID NO: 3945 - DNA, 20 bp, Dolosigranulum pigrum
taggtggattggtcgcatga

SEQ ID NO: 3946 - DNA, 20 bp, Bacteroides capilosus
ttcgtccaatggattgggtt

SEQ ID NO: 3947 - DNA, 20 bp, Suttonella indologenes
ggggtgggggataacgtatg

SEQ ID NO: 3948 - DNA, 20 bp, Streptococcus ratti
tgcttgcacaccgtgttttc

SEQ ID NO: 3949 - DNA, 20 bp, Lactococcus raffinolactis
tcgacatttgaaagtaccaa

SEQ ID NO: 3950 - DNA, 30 bp, Moraxella atlantae
gaaatagtggcgaacgggtgagtaacattt

SEQ ID NO: 3951 - DNA, 20 bp, Streptococcus thoraltensis
gtataaatgagtcgcgaacg

SEQ ID NO: 3952 - DNA, 20 bp, Bacteroides vulgatus
agatggatgtttaagtcagt

SEQ ID NO: 3953 - DNA, 20 bp, Anaerobiospirillum succiniciproducens
ggctttctagagtattgcag

SEQ ID NO: 3954 - DNA, 20 bp, Veillonella atypica
atagtgcgaggatttgacgg

SEQ ID NO: 3955 - DNA, 30 bp, Facklamia sourekii
gagtaactgttactgatttgacggtatcta

SEQ ID NO: 3956 - DNA, 20 bp, Prevotella disiens
tgtttgggaataatcgacat

SEQ ID NO: 3957 - DNA, 20 bp, Dolosigranulum pigrum
gcaagggctagctaatcttt

SEQ ID NO: 3958 - DNA, 20 bp, Peptoniphilus indolicus
gatgaagacataacagacac

SEQ ID NO: 3959 - DNA, 20 bp, Dolosigranulum pigrum
ccataggtggattggtcgca

SEQ ID NO: 3960 - DNA, 20 bp, Anaerobiospirillum succiniciproducens
ttggtcattctaaactgcct

SEQ ID NO: 3961 - DNA, 30 bp, Paenibacillus apiarius
cctgagggaaatgggaaagacggagcaatc

SEQ ID NO: 3962 - DNA, 30 bp, Suttonella indologenes
ggaaacgtacgctaataccacataacactt

SEQ ID NO: 3963 - DNA, 30 bp, Dolosigranulum pigrum
ggaaactgacagacttgaatgtagaagagg

SEQ ID NO: 3964 - DNA, 20 bp, Facklamia sourekii
gctcgcatgagtttaagttg

SEQ ID NO: 3965 - DNA, 20 bp, Moraxella atlantae
tttaggaaactgccttatag

SEQ ID NO: 3966 - DNA, 20 bp, Bacteroides eggerthii
cagcggaatgtagtggaaac

SEQ ID NO: 3967 - DNA, 30 bp, Bacteroides eggerthii
cgggcttaaattgcagcggaatgtagtgga

SEQ ID NO: 3968 - DNA, 20 bp, Bacteroides capilosus
ctcatgacagaggattcgtc

SEQ ID NO: 3969 - DNA, 20 bp, Bacteroides caccae
attatggggaaacccatacg

SEQ ID NO: 3970 - DNA, 20 bp, Psychrobacter phenylpyruvicus
ctaacttttagagggcgctc

SEQ ID NO: 3971 - DNA, 20 bp, Prevotella oralis
cgtatgcagtccgaagcagt

SEQ ID NO: 3972 - DNA, 20 bp, Anaerobiospirillum succiniciproducens
gtcattctaaactgcctttc

SEQ ID NO: 3973 - DNA, 20 bp, Corynebacterium confusum
tgacatatttaggttcgcgg

SEQ ID NO: 3974 - DNA, 20 bp, Weeksella virosa
gttgggttttcgggctcagt

SEQ ID NO: 3975 - DNA, 20 bp, Kytococcus sedentarius
gatacgaccgaccctcgcat

SEQ ID NO: 3976 - DNA, 20 bp, Alloiococcus otitis
taccgcataagttttcccag

SEQ ID NO: 3977 - DNA, 30 bp, Facklamia languida
cggctgtcacttaaggatggctccgcggtg

SEQ ID NO: 3978 - DNA, 20 bp, Anaerobiospirillum succiniciproducens
tcgattaggagcttgaactt

SEQ ID NO: 3979 - DNA, 20 bp, Weeksella virosa
gaatgggatagcccggagaa

SEQ ID NO: 3980 - DNA, 30 bp, Leuconostoc fallax
gacaacctgcctctaagcaggggataacat

SEQ ID NO: 3981 - DNA, 20 bp, Bacteroides vulgatus
atggcatcatgagtccgcat

SEQ ID NO: 3982 - DNA, 20 bp, Lactococcus raffinolactis
gcatagagtggaaaattatg

SEQ ID NO: 3983 - DNA, 30 bp, Pasteurella multocida
gtgatgaggaaggcaggtattttaatagaa

SEQ ID NO: 3984 - DNA, 20 bp, Dolosigranulum pigrum
cactgcttgcagtgattgat

SEQ ID NO: 3985 - DNA, 20 bp, Actinomyces radingae
aactgggggtgtgcggtggg

SEQ ID NO: 3986 - DNA, 20 bp, Microbacterium hominis
acaccagaacaccgtagaaa

SEQ ID NO: 3987 - DNA, 20 bp, Bacteroides thetaiotaomicron
tatggggaaacccataggcc

SEQ ID NO: 3988 - DNA, 20 bp, Bacteroides merdae
gtagtctgaccggagtggaa

SEQ ID NO: 3989 - DNA, 20 bp, Bacteroides eggerthii
actcctttgtatgtaccgta

SEQ ID NO: 3990 - DNA, 20 bp, Pseudoramibacter alactolyticus
ttgacccttcggggggatat

SEQ ID NO: 3991 - DNA, 30 bp, Bordetella avium
aggcgcaggctaataccttgcgcaaatgac

SEQ ID NO: 3992 - DNA, 20 bp, Prevotella bivia
gctatttatgtcggcgaccg

SEQ ID NO: 3993 - DNA, 20 bp, Anaerobiospirillum succiniciproducens
ctgggttggtcattctaaac

SEQ ID NO: 3994 - DNA, 20 bp, Myroides odoratus
gaagaaatgtaattacgtgt

SEQ ID NO: 3995 - DNA, 30 bp, Dolosigranulum pigrum
tgaggaacttgcccatgagcgggggacaac

SEQ ID NO: 3996 - DNA, 20 bp, Clostridium clostridiiforme
cggatggaatcttgattgac

SEQ ID NO: 3997 - DNA, 20 bp, Actinomyces radingae
gtgggaaaggggcctttgtg

SEQ ID NO: 3998 - DNA, 20 bp, Veillonella atypica
gaatagtgcgaggatttgac

SEQ ID NO: 3999 - DNA, 20 bp, Bacillus schlegellii
gagggacggcggagacaggt

SEQ ID NO: 4000 - DNA, 20 bp, Corynebacterium kutscheri
taggaccacattttagtgtg

SEQ ID NO: 4001 - DNA, 30 bp, Suttonella indologenes
gaaactgggtaactagagtatgtcagagga

SEQ ID NO: 4002 - DNA, 30 bp, Kingella kingae
tactcttgtgccttcgggagccgtagcaca

SEQ ID NO: 4003 - DNA, 20 bp, Kocuria kristinae
tgcgactactgcccgcatgg

SEQ ID NO: 4004 - DNA, 20 bp, Actinomyces radingae
tgcaagccgctatttgggta

SEQ ID NO: 4005 - DNA, 20 bp, Leuconostoc fallax
cgcatgaagtgtgtttaaaa

SEQ ID NO: 4006 - DNA, 30 bp, Bacteroides distasonis
cacgtgttacaatggcgtggacaaagggag

SEQ ID NO: 4007 - DNA, 30 bp, Facklamia languida
gctgtcacttaaggatggctccgcggtgca

SEQ ID NO: 4008 - DNA, 20 bp, Prevotella bivia
tcgtgaccgtacaggatcga

SEQ ID NO: 4009 - DNA, 20 bp, Facklamia sourekii
cttaagctcgcatgagtttg

SEQ ID NO: 4010 - DNA, 30 bp, Bacteroides distasonis
aggttctatggatcgtaaacctcttttata

SEQ ID NO: 4011 - DNA, 30 bp, Kingella kingae
gctaatatcattaactgatgacggtaccta

SEQ ID NO: 4012 - DNA, 20 bp, Streptococcus sobrinus
cgcataagaggagttaactc

SEQ ID NO: 4013 - DNA, 30 bp, Comamonas testosteroni
acccacctttgacatggcaggaatccttta

SEQ ID NO: 4014 - DNA, 20 bp, Empedobacter brevis
atcgcagtaggataggcatg

SEQ ID NO: 4015 - DNA, 20 bp, Actinomyces turicensis
tgatgctccaactttgttgg

SEQ ID NO: 4016 - DNA, 20 bp, Anaerobiospirillum succiniciproducens
cagagggagatggaatttca

SEQ ID NO: 4017 - DNA, 20 bp, Actinomyces radingae
tcgcgcctgtcgtgtaatcc

SEQ ID NO: 4018 - DNA, 20 bp, Anaerobiospirillum succiniciproducens
gttggtcattctaaactgcc

SEQ ID NO: 4019 - DNA, 20 bp, Dolosigranulum pigrum
aggtaactactagcgccttg

SEQ ID NO: 4020 - DNA, 20 bp, Streptococcus mutans
gcaagtgggacgcaaggaaa

SEQ ID NO: 4021 - DNA, 20 bp, Ignavigranum ruoffiae
cataggccagtgagtcgcct

SEQ ID NO: 4022 - DNA, 20 bp, Bacillus marinus
taaccctgactctctcctga

SEQ ID NO: 4023 - DNA, 30 bp, Streptococcus thoraltensis
aaaggtgcaacagcatcacttaaagatgga

SEQ ID NO: 4024 - DNA, 30 bp, Prevotella disiens
gatttgaattaaagatttatcggtatagga

SEQ ID NO: 4025 - DNA, 20 bp, Bacillus sp
cttgcataaggagacgttaa

SEQ ID NO: 4026 - DNA, 20 bp, Suttonella indologenes
tgttgggcacttaagtgctc

SEQ ID NO: 4027 - DNA, 20 bp, Brevibacillus thermoruber
gggcaccttctcgcatgaga

SEQ ID NO: 4028 - DNA, 20 bp, Ignavigranum ruoffiae
ttaactgtacaggacttgac

SEQ ID NO: 4029 - DNA, 20 bp, Weeksella virosa
cgtatataaagctaggtggc

SEQ ID NO: 4030 - DNA, 20 bp, Comamonas terrigena
caagaccttgtgctactaga

SEQ ID NO: 4031 - DNA, 30 bp, Weeksella virosa
tggcgaccgtaacaggagctacctagggta

SEQ ID NO: 4032 - DNA, 20 bp, Helcococcus kunzii
gataggatagtcttttcgga

SEQ ID NO: 4033 - DNA, 20 bp, Facklamia languida
caagtcaatgttagtggcgc

SEQ ID NO: 4034 - DNA, 20 bp, Actinomyces radingae
agccgctatttgggtagtgg

SEQ ID NO: 4035 - DNA, 20 bp, Bacteroides eggerthii
agtggaaacattacagcctt

SEQ ID NO: 4036 - DNA, 20 bp, Anaerococcus prevotii
cagtcgaaggtaggataggt

SEQ ID NO: 4037 - DNA, 20 bp, Pseudoramibacter alactolyticus
aacacagcagaatcgcatga

SEQ ID NO: 4038 - DNA, 20 bp, Vagococcus fluvialis
tgattttcaccggagcttgc

SEQ ID NO: 4039 - DNA, 20 bp, Leuconostoc fallax
cgtataacaacgcatttcgc

SEQ ID NO: 4040 - DNA, 30 bp, Clostridium cadaveris
gtaataagggaagctctttcgggagcagga

SEQ ID NO: 4041 - DNA, 20 bp, Bacteroides vulgatus
cgtctactcttggacagcct

SEQ ID NO: 4042 - DNA, 20 bp, Corynebacterium kutscheri
cttgcttgcaagagagtact

SEQ ID NO: 4043 - DNA, 20 bp, Prevotella oralis
ccgtatgcagtccgaagcag

SEQ ID NO: 4044 - DNA, 20 bp, Corynebacterium macginleyi
gtgagggtttttctacgatt

SEQ ID NO: 4045 - DNA, 20 bp, Bacteroides ureolyticus
tacacagaggaacaacagtt

SEQ ID NO: 4046 - DNA, 20 bp, Comamonas terrigena
cgcaagaccttgtgctacta

SEQ ID NO: 4047 - DNA, 20 bp, Peptoniphilus indolicus
atgaagacataacagacacc

SEQ ID NO: 4048 - DNA, 20 bp, Staphylococcus simulans
gatgtaagtaactgtgcatc

SEQ ID NO: 4049 - DNA, 20 bp, Anaerobiospirillum succiniciproducens
tgacatcgtaggaatctttt

SEQ ID NO: 4050 - DNA, 30 bp, Prevotella disiens
taatctaatctttaaagccggtcccagttc

SEQ ID NO: 4051 - DNA, 20 bp, Brevibacterium epidermidis
cctgacgcatgttgggtggt

SEQ ID NO: 4052 - DNA, 20 bp, Suttonella indologenes
cctgtgaatttgacattagc

SEQ ID NO: 4053 - DNA, 20 bp, Bacteroides vulgatus
acaagatggcatcatgagtc

SEQ ID NO: 4054 - DNA, 20 bp, Psychrobacter phenylpyruvicus
agcctaacttttagagggcg

SEQ ID NO: 4055 - DNA, 20 bp, Anaerobiospirillum succiniciproducens
gggggaaagacttcggttgc

SEQ ID NO: 4056 - DNA, 20 bp, Streptococcus thoraltensis
ggaacgcatttataactacc

SEQ ID NO: 4057 - DNA, 20 bp, Weeksella virosa
ataccgtatataaagctagg

SEQ ID NO: 4058 - DNA, 20 bp, Anaerobiospirillum succiniciproducens
cttcggttgctatcagatga

SEQ ID NO: 4059 - DNA, 20 bp, Weeksella virosa
atagaatgggatagcccgga

SEQ ID NO: 4060 - DNA, 20 bp, Bacteroides capilosus
tcatgacagaggattcgtcc

SEQ ID NO: 4061 - DNA, 20 bp, Leuconostoc fallax
gtaaagcatatggctagagt

SEQ ID NO: 4062 - DNA, 20 bp, Anaerobiospirillum succiniciproducens
gaaagacttcggttgctatc

SEQ ID NO: 4063 - DNA, 20 bp, Leuconostoc fallax
aagcatatggctagagtggc

SEQ ID NO: 4064 - DNA, 20 bp, Streptococcus thoraltensis
gcataaaaggagctaaccca

SEQ ID NO: 4065 - DNA, 20 bp, Weeksella virosa
ggatagttgaaggtagcata

SEQ ID NO: 4066 - DNA, 30 bp, Bacteroides eggerthii
agcttgcttcaatcgatggcgaccggcgca

SEQ ID NO: 4067 - DNA, 20 bp, Dolosigranulum pigrum
gtcgcatgacgaattcatta

SEQ ID NO: 4068 - DNA, 30 bp, Ignavigranum ruoffiae
cggatgctaataccgcataggccagtgagt

SEQ ID NO: 4069 - DNA, 20 bp, Actinomyces radingae
gaaaggggcctttgtggttt

SEQ ID NO: 4070 - DNA, 20 bp, Bordetella avium
taataccttgcgcaaatgac

SEQ ID NO: 4071 - DNA, 20 bp, Microbacterium testaceum
actggatatgagacgtgatc

SEQ ID NO: 4072 - DNA, 20 bp, Vagococcus fluvialis
ccgcataatttgttttcccg

SEQ ID NO: 4073 - DNA, 20 bp, Moraxella atlantae
atgtgcctaaattagattag

SEQ ID NO: 4074 - DNA, 30 bp, Alloiococcus otitis
acgggtgctaataccgcataggttttccca

SEQ ID NO: 4075 - DNA, 20 bp, Moraxella atlantae
cagcatatgatactggtgaa

SEQ ID NO: 4076 - DNA, 30 bp, Corynebacterium macginleyi
gctaggtgtgagggtttttctacgattctc

SEQ ID NO: 4077 - DNA, 20 bp, Bacteroides vulgatus
aagatggcatcatgagtccg

SEQ ID NO: 4078 - DNA, 20 bp, Streptococcus thoraltensis
ataactaccgtagcttgcta

SEQ ID NO: 4079 - DNA, 20 bp, Actinomyces turicensis
tgcaccctgacgctgcagag

SEQ ID NO: 4080 - DNA, 30 bp, Alloiococcus otitis
gcggacttgaatgtagcagaggaaagtgga

SEQ ID NO: 4081 - DNA, 30 bp, Alloiococcus otitis
tttctgggctatgattgacgctgaggctcg

SEQ ID NO: 4082 - DNA, 20 bp, Facklamia languida
gcctaacttaggagggagcc

SEQ ID NO: 4083 - DNA, 20 bp, Bacteroides eggerthii
ggaatgtagtggaaacatta

SEQ ID NO: 4084 - DNA, 30 bp, Helcococcus kunzii
cttagcgaagataatgacagtagctaagaa

SEQ ID NO: 4085 - DNA, 20 bp, Moraxella atlantae
gaaaggaggcgagagctttt

SEQ ID NO: 4086 - DNA, 20 bp, Enterobacter gergoviae
gtacggccgctagcttaaaa

SEQ ID NO: 4087 - DNA, 20 bp, Bacteroides vulgatus
tgccgtctactcttggacag

SEQ ID NO: 4088 - DNA, 20 bp, Bacteroides vulgatus
ttggacagccttctgaaagg

SEQ ID NO: 4089 - DNA, 20 bp, Abiotrophia defectiva
ttgcactaggtcaaggtgag

SEQ ID NO: 4090 - DNA, 20 bp, Bacteroides vulgatus
atgttcacatgattaaaggt

SEQ ID NO: 4091 - DNA, 20 bp, Facklamia languida
acttgaacttgttcaagtca

SEQ ID NO: 4092 - DNA, 20 bp, Clostridium tetani
cataaagttaaggtttcgca

SEQ ID NO: 4093 - DNA, 20 bp, Alloiococcus otitis
catcttctgctaccttcaga

SEQ ID NO: 4094 - DNA, 20 bp, Pasteurella multocida
tgagcaataagcttggtgct

SEQ ID NO: 4095 - DNA, 20 bp, Empedobacter brevis
gcaacttgccctactgaaaa

SEQ ID NO: 4096 - DNA, 20 bp, Anaerobiospirillum succiniciproducens
aggagcttgaacttcggttt

SEQ ID NO: 4097 - DNA, 20 bp, Anaerobiospirillum succiniciproducens
tgcctttctagagtattgca

SEQ ID NO: 4098 - DNA, 20 bp, Globicatella sanguinis
tcgaacgaaccacaacgaga

SEQ ID NO: 4099 - DNA, 20 bp, Staphylococcus simulans
agtaactatgcatcccttga

SEQ ID NO: 4100 - DNA, 20 bp, Prevotella disiens
tgggaataatcgacattacg

SEQ ID NO: 4101 - DNA, 20 bp, Dolosigranulum pigrum
cacgtgctaggtaactacta

SEQ ID NO: 4102 - DNA, 20 bp, Weeksella virosa
gtatataaagctaggtggca

SEQ ID NO: 4103 - DNA, 20 bp, Prevotella oralis
tactacggcataccccgttg

SEQ ID NO: 4104 - DNA, 20 bp, Moraxella atlantae
gttggggctcatgaagtctt

SEQ ID NO: 4105 - DNA, 20 bp, Globicatella sanguinis
cggctactagaggaaatgtt

SEQ ID NO: 4106 - DNA, 20 bp, Streptococcus ratti
acactgtgcttgcacaccgt

SEQ ID NO: 4107 - DNA, 30 bp, Bacteroides distasonis
cgattgcgaaggcagcctgccaagccatta

SEQ ID NO: 4108 - DNA, 20 bp, Campylobacter lari
gatgaagcgactagcttgct

SEQ ID NO: 4109 - DNA, 20 bp, Corynebacterium group ANF
gaggcgagagatcgtctgtc

SEQ ID NO: 4110 - DNA, 30 bp, Facklamia sourekii
atttgacggtatctaatcagaaagtcacgg

SEQ ID NO: 4111 - DNA, 20 bp, Ignavigranum ruoffiae
gaacgcacaacgaaggagct

SEQ ID NO: 4112 - DNA, 20 bp, Bacillus schlegellii
cgctgccgggtccagagatg

SEQ ID NO: 4113 - DNA, 20 bp, Ignavigranum ruoffiae
actgtacaggacttgacggt

SEQ ID NO: 4114 - DNA, 20 bp, Corynebacterium group ANF
gacatgcactagatgaggcg

SEQ ID NO: 4115 - DNA, 20 bp, Actinomyces radingae
acccgaagcttgtggcttaa

SEQ ID NO: 4116 - DNA, 20 bp, Prevotella oralis
gggaatcttgagtacgcagt

SEQ ID NO: 4117 - DNA, 20 bp, Clostridium tetani
aaggtttcgcatgaaacttt

SEQ ID NO: 4118 - DNA, 20 bp, Bacteroides caccae
cacgtgtggacttttgtatg

SEQ ID NO: 4119 - DNA, 30 bp, Prevotella bivia
agattgcagcgcgaactgtcagacttgagt

SEQ ID NO: 4120 - DNA, 30 bp, Staphylococcus simulans
tggtttcatgatgaaagacggttttgctgt

SEQ ID NO: 4121 - DNA, 20 bp, Haemophilus aphrophilus
tggggattgtgctttgagct

SEQ ID NO: 4122 - DNA, 20 bp, Bacteroides eggerthii
gcagcatgattgaagcttgc

SEQ ID NO: 4123 - DNA, 20 bp, Lactococcus raffinolactis
aatgttggatgcatattcga

SEQ ID NO: 4124 - DNA, 30 bp, Clostridium glycolicum
atgctaatacaggataacataagagattca

SEQ ID NO: 4125 - DNA, 20 bp, Moraxella atlantae
gggagaaaggaggcgagagc

SEQ ID NO: 4126 - DNA, 30 bp, Empedobacter brevis
aaagatttatcgcagtaggataggcatgcg

SEQ ID NO: 4127 - DNA, 20 bp, Anaerobiospirillum succiniciproducens
ttcggtttgggttccgcagc

SEQ ID NO: 4128 - DNA, 20 bp, Bacillus schlegellii
agcgcactggcctgtaactg

SEQ ID NO: 4129 - DNA, 20 bp, Abiotrophia defectiva
gcataggacatgggatcaca

SEQ ID NO: 4130 - DNA, 20 bp, Suttonella indologenes
gtgttgggcacttaagtgct

SEQ ID NO: 4131 - DNA, 20 bp, Bacillus schlegellii
aaccgtgggggtgcagcgga

SEQ ID NO: 4132 - DNA, 20 bp, Bacteroides distasonis
gggggcttgagtatgtttga

SEQ ID NO: 4133 - DNA, 30 bp, Abiotrophia defectiva
ttccgtgaggaaaggtggcgcaagctatcg

SEQ ID NO: 4134 - DNA, 30 bp, Clostridium clostridiiforme
aagcgcacagtgccgcatggcagtgtgtga

SEQ ID NO: 4135 - DNA, 20 bp, Achromobacter xylosoxidans
cgcctcatgcacgaaagcgt

SEQ ID NO: 4136 - DNA, 30 bp, Bacteroides distasonis
ggagcgaatccccaaaccacgtctcagttc

SEQ ID NO: 4137 - DNA, 20 bp, Streptococcus ratti
gggacgcaagggaacacact

SEQ ID NO: 4138 - DNA, 20 bp, Facklamia languida
ggcctaacttaggagggagc

SEQ ID NO: 4139 - DNA, 20 bp, Prevotella bivia
ttgcagatgaacgatttaga

SEQ ID NO: 4140 - DNA, 20 bp, Ignavigranum ruoffiae
ctgtattaactgtacaggac

SEQ ID NO: 4141 - DNA, 30 bp, Vagococcus fluvialis
aataccgcataatttgttttcccgcatggg

SEQ ID NO: 4142 - DNA, 20 bp, Bacteroides thetaiotaomicron
cgatagcatatatttcccgc

SEQ ID NO: 4143 - DNA, 20 bp, Weeksella virosa
tttcgggctcagtggttaag

SEQ ID NO: 4144 - DNA, 20 bp, Leptotrichia buccalis
ctgcgggagagccttgcgtc

SEQ ID NO: 4145 - DNA, 20 bp, Anaerococcus prevotii
aaggtaggataggtgactgg

SEQ ID NO: 4146 - DNA, 30 bp, Ignavigranum ruoffiae
tatcattagttaccagcattgagatgggga

SEQ ID NO: 4147 - DNA, 30 bp, Bacteroides vulgatus
agcgtagatggatgtttaagtcagttgtga

SEQ ID NO: 4148 - DNA, 30 bp, Sphingobacterium multivorum
atatgatgctaatctctaaaagccattcac

SEQ ID NO: 4149 - DNA, 20 bp, Pseudoramibacter alactolyticus
catgactttgctgtcaaaac

SEQ ID NO: 4150 - DNA, 20 bp, Prevotella oralis
tcatggaggttgttttcaac

SEQ ID NO: 4151 - DNA, 20 bp, Corynebacterium kutscheri
accacgtttgtggagggagt

SEQ ID NO: 4152 - DNA, 30 bp, Bacteroides stercoris
gttagccacgtgtggttttttgcatgtacc

SEQ ID NO: 4153 - DNA, 20 bp, Leuconostoc lactis
caggacagaatgactagggt

SEQ ID NO: 4154 - DNA, 20 bp, Arcanobacterium haemolyticum
gcctaactcgtttgaggggg

SEQ ID NO: 4155 - DNA, 20 bp, Prevotella oralis
actacggcataccccgttga

SEQ ID NO: 4156 - DNA, 20 bp, Clostridium cadaveris
taagggaagctctttcggga

SEQ ID NO: 4157 - DNA, 20 bp, Prevotella oralis
ggaatcttgagtacgcagta

SEQ ID NO: 4158 - DNA, 20 bp, Actinomyces turicensis
actttgttggggtggattag

SEQ ID NO: 4159 - DNA, 20 bp, Brevibacillus thermoruber
ccttctcgcatgagagggtg

SEQ ID NO: 4160 - DNA, 20 bp, Leuconostoc lactis
tcgtttagattgaaggagct

SEQ ID NO: 4161 - DNA, 30 bp, Dolosigranulum pigrum
cgattttctggtctaacattgacgctgagg

SEQ ID NO: 4162 - DNA, 20 bp, Staphylococcus simulans
aagtaactgtgcatcccttg

SEQ ID NO: 4163 - DNA, 20 bp, Bacillus psychrosaccharolyticus
tcgagcgaattgttgagttt

SEQ ID NO: 4164 - DNA, 20 bp, Leuconostoc fallax
ttcggtgagacgtaaagcat

SEQ ID NO: 4165 - DNA, 20 bp, Bacillus schlegellii
gcaaggaaaggggcgacccg

SEQ ID NO: 4166 - DNA, 30 bp, Corynebacterium group ANF
agttggtaacacccgaagccgcttgctcca

SEQ ID NO: 4167 - DNA, 20 bp, Corynebacterium confusum
tttaggttcgcggcagagat

SEQ ID NO: 4168 - DNA, 20 bp, Prevotella disiens
gaataatcgacattacgtgt

SEQ ID NO: 4169 - DNA, 20 bp, Facklamia languida
gacttgaacttgttcaagtc

SEQ ID NO: 4170 - DNA, 20 bp, Corynebacterium confusum
atttaggttcgcggcagaga

SEQ ID NO: 4171 - DNA, 20 bp, Actinomyces radingae
caagccgctatttgggtagt

SEQ ID NO: 4172 - DNA, 20 bp, Pseudoramibacter alactolyticus
gacccttcggggggatataa

SEQ ID NO: 4173 - DNA, 30 bp, Leuconostoc fallax
aataccgtataacaacgcatttcgcatgaa

SEQ ID NO: 4174 - DNA, 20 bp, Pseudoramibacter alactolyticus
agaagttttttattgaccct

SEQ ID NO: 4175 - DNA, 30 bp, Helcococcus kunzii
cctagagataggatagtcttttcggagact

SEQ ID NO: 4176 - DNA, 20 bp, Kocuria kristinae
atgcgactactgcccgcatg

SEQ ID NO: 4177 - DNA, 30 bp, Weeksella virosa
tagaatgggatagcccggagaaattcggat

SEQ ID NO: 4178 - DNA, 20 bp, Ignavigranum ruoffiae
gaaccatcctgtattaactg

SEQ ID NO: 4179 - DNA, 20 bp, Leuconostoc fallax
cgcatttcgcatgaagtgtg

SEQ ID NO: 4180 - DNA, 20 bp, Leuconostoc fallax
tttcgcatgaagtgtgttta

SEQ ID NO: 4181 - DNA, 20 bp, Suttonella indologenes
tgggcacttaagtgctcggt

SEQ ID NO: 4182 - DNA, 20 bp, Weeksella virosa
tgggttttcgggctcagtgg

SEQ ID NO: 4183 - DNA, 30 bp, Streptococcus thoraltensis
agcatcacttaaagatggacctgcgttgta

SEQ ID NO: 4184 - DNA, 20 bp, Clostridium cadaveris
tttttctgcatgggaaagtc

SEQ ID NO: 4185 - DNA, 30 bp, Facklamia sourekii
agcactgttattagagaagaacagtcagta

SEQ ID NO: 4186 - DNA, 20 bp, Bacteroides eggerthii
agtatgcatactcctttgta

SEQ ID NO: 4187 - DNA, 20 bp, Globicatella sanguinis
cgaacgaaccacaacgagaa

SEQ ID NO: 4188 - DNA, 20 bp, Corynebacterium kutscheri
taaccacgtttgtggaggga

SEQ ID NO: 4189 - DNA, 20 bp, Corynebacterium group ANF
atgcactagatgaggcgaga

SEQ ID NO: 4190 - DNA, 30 bp, Weeksella virosa
gggtgagtatcgcgtatgtaacttgcctta

SEQ ID NO: 4191 - DNA, 20 bp, Weeksella virosa
tataaagctaggtggcatca

SEQ ID NO: 4192 - DNA, 20 bp, Prevotella bivia
atagttggtcgtgtgcaaat

SEQ ID NO: 4193 - DNA, 30 bp, Paenibacillus apiarius
gtagctaataccggatagacattttcctcg

SEQ ID NO: 4194 - DNA, 20 bp, Leuconostoc fallax
tgggaagaatagttaatgta

SEQ ID NO: 4195 - DNA, 20 bp, Abiotrophia defectiva
ataccgcataggacatggga

SEQ ID NO: 4196 - DNA, 20 bp, Actinomyces radingae
agtggtgagtgtagcgggta

SEQ ID NO: 4197 - DNA, 20 bp, Globicatella sanguinis
gctactagaggaaatgttag

SEQ ID NO: 4198 - DNA, 20 bp, Clostridium innocuum
taggtatacggagcgcatgc

SEQ ID NO: 4199 - DNA, 20 bp, Streptococcus thoraltensis
aactaccgtagcttgctaca

SEQ ID NO: 4200 - DNA, 20 bp, Bacteroides caccae
atacgccgcaaggcatttgt

SEQ ID NO: 4201 - DNA, 20 bp, Corynebacterium confusum
ggcttgacatatttaggttc

SEQ ID NO: 4202 - DNA, 20 bp, Weeksella virosa
tataagatagacatgcgtaa

SEQ ID NO: 4203 - DNA, 20 bp, Bacteroides thetaiotaomicron
agcatatatttcccgcatgg

SEQ ID NO: 4204 - DNA, 20 bp, Streptococcus bovis
gacatttgaaagtaccaact

SEQ ID NO: 4205 - DNA, 20 bp, Brevibacillus thermoruber
tacgcattggaaactgctcg

SEQ ID NO: 4206 - DNA, 20 bp, Leuconostoc fallax
taccgtataacaacgcattt

SEQ ID NO: 4207 - DNA, 20 bp, Bacteroides ureolyticus
atcctaaaaacatctaagag

SEQ ID NO: 4208 - DNA, 20 bp, Prevotella bivia
cagacttgagtgcgcacaac

SEQ ID NO: 4209 - DNA, 20 bp, Arcanobacterium haemolyticum
cgatgaaggctcctgcttgc

SEQ ID NO: 4210 - DNA, 30 bp, Moraxella atlantae
gaacagcatatgatactggtgaactagagt

SEQ ID NO: 4211 - DNA, 20 bp, Ignavigranum ruoffiae
accatcctgtattaactgta

SEQ ID NO: 4212 - DNA, 20 bp, Moraxella atlantae
cgggagaaaggaggcgagag

SEQ ID NO: 4213 - DNA, 20 bp, Prevotella oralis
cggcataccccgttgaaagg

SEQ ID NO: 4214 - DNA, 20 bp, Bacteroides eggerthii
gtggaaacattacagccttc

SEQ ID NO: 4215 - DNA, 20 bp, Prevotella bivia
tcagacttgagtgcgcacaa

SEQ ID NO: 4216 - DNA, 20 bp, Actinomyces meyeri
gctccagctttgttggggtg

SEQ ID NO: 4217 - DNA, 20 bp, Suttonella indologenes
gtagctagcttatcagggcg

SEQ ID NO: 4218 - DNA, 20 bp, Atopobium parvulum
aatacttcgagacttccgca

SEQ ID NO: 4219 - DNA, 20 bp, Peptoniphilus indolicus
ggtgtcggagtaattcggtg

SEQ ID NO: 4220 - DNA, 30 bp, Brevibacillus thermoruber
tcaaccccggtacgcattggaaactgctcg

SEQ ID NO: 4221 - DNA, 20 bp, Empedobacter brevis
agcgaaagttataagtatcc

SEQ ID NO: 4222 - DNA, 20 bp, Actinomyces radingae
cgtgtgcaagccgctatttg

SEQ ID NO: 4223 - DNA, 20 bp, Ignavigranum ruoffiae
cgcctgactcattggggaaa

SEQ ID NO: 4224 - DNA, 20 bp, Facklamia sourekii
actgttactgatttgacggt

SEQ ID NO: 4225 - DNA, 20 bp, Streptococcus sobrinus
aacgcattggtaacaccgga

SEQ ID NO: 4226 - DNA, 20 bp, Ignavigranum ruoffiae
ccatcctgtattaactgtac

SEQ ID NO: 4227 - DNA, 30 bp, Suttonella indologenes
cgtacgctaataccacataacacttacgag

SEQ ID NO: 4228 - DNA, 20 bp, Facklamia sourekii
agctcgcatgagtttaagtt

SEQ ID NO: 4229 - DNA, 20 bp, Empedobacter brevis
tgcaacttgccctactgaaa

SEQ ID NO: 4230 - DNA, 20 bp, Dolosigranulum pigrum
tgacagacttgaatgtagaa

SEQ ID NO: 4231 - DNA, 20 bp, Prevotella bivia
accgtacaggatcgacctag

SEQ ID NO: 4232 - DNA, 20 bp, Lactococcus raffinolactis
cgacatttgaaagtaccaat

SEQ ID NO: 4233 - DNA, 20 bp, Bacteroides caccae
aataaagttgtccacgtgtg

SEQ ID NO: 4234 - DNA, 30 bp, Moraxella atlantae
tgtctactagccgttggggctcatgaagcc

SEQ ID NO: 4235 - DNA, 20 bp, Sporosarcina pasteurii
atagccgtctttcagagttc

SEQ ID NO: 4236 - DNA, 20 bp, Brevibacillus thermoruber
catgagagggtgcggaaagg

SEQ ID NO: 4237 - DNA, 20 bp, Dolosigranulum pigrum
aacacgtgctaggtaactac

SEQ ID NO: 4238 - DNA, 20 bp, Prevotella oralis
ttcccattactacggcatac

SEQ ID NO: 4239 - DNA, 30 bp, Clostridium limosum
atcccggggctcaaccccggtgctgcattc

SEQ ID NO: 4240 - DNA, 20 bp, Streptococcus acidominimus
cgcataagagttgacaacac

SEQ ID NO: 4241 - DNA, 20 bp, Bacillus schlegellii
cgcgagggacggcggagaca

SEQ ID NO: 4242 - DNA, 20 bp, Atopobium parvulum
tggaagactcgagaaagctc

SEQ ID NO: 4243 - DNA, 20 bp, Leuconostoc fallax
tttaaaaggggcttcggcct

SEQ ID NO: 4244 - DNA, 20 bp, Alloiococcus otitis
ggttttcccagtgcatgctg

SEQ ID NO: 4245 - DNA, 30 bp, Suttonella indologenes
acgagtcaaagcgggggatcttcggacctc

SEQ ID NO: 4246 - DNA, 20 bp, Prevotella oralis
attagccagccggcggggta

SEQ ID NO: 4247 - DNA, 20 bp, Bacteroides capilosus
ctaataccgcataatgcagc

SEQ ID NO: 4248 - DNA, 20 bp, Moraxella atlantae
ggtggtgcactaagtcatat

SEQ ID NO: 4249 - DNA, 20 bp, Bacillus sp
gcataaggagacgttaaaag

SEQ ID NO: 4250 - DNA, 20 bp, Veillonella atypica
tgtgcgaatagtgcgaggat

SEQ ID NO: 4251 - DNA, 20 bp, Abiotrophia defectiva
cgcataggacatgggatcac

SEQ ID NO: 4252 - DNA, 20 bp, Bacillus schlegellii
cgagggacggcggagacagg

SEQ ID NO: 4253 - DNA, 20 bp, Ochrobactrum intermedium
ataccctatacgaccgagag

SEQ ID NO: 4254 - DNA, 20 bp, Anaerobiospirillum succiniciproducens
ctaaactggctttctagagt

SEQ ID NO: 4255 - DNA, 20 bp, Anaerobiospirillum succiniciproducens
ggttggtcattctaaactgc

SEQ ID NO: 4256 - DNA, 20 bp, Pseudoramibacter alactolyticus
ttttattgacccttcggggg

SEQ ID NO: 4257 - DNA, 20 bp, Leuconostoc fallax
agtgtgtttaaaaggggctt

SEQ ID NO: 4258 - DNA, 20 bp, Streptococcus sobrinus
ccggacttgctccagtgtta

SEQ ID NO: 4259 - DNA, 30 bp, Dolosigranulum pigrum
agtttgaaacacccgaagtcggccggccaa

SEQ ID NO: 4260 - DNA, 20 bp, Leuconostoc fallax
ggtgagacgtaaagcatatg

SEQ ID NO: 4261 - DNA, 30 bp, Facklamia sourekii
ggcttttgctgtcactagaggatggtcccg

SEQ ID NO: 4262 - DNA, 20 bp, Paenibacillus apiarius
ctcgcctgagggaaatggga

SEQ ID NO: 4263 - DNA, 20 bp, Atopobium parvulum
acttccgcatggaagactcg

SEQ ID NO: 4264 - DNA, 30 bp, Helcococcus kunzii
taaaggctgtggctcaaccacggttcggtt

SEQ ID NO: 4265 - DNA, 20 bp, Leptotrichia buccalis
gccccggaaactacagggct

SEQ ID NO: 4266 - DNA, 20 bp, Bacteroides eggerthii
ggaaacattacagccttcgg

SEQ ID NO: 4267 - DNA, 20 bp, Corynebacterium confusum
atatttaggttcgcggcaga

SEQ ID NO: 4268 - DNA, 20 bp, Weeksella virosa
taacttgccttatagaatgg

SEQ ID NO: 4269 - DNA, 20 bp, Atopobium parvulum
gagacttccgcatggaagac

SEQ ID NO: 4270 - DNA, 20 bp, Actinomyces radingae
ggtttctggagggagatggg

SEQ ID NO: 4271 - DNA, 20 bp, Vagococcus fluvialis
aaaagacgcttcggtgtcac

SEQ ID NO: 4272 - DNA, 20 bp, Globicatella sanguinis
acggctactagaggaaatgt

SEQ ID NO: 4273 - DNA, 20 bp, Actinomyces radingae
gtttctggagggagatgggc

SEQ ID NO: 4274 - DNA, 30 bp, Ignavigranum ruoffiae
ggaaagatggttttgctatcactaaaggat

SEQ ID NO: 4275 - DNA, 20 bp, Lactococcus raffinolactis
tatccagccctaagtgacgc

SEQ ID NO: 4276 - DNA, 20 bp, Corynebacterium group ANF
cgagagatcgtctgtccctt

SEQ ID NO: 4277 - DNA, 20 bp, Streptococcus thoraltensis
taactaccgtagcttgctac

SEQ ID NO: 4278 - DNA, 20 bp, Bacteroides distasonis
aagggaggccacctggcgac

SEQ ID NO: 4279 - DNA, 30 bp, Bacteroides distasonis
gacaaagggaagccacctggcgacagggag

SEQ ID NO: 4280 - DNA, 20 bp, Aerococcus christensenii
cgcataggaagtttgttcgc

SEQ ID NO: 4281 - DNA, 20 bp, Streptococcus sobrinus
ttggtaacaccggacttgct

SEQ ID NO: 4282 - DNA, 20 bp, Streptococcus thoraltensis
atagaacttttcttaggaac

SEQ ID NO: 4283 - DNA, 30 bp, Bacteroides eggerthii
ttaatacccgatagtatagtttttccgcat

SEQ ID NO: 4284 - DNA, 20 bp, Leptotrichia buccalis
cgagagttgtctgcacctga

SEQ ID NO: 4285 - DNA, 20 bp, Moraxella atlantae
gagccagtggagaaacacac

SEQ ID NO: 4286 - DNA, 20 bp, Bacteroides distasonis
gaatccccaaaccacgtctc

SEQ ID NO: 4287 - DNA, 30 bp, Suttonella indologenes
gaatctaccttggggtgggggataacgtat

SEQ ID NO: 4288 - DNA, 30 bp, Kingella kingae
ggaagagagtagagatactcttgtgccttc

SEQ ID NO: 4289 - DNA, 20 bp, Helcococcus kunzii
cttcggaatgaaaccgaaaa

SEQ ID NO: 4290 - DNA, 20 bp, Dolosigranulum pigrum
tgcttgcagtgattgattag

SEQ ID NO: 4291 - DNA, 20 bp, Leptotrichia buccalis
gcgggagagccttgcgtcct

SEQ ID NO: 4292 - DNA, 20 bp, Bacteroides thetaiotaomicron
aataaagtggtccacgtgtg

SEQ ID NO: 4293 - DNA, 20 bp, Streptococcus acidominimus
gcataagagttgacaacaca

SEQ ID NO: 4294 - DNA, 20 bp, Prevotella oralis
tccgaagcagtcatctaatt

SEQ ID NO: 4295 - DNA, 20 bp, Aerococcus christensenii
gcataggaagtttgttcgca

SEQ ID NO: 4296 - DNA, 30 bp, Helcococcus kunzii
tagcgagtaaagtcgaggactctagagaga

SEQ ID NO: 4297 - DNA, 20 bp, Actinomyces radingae
agagataggtgtgcatttgg

SEQ ID NO: 4298 - DNA, 20 bp, Globicatella sanguinis
acgaaccacaacgagaactt

SEQ ID NO: 4299 - DNA, 30 bp, Myroides odoratus
aaggcagattactacgtacttattgacgct

SEQ ID NO: 4300 - DNA, 20 bp, Anaerobiospirillum succiniciproducens
agttgctatcagatgagccc

SEQ ID NO: 4301 - DNA, 20 bp, Streptococcus sobrinus
gttaactcatgttaactgtt

SEQ ID NO: 4302 - DNA, 20 bp, Helcococcus kunzii
cgaaaaaggaaagtagcgaa

SEQ ID NO: 4303 - DNA, 20 bp, Bacteroides capilosus
cttgacatccgactaacgaa

SEQ ID NO: 4304 - DNA, 20 bp, Streptococcus thoraltensis
acgcatttataactaccgta

SEQ ID NO: 4305 - DNA, 20 bp, Leptotrichia buccalis
tgtaagtctagggtgaaaac

SEQ ID NO: 4306 - DNA, 20 bp, Bacillus sp
ttaacgtctccttatgcaag

SEQ ID NO: 4307 - DNA, 20 bp, Moraxella atlantae
acgggagaaaggaggcgaga

SEQ ID NO: 4308 - DNA, 20 bp, Prevotella bivia
tcaacttctagattgcagcg

SEQ ID NO: 4309 - DNA, 20 bp, Moraxella atlantae
agccagtggagaaacacact

SEQ ID NO: 4310 - DNA, 20 bp, Psychrobacter phenylpyruvicus
aacttttagagggcgctcac

SEQ ID NO: 4311 - DNA, 30 bp, Leuconostoc fallax
ggaaatgatgttaatgtgacggtaccatac

SEQ ID NO: 4312 - DNA, 20 bp, Suttonella indologenes
acctcgcgcccttagatgag

SEQ ID NO: 4313 - DNA, 30 bp, Leuconostoc fallax
gtaggaaatgatgttaatgtgacggtacca

SEQ ID NO: 4314 - DNA, 20 bp, Bacillus schlegellii
tcccgcgagggacggcggag

SEQ ID NO: 4315 - DNA, 20 bp, Streptococcus thoraltensis
ccgcataaaaggagctaacc

SEQ ID NO: 4316 - DNA, 20 bp, Bacteroides distasonis
catgaagcagggatcccgca

SEQ ID NO: 4317 - DNA, 20 bp, Anaerobiospirillum succiniciproducens
ggttggtcattctaaactgg

SEQ ID NO: 4318 - DNA, 20 bp, Bacteroides ureolyticus
atgacatatacagtaagacg

SEQ ID NO: 4319 - DNA, 20 bp, Bacteroides eggerthii
agcggaatgtagtggaaaca

SEQ ID NO: 4320 - DNA, 20 bp, Corynebacterium group ANF
catgcactagatgaggcgag

SEQ ID NO: 4321 - DNA, 20 bp, Bacteroides vulgatus
gatacccgtttgcatgtact

SEQ ID NO: 4322 - DNA, 20 bp, Corynebacterium confusum
acatatttaggttcgcggca

SEQ ID NO: 4323 - DNA, 20 bp, Bacteroides vulgatus
atggatgtttaagtcagttg

SEQ ID NO: 4324 - DNA, 20 bp, Leuconostoc fallax
cggacctgatcacttcggtg

SEQ ID NO: 4325 - DNA, 20 bp, Anaerobiospirillum succiniciproducens
gggaaagacttcggttgcta

SEQ ID NO: 4326 - DNA, 30 bp, Peptoniphilus indolicus
tgcaagtcgagcgatgaagacataacagac

SEQ ID NO: 4327 - DNA, 20 bp, Weeksella virosa
ctataagatagacatgcgta

SEQ ID NO: 4328 - DNA, 30 bp, Bacteroides eggerthii
actcctttgtatgtaccgtatgaataagga

SEQ ID NO: 4329 - DNA, 20 bp, Prevotella oralis
gagtcggccgtatgtaaatg

SEQ ID NO: 4330 - DNA, 20 bp, Bacteroides distasonis
tggggggcttgagtatgttt

SEQ ID NO: 4331 - DNA, 20 bp, Prevotella bivia
gtacagatagttggtcgtgt

SEQ ID NO: 4332 - DNA, 20 bp, Helcococcus kunzii
ttcggaatgaaaccgaaaaa

SEQ ID NO: 4333 - DNA, 30 bp, Staphylococcus simulans
gcatggtttcatgatgaaagacggttttgc

SEQ ID NO: 4334 - DNA, 20 bp, Bacteroides vulgatus
gcccacctagtcttcgatgg

SEQ ID NO: 4335 - DNA, 20 bp, Bacillus sp
aaggagacgttaaaaggcgg

SEQ ID NO: 4336 - DNA, 20 bp, Actinomyces radingae
gtcgcgcctgtcgtgtaatc

SEQ ID NO: 4337 - DNA, 20 bp, Ignavigranum ruoffiae
cctgtattaactgtacagga

SEQ ID NO: 4338 - DNA, 20 bp, Bacteroides distasonis
gaagcagggatcccgcatgg

SEQ ID NO: 4339 - DNA, 20 bp, Bacteroides vulgatus
aaagtcgggtatgcataccc

SEQ ID NO: 4340 - DNA, 20 bp, Anaerobiospirillum succiniciproducens
cctgggttggtcattctaaa

SEQ ID NO: 4341 - DNA, 20 bp, Anaerobiospirillum succiniciproducens
ggggaaagacttcggttgct

SEQ ID NO: 4342 - DNA, 20 bp, Streptococcus ratti
gacgcaagggaacacactgt

SEQ ID NO: 4343 - DNA, 30 bp, Helcococcus kunzii
ggtatgtaggcggttaattaagtctgaatt

SEQ ID NO: 4344 - DNA, 20 bp, Sphingobacterium multivorum
tccgtcggagagcttgctcg

SEQ ID NO: 4345 - DNA, 20 bp, Pseudomonas fluorescens
tagagagatgcttgcatctc

SEQ ID NO: 4346 - DNA, 20 bp, Lactococcus raffinolactis
ttgaaagtaccaaatggtac

SEQ ID NO: 4347 - DNA, 20 bp, Streptococcus sobrinus
aggagttaactcatgttaac

SEQ ID NO: 4348 - DNA, 20 bp, Ignavigranum ruoffiae
aactgtacaggacttgacgg

SEQ ID NO: 4349 - DNA, 30 bp, Moraxella atlantae
ctggtgaactagagtatatgagagggaagt

SEQ ID NO: 4350 - DNA, 20 bp, Bacteroides distasonis
cctgccaagccattactgac

SEQ ID NO: 4351 - DNA, 30 bp, Leptotrichia buccalis
taacgcgtaaggaacttgccccgcagacag

SEQ ID NO: 4352 - DNA, 20 bp, Prevotella oralis
gacttgaatagagatattca

SEQ ID NO: 4353 - DNA, 20 bp, Facklamia sourekii
ctcgcatgagtttaagttga

SEQ ID NO: 4354 - DNA, 20 bp, Prevotella bivia
ctcatgagattacgaataaa

SEQ ID NO: 4355 - DNA, 20 bp, Bacteroides distasonis
acaccttttctaggcaatag

SEQ ID NO: 4356 - DNA, 20 bp, Streptococcus thoraltensis
aacttttcttaggaacactg

SEQ ID NO: 4357 - DNA, 20 bp, Streptococcus macacae
ggcggttaggaaagtctgga

SEQ ID NO: 4358 - DNA, 20 bp, Corynebacterium macginleyi
ttctacgattctcgtgccgt

SEQ ID NO: 4359 - DNA, 20 bp, Peptoniphilus indolicus
cgatgaagacataacagaca

SEQ ID NO: 4360 - DNA, 20 bp, Corynebacterium kutscheri
ctttcttgcttgcaagagag

SEQ ID NO: 4361 - DNA, 20 bp, Streptococcus acidominimus
taagagttgacaacacatgt

SEQ ID NO: 4362 - DNA, 20 bp, Haemophilus segnis
gatgtttaataggcatcacg

SEQ ID NO: 4363 - DNA, 20 bp, Bacteroides eggerthii
gtatgcatactcctttgtat

SEQ ID NO: 4364 - DNA, 20 bp, Streptococcus ratti
agtgggacgcaagggaacac

SEQ ID NO: 4365 - DNA, 20 bp, Sphingobacterium multivorum
aaagttagtgaagagtgcag

SEQ ID NO: 4366 - DNA, 20 bp, Atopobium parvulum
tcgagacttccgcatggaag

SEQ ID NO: 4367 - DNA, 20 bp, Bacteroides vulgatus
caagatggcatcatgagtcc

SEQ ID NO: 4368 - DNA, 20 bp, Facklamia sourekii
atgagtttaagttgaaagac

SEQ ID NO: 4369 - DNA, 30 bp, Moraxella atlantae
tgctataagatgtgcctaaattagattagc

SEQ ID NO: 4370 - DNA, 20 bp, Corynebacterium confusum
cttgacatatttaggttcgc

SEQ ID NO: 4371 - DNA, 20 bp, Helcococcus kunzii
tcttcggaatgaaacggaaa

SEQ ID NO: 4372 - DNA, 20 bp, Myroides odoratus
gtacgggaagaaatgtaatt

SEQ ID NO: 4373 - DNA, 20 bp, Bacteroides distasonis
aacgcattcggaccgaggtg

SEQ ID NO: 4374 - DNA, 30 bp, Prevotella oralis
cggttaaagccgggcactctgtgaatactg

SEQ ID NO: 4375 - DNA, 30 bp, Virgibacillus proomii
agcaagcagaaccccttcgggggtgacgca

SEQ ID NO: 4376 - DNA, 20 bp, Atopobium parvulum
tacttcgagacttccgcatg

SEQ ID NO: 4377 - DNA, 30 bp, Bacteroides vulgatus
tgatactggatatcttgagtgcagttgagg

SEQ ID NO: 4378 - DNA, 20 bp, Suttonella indologenes
ttacgagtcaaagcggggga

SEQ ID NO: 4379 - DNA, 20 bp, Weeksella virosa
taccgtatataaagctaggt

SEQ ID NO: 4380 - DNA, 20 bp, Empedobacter brevis
atgcaacttgccctactgaa

SEQ ID NO: 4381 - DNA, 30 bp, Prevotella oralis
cccttcggggcattggtggaggtgctgcat

SEQ ID NO: 4382 - DNA, 20 bp, Pseudoramibacter alactolyticus
acacagcagaatcgcatgac

SEQ ID NO: 4383 - DNA, 20 bp, Helcococcus kunzii
gtcaaatctcagtgacgcag

SEQ ID NO: 4384 - DNA, 20 bp, Bacteroides distasonis
tcggaccgaggtggaaacac

SEQ ID NO: 4385 - DNA, 30 bp, Facklamia sourekii
cgaaccgacggagaaacttgtttctcttga

SEQ ID NO: 4386 - DNA, 20 bp, Facklamia sourekii
ttaagctcgcatgagtttga

SEQ ID NO: 4387 - DNA, 20 bp, Vagococcus fluvialis
gttttcccgcatgggagaat

SEQ ID NO: 4388 - DNA, 30 bp, Moraxella atlantae
tataagatgtgcctaaattagattagctag

SEQ ID NO: 4389 - DNA, 20 bp, Streptococcus ratti
tgggacgcaagggaacacac

SEQ ID NO: 4390 - DNA, 20 bp, Staphylococcus simulans
atgtaagtaactatgcatcc

SEQ ID NO: 4391 - DNA, 20 bp, Prevotella bivia
gaccgtacaggatcgaccta

SEQ ID NO: 4392 - DNA, 20 bp, Prevotella disiens
tcgacattacgtgtaatgtt

SEQ ID NO: 4393 - DNA, 20 bp, Dolosigranulum pigrum
ctgacagacttgaatgtaga

SEQ ID NO: 4394 - DNA, 30 bp, Moraxella atlantae
aggtggtgcactaagtcatatgtgaaagcc

SEQ ID NO: 4395 - DNA, 20 bp, Facklamia sourekii
taagctcgcatgagtttaag

SEQ ID NO: 4396 - DNA, 20 bp, Clostridium cadaveris
gggaaagtcatgaaaggagc

SEQ ID NO: 4397 - DNA, 20 bp, Streptococcus ratti
agatgcaagcgcatcactag

SEQ ID NO: 4398 - DNA, 20 bp, Prevotella oralis
ttactacggcataccccgtt

SEQ ID NO: 4399 - DNA, 20 bp, Bacillus sp
tttaacgtctccttatgcaa

SEQ ID NO: 4400 - DNA, 20 bp, Kingella kingae
cattaactgatgacggtacc

SEQ ID NO: 4401 - DNA, 20 bp, Actinomyces radingae
tttctggagggagatgggct

SEQ ID NO: 4402 - DNA, 20 bp, Streptococcus thoraltensis
gagatagaacttttcttagg

SEQ ID NO: 4403 - DNA, 20 bp, Prevotella bivia
ccgtacaggatcgacctagg

SEQ ID NO: 4404 - DNA, 20 bp, Streptococcus ratti
cacactgtgcttgcacaccg

SEQ ID NO: 4405 - DNA, 20 bp, Empedobacter brevis
ccctactgaaaaggatagcc

SEQ ID NO: 4406 - DNA, 20 bp, Bacillus sp
tttcttgcataaggagacgt

SEQ ID NO: 4407 - DNA, 30 bp, Globicatella sanguinis
aacgagaacttgttctggttaaggttagtg

SEQ ID NO: 4408 - DNA, 20 bp, Bacillus schlegellii
tcaaccgtgggggtgcagcg

SEQ ID NO: 4409 - DNA, 20 bp, Weeksella virosa
tcgggctcagtggttaagcg

SEQ ID NO: 4410 - DNA, 20 bp, Prevotella disiens
cttgaattgtaggagcacga

SEQ ID NO: 4411 - DNA, 20 bp, Anaerobiospirillum succiniciproducens
gggttggtcattctaaactg

SEQ ID NO: 4412 - DNA, 20 bp, Anaerobiospirillum succiniciproducens
agacttcggttgctatcaga

SEQ ID NO: 4413 - DNA, 30 bp, Aerococcus christensenii
gtgctaataccgcataggaagtttgttcgc

SEQ ID NO: 4414 - DNA, 20 bp, Corynebacterium kutscheri
aggaccacattttagtgtgt

SEQ ID NO: 4415 - DNA, 20 bp, Facklamia languida
aggatgcataacctagagat

SEQ ID NO: 4416 - DNA, 20 bp, Actinomyces radingae
tgtggttgtgtggtgagagt

SEQ ID NO: 4417 - DNA, 20 bp, Alloiococcus otitis
aaatcttcctgcttgcagga

SEQ ID NO: 4418 - DNA, 20 bp, Ignavigranum ruoffiae
agtgagtcgcctgactcatt

SEQ ID NO: 4419 - DNA, 20 bp, Corynebacterium macginleyi
gtgtgagggtttttctacga

SEQ ID NO: 4420 - DNA, 20 bp, Corynebacterium macginleyi
ttttctacgattctcgtgcc

SEQ ID NO: 4421 - DNA, 20 bp, Clostridium tetani
ataaagttaaggtttcgcat

SEQ ID NO: 4422 - DNA, 20 bp, Lactococcus raffinolactis
taacaatgttggatgcatat

SEQ ID NO: 4423 - DNA, 20 bp, Anaerococcus prevotii
agtcgaaggtaggataggtg

SEQ ID NO: 4424 - DNA, 20 bp, Streptococcus sobrinus
tgctccagtgttactaatga

SEQ ID NO: 4425 - DNA, 20 bp, Prevotella bivia
gtttgatctcatgagattac

SEQ ID NO: 4426 - DNA, 20 bp, Streptococcus ratti
gtcaggaaagtctggagtaa

SEQ ID NO: 4427 - DNA, 20 bp, Bacillus schlegellii
accggatagattgtcctggc

SEQ ID NO: 4428 - DNA, 20 bp, Prevotella oralis
actgggaatcttgagtacgc

SEQ ID NO: 4429 - DNA, 30 bp, Prevotella disiens
aacggcaaagagtgcttgcacactttggac

SEQ ID NO: 4430 - DNA, 20 bp, Moraxella atlantae
gatgtgcctaaattagatta

SEQ ID NO: 4431 - DNA, 20 bp, Bacteroides vulgatus
caacctgccgtctactcttg

SEQ ID NO: 4432 - DNA, 20 bp, Pseudomonas luteola
gaggacggtaccacgggtga

SEQ ID NO: 4433 - DNA, 20 bp, Staphylococcus lutrae
aagaacacatgtgtaagtca

SEQ ID NO: 4434 - DNA, 30 bp, Atopobium parvulum
ccgcatggaagactcgagaaagctccggcg

SEQ ID NO: 4435 - DNA, 30 bp, Prevotella bivia
tacagatagttggtcgtgtgcaaatacgat

SEQ ID NO: 4436 - DNA, 20 bp, Prevotella disiens
tgaattgtaggagcacgata

SEQ ID NO: 4437 - DNA, 20 bp, Bordetella avium
ggaaagaaaaggcgcaggct

SEQ ID NO: 4438 - DNA, 20 bp, Weeksella virosa
ttcgggctcagtggttaagc

SEQ ID NO: 4439 - DNA, 20 bp, Bacteroides vulgatus
ggaataaagtcgggtatgca

SEQ ID NO: 4440 - DNA, 20 bp, Facklamia sourekii
tcgcatgagtttaagttgaa

SEQ ID NO: 4441 - DNA, 20 bp, Globicatella sanguinis
tgttctggttaaggttagtg

SEQ ID NO: 4442 - DNA, 30 bp, Bacteroides vulgatus
gtaaacttcttttataaaggaataaagtcg

SEQ ID NO: 4443 - DNA, 30 bp, Actinomyces radingae
ggtagtggtgagtgtagcgggtaaagaagc

SEQ ID NO: 4444 - DNA, 20 bp, Psychrobacter phenylpyruvicus
gcctaacttttagagggcgc

SEQ ID NO: 4445 - DNA, 20 bp, Arcanobacterium haemolyticum
ggcctaactcgtttgagggg

SEQ ID NO: 4446 - DNA, 20 bp, Moraxella atlantae
agctagtggagaaacacact

SEQ ID NO: 4447 - DNA, 20 bp, Moraxella atlantae
ctagagtatatgagagggaa

SEQ ID NO: 4448 - DNA, 20 bp, Staphylococcus simulans
aggatgtaagtaactgtgca

SEQ ID NO: 4449 - DNA, 20 bp, Bacteroides vulgatus
gatggatgtttaagtcagtt

SEQ ID NO: 4450 - DNA, 30 bp, Corynebacterium macginleyi
ttttctacgattctcgtgccgtagctaacg

SEQ ID NO: 4451 - DNA, 20 bp, Psychrobacter phenylpyruvicus
tagcctaacttttagagggc

SEQ ID NO: 4452 - DNA, 30 bp, Facklamia sourekii
aataccgcataaaccttaagctcgcatgag

SEQ ID NO: 4453 - DNA, 20 bp, Sphingobacterium multivorum
gggatccgtcggagagcttg

SEQ ID NO: 4454 - DNA, 20 bp, Actinomyces radingae
ctctttcgctcgtgtgcaag

SEQ ID NO: 4455 - DNA, 30 bp, Streptococcus thoraltensis
gttctagagatagaacttttcttaggaaca

SEQ ID NO: 4456 - DNA, 20 bp, Moraxella atlantae
gggctcatgaagccttagtg

SEQ ID NO: 4457 - DNA, 20 bp, Bacteroides eggerthii
catggtttcactattaaaga

SEQ ID NO: 4458 - DNA, 20 bp, Actinomyces radingae
tgctaatactggatgttctg

SEQ ID NO: 4459 - DNA, 30 bp, Moraxella atlantae
aaggtcataagattgtaaagcactttaagc

SEQ ID NO: 4460 - DNA, 20 bp, Corynebacterium macginleyi
agggtttttctacgattctc

SEQ ID NO: 4461 - DNA, 20 bp, Clostridium innocuum
gcgcatgctctgtatattaa

SEQ ID NO: 4462 - DNA, 20 bp, Bacteroides vulgatus
atgagtccgcatgttcacat

SEQ ID NO: 4463 - DNA, 20 bp, Bacteroides eggerthii
agtatagtttttccgcatgg

SEQ ID NO: 4464 - DNA, 20 bp, Dolosigranulum pigrum
ggagctaacgtattaagcac

SEQ ID NO: 4465 - DNA, 20 bp, Bacillus schlegellii
ggatagattgtcctggcgca

SEQ ID NO: 4466 - DNA, 30 bp, Actinomyces radingae
gggttgtgaacctctttcgctcgtgtgcaa

SEQ ID NO: 4467 - DNA, 20 bp, Suttonella indologenes
acttacgagtcaaagcgggg

SEQ ID NO: 4468 - DNA, 20 bp, Moraxella atlantae
cgttggggctcatgaagcct

SEQ ID NO: 4469 - DNA, 20 bp, Bacteroides vulgatus
gttcacatgattaaaggtat

SEQ ID NO: 4470 - DNA, 30 bp, Leuconostoc fallax
ggggcttcggcctcacttagagatggatcc

SEQ ID NO: 4471 - DNA, 20 bp, Weeksella virosa
ccttatagaatgggatagcc

SEQ ID NO: 4472 - DNA, 20 bp, Facklamia languida
gtcttgacataggatgcata

SEQ ID NO: 4473 - DNA, 30 bp, Moraxella atlantae
gccctgggcttaacctaggaacagcatatg

SEQ ID NO: 4474 - DNA, 20 bp, Prevotella bivia
tagatagcttgctatttatg

SEQ ID NO: 4475 - DNA, 20 bp, Facklamia sourekii
cgcatgagtttaagttgaaa

SEQ ID NO: 4476 - DNA, 20 bp, Actinomyces radingae
taactgggggtgtgcggtgg

SEQ ID NO: 4477 - DNA, 30 bp, Bacteroides vulgatus
cgggcttaaattgcagatgaattacggtga

SEQ ID NO: 4478 - DNA, 30 bp, Peptoniphilus indolicus
atttgaaacttctaaacttgagtagtgaag

SEQ ID NO: 4479 - DNA, 20 bp, Leuconostoc fallax
gacctgatcacttcggtgag

SEQ ID NO: 4480 - DNA, 20 bp, Dolosigranulum pigrum
ataggtggattggtcgcatg

SEQ ID NO: 4481 - DNA, 20 bp, Empedobacter brevis
tttatcgcagtaggataggc

SEQ ID NO: 4482 - DNA, 20 bp, Brevibacillus thermoruber
tgagagggtgcggaaaggtg

SEQ ID NO: 4483 - DNA, 20 bp, Prevotella oralis
agtccgaagcagtcatctaa

SEQ ID NO: 4484 - DNA, 30 bp, Weeksella virosa
atgtaacttgccttatagaatgggatagcc

SEQ ID NO: 4485 - DNA, 20 bp, Suttonella indologenes
ggcacttaagtgctcggtac

SEQ ID NO: 4486 - DNA, 20 bp, Facklamia sourekii
aagctcgcatgagtttgagt

SEQ ID NO: 4487 - DNA, 20 bp, Actinomyces radingae
gcaagccgctatttgggtag

SEQ ID NO: 4488 - DNA, 20 bp, Arcanobacterium haemolyticum
tggcctaactcgtttgaggg

SEQ ID NO: 4489 - DNA, 30 bp, Brevibacterium epidermidis
gtcccaacccttttgggagggggccgtcta

SEQ ID NO: 4490 - DNA, 20 bp, Facklamia sourekii
agaagaacagtcagtagagt

SEQ ID NO: 4491 - DNA, 20 bp, Pseudoramibacter alactolyticus
tattgctttcccttcggaga

SEQ ID NO: 4492 - DNA, 20 bp, Peptoniphilus indolicus
agacataacagacaccttcg

SEQ ID NO: 4493 - DNA, 20 bp, Bordetella avium
taccttgcgcaaatgacggt

SEQ ID NO: 4494 - DNA, 20 bp, Weeksella virosa
ttgatctagaattagtttga

SEQ ID NO: 4495 - DNA, 30 bp, Abiotrophia defectiva
aggtggcgcaagctatcgctaagagatgga

SEQ ID NO: 4496 - DNA, 20 bp, Prevotella disiens
ttgcatgtaaatgtaatcta

SEQ ID NO: 4497 - DNA, 20 bp, Prevotella bivia
gttagcacctagtgttagcg

SEQ ID NO: 4498 - DNA, 30 bp, Prevotella bivia
tatggggataaagtggggaacgtgttccct

SEQ ID NO: 4499 - DNA, 20 bp, Dolosigranulum pigrum
aagtcggccggccaacccta

SEQ ID NO: 4500 - DNA, 20 bp, Bacteroides ureolyticus
catctaagagattagaaagt

SEQ ID NO: 4501 - DNA, 30 bp, Streptococcus thoraltensis
gacatcccggtgccggttctagagatagaa

SEQ ID NO: 4502 - DNA, 20 bp, Alloiococcus otitis
agtcactgcctatcccttga

SEQ ID NO: 4503 - DNA, 30 bp, Bacteroides eggerthii
ttttatacgggaataaagtggagtatgcat

SEQ ID NO: 4504 - DNA, 20 bp, Prevotella disiens
attgtaggagcacgatacag

SEQ ID NO: 4505 - DNA, 20 bp, Lactococcus raffinolactis
ttcgacatttgaaagtacca

SEQ ID NO: 4506 - DNA, 20 bp, Streptococcus sobrinus
gctccagtgttactaatgag

SEQ ID NO: 4507 - DNA, 20 bp, Globicatella sanguinis
ggctactagaggaaatgtta

SEQ ID NO: 4508 - DNA, 20 bp, Paenibacillus apiarius
cctgagggaaatgggaaaga

SEQ ID NO: 4509 - DNA, 20 bp, Prevotella bivia
cgtacaggatcgacctaggg

SEQ ID NO: 4510 - DNA, 30 bp, Dolosigranulum pigrum
ttagagaagaacacgtgctaggtaactact

SEQ ID NO: 4511 - DNA, 20 bp, Abiotrophia defectiva
taccgcataggacatgggat

SEQ ID NO: 4512 - DNA, 20 bp, Abiotrophia defectiva
gcactaggtcaaggtgagtg

SEQ ID NO: 4513 - DNA, 20 bp, Anaerobiospirillum succiniciproducens
cgattaggagcttgaacttc

SEQ ID NO: 4514 - DNA, 20 bp, Streptococcus sobrinus
acgcattggtaacaccggac

SEQ ID NO: 4515 - DNA, 20 bp, Suttonella indologenes
ggtgttgggcacttaagtgc

SEQ ID NO: 4516 - DNA, 30 bp, Corynebacterium coyleae
ccggataggaccacttcttggaggttgtgg

SEQ ID NO: 4517 - DNA, 20 bp, Dolosigranulum pigrum
agggctagctaatctttcaa

SEQ ID NO: 4518 - DNA, 20 bp, Moraxella atlantae
cgagagcttttgctataaga

SEQ ID NO: 4519 - DNA, 20 bp, Prevotella disiens
gggaataatcgacattacgt

SEQ ID NO: 4520 - DNA, 20 bp, Brevibacillus thermoruber
tctcgcatgagagggtgcgg

SEQ ID NO: 4521 - DNA, 20 bp, Prevotella bivia
gggcagcgaatagatagctt

SEQ ID NO: 4522 - DNA, 20 bp, Prevotella bivia
tagttggtcgtgtgcaaata

SEQ ID NO: 4523 - DNA, 20 bp, Bacteroides distasonis
tggacaaagggaggccacct

SEQ ID NO: 4524 - DNA, 20 bp, Anaerobiospirillum succiniciproducens
atcgtaggaatcttttagag

SEQ ID NO: 4525 - DNA, 20 bp, Streptococcus thoraltensis
ctaacccatgttagcttttt

SEQ ID NO: 4526 - DNA, 20 bp, Moraxella atlantae
gagaaacacactggtggtga

SEQ ID NO: 4527 - DNA, 20 bp, Brevibacillus thermoruber
ctcgcatgagagggtgcgga

SEQ ID NO: 4528 - DNA, 20 bp, Prevotella oralis
gcgaactgggaatcttgagt

SEQ ID NO: 4529 - DNA, 20 bp, Campylobacter lari
cgatgaagcgactagcttgc

SEQ ID NO: 4530 - DNA, 20 bp, Globicatella sanguinis
cgaaccacaacgagaacttg

SEQ ID NO: 4531 - DNA, 20 bp, Bacillus schlegellii
gctgccgggtccagagatgg

SEQ ID NO: 4532 - DNA, 30 bp, Moraxella atlantae
ctaaattagattagctagatggtgaggtaa

SEQ ID NO: 4533 - DNA, 20 bp, Prevotella disiens
ggaataatcgacattacgtg

SEQ ID NO: 4534 - DNA, 20 bp, Anaerobiospirillum succiniciproducens
aggaaacactgacgttaccc

SEQ ID NO: 4535 - DNA, 20 bp, Streptococcus thermophilus
gtcaagaacgggtgtgagag

SEQ ID NO: 4536 - DNA, 20 bp, Bacillus schlegellii
ccgcgagggacggcggagac

SEQ ID NO: 4537 - DNA, 20 bp, Microbacterium hominis
caccagaacaccgtagaaat

SEQ ID NO: 4538 - DNA, 20 bp, Facklamia sourekii
cgaaccgacggagaaacttg

SEQ ID NO: 4539 - DNA, 30 bp, Helcococcus kunzii
cgaagataatgacagtagctaagaagcaag

SEQ ID NO: 4540 - DNA, 20 bp, Empedobacter brevis
cctactgaaaaggatagccc

SEQ ID NO: 4541 - DNA, 20 bp, Arcanobacterium haemolyticum
acaccgggattatgcagaga

SEQ ID NO: 4542 - DNA, 30 bp, Myroides odoratus
ttttgtacgggaagaaatgtaattacgtgt

SEQ ID NO: 4543 - DNA, 20 bp, Leuconostoc fallax
taacaacgcatttcgcatga

SEQ ID NO: 4544 - DNA, 20 bp, Actinomyces meyeri
gccctgggcgtgcggagacg

SEQ ID NO: 4545 - DNA, 20 bp, Dolosigranulum pigrum
gtgttgggggctttccggcc

SEQ ID NO: 4546 - DNA, 20 bp, Dolosigranulum pigrum
attggtcgcatgacgaattc

SEQ ID NO: 4547 - DNA, 20 bp, Pseudoramibacter alactolyticus
cacagcagaatcgcatgact

SEQ ID NO: 4548 - DNA, 20 bp, Peptoniphilus indolicus
tcgggaagaagttaagtcgg

SEQ ID NO: 4549 - DNA, 30 bp, Peptoniphilus indolicus
tttgaaacttctaaacttgagtagtgaaga

SEQ ID NO: 4550 - DNA, 30 bp, Abiotrophia defectiva
gaaccgcgactaggtgcttgcactaggtca

SEQ ID NO: 4551 - DNA, 30 bp, Weeksella virosa
agaattagtttgaagtagctagaatgtgta

SEQ ID NO: 4552 - DNA, 30 bp, Bacteroides distasonis
gatcgtaaacctcttttataagggaataaa

SEQ ID NO: 4553 - DNA, 30 bp, Facklamia languida
gcaagtcgaacgaacagcgacttgaacttg

SEQ ID NO: 4554 - DNA, 20 bp, Staphylococcus lutrae
gaacacatgtgtaagtcact

SEQ ID NO: 4555 - DNA, 20 bp, Psychrobacter phenylpyruvicus
cctaacttttagagggcgct

SEQ ID NO: 4556 - DNA, 20 bp, Actinomyces turicensis
gcaccctgacgctgcagaga

SEQ ID NO: 4557 - DNA, 20 bp, Corynebacterium confusum
agcttgctggagtactcgag

SEQ ID NO: 4558 - DNA, 20 bp, Weeksella virosa
cgggctcagtggttaagcga

SEQ ID NO: 4559 - DNA, 20 bp, Streptococcus acidominimus
gttgacaacacatgttgtta

SEQ ID NO: 4560 - DNA, 20 bp, Ignavigranum ruoffiae
gtccgtaaagcactgttgtt

SEQ ID NO: 4561 - DNA, 30 bp, Leptotrichia buccalis
aacgtttagccaatctttaaagccggtcca

SEQ ID NO: 4562 - DNA, 20 bp, Bacillus marinus
tcctgagagtcagttgaaag

SEQ ID NO: 4563 - DNA, 20 bp, Staphylococcus lutrae
gaagaacacatgtgtaagtc

SEQ ID NO: 4564 - DNA, 20 bp, Corynebacterium kutscheri
cttgcaagagagtactcgag

SEQ ID NO: 4565 - DNA, 30 bp, Gemella morbillorum
aataccggataacagtatttctcgcatgag

SEQ ID NO: 4566 - DNA, 30 bp, Virgibacillus proomii
cgttaaaaggcggcgcaagctgtcacttac

SEQ ID NO: 4567 - DNA, 20 bp, Streptococcus sobrinus
actcatgttaactgtttaaa

SEQ ID NO: 4568 - DNA, 20 bp, Bacteroides eggerthii
cccgatagtatagtttttcc

SEQ ID NO: 4569 - DNA, 20 bp, Bacteroides eggerthii
gcatactcctttgtatgtac

SEQ ID NO: 4570 - DNA, 20 bp, Leuconostoc fallax
cggtgagacgtaaagcatat

SEQ ID NO: 4571 - DNA, 20 bp, Anaerococcus prevotii
ttgacatactgaggaccggt

SEQ ID NO: 4572 - DNA, 20 bp, Bacteroides distasonis
cgtggacaaagggaggccac

SEQ ID NO: 4573 - DNA, 20 bp, Streptococcus thoraltensis
ggagctaacccatgttagct

SEQ ID NO: 4574 - DNA, 20 bp, Suttonella indologenes
caactaggtgttgggcactt

SEQ ID NO: 4575 - DNA, 20 bp, Campylobacter lari
atctagagtgggggagaggc

SEQ ID NO: 4576 - DNA, 20 bp, Ignavigranum ruoffiae
tgacatccgctgcatagctt

SEQ ID NO: 4577 - DNA, 20 bp, Bacillus sp
gagacgttaaaaggcggcgc

SEQ ID NO: 4578 - DNA, 20 bp, Bacteroides vulgatus
tcgggtatggatacccgttt

SEQ ID NO: 4579 - DNA, 20 bp, Peptoniphilus indolicus
aagaagttaagtcggattag

SEQ ID NO: 4580 - DNA, 20 bp, Pseudoramibacter alactolyticus
atgactttgctgtcaaaact

SEQ ID NO: 4581 - DNA, 30 bp, Atopobium parvulum
taggtgtgggggagtatttcttccgtgccg

SEQ ID NO: 4582 - DNA, 30 bp, Corynebacterium kutscheri
tcgaacggaaaggctttcttgcttgcaaga

SEQ ID NO: 4583 - DNA, 20 bp, Bacteroides ureolyticus
cactcgaagcagggatgcta

SEQ ID NO: 4584 - DNA, 20 bp, Bacteroides eggerthii
aataaagtggagtatgcata

SEQ ID NO: 4585 - DNA, 20 bp, Sphingobacterium multivorum
agacgcactcgtccttcggg

SEQ ID NO: 4586 - DNA, 20 bp, Vagococcus fluvialis
gtgtcactgttggatgggcc

SEQ ID NO: 4587 - DNA, 20 bp, Corynebacterium coyleae
acttcttggaggttgtggtg

SEQ ID NO: 4588 - DNA, 20 bp, Ignavigranum ruoffiae
atcctgtattaactgtacag

SEQ ID NO: 4589 - DNA, 20 bp, Bacteroides vulgatus
gaattacggtgaaagccgta

SEQ ID NO: 4590 - DNA, 20 bp, Leuconostoc fallax
accgtataacaacgcatttc

SEQ ID NO: 4591 - DNA, 30 bp, Actinomyces radingae
ttgtggtttctggagggagatgggctcgcg

SEQ ID NO: 4592 - DNA, 30 bp, Clostridium limosum
tcccggggctcaaccccggtgctgcattcc

SEQ ID NO: 4593 - DNA, 20 bp, Corynebacterium group ANF
cactagatgaggcgagagat

SEQ ID NO: 4594 - DNA, 20 bp, Paenibacillus pabuli
gagcggagttgagagaaagc

SEQ ID NO: 4595 - DNA, 20 bp, Leuconostoc fallax
tcggtgagacgtaaagcata

SEQ ID NO: 4596 - DNA, 20 bp, Staphylococcus simulans
tgtaagtaactatgcatccc

SEQ ID NO: 4597 - DNA, 20 bp, Arcanobacterium haemolyticum
gatgaaggctcctgcttgcg

SEQ ID NO: 4598 - DNA, 20 bp, Bacteroides thetaiotaomicron
tagcatatatttcccgcatg

SEQ ID NO: 4599 - DNA, 20 bp, Ignavigranum ruoffiae
acgcacaacgaaggagcttg

SEQ ID NO: 4600 - DNA, 20 bp, Streptococcus thoraltensis
ttggtataaatgagtcgcga

SEQ ID NO: 4601 - DNA, 20 bp, Cardiobacterium hominis
actaggcgtcgggttgttaa

SEQ ID NO: 4602 - DNA, 20 bp, Vagococcus fluvialis
aaagacgcttcggtgtcact

SEQ ID NO: 4603 - DNA, 30 bp, Helcococcus kunzii
accgaaaaaggaaagtagcgaacgggtgag

SEQ ID NO: 4604 - DNA, 20 bp, Bacteroides vulgatus
ggcagcctgctaagctgcaa

SEQ ID NO: 4605 - DNA, 20 bp, Corynebacterium kutscheri
aggctttcttgcttgcaaga

SEQ ID NO: 4606 - DNA, 20 bp, Leptotrichia buccalis
taaggaacttgccccgcaga

SEQ ID NO: 4607 - DNA, 20 bp, Bacteroides eggerthii
ccgatagtatagtttttccg

SEQ ID NO: 4608 - DNA, 20 bp, Helcococcus kunzii
aggatagtcttttcggagac

SEQ ID NO: 4609 - DNA, 30 bp, Prevotella bivia
tgttacaatgggtggtacagatagttggtc

SEQ ID NO: 4610 - DNA, 20 bp, Suttonella indologenes
cctcgcgcccttagatgagc

SEQ ID NO: 4611 - DNA, 20 bp, Bacteroides thetaiotaomicron
aattcggtatgagatgggga

SEQ ID NO: 4612 - DNA, 30 bp, Helcococcus kunzii
gtcttttcggagacttgtatacaggtggtg

SEQ ID NO: 4613 - DNA, 20 bp, Prevotella oralis
ggggcatcatggaggttgtt

SEQ ID NO: 4614 - DNA, 20 bp, Dolosigranulum pigrum
cttgcccatgagcgggggac

SEQ ID NO: 4615 - DNA, 20 bp, Suttonella indologenes
cccttagatgagcctatatt

SEQ ID NO: 4616 - DNA, 20 bp, Anaerobiospirillum succiniciproducens
aaagacttcggttgctatca

SEQ ID NO: 4617 - DNA, 20 bp, Prevotella oralis
ggccgtatgtaaatgcggtc

SEQ ID NO: 4618 - DNA, 20 bp, Leuconostoc fallax
ccgtataacaacgcatttcg

SEQ ID NO: 4619 - DNA, 20 bp, Bacteroides ureolyticus
ctacacagaggaacaacagt

SEQ ID NO: 4620 - DNA, 30 bp, Moraxella atlantae
aattagattagctagatggtgaggtaaagg

SEQ ID NO: 4621 - DNA, 20 bp, Ignavigranum ruoffiae
tattaactgtacaggacttg

SEQ ID NO: 4622 - DNA, 30 bp, Brevibacillus thermoruber
gcatgagagggtgcggaaaggtggcgcaag

SEQ ID NO: 4623 - DNA, 20 bp, Streptococcus ratti
atagtgtgctctggaaactg

SEQ ID NO: 4624 - DNA, 30 bp, Prevotella oralis
acaatggcgcgtacagcgagtcggccgtat

SEQ ID NO: 4625 - DNA, 30 bp, Psychrobacter phenylpyruvicus
agaagtgggtagcctaacttttagagggcg

SEQ ID NO: 4626 - DNA, 20 bp, Clostridium innocuum
cgcatgctctgtatattaaa

SEQ ID NO: 4627 - DNA, 20 bp, Bacteroides distasonis
taccgcatgaagcagggatc

SEQ ID NO: 4628 - DNA, 20 bp, Weeksella virosa
gctataagatagacatgcgt

SEQ ID NO: 4629 - DNA, 20 bp, Bacillus schlegellii
aggcagcgcactggcctgta

SEQ ID NO: 4630 - DNA, 20 bp, Actinomyces radingae
gtgcaagccgctatttgggt

SEQ ID NO: 4631 - DNA, 30 bp, Moraxella atlantae
acttgctagcaggtaaagctgagaactgta

SEQ ID NO: 4632 - DNA, 20 bp, Abiotrophia defectiva
ccgcataggacatgggatca

SEQ ID NO: 4633 - DNA, 20 bp, Actinomyces radingae
gccgctatttgggtagtggt

SEQ ID NO: 4634 - DNA, 20 bp, Suttonella indologenes
gttgggcacttaagtgctcg

SEQ ID NO: 4635 - DNA, 20 bp, Bacteroides ureolyticus
tgacatatacagtaagacgc

SEQ ID NO: 4636 - DNA, 20 bp, Moraxella atlantae
tggagaaacacactggtggt

SEQ ID NO: 4637 - DNA, 20 bp, Bacteroides eggerthii
tatgcatactcctttgtatg

SEQ ID NO: 4638 - DNA, 20 bp, Prevotella oralis
aggtatattctatcggtaat

SEQ ID NO: 4639 - DNA, 20 bp, Ignavigranum ruoffiae
ttcttccgcgtgagtggcga

SEQ ID NO: 4640 - DNA, 20 bp, Abiotrophia defectiva
ctaggtgcttgcactaggtc

SEQ ID NO: 4641 - DNA, 20 bp, Vagococcus fluvialis
ataaaagacgcttcggtgtc

SEQ ID NO: 4642 - DNA, 20 bp, Staphylococcus simulans
gatgtaagtaactatgcatc

SEQ ID NO: 4643 - DNA, 20 bp, Atopobium parvulum
gaatacttcgagacttccgc

SEQ ID NO: 4644 - DNA, 20 bp, Arcanobacterium haemolyticum
gtggcctaactcgtttgagg

SEQ ID NO: 4645 - DNA, 20 bp, Myroides odoratus
tcgaggggtatagagagctt

SEQ ID NO: 4646 - DNA, 20 bp, Moraxella atlantae
gagctagtggagaaacacac

SEQ ID NO: 4647 - DNA, 20 bp, Streptococcus ratti
gcaagtgggacgcaagggaa

SEQ ID NO: 4648 - DNA, 20 bp, Actinomyces radingae
cgcgcctgtcgtgtaatcct

SEQ ID NO: 4649 - DNA, 20 bp, Facklamia languida
tgacataggatgcataacct

SEQ ID NO: 4650 - DNA, 20 bp, Brevibacillus thermoruber
ttctcgcatgagagggtgcg

SEQ ID NO: 4651 - DNA, 20 bp, Anaerobiospirillum succiniciproducens
gtcattctaaactggctttc

SEQ ID NO: 4652 - DNA, 20 bp, Facklamia sourekii
cagcgagcagcgaagtcgtg

SEQ ID NO: 4653 - DNA, 20 bp, Bacteroides distasonis
gcgtggacaaagggaggcca

SEQ ID NO: 4654 - DNA, 20 bp, Streptococcus macacae
gcggttaggaaagtctggag

SEQ ID NO: 4655 - DNA, 20 bp, Leptotrichia buccalis
gcctgccccggaaactacag

SEQ ID NO: 4656 - DNA, 20 bp, Corynebacterium confusum
tgggcttgacatatttaggt

SEQ ID NO: 4657 - DNA, 20 bp, Dolosigranulum pigrum
gctttgctaccactcatgga

SEQ ID NO: 4658 - DNA, 20 bp, Bacteroides eggerthii
gagtatgcatactcctttgt

SEQ ID NO: 4659 - DNA, 20 bp, Arcanobacterium haemolyticum
catacaccgggattatgcag

SEQ ID NO: 4660 - DNA, 20 bp, Corynebacterium kutscheri
ggctttcttgcttgcaagag

SEQ ID NO: 4661 - DNA, 30 bp, Pasteurella multocida
gattgagcaataagcttggtgctcgaagct

SEQ ID NO: 4662 - DNA, 20 bp, Prevotella oralis
aatcttgagtacgcagtaag

SEQ ID NO: 4663 - DNA, 30 bp, Dolosigranulum pigrum
gcaagtcgaacgatgatatcactgcttgca

SEQ ID NO: 4664 - DNA, 30 bp, Empedobacter brevis
catcatttaattttgaaagatttatcgcag

SEQ ID NO: 4665 - DNA, 20 bp, Bacteroides distasonis
ataccgcatgaagcagggat

SEQ ID NO: 4666 - DNA, 20 bp, Moraxella atlantae
agagcttttgctataagatg

SEQ ID NO: 4667 - DNA, 20 bp, Prevotella disiens
tattcattgatgacatctga

SEQ ID NO: 4668 - DNA, 20 bp, Prevotella bivia
aactaagggataacccagcg

SEQ ID NO: 4669 - DNA, 30 bp, Brevibacillus thermoruber
tcgggtaagtctgatgtcaaagcccggggc

SEQ ID NO: 4670 - DNA, 20 bp, Ignavigranum ruoffiae
gatttcggtccgtaaagcac

SEQ ID NO: 4671 - DNA, 20 bp, Facklamia sourekii
gcatgagtttgagttgaaag

SEQ ID NO: 4672 - DNA, 20 bp, Corynebacterium kutscheri
ttgcttgcaagagagtactc

SEQ ID NO: 4673 - DNA, 20 bp, Corynebacterium confusum
catatttaggttcgcggcag

SEQ ID NO: 4674 - DNA, 20 bp, Bacteroides caccae
ccatacgccgcaaggcattt

SEQ ID NO: 4675 - DNA, 20 bp, Suttonella indologenes
aggtgttgggcacttaagtg

SEQ ID NO: 4676 - DNA, 20 bp, Anaerococcus prevotii
tgacatactgaggaccggta

SEQ ID NO: 4677 - DNA, 20 bp, Streptococcus ratti
acgcaagggaacacactgtg

SEQ ID NO: 4678 - DNA, 20 bp, Anaerobiospirillum succiniciproducens
gtggggaggaaacactgacg

SEQ ID NO: 4679 - DNA, 20 bp, Corynebacterium confusum
gcttgacatatttaggttcg

SEQ ID NO: 4680 - DNA, 20 bp, Leuconostoc fallax
ataacaacgcatttcgcatg

SEQ ID NO: 4681 - DNA, 20 bp, Streptococcus ratti
catagtgtgctctggaaact

SEQ ID NO: 4682 - DNA, 20 bp, Helcococcus kunzii
gagataggatagtcttttcg

SEQ ID NO: 4683 - DNA, 20 bp, Actinomyces radingae
gtgtgggaaaggggcctttg

SEQ ID NO: 4684 - DNA, 20 bp, Bacteroides eggerthii
gtagtggaaacattacagcc

SEQ ID NO: 4685 - DNA, 20 bp, Bacillus sp
ttgcataaggagacgttaaa

SEQ ID NO: 4686 - DNA, 20 bp, Actinomyces radingae
ggaaaggggcctttgtggtt

SEQ ID NO: 4687 - DNA, 20 bp, Prevotella oralis
cggcctaattccgtatgcag

SEQ ID NO: 4688 - DNA, 20 bp, Alloiococcus otitis
gcgactttctgggctatgat

SEQ ID NO: 4689 - DNA, 20 bp, Prevotella oralis
tccaatccttaaaacgtgcc

SEQ ID NO: 4690 - DNA, 20 bp, Sphingobacterium multivorum
gagacgcactcgtccttcgg

SEQ ID NO: 4691 - DNA, 20 bp, Alloiococcus otitis
ttctgctaccttcagagatg

SEQ ID NO: 4692 - DNA, 20 bp, Streptococcus acidominimus
aagagttgacaacacatgtt

SEQ ID NO: 4693 - DNA, 20 bp, Anaerobiospirillum succiniciproducens
aaacactgacggtacccaca

SEQ ID NO: 4694 - DNA, 20 bp, Weeksella virosa
tcttcggataattgagagcg

SEQ ID NO: 4695 - DNA, 20 bp, Bacteroides distasonis
ttcggaccgaggtggaaaca

SEQ ID NO: 4696 - DNA, 30 bp, Weissella paramesenteroides
caagtcgaacgctttgtctttaactgatac

SEQ ID NO: 4697 - DNA, 20 bp, Alloiococcus otitis
ggcggacttgaatgtagcag

SEQ ID NO: 4698 - DNA, 20 bp, Peptoniphilus indolicus
cttcgggaagaagttaagtc

SEQ ID NO: 4699 - DNA, 30 bp, Alloiococcus otitis
ccagtgcatgctgggaaaataaaaggtggc

SEQ ID NO: 4700 - DNA, 20 bp, Peptoniphilus indolicus
ttcgggaagaagttaagtcg

SEQ ID NO: 4701 - DNA, 20 bp, Corynebacterium confusum
tatttaggttcgcggcagag

SEQ ID NO: 4702 - DNA, 20 bp, Corynebacterium kutscheri
aaccacgtttgtggagggag

SEQ ID NO: 4703 - DNA, 30 bp, Dolosigranulum pigrum
aaggcgattttctggtctaacattgacgct

SEQ ID NO: 4704 - DNA, 20 bp, Moraxella atlantae
gtggtgcactaagtcatatg

SEQ ID NO: 4705 - DNA, 20 bp, Moraxella atlantae
caggtggtgcactaagtcat

SEQ ID NO: 4706 - DNA, 20 bp, Pseudoramibacter alactolyticus
gactttgctgtcaaaactcc

SEQ ID NO: 4707 - DNA, 20 bp, Atopobium parvulum
cccccgctcgctctcgatac

SEQ ID NO: 4708 - DNA, 30 bp, Prevotella oralis
aatggatggggatgcgtccgattagccagc

SEQ ID NO: 4709 - DNA, 20 bp, Suttonella indologenes
acttaagtgctcggtaccgc

SEQ ID NO: 4710 - DNA, 20 bp, Bacillus schlegellii
cgcatgctggggcaaggaaa

SEQ ID NO: 4711 - DNA, 20 bp, Streptococcus sobrinus
gagttaactcatgttaactg

SEQ ID NO: 4712 - DNA, 20 bp, Myroides odoratus
acgtacttattgacgctgat

SEQ ID NO: 4713 - DNA, 20 bp, Dolosigranulum pigrum
cccataggtggattggtcgc

SEQ ID NO: 4714 - DNA, 20 bp, Haemophilus segnis
ggcgtgatgtttaataggca

SEQ ID NO: 4715 - DNA, 30 bp, Streptococcus thoraltensis
atagctaataccgcataaaaggagctaacc

SEQ ID NO: 4716 - DNA, 20 bp, Streptococcus ratti
acaccgtgttttcttgagtc

SEQ ID NO: 4717 - DNA, 20 bp, Streptococcus sobrinus
gcataagaggagttaactca

SEQ ID NO: 4718 - DNA, 20 bp, Peptoniphilus indolicus
gaagacataacagacacctt

SEQ ID NO: 4719 - DNA, 20 bp, Myroides odoratus
tactacgtacttattgacgc

SEQ ID NO: 4720 - DNA, 20 bp, Paenibacillus apiarius
accggatagacattttcctc

SEQ ID NO: 4721 - DNA, 20 bp, Myroides odoratimimus
cggattaatgctccatggtt

SEQ ID NO: 4722 - DNA, 30 bp, Psychrobacter phenylpyruvicus
aacttttagagggcgctcaccacggtgtgg

SEQ ID NO: 4723 - DNA, 20 bp, Prevotella oralis
cattactacggcataccccg

SEQ ID NO: 4724 - DNA, 20 bp, Dolosigranulum pigrum
accccataggtggattggtc

SEQ ID NO: 4725 - DNA, 20 bp, Dolosigranulum pigrum
gggctagctaatctttcaaa

SEQ ID NO: 4726 - DNA, 20 bp, Bacteroides vulgatus
aaagtcgggtatggataccc

SEQ ID NO: 4727 - DNA, 20 bp, Bacteroides vulgatus
aagtcgggtatggatacccg

SEQ ID NO: 4728 - DNA, 30 bp, Sphingobacterium multivorum
ggacgggatccgtcggagagcttgctcgaa

SEQ ID NO: 4729 - DNA, 20 bp, Bacillus sp
cttttaacgtctccttatgc

SEQ ID NO: 4730 - DNA, 20 bp, Clostridium cadaveris
ggtttttctgcatgggaaag

SEQ ID NO: 4731 - DNA, 20 bp, Moraxella atlantae
tggtgaactagagtatatga

SEQ ID NO: 4732 - DNA, 20 bp, Dolosigranulum pigrum
ttggtcgcatgacgaattca

SEQ ID NO: 4733 - DNA, 30 bp, Myroides odoratus
agagagcttgctttctagagaccggcggat

SEQ ID NO: 4734 - DNA, 20 bp, Actinomyces radingae
aagccgctatttgggtagtg

SEQ ID NO: 4735 - DNA, 20 bp, Prevotella bivia
aacgtgttcccttttgcagg

SEQ ID NO: 4736 - DNA, 20 bp, Moraxella atlantae
gtggagaaacacactggtgg

SEQ ID NO: 4737 - DNA, 20 bp, Facklamia languida
cgaacagcgacttgaacttg

SEQ ID NO: 4738 - DNA, 30 bp, Prevotella oralis
atagagatattcattcccttcggggcattg

SEQ ID NO: 4739 - DNA, 30 bp, Moraxella atlantae
tgcaggtggtgcactaagtcatatgtgaaa

SEQ ID NO: 4740 - DNA, 20 bp, Bacteroides vulgatus
tgagtccgcatgttcacatg

SEQ ID NO: 4741 - DNA, 30 bp, Dolosigranulum pigrum
tgaaacacccgaagtcggccggccaaccct

SEQ ID NO: 4742 - DNA, 30 bp, Ignavigranum ruoffiae
tccgtaaagcactgttgttagagaagaacc

SEQ ID NO: 4743 - DNA, 20 bp, Vagococcus fluvialis
taataaaagacgcttcggtg

SEQ ID NO: 4744 - DNA, 20 bp, Weeksella virosa
ccgtatataaagctaggtgg

SEQ ID NO: 4745 - DNA, 20 bp, Ignavigranum ruoffiae
tcctgtattaactgtacagg

SEQ ID NO: 4746 - DNA, 20 bp, Pseudoramibacter alactolyticus
tgactttgctgtcaaaactc

SEQ ID NO: 4747 - DNA, 20 bp, Bacillus sp
ccgccttttaacgtctcctt

SEQ ID NO: 4748 - DNA, 20 bp, Lactococcus raffinolactis
ccgcataacaatgttggatg

SEQ ID NO: 4749 - DNA, 30 bp, Prevotella disiens
ccggtacagaatgttggttgcatgtaaatg

SEQ ID NO: 4750 - DNA, 20 bp, Dolosigranulum pigrum
tcattaaaggtggctttgct

SEQ ID NO: 4751 - DNA, 20 bp, Bacillus sp
gcgccgccttttaacgtctc

SEQ ID NO: 4752 - DNA, 30 bp, Prevotella oralis
tttttcagttgccatcggttaaagccgggc

SEQ ID NO: 4753 - DNA, 20 bp, Bacillus schlegellii
gatagattgtcctggcgcat

SEQ ID NO: 4754 - DNA, 20 bp, Ignavigranum ruoffiae
taactgtacaggacttgacg

SEQ ID NO: 4755 - DNA, 30 bp, Weeksella virosa
tgatactgttgatctagaattagtttgaag

SEQ ID NO: 4756 - DNA, 20 bp, Prevotella bivia
attgcagatgaacgatttag

SEQ ID NO: 4757 - DNA, 20 bp, Actinomyces radingae
ctttcgctcgtgtgcaagcc

SEQ ID NO: 4758 - DNA, 20 bp, Bacteroides eggerthii
ggagtatgcatactcctttg

SEQ ID NO: 4759 - DNA, 20 bp, Bacteroides thetaiotaomicron
gtctagggtaagattggtat

SEQ ID NO: 4760 - DNA, 30 bp, Corynebacterium kutscheri
ttcttgcttgcaagagagtactcgagtggc

SEQ ID NO: 4761 - DNA, 30 bp, Dolosigranulum pigrum
aaaggtggctttgctaccactcatggatag

SEQ ID NO: 4762 - DNA, 20 bp, Streptococcus thoraltensis
aattggtataaatgagtcgc

SEQ ID NO: 4763 - DNA, 20 bp, Myroides odoratus
ctccatggtttatatgaatg

SEQ ID NO: 4764 - DNA, 20 bp, Pseudomonas fluorescens
gtagagagatgcttgcatct

SEQ ID NO: 4765 - DNA, 20 bp, Paenibacillus peoriae
tctgcatggaagaaggagga

SEQ ID NO: 4766 - DNA, 20 bp, Anaerobiospirillum succiniciproducens
tggtcattctaaactgcctt

SEQ ID NO: 4767 - DNA, 20 bp, Alloiococcus otitis
tgaatgtagcagaggaaagt

SEQ ID NO: 4768 - DNA, 20 bp, Bacteroides vulgatus
gtatggatacccgtttgcat

SEQ ID NO: 4769 - DNA, 20 bp, Moraxella atlantae
gcgagagcttttgctataag

SEQ ID NO: 4770 - DNA, 30 bp, Sphingobacterium multivorum
aatatgatgctaatctctaaaagccattca

SEQ ID NO: 4771 - DNA, 20 bp, Alloiococcus otitis
ggccgggcaaccatttggag

SEQ ID NO: 4772 - DNA, 20 bp, Alloiococcus otitis
gttggggaagaacacggata

SEQ ID NO: 4773 - DNA, 20 bp, Suttonella indologenes
tagctagcttatcagggcgg

SEQ ID NO: 4774 - DNA, 30 bp, Clostridium cadaveris
cagtaagatgagcactctagctagactgcc

SEQ ID NO: 4775 - DNA, 20 bp, Streptococcus acidominimus
cataagagttgacaacacat

SEQ ID NO: 4776 - DNA, 20 bp, Bacteroides distasonis
cgaatccccaaaccacgtct

SEQ ID NO: 4777 - DNA, 30 bp, Bacteroides eggerthii
ggtttcactattaaagaatttcggttatcg

SEQ ID NO: 4778 - DNA, 30 bp, Globicatella sanguinis
ctagaacttgttctggttaaggttagtggc

SEQ ID NO: 4779 - DNA, 20 bp, Bacteroides vulgatus
ccaacctgccgtctactctt

SEQ ID NO: 4780 - DNA, 20 bp, Abiotrophia defectiva
cataggacatgggatcacat

SEQ ID NO: 4781 - DNA, 20 bp, Brevibacillus thermoruber
gcttgcttcagacaggttag

SEQ ID NO: 4782 - DNA, 20 bp, Bacteroides distasonis
ggggggcttgagtatgtttg

SEQ ID NO: 4783 - DNA, 20 bp, Facklamia sourekii
ttaagctcgcatgagtttaa

SEQ ID NO: 4784 - DNA, 30 bp, Leptotrichia buccalis
ccctgtaagtctagggtgaaaacctgcggc

SEQ ID NO: 4785 - DNA, 20 bp, Anaerobiospirillum succiniciproducens
ccttcgggggaaagacttcg

SEQ ID NO: 4786 - DNA, 20 bp, Myroides odoratus
cgaggggtatagagagcttg

SEQ ID NO: 4787 - DNA, 20 bp, Ignavigranum ruoffiae
gcttgcttcttccgcgtgag

SEQ ID NO: 4788 - DNA, 20 bp, Facklamia sourekii
aaccttaagctcgcatgagt

SEQ ID NO: 4789 - DNA, 20 bp, Anaerobiospirillum succiniciproducens
gacttcggttgctatcagat

SEQ ID NO: 4790 - DNA, 20 bp, Streptococcus ratti
ggtcaggaaagtctggagta

SEQ ID NO: 4791 - DNA, 20 bp, Atopobium parvulum
ccgcatggaagactcgagaa

SEQ ID NO: 4792 - DNA, 30 bp, Facklamia sourekii
gaagaacagtcagtagagtaactgttactg

SEQ ID NO: 4793 - DNA, 20 bp, Bacillus sp
acgtctccttatgcaagaaa

SEQ ID NO: 4794 - DNA, 20 bp, Arthrobacter globiformis
caggcttgctgggtggatta

SEQ ID NO: 4795 - DNA, 20 bp, Facklamia languida
taccaggtcttgacatagga

SEQ ID NO: 4796 - DNA, 20 bp, Atopobium parvulum
acccccgctcgctctcgata

SEQ ID NO: 4797 - DNA, 20 bp, Brevibacillus thermoruber
ggatagggcaccttctcgca

SEQ ID NO: 4798 - DNA, 30 bp, Bacteroides distasonis
cctggcgacagggagcgaatccccaaacca

SEQ ID NO: 4799 - DNA, 20 bp, Prevotella disiens
aatcgacattacgtgtaatg

SEQ ID NO: 4800 - DNA, 20 bp, Leuconostoc fallax
acgctagtcgcggacctgat

SEQ ID NO: 4801 - DNA, 20 bp, Bacteroides eggerthii
tgcttcaatcgatggcgacc

SEQ ID NO: 4802 - DNA, 30 bp, Bacteroides distasonis
gcggccttttaagtcagcggtgaaagtctg

SEQ ID NO: 4803 - DNA, 20 bp, Anaerococcus prevotii
aggtaggataggtgactggg

SEQ ID NO: 4804 - DNA, 30 bp, Arcanobacterium haemolyticum
tcgtttgagggggagcggtcgaaggtggga

SEQ ID NO: 4805 - DNA, 20 bp, Bacillus marinus
gactctctcctgagagtcag

SEQ ID NO: 4806 - DNA, 20 bp, Actinomyces meyeri
gctttgttggggtggattag

SEQ ID NO: 4807 - DNA, 30 bp, Bacteroides vulgatus
tgattaaaggtattccggtagacgatgggg

SEQ ID NO: 4808 - DNA, 20 bp, Ignavigranum ruoffiae
aggagcttgcttcttccgcg

SEQ ID NO: 4809 - DNA, 30 bp, Moraxella atlantae
gtgaagctgagaactgtaaggagactgcca

SEQ ID NO: 4810 - DNA, 20 bp, Ignavigranum ruoffiae
acaggacttgacggtatcta

SEQ ID NO: 4811 - DNA, 20 bp, Facklamia sourekii
gtttgagttgaaagacggct

SEQ ID NO: 4812 - DNA, 20 bp, Anaerobiospirillum succiniciproducens
tcattctaaactggctttct

SEQ ID NO: 4813 - DNA, 20 bp, Streptococcus ratti
gtgggacgcaagggaacaca

SEQ ID NO: 4814 - DNA, 20 bp, Facklamia languida
ttgttcaagtcaatgttagt

SEQ ID NO: 4815 - DNA, 20 bp, Myroides odoratimimus
acgtatttattgacgctgat

SEQ ID NO: 4816 - DNA, 30 bp, Moraxella atlantae
taggaacagcatatgatactggtgaactag

SEQ ID NO: 4817 - DNA, 20 bp, Abiotrophia defectiva
tgcactaggtcaaggtgagt

SEQ ID NO: 4818 - DNA, 20 bp, Streptococcus thoraltensis
gagctaacccatgttagctt

SEQ ID NO: 4819 - DNA, 20 bp, Suttonella indologenes
gggcacttaagtgctcggta

SEQ ID NO: 4820 - DNA, 20 bp, Helcococcus kunzii
tcaaatctcagtgacgcagc

SEQ ID NO: 4821 - DNA, 30 bp, Myroides odoratus
ccagtacagaaagcagctaccaggcaactg

SEQ ID NO: 4822 - DNA, 20 bp, Veillonella atypica
cgaatagtgcgaggatttga

SEQ ID NO: 4823 - DNA, 20 bp, Dolosigranulum pigrum
acacgtgctaggtaactact

SEQ ID NO: 4824 - DNA, 20 bp, Paenibacillus apiarius
ctgagggaaatgggaaagac

SEQ ID NO: 4825 - DNA, 20 bp, Suttonella indologenes
tcaactaggtgttgggcact

SEQ ID NO: 4826 - DNA, 20 bp, Dolosigranulum pigrum
ggccggccaaccctatggga

SEQ ID NO: 4827 - DNA, 20 bp, Staphylococcus simulans
agtaactgtgcatcccttga

SEQ ID NO: 4828 - DNA, 30 bp, Gemella morbillorum
agatatttaaaagttggttatgctaacact

SEQ ID NO: 4829 - DNA, 30 bp, Clostridium glycolicum
gtgtcgaaggtgaaatcaataactggggtg

SEQ ID NO: 4830 - DNA, 20 bp, Prevotella disiens
taatcgacattacgtgtaat

SEQ ID NO: 4831 - DNA, 20 bp, Pseudoramibacter alactolyticus
ctttgctgtcaaaactccgg

SEQ ID NO: 4832 - DNA, 20 bp, Bacteroides vulgatus
gatggcatcatgagtccgca

SEQ ID NO: 4833 - DNA, 20 bp, Prevotella oralis
cttcccattactacggcata

SEQ ID NO: 4834 - DNA, 20 bp, Burkholderia gladioli
tcggggcctcgcgctatagg

SEQ ID NO: 4835 - DNA, 20 bp, Ignavigranum ruoffiae
cagtgagtcgcctgactcat

SEQ ID NO: 4836 - DNA, 20 bp, Facklamia languida
cttgttcaagtcaatgttag

SEQ ID NO: 4837 - DNA, 20 bp, Brevibacillus thermoruber
atgagagggtgcggaaaggt

SEQ ID NO: 4838 - DNA, 20 bp, Dolosigranulum pigrum
aagggctagctaatctttca

SEQ ID NO: 4839 - DNA, 20 bp, Ignavigranum ruoffiae
agaaccatcctgtattaact

SEQ ID NO: 4840 - DNA, 20 bp, Corynebacterium group ANF
acatgcactagatgaggcga

SEQ ID NO: 4841 - DNA, 20 bp, Bacteroides thetaiotaomicron
gcatatatttcccgcatggg

SEQ ID NO: 4842 - DNA, 20 bp, Anaerobiospirillum succiniciproducens
ggtcattctaaactggcttt

SEQ ID NO: 4843 - DNA, 20 bp, Staphylococcus simulans
ggatgtaagtaactatgcat

SEQ ID NO: 4844 - DNA, 20 bp, Streptococcus thoraltensis
ataggagtaagagtggaaag

SEQ ID NO: 4845 - DNA, 20 bp, Facklamia languida
gacataggatgcataaccta

SEQ ID NO: 4846 - DNA, 20 bp, Bacteroides merdae
tagtctgaccggagtggaaa

SEQ ID NO: 4847 - DNA, 20 bp, Actinomyces radingae
tgtggtttctggagggagat

SEQ ID NO: 4848 - DNA, 20 bp, Streptococcus ratti
cgtgttttcttgagtcgcga

SEQ ID NO: 4849 - DNA, 30 bp, Bacteroides distasonis
atagaattgccgttgaaactggggggcttg

SEQ ID NO: 4850 - DNA, 20 bp, Haemophilus segnis
catcacgattgacgttaatc

SEQ ID NO: 4851 - DNA, 20 bp, Pseudoramibacter alactolyticus
tttattgacccttcgggggg

SEQ ID NO: 4852 - DNA, 20 bp, Abiotrophia defectiva
actaggtcaaggtgagtggc

SEQ ID NO: 4853 - DNA, 20 bp, Alloiococcus otitis
ccggccgggcaaccatttgg

SEQ ID NO: 4854 - DNA, 20 bp, Anaerobiospirillum succiniciproducens
ggagcttgaacttcggtttg

SEQ ID NO: 4855 - DNA, 20 bp, Streptococcus ratti
ggacgcaagggaacacactg

SEQ ID NO: 4856 - DNA, 20 bp, Moraxella atlantae
gaacagcatatgatactggt

SEQ ID NO: 4857 - DNA, 20 bp, Bacteroides thetaiotaomicron
tggcataattagaccgcatg

SEQ ID NO: 4858 - DNA, 30 bp, Chromobacterium violaceum
acctgggaacggcattggagactgcacagc

SEQ ID NO: 4859 - DNA, 20 bp, Dolosigranulum pigrum
acgtgctaggtaactactag

SEQ ID NO: 4860 - DNA, 20 bp, Alloiococcus otitis
aagttttcccagtgcatgct

SEQ ID NO: 4861 - DNA, 20 bp, Kingella kingae
agagagtagagatactcttg

SEQ ID NO: 4862 - DNA, 20 bp, Bacteroides vulgatus
cgggtatggatacccgtttg

SEQ ID NO: 4863 - DNA, 20 bp, Facklamia sourekii
gcgagcagcgaagtcgtgag

SEQ ID NO: 4864 - DNA, 30 bp, Bacteroides distasonis
tcgcgtgagggatgaaggttctatggatcg

SEQ ID NO: 4865 - DNA, 20 bp, Facklamia languida
catgatcaatgaaggaaaga

SEQ ID NO: 4866 - DNA, 20 bp, Empedobacter brevis
tgccctactgaaaaggatag

SEQ ID NO: 4867 - DNA, 30 bp, Clostridium histolyticum
ggtggagccaatctcacaaagccaatctca

SEQ ID NO: 4868 - DNA, 20 bp, Ochrobactrum intermedium
cgaccgagaggtgaaagatt

SEQ ID NO: 4869 - DNA, 20 bp, Corynebacterium confusum
ccgcactttggtgtgtgtgg

SEQ ID NO: 4870 - DNA, 20 bp, Corynebacterium confusum
tcaatacaatgcgttgcgac

SEQ ID NO: 4871 - DNA, 20 bp, Lactococcus raffinolactis
gacatttgaaagtaccaaat

SEQ ID NO: 4872 - DNA, 20 bp, Bacteroides thetaiotaomicron
gatagcatatatttcccgca

SEQ ID NO: 4873 - DNA, 20 bp, Prevotella disiens
ctaatacccaatgatattca

SEQ ID NO: 4874 - DNA, 20 bp, Weeksella virosa
cttatagaatgggatagccc

SEQ ID NO: 4875 - DNA, 20 bp, Prevotella disiens
gcttgaattgtaggagcacg

SEQ ID NO: 4876 - DNA, 20 bp, Streptococcus sobrinus
ggaacgcattggtaacaccg

SEQ ID NO: 4877 - DNA, 20 bp, Kocuria kristinae
gatgcgactactgcccgcat

SEQ ID NO: 4878 - DNA, 20 bp, Facklamia sourekii
aagctcgcatgagtttaagt

SEQ ID NO: 4879 - DNA, 20 bp, Abiotrophia defectiva
atcacatgattccgtgagga

SEQ ID NO: 4880 - DNA, 30 bp, Abiotrophia defectiva
ggtgcttgcacttggtcaaggtgagtggcg

SEQ ID NO: 4881 - DNA, 20 bp, Bacteroides vulgatus
aggaataaagtcgggtatgc

SEQ ID NO: 4882 - DNA, 20 bp, Prevotella oralis
gcggcctaattccgtatgca

SEQ ID NO: 4883 - DNA, 20 bp, Streptococcus ratti
accgtgttttcttgagtcgc

SEQ ID NO: 4884 - DNA, 30 bp, Helcococcus kunzii
gaatttaaaggctgtggctcaaccacggtt

SEQ ID NO: 4885 - DNA, 20 bp, Myroides odoratus
actacgtacttattgacgct

SEQ ID NO: 4886 - DNA, 20 bp, Pasteurella multocida
gggtgggactatttggccac

SEQ ID NO: 4887 - DNA, 20 bp, Bacteroides distasonis
atggggatatttgctaaaga

SEQ ID NO: 4888 - DNA, 30 bp, Suttonella indologenes
gcgcccttagatgagcctatattggattag

SEQ ID NO: 4889 - DNA, 30 bp, Prevotella bivia
caagtcgaggggcagcgaatagatagcttg

SEQ ID NO: 4890 - DNA, 20 bp, Streptococcus thoraltensis
gatagaacttttcttaggaa

SEQ ID NO: 4891 - DNA, 30 bp, Alloiococcus otitis
acatgcaagtcgaacgccaaatcttcctgc

SEQ ID NO: 4892 - DNA, 20 bp, Sphingobacterium multivorum
ttgctcgaagacggtgagag

SEQ ID NO: 4893 - DNA, 20 bp, Weeksella virosa
ctgttgggttttcgggctca

SEQ ID NO: 4894 - DNA, 20 bp, Alloiococcus otitis
cgactttctgggctatgatt

SEQ ID NO: 4895 - DNA, 30 bp, Weeksella virosa
tttagttttgaaagatttatcgctataaga

SEQ ID NO: 4896 - DNA, 20 bp, Bacteroides distasonis
ggcttgagtatgtttgaggc

SEQ ID NO: 4897 - DNA, 20 bp, Ochrobactrum intermedium
acgaccgagaggtgaaagat

SEQ ID NO: 4898 - DNA, 20 bp, Bacteroides vulgatus
gccgtctactcttggacagc

SEQ ID NO: 4899 - DNA, 20 bp, Abiotrophia defectiva
cactaggtcaaggtgagtgg

SEQ ID NO: 4900 - DNA, 20 bp, Alloiococcus otitis
tcccagtgcatgctggggaa

SEQ ID NO: 4901 - DNA, 20 bp, Bacteroides ureolyticus
aatgacatatacagtaagac

SEQ ID NO: 4902 - DNA, 20 bp, Veillonella atypica
taatcgggacgaatggttct

SEQ ID NO: 4903 - DNA, 20 bp, Prevotella disiens
aataatcgacattacgtgta

SEQ ID NO: 4904 - DNA, 20 bp, Clostridium clostridiiforme
ggatggaatcttgattgact

SEQ ID NO: 4905 - DNA, 20 bp, Ignavigranum ruoffiae
aaccatcctgtattaactgt

SEQ ID NO: 4906 - DNA, 20 bp, Globicatella sanguinis
ttgttctggttaaggttagt

SEQ ID NO: 4907 - DNA, 20 bp, Actinomyces meyeri
acatgcgccctgggcgtgcg

SEQ ID NO: 4908 - DNA, 20 bp, Actinomyces radingae
aagcttgtggcttaaccttt

SEQ ID NO: 4909 - DNA, 20 bp, Streptococcus thoraltensis
gcttgctacaattggtataa

SEQ ID NO: 4910 - DNA, 20 bp, Lactococcus raffinolactis
ttggatgcatattcgacatt

SEQ ID NO: 4911 - DNA, 20 bp, Globicatella sanguinis
tggttaaggttagtggcgca

SEQ ID NO: 4912 - DNA, 20 bp, Kingella kingae
atgctaatatcattaactga

SEQ ID NO: 4913 - DNA, 20 bp, Myroides odoratimimus
aaaaagcttgcttttttgag

SEQ ID NO: 4914 - DNA, 20 bp, Clostridium cadaveris
ccgcatattatggtttttct

SEQ ID NO: 4915 - DNA, 20 bp, Facklamia sourekii
tggcctaaccattggaggga

SEQ ID NO: 4916 - DNA, 20 bp, Bacillus sp
tcttgcataaggagacgtta

SEQ ID NO: 4917 - DNA, 20 bp, Prevotella oralis
tgccattgacttgaatagag

SEQ ID NO: 4918 - DNA, 20 bp, Bacillus schlegellii
gccggagttcacacattaag

SEQ ID NO: 4919 - DNA, 20 bp, Gemella morbillorum
tttctcgcatgagagatatt

SEQ ID NO: 4920 - DNA, 20 bp, Weeksella virosa
acttgctgttgggttttcgg

SEQ ID NO: 4921 - DNA, 20 bp, Abiotrophia defectiva
aggtgcttgcactaggtcaa

SEQ ID NO: 4922 - DNA, 20 bp, Clostridium cadaveris
gaggtaaccgaaaggagcca

SEQ ID NO: 4923 - DNA, 20 bp, Bacteroides thetaiotaomicron
gggcatcagtttggtttgct

SEQ ID NO: 4924 - DNA, 20 bp, Bacillus schlegellii
taataccggatagattgtcc

SEQ ID NO: 4925 - DNA, 20 bp, Empedobacter brevis
cgtatgcaacttgccctact

SEQ ID NO: 4926 - DNA, 20 bp, Facklamia languida
aggtcttgacataggatgca

SEQ ID NO: 4927 - DNA, 20 bp, Streptococcus thoraltensis
cgtagcttgctacaattggt

SEQ ID NO: 4928 - DNA, 20 bp, Globicatella sanguinis
gaacgaaccacaacgagaac

SEQ ID NO: 4929 - DNA, 20 bp, Staphylococcus simulans
tcatgatgaaagacggtttt

SEQ ID NO: 4930 - DNA, 20 bp, Anaerobiospirillum succiniciproducens
gtggtctgtgactggggtga

SEQ ID NO: 4931 - DNA, 20 bp, Peptoniphilus indolicus
cgaagaaggatttcgattcg

SEQ ID NO: 4932 - DNA, 20 bp, Streptococcus anginosus
cggcggcgggcctaatacat

SEQ ID NO: 4933 - DNA, 30 bp, Myroides odoratus
tatatgaatggcatcgtttatataataaag

SEQ ID NO: 4934 - DNA, 20 bp, Weissella paramesenteroides
ttgtctttaactgatactga

SEQ ID NO: 4935 - DNA, 20 bp, Prevotella oralis
ttctatcggtaatggatggg

SEQ ID NO: 4936 - DNA, 20 bp, Bacteroides distasonis
ttacaatggcgtggacaaag

SEQ ID NO: 4937 - DNA, 20 bp, Dolosigranulum pigrum
gatgatatcactgcttgcag

SEQ ID NO: 4938 - DNA, 20 bp, Bacteroides capilosus
gattcgtccaatggattggg

SEQ ID NO: 4939 - DNA, 20 bp, Anaerobiospirillum succiniciproducens
cctttctagagtattgcaga

SEQ ID NO: 4940 - DNA, 20 bp, Abiotrophia defectiva
gagtaactgctatgcgtgtg

SEQ ID NO: 4941 - DNA, 20 bp, Alloiococcus otitis
aaactggcggacttgaatgt

SEQ ID NO: 4942 - DNA, 20 bp, Atopobium parvulum
ataataccgaatacttcgag

SEQ ID NO: 4943 - DNA, 20 bp, Brevibacillus thermoruber
gagagggtgcggaaaggtgg

SEQ ID NO: 4944 - DNA, 30 bp, Dolosigranulum pigrum
gagcagcgatcccgcaagggctagctaatc

SEQ ID NO: 4945 - DNA, 20 bp, Bacteroides eggerthii
tcgggccgctgtgaaggtgc

SEQ ID NO: 4946 - DNA, 20 bp, Bacteroides thetaiotaomicron
agtggtccacgtgtggattt

SEQ ID NO: 4947 - DNA, 20 bp, Pseudoramibacter alactolyticus
acagcagaatcgcatgactt

SEQ ID NO: 4948 - DNA, 20 bp, Vagococcus fluvialis
tttcccgcatgggagaataa

SEQ ID NO: 4949 - DNA, 20 bp, Moraxella atlantae
cttgctagcaggtgaagctg

SEQ ID NO: 4950 - DNA, 20 bp, Corynebacterium confusum
ttaggttcgcggcagagatg

SEQ ID NO: 4951 - DNA, 20 bp, Prevotella bivia
aattgcagatgaacgattta

SEQ ID NO: 4952 - DNA, 20 bp, Kingella kingae
aaggttgatgctaatatcat

SEQ ID NO: 4953 - DNA, 20 bp, Bacillus schlegellii
cacacattaagcaccccgcc

SEQ ID NO: 4954 - DNA, 20 bp, Facklamia sourekii
agaacagtcagtagagtaac

SEQ ID NO: 4955 - DNA, 20 bp, Helcococcus kunzii
gagaatttttcagttgattt

SEQ ID NO: 4956 - DNA, 20 bp, Prevotella oralis
gtatgtaaatgcggtccaat

SEQ ID NO: 4957 - DNA, 20 bp, Staphylococcus simulans
tgtgcatcccttgacggtac

SEQ ID NO: 4958 - DNA, 30 bp, Leuconostoc fallax
ggtgggctaaccttcgggaggtagccgtct

SEQ ID NO: 4959 - DNA, 20 bp, Clostridium histolyticum
ctttttaatgcatgttagaa

SEQ ID NO: 4960 - DNA, 20 bp, Bacillus schlegellii
cggatagattgtcctggcgc

SEQ ID NO: 4961 - DNA, 20 bp, Bacteroides vulgatus
cttgagtgcagttgaggcag

SEQ ID NO: 4962 - DNA, 20 bp, Peptoniphilus indolicus
ttaatacccgatgaaatcgt

SEQ ID NO: 4963 - DNA, 20 bp, Streptococcus sobrinus
tccgggacttagtgccgacg

SEQ ID NO: 4964 - DNA, 20 bp, Dermacoccus nishinomiyaensis
gatacgaccgatctccgcat

SEQ ID NO: 4965 - DNA, 20 bp, Neisseria meningitidis
gaagcataccgggtaagcgg

SEQ ID NO: 4966 - DNA, 20 bp, Bacteroides distasonis
agcaatagccgtttgcgagg

SEQ ID NO: 4967 - DNA, 30 bp, Prevotella bivia
tgcctgaagttcgtgaccgtaaggatcgac

SEQ ID NO: 4968 - DNA, 20 bp, Bacteroides ureolyticus
cctatttgacataagttaaa

SEQ ID NO: 4969 - DNA, 20 bp, Facklamia sourekii
gtaactgttactgatttgac

SEQ ID NO: 4970 - DNA, 20 bp, Bacteroides ureolyticus
ctcatactcctatttgacat

SEQ ID NO: 4971 - DNA, 20 bp, Moraxella atlantae
aaattagattagctagatgg

SEQ ID NO: 4972 - DNA, 20 bp, Empedobacter brevis
caagatgcgaatctcgaaaa

SEQ ID NO: 4973 - DNA, 20 bp, Leptotrichia buccalis
gatgaaaggagacgctgcgg

SEQ ID NO: 4974 - DNA, 20 bp, Streptococcus acidominimus
cgaactggtgacagtaagcc

SEQ ID NO: 4975 - DNA, 20 bp, Helcococcus kunzii
catgatgtaaatgttaaaga

SEQ ID NO: 4976 - DNA, 20 bp, Abiotrophia defectiva
cgacgaccgctctagagata

SEQ ID NO: 4977 - DNA, 20 bp, Alloiococcus otitis
ctttctgggctatgattgac

SEQ ID NO: 4978 - DNA, 20 bp, Kocuria kristinae
tcccttttgggctggtgtac

SEQ ID NO: 4979 - DNA, 20 bp, Prevotella disiens
catgtaaatgtaatctaatc

SEQ ID NO: 4980 - DNA, 20 bp, Ignavigranum ruoffiae
gacatccgctgcatagctta

SEQ ID NO: 4981 - DNA, 20 bp, Prevotella bivia
gggaacgtgttcccttttgc

SEQ ID NO: 4982 - DNA, 20 bp, Corynebacterium kutscheri
agtttttcctttttaggtct

SEQ ID NO: 4983 - DNA, 20 bp, Campylobacter lari
ttgctagttgtggattagtg

SEQ ID NO: 4984 - DNA, 20 bp, Clostridium cadaveris
tagttgctaacagtaagatg

SEQ ID NO: 4985 - DNA, 20 bp, Helcococcus kunzii
aaactggttaacttgagtag

SEQ ID NO: 4986 - DNA, 20 bp, Weeksella virosa
atgtgaataaacctattcac

SEQ ID NO: 4987 - DNA, 20 bp, Proteus vulgaris
taggtgagtaatggctcacc

SEQ ID NO: 4988 - DNA, 20 bp, Dolosigranulum pigrum
gaaactgacagacttgaatg

SEQ ID NO: 4989 - DNA, 20 bp, Prevotella disiens
aatgtaatctaatctttaaa

SEQ ID NO: 4990 - DNA, 20 bp, Peptoniphilus indolicus
ttctaaacttgagtagtgaa

SEQ ID NO: 4991 - DNA, 20 bp, Corynebacterium confusum
gtggcctttatacaggtggt

SEQ ID NO: 4992 - DNA, 20 bp, Staphylococcus simulans
atgaaaccgcatggtttcat

SEQ ID NO: 4993 - DNA, 30 bp, Abiotrophia defectiva
cgacgaccgctctagagatagagtttttct

SEQ ID NO: 4994 - DNA, 20 bp, Paenibacillus alvei
aactctagagatagagtccc

SEQ ID NO: 4995 - DNA, 20 bp, Ignavigranum ruoffiae
cgctgcatagcttagagata

SEQ ID NO: 4996 - DNA, 20 bp, Clostridium tetani
gcataaagttaaggtttcgc

SEQ ID NO: 4997 - DNA, 20 bp, Cardiobacterium hominis
gcaagagatgagcccatgtt

SEQ ID NO: 4998 - DNA, 30 bp, Actinomyces radingae
tgcaattcgacctcgtgaaggtggagtcgc

SEQ ID NO: 4999 - DNA, 20 bp, Prevotella bivia
ttcgtttgatctcatgagat

SEQ ID NO: 5000 - DNA, 20 bp, Alloiococcus otitis
ccgcataagttttcccagtg

SEQ ID NO: 5001 - DNA, 30 bp, Clostridium cadaveris
atagttagttgctaacagtaagatgagcac

SEQ ID NO: 5002 - DNA, 20 bp, Atopobium parvulum
ggataataccgaatacttcg

SEQ ID NO: 5003 - DNA, 20 bp, Clostridium innocuum
cggagcgcatgctctgtata

SEQ ID NO: 5004 - DNA, 20 bp, Bacteroides vulgatus
tggatatcttgagtgcagtt

SEQ ID NO: 5005 - DNA, 20 bp, Clostridium septicum
gggagtttcttcggaaacaa

SEQ ID NO: 5006 - DNA, 20 bp, Arcanobacterium haemolyticum
gtctaatactagatattctg

SEQ ID NO: 5007 - DNA, 20 bp, Ignavigranum ruoffiae
gcataggccagtgagtcgcc

SEQ ID NO: 5008 - DNA, 20 bp, Kingella kingae
aatatcattaactgatgacg

SEQ ID NO: 5009 - DNA, 20 bp, Streptococcus sobrinus
ggagttaactcatgttaact

SEQ ID NO: 5010 - DNA, 30 bp, Leuconostoc lactis
agccggtgaggtaacccttcggggagccag

SEQ ID NO: 5011 - DNA, 20 bp, Bacteroides distasonis
ccgtttgcgaggtgctgcat

SEQ ID NO: 5012 - DNA, 20 bp, Bacteroides distasonis
caccttttctagcaatagcc

SEQ ID NO: 5013 - DNA, 20 bp, Bacillus schlegellii
aggcgaacctggcgactggg

SEQ ID NO: 5014 - DNA, 20 bp, Bacillus schlegellii
ctggggcaaggaaaggggcg

SEQ ID NO: 5015 - DNA, 20 bp, Suttonella indologenes
gtcgaacgagggaagcagct

SEQ ID NO: 5016 - DNA, 20 bp, Brevibacillus thermoruber
ccggatagggcaccttctcg

SEQ ID NO: 5017 - DNA, 20 bp, Myroides odoratus
tggtttatatgaatggcatc

SEQ ID NO: 5018 - DNA, 20 bp, Alloiococcus otitis
cgaagccggccgggcaacca

SEQ ID NO: 5019 - DNA, 20 bp, Bacillus schlegellii
ggcaaggaaaggggcgaccc

SEQ ID NO: 5020 - DNA, 30 bp, Tatumella ptyseos
gtactttcagcggggaggaaggcagtcgtg

SEQ ID NO: 5021 - DNA, 20 bp, Veillonella atypica
gttcttgtgcgaatagtgcg

SEQ ID NO: 5022 - DNA, 20 bp, Alloiococcus otitis
tgacatcttctgctaccttc

SEQ ID NO: 5023 - DNA, 20 bp, Bacteroides thetaiotaomicron
tattaaagaaattcggtatg

SEQ ID NO: 5024 - DNA, 20 bp, Bacillus marinus
attgcccggtctagagatag

SEQ ID NO: 5025 - DNA, 20 bp, Paenibacillus macerans
cggataatttattttgcagc

SEQ ID NO: 5026 - DNA, 20 bp, Campylobacter concisus
actggatacgacatgtcacc

SEQ ID NO: 5027 - DNA, 20 bp, Abiotrophia defectiva
accgcataggacatggaatc

SEQ ID NO: 5028 - DNA, 20 bp, Alloiococcus otitis
aacacggataggagtcactg

SEQ ID NO: 5029 - DNA, 20 bp, Prevotella oralis
ttgaaaggcggcctaattcc

SEQ ID NO: 5030 - DNA, 20 bp, Campylobacter lari
agttgtggattagtggcgca

SEQ ID NO: 5031 - DNA, 20 bp, Arcanobacterium haemolyticum
acgatgaaggctcctgcttg

SEQ ID NO: 5032 - DNA, 20 bp, Streptococcus thoraltensis
ggtgccggttctagagatag

SEQ ID NO: 5033 - DNA, 30 bp, Ignavigranum ruoffiae
tacaggacttgacggtatctaaccagaaag

SEQ ID NO: 5034 - DNA, 20 bp, Prevotella oralis
caaccttcccattactacgg

SEQ ID NO: 5035 - DNA, 20 bp, Kocuria kristinae
cgactactgcccgcatgggc

SEQ ID NO: 5036 - DNA, 20 bp, Bacillus sp
gtcacccccgaaggggttct

SEQ ID NO: 5037 - DNA, 20 bp, Bacteroides eggerthii
tgtagtggaaacattacagc

SEQ ID NO: 5038 - DNA, 20 bp, Corynebacterium confusum
ttgacatatttaggttcgcg

SEQ ID NO: 5039 - DNA, 20 bp, Bacteroides distasonis
gccaagccattactgacgct

SEQ ID NO: 5040 - DNA, 20 bp, Bacteroides distasonis
ctgccaagccattactgacg

SEQ ID NO: 5041 - DNA, 20 bp, Bacillus schlegellii
tcacacattaagcaccccgc

SEQ ID NO: 5042 - DNA, 20 bp, Moraxella atlantae
agcagggaggaagagccagt

SEQ ID NO: 5043 - DNA, 20 bp, Bacteroides eggerthii
tgagtgcagcataggtaggc

SEQ ID NO: 5044 - DNA, 20 bp, Stenotrophomonas maltophilia
gagtaatgcatgcgggatct

SEQ ID NO: 5045 - DNA, 20 bp, Prevotella loescheii
gaacgattcggagacgatga

SEQ ID NO: 5046 - DNA, 20 bp, Helcococcus kunzii
tacattaatatcgcatgatg

SEQ ID NO: 5047 - DNA, 20 bp, Prevotella oralis
aaggtatattctatcggtaa

SEQ ID NO: 5048 - DNA, 20 bp, Neisseria flavescens
gaactgggtaactagagtgt

SEQ ID NO: 5049 - DNA, 30 bp, Bacteroides distasonis
ggatcccgcatgggaatatttgctaaagat

SEQ ID NO: 5050 - DNA, 20 bp, Prevotella oralis
gaaaggtatattctatcggt

SEQ ID NO: 5051 - DNA, 20 bp, Streptococcus thoraltensis
tagcttgctacaattggtat

SEQ ID NO: 5052 - DNA, 20 bp, Ignavigranum ruoffiae
agcgcaggtggtggcttaag

SEQ ID NO: 5053 - DNA, 30 bp, Cardiobacterium hominis
cctgggaactgcatttgaaactgggcgact

SEQ ID NO: 5054 - DNA, 20 bp, Myroides odoratus
acgggaagaaatgtaattac

SEQ ID NO: 5055 - DNA, 20 bp, Bacteroides capilosus
catgacagaggattcgtcca

SEQ ID NO: 5056 - DNA, 20 bp, Streptococcus bovis
atttgaaagtaccaactggt

SEQ ID NO: 5057 - DNA, 20 bp, Neisseria subflava
cgcttacccggtatgcttca

SEQ ID NO: 5058 - DNA, 20 bp, Anaerococcus prevotii
aagatacaaagggaagcgaa

SEQ ID NO: 5059 - DNA, 30 bp, Methylobacterium mesophilicum
aagtcgagcgggcacttcggtgtcagcggc

SEQ ID NO: 5060 - DNA, 20 bp, Pasteurella multocida
caggtattttaatagaatac

SEQ ID NO: 5061 - DNA, 20 bp, Bacteroides distasonis
gtggaaacaccttttctagg

SEQ ID NO: 5062 - DNA, 20 bp, Anaerococcus tetradius
ggtaatacgtatggaccgag

SEQ ID NO: 5063 - DNA, 20 bp, Facklamia sourekii
ggcttttgctgtcactagag

SEQ ID NO: 5064 - DNA, 20 bp, Sphingobacterium multivorum
gttagtgaagagtgcagaga

SEQ ID NO: 5065 - DNA, 20 bp, Veillonella atypica
tctcggcatcgagactggat

SEQ ID NO: 5066 - DNA, 20 bp, Alloiococcus otitis
ttttcccagtgcatgctggg

SEQ ID NO: 5067 - DNA, 20 bp, Gemella morbillorum
ggataacagtatttctcgca

SEQ ID NO: 5068 - DNA, 20 bp, Prevotella disiens
cgggcttgaattgtaggagc

SEQ ID NO: 5069 - DNA, 20 bp, Cardiobacterium hominis
taggcgtcgggttgttaaag

SEQ ID NO: 5070 - DNA, 20 bp, Clostridium tetani
agttaaggtttcgcatgaaa

SEQ ID NO: 5071 - DNA, 20 bp, Prevotella oralis
cagcgagtcggccgtatgta

SEQ ID NO: 5072 - DNA, 20 bp, Facklamia languida
cttaaggatggctccgcggt

SEQ ID NO: 5073 - DNA, 20 bp, Prevotella bivia
tagcttgctatttatgtcgg

SEQ ID NO: 5074 - DNA, 20 bp, Ignavigranum ruoffiae
ttccgcgtgagtggcgaacg

SEQ ID NO: 5075 - DNA, 20 bp, Bacteroides stercoris
cgggaataaagttagccacg

SEQ ID NO: 5076 - DNA, 20 bp, Prevotella bivia
gcagatgaacgatttagaga

SEQ ID NO: 5077 - DNA, 20 bp, Brevibacillus reuszeri
aacgggacgctagcccgcga

SEQ ID NO: 5078 - DNA, 20 bp, Weeksella virosa
atcgctataagatagacatg

SEQ ID NO: 5079 - DNA, 20 bp, Dolosigranulum pigrum
ctaacattgacgctgaggct

SEQ ID NO: 5080 - DNA, 20 bp, Myroides odoratimimus
gaatagtatggaagtaacta

SEQ ID NO: 5081 - DNA, 20 bp, Bacteroides vulgatus
tacccgtttgcatgtacttt

SEQ ID NO: 5082 - DNA, 30 bp, Suttonella indologenes
aattgcatttgaaactgggtaactagagta

SEQ ID NO: 5083 - DNA, 20 bp, Bacteroides thetaiotaomicron
ccgcaaggagcgtctagggt

SEQ ID NO: 5084 - DNA, 20 bp, Moraxella atlantae
tataagatgtgcctaaatta

SEQ ID NO: 5085 - DNA, 20 bp, Bacteroides eggerthii
ttttccgcatggtttcacta

SEQ ID NO: 5086 - DNA, 20 bp, Abiotrophia defectiva
gtggcgcaagctatcgctaa

SEQ ID NO: 5087 - DNA, 20 bp, Helcococcus kunzii
aactggttaacttgagtaga

SEQ ID NO: 5088 - DNA, 20 bp, Leuconostoc fallax
atgggaagaatagttaatgt

SEQ ID NO: 5089 - DNA, 20 bp, Bacteroides eggerthii
cgccttgagtgcagcatagg

SEQ ID NO: 5090 - DNA, 20 bp, Facklamia sourekii
cataaaccttaagctcgcat

SEQ ID NO: 5091 - DNA, 20 bp, Paenibacillus macerans
tgcagcattgtggaataatg

SEQ ID NO: 5092 - DNA, 20 bp, Anaerococcus prevotii
aagcaaacctcaaaaagtct

SEQ ID NO: 5093 - DNA, 20 bp, Bacteroides distasonis
cagggagcgaatccccaaac

SEQ ID NO: 5094 - DNA, 20 bp, Alloiococcus otitis
gggaaaataaaaggtggctc

SEQ ID NO: 5095 - DNA, 20 bp, Bacillus sp
tcacccccgaaggggttcta

SEQ ID NO: 5096 - DNA, 20 bp, Cardiobacterium hominis
ctaggcgtcgggttgttaaa

SEQ ID NO: 5097 - DNA, 20 bp, Gemella morbillorum
taacagtatttctcgcatga

SEQ ID NO: 5098 - DNA, 20 bp, Facklamia sourekii
agagaagaacagtcagtaga

SEQ ID NO: 5099 - DNA, 30 bp, Bacteroides capillosus
ccgggcactctgaggatactgcctccgcaa

SEQ ID NO: 5100 - DNA, 20 bp, Bacteroides eggerthii
tttttccgcatggtttcact

SEQ ID NO: 5101 - DNA, 20 bp, Corynebacterium group ANF
tagatgaggcgagagatcgt

SEQ ID NO: 5102 - DNA, 20 bp, Suttonella indologenes
agaaaggtttatggttaata

SEQ ID NO: 5103 - DNA, 20 bp, Sphingobacterium multivorum
gagcttgctcgaagatggtg

SEQ ID NO: 5104 - DNA, 20 bp, Veillonella dispar
ttaatagacggaagcaatac

SEQ ID NO: 5105 - DNA, 20 bp, Helcococcus kunzii
tgtccttagcgaagataatg

SEQ ID NO: 5106 - DNA, 20 bp, Peptoniphilus indolicus
cgtaagcatttgaaacttct

SEQ ID NO: 5107 - DNA, 20 bp, Prevotella oralis
cagcgcgaactgggaatctt

SEQ ID NO: 5108 - DNA, 20 bp, Moraxella atlantae
taacctaggaacagcatatg

SEQ ID NO: 5109 - DNA, 20 bp, Prevotella bivia
ccttatgtattcgtttgatc

SEQ ID NO: 5110 - DNA, 20 bp, Helcococcus kunzii
tcgagctaaccgtcaaggag

SEQ ID NO: 5111 - DNA, 20 bp, Helcococcus kunzii
tgggagtcaaatctcagtga

SEQ ID NO: 5112 - DNA, 30 bp, Leuconostoc fallax
tggctagagtggcgaacgggtgagtaacac

SEQ ID NO: 5113 - DNA, 20 bp, Sphingobacterium multivorum
ggatccgtcggagagcttgc

SEQ ID NO: 5114 - DNA, 20 bp, Moraxella atlantae
tagtggagaaacacactggt

SEQ ID NO: 5115 - DNA, 30 bp, Bacteroides capillosus
gggcgtgtaggcgggactgcaagtcaggtg

SEQ ID NO: 5116 - DNA, 20 bp, Moraxella atlantae
aattagattagctagatggt

SEQ ID NO: 5117 - DNA, 20 bp, Collinsella aerofaciens
ctggcggcgcgctaacacat

SEQ ID NO: 5118 - DNA, 20 bp, Campylobacter coli
gagaacctgcgttggatcac

SEQ ID NO: 5119 - DNA, 20 bp, Myroides odoratimimus
tactacgtatttattgacgc

SEQ ID NO: 5120 - DNA, 20 bp, Myroides odoratus
agagagcttgctttctagag

SEQ ID NO: 5121 - DNA, 20 bp, Myroides odoratimimus
gcaagtacagaaagcagcta

SEQ ID NO: 5122 - DNA, 20 bp, Dolosigranulum pigrum
cctatgggaggcagccgtcg

SEQ ID NO: 5123 - DNA, 20 bp, Helcococcus kunzii
tcaaccacggttcggtttag

SEQ ID NO: 5124 - DNA, 20 bp, Bacteroides ureolyticus
tgacataagttaaataggga

SEQ ID NO: 5125 - DNA, 20 bp, Peptoniphilus indolicus
agcatttgaaacttctaaac

SEQ ID NO: 5126 - DNA, 20 bp, Moraxella atlantae
gtgaagaaggtcataagatt

SEQ ID NO: 5127 - DNA, 20 bp, Facklamia sourekii
gtggcctaaccattggaggg

SEQ ID NO: 5128 - DNA, 20 bp, Corynebacterium macginleyi
agatgtagtttcccttttgt

SEQ ID NO: 5129 - DNA, 20 bp, Eubacterium moniliforme
ttcgcatgaaagaacaatta

SEQ ID NO: 5130 - DNA, 20 bp, Prevotella bivia
tattcgtttgatctcatgag

SEQ ID NO: 5131 - DNA, 20 bp, Kingella kingae
acgagtacttgtacttggtg

SEQ ID NO: 5132 - DNA, 20 bp, Bacteroides caccae
tggtccacgtgtggactttt

SEQ ID NO: 5133 - DNA, 20 bp, Clostridium tetani
ataccgcataaagttaaggt

SEQ ID NO: 5134 - DNA, 20 bp, Ignavigranum ruoffiae
tggggaaagatggttttgct

SEQ ID NO: 5135 - DNA, 20 bp, Prevotella disiens
ttcattgatgacatctgatt

SEQ ID NO: 5136 - DNA, 20 bp, Atopobium parvulum
ataccgaatacttcgagact

SEQ ID NO: 5137 - DNA, 20 bp, Alloiococcus otitis
actttctgggctatgattga

SEQ ID NO: 5138 - DNA, 20 bp, Actinomyces radingae
ctggagggagatgggctcgc

SEQ ID NO: 5139 - DNA, 20 bp, Paenibacillus apiarius
gcctgagggaaatgggaaag

SEQ ID NO: 5140 - DNA, 20 bp, Suttonella indologenes
agggaagcagcttgctgcgg

SEQ ID NO: 5141 - DNA, 20 bp, Streptococcus sobrinus
ctccagtgttactaatgagt

SEQ ID NO: 5142 - DNA, 20 bp, Staphylococcus lentus
gttcaatgttgaaagacggt

SEQ ID NO: 5143 - DNA, 20 bp, Anaerobiospirillum succiniciproducens
atgtcgattaggagcttgaa

SEQ ID NO: 5144 - DNA, 20 bp, Corynebacterium group ANF
atcgtctgtccctttgtggc

SEQ ID NO: 5145 - DNA, 20 bp, Bacteroides vulgatus
ccttgttgtcagttactaac

SEQ ID NO: 5146 - DNA, 30 bp, Staphylococcus simulans
tgcatcccttgacggtacctaatcagaaag

SEQ ID NO: 5147 - DNA, 20 bp, Bacteroides eggerthii
gtgcagcataggtaggcgga

SEQ ID NO: 5148 - DNA, 20 bp, Prevotella oralis
tttttggtcggtggccaagc

SEQ ID NO: 5149 - DNA, 20 bp, Leptotrichia buccalis
agagcgggcagtgccttcgg

SEQ ID NO: 5150 - DNA, 20 bp, Pasteurella multocida
aatagaatacttgattgacg

SEQ ID NO: 5151 - DNA, 20 bp, Streptococcus sobrinus
gtgtgtaagagtggaaagct

SEQ ID NO: 5152 - DNA, 20 bp, Bacteroides vulgatus
gggagcgtagatggatgttt

SEQ ID NO: 5153 - DNA, 20 bp, Empedobacter brevis
ggcatgcgtaagattagtta

SEQ ID NO: 5154 - DNA, 20 bp, Prevotella oralis
catggaggttgttttcaact

SEQ ID NO: 5155 - DNA, 20 bp, Sphingobacterium multivorum
gctcgaagacggtgagagtg

SEQ ID NO: 5156 - DNA, 20 bp, Bacteroides vulgatus
aggaataaagtcgggtatgg

SEQ ID NO: 5157 - DNA, 20 bp, Moraxella atlantae
gtgtgaagaaggtcataaga

SEQ ID NO: 5158 - DNA, 20 bp, Clostridium cadaveris
ttatgatttttctgcatggg

SEQ ID NO: 5159 - DNA, 20 bp, Helcococcus kunzii
ttactagcgagtaaagtcga

SEQ ID NO: 5160 - DNA, 20 bp, Kingella kingae
gtacttgtacttggtggcga

SEQ ID NO: 5161 - DNA, 20 bp, Pasteurella multocida
atacttgattgacgttaatc

SEQ ID NO: 5162 - DNA, 20 bp, Vagococcus fluvialis
atttgttttcccgcatggga

SEQ ID NO: 5163 - DNA, 20 bp, Ignavigranum ruoffiae
tcattagttaccagcattga

SEQ ID NO: 5164 - DNA, 20 bp, Kocuria kristinae
actgcccgcatgggctggtg

SEQ ID NO: 5165 - DNA, 20 bp, Abiotrophia defectiva
attccgtgaggaaaggtggc

SEQ ID NO: 5166 - DNA, 20 bp, Bacteroides distasonis
ctaggcaatagccgtttgcg

SEQ ID NO: 5167 - DNA, 20 bp, Suttonella indologenes
taccttggggtgggggataa

SEQ ID NO: 5168 - DNA, 20 bp, Arcanobacterium haemolyticum
ctaactcgtttgagggggag

SEQ ID NO: 5169 - DNA, 20 bp, Anaerobiospirillum succiniciproducens
ttggtcattctaaactggct

SEQ ID NO: 5170 - DNA, 20 bp, Pseudoramibacter alactolyticus
aatcgcatgactttgctgtc

SEQ ID NO: 5171 - DNA, 20 bp, Bacteroides vulgatus
actcttggacagccttctga

SEQ ID NO: 5172 - DNA, 20 bp, Campylobacter lari
actagcttgctagttgtgga

SEQ ID NO: 5173 - DNA, 20 bp, Streptococcus thoraltensis
tttataactaccgtagcttg

SEQ ID NO: 5174 - DNA, 20 bp, Brevibacillus thermoruber
ctgctcgacttgagtgcaga

SEQ ID NO: 5175 - DNA, 20 bp, Sphingobacterium multivorum
aggaataaacctttctacgt

SEQ ID NO: 5176 - DNA, 20 bp, Empedobacter brevis
agatgcgaatctcgaaaact

SEQ ID NO: 5177 - DNA, 20 bp, Prevotella oris
cacgatccaatccttaaatc

SEQ ID NO: 5178 - DNA, 20 bp, Streptococcus ratti
aaagtctggagtaaaaggct

SEQ ID NO: 5179 - DNA, 20 bp, Corynebacterium kutscheri
aaggctttcttgcttgcaag

SEQ ID NO: 5180 - DNA, 20 bp, Streptococcus sobrinus
aagccattgcttcactatca

SEQ ID NO: 5181 - DNA, 20 bp, Macrococcus caseolyticus
cccgcgggtattagctagtt

SEQ ID NO: 5182 - DNA, 20 bp, Clostridium cadaveris
tggaattttaagtgggatgt

SEQ ID NO: 5183 - DNA, 30 bp, Suttonella indologenes
gtaaagcactttcgttagtgaagaaaggtt

SEQ ID NO: 5184 - DNA, 30 bp, Streptococcus thoraltensis
aggagtaagagtggaaagtttactctatga

SEQ ID NO: 5185 - DNA, 20 bp, Bacteroides distasonis
gatcgtaaacctcttttata

SEQ ID NO: 5186 - DNA, 20 bp, Streptococcus sobrinus
acaccggacttgctccagtg

SEQ ID NO: 5187 - DNA, 20 bp, Clostridium cadaveris
tcgagcgagggagcaccttc

SEQ ID NO: 5188 - DNA, 20 bp, Leptotrichia buccalis
atgaaaggagacgctgcggg

SEQ ID NO: 5189 - DNA, 20 bp, Ochrobactrum intermedium
ctatacgaccgagaggtgaa

SEQ ID NO: 5190 - DNA, 20 bp, Empedobacter brevis
aagcgaaagttataagtatc

SEQ ID NO: 5191 - DNA, 20 bp, Pasteurella multocida
aggcaggtattttaatagaa

SEQ ID NO: 5192 - DNA, 20 bp, Bacteroides distasonis
gtttgaacgcattcggaccg

SEQ ID NO: 5193 - DNA, 20 bp, Bacteroides thetaiotaomicron
atggggaaacccataggccg

SEQ ID NO: 5194 - DNA, 20 bp, Ignavigranum ruoffiae
ctatcactaaaggatggtcc

SEQ ID NO: 5195 - DNA, 20 bp, Bacteroides thetaiotaomicron
ttaaagaaattcggtatgag

SEQ ID NO: 5196 - DNA, 20 bp, Empedobacter brevis
tcgcagtaggataggcatgc

SEQ ID NO: 5197 - DNA, 20 bp, Streptococcus thoraltensis
cgcatttataactaccgtag

SEQ ID NO: 5198 - DNA, 20 bp, Bacillus schlegellii
gcaagtcgagcggggaggcg

SEQ ID NO: 5199 - DNA, 20 bp, Methylobacterium mesophilicum
gggcacttcggtgtcagcgg

SEQ ID NO: 5200 - DNA, 20 bp, Cardiobacterium hominis
aactaggcgtcgggttgtta

SEQ ID NO: 5201 - DNA, 20 bp, Helcococcus kunzii
agtcgtcgagctaaccgtca

SEQ ID NO: 5202 - DNA, 20 bp, Prevotella disiens
acagaatgttggttgcatgt

SEQ ID NO: 5203 - DNA, 20 bp, Methylobacterium mesophilicum
attcccagtccacttcggtg

SEQ ID NO: 5204 - DNA, 20 bp, Alloiococcus otitis
tgcaagtcgaacgccaaatc

SEQ ID NO: 5205 - DNA, 20 bp, Weeksella virosa
accgtatataaagctaggtg

SEQ ID NO: 5206 - DNA, 20 bp, Prevotella disiens
aaagacggactaatacccaa

SEQ ID NO: 5207 - DNA, 20 bp, Bacteroides eggerthii
gagtgcagcataggtaggcg

SEQ ID NO: 5208 - DNA, 20 bp, Anaerobiospirillum succiniciproducens
tgctatcagatgagcccaag

SEQ ID NO: 5209 - DNA, 20 bp, Prevotella oralis
cgtatgtaaatgcggtccaa

SEQ ID NO: 5210 - DNA, 20 bp, Fusobacterium varium
gagtcgcatgatttggttat

SEQ ID NO: 5211 - DNA, 20 bp, Bacillus schlegellii
cagcgctgaaggcgaacctg

SEQ ID NO: 5212 - DNA, 20 bp, Bacteroides distasonis
tgaagcagggatcccgcatg

SEQ ID NO: 5213 - DNA, 20 bp, Actinomyces radingae
ggtgagtgtagcgggtaaag

SEQ ID NO: 5214 - DNA, 20 bp, Granulicatella elegans
accgcataggttctagagtc

SEQ ID NO: 5215 - DNA, 20 bp, Lactococcus raffinolactis
ataacaatgttggatgcata

SEQ ID NO: 5216 - DNA, 20 bp, Prevotella oralis
cgtacagcgagtcggccgta

SEQ ID NO: 5217 - DNA, 20 bp, Enterococcus durans
cgatcggaaggtgcggctgg

SEQ ID NO: 5218 - DNA, 20 bp, Brevibacillus thermoruber
gtttggagcttgcttcagac

SEQ ID NO: 5219 - DNA, 20 bp, Psychrobacter phenylpyruvicus
attccttagtgacgcagcta

SEQ ID NO: 5220 - DNA, 20 bp, Staphylococcus simulans
atggtttcatgatgaaagac

SEQ ID NO: 5221 - DNA, 20 bp, Bacillus schlegellii
cagcggaaactggcgggctt

SEQ ID NO: 5222 - DNA, 20 bp, Bacteroides vulgatus
cgtagatggatgtttaagtc

SEQ ID NO: 5223 - DNA, 20 bp, Streptococcus sobrinus
gagtggaaagcttacacagt

SEQ ID NO: 5224 - DNA, 20 bp, Bacteroides distasonis
ttctagcaatagccgtttgc

SEQ ID NO: 5225 - DNA, 20 bp, Ochrobactrum intermedium
tatacgaccgagaggtgaaa

SEQ ID NO: 5226 - DNA, 20 bp, Brevibacillus thermoruber
atagggcaccttctcgcatg

SEQ ID NO: 5227 - DNA, 20 bp, Moraxella atlantae
gctttctggcacaatactga

SEQ ID NO: 5228 - DNA, 20 bp, Ignavigranum ruoffiae
ggagcttgcttcttccgcgt

SEQ ID NO: 5229 - DNA, 20 bp, Bacillus schlegellii
cggaggcggcattgacggta

SEQ ID NO: 5230 - DNA, 20 bp, Bacteroides capilosus
gcggattgctggacagtaac

SEQ ID NO: 5231 - DNA, 20 bp, Leptotrichia buccalis
aaggagacgctgcgggagag

SEQ ID NO: 5232 - DNA, 20 bp, Moraxella atlantae
gaagctgagaactgtaagga

SEQ ID NO: 5233 - DNA, 20 bp, Myroides odoratus
aagcagctaccaggcaactg

SEQ ID NO: 5234 - DNA, 20 bp, Facklamia sourekii
acctaccctctagcggggga

SEQ ID NO: 5235 - DNA, 30 bp, Bacteroides vulgatus
aattgcagttgatactggatatcttgagtg

SEQ ID NO: 5236 - DNA, 20 bp, Brevibacillus thermoruber
aagtcgagcggatcctgttt

SEQ ID NO: 5237 - DNA, 20 bp, Brevibacterium epidermidis
tgacgcatgttgggtggtgg

SEQ ID NO: 5238 - DNA, 20 bp, Leptotrichia buccalis
tctagggtgaaaacctgcgg

SEQ ID NO: 5239 - DNA, 30 bp, Chromobacterium violaceum
acctcgcgttatacgagcagccgacgtctg

SEQ ID NO: 5240 - DNA, 20 bp, Leptotrichia buccalis
atctaggcggccctgtaagt

SEQ ID NO: 5241 - DNA, 20 bp, Prevotella bivia
gagctcaacttctagattgc

SEQ ID NO: 5242 - DNA, 20 bp, Anaerococcus prevotii
atacccgaagcctgcgagca

SEQ ID NO: 5243 - DNA, 20 bp, Abiotrophia defectiva
tgcacttggtcaaggtgagt

SEQ ID NO: 5244 - DNA, 20 bp, Bacteroides vulgatus
cgcatgttcacatgattaaa

SEQ ID NO: 5245 - DNA, 20 bp, Veillonella atypica
cgaggatttgacggtaccgg

SEQ ID NO: 5246 - DNA, 20 bp, Dolosigranulum pigrum
ccggccaaccctatgggagg

SEQ ID NO: 5247 - DNA, 20 bp, Corynebacterium kutscheri
caagagagtactcgagtggc

SEQ ID NO: 5248 - DNA, 20 bp, Myroides odoratus
atagagagcttgctttctag

SEQ ID NO: 5249 - DNA, 20 bp, Stenotrophomonas maltophilia
gtgagtaatgcatgcgggat

SEQ ID NO: 5250 - DNA, 20 bp, Abiotrophia defectiva
cttgcactaggtcaaggtga

SEQ ID NO: 5251 - DNA, 30 bp, Alloiococcus otitis
cttcagagatgaagggttcccttcggggac

SEQ ID NO: 5252 - DNA, 20 bp, Bacillus marinus
ttgcccggtctagagataga

SEQ ID NO: 5253 - DNA, 20 bp, Dolosigranulum pigrum
gcagcgatcccgcaagggct

SEQ ID NO: 5254 - DNA, 20 bp, Bacteroides capilosus
ggattgctggacagtaactg

SEQ ID NO: 5255 - DNA, 20 bp, Bacteroides eggerthii
ctcctttgtatgtaccgtat

SEQ ID NO: 5256 - DNA, 30 bp, Moraxella atlantae
ggtgacgttacctgcagaataagcaccggc

SEQ ID NO: 5257 - DNA, 30 bp, Bacteroides distasonis
gccacctggcgacagggagcgaatccccaa

SEQ ID NO: 5258 - DNA, 20 bp, Bacteroides vulgatus
tgcagttgaggcaggcggaa

SEQ ID NO: 5259 - DNA, 20 bp, Prevotella disiens
ggctgacttgagtacacaca

SEQ ID NO: 5260 - DNA, 20 bp, Facklamia languida
ggtggcctaacttaggaggg

SEQ ID NO: 5261 - DNA, 30 bp, Helcococcus kunzii
aagtcgtcgagctaaccgtcaaggaggcag

SEQ ID NO: 5262 - DNA, 20 bp, Streptococcus ratti
gtgctctggaaactgtctga

SEQ ID NO: 5263 - DNA, 20 bp, Streptococcus mutans
gcaaggaaacacactgtgct

SEQ ID NO: 5264 - DNA, 20 bp, Bacteroides ureolyticus
acacagaggaacaacagttg

SEQ ID NO: 5265 - DNA, 20 bp, Dolosigranulum pigrum
tgaatgtagaagaggaaaat

SEQ ID NO: 5266 - DNA, 20 bp, Ochrobactrum intermedium
taccctatacgaccgagagg

SEQ ID NO: 5267 - DNA, 20 bp, Vagococcus fluvialis
gcataatttgttttcccgca

SEQ ID NO: 5268 - DNA, 20 bp, Bacillus mycoides
gaagtcgtacaaggatagcc

SEQ ID NO: 5269 - DNA, 20 bp, Peptostreptococcus anaerobius
gtcgagcgcgtctgatttga

SEQ ID NO: 5270 - DNA, 20 bp, Vagococcus fluvialis
tgctccaccgaaaatcaaag

SEQ ID NO: 5271 - DNA, 20 bp, Ignavigranum ruoffiae
tgaaatccttcgggacagcg

SEQ ID NO: 5272 - DNA, 20 bp, Abiotrophia defectiva
cataggacatggaatcacat

SEQ ID NO: 5273 - DNA, 20 bp, Helcococcus kunzii
aatgacagtagctaagaagc

SEQ ID NO: 5274 - DNA, 20 bp, Streptococcus ratti
gtgcttgcacaccgtgtttt

SEQ ID NO: 5275 - DNA, 20 bp, Streptococcus thoraltensis
ggttctagagatagaacttt

SEQ ID NO: 5276 - DNA, 20 bp, Atopobium parvulum
tatttcttccgtgccgcagc

SEQ ID NO: 5277 - DNA, 20 bp, Bacteroides vulgatus
tactcttggacagccttctg

SEQ ID NO: 5278 - DNA, 20 bp, Leptotrichia buccalis
tattggagaggtggacggaa

SEQ ID NO: 5279 - DNA, 20 bp, Pediococcus parvulus
aataccgcataacaaaatta

SEQ ID NO: 5280 - DNA, 20 bp, Bacillus schlegellii
gaaaggggcgacccgcttta

SEQ ID NO: 5281 - DNA, 20 bp, Bacillus schlegellii
ggcgaacctggcgactgggg

SEQ ID NO: 5282 - DNA, 20 bp, Vagococcus fluvialis
gcttcggtgtcactgttgga

SEQ ID NO: 5283 - DNA, 20 bp, Sphingomonas paucimobilis
gtgaagtcgtacaagggagc

SEQ ID NO: 5284 - DNA, 20 bp, Lactococcus raffinolactis
gttagagaagaacgttgcat

SEQ ID NO: 5285 - DNA, 20 bp, Gemella morbillorum
cagtatttctcgcatgagag

SEQ ID NO: 5286 - DNA, 20 bp, Ignavigranum ruoffiae
ggacttgacggtatctaacc

SEQ ID NO: 5287 - DNA, 20 bp, Weeksella virosa
cacgagctggatagttgaag

SEQ ID NO: 5288 - DNA, 20 bp, Abiotrophia defectiva
taggtgcttgcacttggtca

SEQ ID NO: 5289 - DNA, 30 bp, Bacteroides distasonis
tgatcactagctgtttgcgatacactgtaa

SEQ ID NO: 5290 - DNA, 20 bp, Streptococcus ratti
cttgcacaccgtgttttctt

SEQ ID NO: 5291 - DNA, 20 bp, Alloiococcus otitis
tttcccagtgcatgctgggg

SEQ ID NO: 5292 - DNA, 20 bp, Empedobacter brevis
gatgcgaatctcgaaaactt

SEQ ID NO: 5293 - DNA, 20 bp, Moraxella atlantae
ggctcatgaagccttagtgg

SEQ ID NO: 5294 - DNA, 20 bp, Weeksella virosa
ctagaattagtttgaagtag

SEQ ID NO: 5295 - DNA, 20 bp, Streptococcus thoraltensis
atgttagctttttaaaaggt

SEQ ID NO: 5296 - DNA, 20 bp, Lactococcus raffinolactis
aaattatgcaagtgacggta

SEQ ID NO: 5297 - DNA, 20 bp, Actinomyces turicensis
cgaacgatgatgctccaact

SEQ ID NO: 5298 - DNA, 20 bp, Staphylococcus simulans
tggtttcatgatgaaagacg

SEQ ID NO: 5299 - DNA, 20 bp, Staphylococcus simulans
gtaactatgcatcccttgac

SEQ ID NO: 5300 - DNA, 20 bp, Campylobacter coli
taggagaacctgcgttggat

SEQ ID NO: 5301 - DNA, 20 bp, Ignavigranum ruoffiae
gtattaactgtacaggactt

SEQ ID NO: 5302 - DNA, 20 bp, Aerococcus viridans
gcaaatctctcaaagccatt

SEQ ID NO: 5303 - DNA, 20 bp, Lactococcus raffinolactis
tgttagagaagaacgttgca

SEQ ID NO: 5304 - DNA, 20 bp, Helcococcus kunzii
ccgaaaaaggaaagtagcga

SEQ ID NO: 5305 - DNA, 20 bp, Corynebacterium confusum
atacaatgcgttgcgacact

SEQ ID NO: 5306 - DNA, 20 bp, Alloiococcus otitis
gagtcactgcctatcccttg

SEQ ID NO: 5307 - DNA, 20 bp, Weeksella virosa
tagaattagtttgaagtagc

SEQ ID NO: 5308 - DNA, 20 bp, Comamonas testosteroni
catggcaggaatcctttaga

SEQ ID NO: 5309 - DNA, 20 bp, Alloiococcus otitis
atgcaagtcgaacgccaaat

SEQ ID NO: 5310 - DNA, 20 bp, Prevotella loescheii
tggggcgcttgagtgcgctg

SEQ ID NO: 5311 - DNA, 30 bp, Paenibacillus apiarius
cagggagagtaactgctctctgggtgacgg

SEQ ID NO: 5312 - DNA, 20 bp, Bacillus marinus
ctatcacttacggatgagcc

SEQ ID NO: 5313 - DNA, 20 bp, Anaerobiospirillum succiniciproducens
gcggaaaggtaagtaggatg

SEQ ID NO: 5314 - DNA, 30 bp, Staphylococcus simulans
ggctaataccggataacacatgaaaccgca

SEQ ID NO: 5315 - DNA, 20 bp, Streptococcus thoraltensis
gccggttctagagatagaac

SEQ ID NO: 5316 - DNA, 20 bp, Leptotrichia buccalis
gatcttgacatcctgcgtat

SEQ ID NO: 5317 - DNA, 20 bp, Bacillus schlegellii
gcgcatgctggggcaaggaa

SEQ ID NO: 5318 - DNA, 20 bp, Bacteroides thetaiotaomicron
tcgaggggcatcagtttggt

SEQ ID NO: 5319 - DNA, 20 bp, Actinomyces radingae
acctctttcgctcgtgtgca

SEQ ID NO: 5320 - DNA, 20 bp, Clostridium limosum
atgttgaaatgattaaagga

SEQ ID NO: 5321 - DNA, 30 bp, Corynebacterium group ANF
ctagtggttggggatgagctcgcggcctat

SEQ ID NO: 5322 - DNA, 20 bp, Bacteroides distasonis
tttctagcaatagccgtttg

SEQ ID NO: 5323 - DNA, 20 bp, Prevotella oralis
atgcgtccgattagccagcc

SEQ ID NO: 5324 - DNA, 20 bp, Bacteroides eggerthii
atagttactatcaggtcatg

SEQ ID NO: 5325 - DNA, 20 bp, Streptococcus sobrinus
agttaactcatgttaactgt

SEQ ID NO: 5326 - DNA, 20 bp, Actinomyces radingae
caattcgacctcgtgaaggt

SEQ ID NO: 5327 - DNA, 20 bp, Streptococcus sobrinus
cgtgtgtaagagtggaaagc

SEQ ID NO: 5328 - DNA, 20 bp, Actinomyces meyeri
cgatgatgctccagctttgt

SEQ ID NO: 5329 - DNA, 20 bp, Alloiococcus otitis
gaagccggccgggcaaccat

SEQ ID NO: 5330 - DNA, 20 bp, Peptoniphilus indolicus
tcgtaagcatttgaaacttc

SEQ ID NO: 5331 - DNA, 20 bp, Myroides odoratimimus
tcggattaatgctccatggt

SEQ ID NO: 5332 - DNA, 20 bp, Clostridium cadaveris
gatttttctgcatgggaaag

SEQ ID NO: 5333 - DNA, 20 bp, Prevotella oralis
ttggacgaaaggtatattct

SEQ ID NO: 5334 - DNA, 20 bp, Pseudoramibacter alactolyticus
gctgtcaaaactccggtgcc

SEQ ID NO: 5335 - DNA, 20 bp, Bacillus sp
atacgttttcttgcataagg

SEQ ID NO: 5336 - DNA, 20 bp, Peptoniphilus indolicus
cgcaaggaagcagatgccga

SEQ ID NO: 5337 - DNA, 20 bp, Suttonella indologenes
taggtgttgggcacttaagt

SEQ ID NO: 5338 - DNA, 20 bp, Clostridium cadaveris
gttagttgctaacagtaaga

SEQ ID NO: 5339 - DNA, 20 bp, Prevotella oralis
cggtccaatccttaaaacgt

SEQ ID NO: 5340 - DNA, 20 bp, Actinomyces turicensis
atgctccaactttgttgggg

SEQ ID NO: 5341 - DNA, 20 bp, Corynebacterium group ANF
ggtagtggatcgagcggcgg

SEQ ID NO: 5342 - DNA, 20 bp, Bacillus sp
ccttttaacgtctccttatg

SEQ ID NO: 5343 - DNA, 30 bp, Facklamia sourekii
agaaggtcattggaaactggcaaacttgag

SEQ ID NO: 5344 - DNA, 20 bp, Psychrobacter phenylpyruvicus
gaaaagggggcagcttgcgc

SEQ ID NO: 5345 - DNA, 20 bp, Bacteroides capilosus
agaggattcgtccaatggat

SEQ ID NO: 5346 - DNA, 20 bp, Bacteroides distasonis
gactaataccgcatgaagca

SEQ ID NO: 5347 - DNA, 20 bp, Empedobacter brevis
cttgccctactgaaaaggat

SEQ ID NO: 5348 - DNA, 20 bp, Anaerococcus prevotii
ttgagaagagtagaggtaag

SEQ ID NO: 5349 - DNA, 20 bp, Ignavigranum ruoffiae
atccgctgcatagcttagag

SEQ ID NO: 5350 - DNA, 20 bp, Suttonella indologenes
taagtgctcggtaccgcagc

SEQ ID NO: 5351 - DNA, 20 bp, Corynebacterium confusum
cgtttccctttgtggccttt

SEQ ID NO: 5352 - DNA, 20 bp, Corynebacterium kutscheri
tcctttttaggtctgtatac

SEQ ID NO: 5353 - DNA, 20 bp, Prevotella oris
tgcttccccgggcgtcgacc

SEQ ID NO: 5354 - DNA, 20 bp, Staphylococcus lentus
ggttcaatgttgaaagacgg

SEQ ID NO: 5355 - DNA, 20 bp, Prevotella bivia
tacagatagttggtcgtgtg

SEQ ID NO: 5356 - DNA, 20 bp, Streptococcus thoraltensis
tgccggttctagagatagaa

SEQ ID NO: 5357 - DNA, 20 bp, Bacteroides distasonis
cgaggtggaaacaccttttc

SEQ ID NO: 5358 - DNA, 20 bp, Sporosarcina pasteurii
cagcatagccgtctttcaga

SEQ ID NO: 5359 - DNA, 20 bp, Facklamia languida
cttgacataggatgcataac

SEQ ID NO: 5360 - DNA, 20 bp, Bacteroides eggerthii
agcttgcttcaatcgatggc

SEQ ID NO: 5361 - DNA, 20 bp, Myroides odoratus
cttgctttctagagaccggc

SEQ ID NO: 5362 - DNA, 20 bp, Bacillus schlegellii
ttgtcggggaagaagggccg

SEQ ID NO: 5363 - DNA, 20 bp, Paenibacillus apiarius
aggcggtgatgtaagttggg

SEQ ID NO: 5364 - DNA, 20 bp, Leuconostoc fallax
agtcgaacgctagtcgcgga

SEQ ID NO: 5365 - DNA, 20 bp, Eubacterium moniliforme
aggtggccatgtaagtcagg

SEQ ID NO: 5366 - DNA, 20 bp, Brevibacillus brevis
agctgaaagtcggtttcggc

SEQ ID NO: 5367 - DNA, 20 bp, Moraxella atlantae
actggtgaactagagtatat

SEQ ID NO: 5368 - DNA, 20 bp, Actinomyces radingae
taatactggatgttctgcgc

SEQ ID NO: 5369 - DNA, 20 bp, Prevotella oris
ttccccgggcgtcgaccggc

SEQ ID NO: 5370 - DNA, 20 bp, Peptostreptococcus anaerobius
attaatgaaagatgagcggc

SEQ ID NO: 5371 - DNA, 20 bp, Alloiococcus otitis
ccgaagccggccgggcaacc

SEQ ID NO: 5372 - DNA, 20 bp, Helcococcus kunzii
aatgttaaagaatttcggtg

SEQ ID NO: 5373 - DNA, 20 bp, Moraxella atlantae
actagagtatatgagaggga

SEQ ID NO: 5374 - DNA, 20 bp, Suttonella indologenes
ctgtgaatttgacattagct

SEQ ID NO: 5375 - DNA, 20 bp, Corynebacterium confusum
cttcagcttgctggagtact

SEQ ID NO: 5376 - DNA, 20 bp, Bacteroides vulgatus
ggtatggatacccgtttgca

SEQ ID NO: 5377 - DNA, 30 bp, Leptotrichia buccalis
ttaccagatcttgacatcctgcgtatgccc

SEQ ID NO: 5378 - DNA, 20 bp, Streptococcus thoraltensis
gaagaataggagtaagagtg

SEQ ID NO: 5379 - DNA, 20 bp, Ignavigranum ruoffiae
ggggaaagatggttttgcta

SEQ ID NO: 5380 - DNA, 20 bp, Bacteroides ureolyticus
cctatttaacataagttaaa

SEQ ID NO: 5381 - DNA, 20 bp, Bacteroides thetaiotaomicron
agtcgaggggcatcagtttg

SEQ ID NO: 5382 - DNA, 20 bp, Arcanobacterium haemolyticum
ctcgtttgagggggagcggt

SEQ ID NO: 5383 - DNA, 30 bp, Dolosigranulum pigrum
ccctatgggaggcagccgtcgaaggtgggt

SEQ ID NO: 5384 - DNA, 20 bp, Virgibacillus proomii
aagcaagcagaaccccttcg

SEQ ID NO: 5385 - DNA, 20 bp, Anaerobiospirillum succiniciproducens
gacatcgtaggaatctttca

SEQ ID NO: 5386 - DNA, 20 bp, Comamonas terrigena
gaacgaaaagccctgggtta

SEQ ID NO: 5387 - DNA, 30 bp, Dolosigranulum pigrum
tgctaggtaactactagcgccttgacggta

SEQ ID NO: 5388 - DNA, 20 bp, Myroides odoratus
attactacgtacttattgac

SEQ ID NO: 5389 - DNA, 30 bp, Clostridium histolyticum
cgagaatcctgtggaaacataggagtgccc

SEQ ID NO: 5390 - DNA, 20 bp, Suttonella indologenes
gaagcagcttgctgcggacc

SEQ ID NO: 5391 - DNA, 20 bp, Bacteroides capilosus
cggattgctggacagtaact

SEQ ID NO: 5392 - DNA, 20 bp, Paenibacillus macerans
atttattttgcagcattgtg

SEQ ID NO: 5393 - DNA, 30 bp, Dolosigranulum pigrum
caacattcggaaacggatgctaatacccca

SEQ ID NO: 5394 - DNA, 20 bp, Moraxella atlantae
ctagagtatatgagaggaaa

SEQ ID NO: 5395 - DNA, 20 bp, Bacillus sp
ttgcgccgccttttaacgtc

SEQ ID NO: 5396 - DNA, 20 bp, Sphingobacterium multivorum
gaagacggtgagagtggcgc

SEQ ID NO: 5397 - DNA, 20 bp, Facklamia sourekii
taaaccttaagctcgcatga

SEQ ID NO: 5398 - DNA, 20 bp, Actinomyces radingae
aacgctcagaaatgggtgct

SEQ ID NO: 5399 - DNA, 20 bp, Streptococcus mutans
aaacacactgtgcttgcaca

SEQ ID NO: 5400 - DNA, 20 bp, Prevotella loescheii
cgtccgattagccagacggc

SEQ ID NO: 5401 - DNA, 20 bp, Alloiococcus otitis
accgcataagttttcccagt

SEQ ID NO: 5402 - DNA, 30 bp, Corynebacterium group ANF
tggccggtacagtaggttgcgagaccgtga

SEQ ID NO: 5403 - DNA, 20 bp, Bacteroides ureolyticus
taagttaaatagggaaagtc

SEQ ID NO: 5404 - DNA, 20 bp, Clostridium clostridiiforme
acagtgccgcatggcagtgt

SEQ ID NO: 5405 - DNA, 20 bp, Streptococcus acidominimus
tacatttgaattgattgagt

SEQ ID NO: 5406 - DNA, 20 bp, Bacteroides distasonis
acaccttttctagcaatagc

SEQ ID NO: 5407 - DNA, 20 bp, Facklamia sourekii
agttgaaagacggcttttgc

SEQ ID NO: 5408 - DNA, 20 bp, Helcococcus kunzii
ttcagtcgatttcttcggaa

SEQ ID NO: 5409 - DNA, 20 bp, Leuconostoc fallax
agttaatgtaggaaatgatg

SEQ ID NO: 5410 - DNA, 20 bp, Prevotella disiens
ttagcacctggtgttagcgg

SEQ ID NO: 5411 - DNA, 20 bp, Lactococcus raffinolactis
cgttgcatagagtggaaaat

SEQ ID NO: 5412 - DNA, 20 bp, Facklamia languida
tgaacttgttcaagtcaatg

SEQ ID NO: 5413 - DNA, 30 bp, Comamonas testosteroni
gagatagaggagtgctcgaaagagaacctg

SEQ ID NO: 5414 - DNA, 20 bp, Comamonas terrigena
agaccttgtgctactagagc

SEQ ID NO: 5415 - DNA, 30 bp, Staphylococcus lutrae
acatgtgtaagtcactatgcacatcttgac

SEQ ID NO: 5416 - DNA, 20 bp, Dermacoccus nishinomiyaensis
ctggatacgaccgatctccg

SEQ ID NO: 5417 - DNA, 20 bp, Veillonella atypica
caatctcggcatcgagactg

SEQ ID NO: 5418 - DNA, 20 bp, Ignavigranum ruoffiae
tttcggtccgtaaagcactg

SEQ ID NO: 5419 - DNA, 20 bp, Lactococcus raffinolactis
accgcataacaatgttggat

SEQ ID NO: 5420 - DNA, 20 bp, Microbacterium hominis
atacaccagaacaccgtaga

SEQ ID NO: 5421 - DNA, 20 bp, Moraxella atlantae
tgaagaaggtcataagattg

SEQ ID NO: 5422 - DNA, 20 bp, Ignavigranum ruoffiae
ccgcataggccagtgagtcg

SEQ ID NO: 5423 - DNA, 20 bp, Prevotella disiens
tgatattcattgatgacatc

SEQ ID NO: 5424 - DNA, 20 bp, Peptoniphilus indolicus
tagcgatcagtagccggcct

SEQ ID NO: 5425 - DNA, 20 bp, Facklamia sourekii
attagagaagaacagtcagt

SEQ ID NO: 5426 - DNA, 30 bp, Bacteroides vulgatus
aacaggttctgctgaggactctgacaagac

SEQ ID NO: 5427 - DNA, 20 bp, Moraxella atlantae
tagcttgctaggggaaatag

SEQ ID NO: 5428 - DNA, 20 bp, Myroides odoratus
tgtaattatttgacggtacc

SEQ ID NO: 5429 - DNA, 20 bp, Dolosigranulum pigrum
aggaacttgcccatgagcgg

SEQ ID NO: 5430 - DNA, 20 bp, Leuconostoc fallax
gtatgggaagaatagttaat

SEQ ID NO: 5431 - DNA, 20 bp, Staphylococcus simulans
taacacatgaaaccgcatgg

SEQ ID NO: 5432 - DNA, 20 bp, Myroides odoratus
tgctttctagagaccggcgg

SEQ ID NO: 5433 - DNA, 20 bp, Weeksella virosa
tttgaagtagctagaatgtg

SEQ ID NO: 5434 - DNA, 20 bp, Arcanobacterium haemolyticum
tcctgcttgcgggggttgga

SEQ ID NO: 5435 - DNA, 20 bp, Weeksella virosa
gttttcgggctcagtggtta

SEQ ID NO: 5436 - DNA, 20 bp, Bacteroides eggerthii
gcagcggaatgtagtggaaa

SEQ ID NO: 5437 - DNA, 20 bp, Corynebacterium group ANF
ggtggtgcctgtggtggaaa

SEQ ID NO: 5438 - DNA, 20 bp, Facklamia sourekii
ttactgatttgacggtatct

SEQ ID NO: 5439 - DNA, 20 bp, Bacteroides thetaiotaomicron
cgaggggcatcagtttggtt

SEQ ID NO: 5440 - DNA, 20 bp, Helcococcus kunzii
taaatgttaaagaatttcgg

SEQ ID NO: 5441 - DNA, 30 bp, Bacteroides capillosus
tcttgagtgctggagaggcaatcggaattc

SEQ ID NO: 5442 - DNA, 20 bp, Alloiococcus otitis
gttttcccagtgcatgctgg

SEQ ID NO: 5443 - DNA, 20 bp, Bacillus schlegellii
gggccgcggaggcggcattg

SEQ ID NO: 5444 - DNA, 20 bp, Myroides odoratus
gatgcgaatctcaaaaactg

SEQ ID NO: 5445 - DNA, 20 bp, Bacteroides capilosus
caatcggaattccgtgtgta

SEQ ID NO: 5446 - DNA, 20 bp, Streptococcus ratti
actgtgcttgcacaccgtgt

SEQ ID NO: 5447 - DNA, 20 bp, Moraxella atlantae
gccgttggggctcatgaagt

SEQ ID NO: 5448 - DNA, 20 bp, Actinomyces radingae
aacacccgaagcttgtggct

SEQ ID NO: 5449 - DNA, 20 bp, Bacillus sp
ggggttctacttgcttcccg

SEQ ID NO: 5450 - DNA, 20 bp, Bacteroides capilosus
tgtgaaaaccacgggctcaa

SEQ ID NO: 5451 - DNA, 20 bp, Prevotella oralis
ggcggcctaattccgtatgc

SEQ ID NO: 5452 - DNA, 20 bp, Prevotella bivia
gatctaatccttaaaaccat

SEQ ID NO: 5453 - DNA, 20 bp, Anaerobiospirillum succiniciproducens
tgacatcgtaggaatctttc

SEQ ID NO: 5454 - DNA, 20 bp, Facklamia languida
aacgaacagcgacttgaact

SEQ ID NO: 5455 - DNA, 20 bp, Leuconostoc fallax
atgaagtgtgtttaaaaggg

SEQ ID NO: 5456 - DNA, 20 bp, Bacillus sp
agcgcgggaagcaagtagaa

SEQ ID NO: 5457 - DNA, 30 bp, Facklamia languida
gtggcgaaagcggctttctggtctgagact

SEQ ID NO: 5458 - DNA, 20 bp, Moraxella atlantae
gatggaacctagcttgctag

SEQ ID NO: 5459 - DNA, 20 bp, Clostridium cadaveris
caatccgctgtaagatgggc

SEQ ID NO: 5460 - DNA, 30 bp, Sphingobacterium multivorum
gtgtaggaagctgaatgtactggaagaata

SEQ ID NO: 5461 - DNA, 20 bp, Prevotella bivia
aatgaggtccttcgggacat

SEQ ID NO: 5462 - DNA, 20 bp, Aerococcus christensenii
ccgcataggaagtttgttcg

SEQ ID NO: 5463 - DNA, 20 bp, Actinomyces radingae
cgctatttgggtagtggtga

SEQ ID NO: 5464 - DNA, 20 bp, Atopobium parvulum
tcaacccccgctcgctctcg

SEQ ID NO: 5465 - DNA, 20 bp, Lactococcus raffinolactis
agagaagaacgttgcataga

SEQ ID NO: 5466 - DNA, 20 bp, Leptotrichia buccalis
cacctgaagctactggtcca

SEQ ID NO: 5467 - DNA, 20 bp, Bacteroides vulgatus
attaatacaagatggcatca

SEQ ID NO: 5468 - DNA, 20 bp, Prevotella disiens
ttttgcatgtaccattcgaa

SEQ ID NO: 5469 - DNA, 20 bp, Anaerobiospirillum succiniciproducens
gaaacactgacgttacccac

SEQ ID NO: 5470 - DNA, 20 bp, Sphingobacterium multivorum
acgtgtaggaagctgaatgt

SEQ ID NO: 5471 - DNA, 20 bp, Arcanobacterium haemolyticum
gacatacaccgggattatgc

SEQ ID NO: 5472 - DNA, 20 bp, Moraxella atlantae
gtgaactagagtatatgaga

SEQ ID NO: 5473 - DNA, 20 bp, Bacteroides distasonis
tgaacgcattcggaccgagg

SEQ ID NO: 5474 - DNA, 20 bp, Weeksella virosa
ggctcagtggttaagcgaaa

SEQ ID NO: 5475 - DNA, 20 bp, Lactococcus raffinolactis
aaggcagtgatgtcaagcta

SEQ ID NO: 5476 - DNA, 20 bp, Leuconostoc fallax
aggaaatgatgttaatgtga

SEQ ID NO: 5477 - DNA, 20 bp, Bacillus lentus
gtctccagggcggtcaggag

SEQ ID NO: 5478 - DNA, 20 bp, Bacillus marinus
ctgactctctcctgagagtc

SEQ ID NO: 5479 - DNA, 20 bp, Prevotella bivia
agatagcttgctatttatgt

SEQ ID NO: 5480 - DNA, 20 bp, Lactococcus raffinolactis
tttgaaagtaccaaatggta

SEQ ID NO: 5481 - DNA, 20 bp, Facklamia sourekii
tcgcatgagtttgagttgaa

SEQ ID NO: 5482 - DNA, 20 bp, Facklamia languida
agcggctttctggtctgaga

SEQ ID NO: 5483 - DNA, 20 bp, Abiotrophia defectiva
ataccgcataggacatggaa

SEQ ID NO: 5484 - DNA, 20 bp, Clostridium cadaveris
gatgagcactctagctagac

SEQ ID NO: 5485 - DNA, 20 bp, Veillonella atypica
cttgtgcgaatagtgcgagg

SEQ ID NO: 5486 - DNA, 20 bp, Leptotrichia buccalis
ccctgtaagtctagggtgaa

SEQ ID NO: 5487 - DNA, 20 bp, Atopobium parvulum
ctccggcggagagggatggg

SEQ ID NO: 5488 - DNA, 20 bp, Clostridium glycolicum
gtgtcgaaggtgaaatcaat

SEQ ID NO: 5489 - DNA, 20 bp, Dolosigranulum pigrum
tttctggtctaacattgacg

SEQ ID NO: 5490 - DNA, 20 bp, Bacteroides ureolyticus
ctgccctacacagaggaaca

SEQ ID NO: 5491 - DNA, 20 bp, Prevotella oralis
ctctgtgaatactgccgccg

SEQ ID NO: 5492 - DNA, 20 bp, Helcococcus kunzii
cttatgatacattaatatcg

SEQ ID NO: 5493 - DNA, 20 bp, Facklamia languida
gcatagaatcacagatcgca

SEQ ID NO: 5494 - DNA, 20 bp, Bacteroides eggerthii
gaaacattacagccttcggg

SEQ ID NO: 5495 - DNA, 20 bp, Bacteroides ureolyticus
cctggacttgacatcctaaa

SEQ ID NO: 5496 - DNA, 20 bp, Paenibacillus pabuli
ggagttgagagaaagcttgc

SEQ ID NO: 5497 - DNA, 20 bp, Moraxella atlantae
agcagggaggaagagctagt

SEQ ID NO: 5498 - DNA, 20 bp, Abiotrophia defectiva
gttggaggggttccaccctt

SEQ ID NO: 5499 - DNA, 20 bp, Atopobium parvulum
ggagtatttcttccgtgccg

SEQ ID NO: 5500 - DNA, 30 bp, Bacteroides distasonis
gaggaaccttacccgggtttgaacgcattc

SEQ ID NO: 5501 - DNA, 20 bp, Facklamia languida
acttgttcaagtcaatgtta

SEQ ID NO: 5502 - DNA, 20 bp, Peptoniphilus asaccharolyticus
agatgtgaaaggcaagggct

SEQ ID NO: 5503 - DNA, 30 bp, Bacteroides vulgatus
caagactgccatcgtaagatgtgaggaagg

SEQ ID NO: 5504 - DNA, 20 bp, Helcococcus kunzii
aaccacggttcggtttagaa

SEQ ID NO: 5505 - DNA, 20 bp, Fusobacterium varium
gaacttgccttacagactgg

SEQ ID NO: 5506 - DNA, 20 bp, Moraxella atlantae
gcttttgctataagatgtgc

SEQ ID NO: 5507 - DNA, 30 bp, Brevibacillus reuszeri
caacgggacgctagcccgcgagggtatgcc

SEQ ID NO: 5508 - DNA, 20 bp, Bacteroides distasonis
cttttctagcaatagccgtt

SEQ ID NO: 5509 - DNA, 20 bp, Kocuria kristinae
ttcttcccttttgggctggt

SEQ ID NO: 5510 - DNA, 20 bp, Bacteroides ureolyticus
taaatagggaaagtcttttc

SEQ ID NO: 5511 - DNA, 20 bp, Bacillus sp
agaaccccttcgggggtgac

SEQ ID NO: 5512 - DNA, 20 bp, Myroides odoratus
tacagaaagcagctaccagg

SEQ ID NO: 5513 - DNA, 20 bp, Corynebacterium jeikeium
acacccgcccgtcgcgtcat

SEQ ID NO: 5514 - DNA, 20 bp, Psychrobacter phenylpyruvicus
tgattccttagtgacgcagc

SEQ ID NO: 5515 - DNA, 20 bp, Anaerobiospirillum succiniciproducens
cacggtgtggtctgtgactg

SEQ ID NO: 5516 - DNA, 20 bp, Prevotella oralis
gcccaccggggcatcgatcg

SEQ ID NO: 5517 - DNA, 20 bp, Leptotrichia buccalis
cccggaaactacagggctgg

SEQ ID NO: 5518 - DNA, 20 bp, Bacteroides eggerthii
aattgcagcggaatgtagtg

SEQ ID NO: 5519 - DNA, 20 bp, Dolosigranulum pigrum
ttttctggtctaacattgac

SEQ ID NO: 5520 - DNA, 20 bp, Streptococcus sobrinus
cataagaggagttaactcat

SEQ ID NO: 5521 - DNA, 20 bp, Alloiococcus otitis
ggaaaataaaaggtggctct

SEQ ID NO: 5522 - DNA, 20 bp, Streptococcus macacae
ttaggaaagtctggagtaaa

SEQ ID NO: 5523 - DNA, 20 bp, Bacteroides thetaiotaomicron
atagcatatatttcccgcat

SEQ ID NO: 5524 - DNA, 20 bp, Helcococcus kunzii
tatcgcatgatgtaaatgtt

SEQ ID NO: 5525 - DNA, 20 bp, Myroides odoratimimus
cttgaataatatggaagtaa

SEQ ID NO: 5526 - DNA, 20 bp, Bacteroides thetaiotaomicron
agtttggtttgcttgcaaac

SEQ ID NO: 5527 - DNA, 20 bp, Leuconostoc fallax
aaaaggggcttcggcctcac

SEQ ID NO: 5528 - DNA, 20 bp, Weeksella virosa
ttttgaaagatttatcgcta

SEQ ID NO: 5529 - DNA, 20 bp, Prevotella bivia
tgaccgtacaggatcgacct

SEQ ID NO: 5530 - DNA, 20 bp, Peptoniphilus indolicus
cagatgtgaaaggcgagggc

SEQ ID NO: 5531 - DNA, 20 bp, Streptococcus thoraltensis
atcccggtgccggttctaga

SEQ ID NO: 5532 - DNA, 20 bp, Kocuria kristinae
gcgactactgcccgcatggg

SEQ ID NO: 5533 - DNA, 20 bp, Dolosigranulum pigrum
gatatcactgcttgcagtga

SEQ ID NO: 5534 - DNA, 20 bp, Lactococcus raffinolactis
gaaaattatgcaagtgacgg

SEQ ID NO: 5535 - DNA, 20 bp, Bacteroides ureolyticus
aatagggaaagtcttttcgg

SEQ ID NO: 5536 - DNA, 20 bp, Prevotella bivia
ttatatggggataaagtggg

SEQ ID NO: 5537 - DNA, 20 bp, Comamonas terrigena
cggaacgaaaagccctgggt

SEQ ID NO: 5538 - DNA, 20 bp, Peptoniphilus indolicus
aaggaagcagatgccgaagg

SEQ ID NO: 5539 - DNA, 20 bp, Bacteroides distasonis
aatggcgtggacaaagggag

SEQ ID NO: 5540 - DNA, 20 bp, Bacteroides eggerthii
agcataggtaggcggaattc

SEQ ID NO: 5541 - DNA, 20 bp, Atopobium parvulum
caacctgcccctttcattgg

SEQ ID NO: 5542 - DNA, 20 bp, Paenibacillus apiarius
tttcctcgcctgagggaaat

SEQ ID NO: 5543 - DNA, 20 bp, Helcococcus kunzii
ttttcagttgatttcttcgg

SEQ ID NO: 5544 - DNA, 30 bp, Arcanobacterium haemolyticum
acaccgggattatgcagagatgtgtgagtc

SEQ ID NO: 5545 - DNA, 20 bp, Dolosigranulum pigrum
aaccctatgggaggcagccg

SEQ ID NO: 5546 - DNA, 20 bp, Bacteroides capillosus
ggcttgaactgtaggcgaac

SEQ ID NO: 5547 - DNA, 20 bp, Lactococcus raffinolactis
catagagtggaaaattatgc

SEQ ID NO: 5548 - DNA, 20 bp, Leuconostoc fallax
acacatttcgcatgaagtgt

SEQ ID NO: 5549 - DNA, 20 bp, Helcococcus kunzii
tagagataggatagtctttt

SEQ ID NO: 5550 - DNA, 20 bp, Leptotrichia buccalis
ccggaaactacagggctgga

SEQ ID NO: 5551 - DNA, 20 bp, Bacillus schlegellii
catccgtgccggagttcaca

SEQ ID NO: 5552 - DNA, 20 bp, Leuconostoc fallax
cgtataacaacacatttcgc

SEQ ID NO: 5553 - DNA, 20 bp, Bacteroides distasonis
aggtggaaacaccttttcta

SEQ ID NO: 5554 - DNA, 20 bp, Anaerobiospirillum succiniciproducens
caacctgggttggtcattct

SEQ ID NO: 5555 - DNA, 20 bp, Myroides odoratus
tgaatagtatggaagtaatt

SEQ ID NO: 5556 - DNA, 20 bp, Bacteroides vulgatus
cctagtcttcgatggatagg

SEQ ID NO: 5557 - DNA, 20 bp, Veillonella atypica
cgaatggttcttgtgcgaat

SEQ ID NO: 5558 - DNA, 20 bp, Lactococcus raffinolactis
ggctatccagccctaagtga

SEQ ID NO: 5559 - DNA, 20 bp, Psychrobacter phenylpyruvicus
ggccggggactctaaggata

SEQ ID NO: 5560 - DNA, 20 bp, Prevotella oralis
cgaaaggtatattctatcgg

SEQ ID NO: 5561 - DNA, 20 bp, Moraxella atlantae
gcaggtggtgcactaagtca

SEQ ID NO: 5562 - DNA, 20 bp, Bacteroides distasonis
aaggcagcctgccaagccat

SEQ ID NO: 5563 - DNA, 30 bp, Alloiococcus otitis
gagtaacacgtgaggaacttgcccataaga

SEQ ID NO: 5564 - DNA, 20 bp, Kingella kingae
ctcttgtgccttcgggagcc

SEQ ID NO: 5565 - DNA, 20 bp, Anaerococcus tetradius
atctgggagccgcagctaac

SEQ ID NO: 5566 - DNA, 20 bp, Dermacoccus nishinomiyaensis
tactggatacgaccgatctc

SEQ ID NO: 5567 - DNA, 20 bp, Bacteroides vulgatus
cagttgatactggatatctt

SEQ ID NO: 5568 - DNA, 20 bp, Prevotella bivia
gatctcatgagattacgaat

SEQ ID NO: 5569 - DNA, 30 bp, Actinomyces radingae
gggtctgcaattcgacctcgtgaaggtgga

SEQ ID NO: 5570 - DNA, 20 bp, Myroides odoratimimus
gattgacagatttggaaaca

SEQ ID NO: 5571 - DNA, 20 bp, Bacteroides capilosus
ctacaatggtggttaacaga

SEQ ID NO: 5572 - DNA, 20 bp, Facklamia sourekii
accattggagggagccgtcg

SEQ ID NO: 5573 - DNA, 20 bp, Clostridium cadaveris
attatggtttttctgcatgg

SEQ ID NO: 5574 - DNA, 20 bp, Leuconostoc fallax
cggcctcacttagagatgga

SEQ ID NO: 5575 - DNA, 20 bp, Bacillus schlegellii
tgacatcccgctgccgggtc

SEQ ID NO: 5576 - DNA, 20 bp, Helcococcus kunzii
tcgatttcttcggaatgaaa

SEQ ID NO: 5577 - DNA, 20 bp, Pseudomonas fluorescens
agagagatgcttgcatctct

SEQ ID NO: 5578 - DNA, 20 bp, Dolosigranulum pigrum
tgctaataccccataggtgg

SEQ ID NO: 5579 - DNA, 20 bp, Helcococcus kunzii
acgagaatttttcagtcgat

SEQ ID NO: 5580 - DNA, 20 bp, Streptococcus thoraltensis
ttagctttttaaaaggtgca

SEQ ID NO: 5581 - DNA, 20 bp, Helcococcus kunzii
ggctcaaccacggttcggtt

SEQ ID NO: 5582 - DNA, 20 bp, Weeksella virosa
agtatcgcgtatgtaacttg

SEQ ID NO: 5583 - DNA, 20 bp, Abiotrophia defectiva
ggtgcttgcactaggtcaag

SEQ ID NO: 5584 - DNA, 20 bp, Streptococcus thoraltensis
acatcccggtgccggttcta

SEQ ID NO: 5585 - DNA, 20 bp, Cedecea lapagei
aggagagcaagctctcccgt

SEQ ID NO: 5586 - DNA, 30 bp, Suttonella indologenes
tcaaagcgggggatcttcggacctcgcgcc

SEQ ID NO: 5587 - DNA, 20 bp, Arcanobacterium haemolyticum
atacaccgggattatgcaga

SEQ ID NO: 5588 - DNA, 20 bp, Prevotella oralis
tccgattagccagccggcgg

SEQ ID NO: 5589 - DNA, 20 bp, Streptococcus acidominimus
ttgttaatttaaaaggagca

SEQ ID NO: 5590 - DNA, 20 bp, Gemella morbillorum
gataacagtatttctcgcat

SEQ ID NO: 5591 - DNA, 20 bp, Myroides odoratus
aggcagattactacgtactt

SEQ ID NO: 5592 - DNA, 20 bp, Corynebacterium kutscheri
ttttaggtctgtatacaggc

SEQ ID NO: 5593 - DNA, 20 bp, Actinomyces meyeri
cgtgcggagacgtgcgtgca

SEQ ID NO: 5594 - DNA, 20 bp, Paenibacillus apiarius
taccggatagacattttcct

SEQ ID NO: 5595 - DNA, 20 bp, Streptococcus ratti
gttttcttgagtcgcgaacg

SEQ ID NO: 5596 - DNA, 20 bp, Lactococcus raffinolactis
gatgcatattcgacatttga

SEQ ID NO: 5597 - DNA, 20 bp, Bacillus schlegellii
agtctgctgtgaaaggccac

SEQ ID NO: 5598 - DNA, 30 bp, Clostridium histolyticum
cccggtgctgcatttcaaactggatatcta

SEQ ID NO: 5599 - DNA, 20 bp, Facklamia sourekii
acgaaccgacggagaaactt

SEQ ID NO: 5600 - DNA, 30 bp, Prevotella bivia
cgatttagagataatgaggtccttcgggac

SEQ ID NO: 5601 - DNA, 30 bp, Moraxella atlantae
aagctgagaactgtaaggagactgccagtg

SEQ ID NO: 5602 - DNA, 20 bp, Myroides odoratimimus
agattgacagatttggaaac

SEQ ID NO: 5603 - DNA, 20 bp, Staphylococcus lentus
aaccgcatggttcaatgttg

SEQ ID NO: 5604 - DNA, 20 bp, Paenibacillus peoriae
atcctttttctgcatggaag

SEQ ID NO: 5605 - DNA, 20 bp, Bacillus marinus
gagcggagttagagaagctt

SEQ ID NO: 5606 - DNA, 20 bp, Anaerobiospirillum succiniciproducens
gaggaaacactgacggtacc

SEQ ID NO: 5607 - DNA, 20 bp, Prevotella oralis
ccgattagccagccggcggg

SEQ ID NO: 5608 - DNA, 20 bp, Myroides odoratus
atactgcttgacttgaatag

SEQ ID NO: 5609 - DNA, 20 bp, Weeksella virosa
tgtaacttgccttatagaat

SEQ ID NO: 5610 - DNA, 20 bp, Sphingobacterium multivorum
agtgaagagtgcagagacgc

SEQ ID NO: 5611 - DNA, 20 bp, Lactococcus raffinolactis
gcaaggcagtgatgtcaagc

SEQ ID NO: 5612 - DNA, 20 bp, Prevotella bivia
ggaacgtgttcccttttgca

SEQ ID NO: 5613 - DNA, 20 bp, Bacteroides vulgatus
tccggtagacgatggggatg

SEQ ID NO: 5614 - DNA, 20 bp, Bacteroides distasonis
aagcagggatcccgcatggg

SEQ ID NO: 5615 - DNA, 20 bp, Atopobium parvulum
tgtgggggagtatttcttcc

SEQ ID NO: 5616 - DNA, 20 bp, Leptotrichia buccalis
aaacgactgataaaacctgg

SEQ ID NO: 5617 - DNA, 20 bp, Dolosigranulum pigrum
acgaattcattaaaggtggc

SEQ ID NO: 5618 - DNA, 20 bp, Bacteroides distasonis
tatgcaacttgcctatcaga

SEQ ID NO: 5619 - DNA, 30 bp, Corynebacterium kutscheri
tttttcctttttaggtctgtatacaggtgg

SEQ ID NO: 5620 - DNA, 20 bp, Facklamia languida
tcttgacataggatgcataa

SEQ ID NO: 5621 - DNA, 20 bp, Pseudomonas fluorescens
agatgcttgcatctcttgag

SEQ ID NO: 5622 - DNA, 20 bp, Facklamia languida
taacttaggagggagccgtc

SEQ ID NO: 5623 - DNA, 20 bp, Peptoniphilus indolicus
caccttcgggaagaagttaa

SEQ ID NO: 5624 - DNA, 20 bp, Dolosigranulum pigrum
ttgcccatgagcgggggaca

SEQ ID NO: 5625 - DNA, 20 bp, Bacteroides eggerthii
cttcaatcgatggcgaccgg

SEQ ID NO: 5626 - DNA, 20 bp, Bacteroides distasonis
gttacaatggcgtggacaaa

SEQ ID NO: 5627 - DNA, 20 bp, Peptoniphilus indolicus
tacccgatgaaatcgtaatg

SEQ ID NO: 5628 - DNA, 20 bp, Bacillus sp
cttatgcaagaaaacgtatt

SEQ ID NO: 5629 - DNA, 20 bp, Corynebacterium kutscheri
tttttaggtctgtatacagg

SEQ ID NO: 5630 - DNA, 20 bp, Pseudoramibacter alactolyticus
cagaatcgcatgactttgct

SEQ ID NO: 5631 - DNA, 20 bp, Prevotella oralis
tttcaacttttgatggcgac

SEQ ID NO: 5632 - DNA, 20 bp, Prevotella oralis
tgcagcgcgaactgggaatc

SEQ ID NO: 5633 - DNA, 20 bp, Prevotella oralis
gcgcgaactgggaatcttga

SEQ ID NO: 5634 - DNA, 20 bp, Prevotella bivia
aacttctagattgcagcgcg

SEQ ID NO: 5635 - DNA, 20 bp, Moraxella atlantae
ctaaattagattagctagat

SEQ ID NO: 5636 - DNA, 20 bp, Suttonella indologenes
gtaaagcactttcgttagtg

SEQ ID NO: 5637 - DNA, 20 bp, Moraxella atlantae
agtggagaaacacactggtg

SEQ ID NO: 5638 - DNA, 20 bp, Clostridium sordellii
gggataaaatatgagagtcg

SEQ ID NO: 5639 - DNA, 20 bp, Actinomyces radingae
ttcgctcgtgtgcaagccgc

SEQ ID NO: 5640 - DNA, 20 bp, Kytococcus sedentarius
tggggtttccctttgggctg

SEQ ID NO: 5641 - DNA, 20 bp, Alloiococcus otitis
tggcggacttgaatgtagca

SEQ ID NO: 5642 - DNA, 20 bp, Streptococcus thoraltensis
catgttagctttttaaaagg

SEQ ID NO: 5643 - DNA, 20 bp, Myroides odoratus
tggaagtaattagaatatgt

SEQ ID NO: 5644 - DNA, 20 bp, Bacteroides distasonis
agtcgcgtgagggatgaagg

SEQ ID NO: 5645 - DNA, 20 bp, Atopobium parvulum
ctcgagaaagctccggcgga

SEQ ID NO: 5646 - DNA, 20 bp, Vibrio vulnificus
cgggaggacgccaccacttt

SEQ ID NO: 5647 - DNA, 20 bp, Streptococcus acidominimus
agcagcgaactggtgacagt

SEQ ID NO: 5648 - DNA, 20 bp, Streptococcus acidominimus
gacaacacatgttgttaatt

SEQ ID NO: 5649 - DNA, 20 bp, Streptococcus bovis
cgacatttgaaagtaccaac

SEQ ID NO: 5650 - DNA, 30 bp, Bacteroides vulgatus
ttgttgtcagttactaacaggttctgctga

SEQ ID NO: 5651 - DNA, 20 bp, Myroides odoratus
gaaatgtaattacgtgtaat

SEQ ID NO: 5652 - DNA, 20 bp, Bacteroides ureolyticus
aaactgcttaggaaactgat

SEQ ID NO: 5653 - DNA, 20 bp, Prevotella oralis
gaatagagatattcattccc

SEQ ID NO: 5654 - DNA, 20 bp, Bacillus sp
ataaggagacgttaaaaggc

SEQ ID NO: 5655 - DNA, 20 bp, Sphingomonas paucimobilis
tagctgtccgggtgcttggc

SEQ ID NO: 5656 - DNA, 20 bp, Ignavigranum ruoffiae
tcattggggaaagatggttt

SEQ ID NO: 5657 - DNA, 20 bp, Streptococcus sobrinus
aagtggaacgcattggtaac

SEQ ID NO: 5658 - DNA, 20 bp, Prevotella disiens
gtacagaatgttggttgcat

SEQ ID NO: 5659 - DNA, 20 bp, Bacteroides vulgatus
acccgtttgcatgtacttta

SEQ ID NO: 5660 - DNA, 20 bp, Actinomyces radingae
tgaacctctttcgctcgtgt

SEQ ID NO: 5661 - DNA, 20 bp, Helcococcus kunzii
atttcttcggaatgaaaccg

SEQ ID NO: 5662 - DNA, 20 bp, Globicatella sanguinis
gaacttgttctggttaaggt

SEQ ID NO: 5663 - DNA, 20 bp, Weeksella virosa
ttttcgggctcagtggttaa

SEQ ID NO: 5664 - DNA, 30 bp, Bacteroides vulgatus
tgctgaggactctgacaagactgccatcgt

SEQ ID NO: 5665 - DNA, 20 bp, Clostridium cadaveris
aggtggaattttaagtggga

SEQ ID NO: 5666 - DNA, 20 bp, Prevotella disiens
ttgaattgtaggagcacgat

SEQ ID NO: 5667 - DNA, 20 bp, Dolosigranulum pigrum
taccccataggtggattggt

SEQ ID NO: 5668 - DNA, 20 bp, Bacillus sp
gggtgacgcatgtggaacga

SEQ ID NO: 5669 - DNA, 20 bp, Arcanobacterium haemolyticum
cttgacatacaccgggatta

SEQ ID NO: 5670 - DNA, 20 bp, Sphingobacterium multivorum
acgcactcgtccttcgggac

SEQ ID NO: 5671 - DNA, 20 bp, Bacillus sp
acgttaaaaggcggcgcaag

SEQ ID NO: 5672 - DNA, 20 bp, Atopobium parvulum
ccgctcgctctcgataccgg

SEQ ID NO: 5673 - DNA, 20 bp, Clostridium clostridiiforme
gtcgaacgaagcaattaaga

SEQ ID NO: 5674 - DNA, 20 bp, Sphingobacterium multivorum
caatatgatgctaatctcta

SEQ ID NO: 5675 - DNA, 30 bp, Facklamia sourekii
tagaggatggtcccgcggtgcattagttag

SEQ ID NO: 5676 - DNA, 30 bp, Eubacterium moniliforme
actgggcgtaaagggtgcgtaggtggccat

SEQ ID NO: 5677 - DNA, 20 bp, Bacteroides thetaiotaomicron
atatccgatagcatatattt

SEQ ID NO: 5678 - DNA, 20 bp, Bacteroides capillosus
gaggcccttcggggcgccta

SEQ ID NO: 5679 - DNA, 30 bp, Brevibacterium epidermidis
gcatgttgggtggtggaaagtttttcgatc

SEQ ID NO: 5680 - DNA, 20 bp, Bacteroides ureolyticus
gagattagaaagtgctagtt

SEQ ID NO: 5681 - DNA, 20 bp, Aerococcus christensenii
aggaagtttgttcgcatgaa

SEQ ID NO: 5682 - DNA, 30 bp, Campylobacter lari
acatgcaagtcgaacgatgaagcgactagc

SEQ ID NO: 5683 - DNA, 20 bp, Clostridium clostridiiforme
caaagtccttcggtgccgcc

SEQ ID NO: 5684 - DNA, 20 bp, Prevotella bivia
gatagcttgctatttatgtc

SEQ ID NO: 5685 - DNA, 20 bp, Leuconostoc fallax
aaatgatgttaatgtgacgg

SEQ ID NO: 5686 - DNA, 20 bp, Streptococcus ratti
aagtgggacgcaagggaaca

SEQ ID NO: 5687 - DNA, 20 bp, Helcococcus kunzii
tgaacgagaatttttcagtt

SEQ ID NO: 5688 - DNA, 20 bp, Moraxella atlantae
agaaaggaggcgagagcttt

SEQ ID NO: 5689 - DNA, 20 bp, Facklamia sourekii
agcgagcagcgaagtcgtga

SEQ ID NO: 5690 - DNA, 20 bp, Bacillus sp
cgccgccttttaacgtctcc

SEQ ID NO: 5691 - DNA, 20 bp, Globicatella sanguinis
ttctggttaaggttagtggc

SEQ ID NO: 5692 - DNA, 20 bp, Corynebacterium confusum
gctaatcgcttaaagttggc

SEQ ID NO: 5693 - DNA, 20 bp, Leptotrichia buccalis
tgatgaaaggagacgctgcg

SEQ ID NO: 5694 - DNA, 20 bp, Facklamia sourekii
ctcgcatgagtttgagttga

SEQ ID NO: 5695 - DNA, 20 bp, Leptotrichia buccalis
tcaaccgcaggcctgccccg

SEQ ID NO: 5696 - DNA, 20 bp, Streptococcus sobrinus
actaatgagtcgcgaacggg

SEQ ID NO: 5697 - DNA, 20 bp, Abiotrophia defectiva
aacgaaccgcgactaggtgc

SEQ ID NO: 5698 - DNA, 20 bp, Dolosigranulum pigrum
cattaaaggtggctttgcta

SEQ ID NO: 5699 - DNA, 20 bp, Moraxella atlantae
ggctcatgaagtcttagtgg

SEQ ID NO: 5700 - DNA, 20 bp, Eubacterium moniliforme
aaggtgagatcaatgactgg

SEQ ID NO: 5701 - DNA, 20 bp, Streptococcus ratti
cactgtgcttgcacaccgtg

SEQ ID NO: 5702 - DNA, 20 bp, Bacillus schlegellii
ttcccgcgagggacggcgga

SEQ ID NO: 5703 - DNA, 20 bp, Bacteroides capilosus
gggcttgacatccgactaac

SEQ ID NO: 5704 - DNA, 20 bp, Cardiobacterium hominis
gcggcaagagatgagcccat

SEQ ID NO: 5705 - DNA, 20 bp, Facklamia sourekii
atttgacggtatctaatcag

SEQ ID NO: 5706 - DNA, 30 bp, Alloiococcus otitis
tccggtaagtctgatgtgaaagcccacggc

SEQ ID NO: 5707 - DNA, 20 bp, Streptococcus sobrinus
ccgcataagaggagttaact

SEQ ID NO: 5708 - DNA, 20 bp, Prevotella oris
ggaagcttgcttccccgggc

SEQ ID NO: 5709 - DNA, 20 bp, Atopobium parvulum
ggcaacctgcccctttcatt

SEQ ID NO: 5710 - DNA, 20 bp, Myroides odoratus
gaatagtatggaagtaatta

SEQ ID NO: 5711 - DNA, 30 bp, Clostridium septicum
tgtagaggggaatagcctcccgaaagggag

SEQ ID NO: 5712 - DNA, 20 bp, Streptococcus sobrinus
ctaatgagtcgcgaacgggt

SEQ ID NO: 5713 - DNA, 20 bp, Weeksella virosa
gcgaccgtaacaggagctac

SEQ ID NO: 5714 - DNA, 20 bp, Paenibacillus apiarius
tcgcctgagggaaatgggaa

SEQ ID NO: 5715 - DNA, 20 bp, Pseudoramibacter alactolyticus
gttttttattgacccttcgg

SEQ ID NO: 5716 - DNA, 20 bp, Suttonella indologenes
cgcccttagatgagcctata

SEQ ID NO: 5717 - DNA, 20 bp, Dolosigranulum pigrum
gctttccggccctcggtgct

SEQ ID NO: 5718 - DNA, 20 bp, Leuconostoc fallax
caacacatttcgcatgaagt

SEQ ID NO: 5719 - DNA, 20 bp, Ignavigranum ruoffiae
gcaggtggtggcttaagtct

SEQ ID NO: 5720 - DNA, 20 bp, Sporosarcina pasteurii
ggaactctgaaagacggctt

SEQ ID NO: 5721 - DNA, 20 bp, Moraxella atlantae
agctttctggcacaatactg

SEQ ID NO: 5722 - DNA, 20 bp, Lactococcus raffinolactis
atagagtggaaaattatgca

SEQ ID NO: 5723 - DNA, 20 bp, Prevotella disiens
tgtaatctaatctttaaagc

SEQ ID NO: 5724 - DNA, 20 bp, Veillonella atypica
gtgcgaggatttgacggtac

SEQ ID NO: 5725 - DNA, 30 bp, Bacteroides vulgatus
attgggtttaaagggagcgtagatggatgt

SEQ ID NO: 5726 - DNA, 20 bp, Ignavigranum ruoffiae
caggacttgacggtatctaa

SEQ ID NO: 5727 - DNA, 20 bp, Dolosigranulum pigrum
tggattggtcgcatgacgaa

SEQ ID NO: 5728 - DNA, 30 bp, Psychrobacter phenylpyruvicus
gttggggaacttgattccttagtgacgcag

SEQ ID NO: 5729 - DNA, 20 bp, Ignavigranum ruoffiae
ttgctatcactaaaggatgg

SEQ ID NO: 5730 - DNA, 20 bp, Porphyromonas endodontalis
tgcgatatactgtaagagtc

SEQ ID NO: 5731 - DNA, 20 bp, Abiotrophia defectiva
cacttggtcaaggtgagtgg

SEQ ID NO: 5732 - DNA, 20 bp, Globicatella sanguinis
ctggttaaggttagtggcgc

SEQ ID NO: 5733 - DNA, 20 bp, Bacillus psychrosaccharolyticus
gagcgaattgttgagtttac

SEQ ID NO: 5734 - DNA, 20 bp, Atopobium parvulum
cgtatgttgccagcggttag

SEQ ID NO: 5735 - DNA, 20 bp, Bacteroides ureolyticus
tacaatgacatatacagtaa

SEQ ID NO: 5736 - DNA, 20 bp, Prevotella disiens
ttggggataacccgttgaaa

SEQ ID NO: 5737 - DNA, 20 bp, Globicatella sanguinis
acttgttctggttaaggtta

SEQ ID NO: 5738 - DNA, 20 bp, Bacteroides distasonis
ccactagttactaacaggtt

SEQ ID NO: 5739 - DNA, 20 bp, Bacteroides capilosus
ctggctgccaaagatttatc

SEQ ID NO: 5740 - DNA, 20 bp, Weeksella virosa
aacttgccttatagaatggg

SEQ ID NO: 5741 - DNA, 20 bp, Suttonella indologenes
ttatggttaatacctgtgaa

SEQ ID NO: 5742 - DNA, 20 bp, Weeksella virosa
gtgaataaacctattcacga

SEQ ID NO: 5743 - DNA, 20 bp, Actinomyces radingae
tagagataggtgtgcatttg

SEQ ID NO: 5744 - DNA, 20 bp, Suttonella indologenes
tcgttagtgaagaaaggttt

SEQ ID NO: 5745 - DNA, 20 bp, Dolosigranulum pigrum
tctgtttagtctaatgtgaa

SEQ ID NO: 5746 - DNA, 20 bp, Pseudomonas luteola
cttcgggaggacggtaccac

SEQ ID NO: 5747 - DNA, 20 bp, Prevotella disiens
ctggctgacttgagtacaca

SEQ ID NO: 5748 - DNA, 20 bp, Prevotella oralis
caccggggcatcgatcggta

SEQ ID NO: 5749 - DNA, 20 bp, Bacteroides eggerthii
tacccgatagtatagttttt

SEQ ID NO: 5750 - DNA, 20 bp, Moraxella atlantae
ctaggggaaatagtggcgaa

SEQ ID NO: 5751 - DNA, 20 bp, Bacteroides distasonis
gaggtggaaacaccttttct

SEQ ID NO: 5752 - DNA, 20 bp, Actinomyces turicensis
ctccaactttgttggggtgg

SEQ ID NO: 5753 - DNA, 20 bp, Sphingobacterium multivorum
cgtcggagagcttgctcgaa

SEQ ID NO: 5754 - DNA, 20 bp, Dolosigranulum pigrum
cggtgctggagctaacgtat

SEQ ID NO: 5755 - DNA, 20 bp, Dolosigranulum pigrum
ggccaaccctatgggaggca

SEQ ID NO: 5756 - DNA, 20 bp, Corynebacterium glucuronolyticum
cgatacaatgcgttgcgaca

SEQ ID NO: 5757 - DNA, 20 bp, Leuconostoc fallax
aggggcttcggcctcactta

SEQ ID NO: 5758 - DNA, 20 bp, Dolosigranulum pigrum
agcgatcccgcaagggctag

SEQ ID NO: 5759 - DNA, 20 bp, Alloiococcus otitis
ctaatctcccaaagccattc

SEQ ID NO: 5760 - DNA, 20 bp, Alloiococcus otitis
tcttcctgcttgcaggaaga

SEQ ID NO: 5761 - DNA, 20 bp, Atopobium parvulum
cgtggataataccgaatact

SEQ ID NO: 5762 - DNA, 20 bp, Bacteroides vulgatus
aattgcagatgaattacggt

SEQ ID NO: 5763 - DNA, 20 bp, Bacteroides distasonis
cgggtttgaacgcattcgga

SEQ ID NO: 5764 - DNA, 20 bp, Streptococcus sobrinus
ttaactcatgttaactgttt

SEQ ID NO: 5765 - DNA, 20 bp, Facklamia languida
agcgacttgaacttgttcaa

SEQ ID NO: 5766 - DNA, 20 bp, Clostridium histolyticum
cataatatctttttaatgca

SEQ ID NO: 5767 - DNA, 20 bp, Bacillus schlegellii
ggccgcggaggcggcattga

SEQ ID NO: 5768 - DNA, 20 bp, Microbacterium hominis
accagaacaccgtagaaata

SEQ ID NO: 5769 - DNA, 20 bp, Prevotella bivia
atccttaaaaccattctcag

SEQ ID NO: 5770 - DNA, 20 bp, Paenibacillus macerans
cttgtgagagtaactgctca

SEQ ID NO: 5771 - DNA, 20 bp, Myroides odoratus
attacgtgtaattatttgac

SEQ ID NO: 5772 - DNA, 20 bp, Bacillus marinus
gagtcagttgaaagatggtt

SEQ ID NO: 5773 - DNA, 20 bp, Clostridium cadaveris
gctaacagtaagatgagcac

SEQ ID NO: 5774 - DNA, 20 bp, Prevotella oralis
tatgtaaatgcggtccaatc

SEQ ID NO: 5775 - DNA, 20 bp, Corynebacterium macginleyi
tttttctacgattctcgtgc

SEQ ID NO: 5776 - DNA, 20 bp, Alloiococcus otitis
aataccgcataagttttccc

SEQ ID NO: 5777 - DNA, 20 bp, Abiotrophia defectiva
tcccgacgaccgctctagag

SEQ ID NO: 5778 - DNA, 20 bp, Moraxella atlantae
gaagagctagtggagaaaca

SEQ ID NO: 5779 - DNA, 20 bp, Anaerobiospirillum succiniciproducens
cggtgtggtctgtgactggg

SEQ ID NO: 5780 - DNA, 30 bp, Bacteroides vulgatus
taacgagcgcaacccttgttgtcagttact

SEQ ID NO: 5781 - DNA, 20 bp, Clostridium cadaveris
aaactggaattctagagtgc

SEQ ID NO: 5782 - DNA, 20 bp, Myroides odoratus
tttctagagaccggcggatg

SEQ ID NO: 5783 - DNA, 20 bp, Helcococcus kunzii
cttagcgaagataatgacag

SEQ ID NO: 5784 - DNA, 20 bp, Bacteroides vulgatus
tccgcatgttcacatgatta

SEQ ID NO: 5785 - DNA, 20 bp, Bacillus schlegellii
accgtgggggtgcagcggaa

SEQ ID NO: 5786 - DNA, 20 bp, Prevotella oralis
accggggcatcgatcggtag

SEQ ID NO: 5787 - DNA, 30 bp, Weeksella virosa
cagtggttaagcgaaagtaataagtatccc

SEQ ID NO: 5788 - DNA, 20 bp, Leuconostoc lactis
tctcgtttagattgaaggag

SEQ ID NO: 5789 - DNA, 30 bp, Dolosigranulum pigrum
cacgtgaggaacttgcccatgagcggggga

SEQ ID NO: 5790 - DNA, 20 bp, Bacteroides thetaiotaomicron
agctcactggagtgtaactg

SEQ ID NO: 5791 - DNA, 20 bp, Anaerobiospirillum succiniciproducens
tggggaggaaacactgacgt

SEQ ID NO: 5792 - DNA, 20 bp, Bacteroides distasonis
gcattcggaccgaggtggaa

SEQ ID NO: 5793 - DNA, 20 bp, Moraxella atlantae
tggtgcactaagtcatatgt

SEQ ID NO: 5794 - DNA, 20 bp, Budvicia aquatica
catacaaagtgaagcgagct

SEQ ID NO: 5795 - DNA, 20 bp, Anaerobiospirillum succiniciproducens
ttgaacttcggtttgggttc

SEQ ID NO: 5796 - DNA, 20 bp, Prevotella disiens
tgacttgagtacacacaacg

SEQ ID NO: 5797 - DNA, 20 bp, Sphingobacterium multivorum
tgctcgaagacggtgagagt

SEQ ID NO: 5798 - DNA, 20 bp, Streptococcus sobrinus
tgaggtaaccatttatgggg

SEQ ID NO: 5799 - DNA, 20 bp, Bacillus schlegellii
agcgctgaaggcgaacctgg

SEQ ID NO: 5800 - DNA, 20 bp, Moraxella atlantae
ccagtggagaaacacactgg

SEQ ID NO: 5801 - DNA, 20 bp, Myroides odoratus
cttgacttgaatagtatgga

SEQ ID NO: 5802 - DNA, 20 bp, Weeksella virosa
ttgatactgttgatctagaa

SEQ ID NO: 5803 - DNA, 20 bp, Helcococcus kunzii
atgaaaccgaaaaaggaaag

SEQ ID NO: 5804 - DNA, 20 bp, Haemophilus segnis
gtgatgtttaataggcatca

SEQ ID NO: 5805 - DNA, 20 bp, Leptotrichia buccalis
gacgctgcgggagagccttg

SEQ ID NO: 5806 - DNA, 20 bp, Suttonella indologenes
cgagggaagcagcttgctgc

SEQ ID NO: 5807 - DNA, 20 bp, Prevotella disiens
ggcttgaattgtaggagcac

SEQ ID NO: 5808 - DNA, 20 bp, Bacteroides vulgatus
taagccgcaaggcatctgtg

SEQ ID NO: 5809 - DNA, 20 bp, Leuconostoc fallax
agcatatggctagagtggcg

SEQ ID NO: 5810 - DNA, 20 bp, Clostridium sordellii
tgagagtcgcatggctttta

SEQ ID NO: 5811 - DNA, 20 bp, Bacteroides merdae
ctgaccggagtggaaacact

SEQ ID NO: 5812 - DNA, 20 bp, Streptococcus acidominimus
ccgcataagagttgacaaca

SEQ ID NO: 5813 - DNA, 20 bp, Streptococcus acidominimus
agttgacaacacatgttgtt

SEQ ID NO: 5814 - DNA, 20 bp, Bacillus schlegellii
gggggcgcccgaaggcgcgg

SEQ ID NO: 5815 - DNA, 20 bp, Facklamia sourekii
aagtcgaacgaaccgacgga

SEQ ID NO: 5816 - DNA, 20 bp, Facklamia languida
aagtccttcgggacatccat

SEQ ID NO: 5817 - DNA, 20 bp, Myroides odoratimimus
atagtatggaagtaactaga

SEQ ID NO: 5818 - DNA, 20 bp, Moraxella atlantae
ccgttggggctcatgaagtc

SEQ ID NO: 5819 - DNA, 20 bp, Abiotrophia defectiva
catcccgacgaccgctctag

SEQ ID NO: 5820 - DNA, 20 bp, Kocuria kristinae
cccttttgggctggtgtaca

SEQ ID NO: 5821 - DNA, 20 bp, Moraxella atlantae
gaactagagtatatgagagg

SEQ ID NO: 5822 - DNA, 20 bp, Ignavigranum ruoffiae
aggacttgacggtatctaac

SEQ ID NO: 5823 - DNA, 20 bp, Anaerococcus prevotii
tgcatatcttgagaagagta

SEQ ID NO: 5824 - DNA, 20 bp, Bacteroides distasonis
ggcaatagccgtttgcgagg

SEQ ID NO: 5825 - DNA, 20 bp, Bacteroides distasonis
atagccgtttgcgaggtgct

SEQ ID NO: 5826 - DNA, 20 bp, Bacillus schlegellii
gggcctttcccgcgagggac

SEQ ID NO: 5827 - DNA, 20 bp, Moraxella atlantae
agtatatgagagggaagtag

SEQ ID NO: 5828 - DNA, 20 bp, Atopobium parvulum
ggcggagagggatgggcccg

SEQ ID NO: 5829 - DNA, 20 bp, Streptococcus sobrinus
ggggaagaacgtgtgtaaga

SEQ ID NO: 5830 - DNA, 20 bp, Bacteroides capillosus
ttgaactgtaggcgaacgat

SEQ ID NO: 5831 - DNA, 20 bp, Pseudoramibacter alactolyticus
taaaaccgcataacacagca

SEQ ID NO: 5832 - DNA, 20 bp, Gemella morbillorum
gatatttaaaagttggttat

SEQ ID NO: 5833 - DNA, 20 bp, Anaerobiospirillum succiniciproducens
aagggtaaccgtaggggaac

SEQ ID NO: 5834 - DNA, 20 bp, Bacteroides eggerthii
atgtagtggaaacattacag

SEQ ID NO: 5835 - DNA, 30 bp, Haemophilus segnis
gggattgggccttgagcttggtgcccgaag

SEQ ID NO: 5836 - DNA, 20 bp, Abiotrophia defectiva
aataccgcataggacatgga

SEQ ID NO: 5837 - DNA, 20 bp, Ignavigranum ruoffiae
gaagaaccatcctgtattaa

SEQ ID NO: 5838 - DNA, 20 bp, Staphylococcus simulans
ggatgtaagtaactgtgcat

SEQ ID NO: 5839 - DNA, 20 bp, Alloiococcus otitis
tgcttgcaggaagaggcgga

SEQ ID NO: 5840 - DNA, 20 bp, Peptoniphilus indolicus
ggcgagggctcaaccctcgt

SEQ ID NO: 5841 - DNA, 30 bp, Myroides odoratus
tgatactgcttgacttgaatagtatggaag

SEQ ID NO: 5842 - DNA, 20 bp, Bacillus psychrosaccharolyticus
aattgttgagtttactcaac

SEQ ID NO: 5843 - DNA, 20 bp, Suttonella indologenes
ttatcagggcggttaccacg

SEQ ID NO: 5844 - DNA, 20 bp, Bacteroides ureolyticus
ttgacataagttaaataggg

SEQ ID NO: 5845 - DNA, 20 bp, Anaerobiospirillum succiniciproducens
aactggctttctagagtatt

SEQ ID NO: 5846 - DNA, 20 bp, Bacteroides distasonis
ttgccgttgaaactgggggg

SEQ ID NO: 5847 - DNA, 20 bp, Lactococcus raffinolactis
ggatgcatattcgacatttg

SEQ ID NO: 5848 - DNA, 20 bp, Streptococcus gordonii
caggacgaacgctggcgggc

SEQ ID NO: 5849 - DNA, 20 bp, Eubacterium moniliforme
actttcgcatgaaagaacaa

SEQ ID NO: 5850 - DNA, 20 bp, Corynebacterium confusum
ccctttgtggcctttataca

SEQ ID NO: 5851 - DNA, 20 bp, Myroides odoratimimus
gttaaggcggggactctagc

SEQ ID NO: 5852 - DNA, 20 bp, Anaerobiospirillum succiniciproducens
ggggaggaaacactgacgtt

SEQ ID NO: 5853 - DNA, 20 bp, Clostridium cadaveris
ttaataccgcatattatggt

SEQ ID NO: 5854 - DNA, 20 bp, Staphylococcus simulans
ttattagggaagaacaagga

SEQ ID NO: 5855 - DNA, 20 bp, Brevibacillus thermoruber
gcgcgcgcaggcggtcgggt

SEQ ID NO: 5856 - DNA, 20 bp, Myroides odoratus
agaaagcagctaccaggcaa

SEQ ID NO: 5857 - DNA, 20 bp, Weeksella virosa
aatgggatagcccggagaaa

SEQ ID NO: 5858 - DNA, 20 bp, Helcococcus kunzii
gcgaagataatgacagtagc

SEQ ID NO: 5859 - DNA, 20 bp, Streptococcus ratti
gctcaaccatagtgtgctct

SEQ ID NO: 5860 - DNA, 20 bp, Bacteroides vulgatus
aatacaagatggcatcatga

SEQ ID NO: 5861 - DNA, 20 bp, Streptococcus ratti
tcaggaaagtctggagtaaa

SEQ ID NO: 5862 - DNA, 20 bp, Weeksella virosa
tatgtgaataaacctattca

SEQ ID NO: 5863 - DNA, 20 bp, Bacillus schlegellii
cgggtccagagatgggcctt

SEQ ID NO: 5864 - DNA, 20 bp, Pseudoramibacter alactolyticus
cccttcggggggatataaga

SEQ ID NO: 5865 - DNA, 20 bp, Bacteroides vulgatus
ttataaaggaataaagtcgg

SEQ ID NO: 5866 - DNA, 20 bp, Leuconostoc fallax
gtgagacgtaaagcatatgg

SEQ ID NO: 5867 - DNA, 20 bp, Globicatella sanguinis
ggttaaggttagtggcgcac

SEQ ID NO: 5868 - DNA, 20 bp, Abiotrophia defectiva
gacatcccgacgaccgctct

SEQ ID NO: 5869 - DNA, 20 bp, Prevotella buccae
ggcaaaaccgggattggggc

SEQ ID NO: 5870 - DNA, 20 bp, Leuconostoc fallax
catatggctagagtggcgaa

SEQ ID NO: 5871 - DNA, 20 bp, Prevotella oris
tccccgggcgtcgaccggcg

SEQ ID NO: 5872 - DNA, 20 bp, Kingella kingae
aaggagcccgtttaccacgg

SEQ ID NO: 5873 - DNA, 20 bp, Bacteroides thetaiotaomicron
aaagaaattcggtatgagat

SEQ ID NO: 5874 - DNA, 20 bp, Bacteroides distasonis
gccactagttactaacaggt

SEQ ID NO: 5875 - DNA, 20 bp, Prevotella oralis
atattctatcggtaatggat

SEQ ID NO: 5876 - DNA, 20 bp, Vagococcus fluvialis
caccgaaaatcaaagagtgg

SEQ ID NO: 5877 - DNA, 20 bp, Ignavigranum ruoffiae
atcattagttaccagcattg

SEQ ID NO: 5878 - DNA, 20 bp, Clostridium cadaveris
tctttcgggagcaggaacac

SEQ ID NO: 5879 - DNA, 30 bp, Weeksella virosa
ttgagagcggcgtacgggtgagtatcgcgt

SEQ ID NO: 5880 - DNA, 20 bp, Sphingobacterium multivorum
taaaagccattcacaggtcg

SEQ ID NO: 5881 - DNA, 20 bp, Bacteroides ureolyticus
acctcatactcctatttgac

SEQ ID NO: 5882 - DNA, 20 bp, Prevotella oralis
ccgtatgtaaatgcggtcca

SEQ ID NO: 5883 - DNA, 20 bp, Prevotella bivia
acagatagttggtcgtgtgc

SEQ ID NO: 5884 - DNA, 20 bp, Prevotella oralis
ttcggggcattggtggaggt

SEQ ID NO: 5885 - DNA, 20 bp, Haemophilus segnis
atcacgattgacgttaatca

SEQ ID NO: 5886 - DNA, 20 bp, Streptococcus mutans
gtgggacgcaaggaaacaca

SEQ ID NO: 5887 - DNA, 20 bp, Prevotella disiens
cgaggggaaacggcaaagag

SEQ ID NO: 5888 - DNA, 20 bp, Staphylococcus simulans
caaggatgtaagtaactgtg

SEQ ID NO: 5889 - DNA, 20 bp, Bacteroides eggerthii
aagtggagtatgcatactcc

SEQ ID NO: 5890 - DNA, 20 bp, Campylobacter lari
aagcgactagcttgctagtt

SEQ ID NO: 5891 - DNA, 20 bp, Myroides odoratimimus
aggcaacgatgattaggggt

SEQ ID NO: 5892 - DNA, 20 bp, Bacteroides ureolyticus
aagttaaatagggaaagtct

SEQ ID NO: 5893 - DNA, 20 bp, Actinomyces meyeri
atgcgccctgggcgtgcgga

SEQ ID NO: 5894 - DNA, 20 bp, Actinomyces turicensis
gatgatgctccaactttgtt

SEQ ID NO: 5895 - DNA, 20 bp, Bacteroides eggerthii
agtttttccgcatggtttca

SEQ ID NO: 5896 - DNA, 20 bp, Prevotella bivia
tgaggtccttcgggacatct

SEQ ID NO: 5897 - DNA, 20 bp, Prevotella disiens
cttggggataacccgttgaa

SEQ ID NO: 5898 - DNA, 20 bp, Clostridium limosum
tgttgaaatgattaaaggag

SEQ ID NO: 5899 - DNA, 20 bp, Streptococcus ratti
gattgaaagatgcaagcgca

SEQ ID NO: 5900 - DNA, 20 bp, Streptococcus ratti
ggaaactgtctgacttgagt

SEQ ID NO: 5901 - DNA, 20 bp, Leuconostoc fallax
ttaaaaggggcttcggcctc

SEQ ID NO: 5902 - DNA, 20 bp, Bacteroides distasonis
aaacaccttttctaggcaat

SEQ ID NO: 5903 - DNA, 20 bp, Bacillus schlegellii
cgtctcttagcggcggacgg

SEQ ID NO: 5904 - DNA, 30 bp, Peptoniphilus asaccharolyticus
aacacatgcaagtcgagcgatgaaatttcg

SEQ ID NO: 5905 - DNA, 20 bp, Alloiococcus otitis
gcgagcgcaggcggtccggt

SEQ ID NO: 5906 - DNA, 20 bp, Facklamia sourekii
atgagtttgagttgaaagac

SEQ ID NO: 5907 - DNA, 20 bp, Bacillus marinus
gataaccctgactctctcct

SEQ ID NO: 5908 - DNA, 20 bp, Prevotella loescheii
agcctactgtagcgctactg

SEQ ID NO: 5909 - DNA, 20 bp, Streptococcus acidominimus
gacagtaagccaatctctta

SEQ ID NO: 5910 - DNA, 30 bp, Bacteroides vulgatus
cggcccacctagtcttcgatggataggggt

SEQ ID NO: 5911 - DNA, 20 bp, Bacteroides capillosus
tcgtatgcaaatacgatcta

SEQ ID NO: 5912 - DNA, 20 bp, Bacteroides ureolyticus
tcctaaaaacatctaagaga

SEQ ID NO: 5913 - DNA, 20 bp, Suttonella indologenes
taggaatctaccttggggtg

SEQ ID NO: 5914 - DNA, 20 bp, Ignavigranum ruoffiae
attggggaaagatggttttg

SEQ ID NO: 5915 - DNA, 20 bp, Myroides odoratimimus
tcgcgttaaggcggggactc

SEQ ID NO: 5916 - DNA, 20 bp, Listeria seeligeri
ttacagatgggccgcggtgc

SEQ ID NO: 5917 - DNA, 20 bp, Pseudoramibacter alactolyticus
atcgcatgactttgctgtca

SEQ ID NO: 5918 - DNA, 20 bp, Psychrobacter phenylpyruvicus
ggcagcttgcgctctcgcta

SEQ ID NO: 5919 - DNA, 20 bp, Moraxella atlantae
tgaagctgagaactgtaagg

SEQ ID NO: 5920 - DNA, 20 bp, Clostridium sordellii
cgggataaaatatgagagtc

SEQ ID NO: 5921 - DNA, 20 bp, Lactococcus raffinolactis
acgagtcgcaaggcagtgat

SEQ ID NO: 5922 - DNA, 20 bp, Weeksella virosa
agctaggtggcatcatttag

SEQ ID NO: 5923 - DNA, 20 bp, Peptoniphilus indolicus
gtaagcatttgaaacttcta

SEQ ID NO: 5924 - DNA, 20 bp, Bacteroides ureolyticus
cagaggaacaacagttggaa

SEQ ID NO: 5925 - DNA, 20 bp, Clostridium cadaveris
aaagtccgtgaggtaaccga

SEQ ID NO: 5926 - DNA, 20 bp, Arcanobacterium haemolyticum
cctttctcttgggataagcc

SEQ ID NO: 5927 - DNA, 20 bp, Bacteroides vulgatus
taaaggtattccggtagacg

SEQ ID NO: 5928 - DNA, 20 bp, Weeksella virosa
ttaataccgtatataaagct

SEQ ID NO: 5929 - DNA, 30 bp, Atopobium parvulum
atttcttccgtgccgcagctaacgcattaa

SEQ ID NO: 5930 - DNA, 30 bp, Bacteroides eggerthii
aacattacagccttcgggccgctgtgaagg

SEQ ID NO: 5931 - DNA, 20 bp, Suttonella indologenes
aatctaccttggggtggggg

SEQ ID NO: 5932 - DNA, 20 bp, Clostridium cadaveris
catgggaaagtcatgaaagg

SEQ ID NO: 5933 - DNA, 20 bp, Anaerobiospirillum succiniciproducens
gattaggagcttgaacttcg

SEQ ID NO: 5934 - DNA, 20 bp, Abiotrophia defectiva
gtgcttgcacttggtcaagg

SEQ ID NO: 5935 - DNA, 20 bp, Facklamia sourekii
gtcgaacgaaccgacggaga

SEQ ID NO: 5936 - DNA, 20 bp, Bacillus schlegellii
gcggaaactggcgggcttga

SEQ ID NO: 5937 - DNA, 20 bp, Prevotella bivia
aggggcagcgaatagatagc

SEQ ID NO: 5938 - DNA, 20 bp, Empedobacter brevis
gttgaagtggctggaatgtg

SEQ ID NO: 5939 - DNA, 20 bp, Facklamia sourekii
aagttgaaagacggcttttg

SEQ ID NO: 5940 - DNA, 20 bp, Kingella kingae
gagtagagatactcttgtgc

SEQ ID NO: 5941 - DNA, 20 bp, Anaerococcus tetradius
aatacgtatggaccgagcgt

SEQ ID NO: 5942 - DNA, 20 bp, Staphylococcus simulans
aaccgcatggtttcatgatg

SEQ ID NO: 5943 - DNA, 20 bp, Leuconostoc fallax
tggcgaacttgagtgcagta

SEQ ID NO: 5944 - DNA, 20 bp, Achromobacter piechaudii
gaattctgaagagattcgga

SEQ ID NO: 5945 - DNA, 20 bp, Bacteroides ureolyticus
gacatcctaaaaacatctaa

SEQ ID NO: 5946 - DNA, 20 bp, Bacillus sp
tgcgccgccttttaacgtct

SEQ ID NO: 5947 - DNA, 20 bp, Actinomyces radingae
gcgccctgagcgcctagaga

SEQ ID NO: 5948 - DNA, 20 bp, Alloiococcus otitis
tgcaggaagaggcggagtgg

SEQ ID NO: 5949 - DNA, 20 bp, Facklamia sourekii
ttgctgtcactagaggatgg

SEQ ID NO: 5950 - DNA, 20 bp, Vagococcus fluvialis
ccaccgaaaatcaaagagtg

SEQ ID NO: 5951 - DNA, 20 bp, Bacteroides capilosus
aggcaatcggaattccgtgt

SEQ ID NO: 5952 - DNA, 20 bp, Actinomyces radingae
aaggggcctttgtggtttct

SEQ ID NO: 5953 - DNA, 20 bp, Corynebacterium group ANF
gtgcctgtggtggaaaacgt

SEQ ID NO: 5954 - DNA, 20 bp, Alloiococcus otitis
ttcagagatgaagggttccc

SEQ ID NO: 5955 - DNA, 20 bp, Bacillus marinus
tcccattgcccggtctagag

SEQ ID NO: 5956 - DNA, 20 bp, Anaerobiospirillum succiniciproducens
ggtcattctaaactgccttt

SEQ ID NO: 5957 - DNA, 20 bp, Bacteroides vulgatus
tgttgtcagttactaacagg

SEQ ID NO: 5958 - DNA, 20 bp, Weeksella virosa
gggggtacctgaagttggcg

SEQ ID NO: 5959 - DNA, 20 bp, Globicatella sanguinis
gttaaggttagtggcgcacg

SEQ ID NO: 5960 - DNA, 20 bp, Abiotrophia defectiva
cccgacgaccgctctagaga

SEQ ID NO: 5961 - DNA, 20 bp, Stenotrophomonas maltophilia
acaatggcaggagacaaaga

SEQ ID NO: 5962 - DNA, 20 bp, Clostridium cadaveris
ttgctaacagtaagatgagc

SEQ ID NO: 5963 - DNA, 20 bp, Streptococcus acidominimus
gttgttaatttaaaaggagc

SEQ ID NO: 5964 - DNA, 20 bp, Prevotella bivia
ggggcagcgaatagatagct

SEQ ID NO: 5965 - DNA, 20 bp, Staphylococcus simulans
ctatgcatcccttgacggta

SEQ ID NO: 5966 - DNA, 20 bp, Leuconostoc fallax
ttaatgtaggaaatgatgtt

SEQ ID NO: 5967 - DNA, 20 bp, Gemella morbillorum
accggataacagtatttctc

SEQ ID NO: 5968 - DNA, 20 bp, Prevotella disiens
gctgacttgagtacacacaa

SEQ ID NO: 5969 - DNA, 20 bp, Peptoniphilus indolicus
gctcaccaagatagcgatca

SEQ ID NO: 5970 - DNA, 20 bp, Anaerobiospirillum succiniciproducens
gaacttcggtttgggttccg

SEQ ID NO: 5971 - DNA, 20 bp, Bacteroides thetaiotaomicron
taaagaaattcggtatgaga

SEQ ID NO: 5972 - DNA, 20 bp, Bacteroides thetaiotaomicron
gcaaatgaattatggggaaa

SEQ ID NO: 5973 - DNA, 20 bp, Weeksella virosa
ataagatagacatgcgtaag

SEQ ID NO: 5974 - DNA, 20 bp, Kingella kingae
tgctaatatcattaactgat

SEQ ID NO: 5975 - DNA, 20 bp, Streptococcus thoraltensis
tggaacgcatttataactac

SEQ ID NO: 5976 - DNA, 20 bp, Prevotella disiens
taggagcacgatacagagat

SEQ ID NO: 5977 - DNA, 20 bp, Prevotella disiens
taatctaatctttaaagccg

SEQ ID NO: 5978 - DNA, 20 bp, Facklamia sourekii
gctgtcactagaggatggtc

SEQ ID NO: 5979 - DNA, 20 bp, Facklamia sourekii
taactgttactgatttgacg

SEQ ID NO: 5980 - DNA, 20 bp, Facklamia sourekii
tgtcactagaggatggtccc

SEQ ID NO: 5981 - DNA, 20 bp, Myroides odoratus
tagagagcttgctttctaga

SEQ ID NO: 5982 - DNA, 20 bp, Helcococcus kunzii
tttcagtcgatttcttcgga

SEQ ID NO: 5983 - DNA, 20 bp, Myroides odoratus
gggtatagagagcttgcttt

SEQ ID NO: 5984 - DNA, 30 bp, Weeksella virosa
ataagtcagtggtgaaatcctatcgcttaa

SEQ ID NO: 5985 - DNA, 20 bp, Moraxella atlantae
tataactggtcttagaggat

SEQ ID NO: 5986 - DNA, 30 bp, Psychrobacter phenylpyruvicus
tccttagtgacgcagctaacgcaataagta

SEQ ID NO: 5987 - DNA, 20 bp, Bacillus marinus
ctctctcctgagagtcagtt

SEQ ID NO: 5988 - DNA, 20 bp, Bacteroides distasonis
gaaggcagcctgccaagcca

SEQ ID NO: 5989 - DNA, 20 bp, Bacteroides thetaiotaomicron
gcagctcactggagtgtaac

SEQ ID NO: 5990 - DNA, 20 bp, Veillonella atypica
cgagactggatgaaaggtgg

SEQ ID NO: 5991 - DNA, 20 bp, Vagococcus fluvialis
ttgttttcccgcatgggaga

SEQ ID NO: 5992 - DNA, 20 bp, Bacteroides vulgatus
agtgcagttgaggcaggcgg

SEQ ID NO: 5993 - DNA, 20 bp, Moraxella atlantae
catgaagccttagtggcgca

SEQ ID NO: 5994 - DNA, 20 bp, Lactococcus raffinolactis
agaagaacgttgcatagagt

SEQ ID NO: 5995 - DNA, 20 bp, Clostridium cadaveris
tatgatttttctgcatggga

SEQ ID NO: 5996 - DNA, 30 bp, Empedobacter brevis
taggataggcatgcgtaagattagttagtt

SEQ ID NO: 5997 - DNA, 20 bp, Clostridium cadaveris
tattatggtttttctgcatg

SEQ ID NO: 5998 - DNA, 20 bp, Prevotella oralis
atcttgagtacgcagtaagc

SEQ ID NO: 5999 - DNA, 20 bp, Lactococcus raffinolactis
ttgcatagagtggaaaatta

SEQ ID NO: 6000 - DNA, 30 bp, Brevibacillus reuszeri
cgagggtatgccaatctcttaaaaccaatc

SEQ ID NO: 6001 - DNA, 20 bp, Atopobium parvulum
cccgctcgctctcgataccg

SEQ ID NO: 6002 - DNA, 20 bp, Leptotrichia buccalis
cctgccccggaaactacagg

SEQ ID NO: 6003 - DNA, 20 bp, Actinomyces radingae
gctcgtgtgcaagccgctat

SEQ ID NO: 6004 - DNA, 20 bp, Prevotella bivia
cttctagattgcagcgcgaa

SEQ ID NO: 6005 - DNA, 20 bp, Moraxella atlantae
cagggaggaagagctagtgg

SEQ ID NO: 6006 - DNA, 20 bp, Clostridium glycolicum
aagcgagtgtcgaaggtgaa

SEQ ID NO: 6007 - DNA, 20 bp, Peptoniphilus indolicus
tggactcgcgtctgattaat

SEQ ID NO: 6008 - DNA, 20 bp, Bacillus sp
aggagacgttaaaaggcggc

SEQ ID NO: 6009 - DNA, 20 bp, Moraxella atlantae
cactaagtcatatgtgaaag

SEQ ID NO: 6010 - DNA, 20 bp, Dolosigranulum pigrum
taacattgacgctgaggctc

SEQ ID NO: 6011 - DNA, 20 bp, Ignavigranum ruoffiae
aaggagcttgcttcttccgc

SEQ ID NO: 6012 - DNA, 20 bp, Staphylococcus lutrae
atgtgtaagtcactatgcac

SEQ ID NO: 6013 - DNA, 20 bp, Bacteroides vulgatus
gacagccttctgaaaggaag

SEQ ID NO: 6014 - DNA, 20 bp, Globicatella sanguinis
gtcgaacgaaccacaacgag

SEQ ID NO: 6015 - DNA, 20 bp, Prevotella bivia
gtaggagctcaacttctaga

SEQ ID NO: 6016 - DNA, 20 bp, Clostridium cadaveris
ataagggaagctctttcggg

SEQ ID NO: 6017 - DNA, 20 bp, Ignavigranum ruoffiae
gtcgaacgcacaacgaagga

SEQ ID NO: 6018 - DNA, 20 bp, Chromobacterium violaceum
agactgcacagctagagtgc

SEQ ID NO: 6019 - DNA, 30 bp, Staphylococcus muscae
ttgacatcctttgaccgcactagagatagt

SEQ ID NO: 6020 - DNA, 20 bp, Helcococcus kunzii
tcagtcgatttcttcggaat

SEQ ID NO: 6021 - DNA, 20 bp, Streptococcus sobrinus
tgttgtaggggaagaacgtg

SEQ ID NO: 6022 - DNA, 30 bp, Facklamia languida
catagaatcacagatcgcatgatcaatgaa

SEQ ID NO: 6023 - DNA, 20 bp, Veillonella atypica
aatggttcttgtgcgaatag

SEQ ID NO: 6024 - DNA, 30 bp, Staphylococcus chromogenes
gccggataacatatcgaaccgcatggttcg

SEQ ID NO: 6025 - DNA, 20 bp, Actinomyces turicensis
ctttgttggggtggattagt

SEQ ID NO: 6026 - DNA, 20 bp, Staphylococcus lentus
accgcatggttcaatgttga

SEQ ID NO: 6027 - DNA, 20 bp, Prevotella bivia
gtcagacttgagtgcgcaca

SEQ ID NO: 6028 - DNA, 20 bp, Prevotella oralis
acagcgagtcggccgtatgt

SEQ ID NO: 6029 - DNA, 30 bp, Bordetella avium
ccttgcgcaaatgacggtacctgcagaata

SEQ ID NO: 6030 - DNA, 20 bp, Psychrobacter phenylpyruvicus
acttgattccttagtgacgc

SEQ ID NO: 6031 - DNA, 20 bp, Corynebacterium kutscheri
gatagtttttcctttttagg

SEQ ID NO: 6032 - DNA, 20 bp, Moraxella atlantae
aagcagggaggaagagccag

SEQ ID NO: 6033 - DNA, 20 bp, Clostridium clostridiiforme
aacgaagcaattaagatgaa

SEQ ID NO: 6034 - DNA, 20 bp, Bacteroides vulgatus
ttacggtgaaagccgtaagc

SEQ ID NO: 6035 - DNA, 20 bp, Abiotrophia defectiva
gcgactaggtgcttgcacta

SEQ ID NO: 6036 - DNA, 20 bp, Clostridium innocuum
acgaagtcttcaggaagctt

SEQ ID NO: 6037 - DNA, 20 bp, Dolosigranulum pigrum
gtggctttgctaccactcat

SEQ ID NO: 6038 - DNA, 20 bp, Bacteroides eggerthii
ttaaattgcagcggaatgta

SEQ ID NO: 6039 - DNA, 20 bp, Prevotella bivia
atagcttgctatttatgtcg

SEQ ID NO: 6040 - DNA, 20 bp, Corynebacterium kutscheri
cggaaaggctttcttgcttg

SEQ ID NO: 6041 - DNA, 20 bp, Bacteroides capilosus
aggattcgtccaatggattg

SEQ ID NO: 6042 - DNA, 20 bp, Weeksella virosa
tgatctagaattagtttgaa

SEQ ID NO: 6043 - DNA, 20 bp, Facklamia sourekii
ttattagagaagaacagtca

SEQ ID NO: 6044 - DNA, 20 bp, Actinomyces radingae
cgctcagaaatgggtgctaa

SEQ ID NO: 6045 - DNA, 20 bp, Clostridium clostridiiforme
gaacgaagcaattaagatga

SEQ ID NO: 6046 - DNA, 20 bp, Bacillus psychrosaccharolyticus
gtcgagcgaattgttgagtt

SEQ ID NO: 6047 - DNA, 20 bp, Aerococcus christensenii
taggaagtttgttcgcatga

SEQ ID NO: 6048 - DNA, 20 bp, Leptotrichia buccalis
gctgatgaaaggagacgctg

SEQ ID NO: 6049 - DNA, 20 bp, Moraxella atlantae
tgcctaaattagattagcta

SEQ ID NO: 6050 - DNA, 20 bp, Bacillus schlegellii
acctggcgactggggtgaag

SEQ ID NO: 6051 - DNA, 20 bp, Atopobium parvulum
ctttcattgggatagccacg

SEQ ID NO: 6052 - DNA, 20 bp, Streptococcus thoraltensis
ctttttaaaaggtgcaacag

SEQ ID NO: 6053 - DNA, 20 bp, Prevotella oralis
tattctatcggtaatggatg

SEQ ID NO: 6054 - DNA, 30 bp, Actinomyces radingae
aacgctcagaaatgggtgctaatactggat

SEQ ID NO: 6055 - DNA, 20 bp, Alloiococcus otitis
cgcataggttttcccagtgc

SEQ ID NO: 6056 - DNA, 20 bp, Kocuria kristinae
ctaatacccggatgcgacta

SEQ ID NO: 6057 - DNA, 20 bp, Bacteroides capilosus
tgagtgctggagaggcaatc

SEQ ID NO: 6058 - DNA, 20 bp, Prevotella disiens
gtaatctaatctttaaagcc

SEQ ID NO: 6059 - DNA, 20 bp, Lactococcus raffinolactis
tgatgtcaagctaatctctt

SEQ ID NO: 6060 - DNA, 20 bp, Streptococcus thoraltensis
aacccatgttagctttttaa

SEQ ID NO: 6061 - DNA, 20 bp, Prevotella oralis
cattcccttcggggcattgg

SEQ ID NO: 6062 - DNA, 20 bp, Weeksella virosa
ttgaaagatttatcgctata

SEQ ID NO: 6063 - DNA, 20 bp, Ignavigranum ruoffiae
gagcttgcttcttccgcgtg

SEQ ID NO: 6064 - DNA, 20 bp, Brevibacillus thermoruber
accggatagggcaccttctc

SEQ ID NO: 6065 - DNA, 20 bp, Prevotella disiens
aattgtaggagcacgataca

SEQ ID NO: 6066 - DNA, 20 bp, Anaerobiospirillum succiniciproducens
ggaaacactgacgttaccca

SEQ ID NO: 6067 - DNA, 20 bp, Corynebacterium confusum
ggagctaatcgcttaaagtt

SEQ ID NO: 6068 - DNA, 20 bp, Leuconostoc fallax
gcggacctgatcacttcggt

SEQ ID NO: 6069 - DNA, 20 bp, Bacillus sp
gccttttaacgtctccttat

SEQ ID NO: 6070 - DNA, 20 bp, Actinomyces radingae
ggggtgtgggaaaggggcct

SEQ ID NO: 6071 - DNA, 30 bp, Staphylococcus muscae
gaggtgcttgcacctctgacgttagcggcg

SEQ ID NO: 6072 - DNA, 20 bp, Bacteroides ureolyticus
ttaacataagttaaataggg

SEQ ID NO: 6073 - DNA, 20 bp, Sphingobacterium multivorum
gtcggagagcttgctcgaag

SEQ ID NO: 6074 - DNA, 20 bp, Moraxella atlantae
ttaagcagggaggaagagcc

SEQ ID NO: 6075 - DNA, 20 bp, Vibrio metschnikovii
actttgggttcatgactggg

SEQ ID NO: 6076 - DNA, 20 bp, Ochrobactrum intermedium
aataccctatacgaccgaga

SEQ ID NO: 6077 - DNA, 30 bp, Suttonella indologenes
caggccttgacatccagagaagttaccaga

SEQ ID NO: 6078 - DNA, 20 bp, Actinomyces radingae
aacctctttcgctcgtgtgc

SEQ ID NO: 6079 - DNA, 20 bp, Streptococcus thoraltensis
gcaacagcatcacttaaaga

SEQ ID NO: 6080 - DNA, 30 bp, Bacillus marinus
cggctatcacttacggatgagcccgcggcg

SEQ ID NO: 6081 - DNA, 20 bp, Corynebacterium glucuronolyticum
caatggtcgatacaatgcgt

SEQ ID NO: 6082 - DNA, 20 bp, Bacillus schlegellii
gccgcggaggcggcattgac

SEQ ID NO: 6083 - DNA, 20 bp, Myroides odoratimimus
attaatgctccatggtttat

SEQ ID NO: 6084 - DNA, 20 bp, Bacillus alcalophilus
cttgacggacctaaccagaa

SEQ ID NO: 6085 - DNA, 20 bp, Bacillus schlegellii
atagattgtcctggcgcatg

SEQ ID NO: 6086 - DNA, 20 bp, Bacteroides eggerthii
cttcgggccgctgtgaaggt

SEQ ID NO: 6087 - DNA, 20 bp, Prevotella disiens
gaaacggcaaagagtgcttg

SEQ ID NO: 6088 - DNA, 20 bp, Alloiococcus otitis
gcggacttgaatgtagcaga

SEQ ID NO: 6089 - DNA, 20 bp, Staphylococcus chromogenes
gataacatatcgaaccgcat

SEQ ID NO: 6090 - DNA, 20 bp, Sporosarcina pasteurii
tagccgtctttcagagttcc

SEQ ID NO: 6091 - DNA, 20 bp, Bacillus schlegellii
tgtaaacccctgttgtcggg

SEQ ID NO: 6092 - DNA, 30 bp, Cardiobacterium hominis
gggaccgaaaggcctcgcggcaagagatga

SEQ ID NO: 6093 - DNA, 20 bp, Alloiococcus otitis
aacacccgaagccggccggg

SEQ ID NO: 6094 - DNA, 20 bp, Bacillus schlegellii
gaaggcgaacctggcgactg

SEQ ID NO: 6095 - DNA, 30 bp, Actinomyces radingae
cccgaagcttgtggcttaacctttttgggg

SEQ ID NO: 6096 - DNA, 20 bp, Corynebacterium group ANF
aggactgcagggtggtgcct

SEQ ID NO: 6097 - DNA, 20 bp, Psychrobacter phenylpyruvicus
tgggtagcctaacttttaga

SEQ ID NO: 6098 - DNA, 20 bp, Streptococcus sobrinus
ttactaatgagtcgcgaacg

SEQ ID NO: 6099 - DNA, 20 bp, Empedobacter brevis
gtaggataggcatgcgtaag

SEQ ID NO: 6100 - DNA, 20 bp, Myroides odoratus
agattactacgtacttattg

SEQ ID NO: 6101 - DNA, 20 bp, Brevibacillus thermoruber
cgcaagaccgggataacgta

SEQ ID NO: 6102 - DNA, 20 bp, Myroides odoratus
ggatgcgaatctcaaaaact

SEQ ID NO: 6103 - DNA, 20 bp, Weeksella virosa
attaataccgtatataaagc

SEQ ID NO: 6104 - DNA, 20 bp, Ochrobactrum intermedium
taataccctatacgaccgag

SEQ ID NO: 6105 - DNA, 30 bp, Clostridium innocuum
gctctgtatattaaagcgcccttcaaggcg

SEQ ID NO: 6106 - DNA, 20 bp, Bacillus schlegellii
gcggaggcggcattgacggt

SEQ ID NO: 6107 - DNA, 20 bp, Staphylococcus simulans
tgaaaccgcatggtttcatg

SEQ ID NO: 6108 - DNA, 20 bp, Clostridium cadaveris
cgggtgtgaactagcggcgg

SEQ ID NO: 6109 - DNA, 20 bp, Bacteroides eggerthii
ttcgggccgctgtgaaggtg

SEQ ID NO: 6110 - DNA, 20 bp, Staphylococcus simulans
taagtaactatgcatccctt

SEQ ID NO: 6111 - DNA, 20 bp, Abiotrophia defectiva
gacatggaatcacatgattc

SEQ ID NO: 6112 - DNA, 20 bp, Clostridium limosum
taccgcataacatcatttca

SEQ ID NO: 6113 - DNA, 20 bp, Clostridium cadaveris
aaagtcatgaaaggagcaat

SEQ ID NO: 6114 - DNA, 20 bp, Bacteroides merdae
tctgaccggagtggaaacac

SEQ ID NO: 6115 - DNA, 20 bp, Vagococcus fluvialis
ctttgattttcaccggagct

SEQ ID NO: 6116 - DNA, 30 bp, Moraxella atlantae
agtcgaacgatggaacctagcttgctaggg

SEQ ID NO: 6117 - DNA, 20 bp, Leptotrichia buccalis
atgcccgtgagagcgggcag

SEQ ID NO: 6118 - DNA, 20 bp, Prevotella bivia
aggagctcaacttctagatt

SEQ ID NO: 6119 - DNA, 20 bp, Helcococcus kunzii
ttcagttgatttcttcggaa

SEQ ID NO: 6120 - DNA, 20 bp, Staphylococcus lutrae
cacatgtgtaagtcactatg

SEQ ID NO: 6121 - DNA, 20 bp, Bacteroides ureolyticus
tactagaatttagtgacagg

SEQ ID NO: 6122 - DNA, 20 bp, Bacillus sp
gaagcaagtagaaccccttc

SEQ ID NO: 6123 - DNA, 20 bp, Prevotella oralis
aattccgtatgcagtccgaa

SEQ ID NO: 6124 - DNA, 20 bp, Peptostreptococcus anaerobius
tttgatgcttgcattaatga

SEQ ID NO: 6125 - DNA, 20 bp, Bacillus sp
ttttaacgtctccttatgca

SEQ ID NO: 6126 - DNA, 20 bp, Actinomyces radingae
cgaagcttgtggcttaacct

SEQ ID NO: 6127 - DNA, 20 bp, Leptotrichia buccalis
ccgtgagagcgggcagtgcc

SEQ ID NO: 6128 - DNA, 20 bp, Prevotella oralis
gcactctgtgaatactgccg

SEQ ID NO: 6129 - DNA, 20 bp, Weeksella virosa
aagttggcgaccgtaacagg

SEQ ID NO: 6130 - DNA, 20 bp, Leuconostoc fallax
gttaatgtaggaaatgatgt

SEQ ID NO: 6131 - DNA, 30 bp, Suttonella indologenes
cttagatgagcctatattggattagctagt

SEQ ID NO: 6132 - DNA, 20 bp, Clostridium cadaveris
tgctaacagtaagatgagca

SEQ ID NO: 6133 - DNA, 20 bp, Prevotella oralis
gcttgaactgccattgactt

SEQ ID NO: 6134 - DNA, 20 bp, Anaerobiospirillum succiniciproducens
tatcagatgagcccaagtgg

SEQ ID NO: 6135 - DNA, 20 bp, Suttonella indologenes
tgtgaatttgacattagcta

SEQ ID NO: 6136 - DNA, 20 bp, Paenibacillus apiarius
ccggatagacattttcctcg

SEQ ID NO: 6137 - DNA, 30 bp, Pediococcus dextrinicus
ggcctttggctgtcacttaaggatggaccc

SEQ ID NO: 6138 - DNA, 20 bp, Arcanobacterium haemolyticum
gaaggctcctgcttgcgggg

SEQ ID NO: 6139 - DNA, 20 bp, Bacteroides distasonis
ggacaaagggaagccacctg

SEQ ID NO: 6140 - DNA, 20 bp, Facklamia languida
cacagatcgcatgatcaatg

SEQ ID NO: 6141 - DNA, 20 bp, Comamonas terrigena
tcgcaagaccttgtgctact

SEQ ID NO: 6142 - DNA, 20 bp, Facklamia languida
aacttgttcaagtcaatgtt

SEQ ID NO: 6143 - DNA, 20 bp, Streptococcus acidominimus
tttgaattgattgagtcgcg

SEQ ID NO: 6144 - DNA, 20 bp, Empedobacter brevis
cggcttcagtggctaagcga

SEQ ID NO: 6145 - DNA, 20 bp, Actinomyces radingae
tttttctttgggataacgct

SEQ ID NO: 6146 - DNA, 30 bp, Facklamia languida
cctaacttaggagggagccgtcgaaggtgg

SEQ ID NO: 6147 - DNA, 20 bp, Leuconostoc lactis
ttgctcctgattgataaaca

SEQ ID NO: 6148 - DNA, 20 bp, Streptococcus ratti
gaaagtctggagtaaaaggc

SEQ ID NO: 6149 - DNA, 20 bp, Actinomyces radingae
gcctttgtggtttctggagg

SEQ ID NO: 6150 - DNA, 20 bp, Empedobacter brevis
cgaatctcgaaaacttatct

SEQ ID NO: 6151 - DNA, 20 bp, Streptococcus macacae
cggttaggaaagtctggagt

SEQ ID NO: 6152 - DNA, 20 bp, Sphingobacterium multivorum
gacgcactcgtccttcggga

SEQ ID NO: 6153 - DNA, 30 bp, Bacteroides vulgatus
tgagtgcagttgaggcaggcggaattcgtg

SEQ ID NO: 6154 - DNA, 20 bp, Prevotella bivia
cgatttagagataatgaggt

SEQ ID NO: 6155 - DNA, 20 bp, Bacteroides vulgatus
ggatatcttgagtgcagttg

SEQ ID NO: 6156 - DNA, 20 bp, Bacteroides distasonis
atgaagcagggatcccgcat

SEQ ID NO: 6157 - DNA, 20 bp, Sphingobacterium multivorum
cttgctcgaagatggtgaga

SEQ ID NO: 6158 - DNA, 20 bp, Myroides odoratus
cgtacttattgacgctgatg

SEQ ID NO: 6159 - DNA, 20 bp, Psychrobacter phenylpyruvicus
gggtagcctaacttttagag

SEQ ID NO: 6160 - DNA, 20 bp, Prevotella bivia
tgtattcgtttgatctcatg

SEQ ID NO: 6161 - DNA, 20 bp, Bacteroides distasonis
ggaaacaccttttctagcaa

SEQ ID NO: 6162 - DNA, 20 bp, Bacteroides vulgatus
catgagtccgcatgttcaca

SEQ ID NO: 6163 - DNA, 20 bp, Leptotrichia buccalis
tgtctgcacctgaagctact

SEQ ID NO: 6164 - DNA, 20 bp, Prevotella oris
gcttccccgggcgtcgaccg

SEQ ID NO: 6165 - DNA, 20 bp, Prevotella bivia
acttctagattgcagcgcga

SEQ ID NO: 6166 - DNA, 20 bp, Corynebacterium group ANF
ctgcagggtggtgcctgtgg

SEQ ID NO: 6167 - DNA, 20 bp, Streptococcus sobrinus
gtgttactaatgagtcgcga

SEQ ID NO: 6168 - DNA, 20 bp, Prevotella oralis
ttgacttgaatagagatatt

SEQ ID NO: 6169 - DNA, 20 bp, Abiotrophia defectiva
cttggtcaaggtgagtggcg

SEQ ID NO: 6170 - DNA, 20 bp, Alloiococcus otitis
aactggcggacttgaatgta

SEQ ID NO: 6171 - DNA, 20 bp, Anaerobiospirillum succiniciproducens
cggaaaggtaagtaggatgt

SEQ ID NO: 6172 - DNA, 20 bp, Myroides odoratus
agtacagaaagcagctacca

SEQ ID NO: 6173 - DNA, 30 bp, Bacteroides vulgatus
tagtcttcgatggataggggttctgagagg

SEQ ID NO: 6174 - DNA, 20 bp, Dolosigranulum pigrum
ctttccggccctcggtgctg

SEQ ID NO: 6175 - DNA, 20 bp, Pasteurella multocida
gcaggtattttaatagaata

SEQ ID NO: 6176 - DNA, 20 bp, Prevotella oralis
gttttcaacttttgatggcg

SEQ ID NO: 6177 - DNA, 20 bp, Clostridium limosum
tcatttcaatgcatgttgaa

SEQ ID NO: 6178 - DNA, 20 bp, Veillonella atypica
ggacgaatggttcttgtgcg

SEQ ID NO: 6179 - DNA, 20 bp, Bacteroides eggerthii
agtgcagcataggtaggcgg

SEQ ID NO: 6180 - DNA, 20 bp, Corynebacterium kutscheri
gaacggaaaggctttcttgc

SEQ ID NO: 6181 - DNA, 20 bp, Corynebacterium coyleae
cttcttggaggttgtggtgg

SEQ ID NO: 6182 - DNA, 20 bp, Prevotella bivia
tatgtattcgtttgatctca

SEQ ID NO: 6183 - DNA, 20 bp, Pasteurella multocida
gggattgagcaataagcttg

SEQ ID NO: 6184 - DNA, 20 bp, Prevotella oralis
tcagttgccatcggttaaag

SEQ ID NO: 6185 - DNA, 30 bp, Arcanobacterium haemolyticum
ccaaggcttgacatacaccgggattatgca

SEQ ID NO: 6186 - DNA, 20 bp, Pseudomonas fluorescens
gagagatgcttgcatctctt

SEQ ID NO: 6187 - DNA, 20 bp, Anaerobiospirillum succiniciproducens
ggaggaaacactgacggtac

SEQ ID NO: 6188 - DNA, 20 bp, Corynebacterium accolens
tttcccctttgtggttggtg

SEQ ID NO: 6189 - DNA, 20 bp, Empedobacter brevis
ttgccctactgaaaaggata

SEQ ID NO: 6190 - DNA, 20 bp, Clostridium histolyticum
tttaatgcatgttagaaaga

SEQ ID NO: 6191 - DNA, 20 bp, Facklamia languida
cttgaacttgttcaagtcaa

SEQ ID NO: 6192 - DNA, 20 bp, Arcanobacterium haemolyticum
ttctcttgggataagccttg

SEQ ID NO: 6193 - DNA, 20 bp, Kingella kingae
gagtacttgtacttggtggc

SEQ ID NO: 6194 - DNA, 20 bp, Peptoniphilus asaccharolyticus
cagatgtgaaaggcaagggc

SEQ ID NO: 6195 - DNA, 20 bp, Suttonella indologenes
gtgctcggtaccgcagctaa

SEQ ID NO: 6196 - DNA, 20 bp, Brevibacillus thermoruber
gaaactgctcgacttgagtg

SEQ ID NO: 6197 - DNA, 20 bp, Bacteroides eggerthii
cgggaataaagtggagtatg

SEQ ID NO: 6198 - DNA, 30 bp, Prevotella oris
cgacggggaagcttgcttccccgggcgtcg

SEQ ID NO: 6199 - DNA, 20 bp, Bacillus schlegellii
agcggggaggcgggcggaag

SEQ ID NO: 6200 - DNA, 20 bp, Prevotella loescheii
ggcagcctactgtagcgcta

SEQ ID NO: 6201 - DNA, 20 bp, Helcococcus kunzii
agggatatcctagagatagg

SEQ ID NO: 6202 - DNA, 20 bp, Weeksella virosa
tagtttgaagtagctagaat

SEQ ID NO: 6203 - DNA, 20 bp, Alloiococcus otitis
gcttgcaggaagaggcggag

SEQ ID NO: 6204 - DNA, 20 bp, Bacteroides capillosus
cgtatgcaaatacgatctaa

SEQ ID NO: 6205 - DNA, 30 bp, Staphylococcus muscae
ccgcactagagatagtgttttcctcttcgg

SEQ ID NO: 6206 - DNA, 20 bp, Prevotella bivia
tgggtggtacagatagttgg

SEQ ID NO: 6207 - DNA, 20 bp, Ignavigranum ruoffiae
tcgaacgcacaacgaaggag

SEQ ID NO: 6208 - DNA, 20 bp, Abiotrophia defectiva
gtcgaacgaaccgcgactag

SEQ ID NO: 6209 - DNA, 30 bp, Staphylococcus chromogenes
tggttcgatagtgaaagacggtcttgctgt

SEQ ID NO: 6210 - DNA, 20 bp, Leuconostoc fallax
tgttaatgtgacggtaccat

SEQ ID NO: 6211 - DNA, 20 bp, Bacteroides ureolyticus
tagaaagtgctagtttacta

SEQ ID NO: 6212 - DNA, 20 bp, Bacteroides stercoris
cttgagtgcagcagaggtgg

SEQ ID NO: 6213 - DNA, 20 bp, Helcococcus kunzii
atgatgtaaatgttaaagaa

SEQ ID NO: 6214 - DNA, 20 bp, Kingella kingae
tactcttgtgccttcgggag

SEQ ID NO: 6215 - DNA, 20 bp, Prevotella disiens
tgcatgtaccattcgaataa

SEQ ID NO: 6216 - DNA, 30 bp, Corynebacterium matruchotii
ccagattgggctagagatagttcgtccctt

SEQ ID NO: 6217 - DNA, 20 bp, Peptoniphilus indolicus
gaaacttctaaacttgagta

SEQ ID NO: 6218 - DNA, 20 bp, Actinomyces meyeri
tgcgccctgggcgtgcggag

SEQ ID NO: 6219 - DNA, 20 bp, Prevotella bivia
ggcagcgaatagatagcttg

SEQ ID NO: 6220 - DNA, 20 bp, Anaerobiospirillum succiniciproducens
gagggagatggaatttcagg

SEQ ID NO: 6221 - DNA, 20 bp, Bacillus schlegellii
gcggcattgacggtacccga

SEQ ID NO: 6222 - DNA, 20 bp, Prevotella loescheii
gtaggccgcgccttaagcgt

SEQ ID NO: 6223 - DNA, 20 bp, Vagococcus fluvialis
tccaccgaaaatcaaagagt

SEQ ID NO: 6224 - DNA, 20 bp, Aerococcus christensenii
cataggaagtttgttcgcat

SEQ ID NO: 6225 - DNA, 20 bp, Haemophilus segnis
ttaataggcatcacgattga

SEQ ID NO: 6226 - DNA, 20 bp, Lactococcus raffinolactis
tgaaagtaccaaatggtaca

SEQ ID NO: 6227 - DNA, 20 bp, Streptococcus thoraltensis
ataaatgagtcgcgaacggg

SEQ ID NO: 6228 - DNA, 30 bp, Clostridium cadaveris
ctttcgggagcaggaacacaggtggtgcat

SEQ ID NO: 6229 - DNA, 20 bp, Myroides odoratus
gtcgaggggtatagagagct

SEQ ID NO: 6230 - DNA, 20 bp, Weeksella virosa
gtagattatcttcggataat

SEQ ID NO: 6231 - DNA, 20 bp, Dermacoccus nishinomiyaensis
ggatacgaccgatctccgca

SEQ ID NO: 6232 - DNA, 20 bp, Myroides odoratus
tacttattgacgctgatgaa

SEQ ID NO: 6233 - DNA, 20 bp, Anaerobiospirillum succiniciproducens
taccacggtgtggtctgtga

SEQ ID NO: 6234 - DNA, 30 bp, Helcococcus kunzii
ttctagaatctaactgacgctgagatacga

SEQ ID NO: 6235 - DNA, 20 bp, Leuconostoc fallax
gcatatggctagagtggcga

SEQ ID NO: 6236 - DNA, 20 bp, Actinomyces turicensis
agagtgttgcgatatcgtaa

SEQ ID NO: 6237 - DNA, 20 bp, Staphylococcus simulans
actatgcatcccttgacggt

SEQ ID NO: 6238 - DNA, 20 bp, Helcococcus kunzii
tagcgaagataatgacagta

SEQ ID NO: 6239 - DNA, 20 bp, Anaerococcus prevotii
gaaactgcatatcttgagaa

SEQ ID NO: 6240 - DNA, 20 bp, Empedobacter brevis
ggattaatactttataacag

SEQ ID NO: 6241 - DNA, 20 bp, Moraxella atlantae
gcatatgatactggtgaact

SEQ ID NO: 6242 - DNA, 20 bp, Ignavigranum ruoffiae
taataccgcataggccagtg

SEQ ID NO: 6243 - DNA, 20 bp, Paenibacillus apiarius
gagggaaatgggaaagacgg

SEQ ID NO: 6244 - DNA, 30 bp, Vagococcus fluvialis
ttttcaccggagcttgctccaccgaaaatc

SEQ ID NO: 6245 - DNA, 20 bp, Moraxella atlantae
catttaggaaactgccttat

SEQ ID NO: 6246 - DNA, 20 bp, Clostridium sordellii
gagagtcgcatggcttttat

SEQ ID NO: 6247 - DNA, 20 bp, Actinomyces radingae
gtgagtgtagcgggtaaaga

SEQ ID NO: 6248 - DNA, 20 bp, Eubacterium moniliforme
gtaggtggccatgtaagtca

SEQ ID NO: 6249 - DNA, 20 bp, Dolosigranulum pigrum
aggcggtctgtttagtctaa

SEQ ID NO: 6250 - DNA, 20 bp, Prevotella disiens
tgttggttgcatgtaaatgt

SEQ ID NO: 6251 - DNA, 20 bp, Helcococcus kunzii
tagtcttttcggagacttgt

SEQ ID NO: 6252 - DNA, 20 bp, Bacteroides thetaiotaomicron
gtccacgtgtggatttttgt

SEQ ID NO: 6253 - DNA, 20 bp, Myroides odoratus
actgcttgacttgaatagta

SEQ ID NO: 6254 - DNA, 20 bp, Actinomyces turicensis
agtgttgcgatatcgtaagg

SEQ ID NO: 6255 - DNA, 20 bp, Clostridium cadaveris
gcatgggaaagtcatgaaag

SEQ ID NO: 6256 - DNA, 20 bp, Actinomyces meyeri
gcccggaaatgggtgctaat

SEQ ID NO: 6257 - DNA, 20 bp, Virgibacillus proomii
gggaagcaagcagaacccct

SEQ ID NO: 6258 - DNA, 20 bp, Weeksella virosa
cttcggataattgagagcgg

SEQ ID NO: 6259 - DNA, 20 bp, Bacteroides eggerthii
tactcctttgtatgtaccgt

SEQ ID NO: 6260 - DNA, 20 bp, Weissella paramesenteroides
cttgctctgatgtgatttta

SEQ ID NO: 6261 - DNA, 20 bp, Moraxella atlantae
ctgctataagatgtgcctaa

SEQ ID NO: 6262 - DNA, 20 bp, Atopobium parvulum
ggcacaatgggctgccaacc

SEQ ID NO: 6263 - DNA, 30 bp, Kingella kingae
gatagggtaaccgcaaggagcccgtttacc

SEQ ID NO: 6264 - DNA, 20 bp, Anaerobiospirillum succiniciproducens
aggcttgggaatctgcctgg

SEQ ID NO: 6265 - DNA, 20 bp, Bacteroides eggerthii
gccttcgggccgctgtgaag

SEQ ID NO: 6266 - DNA, 20 bp, Achromobacter piechaudii
ctggaattctgaagagattc

SEQ ID NO: 6267 - DNA, 20 bp, Streptococcus acidominimus
acgagcagcgaactggtgac

SEQ ID NO: 6268 - DNA, 20 bp, Bacteroides eggerthii
tcactattaaagaatttcgg

SEQ ID NO: 6269 - DNA, 20 bp, Prevotella oralis
ttgaactgccattgacttga

SEQ ID NO: 6270 - DNA, 20 bp, Eubacterium moniliforme
ttgtactttcgcatgaaaga

SEQ ID NO: 6271 - DNA, 20 bp, Anaerobiospirillum succiniciproducens
tttgggttccgcagctaacg

SEQ ID NO: 6272 - DNA, 20 bp, Alloiococcus otitis
gcataggttttcccagtgca

SEQ ID NO: 6273 - DNA, 20 bp, Clostridium limosum
gcatgttgaaatgattaaag

SEQ ID NO: 6274 - DNA, 20 bp, Ignavigranum ruoffiae
gagatggggactctaatgag

SEQ ID NO: 6275 - DNA, 20 bp, Bacillus marinus
agagtcagttgaaagatggt

SEQ ID NO: 6276 - DNA, 20 bp, Actinomyces turicensis
gtgttgcgatatcgtaaggt

SEQ ID NO: 6277 - DNA, 20 bp, Peptoniphilus indolicus
acataacagacaccttcggg

SEQ ID NO: 6278 - DNA, 20 bp, Comamonas testosteroni
atggcaggaatcctttagag

SEQ ID NO: 6279 - DNA, 20 bp, Bacillus schlegellii
gacgggtccagagatgggcc

SEQ ID NO: 6280 - DNA, 20 bp, Bacteroides ureolyticus
acagaggaacaacagttgga

SEQ ID NO: 6281 - DNA, 20 bp, Veillonella atypica
ggttcttgtgcgaatagtgc

SEQ ID NO: 6282 - DNA, 20 bp, Prevotella oralis
agtcatctaatttggacgaa

SEQ ID NO: 6283 - DNA, 20 bp, Streptococcus thoraltensis
tggtataaatgagtcgcgaa

SEQ ID NO: 6284 - DNA, 20 bp, Alloiococcus otitis
aatcttcctgcttgcaggaa

SEQ ID NO: 6285 - DNA, 20 bp, Peptoniphilus indolicus
agcagatgccgaaggtaggg

SEQ ID NO: 6286 - DNA, 20 bp, Bacillus schlegellii
cggcattgacggtacccgac

SEQ ID NO: 6287 - DNA, 20 bp, Streptococcus thoraltensis
cggtgccggttctagagata

SEQ ID NO: 6288 - DNA, 20 bp, Prevotella bivia
cgaatagatagcttgctatt

SEQ ID NO: 6289 - DNA, 20 bp, Brevibacillus thermoruber
agtcgagcggatcctgtttg

SEQ ID NO: 6290 - DNA, 20 bp, Actinomyces radingae
gctaatactggatgttctgc

SEQ ID NO: 6291 - DNA, 20 bp, Streptococcus acidominimus
ctacatttgaattgattgag

SEQ ID NO: 6292 - DNA, 20 bp, Bacteroides vulgatus
attgcagttgatactggata

SEQ ID NO: 6293 - DNA, 20 bp, Streptococcus thoraltensis
cttaaagatggacctgcgtt

SEQ ID NO: 6294 - DNA, 20 bp, Staphylococcus simulans
tattagggaagaacaaggat

SEQ ID NO: 6295 - DNA, 20 bp, Bacteroides thetaiotaomicron
gtcgaggggcatcagtttgg

SEQ ID NO: 6296 - DNA, 20 bp, Streptococcus ratti
gtgtgctctggaaactgtct

SEQ ID NO: 6297 - DNA, 30 bp, Prevotella oralis
gttttcaacttttgatggcgaccggcgcac

SEQ ID NO: 6298 - DNA, 20 bp, Dolosigranulum pigrum
tcgaacgatgatatcactgc

SEQ ID NO: 6299 - DNA, 20 bp, Vagococcus fluvialis
ttttcccgcatgggagaata

SEQ ID NO: 6300 - DNA, 20 bp, Streptococcus sobrinus
tgcaagtggaacgcattggt

SEQ ID NO: 6301 - DNA, 20 bp, Bacteroides ureolyticus
ttccacagtggaatcagtaa

SEQ ID NO: 6302 - DNA, 20 bp, Facklamia languida
ggtcttgacataggatgcat

SEQ ID NO: 6303 - DNA, 20 bp, Prevotella disiens
aggggaaacggcaaagagtg

SEQ ID NO: 6304 - DNA, 20 bp, Dolosigranulum pigrum
gaatgtagaagaggaaaatg

SEQ ID NO: 6305 - DNA, 20 bp, Myroides odoratimimus
cttgaatagtatggaagtaa

SEQ ID NO: 6306 - DNA, 20 bp, Streptococcus ratti
gcaagggaacacactgtgct

SEQ ID NO: 6307 - DNA, 20 bp, Streptococcus thoraltensis
acagcatcacttaaagatgg

SEQ ID NO: 6308 - DNA, 20 bp, Psychrobacter phenylpyruvicus
ggaaaagggggcagcttgcg

SEQ ID NO: 6309 - DNA, 20 bp, Weeksella virosa
ggttttcgggctcagtggtt

SEQ ID NO: 6310 - DNA, 20 bp, Bacteroides distasonis
atgcaacttgcctatcagag

SEQ ID NO: 6311 - DNA, 20 bp, Prevotella oris
tgcaaacacgatccaatcct

SEQ ID NO: 6312 - DNA, 20 bp, Moraxella atlantae
cttttgctataagatgtgcc

SEQ ID NO: 6313 - DNA, 20 bp, Myroides odoratus
agagaccggcggatgggtga

SEQ ID NO: 6314 - DNA, 20 bp, Pseudoramibacter alactolyticus
aaaaccgcataacacagcag

SEQ ID NO: 6315 - DNA, 20 bp, Prevotella oralis
tattcattcccttcggggca

SEQ ID NO: 6316 - DNA, 20 bp, Moraxella atlantae
ggtaaagctgagaactgtaa

SEQ ID NO: 6317 - DNA, 20 bp, Clostridium glycolicum
aacataagagattcacatgt

SEQ ID NO: 6318 - DNA, 30 bp, Bacteroides distasonis
tgggactgccagcgtaagctgcgaggaagg

SEQ ID NO: 6319 - DNA, 20 bp, Bacillus sp
gcaagaaaacgtattatccg

SEQ ID NO: 6320 - DNA, 20 bp, Bacteroides vulgatus
cggtgaaagccgtaagccgc

SEQ ID NO: 6321 - DNA, 20 bp, Streptococcus thoraltensis
aagaataggagtaagagtgg

SEQ ID NO: 6322 - DNA, 20 bp, Sphingobacterium multivorum
cggacgggatccgtcggaga

SEQ ID NO: 6323 - DNA, 20 bp, Dolosigranulum pigrum
gatcccgcaagggctagcta

SEQ ID NO: 6324 - DNA, 20 bp, Weeksella virosa
ttatatgtgaataaacctat

SEQ ID NO: 6325 - DNA, 20 bp, Helcococcus kunzii
cagtagctaagaagcaagcc

SEQ ID NO: 6326 - DNA, 20 bp, Corynebacterium confusum
cctttgtggcctttatacag

SEQ ID NO: 6327 - DNA, 20 bp, Bacteroides ureolyticus
ggacttgacatcctaaaaac

SEQ ID NO: 6328 - DNA, 20 bp, Streptococcus sobrinus
ttccgggacttagtgccgac

SEQ ID NO: 6329 - DNA, 30 bp, Dolosigranulum pigrum
caggcggtctgtttagtctaatgtgaaagc

SEQ ID NO: 6330 - DNA, 20 bp, Peptoniphilus indolicus
cagacaccttcgggaagaag

SEQ ID NO: 6331 - DNA, 20 bp, Actinomyces radingae
tttcgctcgtgtgcaagccg

SEQ ID NO: 6332 - DNA, 20 bp, Bacillus schlegellii
aagtcgagcggggaggcggg

SEQ ID NO: 6333 - DNA, 20 bp, Brevibacillus thermoruber
attggaaactgctcgacttg

SEQ ID NO: 6334 - DNA, 30 bp, Clostridium histolyticum
tgaggtggagccaatctcacaaagccaatc

SEQ ID NO: 6335 - DNA, 20 bp, Alloiococcus otitis
gttgttggggaagaacacgg

SEQ ID NO: 6336 - DNA, 20 bp, Prevotella oralis
cgattagccagccggcgggg

SEQ ID NO: 6337 - DNA, 20 bp, Bacillus sp
tgcaagaaaacgtattatcc

SEQ ID NO: 6338 - DNA, 20 bp, Bacteroides stercoris
acccttatctatagttacca

SEQ ID NO: 6339 - DNA, 20 bp, Bacteroides vulgatus
tgcatgtactttatgaataa

SEQ ID NO: 6340 - DNA, 20 bp, Atopobium parvulum
gcccctttcattgggatagc

SEQ ID NO: 6341 - DNA, 20 bp, Corynebacterium group ANF
tccttttaaagctggtcgta

SEQ ID NO: 6342 - DNA, 20 bp, Prevotella loescheii
ccgattagccagacggcggg

SEQ ID NO: 6343 - DNA, 20 bp, Streptococcus mutans
aagtgggacgcaaggaaaca

SEQ ID NO: 6344 - DNA, 30 bp, Clostridium histolyticum
gagattaataccgcataatatctttttaat

SEQ ID NO: 6345 - DNA, 30 bp, Actinomyces radingae
gttgcgatgctgtgaggtggagcgaatcct

SEQ ID NO: 6346 - DNA, 20 bp, Arcanobacterium haemolyticum
ctttctcttgggataagcct

SEQ ID NO: 6347 - DNA, 20 bp, Prevotella oralis
gttgttttcaacttttgatg

SEQ ID NO: 6348 - DNA, 20 bp, Staphylococcus lutrae
ggaagaacacatgtgtaagt

SEQ ID NO: 6349 - DNA, 20 bp, Lactococcus raffinolactis
caatgttggatgcatattcg

SEQ ID NO: 6350 - DNA, 20 bp, Leuconostoc carnosum
tggctcaggagaacgctggt

SEQ ID NO: 6351 - DNA, 20 bp, Leuconostoc lactis
ctctcgtttagattgaagga

SEQ ID NO: 6352 - DNA, 20 bp, Actinomyces radingae
ttgggtagtggtgagtgtag

SEQ ID NO: 6353 - DNA, 20 bp, Bacteroides ureolyticus
acatctaagagattagaaag

SEQ ID NO: 6354 - DNA, 30 bp, Prevotella disiens
cacgtgttacaatggccggtacagaatgtt

SEQ ID NO: 6355 - DNA, 20 bp, Kocuria kristinae
tgtactggtcttagatgggc

SEQ ID NO: 6356 - DNA, 20 bp, Alloiococcus otitis
cctatcccttgacggtaccc

SEQ ID NO: 6357 - DNA, 20 bp, Bacteroides thetaiotaomicron
attaaagaaattcggtatga

SEQ ID NO: 6358 - DNA, 20 bp, Bacillus schlegellii
tgaaggcgaacctggcgact

SEQ ID NO: 6359 - DNA, 30 bp, Weissella paramesenteroides
acatgcaagtcgaacgctttgtctttaact

SEQ ID NO: 6360 - DNA, 20 bp, Bacillus schlegellii
aggcgggcggaagccttcgg

SEQ ID NO: 6361 - DNA, 20 bp, Streptococcus sobrinus
gtaacaccggacttgctcca

SEQ ID NO: 6362 - DNA, 20 bp, Dolosigranulum pigrum
ctaataccccataggtggat

SEQ ID NO: 6363 - DNA, 20 bp, Bacteroides distasonis
aataccgcatgaagcaggga

SEQ ID NO: 6364 - DNA, 20 bp, Streptococcus sobrinus
ataagaggagttaactcatg

SEQ ID NO: 6365 - DNA, 20 bp, Dolosigranulum pigrum
gaagtcggccggccaaccct

SEQ ID NO: 6366 - DNA, 20 bp, Bacillus schlegellii
ggaagaagggccgcggaggc

SEQ ID NO: 6367 - DNA, 20 bp, Prevotella bivia
tcgtgaccgtaaggatcgac

SEQ ID NO: 6368 - DNA, 20 bp, Leptotrichia buccalis
gaagctactggtccaaccgc

SEQ ID NO: 6369 - DNA, 20 bp, Prevotella bivia
gaagttcgtgaccgtacagg

SEQ ID NO: 6370 - DNA, 20 bp, Bacteroides caccae
cccatacgccgcaaggcatt

SEQ ID NO: 6371 - DNA, 20 bp, Peptoniphilus indolicus
aaggcgagggctcaaccctc

SEQ ID NO: 6372 - DNA, 30 bp, Sphingobacterium multivorum
taaaaccgataattggggctaagtcgtaac

SEQ ID NO: 6373 - DNA, 20 bp, Suttonella indologenes
gtataggaatctaccttggg

SEQ ID NO: 6374 - DNA, 20 bp, Sphingobacterium multivorum
tctaaaagccattcacaggt

SEQ ID NO: 6375 - DNA, 20 bp, Actinomyces radingae
gagcgcctagagataggtgt

SEQ ID NO: 6376 - DNA, 20 bp, Corynebacterium kutscheri
atagtttttcctttttaggt

SEQ ID NO: 6377 - DNA, 20 bp, Anaerobiospirillum succiniciproducens
ctaaactgcctttctagagt

SEQ ID NO: 6378 - DNA, 30 bp, Bacteroides capillosus
aggcaatcggaattccgtgtgtagcggtga

SEQ ID NO: 6379 - DNA, 20 bp, Staphylococcus simulans
caaggatgtaagtaactatg

SEQ ID NO: 6380 - DNA, 20 bp, Brevibacterium epidermidis
gacgcatgttgggtggtgga

SEQ ID NO: 6381 - DNA, 20 bp, Clostridium glycolicum
gattcacatgtatttcttat

SEQ ID NO: 6382 - DNA, 20 bp, Bacteroides distasonis
tgccactagttactaacagg

SEQ ID NO: 6383 - DNA, 20 bp, Myroides odoratus
atagtatggaagtaattaga

SEQ ID NO: 6384 - DNA, 20 bp, Dolosigranulum pigrum
gtggattggtcgcatgacga

SEQ ID NO: 6385 - DNA, 20 bp, Ignavigranum ruoffiae
ttttgctatcactaaaggat

SEQ ID NO: 6386 - DNA, 20 bp, Facklamia sourekii
cggtatctaatcagaaagtc

SEQ ID NO: 6387 - DNA, 30 bp, Cardiobacterium hominis
tcgggttgttaaagactcggtgccggagct

SEQ ID NO: 6388 - DNA, 20 bp, Corynebacterium group ANF
gagagatcgtctgtcccttt

SEQ ID NO: 6389 - DNA, 30 bp, Corynebacterium group ANF
ggactttccatggtttccgtgtcgtagcta

SEQ ID NO: 6390 - DNA, 20 bp, Paenibacillus peoriae
acatcctttttctgcatgga

SEQ ID NO: 6391 - DNA, 20 bp, Bacteroides caccae
agtggtccacgtgtggactt

SEQ ID NO: 6392 - DNA, 20 bp, Streptococcus ratti
cggtcaggaaagtctggagt

SEQ ID NO: 6393 - DNA, 20 bp, Helcococcus kunzii
ttatgatacattaatatcgc

SEQ ID NO: 6394 - DNA, 20 bp, Peptoniphilus indolicus
acggctcaccaagatagcga

SEQ ID NO: 6395 - DNA, 20 bp, Weeksella virosa
attgatactgttgatctaga

SEQ ID NO: 6396 - DNA, 20 bp, Prevotella bivia
ttcccttttgcaggtaccat

SEQ ID NO: 6397 - DNA, 20 bp, Peptoniphilus indolicus
gcgagggctcaaccctcgta

SEQ ID NO: 6398 - DNA, 20 bp, Myroides odoratus
ttgacttgaatagtatggaa

SEQ ID NO: 6399 - DNA, 20 bp, Peptoniphilus indolicus
caaggaagcagatgccgaag

SEQ ID NO: 6400 - DNA, 20 bp, Kytococcus sedentarius
ctgtgaaaattcagggctta

SEQ ID NO: 6401 - DNA, 20 bp, Cardiobacterium hominis
caagagatgagcccatgttg

SEQ ID NO: 6402 - DNA, 20 bp, Moraxella atlantae
gcagggaggaagagccagtg

SEQ ID NO: 6403 - DNA, 20 bp, Dermacoccus nishinomiyaensis
tggatacgaccgatctccgc

SEQ ID NO: 6404 - DNA, 20 bp, Bacteroides distasonis
gggtttgaacgcattcggac

SEQ ID NO: 6405 - DNA, 20 bp, Kingella kingae
gatgctaatatcattaactg

SEQ ID NO: 6406 - DNA, 20 bp, Kytococcus sedentarius
gaccaaccctcgcatggggt

SEQ ID NO: 6407 - DNA, 20 bp, Corynebacterium confusum
aatggtcaatacaatgcgtt

SEQ ID NO: 6408 - DNA, 20 bp, Anaerobiospirillum succiniciproducens
ggtaagtaggatgtgaaata

SEQ ID NO: 6409 - DNA, 20 bp, Alloiococcus otitis
gataggagtcactgcctatc

SEQ ID NO: 6410 - DNA, 20 bp, Leuconostoc fallax
tcggcctcacttagagatgg

SEQ ID NO: 6411 - DNA, 20 bp, Clostridium innocuum
tgtatattaaagcgcccttc

SEQ ID NO: 6412 - DNA, 20 bp, Weeksella virosa
cgctataagatagacatgcg

SEQ ID NO: 6413 - DNA, 20 bp, Bacillus marinus
gttagagaagcttgcttctc

SEQ ID NO: 6414 - DNA, 20 bp, Moraxella atlantae
ggggctcatgaagtcttagt

SEQ ID NO: 6415 - DNA, 20 bp, Corynebacterium group ANF
cgataggactgcagggtggt

SEQ ID NO: 6416 - DNA, 20 bp, Moraxella atlantae
aggggaaatagtggcgaacg

SEQ ID NO: 6417 - DNA, 20 bp, Leptotrichia buccalis
aatgaaaagtgatgctgcag

SEQ ID NO: 6418 - DNA, 20 bp, Streptococcus thoraltensis
ccggttctagagatagaact

SEQ ID NO: 6419 - DNA, 20 bp, Anaerococcus prevotii
aagcttgtaatacccgaagc

SEQ ID NO: 6420 - DNA, 20 bp, Sphingobacterium multivorum
cgggatccgtcggagagctt

SEQ ID NO: 6421 - DNA, 20 bp, Leptotrichia buccalis
gtgagagcgggcagtgcctt

SEQ ID NO: 6422 - DNA, 20 bp, Campylobacter lari
cgaacgatgaagcgactagc

SEQ ID NO: 6423 - DNA, 20 bp, Ignavigranum ruoffiae
caggtggtggcttaagtctg

SEQ ID NO: 6424 - DNA, 20 bp, Bacteroides eggerthii
atacccgatagtatagtttt

SEQ ID NO: 6425 - DNA, 20 bp, Budvicia aquatica
gtaacgtcgaaagaccaaag

SEQ ID NO: 6426 - DNA, 20 bp, Prevotella oralis
tttggtcggtggccaagcga

SEQ ID NO: 6427 - DNA, 20 bp, Abiotrophia defectiva
aggtgcttgcacttggtcaa

SEQ ID NO: 6428 - DNA, 20 bp, Leptotrichia buccalis
agagttgtctgcacctgaag

SEQ ID NO: 6429 - DNA, 20 bp, Bacteroides thetaiotaomicron
gatggcataattagaccgca

SEQ ID NO: 6430 - DNA, 20 bp, Bacteroides vulgatus
atcttgagtgcagttgaggc

SEQ ID NO: 6431 - DNA, 30 bp, Dolosigranulum pigrum
ccgtggaacggcattggaaactgacagact

SEQ ID NO: 6432 - DNA, 20 bp, Clostridium cadaveris
gctctttcgggagcaggaac

SEQ ID NO: 6433 - DNA, 30 bp, Myroides odoratus
aattatttgacggtaccgtaagaataagga

SEQ ID NO: 6434 - DNA, 20 bp, Kocuria kristinae
tctaatacccggatgcgact

SEQ ID NO: 6435 - DNA, 20 bp, Facklamia sourekii
gggaaacctaccctctagcg

SEQ ID NO: 6436 - DNA, 20 bp, Peptoniphilus indolicus
tcaccaagatagcgatcagt

SEQ ID NO: 6437 - DNA, 20 bp, Bacillus sp
acccccgaaggggttctact

SEQ ID NO: 6438 - DNA, 20 bp, Prevotella bivia
aatagatagcttgctattta

SEQ ID NO: 6439 - DNA, 20 bp, Prevotella oralis
ttttggtcggtggccaagcg

SEQ ID NO: 6440 - DNA, 20 bp, Peptoniphilus asaccharolyticus
atgaaatttcgacagattcc

SEQ ID NO: 6441 - DNA, 20 bp, Bacteroides ovatus
actagactgtcactgacact

SEQ ID NO: 6442 - DNA, 20 bp, Helcococcus kunzii
ctttagttactagcgagtaa

SEQ ID NO: 6443 - DNA, 20 bp, Kingella kingae
aaaggttgatgctaatatca

SEQ ID NO: 6444 - DNA, 20 bp, Prevotella bivia
ccatcaggttctgctgggca

SEQ ID NO: 6445 - DNA, 30 bp, Abiotrophia defectiva
gggcgtaaagggagtgtaggcggtctttta

SEQ ID NO: 6446 - DNA, 20 bp, Bacteroides distasonis
ccttgccactagttactaac

SEQ ID NO: 6447 - DNA, 20 bp, Prevotella oralis
tatgcagtccgaagcagtca

SEQ ID NO: 6448 - DNA, 20 bp, Clostridium cadaveris
ttctgcatgggaaagtcatg

SEQ ID NO: 6449 - DNA, 20 bp, Empedobacter brevis
ttatcgcagtaggataggca

SEQ ID NO: 6450 - DNA, 20 bp, Abiotrophia defectiva
accgcgactaggtgcttgca

SEQ ID NO: 6451 - DNA, 30 bp, Arcanobacterium haemolyticum
caagtcgaacgatgaaggctcctgcttgcg

SEQ ID NO: 6452 - DNA, 20 bp, Alloiococcus otitis
tgctaccttcagagatgaag

SEQ ID NO: 6453 - DNA, 20 bp, Bacteroides stercoris
tgtggttttttgcatgtacc

SEQ ID NO: 6454 - DNA, 20 bp, Stenotrophomonas maltophilia
tgagtaatgcatgcgggatc

SEQ ID NO: 6455 - DNA, 20 bp, Corynebacterium confusum
taggttcgcggcagagatgt

SEQ ID NO: 6456 - DNA, 20 bp, Dolosigranulum pigrum
atgacgaattcattaaaggt

SEQ ID NO: 6457 - DNA, 20 bp, Haemophilus segnis
cacgattgacgttaatcaca

SEQ ID NO: 6458 - DNA, 30 bp, Leptotrichia buccalis
gatgaaaggagacgctgcgggagagccttg

SEQ ID NO: 6459 - DNA, 20 bp, Peptoniphilus indolicus
gacataacagacaccttcgg

SEQ ID NO: 6460 - DNA, 20 bp, Prevotella bivia
ttcgtgaccgtacaggatcg

SEQ ID NO: 6461 - DNA, 20 bp, Granulicatella elegans
gcataggttctagagtcgca

SEQ ID NO: 6462 - DNA, 20 bp, Globicatella sanguinis
ctagaacttgttctggttaa

SEQ ID NO: 6463 - DNA, 20 bp, Streptococcus thoraltensis
tataaatgagtcgcgaacgg

SEQ ID NO: 6464 - DNA, 20 bp, Peptoniphilus indolicus
agcgaagaaggatttcgatt

SEQ ID NO: 6465 - DNA, 30 bp, Moraxella atlantae
gctcatgaagtcttagtggcgcagctaacg

SEQ ID NO: 6466 - DNA, 20 bp, Prevotella oralis
tggatgcccgctgtcggcct

SEQ ID NO: 6467 - DNA, 20 bp, Brevibacillus thermoruber
cgctaataccggatagggca

SEQ ID NO: 6468 - DNA, 20 bp, Facklamia sourekii
tgggaaacctaccctctagc

SEQ ID NO: 6469 - DNA, 20 bp, Sphingobacterium multivorum
gcttgctcgaagacggtgag

SEQ ID NO: 6470 - DNA, 20 bp, Clostridium tetani
ccgcataaagttaaggtttc

SEQ ID NO: 6471 - DNA, 20 bp, Myroides odoratus
gagcttgctttctagagacc

SEQ ID NO: 6472 - DNA, 20 bp, Anaerobiospirillum succiniciproducens
tgtggtctgtgactggggtg

SEQ ID NO: 6473 - DNA, 20 bp, Leptotrichia buccalis
gcgtaaggaacttgccccgc

SEQ ID NO: 6474 - DNA, 20 bp, Streptococcus acidominimus
ataccgcataagagttgaca

SEQ ID NO: 6475 - DNA, 20 bp, Helcococcus kunzii
gcggttaattaagtctgaat

SEQ ID NO: 6476 - DNA, 20 bp, Bacillus sp
gttttcttgcataaggagac

SEQ ID NO: 6477 - DNA, 20 bp, Bacteroides vulgatus
ctgctgaggactctgacaag

SEQ ID NO: 6478 - DNA, 20 bp, Streptococcus sobrinus
gggacttagtgccgacgcta

SEQ ID NO: 6479 - DNA, 20 bp, Staphylococcus lentus
gaaccgcatggttcaatgtt

SEQ ID NO: 6480 - DNA, 20 bp, Staphylococcus simulans
ccgcatggtttcatgatgaa

SEQ ID NO: 6481 - DNA, 20 bp, Dolosigranulum pigrum
tcccgcaagggctagctaat

SEQ ID NO: 6482 - DNA, 20 bp, Paenibacillus pabuli
agcggagttgagagaaagct

SEQ ID NO: 6483 - DNA, 20 bp, Corynebacterium confusum
ttcagcttgctggagtactc

SEQ ID NO: 6484 - DNA, 20 bp, Brevibacillus thermoruber
ggtacgcattggaaactgct

SEQ ID NO: 6485 - DNA, 20 bp, Bacillus marinus
aataccggataaccctgact

SEQ ID NO: 6486 - DNA, 20 bp, Ignavigranum ruoffiae
taccgcataggccagtgagt

SEQ ID NO: 6487 - DNA, 20 bp, Helcococcus kunzii
tgaacgagaatttttcagtc

SEQ ID NO: 6488 - DNA, 20 bp, Alloiococcus otitis
taggttttcccagtgcatgc

SEQ ID NO: 6489 - DNA, 20 bp, Bacteroides distasonis
cgtggacaaagggaagccac

SEQ ID NO: 6490 - DNA, 20 bp, Bacillus schlegellii
gtcggggaagaagggccgcg

SEQ ID NO: 6491 - DNA, 20 bp, Actinomyces meyeri
tgacatgcgccctgggcgtg

SEQ ID NO: 6492 - DNA, 20 bp, Moraxella atlantae
acgatggaacctagcttgct

SEQ ID NO: 6493 - DNA, 30 bp, Clostridium limosum
tgttgaaatgattaaaggagtaatccgctt

SEQ ID NO: 6494 - DNA, 20 bp, Bacillus schlegellii
tcccgctgccgggtccagag

SEQ ID NO: 6495 - DNA, 30 bp, Aerococcus christensenii
aggaagtttgttcgcatgaacaaacttaga

SEQ ID NO: 6496 - DNA, 20 bp, Anaerobiospirillum succiniciproducens
ccatgggagcggattgcacc

SEQ ID NO: 6497 - DNA, 20 bp, Prevotella disiens
aaatgtaatctaatctttaa

SEQ ID NO: 6498 - DNA, 20 bp, Prevotella bivia
tttatatggggataaagtgg

SEQ ID NO: 6499 - DNA, 20 bp, Peptoniphilus indolicus
gacaccttcgggaagaagtt

SEQ ID NO: 6500 - DNA, 20 bp, Bacteroides distasonis
cgcatggggatatttgctaa

SEQ ID NO: 6501 - DNA, 20 bp, Bacteroides ureolyticus
cctaaaaacatctaagagat

SEQ ID NO: 6502 - DNA, 20 bp, Dolosigranulum pigrum
cgaacgatgatatcactgct

SEQ ID NO: 6503 - DNA, 20 bp, Peptoniphilus indolicus
gtgaaaggcgagggctcaac

SEQ ID NO: 6504 - DNA, 20 bp, Myroides odoratus
aaagcagctaccaggcaact

SEQ ID NO: 6505 - DNA, 20 bp, Bacteroides vulgatus
aagccgcaaggcatctgtga

SEQ ID NO: 6506 - DNA, 20 bp, Myroides odoratus
aattatttgacggtaccgta

SEQ ID NO: 6507 - DNA, 20 bp, Moraxella atlantae
gcttgctaggggaaatagtg

SEQ ID NO: 6508 - DNA, 20 bp, Kocuria kristinae
gttatgtactggtcttagat

SEQ ID NO: 6509 - DNA, 30 bp, Prevotella disiens
tgctgggcactctgaggatactgccaccgt

SEQ ID NO: 6510 - DNA, 20 bp, Bacillus schlegellii
catcccgctgccgggtccag

SEQ ID NO: 6511 - DNA, 30 bp, Myroides odoratus
gctaccaggcaactggatgcgaatctcaaa

SEQ ID NO: 6512 - DNA, 30 bp, Alloiococcus otitis
agccagccgtcgaaggtgggttggatgatt

SEQ ID NO: 6513 - DNA, 20 bp, Streptococcus acidominimus
agcgaactggtgacagtaag

SEQ ID NO: 6514 - DNA, 20 bp, Pasteurella multocida
gactggacagctagagtact

SEQ ID NO: 6515 - DNA, 20 bp, Paenibacillus apiarius
atccaaaactgcatgacttg

SEQ ID NO: 6516 - DNA, 20 bp, Brevibacillus thermoruber
tcgcatgagagggtgcggaa

SEQ ID NO: 6517 - DNA, 20 bp, Atopobium parvulum
ttaggccgggcacccatacg

SEQ ID NO: 6518 - DNA, 20 bp, Pasteurella multocida
agactggacagctagagtac

SEQ ID NO: 6519 - DNA, 20 bp, Atopobium parvulum
gcatggaagactcgagaaag

SEQ ID NO: 6520 - DNA, 30 bp, Dolosigranulum pigrum
ggaacggcattggaaactgacagacttgaa

SEQ ID NO: 6521 - DNA, 20 bp, Streptococcus ratti
aacacactgtgcttgcacac

SEQ ID NO: 6522 - DNA, 20 bp, Bacillus mycoides
tgaagtcgtacaaggatagc

SEQ ID NO: 6523 - DNA, 20 bp, Moraxella atlantae
aggaggcgagagcttttgct

SEQ ID NO: 6524 - DNA, 20 bp, Pasteurella multocida
agaatacttgattgacgtta

SEQ ID NO: 6525 - DNA, 20 bp, Bacteroides distasonis
ggacaaagggaggccacctg

SEQ ID NO: 6526 - DNA, 20 bp, Eubacterium moniliforme
aatattgtactttcgcatga

SEQ ID NO: 6527 - DNA, 20 bp, Suttonella indologenes
tagagtatgtcagaggaagg

SEQ ID NO: 6528 - DNA, 20 bp, Clostridium glycolicum
gattcacttcggtgaagagc

SEQ ID NO: 6529 - DNA, 20 bp, Anaerobiospirillum succiniciproducens
acctgggttggtcattctaa

SEQ ID NO: 6530 - DNA, 20 bp, Bacteroides stercoris
gagtgcagcagaggtgggcg

SEQ ID NO: 6531 - DNA, 20 bp, Prevotella oralis
acttgaatagagatattcat

SEQ ID NO: 6532 - DNA, 20 bp, Corynebacterium group ANF
tgcctgtggtggaaaacgtt

SEQ ID NO: 6533 - DNA, 20 bp, Streptococcus ratti
gggaacacactgtgcttgca

SEQ ID NO: 6534 - DNA, 20 bp, Bacteroides ureolyticus
ccctacacagaggaacaaca

SEQ ID NO: 6535 - DNA, 20 bp, Leuconostoc fallax
gttaatgtgacggtaccata

SEQ ID NO: 6536 - DNA, 20 bp, Comamonas terrigena
atcgcaagaccttgtgctac

SEQ ID NO: 6537 - DNA, 20 bp, Actinomyces radingae
ggtgtgggaaaggggccttt

SEQ ID NO: 6538 - DNA, 20 bp, Paenibacillus apiarius
caggcggtgatgtaagttgg

SEQ ID NO: 6539 - DNA, 20 bp, Bacteroides vulgatus
ggtattccggtagacgatgg

SEQ ID NO: 6540 - DNA, 20 bp, Suttonella indologenes
tataggaatctaccttgggg

SEQ ID NO: 6541 - DNA, 20 bp, Myroides odoratus
gcttgacttgaatagtatgg

SEQ ID NO: 6542 - DNA, 20 bp, Streptococcus mutans
caagtgggacgcaaggaaac

SEQ ID NO: 6543 - DNA, 20 bp, Atopobium parvulum
agaaagctccggcggagagg

SEQ ID NO: 6544 - DNA, 20 bp, Streptococcus thoraltensis
tgcaagtggaacgcatttat

SEQ ID NO: 6545 - DNA, 20 bp, Streptococcus ratti
ggagtaaaaggctatggctc

SEQ ID NO: 6546 - DNA, 20 bp, Corynebacterium confusum
gtttccctttgtggccttta

SEQ ID NO: 6547 - DNA, 20 bp, Ignavigranum ruoffiae
gcttcttccgcgtgagtggc

SEQ ID NO: 6548 - DNA, 20 bp, Bacteroides capilosus
acagaggattcgtccaatgg

SEQ ID NO: 6549 - DNA, 20 bp, Ignavigranum ruoffiae
cgaacgcacaacgaaggagc

SEQ ID NO: 6550 - DNA, 20 bp, Weeksella virosa
tgggggtacctgaagttggc

SEQ ID NO: 6551 - DNA, 20 bp, Pseudoramibacter alactolyticus
aaaccgcataacacagcaga

SEQ ID NO: 6552 - DNA, 20 bp, Suttonella indologenes
gaagaaaggtttatggttaa

SEQ ID NO: 6553 - DNA, 20 bp, Streptococcus acidominimus
catttgaattgattgagtcg

SEQ ID NO: 6554 - DNA, 20 bp, Bordetella avium
aggaaagaaaaggcgcaggc

SEQ ID NO: 6555 - DNA, 20 bp, Streptococcus thoraltensis
taaatgagtcgcgaacgggt

SEQ ID NO: 6556 - DNA, 30 bp, Bacteroides distasonis
agtatgtttgaggcaggcggaatgcgtggt

SEQ ID NO: 6557 - DNA, 20 bp, Prevotella bivia
atgagattacgaataaagat

SEQ ID NO: 6558 - DNA, 20 bp, Streptococcus thoraltensis
tgttagctttttaaaaggtg

SEQ ID NO: 6559 - DNA, 20 bp, Suttonella indologenes
atacctgtgaatttgacatt

SEQ ID NO: 6560 - DNA, 20 bp, Pseudoramibacter alactolyticus
attgctttcccttcggagac

SEQ ID NO: 6561 - DNA, 20 bp, Helcococcus kunzii
gaacgagaatttttcagtcg

SEQ ID NO: 6562 - DNA, 20 bp, Bacteroides distasonis
caaagggaggccacctggcg

SEQ ID NO: 6563 - DNA, 20 bp, Gemella morbillorum
tatttctcgcatgagagata

SEQ ID NO: 6564 - DNA, 20 bp, Streptococcus mutans
acgcaaggaaacacactgtg

SEQ ID NO: 6565 - DNA, 30 bp, Arcanobacterium haemolyticum
ccgcatggtgggggttggaaaggttttttc

SEQ ID NO: 6566 - DNA, 20 bp, Prevotella disiens
gaggggaaacggcaaagagt

SEQ ID NO: 6567 - DNA, 20 bp, Moraxella atlantae
acctaggaacagcatatgat

SEQ ID NO: 6568 - DNA, 20 bp, Bacillus schlegellii
tcctggcgcatgctggggca

SEQ ID NO: 6569 - DNA, 20 bp, Moraxella atlantae
gccgttggggctcatgaagc

SEQ ID NO: 6570 - DNA, 20 bp, Prevotella oralis
cataccccgttgaaaggcgg

SEQ ID NO: 6571 - DNA, 20 bp, Empedobacter brevis
atctcgaaaacttatctcag

SEQ ID NO: 6572 - DNA, 20 bp, Leuconostoc lactis
tttagattgaaggagcttgc

SEQ ID NO: 6573 - DNA, 20 bp, Kocuria kristinae
atggttcttcccttttgggc

SEQ ID NO: 6574 - DNA, 20 bp, Paenibacillus pabuli
cggagttgagagaaagcttg

SEQ ID NO: 6575 - DNA, 30 bp, Alloiococcus otitis
taacacgtgaggaacttgcccataagaggg

SEQ ID NO: 6576 - DNA, 20 bp, Bacteroides distasonis
gtatgtttgaggcaggcgga

SEQ ID NO: 6577 - DNA, 20 bp, Actinomyces radingae
gtcgaacgggatctgcgtgg

SEQ ID NO: 6578 - DNA, 20 bp, Weeksella virosa
atatgtgaataaacctattc

SEQ ID NO: 6579 - DNA, 20 bp, Actinomyces meyeri
gacatgcgccctgggcgtgc

SEQ ID NO: 6580 - DNA, 20 bp, Neisseria weaveri
tggctaatatccatgactga

SEQ ID NO: 6581 - DNA, 20 bp, Kocuria kristinae
gactactgcccgcatgggct

SEQ ID NO: 6582 - DNA, 20 bp, Moraxella atlantae
taaagctgagaactgtaagg

SEQ ID NO: 6583 - DNA, 20 bp, Actinomyces odontolyticus
atattcactgatcttcgcat

SEQ ID NO: 6584 - DNA, 20 bp, Bacteroides ureolyticus
ctaagagattagaaagtgct

SEQ ID NO: 6585 - DNA, 20 bp, Bacillus sp
aatacgttttcttgcataag

SEQ ID NO: 6586 - DNA, 20 bp, Streptococcus thoraltensis
tagagatagaacttttctta

SEQ ID NO: 6587 - DNA, 20 bp, Bacillus schlegellii
ggcgcatgctggggcaagga

SEQ ID NO: 6588 - DNA, 20 bp, Lactococcus raffinolactis
agtggaaaattatgcaagtg

SEQ ID NO: 6589 - DNA, 20 bp, Alloiococcus otitis
taggagtcactgcctatccc

SEQ ID NO: 6590 - DNA, 20 bp, Campylobacter concisus
tactggatacgacatgtcac

SEQ ID NO: 6591 - DNA, 20 bp, Anaerococcus prevotii
ctcaaaaagtctttcccagt

SEQ ID NO: 6592 - DNA, 20 bp, Staphylococcus simulans
ttcatgatgaaagacggttt

SEQ ID NO: 6593 - DNA, 20 bp, Prevotella oris
agcttgcttccccgggcgtc

SEQ ID NO: 6594 - DNA, 20 bp, Corynebacterium confusum
gtcaatacaatgcgttgcga

SEQ ID NO: 6595 - DNA, 20 bp, Alloiococcus otitis
tatcccttgacggtacccaa

SEQ ID NO: 6596 - DNA, 20 bp, Bacteroides distasonis
tccccaaaccacgtctcagt

SEQ ID NO: 6597 - DNA, 20 bp, Bacteroides ureolyticus
gacttgacatcctaaaaaca

SEQ ID NO: 6598 - DNA, 20 bp, Helcococcus kunzii
acagtagctaagaagcaagc

SEQ ID NO: 6599 - DNA, 20 bp, Vagococcus fluvialis
acgcttcggtgtcactgttg

SEQ ID NO: 6600 - DNA, 20 bp, Myroides odoratimimus
tgaatagtatggaagtaact

SEQ ID NO: 6601 - DNA, 20 bp, Veillonella atypica
gcaggcggattggtcagtct

SEQ ID NO: 6602 - DNA, 20 bp, Microbacterium hominis
ccagaacaccgtagaaatac

SEQ ID NO: 6603 - DNA, 20 bp, Clostridium glycolicum
ttgggaagcgagtgtcgaag

SEQ ID NO: 6604 - DNA, 20 bp, Anaerobiospirillum succiniciproducens
cgggggaaagacttcggttg

SEQ ID NO: 6605 - DNA, 20 bp, Bacteroides eggerthii
cttaaattgcagcggaatgt

SEQ ID NO: 6606 - DNA, 20 bp, Alloiococcus otitis
tgaagaaggacttcggttcg

SEQ ID NO: 6607 - DNA, 20 bp, Bacteroides eggerthii
tatagtttttccgcatggtt

SEQ ID NO: 6608 - DNA, 20 bp, Bacteroides ureolyticus
gattagaaagtgctagttta

SEQ ID NO: 6609 - DNA, 20 bp, Facklamia sourekii
tagagtaactgttactgatt

SEQ ID NO: 6610 - DNA, 20 bp, Bacteroides capilosus
gtgaaaaccacgggctcaac

SEQ ID NO: 6611 - DNA, 20 bp, Moraxella atlantae
cagtggagaaacacactggt

SEQ ID NO: 6612 - DNA, 20 bp, Bacillus sp
ataatacgttttcttgcata

SEQ ID NO: 6613 - DNA, 20 bp, Kocuria kristinae
gggttatgtactggtcttag

SEQ ID NO: 6614 - DNA, 20 bp, Bacillus sp
cgccttttaacgtctcctta

SEQ ID NO: 6615 - DNA, 20 bp, Atopobium parvulum
tcgctctcgataccggcaga

SEQ ID NO: 6616 - DNA, 20 bp, Prevotella disiens
tggccggtacagaatgttgg

SEQ ID NO: 6617 - DNA, 20 bp, Streptococcus thoraltensis
cggttctagagatagaactt

SEQ ID NO: 6618 - DNA, 20 bp, Bacteroides distasonis
cgacagggagcgaatcccca

SEQ ID NO: 6619 - DNA, 20 bp, Leuconostoc fallax
cgcggacctgatcacttcgg

SEQ ID NO: 6620 - DNA, 20 bp, Leuconostoc lactis
tgctcctgattgataaacat

SEQ ID NO: 6621 - DNA, 20 bp, Moraxella atlantae
taagcagggaggaagagcca

SEQ ID NO: 6622 - DNA, 30 bp, Alloiococcus otitis
caggaagaggcggagtggcgaacgggtgag

SEQ ID NO: 6623 - DNA, 20 bp, Anaerococcus tetradius
gattccttcgggatgaaaaa

SEQ ID NO: 6624 - DNA, 20 bp, Dolosigranulum pigrum
aacacccgaagtcggccggc

SEQ ID NO: 6625 - DNA, 20 bp, Pasteurella multocida
tggggattgagcaataagct

SEQ ID NO: 6626 - DNA, 20 bp, Bacillus schlegellii
gcgcactggcctgtaactga

SEQ ID NO: 6627 - DNA, 20 bp, Bacteroides capilosus
gaggcaatcggaattccgtg

SEQ ID NO: 6628 - DNA, 20 bp, Bacteroides ureolyticus
ctacaatgacatatacagta

SEQ ID NO: 6629 - DNA, 20 bp, Streptococcus ratti
tgcaagtgggacgcaaggga

SEQ ID NO: 6630 - DNA, 20 bp, Prevotella bivia
cttttgcaggtaccatatga

SEQ ID NO: 6631 - DNA, 20 bp, Anaerococcus prevotii
atggaagcttgtaatacccg

SEQ ID NO: 6632 - DNA, 20 bp, Myroides odoratimimus
gaaagcagctacctggcaac

SEQ ID NO: 6633 - DNA, 20 bp, Prevotella oralis
cagttgccatcggttaaagc

SEQ ID NO: 6634 - DNA, 20 bp, Weeksella virosa
gctcagtggttaagcgaaag

SEQ ID NO: 6635 - DNA, 20 bp, Streptococcus thermophilus
tcaagaacgggtgtgagagt

SEQ ID NO: 6636 - DNA, 20 bp, Corynebacterium kutscheri
tttcctttttaggtctgtat

SEQ ID NO: 6637 - DNA, 20 bp, Streptococcus ratti
cgcaagggaacacactgtgc

SEQ ID NO: 6638 - DNA, 20 bp, Bacteroides vulgatus
ttgttgtcagttactaacag

SEQ ID NO: 6639 - DNA, 20 bp, Achromobacter piechaudii
tggaattctgaagagattcg

SEQ ID NO: 6640 - DNA, 20 bp, Achromobacter piechaudii
ttctgaagagattcggaagt

SEQ ID NO: 6641 - DNA, 20 bp, Prevotella bivia
tatggggataaagtggggaa

SEQ ID NO: 6642 - DNA, 30 bp, Moraxella atlantae
gccgcgtgtgtgaagaaggtcataagattg

SEQ ID NO: 6643 - DNA, 20 bp, Streptococcus mutans
agtgggacgcaaggaaacac

SEQ ID NO: 6644 - DNA, 20 bp, Leptotrichia buccalis
cgtgagagcgggcagtgcct

SEQ ID NO: 6645 - DNA, 20 bp, Helcococcus kunzii
tttagttactagcgagtaaa

SEQ ID NO: 6646 - DNA, 20 bp, Dolosigranulum pigrum
tgctaggtaactactagcgc

SEQ ID NO: 6647 - DNA, 20 bp, Prevotella loescheii
cgatttggacgaaaggtttg

SEQ ID NO: 6648 - DNA, 20 bp, Vagococcus fluvialis
cgcttcggtgtcactgttgg

SEQ ID NO: 6649 - DNA, 30 bp, Helcococcus kunzii
gctaaccgtcaaggaggcagacgccgaagg

SEQ ID NO: 6650 - DNA, 20 bp, Veillonella dispar
gcatacgatccaacctcggc

SEQ ID NO: 6651 - DNA, 20 bp, Clostridium innocuum
tctgtatattaaagcgccct

SEQ ID NO: 6652 - DNA, 20 bp, Bacillus schlegellii
tcggggaagaagggccgcgg

SEQ ID NO: 6653 - DNA, 30 bp, Moraxella atlantae
cctagcttgctaggggaaatagtggcgaac

SEQ ID NO: 6654 - DNA, 20 bp, Ochrobactrum intermedium
tacgaccgagaggtgaaaga

SEQ ID NO: 6655 - DNA, 20 bp, Streptococcus sobrinus
gcaagtggaacgcattggta

SEQ ID NO: 6656 - DNA, 20 bp, Helcococcus kunzii
ggttaacttgagtagatgag

SEQ ID NO: 6657 - DNA, 20 bp, Bacteroides capillosus
cccgggcttgaactgtaggc

SEQ ID NO: 6658 - DNA, 20 bp, Dolosigranulum pigrum
cagacttgaatgtagaagag

SEQ ID NO: 6659 - DNA, 20 bp, Peptoniphilus indolicus
aggcgagggctcaaccctcg

SEQ ID NO: 6660 - DNA, 20 bp, Dolosigranulum pigrum
cggccggccaaccctatggg

SEQ ID NO: 6661 - DNA, 20 bp, Globicatella sanguinis
agtcgaacgaaccacaacga

SEQ ID NO: 6662 - DNA, 20 bp, Bacteroides ureolyticus
ctagtttactagaatttagt

SEQ ID NO: 6663 - DNA, 20 bp, Bordetella avium
gctaataccttgcgcaaatg

SEQ ID NO: 6664 - DNA, 20 bp, Anaerobiospirillum succiniciproducens
tgtcgattaggagcttgaac

SEQ ID NO: 6665 - DNA, 20 bp, Weeksella virosa
ggtacctgaagttggcgacc

SEQ ID NO: 6666 - DNA, 30 bp, Moraxella atlantae
agcactttaagcagggaggaagagccagtg

SEQ ID NO: 6667 - DNA, 20 bp, Sphingobacterium multivorum
ccgtcggagagcttgctcga

SEQ ID NO: 6668 - DNA, 20 bp, Streptococcus mutans
gaaacacactgtgcttgcac

SEQ ID NO: 6669 - DNA, 20 bp, Dolosigranulum pigrum
tcggccggccaaccctatgg

SEQ ID NO: 6670 - DNA, 20 bp, Dolosigranulum pigrum
actagcgccttgacggtatc

SEQ ID NO: 6671 - DNA, 20 bp, Corynebacterium kutscheri
tcttgcttgcaagagagtac

SEQ ID NO: 6672 - DNA, 20 bp, Actinomyces radingae
aaaggggcctttgtggtttc

SEQ ID NO: 6673 - DNA, 20 bp, Clostridium cadaveris
aagggaagctctttcgggag

SEQ ID NO: 6674 - DNA, 20 bp, Bacillus schlegellii
agggacggcggagacaggtg

SEQ ID NO: 6675 - DNA, 20 bp, Myroides odoratus
tatggaagtaattagaatat

SEQ ID NO: 6676 - DNA, 20 bp, Abiotrophia defectiva
catgattccgtgaggaaagg

SEQ ID NO: 6677 - DNA, 20 bp, Streptococcus infantarius
caactcttcaaactttagca

SEQ ID NO: 6678 - DNA, 20 bp, Clostridium histolyticum
catgttagaaagattaaagg

SEQ ID NO: 6679 - DNA, 20 bp, Corynebacterium confusum
tttgtggcctttatacaggt

SEQ ID NO: 6680 - DNA, 20 bp, Bacteroides distasonis
gaataaagtgcgggacgtgt

SEQ ID NO: 6681 - DNA, 30 bp, Actinomyces radingae
gggataacgctcagaaatgggtgctaatac

SEQ ID NO: 6682 - DNA, 20 bp, Clostridium cadaveris
ggaaagtcatgaaaggagca

SEQ ID NO: 6683 - DNA, 20 bp, Atopobium parvulum
ccgtggataataccgaatac

SEQ ID NO: 6684 - DNA, 20 bp, Corynebacterium kutscheri
agatagtttttcctttttag

SEQ ID NO: 6685 - DNA, 20 bp, Streptococcus mutans
tgcaagtgggacgcaaggaa

SEQ ID NO: 6686 - DNA, 30 bp, Budvicia aquatica
taccgcgtaacgtcgaaagaccaaagcggg

SEQ ID NO: 6687 - DNA, 20 bp, Empedobacter brevis
tcgggaatctgagaccggcg

SEQ ID NO: 6688 - DNA, 20 bp, Sphingobacterium multivorum
ttgctcgaagatggtgagag

SEQ ID NO: 6689 - DNA, 20 bp, Staphylococcus simulans
gtgcatcccttgacggtacc

SEQ ID NO: 6690 - DNA, 20 bp, Globicatella sanguinis
tagaacttgttctggttaag

SEQ ID NO: 6691 - DNA, 20 bp, Paenibacillus apiarius
tgatgtaagttgggtgttta

SEQ ID NO: 6692 - DNA, 20 bp, Leuconostoc fallax
cgaacgctagtcgcggacct

SEQ ID NO: 6693 - DNA, 20 bp, Bacteroides capillosus
gattaaaggtttagcggtaa

SEQ ID NO: 6694 - DNA, 20 bp, Clostridium innocuum
ggagcgcatgctctgtatat

SEQ ID NO: 6695 - DNA, 20 bp, Actinomyces radingae
ttctggagggagatgggctc

SEQ ID NO: 6696 - DNA, 20 bp, Sphingomonas paucimobilis
ggagccgaggggaacctgcg

SEQ ID NO: 6697 - DNA, 20 bp, Streptococcus gallolyticus
tagagacttgaaagatgcaa

SEQ ID NO: 6698 - DNA, 20 bp, Moraxella atlantae
atgatactggtgaactagag

SEQ ID NO: 6699 - DNA, 20 bp, Peptoniphilus indolicus
tgaagacataacagacacct

SEQ ID NO: 6700 - DNA, 20 bp, Facklamia sourekii
agtcagtagagtaactgtta

SEQ ID NO: 6701 - DNA, 20 bp, Prevotella bivia
aagttcgtgaccgtacagga

SEQ ID NO: 6702 - DNA, 20 bp, Bacillus sp
tgcgtcacccccgaaggggt

SEQ ID NO: 6703 - DNA, 20 bp, Bacteroides distasonis
agtatgtttgaggcaggcgg

SEQ ID NO: 6704 - DNA, 20 bp, Moraxella atlantae
aaaggaggcgagagcttttg

SEQ ID NO: 6705 - DNA, 20 bp, Helcococcus ovis
gcagacgtcgaaggtagggt

SEQ ID NO: 6706 - DNA, 20 bp, Clostridium cadaveris
taagatgagcactctagcta

SEQ ID NO: 6707 - DNA, 20 bp, Clostridium glycolicum
ttagctaacccttttgggaa

SEQ ID NO: 6708 - DNA, 20 bp, Helcococcus kunzii
agatacgaaggcgtgggtag

SEQ ID NO: 6709 - DNA, 20 bp, Suttonella indologenes
gcccttagatgagcctatat

SEQ ID NO: 6710 - DNA, 20 bp, Anaerobiospirillum succiniciproducens
taggagcttgaacttcggtt

SEQ ID NO: 6711 - DNA, 20 bp, Clostridium innocuum
ttcaaggaagcttgcttcca

SEQ ID NO: 6712 - DNA, 20 bp, Kocuria kristinae
gaaagggttatgtactggtc

SEQ ID NO: 6713 - DNA, 20 bp, Sporosarcina pasteurii
gcagtgacagcatagccgtc

SEQ ID NO: 6714 - DNA, 20 bp, Leuconostoc fallax
ggaagaatagttaatgtagg

SEQ ID NO: 6715 - DNA, 20 bp, Dolosigranulum pigrum
ggtaactactagcgccttga

SEQ ID NO: 6716 - DNA, 20 bp, Bacteroides caccae
ggaaacccatacgccgcaag

SEQ ID NO: 6717 - DNA, 20 bp, Helcococcus kunzii
gatacattaatatcgcatga

SEQ ID NO: 6718 - DNA, 20 bp, Staphylococcus simulans
agggaagaacaaggatgtaa

SEQ ID NO: 6719 - DNA, 30 bp, Bacillus marinus
ttgacatcccattgcccggtctagagatag

SEQ ID NO: 6720 - DNA, 30 bp, Dolosigranulum pigrum
cccatgagcgggggacaacattcggaaacg

SEQ ID NO: 6721 - DNA, 20 bp, Eubacterium moniliforme
gtactttcgcatgaaagaac

SEQ ID NO: 6722 - DNA, 20 bp, Streptococcus thoraltensis
gcatcacttaaagatggacc

SEQ ID NO: 6723 - DNA, 20 bp, Bacillus sp
cgaaggggttctacttgctt

SEQ ID NO: 6724 - DNA, 20 bp, Corynebacterium group ANF
gatgaggcgagagatcgtct

SEQ ID NO: 6725 - DNA, 20 bp, Myroides odoratus
gctttctagagaccggcgga

SEQ ID NO: 6726 - DNA, 20 bp, Actinomyces radingae
ctaatactggatgttctgcg

SEQ ID NO: 6727 - DNA, 20 bp, Helcococcus kunzii
gtaaatgttaaagaatttcg

SEQ ID NO: 6728 - DNA, 20 bp, Anaerobiospirillum succiniciproducens
gcctttctagagtattgcag

SEQ ID NO: 6729 - DNA, 20 bp, Bacteroides vulgatus
gaaagccgtaagccgcaagg

SEQ ID NO: 6730 - DNA, 20 bp, Dolosigranulum pigrum
gccctcggtgctggagctaa

SEQ ID NO: 6731 - DNA, 20 bp, Actinomyces radingae
ggataacgctcagaaatggg

SEQ ID NO: 6732 - DNA, 20 bp, Helcococcus kunzii
tactagcgagtaaagtcgag

SEQ ID NO: 6733 - DNA, 20 bp, Bacteroides vulgatus
taagctgcaactgacattga

SEQ ID NO: 6734 - DNA, 20 bp, Corynebacterium kutscheri
aagagagtactcgagtggcg

SEQ ID NO: 6735 - DNA, 20 bp, Dolosigranulum pigrum
cgattttctggtctaacatt

SEQ ID NO: 6736 - DNA, 20 bp, Atopobium parvulum
cgaatacttcgagacttccg

SEQ ID NO: 6737 - DNA, 20 bp, Bacteroides eggerthii
gattgaagcttgcttcaatc

SEQ ID NO: 6738 - DNA, 20 bp, Prevotella oralis
ttttcagttgccatcggtta

SEQ ID NO: 6739 - DNA, 20 bp, Bacteroides stercoris
tacgggaataaagttagcca

SEQ ID NO: 6740 - DNA, 20 bp, Actinomyces radingae
gtagtggtgagtgtagcggg

SEQ ID NO: 6741 - DNA, 20 bp, Kocuria kristinae
atgtactggtcttagatggg

SEQ ID NO: 6742 - DNA, 30 bp, Staphylococcus chromogenes
acatatcgaaccgcatggttcgatagtgaa

SEQ ID NO: 6743 - DNA, 20 bp, Bacillus schlegellii
gaacctggcgactggggtga

SEQ ID NO: 6744 - DNA, 20 bp, Bacillus schlegellii
ggggaggcgggcggaagcct

SEQ ID NO: 6745 - DNA, 20 bp, Leuconostoc fallax
gatgttaatgtgacggtacc

SEQ ID NO: 6746 - DNA, 30 bp, Virgibacillus proomii
gtgaggccaagcaaatcccacaaaaccatt

SEQ ID NO: 6747 - DNA, 20 bp, Bacillus sp
ttttcttgcataaggagacg

SEQ ID NO: 6748 - DNA, 20 bp, Weeksella virosa
gggttttcgggctcagtggt

SEQ ID NO: 6749 - DNA, 20 bp, Bacteroides thetaiotaomicron
aattagaccgcatggtctta

SEQ ID NO: 6750 - DNA, 20 bp, Bacillus sp
gcgcgggaagcaagtagaac

SEQ ID NO: 6751 - DNA, 20 bp, Bacteroides capilosus
attgctggacagtaactgac

SEQ ID NO: 6752 - DNA, 20 bp, Achromobacter xylosoxidans
gcctcatgcacgaaagcgtg

SEQ ID NO: 6753 - DNA, 20 bp, Prevotella bivia
agctcaacttctagattgca

SEQ ID NO: 6754 - DNA, 20 bp, Corynebacterium coyleae
gataggaccacttcttggag

SEQ ID NO: 6755 - DNA, 20 bp, Prevotella oralis
taaagccgggcactctgtga

SEQ ID NO: 6756 - DNA, 20 bp, Actinomyces radingae
ataggtgtgcatttggttgg

SEQ ID NO: 6757 - DNA, 20 bp, Paenibacillus macerans
tttattttgcagcattgtgg

SEQ ID NO: 6758 - DNA, 20 bp, Clostridium cadaveris
ggtgtgaactagcggcggac

SEQ ID NO: 6759 - DNA, 20 bp, Bacteroides thetaiotaomicron
ttaatatccgatagcatata

SEQ ID NO: 6760 - DNA, 20 bp, Helcococcus kunzii
aatatcgcatgatgtaaatg

SEQ ID NO: 6761 - DNA, 20 bp, Clostridium cadaveris
aataagggaagctctttcgg

SEQ ID NO: 6762 - DNA, 20 bp, Leuconostoc fallax
ggcttcggcctcacttagag

SEQ ID NO: 6763 - DNA, 20 bp, Alloiococcus otitis
ggggaagaacacggatagga

SEQ ID NO: 6764 - DNA, 20 bp, Facklamia languida
cgtggagaacctacccttaa

SEQ ID NO: 6765 - DNA, 20 bp, Lactococcus raffinolactis
catattcgacatttgaaagt

SEQ ID NO: 6766 - DNA, 20 bp, Clostridium cadaveris
agttgctaacagtaagatga

SEQ ID NO: 6767 - DNA, 20 bp, Alloiococcus otitis
catgatgcgtagccgacttg

SEQ ID NO: 6768 - DNA, 20 bp, Clostridium cadaveris
cgcatattatgatttttctg

SEQ ID NO: 6769 - DNA, 20 bp, Prevotella loescheii
cctactgtagcgctactgac

SEQ ID NO: 6770 - DNA, 20 bp, Suttonella indologenes
aagtgctcggtaccgcagct

SEQ ID NO: 6771 - DNA, 20 bp, Lactococcus raffinolactis
tgttggatgcatattcgaca

SEQ ID NO: 6772 - DNA, 20 bp, Helcococcus kunzii
atttcttcggaatgaaacgg

SEQ ID NO: 6773 - DNA, 20 bp, Clostridium tetani
aataccgcataaagttaagg

SEQ ID NO: 6774 - DNA, 20 bp, Alloiococcus otitis
ataggagtcactgcctatcc

SEQ ID NO: 6775 - DNA, 20 bp, Prevotella disiens
gggcttgaattgtaggagca

SEQ ID NO: 6776 - DNA, 20 bp, Pseudoramibacter alactolyticus
ataacacagcagaatcgcat

SEQ ID NO: 6777 - DNA, 20 bp, Bacillus schlegellii
ggcggaagccttcgggcgga

SEQ ID NO: 6778 - DNA, 20 bp, Suttonella indologenes
ggaatctaccttggggtggg

SEQ ID NO: 6779 - DNA, 20 bp, Brevibacillus brevis
gaacgccctagaaataggga

SEQ ID NO: 6780 - DNA, 20 bp, Brevibacillus thermoruber
gctcgacttgagtgcagaag

SEQ ID NO: 6781 - DNA, 20 bp, Moraxella atlantae
gcacaatactgacactcaga

SEQ ID NO: 6782 - DNA, 20 bp, Alloiococcus otitis
atcccttgacggtacccaac

SEQ ID NO: 6783 - DNA, 20 bp, Actinomyces radingae
tctttgggataacgctcaga

SEQ ID NO: 6784 - DNA, 20 bp, Leptotrichia buccalis
tctgcacctgaagctactgg

SEQ ID NO: 6785 - DNA, 20 bp, Weeksella virosa
tttatcgctataagatagac

SEQ ID NO: 6786 - DNA, 30 bp, Vagococcus fluvialis
gcttcggtgtcactgttggatgggcccgcg

SEQ ID NO: 6787 - DNA, 20 bp, Actinomyces radingae
tttgtcgcgcctgtcgtgta

SEQ ID NO: 6788 - DNA, 20 bp, Pasteurella multocida
atttggggattgagcaataa

SEQ ID NO: 6789 - DNA, 20 bp, Bacteroides ureolyticus
acataagttaaatagggaaa

SEQ ID NO: 6790 - DNA, 20 bp, Alloiococcus otitis
ttcccagtgcatgctgggaa

SEQ ID NO: 6791 - DNA, 20 bp, Facklamia languida
ccaggtcttgacataggatg

SEQ ID NO: 6792 - DNA, 20 bp, Bacteroides distasonis
ttttctagcaatagccgttt

SEQ ID NO: 6793 - DNA, 20 bp, Suttonella indologenes
cttatcagggcggttaccac

SEQ ID NO: 6794 - DNA, 20 bp, Helcococcus kunzii
agagataggatagtcttttc

SEQ ID NO: 6795 - DNA, 30 bp, Alloiococcus otitis
gacttgaatgtagcagaggaaagtggaatt

SEQ ID NO: 6796 - DNA, 20 bp, Prevotella bivia
cttgctatttatgtcggcga

SEQ ID NO: 6797 - DNA, 20 bp, Bacillus sp
cgcgggaagcaagtagaacc

SEQ ID NO: 6798 - DNA, 20 bp, Pasteurella multocida
atgaggaaggcaggtatttt

SEQ ID NO: 6799 - DNA, 20 bp, Myroides odoratus
tacgggaagaaatgtaatta

SEQ ID NO: 6800 - DNA, 20 bp, Helcococcus kunzii
atagtcttttcggagacttg

SEQ ID NO: 6801 - DNA, 20 bp, Vagococcus fluvialis
agcttgctccaccgaaaatc

SEQ ID NO: 6802 - DNA, 20 bp, Facklamia languida
tggcctaacttaggagggag

SEQ ID NO: 6803 - DNA, 20 bp, Anaerococcus prevotii
ccatggaagcttgtaatacc

SEQ ID NO: 6804 - DNA, 20 bp, Bacteroides vulgatus
acgtatccaacctgccgtct

SEQ ID NO: 6805 - DNA, 20 bp, Moraxella atlantae
ttctgctataagatgtgcct

SEQ ID NO: 6806 - DNA, 20 bp, Prevotella disiens
gacggactaatacccaatga

SEQ ID NO: 6807 - DNA, 20 bp, Bacillus psychrosaccharolyticus
agtttactcaacaattagcg

SEQ ID NO: 6808 - DNA, 20 bp, Bacteroides eggerthii
tacgggaataaagtggagta

SEQ ID NO: 6809 - DNA, 20 bp, Peptostreptococcus anaerobius
ttgatgcttgcattaatgaa

SEQ ID NO: 6810 - DNA, 20 bp, Prevotella bivia
ttctagattgcagcgcgaac

SEQ ID NO: 6811 - DNA, 20 bp, Weeksella virosa
aattagtttgaagtagctag

SEQ ID NO: 6812 - DNA, 20 bp, Peptostreptococcus anaerobius
atttgatgcttgcattaatg

SEQ ID NO: 6813 - DNA, 30 bp, Streptococcus thoraltensis
tcacttaaagatggacctgcgttgtattag

SEQ ID NO: 6814 - DNA, 20 bp, Streptococcus ratti
gtgttttcttgagtcgcgaa

SEQ ID NO: 6815 - DNA, 20 bp, Alloiococcus otitis
ccgcataggttttcccagtg

SEQ ID NO: 6816 - DNA, 20 bp, Peptoniphilus indolicus
cataacagacaccttcggga

SEQ ID NO: 6817 - DNA, 20 bp, Suttonella indologenes
taatacctgtgaatttgaca

SEQ ID NO: 6818 - DNA, 20 bp, Prevotella disiens
ggccggtacagaatgttggt

SEQ ID NO: 6819 - DNA, 20 bp, Bacillus schlegellii
cgaacctggcgactggggtg

SEQ ID NO: 6820 - DNA, 20 bp, Haemophilus influenzae
gcaggcttaacacatgcagt

SEQ ID NO: 6821 - DNA, 30 bp, Staphylococcus chromogenes
ggttcgatagtgaaagacggtcttgctgtc

SEQ ID NO: 6822 - DNA, 20 bp, Atopobium parvulum
aacccccgctcgctctcgat

SEQ ID NO: 6823 - DNA, 20 bp, Bacteroides caccae
aaagtggtccacgtgtggac

SEQ ID NO: 6824 - DNA, 20 bp, Alloiococcus otitis
ggataggagtcactgcctat

SEQ ID NO: 6825 - DNA, 20 bp, Bacteroides vulgatus
ggcccacctagtcttcgatg

SEQ ID NO: 6826 - DNA, 20 bp, Sphingobacterium multivorum
gcttgctcgaagatggtgag

SEQ ID NO: 6827 - DNA, 20 bp, Moraxella atlantae
gaagagccagtggagaaaca

SEQ ID NO: 6828 - DNA, 20 bp, Bordetella avium
caggctaataccttgcgcaa

SEQ ID NO: 6829 - DNA, 20 bp, Paenibacillus macerans
ccggataatttattttgcag

SEQ ID NO: 6830 - DNA, 20 bp, Moraxella atlantae
taggaaactgccttatagag

SEQ ID NO: 6831 - DNA, 20 bp, Prevotella oralis
aatttggacgaaaggtatat

SEQ ID NO: 6832 - DNA, 20 bp, Actinomyces radingae
agtgtagcgggtaaagaagc

SEQ ID NO: 6833 - DNA, 20 bp, Psychrobacter phenylpyruvicus
acggggaaaagggggcagct

SEQ ID NO: 6834 - DNA, 30 bp, Clostridium histolyticum
ccggtgccgcagttaacacattaagtaccc

SEQ ID NO: 6835 - DNA, 20 bp, Kingella kingae
atatcattaactgatgacgg

SEQ ID NO: 6836 - DNA, 20 bp, Bacillus sp
agacgttaaaaggcggcgca

SEQ ID NO: 6837 - DNA, 20 bp, Ignavigranum ruoffiae
gccagtgagtcgcctgactc

SEQ ID NO: 6838 - DNA, 20 bp, Bacteroides vulgatus
atccaacctgccgtctactc

SEQ ID NO: 6839 - DNA, 20 bp, Ochrobactrum intermedium
ctacccatcactagggaata

SEQ ID NO: 6840 - DNA, 20 bp, Prevotella oralis
gttaaagccgggcactctgt

SEQ ID NO: 6841 - DNA, 20 bp, Leuconostoc lactis
ctcctgattgataaacattt

SEQ ID NO: 6842 - DNA, 20 bp, Corynebacterium group ANF
atgaggcgagagatcgtctg

SEQ ID NO: 6843 - DNA, 20 bp, Alloiococcus otitis
gaacacggataggagtcact

SEQ ID NO: 6844 - DNA, 20 bp, Bacillus schlegellii
aaggcagcgcactggcctgt

SEQ ID NO: 6845 - DNA, 20 bp, Clostridium sordellii
ggataaaatatgagagtcgc

SEQ ID NO: 6846 - DNA, 20 bp, Bacteroides ureolyticus
gacatatacagtaagacgca

SEQ ID NO: 6847 - DNA, 20 bp, Bacteroides capilosus
gctggagaggcaatcggaat

SEQ ID NO: 6848 - DNA, 20 bp, Suttonella indologenes
agctagcttatcagggcggt

SEQ ID NO: 6849 - DNA, 20 bp, Vagococcus fluvialis
cgctttgattttcaccggag

SEQ ID NO: 6850 - DNA, 30 bp, Arcanobacterium haemolyticum
cgaggtctaatactagatattctgcttctg

SEQ ID NO: 6851 - DNA, 20 bp, Prevotella disiens
actaatacccaatgatattc

SEQ ID NO: 6852 - DNA, 20 bp, Gemella morbillorum
agagatatttaaaagttggt

SEQ ID NO: 6853 - DNA, 20 bp, Moraxella atlantae
cactggtggtgacgttacct

SEQ ID NO: 6854 - DNA, 20 bp, Streptococcus thoraltensis
taggagtaagagtggaaagt

SEQ ID NO: 6855 - DNA, 20 bp, Bacteroides vulgatus
gcctgctaagctgcaactga

SEQ ID NO: 6856 - DNA, 20 bp, Sphingobacterium multivorum
catcggagagcttgctcgaa

SEQ ID NO: 6857 - DNA, 20 bp, Clostridium histolyticum
taatgcatgttagaaagatt

SEQ ID NO: 6858 - DNA, 30 bp, Clostridium innocuum
gtatacggagcgcatgctctgtatattaaa

SEQ ID NO: 6859 - DNA, 20 bp, Microbacterium hominis
gtagctggaaagattttttg

SEQ ID NO: 6860 - DNA, 20 bp, Macrococcus caseolyticus
gacccgcgggtattagctag

SEQ ID NO: 6861 - DNA, 20 bp, Atopobium parvulum
ctgcccctttcattgggata

SEQ ID NO: 6862 - DNA, 20 bp, Leptotrichia buccalis
gtattggagaggtggacgga

SEQ ID NO: 6863 - DNA, 20 bp, Moraxella atlantae
tttaagcagggaggaagagc

SEQ ID NO: 6864 - DNA, 20 bp, Bacteroides ureolyticus
ctatttgacataagttaaat

SEQ ID NO: 6865 - DNA, 20 bp, Bacteroides vulgatus
gattaatacaagatggcatc

SEQ ID NO: 6866 - DNA, 20 bp, Abiotrophia defectiva
cgcataggacatggaatcac

SEQ ID NO: 6867 - DNA, 20 bp, Actinomyces naeslundii
tgatggcctgccaaggcggt

SEQ ID NO: 6868 - DNA, 20 bp, Streptococcus sobrinus
gccattgcttcactatcaga

SEQ ID NO: 6869 - DNA, 20 bp, Bacteroides eggerthii
aagcttgcttcaatcgatgg

SEQ ID NO: 6870 - DNA, 20 bp, Dolosigranulum pigrum
aagtcgaacgatgatatcac

SEQ ID NO: 6871 - DNA, 20 bp, Moraxella atlantae
ggtgaagctgagaactgtaa

SEQ ID NO: 6872 - DNA, 20 bp, Peptoniphilus indolicus
gtctgattaattagttggtg

SEQ ID NO: 6873 - DNA, 20 bp, Bacteroides caccae
atggggaaacccatacgccg

SEQ ID NO: 6874 - DNA, 20 bp, Facklamia sourekii
aactgttactgatttgacgg

SEQ ID NO: 6875 - DNA, 20 bp, Leptotrichia buccalis
ctgcacctgaagctactggt

SEQ ID NO: 6876 - DNA, 20 bp, Actinomyces radingae
gtaacctgcctttttctttg

SEQ ID NO: 6877 - DNA, 20 bp, Prevotella oralis
ggcactctgtgaatactgcc

SEQ ID NO: 6878 - DNA, 20 bp, Actinomyces radingae
tgacatgcgccctgagcgcc

SEQ ID NO: 6879 - DNA, 20 bp, Ignavigranum ruoffiae
agagaagaaccatcctgtat

SEQ ID NO: 6880 - DNA, 30 bp, Clostridium histolyticum
aaccccggtgctgcatttcaaactggatat

SEQ ID NO: 6881 - DNA, 20 bp, Facklamia sourekii
ataaaccttaagctcgcatg

SEQ ID NO: 6882 - DNA, 20 bp, Peptostreptococcus anaerobius
cattaatgaaagatgagcgg

SEQ ID NO: 6883 - DNA, 20 bp, Streptococcus sobrinus
ctgtttaaaagaagccattg

SEQ ID NO: 6884 - DNA, 20 bp, Bacteroides vulgatus
ttctgctgaggactctgaca

SEQ ID NO: 6885 - DNA, 20 bp, Prevotella bivia
gaacgtgttcccttttgcag

SEQ ID NO: 6886 - DNA, 20 bp, Abiotrophia defectiva
actaggtgcttgcactaggt

SEQ ID NO: 6887 - DNA, 20 bp, Bacteroides distasonis
aactggggggcttgagtatg

SEQ ID NO: 6888 - DNA, 20 bp, Leptotrichia buccalis
tgaagctactggtccaaccg

SEQ ID NO: 6889 - DNA, 20 bp, Bacteroides vulgatus
gaaggcagcctgctaagctg

SEQ ID NO: 6890 - DNA, 20 bp, Bacteroides capilosus
gattgctggacagtaactga

SEQ ID NO: 6891 - DNA, 20 bp, Abiotrophia defectiva
gaaccgcgactaggtgcttg

SEQ ID NO: 6892 - DNA, 20 bp, Dolosigranulum pigrum
agaacacgtgctaggtaact

SEQ ID NO: 6893 - DNA, 20 bp, Streptococcus ratti
tcaagaacgtgtgtgagagt

SEQ ID NO: 6894 - DNA, 20 bp, Bacillus sp
gcgggaagcaagtagaaccc

SEQ ID NO: 6895 - DNA, 20 bp, Suttonella indologenes
tgtaaagcactttcgttagt

SEQ ID NO: 6896 - DNA, 20 bp, Bacteroides eggerthii
tttccgcatggtttcactat

SEQ ID NO: 6897 - DNA, 20 bp, Microbacterium hominis
tgacatacaccagaacaccg

SEQ ID NO: 6898 - DNA, 20 bp, Weeksella virosa
atataaagctaggtggcatc

SEQ ID NO: 6899 - DNA, 20 bp, Dolosigranulum pigrum
gttgggggctttccggccct

SEQ ID NO: 6900 - DNA, 20 bp, Actinomyces radingae
cgccctgagcgcctagagat

SEQ ID NO: 6901 - DNA, 20 bp, Sphingobacterium multivorum
atcggagagcttgctcgaag

SEQ ID NO: 6902 - DNA, 20 bp, Prevotella oralis
ttttcaacttttgatggcga

SEQ ID NO: 6903 - DNA, 20 bp, Facklamia sourekii
agtaactgttactgatttga

SEQ ID NO: 6904 - DNA, 20 bp, Bacteroides thetaiotaomicron
taattagaccgcatggtctt

SEQ ID NO: 6905 - DNA, 20 bp, Arcanobacterium haemolyticum
gtcgaacgatgaaggctcct

SEQ ID NO: 6906 - DNA, 20 bp, Leptotrichia buccalis
gagttgtctgcacctgaagc

SEQ ID NO: 6907 - DNA, 20 bp, Vagococcus fluvialis
gaaaatcaaagagtggcgga

SEQ ID NO: 6908 - DNA, 20 bp, Brevibacillus thermoruber
acgctaataccggatagggc

SEQ ID NO: 6909 - DNA, 20 bp, Anaerobiospirillum succiniciproducens
tcaacctgggttggtcattc

SEQ ID NO: 6910 - DNA, 20 bp, Anaerococcus prevotii
cgaaggtaggataggtgact

SEQ ID NO: 6911 - DNA, 20 bp, Weeksella virosa
ccattgatactgttgatcta

SEQ ID NO: 6912 - DNA, 20 bp, Bacteroides thetaiotaomicron
ggtccacgtgtggatttttg

SEQ ID NO: 6913 - DNA, 20 bp, Streptococcus acidominimus
gttaatttaaaaggagcaac

SEQ ID NO: 6914 - DNA, 20 bp, Myroides odoratus
gagaccggcggatgggtgag

SEQ ID NO: 6915 - DNA, 30 bp, Facklamia sourekii
agcgggggataactatcggaaacggtagct

SEQ ID NO: 6916 - DNA, 20 bp, Clostridium cadaveris
accgcatattatggtttttc

SEQ ID NO: 6917 - DNA, 20 bp, Clostridium cadaveris
attatgatttttctgcatgg

SEQ ID NO: 6918 - DNA, 20 bp, Facklamia sourekii
agtcgaacgaaccgacggag

SEQ ID NO: 6919 - DNA, 20 bp, Weeksella virosa
cttgccttatagaatgggat

SEQ ID NO: 6920 - DNA, 20 bp, Clostridium cadaveris
atgggaaagtcatgaaagga

SEQ ID NO: 6921 - DNA, 20 bp, Anaerobiospirillum succiniciproducens
actcccttcgggggaaagac

SEQ ID NO: 6922 - DNA, 20 bp, Helcococcus kunzii
tcttcggaatgaaaccgaaa

SEQ ID NO: 6923 - DNA, 20 bp, Alloiococcus otitis
cttgcaggaagaggcggagt

SEQ ID NO: 6924 - DNA, 20 bp, Clostridium clostridiiforme
tcttgattgactgagtggcg

SEQ ID NO: 6925 - DNA, 30 bp, Streptococcus acidominimus
tgaattgattgagtcgcgaacgggtgagta

SEQ ID NO: 6926 - DNA, 20 bp, Prevotella oralis
tatattctatcggtaatgga

SEQ ID NO: 6927 - DNA, 20 bp, Clostridium cadaveris
aacagtaagatgagcactct

SEQ ID NO: 6928 - DNA, 20 bp, Bacillus sp
aacgtctccttatgcaagaa

SEQ ID NO: 6929 - DNA, 20 bp, Brevibacillus thermoruber
actgctcgacttgagtgcag

SEQ ID NO: 6930 - DNA, 20 bp, Streptococcus thoraltensis
aaaaggagctaacccatgtt

SEQ ID NO: 6931 - DNA, 20 bp, Prevotella oralis
gaactgccattgacttgaat

SEQ ID NO: 6932 - DNA, 20 bp, Prevotella disiens
gaactggctgacttgagtac

SEQ ID NO: 6933 - DNA, 20 bp, Staphylococcus muscae
ctagagatagtgttttcctc

SEQ ID NO: 6934 - DNA, 30 bp, Weeksella virosa
agacggggactctaatgagactgccggcgt

SEQ ID NO: 6935 - DNA, 20 bp, Prevotella oralis
gacgaaaggtatattctatc

SEQ ID NO: 6936 - DNA, 20 bp, Suttonella indologenes
tttcgttagtgaagaaaggt

SEQ ID NO: 6937 - DNA, 20 bp, Bacteroides distasonis
acccttgccactagttacta

SEQ ID NO: 6938 - DNA, 20 bp, Bacteroides thetaiotaomicron
attatggggaaacccatagg

SEQ ID NO: 6939 - DNA, 20 bp, Lactococcus raffinolactis
taccgcataacaatgttgga

SEQ ID NO: 6940 - DNA, 20 bp, Facklamia sourekii
gaaacctaccctctagcggg

SEQ ID NO: 6941 - DNA, 20 bp, Psychrobacter phenylpyruvicus
acttttagagggcgctcacc

SEQ ID NO: 6942 - DNA, 20 bp, Bacillus marinus
ccattgcccggtctagagat

SEQ ID NO: 6943 - DNA, 20 bp, Bacteroides eggerthii
ttacagccttcgggccgctg

SEQ ID NO: 6944 - DNA, 20 bp, Streptococcus sobrinus
tggtaacaccggacttgctc

SEQ ID NO: 6945 - DNA, 20 bp, Abiotrophia defectiva
gcataggacatggaatcaca

SEQ ID NO: 6946 - DNA, 20 bp, Paenibacillus macerans
ttgcagcattgtggaataat

SEQ ID NO: 6947 - DNA, 20 bp, Prevotella bivia
tggggaacgtgttccctttt

SEQ ID NO: 6948 - DNA, 20 bp, Dolosigranulum pigrum
taactactagcgccttgacg

SEQ ID NO: 6949 - DNA, 20 bp, Bacteroides distasonis
tttctaggcaatagccgttt

SEQ ID NO: 6950 - DNA, 20 bp, Empedobacter brevis
gattaatactttataacaga

SEQ ID NO: 6951 - DNA, 20 bp, Prevotella bivia
taccttatgtattcgtttga

SEQ ID NO: 6952 - DNA, 20 bp, Dolosigranulum pigrum
aacgagcagcgatcccgcaa

SEQ ID NO: 6953 - DNA, 20 bp, Facklamia languida
gttcaagtcaatgttagtgg

SEQ ID NO: 6954 - DNA, 20 bp, Bacillus schlegellii
cctttcccgcgagggacggc

SEQ ID NO: 6955 - DNA, 20 bp, Bacillus schlegellii
gttgtcggggaagaagggcc

SEQ ID NO: 6956 - DNA, 20 bp, Haemophilus segnis
gccttgagcttggtgcccga

SEQ ID NO: 6957 - DNA, 20 bp, Streptococcus sobrinus
tcatgttaactgtttaaaag

SEQ ID NO: 6958 - DNA, 20 bp, Weeksella virosa
aggtggcatcatttagtttt

SEQ ID NO: 6959 - DNA, 20 bp, Prevotella bivia
tggggataaagtggggaacg

SEQ ID NO: 6960 - DNA, 20 bp, Atopobium parvulum
taccgaatacttcgagactt

SEQ ID NO: 6961 - DNA, 30 bp, Paenibacillus apiarius
gcaggcggtgatgtaagttgggtgtttaaa

SEQ ID NO: 6962 - DNA, 20 bp, Ochrobactrum intermedium
acccatcactagggaataac

SEQ ID NO: 6963 - DNA, 20 bp, Corynebacterium kutscheri
cctttttaggtctgtataca

SEQ ID NO: 6964 - DNA, 20 bp, Bacteroides distasonis
gtctgtggctcaaccataga

SEQ ID NO: 6965 - DNA, 20 bp, Bacteroides ureolyticus
taaaaacatctaagagatta

SEQ ID NO: 6966 - DNA, 20 bp, Peptoniphilus indolicus
agtcgagcgatgaagacata

SEQ ID NO: 6967 - DNA, 20 bp, Facklamia sourekii
agtttaagttgaaagacggc

SEQ ID NO: 6968 - DNA, 20 bp, Veillonella atypica
catcgagactggatgaaagg

SEQ ID NO: 6969 - DNA, 20 bp, Suttonella indologenes
gaacgagggaagcagcttgc

SEQ ID NO: 6970 - DNA, 20 bp, Helcococcus kunzii
tctttagttactagcgagta

SEQ ID NO: 6971 - DNA, 30 bp, Dolosigranulum pigrum
gctagctaatctttcaaagccattctcagt

SEQ ID NO: 6972 - DNA, 20 bp, Microbacterium hominis
gaacaccgtagaaatacggg

SEQ ID NO: 6973 - DNA, 20 bp, Pseudoramibacter alactolyticus
tcgcatgactttgctgtcaa

SEQ ID NO: 6974 - DNA, 20 bp, Dolosigranulum pigrum
tctggtctaacattgacgct

SEQ ID NO: 6975 - DNA, 20 bp, Prevotella oralis
cgcggggcatcatggaggtt

SEQ ID NO: 6976 - DNA, 20 bp, Ignavigranum ruoffiae
gttagagaagaaccatcctg

SEQ ID NO: 6977 - DNA, 20 bp, Paenibacillus apiarius
ttttcctcgcctgagggaaa

SEQ ID NO: 6978 - DNA, 30 bp, Bacteroides capillosus
ccctaaaagccatcccagttcggattgcag

SEQ ID NO: 6979 - DNA, 20 bp, Prevotella oralis
cttgaactgccattgacttg

SEQ ID NO: 6980 - DNA, 20 bp, Moraxella atlantae
aagtcgaacgatggaaccta

SEQ ID NO: 6981 - DNA, 20 bp, Suttonella indologenes
ggtttatggttaatacctgt

SEQ ID NO: 6982 - DNA, 20 bp, Bacteroides capilosus
attcgtccaatggattgggt

SEQ ID NO: 6983 - DNA, 30 bp, Abiotrophia defectiva
aacgaaccgcgactaggtgcttgcacttgg

SEQ ID NO: 6984 - DNA, 20 bp, Brevibacillus thermoruber
gggtgcggaaaggtggcgca

SEQ ID NO: 6985 - DNA, 20 bp, Prevotella disiens
atacccaatgatattcattg

SEQ ID NO: 6986 - DNA, 20 bp, Bacteroides caccae
aacccatacgccgcaaggca

SEQ ID NO: 6987 - DNA, 20 bp, Leptotrichia buccalis
acgctgcgggagagccttgc

SEQ ID NO: 6988 - DNA, 20 bp, Bacteroides thetaiotaomicron
aatgaattatggggaaaccc

SEQ ID NO: 6989 - DNA, 20 bp, Corynebacterium group ANF
gagatcgtctgtccctttgt

SEQ ID NO: 6990 - DNA, 20 bp, Actinomyces radingae
ctatttgggtagtggtgagt

SEQ ID NO: 6991 - DNA, 20 bp, Brevibacillus thermoruber
ggctggtacaacgggacgca

SEQ ID NO: 6992 - DNA, 20 bp, Bacillus schlegellii
acatcccgctgccgggtcca

SEQ ID NO: 6993 - DNA, 20 bp, Anaerococcus prevotii
actgcatatcttgagaagag

SEQ ID NO: 6994 - DNA, 20 bp, Prevotella bivia
cctgaagttcgtgaccgtac

SEQ ID NO: 6995 - DNA, 20 bp, Chromobacterium violaceum
gacctcgcgttatacgagca

SEQ ID NO: 6996 - DNA, 20 bp, Prevotella loescheii
aggcagcctactgtagcgct

SEQ ID NO: 6997 - DNA, 20 bp, Lactococcus raffinolactis
agagtggaaaattatgcaag

SEQ ID NO: 6998 - DNA, 20 bp, Dolosigranulum pigrum
gtcggccggccaaccctatg

SEQ ID NO: 6999 - DNA, 20 bp, Prevotella bivia
atgaacgatttagagataat

SEQ ID NO: 7000 - DNA, 20 bp, Clostridium glycolicum
agcgattcacttcggtgaag

SEQ ID NO: 7001 - DNA, 20 bp, Myroides odoratus
aaatgtaattacgtgtaatt

SEQ ID NO: 7002 - DNA, 20 bp, Myroides odoratus
gtttatatgaatggcatcgt

SEQ ID NO: 7003 - DNA, 20 bp, Myroides odoratus
ggttcgtaggcggttgagta

SEQ ID NO: 7004 - DNA, 20 bp, Bacillus sp
tcgttccacatgcgtcaccc

SEQ ID NO: 7005 - DNA, 20 bp, Bacteroides ureolyticus
acatcctaaaaacatctaag

SEQ ID NO: 7006 - DNA, 20 bp, Bacteroides thetaiotaomicron
ggcagctcactggagtgtaa

SEQ ID NO: 7007 - DNA, 20 bp, Actinomyces radingae
gggcctttgtggtttctgga

SEQ ID NO: 7008 - DNA, 20 bp, Paenibacillus apiarius
gcggtgatgtaagttgggtg

SEQ ID NO: 7009 - DNA, 20 bp, Peptostreptococcus anaerobius
gcgtctgatttgatgcttgc

SEQ ID NO: 7010 - DNA, 20 bp, Ignavigranum ruoffiae
tagagaagaaccatcctgta

SEQ ID NO: 7011 - DNA, 20 bp, Pasteurella multocida
agcaataagcttggtgctcg

SEQ ID NO: 7012 - DNA, 20 bp, Leuconostoc fallax
gacggttcgttaagtctgaa

SEQ ID NO: 7013 - DNA, 20 bp, Weeksella virosa
aagatagacatgcgtaagat

SEQ ID NO: 7014 - DNA, 20 bp, Bacteroides vulgatus
ctagtcttcgatggataggg

SEQ ID NO: 7015 - DNA, 20 bp, Prevotella disiens
attcattgatgacatctgat

SEQ ID NO: 7016 - DNA, 20 bp, Alloiococcus otitis
cggataggagtcactgccta

SEQ ID NO: 7017 - DNA, 20 bp, Bacillus schlegellii
cccgctgccgggtccagaga

SEQ ID NO: 7018 - DNA, 20 bp, Pasteurella multocida
tatttggccacctgccatga

SEQ ID NO: 7019 - DNA, 20 bp, Bacteroides vulgatus
tgaaagccgtaagccgcaag

SEQ ID NO: 7020 - DNA, 20 bp, Dolosigranulum pigrum
cggcattggaaactgacaga

SEQ ID NO: 7021 - DNA, 20 bp, Sphingobacterium multivorum
aagacggtgagagtggcgca

SEQ ID NO: 7022 - DNA, 30 bp, Myroides odoratus
tagagaccggcggatgggtgagtaacgcgt

SEQ ID NO: 7023 - DNA, 20 bp, Leuconostoc lactis
gctcctgattgataaacatt

SEQ ID NO: 7024 - DNA, 20 bp, Brevibacterium linens
gcgtgcttaacacatgcagt

SEQ ID NO: 7025 - DNA, 20 bp, Ignavigranum ruoffiae
tccgctgcatagcttagaga

SEQ ID NO: 7026 - DNA, 20 bp, Helcococcus kunzii
tcaaggaggcagacgccgaa

SEQ ID NO: 7027 - DNA, 20 bp, Bacteroides vulgatus
tactggatatcttgagtgca

SEQ ID NO: 7028 - DNA, 20 bp, Paenibacillus apiarius
ggtgatgtaagttgggtgtt

SEQ ID NO: 7029 - DNA, 20 bp, Atopobium parvulum
gaaaccgtggataataccga

SEQ ID NO: 7030 - DNA, 20 bp, Prevotella oralis
ggacgaaaggtatattctat

SEQ ID NO: 7031 - DNA, 20 bp, Helcococcus kunzii
ctagcgagtaaagtcgagga

SEQ ID NO: 7032 - DNA, 20 bp, Vagococcus fluvialis
gcttgctccaccgaaaatca

SEQ ID NO: 7033 - DNA, 20 bp, Clostridium clostridiiforme
tggatccatggctcaggatg

SEQ ID NO: 7034 - DNA, 30 bp, Myroides odoratus
caagtcgaggggtatagagagcttgctttc

SEQ ID NO: 7035 - DNA, 20 bp, Empedobacter brevis
caacttgccctactgaaaag

SEQ ID NO: 7036 - DNA, 20 bp, Corynebacterium confusum
tttccctttgtggcctttat

SEQ ID NO: 7037 - DNA, 20 bp, Bacteroides vulgatus
agtccgcatgttcacatgat

SEQ ID NO: 7038 - DNA, 20 bp, Prevotella bivia
ttacgaataaagatttatcg

SEQ ID NO: 7039 - DNA, 20 bp, Bacteroides distasonis
gcaatagccgtttgcgaggt

SEQ ID NO: 7040 - DNA, 20 bp, Campylobacter lari
tgctagttgtggattagtgg

SEQ ID NO: 7041 - DNA, 20 bp, Prevotella bivia
tgtaggagctcaacttctag

SEQ ID NO: 7042 - DNA, 20 bp, Clostridium clostridiiforme
ggatccatggctcaggatga

SEQ ID NO: 7043 - DNA, 30 bp, Clostridium glycolicum
aacataagagattcacatgtatttcttatc

SEQ ID NO: 7044 - DNA, 20 bp, Prevotella oralis
gtatgcagtccgaagcagtc

SEQ ID NO: 7045 - DNA, 20 bp, Bacteroides distasonis
gaaacaccttttctagcaat

SEQ ID NO: 7046 - DNA, 20 bp, Bacteroides distasonis
ggaccgaggtggaaacacct

SEQ ID NO: 7047 - DNA, 30 bp, Bacteroides eggerthii
cacatgcaagtcgaggggcagcatgattga

SEQ ID NO: 7048 - DNA, 20 bp, Myroides odoratimimus
tgataataaagatttatcgg

SEQ ID NO: 7049 - DNA, 20 bp, Alloiococcus otitis
ctggcggacttgaatgtagc

SEQ ID NO: 7050 - DNA, 20 bp, Lactococcus raffinolactis
aaagtaccaaatggtacact

SEQ ID NO: 7051 - DNA, 20 bp, Clostridium innocuum
ctgtatattaaagcgccctt

SEQ ID NO: 7052 - DNA, 20 bp, Sporosarcina pasteurii
agccgtctttcagagttcct

SEQ ID NO: 7053 - DNA, 20 bp, Moraxella atlantae
gcagggaggaagagctagtg

SEQ ID NO: 7054 - DNA, 20 bp, Leuconostoc fallax
ctggcgaacttgagtgcagt

SEQ ID NO: 7055 - DNA, 30 bp, Prevotella oralis
cggcggggtaacggcccaccggggcatcga

SEQ ID NO: 7056 - DNA, 20 bp, Weeksella virosa
ttatagaatgggatagcccg

SEQ ID NO: 7057 - DNA, 20 bp, Myroides odoratus
cttattgacgctgatgaacg

SEQ ID NO: 7058 - DNA, 20 bp, Bacillus marinus
aagcttgcttctctaactta

SEQ ID NO: 7059 - DNA, 20 bp, Dolosigranulum pigrum
gccggccaaccctatgggag

SEQ ID NO: 7060 - DNA, 20 bp, Sphingobacterium multivorum
aggaagctgaatgtactgga

SEQ ID NO: 7061 - DNA, 20 bp, Prevotella bivia
agacttgagtgcgcacaacg

SEQ ID NO: 7062 - DNA, 20 bp, Prevotella disiens
tgatgacatctgatttgaat

SEQ ID NO: 7063 - DNA, 20 bp, Clostridium sordellii
atgaacgctgacggcgtgcc

SEQ ID NO: 7064 - DNA, 20 bp, Arcanobacterium haemolyticum
gaggtctaatactagatatt

SEQ ID NO: 7065 - DNA, 20 bp, Streptococcus sobrinus
catgttaactgtttaaaaga

SEQ ID NO: 7066 - DNA, 20 bp, Facklamia sourekii
gaaccgacggagaaacttgt

SEQ ID NO: 7067 - DNA, 20 bp, Corynebacterium group ANF
gtggtgcctgtggtggaaaa

SEQ ID NO: 7068 - DNA, 20 bp, Clostridium histolyticum
ttaaccccggtgctgcattt

SEQ ID NO: 7069 - DNA, 20 bp, Bacteroides vulgatus
ggaataaagtcgggtatgga

SEQ ID NO: 7070 - DNA, 30 bp, Clostridium clostridiiforme
caagtcgaacgaagcaattaagatgaagtt

SEQ ID NO: 7071 - DNA, 20 bp, Actinomyces radingae
ggcctttgtggtttctggag

SEQ ID NO: 7072 - DNA, 20 bp, Helcococcus kunzii
gagaatttttcagtcgattt

SEQ ID NO: 7073 - DNA, 20 bp, Clostridium cadaveris
cgagcgagggagcaccttcg

SEQ ID NO: 7074 - DNA, 20 bp, Bacteroides merdae
tggccgagaggctgaaccag

SEQ ID NO: 7075 - DNA, 20 bp, Alloiococcus otitis
ggaagaacacggataggagt

SEQ ID NO: 7076 - DNA, 20 bp, Corynebacterium group ANF
cagggtggtgcctgtggtgg

SEQ ID NO: 7077 - DNA, 20 bp, Psychrobacter phenylpyruvicus
tggccggggactctaaggat

SEQ ID NO: 7078 - DNA, 20 bp, Dolosigranulum pigrum
aagtgttgggggctttccgg

SEQ ID NO: 7079 - DNA, 20 bp, Bacteroides distasonis
accttttctagcaatagccg

SEQ ID NO: 7080 - DNA, 20 bp, Staphylococcus lutrae
acacatgtgtaagtcactat

SEQ ID NO: 7081 - DNA, 30 bp, Facklamia languida
cctacccttaagcgggggataaccattgga

SEQ ID NO: 7082 - DNA, 20 bp, Atopobium parvulum
cgcatggaagactcgagaaa

SEQ ID NO: 7083 - DNA, 20 bp, Alloiococcus otitis
tggggaagaacacggatagg

SEQ ID NO: 7084 - DNA, 20 bp, Prevotella oralis
tgtgcagcgcgaactgggaa

SEQ ID NO: 7085 - DNA, 30 bp, Peptostreptococcus anaerobius
caagtcgagcgcgtctgatttgatgcttgc

SEQ ID NO: 7086 - DNA, 20 bp, Ignavigranum ruoffiae
ttgttagagaagaaccatcc

SEQ ID NO: 7087 - DNA, 20 bp, Moraxella atlantae
aagagggcgcttacccggtg

SEQ ID NO: 7088 - DNA, 20 bp, Helcococcus kunzii
gaatgaaaccgaaaaaggaa

SEQ ID NO: 7089 - DNA, 30 bp, Cardiobacterium hominis
gtagggaggaaaggtgcgtagttaatacct

SEQ ID NO: 7090 - DNA, 20 bp, Anaerococcus tetradius
tgggagccgcagctaacgca

SEQ ID NO: 7091 - DNA, 20 bp, Prevotella bivia
cccttttgcaggtaccatat

SEQ ID NO: 7092 - DNA, 20 bp, Actinomyces radingae
ttgtcgcgcctgtcgtgtaa

SEQ ID NO: 7093 - DNA, 20 bp, Campylobacter lari
cttgctagttgtggattagt

SEQ ID NO: 7094 - DNA, 20 bp, Helcococcus kunzii
tcagttgatttcttcggaat

SEQ ID NO: 7095 - DNA, 20 bp, Prevotella bivia
aatgggtggtacagatagtt

SEQ ID NO: 7096 - DNA, 20 bp, Clostridium cadaveris
ctctgtgccgccgtaaacac

SEQ ID NO: 7097 - DNA, 20 bp, Bacillus psychrosaccharolyticus
caagtcgagcgaattgttga

SEQ ID NO: 7098 - DNA, 20 bp, Pseudomonas fluorescens
gagatgcttgcatctcttga

SEQ ID NO: 7099 - DNA, 20 bp, Clostridium histolyticum
aaagattaaaggagcaatcc

SEQ ID NO: 7100 - DNA, 20 bp, Fusobacterium varium
tgagtcgcatgatttggtta

SEQ ID NO: 7101 - DNA, 20 bp, Peptoniphilus indolicus
ggaagaagttaagtcggatt

SEQ ID NO: 7102 - DNA, 20 bp, Ignavigranum ruoffiae
ttagagaagaaccatcctgt

SEQ ID NO: 7103 - DNA, 20 bp, Actinomyces radingae
gctatttgggtagtggtgag

SEQ ID NO: 7104 - DNA, 20 bp, Streptococcus acidominimus
tgctacatttgaattgattg

SEQ ID NO: 7105 - DNA, 30 bp, Paenibacillus apiarius
actgcatgacttgagtacagaagaggaaag

SEQ ID NO: 7106 - DNA, 20 bp, Streptococcus acidominimus
accgcataagagttgacaac

SEQ ID NO: 7107 - DNA, 20 bp, Facklamia languida
ctaacttaggagggagccgt

SEQ ID NO: 7108 - DNA, 20 bp, Ignavigranum ruoffiae
acaacgaaggagcttgcttc

SEQ ID NO: 7109 - DNA, 20 bp, Eubacterium moniliforme
ctaggtgtggggggcgatag

SEQ ID NO: 7110 - DNA, 20 bp, Facklamia sourekii
cagtcagtagagtaactgtt

SEQ ID NO: 7111 - DNA, 20 bp, Anaerobiospirillum succiniciproducens
attaccacggtgtggtctgt

SEQ ID NO: 7112 - DNA, 20 bp, Clostridium cadaveris
ctctttcgggagcaggaaca

SEQ ID NO: 7113 - DNA, 20 bp, Bacteroides ureolyticus
cacagaggaacaacagttgg

SEQ ID NO: 7114 - DNA, 20 bp, Weeksella virosa
tagaatgggatagcccggag

SEQ ID NO: 7115 - DNA, 20 bp, Streptococcus ratti
ggaaagtctggagtaaaagg

SEQ ID NO: 7116 - DNA, 20 bp, Streptococcus thoraltensis
gtggaacgcatttataacta

SEQ ID NO: 7117 - DNA, 20 bp, Staphylococcus simulans
atgtaagtaactgtgcatcc

SEQ ID NO: 7118 - DNA, 20 bp, Facklamia sourekii
gtcactagaggatggtcccg

SEQ ID NO: 7119 - DNA, 20 bp, Bacillus schlegellii
ccgctgccgggtccagagat

SEQ ID NO: 7120 - DNA, 20 bp, Myroides odoratimimus
cgtatttattgacgctgatg

SEQ ID NO: 7121 - DNA, 20 bp, Bacteroides distasonis
gcagggatcccgcatgggaa

SEQ ID NO: 7122 - DNA, 20 bp, Dolosigranulum pigrum
gattggtcgcatgacgaatt

SEQ ID NO: 7123 - DNA, 20 bp, Bacteroides distasonis
ggactaataccgcatgaagc

SEQ ID NO: 7124 - DNA, 20 bp, Prevotella oralis
aaaggcggcctaattccgta

SEQ ID NO: 7125 - DNA, 30 bp, Paenibacillus apiarius
tgggtcgcatccaaaactgcatgacttgag

SEQ ID NO: 7126 - DNA, 20 bp, Corynebacterium confusum
aatcgcttaaagttggcctt

SEQ ID NO: 7127 - DNA, 20 bp, Brevibacillus thermoruber
cgcattggaaactgctcgac

SEQ ID NO: 7128 - DNA, 20 bp, Bacteroides eggerthii
atagtttttccgcatggttt

SEQ ID NO: 7129 - DNA, 20 bp, Ochrobactrum intermedium
tacccatcactagggaataa

SEQ ID NO: 7130 - DNA, 20 bp, Bacteroides ureolyticus
aaaaacatctaagagattag

SEQ ID NO: 7131 - DNA, 20 bp, Anaerococcus prevotii
gcatatcttgagaagagtag

SEQ ID NO: 7132 - DNA, 20 bp, Atopobium parvulum
gggcaacctgcccctttcat

SEQ ID NO: 7133 - DNA, 20 bp, Atopobium parvulum
gagtatttcttccgtgccgc

SEQ ID NO: 7134 - DNA, 20 bp, Alloiococcus otitis
aggagtcactgcctatccct

SEQ ID NO: 7135 - DNA, 20 bp, Kocuria kristinae
agggttatgtactggtctta

SEQ ID NO: 7136 - DNA, 20 bp, Bacteroides vulgatus
tttataaaggaataaagtcg

SEQ ID NO: 7137 - DNA, 20 bp, Suttonella indologenes
cacttaagtgctcggtaccg

SEQ ID NO: 7138 - DNA, 30 bp, Abiotrophia defectiva
tgattccgtgaggaaaggtggcgcaagcta

SEQ ID NO: 7139 - DNA, 20 bp, Corynebacterium confusum
ctttgtggcctttatacagg

SEQ ID NO: 7140 - DNA, 20 bp, Dolosigranulum pigrum
ggcggtctgtttagtctaat

SEQ ID NO: 7141 - DNA, 20 bp, Clostridium tetani
gttaaggtttcgcatgaaac

SEQ ID NO: 7142 - DNA, 20 bp, Bacteroides eggerthii
cttgagtgcagcataggtag

SEQ ID NO: 7143 - DNA, 20 bp, Anaerobiospirillum succiniciproducens
cattctaaactggctttcta

SEQ ID NO: 7144 - DNA, 20 bp, Haemophilus segnis
taataggcatcacgattgac

SEQ ID NO: 7145 - DNA, 20 bp, Prevotella disiens
aagacggactaatacccaat

SEQ ID NO: 7146 - DNA, 20 bp, Bacteroides vulgatus
ttaatacaagatggcatcat

SEQ ID NO: 7147 - DNA, 20 bp, Prevotella bivia
gacttgagtgcgcacaacgt

SEQ ID NO: 7148 - DNA, 20 bp, Facklamia sourekii
ctgtcactagaggatggtcc

SEQ ID NO: 7149 - DNA, 20 bp, Methylobacterium mesophilicum
gattcccagtccacttcggt

SEQ ID NO: 7150 - DNA, 20 bp, Bacillus schlegellii
tgccggagttcacacattaa

SEQ ID NO: 7151 - DNA, 20 bp, Bordetella avium
cttgcgcaaatgacggtacc

SEQ ID NO: 7152 - DNA, 20 bp, Bacillus sp
ggttctacttgcttcccgcg

SEQ ID NO: 7153 - DNA, 20 bp, Moraxella atlantae
gccagtggagaaacacactg

SEQ ID NO: 7154 - DNA, 20 bp, Cardiobacterium hominis
cgaaaggcctcgcggcaaga

SEQ ID NO: 7155 - DNA, 20 bp, Lactococcus raffinolactis
gcataacaatgttggatgca

SEQ ID NO: 7156 - DNA, 20 bp, Bacillus marinus
tcgagcggagttagagaagc

SEQ ID NO: 7157 - DNA, 20 bp, Bacteroides capilosus
gtggcctgcatttgaaactg

SEQ ID NO: 7158 - DNA, 20 bp, Helcococcus kunzii
cgaagataatgacagtagct

SEQ ID NO: 7159 - DNA, 20 bp, Bacteroides eggerthii
aatgtagtggaaacattaca

SEQ ID NO: 7160 - DNA, 30 bp, Prevotella oris
gatccaatccttaaatccggtcccagttcg

SEQ ID NO: 7161 - DNA, 20 bp, Actinomyces turicensis
tggtacagagtgttgcgata

SEQ ID NO: 7162 - DNA, 20 bp, Actinomyces radingae
tttgtggtttctggagggag

SEQ ID NO: 7163 - DNA, 20 bp, Dolosigranulum pigrum
gcgattttctggtctaacat

SEQ ID NO: 7164 - DNA, 20 bp, Actinomyces naeslundii
gccttttttggtgtttttgg

SEQ ID NO: 7165 - DNA, 20 bp, Propionibacterium acnes
taggactaagtcggtacaag

SEQ ID NO: 7166 - DNA, 30 bp, Moraxella atlantae
aacctagcttgctaggggaaatagtggcga

SEQ ID NO: 7167 - DNA, 20 bp, Lactococcus raffinolactis
ctatccagccctaagtgacg

SEQ ID NO: 7168 - DNA, 20 bp, Weeksella virosa
gatagttgaaggtagcatat

SEQ ID NO: 7169 - DNA, 30 bp, Alloiococcus otitis
cggcattggaaactggcggacttgaatgta

SEQ ID NO: 7170 - DNA, 20 bp, Pasteurella multocida
caataagcttggtgctcgaa

SEQ ID NO: 7171 - DNA, 20 bp, Prevotella bivia
ccttttgcaggtaccatatg

SEQ ID NO: 7172 - DNA, 20 bp, Streptococcus acidominimus
agagttgacaacacatgttg

SEQ ID NO: 7173 - DNA, 20 bp, Campylobacter lari
tgaagcgactagcttgctag

SEQ ID NO: 7174 - DNA, 20 bp, Leuconostoc fallax
aaagcatatggctagagtgg

SEQ ID NO: 7175 - DNA, 20 bp, Anaerobiospirillum succiniciproducens
ggaaaggtaagtaggatgtg

SEQ ID NO: 7176 - DNA, 20 bp, Bacillus sp
taacgtctccttatgcaaga

SEQ ID NO: 7177 - DNA, 20 bp, Ignavigranum ruoffiae
cttccgcgtgagtggcgaac

SEQ ID NO: 7178 - DNA, 20 bp, Moraxella atlantae
aaggtcataagattgtaaag

SEQ ID NO: 7179 - DNA, 20 bp, Bacteroides eggerthii
taatacccgatagtatagtt

SEQ ID NO: 7180 - DNA, 20 bp, Globicatella sanguinis
caagtcgaacgaaccataac

SEQ ID NO: 7181 - DNA, 20 bp, Alloiococcus otitis
ataccgcataagttttccca

SEQ ID NO: 7182 - DNA, 20 bp, Moraxella atlantae
taagatgtgcctaaattaga

SEQ ID NO: 7183 - DNA, 20 bp, Bacillus schlegellii
agatgggcctttcccgcgag

SEQ ID NO: 7184 - DNA, 20 bp, Pseudoramibacter alactolyticus
cagcagaatcgcatgacttt

SEQ ID NO: 7185 - DNA, 20 bp, Bacteroides vulgatus
tctactcttggacagccttc

SEQ ID NO: 7186 - DNA, 20 bp, Weeksella virosa
tgcttttatatgtgaataaa

SEQ ID NO: 7187 - DNA, 30 bp, Citrobacter sedlakii
tacctggtcttgacatccacggaagactgc

SEQ ID NO: 7188 - DNA, 20 bp, Cardiobacterium hominis
tcgcggcaagagatgagccc

SEQ ID NO: 7189 - DNA, 20 bp, Leuconostoc fallax
gaaatgatgttaatgtgacg

SEQ ID NO: 7190 - DNA, 20 bp, Myroides odoratimimus
tatttattgacgctgatgaa

SEQ ID NO: 7191 - DNA, 20 bp, Anaerobiospirillum succiniciproducens
gtttgggttccgcagctaac

SEQ ID NO: 7192 - DNA, 20 bp, Staphylococcus simulans
gggaagaacaaggatgtaag

SEQ ID NO: 7193 - DNA, 20 bp, Prevotella bivia
tctagattgcagcgcgaact

SEQ ID NO: 7194 - DNA, 30 bp, Weeksella virosa
gggggtacctgaagttggcgaccgtaacag

SEQ ID NO: 7195 - DNA, 20 bp, Prevotella bivia
taatgaggtccttcgggaca

SEQ ID NO: 7196 - DNA, 20 bp, Moraxella atlantae
aagagctagtggagaaacac

SEQ ID NO: 7197 - DNA, 20 bp, Suttonella indologenes
cgaacgagggaagcagcttg

SEQ ID NO: 7198 - DNA, 20 bp, Actinomyces radingae
gagtgtagcgggtaaagaag

SEQ ID NO: 7199 - DNA, 20 bp, Veillonella atypica
gggacgaatggttcttgtgc

SEQ ID NO: 7200 - DNA, 20 bp, Myroides odoratus
gtaattatttgacggtaccg

SEQ ID NO: 7201 - DNA, 30 bp, Atopobium parvulum
gatagccacgggaaaccgtggataataccg

SEQ ID NO: 7202 - DNA, 20 bp, Eubacterium moniliforme
cccaccaagtcaacgatggg

SEQ ID NO: 7203 - DNA, 20 bp, Leuconostoc fallax
aacgcatttcgcatgaagtg

SEQ ID NO: 7204 - DNA, 20 bp, Prevotella disiens
catgtaccattcgaataagg

SEQ ID NO: 7205 - DNA, 20 bp, Sphingobacterium multivorum
ttaacaccgcataacatatg

SEQ ID NO: 7206 - DNA, 20 bp, Bacteroides vulgatus
agatgaattacggtgaaagc

SEQ ID NO: 7207 - DNA, 20 bp, Sphingobacterium multivorum
tctacgtgtaggaagctgaa

SEQ ID NO: 7208 - DNA, 20 bp, Bacteroides ureolyticus
tagtttactagaatttagtg

SEQ ID NO: 7209 - DNA, 20 bp, Clostridium glycolicum
tgggaagcgagtgtcgaagg

SEQ ID NO: 7210 - DNA, 20 bp, Prevotella bivia
gaatagatagcttgctattt

SEQ ID NO: 7211 - DNA, 20 bp, Clostridium septicum
agtttcttcggaaacaaacc

SEQ ID NO: 7212 - DNA, 30 bp, Pasteurella multocida
gggactatttggccacctgccatgagatga

SEQ ID NO: 7213 - DNA, 20 bp, Staphylococcus chromogenes
tcgatagtgaaagacggtct

SEQ ID NO: 7214 - DNA, 30 bp, Vagococcus fluvialis
gtaatggcctaccaagaccgtgatgcatag

SEQ ID NO: 7215 - DNA, 20 bp, Bacillus sp
tctccttatgcaagaaaacg

SEQ ID NO: 7216 - DNA, 20 bp, Corynebacterium confusum
taatcgcttaaagttggcct

SEQ ID NO: 7217 - DNA, 20 bp, Bacteroides thetaiotaomicron
atatatttcccgcatgggtt

SEQ ID NO: 7218 - DNA, 20 bp, Streptococcus ratti
tggagtaaaaggctatggct

SEQ ID NO: 7219 - DNA, 20 bp, Actinomyces radingae
cgcctagagataggtgtgca

SEQ ID NO: 7220 - DNA, 20 bp, Leptotrichia buccalis
ctcaaccgcaggcctgcccc

SEQ ID NO: 7221 - DNA, 20 bp, Kocuria kristinae
ggatgcgactactgcccgca

SEQ ID NO: 7222 - DNA, 20 bp, Streptococcus ratti
cacaccgtgttttcttgagt

SEQ ID NO: 7223 - DNA, 20 bp, Alloiococcus otitis
accgcataggttttcccagt

SEQ ID NO: 7224 - DNA, 20 bp, Bacillus schlegellii
ggaaaggggcgacccgcttt

SEQ ID NO: 7225 - DNA, 20 bp, Psychrobacter phenylpyruvicus
gattccttagtgacgcagct

SEQ ID NO: 7226 - DNA, 20 bp, Campylobacter concisus
atactggatacgacatgtca

SEQ ID NO: 7227 - DNA, 20 bp, Prevotella oralis
cccattactacggcataccc

SEQ ID NO: 7228 - DNA, 20 bp, Kingella kingae
tacttgtacttggtggcgag

SEQ ID NO: 7229 - DNA, 20 bp, Clostridium innocuum
tgcttccaaaaagacttagt

SEQ ID NO: 7230 - DNA, 20 bp, Alloiococcus otitis
gaacgccaaatcttcctgct

SEQ ID NO: 7231 - DNA, 20 bp, Myroides odoratus
aaaattgccgttgatactgc

SEQ ID NO: 7232 - DNA, 20 bp, Bacteroides eggerthii
cccttatctatagttactat

SEQ ID NO: 7233 - DNA, 20 bp, Comamonas terrigena
aacgaaaagccctgggttaa

SEQ ID NO: 7234 - DNA, 20 bp, Actinomyces radingae
ttctttgggataacgctcag

SEQ ID NO: 7235 - DNA, 20 bp, Atopobium parvulum
actcgagaaagctccggcgg

SEQ ID NO: 7236 - DNA, 20 bp, Bacteroides capillosus
acgatctaatctttaaaacc

SEQ ID NO: 7237 - DNA, 20 bp, Bacillus sp
ccggataatacgttttcttg

SEQ ID NO: 7238 - DNA, 20 bp, Clostridium cadaveris
gtgtgaactagcggcggacg

SEQ ID NO: 7239 - DNA, 20 bp, Bacteroides ureolyticus
ccttccacagtggaatcagt

SEQ ID NO: 7240 - DNA, 20 bp, Moraxella atlantae
gaggaagagccagtggagaa

SEQ ID NO: 7241 - DNA, 20 bp, Methylobacterium mesophilicum
agcgggcacttcggtgtcag

SEQ ID NO: 7242 - DNA, 30 bp, Helcococcus kunzii
gttgggagtcaaatctcagtgacgcagcta

SEQ ID NO: 7243 - DNA, 20 bp, Bacteroides ureolyticus
acaccatggaagttgatctc

SEQ ID NO: 7244 - DNA, 20 bp, Actinomyces radingae
ggggcctttgtggtttctgg

SEQ ID NO: 7245 - DNA, 20 bp, Moraxella atlantae
agcttgctaggggaaatagt

SEQ ID NO: 7246 - DNA, 20 bp, Facklamia sourekii
cagtagagtaactgttactg

SEQ ID NO: 7247 - DNA, 30 bp, Brevibacillus thermoruber
tacaatggctggtacaacgggacgcaagcc

SEQ ID NO: 7248 - DNA, 30 bp, Arcanobacterium haemolyticum
gggccttttccatgggttctgtaccgtagc

SEQ ID NO: 7249 - DNA, 20 bp, Leptotrichia buccalis
accgcaggcctgccccggaa

SEQ ID NO: 7250 - DNA, 20 bp, Ignavigranum ruoffiae
ttagttaccagcattgagat

SEQ ID NO: 7251 - DNA, 20 bp, Prevotella disiens
tgacatctgatttgaattaa

SEQ ID NO: 7252 - DNA, 20 bp, Helcococcus kunzii
agaatttttcagttgatttc

SEQ ID NO: 7253 - DNA, 20 bp, Sphingobacterium multivorum
gcaatatgatgctaatctct

SEQ ID NO: 7254 - DNA, 20 bp, Prevotella disiens
ggcaaagagtgcttgcacac

SEQ ID NO: 7255 - DNA, 20 bp, Veillonella atypica
tgcgaatagtgcgaggattt

SEQ ID NO: 7256 - DNA, 20 bp, Bacteroides capilosus
  misc_feature (18)..(18): n is a, c, g, or t
aaataaatgacggtactnga

SEQ ID NO: 7257 - DNA, 20 bp, Suttonella indologenes
tgaagaaaggtttatggtta

SEQ ID NO: 7258 - DNA, 20 bp, Leuconostoc fallax
aatagttaatgtaggaaatg

SEQ ID NO: 7259 - DNA, 20 bp, Abiotrophia defectiva
cgactaggtgcttgcactag

SEQ ID NO: 7260 - DNA, 20 bp, Prevotella oralis
cactctgtgaatactgccgc

SEQ ID NO: 7261 - DNA, 20 bp, Bacteroides thetaiotaomicron
aagtcgaggggcatcagttt

SEQ ID NO: 7262 - DNA, 20 bp, Myroides odoratimimus
aaaagcttgcttttttgaga

SEQ ID NO: 7263 - DNA, 20 bp, Kytococcus sedentarius
atggggtttccctttgggct

SEQ ID NO: 7264 - DNA, 20 bp, Actinomyces meyeri
tgctccagctttgttggggt

SEQ ID NO: 7265 - DNA, 20 bp, Bacteroides eggerthii
gatagtatagtttttccgca

SEQ ID NO: 7266 - DNA, 20 bp, Bacillus psychrosaccharolyticus
agtcgagcgaattgttgagt

SEQ ID NO: 7267 - DNA, 20 bp, Sporosarcina ureae
gagtaactgtcctgtacctt

SEQ ID NO: 7268 - DNA, 20 bp, Dolosigranulum pigrum
aataccccataggtggattg

SEQ ID NO: 7269 - DNA, 30 bp, Streptococcus thoraltensis
aagcgaagaataggagtaagagtggaaagt

SEQ ID NO: 7270 - DNA, 20 bp, Bacteroides vulgatus
acccttgttgtcagttacta

SEQ ID NO: 7271 - DNA, 20 bp, Streptococcus sobrinus
ggacttgctccagtgttact

SEQ ID NO: 7272 - DNA, 20 bp, Moraxella atlantae
cataagattgtaaagcactt

SEQ ID NO: 7273 - DNA, 20 bp, Bacteroides distasonis
cggaccgaggtggaaacacc

SEQ ID NO: 7274 - DNA, 20 bp, Bacillus schlegellii
gggacggcggagacaggtgg

SEQ ID NO: 7275 - DNA, 20 bp, Helcococcus kunzii
aacgagaatttttcagtcga

SEQ ID NO: 7276 - DNA, 20 bp, Suttonella indologenes
aagcactttcgttagtgaag

SEQ ID NO: 7277 - DNA, 20 bp, Haemophilus aphrophilus
ttggggattgtgctttgagc

SEQ ID NO: 7278 - DNA, 20 bp, Eubacterium moniliforme
atgaaagaacaattaaagga

SEQ ID NO: 7279 - DNA, 20 bp, Suttonella indologenes
ggaagcagcttgctgcggac

SEQ ID NO: 7280 - DNA, 20 bp, Kingella kingae
ggttgatgctaatatcatta

SEQ ID NO: 7281 - DNA, 20 bp, Prevotella oralis
tctaatttggacgaaaggta

SEQ ID NO: 7282 - DNA, 20 bp, Facklamia languida
agtccttcgggacatccata

SEQ ID NO: 7283 - DNA, 20 bp, Bacillus schlegellii
gggtgctaggtgtgggtggg

SEQ ID NO: 7284 - DNA, 30 bp, Bacteroides vulgatus
gtaacacgtatccaacctgccgtctactct

SEQ ID NO: 7285 - DNA, 20 bp, Dolosigranulum pigrum
aattcattaaaggtggcttt

SEQ ID NO: 7286 - DNA, 20 bp, Prevotella oralis
tacggcataccccgttgaaa

SEQ ID NO: 7287 - DNA, 20 bp, Facklamia sourekii
cgcatgagtttgagttgaaa

SEQ ID NO: 7288 - DNA, 30 bp, Dolosigranulum pigrum
aatggatggtacaacgagcagcgatcccgc

SEQ ID NO: 7289 - DNA, 20 bp, Cardiobacterium hominis
gcgtcgggttgttaaagact

SEQ ID NO: 7290 - DNA, 20 bp, Bacteroides capillosus
caacctttgatggcgaccgg

SEQ ID NO: 7291 - DNA, 20 bp, Streptococcus acidominimus
acagtaagccaatctcttaa

SEQ ID NO: 7292 - DNA, 20 bp, Paenibacillus apiarius
atgggaaagacggagcaatc

SEQ ID NO: 7293 - DNA, 30 bp, Clostridium limosum
gttgaaatgattaaaggagtaatccgcttt

SEQ ID NO: 7294 - DNA, 20 bp, Helcococcus kunzii
cggaatgaaaccgaaaaagg

SEQ ID NO: 7295 - DNA, 20 bp, Abiotrophia defectiva
ataggacatggaatcacatg

SEQ ID NO: 7296 - DNA, 20 bp, Staphylococcus simulans
acaaggatgtaagtaactgt

SEQ ID NO: 7297 - DNA, 20 bp, Facklamia languida
ggatgcataacctagagata

SEQ ID NO: 7298 - DNA, 20 bp, Prevotella loescheii
ttgagtgcgctgaaagtagg

SEQ ID NO: 7299 - DNA, 20 bp, Pasteurella multocida
gagcaataagcttggtgctc

SEQ ID NO: 7300 - DNA, 20 bp, Brevibacillus reuszeri
acgctagcccgcgagggtat

SEQ ID NO: 7301 - DNA, 30 bp, Prevotella oralis
actctgtgaatactgccgccgtaaggtgtg

SEQ ID NO: 7302 - DNA, 20 bp, Leptotrichia buccalis
gctactggtccaaccgcaag

SEQ ID NO: 7303 - DNA, 20 bp, Bacteroides capilosus
ctggagaggcaatcggaatt

SEQ ID NO: 7304 - DNA, 20 bp, Abiotrophia defectiva
accgcataggacatgggatc

SEQ ID NO: 7305 - DNA, 30 bp, Streptococcus acidominimus
gatagctaataccgcataagagttgacaac

SEQ ID NO: 7306 - DNA, 20 bp, Streptococcus ratti
gtcaagaacgtgtgtgagag

SEQ ID NO: 7307 - DNA, 20 bp, Myroides odoratus
agggttcgtaggcggttgag

SEQ ID NO: 7308 - DNA, 20 bp, Brevibacillus thermoruber
ggtcgggtaagtctgatgtc

SEQ ID NO: 7309 - DNA, 20 bp, Prevotella oralis
tgcagtccgaagcagtcatc

SEQ ID NO: 7310 - DNA, 20 bp, Facklamia languida
agtcgaacgaacagcgactt

SEQ ID NO: 7311 - DNA, 20 bp, Facklamia languida
gtggcctaacttaggaggga

SEQ ID NO: 7312 - DNA, 20 bp, Ignavigranum ruoffiae
tgactcattggggaaagatg

SEQ ID NO: 7313 - DNA, 20 bp, Helcococcus kunzii
acattaatatcgcatgatgt

SEQ ID NO: 7314 - DNA, 20 bp, Clostridium sordellii
gataaaatatgagagtcgca

SEQ ID NO: 7315 - DNA, 30 bp, Vagococcus fluvialis
gctccaccgaaaatcaaagagtggcggacg

SEQ ID NO: 7316 - DNA, 20 bp, Pseudoramibacter alactolyticus
gcataacacagcagaatcgc

SEQ ID NO: 7317 - DNA, 20 bp, Alloiococcus otitis
cccagtgcatgctgggaaaa

SEQ ID NO: 7318 - DNA, 20 bp, Bacteroides vulgatus
atacaagatggcatcatgag

SEQ ID NO: 7319 - DNA, 20 bp, Prevotella oralis
ctgggaatcttgagtacgca

SEQ ID NO: 7320 - DNA, 20 bp, Ignavigranum ruoffiae
agaagaaccatcctgtatta

SEQ ID NO: 7321 - DNA, 20 bp, Clostridium limosum
catttcaatgcatgttgaaa

SEQ ID NO: 7322 - DNA, 30 bp, Sphingobacterium multivorum
acatgcaagtcggacgggatccatcggaga

SEQ ID NO: 7323 - DNA, 30 bp, Clostridium histolyticum
taatatctttttaatgcatgttagaaagat

SEQ ID NO: 7324 - DNA, 20 bp, Anaerobiospirillum succiniciproducens
aaggcttgggaatctgcctg

SEQ ID NO: 7325 - DNA, 20 bp, Streptococcus thoraltensis
agtttactctatgacggtag

SEQ ID NO: 7326 - DNA, 20 bp, Corynebacterium kutscheri
gcttgcaagagagtactcga

SEQ ID NO: 7327 - DNA, 20 bp, Sporosarcina pasteurii
catagccgtctttcagagtt

SEQ ID NO: 7328 - DNA, 20 bp, Dolosigranulum pigrum
ccctcggtgctggagctaac

SEQ ID NO: 7329 - DNA, 20 bp, Pseudoramibacter alactolyticus
acccttcggggggatataag

SEQ ID NO: 7330 - DNA, 20 bp, Sporosarcina ureae
ggagtaactgtcctgtacct

SEQ ID NO: 7331 - DNA, 20 bp, Prevotella bivia
tatatggggataaagtgggg

SEQ ID NO: 7332 - DNA, 20 bp, Moraxella atlantae
aagatgtgcctaaattagat

SEQ ID NO: 7333 - DNA, 20 bp, Clostridium clostridiiforme
atccccctgacgggccggta

SEQ ID NO: 7334 - DNA, 20 bp, Atopobium parvulum
gtgggggagtatttcttccg

SEQ ID NO: 7335 - DNA, 20 bp, Corynebacterium group ANF
gataggactgcagggtggtg

SEQ ID NO: 7336 - DNA, 20 bp, Prevotella oralis
gttgaaaggcggcctaattc

SEQ ID NO: 7337 - DNA, 20 bp, Kingella kingae
gaagagagtagagatactct

SEQ ID NO: 7338 - DNA, 20 bp, Weeksella virosa
gggctcagtggttaagcgaa

SEQ ID NO: 7339 - DNA, 20 bp, Myroides odoratus
ttactacgtacttattgacg

SEQ ID NO: 7340 - DNA, 30 bp, Staphylococcus muscae
cctttgaccgcactagagatagtgttttcc

SEQ ID NO: 7341 - DNA, 20 bp, Actinomyces turicensis
gacatgcaccctgacgctgc

SEQ ID NO: 7342 - DNA, 20 bp, Streptococcus ratti
agggaacacactgtgcttgc

SEQ ID NO: 7343 - DNA, 30 bp, Actinomyces radingae
agataggtgtgcatttggttgggggtgtgc

SEQ ID NO: 7344 - DNA, 20 bp, Bacteroides capilosus
agaggcaatcggaattccgt

SEQ ID NO: 7345 - DNA, 20 bp, Facklamia languida
gatgcataacctagagatag

SEQ ID NO: 7346 - DNA, 20 bp, Peptostreptococcus anaerobius
atgcttgcattaatgaaaga

SEQ ID NO: 7347 - DNA, 20 bp, Leuconostoc fallax
atcacttcggtgagacgtaa

SEQ ID NO: 7348 - DNA, 20 bp, Myroides odoratimimus
atctccaaagcttgtctcag

SEQ ID NO: 7349 - DNA, 20 bp, Ignavigranum ruoffiae
aagtcgaacgcacaacgaag

SEQ ID NO: 7350 - DNA, 20 bp, Streptococcus acidominimus
gaactggtgacagtaagcca

SEQ ID NO: 7351 - DNA, 20 bp, Sphingobacterium multivorum
tgcagagacgcactcgtcct

SEQ ID NO: 7352 - DNA, 20 bp, Abiotrophia defectiva
taggtgcttgcactaggtca

SEQ ID NO: 7353 - DNA, 20 bp, Streptococcus ratti
gagtaaaaggctatggctca

SEQ ID NO: 7354 - DNA, 30 bp, Facklamia languida
tacccttaagcgggggataaccattggaaa

SEQ ID NO: 7355 - DNA, 20 bp, Bacteroides vulgatus
gttctgctgaggactctgac

SEQ ID NO: 7356 - DNA, 20 bp, Leuconostoc fallax
acggttcgttaagtctgaag

SEQ ID NO: 7357 - DNA, 20 bp, Actinomyces radingae
gcttgtggcttaaccttttt

SEQ ID NO: 7358 - DNA, 20 bp, Dolosigranulum pigrum
caggcggtctgtttagtcta

SEQ ID NO: 7359 - DNA, 20 bp, Ochrobactrum intermedium
ctaataccctatacgaccga

SEQ ID NO: 7360 - DNA, 20 bp, Bacteroides distasonis
agcagggatcccgcatggga

SEQ ID NO: 7361 - DNA, 20 bp, Alloiococcus otitis
cctgcttgcaggaagaggcg

SEQ ID NO: 7362 - DNA, 20 bp, Clostridium cadaveris
agatgagcactctagctaga

SEQ ID NO: 7363 - DNA, 20 bp, Brevibacterium epidermidis
cacctgacgcatgttgggtg

SEQ ID NO: 7364 - DNA, 20 bp, Lactococcus raffinolactis
aagaacgttgcatagagtgg

SEQ ID NO: 7365 - DNA, 20 bp, Actinomyces radingae
acgctcagaaatgggtgcta

SEQ ID NO: 7366 - DNA, 20 bp, Streptococcus sobrinus
ccagtgttactaatgagtcg

SEQ ID NO: 7367 - DNA, 20 bp, Paenibacillus apiarius
cattttcctcgcctgaggga

SEQ ID NO: 7368 - DNA, 20 bp, Leptotrichia buccalis
cctgtaagtctagggtgaaa

SEQ ID NO: 7369 - DNA, 20 bp, Paenibacillus peoriae
catcctttttctgcatggaa

SEQ ID NO: 7370 - DNA, 20 bp, Prevotella bivia
tcgtttgatctcatgagatt

SEQ ID NO: 7371 - DNA, 20 bp, Leuconostoc fallax
atggctagagtggcgaacgg

SEQ ID NO: 7372 - DNA, 20 bp, Leuconostoc fallax
tgagacgtaaagcatatggc

SEQ ID NO: 7373 - DNA, 20 bp, Paenibacillus macerans
ggataatttattttgcagca

SEQ ID NO: 7374 - DNA, 20 bp, Leuconostoc lactis
ctcgtttagattgaaggagc

SEQ ID NO: 7375 - DNA, 30 bp, Moraxella atlantae
agtatatgagaggaaagtagaattccaggt

SEQ ID NO: 7376 - DNA, 20 bp, Facklamia sourekii
agtttgagttgaaagacggc

SEQ ID NO: 7377 - DNA, 20 bp, Prevotella bivia
acgaataaagatttatcggt

SEQ ID NO: 7378 - DNA, 20 bp, Weeksella virosa
tgaagtagctagaatgtgta

SEQ ID NO: 7379 - DNA, 30 bp, Alloiococcus otitis
ccacgagagtctgaaacacccgaagccggc

SEQ ID NO: 7380 - DNA, 20 bp, Sphingobacterium multivorum
cgaagacggtgagagtggcg

SEQ ID NO: 7381 - DNA, 30 bp, Clostridium tetani
aggattaataccgcataaagttaaggtttc

SEQ ID NO: 7382 - DNA, 20 bp, Corynebacterium group ANF
cgaagccgcttgctccactt

SEQ ID NO: 7383 - DNA, 20 bp, Alloiococcus otitis
aaagcgactttctgggctat

SEQ ID NO: 7384 - DNA, 20 bp, Bacteroides eggerthii
tgggcgccttgagtgcagca

SEQ ID NO: 7385 - DNA, 20 bp, Paenibacillus pabuli
agttgagagaaagcttgctt

SEQ ID NO: 7386 - DNA, 20 bp, Pediococcus inopinatus
atcctcttaaaaccgttctc

SEQ ID NO: 7387 - DNA, 20 bp, Leuconostoc fallax
ctgatcacttcggtgagacg

SEQ ID NO: 7388 - DNA, 20 bp, Paenibacillus alvei
gttgatgaagtgcttgcact

SEQ ID NO: 7389 - DNA, 30 bp, Veillonella atypica
gtgcgaatagtgcgaggatttgacggtacc

SEQ ID NO: 7390 - DNA, 20 bp, Staphylococcus lentus
ttcaatgttgaaagacggtt

SEQ ID NO: 7391 - DNA, 20 bp, Bacillus schlegellii
gtgcagcggaaactggcggg

SEQ ID NO: 7392 - DNA, 20 bp, Staphylococcus chromogenes
gatagtgaaagacggtcttg

SEQ ID NO: 7393 - DNA, 20 bp, Bacillus schlegellii
gggggcgcccgaaggcgcgt

SEQ ID NO: 7394 - DNA, 20 bp, Bacteroides distasonis
ggaggccacctggcgacagg

SEQ ID NO: 7395 - DNA, 20 bp, Bacteroides vulgatus
cctgccgtctactcttggac

SEQ ID NO: 7396 - DNA, 30 bp, Alloiococcus otitis
ttgcccataagagggggataacacccggaa

SEQ ID NO: 7397 - DNA, 20 bp, Weeksella virosa
tgaaagatttatcgctataa

SEQ ID NO: 7398 - DNA, 20 bp, Kingella kingae
acttgtacttggtggcgagt

SEQ ID NO: 7399 - DNA, 20 bp, Bacteroides eggerthii
ggaataaagtggagtatgca

SEQ ID NO: 7400 - DNA, 20 bp, Streptococcus thoraltensis
tagctttttaaaaggtgcaa

SEQ ID NO: 7401 - DNA, 30 bp, Corynebacterium group ANF
tttaaagctggtcgtagttcggattggggt

SEQ ID NO: 7402 - DNA, 20 bp, Bacteroides eggerthii
acgggaataaagtggagtat

SEQ ID NO: 7403 - DNA, 20 bp, Clostridium limosum
catgttgaaatgattaaagg

SEQ ID NO: 7404 - DNA, 20 bp, Kocuria kristinae
actactgcccgcatgggctg

SEQ ID NO: 7405 - DNA, 20 bp, Facklamia sourekii
tgagtttaagttgaaagacg

SEQ ID NO: 7406 - DNA, 20 bp, Campylobacter lari
gcgactagcttgctagttgt

SEQ ID NO: 7407 - DNA, 20 bp, Actinomyces turicensis
atgatgctccaactttgttg

SEQ ID NO: 7408 - DNA, 20 bp, Dolosigranulum pigrum
tgtttagtctaatgtgaaag

SEQ ID NO: 7409 - DNA, 20 bp, Bacillus sp
ccccgaaggggttctacttg

SEQ ID NO: 7410 - DNA, 20 bp, Peptoniphilus indolicus
gcaaggaagcagatgccgaa

SEQ ID NO: 7411 - DNA, 30 bp, Paenibacillus macerans
cggataatttattttgcagcattgtggaat

SEQ ID NO: 7412 - DNA, 20 bp, Lactococcus raffinolactis
tggatgcatattcgacattt

SEQ ID NO: 7413 - DNA, 20 bp, Peptoniphilus indolicus
ccgcaaggaagcagatgccg

SEQ ID NO: 7414 - DNA, 20 bp, Actinomyces radingae
cctttgtggtttctggaggg

SEQ ID NO: 7415 - DNA, 20 bp, Bacteroides distasonis
cgcatgaagcagggatcccg

SEQ ID NO: 7416 - DNA, 20 bp, Streptococcus ratti
gctctggaaactgtctgact

SEQ ID NO: 7417 - DNA, 30 bp, Moraxella atlantae
acgggtgagtaacatttaggaaactgcctt

SEQ ID NO: 7418 - DNA, 20 bp, Brevibacillus thermoruber
ccgcaagaccgggataacgt

SEQ ID NO: 7419 - DNA, 30 bp, Atopobium parvulum
ggttaggccgggcacccatacgagaccgcc

SEQ ID NO: 7420 - DNA, 20 bp, Gemella morbillorum
atacatgtaagagacggtac

SEQ ID NO: 7421 - DNA, 20 bp, Arcanobacterium haemolyticum
gaacgatgaaggctcctgct

SEQ ID NO: 7422 - DNA, 20 bp, Aerococcus viridans
caaatctctcaaagccattc

SEQ ID NO: 7423 - DNA, 30 bp, Aerococcus christensenii
aagtcgagcgaacagagaaagtgcttgcac

SEQ ID NO: 7424 - DNA, 20 bp, Anaerococcus tetradius
taatctgggtgccgcagcta

SEQ ID NO: 7425 - DNA, 30 bp, Actinomyces radingae
gcttgtaggcggtttgtcgcgcctgtcgtg

SEQ ID NO: 7426 - DNA, 20 bp, Haemophilus segnis
taggcatcacgattgacgtt

SEQ ID NO: 7427 - DNA, 20 bp, Streptococcus thoraltensis
agagatagaacttttcttag

SEQ ID NO: 7428 - DNA, 20 bp, Anaerobiospirillum succiniciproducens
ttaggagcttgaacttcggt

SEQ ID NO: 7429 - DNA, 20 bp, Moraxella atlantae
gtaaagctgagaactgtaag

SEQ ID NO: 7430 - DNA, 30 bp, Bacteroides vulgatus
tggacagccttctgaaaggaagattaatac

SEQ ID NO: 7431 - DNA, 20 bp, Moraxella atlantae
cgaacgatggaacctagctt

SEQ ID NO: 7432 - DNA, 20 bp, Prevotella bivia
attcgtttgatctcatgaga

SEQ ID NO: 7433 - DNA, 20 bp, Clostridium histolyticum
gcatgttagaaagattaaag

SEQ ID NO: 7434 - DNA, 20 bp, Moraxella atlantae
aacatttaggaaactgcctt

SEQ ID NO: 7435 - DNA, 20 bp, Propionibacterium acnes
aggactaagtcggtacaagg

SEQ ID NO: 7436 - DNA, 20 bp, Prevotella disiens
acggcaaagagtgcttgcac

SEQ ID NO: 7437 - DNA, 20 bp, Bacillus marinus
tctcctgagagtcagttgaa

SEQ ID NO: 7438 - DNA, 20 bp, Moraxella atlantae
tgagaatcctacagagatgt

SEQ ID NO: 7439 - DNA, 20 bp, Dolosigranulum pigrum
ggctagctaatctttcaaag

SEQ ID NO: 7440 - DNA, 20 bp, Peptoniphilus indolicus
gtcagatgtgaaaggcgagg

SEQ ID NO: 7441 - DNA, 20 bp, Alloiococcus otitis
gccggccgggcaaccatttg

SEQ ID NO: 7442 - DNA, 20 bp, Streptococcus acidominimus
caacgagcagcgaactggtg

SEQ ID NO: 7443 - DNA, 20 bp, Bacteroides uniformis
gcaggagcgccctagggtaa

SEQ ID NO: 7444 - DNA, 20 bp, Weeksella virosa
agaatgggatagcccggaga

SEQ ID NO: 7445 - DNA, 20 bp, Leuconostoc fallax
cctgatcacttcggtgagac

SEQ ID NO: 7446 - DNA, 30 bp, Bacteroides vulgatus
gtgccataacgagcgcaacccttgttgtca

SEQ ID NO: 7447 - DNA, 30 bp, Dolosigranulum pigrum
tttagtctaatgtgaaagcccacggcttaa

SEQ ID NO: 7448 - DNA, 20 bp, Leptotrichia buccalis
gcaaaacggtaacgtttagc

SEQ ID NO: 7449 - DNA, 20 bp, Anaerobiospirillum succiniciproducens
tctaaactgcctttctagag

SEQ ID NO: 7450 - DNA, 20 bp, Weeksella virosa
ttgccttatagaatgggata

SEQ ID NO: 7451 - DNA, 20 bp, Bacteroides vulgatus
aacctgccgtctactcttgg

SEQ ID NO: 7452 - DNA, 20 bp, Atopobium parvulum
cgctcgctctcgataccggc

SEQ ID NO: 7453 - DNA, 20 bp, Helcococcus kunzii
acgagaatttttcagttgat

SEQ ID NO: 7454 - DNA, 20 bp, Haemophilus segnis
ggaaggcgtgatgtttaata

SEQ ID NO: 7455 - DNA, 20 bp, Bacteroides thetaiotaomicron
tccgatagcatatatttccc

SEQ ID NO: 7456 - DNA, 20 bp, Bacteroides vulgatus
ggacagccttctgaaaggaa

SEQ ID NO: 7457 - DNA, 20 bp, Prevotella oralis
ccggggcatcgatcggtagg

SEQ ID NO: 7458 - DNA, 20 bp, Cardiobacterium hominis
agagatgagcccatgttgga

SEQ ID NO: 7459 - DNA, 20 bp, Ignavigranum ruoffiae
cttgacatccgctgcatagc

SEQ ID NO: 7460 - DNA, 20 bp, Lactococcus raffinolactis
ataccgcataacaatgttgg

SEQ ID NO: 7461 - DNA, 20 bp, Streptococcus thoraltensis
gttctagagatagaactttt

SEQ ID NO: 7462 - DNA, 20 bp, Streptococcus sobrinus
tggaacgcattggtaacacc

SEQ ID NO: 7463 - DNA, 20 bp, Suttonella indologenes
gcacttaagtgctcggtacc

SEQ ID NO: 7464 - DNA, 20 bp, Anaerobiospirillum succiniciproducens
acggtgtggtctgtgactgg

SEQ ID NO: 7465 - DNA, 20 bp, Arcanobacterium haemolyticum
cctgcttgcgggggttggat

SEQ ID NO: 7466 - DNA, 20 bp, Dolosigranulum pigrum
tcggtgctggagctaacgta

SEQ ID NO: 7467 - DNA, 20 bp, Anaerobiospirillum succiniciproducens
ttaccacggtgtggtctgtg

SEQ ID NO: 7468 - DNA, 20 bp, Prevotella oralis
cagtccgaagcagtcatcta

SEQ ID NO: 7469 - DNA, 20 bp, Clostridium cadaveris
gggtgtgaactagcggcgga

SEQ ID NO: 7470 - DNA, 30 bp, Bacteroides vulgatus
gtattccggtagacgatggggatgcgttcc

SEQ ID NO: 7471 - DNA, 20 bp, Bacteroides capilosus
tctgagatggcctcgcgtct

SEQ ID NO: 7472 - DNA, 20 bp, Moraxella atlantae
tctgctataagatgtgccta

SEQ ID NO: 7473 - DNA, 20 bp, Peptoniphilus indolicus
ggactcgcgtctgattaatt

SEQ ID NO: 7474 - DNA, 20 bp, Bacteroides eggerthii
atgcatactcctttgtatgt

SEQ ID NO: 7475 - DNA, 30 bp, Clostridium cadaveris
acatgcaagtcgagcgagggagcaccttcg

SEQ ID NO: 7476 - DNA, 20 bp, Bacteroides vulgatus
ggagcgtagatggatgttta

SEQ ID NO: 7477 - DNA, 30 bp, Aerococcus christensenii
taggaagtttgttcgcatgaacaaacttag

SEQ ID NO: 7478 - DNA, 20 bp, Brevibacillus thermoruber
cattggaaactgctcgactt

SEQ ID NO: 7479 - DNA, 20 bp, Anaerococcus prevotii
gcttgtaatacccgaagcct

SEQ ID NO: 7480 - DNA, 20 bp, Atopobium parvulum
ccgaatacttcgagacttcc

SEQ ID NO: 7481 - DNA, 20 bp, Staphylococcus lutrae
aacacatgtgtaagtcacta

SEQ ID NO: 7482 - DNA, 20 bp, Arthrobacter globiformis
aggcttgctgggtggattag

SEQ ID NO: 7483 - DNA, 20 bp, Leptotrichia buccalis
ctgtaagtctagggtgaaaa

SEQ ID NO: 7484 - DNA, 20 bp, Corynebacterium confusum
accgcactttggtgtgtgtg

SEQ ID NO: 7485 - DNA, 20 bp, Paenibacillus macerans
ataatttattttgcagcatt

SEQ ID NO: 7486 - DNA, 20 bp, Moraxella atlantae
gaagaaggtcataagattgt

SEQ ID NO: 7487 - DNA, 20 bp, Leptotrichia buccalis
agatcttgacatcctgcgta

SEQ ID NO: 7488 - DNA, 20 bp, Pseudoramibacter alactolyticus
gcagaatcgcatgactttgc

SEQ ID NO: 7489 - DNA, 20 bp, Vagococcus fluvialis
aataataaaagacgcttcgg

SEQ ID NO: 7490 - DNA, 30 bp, Prevotella oris
tgcttccccgggcgtcgaccggcgcacggg

SEQ ID NO: 7491 - DNA, 20 bp, Empedobacter brevis
atgcgaatctcgaaaactta

SEQ ID NO: 7492 - DNA, 20 bp, Pasteurella multocida
agggtgggactatttggcca

SEQ ID NO: 7493 - DNA, 30 bp, Peptoniphilus indolicus
aaggatttcgattcgtaaagctctgtccta

SEQ ID NO: 7494 - DNA, 20 bp, Aerococcus christensenii
tttgttcgcatgaacaaact

SEQ ID NO: 7495 - DNA, 20 bp, Streptococcus sobrinus
taactcatgttaactgttta

SEQ ID NO: 7496 - DNA, 20 bp, Kocuria kristinae
taatacccggatgcgactac

SEQ ID NO: 7497 - DNA, 20 bp, Dermacoccus nishinomiyaensis
actggatacgaccgatctcc

SEQ ID NO: 7498 - DNA, 20 bp, Helcococcus kunzii
taccttatgatacattaata

SEQ ID NO: 7499 - DNA, 20 bp, Corynebacterium confusum
ctaatcgcttaaagttggcc

SEQ ID NO: 7500 - DNA, 20 bp, Weeksella virosa
agatagacatgcgtaagatt

SEQ ID NO: 7501 - DNA, 20 bp, Bacillus sp
cccccgaaggggttctactt

SEQ ID NO: 7502 - DNA, 20 bp, Dolosigranulum pigrum
ttgctaccactcatggatag

SEQ ID NO: 7503 - DNA, 20 bp, Bacteroides ureolyticus
tggacttgacatcctaaaaa

SEQ ID NO: 7504 - DNA, 20 bp, Dolosigranulum pigrum
cgatcccgcaagggctagct

SEQ ID NO: 7505 - DNA, 20 bp, Atopobium parvulum
atttcttccgtgccgcagct

SEQ ID NO: 7506 - DNA, 30 bp, Suttonella indologenes
cctagtggcggacgggtgagtaacgtatag

SEQ ID NO: 7507 - DNA, 20 bp, Actinomyces radingae
ctcgtgtgcaagccgctatt

SEQ ID NO: 7508 - DNA, 20 bp, Methylobacterium mesophilicum
cgggcacttcggtgtcagcg

SEQ ID NO: 7509 - DNA, 20 bp, Moraxella atlantae
atggaacctagcttgctagg

SEQ ID NO: 7510 - DNA, 30 bp, Pseudoramibacter alactolyticus
gaacgagaagttttttattgacccttcggg

SEQ ID NO: 7511 - DNA, 20 bp, Cardiobacterium hominis
ggcgtcgggttgttaaagac

SEQ ID NO: 7512 - DNA, 20 bp, Prevotella oralis
catctaatttggacgaaagg

SEQ ID NO: 7513 - DNA, 20 bp, Sphingobacterium multivorum
gacgggatccgtcggagagc

SEQ ID NO: 7514 - DNA, 20 bp, Anaerococcus prevotii
cttgtaatacccgaagcctg

SEQ ID NO: 7515 - DNA, 20 bp, Bacillus marinus
ggagttagagaagcttgctt

SEQ ID NO: 7516 - DNA, 20 bp, Campylobacter lari
aacgatgaagcgactagctt

SEQ ID NO: 7517 - DNA, 20 bp, Kingella kingae
ttaactgatgacggtaccta

SEQ ID NO: 7518 - DNA, 20 bp, Bacteroides eggerthii
attgaagcttgcttcaatcg

SEQ ID NO: 7519 - DNA, 20 bp, Moraxella atlantae
aaggaggcgagagcttttgc

SEQ ID NO: 7520 - DNA, 20 bp, Veillonella atypica
agactggatgaaaggtggcc

SEQ ID NO: 7521 - DNA, 20 bp, Cardiobacterium hominis
ccgaaaggcctcgcggcaag

SEQ ID NO: 7522 - DNA, 20 bp, Moraxella atlantae
aaacacactggtggtgacgt

SEQ ID NO: 7523 - DNA, 20 bp, Prevotella bivia
gtggtacagatagttggtcg

SEQ ID NO: 7524 - DNA, 20 bp, Eubacterium moniliforme
tactttcgcatgaaagaaca

SEQ ID NO: 7525 - DNA, 20 bp, Bacteroides vulgatus
aggtattccggtagacgatg

SEQ ID NO: 7526 - DNA, 20 bp, Streptococcus infantarius
ctcacacacattcttctctt

SEQ ID NO: 7527 - DNA, 20 bp, Prevotella oralis
ttaaagccgggcactctgtg

SEQ ID NO: 7528 - DNA, 20 bp, Bacteroides ureolyticus
agtttactagaatttagtga

SEQ ID NO: 7529 - DNA, 20 bp, Leptotrichia buccalis
tgacatcctgcgtatgcccg

SEQ ID NO: 7530 - DNA, 20 bp, Clostridium histolyticum
caatctcacaaagccaatct

SEQ ID NO: 7531 - DNA, 20 bp, Ignavigranum ruoffiae
ctaataccgcataggccagt

SEQ ID NO: 7532 - DNA, 20 bp, Empedobacter brevis
gaatctcgaaaacttatctc

SEQ ID NO: 7533 - DNA, 20 bp, Bacillus schlegellii
gcagcgcactggcctgtaac

SEQ ID NO: 7534 - DNA, 20 bp, Streptococcus thoraltensis
aggtgcaacagcatcactta

SEQ ID NO: 7535 - DNA, 20 bp, Burkholderia gladioli
tgacgctggcggcatgcctt

SEQ ID NO: 7536 - DNA, 20 bp, Actinomyces radingae
ccgaagcttgtggcttaacc

SEQ ID NO: 7537 - DNA, 20 bp, Atopobium parvulum
agactcgagaaagctccggc

SEQ ID NO: 7538 - DNA, 20 bp, Pasteurella multocida
gaaggcaggtattttaatag

SEQ ID NO: 7539 - DNA, 20 bp, Bacillus schlegellii
caaccgtgggggtgcagcgg

SEQ ID NO: 7540 - DNA, 20 bp, Staphylococcus muscae
tgcttgcacctctgacgtta

SEQ ID NO: 7541 - DNA, 20 bp, Prevotella oralis
ttaaaacgtgcctcagttcg

SEQ ID NO: 7542 - DNA, 30 bp, Moraxella atlantae
aggctcaccatggcgacgatctataactgg

SEQ ID NO: 7543 - DNA, 20 bp, Streptococcus mutans
atgcaagtgggacgcaagga

SEQ ID NO: 7544 - DNA, 20 bp, Dolosigranulum pigrum
attaaaggtggctttgctac

SEQ ID NO: 7545 - DNA, 20 bp, Prevotella bivia
gtcgaggggcagcgaataga

SEQ ID NO: 7546 - DNA, 20 bp, Anaerobiospirillum succiniciproducens
gagcggatgcaccagaagta

SEQ ID NO: 7547 - DNA, 20 bp, Bacillus marinus
agtcgagcggagttagagaa

SEQ ID NO: 7548 - DNA, 20 bp, Granulicatella elegans
aaccgcataggttctagagt

SEQ ID NO: 7549 - DNA, 20 bp, Enterobacter sakazakii
taaccttggccattgacgtt

SEQ ID NO: 7550 - DNA, 20 bp, Bacillus marinus
cgagcggagttagagaagct

SEQ ID NO: 7551 - DNA, 20 bp, Abiotrophia defectiva
cttgcacttggtcaaggtga

SEQ ID NO: 7552 - DNA, 20 bp, Prevotella disiens
acggactaatacccaatgat

SEQ ID NO: 7553 - DNA, 30 bp, Empedobacter brevis
acgcagaacaccaattgcgaaggcaggtca

SEQ ID NO: 7554 - DNA, 20 bp, Prevotella oralis
gaatactgccgccgtaaggt

SEQ ID NO: 7555 - DNA, 20 bp, Facklamia sourekii
ccgacggagaaacttgtttc

SEQ ID NO: 7556 - DNA, 20 bp, Empedobacter brevis
gtatgcaacttgccctactg

SEQ ID NO: 7557 - DNA, 20 bp, Bacteroides distasonis
gaaacaccttttctaggcaa

SEQ ID NO: 7558 - DNA, 20 bp, Bacteroides distasonis
cttttctaggcaatagccgt

SEQ ID NO: 7559 - DNA, 20 bp, Bacteroides eggerthii
gcatgattgaagcttgcttc

SEQ ID NO: 7560 - DNA, 20 bp, Prevotella oralis
atggaggttgttttcaactt

SEQ ID NO: 7561 - DNA, 20 bp, Dolosigranulum pigrum
gcagtgattgattagtggcg

SEQ ID NO: 7562 - DNA, 30 bp, Clostridium septicum
gagtttcttcggaaacaaacctagcggcgg

SEQ ID NO: 7563 - DNA, 20 bp, Bacteroides distasonis
cttgccactagttactaaca

SEQ ID NO: 7564 - DNA, 20 bp, Bacteroides vulgatus
taatacaagatggcatcatg

SEQ ID NO: 7565 - DNA, 20 bp, Bacteroides distasonis
aagggaagccacctggcgac

SEQ ID NO: 7566 - DNA, 20 bp, Bacteroides vulgatus
gctgcaactgacattgaggc

SEQ ID NO: 7567 - DNA, 20 bp, Moraxella atlantae
ctaggaacagcatatgatac

SEQ ID NO: 7568 - DNA, 20 bp, Prevotella disiens
tcgaggggaaacggcaaaga

SEQ ID NO: 7569 - DNA, 20 bp, Eubacterium moniliforme
tcgcatgaaagaacaattaa

SEQ ID NO: 7570 - DNA, 20 bp, Streptococcus sobrinus
ttgctccagtgttactaatg

SEQ ID NO: 7571 - DNA, 20 bp, Prevotella oris
gatccaatccttaaatccgg

SEQ ID NO: 7572 - DNA, 20 bp, Bacteroides thetaiotaomicron
tatccgatagcatatatttc

SEQ ID NO: 7573 - DNA, 20 bp, Weeksella virosa
atagttgaaggtagcatatg

SEQ ID NO: 7574 - DNA, 20 bp, Veillonella atypica
gactggatgaaaggtggcct

SEQ ID NO: 7575 - DNA, 20 bp, Dolosigranulum pigrum
cgcaagggctagctaatctt

SEQ ID NO: 7576 - DNA, 20 bp, Bacteroides distasonis
gcgaatccccaaaccacgtc

SEQ ID NO: 7577 - DNA, 20 bp, Lactococcus raffinolactis
gaaagtaccaaatggtacac

SEQ ID NO: 7578 - DNA, 20 bp, Prevotella oralis
gccagccggcggggtaacgg

SEQ ID NO: 7579 - DNA, 20 bp, Bacillus schlegellii
gcgagggacggcggagacag

SEQ ID NO: 7580 - DNA, 20 bp, Veillonella atypica
aatctcggcatcgagactgg

SEQ ID NO: 7581 - DNA, 20 bp, Clostridium tetani
ttaaggtttcgcatgaaact

SEQ ID NO: 7582 - DNA, 20 bp, Streptococcus thoraltensis
attggtataaatgagtcgcg

SEQ ID NO: 7583 - DNA, 20 bp, Abiotrophia defectiva
taggacatggaatcacatga

SEQ ID NO: 7584 - DNA, 20 bp, Moraxella atlantae
taaattagattagctagatg

SEQ ID NO: 7585 - DNA, 20 bp, Streptococcus ratti
ttgcacaccgtgttttcttg

SEQ ID NO: 7586 - DNA, 20 bp, Atopobium parvulum
tgggggagtatttcttccgt

SEQ ID NO: 7587 - DNA, 20 bp, Pasteurella multocida
ctatttggccacctgccatg

SEQ ID NO: 7588 - DNA, 20 bp, Facklamia languida
gcgacttgaacttgttcaag

SEQ ID NO: 7589 - DNA, 20 bp, Bacteroides distasonis
ggtggaaacaccttttctag

SEQ ID NO: 7590 - DNA, 20 bp, Ignavigranum ruoffiae
tgagtcgcctgactcattgg

SEQ ID NO: 7591 - DNA, 20 bp, Prevotella oralis
taatttggacgaaaggtata

SEQ ID NO: 7592 - DNA, 20 bp, Weeksella virosa
ggggtacctgaagttggcga

SEQ ID NO: 7593 - DNA, 20 bp, Bacteroides vulgatus
tgtcagttactaacaggttc

SEQ ID NO: 7594 - DNA, 20 bp, Vagococcus fluvialis
gctccaccgaaaatcaaaga

SEQ ID NO: 7595 - DNA, 20 bp, Brevibacillus thermoruber
ataccggatagggcaccttc

SEQ ID NO: 7596 - DNA, 30 bp, Atopobium parvulum
ggctcaacccccgctcgctctcgataccgg

SEQ ID NO: 7597 - DNA, 20 bp, Streptococcus sobrinus
gaggtaaccatttatggggc

SEQ ID NO: 7598 - DNA, 20 bp, Bacteroides vulgatus
tcttggacagccttctgaaa

SEQ ID NO: 7599 - DNA, 20 bp, Clostridium innocuum
atacggagcgcatgctctgt

SEQ ID NO: 7600 - DNA, 20 bp, Clostridium clostridiiforme
gtgccgcatggcagtgtgtg

SEQ ID NO: 7601 - DNA, 30 bp, Veillonella atypica
atgggagttaatagacggaagcgaaaccgc

SEQ ID NO: 7602 - DNA, 20 bp, Bacteroides vulgatus
atggatacccgtttgcatgt

SEQ ID NO: 7603 - DNA, 20 bp, Paenibacillus apiarius
catccaaaactgcatgactt

SEQ ID NO: 7604 - DNA, 20 bp, Prevotella bivia
tttagagataatgaggtcct

SEQ ID NO: 7605 - DNA, 20 bp, Dolosigranulum pigrum
tctaacattgacgctgaggc

SEQ ID NO: 7606 - DNA, 20 bp, Dolosigranulum pigrum
agtcggccggccaaccctat

SEQ ID NO: 7607 - DNA, 20 bp, Clostridium cadaveris
aaggatgcgtaggtggaatt

SEQ ID NO: 7608 - DNA, 20 bp, Campylobacter lari
gttgtggattagtggcgcac

SEQ ID NO: 7609 - DNA, 20 bp, Prevotella oralis
ggcataccccgttgaaaggc

SEQ ID NO: 7610 - DNA, 20 bp, Peptostreptococcus anaerobius
gcttgcattaatgaaagatg

SEQ ID NO: 7611 - DNA, 20 bp, Dolosigranulum pigrum
accctatgggaggcagccgt

SEQ ID NO: 7612 - DNA, 20 bp, Comamonas terrigena
aagaccttgtgctactagag

SEQ ID NO: 7613 - DNA, 20 bp, Leptotrichia buccalis
tgtaatgcttaacacatgca

SEQ ID NO: 7614 - DNA, 20 bp, Streptococcus sobrinus
taactgtttaaaagaagcca

SEQ ID NO: 7615 - DNA, 20 bp, Myroides odoratus
actataaaattgccgttgat

SEQ ID NO: 7616 - DNA, 20 bp, Clostridium clostridiiforme
gttttcggatggatttgaaa

SEQ ID NO: 7617 - DNA, 20 bp, Moraxella atlantae
ggggctcatgaagccttagt

SEQ ID NO: 7618 - DNA, 20 bp, Dolosigranulum pigrum
cgatgatatcactgcttgca

SEQ ID NO: 7619 - DNA, 20 bp, Streptococcus thoraltensis
agaataggagtaagagtgga

SEQ ID NO: 7620 - DNA, 20 bp, Alloiococcus otitis
ataagttttcccagtgcatg

SEQ ID NO: 7621 - DNA, 20 bp, Leptotrichia buccalis
aacgactgataaaacctggt

SEQ ID NO: 7622 - DNA, 20 bp, Psychrobacter phenylpyruvicus
gtagcctaacttttagaggg

SEQ ID NO: 7623 - DNA, 20 bp, Paenibacillus macerans
tattttgcagcattgtggaa

SEQ ID NO: 7624 - DNA, 20 bp, Facklamia languida
acagcgacttgaacttgttc

SEQ ID NO: 7625 - DNA, 20 bp, Prevotella oralis
atccttaaaacgtgcctcag

SEQ ID NO: 7626 - DNA, 30 bp, Prevotella bivia
acgaataaagatttatcggttatggatggg

SEQ ID NO: 7627 - DNA, 20 bp, Staphylococcus simulans
agaacaaggatgtaagtaac

SEQ ID NO: 7628 - DNA, 20 bp, Bacteroides thetaiotaomicron
tcactggagtgtaactgacg

SEQ ID NO: 7629 - DNA, 20 bp, Myroides odoratus
atgaatggcatcgtttatat

SEQ ID NO: 7630 - DNA, 20 bp, Pediococcus dextrinicus
aattgaaagacggcctttgg

SEQ ID NO: 7631 - DNA, 20 bp, Dolosigranulum pigrum
agaagaacacgtgctaggta

SEQ ID NO: 7632 - DNA, 30 bp, Ignavigranum ruoffiae
gcattgagatggggactctaatgagactgc

SEQ ID NO: 7633 - DNA, 20 bp, Actinomyces turicensis
accctgacgctgcagagatg

SEQ ID NO: 7634 - DNA, 20 bp, Brevibacillus reuszeri
acgggacgctagcccgcgag

SEQ ID NO: 7635 - DNA, 20 bp, Corynebacterium group ANF
ccggtacagtaggttgcgag

SEQ ID NO: 7636 - DNA, 20 bp, Alloiococcus otitis
caaatcttcctgcttgcagg

SEQ ID NO: 7637 - DNA, 20 bp, Dolosigranulum pigrum
gctaggtaactactagcgcc

SEQ ID NO: 7638 - DNA, 20 bp, Streptococcus infantarius
gctaaagtttgaagagttgc

SEQ ID NO: 7639 - DNA, 20 bp, Dolosigranulum pigrum
agtgttgggggctttccggc

SEQ ID NO: 7640 - DNA, 20 bp, Weissella paramesenteroides
gctctgatgtgattttatct

SEQ ID NO: 7641 - DNA, 20 bp, Ignavigranum ruoffiae
tcgggacagcgagacaggtg

SEQ ID NO: 7642 - DNA, 20 bp, Clostridium clostridiiforme
aattaagatgaagttttcgg

SEQ ID NO: 7643 - DNA, 20 bp, Facklamia languida
aagcggctttctggtctgag

SEQ ID NO: 7644 - DNA, 20 bp, Clostridium clostridiiforme
atcttgattgactgagtggc

SEQ ID NO: 7645 - DNA, 20 bp, Chromobacterium violaceum
cagggaggaaatcccgctgg

SEQ ID NO: 7646 - DNA, 20 bp, Moraxella atlantae
ggtgcactaagtcatatgtg

SEQ ID NO: 7647 - DNA, 20 bp, Alloiococcus otitis
gccgggcaaccatttggagc

SEQ ID NO: 7648 - DNA, 20 bp, Actinomyces radingae
aggtgtgcatttggttgggg

SEQ ID NO: 7649 - DNA, 20 bp, Virgibacillus proomii
gcgggaagcaagcagaaccc

SEQ ID NO: 7650 - DNA, 20 bp, Bacteroides vulgatus
gcagatgaattacggtgaaa

SEQ ID NO: 7651 - DNA, 20 bp, Empedobacter brevis
gatttatcgcagtaggatag

SEQ ID NO: 7652 - DNA, 20 bp, Pasteurella multocida
attgagcaataagcttggtg

SEQ ID NO: 7653 - DNA, 20 bp, Sphingobacterium multivorum
gtcggacgggatccgtcgga

SEQ ID NO: 7654 - DNA, 30 bp, Prevotella bivia
gcgcacaacgtaggcggaattcatggtgta

SEQ ID NO: 7655 - DNA, 20 bp, Lactococcus raffinolactis
acatttgaaagtaccaattg

SEQ ID NO: 7656 - DNA, 20 bp, Sphingobacterium multivorum
gtgaagagtgcagagacgca

SEQ ID NO: 7657 - DNA, 20 bp, Actinomyces radingae
ggggggtgtgggaaaggggc

SEQ ID NO: 7658 - DNA, 20 bp, Actinomyces meyeri
cgcccggaaatgggtgctaa

SEQ ID NO: 7659 - DNA, 20 bp, Paenibacillus pabuli
gcggagttgagagaaagctt

SEQ ID NO: 7660 - DNA, 20 bp, Abiotrophia defectiva
gacatgggatcacatgattc

SEQ ID NO: 7661 - DNA, 30 bp, Moraxella atlantae
gggtgagtaacatttaggaaactgccttat

SEQ ID NO: 7662 - DNA, 20 bp, Bacillus marinus
catcccattgcccggtctag

SEQ ID NO: 7663 - DNA, 20 bp, Anaerococcus prevotii
tcgaaggtaggataggtgac

SEQ ID NO: 7664 - DNA, 20 bp, Facklamia languida
gagaacctacccttaagcgg

SEQ ID NO: 7665 - DNA, 20 bp, Campylobacter concisus
ctggatacgacatgtcaccg

SEQ ID NO: 7666 - DNA, 20 bp, Clostridium limosum
atcatttcaatgcatgttga

SEQ ID NO: 7667 - DNA, 20 bp, Bacillus schlegellii
aacctggcgactggggtgaa

SEQ ID NO: 7668 - DNA, 20 bp, Streptococcus acidominimus
agagtggaaaatttactctg

SEQ ID NO: 7669 - DNA, 20 bp, Bacteroides vulgatus
gaataaagtcgggtatgcat

SEQ ID NO: 7670 - DNA, 20 bp, Suttonella indologenes
cacttacgagtcaaagcggg

SEQ ID NO: 7671 - DNA, 20 bp, Abiotrophia defectiva
ttccgtgaggaaaggtggcg

SEQ ID NO: 7672 - DNA, 20 bp, Sphingobacterium multivorum
tcggacgggatccgtcggag

SEQ ID NO: 7673 - DNA, 20 bp, Clostridium histolyticum
tctttttaatgcatgttaga

SEQ ID NO: 7674 - DNA, 20 bp, Clostridium glycolicum
acataagagattcacatgta

SEQ ID NO: 7675 - DNA, 20 bp, Peptoniphilus indolicus
taacagacaccttcgggaag

SEQ ID NO: 7676 - DNA, 20 bp, Campylobacter lari
cgactagcttgctagttgtg

SEQ ID NO: 7677 - DNA, 20 bp, Bacillus schlegellii
acgggtccagagatgggcct

SEQ ID NO: 7678 - DNA, 20 bp, Bacillus marinus
ccggataaccctgactctct

SEQ ID NO: 7679 - DNA, 20 bp, Vagococcus fluvialis
accgaaaatcaaagagtggc

SEQ ID NO: 7680 - DNA, 20 bp, Facklamia sourekii
ccttaagctcgcatgagttt

SEQ ID NO: 7681 - DNA, 20 bp, Bacillus schlegellii
gcagcgctgaaggcgaacct

SEQ ID NO: 7682 - DNA, 20 bp, Pasteurella multocida
tgatgaggaaggcaggtatt

SEQ ID NO: 7683 - DNA, 20 bp, Prevotella bivia
atgtaggagctcaacttcta

SEQ ID NO: 7684 - DNA, 20 bp, Prevotella oralis
gtccaatccttaaaacgtgc

SEQ ID NO: 7685 - DNA, 20 bp, Suttonella indologenes
agtgaagaaaggtttatggt

SEQ ID NO: 7686 - DNA, 20 bp, Campylobacter lari
gtcgaacgatgaagcgacta

SEQ ID NO: 7687 - DNA, 20 bp, Dolosigranulum pigrum
aaggtggctttgctaccact

SEQ ID NO: 7688 - DNA, 20 bp, Bacteroides thetaiotaomicron
tgcaaatgaattatggggaa

SEQ ID NO: 7689 - DNA, 20 bp, Bacteroides vulgatus
gtttgcatgtactttatgaa

SEQ ID NO: 7690 - DNA, 30 bp, Streptococcus thoraltensis
aacgatagctaataccgcataaaaggagct

SEQ ID NO: 7691 - DNA, 20 bp, Sphingobacterium multivorum
ccaggaataaacctttctac

SEQ ID NO: 7692 - DNA, 20 bp, Leptotrichia buccalis
aaggtatctaaggtgtggat

SEQ ID NO: 7693 - DNA, 20 bp, Facklamia sourekii
ccattggagggagccgtcga

SEQ ID NO: 7694 - DNA, 20 bp, Moraxella atlantae
agggaggaagagccagtgga

SEQ ID NO: 7695 - DNA, 30 bp, Leptotrichia buccalis
gtgagagcgggcagtgccttcgggaacgca

SEQ ID NO: 7696 - DNA, 20 bp, Bacillus sp
gcaagtagaaccccttcggg

SEQ ID NO: 7697 - DNA, 20 bp, Leptotrichia buccalis
caggcctgccccggaaacta

SEQ ID NO: 7698 - DNA, 20 bp, Weeksella virosa
tatataaagctaggtggcat

SEQ ID NO: 7699 - DNA, 20 bp, Bacteroides ureolyticus
cctcatactcctatttgaca

SEQ ID NO: 7700 - DNA, 20 bp, Leptotrichia buccalis
cgctgcgggagagccttgcg

SEQ ID NO: 7701 - DNA, 20 bp, Bacteroides thetaiotaomicron
gctcactggagtgtaactga

SEQ ID NO: 7702 - DNA, 20 bp, Bacteroides distasonis
aacaccttttctagcaatag

SEQ ID NO: 7703 - DNA, 20 bp, Corynebacterium kutscheri
acgtttgtggagggagtggt

SEQ ID NO: 7704 - DNA, 20 bp, Actinomyces radingae
agcgcctagagataggtgtg

SEQ ID NO: 7705 - DNA, 20 bp, Prevotella oris
gggaagcttgcttccccggg

SEQ ID NO: 7706 - DNA, 20 bp, Paenibacillus alvei
ggagttgatgaagtgcttgc

SEQ ID NO: 7707 - DNA, 20 bp, Dolosigranulum pigrum
gaacacgtgctaggtaacta

SEQ ID NO: 7708 - DNA, 20 bp, Bacteroides capillosus
gcctagggcgaaactggtga

SEQ ID NO: 7709 - DNA, 20 bp, Lactococcus raffinolactis
agtcgcaaggcagtgatgtc

SEQ ID NO: 7710 - DNA, 20 bp, Helcococcus kunzii
ttgaacgagaatttttcagt

SEQ ID NO: 7711 - DNA, 20 bp, Helcococcus kunzii
gaatttttcagtcgatttct

SEQ ID NO: 7712 - DNA, 20 bp, Alloiococcus otitis
ggacttgaatgtagcagagg

SEQ ID NO: 7713 - DNA, 20 bp, Weeksella virosa
tgagtatcgcgtatgtaact

SEQ ID NO: 7714 - DNA, 20 bp, Paenibacillus apiarius
gatagacattttcctcgcct

SEQ ID NO: 7715 - DNA, 20 bp, Brevibacillus thermoruber
cttgcttcagacaggttagc

SEQ ID NO: 7716 - DNA, 20 bp, Psychrobacter phenylpyruvicus
ggaacttgattccttagtga

SEQ ID NO: 7717 - DNA, 20 bp, Bacteroides eggerthii
aatacccgatagtatagttt

SEQ ID NO: 7718 - DNA, 20 bp, Bacillus schlegellii
gggaagaagggccgcggagg

SEQ ID NO: 7719 - DNA, 20 bp, Alloiococcus otitis
tcactgcctatcccttgacg

SEQ ID NO: 7720 - DNA, 20 bp, Empedobacter brevis
cagtaggataggcatgcgta

SEQ ID NO: 7721 - DNA, 20 bp, Bacillus marinus
ctcctgagagtcagttgaaa

SEQ ID NO: 7722 - DNA, 20 bp, Myroides odoratus
gtaattacgtgtaattattt

SEQ ID NO: 7723 - DNA, 20 bp, Myroides odoratus
tgcttgacttgaatagtatg

SEQ ID NO: 7724 - DNA, 20 bp, Bacteroides vulgatus
ccgcatgttcacatgattaa

SEQ ID NO: 7725 - DNA, 20 bp, Prevotella disiens
gactaatacccaatgatatt

SEQ ID NO: 7726 - DNA, 20 bp, Facklamia sourekii
tgagtttgagttgaaagacg

SEQ ID NO: 7727 - DNA, 20 bp, Bacillus marinus
tgactctctcctgagagtca

SEQ ID NO: 7728 - DNA, 30 bp, Prevotella bivia
gaggtccttcgggacatctgtgaaggtgct

SEQ ID NO: 7729 - DNA, 20 bp, Helcococcus kunzii
ttagcgaagataatgacagt

SEQ ID NO: 7730 - DNA, 20 bp, Streptococcus thoraltensis
tcccggtgccggttctagag

SEQ ID NO: 7731 - DNA, 20 bp, Bacteroides eggerthii
tagtttttccgcatggtttc

SEQ ID NO: 7732 - DNA, 20 bp, Moraxella atlantae
acgatctataactggtctta

SEQ ID NO: 7733 - DNA, 20 bp, Prevotella bivia
gaggggcagcgaatagatag

SEQ ID NO: 7734 - DNA, 20 bp, Bacteroides vulgatus
cacatgattaaaggtattcc

SEQ ID NO: 7735 - DNA, 20 bp, Suttonella indologenes
ttaagtgctcggtaccgcag

SEQ ID NO: 7736 - DNA, 20 bp, Haemophilus segnis
ataggcatcacgattgacgt

SEQ ID NO: 7737 - DNA, 20 bp, Leuconostoc fallax
atttcgcatgaagtgtgttt

SEQ ID NO: 7738 - DNA, 20 bp, Pseudoramibacter alactolyticus
ttttttattgacccttcggg

SEQ ID NO: 7739 - DNA, 20 bp, Actinomyces radingae
cgaacgggatctgcgtggcc

SEQ ID NO: 7740 - DNA, 20 bp, Brevibacillus thermoruber
ctcgacttgagtgcagaaga

SEQ ID NO: 7741 - DNA, 20 bp, Anaerobiospirillum succiniciproducens
aaaggtaagtaggatgtgaa

SEQ ID NO: 7742 - DNA, 20 bp, Moraxella atlantae
cgatggaacctagcttgcta

SEQ ID NO: 7743 - DNA, 30 bp, Bacteroides distasonis
gtgcgggacgtgtcccgttttgtatgtacc

SEQ ID NO: 7744 - DNA, 20 bp, Prevotella oralis
ctgccattgacttgaataga

SEQ ID NO: 7745 - DNA, 20 bp, Prevotella bivia
tggtacagatagttggtcgt

SEQ ID NO: 7746 - DNA, 20 bp, Bacillus sp
tgcataaggagacgttaaaa

SEQ ID NO: 7747 - DNA, 20 bp, Clostridium cadaveris
gaagctctttcgggagcagg

SEQ ID NO: 7748 - DNA, 20 bp, Leuconostoc fallax
tagttaatgtaggaaatgat

SEQ ID NO: 7749 - DNA, 20 bp, Lactococcus raffinolactis
acatttgaaagtaccaaatg

SEQ ID NO: 7750 - DNA, 20 bp, Prevotella disiens
tttgcatgtaccattcgaat

SEQ ID NO: 7751 - DNA, 20 bp, Anaerobiospirillum succiniciproducens
agggagatggaatttcaggt

SEQ ID NO: 7752 - DNA, 20 bp, Weeksella virosa
gttggcgaccgtaacaggag

SEQ ID NO: 7753 - DNA, 30 bp, Clostridium tetani
taaagttaaggtttcgcatgaaactttaac

SEQ ID NO: 7754 - DNA, 30 bp, Moraxella atlantae
ttaggaaactgccttatagagggggatagc

SEQ ID NO: 7755 - DNA, 20 bp, Moraxella atlantae
aacagcatatgatactggtg

SEQ ID NO: 7756 - DNA, 20 bp, Bacillus marinus
ccctgactctctcctgagag

SEQ ID NO: 7757 - DNA, 20 bp, Bacillus sp
gttctacttgcttcccgcgc

SEQ ID NO: 7758 - DNA, 20 bp, Bordetella avium
ggctaataccttgcgcaaat

SEQ ID NO: 7759 - DNA, 20 bp, Brevibacillus thermoruber
caagtcgagcggatcctgtt

SEQ ID NO: 7760 - DNA, 20 bp, Bacillus schlegellii
gggaggcgggcggaagcctt

SEQ ID NO: 7761 - DNA, 30 bp, Dolosigranulum pigrum
gcttaccaaggcagtgatacgtagccgact

SEQ ID NO: 7762 - DNA, 20 bp, Prevotella bivia
ggataaagtggggaacgtgt

SEQ ID NO: 7763 - DNA, 20 bp, Bacteroides eggerthii
attgcagcggaatgtagtgg

SEQ ID NO: 7764 - DNA, 20 bp, Bacteroides vulgatus
tgaattacggtgaaagccgt

SEQ ID NO: 7765 - DNA, 20 bp, Anaerococcus tetradius
tacgtatggaccgagcgttg

SEQ ID NO: 7766 - DNA, 20 bp, Clostridium cadaveris
tgtgaactagcggcggacgg

SEQ ID NO: 7767 - DNA, 20 bp, Helcococcus kunzii
gaaaccgaaaaaggaaagta

SEQ ID NO: 7768 - DNA, 20 bp, Corynebacterium glucuronolyticum
gcttgctggagtgctcgagt

SEQ ID NO: 7769 - DNA, 20 bp, Methylobacterium mesophilicum
ggcacttcggtgtcagcggc

SEQ ID NO: 7770 - DNA, 20 bp, Kocuria kristinae
aatacccggatgcgactact

SEQ ID NO: 7771 - DNA, 20 bp, Prevotella disiens
ttgcatgtaccattcgaata

SEQ ID NO: 7772 - DNA, 20 bp, Bacillus sp
gccgccttttaacgtctcct

SEQ ID NO: 7773 - DNA, 20 bp, Vagococcus fluvialis
accgcataatttgttttccc

SEQ ID NO: 7774 - DNA, 20 bp, Sporosarcina pasteurii
acctgccctgcagttgggga

SEQ ID NO: 7775 - DNA, 20 bp, Bacteroides vulgatus
tatcttgagtgcagttgagg

SEQ ID NO: 7776 - DNA, 20 bp, Staphylococcus schleiferi
attggggtgaaagtcgttac

SEQ ID NO: 7777 - DNA, 20 bp, Corynebacterium confusum
tggtcaatacaatgcgttgc

SEQ ID NO: 7778 - DNA, 20 bp, Empedobacter brevis
ttcgggaatctgagaccggc

SEQ ID NO: 7779 - DNA, 20 bp, Atopobium parvulum
tgggcaacctgcccctttca

SEQ ID NO: 7780 - DNA, 30 bp, Facklamia languida
taacttaggagggagccgtcgaaggtggga

SEQ ID NO: 7781 - DNA, 30 bp, Prevotella oralis
acatgcaagtcgcggggcatcatggaggtt

SEQ ID NO: 7782 - DNA, 30 bp, Myroides odoratus
ttcgtaggcggttgagtaagtcagtggtga

SEQ ID NO: 7783 - DNA, 20 bp, Weeksella virosa
gctaggtggcatcatttagt

SEQ ID NO: 7784 - DNA, 20 bp, Ignavigranum ruoffiae
ggttttgctatcactaaagg

SEQ ID NO: 7785 - DNA, 20 bp, Myroides odoratimimus
agtacagaaagcagctacct

SEQ ID NO: 7786 - DNA, 20 bp, Dolosigranulum pigrum
tgacgaattcattaaaggtg

SEQ ID NO: 7787 - DNA, 20 bp, Anaerococcus prevotii
caccatggaagcttgtaata

SEQ ID NO: 7788 - DNA, 20 bp, Tatumella ptyseos
gagaacttgccagagatgcc

SEQ ID NO: 7789 - DNA, 20 bp, Moraxella atlantae
agcgggtgcaggtggtgcac

SEQ ID NO: 7790 - DNA, 30 bp, Staphylococcus simulans
attagggaagaacaaggatgtaagtaacta

SEQ ID NO: 7791 - DNA, 20 bp, Prevotella bivia
aacccagcgaaagttggact

SEQ ID NO: 7792 - DNA, 20 bp, Bacteroides distasonis
aataccgcatgaagcagggg

SEQ ID NO: 7793 - DNA, 20 bp, Psychrobacter phenylpyruvicus
agggggcagcttgcgctctc

SEQ ID NO: 7794 - DNA, 20 bp, Alloiococcus otitis
gaagaaggacttcggttcgt

SEQ ID NO: 7795 - DNA, 20 bp, Pseudoramibacter alactolyticus
aaggagcgattcggagcgaa

SEQ ID NO: 7796 - DNA, 20 bp, Helcococcus kunzii
tgaaaccgaaaaaggaaagt

SEQ ID NO: 7797 - DNA, 20 bp, Helcococcus kunzii
actggttaacttgagtagat

SEQ ID NO: 7798 - DNA, 30 bp, Prevotella oralis
gcgagtcggccgtatgtaaatgcggtccaa

SEQ ID NO: 7799 - DNA, 20 bp, Kytococcus sedentarius
cgaccgaccctcgcatgggg

SEQ ID NO: 7800 - DNA, 20 bp, Clostridium clostridiiforme
tccccctgacgggccggtaa

SEQ ID NO: 7801 - DNA, 20 bp, Vagococcus fluvialis
cgaaaatcaaagagtggcgg

SEQ ID NO: 7802 - DNA, 20 bp, Dolosigranulum pigrum
ctatgggaggcagccgtcga

SEQ ID NO: 7803 - DNA, 20 bp, Leuconostoc fallax
aataccgtataacaacgcat

SEQ ID NO: 7804 - DNA, 20 bp, Actinomyces radingae
ttgtggcttaacctttttgg

SEQ ID NO: 7805 - DNA, 20 bp, Virgibacillus proomii
agcagaaccccttcgggggt

SEQ ID NO: 7806 - DNA, 20 bp, Prevotella bivia
cataactaagggataaccca

SEQ ID NO: 7807 - DNA, 20 bp, Moraxella atlantae
acaatactgacactcagacc

SEQ ID NO: 7808 - DNA, 20 bp, Brevibacillus thermoruber
ctggtacaacgggacgcaag

SEQ ID NO: 7809 - DNA, 20 bp, Bacteroides vulgatus
tggatgtttaagtcagttgt

SEQ ID NO: 7810 - DNA, 20 bp, Alloiococcus otitis
tgctgggaaaataaaaggtg

SEQ ID NO: 7811 - DNA, 20 bp, Actinomyces radingae
tggggggtgtgggaaagggg

SEQ ID NO: 7812 - DNA, 20 bp, Facklamia languida
cgacttgaacttgttcaagt

SEQ ID NO: 7813 - DNA, 20 bp, Abiotrophia defectiva
acatcccgacgaccgctcta

SEQ ID NO: 7814 - DNA, 20 bp, Clostridium cadaveris
cgagggagcaccttcgggtg

SEQ ID NO: 7815 - DNA, 20 bp, Myroides odoratus
ggggtatagagagcttgctt

SEQ ID NO: 7816 - DNA, 20 bp, Weeksella virosa
ggcgaccgtaacaggagcta

SEQ ID NO: 7817 - DNA, 20 bp, Pseudoramibacter alactolyticus
cgcatgactttgctgtcaaa

SEQ ID NO: 7818 - DNA, 20 bp, Arcanobacterium haemolyticum
cctaactcgtttgaggggga

SEQ ID NO: 7819 - DNA, 20 bp, Bordetella avium
aaaggcgcaggctaatacct

SEQ ID NO: 7820 - DNA, 20 bp, Actinomyces radingae
atttgggtagtggtgagtgt

SEQ ID NO: 7821 - DNA, 20 bp, Prevotella bivia
agatagttggtcgtgtgcaa

SEQ ID NO: 7822 - DNA, 20 bp, Abiotrophia defectiva
gcgactaggtgcttgcactt

SEQ ID NO: 7823 - DNA, 20 bp, Facklamia sourekii
ttaagttgaaagacggcttt

SEQ ID NO: 7824 - DNA, 20 bp, Virgibacillus proomii
aagcagaaccccttcggggg

SEQ ID NO: 7825 - DNA, 30 bp, Clostridium cadaveris
tgtcctgaattacctgtaataagggaagct

SEQ ID NO: 7826 - DNA, 20 bp, Vagococcus fluvialis
ccgaaaatcaaagagtggcg

SEQ ID NO: 7827 - DNA, 20 bp, Dolosigranulum pigrum
ttctggtctaacattgacgc

SEQ ID NO: 7828 - DNA, 20 bp, Weeksella virosa
tatatgtgaataaacctatt

SEQ ID NO: 7829 - DNA, 20 bp, Bacillus psychrosaccharolyticus
cgagcgaattgttgagttta

SEQ ID NO: 7830 - DNA, 20 bp, Bacteroides eggerthii
gcggaatgtagtggaaacat

SEQ ID NO: 7831 - DNA, 30 bp, Prevotella disiens
cgaactggctgacttgagtacacacaacgt

SEQ ID NO: 7832 - DNA, 20 bp, Bacteroides capilosus
ggattcgtccaatggattgg

SEQ ID NO: 7833 - DNA, 20 bp, Bacteroides capilosus
aggcggattgctggacagta

SEQ ID NO: 7834 - DNA, 20 bp, Streptococcus thoraltensis
ttataactaccgtagcttgc

SEQ ID NO: 7835 - DNA, 20 bp, Prevotella bivia
gaggtccttcgggacatctg

SEQ ID NO: 7836 - DNA, 20 bp, Prevotella oralis
cgtgcctcagttcggactgg

SEQ ID NO: 7837 - DNA, 20 bp, Clostridium cadaveris
agctctttcgggagcaggaa

SEQ ID NO: 7838 - DNA, 20 bp, Dolosigranulum pigrum
tggctttgctaccactcatg

SEQ ID NO: 7839 - DNA, 20 bp, Actinomyces radingae
cctgtcgtgtaatcctctgg

SEQ ID NO: 7840 - DNA, 20 bp, Vibrio parahaemolyticus
gttaatagcgctatcatttg

SEQ ID NO: 7841 - DNA, 20 bp, Bacteroides thetaiotaomicron
catatatttcccgcatgggt

SEQ ID NO: 7842 - DNA, 20 bp, Methylobacterium mesophilicum
gagcgggcacttcggtgtca

SEQ ID NO: 7843 - DNA, 20 bp, Staphylococcus lutrae
gggaagaacacatgtgtaag

SEQ ID NO: 7844 - DNA, 20 bp, Clostridium histolyticum
aagattaaaggagcaatccg

SEQ ID NO: 7845 - DNA, 20 bp, Clostridium cadaveris
tgggaaagtcatgaaaggag

SEQ ID NO: 7846 - DNA, 20 bp, Kingella kingae
cagacggttagttaagcaag

SEQ ID NO: 7847 - DNA, 20 bp, Alloiococcus otitis
gccatgatgcgtagccgact

SEQ ID NO: 7848 - DNA, 20 bp, Prevotella loescheii
gcggaacgattcggagacga

SEQ ID NO: 7849 - DNA, 20 bp, Bacteroides eggerthii
atactcctttgtatgtaccg

SEQ ID NO: 7850 - DNA, 20 bp, Leuconostoc fallax
atagttaatgtaggaaatga

SEQ ID NO: 7851 - DNA, 20 bp, Moraxella atlantae
gctgagaactgtaaggagac

SEQ ID NO: 7852 - DNA, 20 bp, Prevotella bivia
attacgaataaagatttatc

SEQ ID NO: 7853 - DNA, 20 bp, Bacillus schlegellii
gcactggcctgtaactgacg

SEQ ID NO: 7854 - DNA, 20 bp, Weeksella virosa
tcggattaataccgtatata

SEQ ID NO: 7855 - DNA, 20 bp, Bacteroides capillosus
cgggcttgaactgtaggcga

SEQ ID NO: 7856 - DNA, 20 bp, Facklamia languida
acgaacagcgacttgaactt

SEQ ID NO: 7857 - DNA, 20 bp, Moraxella atlantae
gtgcctaaattagattagct

SEQ ID NO: 7858 - DNA, 20 bp, Helcococcus kunzii
tttcttcggaatgaaaccga

SEQ ID NO: 7859 - DNA, 20 bp, Sphingobacterium multivorum
cggacgggatccatcggaga

SEQ ID NO: 7860 - DNA, 20 bp, Peptoniphilus indolicus
ccttcgggaagaagttaagt

SEQ ID NO: 7861 - DNA, 20 bp, Bacteroides capilosus
ggcggattgctggacagtaa

SEQ ID NO: 7862 - DNA, 20 bp, Facklamia languida
ttcaagtcaatgttagtggc

SEQ ID NO: 7863 - DNA, 20 bp, Prevotella oralis
cggggcatcgatcggtaggg

SEQ ID NO: 7864 - DNA, 20 bp, Arcanobacterium haemolyticum
cgtggcctaactcgtttgag

SEQ ID NO: 7865 - DNA, 20 bp, Lactococcus raffinolactis
atttgaaagtaccaaatggt

SEQ ID NO: 7866 - DNA, 20 bp, Streptococcus ratti
ctgtgcttgcacaccgtgtt

SEQ ID NO: 7867 - DNA, 30 bp, Clostridium tetani
ccgcataaagttaaggtttcgcatgaaact

SEQ ID NO: 7868 - DNA, 30 bp, Paenibacillus peoriae
tacccgatacatcctttttctgcatggaag

SEQ ID NO: 7869 - DNA, 20 bp, Streptococcus sobrinus
caccggacttgctccagtgt

SEQ ID NO: 7870 - DNA, 20 bp, Clostridium glycolicum
gcgattcacttcggtgaaga

SEQ ID NO: 7871 - DNA, 20 bp, Dolosigranulum pigrum
gctagctaatctttcaaagc

SEQ ID NO: 7872 - DNA, 20 bp, Clostridium clostridiiforme
cgaacgaagcaattaagatg

SEQ ID NO: 7873 - DNA, 20 bp, Dolosigranulum pigrum
cagcgatcccgcaagggcta

SEQ ID NO: 7874 - DNA, 20 bp, Brevibacillus thermoruber
gatagggcaccttctcgcat

SEQ ID NO: 7875 - DNA, 20 bp, Bacillus schlegellii
ttgtcctggcgcatgctggg

SEQ ID NO: 7876 - DNA, 20 bp, Anaerobiospirillum succiniciproducens
tgaacttcggtttgggttcc

SEQ ID NO: 7877 - DNA, 20 bp, Bordetella avium
aggctaataccttgcgcaaa

SEQ ID NO: 7878 - DNA, 20 bp, Prevotella oralis
aaccttcccattactacggc

SEQ ID NO: 7879 - DNA, 20 bp, Dolosigranulum pigrum
catgacgaattcattaaagg

SEQ ID NO: 7880 - DNA, 20 bp, Ignavigranum ruoffiae
ggagcgcaggtggtggctta

SEQ ID NO: 7881 - DNA, 20 bp, Prevotella oralis
cccaccggggcatcgatcgg

SEQ ID NO: 7882 - DNA, 20 bp, Abiotrophia defectiva
gtgcttgcactaggtcaagg

SEQ ID NO: 7883 - DNA, 20 bp, Facklamia sourekii
gagtttaagttgaaagacgg

SEQ ID NO: 7884 - DNA, 20 bp, Brevibacillus thermoruber
agagggtgcggaaaggtggc

SEQ ID NO: 7885 - DNA, 20 bp, Prevotella disiens
gcatgtaaatgtaatctaat

SEQ ID NO: 7886 - DNA, 20 bp, Budvicia aquatica
aagcggaccacataaagtgc

SEQ ID NO: 7887 - DNA, 20 bp, Leptotrichia buccalis
ggtatctaaggtgtggatag

SEQ ID NO: 7888 - DNA, 20 bp, Bacteroides capillosus
aggattaaaggtttagcggt

SEQ ID NO: 7889 - DNA, 30 bp, Facklamia languida
gaccggtagagtaactgttaccggagtgac

SEQ ID NO: 7890 - DNA, 20 bp, Brevibacillus brevis
aagctgaaagtcggtttcgg

SEQ ID NO: 7891 - DNA, 20 bp, Dolosigranulum pigrum
gaacgatgatatcactgctt

SEQ ID NO: 7892 - DNA, 20 bp, Anaerococcus prevotii
tgtaatacccgaagcctgcg

SEQ ID NO: 7893 - DNA, 20 bp, Anaerococcus tetradius
tctgggagccgcagctaacg

SEQ ID NO: 7894 - DNA, 20 bp, Peptoniphilus indolicus
gcatttgaaacttctaaact

SEQ ID NO: 7895 - DNA, 20 bp, Haemophilus segnis
aataggcatcacgattgacg

SEQ ID NO: 7896 - DNA, 20 bp, Prevotella bivia
gataaagtggggaacgtgtt

SEQ ID NO: 7897 - DNA, 30 bp, Helcococcus kunzii
cctatctttagttactagcgagtaaagtcg

SEQ ID NO: 7898 - DNA, 20 bp, Psychrobacter phenylpyruvicus
tttagagggcgctcaccacg

SEQ ID NO: 7899 - DNA, 20 bp, Prevotella bivia
gtacaggatcgacctagggc

SEQ ID NO: 7900 - DNA, 20 bp, Globicatella sanguinis
aacttgttctggttaaggtt

SEQ ID NO: 7901 - DNA, 20 bp, Leptotrichia buccalis
tgcaagtctttggcgaagct

SEQ ID NO: 7902 - DNA, 20 bp, Dolosicoccus paucivorans
gtgcaatgccgcgtgtgtga

SEQ ID NO: 7903 - DNA, 30 bp, Bacteroides capillosus
ggaaccttacccgggcttgaactgtaggcg

SEQ ID NO: 7904 - DNA, 20 bp, Moraxella atlantae
gagaaaggaggcgagagctt

SEQ ID NO: 7905 - DNA, 20 bp, Sphingomonas paucimobilis
agctgtccgggtgcttggca

SEQ ID NO: 7906 - DNA, 20 bp, Prevotella bivia
gtattcgtttgatctcatga

SEQ ID NO: 7907 - DNA, 20 bp, Moraxella atlantae
gacgatctataactggtctt

SEQ ID NO: 7908 - DNA, 20 bp, Sphingobacterium multivorum
gatccgtcggagagcttgct

SEQ ID NO: 7909 - DNA, 30 bp, Clostridium cadaveris
ttccaaactggaattctagagtgcaggaga

SEQ ID NO: 7910 - DNA, 20 bp, Suttonella indologenes
gacattagctaaagaagaag

SEQ ID NO: 7911 - DNA, 20 bp, Vagococcus fluvialis
tttgttttcccgcatgggag

SEQ ID NO: 7912 - DNA, 20 bp, Bacteroides vulgatus
cgtaagccgcaaggcatctg

SEQ ID NO: 7913 - DNA, 20 bp, Actinomyces meyeri
ttgacatgcgccctgggcgt

SEQ ID NO: 7914 - DNA, 20 bp, Actinomyces radingae
tcgaacgggatctgcgtggc

SEQ ID NO: 7915 - DNA, 20 bp, Bacteroides vulgatus
tgctaagctgcaactgacat

SEQ ID NO: 7916 - DNA, 20 bp, Bacteroides vulgatus
caagactgccatcgtaagat

SEQ ID NO: 7917 - DNA, 20 bp, Facklamia sourekii
tttgagttgaaagacggctt

SEQ ID NO: 7918 - DNA, 20 bp, Kytococcus sedentarius
gaccctcgcatggggtgttg

SEQ ID NO: 7919 - DNA, 20 bp, Kocuria kristinae
tggttcttcccttttgggct

SEQ ID NO: 7920 - DNA, 20 bp, Streptococcus sobrinus
agtggaacgcattggtaaca

SEQ ID NO: 7921 - DNA, 20 bp, Weeksella virosa
taggtggcatcatttagttt

SEQ ID NO: 7922 - DNA, 20 bp, Helcococcus kunzii
cgactttctagaatctaact

SEQ ID NO: 7923 - DNA, 20 bp, Abiotrophia defectiva
tggtcaaggtgagtggcgaa

SEQ ID NO: 7924 - DNA, 30 bp, Facklamia languida
aaggaaagacggcttcggctgtcacttaag

SEQ ID NO: 7925 - DNA, 20 bp, Helcococcus kunzii
gtggctcaaccacggttcgg

SEQ ID NO: 7926 - DNA, 20 bp, Ignavigranum ruoffiae
cggtccgtaaagcactgttg

SEQ ID NO: 7927 - DNA, 20 bp, Peptoniphilus indolicus
gaagcagacgccgaaggtag

SEQ ID NO: 7928 - DNA, 20 bp, Alloiococcus otitis
gctgggaaaataaaaggtgg

SEQ ID NO: 7929 - DNA, 30 bp, Paenibacillus apiarius
ccaaaactgcatgacttgagtacagaagag

SEQ ID NO: 7930 - DNA, 20 bp, Weeksella virosa
cttttatatgtgaataaacc

SEQ ID NO: 7931 - DNA, 20 bp, Clostridium cadaveris
agtaagatgagcactctagc

SEQ ID NO: 7932 - DNA, 20 bp, Moraxella atlantae
agcatatgatactggtgaac

SEQ ID NO: 7933 - DNA, 20 bp, Paenibacillus azotofixans
aagtcgagcggagttgtaga

SEQ ID NO: 7934 - DNA, 20 bp, Eubacterium moniliforme
aggtgagatcaatgactggg

SEQ ID NO: 7935 - DNA, 20 bp, Brevibacterium epidermidis
ctgacgcatgttgggtggtg

SEQ ID NO: 7936 - DNA, 20 bp, Prevotella oralis
tgaatactgccgccgtaagg

SEQ ID NO: 7937 - DNA, 20 bp, Streptococcus thoraltensis
agcttgctacaattggtata

SEQ ID NO: 7938 - DNA, 20 bp, Moraxella atlantae
actaagtcatatgtgaaagc

SEQ ID NO: 7939 - DNA, 20 bp, Bordetella avium
aataccttgcgcaaatgacg

SEQ ID NO: 7940 - DNA, 20 bp, Weeksella virosa
gaattagtttgaagtagcta

SEQ ID NO: 7941 - DNA, 20 bp, Moraxella atlantae
acttgctagcaggtgaagct

SEQ ID NO: 7942 - DNA, 20 bp, Corynebacterium kutscheri
ttcttgcttgcaagagagta

SEQ ID NO: 7943 - DNA, 20 bp, Peptoniphilus indolicus
gacgccgaaggtagggttaa

SEQ ID NO: 7944 - DNA, 20 bp, Moraxella atlantae
ctataagatgtgcctaaatt

SEQ ID NO: 7945 - DNA, 20 bp, Abiotrophia defectiva
acgaaccgcgactaggtgct

SEQ ID NO: 7946 - DNA, 20 bp, Kytococcus sedentarius
gatggggtttccctttgggc

SEQ ID NO: 7947 - DNA, 20 bp, Bacillus schlegellii
ccatccgtgccggagttcac

SEQ ID NO: 7948 - DNA, 30 bp, Corynebacterium coyleae
ggtgtgctaatcgctgaaagccggccttag

SEQ ID NO: 7949 - DNA, 20 bp, Dolosigranulum pigrum
acacccgaagtcggccggcc

SEQ ID NO: 7950 - DNA, 20 bp, Anaerococcus prevotii
agcagtcgaaggtaggatag

SEQ ID NO: 7951 - DNA, 20 bp, Moraxella atlantae
gggaggaagagctagtggag

SEQ ID NO: 7952 - DNA, 20 bp, Moraxella atlantae
cctaaattagattagctaga

SEQ ID NO: 7953 - DNA, 20 bp, Granulicatella adiacens
cgaccgggcttgcactggtc

SEQ ID NO: 7954 - DNA, 20 bp, Pseudoramibacter alactolyticus
ttgctgtcaaaactccggtg

SEQ ID NO: 7955 - DNA, 30 bp, Chromobacterium violaceum
tggagactgcacagctagagtgcgtcagag

SEQ ID NO: 7956 - DNA, 20 bp, Anaerobiospirillum succiniciproducens
aacctgggttggtcattcta

SEQ ID NO: 7957 - DNA, 20 bp, Actinomyces radingae
gggtgtgggaaaggggcctt

SEQ ID NO: 7958 - DNA, 20 bp, Lactococcus raffinolactis
acgttgcatagagtggaaaa

SEQ ID NO: 7959 - DNA, 20 bp, Bacillus schlegellii
tgccgggtccagagatgggc

SEQ ID NO: 7960 - DNA, 20 bp, Streptococcus sobrinus
gaacgcattggtaacaccgg

SEQ ID NO: 7961 - DNA, 20 bp, Alloiococcus otitis
ttctgggctatgattgacgc

SEQ ID NO: 7962 - DNA, 20 bp, Atopobium parvulum
catggaagactcgagaaagc

SEQ ID NO: 7963 - DNA, 20 bp, Kytococcus sedentarius
gaccgaccctcgcatggggt

SEQ ID NO: 7964 - DNA, 30 bp, Helcococcus kunzii
aagttctgtccttagcgaagataatgacag

SEQ ID NO: 7965 - DNA, 20 bp, Clostridium glycolicum
gaagcgagtgtcgaaggtga

SEQ ID NO: 7966 - DNA, 20 bp, Corynebacterium confusum
ttgtggcctttatacaggtg

SEQ ID NO: 7967 - DNA, 20 bp, Weeksella virosa
acttgccttatagaatggga

SEQ ID NO: 7968 - DNA, 30 bp, Clostridium cadaveris
acgatgggtactaggtgtaggggtttcgat

SEQ ID NO: 7969 - DNA, 20 bp, Prevotella disiens
gaattgtaggagcacgatac

SEQ ID NO: 7970 - DNA, 20 bp, Helcococcus kunzii
agaatttttcagtcgatttc

SEQ ID NO: 7971 - DNA, 20 bp, Actinomyces meyeri
atgatgctccagctttgttg

SEQ ID NO: 7972 - DNA, 20 bp, Bacteroides distasonis
ccttttctagcaatagccgt

SEQ ID NO: 7973 - DNA, 20 bp, Pediococcus inopinatus
tcctcttaaaaccgttctca

SEQ ID NO: 7974 - DNA, 20 bp, Prevotella oralis
atttggacgaaaggtatatt

SEQ ID NO: 7975 - DNA, 20 bp, Moraxella atlantae
ttaacctaggaacagcatat

SEQ ID NO: 7976 - DNA, 20 bp, Actinomyces turicensis
cttgacatgcaccctgacgc

SEQ ID NO: 7977 - DNA, 20 bp, Prevotella oralis
atgcggggataaagttgggg

SEQ ID NO: 7978 - DNA, 20 bp, Prevotella disiens
gaatgttggttgcatgtaaa

SEQ ID NO: 7979 - DNA, 20 bp, Prevotella oralis
tcggccgtatgtaaatgcgg

SEQ ID NO: 7980 - DNA, 20 bp, Bacteroides eggerthii
gcgccttgagtgcagcatag

SEQ ID NO: 7981 - DNA, 20 bp, Leptotrichia buccalis
ctgaagctactggtccaacc

SEQ ID NO: 7982 - DNA, 20 bp, Prevotella disiens
ggactaatacccaatgatat

SEQ ID NO: 7983 - DNA, 20 bp, Alloiococcus otitis
gcaagtcgaacgccaaatct

SEQ ID NO: 7984 - DNA, 20 bp, Bacteroides ureolyticus
taacataagttaaataggga

SEQ ID NO: 7985 - DNA, 30 bp, Virgibacillus proomii
ccggataatacgttttcttgcataaggaga

SEQ ID NO: 7986 - DNA, 20 bp, Prevotella oralis
tagagatattcattcccttc

SEQ ID NO: 7987 - DNA, 20 bp, Moraxella atlantae
ggcagctttctggcacaata

SEQ ID NO: 7988 - DNA, 20 bp, Prevotella oralis
ccagccggcggggtaacggc

SEQ ID NO: 7989 - DNA, 20 bp, Bacteroides ureolyticus
ttaaatagggaaagtctttt

SEQ ID NO: 7990 - DNA, 20 bp, Bacillus schlegellii
gttgtaaacccctgttgtcg

SEQ ID NO: 7991 - DNA, 20 bp, Prevotella oralis
catcatggaggttgttttca

SEQ ID NO: 7992 - DNA, 20 bp, Bacillus schlegellii
gacatcccgctgccgggtcc

SEQ ID NO: 7993 - DNA, 20 bp, Moraxella atlantae
atactggtgaactagagtat

SEQ ID NO: 7994 - DNA, 20 bp, Bacteroides vulgatus
gagtccgcatgttcacatga

SEQ ID NO: 7995 - DNA, 20 bp, Myroides odoratus
aactggatgcgaatctcaaa

SEQ ID NO: 7996 - DNA, 20 bp, Granulicatella elegans
aggttctagagtcgcatgac

SEQ ID NO: 7997 - DNA, 20 bp, Bacteroides capilosus
tggagaggcaatcggaattc

SEQ ID NO: 7998 - DNA, 30 bp, Chromobacterium violaceum
cagctagagtgcgtcagaggggggtagaat

SEQ ID NO: 7999 - DNA, 20 bp, Clostridium barati
gattggggtcgaagtcgtaa

SEQ ID NO: 8000 - DNA, 30 bp, Prevotella oris
aacgacggggaagcttgcttccccgggcgt

SEQ ID NO: 8001 - DNA, 20 bp, Corynebacterium group ANF
aggcgagagatcgtctgtcc

SEQ ID NO: 8002 - DNA, 20 bp, Bacteroides distasonis
gcatggggatatttgctaaa

SEQ ID NO: 8003 - DNA, 20 bp, Alloiococcus otitis
atcttctgctaccttcagag

SEQ ID NO: 8004 - DNA, 20 bp, Ignavigranum ruoffiae
aatccttcgggacagcgaga

SEQ ID NO: 8005 - DNA, 20 bp, Dolosigranulum pigrum
atgtagaagaggaaaatgga

SEQ ID NO: 8006 - DNA, 20 bp, Peptoniphilus indolicus
gatcaaagtgaattagcggt

SEQ ID NO: 8007 - DNA, 20 bp, Brevibacillus thermoruber
gagggtgcggaaaggtggcg

SEQ ID NO: 8008 - DNA, 20 bp, Facklamia sourekii
gtcagtagagtaactgttac

SEQ ID NO: 8009 - DNA, 20 bp, Eubacterium moniliforme
catgaaagaacaattaaagg

SEQ ID NO: 8010 - DNA, 20 bp, Sphingobacterium multivorum
taacaccgcataacatatgt

SEQ ID NO: 8011 - DNA, 20 bp, Globicatella sanguinis
gaaccacaacgagaacttgt

SEQ ID NO: 8012 - DNA, 20 bp, Sphingobacterium multivorum
cttgctcgaagacggtgaga

SEQ ID NO: 8013 - DNA, 20 bp, Bordetella avium
accttgcgcaaatgacggta

SEQ ID NO: 8014 - DNA, 20 bp, Paenibacillus apiarius
gtgatgtaagttgggtgttt

SEQ ID NO: 8015 - DNA, 20 bp, Ignavigranum ruoffiae
cgagcagcgacctcgtgaga

SEQ ID NO: 8016 - DNA, 20 bp, Bacteroides distasonis
cggtgaaagtctgtggctca

SEQ ID NO: 8017 - DNA, 20 bp, Kocuria kristinae
aagggttatgtactggtctt

SEQ ID NO: 8018 - DNA, 20 bp, Methylobacterium mesophilicum
cgagcgggcacttcggtgtc

SEQ ID NO: 8019 - DNA, 20 bp, Paenibacillus apiarius
tagacattttcctcgcctga

SEQ ID NO: 8020 - DNA, 20 bp, Bacteroides eggerthii
cgatagtatagtttttccgc

SEQ ID NO: 8021 - DNA, 20 bp, Prevotella disiens
tgtaggagcacgatacagag

SEQ ID NO: 8022 - DNA, 20 bp, Leptotrichia buccalis
agctactggtccaaccgcaa

SEQ ID NO: 8023 - DNA, 20 bp, Prevotella bivia
ataactaagggataacccag

SEQ ID NO: 8024 - DNA, 20 bp, Dolosigranulum pigrum
taggtaactactagcgcctt

SEQ ID NO: 8025 - DNA, 20 bp, Bacillus schlegellii
cggggaggcgggcggaagcc

SEQ ID NO: 8026 - DNA, 20 bp, Leuconostoc fallax
ttcggcctcacttagagatg

SEQ ID NO: 8027 - DNA, 20 bp, Bacteroides vulgatus
cttggacagccttctgaaag

SEQ ID NO: 8028 - DNA, 20 bp, Kingella kingae
cgagtacttgtacttggtgg

SEQ ID NO: 8029 - DNA, 20 bp, Corynebacterium glucuronolyticum
agcttgctggagtgctcgag

SEQ ID NO: 8030 - DNA, 20 bp, Sphingobacterium multivorum
caggaataaacctttctacg

SEQ ID NO: 8031 - DNA, 20 bp, Moraxella atlantae
ctggtggtgacgttacctgc

SEQ ID NO: 8032 - DNA, 20 bp, Leptotrichia buccalis
ggctgatgaaaggagacgct

SEQ ID NO: 8033 - DNA, 20 bp, Staphylococcus simulans
atcccttgacggtacctaat

SEQ ID NO: 8034 - DNA, 20 bp, Lactococcus raffinolactis
ttagagaagaacgttgcata

SEQ ID NO: 8035 - DNA, 20 bp, Anaerococcus tetradius
attccttcgggatgaaaaat

SEQ ID NO: 8036 - DNA, 20 bp, Veillonella atypica
ttcttgtgcgaatagtgcga

SEQ ID NO: 8037 - DNA, 20 bp, Helcococcus kunzii
atgacagtagctaagaagca

SEQ ID NO: 8038 - DNA, 20 bp, Bacteroides distasonis
tctgtggctcaaccatagaa

SEQ ID NO: 8039 - DNA, 30 bp, Helcococcus kunzii
gggaaaccgggattaataccttatgataca

SEQ ID NO: 8040 - DNA, 30 bp, Staphylococcus simulans
agggaagaacaaggatgtaagtaactgtgc

SEQ ID NO: 8041 - DNA, 20 bp, Alloiococcus otitis
cgccaaatcttcctgcttgc

SEQ ID NO: 8042 - DNA, 20 bp, Psychrobacter phenylpyruvicus
aagtgggtagcctaactttt

SEQ ID NO: 8043 - DNA, 20 bp, Bacillus schlegellii
gtgggggtgcagcggaaact

SEQ ID NO: 8044 - DNA, 20 bp, Prevotella oralis
ttccgtatgcagtccgaagc

SEQ ID NO: 8045 - DNA, 20 bp, Ignavigranum ruoffiae
tttgctatcactaaaggatg

SEQ ID NO: 8046 - DNA, 20 bp, Veillonella atypica
gagactggatgaaaggtggc

SEQ ID NO: 8047 - DNA, 20 bp, Abiotrophia defectiva
aaccgcgactaggtgcttgc

SEQ ID NO: 8048 - DNA, 20 bp, Peptoniphilus indolicus
agtcagatgtgaaaggcgag

SEQ ID NO: 8049 - DNA, 20 bp, Prevotella bivia
atttagagataatgaggtcc

SEQ ID NO: 8050 - DNA, 20 bp, Prevotella bivia
agcgaatagatagcttgcta

SEQ ID NO: 8051 - DNA, 30 bp, Bacteroides distasonis
gatgaaggttctatggatcgtaaacctctt

SEQ ID NO: 8052 - DNA, 20 bp, Streptococcus acidominimus
tgttaatttaaaaggagcaa

SEQ ID NO: 8053 - DNA, 20 bp, Bacteroides distasonis
tggcgtggacaaagggaggc

SEQ ID NO: 8054 - DNA, 20 bp, Staphylococcus simulans
attagggaagaacaaggatg

SEQ ID NO: 8055 - DNA, 20 bp, Staphylococcus simulans
ggataacacatgaaaccgca

SEQ ID NO: 8056 - DNA, 20 bp, Alloiococcus otitis
cgaacgccaaatcttcctgc

SEQ ID NO: 8057 - DNA, 20 bp, Haemophilus segnis
tgatgtttaataggcatcac

SEQ ID NO: 8058 - DNA, 20 bp, Clostridium histolyticum
gttagaaagattaaaggagc

SEQ ID NO: 8059 - DNA, 20 bp, Bacteroides capilosus
gacagaggattcgtccaatg

SEQ ID NO: 8060 - DNA, 20 bp, Helcococcus kunzii
ataggatagtcttttcggag

SEQ ID NO: 8061 - DNA, 20 bp, Bacteroides eggerthii
acattacagccttcgggccg

SEQ ID NO: 8062 - DNA, 30 bp, Myroides odoratus
gatgcgaatctcaaaaactggtctcagttc

SEQ ID NO: 8063 - DNA, 20 bp, Actinomyces radingae
tgtcgcgcctgtcgtgtaat

SEQ ID NO: 8064 - DNA, 30 bp, Facklamia languida
aacacgtggagaacctacccttaagcgggg

SEQ ID NO: 8065 - DNA, 30 bp, Arcanobacterium haemolyticum
accaaggcttgacatacaccgggattatgc

SEQ ID NO: 8066 - DNA, 20 bp, Bacteroides eggerthii
aaagtggagtatgcatactc

SEQ ID NO: 8067 - DNA, 20 bp, Moraxella atlantae
gtgaagctgagaactgtaag

SEQ ID NO: 8068 - DNA, 20 bp, Lactococcus raffinolactis
gttggatgcatattcgacat

SEQ ID NO: 8069 - DNA, 20 bp, Bacteroides vulgatus
ataaagtcgggtatggatac

SEQ ID NO: 8070 - DNA, 20 bp, Dolosigranulum pigrum
ttcattaaaggtggctttgc

SEQ ID NO: 8071 - DNA, 20 bp, Paenibacillus peoriae
ctttttctgcatggaagaag

SEQ ID NO: 8072 - DNA, 20 bp, Moraxella atlantae
gagtatatgagagggaagta

SEQ ID NO: 8073 - DNA, 20 bp, Myroides odoratus
gattactacgtacttattga

SEQ ID NO: 8074 - DNA, 20 bp, Bacteroides thetaiotaomicron
gaattatggggaaacccata

SEQ ID NO: 8075 - DNA, 20 bp, Abiotrophia defectiva
tgattccgtgaggaaaggtg

SEQ ID NO: 8076 - DNA, 20 bp, Moraxella atlantae
ggtcataagattgtaaagca

SEQ ID NO: 8077 - DNA, 20 bp, Comamonas terrigena
acgaaaagccctgggttaat

SEQ ID NO: 8078 - DNA, 20 bp, Facklamia sourekii
taccgcataaaccttaagct

SEQ ID NO: 8079 - DNA, 20 bp, Leuconostoc fallax
agtcgcggacctgatcactt

SEQ ID NO: 8080 - DNA, 20 bp, Neisseria meningitidis
tcatgaagcataccgggtaa

SEQ ID NO: 8081 - DNA, 20 bp, Weeksella virosa
gagtatcgcgtatgtaactt

SEQ ID NO: 8082 - DNA, 20 bp, Peptoniphilus indolicus
agatgtgaaaggcgagggct

SEQ ID NO: 8083 - DNA, 20 bp, Streptococcus thoraltensis
ggtgcaacagcatcacttaa

SEQ ID NO: 8084 - DNA, 30 bp, Weeksella virosa
attatcttcggataattgagagcggcgtac

SEQ ID NO: 8085 - DNA, 20 bp, Prevotella oralis
gcgagtcggccgtatgtaaa

SEQ ID NO: 8086 - DNA, 20 bp, Myroides odoratus
ctggatgcgaatctcaaaaa

SEQ ID NO: 8087 - DNA, 20 bp, Alloiococcus otitis
aagaggcggagtggcgaacg

SEQ ID NO: 8088 - DNA, 20 bp, Bacteroides vulgatus
atgattaaaggtattccggt

SEQ ID NO: 8089 - DNA, 20 bp, Bacillus schlegellii
cctggcgcatgctggggcaa

SEQ ID NO: 8090 - DNA, 30 bp, Ignavigranum ruoffiae
tgagagcaagcgaatctcttaaagctattc

SEQ ID NO: 8091 - DNA, 20 bp, Dolosigranulum pigrum
aatgtagaagaggaaaatgg

SEQ ID NO: 8092 - DNA, 20 bp, Paenibacillus macerans
tttgcagcattgtggaataa

SEQ ID NO: 8093 - DNA, 20 bp, Facklamia languida
cctaacttaggagggagccg

SEQ ID NO: 8094 - DNA, 30 bp, Moraxella atlantae
aggaaactgccttatagagggggatagctc

SEQ ID NO: 8095 - DNA, 30 bp, Cardiobacterium hominis
agtagggaggaaaggtgcgtagttaatacc

SEQ ID NO: 8096 - DNA, 20 bp, Bacteroides vulgatus
ttaaattgcagatgaattac

SEQ ID NO: 8097 - DNA, 20 bp, Prevotella oralis
cggggcatcatggaggttgt

SEQ ID NO: 8098 - DNA, 20 bp, Myroides odoratus
tacgatgattaggggtcctg

SEQ ID NO: 8099 - DNA, 20 bp, Bacillus marinus
gctatcacttacggatgagc

SEQ ID NO: 8100 - DNA, 20 bp, Anaerococcus prevotii
ctcttcttcggaagcctcaa

SEQ ID NO: 8101 - DNA, 20 bp, Bacteroides ureolyticus
gccctacacagaggaacaac

SEQ ID NO: 8102 - DNA, 20 bp, Helcococcus kunzii
gataatgacagtagctaaga

SEQ ID NO: 8103 - DNA, 20 bp, Prevotella oralis
agagatattcattcccttcg

SEQ ID NO: 8104 - DNA, 20 bp, Weeksella virosa
agtttgaagtagctagaatg

SEQ ID NO: 8105 - DNA, 20 bp, Bacteroides thetaiotaomicron
aggggcatcagtttggtttg

SEQ ID NO: 8106 - DNA, 20 bp, Streptococcus thoraltensis
catttataactaccgtagct

SEQ ID NO: 8107 - DNA, 20 bp, Bacillus sp
ggggtgacgcatgtggaacg

SEQ ID NO: 8108 - DNA, 20 bp, Facklamia sourekii
gttactgatttgacggtatc

SEQ ID NO: 8109 - DNA, 20 bp, Streptococcus ratti
gcttgcacaccgtgttttct

SEQ ID NO: 8110 - DNA, 20 bp, Corynebacterium confusum
atggtcaatacaatgcgttg

SEQ ID NO: 8111 - DNA, 20 bp, Clostridium clostridiiforme
gcaattaagatgaagttttc

SEQ ID NO: 8112 - DNA, 20 bp, Streptococcus ratti
ttcttgagtcgcgaacgggt

SEQ ID NO: 8113 - DNA, 20 bp, Corynebacterium group ANF
agatgaggcgagagatcgtc

SEQ ID NO: 8114 - DNA, 20 bp, Bacillus marinus
cggctatcacttacggatga

SEQ ID NO: 8115 - DNA, 20 bp, Actinomyces radingae
taacgctcagaaatgggtgc

SEQ ID NO: 8116 - DNA, 20 bp, Leptotrichia buccalis
gccctgtaagtctagggtga

SEQ ID NO: 8117 - DNA, 20 bp, Myroides odoratus
ggccagtacagaaagcagct

SEQ ID NO: 8118 - DNA, 20 bp, Prevotella oralis
cattgacttgaatagagata

SEQ ID NO: 8119 - DNA, 20 bp, Weeksella virosa
ttggcgaccgtaacaggagc

SEQ ID NO: 8120 - DNA, 20 bp, Clostridium clostridiiforme
aagtccttcggtgccgccgc

SEQ ID NO: 8121 - DNA, 20 bp, Ignavigranum ruoffiae
accgcataggccagtgagtc

SEQ ID NO: 8122 - DNA, 20 bp, Lactococcus raffinolactis
tggaaaattatgcaagtgac

SEQ ID NO: 8123 - DNA, 20 bp, Prevotella disiens
gtaggagcacgatacagaga

SEQ ID NO: 8124 - DNA, 20 bp, Prevotella bivia
aatccttaaaaccattctca

SEQ ID NO: 8125 - DNA, 20 bp, Alloiococcus otitis
gaatgtagcagaggaaagtg

SEQ ID NO: 8126 - DNA, 20 bp, Helcococcus kunzii
cttcggaatgaaacggaaaa

SEQ ID NO: 8127 - DNA, 20 bp, Helcococcus kunzii
gaagataatgacagtagcta

SEQ ID NO: 8128 - DNA, 20 bp, Rothia mucilaginosa
tcgaacgatgaagcctaggc

SEQ ID NO: 8129 - DNA, 20 bp, Bacteroides ureolyticus
cacaccatggaagttgatct

SEQ ID NO: 8130 - DNA, 20 bp, Bacteroides vulgatus
tgcagatgaattacggtgaa

SEQ ID NO: 8131 - DNA, 20 bp, Veillonella dispar
taatagacggaagcaatacc

SEQ ID NO: 8132 - DNA, 20 bp, Actinomyces meyeri
gcgccctgggcgtgcggaga

SEQ ID NO: 8133 - DNA, 20 bp, Clostridium cadaveris
gcgagggagcaccttcgggt

SEQ ID NO: 8134 - DNA, 30 bp, Comamonas terrigena
ttttgtacggaacgaaaagccctgggttaa

SEQ ID NO: 8135 - DNA, 20 bp, Streptococcus ratti
tttcttgagtcgcgaacggg

SEQ ID NO: 8136 - DNA, 20 bp, Suttonella indologenes
ttggggtgggggataacgta

SEQ ID NO: 8137 - DNA, 20 bp, Lactococcus raffinolactis
atgcatattcgacatttgaa

SEQ ID NO: 8138 - DNA, 20 bp, Bacteroides ureolyticus
cagtaagacgcaatatcgca

SEQ ID NO: 8139 - DNA, 20 bp, Weeksella virosa
acctgaagttggcgaccgta

SEQ ID NO: 8140 - DNA, 20 bp, Bacteroides thetaiotaomicron
ttcggtatgagatggggatg

SEQ ID NO: 8141 - DNA, 20 bp, Streptococcus acidominimus
tgttgttaatttaaaaggag

SEQ ID NO: 8142 - DNA, 30 bp, Suttonella indologenes
ccttagggttgtaaagcactttcgttagtg

SEQ ID NO: 8143 - DNA, 20 bp, Globicatella sanguinis
aactagaacttgttctggtt

SEQ ID NO: 8144 - DNA, 20 bp, Leuconostoc fallax
gaagtgtgtttaaaaggggc

SEQ ID NO: 8145 - DNA, 30 bp, Dolosigranulum pigrum
taccagctcttgacatcttctgacaactct

SEQ ID NO: 8146 - DNA, 20 bp, Corynebacterium confusum
acaatggtcaatacaatgcg

SEQ ID NO: 8147 - DNA, 20 bp, Bacteroides distasonis
ccactagttactaacaggta

SEQ ID NO: 8148 - DNA, 20 bp, Prevotella oralis
gaaaggcggcctaattccgt

SEQ ID NO: 8149 - DNA, 20 bp, Bacillus sp
gtagaaccccttcgggggtg

SEQ ID NO: 8150 - DNA, 20 bp, Prevotella oralis
aatccttaaaacgtgcctca

SEQ ID NO: 8151 - DNA, 20 bp, Prevotella oralis
tgcggtccaatccttaaaac

SEQ ID NO: 8152 - DNA, 20 bp, Prevotella disiens
tacccaatgatattcattga

SEQ ID NO: 8153 - DNA, 20 bp, Staphylococcus lentus
ccgcatggttcaatgttgaa

SEQ ID NO: 8154 - DNA, 20 bp, Leuconostoc fallax
ggcctcacttagagatggat

SEQ ID NO: 8155 - DNA, 30 bp, Empedobacter brevis
cgaaaacttatctcagttcggattggagtc

SEQ ID NO: 8156 - DNA, 20 bp, Actinomyces radingae
tatttgggtagtggtgagtg

SEQ ID NO: 8157 - DNA, 20 bp, Dolosigranulum pigrum
acggcattggaaactgacag

SEQ ID NO: 8158 - DNA, 20 bp, Alloiococcus otitis
aatgtagcagaggaaagtgg

SEQ ID NO: 8159 - DNA, 20 bp, Dolosigranulum pigrum
ttgggggctttccggccctc

SEQ ID NO: 8160 - DNA, 20 bp, Suttonella indologenes
atctaccttggggtggggga

SEQ ID NO: 8161 - DNA, 20 bp, Actinomyces turicensis
tgttgcgatatcgtaaggtg

SEQ ID NO: 8162 - DNA, 20 bp, Anaerobiospirillum succiniciproducens
aactgcctttctagagtatt

SEQ ID NO: 8163 - DNA, 20 bp, Bacteroides distasonis
ctcaaccatagaattgccgt

SEQ ID NO: 8164 - DNA, 20 bp, Myroides odoratus
tgtacgggaagaaatgtaat

SEQ ID NO: 8165 - DNA, 20 bp, Moraxella atlantae
aggaagagccagtggagaaa

SEQ ID NO: 8166 - DNA, 20 bp, Bacteroides vulgatus
tccaacctgccgtctactct

SEQ ID NO: 8167 - DNA, 20 bp, Facklamia languida
accaggtcttgacataggat

SEQ ID NO: 8168 - DNA, 30 bp, Facklamia languida
gaaccttaccaggtcttgacataggatgca

SEQ ID NO: 8169 - DNA, 20 bp, Listeria innocua
ctgatgtgaaagccccccgg

SEQ ID NO: 8170 - DNA, 20 bp, Bacillus schlegellii
gcgctgaaggcgaacctggc

SEQ ID NO: 8171 - DNA, 20 bp, Brevibacillus thermoruber
agcgcgcgcaggcggtcggg

SEQ ID NO: 8172 - DNA, 20 bp, Sphingobacterium multivorum
aagttagtgaagagtgcaga

SEQ ID NO: 8173 - DNA, 20 bp, Corynebacterium confusum
ttaaagttggccttagttcg

SEQ ID NO: 8174 - DNA, 20 bp, Prevotella disiens
atattcattgatgacatctg

SEQ ID NO: 8175 - DNA, 20 bp, Prevotella oralis
gggcatcatggaggttgttt

SEQ ID NO: 8176 - DNA, 20 bp, Prevotella oralis
caatccttaaaacgtgcctc

SEQ ID NO: 8177 - DNA, 30 bp, Actinomyces radingae
tgtgaggtggagcgaatcctttaaagcttg

SEQ ID NO: 8178 - DNA, 20 bp, Alloiococcus otitis
ctgggaaaataaaaggtggc

SEQ ID NO: 8179 - DNA, 20 bp, Moraxella atlantae
gcaggtaaagctgagaactg

SEQ ID NO: 8180 - DNA, 30 bp, Prevotella bivia
cgtgttgtgaaatgtaggagctcaacttct

SEQ ID NO: 8181 - DNA, 30 bp, Corynebacterium kutscheri
tgtgtgtggtggaaagttttttcggttagg

SEQ ID NO: 8182 - DNA, 20 bp, Bacillus marinus
acgtgggcaatctgcccgta

SEQ ID NO: 8183 - DNA, 20 bp, Peptoniphilus indolicus
aacagacaccttcgggaaga

SEQ ID NO: 8184 - DNA, 20 bp, Prevotella oralis
acggcataccccgttgaaag

SEQ ID NO: 8185 - DNA, 30 bp, Staphylococcus simulans
tgtaagtaactgtgcatcccttgacggtac

SEQ ID NO: 8186 - DNA, 20 bp, Bacillus schlegellii
ctgccgggtccagagatggg

SEQ ID NO: 8187 - DNA, 20 bp, Dolosigranulum pigrum
gtaactactagcgccttgac

SEQ ID NO: 8188 - DNA, 20 bp, Streptococcus thoraltensis
taccgtagcttgctacaatt

SEQ ID NO: 8189 - DNA, 20 bp, Corynebacterium group ANF
ggtgcctgtggtggaaaacg

SEQ ID NO: 8190 - DNA, 30 bp, Chromobacterium violaceum
gcattggagactgcacagctagagtgcgtc

SEQ ID NO: 8191 - DNA, 20 bp, Bacillus marinus
gacatcccattgcccggtct

SEQ ID NO: 8192 - DNA, 20 bp, Helcococcus kunzii
ttgttgggagtcaaatctca

SEQ ID NO: 8193 - DNA, 20 bp, Ignavigranum ruoffiae
acatccgctgcatagcttag

SEQ ID NO: 8194 - DNA, 20 bp, Bacteroides distasonis
ccgtaaccgaaaggatcggc

SEQ ID NO: 8195 - DNA, 20 bp, Vagococcus fluvialis
ggtgtcactgttggatgggc

SEQ ID NO: 8196 - DNA, 20 bp, Staphylococcus simulans
atgcatcccttgacggtacc

SEQ ID NO: 8197 - DNA, 20 bp, Corynebacterium confusum
tccctttgtggcctttatac

SEQ ID NO: 8198 - DNA, 20 bp, Bacteroides vulgatus
tggcatcatgagtccgcatg

SEQ ID NO: 8199 - DNA, 20 bp, Moraxella atlantae
atgaagccttagtggcgcag

SEQ ID NO: 8200 - DNA, 20 bp, Moraxella atlantae
tgtgcctaaattagattagc

SEQ ID NO: 8201 - DNA, 30 bp, Peptoniphilus indolicus
aggatttcgattcgtaaagctctgtcctat

SEQ ID NO: 8202 - DNA, 20 bp, Bacteroides thetaiotaomicron
gaataaagtggtccacgtgt

SEQ ID NO: 8203 - DNA, 20 bp, Prevotella oralis
tccaaccttcccattactac

SEQ ID NO: 8204 - DNA, 20 bp, Lactococcus raffinolactis
acaacgagtcgcaaggcagt

SEQ ID NO: 8205 - DNA, 20 bp, Pseudoramibacter alactolyticus
taacacagcagaatcgcatg

SEQ ID NO: 8206 - DNA, 20 bp, Bacteroides distasonis
gacaaagggaggccacctgg

SEQ ID NO: 8207 - DNA, 20 bp, Bacteroides thetaiotaomicron
attgcaaatgaattatgggg

SEQ ID NO: 8208 - DNA, 20 bp, Moraxella atlantae
ggtgaactagagtatatgag

SEQ ID NO: 8209 - DNA, 20 bp, Prevotella oralis
gcagtccgaagcagtcatct

SEQ ID NO: 8210 - DNA, 20 bp, Atopobium parvulum
gctcgctctcgataccggca

SEQ ID NO: 8211 - DNA, 20 bp, Burkholderia gladioli
cggggcctcgcgctataggg

SEQ ID NO: 8212 - DNA, 30 bp, Corynebacterium kutscheri
caagtcgaacggaaaggctttcttgcttgc

SEQ ID NO: 8213 - DNA, 20 bp, Anaerobiospirillum succiniciproducens
acatcgtaggaatctttcag

SEQ ID NO: 8214 - DNA, 20 bp, Abiotrophia defectiva
taggtcaaggtgagtggcga

SEQ ID NO: 8215 - DNA, 20 bp, Ochrobactrum intermedium
ccctatacgaccgagaggtg

SEQ ID NO: 8216 - DNA, 20 bp, Prevotella oralis
tccttaaaacgtgcctcagt

SEQ ID NO: 8217 - DNA, 20 bp, Prevotella bivia
taagggataacccagcgaaa

SEQ ID NO: 8218 - DNA, 20 bp, Actinomyces meyeri
atgctccagctttgttgggg

SEQ ID NO: 8219 - DNA, 20 bp, Clostridium tetani
cgcataaagttaaggtttcg

SEQ ID NO: 8220 - DNA, 20 bp, Abiotrophia defectiva
aggacatggaatcacatgat

SEQ ID NO: 8221 - DNA, 20 bp, Prevotella disiens
tcattgatgacatctgattt

SEQ ID NO: 8222 - DNA, 20 bp, Clostridium cadaveris
gatgcgtaggtggaatttta

SEQ ID NO: 8223 - DNA, 20 bp, Streptococcus ratti
ttgattgaaagatgcaagcg

SEQ ID NO: 8224 - DNA, 20 bp, Kytococcus sedentarius
ggatacgaccgaccctcgca

SEQ ID NO: 8225 - DNA, 30 bp, Actinomyces radingae
cgcctgtcgtgtaatcctctggcttaactg

SEQ ID NO: 8226 - DNA, 20 bp, Bacteroides vulgatus
aaagccgtaagccgcaaggc

SEQ ID NO: 8227 - DNA, 20 bp, Prevotella oralis
accttcccattactacggca

SEQ ID NO: 8228 - DNA, 20 bp, Veillonella atypica
tggttcttgtgcgaatagtg

SEQ ID NO: 8229 - DNA, 20 bp, Clostridium cadaveris
gtaggtggaattttaagtgg

SEQ ID NO: 8230 - DNA, 20 bp, Weeksella virosa
ggtggcatcatttagttttg

SEQ ID NO: 8231 - DNA, 20 bp, Corynebacterium kutscheri
ttttaggtctgtatacaggt

SEQ ID NO: 8232 - DNA, 20 bp, Abiotrophia defectiva
ggacatggaatcacatgatt

SEQ ID NO: 8233 - DNA, 20 bp, Prevotella oris
cttgcttccccgggcgtcga

SEQ ID NO: 8234 - DNA, 20 bp, Helcococcus kunzii
ctgtccttagcgaagataat

SEQ ID NO: 8235 - DNA, 20 bp, Clostridium innocuum
ggacctgcgacgcattagct

SEQ ID NO: 8236 - DNA, 20 bp, Facklamia sourekii
tgatttgacggtatctaatc

SEQ ID NO: 8237 - DNA, 20 bp, Prevotella bivia
tctcatgagattacgaataa

SEQ ID NO: 8238 - DNA, 30 bp, Corynebacterium group ANF
agatcgtctgtccctttgtggctggtgtgc

SEQ ID NO: 8239 - DNA, 20 bp, Bacteroides vulgatus
ttgcatgtactttatgaata

SEQ ID NO: 8240 - DNA, 20 bp, Bacteroides eggerthii
ggcgggtgcttaagtcagtt

SEQ ID NO: 8241 - DNA, 20 bp, Bacteroides vulgatus
gcagcctgctaagctgcaac

SEQ ID NO: 8242 - DNA, 20 bp, Moraxella atlantae
ataagattgtaaagcacttt

SEQ ID NO: 8243 - DNA, 20 bp, Bacillus psychrosaccharolyticus
gaattgttgagtttactcaa

SEQ ID NO: 8244 - DNA, 30 bp, Bacteroides vulgatus
ccgtaaaattgcagttgatactggatatct

SEQ ID NO: 8245 - DNA, 20 bp, Lactococcus raffinolactis
tcgcaaggcagtgatgtcaa

SEQ ID NO: 8246 - DNA, 20 bp, Actinomyces odontolyticus
tattcactgatcttcgcatg

SEQ ID NO: 8247 - DNA, 20 bp, Moraxella atlantae
agtcgaacgatggaacctag

SEQ ID NO: 8248 - DNA, 20 bp, Bacteroides vulgatus
ttgcagatgaattacggtga

SEQ ID NO: 8249 - DNA, 30 bp, Actinomyces radingae
gtaggcggtttgtcgcgcctgtcgtgtaat

SEQ ID NO: 8250 - DNA, 20 bp, Bacteroides caccae
acgccgcaaggcatttgtga

SEQ ID NO: 8251 - DNA, 20 bp, Budvicia aquatica
taagcggaccacataaagtg

SEQ ID NO: 8252 - DNA, 20 bp, Brevibacillus thermoruber
aacgggacgcaagcccgcga

SEQ ID NO: 8253 - DNA, 20 bp, Corynebacterium kutscheri
gaaaggctttcttgcttgca

SEQ ID NO: 8254 - DNA, 20 bp, Lactococcus raffinolactis
tgcatagagtggaaaattat

SEQ ID NO: 8255 - DNA, 20 bp, Haemophilus segnis
gtttaataggcatcacgatt

SEQ ID NO: 8256 - DNA, 20 bp, Psychrobacter phenylpyruvicus
gcttgcgctctcgctattgg

SEQ ID NO: 8257 - DNA, 20 bp, Paenibacillus macerans
taaggctgtggctcaaccac

SEQ ID NO: 8258 - DNA, 20 bp, Streptococcus ratti
gcggtcaggaaagtctggag

SEQ ID NO: 8259 - DNA, 20 bp, Alloiococcus otitis
agtcgaacgccaaatcttcc

SEQ ID NO: 8260 - DNA, 20 bp, Corynebacterium confusum
ctgggcttgacatatttagg

SEQ ID NO: 8261 - DNA, 20 bp, Bacteroides caccae
tggggaaacccatacgccgc

SEQ ID NO: 8262 - DNA, 20 bp, Empedobacter brevis
ttgaaagatttatcgcagta

SEQ ID NO: 8263 - DNA, 20 bp, Clostridium cadaveris
aagctctttcgggagcagga

SEQ ID NO: 8264 - DNA, 20 bp, Bacillus schlegellii
ggcagcgcactggcctgtaa

SEQ ID NO: 8265 - DNA, 30 bp, Aerococcus christensenii
ggtgctaataccgcataggaagtttgttcg

SEQ ID NO: 8266 - DNA, 20 bp, Atopobium parvulum
aaaccgtggataataccgaa

SEQ ID NO: 8267 - DNA, 20 bp, Dolosigranulum pigrum
ggattggtcgcatgacgaat

SEQ ID NO: 8268 - DNA, 30 bp, Weeksella virosa
cgatagaactgccattgatactgttgatct

SEQ ID NO: 8269 - DNA, 20 bp, Anaerobiospirillum succiniciproducens
ggaaacactgacggtaccca

SEQ ID NO: 8270 - DNA, 20 bp, Bacteroides capilosus
cagggcttgacatccgacta

SEQ ID NO: 8271 - DNA, 20 bp, Prevotella oralis
agcgagtcggccgtatgtaa

SEQ ID NO: 8272 - DNA, 30 bp, Facklamia languida
aagtccttcgggacatccatacaggtggtg

SEQ ID NO: 8273 - DNA, 20 bp, Bacteroides stercoris
agtgcagcagaggtgggcgg

SEQ ID NO: 8274 - DNA, 20 bp, Staphylococcus chromogenes
cgatagtgaaagacggtctt

SEQ ID NO: 8275 - DNA, 20 bp, Bacteroides eggerthii
cttgcttcaatcgatggcga

SEQ ID NO: 8276 - DNA, 20 bp, Lactococcus raffinolactis
gtttggggctatccagccct

SEQ ID NO: 8277 - DNA, 20 bp, Alloiococcus otitis
ttgttggggaagaacacgga

SEQ ID NO: 8278 - DNA, 20 bp, Gemella morbillorum
ccggataacagtatttctcg

SEQ ID NO: 8279 - DNA, 20 bp, Alloiococcus otitis
cccgaagccggccgggcaac

SEQ ID NO: 8280 - DNA, 20 bp, Suttonella indologenes
ccttagatgagcctatattg

SEQ ID NO: 8281 - DNA, 20 bp, Ignavigranum ruoffiae
tcgcctgactcattggggaa

SEQ ID NO: 8282 - DNA, 20 bp, Kytococcus sedentarius
tggatacgaccgaccctcgc

SEQ ID NO: 8283 - DNA, 20 bp, Suttonella indologenes
ttcgttagtgaagaaaggtt

SEQ ID NO: 8284 - DNA, 20 bp, Staphylococcus simulans
ggtttcatgatgaaagacgg

SEQ ID NO: 8285 - DNA, 20 bp, Neisseria weaveri
gtggctaatatccatgactg

SEQ ID NO: 8286 - DNA, 20 bp, Leuconostoc fallax
tgatcacttcggtgagacgt

SEQ ID NO: 8287 - DNA, 20 bp, Bacteroides vulgatus
agtcgggtatggatacccgt

SEQ ID NO: 8288 - DNA, 20 bp, Myroides odoratus
ttcgtaggcggttgagtaag

SEQ ID NO: 8289 - DNA, 20 bp, Bacteroides distasonis
gccgtttgcgaggtgctgca

SEQ ID NO: 8290 - DNA, 30 bp, Actinomyces meyeri
atgcgccctgggcgtgcggagacgtgcgtg

SEQ ID NO: 8291 - DNA, 20 bp, Cardiobacterium hominis
cctcgcggcaagagatgagc

SEQ ID NO: 8292 - DNA, 20 bp, Clostridium glycolicum
gcgagtgtcgaaggtgaaat

SEQ ID NO: 8293 - DNA, 20 bp, Anaerobiospirillum succiniciproducens
tcattctaaactgcctttct

SEQ ID NO: 8294 - DNA, 20 bp, Streptococcus thoraltensis
gcaagtggaacgcatttata

SEQ ID NO: 8295 - DNA, 20 bp, Bacillus schlegellii
ggtccagagatgggcctttc

SEQ ID NO: 8296 - DNA, 20 bp, Weissella paramesenteroides
ctctgatgtgattttatctg

SEQ ID NO: 8297 - DNA, 20 bp, Alloiococcus otitis
aggttttcccagtgcatgct

SEQ ID NO: 8298 - DNA, 20 bp, Helcococcus kunzii
ataccttatgatacattaat

SEQ ID NO: 8299 - DNA, 20 bp, Bacillus marinus
ttctctaacttagcggcgga

SEQ ID NO: 8300 - DNA, 20 bp, Bacillus sp
actgatgaagagcttgcttt

SEQ ID NO: 8301 - DNA, 20 bp, Streptococcus thoraltensis
tgttataagcgaagaatagg

SEQ ID NO: 8302 - DNA, 20 bp, Streptococcus ratti
attgattgaaagatgcaagc

SEQ ID NO: 8303 - DNA, 20 bp, Paenibacillus macerans
taatttattttgcagcattg

SEQ ID NO: 8304 - DNA, 20 bp, Prevotella disiens
gggactcctatgaaggtgct

SEQ ID NO: 8305 - DNA, 20 bp, Peptoniphilus indolicus
gttaagtcggattagcggcg

SEQ ID NO: 8306 - DNA, 20 bp, Myroides odoratus
gcagattactacgtacttat

SEQ ID NO: 8307 - DNA, 20 bp, Helcococcus kunzii
atacattaatatcgcatgat

SEQ ID NO: 8308 - DNA, 20 bp, Helcococcus kunzii
actagcgagtaaagtcgagg

SEQ ID NO: 8309 - DNA, 20 bp, Leuconostoc fallax
catgaagtgtgtttaaaagg

SEQ ID NO: 8310 - DNA, 20 bp, Leuconostoc fallax
cgctagtcgcggacctgatc

SEQ ID NO: 8311 - DNA, 20 bp, Dolosigranulum pigrum
gggctttccggccctcggtg

SEQ ID NO: 8312 - DNA, 20 bp, Peptoniphilus indolicus
gcgaagaaggatttcgattc

SEQ ID NO: 8313 - DNA, 20 bp, Bacillus schlegellii
aagaagggccgcggaggcgg

SEQ ID NO: 8314 - DNA, 20 bp, Brevibacterium epidermidis
acgaccacctgacgcatgtt

SEQ ID NO: 8315 - DNA, 20 bp, Bacteroides distasonis
aacccttgccactagttact

SEQ ID NO: 8316 - DNA, 20 bp, Dolosigranulum pigrum
tcactgcttgcagtgattga

SEQ ID NO: 8317 - DNA, 20 bp, Bacillus schlegellii
tgtcggggaagaagggccgc

SEQ ID NO: 8318 - DNA, 20 bp, Gemella morbillorum
ttctcgcatgagagatattt

SEQ ID NO: 8319 - DNA, 20 bp, Pasteurella multocida
ttggggattgagcaataagc

SEQ ID NO: 8320 - DNA, 20 bp, Bacteroides caccae
atccaacctacctcatactc

SEQ ID NO: 8321 - DNA, 20 bp, Ignavigranum ruoffiae
tgctatcactaaaggatggt

SEQ ID NO: 8322 - DNA, 20 bp, Bacillus sp
ccgaaggggttctacttgct

SEQ ID NO: 8323 - DNA, 20 bp, Psychrobacter phenylpyruvicus
gggaaaagggggcagcttgc

SEQ ID NO: 8324 - DNA, 20 bp, Bacteroides vulgatus
gcatgttcacatgattaaag

SEQ ID NO: 8325 - DNA, 20 bp, Bacteroides vulgatus
taaagtcgggtatgcatacc

SEQ ID NO: 8326 - DNA, 20 bp, Myroides odoratus
aggctacgatgattaggggt

SEQ ID NO: 8327 - DNA, 20 bp, Bacillus marinus
gagaagcttgcttctctaac

SEQ ID NO: 8328 - DNA, 20 bp, Dolosigranulum pigrum
agtcgaacgatgatatcact

SEQ ID NO: 8329 - DNA, 20 bp, Prevotella oralis
ccttaaaacgtgcctcagtt

SEQ ID NO: 8330 - DNA, 20 bp, Leuconostoc lactis
gtttagattgaaggagcttg

SEQ ID NO: 8331 - DNA, 30 bp, Staphylococcus simulans
cggggctaataccggataacacatgaaacc

SEQ ID NO: 8332 - DNA, 20 bp, Staphylococcus sciuri
gggcagcgaatccgcgaggc

SEQ ID NO: 8333 - DNA, 20 bp, Aeromonas hydrophila
ccaccagctgtgacgttact

SEQ ID NO: 8334 - DNA, 20 bp, Anaerobiospirillum succiniciproducens
accacggtgtggtctgtgac

SEQ ID NO: 8335 - DNA, 20 bp, Lactococcus raffinolactis
attcgacatttgaaagtacc

SEQ ID NO: 8336 - DNA, 20 bp, Actinomyces radingae
gaagcttgtggcttaacctt

SEQ ID NO: 8337 - DNA, 20 bp, Leptotrichia buccalis
agtattggagaggtggacgg

SEQ ID NO: 8338 - DNA, 20 bp, Suttonella indologenes
gtgaagaaaggtttatggtt

SEQ ID NO: 8339 - DNA, 20 bp, Alloiococcus otitis
gggctatgattgacgctgag

SEQ ID NO: 8340 - DNA, 20 bp, Helcococcus kunzii
atttttcagttgatttcttc

SEQ ID NO: 8341 - DNA, 20 bp, Veillonella atypica
tcttgtgcgaatagtgcgag

SEQ ID NO: 8342 - DNA, 20 bp, Moraxella atlantae
acagcatatgatactggtga

SEQ ID NO: 8343 - DNA, 30 bp, Bacteroides vulgatus
gttactaacaggttctgctgaggactctga

SEQ ID NO: 8344 - DNA, 20 bp, Pasteurella multocida
gattgagcaataagcttggt

SEQ ID NO: 8345 - DNA, 20 bp, Leptotrichia buccalis
attggagaggtggacggaac

SEQ ID NO: 8346 - DNA, 20 bp, Streptococcus sobrinus
acttgctccagtgttactaa

SEQ ID NO: 8347 - DNA, 20 bp, Prevotella bivia
acgatttagagataatgagg

SEQ ID NO: 8348 - DNA, 20 bp, Leuconostoc lactis
attgaaggagcttgctcctg

SEQ ID NO: 8349 - DNA, 20 bp, Abiotrophia defectiva
tgcttgcacttggtcaaggt

SEQ ID NO: 8350 - DNA, 20 bp, Streptococcus thoraltensis
tagaacttttcttaggaaca

SEQ ID NO: 8351 - DNA, 20 bp, Peptostreptococcus anaerobius
aagtcgagcgcgtctgattt

SEQ ID NO: 8352 - DNA, 20 bp, Brevibacillus thermoruber
tttggagcttgcttcagaca

SEQ ID NO: 8353 - DNA, 20 bp, Weeksella virosa
agttgaaggtagcatatgaa

SEQ ID NO: 8354 - DNA, 20 bp, Prevotella bivia
atgaggtccttcgggacatc

SEQ ID NO: 8355 - DNA, 20 bp, Bacillus psychrosaccharolyticus
gttgagtttactcaacaatt

SEQ ID NO: 8356 - DNA, 20 bp, Weeksella virosa
gaagttggcgaccgtaacag

SEQ ID NO: 8357 - DNA, 20 bp, Myroides odoratus
agtatggaagtaattagaat

SEQ ID NO: 8358 - DNA, 20 bp, Actinomyces radingae
agtttctggagggagatggg

SEQ ID NO: 8359 - DNA, 20 bp, Staphylococcus simulans
aactatgcatcccttgacgg

SEQ ID NO: 8360 - DNA, 20 bp, Moraxella atlantae
agcttttgctataagatgtg

SEQ ID NO: 8361 - DNA, 30 bp, Paenibacillus apiarius
cgcgcgcaggcggtgatgtaagttgggtgt

SEQ ID NO: 8362 - DNA, 20 bp, Bacteroides thetaiotaomicron
ggatagccgtaaggcaaatg

SEQ ID NO: 8363 - DNA, 20 bp, Clostridium clostridiiforme
cacagtgccgcatggcagtg

SEQ ID NO: 8364 - DNA, 20 bp, Bacillus azotoformans
aagccgcgaggcttgagcca

SEQ ID NO: 8365 - DNA, 20 bp, Ignavigranum ruoffiae
aggtggtggcttaagtctga

SEQ ID NO: 8366 - DNA, 20 bp, Peptoniphilus asaccharolyticus
gacagattccttcggggtga

SEQ ID NO: 8367 - DNA, 30 bp, Suttonella indologenes
ctgggaattgcatttgaaactgggtaacta

SEQ ID NO: 8368 - DNA, 30 bp, Staphylococcus simulans
taaaactctgttattagggaagaacaagga

SEQ ID NO: 8369 - DNA, 20 bp, Clostridium cadaveris
aagtcatgaaaggagcaatc

SEQ ID NO: 8370 - DNA, 20 bp, Cardiobacterium hominis
aaggcctcgcggcaagagat

SEQ ID NO: 8371 - DNA, 20 bp, Bacteroides thetaiotaomicron
aattatggggaaacccatag

SEQ ID NO: 8372 - DNA, 20 bp, Bacteroides thetaiotaomicron
ataattagaccgcatggtct

SEQ ID NO: 8373 - DNA, 30 bp, Globicatella sanguinis
gttaaggttagtggcgcacgggtgagtaac

SEQ ID NO: 8374 - DNA, 20 bp, Corynebacterium group ANF
cctgtggtggaaaacgtttt

SEQ ID NO: 8375 - DNA, 20 bp, Myroides odoratus
gacttgaatagtatggaagt

SEQ ID NO: 8376 - DNA, 30 bp, Bacteroides distasonis
cgtttgcgaggtgctgcatggttgtcgtca

SEQ ID NO: 8377 - DNA, 20 bp, Weeksella virosa
cggattaataccgtatataa

SEQ ID NO: 8378 - DNA, 20 bp, Bacteroides thetaiotaomicron
gcataattagaccgcatggt

SEQ ID NO: 8379 - DNA, 20 bp, Microbacterium testaceum
ctggatatgagacgtgatcg

SEQ ID NO: 8380 - DNA, 30 bp, Vagococcus fluvialis
ttggatgggcccgcgctgcattagttagtt

SEQ ID NO: 8381 - DNA, 20 bp, Ignavigranum ruoffiae
gggagcgcaggtggtggctt

SEQ ID NO: 8382 - DNA, 20 bp, Staphylococcus hyicus
tcttttgaccagctctagag

SEQ ID NO: 8383 - DNA, 20 bp, Ochrobactrum intermedium
cctatacgaccgagaggtga

SEQ ID NO: 8384 - DNA, 20 bp, Facklamia sourekii
gcttttgctgtcactagagg

SEQ ID NO: 8385 - DNA, 20 bp, Prevotella oralis
gcggggcatcatggaggttg

SEQ ID NO: 8386 - DNA, 20 bp, Bacteroides thetaiotaomicron
ttagaccgcatggtcttatt

SEQ ID NO: 8387 - DNA, 20 bp, Chromobacterium violaceum
tcagggaggaaatcccgctg

SEQ ID NO: 8388 - DNA, 20 bp, Clostridium septicum
ggagtttcttcggaaacaaa

SEQ ID NO: 8389 - DNA, 20 bp, Anaerobiospirillum succiniciproducens
atcgtaggaatctttcagag

SEQ ID NO: 8390 - DNA, 20 bp, Corynebacterium group ANF
tgacatgcactagatgaggc

SEQ ID NO: 8391 - DNA, 20 bp, Sphingobacterium multivorum
gtccaggaataaacctttct

SEQ ID NO: 8392 - DNA, 20 bp, Globicatella sanguinis
cacaacgagaacttgttctg

SEQ ID NO: 8393 - DNA, 30 bp, Leuconostoc fallax
aatggctttggaaactggcgaacttgagtg

SEQ ID NO: 8394 - DNA, 20 bp, Empedobacter brevis
atttatcgcagtaggatagg

SEQ ID NO: 8395 - DNA, 20 bp, Facklamia sourekii
ccgcataaaccttaagctcg

SEQ ID NO: 8396 - DNA, 20 bp, Corynebacterium confusum
tggcctttatacaggtggtg

SEQ ID NO: 8397 - DNA, 20 bp, Bacillus schlegellii
cccgcgagggacggcggaga

SEQ ID NO: 8398 - DNA, 20 bp, Gemella morbillorum
gtatttctcgcatgagagat

SEQ ID NO: 8399 - DNA, 20 bp, Leuconostoc fallax
gaagaatagttaatgtagga

SEQ ID NO: 8400 - DNA, 20 bp, Bacteroides eggerthii
cagcataggtaggcggaatt

SEQ ID NO: 8401 - DNA, 20 bp, Anaerobiospirillum succiniciproducens
aacttcggtttgggttccgc

SEQ ID NO: 8402 - DNA, 20 bp, Streptococcus sobrinus
accggacttgctccagtgtt

SEQ ID NO: 8403 - DNA, 20 bp, Prevotella oralis
ttggtcggtggccaagcgaa

SEQ ID NO: 8404 - DNA, 20 bp, Corynebacterium accolens
agagatgtagtttccccttt

SEQ ID NO: 8405 - DNA, 20 bp, Staphylococcus simulans
taactatgcatcccttgacg

SEQ ID NO: 8406 - DNA, 20 bp, Empedobacter brevis
tcgaaaacttatctcagttc

SEQ ID NO: 8407 - DNA, 20 bp, Facklamia sourekii
gtagagtaactgttactgat

SEQ ID NO: 8408 - DNA, 20 bp, Actinomyces radingae
tgcgccctgagcgcctagag

SEQ ID NO: 8409 - DNA, 20 bp, Leptotrichia buccalis
atcttgacatcctgcgtatg

SEQ ID NO: 8410 - DNA, 20 bp, Leuconostoc fallax
gtaggaaatgatgttaatgt

SEQ ID NO: 8411 - DNA, 30 bp, Bacteroides vulgatus
ggactctgacaagactgccatcgtaagatg

SEQ ID NO: 8412 - DNA, 20 bp, Corynebacterium confusum
caatggtcaatacaatgcgt

SEQ ID NO: 8413 - DNA, 20 bp, Peptoniphilus indolicus
ccctcgtaagcatttgaaac

SEQ ID NO: 8414 - DNA, 20 bp, Moraxella atlantae
tttctggcacaatactgaca

SEQ ID NO: 8415 - DNA, 20 bp, Bacillus schlegellii
atgctggggcaaggaaaggg

SEQ ID NO: 8416 - DNA, 20 bp, Brevibacillus thermoruber
accttctcgcatgagagggt

SEQ ID NO: 8417 - DNA, 20 bp, Facklamia sourekii
agagtaactgttactgattt

SEQ ID NO: 8418 - DNA, 20 bp, Streptococcus sobrinus
tgttaactgtttaaaagaag

SEQ ID NO: 8419 - DNA, 20 bp, Streptococcus thoraltensis
aataccgcataaaaggagct

SEQ ID NO: 8420 - DNA, 20 bp, Bacteroides vulgatus
gtagatggatgtttaagtca

SEQ ID NO: 8421 - DNA, 20 bp, Paenibacillus apiarius
atagacattttcctcgcctg

SEQ ID NO: 8422 - DNA, 20 bp, Ignavigranum ruoffiae
ttcggtccgtaaagcactgt

SEQ ID NO: 8423 - DNA, 20 bp, Bacillus psychrosaccharolyticus
gagtttactcaacaattagc

SEQ ID NO: 8424 - DNA, 20 bp, Prevotella oralis
ctaattccgtatgcagtccg

SEQ ID NO: 8425 - DNA, 20 bp, Bacillus schlegellii
ccgggtccagagatgggcct

SEQ ID NO: 8426 - DNA, 20 bp, Paenibacillus apiarius
cgcctgagggaaatgggaaa

SEQ ID NO: 8427 - DNA, 20 bp, Arcanobacterium haemolyticum
aacgatgaaggctcctgctt

SEQ ID NO: 8428 - DNA, 20 bp, Abiotrophia defectiva
agagtaactgctatgcgtgt

SEQ ID NO: 8429 - DNA, 20 bp, Bacteroides distasonis
tggacaaagggaagccacct

SEQ ID NO: 8430 - DNA, 20 bp, Bacillus schlegellii
ttcacacattaagcaccccg

SEQ ID NO: 8431 - DNA, 20 bp, Weissella paramesenteroides
tctgatgtgattttatctga

SEQ ID NO: 8432 - DNA, 20 bp, Gemella morbillorum
cggataacagtatttctcgc

SEQ ID NO: 8433 - DNA, 20 bp, Atopobium parvulum
agacttccgcatggaagact

SEQ ID NO: 8434 - DNA, 20 bp, Streptococcus infantarius
tcacccgttcgcaatcttcc

SEQ ID NO: 8435 - DNA, 20 bp, Clostridium cadaveris
atattatggtttttctgcat

SEQ ID NO: 8436 - DNA, 20 bp, Streptococcus mutans
cgcaaggaaacacactgtgc

SEQ ID NO: 8437 - DNA, 20 bp, Streptococcus ratti
gcaggcggtcaggaaagtct

SEQ ID NO: 8438 - DNA, 20 bp, Bacteroides ureolyticus
ccttttatcaggaaagaata

SEQ ID NO: 8439 - DNA, 20 bp, Peptoniphilus asaccharolyticus
gcgatgaaatttcgacagat

SEQ ID NO: 8440 - DNA, 20 bp, Clostridium cadaveris
tctgcatgggaaagtcatga

SEQ ID NO: 8441 - DNA, 20 bp, Finegoldia magna
gaacgaagaaggtattcgta

SEQ ID NO: 8442 - DNA, 20 bp, Staphylococcus hyicus
gacatcttttgaccagctct

SEQ ID NO: 8443 - DNA, 20 bp, Anaerobiospirillum succiniciproducens
aaggtaagtaggatgtgaaa

SEQ ID NO: 8444 - DNA, 20 bp, Bacteroides distasonis
ggcgtggacaaagggaagcc

SEQ ID NO: 8445 - DNA, 20 bp, Moraxella atlantae
aagattgtaaagcactttaa

SEQ ID NO: 8446 - DNA, 20 bp, Bacillus schlegellii
cgcggaggcggcattgacgg

SEQ ID NO: 8447 - DNA, 20 bp, Clostridium innocuum
gcttccaaaaagacttagtg

SEQ ID NO: 8448 - DNA, 20 bp, Prevotella bivia
tttatgtcggcgaccggcgc

SEQ ID NO: 8449 - DNA, 20 bp, Prevotella bivia
cgtttgatctcatgagatta

SEQ ID NO: 8450 - DNA, 20 bp, Moraxella atlantae
tacgggagaaaggaggcgag

SEQ ID NO: 8451 - DNA, 20 bp, Peptoniphilus indolicus
gactcgcgtctgattaatta

SEQ ID NO: 8452 - DNA, 20 bp, Weeksella virosa
tagttgaaggtagcatatga

SEQ ID NO: 8453 - DNA, 20 bp, Corynebacterium group ANF
tgcagggtggtgcctgtggt

SEQ ID NO: 8454 - DNA, 20 bp, Bacteroides distasonis
cttgagtatgtttgaggcag

SEQ ID NO: 8455 - DNA, 20 bp, Bacteroides distasonis
gggaagccacctggcgacag

SEQ ID NO: 8456 - DNA, 20 bp, Anaerobiospirillum succiniciproducens
attctaaactggctttctag

SEQ ID NO: 8457 - DNA, 20 bp, Sphingobacterium multivorum
ctaaaagccattcacaggtc

SEQ ID NO: 8458 - DNA, 20 bp, Paenibacillus apiarius
cggtgatgtaagttgggtgt

SEQ ID NO: 8459 - DNA, 20 bp, Eubacterium moniliforme
attgtactttcgcatgaaag

SEQ ID NO: 8460 - DNA, 20 bp, Myroides odoratus
aattacgtgtaattatttga

SEQ ID NO: 8461 - DNA, 20 bp, Atopobium parvulum
ctcaacccccgctcgctctc

SEQ ID NO: 8462 - DNA, 20 bp, Streptococcus thoraltensis
gacatcccggtgccggttct

SEQ ID NO: 8463 - DNA, 20 bp, Dolosigranulum pigrum
gacagacttgaatgtagaag

SEQ ID NO: 8464 - DNA, 30 bp, Facklamia sourekii
ggaaacctaccctctagcgggggataacta

SEQ ID NO: 8465 - DNA, 20 bp, Bacteroides eggerthii
tgaagcttgcttcaatcgat

SEQ ID NO: 8466 - DNA, 20 bp, Bacteroides vulgatus
acatgattaaaggtattccg

SEQ ID NO: 8467 - DNA, 20 bp, Suttonella indologenes
gcttatcagggcggttacca

SEQ ID NO: 8468 - DNA, 20 bp, Veillonella atypica
atcgagactggatgaaaggt

SEQ ID NO: 8469 - DNA, 20 bp, Helcococcus kunzii
ggatagtcttttcggagact

SEQ ID NO: 8470 - DNA, 20 bp, Ignavigranum ruoffiae
taggccagtgagtcgcctga

SEQ ID NO: 8471 - DNA, 20 bp, Corynebacterium macginleyi
gagggtttttctacgattct

SEQ ID NO: 8472 - DNA, 20 bp, Bacillus marinus
tatcacttacggatgagccc

SEQ ID NO: 8473 - DNA, 20 bp, Bacteroides ureolyticus
agggaaagtcttttcggtgt

SEQ ID NO: 8474 - DNA, 20 bp, Dolosigranulum pigrum
ggctttccggccctcggtgc

SEQ ID NO: 8475 - DNA, 20 bp, Clostridium sordellii
atacgggataaaatatgaga

SEQ ID NO: 8476 - DNA, 30 bp, Cardiobacterium hominis
gtcgggttgttaaagactcggtgccggagc

SEQ ID NO: 8477 - DNA, 20 bp, Clostridium cadaveris
tttcgggagcaggaacacag

SEQ ID NO: 8478 - DNA, 20 bp, Ignavigranum ruoffiae
cgcacaacgaaggagcttgc

SEQ ID NO: 8479 - DNA, 20 bp, Anaerobiospirillum succiniciproducens
taggcggaaaggtaagtagg

SEQ ID NO: 8480 - DNA, 20 bp, Abiotrophia defectiva
gactaggtgcttgcactagg

SEQ ID NO: 8481 - DNA, 20 bp, Lactococcus raffinolactis
tagagtggaaaattatgcaa

SEQ ID NO: 8482 - DNA, 30 bp, Corynebacterium kutscheri
aagagagtactcgagtggcgaacgggtgag

SEQ ID NO: 8483 - DNA, 20 bp, Bacteroides vulgatus
gtattccggtagacgatggg

SEQ ID NO: 8484 - DNA, 20 bp, Actinomyces radingae
ccgctatttgggtagtggtg

SEQ ID NO: 8485 - DNA, 20 bp, Streptococcus acidominimus
gcagcgaactggtgacagta

SEQ ID NO: 8486 - DNA, 20 bp, Virgibacillus proomii
cgggaagcaagcagaacccc

SEQ ID NO: 8487 - DNA, 20 bp, Streptococcus thoraltensis
aagcgaagaataggagtaag

SEQ ID NO: 8488 - DNA, 20 bp, Clostridium tetani
accgcataaagttaaggttt

SEQ ID NO: 8489 - DNA, 20 bp, Leuconostoc fallax
taatgtaggaaatgatgtta

SEQ ID NO: 8490 - DNA, 20 bp, Corynebacterium kutscheri
ctaaccacgtttgtggaggg

SEQ ID NO: 8491 - DNA, 20 bp, Actinomyces radingae
cttgtggcttaacctttttg

SEQ ID NO: 8492 - DNA, 20 bp, Peptoniphilus indolicus
gagcgaagaaggatttcgat

SEQ ID NO: 8493 - DNA, 20 bp, Clostridium clostridiiforme
ccccctgacgggccggtaac

SEQ ID NO: 8494 - DNA, 20 bp, Prevotella bivia
ttagcacctagtgttagcgg

SEQ ID NO: 8495 - DNA, 20 bp, Sphingobacterium multivorum
ggacgggatccatcggagag

SEQ ID NO: 8496 - DNA, 20 bp, Suttonella indologenes
ggttaatacctgtgaatttg

SEQ ID NO: 8497 - DNA, 20 bp, Paenibacillus apiarius
agggaaatgggaaagacgga

SEQ ID NO: 8498 - DNA, 20 bp, Prevotella disiens
gcatgtaccattcgaataag

SEQ ID NO: 8499 - DNA, 20 bp, Bacteroides distasonis
gtggacaaagggaagccacc

SEQ ID NO: 8500 - DNA, 20 bp, Staphylococcus simulans
gtaagtaactatgcatccct

SEQ ID NO: 8501 - DNA, 20 bp, Leptotrichia buccalis
aggcggccctgtaagtctag

SEQ ID NO: 8502 - DNA, 20 bp, Anaerobiospirillum succiniciproducens
tggtcattctaaactggctt

SEQ ID NO: 8503 - DNA, 20 bp, Abiotrophia defectiva
caagctatcgctaagagatg

SEQ ID NO: 8504 - DNA, 20 bp, Myroides odoratus
caagtcgaggggtatagaga

SEQ ID NO: 8505 - DNA, 20 bp, Corynebacterium coyleae
tggaggttgtggtggaaagt

SEQ ID NO: 8506 - DNA, 20 bp, Weeksella virosa
ctaggtggcatcatttagtt

SEQ ID NO: 8507 - DNA, 20 bp, Bacteroides distasonis
gttaggctgaggactctggt

SEQ ID NO: 8508 - DNA, 20 bp, Myroides odoratus
cgaatctcaaaaactggtct

SEQ ID NO: 8509 - DNA, 20 bp, Sphingobacterium multivorum
accgataattggggctaagt

SEQ ID NO: 8510 - DNA, 20 bp, Lactococcus raffinolactis
acaatgttggatgcatattc

SEQ ID NO: 8511 - DNA, 20 bp, Corynebacterium confusum
gcttcagcttgctggagtac

SEQ ID NO: 8512 - DNA, 20 bp, Peptoniphilus indolicus
gctcaaccctcgtaagcatt

SEQ ID NO: 8513 - DNA, 20 bp, Arcanobacterium haemolyticum
tgcttgcgggggttggatta

SEQ ID NO: 8514 - DNA, 20 bp, Actinomyces meyeri
ccagctttgttggggtggat

SEQ ID NO: 8515 - DNA, 20 bp, Sphingobacterium multivorum
aagatggtgagagtggcgca

SEQ ID NO: 8516 - DNA, 20 bp, Paenibacillus apiarius
ggcggtgatgtaagttgggt

SEQ ID NO: 8517 - DNA, 20 bp, Leuconostoc lactis
tagattgaaggagcttgctc

SEQ ID NO: 8518 - DNA, 20 bp, Bacteroides vulgatus
cttgttgtcagttactaaca

SEQ ID NO: 8519 - DNA, 20 bp, Leuconostoc fallax
ttcgcatgaagtgtgtttaa

SEQ ID NO: 8520 - DNA, 20 bp, Neisseria flavescens
gaacgctgacgagcatgctt

SEQ ID NO: 8521 - DNA, 20 bp, Prevotella disiens
tgtaaatgtaatctaatctt

SEQ ID NO: 8522 - DNA, 20 bp, Ignavigranum ruoffiae
tggtggcttaagtctgatgt

SEQ ID NO: 8523 - DNA, 20 bp, Bacteroides ureolyticus
tccttttatcaggaaagaat

SEQ ID NO: 8524 - DNA, 20 bp, Streptococcus ratti
agtgtgctctggaaactgtc

SEQ ID NO: 8525 - DNA, 20 bp, Alloiococcus otitis
tcccttgacggtacccaacc

SEQ ID NO: 8526 - DNA, 20 bp, Anaerococcus tetradius
gcggtaatacgtatggaccg

SEQ ID NO: 8527 - DNA, 20 bp, Bacteroides distasonis
gcgatacactgtaagcggca

SEQ ID NO: 8528 - DNA, 20 bp, Clostridium cadaveris
tgtaataagggaagctcttt

SEQ ID NO: 8529 - DNA, 20 bp, Prevotella disiens
gaaagacggactaataccca

SEQ ID NO: 8530 - DNA, 20 bp, Bacteroides distasonis
acgtgtcccgttttgtatgt

SEQ ID NO: 8531 - DNA, 20 bp, Anaerococcus prevotii
gagaagagtagaggtaagtg

SEQ ID NO: 8532 - DNA, 20 bp, Arcanobacterium haemolyticum
tgaaggctcctgcttgcggg

SEQ ID NO: 8533 - DNA, 20 bp, Bacteroides eggerthii
agccttcgggccgctgtgaa

SEQ ID NO: 8534 - DNA, 20 bp, Streptococcus sobrinus
aactgtttaaaagaagccat

SEQ ID NO: 8535 - DNA, 20 bp, Prevotella oralis
tcaacttttgatggcgaccg

SEQ ID NO: 8536 - DNA, 20 bp, Staphylococcus simulans
ataacacatgaaaccgcatg

SEQ ID NO: 8537 - DNA, 20 bp, Bacillus marinus
cttgcttctctaacttagcg

SEQ ID NO: 8538 - DNA, 20 bp, Alloiococcus otitis
aacgccaaatcttcctgctt

SEQ ID NO: 8539 - DNA, 20 bp, Bacteroides eggerthii
gcagcataggtaggcggaat

SEQ ID NO: 8540 - DNA, 20 bp, Leuconostoc fallax
gcctcacttagagatggatc

SEQ ID NO: 8541 - DNA, 20 bp, Paenibacillus apiarius
ggatagacattttcctcgcc

SEQ ID NO: 8542 - DNA, 20 bp, Abiotrophia defectiva
gtcaaggtgagtggcgaacg

SEQ ID NO: 8543 - DNA, 20 bp, Alloiococcus otitis
gaagaacacggataggagtc

SEQ ID NO: 8544 - DNA, 20 bp, Veillonella atypica
gcgaatagtgcgaggatttg

SEQ ID NO: 8545 - DNA, 20 bp, Prevotella oralis
gcagcgcgaactgggaatct

SEQ ID NO: 8546 - DNA, 20 bp, Campylobacter lari
ttaaccgttgaactgcttgg

SEQ ID NO: 8547 - DNA, 20 bp, Bacillus marinus
ggctatcacttacggatgag

SEQ ID NO: 8548 - DNA, 20 bp, Suttonella indologenes
gagggaagcagcttgctgcg

SEQ ID NO: 8549 - DNA, 20 bp, Bacteroides vulgatus
cacctagtcttcgatggata

SEQ ID NO: 8550 - DNA, 20 bp, Bacteroides thetaiotaomicron
aggatagccgtaaggcaaat

SEQ ID NO: 8551 - DNA, 20 bp, Dolosigranulum pigrum
tgaggaacttgcccatgagc

SEQ ID NO: 8552 - DNA, 20 bp, Clostridium cadaveris
ggaagctctttcgggagcag

SEQ ID NO: 8553 - DNA, 20 bp, Prevotella loescheii
atgcgtccgattagccagac

SEQ ID NO: 8554 - DNA, 20 bp, Microbacterium hominis
gacatacaccagaacaccgt

SEQ ID NO: 8555 - DNA, 20 bp, Bacillus mycoides
gtgaagtcgtacaaggatag

SEQ ID NO: 8556 - DNA, 20 bp, Bacteroides merdae
ggccgagaggctgaaccagc

SEQ ID NO: 8557 - DNA, 20 bp, Bacillus sp
cataaggagacgttaaaagg

SEQ ID NO: 8558 - DNA, 20 bp, Streptococcus macacae
gttaggaaagtctggagtaa

SEQ ID NO: 8559 - DNA, 30 bp, Helcococcus kunzii
agtaaagtcgaggactctagagagactgcc

SEQ ID NO: 8560 - DNA, 20 bp, Peptoniphilus indolicus
caagtcgagcgatgaagaca

SEQ ID NO: 8561 - DNA, 20 bp, Bacillus schlegellii
ctgaaggcgaacctggcgac

SEQ ID NO: 8562 - DNA, 20 bp, Kingella kingae
aggagcccgtttaccacggt

SEQ ID NO: 8563 - DNA, 20 bp, Facklamia sourekii
gaacgaaccgacggagaaac

SEQ ID NO: 8564 - DNA, 20 bp, Peptoniphilus indolicus
ttaagtcggattagcggcgg

SEQ ID NO: 8565 - DNA, 30 bp, Staphylococcus chromogenes
catatcgaaccgcatggttcgatagtgaaa

SEQ ID NO: 8566 - DNA, 20 bp, Moraxella atlantae
tacttgctagcaggtgaagc

SEQ ID NO: 8567 - DNA, 20 bp, Leptotrichia buccalis
ctagggtgaaaacctgcggc

SEQ ID NO: 8568 - DNA, 20 bp, Clostridium innocuum
cgaagtcttcaggaagcttg

SEQ ID NO: 8569 - DNA, 20 bp, Sphingobacterium multivorum
tccaggaataaacctttcta

SEQ ID NO: 8570 - DNA, 20 bp, Bacillus schlegellii
ggcattgacggtacccgacg

SEQ ID NO: 8571 - DNA, 20 bp, Prevotella loescheii
cgcttgagtgcgctgaaagt

SEQ ID NO: 8572 - DNA, 20 bp, Moraxella atlantae
ggaacagcatatgatactgg

SEQ ID NO: 8573 - DNA, 20 bp, Streptococcus thoraltensis
ttctagagatagaacttttc

SEQ ID NO: 8574 - DNA, 30 bp, Pasteurella multocida
cgatgtcgatttggggattgagcaataagc

SEQ ID NO: 8575 - DNA, 20 bp, Alloiococcus otitis
tctgggctatgattgacgct

SEQ ID NO: 8576 - DNA, 20 bp, Moraxella atlantae
gggctcatgaagtcttagtg

SEQ ID NO: 8577 - DNA, 20 bp, Lactococcus raffinolactis
gaagaacgttgcatagagtg

SEQ ID NO: 8578 - DNA, 30 bp, Pseudoramibacter alactolyticus
tattgacccttcggggggatataagagaca

SEQ ID NO: 8579 - DNA, 20 bp, Actinomyces radingae
tgggaaaggggcctttgtgg

SEQ ID NO: 8580 - DNA, 20 bp, Bacillus sp
taaggagacgttaaaaggcg

SEQ ID NO: 8581 - DNA, 20 bp, Kingella kingae
ggaagagagtagagatactc

SEQ ID NO: 8582 - DNA, 20 bp, Alloiococcus otitis
tttctgggctatgattgacg

SEQ ID NO: 8583 - DNA, 20 bp, Peptoniphilus indolicus
gcgatgaagacataacagac

SEQ ID NO: 8584 - DNA, 20 bp, Bacteroides distasonis
ccgaggtggaaacacctttt

SEQ ID NO: 8585 - DNA, 20 bp, Bacteroides vulgatus
gggtatggatacccgtttgc

SEQ ID NO: 8586 - DNA, 20 bp, Peptoniphilus indolicus
cctcgtaagcatttgaaact

SEQ ID NO: 8587 - DNA, 20 bp, Alloiococcus otitis
acgccaaatcttcctgcttg

SEQ ID NO: 8588 - DNA, 20 bp, Campylobacter lari
agcttgctagttgtggatta

SEQ ID NO: 8589 - DNA, 20 bp, Dolosigranulum pigrum
catgagcgggggacaacatt

SEQ ID NO: 8590 - DNA, 20 bp, Peptoniphilus asaccharolyticus
gtcagatgtgaaaggcaagg

SEQ ID NO: 8591 - DNA, 20 bp, Peptoniphilus indolicus
aagtcgagcgatgaagacat

SEQ ID NO: 8592 - DNA, 20 bp, Facklamia sourekii
ggtatctaatcagaaagtca

SEQ ID NO: 8593 - DNA, 20 bp, Streptococcus ratti
ctggagtaaaaggctatggc

SEQ ID NO: 8594 - DNA, 30 bp, Clostridium cadaveris
aatggcgagaacaaagagaagcaagaccgc

SEQ ID NO: 8595 - DNA, 20 bp, Sporosarcina pasteurii
cttagtgctggagcaaacgc

SEQ ID NO: 8596 - DNA, 20 bp, Alloiococcus otitis
ctatcccttgacggtaccca

SEQ ID NO: 8597 - DNA, 20 bp, Ignavigranum ruoffiae
aacgcacaacgaaggagctt

SEQ ID NO: 8598 - DNA, 20 bp, Streptococcus thoraltensis
ataccgcataaaaggagcta

SEQ ID NO: 8599 - DNA, 20 bp, Sphingobacterium multivorum
ctcgtccttcgggacacgaa

SEQ ID NO: 8600 - DNA, 20 bp, Streptococcus thoraltensis
gttagctttttaaaaggtgc

SEQ ID NO: 8601 - DNA, 20 bp, Prevotella disiens
gatattcattgatgacatct

SEQ ID NO: 8602 - DNA, 20 bp, Paenibacillus apiarius
tcctcgcctgagggaaatgg

SEQ ID NO: 8603 - DNA, 20 bp, Ignavigranum ruoffiae
gtgagtcgcctgactcattg

SEQ ID NO: 8604 - DNA, 20 bp, Bacillus schlegellii
aagggccgcggaggcggcat

SEQ ID NO: 8605 - DNA, 20 bp, Clostridium glycolicum
ggaagcgagtgtcgaaggtg

SEQ ID NO: 8606 - DNA, 30 bp, Clostridium limosum
caagaatcctgtggaaacacgggagtgccc

SEQ ID NO: 8607 - DNA, 20 bp, Facklamia languida
cagcgacttgaacttgttca

SEQ ID NO: 8608 - DNA, 20 bp, Prevotella disiens
ataatcgacattacgtgtaa

SEQ ID NO: 8609 - DNA, 20 bp, Bacteroides capilosus
aaggcggattgctggacagt

SEQ ID NO: 8610 - DNA, 20 bp, Leptotrichia buccalis
aaggaacttgccccgcagac

SEQ ID NO: 8611 - DNA, 20 bp, Prevotella disiens
agaatgttggttgcatgtaa

SEQ ID NO: 8612 - DNA, 20 bp, Facklamia sourekii
ggaaacctaccctctagcgg

SEQ ID NO: 8613 - DNA, 30 bp, Weeksella virosa
gggttgtaaactgcttttatatgtgaataa

SEQ ID NO: 8614 - DNA, 20 bp, Clostridium cadaveris
caagtcgagcgagggagcac

SEQ ID NO: 8615 - DNA, 20 bp, Bacteroides capillosus
tgaggatactgcctccgcaa

SEQ ID NO: 8616 - DNA, 20 bp, Pediococcus dextrinicus
tttaattgaaagacggcctt

SEQ ID NO: 8617 - DNA, 20 bp, Staphylococcus simulans
ttagggaagaacaaggatgt

SEQ ID NO: 8618 - DNA, 20 bp, Kingella kingae
tacggaagagagtagagata

SEQ ID NO: 8619 - DNA, 20 bp, Prevotella loescheii
actgtagcgctactgacgct

SEQ ID NO: 8620 - DNA, 20 bp, Prevotella bivia
gaaatgtaggagctcaactt

SEQ ID NO: 8621 - DNA, 20 bp, Staphylococcus lentus
catggttcaatgttgaaaga

SEQ ID NO: 8622 - DNA, 20 bp, Bacteroides eggerthii
aaattgcagcggaatgtagt

SEQ ID NO: 8623 - DNA, 20 bp, Sphingobacterium multivorum
taggaagctgaatgtactgg

SEQ ID NO: 8624 - DNA, 20 bp, Moraxella atlantae
aacacactggtggtgacgtt

SEQ ID NO: 8625 - DNA, 20 bp, Bacillus schlegellii
gtcgggggcgcccgaaggcg

SEQ ID NO: 8626 - DNA, 20 bp, Bacteroides thetaiotaomicron
tggtccacgtgtggattttt

SEQ ID NO: 8627 - DNA, 20 bp, Prevotella loescheii
tccaatcctcaaagtgcgtc

SEQ ID NO: 8628 - DNA, 30 bp, Abiotrophia defectiva
caggtcttgacatcccgacgaccgctctag

SEQ ID NO: 8629 - DNA, 20 bp, Weeksella virosa
atttatcgctataagataga

SEQ ID NO: 8630 - DNA, 20 bp, Helcococcus kunzii
gatagtcttttcggagactt

SEQ ID NO: 8631 - DNA, 20 bp, Eubacterium moniliforme
ctttcgcatgaaagaacaat

SEQ ID NO: 8632 - DNA, 20 bp, Bacteroides vulgatus
ctactcttggacagccttct

SEQ ID NO: 8633 - DNA, 20 bp, Atopobium parvulum
tcattgggatagccacggga

SEQ ID NO: 8634 - DNA, 20 bp, Vagococcus fluvialis
ggctcaaccgaggaaggtca

SEQ ID NO: 8635 - DNA, 20 bp, Anaerococcus tetradius
gggagccgcagctaacgcat

SEQ ID NO: 8636 - DNA, 20 bp, Rothia mucilaginosa
cgaacgatgaagcctaggct

SEQ ID NO: 8637 - DNA, 20 bp, Kingella kingae
cggaagagagtagagatact

SEQ ID NO: 8638 - DNA, 20 bp, Haemophilus segnis
aggaaggcgtgatgtttaat

SEQ ID NO: 8639 - DNA, 20 bp, Ignavigranum ruoffiae
cacaacgaaggagcttgctt

SEQ ID NO: 8640 - DNA, 20 bp, Lactococcus raffinolactis
catttgaaagtaccaaatgg

SEQ ID NO: 8641 - DNA, 20 bp, Kocuria kristinae
ccggatgcgactactgcccg

SEQ ID NO: 8642 - DNA, 20 bp, Streptococcus sobrinus
tgtaggggaagaacgtgtgt

SEQ ID NO: 8643 - DNA, 20 bp, Peptoniphilus indolicus
tcgagcgatgaagacataac

SEQ ID NO: 8644 - DNA, 20 bp, Paenibacillus macerans
ttattttgcagcattgtgga

SEQ ID NO: 8645 - DNA, 20 bp, Leuconostoc fallax
tcgaacgctagtcgcggacc

SEQ ID NO: 8646 - DNA, 20 bp, Actinomyces turicensis
acatgcaccctgacgctgca

SEQ ID NO: 8647 - DNA, 20 bp, Staphylococcus lutrae
agaacacatgtgtaagtcac

SEQ ID NO: 8648 - DNA, 20 bp, Prevotella bivia
ttgctatttatgtcggcgac

SEQ ID NO: 8649 - DNA, 20 bp, Dolosigranulum pigrum
aaaggtggctttgctaccac

SEQ ID NO: 8650 - DNA, 20 bp, Anaerococcus tetradius
ctgggagccgcagctaacgc

SEQ ID NO: 8651 - DNA, 20 bp, Staphylococcus saccharolyticus
gtcaagcaaaccccataaag

SEQ ID NO: 8652 - DNA, 20 bp, Bacillus schlegellii
atccgtgccggagttcacac

SEQ ID NO: 8653 - DNA, 20 bp, Sphingobacterium multivorum
tcgaagacggtgagagtggc

SEQ ID NO: 8654 - DNA, 20 bp, Pediococcus dextrinicus
cctttggctgtcacttaagg

SEQ ID NO: 8655 - DNA, 20 bp, Bacteroides thetaiotaomicron
gcatcagtttggtttgcttg

SEQ ID NO: 8656 - DNA, 20 bp, Achromobacter piechaudii
attctgaagagattcggaag

SEQ ID NO: 8657 - DNA, 20 bp, Dolosigranulum pigrum
gaagaacacgtgctaggtaa

SEQ ID NO: 8658 - DNA, 20 bp, Aerococcus christensenii
ataggaagtttgttcgcatg

SEQ ID NO: 8659 - DNA, 20 bp, Leptotrichia buccalis
tcctgcgtatgcccgtgaga

SEQ ID NO: 8660 - DNA, 20 bp, Streptococcus sobrinus
ccatttatggggccagccgc

SEQ ID NO: 8661 - DNA, 20 bp, Prevotella disiens
taatacccaatgatattcat

SEQ ID NO: 8662 - DNA, 20 bp, Abiotrophia defectiva
aggtcaaggtgagtggcgaa

SEQ ID NO: 8663 - DNA, 20 bp, Streptococcus thoraltensis
cataaaaggagctaacccat

SEQ ID NO: 8664 - DNA, 20 bp, Suttonella indologenes
attagctaaagaagaagcac

SEQ ID NO: 8665 - DNA, 20 bp, Sporosarcina pasteurii
ttagtgctggagcaaacgca

SEQ ID NO: 8666 - DNA, 20 bp, Suttonella indologenes
aacgtataggaatctacctt

SEQ ID NO: 8667 - DNA, 20 bp, Shewanella putrefaciens
aaaagaagtgggtagctaac

SEQ ID NO: 8668 - DNA, 20 bp, Streptococcus ratti
tgcacaccgtgttttcttga

SEQ ID NO: 8669 - DNA, 20 bp, Dermacoccus nishinomiyaensis
cgaccgatctccgcatggag

SEQ ID NO: 8670 - DNA, 20 bp, Streptococcus acidominimus
gagcagcgaactggtgacag

SEQ ID NO: 8671 - DNA, 20 bp, Veillonella atypica
acgaatggttcttgtgcgaa

SEQ ID NO: 8672 - DNA, 20 bp, Paenibacillus amylolyticus
cacctctgatgcttagcggc

SEQ ID NO: 8673 - DNA, 20 bp, Streptococcus sobrinus
taacaccggacttgctccag

SEQ ID NO: 8674 - DNA, 20 bp, Bacillus sp
caagaaaacgtattatccgg

SEQ ID NO: 8675 - DNA, 20 bp, Anaerococcus prevotii
tacccgaagcctgcgagcaa

SEQ ID NO: 8676 - DNA, 20 bp, Streptococcus sobrinus
gtaggggaagaacgtgtgta

SEQ ID NO: 8677 - DNA, 30 bp, Arcanobacterium haemolyticum
cgtttgagggggagcggtcgaaggtgggat

SEQ ID NO: 8678 - DNA, 20 bp, Leptotrichia buccalis
gtaaggaacttgccccgcag

SEQ ID NO: 8679 - DNA, 20 bp, Clostridium clostridiiforme
cgcacagtgccgcatggcag

SEQ ID NO: 8680 - DNA, 20 bp, Anaerobiospirillum succiniciproducens
catcgtaggaatcttttaga

SEQ ID NO: 8681 - DNA, 30 bp, Leptotrichia buccalis
gtgaaaacctgcggctcaaccgcaggcctg

SEQ ID NO: 8682 - DNA, 20 bp, Kingella kingae
gtagagatactcttgtgcct

SEQ ID NO: 8683 - DNA, 20 bp, Suttonella indologenes
accttggggtgggggataac

SEQ ID NO: 8684 - DNA, 20 bp, Peptoniphilus indolicus
tgaaatcgtaatgacacatg

SEQ ID NO: 8685 - DNA, 20 bp, Bacillus sp
acgttttcttgcataaggag

SEQ ID NO: 8686 - DNA, 20 bp, Haemophilus segnis
gaggaaggcgtgatgtttaa

SEQ ID NO: 8687 - DNA, 30 bp, Bacteroides distasonis
ccaagtcgcgtgagggatgaaggttctatg

SEQ ID NO: 8688 - DNA, 20 bp, Weeksella virosa
tgccttatagaatgggatag

SEQ ID NO: 8689 - DNA, 20 bp, Peptoniphilus indolicus
aagcagacgccgaaggtagg

SEQ ID NO: 8690 - DNA, 20 bp, Globicatella sanguinis
aagtcgaacgaaccacaacg

SEQ ID NO: 8691 - DNA, 20 bp, Bacillus schlegellii
agcggaaactggcgggcttg

SEQ ID NO: 8692 - DNA, 30 bp, Bacteroides distasonis
tgttacaatggcgtggacaaagggaagcca

SEQ ID NO: 8693 - DNA, 20 bp, Bacteroides vulgatus
aacccttgttgtcagttact

SEQ ID NO: 8694 - DNA, 20 bp, Prevotella disiens
gggaaacggcaaagagtgct

SEQ ID NO: 8695 - DNA, 20 bp, Anaerobiospirillum succiniciproducens
acatcgtaggaatcttttag

SEQ ID NO: 8696 - DNA, 20 bp, Leuconostoc fallax
tgtgtttaaaaggggcttcg

SEQ ID NO: 8697 - DNA, 20 bp, Myroides odoratus
gttcgtaggcggttgagtaa

SEQ ID NO: 8698 - DNA, 20 bp, Moraxella atlantae
cacactggtggtgacgttac

SEQ ID NO: 8699 - DNA, 20 bp, Streptococcus ratti
tgtgctctggaaactgtctg

SEQ ID NO: 8700 - DNA, 20 bp, Actinomyces radingae
tcgtgtgcaagccgctattt

SEQ ID NO: 8701 - DNA, 20 bp, Leuconostoc fallax
ggcgaacttgagtgcagtag

SEQ ID NO: 8702 - DNA, 20 bp, Anaerobiospirillum succiniciproducens
ggttgctatcagatgagccc

SEQ ID NO: 8703 - DNA, 20 bp, Streptococcus sobrinus
agaggagttaactcatgtta

SEQ ID NO: 8704 - DNA, 20 bp, Corynebacterium group ANF
agagatcgtctgtccctttg

SEQ ID NO: 8705 - DNA, 20 bp, Myroides odoratimimus
tacgtatttattgacgctga

SEQ ID NO: 8706 - DNA, 20 bp, Veillonella atypica
tcgagactggatgaaaggtg

SEQ ID NO: 8707 - DNA, 30 bp, Helcococcus kunzii
ttaacttgagtagatgaggggaaagtggaa

SEQ ID NO: 8708 - DNA, 20 bp, Helcococcus kunzii
ttcttcggaatgaaacggaa

SEQ ID NO: 8709 - DNA, 20 bp, Bacillus marinus
ataaccctgactctctcctg

SEQ ID NO: 8710 - DNA, 20 bp, Corynebacterium coyleae
ggataggaccacttcttgga

SEQ ID NO: 8711 - DNA, 20 bp, Abiotrophia defectiva
tcgaacgaaccgcgactagg

SEQ ID NO: 8712 - DNA, 20 bp, Prevotella loescheii
cggcggaacgattcggagac

SEQ ID NO: 8713 - DNA, 30 bp, Dolosigranulum pigrum
ctaacgtattaagcactccgcctggggatt

SEQ ID NO: 8714 - DNA, 20 bp, Weeksella virosa
tttatatgtgaataaaccta

SEQ ID NO: 8715 - DNA, 20 bp, Abiotrophia defectiva
cgactaggtgcttgcacttg

SEQ ID NO: 8716 - DNA, 20 bp, Bacteroides eggerthii
tgcatactcctttgtatgta

SEQ ID NO: 8717 - DNA, 20 bp, Anaerococcus prevotii
gaagcttgtaatacccgaag

SEQ ID NO: 8718 - DNA, 20 bp, Bacillus schlegellii
ccgcggaggcggcattgacg

SEQ ID NO: 8719 - DNA, 20 bp, Bacteroides vulgatus
agcctgctaagctgcaactg

SEQ ID NO: 8720 - DNA, 20 bp, Suttonella indologenes
agtgctcggtaccgcagcta

SEQ ID NO: 8721 - DNA, 30 bp, Bacteroides distasonis
attgccgttgaaactggggggcttgagtat

SEQ ID NO: 8722 - DNA, 20 bp, Bacillus psychrosaccharolyticus
tactcaacaattagcggcgg

SEQ ID NO: 8723 - DNA, 20 bp, Brevibacillus thermoruber
acgggacgcaagcccgcgag

SEQ ID NO: 8724 - DNA, 20 bp, Alloiococcus otitis
cacggataggagtcactgcc

SEQ ID NO: 8725 - DNA, 20 bp, Prevotella bivia
cgcctgaagttcgtgaccgt

SEQ ID NO: 8726 - DNA, 20 bp, Bacteroides eggerthii
atagtatagtttttccgcat

SEQ ID NO: 8727 - DNA, 20 bp, Streptococcus thoraltensis
gctttttaaaaggtgcaaca

SEQ ID NO: 8728 - DNA, 20 bp, Moraxella atlantae
atatgatactggtgaactag

SEQ ID NO: 8729 - DNA, 20 bp, Leuconostoc fallax
tgtttaaaaggggcttcggc

SEQ ID NO: 8730 - DNA, 20 bp, Bacteroides distasonis
ggaatatttgctaaagattc

SEQ ID NO: 8731 - DNA, 20 bp, Moraxella atlantae
gtaaagcgggtgcaggtggt

SEQ ID NO: 8732 - DNA, 20 bp, Peptoniphilus indolicus
acccgatgaaatcgtaatga

SEQ ID NO: 8733 - DNA, 20 bp, Staphylococcus hyicus
tgacatcttttgaccagctc

SEQ ID NO: 8734 - DNA, 20 bp, Psychrobacter phenylpyruvicus
gggcagcttgcgctctcgct

SEQ ID NO: 8735 - DNA, 20 bp, Anaerococcus tetradius
cggtaatacgtatggaccga

SEQ ID NO: 8736 - DNA, 20 bp, Actinomyces naeslundii
aagattgcgccttttttggt

SEQ ID NO: 8737 - DNA, 20 bp, Prevotella disiens
gttggttgcatgtaaatgta

SEQ ID NO: 8738 - DNA, 20 bp, Peptoniphilus indolicus
ataacagacaccttcgggaa

SEQ ID NO: 8739 - DNA, 20 bp, Prevotella oralis
tgacttgaatagagatattc

SEQ ID NO: 8740 - DNA, 20 bp, Arcanobacterium haemolyticum
tcgaacgatgaaggctcctg

SEQ ID NO: 8741 - DNA, 20 bp, Peptostreptococcus anaerobius
tcgagcgcgtctgatttgat

SEQ ID NO: 8742 - DNA, 20 bp, Clostridium clostridiiforme
agtgccgcatggcagtgtgt

SEQ ID NO: 8743 - DNA, 20 bp, Globicatella sanguinis
cttgttctggttaaggttag

SEQ ID NO: 8744 - DNA, 20 bp, Dolosigranulum pigrum
gtcgaacgatgatatcactg

SEQ ID NO: 8745 - DNA, 20 bp, Prevotella bivia
ggtacagatagttggtcgtg

SEQ ID NO: 8746 - DNA, 20 bp, Streptococcus acidominimus
gctacatttgaattgattga

SEQ ID NO: 8747 - DNA, 20 bp, Atopobium parvulum
cgagacttccgcatggaaga

SEQ ID NO: 8748 - DNA, 20 bp, Aerococcus christensenii
ggaagtttgttcgcatgaac

SEQ ID NO: 8749 - DNA, 30 bp, Leuconostoc carnosum
atggctcaggagaacgctggtggcgtgcct

SEQ ID NO: 8750 - DNA, 20 bp, Staphylococcus lutrae
catgtgtaagtcactatgca

SEQ ID NO: 8751 - DNA, 20 bp, Bacillus sp
gacgttaaaaggcggcgcaa

SEQ ID NO: 8752 - DNA, 20 bp, Corynebacterium confusum
tcgtttccctttgtggcctt

SEQ ID NO: 8753 - DNA, 30 bp, Moraxella atlantae
ctcaccatggcgacgatctataactggtct

SEQ ID NO: 8754 - DNA, 20 bp, Myroides odoratus
acttgaatagtatggaagta

SEQ ID NO: 8755 - DNA, 20 bp, Sphingobacterium multivorum
gtaggaagctgaatgtactg

SEQ ID NO: 8756 - DNA, 20 bp, Anaerococcus prevotii
gaaggtaggataggtgactg

SEQ ID NO: 8757 - DNA, 20 bp, Bacteroides ureolyticus
cttccacagtggaatcagta

SEQ ID NO: 8758 - DNA, 20 bp, Staphylococcus simulans
acaaggatgtaagtaactat

SEQ ID NO: 8759 - DNA, 20 bp, Suttonella indologenes
gtttatggttaatacctgtg

SEQ ID NO: 8760 - DNA, 20 bp, Bacillus marinus
ggataaccctgactctctcc

SEQ ID NO: 8761 - DNA, 20 bp, Weeksella virosa
gattaataccgtatataaag

SEQ ID NO: 8762 - DNA, 20 bp, Actinomyces naeslundii
aagcaggcctgcctcgtttg

SEQ ID NO: 8763 - DNA, 20 bp, Myroides odoratimimus
tggcaagtacagaaagcagc

SEQ ID NO: 8764 - DNA, 20 bp, Clostridium cadaveris
tcatgaaaggagcaatccgc

SEQ ID NO: 8765 - DNA, 20 bp, Staphylococcus simulans
tttcatgatgaaagacggtt

SEQ ID NO: 8766 - DNA, 30 bp, Virgibacillus proomii
gaagccgtgaggccaagcaaatcccacaaa

SEQ ID NO: 8767 - DNA, 20 bp, Clostridium cadaveris
tattatgatttttctgcatg

SEQ ID NO: 8768 - DNA, 20 bp, Anaerobiospirillum succiniciproducens
cttcgggggaaagacttcgg

SEQ ID NO: 8769 - DNA, 20 bp, Bacteroides distasonis
acgcattcggaccgaggtgg

SEQ ID NO: 8770 - DNA, 20 bp, Leuconostoc fallax
taggaaatgatgttaatgtg

SEQ ID NO: 8771 - DNA, 20 bp, Bordetella avium
ataccttgcgcaaatgacgg

SEQ ID NO: 8772 - DNA, 20 bp, Brevibacillus thermoruber
ttggagcttgcttcagacag

SEQ ID NO: 8773 - DNA, 20 bp, Methylobacterium mesophilicum
cagtccacttcggtggcgcg

SEQ ID NO: 8774 - DNA, 20 bp, Myroides odoratus
gtgtaattatttgacggtac

SEQ ID NO: 8775 - DNA, 20 bp, Corynebacterium group ANF
gaagatgaaaggcggcgcaa

SEQ ID NO: 8776 - DNA, 20 bp, Bacteroides vulgatus
gattaaaggtattccggtag

SEQ ID NO: 8777 - DNA, 20 bp, Bacteroides capillosus
ggccggtacagagcgtcggt

SEQ ID NO: 8778 - DNA, 20 bp, Veillonella atypica
gaggatttgacggtaccgga

SEQ ID NO: 8779 - DNA, 20 bp, Alloiococcus otitis
cgagcgcaggcggtccggta

SEQ ID NO: 8780 - DNA, 20 bp, Dolosigranulum pigrum
aacgatgatatcactgcttg

SEQ ID NO: 8781 - DNA, 20 bp, Clostridium clostridiiforme
attaagatgaagttttcgga

SEQ ID NO: 8782 - DNA, 20 bp, Streptococcus sobrinus
gcattggtaacaccggactt

SEQ ID NO: 8783 - DNA, 20 bp, Actinomyces radingae
tgggataacgctcagaaatg

SEQ ID NO: 8784 - DNA, 30 bp, Ignavigranum ruoffiae
ggagcgcaggtggtggcttaagtctgatgt

SEQ ID NO: 8785 - DNA, 20 bp, Dolosigranulum pigrum
ctgcttgcagtgattgatta

SEQ ID NO: 8786 - DNA, 20 bp, Prevotella oralis
aagtcgcggggcatcatgga

SEQ ID NO: 8787 - DNA, 20 bp, Corynebacterium group ANF
actagatgaggcgagagatc

SEQ ID NO: 8788 - DNA, 20 bp, Bacteroides ureolyticus
agttaaatagggaaagtctt

SEQ ID NO: 8789 - DNA, 20 bp, Bacteroides ureolyticus
gtttactagaatttagtgac

SEQ ID NO: 8790 - DNA, 20 bp, Prevotella oralis
aatagagatattcattccct

SEQ ID NO: 8791 - DNA, 20 bp, Paenibacillus apiarius
tcgcatccaaaactgcatga

SEQ ID NO: 8792 - DNA, 20 bp, Bacteroides thetaiotaomicron
aagaaattcggtatgagatg

SEQ ID NO: 8793 - DNA, 20 bp, Corynebacterium confusum
tacaatggtcaatacaatgc

SEQ ID NO: 8794 - DNA, 20 bp, Clostridium clostridiiforme
gacatccccctgacgggccg

SEQ ID NO: 8795 - DNA, 30 bp, Peptoniphilus indolicus
gtgtcggagtaattcggtgccgcagttaac

SEQ ID NO: 8796 - DNA, 20 bp, Ignavigranum ruoffiae
atggttttgctatcactaaa

SEQ ID NO: 8797 - DNA, 20 bp, Ignavigranum ruoffiae
attaactgtacaggacttga

SEQ ID NO: 8798 - DNA, 20 bp, Streptococcus thoraltensis
agatagaacttttcttagga

SEQ ID NO: 8799 - DNA, 20 bp, Streptococcus infantarius
taagttttcagcgttctact

SEQ ID NO: 8800 - DNA, 20 bp, Prevotella oralis
ggtatattctatcggtaatg

SEQ ID NO: 8801 - DNA, 20 bp, Bacillus schlegellii
gagatgggcctttcccgcga

SEQ ID NO: 8802 - DNA, 20 bp, Anaerobiospirillum succiniciproducens
cttcggtttgggttccgcag

SEQ ID NO: 8803 - DNA, 20 bp, Leptotrichia buccalis
aggtatctaaggtgtggata

SEQ ID NO: 8804 - DNA, 20 bp, Staphylococcus simulans
acatgaaaccgcatggtttc

SEQ ID NO: 8805 - DNA, 20 bp, Prevotella loescheii
gcgtccgattagccagacgg

SEQ ID NO: 8806 - DNA, 20 bp, Myroides odoratimimus
atggcaagtacagaaagcag

SEQ ID NO: 8807 - DNA, 20 bp, Leptotrichia buccalis
gagcgggcagtgccttcggg

SEQ ID NO: 8808 - DNA, 20 bp, Anaerobiospirillum succiniciproducens
gcagagggagatggaatttc

SEQ ID NO: 8809 - DNA, 20 bp, Paenibacillus apiarius
acattttcctcgcctgaggg

SEQ ID NO: 8810 - DNA, 20 bp, Bacteroides distasonis
caccttttctaggcaatagc

SEQ ID NO: 8811 - DNA, 20 bp, Prevotella loescheii
cgattagccagacggcgggg

SEQ ID NO: 8812 - DNA, 20 bp, Atopobium parvulum
aagactcgagaaagctccgg

SEQ ID NO: 8813 - DNA, 30 bp, Empedobacter brevis
gcttcagtggctaagcgaaagttataagta

SEQ ID NO: 8814 - DNA, 20 bp, Clostridium cadaveris
aggatgcgtaggtggaattt

SEQ ID NO: 8815 - DNA, 20 bp, Actinomyces naeslundii
agcaggcctgcctcgtttgt

SEQ ID NO: 8816 - DNA, 20 bp, Leptotrichia buccalis
agtctagggtgaaaacctgc

SEQ ID NO: 8817 - DNA, 20 bp, Streptococcus thoraltensis
taagcgaagaataggagtaa

SEQ ID NO: 8818 - DNA, 20 bp, Bacillus schlegellii
gcctttcccgcgagggacgg

SEQ ID NO: 8819 - DNA, 20 bp, Bacteroides thetaiotaomicron
cgatggcataattagaccgc

SEQ ID NO: 8820 - DNA, 20 bp, Prevotella oralis
ccttcccattactacggcat

SEQ ID NO: 8821 - DNA, 20 bp, Anaerococcus tetradius
gactctagatatactgccgg

SEQ ID NO: 8822 - DNA, 20 bp, Peptoniphilus indolicus
ggaagcagacgccgaaggta

SEQ ID NO: 8823 - DNA, 20 bp, Abiotrophia defectiva
gattccgtgaggaaaggtgg

SEQ ID NO: 8824 - DNA, 20 bp, Clostridium clostridiiforme
ccctgacgggccggtaacgc

SEQ ID NO: 8825 - DNA, 20 bp, Facklamia languida
ccggtggcctaacttaggag

SEQ ID NO: 8826 - DNA, 20 bp, Anaerococcus tetradius
aatctgggagccgcagctaa

SEQ ID NO: 8827 - DNA, 30 bp, Helcococcus kunzii
cggttaattaagtctgaatttaaaggctgt

SEQ ID NO: 8828 - DNA, 30 bp, Leuconostoc fallax
cactgttgtatgggaagaatagttaatgta

SEQ ID NO: 8829 - DNA, 20 bp, Ignavigranum ruoffiae
ggatttcggtccgtaaagca

SEQ ID NO: 8830 - DNA, 20 bp, Myroides odoratus
acttattgacgctgatgaac

SEQ ID NO: 8831 - DNA, 20 bp, Eschericchia vulneris
agtctggtctgagaggatga

SEQ ID NO: 8832 - DNA, 20 bp, Brevibacillus thermoruber
ggagcttgcttcagacaggt

SEQ ID NO: 8833 - DNA, 20 bp, Peptoniphilus indolicus
aaccctcgtaagcatttgaa

SEQ ID NO: 8834 - DNA, 30 bp, Globicatella sanguinis
agagaagaacggctactagaggaaatgtta

SEQ ID NO: 8835 - DNA, 20 bp, Veillonella atypica
caggcggattggtcagtctg

SEQ ID NO: 8836 - DNA, 20 bp, Ignavigranum ruoffiae
ttgacatccgctgcatagct

SEQ ID NO: 8837 - DNA, 20 bp, Suttonella indologenes
cgtataggaatctaccttgg

SEQ ID NO: 8838 - DNA, 20 bp, Anaerobiospirillum succiniciproducens
gaggaaacactgacgttacc

SEQ ID NO: 8839 - DNA, 20 bp, Abiotrophia defectiva
tgacatcccgacgaccgctc

SEQ ID NO: 8840 - DNA, 20 bp, Staphylococcus simulans
aaggatgtaagtaactatgc

SEQ ID NO: 8841 - DNA, 20 bp, Atopobium parvulum
gactcgagaaagctccggcg

SEQ ID NO: 8842 - DNA, 20 bp, Peptoniphilus indolicus
accgcaaggaagcagatgcc

SEQ ID NO: 8843 - DNA, 20 bp, Kocuria kristinae
ttcccttttgggctggtgta

SEQ ID NO: 8844 - DNA, 20 bp, Alloiococcus otitis
ccgggcaaccatttggagcc

SEQ ID NO: 8845 - DNA, 20 bp, Anaerococcus prevotii
gaagagtagaggtaagtgga

SEQ ID NO: 8846 - DNA, 20 bp, Alloiococcus otitis
taagttttcccagtgcatgc

SEQ ID NO: 8847 - DNA, 20 bp, Facklamia languida
tgtcacttaaggatggctcc

SEQ ID NO: 8848 - DNA, 20 bp, Moraxella atlantae
cagctttctggcacaatact

SEQ ID NO: 8849 - DNA, 20 bp, Moraxella atlantae
tggggctcatgaagccttag

SEQ ID NO: 8850 - DNA, 20 bp, Moraxella atlantae
tagagtatatgagaggaaag

SEQ ID NO: 8851 - DNA, 20 bp, Eubacterium moniliforme
tgtactttcgcatgaaagaa

SEQ ID NO: 8852 - DNA, 20 bp, Streptococcus thoraltensis
ggtataaatgagtcgcgaac

SEQ ID NO: 8853 - DNA, 20 bp, Peptoniphilus indolicus
gatgaaatcgtaatgacaca

SEQ ID NO: 8854 - DNA, 20 bp, Clostridium histolyticum
aatgcatgttagaaagatta

SEQ ID NO: 8855 - DNA, 20 bp, Lactococcus raffinolactis
cgagtcgcaaggcagtgatg

SEQ ID NO: 8856 - DNA, 20 bp, Dolosigranulum pigrum
caacgagcagcgatcccgca

SEQ ID NO: 8857 - DNA, 20 bp, Helcococcus kunzii
gaatttttcagttgatttct

SEQ ID NO: 8858 - DNA, 20 bp, Bacillus schlegellii
aaacccctgttgtcggggaa

SEQ ID NO: 8859 - DNA, 20 bp, Myroides odoratimimus
aagtacagaaagcagctacc

SEQ ID NO: 8860 - DNA, 20 bp, Clostridium glycolicum
atacaggataacataagaga

SEQ ID NO: 8861 - DNA, 20 bp, Atopobium parvulum
gctccggcggagagggatgg

SEQ ID NO: 8862 - DNA, 30 bp, Paenibacillus apiarius
taataccggatagacattttcctcgcctga

SEQ ID NO: 8863 - DNA, 20 bp, Streptococcus sobrinus
ggtaacaccggacttgctcc

SEQ ID NO: 8864 - DNA, 20 bp, Globicatella sanguinis
accacaacgagaacttgttc

SEQ ID NO: 8865 - DNA, 20 bp, Clostridium cadaveris
agtcgagcgagggagcacct

SEQ ID NO: 8866 - DNA, 20 bp, Actinomyces radingae
gggataacgctcagaaatgg

SEQ ID NO: 8867 - DNA, 20 bp, Moraxella atlantae
ctagccgttggggctcatga

SEQ ID NO: 8868 - DNA, 30 bp, Facklamia sourekii
ggtggcctaaccattggagggagccgtcga

SEQ ID NO: 8869 - DNA, 30 bp, Suttonella indologenes
cttacttgccagcacttcgggtgggaacta

SEQ ID NO: 8870 - DNA, 20 bp, Peptoniphilus indolicus
cgggaagaagttaagtcgga

SEQ ID NO: 8871 - DNA, 20 bp, Globicatella sanguinis
caacgagaacttgttctggt

SEQ ID NO: 8872 - DNA, 20 bp, Moraxella atlantae
tactagccgttggggctcat

SEQ ID NO: 8873 - DNA, 20 bp, Moraxella atlantae
ggggaaatagtggcgaacgg

SEQ ID NO: 8874 - DNA, 20 bp, Bacteroides thetaiotaomicron
gatagccgtaaggcaaatgt

SEQ ID NO: 8875 - DNA, 20 bp, Corynebacterium kutscheri
atctgcccctaacttcggga

SEQ ID NO: 8876 - DNA, 20 bp, Bacteroides caccae
aagtggtccacgtgtggact

SEQ ID NO: 8877 - DNA, 20 bp, Vagococcus fluvialis
ataccgcataatttgttttc

SEQ ID NO: 8878 - DNA, 20 bp, Dolosigranulum pigrum
aacttgcccatgagcggggg

SEQ ID NO: 8879 - DNA, 30 bp, Vagococcus fluvialis
agtcgaacgctttgattttcaccggagctt

SEQ ID NO: 8880 - DNA, 30 bp, Prevotella disiens
tgcaagtcgaggggaaacggcaaagagtgc

SEQ ID NO: 8881 - DNA, 20 bp, Bacteroides vulgatus
tacggtgaaagccgtaagcc

SEQ ID NO: 8882 - DNA, 20 bp, Anaerococcus prevotii
accatggaagcttgtaatac

SEQ ID NO: 8883 - DNA, 20 bp, Pasteurella multocida
ggattgagcaataagcttgg

SEQ ID NO: 8884 - DNA, 20 bp, Globicatella sanguinis
caagtcgaacgaaccacaac

SEQ ID NO: 8885 - DNA, 20 bp, Bacteroides eggerthii
ttgcttcaatcgatggcgac

SEQ ID NO: 8886 - DNA, 20 bp, Bacteroides ureolyticus
tcctatttgacataagttaa

SEQ ID NO: 8887 - DNA, 20 bp, Paenibacillus peoriae
cctttttctgcatggaagaa

SEQ ID NO: 8888 - DNA, 20 bp, Clostridium glycolicum
agtgtcgaaggtgaaatcaa

SEQ ID NO: 8889 - DNA, 20 bp, Actinomyces radingae
tgtgggaaaggggcctttgt

SEQ ID NO: 8890 - DNA, 20 bp, Actinomyces radingae
gcctgtcgtgtaatcctctg

SEQ ID NO: 8891 - DNA, 20 bp, Lactococcus raffinolactis
catttgaaagtaccaattgg

SEQ ID NO: 8892 - DNA, 20 bp, Peptoniphilus indolicus
atgccgaaggtagggttaat

SEQ ID NO: 8893 - DNA, 20 bp, Moraxella atlantae
ggaagagctagtggagaaac

SEQ ID NO: 8894 - DNA, 30 bp, Corynebacterium group ANF
ttcccgataggactgcagggtggtgcctgt

SEQ ID NO: 8895 - DNA, 20 bp, Bacillus schlegellii
ctcaaccgtgggggtgcagc

SEQ ID NO: 8896 - DNA, 20 bp, Sphingobacterium multivorum
ggaagctgaatgtactggaa

SEQ ID NO: 8897 - DNA, 20 bp, Bacteroides capillosus
gtcgtatgcaaatacgatct

SEQ ID NO: 8898 - DNA, 20 bp, Prevotella oralis
gcggtccaatccttaaaacg

SEQ ID NO: 8899 - DNA, 20 bp, Actinomyces radingae
tgagtgtagcgggtaaagaa

SEQ ID NO: 8900 - DNA, 20 bp, Haemophilus segnis
cttgagcttggtgcccgaag

SEQ ID NO: 8901 - DNA, 20 bp, Pseudoramibacter alactolyticus
aaccgcataacacagcagaa

SEQ ID NO: 8902 - DNA, 30 bp, Alloiococcus otitis
cgagagtctgaaacacccgaagccggccgg

SEQ ID NO: 8903 - DNA, 20 bp, Virgibacillus proomii
ggaagcaagcagaacccctt

SEQ ID NO: 8904 - DNA, 20 bp, Bacillus marinus
atcacttacggatgagcccg

SEQ ID NO: 8905 - DNA, 20 bp, Leptotrichia buccalis
ggccctgtaagtctagggtg

SEQ ID NO: 8906 - DNA, 20 bp, Abiotrophia defectiva
ggacatgggatcacatgatt

SEQ ID NO: 8907 - DNA, 30 bp, Actinomyces radingae
cttcgggttgtgaacctctttcgctcgtgt

SEQ ID NO: 8908 - DNA, 20 bp, Vagococcus fluvialis
taccgcataatttgttttcc

SEQ ID NO: 8909 - DNA, 30 bp, Bacteroides capillosus
gcgaaggcggattgctggacagtaactgac

SEQ ID NO: 8910 - DNA, 20 bp, Anaerobiospirillum succiniciproducens
acttcggtttgggttccgca

SEQ ID NO: 8911 - DNA, 20 bp, Moraxella atlantae
ctagcttgctaggggaaata

SEQ ID NO: 8912 - DNA, 20 bp, Shewanella putrefaciens
gaagtgggtagctaaccttc

SEQ ID NO: 8913 - DNA, 20 bp, Ignavigranum ruoffiae
ttgagatggggactctaatg

SEQ ID NO: 8914 - DNA, 20 bp, Bacteroides distasonis
ccgggtttgaacgcattcgg

SEQ ID NO: 8915 - DNA, 20 bp, Corynebacterium kutscheri
tgcaagagagtactcgagtg

SEQ ID NO: 8916 - DNA, 20 bp, Facklamia languida
cacttaaggatggctccgcg

SEQ ID NO: 8917 - DNA, 20 bp, Helcococcus kunzii
aaaccgaaaaaggaaagtag

SEQ ID NO: 8918 - DNA, 20 bp, Alloiococcus otitis
ttgaatgtagcagaggaaag

SEQ ID NO: 8919 - DNA, 20 bp, Pseudoramibacter alactolyticus
agaatcgcatgactttgctg

SEQ ID NO: 8920 - DNA, 20 bp, Bacillus marinus
gcttctctaacttagcggcg

SEQ ID NO: 8921 - DNA, 20 bp, Dolosigranulum pigrum
gtctaacattgacgctgagg

SEQ ID NO: 8922 - DNA, 20 bp, Psychrobacter phenylpyruvicus
ggggcagcttgcgctctcgc

SEQ ID NO: 8923 - DNA, 20 bp, Bacillus schlegellii
cccatccgtgccggagttca

SEQ ID NO: 8924 - DNA, 20 bp, Abiotrophia defectiva
ataggacatgggatcacatg

SEQ ID NO: 8925 - DNA, 20 bp, Prevotella oralis
ggcattggtggaggtgctgc

SEQ ID NO: 8926 - DNA, 20 bp, Bacteroides vulgatus
aaggaataaagtcgggtatg

SEQ ID NO: 8927 - DNA, 20 bp, Prevotella bivia
tgtcagacttgagtgcgcac

SEQ ID NO: 8928 - DNA, 20 bp, Helcococcus kunzii
aaccgaaaaaggaaagtagc

SEQ ID NO: 8929 - DNA, 20 bp, Prevotella loescheii
cggaacgattcggagacgat

SEQ ID NO: 8930 - DNA, 20 bp, Prevotella bivia
gtggggaacgtgttcccttt

SEQ ID NO: 8931 - DNA, 20 bp, Streptococcus thoraltensis
agctttttaaaaggtgcaac

SEQ ID NO: 8932 - DNA, 20 bp, Prevotella oralis
tcgcggggcatcatggaggt

SEQ ID NO: 8933 - DNA, 20 bp, Streptococcus thoraltensis
ccgtagcttgctacaattgg

SEQ ID NO: 8934 - DNA, 20 bp, Ignavigranum ruoffiae
tgagatggggactctaatga

SEQ ID NO: 8935 - DNA, 20 bp, Leuconostoc fallax
gtcgcggacctgatcacttc

SEQ ID NO: 8936 - DNA, 20 bp, Bacteroides distasonis
ggcagcctgccaagccatta

SEQ ID NO: 8937 - DNA, 20 bp, Campylobacter coli
gtaggagaacctgcgttgga

SEQ ID NO: 8938 - DNA, 20 bp, Facklamia languida
gtcaatgttagtggcgcacg

SEQ ID NO: 8939 - DNA, 20 bp, Clostridium histolyticum
ttaatgcatgttagaaagat

SEQ ID NO: 8940 - DNA, 20 bp, Enterococcus durans
ccgatcggaaggtgcggctg

SEQ ID NO: 8941 - DNA, 20 bp, Paenibacillus polymyxa
aagccgcgatgtggagccaa

SEQ ID NO: 8942 - DNA, 20 bp, Prevotella disiens
atgatattcattgatgacat

SEQ ID NO: 8943 - DNA, 20 bp, Bacteroides distasonis
atccccaaaccacgtctcag

SEQ ID NO: 8944 - DNA, 20 bp, Atopobium parvulum
ggggagtatttcttccgtgc

SEQ ID NO: 8945 - DNA, 20 bp, Bacillus sp
ccttatgcaagaaaacgtat

SEQ ID NO: 8946 - DNA, 30 bp, Moraxella atlantae
gcgtgtgtgaagaaggtcataagattgtaa

SEQ ID NO: 8947 - DNA, 20 bp, Facklamia languida
ttaccaggtcttgacatagg

SEQ ID NO: 8948 - DNA, 20 bp, Leptotrichia buccalis
gcaggcctgccccggaaact

SEQ ID NO: 8949 - DNA, 20 bp, Streptococcus ratti
aggaaagtctggagtaaaag

SEQ ID NO: 8950 - DNA, 20 bp, Cardiobacterium hominis
gaaaggcctcgcggcaagag

SEQ ID NO: 8951 - DNA, 20 bp, Dolosigranulum pigrum
tttccggccctcggtgctgg

SEQ ID NO: 8952 - DNA, 20 bp, Myroides odoratus
cataccaaggctacgatgat

SEQ ID NO: 8953 - DNA, 20 bp, Streptococcus thoraltensis
aaggtgcaacagcatcactt

SEQ ID NO: 8954 - DNA, 20 bp, Enterobacter sakazakii
aaccttggccattgacgtta

SEQ ID NO: 8955 - DNA, 20 bp, Clostridium glycolicum
aatacaggataatataagag

SEQ ID NO: 8956 - DNA, 20 bp, Bacteroides distasonis
agccgtttgcgaggtgctgc

SEQ ID NO: 8957 - DNA, 20 bp, Actinomyces radingae
ttgacatgcgccctgagcgc

SEQ ID NO: 8958 - DNA, 30 bp, Moraxella atlantae
atctataactggtcttagaggatgatcagt

SEQ ID NO: 8959 - DNA, 20 bp, Suttonella indologenes
aggtttatggttaatacctg

SEQ ID NO: 8960 - DNA, 20 bp, Sphingobacterium multivorum
taaacctttctacgtgtagg

SEQ ID NO: 8961 - DNA, 20 bp, Helcococcus kunzii
ccttatgatacattaatatc

SEQ ID NO: 8962 - DNA, 20 bp, Abiotrophia defectiva
gcaagctatcgctaagagat

SEQ ID NO: 8963 - DNA, 20 bp, Leptotrichia buccalis
tgaaaggagacgctgcggga

SEQ ID NO: 8964 - DNA, 20 bp, Staphylococcus hyicus
cttgacatcttttgatcgct

SEQ ID NO: 8965 - DNA, 20 bp, Abiotrophia defectiva
ggtcaaggtgagtggcgaac

SEQ ID NO: 8966 - DNA, 20 bp, Kocuria kristinae
ggttatgtactggtcttaga

SEQ ID NO: 8967 - DNA, 20 bp, Corynebacterium kutscheri
gctttcttgcttgcaagaga

SEQ ID NO: 8968 - DNA, 20 bp, Myroides odoratus
acagaaagcagctaccaggc

SEQ ID NO: 8969 - DNA, 20 bp, Actinomyces radingae
attcgacctcgtgaaggtgg

SEQ ID NO: 8970 - DNA, 20 bp, Prevotella loescheii
ctactgtagcgctactgacg

SEQ ID NO: 8971 - DNA, 20 bp, Globicatella sanguinis
tctggttaaggttagtggcg

SEQ ID NO: 8972 - DNA, 20 bp, Pasteurella multocida
aataagcttggtgctcgaag

SEQ ID NO: 8973 - DNA, 20 bp, Bacteroides distasonis
ctagcaatagccgtttgcga

SEQ ID NO: 8974 - DNA, 20 bp, Myroides odoratus
gcaactggatgcgaatctca

SEQ ID NO: 8975 - DNA, 20 bp, Streptococcus ratti
caggaaagtctggagtaaaa

SEQ ID NO: 8976 - DNA, 20 bp, Weeksella virosa
gctgttgggttttcgggctc

SEQ ID NO: 8977 - DNA, 20 bp, Bacillus schlegellii
tgcagcggaaactggcgggc

SEQ ID NO: 8978 - DNA, 20 bp, Bacillus marinus
aagtcgagcggagttagaga

SEQ ID NO: 8979 - DNA, 30 bp, Eubacterium moniliforme
gcgcaacccttgttgctagttgccagcacg

SEQ ID NO: 8980 - DNA, 20 bp, Bacteroides stercoris
acgggaataaagttagccac

SEQ ID NO: 8981 - DNA, 20 bp, Myroides odoratus
gcgaatctcaaaaactggtc

SEQ ID NO: 8982 - DNA, 30 bp, Virgibacillus proomii
gcgggaagcaagcagaaccccttcgggggt

SEQ ID NO: 8983 - DNA, 20 bp, Actinomyces radingae
ctttgtggtttctggaggga

SEQ ID NO: 8984 - DNA, 20 bp, Eubacterium moniliforme
gaaggtgagatcaatgactg

SEQ ID NO: 8985 - DNA, 20 bp, Leptotrichia buccalis
tgcgggagagccttgcgtcc

SEQ ID NO: 8986 - DNA, 20 bp, Staphylococcus chromogenes
ataacatatcgaaccgcatg

SEQ ID NO: 8987 - DNA, 20 bp, Prevotella loescheii
gcgcttgagtgcgctgaaag

SEQ ID NO: 8988 - DNA, 20 bp, Dolosigranulum pigrum
acttgcccatgagcggggga

SEQ ID NO: 8989 - DNA, 20 bp, Clostridium tetani
taaagttaaggtttcgcatg

SEQ ID NO: 8990 - DNA, 20 bp, Prevotella disiens
ttgggaataatcgacattac

SEQ ID NO: 8991 - DNA, 20 bp, Actinomyces radingae
gtgtgcaagccgctatttgg

SEQ ID NO: 8992 - DNA, 20 bp, Prevotella oralis
tttggacgaaaggtatattc

SEQ ID NO: 8993 - DNA, 20 bp, Facklamia languida
aacttaggagggagccgtcg

SEQ ID NO: 8994 - DNA, 20 bp, Peptoniphilus indolicus
taaccgcaaggaagcagatg

SEQ ID NO: 8995 - DNA, 30 bp, Dolosigranulum pigrum
tgagcgggggacaacattcggaaacggatg

SEQ ID NO: 8996 - DNA, 20 bp, Bacteroides ovatus
tggcgacagtgatgctaatc

SEQ ID NO: 8997 - DNA, 20 bp, Moraxella atlantae
gctagtggagaaacacactg

SEQ ID NO: 8998 - DNA, 20 bp, Streptococcus ratti
aattgattgaaagatgcaag

SEQ ID NO: 8999 - DNA, 20 bp, Prevotella oralis
tgggaatcttgagtacgcag

SEQ ID NO: 9000 - DNA, 20 bp, Microbacterium hominis
acaccgtagaaatacgggac

SEQ ID NO: 9001 - DNA, 20 bp, Brevibacillus thermoruber
gagcttgcttcagacaggtt

SEQ ID NO: 9002 - DNA, 20 bp, Veillonella atypica
gacgaatggttcttgtgcga

SEQ ID NO: 9003 - DNA, 20 bp, Leuconostoc fallax
ggaaatgatgttaatgtgac

SEQ ID NO: 9004 - DNA, 20 bp, Atopobium parvulum
ctcgctctcgataccggcag

SEQ ID NO: 9005 - DNA, 20 bp, Leuconostoc fallax
aacaacacatttcgcatgaa

SEQ ID NO: 9006 - DNA, 20 bp, Moraxella atlantae
taagcagggaggaagagcta

SEQ ID NO: 9007 - DNA, 20 bp, Prevotella bivia
acccagcgaaagttggacta

SEQ ID NO: 9008 - DNA, 30 bp, Dolosigranulum pigrum
tgtagaagaggaaaatggaattccaagtgt

SEQ ID NO: 9009 - DNA, 20 bp, Bacteroides thetaiotaomicron
atccgatagcatatatttcc

SEQ ID NO: 9010 - DNA, 20 bp, Alloiococcus otitis
ccaaatcttcctgcttgcag

SEQ ID NO: 9011 - DNA, 20 bp, Abiotrophia defectiva
ctaggtgcttgcacttggtc

SEQ ID NO: 9012 - DNA, 30 bp, Clostridium tetani
aagtcccttcggggacagggatacaggtgg

SEQ ID NO: 9013 - DNA, 20 bp, Bacteroides ureolyticus
atacctcatactcctatttg

SEQ ID NO: 9014 - DNA, 20 bp, Streptococcus mutans
aggaaacacactgtgcttgc

SEQ ID NO: 9015 - DNA, 20 bp, Prevotella loescheii
tccgattagccagacggcgg

SEQ ID NO: 9016 - DNA, 20 bp, Eubacterium moniliforme
gtcgaacgaagttgctcttt

SEQ ID NO: 9017 - DNA, 20 bp, Ignavigranum ruoffiae
ctgtacaggacttgacggta

SEQ ID NO: 9018 - DNA, 30 bp, Ignavigranum ruoffiae
gaagaaggatttcggtccgtaaagcactgt

SEQ ID NO: 9019 - DNA, 20 bp, Alloiococcus otitis
ttcccagtgcatgctgggga

SEQ ID NO: 9020 - DNA, 20 bp, Bacteroides vulgatus
ataaaggaataaagtcgggt

SEQ ID NO: 9021 - DNA, 20 bp, Prevotella disiens
gcaaagagtgcttgcacact

SEQ ID NO: 9022 - DNA, 20 bp, Ignavigranum ruoffiae
gactcattggggaaagatgg

SEQ ID NO: 9023 - DNA, 20 bp, Bacteroides eggerthii
tggagtatgcatactccttt

SEQ ID NO: 9024 - DNA, 20 bp, Streptococcus sobrinus
tactaatgagtcgcgaacgg

SEQ ID NO: 9025 - DNA, 20 bp, Suttonella indologenes
cgttagtgaagaaaggttta

SEQ ID NO: 9026 - DNA, 20 bp, Bacteroides vulgatus
cccgtttgcatgtactttat

SEQ ID NO: 9027 - DNA, 20 bp, Bacteroides vulgatus
aggaagattaatacaagatg

SEQ ID NO: 9028 - DNA, 20 bp, Bacteroides thetaiotaomicron
caggatagccgtaaggcaaa

SEQ ID NO: 9029 - DNA, 20 bp, Ignavigranum ruoffiae
tcggtccgtaaagcactgtt

SEQ ID NO: 9030 - DNA, 20 bp, Anaerococcus prevotii
atcttgagaagagtagaggt

SEQ ID NO: 9031 - DNA, 20 bp, Veillonella atypica
tccaatctcggcatcgagac

SEQ ID NO: 9032 - DNA, 20 bp, Cardiobacterium hominis
ggaccgaaaggcctcgcggc

SEQ ID NO: 9033 - DNA, 30 bp, Myroides odoratus
gtttatataataaagatttatcggtaaaag

SEQ ID NO: 9034 - DNA, 20 bp, Moraxella atlantae
gaaacacactggtggtgacg

SEQ ID NO: 9035 - DNA, 20 bp, Dolosigranulum pigrum
taataccccataggtggatt

SEQ ID NO: 9036 - DNA, 20 bp, Suttonella indologenes
tagcttatcagggcggttac

SEQ ID NO: 9037 - DNA, 20 bp, Veillonella atypica
actggatgaaaggtggcctc

SEQ ID NO: 9038 - DNA, 20 bp, Abiotrophia defectiva
acttggtcaaggtgagtggc

SEQ ID NO: 9039 - DNA, 20 bp, Atopobium parvulum
aacctgcccctttcattggg

SEQ ID NO: 9040 - DNA, 20 bp, Bacillus schlegellii
ggcgggcggaagccttcggg

SEQ ID NO: 9041 - DNA, 20 bp, Corynebacterium confusum
cggaaaggcttcagcttgct

SEQ ID NO: 9042 - DNA, 20 bp, Bacteroides vulgatus
tagatggatgtttaagtcag

SEQ ID NO: 9043 - DNA, 20 bp, Prevotella disiens
cgacattacgtgtaatgttt

SEQ ID NO: 9044 - DNA, 20 bp, Vagococcus fluvialis
ataataaaagacgcttcggt

SEQ ID NO: 9045 - DNA, 20 bp, Bacteroides vulgatus
ttgcagttgatactggatat

SEQ ID NO: 9046 - DNA, 20 bp, Vibrio alginolyticus
tgaacgctggcggcagggcc

SEQ ID NO: 9047 - DNA, 20 bp, Dolosigranulum pigrum
gagaagaacacgtgctaggt

SEQ ID NO: 9048 - DNA, 20 bp, Bacteroides eggerthii
tagtggaaacattacagcct

SEQ ID NO: 9049 - DNA, 20 bp, Bacteroides caccae
gtccacgtgtggacttttgt

SEQ ID NO: 9050 - DNA, 20 bp, Arcanobacterium haemolyticum
aactcgtttgagggggagcg

SEQ ID NO: 9051 - DNA, 20 bp, Anaerobiospirillum succiniciproducens
gaaacactgacggtacccac

SEQ ID NO: 9052 - DNA, 30 bp, Prevotella bivia
tgaattgcagatgaacgatttagagataat

SEQ ID NO: 9053 - DNA, 20 bp, Prevotella loescheii
gggatgcgtccgattagcca

SEQ ID NO: 9054 - DNA, 30 bp, Dolosigranulum pigrum
tctaacattgacgctgaggctcgaaagcgt

SEQ ID NO: 9055 - DNA, 20 bp, Clostridium glycolicum
cataagagattcacatgtat

SEQ ID NO: 9056 - DNA, 20 bp, Lactococcus raffinolactis
agaacgttgcatagagtgga

SEQ ID NO: 9057 - DNA, 20 bp, Leptotrichia buccalis
aggcctgccccggaaactac

SEQ ID NO: 9058 - DNA, 20 bp, Prevotella loescheii
ggggcgcttgagtgcgctga

SEQ ID NO: 9059 - DNA, 20 bp, Bacteroides eggerthii
tctatagttactatcaggtc

SEQ ID NO: 9060 - DNA, 20 bp, Alloiococcus otitis
ttggggaagaacacggatag

SEQ ID NO: 9061 - DNA, 20 bp, Suttonella indologenes
gttagtgaagaaaggtttat

SEQ ID NO: 9062 - DNA, 30 bp, Paenibacillus apiarius
accggaaacggtagctaataccggatagac

SEQ ID NO: 9063 - DNA, 20 bp, Myroides odoratus
tataaaattgccgttgatac

SEQ ID NO: 9064 - DNA, 20 bp, Myroides odoratus
tatgaatggcatcgtttata

SEQ ID NO: 9065 - DNA, 20 bp, Dolosigranulum pigrum
aggcgattttctggtctaac

SEQ ID NO: 9066 - DNA, 20 bp, Suttonella indologenes
aatacctgtgaatttgacat

SEQ ID NO: 9067 - DNA, 20 bp, Bacteroides vulgatus
cgtatccaacctgccgtcta

SEQ ID NO: 9068 - DNA, 20 bp, Leptotrichia buccalis
ggaaggtatctaaggtgtgg

SEQ ID NO: 9069 - DNA, 20 bp, Myroides odoratus
gtacttattgacgctgatga

SEQ ID NO: 9070 - DNA, 20 bp, Corynebacterium kutscheri
ctttttaggtctgtatacag

SEQ ID NO: 9071 - DNA, 20 bp, Suttonella indologenes
tcgaacgagggaagcagctt

SEQ ID NO: 9072 - DNA, 20 bp, Prevotella oralis
gccgtatgtaaatgcggtcc

SEQ ID NO: 9073 - DNA, 20 bp, Kingella kingae
agtacttgtacttggtggcg

SEQ ID NO: 9074 - DNA, 20 bp, Bacteroides eggerthii
tcaatcgatggcgaccggcg

SEQ ID NO: 9075 - DNA, 20 bp, Peptoniphilus indolicus
cccgatgaaatcgtaatgac

SEQ ID NO: 9076 - DNA, 20 bp, Streptococcus thoraltensis
gaacgcatttataactaccg

SEQ ID NO: 9077 - DNA, 20 bp, Bacteroides distasonis
gatatttgctaaagattcat

SEQ ID NO: 9078 - DNA, 20 bp, Bacteroides distasonis
tagccgtttgcgaggtgctg

SEQ ID NO: 9079 - DNA, 20 bp, Lactococcus raffinolactis
aacgagtcgcaaggcagtga

SEQ ID NO: 9080 - DNA, 20 bp, Comamonas terrigena
cgaaaagccctgggttaata

SEQ ID NO: 9081 - DNA, 20 bp, Dolosigranulum pigrum
ggtctaacattgacgctgag

SEQ ID NO: 9082 - DNA, 20 bp, Cardiobacterium hominis
aagactcggtgccggagcta

SEQ ID NO: 9083 - DNA, 20 bp, Empedobacter brevis
gcagtaggataggcatgcgt

SEQ ID NO: 9084 - DNA, 30 bp, Prevotella disiens
acttggggataacccgttgaaagacggact

SEQ ID NO: 9085 - DNA, 20 bp, Microbacterium hominis
accgtagaaatacgggactc

SEQ ID NO: 9086 - DNA, 20 bp, Myroides odoratus
gtatagagagcttgctttct

SEQ ID NO: 9087 - DNA, 20 bp, Vagococcus fluvialis
ataatttgttttcccgcatg

SEQ ID NO: 9088 - DNA, 20 bp, Prevotella disiens
tggctgacttgagtacacac

SEQ ID NO: 9089 - DNA, 20 bp, Staphylococcus saccharolyticus
agctaataccagataacatg

SEQ ID NO: 9090 - DNA, 20 bp, Streptococcus thoraltensis
gtttactctatgacggtagc

SEQ ID NO: 9091 - DNA, 30 bp, Staphylococcus muscae
gaacagacgaggtgcttgcacctctgacgt

SEQ ID NO: 9092 - DNA, 20 bp, Clostridium cadaveris
atgatttttctgcatgggaa

SEQ ID NO: 9093 - DNA, 20 bp, Prevotella oralis
gggcattggtggaggtgctg

SEQ ID NO: 9094 - DNA, 20 bp, Bacteroides thetaiotaomicron
ggcataattagaccgcatgg

SEQ ID NO: 9095 - DNA, 20 bp, Weeksella virosa
actgttgatctagaattagt

SEQ ID NO: 9096 - DNA, 20 bp, Anaerococcus prevotii
ccgaagcctgcgagcaaacc

SEQ ID NO: 9097 - DNA, 30 bp, Corynebacterium coyleae
tcttggaggttgtggtggaaagttttttcg

SEQ ID NO: 9098 - DNA, 20 bp, Leuconostoc fallax
gtgtgtttaaaaggggcttc

SEQ ID NO: 9099 - DNA, 30 bp, Helcococcus kunzii
taaagggtatgtaggcggttaattaagtct

SEQ ID NO: 9100 - DNA, 20 bp, Streptococcus thoraltensis
taataccgcataaaaggagc

SEQ ID NO: 9101 - DNA, 20 bp, Helcococcus kunzii
ctagagataggatagtcttt

SEQ ID NO: 9102 - DNA, 30 bp, Bacteroides capillosus
cgaggtggagcaaatccctaaaagccatcc

SEQ ID NO: 9103 - DNA, 20 bp, Haemophilus segnis
cgtgatgtttaataggcatc

SEQ ID NO: 9104 - DNA, 20 bp, Bacteroides thetaiotaomicron
aatatccgatagcatatatt

SEQ ID NO: 9105 - DNA, 20 bp, Sphingobacterium multivorum
cggagagcttgctcgaagat

SEQ ID NO: 9106 - DNA, 20 bp, Paenibacillus peoriae
ttctgcatggaagaaggagg

SEQ ID NO: 9107 - DNA, 20 bp, Streptococcus ratti
ccatagtgtgctctggaaac

SEQ ID NO: 9108 - DNA, 20 bp, Bacteroides vulgatus
tgattaaaggtattccggta

SEQ ID NO: 9109 - DNA, 20 bp, Actinomyces radingae
gagataggtgtgcatttggt

SEQ ID NO: 9110 - DNA, 20 bp, Leptotrichia buccalis
caaaacggtaacgtttagcc

SEQ ID NO: 9111 - DNA, 20 bp, Prevotella disiens
agacggactaatacccaatg

SEQ ID NO: 9112 - DNA, 20 bp, Bacteroides distasonis
gactctggtgggactgccag

SEQ ID NO: 9113 - DNA, 20 bp, Veillonella atypica
gaatggttcttgtgcgaata

SEQ ID NO: 9114 - DNA, 20 bp, Veillonella atypica
catacgatccaatctcggca

SEQ ID NO: 9115 - DNA, 30 bp, Bacteroides capillosus
ccacacacgtactacaatggtggttaacag

SEQ ID NO: 9116 - DNA, 20 bp, Moraxella atlantae
actttaagcagggaggaaga

SEQ ID NO: 9117 - DNA, 20 bp, Helcococcus kunzii
cgagaatttttcagtcgatt

SEQ ID NO: 9118 - DNA, 30 bp, Dolosigranulum pigrum
gatggtacaacgagcagcgatcccgcaagg

SEQ ID NO: 9119 - DNA, 20 bp, Streptococcus thoraltensis
ccatgttagctttttaaaag

SEQ ID NO: 9120 - DNA, 20 bp, Bacillus schlegellii
agagatgggcctttcccgcg

SEQ ID NO: 9121 - DNA, 20 bp, Bacteroides thetaiotaomicron
taatatccgatagcatatat

SEQ ID NO: 9122 - DNA, 20 bp, Brevibacillus thermoruber
tgtttggagcttgcttcaga

SEQ ID NO: 9123 - DNA, 20 bp, Atopobium parvulum
taggccgggcacccatacga

SEQ ID NO: 9124 - DNA, 20 bp, Leuconostoc fallax
gaacgctagtcgcggacctg

SEQ ID NO: 9125 - DNA, 20 bp, Prevotella oris
tccaatccttaaatccggtc

SEQ ID NO: 9126 - DNA, 20 bp, Bacteroides thetaiotaomicron
tcagtttggtttgcttgcaa

SEQ ID NO: 9127 - DNA, 20 bp, Leptotrichia buccalis
gagagttgtctgcacctgaa

SEQ ID NO: 9128 - DNA, 20 bp, Veillonella atypica
atccaatctcggcatcgaga

SEQ ID NO: 9129 - DNA, 20 bp, Bacteroides capilosus
ggcaatcggaattccgtgtg

SEQ ID NO: 9130 - DNA, 20 bp, Moraxella atlantae
atttaggaaactgccttata

SEQ ID NO: 9131 - DNA, 20 bp, Streptococcus infantarius
gaacgctgaaaactttagct

SEQ ID NO: 9132 - DNA, 30 bp, Facklamia sourekii
ctacggctcaaccgtagaaggtcattggaa

SEQ ID NO: 9133 - DNA, 20 bp, Clostridium cadaveris
acagtaagatgagcactcta

SEQ ID NO: 9134 - DNA, 30 bp, Bacteroides distasonis
ggctgaggactctggtgggactgccagcgt

SEQ ID NO: 9135 - DNA, 20 bp, Bacteroides distasonis
acagggagcgaatccccaaa

SEQ ID NO: 9136 - DNA, 20 bp, Dolosigranulum pigrum
cggccaaccctatgggaggc

SEQ ID NO: 9137 - DNA, 20 bp, Myroides odoratus
aatgtaattacgtgtaatta

SEQ ID NO: 9138 - DNA, 20 bp, Atopobium parvulum
tccgcatggaagactcgaga

SEQ ID NO: 9139 - DNA, 20 bp, Leuconostoc fallax
gatcacttcggtgagacgta

SEQ ID NO: 9140 - DNA, 20 bp, Pseudoramibacter alactolyticus
agcagaatcgcatgactttg

SEQ ID NO: 9141 - DNA, 30 bp, Anaerococcus tetradius
ctgggagccgcagctaacgcattaaacact

SEQ ID NO: 9142 - DNA, 20 bp, Prevotella oralis
cgcgtacagcgagtcggccg

SEQ ID NO: 9143 - DNA, 20 bp, Kingella kingae
aagagagtagagatactctt

SEQ ID NO: 9144 - DNA, 20 bp, Moraxella atlantae
ggaggaagagctagtggaga

SEQ ID NO: 9145 - DNA, 20 bp, Clostridium cadaveris
cagtaagatgagcactctag

SEQ ID NO: 9146 - DNA, 20 bp, Leuconostoc fallax
tggctttggaaactggcgaa

SEQ ID NO: 9147 - DNA, 20 bp, Helcococcus kunzii
aataccttatgatacattaa

SEQ ID NO: 9148 - DNA, 20 bp, Sphingobacterium multivorum
tcgaagatggtgagagtggc

SEQ ID NO: 9149 - DNA, 30 bp, Actinomyces radingae
gtggtgagtgtagcgggtaaagaagcgccg

SEQ ID NO: 9150 - DNA, 20 bp, Staphylococcus simulans
gaagaacaaggatgtaagta

SEQ ID NO: 9151 - DNA, 20 bp, Streptococcus sobrinus
ctcatgttaactgtttaaaa

SEQ ID NO: 9152 - DNA, 20 bp, Peptoniphilus indolicus
cttctaaacttgagtagtga

SEQ ID NO: 9153 - DNA, 20 bp, Campylobacter lari
tagttgtggattagtggcgc

SEQ ID NO: 9154 - DNA, 20 bp, Lactococcus raffinolactis
attatgcaagtgacggtatc

SEQ ID NO: 9155 - DNA, 20 bp, Moraxella atlantae
tggggctcatgaagtcttag

SEQ ID NO: 9156 - DNA, 20 bp, Prevotella oralis
cgttgaaaggcggcctaatt

SEQ ID NO: 9157 - DNA, 20 bp, Weeksella virosa
ataaagctaggtggcatcat

SEQ ID NO: 9158 - DNA, 20 bp, Dolosigranulum pigrum
ctaggtaactactagcgcct

SEQ ID NO: 9159 - DNA, 20 bp, Peptostreptococcus anaerobius
tgcattaatgaaagatgagc

SEQ ID NO: 9160 - DNA, 20 bp, Staphylococcus lentus
atggttcaatgttgaaagac

SEQ ID NO: 9161 - DNA, 20 bp, Facklamia sourekii
gaacagtcagtagagtaact

SEQ ID NO: 9162 - DNA, 20 bp, Myroides odoratimimus
caacgatgattaggggtcct

SEQ ID NO: 9163 - DNA, 20 bp, Bacteroides distasonis
tcaaccatagaattgccgtt

SEQ ID NO: 9164 - DNA, 30 bp, Vagococcus fluvialis
atacatgcaagtcgaacgctttgattttca

SEQ ID NO: 9165 - DNA, 20 bp, Moraxella atlantae
cctagcttgctaggggaaat

SEQ ID NO: 9166 - DNA, 20 bp, Prevotella bivia
atctcatgagattacgaata

SEQ ID NO: 9167 - DNA, 20 bp, Actinomyces turicensis
catgcaccctgacgctgcag

SEQ ID NO: 9168 - DNA, 30 bp, Peptoniphilus indolicus
agtcgtcgagctaaccgcaaggaagcagat

SEQ ID NO: 9169 - DNA, 20 bp, Bacteroides vulgatus
agttgatactggatatcttg

SEQ ID NO: 9170 - DNA, 20 bp, Alloiococcus otitis
aggaagaggcggagtggcga

SEQ ID NO: 9171 - DNA, 20 bp, Bacteroides vulgatus
gcatcatgagtccgcatgtt

SEQ ID NO: 9172 - DNA, 20 bp, Facklamia sourekii
cgagcagcgaagtcgtgagg

SEQ ID NO: 9173 - DNA, 20 bp, Bacillus marinus
gagttagagaagcttgcttc

SEQ ID NO: 9174 - DNA, 20 bp, Actinomyces turicensis
ctgacgctgcagagatgtgg

SEQ ID NO: 9175 - DNA, 20 bp, Peptoniphilus indolicus
agacgccgaaggtagggtta

SEQ ID NO: 9176 - DNA, 20 bp, Gemella morbillorum
atttctcgcatgagagatat

SEQ ID NO: 9177 - DNA, 20 bp, Leuconostoc fallax
gggaagaatagttaatgtag

SEQ ID NO: 9178 - DNA, 20 bp, Kingella kingae
gttagggaagaaaaggttga

SEQ ID NO: 9179 - DNA, 20 bp, Prevotella bivia
actaagggataacccagcga

SEQ ID NO: 9180 - DNA, 20 bp, Pasteurella multocida
gatgaggaaggcaggtattt

SEQ ID NO: 9181 - DNA, 20 bp, Clostridium glycolicum
agcgagtgtcgaaggtgaaa

SEQ ID NO: 9182 - DNA, 20 bp, Leuconostoc fallax
cctcacttagagatggatcc

SEQ ID NO: 9183 - DNA, 20 bp, Brevibacillus reuszeri
cgctagcccgcgagggtatg

SEQ ID NO: 9184 - DNA, 20 bp, Bacillus marinus
atcccattgcccggtctaga

SEQ ID NO: 9185 - DNA, 20 bp, Myroides odoratus
ttgaatagtatggaagtaat

SEQ ID NO: 9186 - DNA, 20 bp, Helcococcus kunzii
tttcagttgatttcttcgga

SEQ ID NO: 9187 - DNA, 20 bp, Enterobacter hormaechei
ttgcatgtgttaggcctaaa

SEQ ID NO: 9188 - DNA, 20 bp, Suttonella indologenes
gtcaactaggtgttgggcac

SEQ ID NO: 9189 - DNA, 20 bp, Staphylococcus simulans
cttttaggaactagccgtcg

SEQ ID NO: 9190 - DNA, 20 bp, Clostridium cadaveris
taggtggaattttaagtggg

SEQ ID NO: 9191 - DNA, 20 bp, Bacteroides capillosus
atctaatctttaaaaccggt

SEQ ID NO: 9192 - DNA, 20 bp, Facklamia languida
tgttcaagtcaatgttagtg

SEQ ID NO: 9193 - DNA, 20 bp, Brevibacillus thermoruber
gtcgggtaagtctgatgtca

SEQ ID NO: 9194 - DNA, 20 bp, Bacteroides thetaiotaomicron
atcagtttggtttgcttgca

SEQ ID NO: 9195 - DNA, 20 bp, Suttonella indologenes
tatggttaatacctgtgaat

SEQ ID NO: 9196 - DNA, 30 bp, Weeksella virosa
caagccgagcggtagattatcttcggataa

SEQ ID NO: 9197 - DNA, 20 bp, Staphylococcus saccharolyticus
gctaataccagataacatgt

SEQ ID NO: 9198 - DNA, 20 bp, Helcococcus kunzii
ttcttcggaatgaaaccgaa

SEQ ID NO: 9199 - DNA, 20 bp, Burkholderia gladioli
agattgacgctggcggcatg

SEQ ID NO: 9200 - DNA, 20 bp, Kingella kingae
acggaagagagtagagatac

SEQ ID NO: 9201 - DNA, 20 bp, Helcococcus kunzii
tagcgagtaaagtcgaggac

SEQ ID NO: 9202 - DNA, 20 bp, Prevotella bivia
tagagataatgaggtccttc

SEQ ID NO: 9203 - DNA, 20 bp, Bacillus schlegellii
tagattgtcctggcgcatgc

SEQ ID NO: 9204 - DNA, 20 bp, Leuconostoc fallax
tataacaacgcatttcgcat

SEQ ID NO: 9205 - DNA, 20 bp, Suttonella indologenes
agcactttcgttagtgaaga

SEQ ID NO: 9206 - DNA, 20 bp, Bacteroides vulgatus
acggtgaaagccgtaagccg

SEQ ID NO: 9207 - DNA, 20 bp, Myroides odoratus
ttgtacgggaagaaatgtaa

SEQ ID NO: 9208 - DNA, 20 bp, Haemophilus segnis
gggattgggccttgagcttg

SEQ ID NO: 9209 - DNA, 20 bp, Sporosarcina pasteurii
tgcagtgacagcatagccgt

SEQ ID NO: 9210 - DNA, 20 bp, Moraxella atlantae
gtcataagattgtaaagcac

SEQ ID NO: 9211 - DNA, 20 bp, Bacteroides capilosus
gaggattcgtccaatggatt

SEQ ID NO: 9212 - DNA, 20 bp, Bacillus schlegellii
gggtccagagatgggccttt

SEQ ID NO: 9213 - DNA, 30 bp, Atopobium parvulum
ggagttaaatccgggggctcaacccccgct

SEQ ID NO: 9214 - DNA, 20 bp, Helcococcus kunzii
aaatgttaaagaatttcggt

SEQ ID NO: 9215 - DNA, 20 bp, Myroides odoratus
ctacgtacttattgacgctg

SEQ ID NO: 9216 - DNA, 20 bp, Sphingobacterium multivorum
cactcgtccttcgggacacg

SEQ ID NO: 9217 - DNA, 20 bp, Helcococcus kunzii
accttatgatacattaatat

SEQ ID NO: 9218 - DNA, 20 bp, Bacillus schlegellii
ttgagtgcaggagaggtgcg

SEQ ID NO: 9219 - DNA, 20 bp, Prevotella bivia
atgggtggtacagatagttg

SEQ ID NO: 9220 - DNA, 20 bp, Prevotella oralis
agatattcattcccttcggg

SEQ ID NO: 9221 - DNA, 20 bp, Alloiococcus otitis
tgcctatcccttgacggtac

SEQ ID NO: 9222 - DNA, 20 bp, Prevotella oralis
gtcggccgtatgtaaatgcg

SEQ ID NO: 9223 - DNA, 20 bp, Anaerococcus prevotii
ctgcatatcttgagaagagt

SEQ ID NO: 9224 - DNA, 20 bp, Sphingobacterium multivorum
ctctaaaagccattcacagg

SEQ ID NO: 9225 - DNA, 20 bp, Streptococcus sobrinus
taagaggagttaactcatgt

SEQ ID NO: 9226 - DNA, 20 bp, Bacteroides distasonis
cgtttgcgaggtgctgcatg

SEQ ID NO: 9227 - DNA, 20 bp, Weeksella virosa
taaagctaggtggcatcatt

SEQ ID NO: 9228 - DNA, 20 bp, Prevotella oralis
tagccagccggcggggtaac

SEQ ID NO: 9229 - DNA, 20 bp, Leuconostoc fallax
tcacttcggtgagacgtaaa

SEQ ID NO: 9230 - DNA, 20 bp, Abiotrophia defectiva
taccgcataggacatggaat

SEQ ID NO: 9231 - DNA, 20 bp, Bacteroides eggerthii
ttgagtgcagcataggtagg

SEQ ID NO: 9232 - DNA, 30 bp, Clostridium histolyticum
gcatgttagaaagattaaaggagcaatccg

SEQ ID NO: 9233 - DNA, 20 bp, Facklamia languida
ttgacataggatgcataacc

SEQ ID NO: 9234 - DNA, 20 bp, Moraxella atlantae
cgatctataactggtcttag

SEQ ID NO: 9235 - DNA, 20 bp, Facklamia languida
tcaagtcaatgttagtggcg

SEQ ID NO: 9236 - DNA, 20 bp, Clostridium cadaveris
gtcatgaaaggagcaatccg

SEQ ID NO: 9237 - DNA, 20 bp, Prevotella bivia
ttgatctcatgagattacga

SEQ ID NO: 9238 - DNA, 20 bp, Pseudoramibacter alactolyticus
cataacacagcagaatcgca

SEQ ID NO: 9239 - DNA, 20 bp, Moraxella atlantae
cgaaggcagctttctggcac

SEQ ID NO: 9240 - DNA, 20 bp, Bacteroides eggerthii
cagcatgattgaagcttgct

SEQ ID NO: 9241 - DNA, 20 bp, Suttonella indologenes
ctaccttggggtgggggata

SEQ ID NO: 9242 - DNA, 20 bp, Bacteroides ureolyticus
tgacatcctaaaaacatcta

SEQ ID NO: 9243 - DNA, 20 bp, Bacillus sp
ttcttgcataaggagacgtt

SEQ ID NO: 9244 - DNA, 20 bp, Moraxella atlantae
cacaatactgacactcagac

SEQ ID NO: 9245 - DNA, 20 bp, Leuconostoc fallax
acttcggtgagacgtaaagc

SEQ ID NO: 9246 - DNA, 20 bp, Corynebacterium coyleae
ccggataggaccacttcttg

SEQ ID NO: 9247 - DNA, 20 bp, Actinomyces radingae
aattcgacctcgtgaaggtg

SEQ ID NO: 9248 - DNA, 20 bp, Actinomyces radingae
agcttgtggcttaacctttt

SEQ ID NO: 9249 - DNA, 20 bp, Clostridium cadaveris
agtcatgaaaggagcaatcc

SEQ ID NO: 9250 - DNA, 20 bp, Alloiococcus otitis
cgcataagttttcccagtgc

SEQ ID NO: 9251 - DNA, 20 bp, Dolosigranulum pigrum
ggtctgtttagtctaatgtg

SEQ ID NO: 9252 - DNA, 20 bp, Haemophilus segnis
tcacgattgacgttaatcac

SEQ ID NO: 9253 - DNA, 20 bp, Moraxella atlantae
acatttaggaaactgcctta

SEQ ID NO: 9254 - DNA, 20 bp, Bacteroides eggerthii
atacgggaataaagtggagt

SEQ ID NO: 9255 - DNA, 20 bp, Bacillus schlegellii
cccctgttgtcggggaagaa

SEQ ID NO: 9256 - DNA, 20 bp, Actinomyces turicensis
gctccaactttgttggggtg

SEQ ID NO: 9257 - DNA, 20 bp, Moraxella atlantae
tttgctataagatgtgccta

SEQ ID NO: 9258 - DNA, 30 bp, Staphylococcus muscae
cgcactagagatagtgttttcctcttcgga

SEQ ID NO: 9259 - DNA, 20 bp, Leptotrichia buccalis
gttgtctgcacctgaagcta

SEQ ID NO: 9260 - DNA, 20 bp, Moraxella atlantae
aacctaggaacagcatatga

SEQ ID NO: 9261 - DNA, 20 bp, Streptococcus ratti
tgattgaaagatgcaagcgc

SEQ ID NO: 9262 - DNA, 20 bp, Neisseria meningitidis
tgaagcataccgggtaagcg

SEQ ID NO: 9263 - DNA, 20 bp, Microbacterium hominis
acatacaccagaacaccgta

SEQ ID NO: 9264 - DNA, 20 bp, Ignavigranum ruoffiae
aagaaccatcctgtattaac

SEQ ID NO: 9265 - DNA, 20 bp, Myroides odoratus
tgctccatggtttatatgaa

SEQ ID NO: 9266 - DNA, 20 bp, Sporosarcina pasteurii
ctgcagtgacagcatagccg

SEQ ID NO: 9267 - DNA, 20 bp, Leptotrichia buccalis
ctactggtccaaccgcaagg

SEQ ID NO: 9268 - DNA, 20 bp, Aerococcus christensenii
cgcatgaacaaacttagaaa

SEQ ID NO: 9269 - DNA, 20 bp, Moraxella atlantae
ggagaaaggaggcgagagct

SEQ ID NO: 9270 - DNA, 20 bp, Prevotella bivia
gcagcgaatagatagcttgc

SEQ ID NO: 9271 - DNA, 20 bp, Clostridium cadaveris
tggtttttctgcatgggaaa

SEQ ID NO: 9272 - DNA, 20 bp, Streptococcus thoraltensis
acaattggtataaatgagtc

SEQ ID NO: 9273 - DNA, 30 bp, Veillonella atypica
tgggagttaatagacggaagcgaaaccgcg

SEQ ID NO: 9274 - DNA, 30 bp, Facklamia sourekii
tacatgcaagtcgaacgaaccgacggagaa

SEQ ID NO: 9275 - DNA, 20 bp, Prevotella oralis
tgcgtccgattagccagccg

SEQ ID NO: 9276 - DNA, 20 bp, Clostridium histolyticum
ttagaaagattaaaggagca

SEQ ID NO: 9277 - DNA, 20 bp, Bacillus schlegellii
ggcctttcccgcgagggacg

SEQ ID NO: 9278 - DNA, 20 bp, Vagococcus fluvialis
cataatttgttttcccgcat

SEQ ID NO: 9279 - DNA, 20 bp, Streptococcus ratti
tagtgtgctctggaaactgt

SEQ ID NO: 9280 - DNA, 20 bp, Streptococcus alactolyticus
aagagaagaatgtgtgtgag

SEQ ID NO: 9281 - DNA, 20 bp, Paenibacillus azotofixans
agtcgagcggagttgtagag

SEQ ID NO: 9282 - DNA, 20 bp, Actinomyces radingae
tgtagcgggtaaagaagcgc

SEQ ID NO: 9283 - DNA, 20 bp, Pasteurella multocida
cgatttggggattgagcaat

SEQ ID NO: 9284 - DNA, 20 bp, Bacteroides distasonis
gtgcgggacgtgtcccgttt

SEQ ID NO: 9285 - DNA, 20 bp, Clostridium innocuum
tatacggagcgcatgctctg

SEQ ID NO: 9286 - DNA, 20 bp, Bacillus sp
tccttatgcaagaaaacgta

SEQ ID NO: 9287 - DNA, 20 bp, Chromobacterium violaceum
acctcgcgttatacgagcag

SEQ ID NO: 9288 - DNA, 20 bp, Streptococcus sobrinus
tccagtgttactaatgagtc

SEQ ID NO: 9289 - DNA, 20 bp, Moraxella atlantae
gtatatgagaggaaagtaga

SEQ ID NO: 9290 - DNA, 30 bp, Brevibacillus thermoruber
aacgggacgcaagcccgcgagggtaagcca

SEQ ID NO: 9291 - DNA, 20 bp, Bacteroides vulgatus
aataaagtcgggtatggata

SEQ ID NO: 9292 - DNA, 20 bp, Bacillus marinus
agcggagttagagaagcttg

SEQ ID NO: 9293 - DNA, 20 bp, Prevotella oralis
acgaaaggtatattctatcg

SEQ ID NO: 9294 - DNA, 20 bp, Veillonella atypica
agtgcgaggatttgacggta

SEQ ID NO: 9295 - DNA, 30 bp, Bacteroides eggerthii
tgagtgcagcataggtaggcggaattcgtg

SEQ ID NO: 9296 - DNA, 20 bp, Moraxella atlantae
ttaagcagggaggaagagct

SEQ ID NO: 9297 - DNA, 20 bp, Anaerobiospirillum succiniciproducens
ggtttgggttccgcagctaa

SEQ ID NO: 9298 - DNA, 20 bp, Suttonella indologenes
tggggtgggggataacgtat

SEQ ID NO: 9299 - DNA, 20 bp, Ignavigranum ruoffiae
gaaatccttcgggacagcga

SEQ ID NO: 9300 - DNA, 20 bp, Clostridium tetani
aaagttaaggtttcgcatga

SEQ ID NO: 9301 - DNA, 20 bp, Facklamia languida
gtggagaacctacccttaag

SEQ ID NO: 9302 - DNA, 20 bp, Suttonella indologenes
actaggtgttgggcacttaa

SEQ ID NO: 9303 - DNA, 20 bp, Prevotella loescheii
ggatgcgtccgattagccag

SEQ ID NO: 9304 - DNA, 20 bp, Brevibacillus thermoruber
agggcaccttctcgcatgag

SEQ ID NO: 9305 - DNA, 20 bp, Bacteroides thetaiotaomicron
cccgatggcataattagacc

SEQ ID NO: 9306 - DNA, 30 bp, Clostridium glycolicum
gtcgagcgattcacttcggtgaagagcggc

SEQ ID NO: 9307 - DNA, 20 bp, Facklamia languida
ttaaggatggctccgcggtg

SEQ ID NO: 9308 - DNA, 30 bp, Streptococcus thoraltensis
gtaaagctctgttataagcgaagaatagga

SEQ ID NO: 9309 - DNA, 20 bp, Prevotella oralis
cagccggcggggtaacggcc

SEQ ID NO: 9310 - DNA, 20 bp, Alloiococcus otitis
gaggaacttgcccataagag

SEQ ID NO: 9311 - DNA, 20 bp, Bacteroides vulgatus
aataaagtcgggtatgcata

SEQ ID NO: 9312 - DNA, 20 bp, Campylobacter lari
gctagttgtggattagtggc

SEQ ID NO: 9313 - DNA, 20 bp, Streptococcus sobrinus
agtgttactaatgagtcgcg

SEQ ID NO: 9314 - DNA, 20 bp, Vagococcus fluvialis
tcggctcaaccgaggaaggt

SEQ ID NO: 9315 - DNA, 20 bp, Atopobium parvulum
accgaatacttcgagacttc

SEQ ID NO: 9316 - DNA, 20 bp, Prevotella bivia
taacccagcgaaagttggac

SEQ ID NO: 9317 - DNA, 20 bp, Alloiococcus otitis
aataccgcataggttttccc

SEQ ID NO: 9318 - DNA, 20 bp, Bacteroides ureolyticus
actcgaagcagggatgctaa

SEQ ID NO: 9319 - DNA, 20 bp, Clostridium glycolicum
gagcgattcacttcggtgaa

SEQ ID NO: 9320 - DNA, 20 bp, Leuconostoc fallax
ggacctgatcacttcggtga

SEQ ID NO: 9321 - DNA, 20 bp, Clostridium limosum
aatgcatgttgaaatgatta

SEQ ID NO: 9322 - DNA, 20 bp, Prevotella oralis
ggttgttttcaacttttgat

SEQ ID NO: 9323 - DNA, 20 bp, Streptococcus thoraltensis
cttttcttaggaacactgga

SEQ ID NO: 9324 - DNA, 20 bp, Vagococcus fluvialis
cggtgtcactgttggatggg

SEQ ID NO: 9325 - DNA, 20 bp, Anaerococcus prevotii
agaagagtagaggtaagtgg

SEQ ID NO: 9326 - DNA, 20 bp, Bordetella avium
gaaaaggcgcaggctaatac

SEQ ID NO: 9327 - DNA, 20 bp, Prevotella disiens
cagaatgttggttgcatgta

SEQ ID NO: 9328 - DNA, 20 bp, Leuconostoc fallax
tatgggaagaatagttaatg

SEQ ID NO: 9329 - DNA, 20 bp, Haemophilus segnis
tgtttaataggcatcacgat

SEQ ID NO: 9330 - DNA, 30 bp, Suttonella indologenes
ttgacattagctaaagaagaagcaccggct

SEQ ID NO: 9331 - DNA, 20 bp, Weeksella virosa
gatttatcgctataagatag

SEQ ID NO: 9332 - DNA, 20 bp, Facklamia languida
gaacttgttcaagtcaatgt

SEQ ID NO: 9333 - DNA, 20 bp, Brevibacterium epidermidis
cgaccacctgacgcatgttg

SEQ ID NO: 9334 - DNA, 20 bp, Alloiococcus otitis
tttcccagtgcatgctggga

SEQ ID NO: 9335 - DNA, 20 bp, Bacteroides distasonis
ccgttgaaactggggggctt

SEQ ID NO: 9336 - DNA, 30 bp, Moraxella atlantae
accgatggcgaaggcagctttctggcacaa

SEQ ID NO: 9337 - DNA, 20 bp, Clostridium cadaveris
tacctctgtgccgccgtaaa

SEQ ID NO: 9338 - DNA, 20 bp, Leuconostoc fallax
tgatgttaatgtgacggtac

SEQ ID NO: 9339 - DNA, 20 bp, Weeksella virosa
ggattaataccgtatataaa

SEQ ID NO: 9340 - DNA, 20 bp, Myroides odoratus
gagagcttgctttctagaga

SEQ ID NO: 9341 - DNA, 20 bp, Anaerobiospirillum succiniciproducens
ctcccttcgggggaaagact

SEQ ID NO: 9342 - DNA, 20 bp, Bacteroides vulgatus
gagtgcagttgaggcaggcg

SEQ ID NO: 9343 - DNA, 20 bp, Myroides odoratus
gcttgctttctagagaccgg

SEQ ID NO: 9344 - DNA, 20 bp, Bacteroides distasonis
tgttacaatggcgtggacaa

SEQ ID NO: 9345 - DNA, 20 bp, Paenibacillus polymyxa
gaagccgcgatgtggagcca

SEQ ID NO: 9346 - DNA, 20 bp, Dolosigranulum pigrum
tgcccatgagcgggggacaa

SEQ ID NO: 9347 - DNA, 20 bp, Facklamia languida
cggtggcctaacttaggagg

SEQ ID NO: 9348 - DNA, 20 bp, Weeksella virosa
tcgcgtatgtaacttgcctt

SEQ ID NO: 9349 - DNA, 20 bp, Leptotrichia buccalis
tgcccgtgagagcgggcagt

SEQ ID NO: 9350 - DNA, 20 bp, Streptococcus sobrinus
cattggtaacaccggacttg

SEQ ID NO: 9351 - DNA, 20 bp, Enterococcus durans
tcgtacaaggtagccgatcg

SEQ ID NO: 9352 - DNA, 20 bp, Prevotella disiens
catctgatttgaattaaaga

SEQ ID NO: 9353 - DNA, 20 bp, Anaerobiospirillum succiniciproducens
tcggtttgggttccgcagct

SEQ ID NO: 9354 - DNA, 20 bp, Helcococcus kunzii
ctcaaccacggttcggttta

SEQ ID NO: 9355 - DNA, 20 bp, Suttonella indologenes
aactaggtgttgggcactta

SEQ ID NO: 9356 - DNA, 20 bp, Streptococcus ratti
gcacaccgtgttttcttgag

SEQ ID NO: 9357 - DNA, 20 bp, Ochrobactrum intermedium
tctacccatcactagggaat

SEQ ID NO: 9358 - DNA, 20 bp, Myroides odoratus
aatagtatggaagtaattag

SEQ ID NO: 9359 - DNA, 20 bp, Bacteroides ureolyticus
aacataagttaaatagggaa

SEQ ID NO: 9360 - DNA, 20 bp, Actinomyces turicensis
ggtacagagtgttgcgatat

SEQ ID NO: 9361 - DNA, 20 bp, Suttonella indologenes
actttcgttagtgaagaaag

SEQ ID NO: 9362 - DNA, 20 bp, Prevotella disiens
tgtaccattcgaataaggac

SEQ ID NO: 9363 - DNA, 20 bp, Empedobacter brevis
aatctcgaaaacttatctca

SEQ ID NO: 9364 - DNA, 20 bp, Ignavigranum ruoffiae
catccgctgcatagcttaga

SEQ ID NO: 9365 - DNA, 20 bp, Actinomyces turicensis
cctgacgctgcagagatgtg

SEQ ID NO: 9366 - DNA, 20 bp, Bacteroides eggerthii
catactcctttgtatgtacc

SEQ ID NO: 9367 - DNA, 20 bp, Bacillus psychrosaccharolyticus
agcgaattgttgagtttact

SEQ ID NO: 9368 - DNA, 20 bp, Corynebacterium kutscheri
aaaggctttcttgcttgcaa

SEQ ID NO: 9369 - DNA, 20 bp, Empedobacter brevis
gcgaatctcgaaaacttatc

SEQ ID NO: 9370 - DNA, 20 bp, Staphylococcus muscae
gtgcttgcacctctgacgtt

SEQ ID NO: 9371 - DNA, 20 bp, Atopobium parvulum
acttcgagacttccgcatgg

SEQ ID NO: 9372 - DNA, 30 bp, Atopobium parvulum
aacacgtgggcaacctgcccctttcattgg

SEQ ID NO: 9373 - DNA, 20 bp, Chromobacterium violaceum
cggcattggagactgcacag

SEQ ID NO: 9374 - DNA, 30 bp, Comamonas testosteroni
ggcaggaatcctttagagatagaggagtgc

SEQ ID NO: 9375 - DNA, 20 bp, Vagococcus fluvialis
cttcggtgtcactgttggat

SEQ ID NO: 9376 - DNA, 20 bp, Lactococcus raffinolactis
gctatccagccctaagtgac

SEQ ID NO: 9377 - DNA, 20 bp, Empedobacter brevis
agatttatcgcagtaggata

SEQ ID NO: 9378 - DNA, 20 bp, Ignavigranum ruoffiae
cgcataggccagtgagtcgc

SEQ ID NO: 9379 - DNA, 20 bp, Clostridium cadaveris
ctgcatgggaaagtcatgaa

SEQ ID NO: 9380 - DNA, 30 bp, Dolosigranulum pigrum
cggtgctggagctaacgtattaagcactcc

SEQ ID NO: 9381 - DNA, 20 bp, Facklamia sourekii
ttagagaagaacagtcagta

SEQ ID NO: 9382 - DNA, 20 bp, Abiotrophia defectiva
gcttgcacttggtcaaggtg

SEQ ID NO: 9383 - DNA, 20 bp, Streptococcus acidominimus
gagttgacaacacatgttgt

SEQ ID NO: 9384 - DNA, 20 bp, Facklamia languida
gtcacttaaggatggctccg

SEQ ID NO: 9385 - DNA, 20 bp, Bacteroides vulgatus
atatcttgagtgcagttgag

SEQ ID NO: 9386 - DNA, 20 bp, Weeksella virosa
ttagtttgaagtagctagaa

SEQ ID NO: 9387 - DNA, 20 bp, Bacteroides eggerthii
ctatagttactatcaggtca

SEQ ID NO: 9388 - DNA, 20 bp, Moraxella atlantae
ctactagccgttggggctca

SEQ ID NO: 9389 - DNA, 20 bp, Leptotrichia buccalis
cgggagagccttgcgtccta

SEQ ID NO: 9390 - DNA, 20 bp, Myroides odoratus
cagattactacgtacttatt

SEQ ID NO: 9391 - DNA, 20 bp, Moraxella atlantae
actagccgttggggctcatg

SEQ ID NO: 9392 - DNA, 20 bp, Prevotella oralis
tgaatagagatattcattcc

SEQ ID NO: 9393 - DNA, 20 bp, Anaerobiospirillum succiniciproducens
attctaaactgcctttctag

SEQ ID NO: 9394 - DNA, 20 bp, Alloiococcus otitis
ataggttttcccagtgcatg

SEQ ID NO: 9395 - DNA, 20 bp, Moraxella atlantae
aggcgagagcttttgctata

SEQ ID NO: 9396 - DNA, 20 bp, Atopobium parvulum
aggtgtgggggagtatttct

SEQ ID NO: 9397 - DNA, 20 bp, Dolosigranulum pigrum
attttctggtctaacattga

SEQ ID NO: 9398 - DNA, 20 bp, Haemophilus segnis
ggcatcacgattgacgttaa

SEQ ID NO: 9399 - DNA, 20 bp, Myroides odoratimimus
aatggcaagtacagaaagca

SEQ ID NO: 9400 - DNA, 20 bp, Sphingobacterium multivorum
tgtaggaagctgaatgtact

SEQ ID NO: 9401 - DNA, 20 bp, Cardiobacterium hominis
aggcgtcgggttgttaaaga

SEQ ID NO: 9402 - DNA, 20 bp, Prevotella oralis
cttaaaacgtgcctcagttc

SEQ ID NO: 9403 - DNA, 20 bp, Prevotella oralis
gcgtacagcgagtcggccgt

SEQ ID NO: 9404 - DNA, 20 bp, Staphylococcus simulans
gataacacatgaaaccgcat

SEQ ID NO: 9405 - DNA, 20 bp, Leuconostoc fallax
acaacgcatttcgcatgaag

SEQ ID NO: 9406 - DNA, 20 bp, Kingella kingae
aaaaggttgatgctaatatc

SEQ ID NO: 9407 - DNA, 20 bp, Leuconostoc fallax
gctagtcgcggacctgatca

SEQ ID NO: 9408 - DNA, 20 bp, Bacillus psychrosaccharolyticus
tgttgagtttactcaacaat

SEQ ID NO: 9409 - DNA, 20 bp, Bacillus sp
cggataatacgttttcttgc

SEQ ID NO: 9410 - DNA, 20 bp, Leuconostoc fallax
catttcgcatgaagtgtgtt

SEQ ID NO: 9411 - DNA, 20 bp, Leuconostoc fallax
ctcacttagagatggatccg

SEQ ID NO: 9412 - DNA, 20 bp, Anaerococcus prevotii
ggaagcttgtaatacccgaa

SEQ ID NO: 9413 - DNA, 20 bp, Microbacterium hominis
cagaacaccgtagaaatacg

SEQ ID NO: 9414 - DNA, 20 bp, Dolosigranulum pigrum
gtctgtttagtctaatgtga

SEQ ID NO: 9415 - DNA, 20 bp, Streptococcus thoraltensis
tataagcgaagaataggagt

SEQ ID NO: 9416 - DNA, 20 bp, Prevotella oralis
tcatctaatttggacgaaag

SEQ ID NO: 9417 - DNA, 20 bp, Bacteroides ureolyticus
tttactagaatttagtgaca

SEQ ID NO: 9418 - DNA, 20 bp, Streptococcus thoraltensis
cccatgttagctttttaaaa

SEQ ID NO: 9419 - DNA, 20 bp, Kytococcus sedentarius
tacgaccgaccctcgcatgg

SEQ ID NO: 9420 - DNA, 20 bp, Prevotella disiens
gttgcatgtaaatgtaatct

SEQ ID NO: 9421 - DNA, 20 bp, Myroides odoratimimus
ctacgtatttattgacgctg

SEQ ID NO: 9422 - DNA, 20 bp, Dolosigranulum pigrum
gaacttgcccatgagcgggg

SEQ ID NO: 9423 - DNA, 20 bp, Moraxella atlantae
gagtatatgagaggaaagta

SEQ ID NO: 9424 - DNA, 20 bp, Lactococcus raffinolactis
gtacaacgagtcgcaaggca

SEQ ID NO: 9425 - DNA, 30 bp, Streptococcus thoraltensis
taccaggtcttgacatcccggtgccggttc

SEQ ID NO: 9426 - DNA, 20 bp, Bacteroides distasonis
cgaaggcagcctgccaagcc

SEQ ID NO: 9427 - DNA, 20 bp, Streptococcus thoraltensis
aagtggaacgcatttataac

SEQ ID NO: 9428 - DNA, 20 bp, Arcanobacterium haemolyticum
taactcgtttgagggggagc

SEQ ID NO: 9429 - DNA, 20 bp, Bacteroides capilosus
gcaatcggaattccgtgtgt

SEQ ID NO: 9430 - DNA, 20 bp, Prevotella bivia
cgatctaatccttaaaacca

SEQ ID NO: 9431 - DNA, 20 bp, Peptoniphilus indolicus
caaccctcgtaagcatttga

SEQ ID NO: 9432 - DNA, 20 bp, Lactococcus raffinolactis
gtcgcaaggcagtgatgtca

SEQ ID NO: 9433 - DNA, 30 bp, Peptostreptococcus anaerobius
attaatgaaagatgagcggcggacgggtga

SEQ ID NO: 9434 - DNA, 20 bp, Anaerobiospirillum succiniciproducens
gggaggaaacactgacgtta

SEQ ID NO: 9435 - DNA, 20 bp, Clostridium cadaveris
tttctgcatgggaaagtcat

SEQ ID NO: 9436 - DNA, 20 bp, Peptoniphilus indolicus
gcagatgccgaaggtagggt

SEQ ID NO: 9437 - DNA, 20 bp, Facklamia sourekii
aaaccttaagctcgcatgag

SEQ ID NO: 9438 - DNA, 20 bp, Aerococcus christensenii
ttcgcatgaacaaacttaga

SEQ ID NO: 9439 - DNA, 30 bp, Bacteroides vulgatus
gctgcaactgacattgaggctcgaaagtgt

SEQ ID NO: 9440 - DNA, 20 bp, Clostridium cadaveris
taataagggaagctctttcg

SEQ ID NO: 9441 - DNA, 20 bp, Facklamia languida
taggatgcataacctagaga

SEQ ID NO: 9442 - DNA, 20 bp, Bacteroides ureolyticus
acatatacagtaagacgcaa

SEQ ID NO: 9443 - DNA, 20 bp, Lactococcus raffinolactis
cgcataacaatgttggatgc

SEQ ID NO: 9444 - DNA, 20 bp, Suttonella indologenes
cgagtcaaagcgggggatct

SEQ ID NO: 9445 - DNA, 20 bp, Atopobium parvulum
atacttcgagacttccgcat

SEQ ID NO: 9446 - DNA, 20 bp, Prevotella oris
acgatccaatccttaaatcc

SEQ ID NO: 9447 - DNA, 20 bp, Prevotella loescheii
ttgtgaaatccgggtgctca

SEQ ID NO: 9448 - DNA, 20 bp, Myroides odoratimimus
ggcatgcgtatcattagcta

SEQ ID NO: 9449 - DNA, 20 bp, Prevotella oralis
acgtgcctcagttcggactg

SEQ ID NO: 9450 - DNA, 20 bp, Prevotella oralis
ccaaccttcccattactacg

SEQ ID NO: 9451 - DNA, 20 bp, Prevotella oralis
gatgcgtccgattagccagc

SEQ ID NO: 9452 - DNA, 20 bp, Facklamia sourekii
tagagaagaacagtcagtag

SEQ ID NO: 9453 - DNA, 20 bp, Prevotella disiens
gacatctgatttgaattaaa

SEQ ID NO: 9454 - DNA, 20 bp, Ignavigranum ruoffiae
gagcgcaggtggtggcttaa

SEQ ID NO: 9455 - DNA, 20 bp, Myroides odoratus
agtcgaggggtatagagagc

SEQ ID NO: 9456 - DNA, 20 bp, Prevotella bivia
agtcgaggggcagcgaatag

SEQ ID NO: 9457 - DNA, 20 bp, Prevotella oralis
gtgcctcagttcggactggg

SEQ ID NO: 9458 - DNA, 20 bp, Ignavigranum ruoffiae
tacaggacttgacggtatct

SEQ ID NO: 9459 - DNA, 20 bp, Corynebacterium glucuronolyticum
tcgatacaatgcgttgcgac

SEQ ID NO: 9460 - DNA, 20 bp, Bacteroides thetaiotaomicron
atggcataattagaccgcat

SEQ ID NO: 9461 - DNA, 20 bp, Campylobacter lari
tcgaacgatgaagcgactag

SEQ ID NO: 9462 - DNA, 20 bp, Alloiococcus otitis
ccatgatgcgtagccgactt

SEQ ID NO: 9463 - DNA, 20 bp, Peptoniphilus indolicus
gagggctcaaccctcgtaag

SEQ ID NO: 9464 - DNA, 20 bp, Prevotella bivia
tcccttttgcaggtaccata

SEQ ID NO: 9465 - DNA, 20 bp, Bordetella avium
aggcgcaggctaataccttg

SEQ ID NO: 9466 - DNA, 20 bp, Clostridium innocuum
gtatacggagcgcatgctct

SEQ ID NO: 9467 - DNA, 20 bp, Prevotella bivia
gatttagagataatgaggtc

SEQ ID NO: 9468 - DNA, 20 bp, Prevotella bivia
caggatcgacctagggcaaa

SEQ ID NO: 9469 - DNA, 20 bp, Abiotrophia defectiva
tcttcggaacgtcggtgaca

SEQ ID NO: 9470 - DNA, 20 bp, Clostridium cadaveris
caaactggaattctagagtg

SEQ ID NO: 9471 - DNA, 20 bp, Leptotrichia buccalis
cggaaactacagggctggag

SEQ ID NO: 9472 - DNA, 20 bp, Streptococcus thoraltensis
taaagatggacctgcgttgt

SEQ ID NO: 9473 - DNA, 20 bp, Kocuria kristinae
tcttcccttttgggctggtg

SEQ ID NO: 9474 - DNA, 20 bp, Bacteroides distasonis
tttgaacgcattcggaccga

SEQ ID NO: 9475 - DNA, 20 bp, Sphingobacterium multivorum
agcttgctcgaagacggtga

SEQ ID NO: 9476 - DNA, 20 bp, Arcanobacterium haemolyticum
tacaccgggattatgcagag

SEQ ID NO: 9477 - DNA, 20 bp, Empedobacter brevis
ggcttcagtggctaagcgaa

SEQ ID NO: 9478 - DNA, 20 bp, Kocuria kristinae
ctactgcccgcatgggctgg

SEQ ID NO: 9479 - DNA, 20 bp, Bacillus schlegellii
aggaaaggggcgacccgctt

SEQ ID NO: 9480 - DNA, 20 bp, Streptococcus thoraltensis
tttttaaaaggtgcaacagc

SEQ ID NO: 9481 - DNA, 20 bp, Bacillus schlegellii
aaaggggcgacccgctttag

SEQ ID NO: 9482 - DNA, 20 bp, Bacteroides distasonis
gggcttgagtatgtttgagg

SEQ ID NO: 9483 - DNA, 20 bp, Myroides odoratus
gaaagcagctaccaggcaac

SEQ ID NO: 9484 - DNA, 20 bp, Bacteroides distasonis
gacagggagcgaatccccaa

SEQ ID NO: 9485 - DNA, 30 bp, Alloiococcus otitis
aacttgcccataagagggggataacacccg

SEQ ID NO: 9486 - DNA, 20 bp, Lactococcus garvieae
tgaagtcggtacaaggtagc

SEQ ID NO: 9487 - DNA, 20 bp, Anaerococcus prevotii
gtcgaaggtaggataggtga

SEQ ID NO: 9488 - DNA, 20 bp, Bacteroides distasonis
atcgtaaacctcttttataa

SEQ ID NO: 9489 - DNA, 20 bp, Moraxella atlantae
gcagctttctggcacaatac

SEQ ID NO: 9490 - DNA, 20 bp, Paenibacillus peoriae
tttttctgcatggaagaagg

SEQ ID NO: 9491 - DNA, 20 bp, Bacteroides distasonis
actggggggcttgagtatgt

SEQ ID NO: 9492 - DNA, 20 bp, Prevotella bivia
cttatgtattcgtttgatct

SEQ ID NO: 9493 - DNA, 20 bp, Myroides odoratus
aatgctccatggtttatatg

SEQ ID NO: 9494 - DNA, 20 bp, Bacillus psychrosaccharolyticus
tttactcaacaattagcggc

SEQ ID NO: 9495 - DNA, 20 bp, Bacteroides capilosus
actacaatggtggttaacag

SEQ ID NO: 9496 - DNA, 20 bp, Pseudoramibacter alactolyticus
accgcataacacagcagaat

SEQ ID NO: 9497 - DNA, 20 bp, Prevotella loescheii
cagcctactgtagcgctact

SEQ ID NO: 9498 - DNA, 20 bp, Leptotrichia buccalis
gagtattggagaggtggacg

SEQ ID NO: 9499 - DNA, 20 bp, Prevotella loescheii
gtccgattagccagacggcg

SEQ ID NO: 9500 - DNA, 20 bp, Staphylococcus lentus
tgaaccgcatggttcaatgt

SEQ ID NO: 9501 - DNA, 20 bp, Weeksella virosa
gttgatctagaattagtttg

SEQ ID NO: 9502 - DNA, 30 bp, Clostridium septicum
cattgcagcttcgcatggagcagcaattaa

SEQ ID NO: 9503 - DNA, 20 bp, Bacteroides eggerthii
ttgaagcttgcttcaatcga

SEQ ID NO: 9504 - DNA, 20 bp, Bacillus sp
tacgttttcttgcataagga

SEQ ID NO: 9505 - DNA, 20 bp, Leptotrichia buccalis
gcacctgaagctactggtcc

SEQ ID NO: 9506 - DNA, 20 bp, Helcococcus kunzii
gtcaaggaggcagacgccga

SEQ ID NO: 9507 - DNA, 20 bp, Clostridium glycolicum
cgattcacttcggtgaagag

SEQ ID NO: 9508 - DNA, 20 bp, Prevotella oralis
gtcatctaatttggacgaaa

SEQ ID NO: 9509 - DNA, 20 bp, Comamonas testosteroni
ggcaggaatcctttagagat

SEQ ID NO: 9510 - DNA, 20 bp, Prevotella oralis
atgcagtccgaagcagtcat

SEQ ID NO: 9511 - DNA, 20 bp, Clostridium cadaveris
atggtttttctgcatgggaa

SEQ ID NO: 9512 - DNA, 20 bp, Dolosigranulum pigrum
actgacagacttgaatgtag

SEQ ID NO: 9513 - DNA, 20 bp, Atopobium parvulum
gggagtatttcttccgtgcc

SEQ ID NO: 9514 - DNA, 20 bp, Atopobium parvulum
cccctttcattgggatagcc

SEQ ID NO: 9515 - DNA, 20 bp, Weeksella virosa
ctgcttttatatgtgaataa

SEQ ID NO: 9516 - DNA, 20 bp, Clostridium cadaveris
cactctagctagactgccgt

SEQ ID NO: 9517 - DNA, 20 bp, Peptoniphilus indolicus
ctcgtaagcatttgaaactt

SEQ ID NO: 9518 - DNA, 20 bp, Sphingobacterium multivorum
gaagatggtgagagtggcgc

SEQ ID NO: 9519 - DNA, 20 bp, Bacteroides ureolyticus
atctaagagattagaaagtg

SEQ ID NO: 9520 - DNA, 20 bp, Bacteroides vulgatus
ttccggtagacgatggggat

SEQ ID NO: 9521 - DNA, 20 bp, Bacteroides thetaiotaomicron
cactggagtgtaactgacgc

SEQ ID NO: 9522 - DNA, 30 bp, Campylobacter lari
ttgctagttgtggattagtggcgcacgggt

SEQ ID NO: 9523 - DNA, 20 bp, Moraxella atlantae
catatgatactggtgaacta

SEQ ID NO: 9524 - DNA, 20 bp, Staphylococcus simulans
tgcatcccttgacggtacct

SEQ ID NO: 9525 - DNA, 20 bp, Anaerobiospirillum succiniciproducens
aaactggctttctagagtat

SEQ ID NO: 9526 - DNA, 20 bp, Weeksella virosa
cgaccgtaacaggagctacc

SEQ ID NO: 9527 - DNA, 20 bp, Sphingobacterium multivorum
tgtccaggaataaacctttc

SEQ ID NO: 9528 - DNA, 20 bp, Corynebacterium group ANF
tggtgcctgtggtggaaaac

SEQ ID NO: 9529 - DNA, 20 bp, Weissella paramesenteroides
cgctttgtctttaactgata

SEQ ID NO: 9530 - DNA, 20 bp, Atopobium parvulum
gtatgttgccagcggttagg

SEQ ID NO: 9531 - DNA, 20 bp, Clostridium clostridiiforme
cgatgaagttttcggatgga

SEQ ID NO: 9532 - DNA, 20 bp, Ignavigranum ruoffiae
gcctgactcattggggaaag

SEQ ID NO: 9533 - DNA, 20 bp, Leuconostoc fallax
tgaagtgtgtttaaaagggg

SEQ ID NO: 9534 - DNA, 20 bp, Leptotrichia buccalis
agttgtctgcacctgaagct

SEQ ID NO: 9535 - DNA, 30 bp, Brevibacillus thermoruber
agcgcgcgcaggcggtcgggtaagtctgat

SEQ ID NO: 9536 - DNA, 30 bp, Staphylococcus sciuri
ataatacaaagggcagcgaatccgcgaggc

SEQ ID NO: 9537 - DNA, 20 bp, Bacteroides distasonis
ggcgtggacaaagggaggcc

SEQ ID NO: 9538 - DNA, 20 bp, Weeksella virosa
ggtagattatcttcggataa

SEQ ID NO: 9539 - DNA, 20 bp, Myroides odoratus
aggggtatagagagcttgct

SEQ ID NO: 9540 - DNA, 20 bp, Corynebacterium group ANF
tgaggcgagagatcgtctgt

SEQ ID NO: 9541 - DNA, 20 bp, Bacteroides caccae
tacgccgcaaggcatttgtg

SEQ ID NO: 9542 - DNA, 20 bp, Veillonella atypica
ctcggcatcgagactggatg

SEQ ID NO: 9543 - DNA, 20 bp, Corynebacterium group ANF
actgcagggtggtgcctgtg

SEQ ID NO: 9544 - DNA, 20 bp, Bacillus sp
ttctacttgcttcccgcgct

SEQ ID NO: 9545 - DNA, 20 bp, Bacillus schlegellii
ataccggatagattgtcctg

SEQ ID NO: 9546 - DNA, 20 bp, Actinomyces radingae
gcaattcgacctcgtgaagg

SEQ ID NO: 9547 - DNA, 20 bp, Myroides odoratus
catcgtttatataataaaga

SEQ ID NO: 9548 - DNA, 30 bp, Paenibacillus macerans
gcagcattgtggaataatgaaaggcggagc

SEQ ID NO: 9549 - DNA, 20 bp, Peptoniphilus indolicus
gtaacggctcaccaagatag

SEQ ID NO: 9550 - DNA, 20 bp, Aerococcus christensenii
gaagtttgttcgcatgaaca

SEQ ID NO: 9551 - DNA, 20 bp, Prevotella oralis
gcattggtggaggtgctgca

SEQ ID NO: 9552 - DNA, 20 bp, Leuconostoc fallax
aagtgtgtttaaaaggggct

SEQ ID NO: 9553 - DNA, 20 bp, Staphylococcus simulans
ggaagaacaaggatgtaagt

SEQ ID NO: 9554 - DNA, 20 bp, Bacteroides caccae
agtttgttgggggggtaacg

SEQ ID NO: 9555 - DNA, 20 bp, Clostridium cadaveris
agcgagggagcaccttcggg

SEQ ID NO: 9556 - DNA, 20 bp, Actinomyces radingae
tttgggtagtggtgagtgta

SEQ ID NO: 9557 - DNA, 20 bp, Bacteroides distasonis
caatagccgtttgcgaggtg

SEQ ID NO: 9558 - DNA, 20 bp, Brevibacillus thermoruber
caagaccgggataacgtagg

SEQ ID NO: 9559 - DNA, 20 bp, Streptococcus thoraltensis
caagtggaacgcatttataa

SEQ ID NO: 9560 - DNA, 20 bp, Moraxella atlantae
aaagctgagaactgtaagga

SEQ ID NO: 9561 - DNA, 20 bp, Atopobium parvulum
aataccgaatacttcgagac

SEQ ID NO: 9562 - DNA, 20 bp, Ignavigranum ruoffiae
gtggtggcttaagtctgatg

SEQ ID NO: 9563 - DNA, 20 bp, Streptococcus ratti
tgttttcttgagtcgcgaac

SEQ ID NO: 9564 - DNA, 20 bp, Campylobacter lari
gcttgctagttgtggattag

SEQ ID NO: 9565 - DNA, 30 bp, Campylobacter lari
ttgctaacacttcgggtgagcactctaaat

SEQ ID NO: 9566 - DNA, 20 bp, Facklamia sourekii
tagctaataccgcataaacc

SEQ ID NO: 9567 - DNA, 20 bp, Prevotella bivia
tgatctcatgagattacgaa

SEQ ID NO: 9568 - DNA, 20 bp, Corynebacterium kutscheri
ttttcctttttaggtctgta

SEQ ID NO: 9569 - DNA, 20 bp, Streptococcus thoraltensis
caacagcatcacttaaagat

SEQ ID NO: 9570 - DNA, 20 bp, Brevibacillus thermoruber
taccggatagggcaccttct

SEQ ID NO: 9571 - DNA, 20 bp, Myroides odoratimimus
agtatggaagtaactagaat

SEQ ID NO: 9572 - DNA, 20 bp, Actinomyces radingae
gcctttttctttgggataac

SEQ ID NO: 9573 - DNA, 20 bp, Brevibacillus thermoruber
cggatagggcaccttctcgc

SEQ ID NO: 9574 - DNA, 20 bp, Vagococcus fluvialis
gacgcttcggtgtcactgtt

SEQ ID NO: 9575 - DNA, 20 bp, Bacteroides ureolyticus
acaatgacatatacagtaag

SEQ ID NO: 9576 - DNA, 20 bp, Dermacoccus nishinomiyaensis
atactggatacgaccgatct

SEQ ID NO: 9577 - DNA, 20 bp, Myroides odoratus
tgacttgaatagtatggaag

SEQ ID NO: 9578 - DNA, 20 bp, Bacteroides capilosus
cagaggattcgtccaatgga

SEQ ID NO: 9579 - DNA, 20 bp, Moraxella atlantae
tactggtgaactagagtata

SEQ ID NO: 9580 - DNA, 20 bp, Pseudoramibacter alactolyticus
gagaagttttttattgaccc

SEQ ID NO: 9581 - DNA, 20 bp, Alloiococcus otitis
gcctatcccttgacggtacc

SEQ ID NO: 9582 - DNA, 20 bp, Facklamia sourekii
gagcagcgaagtcgtgaggc

SEQ ID NO: 9583 - DNA, 20 bp, Bacteroides eggerthii
gcgggtgcttaagtcagttg

SEQ ID NO: 9584 - DNA, 20 bp, Bacteroides eggerthii
tagtatagtttttccgcatg

SEQ ID NO: 9585 - DNA, 20 bp, Facklamia sourekii
ataccgcataaaccttaagc

SEQ ID NO: 9586 - DNA, 20 bp, Vibrio parahaemolyticus
tgttaatagcgctatcattt

SEQ ID NO: 9587 - DNA, 20 bp, Bacteroides capilosus
gctcaacctgtggcctgcat

SEQ ID NO: 9588 - DNA, 30 bp, Helcococcus kunzii
ccgtcaaggaggcagacgccgaaggtaggg

SEQ ID NO: 9589 - DNA, 20 bp, Helcococcus kunzii
agataggatagtcttttcgg

SEQ ID NO: 9590 - DNA, 30 bp, Streptococcus thoraltensis
ggtataaatgagtcgcgaacgggtgagtaa

SEQ ID NO: 9591 - DNA, 20 bp, Bacteroides distasonis
aatagccgtttgcgaggtgc

SEQ ID NO: 9592 - DNA, 30 bp, Brevibacillus thermoruber
cgcgagggtaagccaatctcttaaaaccag

SEQ ID NO: 9593 - DNA, 20 bp, Lactococcus raffinolactis
gtggaaaattatgcaagtga

SEQ ID NO: 9594 - DNA, 20 bp, Actinomyces radingae
gggtagtggtgagtgtagcg

SEQ ID NO: 9595 - DNA, 20 bp, Leptotrichia buccalis
aagggcatctaggcggccct

SEQ ID NO: 9596 - DNA, 20 bp, Kytococcus sedentarius
actggatacgaccgaccctc

SEQ ID NO: 9597 - DNA, 20 bp, Bacteroides ureolyticus
cctacacagaggaacaacag

SEQ ID NO: 9598 - DNA, 30 bp, Paenibacillus peoriae
ttttctgcatggaagaaggaggaaagacgg

SEQ ID NO: 9599 - DNA, 20 bp, Globicatella sanguinis
aacgaaccacaacgagaact

SEQ ID NO: 9600 - DNA, 20 bp, Actinomyces meyeri
ctccagctttgttggggtgg

SEQ ID NO: 9601 - DNA, 20 bp, Sporosarcina pasteurii
gcgtttgctccagcactaag

SEQ ID NO: 9602 - DNA, 20 bp, Neisseria subflava
aaggggccgcttaccacggt

SEQ ID NO: 9603 - DNA, 20 bp, Streptococcus thoraltensis
catcacttaaagatggacct

SEQ ID NO: 9604 - DNA, 20 bp, Streptococcus acidominimus
actggtgacagtaagccaat

SEQ ID NO: 9605 - DNA, 20 bp, Veillonella atypica
tagtgcgaggatttgacggt

SEQ ID NO: 9606 - DNA, 20 bp, Moraxella atlantae
tgtgtgaagaaggtcataag

SEQ ID NO: 9607 - DNA, 20 bp, Suttonella indologenes
gtacgctaataccacataac

SEQ ID NO: 9608 - DNA, 20 bp, Anaerobiospirillum succiniciproducens
ttgacatcgtaggaatcttt

SEQ ID NO: 9609 - DNA, 20 bp, Pseudoramibacter alactolyticus
gaagttttttattgaccctt

SEQ ID NO: 9610 - DNA, 20 bp, Alloiococcus otitis
cataggttttcccagtgcat

SEQ ID NO: 9611 - DNA, 20 bp, Anaerobiospirillum succiniciproducens
ccacggtgtggtctgtgact

SEQ ID NO: 9612 - DNA, 20 bp, Dolosigranulum pigrum
gctaatctttcaaagccatt

SEQ ID NO: 9613 - DNA, 20 bp, Arcanobacterium haemolyticum
tttctcttgggataagcctt

SEQ ID NO: 9614 - DNA, 20 bp, Atopobium parvulum
tcgagaaagctccggcggag

SEQ ID NO: 9615 - DNA, 30 bp, Dolosigranulum pigrum
agctcttgacatcttctgacaactctagag

SEQ ID NO: 9616 - DNA, 20 bp, Veillonella dispar
catacgatccaacctcggca

SEQ ID NO: 9617 - DNA, 20 bp, Lactococcus raffinolactis
aaaattatgcaagtgacggt

SEQ ID NO: 9618 - DNA, 20 bp, Clostridium glycolicum
aatacaggataacataagag

SEQ ID NO: 9619 - DNA, 20 bp, Moraxella atlantae
ataagatgtgcctaaattag

SEQ ID NO: 9620 - DNA, 20 bp, Facklamia sourekii
gtacagcgagcagcgaagtc

SEQ ID NO: 9621 - DNA, 20 bp, Abiotrophia defectiva
ggtgcttgcacttggtcaag

SEQ ID NO: 9622 - DNA, 20 bp, Prevotella oralis
gtatattctatcggtaatgg

SEQ ID NO: 9623 - DNA, 20 bp, Lactococcus garvieae
aagtcggtacaaggtagccg

SEQ ID NO: 9624 - DNA, 20 bp, Clostridium clostridiiforme
gcacagtgccgcatggcagt

SEQ ID NO: 9625 - DNA, 20 bp, Clostridium histolyticum
cccggggcttaaccccggtg

SEQ ID NO: 9626 - DNA, 20 bp, Myroides odoratimimus
caagtacagaaagcagctac

SEQ ID NO: 9627 - DNA, 20 bp, Ignavigranum ruoffiae
acgagcagcgacctcgtgag

SEQ ID NO: 9628 - DNA, 20 bp, Anaerococcus prevotii
acccgaagcctgcgagcaaa

SEQ ID NO: 9629 - DNA, 20 bp, Atopobium parvulum
gtgtgggggagtatttcttc

SEQ ID NO: 9630 - DNA, 20 bp, Clostridium clostridiiforme
acatccccctgacgggccgg

SEQ ID NO: 9631 - DNA, 20 bp, Bacillus sp
ctccttatgcaagaaaacgt

SEQ ID NO: 9632 - DNA, 30 bp, Unknown Organism
  oligonucleotide from CDC group EF-4B
aaggatggctaataccgcatacactttgag

SEQ ID NO: 9633 - DNA, 20 bp, Streptococcus thoraltensis
atttataactaccgtagctt

SEQ ID NO: 9634 - DNA, 20 bp, Leptotrichia buccalis
cggccctgtaagtctagggt

SEQ ID NO: 9635 - DNA, 20 bp, Moraxella atlantae
aggaaactgccttatagagg

SEQ ID NO: 9636 - DNA, 20 bp, Streptococcus sobrinus
ggacttagtgccgacgctaa

SEQ ID NO: 9637 - DNA, 20 bp, Prevotella bivia
atttatgtcggcgaccggcg

SEQ ID NO: 9638 - DNA, 20 bp, Arcanobacterium haemolyticum
tcgtttgagggggagcggtc

SEQ ID NO: 9639 - DNA, 20 bp, Corynebacterium kutscheri
acggaaaggctttcttgctt

SEQ ID NO: 9640 - DNA, 20 bp, Bacteroides distasonis
aataaagtgcgggacgtgtc

SEQ ID NO: 9641 - DNA, 20 bp, Unknown Organism
  oligonucleotide from CDC group VB-3
ttcatgactggggtgaaggt

SEQ ID NO: 9642 - DNA, 20 bp, Bacteroides distasonis
cccgggtttgaacgcattcg

SEQ ID NO: 9643 - DNA, 20 bp, Kingella kingae
tgatgctaatatcattaact

SEQ ID NO: 9644 - DNA, 20 bp, Bacteroides vulgatus
gccgtaagccgcaaggcatc

SEQ ID NO: 9645 - DNA, 20 bp, Leptotrichia buccalis
gacatcctgcgtatgcccgt

SEQ ID NO: 9646 - DNA, 20 bp, Weeksella virosa
atgggatagcccggagaaat

SEQ ID NO: 9647 - DNA, 20 bp, Bacteroides thetaiotaomicron
cagtttggtttgcttgcaaa

SEQ ID NO: 9648 - DNA, 20 bp, Prevotella loescheii
ggaacgattcggagacgatg

SEQ ID NO: 9649 - DNA, 30 bp, Dolosigranulum pigrum
tttcaaagccattctcagttcggattgcac

SEQ ID NO: 9650 - DNA, 20 bp, Anaerobiospirillum succiniciproducens
gttggtcattctaaactggc

SEQ ID NO: 9651 - DNA, 20 bp, Streptococcus ratti
cttagagataggaagttact

SEQ ID NO: 9652 - DNA, 20 bp, Pseudoramibacter alactolyticus
aagttttttattgacccttc

SEQ ID NO: 9653 - DNA, 20 bp, Streptococcus thoraltensis
cttgctacaattggtataaa

SEQ ID NO: 9654 - DNA, 20 bp, Bacillus sp
gtctccttatgcaagaaaac

SEQ ID NO: 9655 - DNA, 20 bp, Bacteroides distasonis
cccttgccactagttactaa

SEQ ID NO: 9656 - DNA, 20 bp, Pseudoramibacter alactolyticus
gtaaaaccgcataacacagc

SEQ ID NO: 9657 - DNA, 20 bp, Pseudoramibacter alactolyticus
ccgcataacacagcagaatc

SEQ ID NO: 9658 - DNA, 20 bp, Weeksella virosa
ttatcgctataagatagaca

SEQ ID NO: 9659 - DNA, 20 bp, Bacteroides distasonis
tgcgggacgtgtcccgtttt

SEQ ID NO: 9660 - DNA, 20 bp, Bacteroides thetaiotaomicron
cgtctagggtaagattggta

SEQ ID NO: 9661 - DNA, 20 bp, Staphylococcus simulans
cacatgaaaccgcatggttt

SEQ ID NO: 9662 - DNA, 20 bp, Abiotrophia defectiva
ccgtgaggaaaggtggcgca

SEQ ID NO: 9663 - DNA, 20 bp, Peptostreptococcus anaerobius
gcgcgtctgatttgatgctt

SEQ ID NO: 9664 - DNA, 30 bp, Ignavigranum ruoffiae
cgagcagcgacctcgtgagagcaagcgaat

SEQ ID NO: 9665 - DNA, 20 bp, Streptococcus acidominimus
ttgaattgattgagtcgcga

SEQ ID NO: 9666 - DNA, 20 bp, Prevotella oralis
tccgtatgcagtccgaagca

SEQ ID NO: 9667 - DNA, 30 bp, Bacteroides capillosus
gctcatgacagaggattcgtccaatggatt

SEQ ID NO: 9668 - DNA, 20 bp, Peptoniphilus indolicus
agcagacgccgaaggtaggg

SEQ ID NO: 9669 - DNA, 30 bp, Clostridium clostridiiforme
ccaagtcttgacatccccctgacgggccgg

SEQ ID NO: 9670 - DNA, 20 bp, Bacteroides distasonis
cccaaaccacgtctcagttc

SEQ ID NO: 9671 - DNA, 20 bp, Peptostreptococcus anaerobius
cttgcattaatgaaagatga

SEQ ID NO: 9672 - DNA, 30 bp, Alloiococcus otitis
gcaaccatttggagccagccgtcgaaggtg

SEQ ID NO: 9673 - DNA, 20 bp, Bacteroides capilosus
tgacagaggattcgtccaat

SEQ ID NO: 9674 - DNA, 20 bp, Clostridium cadaveris
gtcgagcgagggagcacctt

SEQ ID NO: 9675 - DNA, 20 bp, Globicatella sanguinis
ccacaacgagaacttgttct

SEQ ID NO: 9676 - DNA, 20 bp, Atopobium parvulum
taataccgaatacttcgaga

SEQ ID NO: 9677 - DNA, 20 bp, Prevotella oralis
cgcgaactgggaatcttgag

SEQ ID NO: 9678 - DNA, 20 bp, Gemella morbillorum
atgagagatatttaaaagtt

SEQ ID NO: 9679 - DNA, 20 bp, Bacteroides caccae
acgtgtggacttttgtatgt

SEQ ID NO: 9680 - DNA, 20 bp, Microbacterium hominis
tacaccagaacaccgtagaa

SEQ ID NO: 9681 - DNA, 20 bp, Bacteroides ureolyticus
gttaaatagggaaagtcttt

SEQ ID NO: 9682 - DNA, 20 bp, Bacteroides distasonis
tccgtaaccgaaaggatcgg

SEQ ID NO: 9683 - DNA, 20 bp, Streptococcus thoraltensis
accgcataaaaggagctaac

SEQ ID NO: 9684 - DNA, 20 bp, Sphingobacterium multivorum
tccatcggagagcttgctcg

SEQ ID NO: 9685 - DNA, 20 bp, Actinomyces turicensis
aacgatgatgctccaacttt

SEQ ID NO: 9686 - DNA, 20 bp, Bacillus psychrosaccharolyticus
cgaattgttgagtttactca

SEQ ID NO: 9687 - DNA, 20 bp, Dolosigranulum pigrum
cgaattcattaaaggtggct

SEQ ID NO: 9688 - DNA, 20 bp, Atopobium parvulum
ttccgcatggaagactcgag

SEQ ID NO: 9689 - DNA, 20 bp, Actinomyces radingae
gcgcctgtcgtgtaatcctc

SEQ ID NO: 9690 - DNA, 20 bp, Leptotrichia buccalis
aagctactggtccaaccgca

SEQ ID NO: 9691 - DNA, 20 bp, Bacteroides caccae
aaacccatacgccgcaaggc

SEQ ID NO: 9692 - DNA, 20 bp, Alloiococcus otitis
aagccggccgggcaaccatt

SEQ ID NO: 9693 - DNA, 20 bp, Bacteroides ureolyticus
agagattagaaagtgctagt

SEQ ID NO: 9694 - DNA, 20 bp, Dolosigranulum pigrum
cgtgctaggtaactactagc

SEQ ID NO: 9695 - DNA, 20 bp, Clostridium septicum
tttcttcggaaacaaaccta

SEQ ID NO: 9696 - DNA, 20 bp, Dolosigranulum pigrum
ggtggctttgctaccactca

SEQ ID NO: 9697 - DNA, 30 bp, Facklamia languida
acccgaagccggtggcctaacttaggaggg

SEQ ID NO: 9698 - DNA, 20 bp, Propionibacterium acnes
ggactaagtcggtacaaggt

SEQ ID NO: 9699 - DNA, 20 bp, Prevotella bivia
aggtccttcgggacatctgt

SEQ ID NO: 9700 - DNA, 20 bp, Campylobacter concisus
acaacgcgcatgcgagcctg

SEQ ID NO: 9701 - DNA, 20 bp, Streptococcus thoraltensis
taacccatgttagcttttta

SEQ ID NO: 9702 - DNA, 20 bp, Actinomyces turicensis
cgatgatgctccaactttgt

SEQ ID NO: 9703 - DNA, 20 bp, Helcococcus kunzii
gtcttttcggagacttgtat

SEQ ID NO: 9704 - DNA, 20 bp, Streptococcus bovis
acatttgaaagtaccaactg

SEQ ID NO: 9705 - DNA, 20 bp, Suttonella indologenes
aaagcactttcgttagtgaa

SEQ ID NO: 9706 - DNA, 30 bp, Moraxella atlantae
acgatctataactggtcttagaggatgatc

SEQ ID NO: 9707 - DNA, 20 bp, Prevotella bivia
catcaggttctgctgggcac

SEQ ID NO: 9708 - DNA, 20 bp, Bacteroides capillosus
gccggtacagagcgtcggtc

SEQ ID NO: 9709 - DNA, 20 bp, Moraxella atlantae
gcactaagtcatatgtgaaa

SEQ ID NO: 9710 - DNA, 20 bp, Bacteroides ureolyticus
agtaagacgcaatatcgcaa

SEQ ID NO: 9711 - DNA, 20 bp, Prevotella disiens
ctgatttgaattaaagattt

SEQ ID NO: 9712 - DNA, 20 bp, Alloiococcus otitis
cttcagagatgaagggttcc

SEQ ID NO: 9713 - DNA, 20 bp, Leuconostoc fallax
atgtaggaaatgatgttaat

SEQ ID NO: 9714 - DNA, 20 bp, Myroides odoratus
aagtcgaggggtatagagag

SEQ ID NO: 9715 - DNA, 20 bp, Abiotrophia defectiva
ttgcacttggtcaaggtgag

SEQ ID NO: 9716 - DNA, 20 bp, Bacillus marinus
cttctctaacttagcggcgg

SEQ ID NO: 9717 - DNA, 20 bp, Prevotella oris
aagcttgcttccccgggcgt

SEQ ID NO: 9718 - DNA, 20 bp, Myroides odoratus
tacgtacttattgacgctga

SEQ ID NO: 9719 - DNA, 20 bp, Myroides odoratus
tactgcttgacttgaatagt

SEQ ID NO: 9720 - DNA, 20 bp, Prevotella bivia
gcgaatagatagcttgctat

SEQ ID NO: 9721 - DNA, 20 bp, Corynebacterium coyleae
cggataggaccacttcttgg

SEQ ID NO: 9722 - DNA, 20 bp, Staphylococcus simulans
tagggaagaacaaggatgta

SEQ ID NO: 9723 - DNA, 20 bp, Myroides odoratimimus
gtatggaagtaactagaata

SEQ ID NO: 9724 - DNA, 20 bp, Actinomyces radingae
gtggtttctggagggagatg

SEQ ID NO: 9725 - DNA, 20 bp, Bacteroides distasonis
agtgcgggacgtgtcccgtt

SEQ ID NO: 9726 - DNA, 20 bp, Prevotella bivia
aaagtggggaacgtgttccc

SEQ ID NO: 9727 - DNA, 20 bp, Bacillus psychrosaccharolyticus
ttactcaacaattagcggcg

SEQ ID NO: 9728 - DNA, 20 bp, Streptococcus sobrinus
attggtaacaccggacttgc

SEQ ID NO: 9729 - DNA, 20 bp, Ignavigranum ruoffiae
tccgcgtgagtggcgaacgg

SEQ ID NO: 9730 - DNA, 20 bp, Atopobium parvulum
cctgcccctttcattgggat

SEQ ID NO: 9731 - DNA, 20 bp, Comamonas testosteroni
caggaatcctttagagatag

SEQ ID NO: 9732 - DNA, 20 bp, Anaerobiospirillum succiniciproducens
actggctttctagagtattg

SEQ ID NO: 9733 - DNA, 20 bp, Alloiococcus otitis
ccagtgcatgctggggaaat

SEQ ID NO: 9734 - DNA, 20 bp, Ignavigranum ruoffiae
tgttagagaagaaccatcct

SEQ ID NO: 9735 - DNA, 30 bp, Brevibacillus thermoruber
tgtttggagcttgcttcagacaggttagcg

SEQ ID NO: 9736 - DNA, 20 bp, Brevibacillus thermoruber
tggagcttgcttcagacagg

SEQ ID NO: 9737 - DNA, 20 bp, Ignavigranum ruoffiae
ttggggaaagatggttttgc

SEQ ID NO: 9738 - DNA, 20 bp, Bacteroides capilosus
gagaggcaatcggaattccg

SEQ ID NO: 9739 - DNA, 20 bp, Sphingobacterium multivorum
cgggatccatcggagagctt

SEQ ID NO: 9740 - DNA, 20 bp, Prevotella oralis
gtgaatactgccgccgtaag

SEQ ID NO: 9741 - DNA, 20 bp, Facklamia sourekii
cggtggcctaaccattggag

SEQ ID NO: 9742 - DNA, 20 bp, Bacteroides capilosus
gcttgacatccgactaacga

SEQ ID NO: 9743 - DNA, 20 bp, Myroides odoratus
tagtatggaagtaattagaa

SEQ ID NO: 9744 - DNA, 20 bp, Prevotella oralis
actctgtgaatactgccgcc

SEQ ID NO: 9745 - DNA, 20 bp, Campylobacter concisus
tacaacgcgcatgcgagcct

SEQ ID NO: 9746 - DNA, 20 bp, Bacteroides caccae
gaaacccatacgccgcaagg

SEQ ID NO: 9747 - DNA, 20 bp, Streptococcus thoraltensis
ctaccgtagcttgctacaat

SEQ ID NO: 9748 - DNA, 20 bp, Paenibacillus macerans
aatttattttgcagcattgt

SEQ ID NO: 9749 - DNA, 20 bp, Helcococcus kunzii
cagttgatttcttcggaatg

SEQ ID NO: 9750 - DNA, 20 bp, Bacteroides vulgatus
gtatccaacctgccgtctac

SEQ ID NO: 9751 - DNA, 30 bp, Suttonella indologenes
ttcggacctcgcgcccttagatgagcctat

SEQ ID NO: 9752 - DNA, 20 bp, Weeksella virosa
ctgttgatctagaattagtt

SEQ ID NO: 9753 - DNA, 20 bp, Moraxella atlantae
ttacttgctagcaggtgaag

SEQ ID NO: 9754 - DNA, 20 bp, Peptoniphilus indolicus
agttaagtcggattagcggc

SEQ ID NO: 9755 - DNA, 20 bp, Neisseria subflava
ttacccggtatgcttcatga

SEQ ID NO: 9756 - DNA, 20 bp, Streptococcus ratti
caggcggtcaggaaagtctg

SEQ ID NO: 9757 - DNA, 20 bp, Facklamia sourekii
ctctagcgggggataactat

SEQ ID NO: 9758 - DNA, 20 bp, Clostridium innocuum
taaagcgcccttcaaggcgt

SEQ ID NO: 9759 - DNA, 20 bp, Corynebacterium group ANF
cacccgaagccgcttgctcc

SEQ ID NO: 9760 - DNA, 20 bp, Weeksella virosa
gtaacttgccttatagaatg

SEQ ID NO: 9761 - DNA, 20 bp, Bacteroides vulgatus
tacaagatggcatcatgagt

SEQ ID NO: 9762 - DNA, 20 bp, Lactococcus raffinolactis
gagtggaaaattatgcaagt

SEQ ID NO: 9763 - DNA, 20 bp, Streptococcus thoraltensis
agcatcacttaaagatggac

SEQ ID NO: 9764 - DNA, 20 bp, Bacteroides eggerthii
attacagccttcgggccgct

SEQ ID NO: 9765 - DNA, 20 bp, Clostridium histolyticum
gaaagattaaaggagcaatc

SEQ ID NO: 9766 - DNA, 30 bp, Abiotrophia defectiva
gtcggaaacgactgctaataccgcatagga

SEQ ID NO: 9767 - DNA, 20 bp, Microbacterium hominis
catacaccagaacaccgtag

SEQ ID NO: 9768 - DNA, 20 bp, Streptococcus sobrinus
aggggaagaacgtgtgtaag

SEQ ID NO: 9769 - DNA, 20 bp, Leptotrichia buccalis
ctgatgaaaggagacgctgc

SEQ ID NO: 9770 - DNA, 20 bp, Anaerobiospirillum succiniciproducens
tttcagtggggaggaaacac

SEQ ID NO: 9771 - DNA, 20 bp, Bacteroides thetaiotaomicron
ggggcatcagtttggtttgc

SEQ ID NO: 9772 - DNA, 20 bp, Ignavigranum ruoffiae
aataccgcataggccagtga

SEQ ID NO: 9773 - DNA, 20 bp, Veillonella atypica
tcggcatcgagactggatga

SEQ ID NO: 9774 - DNA, 20 bp, Streptococcus sobrinus
ttgtaggggaagaacgtgtg

SEQ ID NO: 9775 - DNA, 20 bp, Bacillus sp
cgttccacatgcgtcacccc

SEQ ID NO: 9776 - DNA, 20 bp, Prevotella bivia
gatagttggtcgtgtgcaaa

SEQ ID NO: 9777 - DNA, 20 bp, Kingella kingae
aggttgatgctaatatcatt

SEQ ID NO: 9778 - DNA, 20 bp, Anaerobiospirillum succiniciproducens
accatgggagcggattgcac

SEQ ID NO: 9779 - DNA, 20 bp, Bacteroides vulgatus
gatatcttgagtgcagttga

SEQ ID NO: 9780 - DNA, 20 bp, Dolosigranulum pigrum
tagctaatctttcaaagcca

SEQ ID NO: 9781 - DNA, 20 bp, Clostridium glycolicum
taatacaggataacataaga

SEQ ID NO: 9782 - DNA, 20 bp, Bacteroides caccae
tatggggaaacccatacgcc

SEQ ID NO: 9783 - DNA, 20 bp, Pasteurella multocida
tagaatacttgattgacgtt

SEQ ID NO: 9784 - DNA, 20 bp, Pseudoramibacter alactolyticus
actttgctgtcaaaactccg

SEQ ID NO: 9785 - DNA, 20 bp, Streptococcus thoraltensis
ttataagcgaagaataggag

SEQ ID NO: 9786 - DNA, 20 bp, Helcococcus kunzii
taatatcgcatgatgtaaat

SEQ ID NO: 9787 - DNA, 20 bp, Myroides odoratimimus
tatacaggggaatagcccga

SEQ ID NO: 9788 - DNA, 20 bp, Anaerobiospirillum succiniciproducens
ggaaagacttcggttgctat

SEQ ID NO: 9789 - DNA, 20 bp, Moraxella atlantae
agtatatgagaggaaagtag

SEQ ID NO: 9790 - DNA, 20 bp, Bacteroides vulgatus
tgagtgcagttgaggcaggc

SEQ ID NO: 9791 - DNA, 20 bp, Myroides odoratus
tggcatcgtttatataataa

SEQ ID NO: 9792 - DNA, 20 bp, Suttonella indologenes
aggaatctaccttggggtgg

SEQ ID NO: 9793 - DNA, 20 bp, Bacillus marinus
tgcttctctaacttagcggc

SEQ ID NO: 9794 - DNA, 20 bp, Dolosigranulum pigrum
actactagcgccttgacggt

SEQ ID NO: 9795 - DNA, 30 bp, Arcanobacterium haemolyticum
agcccgtggcctaactcgtttgagggggag

SEQ ID NO: 9796 - DNA, 20 bp, Weeksella virosa
gagcggtagattatcttcgg

SEQ ID NO: 9797 - DNA, 20 bp, Weeksella virosa
gggtgagtatcgcgtatgta

SEQ ID NO: 9798 - DNA, 20 bp, Chromobacterium violaceum
tgtcagggaggaaatcccgc

SEQ ID NO: 9799 - DNA, 30 bp, Peptoniphilus indolicus
atagaggcttcccttcggggacagtattac

SEQ ID NO: 9800 - DNA, 20 bp, Alloiococcus otitis
aggaacttgcccataagagg

SEQ ID NO: 9801 - DNA, 20 bp, Dolosigranulum pigrum
attcattaaaggtggctttg

SEQ ID NO: 9802 - DNA, 20 bp, Bacillus schlegellii
gctgaaggcgaacctggcga

SEQ ID NO: 9803 - DNA, 20 bp, Weeksella virosa
aagctaggtggcatcattta

SEQ ID NO: 9804 - DNA, 20 bp, Kytococcus sedentarius
cggtgaagcgagtgcttgca

SEQ ID NO: 9805 - DNA, 20 bp, Lactococcus raffinolactis
tgcatattcgacatttgaaa

SEQ ID NO: 9806 - DNA, 20 bp, Streptococcus ratti
aggcggtcaggaaagtctgg

SEQ ID NO: 9807 - DNA, 20 bp, Abiotrophia defectiva
atgattccgtgaggaaaggt

SEQ ID NO: 9808 - DNA, 20 bp, Psychrobacter phenylpyruvicus
gaacttgattccttagtgac

SEQ ID NO: 9809 - DNA, 20 bp, Arcanobacterium haemolyticum
cttttccatgggttctgtac

SEQ ID NO: 9810 - DNA, 20 bp, Bacteroides eggerthii
gcttgcttcaatcgatggcg

SEQ ID NO: 9811 - DNA, 20 bp, Bacillus sp
agtagaaccccttcgggggt

SEQ ID NO: 9812 - DNA, 20 bp, Prevotella oralis
ccattactacggcatacccc

SEQ ID NO: 9813 - DNA, 20 bp, Bacillus marinus
gagagtcagttgaaagatgg

SEQ ID NO: 9814 - DNA, 20 bp, Bacteroides thetaiotaomicron
ttgcaaatgaattatgggga

SEQ ID NO: 9815 - DNA, 20 bp, Facklamia sourekii
tacagcgagcagcgaagtcg

SEQ ID NO: 9816 - DNA, 20 bp, Sporosarcina pasteurii
tgcgtttgctccagcactaa

SEQ ID NO: 9817 - DNA, 20 bp, Leptotrichia buccalis
gaaaggagacgctgcgggag

SEQ ID NO: 9818 - DNA, 20 bp, Anaerobiospirillum succiniciproducens
ggcggaaaggtaagtaggat

SEQ ID NO: 9819 - DNA, 20 bp, Clostridium cadaveris
gggaagctctttcgggagca

SEQ ID NO: 9820 - DNA, 20 bp, Bacillus schlegellii
agttcacacattaagcaccc

SEQ ID NO: 9821 - DNA, 20 bp, Ochrobactrum intermedium
gaccgagaggtgaaagattt

SEQ ID NO: 9822 - DNA, 20 bp, Leuconostoc fallax
tatggctagagtggcgaacg

SEQ ID NO: 9823 - DNA, 20 bp, Anaerobiospirillum succiniciproducens
ctttcagtggggaggaaaca

SEQ ID NO: 9824 - DNA, 20 bp, Staphylococcus simulans
tgtaagtaactgtgcatccc

SEQ ID NO: 9825 - DNA, 20 bp, Leuconostoc fallax
gtcgaacgctagtcgcggac

SEQ ID NO: 9826 - DNA, 20 bp, Weeksella virosa
cgggtgagtatcgcgtatgt

SEQ ID NO: 9827 - DNA, 20 bp, Alloiococcus otitis
cataagttttcccagtgcat

SEQ ID NO: 9828 - DNA, 20 bp, Bacillus marinus
agcttgcttctctaacttag

SEQ ID NO: 9829 - DNA, 20 bp, Bacillus marinus
gaagcttgcttctctaactt

SEQ ID NO: 9830 - DNA, 20 bp, Staphylococcus simulans
aacaaggatgtaagtaactg

SEQ ID NO: 9831 - DNA, 20 bp, Lactococcus raffinolactis
aggcagtgatgtcaagctaa

SEQ ID NO: 9832 - DNA, 20 bp, Actinomyces radingae
taacctgcctttttctttgg

SEQ ID NO: 9833 - DNA, 20 bp, Sphingobacterium multivorum
ttgtccaggaataaaccttt

SEQ ID NO: 9834 - DNA, 20 bp, Actinomyces radingae
ttgtggtttctggagggaga

SEQ ID NO: 9835 - DNA, 20 bp, Streptococcus ratti
atgcaagtgggacgcaaggg

SEQ ID NO: 9836 - DNA, 20 bp, Leptotrichia buccalis
aggaacttgccccgcagaca

SEQ ID NO: 9837 - DNA, 20 bp, Actinomyces meyeri
gatgatgctccagctttgtt

SEQ ID NO: 9838 - DNA, 20 bp, Prevotella bivia
gcttgctatttatgtcggcg

SEQ ID NO: 9839 - DNA, 20 bp, Leuconostoc fallax
ccgtataacaacacatttcg

SEQ ID NO: 9840 - DNA, 20 bp, Bacillus psychrosaccharolyticus
attgttgagtttactcaaca

SEQ ID NO: 9841 - DNA, 20 bp, Peptoniphilus indolicus
atacccgatgaaatcgtaat

SEQ ID NO: 9842 - DNA, 20 bp, Streptococcus sobrinus
gacttagtgccgacgctaac

SEQ ID NO: 9843 - DNA, 20 bp, Bacteroides eggerthii
ataaagtggagtatgcatac

SEQ ID NO: 9844 - DNA, 20 bp, Bacillus schlegellii
cgggggcgcccgaaggcgcg

SEQ ID NO: 9845 - DNA, 20 bp, Prevotella bivia
tgttcccttttgcaggtacc

SEQ ID NO: 9846 - DNA, 20 bp, Actinomyces meyeri
gcgtgcggagacgtgcgtgc

SEQ ID NO: 9847 - DNA, 20 bp, Facklamia languida
ataggatgcataacctagag

SEQ ID NO: 9848 - DNA, 20 bp, Prevotella bivia
cagcgaatagatagcttgct

SEQ ID NO: 9849 - DNA, 20 bp, Bacteroides vulgatus
acctgccgtctactcttgga

SEQ ID NO: 9850 - DNA, 20 bp, Lactococcus raffinolactis
gcatattcgacatttgaaag

SEQ ID NO: 9851 - DNA, 20 bp, Prevotella disiens
atgtaccattcgaataagga

SEQ ID NO: 9852 - DNA, 20 bp, Prevotella oralis
gtccgattagccagccggcg

SEQ ID NO: 9853 - DNA, 20 bp, Actinomyces radingae
tttctttgggataacgctca

SEQ ID NO: 9854 - DNA, 20 bp, Facklamia sourekii
cgcataaaccttaagctcgc

SEQ ID NO: 9855 - DNA, 20 bp, Bacteroides capillosus
atacgatctaatctttaaaa

SEQ ID NO: 9856 - DNA, 20 bp, Bacteroides eggerthii
tggaaacattacagccttcg

SEQ ID NO: 9857 - DNA, 20 bp, Leptotrichia buccalis
tctaggcggccctgtaagtc

SEQ ID NO: 9858 - DNA, 20 bp, Streptococcus ratti
ctgacttgagtgcagaaggg

SEQ ID NO: 9859 - DNA, 20 bp, Abiotrophia defectiva
gaacgaaccgcgactaggtg

SEQ ID NO: 9860 - DNA, 20 bp, Sphingobacterium multivorum
gaaagttagtgaagagtgca

SEQ ID NO: 9861 - DNA, 20 bp, Microbacterium hominis
tcagcaacgctgcggtgtaa

SEQ ID NO: 9862 - DNA, 20 bp, Bacillus schlegellii
gaagaagggccgcggaggcg

SEQ ID NO: 9863 - DNA, 20 bp, Globicatella sanguinis
aaccacaacgagaacttgtt

SEQ ID NO: 9864 - DNA, 20 bp, Prevotella bivia
ttatgtattcgtttgatctc

SEQ ID NO: 9865 - DNA, 30 bp, Bacteroides vulgatus
taagccgcaaggcatctgtgaaggtgctgc

SEQ ID NO: 9866 - DNA, 20 bp, Peptoniphilus indolicus
cggctcaccaagatagcgat

SEQ ID NO: 9867 - DNA, 20 bp, Bacillus schlegellii
tgagtgcaggagaggtgcgc

SEQ ID NO: 9868 - DNA, 30 bp, Dolosigranulum pigrum
aagctctgttgttagagaagaacacgtgct

SEQ ID NO: 9869 - DNA, 20 bp, Facklamia sourekii
tgttactgatttgacggtat

SEQ ID NO: 9870 - DNA, 20 bp, Bacteroides ureolyticus
ttagaaagtgctagtttact

SEQ ID NO: 9871 - DNA, 20 bp, Paenibacillus macerans
attttgcagcattgtggaat

SEQ ID NO: 9872 - DNA, 30 bp, Fusobacterium varium
gagggtaagctaatctcataaaactattct

SEQ ID NO: 9873 - DNA, 20 bp, Haemophilus segnis
acgaggaaggcgtgatgttt

SEQ ID NO: 9874 - DNA, 20 bp, Empedobacter brevis
cgaaaacttatctcagttcg

SEQ ID NO: 9875 - DNA, 30 bp, Moraxella atlantae
taaagcactttaagcagggaggaagagcta

SEQ ID NO: 9876 - DNA, 20 bp, Campylobacter lari
atgaagcgactagcttgcta

SEQ ID NO: 9877 - DNA, 20 bp, Corynebacterium group ANF
taggactgcagggtggtgcc

SEQ ID NO: 9878 - DNA, 20 bp, Pasteurella multocida
ttgagcaataagcttggtgc

SEQ ID NO: 9879 - DNA, 20 bp, Bacillus schlegellii
ggaggcgggcggaagccttc

SEQ ID NO: 9880 - DNA, 20 bp, Streptococcus sobrinus
ccgggacttagtgccgacgc

SEQ ID NO: 9881 - DNA, 20 bp, Leuconostoc lactis
gagcttgctcctgattgata

SEQ ID NO: 9882 - DNA, 20 bp, Sphingobacterium multivorum
agacggtgagagtggcgcac

SEQ ID NO: 9883 - DNA, 20 bp, Leptotrichia buccalis
cgcgtaaggaacttgccccg

SEQ ID NO: 9884 - DNA, 20 bp, Bacillus marinus
ttgcttctctaacttagcgg

SEQ ID NO: 9885 - DNA, 20 bp, Comamonas testosteroni
tggcaggaatcctttagaga

SEQ ID NO: 9886 - DNA, 20 bp, Aerococcus christensenii
gttcgcatgaacaaacttag

SEQ ID NO: 9887 - DNA, 30 bp, Virgibacillus proomii
gggctaataccggataatacgttttcttgc

SEQ ID NO: 9888 - DNA, 20 bp, Sporosarcina pasteurii
acagcatagccgtctttcag

SEQ ID NO: 9889 - DNA, 20 bp, Bacillus schlegellii
gatgggcctttcccgcgagg

SEQ ID NO: 9890 - DNA, 20 bp, Peptoniphilus indolicus
acgccgaaggtagggttaat

SEQ ID NO: 9891 - DNA, 20 bp, Actinomyces meyeri
agctttgttggggtggatta

SEQ ID NO: 9892 - DNA, 20 bp, Peptoniphilus indolicus
aggatttcgattcgtaaagc

SEQ ID NO: 9893 - DNA, 20 bp, Alloiococcus otitis
actgcctatcccttgacggt

SEQ ID NO: 9894 - DNA, 30 bp, Paenibacillus pabuli
gttgttttcttctcctgaagagaactggaa

SEQ ID NO: 9895 - DNA, 30 bp, Bacteroides distasonis
cgaaagtcggactaataccgcatgaagcag

SEQ ID NO: 9896 - DNA, 30 bp, Bacteroides distasonis
tagccgtttgcgaggtgctgcatggttgtc

SEQ ID NO: 9897 - DNA, 20 bp, Alloiococcus otitis
gccaaatcttcctgcttgca

SEQ ID NO: 9898 - DNA, 20 bp, Bacteroides distasonis
gttgaaactggggggcttga

SEQ ID NO: 9899 - DNA, 30 bp, Moraxella atlantae
ctactagccgttggggctcatgaagtctta

SEQ ID NO: 9900 - DNA, 20 bp, Bacillus schlegellii
ccggatagattgtcctggcg

SEQ ID NO: 9901 - DNA, 20 bp, Leuconostoc fallax
tcgcggacctgatcacttcg

SEQ ID NO: 9902 - DNA, 20 bp, Helcococcus kunzii
ttttcagtcgatttcttcgg

SEQ ID NO: 9903 - DNA, 20 bp, Helcococcus kunzii
gcgactttctagaatctaac

SEQ ID NO: 9904 - DNA, 20 bp, Prevotella oralis
ccgggcactctgtgaatact

SEQ ID NO: 9905 - DNA, 20 bp, Ochrobactrum intermedium
atacgaccgagaggtgaaag

SEQ ID NO: 9906 - DNA, 20 bp, Prevotella oralis
gccattgacttgaatagaga

SEQ ID NO: 9907 - DNA, 20 bp, Alloiococcus otitis
cacccgaagccggccgggca

SEQ ID NO: 9908 - DNA, 20 bp, Anaerobiospirillum succiniciproducens
ctgcctttctagagtattgc

SEQ ID NO: 9909 - DNA, 20 bp, Prevotella disiens
gccggtacagaatgttggtt

SEQ ID NO: 9910 - DNA, 20 bp, Streptococcus ratti
caccgtgttttcttgagtcg

SEQ ID NO: 9911 - DNA, 20 bp, Bacteroides thetaiotaomicron
atacccgatggcataattag

SEQ ID NO: 9912 - DNA, 20 bp, Streptococcus thoraltensis
gctacaattggtataaatga

SEQ ID NO: 9913 - DNA, 20 bp, Corynebacterium kutscheri
tttcttgcttgcaagagagt

SEQ ID NO: 9914 - DNA, 20 bp, Arcanobacterium haemolyticum
ccgtggcctaactcgtttga

SEQ ID NO: 9915 - DNA, 20 bp, Suttonella indologenes
acgtataggaatctaccttg

SEQ ID NO: 9916 - DNA, 20 bp, Alloiococcus otitis
agccggccgggcaaccattt

SEQ ID NO: 9917 - DNA, 20 bp, Bacteroides ureolyticus
ctggacttgacatcctaaaa

SEQ ID NO: 9918 - DNA, 20 bp, Achromobacter piechaudii
tctgaagagattcggaagtg

SEQ ID NO: 9919 - DNA, 20 bp, Streptococcus thoraltensis
gtgcaacagcatcacttaaa

SEQ ID NO: 9920 - DNA, 30 bp, Leptotrichia buccalis
agggcatctaggcggccctgtaagtctagg

SEQ ID NO: 9921 - DNA, 20 bp, Bacteroides ureolyticus
aagtgctagtttactagaat

SEQ ID NO: 9922 - DNA, 20 bp, Peptoniphilus indolicus
gagcgatgaagacataacag

SEQ ID NO: 9923 - DNA, 20 bp, Atopobium parvulum
gagaaagctccggcggagag

SEQ ID NO: 9924 - DNA, 20 bp, Moraxella atlantae
ttttgctataagatgtgcct

SEQ ID NO: 9925 - DNA, 20 bp, Helcococcus kunzii
agcgaagataatgacagtag

SEQ ID NO: 9926 - DNA, 20 bp, Virgibacillus proomii
cgcgggaagcaagcagaacc

SEQ ID NO: 9927 - DNA, 20 bp, Staphylococcus simulans
catgaaaccgcatggtttca

SEQ ID NO: 9928 - DNA, 20 bp, Ignavigranum ruoffiae
aggccagtgagtcgcctgac

SEQ ID NO: 9929 - DNA, 20 bp, Alloiococcus otitis
cactgcctatcccttgacgg

SEQ ID NO: 9930 - DNA, 20 bp, Alloiococcus otitis
cgggcaaccatttggagcca

SEQ ID NO: 9931 - DNA, 20 bp, Empedobacter brevis
tatgcaacttgccctactga

SEQ ID NO: 9932 - DNA, 20 bp, Staphylococcus schleiferi
tgattggggtgaaagtcgtt

SEQ ID NO: 9933 - DNA, 30 bp, Facklamia languida
cgcatagaatcacagatcgcatgatcaatg

SEQ ID NO: 9934 - DNA, 20 bp, Brevibacillus thermoruber
tagggcaccttctcgcatga

SEQ ID NO: 9935 - DNA, 20 bp, Brevibacillus thermoruber
aactgctcgacttgagtgca

SEQ ID NO: 9936 - DNA, 20 bp, Vagococcus fluvialis
taatttgttttcccgcatgg

SEQ ID NO: 9937 - DNA, 20 bp, Anaerobiospirillum succiniciproducens
agcagagagcttgctctttg

SEQ ID NO: 9938 - DNA, 20 bp, Bacteroides distasonis
tatgtttgaggcaggcggaa

SEQ ID NO: 9939 - DNA, 20 bp, Bacteroides capillosus
tctgaggatactgcctccgc

SEQ ID NO: 9940 - DNA, 20 bp, Anaerobiospirillum succiniciproducens
tggctttctagagtattgca

SEQ ID NO: 9941 - DNA, 20 bp, Sphingobacterium multivorum
ggagagcttgctcgaagatg

SEQ ID NO: 9942 - DNA, 20 bp, Pasteurella multocida
aaggcaggtattttaataga

SEQ ID NO: 9943 - DNA, 20 bp, Bacillus psychrosaccharolyticus
gtttactcaacaattagcgg

SEQ ID NO: 9944 - DNA, 20 bp, Prevotella oralis
ctaatttggacgaaaggtat

SEQ ID NO: 9945 - DNA, 20 bp, Bacteroides eggerthii
tatagttactatcaggtcat

SEQ ID NO: 9946 - DNA, 30 bp, Bacteroides distasonis
aaccccgattgcgaaggcagcctgccaagc

SEQ ID NO: 9947 - DNA, 20 bp, Helcococcus kunzii
tgtaaatgttaaagaatttc

SEQ ID NO: 9948 - DNA, 20 bp, Suttonella indologenes
tacgagtcaaagcgggggat

SEQ ID NO: 9949 - DNA, 20 bp, Actinomyces radingae
ggggggaaccttgatgcagc

SEQ ID NO: 9950 - DNA, 20 bp, Bacteroides capilosus
ggctcaacctgtggcctgca

SEQ ID NO: 9951 - DNA, 20 bp, Pasteurella multocida
tttggggattgagcaataag

SEQ ID NO: 9952 - DNA, 20 bp, Leuconostoc lactis
agattgaaggagcttgctcc

SEQ ID NO: 9953 - DNA, 20 bp, Streptococcus macacae
taggaaagtctggagtaaaa

SEQ ID NO: 9954 - DNA, 30 bp, Ignavigranum ruoffiae
catccgctgcatagcttagagataagtgaa

SEQ ID NO: 9955 - DNA, 20 bp, Prevotella oralis
tggacgaaaggtatattcta

SEQ ID NO: 9956 - DNA, 20 bp, Streptococcus sobrinus
ctgttgtaggggaagaacgt

SEQ ID NO: 9957 - DNA, 20 bp, Prevotella oralis
taaatgcggtccaatcctta

SEQ ID NO: 9958 - DNA, 20 bp, Weeksella virosa
gctggatagttgaaggtagc

SEQ ID NO: 9959 - DNA, 20 bp, Anaerobiospirillum succiniciproducens
catcgtaggaatctttcaga

SEQ ID NO: 9960 - DNA, 20 bp, Alloiococcus otitis
acacccgaagccggccgggc

SEQ ID NO: 9961 - DNA, 20 bp, Helcococcus kunzii
cggttaattaagtctgaatt

SEQ ID NO: 9962 - DNA, 20 bp, Dolosigranulum pigrum
ctcggtgctggagctaacgt

SEQ ID NO: 9963 - DNA, 20 bp, Veillonella atypica
ttaatcgggacgaatggttc

SEQ ID NO: 9964 - DNA, 20 bp, Weeksella virosa
tttgaaagatttatcgctat

SEQ ID NO: 9965 - DNA, 20 bp, Facklamia sourekii
cctaccctctagcgggggat

SEQ ID NO: 9966 - DNA, 20 bp, Streptococcus acidominimus
aactggtgacagtaagccaa

SEQ ID NO: 9967 - DNA, 20 bp, Suttonella indologenes
tagtgaagaaaggtttatgg

SEQ ID NO: 9968 - DNA, 20 bp, Bacteroides thetaiotaomicron
acaggatagccgtaaggcaa

SEQ ID NO: 9969 - DNA, 20 bp, Bacteroides caccae
gtggtccacgtgtggacttt

SEQ ID NO: 9970 - DNA, 30 bp, Veillonella atypica
ggcatcgagactggatgaaaggtggcctct

SEQ ID NO: 9971 - DNA, 20 bp, Prevotella bivia
caacttctagattgcagcgc

SEQ ID NO: 9972 - DNA, 20 bp, Veillonella atypica
gcgaggatttgacggtaccg

SEQ ID NO: 9973 - DNA, 30 bp, Clostridium histolyticum
tgttagaaagattaaaggagcaatccgctt

SEQ ID NO: 9974 - DNA, 20 bp, Bacillus sp
aagtagaaccccttcggggg

SEQ ID NO: 9975 - DNA, 20 bp, Brevibacillus thermoruber
gctggtacaacgggacgcaa

SEQ ID NO: 9976 - DNA, 20 bp, Bacteroides distasonis
gaatatttgctaaagattca

SEQ ID NO: 9977 - DNA, 20 bp, Actinomyces radingae
aatactggatgttctgcgct

SEQ ID NO: 9978 - DNA, 20 bp, Helcococcus kunzii
ggctgtggctcaaccacggt

SEQ ID NO: 9979 - DNA, 20 bp, Corynebacterium group ANF
agatcgtctgtccctttgtg

SEQ ID NO: 9980 - DNA, 20 bp, Empedobacter brevis
tttgaaagatttatcgcagt

SEQ ID NO: 9981 - DNA, 20 bp, Anaerococcus prevotii
tggaagcttgtaatacccga

SEQ ID NO: 9982 - DNA, 20 bp, Staphylococcus schleiferi
aaagtgggacacaatgattg

SEQ ID NO: 9983 - DNA, 20 bp, Bacteroides stercoris
gtgcagcagaggtgggcgga

SEQ ID NO: 9984 - DNA, 20 bp, Alloiococcus otitis
gaagaggcggagtggcgaac

SEQ ID NO: 9985 - DNA, 20 bp, Lactococcus raffinolactis
gaacgttgcatagagtggaa

SEQ ID NO: 9986 - DNA, 20 bp, Paenibacillus apiarius
attttcctcgcctgagggaa

SEQ ID NO: 9987 - DNA, 20 bp, Suttonella indologenes
aaggtttatggttaatacct

SEQ ID NO: 9988 - DNA, 20 bp, Corynebacterium macginleyi
ctacgattctcgtgccgtag

SEQ ID NO: 9989 - DNA, 20 bp, Clostridium cadaveris
cgcatattatggtttttctg

SEQ ID NO: 9990 - DNA, 30 bp, Helcococcus kunzii
tagttgttgggagtcaaatctcagtgacgc

SEQ ID NO: 9991 - DNA, 20 bp, Peptostreptococcus anaerobius
agtcgagcgcgtctgatttg

SEQ ID NO: 9992 - DNA, 20 bp, Prevotella oris
ttgcttccccgggcgtcgac

SEQ ID NO: 9993 - DNA, 20 bp, Vibrio vulnificus
accttcgggaggacgccacc

SEQ ID NO: 9994 - DNA, 20 bp, Bacteroides vulgatus
taaaggaataaagtcgggta

SEQ ID NO: 9995 - DNA, 20 bp, Lactococcus raffinolactis
atattcgacatttgaaagta

SEQ ID NO: 9996 - DNA, 30 bp, Alloiococcus otitis
taaagcgagcgcaggcggtccggtaagtct

SEQ ID NO: 9997 - DNA, 20 bp, Bacillus psychrosaccharolyticus
aagtcgagcgaattgttgag

SEQ ID NO: 9998 - DNA, 20 bp, Alloiococcus otitis
ctgggctatgattgacgctg

SEQ ID NO: 9999 - DNA, 20 bp, Moraxella atlantae
aacgatggaacctagcttgc

SEQ ID NO: 10000 - DNA, 20 bp, Peptoniphilus indolicus
atagcgatcagtagccggcc

SEQ ID NO: 10001 - DNA, 20 bp, Anaerobiospirillum succiniciproducens
gggaggaaacactgacggta

SEQ ID NO: 10002 - DNA, 20 bp, Clostridium cadaveris
atgcgtaggtggaattttaa

SEQ ID NO: 10003 - DNA, 30 bp, Prevotella oralis
tccgaagcagtcatctaatttggacgaaag

SEQ ID NO: 10004 - DNA, 20 bp, Facklamia sourekii
cttttgctgtcactagagga

SEQ ID NO: 10005 - DNA, 20 bp, Bacillus schlegellii
ttaagtctgctgtgaaaggc

SEQ ID NO: 10006 - DNA, 20 bp, Streptococcus thoraltensis
ataagcgaagaataggagta

SEQ ID NO: 10007 - DNA, 20 bp, Actinomyces radingae
gggaaaggggcctttgtggt

SEQ ID NO: 10008 - DNA, 20 bp, Bacteroides ureolyticus
tctaagagattagaaagtgc

SEQ ID NO: 10009 - DNA, 20 bp, Kocuria kristinae
atacccggatgcgactactg

SEQ ID NO: 10010 - DNA, 20 bp, Bacillus schlegellii
gggggtgcagcggaaactgg

SEQ ID NO: 10011 - DNA, 20 bp, Corynebacterium confusum
ggtcaatacaatgcgttgcg

SEQ ID NO: 10012 - DNA, 20 bp, Dolosigranulum pigrum
tgcagtgattgattagtggc

SEQ ID NO: 10013 - DNA, 30 bp, Paenibacillus apiarius
gggaaatgggaaagacggagcaatctgtca

SEQ ID NO: 10014 - DNA, 20 bp, Atopobium parvulum
caacccccgctcgctctcga

SEQ ID NO: 10015 - DNA, 20 bp, Moraxella atlantae
agagccagtggagaaacaca

SEQ ID NO: 10016 - DNA, 20 bp, Prevotella bivia
ttagagataatgaggtcctt

SEQ ID NO: 10017 - DNA, 20 bp, Facklamia sourekii
cgaacgaaccgacggagaaa

SEQ ID NO: 10018 - DNA, 20 bp, Streptococcus thoraltensis
aataggagtaagagtggaaa

SEQ ID NO: 10019 - DNA, 20 bp, Alloiococcus otitis
atcttcctgcttgcaggaag

SEQ ID NO: 10020 - DNA, 20 bp, Facklamia languida
caggtcttgacataggatgc

SEQ ID NO: 10021 - DNA, 20 bp, Sphingobacterium multivorum
tacgtgtaggaagctgaatg

SEQ ID NO: 10022 - DNA, 30 bp, Clostridium sordellii
cgcatggcttttatatcaaagcttttgcgg

SEQ ID NO: 10023 - DNA, 20 bp, Prevotella bivia
atggggataaagtggggaac

SEQ ID NO: 10024 - DNA, 20 bp, Dolosigranulum pigrum
gcttgcagtgattgattagt

SEQ ID NO: 10025 - DNA, 20 bp, Gemella morbillorum
tcgcatgagagatatttaaa

SEQ ID NO: 10026 - DNA, 30 bp, Abiotrophia defectiva
tggcgcaagctatcgctaagagatggaccc

SEQ ID NO: 10027 - DNA, 20 bp, Myroides odoratus
gaaggcagattactacgtac

SEQ ID NO: 10028 - DNA, 20 bp, Facklamia sourekii
acggcttttgctgtcactag

SEQ ID NO: 10029 - DNA, 20 bp, Helcococcus kunzii
gttgaacgagaatttttcag

SEQ ID NO: 10030 - DNA, 20 bp, Weeksella virosa
tgtgaataaacctattcacg

SEQ ID NO: 10031 - DNA, 20 bp, Abiotrophia defectiva
ccgcgactaggtgcttgcac

SEQ ID NO: 10032 - DNA, 20 bp, Streptococcus thoraltensis
taccgcataaaaggagctaa

SEQ ID NO: 10033 - DNA, 20 bp, Dolosigranulum pigrum
cataggtggattggtcgcat

SEQ ID NO: 10034 - DNA, 20 bp, Myroides odoratus
atcgtttatataataaagat

SEQ ID NO: 10035 - DNA, 20 bp, Streptococcus sobrinus
cttacacagtgacggtaccc

SEQ ID NO: 10036 - DNA, 20 bp, Myroides odoratus
ctacgatgattaggggtcct

SEQ ID NO: 10037 - DNA, 20 bp, Brevibacterium epidermidis
gaccacctgacgcatgttgg

SEQ ID NO: 10038 - DNA, 30 bp, Clostridium cadaveris
gaaaggagcaatccgctgtaagatgggccc

SEQ ID NO: 10039 - DNA, 20 bp, Leuconostoc fallax
tcgcatgaagtgtgtttaaa

SEQ ID NO: 10040 - DNA, 20 bp, Atopobium parvulum
agtatttcttccgtgccgca

SEQ ID NO: 10041 - DNA, 20 bp, Alloiococcus otitis
tgggctatgattgacgctga

SEQ ID NO: 10042 - DNA, 20 bp, Myroides odoratimimus
cagaaagcagctacctggca

SEQ ID NO: 10043 - DNA, 20 bp, Bacillus marinus
cattgcccggtctagagata

SEQ ID NO: 10044 - DNA, 20 bp, Helcococcus kunzii
cattaatatcgcatgatgta

SEQ ID NO: 10045 - DNA, 20 bp, Brevibacillus thermoruber
agggtgcggaaaggtggcgc

SEQ ID NO: 10046 - DNA, 20 bp, Prevotella loescheii
ggatgctcgttgtcggcccc

SEQ ID NO: 10047 - DNA, 20 bp, Alloiococcus otitis
acacggataggagtcactgc

SEQ ID NO: 10048 - DNA, 20 bp, Myroides odoratimimus
aacgatgattaggggtcctg

SEQ ID NO: 10049 - DNA, 20 bp, Streptococcus mutans
tgggacgcaaggaaacacac

SEQ ID NO: 10050 - DNA, 20 bp, Myroides odoratimimus
ttcggattaatgctccatgg

SEQ ID NO: 10051 - DNA, 20 bp, Corynebacterium kutscheri
gagatagtttttccttttta

SEQ ID NO: 10052 - DNA, 30 bp, Abiotrophia defectiva
gggtaacctacctcatagtgggggataaca

SEQ ID NO: 10053 - DNA, 20 bp, Bacteroides caccae
tatccaacctacctcatact

SEQ ID NO: 10054 - DNA, 20 bp, Streptococcus sobrinus
agtggaaagcttacacagtg

SEQ ID NO: 10055 - DNA, 20 bp, Streptococcus thoraltensis
cagcatcacttaaagatgga

SEQ ID NO: 10056 - DNA, 20 bp, Facklamia sourekii
gtttaagttgaaagacggct

SEQ ID NO: 10057 - DNA, 20 bp, Clostridium clostridiiforme
cccctgacgggccggtaacg

SEQ ID NO: 10058 - DNA, 30 bp, Vagococcus fluvialis
acaggtgctaataccgcataatttgttttc

SEQ ID NO: 10059 - DNA, 20 bp, Facklamia sourekii
tcgaacgaaccgacggagaa

SEQ ID NO: 10060 - DNA, 20 bp, Bacteroides ureolyticus
tagggaaagtcttttcggtg

SEQ ID NO: 10061 - DNA, 20 bp, Ignavigranum ruoffiae
atttcggtccgtaaagcact

SEQ ID NO: 10062 - DNA, 20 bp, Moraxella atlantae
tgaactagagtatatgagag

SEQ ID NO: 10063 - DNA, 20 bp, Staphylococcus schleiferi
gattggggtgaaagtcgtta

SEQ ID NO: 10064 - DNA, 20 bp, Streptococcus thoraltensis
gtgccggttctagagataga

SEQ ID NO: 10065 - DNA, 20 bp, Sporosarcina pasteurii
cctgcagtgacagcatagcc

SEQ ID NO: 10066 - DNA, 20 bp, Vagococcus fluvialis
gctttgattttcaccggagc

SEQ ID NO: 10067 - DNA, 20 bp, Facklamia sourekii
ttttgctgtcactagaggat

SEQ ID NO: 10068 - DNA, 20 bp, Bacteroides distasonis
ttgaacgcattcggaccgag

SEQ ID NO: 10069 - DNA, 20 bp, Prevotella oralis
gatattcattcccttcgggg

SEQ ID NO: 10070 - DNA, 20 bp, Sphingobacterium multivorum
atccatcggagagcttgctc

SEQ ID NO: 10071 - DNA, 20 bp, Moraxella atlantae
aggcagctttctggcacaat

SEQ ID NO: 10072 - DNA, 20 bp, Bacteroides eggerthii
acagccttcgggccgctgtg

SEQ ID NO: 10073 - DNA, 20 bp, Bacteroides ureolyticus
tcatactcctatttgacata

SEQ ID NO: 10074 - DNA, 20 bp, Sphingobacterium multivorum
agcttgctcgaagatggtga

SEQ ID NO: 10075 - DNA, 20 bp, Bacillus sp
ggataatacgttttcttgca

SEQ ID NO: 10076 - DNA, 20 bp, Ignavigranum ruoffiae
agcttgcttcttccgcgtga

SEQ ID NO: 10077 - DNA, 20 bp, Moraxella atlantae
aagcagggaggaagagctag

SEQ ID NO: 10078 - DNA, 20 bp, Moraxella atlantae
gagcttttgctataagatgt

SEQ ID NO: 10079 - DNA, 20 bp, Arcanobacterium haemolyticum
acatacaccgggattatgca

SEQ ID NO: 10080 - DNA, 20 bp, Moraxella atlantae
ctagtggagaaacacactgg

SEQ ID NO: 10081 - DNA, 30 bp, Brevibacillus thermoruber
gcccgcaagaccgggataacgtagggaaac

SEQ ID NO: 10082 - DNA, 20 bp, Moraxella atlantae
tgctaggggaaatagtggcg

SEQ ID NO: 10083 - DNA, 20 bp, Bordetella avium
aaggcgcaggctaatacctt

SEQ ID NO: 10084 - DNA, 20 bp, Brevibacillus thermoruber
aagaccgggataacgtaggg

SEQ ID NO: 10085 - DNA, 20 bp, Paenibacillus peoriae
ttttctgcatggaagaagga

SEQ ID NO: 10086 - DNA, 20 bp, Campylobacter coli
aggagaacctgcgttggatc

SEQ ID NO: 10087 - DNA, 20 bp, Prevotella oralis
attactacggcataccccgt

SEQ ID NO: 10088 - DNA, 20 bp, Ignavigranum ruoffiae
tgcttcttccgcgtgagtgg

SEQ ID NO: 10089 - DNA, 30 bp, Alloiococcus otitis
ctgggctatgattgacgctgaggctcgaaa

SEQ ID NO: 10090 - DNA, 20 bp, Actinomyces radingae
tgggtagtggtgagtgtagc

SEQ ID NO: 10091 - DNA, 20 bp, Prevotella bivia
agattacgaataaagattta

SEQ ID NO: 10092 - DNA, 20 bp, Helcococcus kunzii
agtagctaagaagcaagccc

SEQ ID NO: 10093 - DNA, 20 bp, Leuconostoc fallax
atggctttggaaactggcga

SEQ ID NO: 10094 - DNA, 20 bp, Prevotella oris
caatccttaaatccggtccc

SEQ ID NO: 10095 - DNA, 20 bp, Prevotella disiens
cattgatgacatctgatttg

SEQ ID NO: 10096 - DNA, 20 bp, Alloiococcus otitis
agaggcggagtggcgaacgg

SEQ ID NO: 10097 - DNA, 20 bp, Bacteroides ovatus
cgtacagctcgtgccgtagg

SEQ ID NO: 10098 - DNA, 20 bp, Prevotella oralis
acggcccaccggggcatcga

SEQ ID NO: 10099 - DNA, 20 bp, Corynebacterium coyleae
accgcccgtacacgtcatga

SEQ ID NO: 10100 - DNA, 20 bp, Dolosigranulum pigrum
tatcactgcttgcagtgatt

SEQ ID NO: 10101 - DNA, 20 bp, Dolosigranulum pigrum
ctgtttagtctaatgtgaaa

SEQ ID NO: 10102 - DNA, 20 bp, Bacteroides ureolyticus
ctatttaacataagttaaat

SEQ ID NO: 10103 - DNA, 20 bp, Bacillus schlegellii
cctggcgactggggtgaagc

SEQ ID NO: 10104 - DNA, 20 bp, Bacteroides distasonis
agggaagccacctggcgaca

SEQ ID NO: 10105 - DNA, 20 bp, Corynebacterium glucuronolyticum
gatacaatgcgttgcgacac

SEQ ID NO: 10106 - DNA, 20 bp, Streptococcus acidominimus
acaacgagcagcgaactggt

SEQ ID NO: 10107 - DNA, 20 bp, Actinomyces radingae
atgcgccctgagcgcctaga

SEQ ID NO: 10108 - DNA, 20 bp, Bacillus lentus
tctccagggcggtcaggaga

SEQ ID NO: 10109 - DNA, 20 bp, Prevotella bivia
tttgatctcatgagattacg

SEQ ID NO: 10110 - DNA, 20 bp, Corynebacterium kutscheri
gtttttcctttttaggtctg

SEQ ID NO: 10111 - DNA, 20 bp, Brevibacillus thermoruber
cgggtaagtctgatgtcaaa

SEQ ID NO: 10112 - DNA, 30 bp, Facklamia languida
tgaagtccttcgggacatccatacaggtgg

SEQ ID NO: 10113 - DNA, 20 bp, Bacteroides distasonis
gggaggccacctggcgacag

SEQ ID NO: 10114 - DNA, 20 bp, Streptococcus ratti
tcaaccatagtgtgctctgg

SEQ ID NO: 10115 - DNA, 20 bp, Sphingobacterium multivorum
atccgtcggagagcttgctc

SEQ ID NO: 10116 - DNA, 20 bp, Clostridium cadaveris
ctttcgggagcaggaacaca

SEQ ID NO: 10117 - DNA, 20 bp, Paenibacillus alvei
agttgatgaagtgcttgcac

SEQ ID NO: 10118 - DNA, 20 bp, Bacteroides distasonis
gaacgcattcggaccgaggt

SEQ ID NO: 10119 - DNA, 20 bp, Helcococcus kunzii
ttaacttgagtagatgaggg

SEQ ID NO: 10120 - DNA, 20 bp, Bacteroides vulgatus
ggtgaaagccgtaagccgca

SEQ ID NO: 10121 - DNA, 20 bp, Prevotella loescheii
gggcgcttgagtgcgctgaa

SEQ ID NO: 10122 - DNA, 30 bp, Staphylococcus muscae
aacagacgaggtgcttgcacctctgacgtt

SEQ ID NO: 10123 - DNA, 20 bp, Globicatella sanguinis
cgagaacttgttctggttaa

SEQ ID NO: 10124 - DNA, 20 bp, Psychrobacter phenylpyruvicus
ttgattccttagtgacgcag

SEQ ID NO: 10125 - DNA, 20 bp, Campylobacter concisus
ggatacgacatgtcaccgca

SEQ ID NO: 10126 - DNA, 20 bp, Brevibacillus thermoruber
caccttctcgcatgagaggg

SEQ ID NO: 10127 - DNA, 20 bp, Bacteroides vulgatus
cagcctgctaagctgcaact

SEQ ID NO: 10128 - DNA, 20 bp, Anaerococcus prevotii
ttgtaatacccgaagcctgc

SEQ ID NO: 10129 - DNA, 30 bp, Clostridium histolyticum
tatctttttaatgcatgttagaaagattaa

SEQ ID NO: 10130 - DNA, 20 bp, Prevotella bivia
gagattacgaataaagattt

SEQ ID NO: 10131 - DNA, 20 bp, Leuconostoc fallax
acctgatcacttcggtgaga

SEQ ID NO: 10132 - DNA, 20 bp, Alloiococcus otitis
gcataagttttcccagtgca

SEQ ID NO: 10133 - DNA, 20 bp, Moraxella atlantae
gaggcgagagcttttgctat

SEQ ID NO: 10134 - DNA, 20 bp, Anaerobiospirillum succiniciproducens
ttcgggggaaagacttcggt

SEQ ID NO: 10135 - DNA, 20 bp, Streptococcus sobrinus
tgtgtaagagtggaaagctt

SEQ ID NO: 10136 - DNA, 20 bp, Streptococcus thoraltensis
agcgaagaataggagtaaga

SEQ ID NO: 10137 - DNA, 30 bp, Brevibacillus reuszeri
cgggacgctagcccgcgagggtatgccaat

SEQ ID NO: 10138 - DNA, 20 bp, Atopobium parvulum
aggccgggcacccatacgag

SEQ ID NO: 10139 - DNA, 20 bp, Prevotella intermedia
ccggcggctgctggcacgta

SEQ ID NO: 10140 - DNA, 20 bp, Fusobacterium varium
ttcgggtgaaggtggcggac

SEQ ID NO: 10141 - DNA, 20 bp, Alloiococcus otitis
ctgcctatcccttgacggta

SEQ ID NO: 10142 - DNA, 20 bp, Alloiococcus otitis
tgggaaaataaaaggtggct

SEQ ID NO: 10143 - DNA, 20 bp, Bacteroides distasonis
ttgccactagttactaacag

SEQ ID NO: 10144 - DNA, 20 bp, Prevotella bivia
accttatgtattcgtttgat

SEQ ID NO: 10145 - DNA, 20 bp, Abiotrophia defectiva
agctatcgctaagagatgga

SEQ ID NO: 10146 - DNA, 20 bp, Dolosigranulum pigrum
gggggctttccggccctcgg

SEQ ID NO: 10147 - DNA, 20 bp, Bacteroides uniformis
caggagcgccctagggtaac

SEQ ID NO: 10148 - DNA, 20 bp, Leuconostoc fallax
aatgtaggaaatgatgttaa

SEQ ID NO: 10149 - DNA, 20 bp, Bacteroides vulgatus
catgattaaaggtattccgg

SEQ ID NO: 10150 - DNA, 20 bp, Clostridium cadaveris
tgatttttctgcatgggaaa

SEQ ID NO: 10151 - DNA, 20 bp, Prevotella loescheii
gcctactgtagcgctactga

SEQ ID NO: 10152 - DNA, 20 bp, Prevotella bivia
ggggataaagtggggaacgt

SEQ ID NO: 10153 - DNA, 20 bp, Ignavigranum ruoffiae
ggtggtggcttaagtctgat

SEQ ID NO: 10154 - DNA, 20 bp, Bacteroides thetaiotaomicron
tagaccgcatggtcttatta

SEQ ID NO: 10155 - DNA, 20 bp, Peptoniphilus indolicus
gaaatcgtaatgacacatgt

SEQ ID NO: 10156 - DNA, 30 bp, Prevotella bivia
ccatcaggttctgctgggcactctggagat

SEQ ID NO: 10157 - DNA, 30 bp, Ignavigranum ruoffiae
ttcttccgcgtgagtggcgaacgggtgagt

SEQ ID NO: 10158 - DNA, 20 bp, Leuconostoc fallax
tagtcgcggacctgatcact

SEQ ID NO: 10159 - DNA, 20 bp, Bacteroides vulgatus
gtgaaagccgtaagccgcaa

SEQ ID NO: 10160 - DNA, 20 bp, Lactococcus raffinolactis
gggctatccagccctaagtg

SEQ ID NO: 10161 - DNA, 20 bp, Bacillus marinus
taataccggataaccctgac

SEQ ID NO: 10162 - DNA, 20 bp, Leptotrichia buccalis
gctgcgggagagccttgcgt

SEQ ID NO: 10163 - DNA, 20 bp, Streptococcus mutans
ggaaacacactgtgcttgca

SEQ ID NO: 10164 - DNA, 20 bp, Helcococcus kunzii
ttaatatcgcatgatgtaaa

SEQ ID NO: 10165 - DNA, 20 bp, Bacteroides vulgatus
ctcttggacagccttctgaa

SEQ ID NO: 10166 - DNA, 20 bp, Actinomyces radingae
gtggttgtgtggtgagagtg

SEQ ID NO: 10167 - DNA, 20 bp, Helcococcus kunzii
gttaacttgagtagatgagg

SEQ ID NO: 10168 - DNA, 20 bp, Prevotella oralis
tgttttcaacttttgatggc

SEQ ID NO: 10169 - DNA, 20 bp, Helcococcus kunzii
gtcgatttcttcggaatgaa

SEQ ID NO: 10170 - DNA, 20 bp, Facklamia languida
tcacttaaggatggctccgc

SEQ ID NO: 10171 - DNA, 20 bp, Abiotrophia defectiva
ccgacgaccgctctagagat

SEQ ID NO: 10172 - DNA, 20 bp, Suttonella indologenes
agcttatcagggcggttacc

SEQ ID NO: 10173 - DNA, 20 bp, Clostridium cadaveris
gagcgagggagcaccttcgg

SEQ ID NO: 10174 - DNA, 20 bp, Streptococcus ratti
tctgacttgagtgcagaagg

SEQ ID NO: 10175 - DNA, 20 bp, Abiotrophia defectiva
actaggtgcttgcacttggt

SEQ ID NO: 10176 - DNA, 20 bp, Weeksella virosa
tatcgctataagatagacat

SEQ ID NO: 10177 - DNA, 20 bp, Peptoniphilus indolicus
tctaaacttgagtagtgaag

SEQ ID NO: 10178 - DNA, 20 bp, Prevotella oralis
agcagtcatctaatttggac

SEQ ID NO: 10179 - DNA, 20 bp, Bacillus schlegellii
gtgccggagttcacacatta

SEQ ID NO: 10180 - DNA, 20 bp, Peptoniphilus indolicus
ctcaccaagatagcgatcag

SEQ ID NO: 10181 - DNA, 20 bp, Alloiococcus otitis
tcgaacgccaaatcttcctg

SEQ ID NO: 10182 - DNA, 20 bp, Empedobacter brevis
tgcgaatctcgaaaacttat

SEQ ID NO: 10183 - DNA, 20 bp, Brevibacillus thermoruber
gcaccttctcgcatgagagg

SEQ ID NO: 10184 - DNA, 20 bp, Actinomyces turicensis
gaacgatgatgctccaactt

SEQ ID NO: 10185 - DNA, 20 bp, Prevotella bivia
gggataacccagcgaaagtt

SEQ ID NO: 10186 - DNA, 20 bp, Lactococcus raffinolactis
tagagaagaacgttgcatag

SEQ ID NO: 10187 - DNA, 20 bp, Corynebacterium macginleyi
ggtttttctacgattctcgt

SEQ ID NO: 10188 - DNA, 20 bp, Bacteroides eggerthii
gccttgagtgcagcataggt

SEQ ID NO: 10189 - DNA, 20 bp, Facklamia languida
ctgtcacttaaggatggctc

SEQ ID NO: 10190 - DNA, 20 bp, Abiotrophia defectiva
gcacttggtcaaggtgagtg

SEQ ID NO: 10191 - DNA, 20 bp, Prevotella oralis
ggcatcatggaggttgtttt

SEQ ID NO: 10192 - DNA, 20 bp, Alloiococcus otitis
acggataggagtcactgcct

SEQ ID NO: 10193 - DNA, 20 bp, Bacteroides eggerthii
ttcaatcgatggcgaccggc

SEQ ID NO: 10194 - DNA, 20 bp, Peptoniphilus indolicus
accctcgtaagcatttgaaa

SEQ ID NO: 10195 - DNA, 30 bp, Alloiococcus otitis
agcgagcgcaggcggtccggtaagtctgat

SEQ ID NO: 10196 - DNA, 20 bp, Myroides odoratus
ggtttatatgaatggcatcg

SEQ ID NO: 10197 - DNA, 20 bp, Paenibacillus amylolyticus
tcgagcggagttgatgaggt

SEQ ID NO: 10198 - DNA, 20 bp, Actinomyces turicensis
cagagtgttgcgatatcgta

SEQ ID NO: 10199 - DNA, 20 bp, Gemella morbillorum
tctcgcatgagagatattta

SEQ ID NO: 10200 - DNA, 20 bp, Corynebacterium group ANF
ggggttgacatgcactagat

SEQ ID NO: 10201 - DNA, 20 bp, Streptococcus sobrinus
aggtaaccatttatggggcc

SEQ ID NO: 10202 - DNA, 20 bp, Facklamia sourekii
gagtttgagttgaaagacgg

SEQ ID NO: 10203 - DNA, 20 bp, Leuconostoc fallax
ggggcttcggcctcacttag

SEQ ID NO: 10204 - DNA, 20 bp, Bacteroides eggerthii
aaacattacagccttcgggc

SEQ ID NO: 10205 - DNA, 20 bp, Anaerobiospirillum succiniciproducens
taaactggctttctagagta

SEQ ID NO: 10206 - DNA, 20 bp, Psychrobacter phenylpyruvicus
taacttttagagggcgctca

SEQ ID NO: 10207 - DNA, 20 bp, Streptococcus thoraltensis
tgacatcccggtgccggttc

SEQ ID NO: 10208 - DNA, 20 bp, Moraxella atlantae
gtgcactaagtcatatgtga

SEQ ID NO: 10209 - DNA, 20 bp, Bacteroides distasonis
gtggacaaagggaggccacc

SEQ ID NO: 10210 - DNA, 30 bp, Myroides odoratus
taatgctccatggtttatatgaatggcatc

SEQ ID NO: 10211 - DNA, 20 bp, Kocuria kristinae
cttcccttttgggctggtgt

SEQ ID NO: 10212 - DNA, 20 bp, Arcanobacterium haemolyticum
tctaatactagatattctgc

SEQ ID NO: 10213 - DNA, 20 bp, Brevibacillus thermoruber
gcatgagagggtgcggaaag

SEQ ID NO: 10214 - DNA, 20 bp, Streptococcus thoraltensis
ctgttataagcgaagaatag

SEQ ID NO: 10215 - DNA, 20 bp, Leuconostoc fallax
ataccgtataacaacgcatt

SEQ ID NO: 10216 - DNA, 20 bp, Prevotella oris
cttccccgggcgtcgaccgg

SEQ ID NO: 10217 - DNA, 20 bp, Myroides odoratimimus
tagtatggaagtaactagaa

SEQ ID NO: 10218 - DNA, 30 bp, Methylobacterium mesophilicum
ttcccagtccacttcggtggcgcgcacaca

SEQ ID NO: 10219 - DNA, 20 bp, Prevotella oralis
ttcaacttttgatggcgacc

SEQ ID NO: 10220 - DNA, 20 bp, Alloiococcus otitis
ctaccaaggccatgatgcgt

SEQ ID NO: 10221 - DNA, 20 bp, Facklamia sourekii
aacagtcagtagagtaactg

SEQ ID NO: 10222 - DNA, 20 bp, Prevotella bivia
agtggggaacgtgttccctt

SEQ ID NO: 10223 - DNA, 20 bp, Helcococcus kunzii
atgatacattaatatcgcat

SEQ ID NO: 10224 - DNA, 20 bp, Alloiococcus otitis
ctgctaccttcagagatgaa

SEQ ID NO: 10225 - DNA, 20 bp, Aerococcus christensenii
ttgttcgcatgaacaaactt

SEQ ID NO: 10226 - DNA, 20 bp, Bacteroides ureolyticus
ctaaaaacatctaagagatt

SEQ ID NO: 10227 - DNA, 20 bp, Clostridium innocuum
aaagcgcccttcaaggcgtg

SEQ ID NO: 10228 - DNA, 20 bp, Bacteroides distasonis
ttctatggatcgtaaacctc

SEQ ID NO: 10229 - DNA, 20 bp, Bacteroides ureolyticus
ctaactgacgctgaggcgtg

SEQ ID NO: 10230 - DNA, 20 bp, Actinomyces radingae
ataacgctcagaaatgggtg

SEQ ID NO: 10231 - DNA, 20 bp, Streptococcus thoraltensis
gttataagcgaagaatagga

SEQ ID NO: 10232 - DNA, 20 bp, Prevotella oralis
attcattcccttcggggcat

SEQ ID NO: 10233 - DNA, 20 bp, Leptotrichia buccalis
gcaagtctttggcgaagctg

SEQ ID NO: 10234 - DNA, 20 bp, Actinomyces turicensis
ttgacatgcaccctgacgct

SEQ ID NO: 10235 - DNA, 20 bp, Budvicia aquatica
gcatacaaagtgaagcgagc

SEQ ID NO: 10236 - DNA, 20 bp, Atopobium parvulum
ggtgtgggggagtatttctt

SEQ ID NO: 10237 - DNA, 20 bp, Moraxella atlantae
tcatgaagccttagtggcgc

SEQ ID NO: 10238 - DNA, 20 bp, Actinomyces radingae
gaacgggatctgcgtggcct

SEQ ID NO: 10239 - DNA, 20 bp, Prevotella disiens
ttggttgcatgtaaatgtaa

SEQ ID NO: 10240 - DNA, 20 bp, Helcococcus kunzii
gacagtagctaagaagcaag

SEQ ID NO: 10241 - DNA, 20 bp, Leptotrichia buccalis
ggaacttgccccgcagacag

SEQ ID NO: 10242 - DNA, 20 bp, Cardiobacterium hominis
ctcgcggcaagagatgagcc

SEQ ID NO: 10243 - DNA, 20 bp, Actinomyces radingae
gccctgagcgcctagagata

SEQ ID NO: 10244 - DNA, 20 bp, Bacteroides caccae
caaggagcgtctagggtaaa

SEQ ID NO: 10245 - DNA, 20 bp, Actinomyces radingae
tgtgcaagccgctatttggg

SEQ ID NO: 10246 - DNA, 30 bp, Moraxella atlantae
ggcagctttctggcacaatactgacactca

SEQ ID NO: 10247 - DNA, 20 bp, Peptoniphilus indolicus
cgatcaaagtgaattagcgg

SEQ ID NO: 10248 - DNA, 20 bp, Bacteroides vulgatus
agatggcatcatgagtccgc

SEQ ID NO: 10249 - DNA, 20 bp, Capnocytophaga sp.
tagacgagcgcaacccctgc

SEQ ID NO: 10250 - DNA, 20 bp, Finegoldia magna
tgaacgaagaaggtattcgt

SEQ ID NO: 10251 - DNA, 20 bp, Streptococcus thoraltensis
aggagctaacccatgttagc

SEQ ID NO: 10252 - DNA, 20 bp, Corynebacterium group ANF
ttctagtggttggggatgag

SEQ ID NO: 10253 - DNA, 20 bp, Alloiococcus otitis
ctgcttgcaggaagaggcgg

SEQ ID NO: 10254 - DNA, 20 bp, Facklamia sourekii
tgagttgaaagacggctttt

SEQ ID NO: 10255 - DNA, 20 bp, Anaerobiospirillum succiniciproducens
aaacactgacgttacccaca

SEQ ID NO: 10256 - DNA, 20 bp, Anaerobiospirillum succiniciproducens
cgggaacctacagacaggtg

SEQ ID NO: 10257 - DNA, 20 bp, Arcanobacterium haemolyticum
caccgggattatgcagagat

SEQ ID NO: 10258 - DNA, 20 bp, Clostridium cadaveris
atgagcactctagctagact

SEQ ID NO: 10259 - DNA, 20 bp, Bacteroides eggerthii
cctttgtatgtaccgtatga

SEQ ID NO: 10260 - DNA, 20 bp, Bacteroides distasonis
gggacgtgtcccgttttgta

SEQ ID NO: 10261 - DNA, 20 bp, Atopobium parvulum
gccacgggaaaccgtggata

SEQ ID NO: 10262 - DNA, 20 bp, Prevotella bivia
cgtgttcccttttgcaggta

SEQ ID NO: 10263 - DNA, 20 bp, Bacteroides thetaiotaomicron
ggcatcagtttggtttgctt

SEQ ID NO: 10264 - DNA, 20 bp, Weeksella virosa
tggatagttgaaggtagcat

SEQ ID NO: 10265 - DNA, 20 bp, Moraxella atlantae
agatgtgcctaaattagatt

SEQ ID NO: 10266 - DNA, 20 bp, Helcococcus kunzii
gagatacgaaggcgtgggta

SEQ ID NO: 10267 - DNA, 20 bp, Corynebacterium group ANF
gtagtggatcgagcggcgga

SEQ ID NO: 10268 - DNA, 20 bp, Actinomyces meyeri
cagctttgttggggtggatt

SEQ ID NO: 10269 - DNA, 20 bp, Facklamia sourekii
tactgatttgacggtatcta

SEQ ID NO: 10270 - DNA, 20 bp, Sporosarcina pasteurii
cagtgacagcatagccgtct

SEQ ID NO: 10271 - DNA, 20 bp, Prevotella oralis
agtcgcggggcatcatggag

SEQ ID NO: 10272 - DNA, 20 bp, Prevotella bivia
taactaagggataacccagc

SEQ ID NO: 10273 - DNA, 20 bp, Moraxella atlantae
ggaggcgagagcttttgcta

SEQ ID NO: 10274 - DNA, 20 bp, Actinomyces radingae
ctagagataggtgtgcattt

SEQ ID NO: 10275 - DNA, 20 bp, Bacteroides eggerthii
tcctttgtatgtaccgtatg

SEQ ID NO: 10276 - DNA, 20 bp, Anaerococcus prevotii
tcttgagaagagtagaggta

SEQ ID NO: 10277 - DNA, 20 bp, Corynebacterium group ANF
tggtgtcgaaggtgggatcg

SEQ ID NO: 10278 - DNA, 20 bp, Bacteroides distasonis
caaagggaagccacctggcg

SEQ ID NO: 10279 - DNA, 20 bp, Atopobium parvulum
gttaggccgggcacccatac

SEQ ID NO: 10280 - DNA, 20 bp, Bacillus schlegellii
acccctgttgtcggggaaga

SEQ ID NO: 10281 - DNA, 20 bp, Lactococcus garvieae
agtcggtacaaggtagccgt

SEQ ID NO: 10282 - DNA, 20 bp, Anaerobiospirillum succiniciproducens
ctatcagatgagcccaagtg

SEQ ID NO: 10283 - DNA, 20 bp, Actinomyces turicensis
atgcaccctgacgctgcaga

SEQ ID NO: 10284 - DNA, 20 bp, Bacteroides distasonis
aagtgcgggacgtgtcccgt

SEQ ID NO: 10285 - DNA, 20 bp, Helcococcus kunzii
agctaaccgtcaaggaggca

SEQ ID NO: 10286 - DNA, 20 bp, Weeksella virosa
gccttatagaatgggatagc

SEQ ID NO: 10287 - DNA, 20 bp, Globicatella sanguinis
aacgagaacttgttctggtt

SEQ ID NO: 10288 - DNA, 20 bp, Myroides odoratus
gggaagaaatgtaattacgt

SEQ ID NO: 10289 - DNA, 20 bp, Dolosigranulum pigrum
tggaaactgacagacttgaa

SEQ ID NO: 10290 - DNA, 20 bp, Weeksella virosa
aaagctaggtggcatcattt

SEQ ID NO: 10291 - DNA, 20 bp, Leuconostoc fallax
atgttaatgtgacggtacca

SEQ ID NO: 10292 - DNA, 20 bp, Staphylococcus sciuri
ggcagcgaatccgcgaggcc

SEQ ID NO: 10293 - DNA, 30 bp, Sphingobacterium multivorum
tctaaaagccattcacagttcggattgggg

SEQ ID NO: 10294 - DNA, 20 bp, Myroides odoratus
agagcttgctttctagagac

SEQ ID NO: 10295 - DNA, 20 bp, Suttonella indologenes
ctagcttatcagggcggtta

SEQ ID NO: 10296 - DNA, 20 bp, Prevotella bivia
gaattgcagatgaacgattt

SEQ ID NO: 10297 - DNA, 20 bp, Facklamia languida
aagtcaatgttagtggcgca

SEQ ID NO: 10298 - DNA, 20 bp, Pasteurella multocida
taatagaatacttgattgac

SEQ ID NO: 10299 - DNA, 20 bp, Prevotella oralis
ctgtgaatactgccgccgta

SEQ ID NO: 10300 - DNA, 30 bp, Peptoniphilus indolicus
ccgcgtgagcgaagaaggatttcgattcgt

SEQ ID NO: 10301 - DNA, 20 bp, Suttonella indologenes
acattagctaaagaagaagc

SEQ ID NO: 10302 - DNA, 20 bp, Abiotrophia defectiva
cgcaagctatcgctaagaga

SEQ ID NO: 10303 - DNA, 20 bp, Leuconostoc fallax
ctagtcgcggacctgatcac

SEQ ID NO: 10304 - DNA, 20 bp, Corynebacterium confusum
ggcttcagcttgctggagta

SEQ ID NO: 10305 - DNA, 20 bp, Streptococcus ratti
ggctcaaccatagtgtgctc

SEQ ID NO: 10306 - DNA, 20 bp, Suttonella indologenes
taaagcactttcgttagtga

SEQ ID NO: 10307 - DNA, 20 bp, Helcococcus kunzii
aatttttcagtcgatttctt

SEQ ID NO: 10308 - DNA, 20 bp, Bacteroides eggerthii
gaagcttgcttcaatcgatg

SEQ ID NO: 10309 - DNA, 20 bp, Bordetella avium
aaaaggcgcaggctaatacc

SEQ ID NO: 10310 - DNA, 20 bp, Pseudoramibacter alactolyticus
gaatcgcatgactttgctgt

SEQ ID NO: 10311 - DNA, 20 bp, Moraxella atlantae
gttggggctcatgaagcctt

SEQ ID NO: 10312 - DNA, 20 bp, Prevotella disiens
atctgatttgaattaaagat

SEQ ID NO: 10313 - DNA, 20 bp, Prevotella oralis
ccaccggggcatcgatcggt

SEQ ID NO: 10314 - DNA, 20 bp, Bacteroides distasonis
aacaccttttctaggcaata

SEQ ID NO: 10315 - DNA, 30 bp, Clostridium cadaveris
ggtgtgaactagcggcggacgggtgagtaa

SEQ ID NO: 10316 - DNA, 30 bp, Chromobacterium violaceum
acccggcggggatgacagtacctgaagaat

SEQ ID NO: 10317 - DNA, 20 bp, Facklamia sourekii
cttaagctcgcatgagttta

SEQ ID NO: 10318 - DNA, 20 bp, Myroides odoratus
ggcagattactacgtactta

SEQ ID NO: 10319 - DNA, 20 bp, Leuconostoc fallax
tgtaggaaatgatgttaatg

SEQ ID NO: 10320 - DNA, 20 bp, Myroides odoratus
gctccatggtttatatgaat

SEQ ID NO: 10321 - DNA, 20 bp, Anaerobiospirillum succiniciproducens
tcgggggaaagacttcggtt

SEQ ID NO: 10322 - DNA, 20 bp, Weeksella virosa
acaggagctacctagggtaa

SEQ ID NO: 10323 - DNA, 20 bp, Bacillus schlegellii
cgctgaaggcgaacctggcg

SEQ ID NO: 10324 - DNA, 30 bp, Moellerella wisconsensis
aaggagcaaagcaggggaccttcgggcctt

SEQ ID NO: 10325 - DNA, 30 bp, Dolosigranulum pigrum
ggcgtaaagggagcgcaggcggtctgttta

SEQ ID NO: 10326 - DNA, 20 bp, Moraxella atlantae
ttggggctcatgaagtctta

SEQ ID NO: 10327 - DNA, 20 bp, Corynebacterium kutscheri
ttgacatgtacaggatcggg

SEQ ID NO: 10328 - DNA, 20 bp, Moraxella atlantae
gtcgaacgatggaacctagc

SEQ ID NO: 10329 - DNA, 20 bp, Campylobacter concisus
tggtcggtacaacgcgcatg

SEQ ID NO: 10330 - DNA, 20 bp, Facklamia sourekii
tgctgtcactagaggatggt

SEQ ID NO: 10331 - DNA, 20 bp, Bacteroides vulgatus
gatgaattacggtgaaagcc

SEQ ID NO: 10332 - DNA, 20 bp, Prevotella disiens
tggttgcatgtaaatgtaat

SEQ ID NO: 10333 - DNA, 20 bp, Veillonella atypica
ttgtgcgaatagtgcgagga

SEQ ID NO: 10334 - DNA, 20 bp, Vagococcus fluvialis
tgttttcccgcatgggagaa

SEQ ID NO: 10335 - DNA, 20 bp, Corynebacterium group ANF
tctagtggttggggatgagc

SEQ ID NO: 10336 - DNA, 20 bp, Leptotrichia buccalis
tgagagcgggcagtgccttc

SEQ ID NO: 10337 - DNA, 20 bp, Bacteroides vulgatus
aaggcagcctgctaagctgc

SEQ ID NO: 10338 - DNA, 20 bp, Dolosigranulum pigrum
cagtgattgattagtggcga

SEQ ID NO: 10339 - DNA, 20 bp, Bacteroides eggerthii
gtttttccgcatggtttcac

SEQ ID NO: 10340 - DNA, 20 bp, Bacteroides ureolyticus
tctgccctacacagaggaac

SEQ ID NO: 10341 - DNA, 30 bp, Bacteroides ureolyticus
cctacacagaggaacaacagttggaaacgg

SEQ ID NO: 10342 - DNA, 20 bp, Campylobacter lari
ctagcttgctagttgtggat

SEQ ID NO: 10343 - DNA, 20 bp, Staphylococcus lutrae
tgtgtaagtcactatgcaca

SEQ ID NO: 10344 - DNA, 30 bp, Bacteroides thetaiotaomicron
attaatacccgatggcataattagaccgca

SEQ ID NO: 10345 - DNA, 20 bp, Bacteroides eggerthii
gggaataaagtggagtatgc

SEQ ID NO: 10346 - DNA, 20 bp, Ignavigranum ruoffiae
ggccagtgagtcgcctgact

SEQ ID NO: 10347 - DNA, 20 bp, Bacteroides vulgatus
ggaagattaatacaagatgg

SEQ ID NO: 10348 - DNA, 20 bp, Bacteroides vulgatus
gtccgcatgttcacatgatt

SEQ ID NO: 10349 - DNA, 20 bp, Bacteroides capilosus
ctgagatggcctcgcgtctg

SEQ ID NO: 10350 - DNA, 20 bp, Ignavigranum ruoffiae
ataggccagtgagtcgcctg

SEQ ID NO: 10351 - DNA, 20 bp, Streptococcus thoraltensis
aaaggagctaacccatgtta

SEQ ID NO: 10352 - DNA, 20 bp, Corynebacterium kutscheri
taggtctgtatacaggctgg

SEQ ID NO: 10353 - DNA, 20 bp, Bacteroides capilosus
atgacagaggattcgtccaa

SEQ ID NO: 10354 - DNA, 20 bp, Moraxella atlantae
gtatatgagagggaagtaga

SEQ ID NO: 10355 - DNA, 20 bp, Myroides odoratus
atggcatcgtttatataata

SEQ ID NO: 10356 - DNA, 20 bp, Streptococcus ratti
attgaaagatgcaagcgcat

SEQ ID NO: 10357 - DNA, 20 bp, Anaerobiospirillum succiniciproducens
aggaaacactgacggtaccc

SEQ ID NO: 10358 - DNA, 20 bp, Bacteroides thetaiotaomicron
aaattcggtatgagatgggg

SEQ ID NO: 10359 - DNA, 20 bp, Leptotrichia buccalis
gtctgcacctgaagctactg

SEQ ID NO: 10360 - DNA, 30 bp, Facklamia languida
accttaccaggtcttgacataggatgcata

SEQ ID NO: 10361 - DNA, 30 bp, Weeksella virosa
cggagaaattcggattaataccgtatataa

SEQ ID NO: 10362 - DNA, 20 bp, Bacillus schlegellii
tgctggggcaaggaaagggg

SEQ ID NO: 10363 - DNA, 20 bp, Bacillus schlegellii
gaggcgggcggaagccttcg

SEQ ID NO: 10364 - DNA, 20 bp, Bacteroides vulgatus
tcttgagtgcagttgaggca

SEQ ID NO: 10365 - DNA, 20 bp, Haemophilus aegyptius
ggggtaaaggtctaccaagc

SEQ ID NO: 10366 - DNA, 20 bp, Streptococcus sobrinus
cggacttgctccagtgttac

SEQ ID NO: 10367 - DNA, 20 bp, Prevotella bivia
atagatagcttgctatttat

SEQ ID NO: 10368 - DNA, 20 bp, Bacteroides distasonis
aggcagcctgccaagccatt

SEQ ID NO: 10369 - DNA, 30 bp, Prevotella disiens
ggcttgaattgtaggagcacgatacagaga

SEQ ID NO: 10370 - DNA, 20 bp, Empedobacter brevis
cgcagtaggataggcatgcg

SEQ ID NO: 10371 - DNA, 20 bp, Leptotrichia buccalis
agggcatctaggcggccctg

SEQ ID NO: 10372 - DNA, 20 bp, Peptostreptococcus anaerobius
ttgcattaatgaaagatgag

SEQ ID NO: 10373 - DNA, 20 bp, Prevotella oralis
cgggcactctgtgaatactg

SEQ ID NO: 10374 - DNA, 20 bp, Myroides odoratus
ttacgtgtaattatttgacg

SEQ ID NO: 10375 - DNA, 20 bp, Actinomyces turicensis
tggcatttggttgggggtgt

SEQ ID NO: 10376 - DNA, 20 bp, Streptococcus sobrinus
cagtgttactaatgagtcgc

SEQ ID NO: 10377 - DNA, 20 bp, Pseudoramibacter alactolyticus
cgagaagttttttattgacc

SEQ ID NO: 10378 - DNA, 20 bp, Prevotella disiens
acccaatgatattcattgat

SEQ ID NO: 10379 - DNA, 20 bp, Paenibacillus apiarius
ggaaatgggaaagacggagc

SEQ ID NO: 10380 - DNA, 20 bp, Prevotella bivia
tatttatgtcggcgaccggc

SEQ ID NO: 10381 - DNA, 20 bp, Clostridium tetani
taccgcataaagttaaggtt

SEQ ID NO: 10382 - DNA, 20 bp, Abiotrophia defectiva
agtcgaacgaaccgcgacta

SEQ ID NO: 10383 - DNA, 20 bp, Paenibacillus apiarius
gcaggcggtgatgtaagttg

SEQ ID NO: 10384 - DNA, 20 bp, Anaerococcus tetradius
acgtatggaccgagcgttgt

SEQ ID NO: 10385 - DNA, 20 bp, Abiotrophia defectiva
aataccgcataggacatggg

SEQ ID NO: 10386 - DNA, 20 bp, Dolosigranulum pigrum
ccggccctcggtgctggagc

SEQ ID NO: 10387 - DNA, 20 bp, Bacteroides vulgatus
aagctgcaactgacattgag

SEQ ID NO: 10388 - DNA, 20 bp, Kocuria kristinae
cggatgcgactactgcccgc

SEQ ID NO: 10389 - DNA, 30 bp, Abiotrophia defectiva
aatacatgcaagtcgaacgaaccgcgacta

SEQ ID NO: 10390 - DNA, 20 bp, Bacillus sp
aagcaagtagaaccccttcg

SEQ ID NO: 10391 - DNA, 20 bp, Lactococcus raffinolactis
ggaaaattatgcaagtgacg

SEQ ID NO: 10392 - DNA, 20 bp, Prevotella oralis
ctacggcataccccgttgaa

SEQ ID NO: 10393 - DNA, 20 bp, Clostridium histolyticum
atctttttaatgcatgttag

SEQ ID NO: 10394 - DNA, 30 bp, Abiotrophia defectiva
acatgcaagtcgaacgaaccgcgactaggt

SEQ ID NO: 10395 - DNA, 20 bp, Streptococcus thoraltensis
agtggaacgcatttataact

SEQ ID NO: 10396 - DNA, 20 bp, Prevotella oralis
aggttgttttcaacttttga

SEQ ID NO: 10397 - DNA, 20 bp, Bacteroides vulgatus
ttaaaggtattccggtagac

SEQ ID NO: 10398 - DNA, 20 bp, Streptococcus thoraltensis
acccatgttagctttttaaa

SEQ ID NO: 10399 - DNA, 30 bp, Chromobacterium violaceum
tttgtcagggaggaaatcccgctggttaat

SEQ ID NO: 10400 - DNA, 20 bp, Corynebacterium cystitidis
gcgccccgcctggggagtga

SEQ ID NO: 10401 - DNA, 20 bp, Paenibacillus apiarius
ataccggatagacattttcc

SEQ ID NO: 10402 - DNA, 20 bp, Arcanobacterium haemolyticum
ctgcttgcgggggttggatt

SEQ ID NO: 10403 - DNA, 30 bp, Chromobacterium violaceum
gggatcgaaagacctcgcgttatacgagca

SEQ ID NO: 10404 - DNA, 20 bp, Clostridium clostridiiforme
tcgaacgaagcaattaagat

SEQ ID NO: 10405 - DNA, 20 bp, Anaerobiospirillum succiniciproducens
gttgctatcagatgagccca

SEQ ID NO: 10406 - DNA, 20 bp, Veillonella atypica
cgggacgaatggttcttgtg

SEQ ID NO: 10407 - DNA, 20 bp, Campylobacter lari
agcgactagcttgctagttg

SEQ ID NO: 10408 - DNA, 20 bp, Streptococcus acidominimus
tgaattgattgagtcgcgaa

SEQ ID NO: 10409 - DNA, 20 bp, Prevotella bivia
gtgttcccttttgcaggtac

SEQ ID NO: 10410 - DNA, 20 bp, Sphingobacterium multivorum
cgcactcgtccttcgggaca

SEQ ID NO: 10411 - DNA, 20 bp, Dolosigranulum pigrum
ctagctaatctttcaaagcc

SEQ ID NO: 10412 - DNA, 20 bp, Sphingobacterium multivorum
ccgataattggggctaagtc

SEQ ID NO: 10413 - DNA, 20 bp, Alloiococcus otitis
acccgaagccggccgggcaa

SEQ ID NO: 10414 - DNA, 20 bp, Streptococcus sobrinus
cgcattggtaacaccggact

SEQ ID NO: 10415 - DNA, 20 bp, Bacteroides ureolyticus
aaatagggaaagtcttttcg

SEQ ID NO: 10416 - DNA, 20 bp, Abiotrophia defectiva
gactaggtgcttgcacttgg

SEQ ID NO: 10417 - DNA, 20 bp, Bacillus schlegellii
ggcggcattgacggtacccg

SEQ ID NO: 10418 - DNA, 20 bp, Prevotella oralis
aaaggtatattctatcggta

SEQ ID NO: 10419 - DNA, 20 bp, Actinomyces turicensis
gatgctccaactttgttggg

SEQ ID NO: 10420 - DNA, 20 bp, Bacteroides distasonis
gttctatggatcgtaaacct

SEQ ID NO: 10421 - DNA, 20 bp, Clostridium cadaveris
attaataccgcatattatgg

SEQ ID NO: 10422 - DNA, 20 bp, Prevotella oris
cgatccaatccttaaatccg

SEQ ID NO: 10423 - DNA, 20 bp, Peptoniphilus indolicus
aagttaagtcggattagcgg

SEQ ID NO: 10424 - DNA, 20 bp, Bacteroides capilosus
cgaaggcggattgctggaca

SEQ ID NO: 10425 - DNA, 20 bp, Actinomyces turicensis
tgctccaactttgttggggt

SEQ ID NO: 10426 - DNA, 20 bp, Bacteroides distasonis
gagcgaatccccaaaccacg

SEQ ID NO: 10427 - DNA, 20 bp, Bacillus schlegellii
ggcggaagcctttgggtgga

SEQ ID NO: 10428 - DNA, 20 bp, Bacteroides vulgatus
taaagtcgggtatggatacc

SEQ ID NO: 10429 - DNA, 20 bp, Anaerococcus prevotii
cccgaagcctgcgagcaaac

SEQ ID NO: 10430 - DNA, 20 bp, Arcanobacterium haemolyticum
actcgtttgagggggagcgg

SEQ ID NO: 10431 - DNA, 20 bp, Helcococcus kunzii
agataatgacagtagctaag

SEQ ID NO: 10432 - DNA, 30 bp, Clostridium cadaveris
tcataaaactcgtcccagttcggattgcag

SEQ ID NO: 10433 - DNA, 20 bp, Streptococcus thoraltensis
cgaagaataggagtaagagt

SEQ ID NO: 10434 - DNA, 20 bp, Leuconostoc fallax
ataccgtataacaacacatt

SEQ ID NO: 10435 - DNA, 20 bp, Moraxella atlantae
ctgagaactgtaaggagact

SEQ ID NO: 10436 - DNA, 20 bp, Bacteroides distasonis
gcatgaagcagggatcccgc

SEQ ID NO: 10437 - DNA, 20 bp, Moraxella atlantae
cttacttgctagcaggtaaa

SEQ ID NO: 10438 - DNA, 20 bp, Haemophilus segnis
aggcatcacgattgacgtta

SEQ ID NO: 10439 - DNA, 20 bp, Peptoniphilus indolicus
cgagggctcaaccctcgtaa

SEQ ID NO: 10440 - DNA, 20 bp, Lactococcus raffinolactis
cgcaaggcagtgatgtcaag

SEQ ID NO: 10441 - DNA, 20 bp, Moraxella atlantae
aagcgggtgcaggtggtgca

SEQ ID NO: 10442 - DNA, 20 bp, Microbacterium hominis
caccgtagaaatacgggact

SEQ ID NO: 10443 - DNA, 20 bp, Peptoniphilus indolicus
tttgaaacttctaaacttga

SEQ ID NO: 10444 - DNA, 20 bp, Bacteroides ureolyticus
aaacatctaagagattagaa

SEQ ID NO: 10445 - DNA, 20 bp, Bacteroides vulgatus
gtcagttactaacaggttct

SEQ ID NO: 10446 - DNA, 20 bp, Bacteroides ureolyticus
taaactgcttaggaaactga

SEQ ID NO: 10447 - DNA, 20 bp, Psychrobacter phenylpyruvicus
agtgggtagcctaactttta

SEQ ID NO: 10448 - DNA, 20 bp, Myroides odoratus
gtatggaagtaattagaata

SEQ ID NO: 10449 - DNA, 20 bp, Anaerobiospirillum succiniciproducens
gaaaggtaagtaggatgtga

SEQ ID NO: 10450 - DNA, 20 bp, Myroides odoratus
gccagtacagaaagcagcta

SEQ ID NO: 10451 - DNA, 20 bp, Gemella morbillorum
agtatttctcgcatgagaga

SEQ ID NO: 10452 - DNA, 20 bp, Dolosigranulum pigrum
ggtggattggtcgcatgacg

SEQ ID NO: 10453 - DNA, 20 bp, Bacteroides eggerthii
ccttgagtgcagcataggta

SEQ ID NO: 10454 - DNA, 20 bp, Globicatella sanguinis
gcaagtcgaacgaaccacaa

SEQ ID NO: 10455 - DNA, 20 bp, Prevotella oralis
attccgtatgcagtccgaag

SEQ ID NO: 10456 - DNA, 20 bp, Bacillus schlegellii
aaggcgaacctggcgactgg

SEQ ID NO: 10457 - DNA, 20 bp, Bacteroides distasonis
gtggaaacaccttttctagc

SEQ ID NO: 10458 - DNA, 20 bp, Helcococcus kunzii
tatgatacattaatatcgca

SEQ ID NO: 10459 - DNA, 20 bp, Actinomyces turicensis
tccaactttgttggggtgga

SEQ ID NO: 10460 - DNA, 20 bp, Streptococcus ratti
tgctctggaaactgtctgac

SEQ ID NO: 10461 - DNA, 20 bp, Anaerococcus tetradius
aatctgggtgccgcagctaa

SEQ ID NO: 10462 - DNA, 20 bp, Psychrobacter phenylpyruvicus
aagggggcagcttgcgctct

SEQ ID NO: 10463 - DNA, 20 bp, Dolosigranulum pigrum
gccaaccctatgggaggcag

SEQ ID NO: 10464 - DNA, 20 bp, Sphingomonas paucimobilis
ggtgaagtcgtacaagggag

SEQ ID NO: 10465 - DNA, 20 bp, Bacteroides ureolyticus
tacctcatactcctatttga

SEQ ID NO: 10466 - DNA, 20 bp, Facklamia sourekii
tctagcgggggataactatc

SEQ ID NO: 10467 - DNA, 20 bp, Prevotella oralis
cgagtcggccgtatgtaaat

SEQ ID NO: 10468 - DNA, 20 bp, Brevibacillus thermoruber
tcgggtaagtctgatgtcaa

SEQ ID NO: 10469 - DNA, 20 bp, Vibrio vulnificus
tcaccactttgtggtcatga

SEQ ID NO: 10470 - DNA, 20 bp, Bacteroides vulgatus
tagtcttcgatggatagggg

SEQ ID NO: 10471 - DNA, 20 bp, Anaerobiospirillum succiniciproducens
attaggagcttgaacttcgg

SEQ ID NO: 10472 - DNA, 20 bp, Prevotella bivia
aagtggggaacgtgttccct

SEQ ID NO: 10473 - DNA, 20 bp, Prevotella oralis
gccgggcactctgtgaatac

SEQ ID NO: 10474 - DNA, 20 bp, Paenibacillus macerans
accggataatttattttgca

SEQ ID NO: 10475 - DNA, 20 bp, Prevotella bivia
tgaacgatttagagataatg

SEQ ID NO: 10476 - DNA, 20 bp, Helcococcus kunzii
tggctcaaccacggttcggt

SEQ ID NO: 10477 - DNA, 20 bp, Dolosigranulum pigrum
ggaacttgcccatgagcggg

SEQ ID NO: 10478 - DNA, 20 bp, Bacteroides eggerthii
tggtttcactattaaagaat

SEQ ID NO: 10479 - DNA, 20 bp, Bacteroides capilosus
ctcaacctgtggcctgcatt

SEQ ID NO: 10480 - DNA, 20 bp, Paenibacillus pabuli
cgagcggagttgagagaaag

SEQ ID NO: 10481 - DNA, 20 bp, Anaerobiospirillum succiniciproducens
ggtgtggtctgtgactgggg

SEQ ID NO: 10482 - DNA, 20 bp, Corynebacterium group ANF
ggactgcagggtggtgcctg

SEQ ID NO: 10483 - DNA, 30 bp, Helcococcus kunzii
ataccttatgatacattaatatcgcatgat

SEQ ID NO: 10484 - DNA, 20 bp, Sphingomonas paucimobilis
tgaagtcgtacaagggagcc

SEQ ID NO: 10485 - DNA, 20 bp, Arcanobacterium haemolyticum
cgaacgatgaaggctcctgc

SEQ ID NO: 10486 - DNA, 20 bp, Weeksella virosa
tgctgttgggttttcgggct

SEQ ID NO: 10487 - DNA, 20 bp, Myroides odoratus
ggctacgatgattaggggtc

SEQ ID NO: 10488 - DNA, 20 bp, Empedobacter brevis
aggcatgcgtaagattagtt

SEQ ID NO: 10489 - DNA, 20 bp, Clostridium cadaveris
ccgcatattatgatttttct

SEQ ID NO: 10490 - DNA, 30 bp, Brevibacillus reuszeri
caatggttggtacaacgggacgctagcccg

SEQ ID NO: 10491 - DNA, 30 bp, Leuconostoc fallax
gacggttcgttaagtctgaagtgaaagccc

SEQ ID NO: 10492 - DNA, 20 bp, Helcococcus kunzii
tgatgtaaatgttaaagaat

SEQ ID NO: 10493 - DNA, 30 bp, Helcococcus kunzii
gacgctgagatacgaaggcgtgggtagcaa

SEQ ID NO: 10494 - DNA, 20 bp, Aerococcus christensenii
gtcgagcgaacagagaaagt

SEQ ID NO: 10495 - DNA, 20 bp, Brevibacillus thermoruber
gtacgcattggaaactgctc

SEQ ID NO: 10496 - DNA, 20 bp, Suttonella indologenes
agagtatgtcagaggaaggc

SEQ ID NO: 10497 - DNA, 30 bp, Suttonella indologenes
tgggttgcaccagaagtagctagcttatca

SEQ ID NO: 10498 - DNA, 20 bp, Pseudomonas fluorescens
atgcttgcatctcttgagag

SEQ ID NO: 10499 - DNA, 20 bp, Bacillus schlegellii
gcggggaggcgggcggaagc

SEQ ID NO: 10500 - DNA, 20 bp, Prevotella oralis
agccgggcactctgtgaata

SEQ ID NO: 10501 - DNA, 20 bp, Haemophilus segnis
aggcgtgatgtttaataggc

SEQ ID NO: 10502 - DNA, 20 bp, Bacillus marinus
tctctcctgagagtcagttg

SEQ ID NO: 10503 - DNA, 20 bp, Streptococcus ratti
ctcaaccatagtgtgctctg

SEQ ID NO: 10504 - DNA, 20 bp, Peptoniphilus indolicus
aacggctcaccaagatagcg

SEQ ID NO: 10505 - DNA, 30 bp, Leuconostoc fallax
aagcactgttgtatgggaagaatagttaat

SEQ ID NO: 10506 - DNA, 20 bp, Atopobium parvulum
ggttaggccgggcacccata

SEQ ID NO: 10507 - DNA, 20 bp, Bacteroides vulgatus
agattaatacaagatggcat

SEQ ID NO: 10508 - DNA, 20 bp, Peptoniphilus indolicus
accttcgggaagaagttaag

SEQ ID NO: 10509 - DNA, 20 bp, Actinomyces turicensis
tcgaacgatgatgctccaac

SEQ ID NO: 10510 - DNA, 30 bp, Prevotella disiens
gagtacacacaacgtaggcggaattcatgg

SEQ ID NO: 10511 - DNA, 20 bp, Myroides odoratimimus
agaaagcagctacctggcaa

SEQ ID NO: 10512 - DNA, 20 bp, Suttonella indologenes
ctaggtgttgggcacttaag

SEQ ID NO: 10513 - DNA, 30 bp, Cardiobacterium hominis
acctgggaactgcatttgaaactgggcgac

SEQ ID NO: 10514 - DNA, 20 bp, Leptotrichia buccalis
ccccggaaactacagggctg

SEQ ID NO: 10515 - DNA, 20 bp, Bacillus schlegellii
gttcacacattaagcacccc

SEQ ID NO: 10516 - DNA, 20 bp, Dolosigranulum pigrum
aagaacacgtgctaggtaac

SEQ ID NO: 10517 - DNA, 20 bp, Serratia proteamaculans
tggtgtgttaatagcgcatc

SEQ ID NO: 10518 - DNA, 30 bp, Clostridium cadaveris
acctctgtgccgccgtaaacacaataagta

SEQ ID NO: 10519 - DNA, 20 bp, Suttonella indologenes
agtagctagcttatcagggc

SEQ ID NO: 10520 - DNA, 20 bp, Bacillus sp
ggagacgttaaaaggcggcg

SEQ ID NO: 10521 - DNA, 20 bp, Anaerococcus tetradius
gtatggaccgagcgttgtcc

SEQ ID NO: 10522 - DNA, 20 bp, Alloiococcus otitis
ggaagaggcggagtggcgaa

SEQ ID NO: 10523 - DNA, 30 bp, Peptoniphilus indolicus
gccgcgtgagcgaagaaggatttcgattcg

SEQ ID NO: 10524 - DNA, 20 bp, Moraxella atlantae
ggagaaacacactggtggtg

SEQ ID NO: 10525 - DNA, 20 bp, Leifsonia aquatica
ggctgacatatacgagaacg

SEQ ID NO: 10526 - DNA, 20 bp, Actinomyces radingae
gtttgtcgcgcctgtcgtgt

SEQ ID NO: 10527 - DNA, 20 bp, Dolosigranulum pigrum
ggggctttccggccctcggt

SEQ ID NO: 10528 - DNA, 20 bp, Anaerobiospirillum succiniciproducens
cggttgctatcagatgagcc

SEQ ID NO: 10529 - DNA, 20 bp, Corynebacterium confusum
tcgcttaaagttggccttag

SEQ ID NO: 10530 - DNA, 20 bp, Facklamia languida
gtccttcgggacatccatac

SEQ ID NO: 10531 - DNA, 20 bp, Helcococcus kunzii
agtcgatttcttcggaatga

SEQ ID NO: 10532 - DNA, 20 bp, Peptostreptococcus anaerobius
caagtcgagcgcgtctgatt

SEQ ID NO: 10533 - DNA, 20 bp, Prevotella loescheii
ctggggcgcttgagtgcgct

SEQ ID NO: 10534 - DNA, 20 bp, Abiotrophia defectiva
cgaacgaaccgcgactaggt

SEQ ID NO: 10535 - DNA, 20 bp, Myroides odoratimimus
gtatttattgacgctgatga

SEQ ID NO: 10536 - DNA, 20 bp, Vagococcus fluvialis
ttcggtgtcactgttggatg

SEQ ID NO: 10537 - DNA, 20 bp, Streptococcus sobrinus
aacaccggacttgctccagt

SEQ ID NO: 10538 - DNA, 20 bp, Bacteroides distasonis
ccccaaaccacgtctcagtt

SEQ ID NO: 10539 - DNA, 20 bp, Alloiococcus otitis
cccagtgcatgctggggaaa

SEQ ID NO: 10540 - DNA, 20 bp, Ignavigranum ruoffiae
tggttttgctatcactaaag

SEQ ID NO: 10541 - DNA, 20 bp, Kingella kingae
cacgagtacttgtacttggt

SEQ ID NO: 10542 - DNA, 20 bp, Lactococcus raffinolactis
ggcagtgatgtcaagctaat

SEQ ID NO: 10543 - DNA, 20 bp, Atopobium parvulum
ttcgagacttccgcatggaa

SEQ ID NO: 10544 - DNA, 20 bp, Sphingobacterium multivorum
gcactcgtccttcgggacac

SEQ ID NO: 10545 - DNA, 30 bp, Dolosigranulum pigrum
gtgattgattagtggcgaacgggtgagtaa

SEQ ID NO: 10546 - DNA, 30 bp, Actinomyces radingae
gttggtaacacccgaagcttgtggcttaac

SEQ ID NO: 10547 - DNA, 30 bp, Arcanobacterium haemolyticum
gcccgtggcctaactcgtttgagggggagc

SEQ ID NO: 10548 - DNA, 30 bp, Dolosigranulum pigrum
gatgagtgctaagtgttgggggctttccgg

SEQ ID NO: 10549 - DNA, 20 bp, Bacillus schlegellii
gccgggtccagagatgggcc

SEQ ID NO: 10550 - DNA, 20 bp, Ignavigranum ruoffiae
ccgctgcatagcttagagat

SEQ ID NO: 10551 - DNA, 20 bp, Peptoniphilus indolicus
gtcgagcgatgaagacataa

SEQ ID NO: 10552 - DNA, 20 bp, Peptoniphilus indolicus
acaccttcgggaagaagtta

SEQ ID NO: 10553 - DNA, 20 bp, Leptotrichia buccalis
gaaggtatctaaggtgtgga

SEQ ID NO: 10554 - DNA, 20 bp, Prevotella oralis
cggccgtatgtaaatgcggt

SEQ ID NO: 10555 - DNA, 20 bp, Bacillus marinus
acatcccattgcccggtcta

SEQ ID NO: 10556 - DNA, 20 bp, Clostridium glycolicum
attcacatgtatttcttatc

SEQ ID NO: 10557 - DNA, 20 bp, Suttonella indologenes
gaatctaccttggggtgggg

SEQ ID NO: 10558 - DNA, 20 bp, Corynebacterium group ANF
cgtctgtccctttgtggctg

SEQ ID NO: 10559 - DNA, 20 bp, Prevotella disiens
aatctaatctttaaagccgg

SEQ ID NO: 10560 - DNA, 20 bp, Sporosarcina pasteurii
aggaactctgaaagacggct

SEQ ID NO: 10561 - DNA, 20 bp, Streptococcus sobrinus
tgttactaatgagtcgcgaa

SEQ ID NO: 10562 - DNA, 20 bp, Leuconostoc fallax
cacttcggtgagacgtaaag

SEQ ID NO: 10563 - DNA, 20 bp, Pediococcus dextrinicus
attgaaagacggcctttggc

SEQ ID NO: 10564 - DNA, 20 bp, Leptotrichia buccalis
tgccccggaaactacagggc

SEQ ID NO: 10565 - DNA, 20 bp, Moraxella atlantae
gctcatgaagtcttagtggc

SEQ ID NO: 10566 - DNA, 20 bp, Kingella kingae
tagggaagaaaaggttgatg

SEQ ID NO: 10567 - DNA, 20 bp, Myroides odoratus
aaaagatgggcatgcgtatc

SEQ ID NO: 10568 - DNA, 20 bp, Streptococcus sobrinus
gtggaacgcattggtaacac

SEQ ID NO: 10569 - DNA, 20 bp, Actinomyces radingae
gtggtgagtgtagcgggtaa

SEQ ID NO: 10570 - DNA, 20 bp, Kingella kingae
tatcattaactgatgacggt

SEQ ID NO: 10571 - DNA, 20 bp, Bacteroides distasonis
tggaaacaccttttctagca

SEQ ID NO: 10572 - DNA, 20 bp, Sphingobacterium multivorum
gggatccatcggagagcttg

SEQ ID NO: 10573 - DNA, 20 bp, Streptococcus macacae
ggttaggaaagtctggagta

SEQ ID NO: 10574 - DNA, 20 bp, Psychrobacter phenylpyruvicus
ggtagcctaacttttagagg

SEQ ID NO: 10575 - DNA, 20 bp, Facklamia sourekii
gagttgaaagacggcttttg

SEQ ID NO: 10576 - DNA, 20 bp, Bacteroides vulgatus
ggttctgctgaggactctga

SEQ ID NO: 10577 - DNA, 30 bp, Facklamia languida
ccgaagccggtggcctaacttaggagggag

SEQ ID NO: 10578 - DNA, 20 bp, Bacteroides capilosus
agggcttgacatccgactaa

SEQ ID NO: 10579 - DNA, 20 bp, Brevibacillus thermoruber
cgcgcaggcggtcgggtaag

SEQ ID NO: 10580 - DNA, 20 bp, Sphingobacterium multivorum
tcggagagcttgctcgaaga

SEQ ID NO: 10581 - DNA, 20 bp, Kingella kingae
ttagggaagaaaaggttgat

SEQ ID NO: 10582 - DNA, 20 bp, Anaerobiospirillum succiniciproducens
agtggggaggaaacactgac

SEQ ID NO: 10583 - DNA, 20 bp, Moraxella atlantae
aagaaggtcataagattgta

SEQ ID NO: 10584 - DNA, 20 bp, Prevotella bivia
ctaagggataacccagcgaa

SEQ ID NO: 10585 - DNA, 20 bp, Suttonella indologenes
ataggaatctaccttggggt

SEQ ID NO: 10586 - DNA, 20 bp, Moraxella atlantae
agagctagtggagaaacaca

SEQ ID NO: 10587 - DNA, 20 bp, Streptococcus sobrinus
agccattgcttcactatcag

SEQ ID NO: 10588 - DNA, 30 bp, Clostridium glycolicum
tatgctaatacaggataatataagagattc

SEQ ID NO: 10589 - DNA, 20 bp, Leuconostoc fallax
gcgaacttgagtgcagtaga

SEQ ID NO: 10590 - DNA, 20 bp, Methylobacterium mesophilicum
ttcccagtccacttcggtgg

SEQ ID NO: 10591 - DNA, 20 bp, Peptoniphilus indolicus
aaggatttcgattcgtaaag

SEQ ID NO: 10592 - DNA, 20 bp, Prevotella bivia
ttcgtgaccgtaaggatcga

SEQ ID NO: 10593 - DNA, 20 bp, Streptococcus sobrinus
gaagccattgcttcactatc

SEQ ID NO: 10594 - DNA, 20 bp, Prevotella loescheii
ctcgttgtcggccccttggg

SEQ ID NO: 10595 - DNA, 30 bp, Unknown Organism
  oligonucleotide from CDC group EF-4B
ggggctcttcggaccttgcgctattcgagc

SEQ ID NO: 10596 - DNA, 20 bp, Sphingobacterium multivorum
gaagctgaatgtactggaag

SEQ ID NO: 10597 - DNA, 20 bp, Weeksella virosa
tggcgaccgtaacaggagct

SEQ ID NO: 10598 - DNA, 20 bp, Corynebacterium confusum
cttaaagttggccttagttc

SEQ ID NO: 10599 - DNA, 20 bp, Dolosigranulum pigrum
tcgcatgacgaattcattaa

SEQ ID NO: 10600 - DNA, 20 bp, Bacillus sp
tctctagggccgtcagagga

SEQ ID NO: 10601 - DNA, 20 bp, Myroides odoratus
ttgctttctagagaccggcg

SEQ ID NO: 10602 - DNA, 20 bp, Atopobium parvulum
cttcgagacttccgcatgga

SEQ ID NO: 10603 - DNA, 20 bp, Bacteroides vulgatus
ggcatcatgagtccgcatgt

SEQ ID NO: 10604 - DNA, 20 bp, Corynebacterium macginleyi
gtttttctacgattctcgtg

SEQ ID NO: 10605 - DNA, 20 bp, Veillonella atypica
tgcgaggatttgacggtacc

SEQ ID NO: 10606 - DNA, 20 bp, Paenibacillus macerans
ttttgcagcattgtggaata

SEQ ID NO: 10607 - DNA, 20 bp, Peptoniphilus indolicus
aaacttctaaacttgagtag

SEQ ID NO: 10608 - DNA, 20 bp, Actinomyces radingae
taggtgtgcatttggttggg

SEQ ID NO: 10609 - DNA, 20 bp, Bacteroides vulgatus
tcatgagtccgcatgttcac

SEQ ID NO: 10610 - DNA, 30 bp, Moraxella atlantae
caagtcgaacgatggaacctagcttgctag

SEQ ID NO: 10611 - DNA, 20 bp, Facklamia sourekii
gcctaaccattggagggagc

SEQ ID NO: 10612 - DNA, 20 bp, Bacillus sp
caagtagaaccccttcgggg

SEQ ID NO: 10613 - DNA, 20 bp, Sphingobacterium multivorum
cgaagatggtgagagtggcg

SEQ ID NO: 10614 - DNA, 20 bp, Bacteroides capilosus
  misc_feature (19)..(19): n is a, c, g, or t
gaaataaatgacggtactng

SEQ ID NO: 10615 - DNA, 20 bp, Bacillus sp
atgcaagaaaacgtattatc

SEQ ID NO: 10616 - DNA, 20 bp, Moraxella atlantae
taggggaaatagtggcgaac

SEQ ID NO: 10617 - DNA, 20 bp, Helcococcus kunzii
aagataatgacagtagctaa

SEQ ID NO: 10618 - DNA, 30 bp, Staphylococcus lentus
ttgaaccgcatggttcaatgttgaaagacg

SEQ ID NO: 10619 - DNA, 20 bp, Bacillus marinus
ctctcctgagagtcagttga

SEQ ID NO: 10620 - DNA, 20 bp, Corynebacterium macginleyi
tgagggtttttctacgattc

SEQ ID NO: 10621 - DNA, 20 bp, Sphingobacterium multivorum
acgggatccgtcggagagct

SEQ ID NO: 10622 - DNA, 20 bp, Myroides odoratus
ctttctagagaccggcggat

SEQ ID NO: 10623 - DNA, 20 bp, Moraxella atlantae
gatctataactggtcttaga

SEQ ID NO: 10624 - DNA, 20 bp, Weeksella virosa
gatctagaattagtttgaag

SEQ ID NO: 10625 - DNA, 20 bp, Bacillus sp
gaaggggttctacttgcttc

SEQ ID NO: 10626 - DNA, 20 bp, Bacteroides vulgatus
gaataaagtcgggtatggat

SEQ ID NO: 10627 - DNA, 20 bp, Suttonella indologenes
gtgaatttgacattagctaa

SEQ ID NO: 10628 - DNA, 20 bp, Atopobium parvulum
ccggcggagagggatgggcc

SEQ ID NO: 10629 - DNA, 20 bp, Bacillus schlegellii
cagcgcactggcctgtaact

SEQ ID NO: 10630 - DNA, 20 bp, Corynebacterium kutscheri
tttttcctttttaggtctgt

SEQ ID NO: 10631 - DNA, 20 bp, Staphylococcus simulans
aagtaactatgcatcccttg

SEQ ID NO: 10632 - DNA, 20 bp, Dolosigranulum pigrum
ctactagcgccttgacggta

SEQ ID NO: 10633 - DNA, 20 bp, Myroides odoratus
ggaagaaatgtaattacgtg

SEQ ID NO: 10634 - DNA, 20 bp, Streptococcus sobrinus
agaagccattgcttcactat

SEQ ID NO: 10635 - DNA, 20 bp, Weeksella virosa
gggtacctgaagttggcgac

SEQ ID NO: 10636 - DNA, 20 bp, Weeksella virosa
agattatcttcggataattg

SEQ ID NO: 10637 - DNA, 20 bp, Peptostreptococcus anaerobius
gcattaatgaaagatgagcg

SEQ ID NO: 10638 - DNA, 20 bp, Staphylococcus chromogenes
ttcgatagtgaaagacggtc

SEQ ID NO: 10639 - DNA, 20 bp, Cardiobacterium hominis
cgcggcaagagatgagccca

SEQ ID NO: 10640 - DNA, 20 bp, Helcococcus kunzii
gctcaaccacggttcggttt

SEQ ID NO: 10641 - DNA, 20 bp, Leuconostoc fallax
ggacaacctgcctctaagca

SEQ ID NO: 10642 - DNA, 20 bp, Actinomyces turicensis
tgacatgcaccctgacgctg

SEQ ID NO: 10643 - DNA, 30 bp, Bacteroides eggerthii
ccgtaaaattgcagttgatactgggcgcct

SEQ ID NO: 10644 - DNA, 20 bp, Bordetella avium
ccttgcgcaaatgacggtac

SEQ ID NO: 10645 - DNA, 20 bp, Ignavigranum ruoffiae
tgtacaggacttgacggtat

SEQ ID NO: 10646 - DNA, 20 bp, Vibrio metschnikovii
ccactttgggttcatgactg

SEQ ID NO: 10647 - DNA, 20 bp, Myroides odoratus
tagagaccggcggatgggtg

SEQ ID NO: 10648 - DNA, 20 bp, Brevibacillus thermoruber
ggtgcggaaaggtggcgcaa

SEQ ID NO: 10649 - DNA, 20 bp, Weeksella virosa
ttttatatgtgaataaacct

SEQ ID NO: 10650 - DNA, 20 bp, Anaerobiospirillum succiniciproducens
actgcctttctagagtattg

SEQ ID NO: 10651 - DNA, 20 bp, Sphingobacterium multivorum
ctcgaagatggtgagagtgg

SEQ ID NO: 10652 - DNA, 20 bp, Lactococcus garvieae
gtgaagtcggtacaaggtag

SEQ ID NO: 10653 - DNA, 20 bp, Leptotrichia buccalis
ttgtctgcacctgaagctac

SEQ ID NO: 10654 - DNA, 20 bp, Lactococcus raffinolactis
caacgagtcgcaaggcagtg

SEQ ID NO: 10655 - DNA, 30 bp, Abiotrophia defectiva
taccaggtcttgacatcccgacgaccgctc

SEQ ID NO: 10656 - DNA, 20 bp, Clostridium innocuum
acggagcgcatgctctgtat

SEQ ID NO: 10657 - DNA, 20 bp, Bacteroides distasonis
gcgggacgtgtcccgttttg

SEQ ID NO: 10658 - DNA, 20 bp, Prevotella bivia
agttcgtgaccgtacaggat

SEQ ID NO: 10659 - DNA, 20 bp, Abiotrophia defectiva
ttggtcaaggtgagtggcga

SEQ ID NO: 10660 - DNA, 20 bp, Leptotrichia buccalis
atcctgcgtatgcccgtgag

SEQ ID NO: 10661 - DNA, 20 bp, Bacteroides distasonis
ttttctaggcaatagccgtt

SEQ ID NO: 10662 - DNA, 20 bp, Campylobacter lari
gactagcttgctagttgtgg

SEQ ID NO: 10663 - DNA, 20 bp, Prevotella oralis
gtcgcggggcatcatggagg

SEQ ID NO: 10664 - DNA, 20 bp, Dolosigranulum pigrum
acgatgatatcactgcttgc

SEQ ID NO: 10665 - DNA, 20 bp, Helcococcus kunzii
gaacgagaatttttcagttg

SEQ ID NO: 10666 - DNA, 20 bp, Actinomyces turicensis
gagtgttgcgatatcgtaag

SEQ ID NO: 10667 - DNA, 20 bp, Suttonella indologenes
tggttaatacctgtgaattt

SEQ ID NO: 10668 - DNA, 20 bp, Campylobacter coli
cgtaggagaacctgcgttgg

SEQ ID NO: 10669 - DNA, 20 bp, Sporosarcina pasteurii
agcatagccgtctttcagag

SEQ ID NO: 10670 - DNA, 20 bp, Clostridium clostridiiforme
caattaagatgaagttttcg

SEQ ID NO: 10671 - DNA, 20 bp, Bacteroides thetaiotaomicron
aggcagctcactggagtgta

SEQ ID NO: 10672 - DNA, 20 bp, Facklamia languida
acttaaggatggctccgcgg

SEQ ID NO: 10673 - DNA, 20 bp, Peptostreptococcus anaerobius
gatgaaagatgagcggcgga

SEQ ID NO: 10674 - DNA, 20 bp, Myroides odoratus
ggagcttgcttttttgagac

SEQ ID NO: 10675 - DNA, 20 bp, Moraxella atlantae
cttacttgctagcaggtgaa

SEQ ID NO: 10676 - DNA, 20 bp, Gemella morbillorum
taccggataacagtatttct

SEQ ID NO: 10677 - DNA, 20 bp, Bacteroides capilosus
taacagagggaagcaatgcc

SEQ ID NO: 10678 - DNA, 20 bp, Kingella kingae
agacggttagttaagcaaga

SEQ ID NO: 10679 - DNA, 20 bp, Myroides odoratimimus
caatggcaagtacagaaagc

SEQ ID NO: 10680 - DNA, 20 bp, Bacteroides eggerthii
ttgcagcggaatgtagtgga

SEQ ID NO: 10681 - DNA, 20 bp, Leuconostoc fallax
gggcttcggcctcacttaga

SEQ ID NO: 10682 - DNA, 20 bp, Pasteurella multocida
gcaataagcttggtgctcga

SEQ ID NO: 10683 - DNA, 20 bp, Leuconostoc fallax
taacaacacatttcgcatga

SEQ ID NO: 10684 - DNA, 30 bp, Leuconostoc fallax
gcttcggcctcacttagagatggatccgcg

SEQ ID NO: 10685 - DNA, 20 bp, Actinomyces turicensis
acgatgatgctccaactttg

SEQ ID NO: 10686 - DNA, 20 bp, Moraxella atlantae
agccgttggggctcatgaag

SEQ ID NO: 10687 - DNA, 20 bp, Dolosigranulum pigrum
ataccccataggtggattgg

SEQ ID NO: 10688 - DNA, 30 bp, Bacteroides distasonis
caacttgcctatcagagggggataacccgg

SEQ ID NO: 10689 - DNA, 20 bp, Ignavigranum ruoffiae
gttgttagagaagaaccatc

SEQ ID NO: 10690 - DNA, 20 bp, Facklamia sourekii
gatttgacggtatctaatca

SEQ ID NO: 10691 - DNA, 20 bp, Clostridium clostridiiforme
tccttcggtgccgccgctaa

SEQ ID NO: 10692 - DNA, 20 bp, Ignavigranum ruoffiae
agtcgaacgcacaacgaagg

SEQ ID NO: 10693 - DNA, 20 bp, Anaerobiospirillum succiniciproducens
cggtttgggttccgcagcta

SEQ ID NO: 10694 - DNA, 20 bp, Vibrio metschnikovii
cactttgggttcatgactgg

SEQ ID NO: 10695 - DNA, 20 bp, Myroides odoratus
atatgaatggcatcgtttat

SEQ ID NO: 10696 - DNA, 20 bp, Prevotella bivia
tacgaataaagatttatcgg

SEQ ID NO: 10697 - DNA, 20 bp, Bacteroides vulgatus
tattccggtagacgatgggg

SEQ ID NO: 10698 - DNA, 20 bp, Peptoniphilus indolicus
taagcatttgaaacttctaa

SEQ ID NO: 10699 - DNA, 20 bp, Bacillus psychrosaccharolyticus
tatgttcttctctcgcatga

SEQ ID NO: 10700 - DNA, 20 bp, Facklamia sourekii
gctcaaccgtagaaggtcat

SEQ ID NO: 10701 - DNA, 20 bp, Actinomyces radingae
tttgggataacgctcagaaa

SEQ ID NO: 10702 - DNA, 20 bp, Facklamia sourekii
ctgttactgatttgacggta

SEQ ID NO: 10703 - DNA, 20 bp, Ignavigranum ruoffiae
cattggggaaagatggtttt

SEQ ID NO: 10704 - DNA, 20 bp, Leuconostoc fallax
caacgcatttcgcatgaagt

SEQ ID NO: 10705 - DNA, 20 bp, Weissella paramesenteroides
ctgatgtgattttatctgac

SEQ ID NO: 10706 - DNA, 20 bp, Dolosigranulum pigrum
gtgctaggtaactactagcg

SEQ ID NO: 10707 - DNA, 20 bp, Streptococcus thoraltensis
actaccgtagcttgctacaa

SEQ ID NO: 10708 - DNA, 30 bp, Aerococcus christensenii
ggagatagagttttcccttcggggacaaag

SEQ ID NO: 10709 - DNA, 20 bp, Prevotella oralis
gagatattcattcccttcgg

SEQ ID NO: 10710 - DNA, 20 bp, Facklamia sourekii
ctgatttgacggtatctaat

SEQ ID NO: 10711 - DNA, 20 bp, Streptococcus mutans
aaggaaacacactgtgcttg

SEQ ID NO: 10712 - DNA, 20 bp, Arcanobacterium haemolyticum
aggtctaatactagatattc

SEQ ID NO: 10713 - DNA, 20 bp, Actinomyces meyeri
cgccctgggcgtgcggagac

SEQ ID NO: 10714 - DNA, 20 bp, Weeksella virosa
tatagaatgggatagcccgg

SEQ ID NO: 10715 - DNA, 20 bp, Corynebacterium macginleyi
ccctgcttgcggggtactcg

SEQ ID NO: 10716 - DNA, 20 bp, Bacteroides ureolyticus
agattagaaagtgctagttt

SEQ ID NO: 10717 - DNA, 20 bp, Anaerobiospirillum succiniciproducens
gctttctagagtattgcaga

SEQ ID NO: 10718 - DNA, 20 bp, Bacteroides capillosus
ccgggcttgaactgtaggcg

SEQ ID NO: 10719 - DNA, 20 bp, Pasteurella multocida
gaggaaggcaggtattttaa

SEQ ID NO: 10720 - DNA, 20 bp, Myroides odoratus
taattacgtgtaattatttg

SEQ ID NO: 10721 - DNA, 20 bp, Pasteurella multocida
ttaatagaatacttgattga

SEQ ID NO: 10722 - DNA, 20 bp, Actinomyces turicensis
caactttgttggggtggatt

SEQ ID NO: 10723 - DNA, 20 bp, Prevotella loescheii
gatgcgtccgattagccaga

SEQ ID NO: 10724 - DNA, 30 bp, Staphylococcus lutrae
ttgttagggaagaacacatgtgtaagtcac

SEQ ID NO: 10725 - DNA, 20 bp, Atopobium parvulum
gtatttcttccgtgccgcag

SEQ ID NO: 10726 - DNA, 20 bp, Bacteroides ureolyticus
catcctaaaaacatctaaga

SEQ ID NO: 10727 - DNA, 20 bp, Prevotella loescheii
gaaggcagcctactgtagcg

SEQ ID NO: 10728 - DNA, 30 bp, Moraxella atlantae
gggaaatagtggcgaacgggtgagtaacat

SEQ ID NO: 10729 - DNA, 20 bp, Enterobacter gergoviae
tacggccgctagcttaaaac

SEQ ID NO: 10730 - DNA, 20 bp, Prevotella oralis
cttcggggcattggtggagg

SEQ ID NO: 10731 - DNA, 20 bp, Abiotrophia defectiva
cgcgactaggtgcttgcact

SEQ ID NO: 10732 - DNA, 20 bp, Bacillus marinus
aaccctgactctctcctgag

SEQ ID NO: 10733 - DNA, 20 bp, Corynebacterium group ANF
gcctgtggtggaaaacgttt

SEQ ID NO: 10734 - DNA, 20 bp, Bacteroides capillosus
ggtcgtatgcaaatacgatc

SEQ ID NO: 10735 - DNA, 20 bp, Bacteroides ureolyticus
caatgacatatacagtaaga

SEQ ID NO: 10736 - DNA, 30 bp, Pseudomonas fluorescens
atgcttgcatctcttgagagcggcggacgg

SEQ ID NO: 10737 - DNA, 20 bp, Prevotella oralis
ggggcatcgatcggtagggg

SEQ ID NO: 10738 - DNA, 20 bp, Streptococcus acidominimus
atttgaattgattgagtcgc

SEQ ID NO: 10739 - DNA, 20 bp, Enterobacter hormaechei
gtcgtaacaaggaaccgtag

SEQ ID NO: 10740 - DNA, 20 bp, Pasteurella multocida
aggaaggcaggtattttaat

SEQ ID NO: 10741 - DNA, 20 bp, Bacillus schlegellii
gcattgacggtacccgacga

SEQ ID NO: 10742 - DNA, 20 bp, Clostridium glycolicum
gggaagcgagtgtcgaaggt

SEQ ID NO: 10743 - DNA, 20 bp, Leptotrichia buccalis
ctgccccggaaactacaggg

SEQ ID NO: 10744 - DNA, 30 bp, Kingella kingae
aggacttttgttagggaagaaaaggttgat

SEQ ID NO: 10745 - DNA, 20 bp, Weeksella virosa
tgaataaacctattcacgag

SEQ ID NO: 10746 - DNA, 20 bp, Peptoniphilus indolicus
cagacgccgaaggtagggtt

SEQ ID NO: 10747 - DNA, 20 bp, Peptoniphilus indolicus
tcaaccctcgtaagcatttg

SEQ ID NO: 10748 - DNA, 20 bp, Bacteroides vulgatus
catcatgagtccgcatgttc

SEQ ID NO: 10749 - DNA, 20 bp, Finegoldia magna
tacttagttaccagcgagta

SEQ ID NO: 10750 - DNA, 20 bp, Vagococcus fluvialis
ctccaccgaaaatcaaagag

SEQ ID NO: 10751 - DNA, 20 bp, Peptostreptococcus anaerobius
ttgatgaaagatgagcggcg

SEQ ID NO: 10752 - DNA, 20 bp, Atopobium parvulum
ccctttcattgggatagcca

SEQ ID NO: 10753 - DNA, 20 bp, Cardiobacterium hominis
ggcctcgcggcaagagatga

SEQ ID NO: 10754 - DNA, 20 bp, Bacteroides vulgatus
tctgctgaggactctgacaa

SEQ ID NO: 10755 - DNA, 20 bp, Prevotella disiens
tgcatgtaaatgtaatctaa

SEQ ID NO: 10756 - DNA, 20 bp, Facklamia sourekii
tttaagttgaaagacggctt

SEQ ID NO: 10757 - DNA, 20 bp, Anaerobiospirillum succiniciproducens
aacactgacgttacccacag

SEQ ID NO: 10758 - DNA, 20 bp, Bacillus marinus
agaagcttgcttctctaact

SEQ ID NO: 10759 - DNA, 20 bp, Abiotrophia defectiva
cgaaccgcgactaggtgctt

SEQ ID NO: 10760 - DNA, 20 bp, Corynebacterium kutscheri
tagtttttcctttttaggtc

SEQ ID NO: 10761 - DNA, 20 bp, Alloiococcus otitis
cggacttgaatgtagcagag

SEQ ID NO: 10762 - DNA, 20 bp, Vagococcus fluvialis
gacggtacaatgagtcgcga

SEQ ID NO: 10763 - DNA, 30 bp, Alloiococcus otitis
cggtccggtaagtctgatgtgaaagcccac

SEQ ID NO: 10764 - DNA, 20 bp, Prevotella bivia
gttcccttttgcaggtacca

SEQ ID NO: 10765 - DNA, 20 bp, Chromobacterium violaceum
cggcggggatgacagtacct

SEQ ID NO: 10766 - DNA, 30 bp, Ignavigranum ruoffiae
gcaagtcgaacgcacaacgaaggagcttgc

SEQ ID NO: 10767 - DNA, 20 bp, Pseudoramibacter alactolyticus
tgacccttcggggggatata

SEQ ID NO: 10768 - DNA, 20 bp, Alloiococcus otitis
aagtcgaacgccaaatcttc

SEQ ID NO: 10769 - DNA, 20 bp, Peptostreptococcus anaerobius
cgcgtctgatttgatgcttg

SEQ ID NO: 10770 - DNA, 20 bp, Clostridium tetani
taaggtttcgcatgaaactt

SEQ ID NO: 10771 - DNA, 20 bp, Bacillus marinus
tgagagtcagttgaaagatg

SEQ ID NO: 10772 - DNA, 20 bp, Clostridium cadaveris
gcactctagctagactgccg

SEQ ID NO: 10773 - DNA, 30 bp, Prevotella oralis
ccaccggggcatcgatcggtaggggttctg

SEQ ID NO: 10774 - DNA, 20 bp, Bacillus psychrosaccharolyticus
actcaacaattagcggcgga

SEQ ID NO: 10775 - DNA, 20 bp, Propionibacterium acnes
ttaggactaagtcggtacaa

SEQ ID NO: 10776 - DNA, 20 bp, Bacteroides eggerthii
cagccttcgggccgctgtga

SEQ ID NO: 10777 - DNA, 20 bp, Alloiococcus otitis
cggccgggcaaccatttgga

SEQ ID NO: 10778 - DNA, 20 bp, Prevotella bivia
ggtggtacagatagttggtc

SEQ ID NO: 10779 - DNA, 20 bp, Anaerobiospirillum succiniciproducens
cagcagagagcttgctcttt

SEQ ID NO: 10780 - DNA, 20 bp, Veillonella atypica
ccaatctcggcatcgagact

SEQ ID NO: 10781 - DNA, 20 bp, Bacteroides ureolyticus
gttaatctgccctacacaga

SEQ ID NO: 10782 - DNA, 30 bp, Dolosigranulum pigrum
aaaatggaattccaagtgtagcggtggaat

SEQ ID NO: 10783 - DNA, 20 bp, Sphingobacterium multivorum
gagagcttgctcgaagatgg

SEQ ID NO: 10784 - DNA, 20 bp, Moraxella atlantae
cgttggggctcatgaagtct

SEQ ID NO: 10785 - DNA, 20 bp, Actinomyces radingae
agcgaatcctttaaagcttg

SEQ ID NO: 10786 - DNA, 20 bp, Facklamia sourekii
aaccattggagggagccgtc

SEQ ID NO: 10787 - DNA, 20 bp, Corynebacterium kutscheri
gcaagagagtactcgagtgg

SEQ ID NO: 10788 - DNA, 20 bp, Prevotella bivia
cgaggggcagcgaatagata

SEQ ID NO: 10789 - DNA, 20 bp, Bacteroides thetaiotaomicron
gtggtccacgtgtggatttt

SEQ ID NO: 10790 - DNA, 20 bp, Leptotrichia buccalis
agcgggcagtgccttcggga

SEQ ID NO: 10791 - DNA, 20 bp, Anaerococcus prevotii
catatcttgagaagagtaga

SEQ ID NO: 10792 - DNA, 20 bp, Budvicia aquatica
ggttgtgggcatgacccgtg

SEQ ID NO: 10793 - DNA, 20 bp, Bacteroides vulgatus
tatccaacctgccgtctact

SEQ ID NO: 10794 - DNA, 20 bp, Weeksella virosa
agcggtagattatcttcgga

SEQ ID NO: 10795 - DNA, 20 bp, Brevibacillus thermoruber
ggcaccttctcgcatgagag

SEQ ID NO: 10796 - DNA, 20 bp, Clostridium clostridiiforme
aagatgaagttttcggatgg

SEQ ID NO: 10797 - DNA, 20 bp, Moraxella atlantae
tagccgttggggctcatgaa

SEQ ID NO: 10798 - DNA, 20 bp, Bacteroides distasonis
cggactaataccgcatgaag

SEQ ID NO: 10799 - DNA, 20 bp, Facklamia sourekii
aaacctaccctctagcgggg

SEQ ID NO: 10800 - DNA, 20 bp, Paenibacillus apiarius
tgagggaaatgggaaagacg

SEQ ID NO: 10801 - DNA, 30 bp, Cardiobacterium hominis
ggggaccgaaaggcctcgcggcaagagatg

SEQ ID NO: 10802 - DNA, 20 bp, Bacteroides distasonis
tcgtaaacctcttttataag

SEQ ID NO: 10803 - DNA, 20 bp, Vagococcus fluvialis
cgcataatttgttttcccgc

SEQ ID NO: 10804 - DNA, 20 bp, Alloiococcus otitis
actggcggacttgaatgtag

SEQ ID NO: 10805 - DNA, 20 bp, Bacteroides thetaiotaomicron
ttatggggaaacccataggc

SEQ ID NO: 10806 - DNA, 20 bp, Ignavigranum ruoffiae
gtacaggacttgacggtatc

SEQ ID NO: 10807 - DNA, 20 bp, Facklamia languida
acagatcgcatgatcaatga

SEQ ID NO: 10808 - DNA, 20 bp, Prevotella oralis
atctaatttggacgaaaggt

SEQ ID NO: 10809 - DNA, 20 bp, Prevotella oralis
tgaaaggcggcctaattccg

SEQ ID NO: 10810 - DNA, 20 bp, Bacteroides caccae
ggtccacgtgtggacttttg

SEQ ID NO: 10811 - DNA, 30 bp, Brevibacillus thermoruber
attggaaactgctcgacttgagtgcagaag

SEQ ID NO: 10812 - DNA, 30 bp, Staphylococcus chromogenes
ttttgaccactctagagatagagttttcct

SEQ ID NO: 10813 - DNA, 20 bp, Bacteroides thetaiotaomicron
cagctcactggagtgtaact

SEQ ID NO: 10814 - DNA, 20 bp, Peptoniphilus asaccharolyticus
tgaaatggattagcggcgga

SEQ ID NO: 10815 - DNA, 20 bp, Kytococcus sedentarius
acgaccgaccctcgcatggg

SEQ ID NO: 10816 - DNA, 20 bp, Streptococcus thoraltensis
gcgaagaataggagtaagag

SEQ ID NO: 10817 - DNA, 20 bp, Anaerobiospirillum succiniciproducens
gtaggcggaaaggtaagtag

SEQ ID NO: 10818 - DNA, 20 bp, Lactococcus raffinolactis
gagatggacccgcgttgtat

SEQ ID NO: 10819 - DNA, 20 bp, Bacteroides distasonis
ggtttgaacgcattcggacc

SEQ ID NO: 10820 - DNA, 20 bp, Alloiococcus otitis
agcgagcgcaggcggtccgg

SEQ ID NO: 10821 - DNA, 20 bp, Peptoniphilus indolicus
aacttctaaacttgagtagt

SEQ ID NO: 10822 - DNA, 20 bp, Clostridium septicum
gtttcttcggaaacaaacct

SEQ ID NO: 10823 - DNA, 20 bp, Bacteroides thetaiotaomicron
caaatgaattatggggaaac

SEQ ID NO: 10824 - DNA, 20 bp, Anaerobiospirillum succiniciproducens
gacatcgtaggaatctttta

SEQ ID NO: 10825 - DNA, 20 bp, Moraxella atlantae
gctaggggaaatagtggcga

SEQ ID NO: 10826 - DNA, 20 bp, Sphingobacterium multivorum
actcgtccttcgggacacga

SEQ ID NO: 10827 - DNA, 20 bp, Bacteroides eggerthii
gggcgccttgagtgcagcat

SEQ ID NO: 10828 - DNA, 20 bp, Streptococcus sobrinus
gtgaggtaaccatttatggg

SEQ ID NO: 10829 - DNA, 20 bp, Corynebacterium confusum
cctgggcttgacatatttag

SEQ ID NO: 10830 - DNA, 20 bp, Atopobium parvulum
tttcattgggatagccacgg

SEQ ID NO: 10831 - DNA, 20 bp, Campylobacter lari
cttcgggtgagcactctaaa

SEQ ID NO: 10832 - DNA, 20 bp, Empedobacter brevis
acatgcaagccgaggggtac

SEQ ID NO: 10833 - DNA, 20 bp, Ignavigranum ruoffiae
ccagtgagtcgcctgactca

SEQ ID NO: 10834 - DNA, 20 bp, Bacteroides eggerthii
gtggagtatgcatactcctt

SEQ ID NO: 10835 - DNA, 30 bp, Weissella paramesenteroides
ctctgatgtgattttatctgacaaagagtg

SEQ ID NO: 10836 - DNA, 20 bp, Bacteroides thetaiotaomicron
atgaattatggggaaaccca

SEQ ID NO: 10837 - DNA, 20 bp, Bacteroides ureolyticus
aaaacatctaagagattaga

SEQ ID NO: 10838 - DNA, 20 bp, Empedobacter brevis
tgaaagatttatcgcagtag

SEQ ID NO: 10839 - DNA, 20 bp, Suttonella indologenes
cttacgagtcaaagcggggg

SEQ ID NO: 10840 - DNA, 20 bp, Clostridium cadaveris
tgcatgggaaagtcatgaaa

SEQ ID NO: 10841 - DNA, 20 bp, Streptococcus macacae
aggcggttaggaaagtctgg

SEQ ID NO: 10842 - DNA, 20 bp, Bacteroides vulgatus
aaaggtattccggtagacga

SEQ ID NO: 10843 - DNA, 20 bp, Leuconostoc fallax
accgtataacaacacatttc

SEQ ID NO: 10844 - DNA, 20 bp, Campylobacter lari
acgatgaagcgactagcttg

SEQ ID NO: 10845 - DNA, 20 bp, Anaerobiospirillum succiniciproducens
ttgctatcagatgagcccaa

SEQ ID NO: 10846 - DNA, 20 bp, Ignavigranum ruoffiae
cttcttccgcgtgagtggcg

SEQ ID NO: 10847 - DNA, 20 bp, Facklamia sourekii
tttgctgtcactagaggatg

SEQ ID NO: 10848 - DNA, 20 bp, Clostridium cadaveris
gtaagatgagcactctagct

SEQ ID NO: 10849 - DNA, 20 bp, Prevotella oralis
gattagccagccggcggggt

SEQ ID NO: 10850 - DNA, 20 bp, Bacillus schlegellii
gggcaaggaaaggggcgacc

SEQ ID NO: 10851 - DNA, 20 bp, Actinomyces radingae
acacccgaagcttgtggctt

SEQ ID NO: 10852 - DNA, 20 bp, Peptoniphilus indolicus
agacaccttcgggaagaagt

SEQ ID NO: 10853 - DNA, 20 bp, Streptococcus iniae
agcaaaagcttcactatgag

SEQ ID NO: 10854 - DNA, 30 bp, Actinomyces radingae
gtcgcgcctgtcgtgtaatcctctggctta

SEQ ID NO: 10855 - DNA, 20 bp, Ignavigranum ruoffiae
tgtattaactgtacaggact

SEQ ID NO: 10856 - DNA, 20 bp, Arcanobacterium haemolyticum
tgacatacaccgggattatg

SEQ ID NO: 10857 - DNA, 20 bp, Moraxella atlantae
gtgtgtgaagaaggtcataa

SEQ ID NO: 10858 - DNA, 20 bp, Suttonella indologenes
tatcagggcggttaccacgg

SEQ ID NO: 10859 - DNA, 20 bp, Suttonella indologenes
cttaagtgctcggtaccgca

SEQ ID NO: 10860 - DNA, 20 bp, Streptococcus gallolyticus
ttagagacttgaaagatgca

SEQ ID NO: 10861 - DNA, 20 bp, Vagococcus fluvialis
aataaaagacgcttcggtgt

SEQ ID NO: 10862 - DNA, 20 bp, Bacillus schlegellii
cattgacggtacccgacgag

SEQ ID NO: 10863 - DNA, 20 bp, Dolosigranulum pigrum
gcatgacgaattcattaaag

SEQ ID NO: 10864 - DNA, 20 bp, Prevotella bivia
aatgtaggagctcaacttct

SEQ ID NO: 10865 - DNA, 20 bp, Suttonella indologenes
tttatggttaatacctgtga

SEQ ID NO: 10866 - DNA, 20 bp, Actinomyces radingae
ttcgacctcgtgaaggtgga

SEQ ID NO: 10867 - DNA, 20 bp, Prevotella oralis
ggggcattggtggaggtgct

SEQ ID NO: 10868 - DNA, 20 bp, Myroides odoratimimus
ggattaatgctccatggttt

SEQ ID NO: 10869 - DNA, 20 bp, Bacteroides distasonis
gcgtggacaaagggaagcca

SEQ ID NO: 10870 - DNA, 20 bp, Sphingobacterium multivorum
ttgaaagttagtgaagagtg

SEQ ID NO: 10871 - DNA, 20 bp, Clostridium histolyticum
taaccccggtgctgcatttc

SEQ ID NO: 10872 - DNA, 20 bp, Peptoniphilus indolicus
aagcagatgccgaaggtagg

SEQ ID NO: 10873 - DNA, 20 bp, Brevibacillus thermoruber
ctgtttggagcttgcttcag

SEQ ID NO: 10874 - DNA, 20 bp, Cardiobacterium hominis
cggcaagagatgagcccatg

SEQ ID NO: 10875 - DNA, 20 bp, Bacillus schlegellii
gtcctggcgcatgctggggc

SEQ ID NO: 10876 - DNA, 20 bp, Moraxella atlantae
tgcactaagtcatatgtgaa

SEQ ID NO: 10877 - DNA, 20 bp, Helcococcus kunzii
atatcgcatgatgtaaatgt

SEQ ID NO: 10878 - DNA, 20 bp, Bacteroides vulgatus
cgtttgcatgtactttatga

SEQ ID NO: 10879 - DNA, 20 bp, Streptococcus acidominimus
aacgagcagcgaactggtga

SEQ ID NO: 10880 - DNA, 20 bp, Sphingobacterium multivorum
tcggacgggatccatcggag

SEQ ID NO: 10881 - DNA, 20 bp, Veillonella atypica
ggcatcgagactggatgaaa

SEQ ID NO: 10882 - DNA, 30 bp, Alloiococcus otitis
accttaccagctcttgacatcttctgctac

SEQ ID NO: 10883 - DNA, 20 bp, Bacteroides caccae
acccatacgccgcaaggcat

SEQ ID NO: 10884 - DNA, 20 bp, Prevotella loescheii
tgcgtccgattagccagacg

SEQ ID NO: 10885 - DNA, 30 bp, Moraxella atlantae
ggtggtgacgttacctgcagaataagcacc

SEQ ID NO: 10886 - DNA, 20 bp, Clostridium glycolicum
cgagtgtcgaaggtgaaatc

SEQ ID NO: 10887 - DNA, 20 bp, Brevibacillus centrosporus
gcggcgcaagctatcactta

SEQ ID NO: 10888 - DNA, 20 bp, Bacteroides vulgatus
tgaaaggaagattaatacaa

SEQ ID NO: 10889 - DNA, 20 bp, Pasteurella multocida
tgaggaaggcaggtatttta

SEQ ID NO: 10890 - DNA, 30 bp, Staphylococcus sciuri
tccgcgaggccaagcaaatcccataaaatt

SEQ ID NO: 10891 - DNA, 20 bp, Suttonella indologenes
tgacattagctaaagaagaa

SEQ ID NO: 10892 - DNA, 30 bp, Atopobium parvulum
gggctgccaacccgcgagggtgagcgaatc

SEQ ID NO: 10893 - DNA, 20 bp, Corynebacterium group ANF
gcagggtggtgcctgtggtg

SEQ ID NO: 10894 - DNA, 20 bp, Facklamia languida
ggagaacctacccttaagcg

SEQ ID NO: 10895 - DNA, 30 bp, Dolosigranulum pigrum
agcgcaggcggtctgtttagtctaatgtga

SEQ ID NO: 10896 - DNA, 20 bp, Streptococcus acidominimus
acatttgaattgattgagtc

SEQ ID NO: 10897 - DNA, 30 bp, Alloiococcus otitis
ccaaggccatgatgcgtagccgacttgaga

SEQ ID NO: 10898 - DNA, 20 bp, Streptococcus sobrinus
catttatggggccagccgcc

SEQ ID NO: 10899 - DNA, 20 bp, Myroides odoratus
tatagagagcttgctttcta

SEQ ID NO: 10900 - DNA, 20 bp, Anaerobiospirillum succiniciproducens
gagcttgaacttcggtttgg

SEQ ID NO: 10901 - DNA, 20 bp, Prevotella disiens
aacggcaaagagtgcttgca

SEQ ID NO: 10902 - DNA, 20 bp, Bacteroides eggerthii
gcataggtaggcggaattcg

SEQ ID NO: 10903 - DNA, 30 bp, Arcanobacterium haemolyticum
ggccttttccatgggttctgtaccgtagct

SEQ ID NO: 10904 - DNA, 20 bp, Dolosigranulum pigrum
tactagcgccttgacggtat

SEQ ID NO: 10905 - DNA, 20 bp, Vagococcus fluvialis
gctcaaccgaggaaggtcat

SEQ ID NO: 10906 - DNA, 20 bp, Actinomyces radingae
cctttttctttgggataacg

SEQ ID NO: 10907 - DNA, 20 bp, Leptotrichia buccalis
tcttgacatcctgcgtatgc

SEQ ID NO: 10908 - DNA, 20 bp, Bacteroides vulgatus
catgttcacatgattaaagg

SEQ ID NO: 10909 - DNA, 20 bp, Myroides odoratimimus
ggcaagtacagaaagcagct

SEQ ID NO: 10910 - DNA, 20 bp, Helcococcus kunzii
taattaagtctgaatttaaa

SEQ ID NO: 10911 - DNA, 20 bp, Alloiococcus otitis
acatcttctgctaccttcag

SEQ ID NO: 10912 - DNA, 20 bp, Kytococcus sedentarius
ggtgaagcgagtgcttgcac

SEQ ID NO: 10913 - DNA, 20 bp, Psychrobacter phenylpyruvicus
agcttgcgctctcgctattg

SEQ ID NO: 10914 - DNA, 20 bp, Streptococcus sobrinus
aactcatgttaactgtttaa

SEQ ID NO: 10915 - DNA, 30 bp, Bacteroides distasonis
cgaatccccaaaccacgtctcagttcggat

SEQ ID NO: 10916 - DNA, 20 bp, Propionibacterium acnes
attaggactaagtcggtaca

SEQ ID NO: 10917 - DNA, 20 bp, Weeksella virosa
taagatagacatgcgtaaga

SEQ ID NO: 10918 - DNA, 20 bp, Bacteroides distasonis
taggctgaggactctggtgg

SEQ ID NO: 10919 - DNA, 20 bp, Sphingobacterium multivorum
ggacgggatccgtcggagag

SEQ ID NO: 10920 - DNA, 30 bp, Bacillus marinus
tgcttctctaacttagcggcggacgggtga

SEQ ID NO: 10921 - DNA, 20 bp, Actinomyces radingae
tagtggtgagtgtagcgggt

SEQ ID NO: 10922 - DNA, 20 bp, Campylobacter lari
ctagttgtggattagtggcg

SEQ ID NO: 10923 - DNA, 20 bp, Alloiococcus otitis
tgaggaacttgcccataaga

SEQ ID NO: 10924 - DNA, 20 bp, Bacteroides vulgatus
taaattgcagatgaattacg

SEQ ID NO: 10925 - DNA, 30 bp, Abiotrophia defectiva
attgggcgtaaagggagtgtaggcggtctt

SEQ ID NO: 10926 - DNA, 20 bp, Bacteroides vulgatus
gtcgggtatggatacccgtt

SEQ ID NO: 10927 - DNA, 20 bp, Clostridium limosum
aagctctgttttcagggacg

SEQ ID NO: 10928 - DNA, 20 bp, Suttonella indologenes
tgctcggtaccgcagctaac

SEQ ID NO: 10929 - DNA, 20 bp, Moraxella atlantae
cctaggaacagcatatgata

SEQ ID NO: 10930 - DNA, 20 bp, Cardiobacterium hominis
cgtcgggttgttaaagactc

SEQ ID NO: 10931 - DNA, 20 bp, Actinomyces naeslundii
gtgatggcctgccaaggcgg

SEQ ID NO: 10932 - DNA, 20 bp, Sporosarcina pasteurii
tccccaactgcagggcaggt

SEQ ID NO: 10933 - DNA, 20 bp, Bacteroides thetaiotaomicron
aaatgaattatggggaaacc

SEQ ID NO: 10934 - DNA, 20 bp, Bacillus sp
cgtctccttatgcaagaaaa

SEQ ID NO: 10935 - DNA, 20 bp, Bacteroides eggerthii
ccttcgggccgctgtgaagg

SEQ ID NO: 10936 - DNA, 20 bp, Corynebacterium kutscheri
ggaaaggctttcttgcttgc

SEQ ID NO: 10937 - DNA, 20 bp, Helcococcus kunzii
tggttaacttgagtagatga

SEQ ID NO: 10938 - DNA, 30 bp, Prevotella oralis
ttggtcggtggccaagcgaaagcgttaagc

SEQ ID NO: 10939 - DNA, 20 bp, Leptotrichia buccalis
gtatctaaggtgtggatagt

SEQ ID NO: 10940 - DNA, 20 bp, Streptococcus thoraltensis
aacagcatcacttaaagatg

SEQ ID NO: 10941 - DNA, 20 bp, Streptococcus infantarius
gcaactcttcaaactttagc

SEQ ID NO: 10942 - DNA, 30 bp, Leuconostoc fallax
accgtaaacgatgagtgctaggtgttagga

SEQ ID NO: 10943 - DNA, 20 bp, Bacillus sp
tatgcaagaaaacgtattat

SEQ ID NO: 10944 - DNA, 20 bp, Leuconostoc fallax
acgcatttcgcatgaagtgt

SEQ ID NO: 10945 - DNA, 20 bp, Prevotella bivia
gattacgaataaagatttat

SEQ ID NO: 10946 - DNA, 20 bp, Bacillus marinus
tctctaacttagcggcggac

SEQ ID NO: 10947 - DNA, 20 bp, Bacteroides thetaiotaomicron
ccaaagctggcgaccggcgc

SEQ ID NO: 10948 - DNA, 20 bp, Lactococcus raffinolactis
tacaacgagtcgcaaggcag

SEQ ID NO: 10949 - DNA, 20 bp, Streptococcus ratti
ttttcttgagtcgcgaacgg

SEQ ID NO: 10950 - DNA, 20 bp, Dolosigranulum pigrum
ctggtctaacattgacgctg

SEQ ID NO: 10951 - DNA, 20 bp, Paenibacillus pabuli
gttgagagaaagcttgcttt

SEQ ID NO: 10952 - DNA, 20 bp, Bacillus schlegellii
gctcaaccgtgggggtgcag

SEQ ID NO: 10953 - DNA, 20 bp, Prevotella oralis
ccattgacttgaatagagat

SEQ ID NO: 10954 - DNA, 20 bp, Streptococcus thoraltensis
ctacaattggtataaatgag

SEQ ID NO: 10955 - DNA, 20 bp, Bacteroides distasonis
cgttgaaactggggggcttg

SEQ ID NO: 10956 - DNA, 20 bp, Bacteroides distasonis
tctaggcaatagccgtttgc

SEQ ID NO: 10957 - DNA, 20 bp, Granulicatella elegans
cgcataggttctagagtcgc

SEQ ID NO: 10958 - DNA, 30 bp, Globicatella sanguinis
tggttaaggttagtggcgcacgggtgagta

SEQ ID NO: 10959 - DNA, 20 bp, Bacteroides caccae
ggggaaacccatacgccgca

SEQ ID NO: 10960 - DNA, 20 bp, Corynebacterium group ANF
ctagatgaggcgagagatcg

SEQ ID NO: 10961 - DNA, 20 bp, Leuconostoc fallax
taaaaggggcttcggcctca

SEQ ID NO: 10962 - DNA, 20 bp, Prevotella disiens
cggtacagaatgttggttgc

SEQ ID NO: 10963 - DNA, 20 bp, Facklamia languida
gctgtcacttaaggatggct

SEQ ID NO: 10964 - DNA, 20 bp, Bacteroides distasonis
cgggacgtgtcccgttttgt

SEQ ID NO: 10965 - DNA, 20 bp, Helcococcus kunzii
attaatatcgcatgatgtaa

SEQ ID NO: 10966 - DNA, 20 bp, Prevotella loescheii
ctgtagcgctactgacgctg

SEQ ID NO: 10967 - DNA, 20 bp, Bacteroides eggerthii
aacattacagccttcgggcc

SEQ ID NO: 10968 - DNA, 20 bp, Myroides odoratus
gtacagaaagcagctaccag

SEQ ID NO: 10969 - DNA, 20 bp, Anaerobiospirillum succiniciproducens
gtgtggtctgtgactggggt

SEQ ID NO: 10970 - DNA, 20 bp, Ignavigranum ruoffiae
actcattggggaaagatggt

SEQ ID NO: 10971 - DNA, 20 bp, Prevotella oralis
ttcattcccttcggggcatt

SEQ ID NO: 10972 - DNA, 20 bp, Staphylococcus hyicus
atcttttgaccagctctaga

SEQ ID NO: 10973 - DNA, 20 bp, Atopobium parvulum
cctttcattgggatagccac

SEQ ID NO: 10974 - DNA, 30 bp, Moraxella atlantae
ctgggcttaacctaggaacagcatatgata

SEQ ID NO: 10975 - DNA, 30 bp, Leptotrichia buccalis
gagttgtctgcacctgaagctactggtcca

SEQ ID NO: 10976 - DNA, 20 bp, Corynebacterium group ANF
acccgaagccgcttgctcca

SEQ ID NO: 10977 - DNA, 30 bp, Comamonas terrigena
aaagccctgggttaataccctggggtcatg

SEQ ID NO: 10978 - DNA, 20 bp, Bacteroides distasonis
aaagtgcgggacgtgtcccg

SEQ ID NO: 10979 - DNA, 20 bp, Leptotrichia buccalis
acgcgtaaggaacttgcccc

SEQ ID NO: 10980 - DNA, 20 bp, Anaerobiospirillum succiniciproducens
tcgtaggaatctttcagaga

SEQ ID NO: 10981 - DNA, 20 bp, Leptotrichia buccalis
gcggccctgtaagtctaggg

SEQ ID NO: 10982 - DNA, 20 bp, Clostridium cadaveris
ttttctgcatgggaaagtca

SEQ ID NO: 10983 - DNA, 20 bp, Alloiococcus otitis
gaaagcgactttctgggcta

SEQ ID NO: 10984 - DNA, 20 bp, Suttonella indologenes
agtcaaagcgggggatcttc

SEQ ID NO: 10985 - DNA, 20 bp, Paenibacillus apiarius
ttcctcgcctgagggaaatg

SEQ ID NO: 10986 - DNA, 20 bp, Dolosigranulum pigrum
tgggggctttccggccctcg

SEQ ID NO: 10987 - DNA, 20 bp, Facklamia sourekii
aataccgcataaaccttaag

SEQ ID NO: 10988 - DNA, 20 bp, Prevotella oralis
ttgttttcaacttttgatgg

SEQ ID NO: 10989 - DNA, 20 bp, Helcococcus kunzii
accgaaaaaggaaagtagcg

SEQ ID NO: 10990 - DNA, 20 bp, Moraxella atlantae
ggtggtgacgttacctgcag

SEQ ID NO: 10991 - DNA, 20 bp, Bacteroides vulgatus
ccgtctactcttggacagcc

SEQ ID NO: 10992 - DNA, 20 bp, Abiotrophia defectiva
ctaggtcaaggtgagtggcg

SEQ ID NO: 10993 - DNA, 20 bp, Streptococcus thoraltensis
agctaacccatgttagcttt

SEQ ID NO: 10994 - DNA, 20 bp, Bacteroides vulgatus
aaaggaataaagtcgggtat

SEQ ID NO: 10995 - DNA, 20 bp, Lactococcus raffinolactis
aattatgcaagtgacggtat

SEQ ID NO: 10996 - DNA, 20 bp, Anaerobiospirillum succiniciproducens
ttctaaactgcctttctaga

SEQ ID NO: 10997 - DNA, 20 bp, Budvicia aquatica
cgtaacgtcgaaagaccaaa

SEQ ID NO: 10998 - DNA, 20 bp, Ignavigranum ruoffiae
cttgcttcttccgcgtgagt

SEQ ID NO: 10999 - DNA, 20 bp, Prevotella oralis
ccaatccttaaaacgtgcct

SEQ ID NO: 11000 - DNA, 30 bp, Clostridium limosum
aagaatcctgtggaaacacgggagtgccct

SEQ ID NO: 11001 - DNA, 20 bp, Anaerococcus tetradius
atctgggtgccgcagctaac

SEQ ID NO: 11002 - DNA, 20 bp, Actinomyces radingae
gctcagaaatgggtgctaat

SEQ ID NO: 11003 - DNA, 20 bp, Bacteroides eggerthii
acccgatagtatagtttttc

SEQ ID NO: 11004 - DNA, 20 bp, Actinomyces radingae
tcgctcgtgtgcaagccgct

SEQ ID NO: 11005 - DNA, 20 bp, Weissella paramesenteroides
gctttgtctttaactgatac

SEQ ID NO: 11006 - DNA, 20 bp, Actinomyces radingae
gcctagagataggtgtgcat

SEQ ID NO: 11007 - DNA, 20 bp, Actinomyces radingae
gataacgctcagaaatgggt

SEQ ID NO: 11008 - DNA, 20 bp, Bacteroides eggerthii
taaagtggagtatgcatact

SEQ ID NO: 11009 - DNA, 30 bp, Myroides odoratus
attgggtttaaagggttcgtaggcggttga

SEQ ID NO: 11010 - DNA, 20 bp, Bacillus psychrosaccharolyticus
gcgaattgttgagtttactc

SEQ ID NO: 11011 - DNA, 20 bp, Staphylococcus simulans
taccggataacacatgaaac

SEQ ID NO: 11012 - DNA, 20 bp, Haemophilus segnis
ggattgggccttgagcttgg

SEQ ID NO: 11013 - DNA, 20 bp, Bacteroides vulgatus
ttgagtgcagttgaggcagg

SEQ ID NO: 11014 - DNA, 20 bp, Weeksella virosa
tacctgaagttggcgaccgt

SEQ ID NO: 11015 - DNA, 20 bp, Streptococcus ratti
acacactgtgcttgcacacc

SEQ ID NO: 11016 - DNA, 20 bp, Kocuria kristinae
aaagggttatgtactggtct

SEQ ID NO: 11017 - DNA, 20 bp, Suttonella indologenes
gctagcttatcagggcggtt

SEQ ID NO: 11018 - DNA, 20 bp, Empedobacter brevis
taggataggcatgcgtaaga

SEQ ID NO: 11019 - DNA, 20 bp, Bacteroides vulgatus
tataaaggaataaagtcggg

SEQ ID NO: 11020 - DNA, 20 bp, Prevotella bivia
agttggtcgtgtgcaaatac

SEQ ID NO: 11021 - DNA, 20 bp, Bacteroides distasonis
catggggatatttgctaaag

SEQ ID NO: 11022 - DNA, 20 bp, Bacillus schlegellii
atcccgctgccgggtccaga

SEQ ID NO: 11023 - DNA, 20 bp, Bacteroides eggerthii
ttcactattaaagaatttcg

SEQ ID NO: 11024 - DNA, 20 bp, Anaerobiospirillum succiniciproducens
tcgtaggaatcttttagaga

SEQ ID NO: 11025 - DNA, 20 bp, Bacillus sp
tagaaccccttcgggggtga

SEQ ID NO: 11026 - DNA, 20 bp, Helcococcus kunzii
caaccacggttcggtttaga

SEQ ID NO: 11027 - DNA, 20 bp, Myroides odoratus
ttctagagaccggcggatgg

SEQ ID NO: 11028 - DNA, 20 bp, Bacteroides distasonis
attcggaccgaggtggaaac

SEQ ID NO: 11029 - DNA, 20 bp, Weeksella virosa
cttgctgttgggttttcggg

SEQ ID NO: 11030 - DNA, 30 bp, Streptococcus acidominimus
caatggtcggtacaacgagcagcgaactgg

SEQ ID NO: 11031 - DNA, 20 bp, Alloiococcus otitis
ccagtgcatgctgggaaaat

SEQ ID NO: 11032 - DNA, 20 bp, Empedobacter brevis
ttcggcttcagtggctaagc

SEQ ID NO: 11033 - DNA, 20 bp, Neisseria subflava
ccgcttacccggtatgcttc

SEQ ID NO: 11034 - DNA, 20 bp, Pasteurella multocida
ggaaggcaggtattttaata

SEQ ID NO: 11035 - DNA, 20 bp, Cellulosimicrobium cellulans
gtccctcgcatgggggtggt

SEQ ID NO: 11036 - DNA, 20 bp, Prevotella oralis
tcccattactacggcatacc

SEQ ID NO: 11037 - DNA, 20 bp, Bacillus sp
cgggaagcaagtagaacccc

SEQ ID NO: 11038 - DNA, 20 bp, Actinomyces turicensis
gtggtggcatttggttgggg

SEQ ID NO: 11039 - DNA, 30 bp, Haemophilus influenzae
aacgctggcggcaggcttaacacatgcagt

SEQ ID NO: 11040 - DNA, 20 bp, Staphylococcus lentus
tcaatgttgaaagacggttt

SEQ ID NO: 11041 - DNA, 20 bp, Bacteroides thetaiotaomicron
tgaattatggggaaacccat

SEQ ID NO: 11042 - DNA, 30 bp, Prevotella oris
attttgtgcaaacacgatccaatccttaaa

SEQ ID NO: 11043 - DNA, 20 bp, Streptococcus thoraltensis
cgcataaaaggagctaaccc

SEQ ID NO: 11044 - DNA, 20 bp, Clostridium cadaveris
agttagttgctaacagtaag

SEQ ID NO: 11045 - DNA, 30 bp, Bacillus marinus
acatgcaagtcgagcggagttagagaagct

SEQ ID NO: 11046 - DNA, 20 bp, Moraxella atlantae
tcataagattgtaaagcact

SEQ ID NO: 11047 - DNA, 20 bp, Bacillus schlegellii
ccgtgggggtgcagcggaaa

SEQ ID NO: 11048 - DNA, 20 bp, Leptotrichia buccalis
aaaggagacgctgcgggaga

SEQ ID NO: 11049 - DNA, 30 bp, Actinomyces meyeri
ttaccaaggcttgacatgcgccctgggcgt

SEQ ID NO: 11050 - DNA, 30 bp, Facklamia languida
acgaccggtagagtaactgttaccggagtg

SEQ ID NO: 11051 - DNA, 20 bp, Campylobacter lari
gaacgatgaagcgactagct

SEQ ID NO: 11052 - DNA, 20 bp, Pasteurella multocida
gaatacttgattgacgttaa

SEQ ID NO: 11053 - DNA, 20 bp, Myroides odoratus
gggttcgtaggcggttgagt

SEQ ID NO: 11054 - DNA, 20 bp, Pediococcus parvulus
ataccgcataacaaaattaa

SEQ ID NO: 11055 - DNA, 20 bp, Actinomyces radingae
gggggaaccttgatgcagcg

SEQ ID NO: 11056 - DNA, 20 bp, Bacteroides ureolyticus
taatctgccctacacagagg

SEQ ID NO: 11057 - DNA, 20 bp, Myroides odoratus
cgggaagaaatgtaattacg

SEQ ID NO: 11058 - DNA, 20 bp, Globicatella sanguinis
acgagaacttgttctggtta

SEQ ID NO: 11059 - DNA, 20 bp, Bacillus sp
cgttttcttgcataaggaga

SEQ ID NO: 11060 - DNA, 30 bp, Helcococcus kunzii
ctttagttactagcgagtaaagtcgaggac

SEQ ID NO: 11061 - DNA, 20 bp, Anaerococcus prevotii
gcagtcgaaggtaggatagg

SEQ ID NO: 11062 - DNA, 20 bp, Prevotella oralis
agccagccggcggggtaacg

SEQ ID NO: 11063 - DNA, 20 bp, Bacteroides caccae
catacgccgcaaggcatttg

SEQ ID NO: 11064 - DNA, 20 bp, Atopobium parvulum
gcaacctgcccctttcattg

SEQ ID NO: 11065 - DNA, 20 bp, Haemophilus segnis
cgaggaaggcgtgatgttta

SEQ ID NO: 11066 - DNA, 20 bp, Helcococcus kunzii
tgacagtagctaagaagcaa

SEQ ID NO: 11067 - DNA, 20 bp, Chromobacterium violaceum
gtcagggaggaaatcccgct

SEQ ID NO: 11068 - DNA, 20 bp, Aerococcus christensenii
tgttcgcatgaacaaactta

SEQ ID NO: 11069 - DNA, 20 bp, Staphylococcus simulans
aacacatgaaaccgcatggt

SEQ ID NO: 11070 - DNA, 20 bp, Leuconostoc fallax
aatgatgttaatgtgacggt

SEQ ID NO: 11071 - DNA, 20 bp, Prevotella disiens
ccggtacagaatgttggttg

SEQ ID NO: 11072 - DNA, 20 bp, Suttonella indologenes
cattagctaaagaagaagca

SEQ ID NO: 11073 - DNA, 20 bp, Gemella morbillorum
ctcgcatgagagatatttaa

SEQ ID NO: 11074 - DNA, 20 bp, Actinomyces meyeri
tccagctttgttggggtgga

SEQ ID NO: 11075 - DNA, 20 bp, Campylobacter lari
tagcttgctagttgtggatt

SEQ ID NO: 11076 - DNA, 20 bp, Staphylococcus simulans
aggatgtaagtaactatgca

SEQ ID NO: 11077 - DNA, 20 bp, Facklamia sourekii
aacgaaccgacggagaaact

SEQ ID NO: 11078 - DNA, 20 bp, Streptococcus infantarius
tgctaaagtttgaagagttg

SEQ ID NO: 11079 - DNA, 20 bp, Prevotella oralis
cttgaatagagatattcatt

SEQ ID NO: 11080 - DNA, 30 bp, Bacteroides distasonis
ccgcatggggatatttgctaaagattcatc

SEQ ID NO: 11081 - DNA, 20 bp, Dolosigranulum pigrum
ggcgattttctggtctaaca

SEQ ID NO: 11082 - DNA, 30 bp, Abiotrophia defectiva
taataccgcataggacatggaatcacatga

SEQ ID NO: 11083 - DNA, 20 bp, Empedobacter brevis
aagatgcgaatctcgaaaac

SEQ ID NO: 11084 - DNA, 20 bp, Abiotrophia defectiva
atcccgacgaccgctctaga

SEQ ID NO: 11085 - DNA, 20 bp, Prevotella bivia
ataccttatgtattcgtttg

SEQ ID NO: 11086 - DNA, 20 bp, Pasteurella multocida
tcgatttggggattgagcaa

SEQ ID NO: 11087 - DNA, 20 bp, Bacteroides capillosus
gggcttgaactgtaggcgaa

SEQ ID NO: 11088 - DNA, 30 bp, Streptococcus thoraltensis
cttttcttaggaacactggagacaggtggt

SEQ ID NO: 11089 - DNA, 20 bp, Bacteroides caccae
gtttgttgggggggtaacgg

SEQ ID NO: 11090 - DNA, 20 bp, Bacteroides ureolyticus
cttgacatcctaaaaacatc

SEQ ID NO: 11091 - DNA, 20 bp, Prevotella oralis
attgacttgaatagagatat

SEQ ID NO: 11092 - DNA, 20 bp, Leptotrichia buccalis
gggcatctaggcggccctgt

SEQ ID NO: 11093 - DNA, 20 bp, Ignavigranum ruoffiae
aaatccttcgggacagcgag

SEQ ID NO: 11094 - DNA, 20 bp, Streptococcus acidominimus
ttgacaacacatgttgttaa

SEQ ID NO: 11095 - DNA, 20 bp, Bacteroides ureolyticus
ccacagtggaatcagtaact

SEQ ID NO: 11096 - DNA, 20 bp, Psychrobacter phenylpyruvicus
gtgggtagcctaacttttag

SEQ ID NO: 11097 - DNA, 20 bp, Bacillus schlegellii
ggtgctaggtgtgggtgggg

SEQ ID NO: 11098 - DNA, 20 bp, Facklamia sourekii
cggcttttgctgtcactaga

SEQ ID NO: 11099 - DNA, 20 bp, Dolosigranulum pigrum
ttaaaggtggctttgctacc

SEQ ID NO: 11100 - DNA, 20 bp, Actinomyces turicensis
caccctgacgctgcagagat

SEQ ID NO: 11101 - DNA, 20 bp, Corynebacterium macginleyi
tttctacgattctcgtgccg

SEQ ID NO: 11102 - DNA, 20 bp, Suttonella indologenes
gctaataccacataacactt

SEQ ID NO: 11103 - DNA, 20 bp, Anaerococcus prevotii
cctcaaaaagtctttcccag

SEQ ID NO: 11104 - DNA, 20 bp, Streptococcus thoraltensis
tataactaccgtagcttgct

SEQ ID NO: 11105 - DNA, 30 bp, Abiotrophia defectiva
tcccgacgaccgctctagagatagagtttt

SEQ ID NO: 11106 - DNA, 20 bp, Bacillus sp
tcctctgacggccctagaga

SEQ ID NO: 11107 - DNA, 20 bp, Clostridium limosum
tgaaatgattaaaggagtaa

SEQ ID NO: 11108 - DNA, 20 bp, Peptoniphilus indolicus
gggaagaagttaagtcggat

SEQ ID NO: 11109 - DNA, 20 bp, Bacteroides eggerthii
gaataaagtggagtatgcat

SEQ ID NO: 11110 - DNA, 20 bp, Anaerobiospirillum succiniciproducens
ggcttgggaatctgcctggt

SEQ ID NO: 11111 - DNA, 20 bp, Bacteroides vulgatus
ttcacatgattaaaggtatt

SEQ ID NO: 11112 - DNA, 20 bp, Kingella kingae
gcacgagtacttgtacttgg

SEQ ID NO: 11113 - DNA, 20 bp, Bacillus marinus
cggataaccctgactctctc

SEQ ID NO: 11114 - DNA, 20 bp, Dolosigranulum pigrum
aggtggattggtcgcatgac

SEQ ID NO: 11115 - DNA, 20 bp, Prevotella bivia
tcgaggggcagcgaatagat

SEQ ID NO: 11116 - DNA, 20 bp, Paenibacillus apiarius
gtagctaataccggatagac

SEQ ID NO: 11117 - DNA, 20 bp, Facklamia sourekii
gaagaacagtcagtagagta

SEQ ID NO: 11118 - DNA, 20 bp, Bacteroides vulgatus
tgttcacatgattaaaggta

SEQ ID NO: 11119 - DNA, 20 bp, Peptoniphilus indolicus
gaagaagttaagtcggatta

SEQ ID NO: 11120 - DNA, 20 bp, Anaerobiospirillum succiniciproducens
acttcggttgctatcagatg

SEQ ID NO: 11121 - DNA, 20 bp, Prevotella loescheii
cgtaggccgcgccttaagcg

SEQ ID NO: 11122 - DNA, 20 bp, Weeksella virosa
tcgctataagatagacatgc

SEQ ID NO: 11123 - DNA, 20 bp, Streptococcus thoraltensis
tacaattggtataaatgagt

SEQ ID NO: 11124 - DNA, 20 bp, Granulicatella elegans
ccgcataggttctagagtcg

SEQ ID NO: 11125 - DNA, 20 bp, Clostridium histolyticum
tttcaatactccggtgccgc

SEQ ID NO: 11126 - DNA, 20 bp, Prevotella oralis
ttgaatagagatattcattc

SEQ ID NO: 11127 - DNA, 20 bp, Leptotrichia buccalis
tgcacctgaagctactggtc

SEQ ID NO: 11128 - DNA, 20 bp, Suttonella indologenes
gcgcccttagatgagcctat

SEQ ID NO: 11129 - DNA, 20 bp, Facklamia sourekii
taagctcgcatgagtttgag

SEQ ID NO: 11130 - DNA, 20 bp, Dolosigranulum pigrum
caaccctatgggaggcagcc

SEQ ID NO: 11131 - DNA, 20 bp, Alloiococcus otitis
atgtagcagaggaaagtgga

SEQ ID NO: 11132 - DNA, 20 bp, Staphylococcus simulans
aacaaggatgtaagtaacta

SEQ ID NO: 11133 - DNA, 20 bp, Lactococcus raffinolactis
ccagccctaagtgacgcagc

SEQ ID NO: 11134 - DNA, 30 bp, Facklamia languida
gtaacacgtggagaacctacccttaagcgg

SEQ ID NO: 11135 - DNA, 20 bp, Abiotrophia defectiva
ggtggcgcaagctatcgcta

SEQ ID NO: 11136 - DNA, 20 bp, Moraxella atlantae
agggaggaagagctagtgga

SEQ ID NO: 11137 - DNA, 20 bp, Bacillus sp
gataatacgttttcttgcat

SEQ ID NO: 11138 - DNA, 20 bp, Bacteroides vulgatus
agccgtaagccgcaaggcat

SEQ ID NO: 11139 - DNA, 20 bp, Streptococcus thoraltensis
acttttcttaggaacactgg

SEQ ID NO: 11140 - DNA, 20 bp, Anaerococcus tetradius
cgtatggaccgagcgttgtc

SEQ ID NO: 11141 - DNA, 20 bp, Clostridium cadaveris
cgtaggtggaattttaagtg

SEQ ID NO: 11142 - DNA, 20 bp, Leuconostoc fallax
atatggctagagtggcgaac

SEQ ID NO: 11143 - DNA, 30 bp, Prevotella oris
cttccccgggcgtcgaccggcgcacgggtg

SEQ ID NO: 11144 - DNA, 20 bp, Vagococcus fluvialis
acggtacaatgagtcgcgag

SEQ ID NO: 11145 - DNA, 20 bp, Dolosigranulum pigrum
ggctttgctaccactcatgg

SEQ ID NO: 11146 - DNA, 30 bp, Cardiobacterium hominis
gatgtcaactaggcgtcgggttgttaaaga

SEQ ID NO: 11147 - DNA, 20 bp, Peptoniphilus indolicus
aatacccgatgaaatcgtaa

SEQ ID NO: 11148 - DNA, 20 bp, Bacteroides capilosus
tggctgccaaagatttatcg

SEQ ID NO: 11149 - DNA, 30 bp, Leuconostoc fallax
gtggacaacctgcctctaagcaggggataa

SEQ ID NO: 11150 - DNA, 20 bp, Facklamia sourekii
gagaagaacagtcagtagag

SEQ ID NO: 11151 - DNA, 20 bp, Dolosigranulum pigrum
ccctatgggaggcagccgtc

SEQ ID NO: 11152 - DNA, 20 bp, Anaerobiospirillum succiniciproducens
ttcagtggggaggaaacact

SEQ ID NO: 11153 - DNA, 20 bp, Actinomyces radingae
agtcgaacgggatctgcgtg

SEQ ID NO: 11154 - DNA, 20 bp, Bacteroides vulgatus
cccttgttgtcagttactaa

SEQ ID NO: 11155 - DNA, 20 bp, Peptoniphilus indolicus
gatgccgaaggtagggttaa

SEQ ID NO: 11156 - DNA, 20 bp, Prevotella oris
ccaatccttaaatccggtcc

SEQ ID NO: 11157 - DNA, 20 bp, Bacteroides distasonis
ggagcgaatccccaaaccac

SEQ ID NO: 11158 - DNA, 20 bp, Clostridium clostridiiforme
cagtgccgcatggcagtgtg

SEQ ID NO: 11159 - DNA, 30 bp, Vagococcus fluvialis
ccggagcttgctccaccgaaaatcaaagag

SEQ ID NO: 11160 - DNA, 20 bp, Weeksella virosa
taataccgtatataaagcta

SEQ ID NO: 11161 - DNA, 20 bp, Dolosigranulum pigrum
tgttgggggctttccggccc

SEQ ID NO: 11162 - DNA, 20 bp, Abiotrophia defectiva
tggcgcaagctatcgctaag

SEQ ID NO: 11163 - DNA, 20 bp, Pasteurella multocida
gatttggggattgagcaata

SEQ ID NO: 11164 - DNA, 20 bp, Corynebacterium confusum
gggcttgacatatttaggtt

SEQ ID NO: 11165 - DNA, 20 bp, Ignavigranum ruoffiae
ttgcttcttccgcgtgagtg

SEQ ID NO: 11166 - DNA, 20 bp, Weeksella virosa
gcttttatatgtgaataaac

SEQ ID NO: 11167 - DNA, 20 bp, Bacteroides distasonis
ctggggggcttgagtatgtt

SEQ ID NO: 11168 - DNA, 20 bp, Leptotrichia buccalis
gagagcgggcagtgccttcg

SEQ ID NO: 11169 - DNA, 20 bp, Leuconostoc fallax
ataacaacacatttcgcatg

SEQ ID NO: 11170 - DNA, 20 bp, Clostridium cadaveris
ttaataccgcatattatgat

SEQ ID NO: 11171 - DNA, 20 bp, Dolosigranulum pigrum
ctttgctaccactcatggat

SEQ ID NO: 11172 - DNA, 20 bp, Globicatella sanguinis
gttctggttaaggttagtgg

SEQ ID NO: 11173 - DNA, 20 bp, Suttonella indologenes
tctaccttggggtgggggat

SEQ ID NO: 11174 - DNA, 20 bp, Bacteroides distasonis
tagcaatagccgtttgcgag

SEQ ID NO: 11175 - DNA, 20 bp, Bacillus schlegellii
taccggatagattgtcctgg

SEQ ID NO: 11176 - DNA, 20 bp, Prevotella oralis
gtaaatgcggtccaatcctt

SEQ ID NO: 11177 - DNA, 20 bp, Prevotella bivia
gttcgtgaccgtacaggatc

SEQ ID NO: 11178 - DNA, 20 bp, Bacteroides eggerthii
gaatgtagtggaaacattac

SEQ ID NO: 11179 - DNA, 20 bp, Helcococcus kunzii
ggaatgaaaccgaaaaagga

SEQ ID NO: 11180 - DNA, 20 bp, Kocuria kristinae
ttatgtactggtcttagatg

SEQ ID NO: 11181 - DNA, 20 bp, Paenibacillus apiarius
gggaaatgggaaagacggag

SEQ ID NO: 11182 - DNA, 20 bp, Psychrobacter phenylpyruvicus
gggggcagcttgcgctctcg

SEQ ID NO: 11183 - DNA, 20 bp, Vagococcus fluvialis
aatttgttttcccgcatggg

SEQ ID NO: 11184 - DNA, 20 bp, Brevibacillus centrosporus
ggaaaggcggcgcaagctat

SEQ ID NO: 11185 - DNA, 20 bp, Staphylococcus simulans
tatgcatcccttgacggtac

SEQ ID NO: 11186 - DNA, 20 bp, Globicatella sanguinis
acaacgagaacttgttctgg

SEQ ID NO: 11187 - DNA, 20 bp, Bacteroides ureolyticus
cataagttaaatagggaaag

SEQ ID NO: 11188 - DNA, 20 bp, Corynebacterium group ANF
gcgagagatcgtctgtccct

SEQ ID NO: 11189 - DNA, 20 bp, Bacillus sp
gggttctacttgcttcccgc

SEQ ID NO: 11190 - DNA, 20 bp, Bacillus marinus
gcttgcttctctaacttagc

SEQ ID NO: 11191 - DNA, 30 bp, Prevotella disiens
atctgacttgcagcgcgaactggctgactt

SEQ ID NO: 11192 - DNA, 20 bp, Paenibacillus apiarius
cctcgcctgagggaaatggg

SEQ ID NO: 11193 - DNA, 20 bp, Paenibacillus peoriae
tttctgcatggaagaaggag

SEQ ID NO: 11194 - DNA, 20 bp, Dolosigranulum pigrum
ggcattggaaactgacagac

SEQ ID NO: 11195 - DNA, 20 bp, Bacteroides distasonis
agggaggccacctggcgaca

SEQ ID NO: 11196 - DNA, 20 bp, Facklamia sourekii
gctcgcatgagtttgagttg

SEQ ID NO: 11197 - DNA, 20 bp, Streptococcus ratti
accatagtgtgctctggaaa

SEQ ID NO: 11198 - DNA, 20 bp, Peptostreptococcus anaerobius
ttaatgaaagatgagcggcg

SEQ ID NO: 11199 - DNA, 20 bp, Prevotella bivia
gggataaagtggggaacgtg

SEQ ID NO: 11200 - DNA, 20 bp, Streptococcus thoraltensis
gcatttataactaccgtagc

SEQ ID NO: 11201 - DNA, 20 bp, Dolosigranulum pigrum
tggtcgcatgacgaattcat

SEQ ID NO: 11202 - DNA, 20 bp, Kingella kingae
atcattaactgatgacggta

SEQ ID NO: 11203 - DNA, 20 bp, Ignavigranum ruoffiae
attagttaccagcattgaga

SEQ ID NO: 11204 - DNA, 20 bp, Facklamia sourekii
agcagcgaagtcgtgaggcc

SEQ ID NO: 11205 - DNA, 20 bp, Prevotella oralis
aactgggaatcttgagtacg

SEQ ID NO: 11206 - DNA, 20 bp, Corynebacterium group ANF
agggtggtgcctgtggtgga

SEQ ID NO: 11207 - DNA, 20 bp, Leptotrichia buccalis
aaactacagggctggagtat

SEQ ID NO: 11208 - DNA, 20 bp, Bacteroides eggerthii
tgcagcataggtaggcggaa

SEQ ID NO: 11209 - DNA, 20 bp, Kingella kingae
attaactgatgacggtacct

SEQ ID NO: 11210 - DNA, 30 bp, Actinomyces radingae
taatcctctggcttaactgggggtgtgcgg

SEQ ID NO: 11211 - DNA, 20 bp, Peptoniphilus indolicus
aaccgcaaggaagcagatgc

SEQ ID NO: 11212 - DNA, 20 bp, Sphingobacterium multivorum
aacaccgcataacatatgtg

SEQ ID NO: 11213 - DNA, 20 bp, Dolosigranulum pigrum
ggagcgcaggcggtctgttt

SEQ ID NO: 11214 - DNA, 20 bp, Staphylococcus simulans
gcatcccttgacggtaccta

SEQ ID NO: 11215 - DNA, 30 bp, Pseudomonas fluorescens
tcgagcggtagagagatgcttgcatctctt

SEQ ID NO: 11216 - DNA, 20 bp, Anaerococcus prevotii
tgagaagagtagaggtaagt

SEQ ID NO: 11217 - DNA, 20 bp, Kocuria kristinae
ggttcttcccttttgggctg

SEQ ID NO: 11218 - DNA, 20 bp, Prevotella disiens
ggttgcatgtaaatgtaatc

SEQ ID NO: 11219 - DNA, 20 bp, Leuconostoc fallax
taccgtataacaacacattt

SEQ ID NO: 11220 - DNA, 30 bp, Alloiococcus otitis
aggccatgatgcgtagccgacttgagaggg

SEQ ID NO: 11221 - DNA, 20 bp, Prevotella oralis
cccttcggggcattggtgga

SEQ ID NO: 11222 - DNA, 20 bp, Moraxella atlantae
tatgatactggtgaactaga

SEQ ID NO: 11223 - DNA, 20 bp, Streptococcus acidominimus
atgttgttaatttaaaagga

SEQ ID NO: 11224 - DNA, 20 bp, Pasteurella multocida
atagaatacttgattgacgt

SEQ ID NO: 11225 - DNA, 20 bp, Prevotella loescheii
gaactggggcgcttgagtgc

SEQ ID NO: 11226 - DNA, 20 bp, Dolosigranulum pigrum
ttgcagtgattgattagtgg

SEQ ID NO: 11227 - DNA, 20 bp, Ignavigranum ruoffiae
tgttgttagagaagaaccat

SEQ ID NO: 11228 - DNA, 20 bp, Budvicia aquatica
gttgtgggcatgacccgtgg

SEQ ID NO: 11229 - DNA, 30 bp, Dolosigranulum pigrum
agtgctaagtgttgggggctttccggccct

SEQ ID NO: 11230 - DNA, 20 bp, Weeksella virosa
actgcttttatatgtgaata

SEQ ID NO: 11231 - DNA, 20 bp, Vagococcus fluvialis
tcggtgtcactgttggatgg

SEQ ID NO: 11232 - DNA, 20 bp, Bacteroides capilosus
ggcttgacatccgactaacg

SEQ ID NO: 11233 - DNA, 20 bp, Streptococcus acidominimus
gagtggaaaatttactctgt

SEQ ID NO: 11234 - DNA, 30 bp, Virgibacillus proomii
aagtcgagcgcgggaagcaagcagaacccc

SEQ ID NO: 11235 - DNA, 20 bp, Moraxella atlantae
gcgggtgcaggtggtgcact

SEQ ID NO: 11236 - DNA, 20 bp, Facklamia sourekii
ggtacagcgagcagcgaagt

SEQ ID NO: 11237 - DNA, 20 bp, Bacteroides ureolyticus
aagagattagaaagtgctag

SEQ ID NO: 11238 - DNA, 20 bp, Atopobium parvulum
cttccgcatggaagactcga

SEQ ID NO: 11239 - DNA, 20 bp, Peptoniphilus indolicus
actcgcgtctgattaattag

SEQ ID NO: 11240 - DNA, 20 bp, Bacillus schlegellii
attgacggtacccgacgagg

SEQ ID NO: 11241 - DNA, 20 bp, Streptococcus sobrinus
tgtttaaaagaagccattgc

SEQ ID NO: 11242 - DNA, 20 bp, Bacteroides distasonis
aaagggaagccacctggcga

SEQ ID NO: 11243 - DNA, 20 bp, Bacillus megaterium
gtaacaaggtagccgatcgg

SEQ ID NO: 11244 - DNA, 20 bp, Prevotella oralis
cgtccgattagccagccggc

SEQ ID NO: 11245 - DNA, 20 bp, Bacteroides ureolyticus
atttaacataagttaaatag

SEQ ID NO: 11246 - DNA, 20 bp, Myroides odoratus
agcagctaccaggcaactgg

SEQ ID NO: 11247 - DNA, 20 bp, Bacillus schlegellii
cggggaagaagggccgcgga

SEQ ID NO: 11248 - DNA, 20 bp, Campylobacter lari
gaagcgactagcttgctagt

SEQ ID NO: 11249 - DNA, 20 bp, Prevotella oris
atccaatccttaaatccggt

SEQ ID NO: 11250 - DNA, 20 bp, Atopobium parvulum
gggggagtatttcttccgtg

SEQ ID NO: 11251 - DNA, 20 bp, Actinomyces meyeri
catgcgccctgggcgtgcgg

SEQ ID NO: 11252 - DNA, 20 bp, Actinomyces radingae
gaacctctttcgctcgtgtg

SEQ ID NO: 11253 - DNA, 20 bp, Helcococcus kunzii
cgagaatttttcagttgatt

SEQ ID NO: 11254 - DNA, 20 bp, Leuconostoc fallax
aacaacgcatttcgcatgaa

SEQ ID NO: 11255 - DNA, 20 bp, Anaerobiospirillum succiniciproducens
ccttgacatcgtaggaatct

SEQ ID NO: 11256 - DNA, 20 bp, Myroides odoratus
aaggcagattactacgtact

SEQ ID NO: 11257 - DNA, 20 bp, Moraxella atlantae
gaaactgccttatagagggg

SEQ ID NO: 11258 - DNA, 20 bp, Myroides odoratus
ctgcttgacttgaatagtat

SEQ ID NO: 11259 - DNA, 20 bp, Streptococcus acidominimus
ctgctacatttgaattgatt

SEQ ID NO: 11260 - DNA, 20 bp, Prevotella oralis
tggtcggtggccaagcgaaa

SEQ ID NO: 11261 - DNA, 20 bp, Leptotrichia buccalis
gtctagggtgaaaacctgcg

SEQ ID NO: 11262 - DNA, 20 bp, Corynebacterium kutscheri
ttcctttttaggtctgtata

SEQ ID NO: 11263 - DNA, 20 bp, Bacteroides distasonis
accgcatgaagcagggatcc

SEQ ID NO: 11264 - DNA, 20 bp, Ignavigranum ruoffiae
tgtgaagaaggatttcggtc

SEQ ID NO: 11265 - DNA, 20 bp, Empedobacter brevis
tatcgcagtaggataggcat

SEQ ID NO: 11266 - DNA, 20 bp, Prevotella bivia
ggggaacgtgttcccttttg

SEQ ID NO: 11267 - DNA, 20 bp, Moraxella atlantae
ttggggctcatgaagcctta

SEQ ID NO: 11268 - DNA, 20 bp, Vagococcus fluvialis
acgctttgattttcaccgga

SEQ ID NO: 11269 - DNA, 20 bp, Alloiococcus otitis
caagtcgaacgccaaatctt

SEQ ID NO: 11270 - DNA, 20 bp, Actinomyces turicensis
gggtacgggttgacttgagt

SEQ ID NO: 11271 - DNA, 20 bp, Alloiococcus otitis
agttttcccagtgcatgctg

SEQ ID NO: 11272 - DNA, 30 bp, Prevotella bivia
ctatttatgtcggcgaccggcgcacgggtg

SEQ ID NO: 11273 - DNA, 20 bp, Prevotella disiens
cccaatgatattcattgatg

SEQ ID NO: 11274 - DNA, 20 bp, Kingella kingae
agtagagatactcttgtgcc

SEQ ID NO: 11275 - DNA, 20 bp, Clostridium glycolicum
attcacttcggtgaagagcg

SEQ ID NO: 11276 - DNA, 20 bp, Alloiococcus otitis
caggcggtccggtaagtctg

SEQ ID NO: 11277 - DNA, 20 bp, Streptococcus sobrinus
aagaggagttaactcatgtt

SEQ ID NO: 11278 - DNA, 20 bp, Bacillus sp
agcaagtagaaccccttcgg

SEQ ID NO: 11279 - DNA, 20 bp, Clostridium tetani
aggtttcgcatgaaacttta

SEQ ID NO: 11280 - DNA, 20 bp, Clostridium innocuum
ataggtatacggagcgcatg

SEQ ID NO: 11281 - DNA, 20 bp, Anaerobiospirillum succiniciproducens
cccttcgggggaaagacttc

SEQ ID NO: 11282 - DNA, 20 bp, Prevotella oralis
cgaactgggaatcttgagta

SEQ ID NO: 11283 - DNA, 30 bp, Clostridium cadaveris
gatgcgtaggtggaattttaagtgggatgt

SEQ ID NO: 11284 - DNA, 20 bp, Atopobium parvulum
gataataccgaatacttcga

SEQ ID NO: 11285 - DNA, 20 bp, Bacteroides distasonis
acccgggtttgaacgcattc

SEQ ID NO: 11286 - DNA, 20 bp, Anaerobiospirillum succiniciproducens
cgtaggaatctttcagagat

SEQ ID NO: 11287 - DNA, 20 bp, Bacteroides eggerthii
agtggagtatgcatactcct

SEQ ID NO: 11288 - DNA, 20 bp, Anaerococcus prevotii
cttgagaagagtagaggtaa

SEQ ID NO: 11289 - DNA, 20 bp, Sphingobacterium multivorum
ccatcggagagcttgctcga

SEQ ID NO: 11290 - DNA, 20 bp, Leptotrichia buccalis
agggtgaaaacctgcggctc

SEQ ID NO: 11291 - DNA, 20 bp, Atopobium parvulum
gctcaacccccgctcgctct

SEQ ID NO: 11292 - DNA, 20 bp, Dolosigranulum pigrum
ctaatctttcaaagccattc

SEQ ID NO: 11293 - DNA, 20 bp, Alloiococcus otitis
gcaggaagaggcggagtggc

SEQ ID NO: 11294 - DNA, 20 bp, Dolosigranulum pigrum
actgcttgcagtgattgatt

SEQ ID NO: 11295 - DNA, 20 bp, Clostridium cadaveris
cctctgtgccgccgtaaaca

SEQ ID NO: 11296 - DNA, 20 bp, Bacteroides caccae
ttatggggaaacccatacgc

SEQ ID NO: 11297 - DNA, 20 bp, Bacteroides vulgatus
aaggtattccggtagacgat

SEQ ID NO: 11298 - DNA, 20 bp, Moraxella atlantae
ccgttggggctcatgaagcc

SEQ ID NO: 11299 - DNA, 20 bp, Bacillus marinus
tagagaagcttgcttctcta

SEQ ID NO: 11300 - DNA, 20 bp, Prevotella disiens
gtttgggaataatcgacatt

SEQ ID NO: 11301 - DNA, 20 bp, Leptotrichia buccalis
cgtaaggaacttgccccgca

SEQ ID NO: 11302 - DNA, 20 bp, Prevotella oralis
gggcactctgtgaatactgc

SEQ ID NO: 11303 - DNA, 20 bp, Bacteroides vulgatus
tggacagccttctgaaagga

SEQ ID NO: 11304 - DNA, 20 bp, Dolosigranulum pigrum
gcccatgagcgggggacaac

SEQ ID NO: 11305 - DNA, 20 bp, Veillonella atypica
gtgcgaatagtgcgaggatt

SEQ ID NO: 11306 - DNA, 20 bp, Bacillus schlegellii
ttgtaaacccctgttgtcgg

SEQ ID NO: 11307 - DNA, 20 bp, Streptococcus ratti
tgtgcttgcacaccgtgttt

SEQ ID NO: 11308 - DNA, 20 bp, Veillonella atypica
gcatacgatccaatctcggc

SEQ ID NO: 11309 - DNA, 20 bp, Weeksella virosa
gtttgaagtagctagaatgt

SEQ ID NO: 11310 - DNA, 20 bp, Bacteroides eggerthii
tacagccttcgggccgctgt

SEQ ID NO: 11311 - DNA, 20 bp, Dolosigranulum pigrum
acgagcagcgatcccgcaag

SEQ ID NO: 11312 - DNA, 20 bp, Brevibacillus thermoruber
gggtaagtctgatgtcaaag

SEQ ID NO: 11313 - DNA, 20 bp, Prevotella bivia
atatggggataaagtgggga

SEQ ID NO: 11314 - DNA, 20 bp, Bacteroides ureolyticus
gacataagttaaatagggaa

SEQ ID NO: 11315 - DNA, 20 bp, Haemophilus segnis
ccttgagcttggtgcccgaa

SEQ ID NO: 11316 - DNA, 20 bp, Bacteroides vulgatus
attacggtgaaagccgtaag

SEQ ID NO: 11317 - DNA, 20 bp, Bacteroides vulgatus
aaattgcagatgaattacgg

SEQ ID NO: 11318 - DNA, 20 bp, Prevotella oralis
tctgtgaatactgccgccgt

SEQ ID NO: 11319 - DNA, 20 bp, Facklamia languida
tggagaacctacccttaagc

SEQ ID NO: 11320 - DNA, 20 bp, Peptoniphilus asaccharolyticus
agtcagatgtgaaaggcaag

SEQ ID NO: 11321 - DNA, 20 bp, Prevotella bivia
ggataacccagcgaaagttg

SEQ ID NO: 11322 - DNA, 20 bp, Cardiobacterium hominis
aggcctcgcggcaagagatg

SEQ ID NO: 11323 - DNA, 20 bp, Aerococcus christensenii
gtttgttcgcatgaacaaac

SEQ ID NO: 11324 - DNA, 20 bp, Bacillus schlegellii
caagtcgagcggggaggcgg

SEQ ID NO: 11325 - DNA, 20 bp, Streptococcus sobrinus
cttgctccagtgttactaat

SEQ ID NO: 11326 - DNA, 20 bp, Prevotella oralis
gggcttgaactgccattgac

SEQ ID NO: 11327 - DNA, 20 bp, Weeksella virosa
agaattagtttgaagtagct

SEQ ID NO: 11328 - DNA, 20 bp, Bacillus sp
cacccccgaaggggttctac

SEQ ID NO: 11329 - DNA, 20 bp, Microbacterium hominis
aacaccgtagaaatacggga

SEQ ID NO: 11330 - DNA, 20 bp, Bacteroides vulgatus
gcaactgacattgaggctcg

SEQ ID NO: 11331 - DNA, 20 bp, Bacillus schlegellii
gttaagtctgctgtgaaagg

SEQ ID NO: 11332 - DNA, 20 bp, Corynebacterium confusum
atcgcttaaagttggcctta

SEQ ID NO: 11333 - DNA, 20 bp, Actinomyces radingae
ctttttctttgggataacgc

SEQ ID NO: 11334 - DNA, 20 bp, Facklamia sourekii
actgatttgacggtatctaa

SEQ ID NO: 11335 - DNA, 20 bp, Chromobacterium violaceum
ggcattggagactgcacagc

SEQ ID NO: 11336 - DNA, 20 bp, Clostridium limosum
tcaatgcatgttgaaatgat

SEQ ID NO: 11337 - DNA, 30 bp, Vagococcus fluvialis
ccgaaaatcaaagagtggcggacgggtgag

SEQ ID NO: 11338 - DNA, 20 bp, Suttonella indologenes
gggtgggggataacgtatgg

SEQ ID NO: 11339 - DNA, 20 bp, Alloiococcus otitis
ttgcaggaagaggcggagtg

SEQ ID NO: 11340 - DNA, 20 bp, Streptococcus thoraltensis
acttaaagatggacctgcgt

SEQ ID NO: 11341 - DNA, 20 bp, Suttonella indologenes
gcactttcgttagtgaagaa

SEQ ID NO: 11342 - DNA, 20 bp, Abiotrophia defectiva
cgtgaggaaaggtggcgcaa

SEQ ID NO: 11343 - DNA, 20 bp, Peptoniphilus indolicus
cgatgaaatcgtaatgacac

SEQ ID NO: 11344 - DNA, 20 bp, Cardiobacterium hominis
aagagatgagcccatgttgg

SEQ ID NO: 11345 - DNA, 20 bp, Weeksella virosa
tctagaattagtttgaagta

SEQ ID NO: 11346 - DNA, 20 bp, Bacteroides distasonis
ggggcttgagtatgtttgag

SEQ ID NO: 11347 - DNA, 20 bp, Bacillus marinus
tcagttgaaagatggtttcg

SEQ ID NO: 11348 - DNA, 20 bp, Prevotella bivia
ggtccttcgggacatctgtg

SEQ ID NO: 11349 - DNA, 20 bp, Facklamia languida
catagaatcacagatcgcat

SEQ ID NO: 11350 - DNA, 30 bp, Ignavigranum ruoffiae
ctatcactaaaggatggtcccgcggtgcat

SEQ ID NO: 11351 - DNA, 20 bp, Anaerococcus tetradius
atggaccgagcgttgtccgg

SEQ ID NO: 11352 - DNA, 20 bp, Moraxella atlantae
ttatccttacttgctagcag

SEQ ID NO: 11353 - DNA, 20 bp, Bacteroides vulgatus
cagatgaattacggtgaaag

SEQ ID NO: 11354 - DNA, 30 bp, Leuconostoc lactis
tgaaggagcttgctcctgattgataaacat

SEQ ID NO: 11355 - DNA, 20 bp, Myroides odoratus
ctataaaattgccgttgata

SEQ ID NO: 11356 - DNA, 20 bp, Staphylococcus simulans
acacatgaaaccgcatggtt

SEQ ID NO: 11357 - DNA, 20 bp, Veillonella atypica
atggttcttgtgcgaatagt

SEQ ID NO: 11358 - DNA, 20 bp, Clostridium sordellii
aatacgggataaaatatgag

SEQ ID NO: 11359 - DNA, 20 bp, Peptoniphilus indolicus
gcttcccttcggggacagta

SEQ ID NO: 11360 - DNA, 20 bp, Dolosigranulum pigrum
gtgattgattagtggcgaac

SEQ ID NO: 11361 - DNA, 20 bp, Staphylococcus simulans
accggataacacatgaaacc

SEQ ID NO: 11362 - DNA, 20 bp, Bacteroides vulgatus
ccgtttgcatgtactttatg

SEQ ID NO: 11363 - DNA, 20 bp, Clostridium clostridiiforme
catccccctgacgggccggt

SEQ ID NO: 11364 - DNA, 20 bp, Helcococcus kunzii
cagtcgatttcttcggaatg

SEQ ID NO: 11365 - DNA, 20 bp, Streptococcus thoraltensis
taaaaggagctaacccatgt

SEQ ID NO: 11366 - DNA, 20 bp, Leptotrichia buccalis
ggcatctaggcggccctgta

SEQ ID NO: 11367 - DNA, 20 bp, Prevotella disiens
ctgacttgagtacacacaac

SEQ ID NO: 11368 - DNA, 20 bp, Streptococcus sobrinus
gttgtaggggaagaacgtgt

SEQ ID NO: 11369 - DNA, 20 bp, Psychrobacter phenylpyruvicus
aacttgattccttagtgacg

SEQ ID NO: 11370 - DNA, 20 bp, Moraxella atlantae
acacactggtggtgacgtta

SEQ ID NO: 11371 - DNA, 20 bp, Anaerobiospirillum succiniciproducens
cattctaaactgcctttcta

SEQ ID NO: 11372 - DNA, 20 bp, Comamonas terrigena
ggaacgaaaagccctgggtt

SEQ ID NO: 11373 - DNA, 20 bp, Prevotella bivia
cagatagttggtcgtgtgca

SEQ ID NO: 11374 - DNA, 20 bp, Clostridium limosum
caatgcatgttgaaatgatt

SEQ ID NO: 11375 - DNA, 20 bp, Bacteroides vulgatus
agctgcaactgacattgagg

SEQ ID NO: 11376 - DNA, 20 bp, Actinomyces radingae
cgctcgtgtgcaagccgcta

SEQ ID NO: 11377 - DNA, 20 bp, Bacteroides vulgatus
ctgccgtctactcttggaca

SEQ ID NO: 11378 - DNA, 20 bp, Dolosigranulum pigrum
aactactagcgccttgacgg

SEQ ID NO: 11379 - DNA, 20 bp, Facklamia sourekii
ttgagttgaaagacggcttt

SEQ ID NO: 11380 - DNA, 20 bp, Vagococcus fluvialis
agtcgaacgctttgattttc

SEQ ID NO: 11381 - DNA, 20 bp, Anaerobiospirillum succiniciproducens
agagggagatggaatttcag

SEQ ID NO: 11382 - DNA, 20 bp, Prevotella disiens
ggaaacggcaaagagtgctt

SEQ ID NO: 11383 - DNA, 20 bp, Streptococcus sobrinus
gggaagaacgtgtgtaagag

SEQ ID NO: 11384 - DNA, 20 bp, Lactococcus raffinolactis
gagaagaacgttgcatagag

SEQ ID NO: 11385 - DNA, 20 bp, Clostridium cadaveris
gtttttctgcatgggaaagt

SEQ ID NO: 11386 - DNA, 30 bp, Clostridium cadaveris
aacctgggaactgcattccaaactggaatt

SEQ ID NO: 11387 - DNA, 20 bp, Dolosigranulum pigrum
atgggtgcaaacctgatgga

SEQ ID NO: 11388 - DNA, 20 bp, Streptococcus acidominimus
cgatgcccgttctagagata

SEQ ID NO: 11389 - DNA, 20 bp, Myroides odoratus
cagtacagaaagcagctacc

SEQ ID NO: 11390 - DNA, 30 bp, Staphylococcus simulans
atcccttgacggtacctaatcagaaagcca

SEQ ID NO: 11391 - DNA, 20 bp, Haemophilus segnis
gcgtgatgtttaataggcat

SEQ ID NO: 11392 - DNA, 20 bp, Prevotella oralis
gaactgggaatcttgagtac

SEQ ID NO: 11393 - DNA, 20 bp, Kytococcus sedentarius
ctggatacgaccgaccctcg

SEQ ID NO: 11394 - DNA, 20 bp, Weeksella virosa
aacaggagctacctagggta

SEQ ID NO: 11395 - DNA, 20 bp, Prevotella oralis
aacgtgcctcagttcggact

SEQ ID NO: 11396 - DNA, 20 bp, Bacillus sp
cttgcgccgccttttaacgt

SEQ ID NO: 11397 - DNA, 20 bp, Bacteroides distasonis
ggttctatggatcgtaaacc

SEQ ID NO: 11398 - DNA, 20 bp, Pasteurella multocida
aatacttgattgacgttaat

SEQ ID NO: 11399 - DNA, 20 bp, Leptotrichia buccalis
aagtctagggtgaaaacctg

SEQ ID NO: 11400 - DNA, 20 bp, Suttonella indologenes
atggttaatacctgtgaatt

SEQ ID NO: 11401 - DNA, 20 bp, Staphylococcus simulans
aaggatgtaagtaactgtgc

SEQ ID NO: 11402 - DNA, 20 bp, Kingella kingae
tcattaactgatgacggtac

SEQ ID NO: 11403 - DNA, 20 bp, Empedobacter brevis
tcggcttcagtggctaagcg

SEQ ID NO: 11404 - DNA, 30 bp, Bacteroides eggerthii
agcgtaggcgggtgcttaagtcagttgtga

SEQ ID NO: 11405 - DNA, 20 bp, Bacteroides ovatus
tcgtacagctcgtgccgtag

SEQ ID NO: 11406 - DNA, 20 bp, Bacteroides eggerthii
gcttcaatcgatggcgaccg

SEQ ID NO: 11407 - DNA, 20 bp, Prevotella loescheii
gcagcctactgtagcgctac

SEQ ID NO: 11408 - DNA, 20 bp, Streptococcus sobrinus
atgttaactgtttaaaagaa

SEQ ID NO: 11409 - DNA, 20 bp, Alloiococcus otitis
tcagagatgaagggttccct

SEQ ID NO: 11410 - DNA, 20 bp, Paenibacillus peoriae
tcctttttctgcatggaaga

SEQ ID NO: 11411 - DNA, 20 bp, Moraxella atlantae
aggtgaagctgagaactgta

SEQ ID NO: 11412 - DNA, 20 bp, Myroides odoratus
caactggatgcgaatctcaa

SEQ ID NO: 11413 - DNA, 20 bp, Peptoniphilus indolicus
gaagttaagtcggattagcg

SEQ ID NO: 11414 - DNA, 20 bp, Bacillus schlegellii
gctggggcaaggaaaggggc

SEQ ID NO: 11415 - DNA, 20 bp, Prevotella oralis
tgaactgccattgacttgaa

SEQ ID NO: 11416 - DNA, 30 bp, Helcococcus kunzii
gacagtagctaagaagcaagccctggctaa

SEQ ID NO: 11417 - DNA, 20 bp, Bacteroides capillosus
ctgaggatactgcctccgca

SEQ ID NO: 11418 - DNA, 30 bp, Aerococcus christensenii
agtcgagcgaacagagaaagtgcttgcact

SEQ ID NO: 11419 - DNA, 20 bp, Peptoniphilus indolicus
acttctaaacttgagtagtg

SEQ ID NO: 11420 - DNA, 20 bp, Bacteroides eggerthii
acccttatctatagttacta

SEQ ID NO: 11421 - DNA, 20 bp, Corynebacterium coyleae
ggaggttgtggtggaaagtt

SEQ ID NO: 11422 - DNA, 20 bp, Alloiococcus otitis
gggaagaacacggataggag

SEQ ID NO: 11423 - DNA, 20 bp, Dolosigranulum pigrum
cttgcagtgattgattagtg

SEQ ID NO: 11424 - DNA, 20 bp, Streptococcus sobrinus
caagtggaacgcattggtaa

SEQ ID NO: 11425 - DNA, 20 bp, Bacillus schlegellii
tggggcaaggaaaggggcga

SEQ ID NO: 11426 - DNA, 20 bp, Bacillus marinus
cccattgcccggtctagaga

SEQ ID NO: 11427 - DNA, 20 bp, Actinomyces radingae
gtgctaatactggatgttct

SEQ ID NO: 11428 - DNA, 20 bp, Corynebacterium kutscheri
aacggaaaggctttcttgct

SEQ ID NO: 11429 - DNA, 20 bp, Prevotella oralis
ttagccagccggcggggtaa

SEQ ID NO: 11430 - DNA, 20 bp, Bacteroides caccae
gggaaacccatacgccgcaa

SEQ ID NO: 11431 - DNA, 20 bp, Prevotella oralis
tgtgaatactgccgccgtaa

SEQ ID NO: 11432 - DNA, 20 bp, Cardiobacterium hominis
ggcaagagatgagcccatgt

SEQ ID NO: 11433 - DNA, 20 bp, Paenibacillus apiarius
cggatagacattttcctcgc

SEQ ID NO: 11434 - DNA, 20 bp, Corynebacterium confusum
gtacaaggtagccgtaccgg

SEQ ID NO: 11435 - DNA, 20 bp, Pasteurella multocida
ggcaggtattttaatagaat

SEQ ID NO: 11436 - DNA, 20 bp, Clostridium glycolicum
ccttttgggaagcgagtgtc

SEQ ID NO: 11437 - DNA, 20 bp, Veillonella atypica
gcatcgagactggatgaaag

SEQ ID NO: 11438 - DNA, 20 bp, Dolosigranulum pigrum
atcccgcaagggctagctaa

SEQ ID NO: 11439 - DNA, 20 bp, Staphylococcus simulans
gaacaaggatgtaagtaact

SEQ ID NO: 11440 - DNA, 20 bp, Moraxella atlantae
tgtgaagaaggtcataagat

SEQ ID NO: 11441 - DNA, 20 bp, Bacteroides eggerthii
ggcgccttgagtgcagcata

SEQ ID NO: 11442 - DNA, 20 bp, Prevotella oralis
atcatggaggttgttttcaa

SEQ ID NO: 11443 - DNA, 20 bp, Bacteroides vulgatus
atgaattacggtgaaagccg

SEQ ID NO: 11444 - DNA, 20 bp, Bacteroides vulgatus
ccacctagtcttcgatggat

SEQ ID NO: 11445 - DNA, 30 bp, Bacteroides distasonis
taaacctcttttataagggaataaagtgtg

SEQ ID NO: 11446 - DNA, 20 bp, Gemella morbillorum
gagatatttaaaagttggtt

SEQ ID NO: 11447 - DNA, 20 bp, Pasteurella multocida
ggggattgagcaataagctt

SEQ ID NO: 11448 - DNA, 30 bp, Cardiobacterium hominis
cgatgtcaactaggcgtcgggttgttaaag

SEQ ID NO: 11449 - DNA, 20 bp, Bacteroides vulgatus
agccgcaaggcatctgtgaa

SEQ ID NO: 11450 - DNA, 20 bp, Bacteroides vulgatus
gctaagctgcaactgacatt

SEQ ID NO: 11451 - DNA, 20 bp, Bacteroides distasonis
ctcttttataagggaataaa

SEQ ID NO: 11452 - DNA, 20 bp, Myroides odoratus
ccatggtttatatgaatggc

SEQ ID NO: 11453 - DNA, 20 bp, Empedobacter brevis
ttttgaaagatttatcgcag

SEQ ID NO: 11454 - DNA, 20 bp, Clostridium glycolicum
gagtgtcgaaggtgaaatca

SEQ ID NO: 11455 - DNA, 20 bp, Leuconostoc fallax
gtataacaacgcatttcgca

SEQ ID NO: 11456 - DNA, 20 bp, Ignavigranum ruoffiae
gttttgctatcactaaagga

SEQ ID NO: 11457 - DNA, 20 bp, Bacteroides vulgatus
ctaagctgcaactgacattg

SEQ ID NO: 11458 - DNA, 20 bp, Kingella kingae
actcttgtgccttcgggagc

SEQ ID NO: 11459 - DNA, 20 bp, Moraxella atlantae
tgcaggtggtgcactaagtc

SEQ ID NO: 11460 - DNA, 20 bp, Bacteroides ureolyticus
actagaatttagtgacaggt

SEQ ID NO: 11461 - DNA, 20 bp, Weeksella virosa
agttggcgaccgtaacagga

SEQ ID NO: 11462 - DNA, 20 bp, Bacteroides distasonis
ccgcatgaagcagggatccc

SEQ ID NO: 11463 - DNA, 20 bp, Helcococcus kunzii
tgatacattaatatcgcatg

SEQ ID NO: 11464 - DNA, 20 bp, Prevotella oris
gaagcttgcttccccgggcg

SEQ ID NO: 11465 - DNA, 20 bp, Bacteroides eggerthii
cgggtgcttaagtcagttgt

SEQ ID NO: 11466 - DNA, 20 bp, Corynebacterium group ANF
ccgataggactgcagggtgg

SEQ ID NO: 11467 - DNA, 20 bp, Sphingobacterium multivorum
aaaaccgataattggggcta

SEQ ID NO: 11468 - DNA, 20 bp, Bacteroides ureolyticus
attagaaagtgctagtttac

SEQ ID NO: 11469 - DNA, 20 bp, Helcococcus kunzii
ccttagcgaagataatgaca

SEQ ID NO: 11470 - DNA, 20 bp, Staphylococcus simulans
accgcatggtttcatgatga

SEQ ID NO: 11471 - DNA, 20 bp, Paenibacillus macerans
gataatttattttgcagcat

SEQ ID NO: 11472 - DNA, 30 bp, Bacteroides vulgatus
agaactccgattgcgaaggcagcctgctaa

SEQ ID NO: 11473 - DNA, 20 bp, Peptoniphilus indolicus
acagacaccttcgggaagaa

SEQ ID NO: 11474 - DNA, 20 bp, Bacteroides vulgatus
gaagattaatacaagatggc

SEQ ID NO: 11475 - DNA, 20 bp, Streptococcus thoraltensis
tgcaacagcatcacttaaag

SEQ ID NO: 11476 - DNA, 20 bp, Prevotella bivia
tgcagatgaacgatttagag

SEQ ID NO: 11477 - DNA, 20 bp, Abiotrophia defectiva
tcacatgattccgtgaggaa

SEQ ID NO: 11478 - DNA, 20 bp, Bacteroides ureolyticus
gtaagacgcaatatcgcaag

SEQ ID NO: 11479 - DNA, 20 bp, Streptococcus thoraltensis
cccggtgccggttctagaga

SEQ ID NO: 11480 - DNA, 20 bp, Pseudoramibacter alactolyticus
cgcataacacagcagaatcg

SEQ ID NO: 11481 - DNA, 20 bp, Staphylococcus simulans
ccggataacacatgaaaccg

SEQ ID NO: 11482 - DNA, 20 bp, Prevotella bivia
taggagctcaacttctagat

SEQ ID NO: 11483 - DNA, 20 bp, Eubacterium moniliforme
tttcgcatgaaagaacaatt

SEQ ID NO: 11484 - DNA, 20 bp, Prevotella oralis
agcgcgaactgggaatcttg

SEQ ID NO: 11485 - DNA, 20 bp, Bacteroides eggerthii
cgggccgctgtgaaggtgct

SEQ ID NO: 11486 - DNA, 20 bp, Helcococcus ovis
aggaggcagacgtcgaaggt

SEQ ID NO: 11487 - DNA, 20 bp, Bacteroides vulgatus
acctagtcttcgatggatag

SEQ ID NO: 11488 - DNA, 20 bp, Veillonella atypica
atcgggacgaatggttcttg

SEQ ID NO: 11489 - DNA, 20 bp, Corynebacterium confusum
tgtggcctttatacaggtgg

SEQ ID NO: 11490 - DNA, 20 bp, Anaerobiospirillum succiniciproducens
gattaccacggtgtggtctg

SEQ ID NO: 11491 - DNA, 20 bp, Aerococcus christensenii
tcgcatgaacaaacttagaa

SEQ ID NO: 11492 - DNA, 20 bp, Actinomyces radingae
tctggagggagatgggctcg

SEQ ID NO: 11493 - DNA, 20 bp, Sphingobacterium multivorum
gcagagacgcactcgtcctt

SEQ ID NO: 11494 - DNA, 20 bp, Bacteroides ureolyticus
ttactagaatttagtgacag

SEQ ID NO: 11495 - DNA, 20 bp, Leuconostoc fallax
acaacacatttcgcatgaag

SEQ ID NO: 11496 - DNA, 20 bp, Bacillus schlegellii
ggaggcggcattgacggtac

SEQ ID NO: 11497 - DNA, 20 bp, Alloiococcus otitis
cagtgcatgctgggaaaata

SEQ ID NO: 11498 - DNA, 20 bp, Clostridium cadaveris
atttttctgcatgggaaagt

SEQ ID NO: 11499 - DNA, 20 bp, Bacillus schlegellii
gtgctaggtgtgggtggggc

SEQ ID NO: 11500 - DNA, 20 bp, Atopobium parvulum
gaagactcgagaaagctccg

SEQ ID NO: 11501 - DNA, 20 bp, Ignavigranum ruoffiae
gcacaacgaaggagcttgct

SEQ ID NO: 11502 - DNA, 20 bp, Prevotella oralis
taaaacgtgcctcagttcgg

SEQ ID NO: 11503 - DNA, 20 bp, Ignavigranum ruoffiae
ttcgggacagcgagacaggt

SEQ ID NO: 11504 - DNA, 30 bp, Streptococcus thoraltensis
ttataagcgaagaataggagtaagagtgga

SEQ ID NO: 11505 - DNA, 20 bp, Actinomyces radingae
gtgtagcgggtaaagaagcg

SEQ ID NO: 11506 - DNA, 20 bp, Bacillus marinus
accctgactctctcctgaga

SEQ ID NO: 11507 - DNA, 20 bp, Bacteroides eggerthii
tgattgaagcttgcttcaat

SEQ ID NO: 11508 - DNA, 20 bp, Paenibacillus apiarius
cgcatccaaaactgcatgac

SEQ ID NO: 11509 - DNA, 20 bp, Peptoniphilus indolicus
taacggctcaccaagatagc

SEQ ID NO: 11510 - DNA, 20 bp, Empedobacter brevis
agtaggataggcatgcgtaa

SEQ ID NO: 11511 - DNA, 20 bp, Peptoniphilus indolicus
agaagttaagtcggattagc

SEQ ID NO: 11512 - DNA, 20 bp, Prevotella oralis
gcatcatggaggttgttttc

SEQ ID NO: 11513 - DNA, 20 bp, Prevotella disiens
aatgatattcattgatgaca

SEQ ID NO: 11514 - DNA, 20 bp, Facklamia sourekii
accgcataaaccttaagctc

SEQ ID NO: 11515 - DNA, 20 bp, Prevotella bivia
tgagattacgaataaagatt

SEQ ID NO: 11516 - DNA, 20 bp, Virgibacillus proomii
gaagcaagcagaaccccttc

SEQ ID NO: 11517 - DNA, 20 bp, Bacteroides thetaiotaomicron
cataattagaccgcatggtc

SEQ ID NO: 11518 - DNA, 20 bp, Helcococcus kunzii
ctggttaacttgagtagatg

SEQ ID NO: 11519 - DNA, 20 bp, Myroides odoratus
agcttgctttctagagaccg

SEQ ID NO: 11520 - DNA, 20 bp, Helcococcus kunzii
taatgacagtagctaagaag

SEQ ID NO: 11521 - DNA, 20 bp, Leuconostoc lactis
cgtttagattgaaggagctt

SEQ ID NO: 11522 - DNA, 20 bp, Streptococcus thoraltensis
gaataggagtaagagtggaa

SEQ ID NO: 11523 - DNA, 20 bp, Streptococcus thoraltensis
catcccggtgccggttctag

SEQ ID NO: 11524 - DNA, 20 bp, Weeksella virosa
attagtttgaagtagctaga

SEQ ID NO: 11525 - DNA, 30 bp, Clostridium histolyticum
ggaaacataggagtgcccttcggggaactc

SEQ ID NO: 11526 - DNA, 20 bp, Bacteroides capillosus
ccggtacagagcgtcggtcg

SEQ ID NO: 11527 - DNA, 20 bp, Lactococcus raffinolactis
aacgttgcatagagtggaaa

SEQ ID NO: 11528 - DNA, 20 bp, Bacteroides ureolyticus
ttgacatcctaaaaacatct

SEQ ID NO: 11529 - DNA, 20 bp, Actinomyces radingae
gagcgaatcctttaaagctt

SEQ ID NO: 11530 - DNA, 20 bp, Helcococcus kunzii
tcggaatgaaaccgaaaaag

SEQ ID NO: 11531 - DNA, 20 bp, Arcanobacterium haemolyticum
ccttttccatgggttctgta

SEQ ID NO: 11532 - DNA, 20 bp, Alloiococcus otitis
tcccagtgcatgctgggaaa

SEQ ID NO: 11533 - DNA, 20 bp, Ignavigranum ruoffiae
ctcattggggaaagatggtt

SEQ ID NO: 11534 - DNA, 20 bp, Lactococcus raffinolactis
gagtcgcaaggcagtgatgt

SEQ ID NO: 11535 - DNA, 20 bp, Myroides odoratimimus
ttgaatagtatggaagtaac

SEQ ID NO: 11536 - DNA, 20 bp, Gemella morbillorum
aacagtatttctcgcatgag

SEQ ID NO: 11537 - DNA, 20 bp, Bacteroides capillosus
gaggatactgcctccgcaag

SEQ ID NO: 11538 - DNA, 20 bp, Abiotrophia defectiva
gacgaccgctctagagatag

SEQ ID NO: 11539 - DNA, 20 bp, Staphylococcus simulans
gaaaccgcatggtttcatga

SEQ ID NO: 11540 - DNA, 20 bp, Streptococcus thoraltensis
ccggtgccggttctagagat

SEQ ID NO: 11541 - DNA, 20 bp, Helcococcus kunzii
aacgagaatttttcagttga

SEQ ID NO: 11542 - DNA, 20 bp, Bacteroides thetaiotaomicron
ctcactggagtgtaactgac

SEQ ID NO: 11543 - DNA, 20 bp, Prevotella bivia
ggagctcaacttctagattg

SEQ ID NO: 11544 - DNA, 20 bp, Streptococcus ratti
ggcggtcaggaaagtctgga

SEQ ID NO: 11545 - DNA, 30 bp, Atopobium parvulum
tcgtatgttgccagcggttaggccgggcac

SEQ ID NO: 11546 - DNA, 20 bp, Kocuria kristinae
tactgcccgcatgggctggt

SEQ ID NO: 11547 - DNA, 20 bp, Clostridium glycolicum
atacaggataatataagaga

SEQ ID NO: 11548 - DNA, 20 bp, Facklamia sourekii
ctcaaccgtagaaggtcatt

SEQ ID NO: 11549 - DNA, 20 bp, Prevotella oralis
taattccgtatgcagtccga

SEQ ID NO: 11550 - DNA, 20 bp, Actinomyces radingae
cctctttcgctcgtgtgcaa

SEQ ID NO: 11551 - DNA, 20 bp, Helcococcus kunzii
ataatgacagtagctaagaa

SEQ ID NO: 11552 - DNA, 30 bp, Leuconostoc fallax
tggaatggctttggaaactggcgaacttga

SEQ ID NO: 11553 - DNA, 20 bp, Ignavigranum ruoffiae
tcttccgcgtgagtggcgaa

SEQ ID NO: 11554 - DNA, 20 bp, Prevotella disiens
cttgagtacacacaacgtag

SEQ ID NO: 11555 - DNA, 20 bp, Pseudomonas fluorescens
agagatgcttgcatctcttg

SEQ ID NO: 11556 - DNA, 20 bp, Helcococcus kunzii
tttcttcggaatgaaacgga

SEQ ID NO: 11557 - DNA, 20 bp, Clostridium limosum
atgcatgttgaaatgattaa

SEQ ID NO: 11558 - DNA, 20 bp, Dolosigranulum pigrum
gaggaacttgcccatgagcg

SEQ ID NO: 11559 - DNA, 30 bp, Haemophilus segnis
gcgggaccgcaaggccgcatgccataggat

SEQ ID NO: 11560 - DNA, 20 bp, Prevotella bivia
gctcaacttctagattgcag

SEQ ID NO: 11561 - DNA, 20 bp, Arcanobacterium haemolyticum
atgaaggctcctgcttgcgg

SEQ ID NO: 11562 - DNA, 20 bp, Streptococcus thoraltensis
aacgcatttataactaccgt

SEQ ID NO: 11563 - DNA, 20 bp, Clostridium cadaveris
aagatgagcactctagctag

SEQ ID NO: 11564 - DNA, 20 bp, Helcococcus kunzii
cgtcaaggaggcagacgccg

SEQ ID NO: 11565 - DNA, 20 bp, Actinomyces radingae
tggtgagtgtagcgggtaaa

SEQ ID NO: 11566 - DNA, 20 bp, Peptoniphilus indolicus
attaatacccgatgaaatcg

SEQ ID NO: 11567 - DNA, 20 bp, Bacillus schlegellii
agggccgcggaggcggcatt

SEQ ID NO: 11568 - DNA, 20 bp, Atopobium parvulum
acctgcccctttcattggga

SEQ ID NO: 11569 - DNA, 20 bp, Actinomyces meyeri
acgatgatgctccagctttg

SEQ ID NO: 11570 - DNA, 20 bp, Weeksella virosa
cgagctggatagttgaaggt

SEQ ID NO: 11571 - DNA, 20 bp, Clostridium cadaveris
tagttagttgctaacagtaa

SEQ ID NO: 11572 - DNA, 20 bp, Facklamia sourekii
acagtcagtagagtaactgt

SEQ ID NO: 11573 - DNA, 20 bp, Bacteroides vulgatus
tatggatacccgtttgcatg

SEQ ID NO: 11574 - DNA, 20 bp, Bacteroides distasonis
ggggatatttgctaaagatt

SEQ ID NO: 11575 - DNA, 20 bp, Bacillus sp
accccttcgggggtgacgca

SEQ ID NO: 11576 - DNA, 20 bp, Moraxella atlantae
gagagcttttgctataagat

SEQ ID NO: 11577 - DNA, 20 bp, Corynebacterium group ANF
ttgacatgcactagatgagg

SEQ ID NO: 11578 - DNA, 30 bp, Vagococcus fluvialis
acgctttgattttcaccggagcttgctcca

SEQ ID NO: 11579 - DNA, 20 bp, Anaerococcus tetradius
tatggaccgagcgttgtccg

SEQ ID NO: 11580 - DNA, 20 bp, Corynebacterium group ANF
tcgtctgtccctttgtggct

SEQ ID NO: 11581 - DNA, 20 bp, Clostridium cadaveris
ttagttgctaacagtaagat

SEQ ID NO: 11582 - DNA, 20 bp, Staphylococcus lentus
tggttcaatgttgaaagacg

SEQ ID NO: 11583 - DNA, 20 bp, Propionibacterium acnes
gactaagtcggtacaaggta

SEQ ID NO: 11584 - DNA, 20 bp, Dolosigranulum pigrum
gacgaattcattaaaggtgg

SEQ ID NO: 11585 - DNA, 20 bp, Empedobacter brevis
ctcgaaaacttatctcagtt

SEQ ID NO: 11586 - DNA, 20 bp, Prevotella oralis
gcataccccgttgaaaggcg

SEQ ID NO: 11587 - DNA, 20 bp, Actinomyces radingae
gggggtgtgggaaaggggcc

SEQ ID NO: 11588 - DNA, 20 bp, Alloiococcus otitis
gtcgaacgccaaatcttcct

SEQ ID NO: 11589 - DNA, 20 bp, Suttonella indologenes
ctttcgttagtgaagaaagg

SEQ ID NO: 11590 - DNA, 20 bp, Actinomyces radingae
ggtagtggtgagtgtagcgg

SEQ ID NO: 11591 - DNA, 20 bp, Leptotrichia buccalis
tagggtgaaaacctgcggct

SEQ ID NO: 11592 - DNA, 20 bp, Bacteroides distasonis
tgccaagccattactgacgc

SEQ ID NO: 11593 - DNA, 20 bp, Bacteroides thetaiotaomicron
ttaaattgcaaatgaattat

SEQ ID NO: 11594 - DNA, 20 bp, Abiotrophia defectiva
tccgtgaggaaaggtggcgc

SEQ ID NO: 11595 - DNA, 20 bp, Corynebacterium confusum
gacatatttaggttcgcggc

SEQ ID NO: 11596 - DNA, 20 bp, Prevotella oralis
gtgcagcgcgaactgggaat

SEQ ID NO: 11597 - DNA, 20 bp, Empedobacter brevis
tctcgaaaacttatctcagt

SEQ ID NO: 11598 - DNA, 20 bp, Corynebacterium group ANF
gatcgtctgtccctttgtgg

SEQ ID NO: 11599 - DNA, 20 bp, Bacillus schlegellii
aacccctgttgtcggggaag

SEQ ID NO: 11600 - DNA, 20 bp, Prevotella oralis
tcattcccttcggggcattg

SEQ ID NO: 11601 - DNA, 20 bp, Bacteroides distasonis
cgcattcggaccgaggtgga

SEQ ID NO: 11602 - DNA, 20 bp, Facklamia languida
cataggatgcataacctaga

SEQ ID NO: 11603 - DNA, 20 bp, Cardiobacterium hominis
gcctcgcggcaagagatgag

SEQ ID NO: 11604 - DNA, 20 bp, Bacillus sp
aactgatgaagagcttgctt

SEQ ID NO: 11605 - DNA, 20 bp, Prevotella bivia
ctatttatgtcggcgaccgg

SEQ ID NO: 11606 - DNA, 20 bp, Anaerococcus tetradius
atacgtatggaccgagcgtt

SEQ ID NO: 11607 - DNA, 20 bp, Bacteroides eggerthii
gtatagtttttccgcatggt

SEQ ID NO: 11608 - DNA, 20 bp, Alloiococcus otitis
gtcactgcctatcccttgac

SEQ ID NO: 11609 - DNA, 20 bp, Corynebacterium group ANF
ggcgagagatcgtctgtccc

SEQ ID NO: 11610 - DNA, 20 bp, Suttonella indologenes
ttagtgaagaaaggtttatg

SEQ ID NO: 11611 - DNA, 20 bp, Myroides odoratimimus
gcttgaatagtatggaagta

SEQ ID NO: 11612 - DNA, 20 bp, Alloiococcus otitis
tcctgcttgcaggaagaggc

SEQ ID NO: 11613 - DNA, 20 bp, Dolosigranulum pigrum
tggtctaacattgacgctga

SEQ ID NO: 11614 - DNA, 20 bp, Lactococcus raffinolactis
gacatttgaaagtaccaatt

SEQ ID NO: 11615 - DNA, 20 bp, Myroides odoratus
gaggggtatagagagcttgc

SEQ ID NO: 11616 - DNA, 20 bp, Weeksella virosa
cattgatactgttgatctag

SEQ ID NO: 11617 - DNA, 20 bp, Bacteroides eggerthii
cattacagccttcgggccgc

SEQ ID NO: 11618 - DNA, 20 bp, Bacteroides thetaiotaomicron
aacaggatagccgtaaggca

SEQ ID NO: 11619 - DNA, 20 bp, Sphingobacterium multivorum
ctcgaagacggtgagagtgg

SEQ ID NO: 11620 - DNA, 20 bp, Paenibacillus macerans
aataccggatacgcaactcc

SEQ ID NO: 11621 - DNA, 20 bp, Peptoniphilus indolicus
catttgaaacttctaaactt

SEQ ID NO: 11622 - DNA, 20 bp, Clostridium cadaveris
agggaagctctttcgggagc

SEQ ID NO: 11623 - DNA, 20 bp, Bacillus schlegellii
ctttcccgcgagggacggcg

SEQ ID NO: 11624 - DNA, 20 bp, Bacteroides distasonis
gccgttgaaactggggggct

SEQ ID NO: 11625 - DNA, 30 bp, Bacteroides vulgatus
gggtaacggcccacctagtcttcgatggat

SEQ ID NO: 11626 - DNA, 20 bp, Bacillus sp
cccgaaggggttctacttgc

SEQ ID NO: 11627 - DNA, 20 bp, Psychrobacter phenylpyruvicus
ttagagggcgctcaccacgg

SEQ ID NO: 11628 - DNA, 20 bp, Helcococcus kunzii
taggatagtcttttcggaga

SEQ ID NO: 11629 - DNA, 20 bp, Veillonella atypica
tcgggacgaatggttcttgt

SEQ ID NO: 11630 - DNA, 20 bp, Achromobacter piechaudii
aattctgaagagattcggaa

SEQ ID NO: 11631 - DNA, 20 bp, Bacteroides distasonis
tggggatatttgctaaagat

SEQ ID NO: 11632 - DNA, 20 bp, Anaerobiospirillum succiniciproducens
aggtaagtaggatgtgaaat

SEQ ID NO: 11633 - DNA, 20 bp, Bacteroides eggerthii
atggtttcactattaaagaa

SEQ ID NO: 11634 - DNA, 20 bp, Clostridium clostridiiforme
aaagtccttcggtgccgccg

SEQ ID NO: 11635 - DNA, 20 bp, Dolosigranulum pigrum
agtgattgattagtggcgaa

SEQ ID NO: 11636 - DNA, 20 bp, Brevibacillus reuszeri
tagcccgcgagggtatgcca

SEQ ID NO: 11637 - DNA, 20 bp, Leuconostoc lactis
tcctgattgataaacatttg

SEQ ID NO: 11638 - DNA, 20 bp, Streptococcus thoraltensis
accgtagcttgctacaattg

SEQ ID NO: 11639 - DNA, 20 bp, Suttonella indologenes
acgagtcaaagcgggggatc

SEQ ID NO: 11640 - DNA, 30 bp, Bacteroides vulgatus
tttaaagggagcgtagatggatgtttaagt

SEQ ID NO: 11641 - DNA, 20 bp, Weeksella virosa
tgttgatctagaattagttt

SEQ ID NO: 11642 - DNA, 20 bp, Bacteroides ureolyticus
acttgacatcctaaaaacat

SEQ ID NO: 11643 - DNA, 20 bp, Anaerobiospirillum succiniciproducens
aggcggaaaggtaagtagga

SEQ ID NO: 11644 - DNA, 20 bp, Bacteroides ureolyticus
aacatctaagagattagaaa

SEQ ID NO: 11645 - DNA, 30 bp, Leuconostoc fallax
gccggtgggctaaccttcgggaggtagccg

SEQ ID NO: 11646 - DNA, 20 bp, Pseudomonas fluorescens
gatgcttgcatctcttgaga

SEQ ID NO: 11647 - DNA, 30 bp, Moraxella atlantae
cttacttgctagcaggtgaagctgagaact

SEQ ID NO: 11648 - DNA, 20 bp, Streptococcus thoraltensis
ataaaaggagctaacccatg

SEQ ID NO: 11649 - DNA, 20 bp, Clostridium innocuum
tacggagcgcatgctctgta

SEQ ID NO: 11650 - DNA, 20 bp, Haemophilus segnis
cgcaaggccgcatgccatag

SEQ ID NO: 11651 - DNA, 20 bp, Helcococcus kunzii
gaaaaaggaaagtagcgaac

SEQ ID NO: 11652 - DNA, 20 bp, Bacillus schlegellii
gcagcggaaactggcgggct

SEQ ID NO: 11653 - DNA, 20 bp, Actinomyces radingae
cacccgaagcttgtggctta

SEQ ID NO: 11654 - DNA, 20 bp, Facklamia languida
agtcaatgttagtggcgcac

SEQ ID NO: 11655 - DNA, 20 bp, Abiotrophia defectiva
ccgcataggacatggaatca

SEQ ID NO: 11656 - DNA, 20 bp, Lactococcus raffinolactis
aagtgacgcagcaaacgcat

SEQ ID NO: 11657 - DNA, 20 bp, Staphylococcus saccharolyticus
tcaagcaaaccccataaagt

SEQ ID NO: 11658 - DNA, 30 bp, Leuconostoc fallax
gcagacggttcgttaagtctgaagtgaaag

SEQ ID NO: 11659 - DNA, 20 bp, Clostridium cadaveris
accgcatattatgatttttc

SEQ ID NO: 11660 - DNA, 20 bp, Bacillus marinus
cctgactctctcctgagagt

SEQ ID NO: 11661 - DNA, 20 bp, Myroides odoratus
atgcgaatctcaaaaactgg

SEQ ID NO: 11662 - DNA, 20 bp, Veillonella atypica
cggcatcgagactggatgaa

SEQ ID NO: 11663 - DNA, 20 bp, Bacteroides distasonis
ttaggctgaggactctggtg

SEQ ID NO: 11664 - DNA, 20 bp, Peptoniphilus indolicus
gtgtcggagtaattcggtgc

SEQ ID NO: 11665 - DNA, 20 bp, Bacillus schlegellii
tgtcctggcgcatgctgggg

SEQ ID NO: 11666 - DNA, 20 bp, Leuconostoc fallax
acgtaaagcatatggctaga

SEQ ID NO: 11667 - DNA, 30 bp, Peptoniphilus indolicus
ttaagtcggattagcggcggacgggtgagt

SEQ ID NO: 11668 - DNA, 20 bp, Bacteroides vulgatus
attgcagatgaattacggtg

SEQ ID NO: 11669 - DNA, 20 bp, Pseudoramibacter alactolyticus
tttttattgacccttcgggg

SEQ ID NO: 11670 - DNA, 20 bp, Pseudoramibacter alactolyticus
agttttttattgacccttcg

SEQ ID NO: 11671 - DNA, 20 bp, Actinomyces radingae
ctcagaaatgggtgctaata

SEQ ID NO: 11672 - DNA, 20 bp, Corynebacterium group ANF
gtggtgtcgaaggtgggatc

SEQ ID NO: 11673 - DNA, 20 bp, Anaerobiospirillum succiniciproducens
taaactgcctttctagagta

SEQ ID NO: 11674 - DNA, 20 bp, Peptoniphilus asaccharolyticus
gatgaaatttcgacagattc

SEQ ID NO: 11675 - DNA, 20 bp, Brevibacillus thermoruber
tgctcgacttgagtgcagaa

SEQ ID NO: 11676 - DNA, 20 bp, Bacillus schlegellii
tgggggtgcagcggaaactg

SEQ ID NO: 11677 - DNA, 20 bp, Peptoniphilus indolicus
gaagcagatgccgaaggtag

SEQ ID NO: 11678 - DNA, 20 bp, Stenotrophomonas maltophilia
caatggcaggagacaaagag

SEQ ID NO: 11679 - DNA, 20 bp, Campylobacter concisus
agggagctgcgaaggtggga

SEQ ID NO: 11680 - DNA, 20 bp, Corynebacterium pseudotuberculosis
ccgtaacggtgggcgctagg

SEQ ID NO: 11681 - DNA, 20 bp, Corynebacterium renale
ctggtagtccatgccgaaac

SEQ ID NO: 11682 - DNA, 20 bp, Pseudomonas putida
cacgggtgattcatgactgg

SEQ ID NO: 11683 - DNA, 20 bp, Kocuria rosea
aacacgtggtaacctaccta

SEQ ID NO: 11684 - DNA, 20 bp, Shewanella algae
cgtggatcagaatgcccggt

SEQ ID NO: 11685 - DNA, 30 bp, Prevotella disiens
tcgacattacgtgtaatgttttgcatgtac

SEQ ID NO: 11686 - DNA, 30 bp, Streptococcus urinalis
acgctgaggtcatgtgcttgcacaagacca

SEQ ID NO: 11687 - DNA, 20 bp, Enterococcus faecium
gtttgaacacccgaagtcgg

SEQ ID NO: 11688 - DNA, 30 bp, Bacteroides capillosus
atgcaggcatctaactaggattaaaggttt

SEQ ID NO: 11689 - DNA, 20 bp, Pasteurella multocida
cgtcacccatgggagtgggt

SEQ ID NO: 11690 - DNA, 30 bp, Streptococcus macacae
ctggaaagtcagtagttaaaagcattggct

SEQ ID NO: 11691 - DNA, 20 bp, Prevotella loescheii
gcccgcacaagcggaggaac

SEQ ID NO: 11692 - DNA, 20 bp, Burkholderia gladioli
gccggattaatccgcatacg

SEQ ID NO: 11693 - DNA, 20 bp, Propionibacterium acnes
ttaggactaagtcgtacaag

SEQ ID NO: 11694 - DNA, 20 bp, Pseudomonas putida
cggttaccacgggtgattca

SEQ ID NO: 11695 - DNA, 20 bp, Salmonella paratyphi
tagctaaccttcgggagggc

SEQ ID NO: 11696 - DNA, 20 bp, Pseudomonas putida
gacggttaccacgggtgatt

SEQ ID NO: 11697 - DNA, 20 bp, Arthrobacter globiformis
gccggggcctaacccttgtg

SEQ ID NO: 11698 - DNA, 20 bp, Proteus vulgaris
tggctgagagatgatcagcc

SEQ ID NO: 11699 - DNA, 20 bp, Anaerobiospirillum succiniciproducens
gttcccgggccttgacacac

SEQ ID NO: 11700 - DNA, 20 bp, Vibrio fluvialis
gggacgacgtcaagcatcat

SEQ ID NO: 11701 - DNA, 20 bp, Campylobacter sputorum
acatgcagtcgaacgatgaa

SEQ ID NO: 11702 - DNA, 20 bp, Corynebacterium pseudotuberculosis
tagtccatgccgtaacggtg

SEQ ID NO: 11703 - DNA, 20 bp, Prevotella intermedia
aagccgttaccttccaacta

SEQ ID NO: 11704 - DNA, 20 bp, Campylobacter sputorum
taatacatgcagtcgaacga

SEQ ID NO: 11705 - DNA, 20 bp, Stenotrophomonas maltophilia
cgatatgacggtacccgcag

SEQ ID NO: 11706 - DNA, 30 bp, Corynebacterium cystitidis
gtagccatgctgaaacgggggcgctaggtg

SEQ ID NO: 11707 - DNA, 20 bp, Prevotella loescheii
gcacaagcggaggaacatgt

SEQ ID NO: 11708 - DNA, 20 bp, Prevotella loescheii
ggcccgcacaagcggaggaa

SEQ ID NO: 11709 - DNA, 20 bp, Staphylococcus schleiferi
actgccgggacaaaccggag

SEQ ID NO: 11710 - DNA, 30 bp, Salmonella paratyphi
agaagtaggtagctaaccttcgggagggcg

SEQ ID NO: 11711 - DNA, 30 bp, Burkholderia gladioli
tagcccggcgaaagccggattaatccgcat

SEQ ID NO: 11712 - DNA, 20 bp, Haemophilus influenzae
atgcagtcgaacggtagcag

SEQ ID NO: 11713 - DNA, 20 bp, Citrobacter youngae
ccggctaactccggccagca

SEQ ID NO: 11714 - DNA, 20 bp, Corynebacterium pseudotuberculosis
gtccatgccgtaacggtggg

SEQ ID NO: 11715 - DNA, 20 bp, Bacteroides capilosus
gacccagcaacgccgcgtga

SEQ ID NO: 11716 - DNA, 20 bp, Kocuria rosea
gtgcctaatacatgcagtcg

SEQ ID NO: 11717 - DNA, 20 bp, Corynebacterium propinquum
ggcggcggcttaacacatgc

SEQ ID NO: 11718 - DNA, 20 bp, Corynebacterium renale
gccgaaacggtgggcgctag

SEQ ID NO: 11719 - DNA, 30 bp, Eremococcus coleocola
cgcataacagcaatcatcgcctgatggttg

SEQ ID NO: 11720 - DNA, 20 bp, Corynebacterium confusum
tgggacgaagtcgtacaagg

SEQ ID NO: 11721 - DNA, 20 bp, Corynebacterium ulcerans
taacacatgcagtcgaacgg

SEQ ID NO: 11722 - DNA, 30 bp, Psychrobacter phenylpyruvicus
tcatgagacaatactaaaaggcggctttta

SEQ ID NO: 11723 - DNA, 20 bp, Citrobacter youngae
cggctaactccggccagcag

SEQ ID NO: 11724 - DNA, 20 bp, Proteus vulgaris
gaaacggggctaataccgca

SEQ ID NO: 11725 - DNA, 20 bp, Pseudomonas luteola
ttcgggaggacggtaccacg

SEQ ID NO: 11726 - DNA, 20 bp, Staphylococcus capitis
cggacctaatcagaaagcca

SEQ ID NO: 11727 - DNA, 20 bp, Bacillus psychrosaccharolyticus
ggaggaacccagtggcgaag

SEQ ID NO: 11728 - DNA, 20 bp, Capnocytophaga sp.
gtcaaatcatccggccctta

SEQ ID NO: 11729 - DNA, 20 bp, Prevotella loescheii
ccgcacaagcggaggaacat

SEQ ID NO: 11730 - DNA, 20 bp, Corynebacterium afermentans
gttccgactttcatgacttg

SEQ ID NO: 11731 - DNA, 20 bp, Dolosigranulum pigrum
ggtagccgttcggaaggtgc

SEQ ID NO: 11732 - DNA, 20 bp, Prevotella bivia
cagccatggcgcgggaatac

SEQ ID NO: 11733 - DNA, 20 bp, Pediococcus acidilactici
actgcgctgaggctcgaaag

SEQ ID NO: 11734 - DNA, 20 bp, Leifsonia aquatica
cttaccaaggctgacatata

SEQ ID NO: 11735 - DNA, 20 bp, Enterococcus faecium
accacgagagtttgaacacc

SEQ ID NO: 11736 - DNA, 20 bp, Arthrobacter globiformis
gaagccggggcctaaccctt

SEQ ID NO: 11737 - DNA, 20 bp, Salmonella paratyphi
gaagtaggtagctaaccttc

SEQ ID NO: 11738 - DNA, 20 bp, Campylobacter sputorum
ctaatacatgcagtcgaacg

SEQ ID NO: 11739 - DNA, 30 bp, Vibrio parahaemolyticus
gagcgaatcccaaaaaggcgtcgtagtccg

SEQ ID NO: 11740 - DNA, 20 bp, Anaerobiospirillum succiniciproducens
tgcgggaatacgttcccggg

SEQ ID NO: 11741 - DNA, 20 bp, Vibrio fluvialis
ggggacgacgtcaagcatca

SEQ ID NO: 11742 - DNA, 20 bp, Delftia acidovorans
caaggagggcgcttacccgg

SEQ ID NO: 11743 - DNA, 20 bp, Enterococcus faecium
agtttgaacacccgaagtcg

SEQ ID NO: 11744 - DNA, 20 bp, Haemophilus influenzae
catgcagtcgaacggtagca

SEQ ID NO: 11745 - DNA, 20 bp, Bacteroides thetaiotaomicron
cgcggtgaatagttcccggg

SEQ ID NO: 11746 - DNA, 20 bp, Leclercia adecarboxylata
aactgagacacggccagact

SEQ ID NO: 11747 - DNA, 30 bp, Anaerococcus tetradius
accctataaagttagtcaatcgcatggtag

SEQ ID NO: 11748 - DNA, 20 bp, Campylobacter jejuni
aatacatgcagtcgagcgaa

SEQ ID NO: 11749 - DNA, 20 bp, Corynebacterium renale
tgccgaaacggtgggcgcta

SEQ ID NO: 11750 - DNA, 20 bp, Neisseria subflava
ttcccgggtctgtacacacc

SEQ ID NO: 11751 - DNA, 20 bp, Kocuria rosea
tgcctaatacatgcagtcga

SEQ ID NO: 11752 - DNA, 20 bp, Pasteurella multocida
gtcacccatgggagtgggtt

SEQ ID NO: 11753 - DNA, 20 bp, Corynebacterium pseudotuberculosis
agtccatgccgtaacggtgg

SEQ ID NO: 11754 - DNA, 20 bp, Staphylococcus capitis
acggacctaatcagaaagcc

SEQ ID NO: 11755 - DNA, 20 bp, Shigella dysenteriae
tcatggctcagattgacgct

SEQ ID NO: 11756 - DNA, 20 bp, Enterococcus saccharolyticus
cctaatcatgcaagtcgaac

SEQ ID NO: 11757 - DNA, 20 bp, Streptococcus infantarius
agccgctttcgccccggtgt

SEQ ID NO: 11758 - DNA, 20 bp, Myroides odoratimimus
agccatgatccgggaatacg

SEQ ID NO: 11759 - DNA, 20 bp, Serratia plymuthica
agatcagaatgctacgggaa

SEQ ID NO: 11760 - DNA, 20 bp, Neisseria subflava
aaaaccgatcgagtccggat

SEQ ID NO: 11761 - DNA, 20 bp, Bacteroides uniformis
cgtcaaatcagccggccctt

SEQ ID NO: 11762 - DNA, 20 bp, Bacteroides uniformis
acgtcaaatcagccggccct

SEQ ID NO: 11763 - DNA, 20 bp, Leptotrichia buccalis
gtcccagctgtaaacgatga

SEQ ID NO: 11764 - DNA, 20 bp, Prevotella intermedia
cgttaccttccaactagcta

SEQ ID NO: 11765 - DNA, 20 bp, Streptococcus equinus
ttgatcatggctcaggcgaa

SEQ ID NO: 11766 - DNA, 20 bp, Kocuria rosea
cgtggtaacctacctataag

SEQ ID NO: 11767 - DNA, 20 bp, Leclercia adecarboxylata
ggaactgagacacggccaga

SEQ ID NO: 11768 - DNA, 30 bp, Eremococcus coleocola
ctggctagggattgacggtaactaatcaga

SEQ ID NO: 11769 - DNA, 20 bp, Bacteroides uniformis
atcagccggcccttacgtcc

SEQ ID NO: 11770 - DNA, 20 bp, Prevotella loescheii
agcggaggaacatgtggttt

SEQ ID NO: 11771 - DNA, 20 bp, Enterococcus durans
ggtagccgatcggaaggtgc

SEQ ID NO: 11772 - DNA, 30 bp, Clostridium clostridiiforme
ttacctggacttgacatccacgcggtagag

SEQ ID NO: 11773 - DNA, 20 bp, Enterococcus faecium
acgagagtttgaacacccga

SEQ ID NO: 11774 - DNA, 20 bp, Propionibacterium avidum
gtacacccgcccgtcaagtc

SEQ ID NO: 11775 - DNA, 20 bp, Kocuria rosea
cacgtggtaacctacctata

SEQ ID NO: 11776 - DNA, 20 bp, Clostridium clostridiiforme
cagccgcggaatacgtaggg

SEQ ID NO: 11777 - DNA, 20 bp, Vibrio fluvialis
tggggacgacgtcaagcatc

SEQ ID NO: 11778 - DNA, 20 bp, Pseudomonas putida
ttaccacgggtgattcatga

SEQ ID NO: 11779 - DNA, 20 bp, Pasteurella multocida
cggatgattcatgactgggg

SEQ ID NO: 11780 - DNA, 20 bp, Proteus vulgaris
tgggactgaacacggcccag

SEQ ID NO: 11781 - DNA, 20 bp, Serratia plymuthica
gaatgctacgggaatacgtt

SEQ ID NO: 11782 - DNA, 20 bp, Enterococcus faecium
agagtttgaacacccgaagt

SEQ ID NO: 11783 - DNA, 20 bp, Anaerobiospirillum succiniciproducens
acgttcccgggccttgacac

SEQ ID NO: 11784 - DNA, 30 bp, Streptococcus urinalis
gaatggaagtaggagtggaaagtctacttc

SEQ ID NO: 11785 - DNA, 20 bp, Staphylococcus schleiferi
ctgccgggacaaaccggagg

SEQ ID NO: 11786 - DNA, 30 bp, Bacteroides capillosus
accgtatgatatcctatgcaggcatctaac

SEQ ID NO: 11787 - DNA, 20 bp, Serratia plymuthica
tgctacgggaatacgttccc

SEQ ID NO: 11788 - DNA, 30 bp, Bacteroides thetaiotaomicron
aaacccataggccgtaaggcatttgtgaag

SEQ ID NO: 11789 - DNA, 20 bp, Leptotrichia buccalis
tagtcccagctgtaaacgat

SEQ ID NO: 11790 - DNA, 20 bp, Serratia plymuthica
tacgggaatacgttcccggg

SEQ ID NO: 11791 - DNA, 20 bp, Enterococcus casseliflavus
tggacccgcgggcattagct

SEQ ID NO: 11792 - DNA, 20 bp, Prevotella loescheii
cggaggaacatgtggtttaa

SEQ ID NO: 11793 - DNA, 20 bp, Pasteurella multocida
gcgtttaccacggatgattc

SEQ ID NO: 11794 - DNA, 20 bp, Pasteurella multocida
gcccgtcacccatgggagtg

SEQ ID NO: 11795 - DNA, 20 bp, Corynebacterium renale
atgccgaaacggtgggcgct

SEQ ID NO: 11796 - DNA, 20 bp, Shewanella algae
ggatcagaatgcccggtgaa

SEQ ID NO: 11797 - DNA, 20 bp, Corynebacterium renale
ccatgccgaaacggtgggcg

SEQ ID NO: 11798 - DNA, 20 bp, Citrobacter freundii
gagaggatgccagccacact

SEQ ID NO: 11799 - DNA, 20 bp, Pseudomonas putida
acggttaccacgggtgattc

SEQ ID NO: 11800 - DNA, 30 bp, Dolosicoccus paucivorans
agtcgaacgcgactgtatcaccgccttctt

SEQ ID NO: 11801 - DNA, 20 bp, Vibrio alginolyticus
tccatgaagcggaatcgcta

SEQ ID NO: 11802 - DNA, 20 bp, Clostridium clostridiiforme
agcagccgcggaatacgtag

SEQ ID NO: 11803 - DNA, 20 bp, Clostridium barati
cctgcggtggatcacctcct

SEQ ID NO: 11804 - DNA, 20 bp, Shigella dysenteriae
ctcagattgacgctggcggc

SEQ ID NO: 11805 - DNA, 20 bp, Clostridium clostridiiforme
gccagcagccgcggaatacg

SEQ ID NO: 11806 - DNA, 20 bp, Kocuria rosea
acgtggtaacctacctataa

SEQ ID NO: 11807 - DNA, 20 bp, Unknown Organism
  oligonucleotide from CDC group VB-3
gtaacaaggagccgtagggg

SEQ ID NO: 11808 - DNA, 30 bp, Eremococcus coleocola
gttattagccaagaacacccctagtagtaa

SEQ ID NO: 11809 - DNA, 20 bp, Staphylococcus schleiferi
tgccgggacaaaccggagga

SEQ ID NO: 11810 - DNA, 20 bp, Bacteroides capilosus
  misc_feature (11)..(11): n is a, c, g, or t
tgacggtactngatgaataa

SEQ ID NO: 11811 - DNA, 20 bp, Prevotella loescheii
tacgcgaggaaccttacccg

SEQ ID NO: 11812 - DNA, 30 bp, Vagococcus fluvialis
ccgcatgggagaataataaaagacgcttcg

SEQ ID NO: 11813 - DNA, 20 bp, Staphylococcus schleiferi
cgggacaaaccggaggaagg

SEQ ID NO: 11814 - DNA, 20 bp, Proteus vulgaris
atgcaagcgagcggtaacag

SEQ ID NO: 11815 - DNA, 20 bp, Corynebacterium confusum
gggacgaagtcgtacaaggt

SEQ ID NO: 11816 - DNA, 20 bp, Vibrio fluvialis
gacgacgtcaagcatcatgg

SEQ ID NO: 11817 - DNA, 20 bp, Burkholderia gladioli
gaaagccggattaatccgca

SEQ ID NO: 11818 - DNA, 20 bp, Unknown Organism
  oligonucleotide from CDC group VB-3
aacaaggagccgtaggggaa

SEQ ID NO: 11819 - DNA, 20 bp, Bacteroides uniformis
tcggcttaagtgccatacga

SEQ ID NO: 11820 - DNA, 20 bp, Prevotella intermedia
agccgttaccttccaactag

SEQ ID NO: 11821 - DNA, 20 bp, Prevotella intermedia
gccgttaccttccaactagc

SEQ ID NO: 11822 - DNA, 20 bp, Achromobacter xylosoxidans
acgatgtcactagctgttgg

SEQ ID NO: 11823 - DNA, 20 bp, Corynebacterium renale
gtagtccatgccgaaacggt

SEQ ID NO: 11824 - DNA, 20 bp, Myroides odoratimimus
cagccatgatccgggaatac

SEQ ID NO: 11825 - DNA, 20 bp, Proteus vulgaris
acatgcaagcgagcggtaac

SEQ ID NO: 11826 - DNA, 20 bp, Prevotella bivia
ccatggcgcgggaatacgtt

SEQ ID NO: 11827 - DNA, 30 bp, Dolosicoccus paucivorans
caagtcgaacgcgactgtatcaccgccttc

SEQ ID NO: 11828 - DNA, 30 bp, Clostridium clostridiiforme
aaagcagagatgcgcttttggagagacttg

SEQ ID NO: 11829 - DNA, 20 bp, Corynebacterium pseudotuberculosis
ccatgccgtaacggtgggcg

SEQ ID NO: 11830 - DNA, 20 bp, Neisseria subflava
aatacgttcccgggtctgta

SEQ ID NO: 11831 - DNA, 20 bp, Streptococcus sp.
gaggtaccgtaaggagccag

SEQ ID NO: 11832 - DNA, 20 bp, Myroides odoratimimus
tatcagccatgatccgggaa

SEQ ID NO: 11833 - DNA, 30 bp, Bacteroides capillosus
ttcgtccaatggattgggtttcttagtggc

SEQ ID NO: 11834 - DNA, 20 bp, Enterococcus casseliflavus
atggacccgcgggcattagc

SEQ ID NO: 11835 - DNA, 30 bp, Clostridium clostridiiforme
atccacgcggtagagaagcgaaagcggatc

SEQ ID NO: 11836 - DNA, 20 bp, Neisseria subflava
gggtctgtacacaccgcccg

SEQ ID NO: 11837 - DNA, 20 bp, Campylobacter concisus
gggagctgcgaaggtgggat

SEQ ID NO: 11838 - DNA, 20 bp, Enterococcus casseliflavus
cccgcgggcattagctagtt

SEQ ID NO: 11839 - DNA, 20 bp, Brevibacterium casei
catgctacaatggctggaca

SEQ ID NO: 11840 - DNA, 30 bp, Clostridium clostridiiforme
cgcttcaagtcgtctgtcaaaagccgaggc

SEQ ID NO: 11841 - DNA, 20 bp, Anaerobiospirillum succiniciproducens
gccttgacacaccgcccgtc

SEQ ID NO: 11842 - DNA, 20 bp, Streptococcus equinus
gccgcctaagggggatagat

SEQ ID NO: 11843 - DNA, 20 bp, Bacteroides uniformis
cagccggcccttacgtccgg

SEQ ID NO: 11844 - DNA, 20 bp, Enterococcus casseliflavus
gatggacccgcgggcattag

SEQ ID NO: 11845 - DNA, 20 bp, Propionibacterium avidum
tacacccgcccgtcaagtca

SEQ ID NO: 11846 - DNA, 20 bp, Leifsonia aquatica
accaaggctgacatatacga

SEQ ID NO: 11847 - DNA, 20 bp, Staphylococcus aureus
tccacgccgaaacgatgagt

SEQ ID NO: 11848 - DNA, 20 bp, Pseudomonas putida
accacgggtgattcatgact

SEQ ID NO: 11849 - DNA, 20 bp, Leptotrichia buccalis
agtcccagctgtaaacgatg

SEQ ID NO: 11850 - DNA, 20 bp, Bacillus cereus
caaggagccgtatcggaagg

SEQ ID NO: 11851 - DNA, 20 bp, Pseudomonas putida
ggttaccacgggtgattcat

SEQ ID NO: 11852 - DNA, 30 bp, Staphylococcus schleiferi
accatttggaagctaagcccgtcgaaagtg

SEQ ID NO: 11853 - DNA, 20 bp, Bacteroides uniformis
tgacgtcaaatcagccggcc

SEQ ID NO: 11854 - DNA, 20 bp, Pediococcus acidilactici
ctgcgctgaggctcgaaagc

SEQ ID NO: 11855 - DNA, 20 bp, Eubacterium moniliforme
aaccctgacccagcaacgcc

SEQ ID NO: 11856 - DNA, 20 bp, Bacillus azotoformans
aaggagactgccgggacaaa

SEQ ID NO: 11857 - DNA, 20 bp, Corynebacterium pseudotuberculosis
gccgtaacggtgggcgctag

SEQ ID NO: 11858 - DNA, 20 bp, Prevotella intermedia
taagccgttaccttccaact

SEQ ID NO: 11859 - DNA, 20 bp, Pasteurella multocida
cacggatgattcatgactgg

SEQ ID NO: 11860 - DNA, 20 bp, Enterococcus faecium
cgaagtcgggaggtaacctt

SEQ ID NO: 11861 - DNA, 20 bp, Pasteurella multocida
cacccgcccgtcacccatgg

SEQ ID NO: 11862 - DNA, 20 bp, Leifsonia aquatica
ttaccaaggctgacatatac

SEQ ID NO: 11863 - DNA, 20 bp, Klebsiella pneumoniae
ttcgggttgtaaagactttc

SEQ ID NO: 11864 - DNA, 20 bp, Micrococcus luteus
cacccgcccgtcaagtcacg

SEQ ID NO: 11865 - DNA, 20 bp, Bacteroides ovatus
cgtaggtgtcggcttaagtg

SEQ ID NO: 11866 - DNA, 20 bp, Achromobacter xylosoxidans
aacgatgtcactagctgttg

SEQ ID NO: 11867 - DNA, 30 bp, Staphylococcus aureus
ttagataccctggagtccacgccgaaacga

SEQ ID NO: 11868 - DNA, 20 bp, Campylobacter sputorum
aatacatgcagtcgaacgat

SEQ ID NO: 11869 - DNA, 20 bp, Corynebacterium afermentans
tgttccgactttcatgactt

SEQ ID NO: 11870 - DNA, 20 bp, Streptococcus ratti
agtcgaacaaggtagccgta

SEQ ID NO: 11871 - DNA, 20 bp, Haemophilus influenzae
acacatgcagtcgaacggta

SEQ ID NO: 11872 - DNA, 20 bp, Microbacterium hominis
ttgtcatggctcaggatgaa

SEQ ID NO: 11873 - DNA, 20 bp, Streptococcus ratti
aagtcgaacaaggtagccgt

SEQ ID NO: 11874 - DNA, 30 bp, Streptococcus equinus
aaccttttggagccagccgcctaaggggga

SEQ ID NO: 11875 - DNA, 20 bp, Shewanella algae
tgccggtgataaccggagga

SEQ ID NO: 11876 - DNA, 20 bp, Campylobacter rectus
cgtaactggtctgagagatg

SEQ ID NO: 11877 - DNA, 20 bp, Anaerobiospirillum succiniciproducens
gaatgttgcgggaatacgtt

SEQ ID NO: 11878 - DNA, 20 bp, Neisseria subflava
cgggtctgtacacaccgccc

SEQ ID NO: 11879 - DNA, 20 bp, Pseudomonas luteola
gtaggggaacctgcgttgga

SEQ ID NO: 11880 - DNA, 20 bp, Prevotella bivia
atcagccatggcgcgggaat

SEQ ID NO: 11881 - DNA, 20 bp, Proteus vulgaris
acacatgcaagcgagcggta

SEQ ID NO: 11882 - DNA, 20 bp, Enterococcus faecium
gagagtttgaacacccgaag

SEQ ID NO: 11883 - DNA, 30 bp, Clostridium clostridiiforme
aagcgaaagcggatcgaccctttcgcaagg

SEQ ID NO: 11884 - DNA, 20 bp, Haemophilus influenzae
aacacatgcagtcgaacggt

SEQ ID NO: 11885 - DNA, 20 bp, Vibrio fluvialis
acgacgtcaagcatcatggc

SEQ ID NO: 11886 - DNA, 20 bp, Serratia plymuthica
atgctacgggaatacgttcc

SEQ ID NO: 11887 - DNA, 30 bp, Bacteroides capillosus
gatgcccgttgtatggcctttcggctatgt

SEQ ID NO: 11888 - DNA, 20 bp, Pasteurella multocida
gggggcgtttaccacggatg

SEQ ID NO: 11889 - DNA, 20 bp, Bacteroides uniformis
gacgtcaaatcagccggccc

SEQ ID NO: 11890 - DNA, 20 bp, Bacteroides uniformis
ttaagtgccatacgagcgca

SEQ ID NO: 11891 - DNA, 20 bp, Corynebacterium confusum
acgaagtcgtacaaggtagc

SEQ ID NO: 11892 - DNA, 30 bp, Streptococcus equi
gatgatacgtagcttgctacaattatctgt

SEQ ID NO: 11893 - DNA, 30 bp, Kocuria rosea
cgtggtaacctacctataagactgggataa

SEQ ID NO: 11894 - DNA, 20 bp, Corynebacterium confusum
cgtacaaggtagccgtaccg

SEQ ID NO: 11895 - DNA, 20 bp, Shewanella algae
cagaatgcccggtgaatacg

SEQ ID NO: 11896 - DNA, 20 bp, Vibrio fluvialis
ggacgacgtcaagcatcatg

SEQ ID NO: 11897 - DNA, 20 bp, Brevibacterium linens
acacatgcagtcgaacgctg

SEQ ID NO: 11898 - DNA, 20 bp, Bacillus psychrosaccharolyticus
agagatgtggaggaacccag

SEQ ID NO: 11899 - DNA, 20 bp, Neisseria subflava
acgttcccgggtctgtacac

SEQ ID NO: 11900 - DNA, 20 bp, Pseudomonas putida
ggacggttaccacgggtgat

SEQ ID NO: 11901 - DNA, 20 bp, Pasteurella multocida
accacggatgattcatgact

SEQ ID NO: 11902 - DNA, 20 bp, Haemophilus influenzae
aggcttaacacatgcagtcg

SEQ ID NO: 11903 - DNA, 20 bp, Staphylococcus schleiferi
ccgggacaaaccggaggaag

SEQ ID NO: 11904 - DNA, 20 bp, Leifsonia aquatica
taccaaggctgacatatacg

SEQ ID NO: 11905 - DNA, 20 bp, Enterococcus faecium
ccacgagagtttgaacaccc

SEQ ID NO: 11906 - DNA, 20 bp, Bacillus psychrosaccharolyticus
agatgtggaggaacccagtg

SEQ ID NO: 11907 - DNA, 20 bp, Bacteroides uniformis
gtcaaatcagccggccctta

SEQ ID NO: 11908 - DNA, 20 bp, Prevotella intermedia
tggtaagccgttaccttcca

SEQ ID NO: 11909 - DNA, 20 bp, Prevotella loescheii
acaagcggaggaacatgtgg

SEQ ID NO: 11910 - DNA, 20 bp, Myroides odoratimimus
tcagccatgatccgggaata

SEQ ID NO: 11911 - DNA, 20 bp, Prevotella bivia
tcagccatggcgcgggaata

SEQ ID NO: 11912 - DNA, 20 bp, Bacteroides uniformis
aatcagccggcccttacgtc

SEQ ID NO: 11913 - DNA, 20 bp, Enterococcus faecium
gagtttgaacacccgaagtc

SEQ ID NO: 11914 - DNA, 20 bp, Prevotella loescheii
acgcgaggaaccttacccgg

SEQ ID NO: 11915 - DNA, 20 bp, Corynebacterium propinquum
tggcggcggcttaacacatg

SEQ ID NO: 11916 - DNA, 20 bp, Citrobacter freundii
agaagaagcccggctaactc

SEQ ID NO: 11917 - DNA, 20 bp, Vibrio cholerae
tcctccggttatcaccggca

SEQ ID NO: 11918 - DNA, 30 bp, Neisseria subflava
aaccgatcgagtccggattgcactctgcaa

SEQ ID NO: 11919 - DNA, 20 bp, Streptococcus sp.
tgaggtaccgtaaggagcca

SEQ ID NO: 11920 - DNA, 20 bp, Leuconostoc mesenteroides
ggctcaggatgacgctggcg

SEQ ID NO: 11921 - DNA, 20 bp, Campylobacter sputorum
atacatgcagtcgaacgatg

SEQ ID NO: 11922 - DNA, 20 bp, Bacillus azotoformans
ggagactgccgggacaaacc

SEQ ID NO: 11923 - DNA, 20 bp, Corynebacterium ulcerans
aacacatgcagtcgaacgga

SEQ ID NO: 11924 - DNA, 20 bp, Streptococcus infantarius
ccgctttcgccccggtgttc

SEQ ID NO: 11925 - DNA, 30 bp, Corynebacterium confusum
tgggacgaagtcgtacaaggtagccgtacc

SEQ ID NO: 11926 - DNA, 20 bp, Prevotella bivia
agccatggcgcgggaatacg

SEQ ID NO: 11927 - DNA, 20 bp, Streptococcus equinus
gccagccgcctaagggggat

SEQ ID NO: 11928 - DNA, 20 bp, Prevotella loescheii
cacaagcggaggaacatgtg

SEQ ID NO: 11929 - DNA, 20 bp, Campylobacter concisus
ggagctgcgaaggtgggatc

SEQ ID NO: 11930 - DNA, 20 bp, Salmonella paratyphi
agaagtaggtagctaacctt

SEQ ID NO: 11931 - DNA, 30 bp, Streptococcus equi
acagatgatacgtagcttgctacaattatc

SEQ ID NO: 11932 - DNA, 20 bp, Bacillus psychrosaccharolyticus
gatgtggaggaacccagtgg

SEQ ID NO: 11933 - DNA, 20 bp, Prevotella intermedia
ggtaagccgttaccttccaa

SEQ ID NO: 11934 - DNA, 20 bp, Corynebacterium ulcerans
acacatgcagtcgaacggaa

SEQ ID NO: 11935 - DNA, 20 bp, Bacillus azotoformans
gagactgccgggacaaaccg

SEQ ID NO: 11936 - DNA, 20 bp, Leclercia adecarboxylata
gaactgagacacggccagac

SEQ ID NO: 11937 - DNA, 20 bp, Pasteurella multocida
ttaccacggatgattcatga

SEQ ID NO: 11938 - DNA, 30 bp, Neisseria subflava
aggataccgcaaggggccgcttaccacggt

SEQ ID NO: 11939 - DNA, 20 bp, Pseudomonas putida
acgggtgattcatgactggg

SEQ ID NO: 11940 - DNA, 20 bp, Corynebacterium ulcerans
atgcagtcgaacggaaaggc

SEQ ID NO: 11941 - DNA, 20 bp, Vibrio fluvialis
gtggggacgacgtcaagcat

SEQ ID NO: 11942 - DNA, 20 bp, Proteus vulgaris
ttagctagtaggtgagtaat

SEQ ID NO: 11943 - DNA, 20 bp, Staphylococcus capitis
cttgacggacctaatcagaa

SEQ ID NO: 11944 - DNA, 20 bp, Bacteroides ovatus
ccgtaggtgtcggcttaagt

SEQ ID NO: 11945 - DNA, 20 bp, Actinomyces neuii
gaacgtgcggcgtgcttaac

SEQ ID NO: 11946 - DNA, 20 bp, Citrobacter youngae
accggctaactccggccagc

SEQ ID NO: 11947 - DNA, 20 bp, Neisseria subflava
tacgttcccgggtctgtaca

SEQ ID NO: 11948 - DNA, 20 bp, Prevotella loescheii
aagcggaggaacatgtggtt

SEQ ID NO: 11949 - DNA, 20 bp, Providencia alcalifaciens
ggaaacggtagctaatccgc

SEQ ID NO: 11950 - DNA, 20 bp, Staphylococcus capitis
tgacggacctaatcagaaag

SEQ ID NO: 11951 - DNA, 20 bp, Streptococcus equinus
gcctaagggggatagatgat

SEQ ID NO: 11952 - DNA, 20 bp, Pasteurella multocida
acacccgcccgtcacccatg

SEQ ID NO: 11953 - DNA, 20 bp, Enterococcus faecium
caccacgagagtttgaacac

SEQ ID NO: 11954 - DNA, 20 bp, Bacteroides uniformis
cttaagtgccatacgagcgc

SEQ ID NO: 11955 - DNA, 20 bp, Prevotella loescheii
cccgcacaagcggaggaaca

SEQ ID NO: 11956 - DNA, 20 bp, Citrobacter freundii
tcgcagaagaagcccggcta

SEQ ID NO: 11957 - DNA, 20 bp, Citrobacter youngae
ggctaactccggccagcagc

SEQ ID NO: 11958 - DNA, 20 bp, Prevotella loescheii
cgcgaggaaccttacccggg

SEQ ID NO: 11959 - DNA, 20 bp, Streptococcus acidominimus
  misc_feature (11)..(11): n is a, c, g, or t
gaaggtgcggntggatcacc

SEQ ID NO: 11960 - DNA, 20 bp, Leptotrichia buccalis
ggtagtcccagctgtaaacg

SEQ ID NO: 11961 - DNA, 20 bp, Shigella dysenteriae
catggctcagattgacgctg

SEQ ID NO: 11962 - DNA, 30 bp, Streptococcus equi
cttgctacaattatctgtgagtcgcgaacg

SEQ ID NO: 11963 - DNA, 20 bp, Serratia ficaria
taggggaacctgcggtggat

SEQ ID NO: 11964 - DNA, 20 bp, Citrobacter youngae
caccggctaactccggccag

SEQ ID NO: 11965 - DNA, 30 bp, Staphylococcus schleiferi
gtgaaagtcgttaccatggtatgcccgtat

SEQ ID NO: 11966 - DNA, 20 bp, Proteus vulgaris
ctggaaacggggctaatacc

SEQ ID NO: 11967 - DNA, 20 bp, Myroides odoratimimus
ccatgatccgggaatacgtt

SEQ ID NO: 11968 - DNA, 20 bp, Vibrio alginolyticus
ctccatgaagcggaatcgct

SEQ ID NO: 11969 - DNA, 30 bp, Dolosicoccus paucivorans
tttgaaggcaccgatacatcgagtggcgaa

SEQ ID NO: 11970 - DNA, 30 bp, Clostridium clostridiiforme
ttttggagagacttgtgtcctatcaggcag

SEQ ID NO: 11971 - DNA, 20 bp, Citrobacter youngae
aactccggccagcagccgcg

SEQ ID NO: 11972 - DNA, 20 bp, Kocuria rosea
cctaatacatgcagtcgagc

SEQ ID NO: 11973 - DNA, 20 bp, Streptococcus equinus
ccagccgcctaagggggata

SEQ ID NO: 11974 - DNA, 20 bp, Citrobacter youngae
ctccggccagcagccgcggt

SEQ ID NO: 11975 - DNA, 20 bp, Streptococcus infantarius
tcgccccggtgttcctccat

SEQ ID NO: 11976 - DNA, 20 bp, Leifsonia aquatica
ccttaccaaggctgacatat

SEQ ID NO: 11977 - DNA, 20 bp, Providencia alcalifaciens
tggaaacggtagctaatccg

SEQ ID NO: 11978 - DNA, 30 bp, Bacteroides capillosus
aatgcagctgagtcgcatgacactggctgc

SEQ ID NO: 11979 - DNA, 20 bp, Campylobacter jejuni
ctaatacatgcagtcgagcg

SEQ ID NO: 11980 - DNA, 20 bp, Citrobacter youngae
ctaactccggccagcagccg

SEQ ID NO: 11981 - DNA, 30 bp, Eubacterium moniliforme
ctctgacgcatatagagatatatgttccct

SEQ ID NO: 11982 - DNA, 20 bp, Enterococcus casseliflavus
gacccgcgggcattagctag

SEQ ID NO: 11983 - DNA, 20 bp, Stenotrophomonas maltophilia
gatatgacggtacccgcaga

SEQ ID NO: 11984 - DNA, 20 bp, Streptococcus equinus
atcatggctcaggcgaacgc

SEQ ID NO: 11985 - DNA, 20 bp, Leuconostoc mesenteroides
atcatggctcaggatgacgc

SEQ ID NO: 11986 - DNA, 20 bp, Burkholderia gladioli
aaagccggattaatccgcat

SEQ ID NO: 11987 - DNA, 20 bp, Anaerobiospirillum succiniciproducens
ggccttgacacaccgcccgt

SEQ ID NO: 11988 - DNA, 20 bp, Streptococcus acidominimus
  misc_feature (10)..(10): n is a, c, g, or t
aaggtgcggntggatcacct

SEQ ID NO: 11989 - DNA, 20 bp, Anaerobiospirillum succiniciproducens
tcagaatgttgcgggaatac

SEQ ID NO: 11990 - DNA, 20 bp, Bacteroides ovatus
tgccgtaggtgtcggcttaa

SEQ ID NO: 11991 - DNA, 20 bp, Streptococcus infantarius
gccccggtgttcctccatat

SEQ ID NO: 11992 - DNA, 20 bp, Bacteroides capilosus
  misc_feature (10)..(10): n is a, c, g, or t
gacggtactngatgaataag

SEQ ID NO: 11993 - DNA, 20 bp, Bacteroides ovatus
cgtgccgtaggtgtcggctt

SEQ ID NO: 11994 - DNA, 20 bp, Pasteurella multocida
acggatgattcatgactggg

SEQ ID NO: 11995 - DNA, 20 bp, Neisseria subflava
ccgggtctgtacacaccgcc

SEQ ID NO: 11996 - DNA, 20 bp, Enterococcus saccharolyticus
ctaatcatgcaagtcgaacg

SEQ ID NO: 11997 - DNA, 20 bp, Enterococcus casseliflavus
acccgcgggcattagctagt

SEQ ID NO: 11998 - DNA, 20 bp, Bacteroides ovatus
tcgtgccgtaggtgtcggct

SEQ ID NO: 11999 - DNA, 20 bp, Serratia plymuthica
gatcagaatgctacgggaat

SEQ ID NO: 12000 - DNA, 20 bp, Clostridium clostridiiforme
gtgccagcagccgcggaata

SEQ ID NO: 12001 - DNA, 30 bp, Brevibacillus centrosporus
caaaagcttgaaagccgggttttgggctgt

SEQ ID NO: 12002 - DNA, 20 bp, Pasteurella multocida
cgtttaccacggatgattca

SEQ ID NO: 12003 - DNA, 20 bp, Corynebacterium pseudotuberculosis
catgccgtaacggtgggcgc

SEQ ID NO: 12004 - DNA, 20 bp, Corynebacterium confusum
gacgaagtcgtacaaggtag

SEQ ID NO: 12005 - DNA, 20 bp, Actinomyces neuii
aacgtgcggcgtgcttaaca

SEQ ID NO: 12006 - DNA, 20 bp, Bacillus megaterium
aggtagccgatcggaaggtg

SEQ ID NO: 12007 - DNA, 20 bp, Pasteurella multocida
taccacggatgattcatgac

SEQ ID NO: 12008 - DNA, 20 bp, Salmonella paratyphi
aagaagtaggtagctaacct

SEQ ID NO: 12009 - DNA, 20 bp, Pasteurella multocida
cccgtcacccatgggagtgg

SEQ ID NO: 12010 - DNA, 20 bp, Serratia plymuthica
gctacgggaatacgttcccg

SEQ ID NO: 12011 - DNA, 20 bp, Propionibacterium avidum
cacccgcccgtcaagtcatg

SEQ ID NO: 12012 - DNA, 20 bp, Prevotella bivia
gccatggcgcgggaatacgt

SEQ ID NO: 12013 - DNA, 20 bp, Campylobacter sputorum
catgcagtcgaacgatgaag

SEQ ID NO: 12014 - DNA, 20 bp, Bacillus psychrosaccharolyticus
gagatgtggaggaacccagt

SEQ ID NO: 12015 - DNA, 20 bp, Pasteurella multocida
ggggcgtttaccacggatga

SEQ ID NO: 12016 - DNA, 20 bp, Pasteurella multocida
ccgtcacccatgggagtggg

SEQ ID NO: 12017 - DNA, 30 bp, Streptococcus macacae
cataatatctctctaagcctttagagggat

SEQ ID NO: 12018 - DNA, 20 bp, Citrobacter youngae
gcaccggctaactccggcca

SEQ ID NO: 12019 - DNA, 20 bp, Brevibacterium linens
cgtgcttaacacatgcagtc

SEQ ID NO: 12020 - DNA, 20 bp, Propionibacterium acnes
attaggactaagtcgtacaa

SEQ ID NO: 12021 - DNA, 20 bp, Proteus vulgaris
tgcaagcgagcggtaacagg

SEQ ID NO: 12022 - DNA, 20 bp, Enterococcus faecium
acaccacgagagtttgaaca

SEQ ID NO: 12023 - DNA, 20 bp, Prevotella loescheii
aggaacatgtggtttaattc

SEQ ID NO: 12024 - DNA, 20 bp, Corynebacterium renale
ccgaaacggtgggcgctagg

SEQ ID NO: 12025 - DNA, 20 bp, Leptotrichia buccalis
gtagtcccagctgtaaacga

SEQ ID NO: 12026 - DNA, 20 bp, Neisseria subflava
cccgggtctgtacacaccgc

SEQ ID NO: 12027 - DNA, 20 bp, Neisseria subflava
atacgttcccgggtctgtac

SEQ ID NO: 12028 - DNA, 20 bp, Neisseria subflava
tcccgggtctgtacacaccg

SEQ ID NO: 12029 - DNA, 20 bp, Streptococcus equinus
cgcctaagggggatagatga

SEQ ID NO: 12030 - DNA, 20 bp, Salmonella paratyphi
agtaggtagctaaccttcgg

SEQ ID NO: 12031 - DNA, 20 bp, Bacteroides ovatus
agctcgtgccgtaggtgtcg

SEQ ID NO: 12032 - DNA, 20 bp, Neisseria subflava
ggtctgtacacaccgcccgt

SEQ ID NO: 12033 - DNA, 20 bp, Prevotella loescheii
cgcacaagcggaggaacatg

SEQ ID NO: 12034 - DNA, 30 bp, Eremococcus coleocola
agccaagaacacccctagtagtaactggct

SEQ ID NO: 12035 - DNA, 20 bp, Clostridium clostridiiforme
cgtgccagcagccgcggaat

SEQ ID NO: 12036 - DNA, 20 bp, Enterococcus faecium
cacgagagtttgaacacccg

SEQ ID NO: 12037 - DNA, 20 bp, Prevotella loescheii
gaggaacatgtggtttaatt

SEQ ID NO: 12038 - DNA, 20 bp, Brevibacterium linens
gtgcttaacacatgcagtcg

SEQ ID NO: 12039 - DNA, 20 bp, Leptotrichia buccalis
tggtagtcccagctgtaaac

SEQ ID NO: 12040 - DNA, 20 bp, Corynebacterium urealyticum
tacggccgcaggctaaaact

SEQ ID NO: 12041 - DNA, 20 bp, Anaerobiospirillum succiniciproducens
cgttcccgggccttgacaca

SEQ ID NO: 12042 - DNA, 20 bp, Anaerobiospirillum succiniciproducens
ttcccgggccttgacacacc

SEQ ID NO: 12043 - DNA, 30 bp, Dolosicoccus paucivorans
tgaaggcaccgatacatcgagtggcgaacg

SEQ ID NO: 12044 - DNA, 20 bp, Kocuria rosea
acacgtggtaacctacctat

SEQ ID NO: 12045 - DNA, 20 bp, Corynebacterium confusum
ttgggacgaagtcgtacaag

SEQ ID NO: 12046 - DNA, 20 bp, Citrobacter freundii
cagaagaagcccggctaact

SEQ ID NO: 12047 - DNA, 20 bp, Bacteroides ovatus
gccgtaggtgtcggcttaag

SEQ ID NO: 12048 - DNA, 20 bp, Anaerobiospirillum succiniciproducens
gggccttgacacaccgcccg

SEQ ID NO: 12049 - DNA, 20 bp, Pediococcus acidilactici
tactgcgctgaggctcgaaa

SEQ ID NO: 12050 - DNA, 20 bp, Corynebacterium confusum
attgggacgaagtcgtacaa

SEQ ID NO: 12051 - DNA, 20 bp, Arthrobacter globiformis
agccggggcctaacccttgt

SEQ ID NO: 12052 - DNA, 20 bp, Stenotrophomonas maltophilia
cgctggcggaggcctaacac

SEQ ID NO: 12053 - DNA, 20 bp, Arthrobacter globiformis
cgaagccggggcctaaccct

SEQ ID NO: 12054 - DNA, 30 bp, Citrobacter youngae
ctaactccggccagcagccgcggtaatacg

SEQ ID NO: 12055 - DNA, 20 bp, Proteus vulgaris
gcaagcgagcggtaacagga

SEQ ID NO: 12056 - DNA, 20 bp, Bacillus psychrosaccharolyticus
atgtggaggaacccagtggc

SEQ ID NO: 12057 - DNA, 20 bp, Pseudomonas putida
ccacgggtgattcatgactg

SEQ ID NO: 12058 - DNA, 20 bp, Corynebacterium renale
tggtagtccatgccgaaacg

SEQ ID NO: 12059 - DNA, 20 bp, Corynebacterium propinquum
cgaacgctggcggcggctta

SEQ ID NO: 12060 - DNA, 20 bp, Pasteurella multocida
ccacggatgattcatgactg

SEQ ID NO: 12061 - DNA, 20 bp, Rhizobium radiobacter
catggctcagacgaacgctg

SEQ ID NO: 12062 - DNA, 20 bp, Corynebacterium renale
tagtccatgccgaaacggtg

SEQ ID NO: 12063 - DNA, 20 bp, Shewanella algae
gatcagaatgcccggtgaat

SEQ ID NO: 12064 - DNA, 30 bp, Myroides odoratimimus
catgatccgggaatacgttcccgggccttg

SEQ ID NO: 12065 - DNA, 20 bp, Shigella dysenteriae
tcagattgacgctggcggca

SEQ ID NO: 12066 - DNA, 20 bp, Staphylococcus schleiferi
gactgccgggacaaaccgga

SEQ ID NO: 12067 - DNA, 20 bp, Prevotella loescheii
gcggaggaacatgtggttta

SEQ ID NO: 12068 - DNA, 30 bp, Bacteroides merdae
ggtttgaacgtagtctgaccggagtggaaa

SEQ ID NO: 12069 - DNA, 20 bp, Klebsiella pneumoniae
tcgggttgtaaagactttca

SEQ ID NO: 12070 - DNA, 20 bp, Corynebacterium urealyticum
acggccgcaggctaaaactc

SEQ ID NO: 12071 - DNA, 20 bp, Corynebacterium pseudotuberculosis
gtagtccatgccgtaacggt

SEQ ID NO: 12072 - DNA, 20 bp, Enterobacter hormaechei
gtaacaaggaaccgtagggg

SEQ ID NO: 12073 - DNA, 20 bp, Prevotella loescheii
ggaggaacatgtggtttaat

SEQ ID NO: 12074 - DNA, 20 bp, Myroides odoratimimus
tgatccgggaatacgttccc

SEQ ID NO: 12075 - DNA, 20 bp, Staphylococcus capitis
gacggacctaatcagaaagc

SEQ ID NO: 12076 - DNA, 20 bp, Kocuria rosea
cgtgcctaatacatgcagtc

SEQ ID NO: 12077 - DNA, 20 bp, Corynebacterium cystitidis
tagataccctggtagccatg

SEQ ID NO: 12078 - DNA, 20 bp, Shigella dysenteriae
atggctcagattgacgctgg

SEQ ID NO: 12079 - DNA, 20 bp, Haemophilus influenzae
ggcttaacacatgcagtcga

SEQ ID NO: 12080 - DNA, 20 bp, Streptococcus infantarius
ctttcgccccggtgttcctc

SEQ ID NO: 12081 - DNA, 20 bp, Serratia plymuthica
atcagaatgctacgggaata

SEQ ID NO: 12082 - DNA, 30 bp, Eremococcus coleocola
cacccctagtagtaactggctagggattga

SEQ ID NO: 12083 - DNA, 20 bp, Corynebacterium pseudotuberculosis
tgccgtaacggtgggcgcta

SEQ ID NO: 12084 - DNA, 20 bp, Vibrio alginolyticus
tagttaaccttcggggggac

SEQ ID NO: 12085 - DNA, 20 bp, Prevotella corporis
agcccgcacaagcggaggaa

SEQ ID NO: 12086 - DNA, 20 bp, Streptococcus equinus
agccgcctaagggggataga

SEQ ID NO: 12087 - DNA, 30 bp, Bacillus psychrosaccharolyticus
gaacccagtggcgaaggcgactttctggtc

SEQ ID NO: 12088 - DNA, 20 bp, Propionibacterium avidum
ttgtacacccgcccgtcaag

SEQ ID NO: 12089 - DNA, 20 bp, Anaerobiospirillum succiniciproducens
gttgcgggaatacgttcccg

SEQ ID NO: 12090 - DNA, 20 bp, Myroides odoratimimus
gatccgggaatacgttcccg

SEQ ID NO: 12091 - DNA, 20 bp, Microbacterium hominis
tttgtcatggctcaggatga

SEQ ID NO: 12092 - DNA, 20 bp, Pasteurella multocida
ggcgtttaccacggatgatt

SEQ ID NO: 12093 - DNA, 20 bp, Streptococcus infantarius
cgccccggtgttcctccata

SEQ ID NO: 12094 - DNA, 20 bp, Citrobacter freundii
actcgcagaagaagcccggc

SEQ ID NO: 12095 - DNA, 20 bp, Haemophilus influenzae
acatgcagtcgaacggtagc

SEQ ID NO: 12096 - DNA, 20 bp, Serratia plymuthica
cagaatgctacgggaatacg

SEQ ID NO: 12097 - DNA, 20 bp, Bacteroides uniformis
aaatcagccggcccttacgt

SEQ ID NO: 12098 - DNA, 20 bp, Streptococcus infantarius
gccgctttcgccccggtgtt

SEQ ID NO: 12099 - DNA, 20 bp, Anaerobiospirillum succiniciproducens
ccttgacacaccgcccgtca

SEQ ID NO: 12100 - DNA, 20 bp, Bacteroides thetaiotaomicron
ccatggcgcggtgaatagtt

SEQ ID NO: 12101 - DNA, 20 bp, Campylobacter jejuni
tacatgcagtcgagcgaaca

SEQ ID NO: 12102 - DNA, 30 bp, Clostridium clostridiiforme
tcaacctcggcgcgcagacgaaactggaga

SEQ ID NO: 12103 - DNA, 20 bp, Clostridium clostridiiforme
tgccagcagccgcggaatac

SEQ ID NO: 12104 - DNA, 20 bp, Streptococcus equinus
cagccgcctaagggggatag

SEQ ID NO: 12105 - DNA, 20 bp, Corynebacterium cystitidis
agataccctggtagccatgc

SEQ ID NO: 12106 - DNA, 20 bp, Leuconostoc mesenteroides
tggctcaggatgacgctggc

SEQ ID NO: 12107 - DNA, 20 bp, Corynebacterium afermentans
ggtgttccgactttcatgac

SEQ ID NO: 12108 - DNA, 20 bp, Kingella denitrificans
ggaattttggacaatggggg

SEQ ID NO: 12109 - DNA, 20 bp, Streptococcus criceti
agccagccgctaaggtggga

SEQ ID NO: 12110 - DNA, 20 bp, Pseudomonas putida
taccacgggtgattcatgac

SEQ ID NO: 12111 - DNA, 20 bp, Salmonella paratyphi
aagtaggtagctaaccttcg

SEQ ID NO: 12112 - DNA, 30 bp, Streptococcus macacae
tgttaggtcctaaggggcttagtgccgtag

SEQ ID NO: 12113 - DNA, 20 bp, Serratia plymuthica
ctacgggaatacgttcccgg

SEQ ID NO: 12114 - DNA, 20 bp, Providencia alcalifaciens
gaaacggtagctaatccgca

SEQ ID NO: 12115 - DNA, 20 bp, Proteus vulgaris
attagctagtaggtgagtaa

SEQ ID NO: 12116 - DNA, 20 bp, Corynebacterium confusum
tcgtacaaggtagccgtacc

SEQ ID NO: 12117 - DNA, 20 bp, Bacteroides uniformis
cggcttaagtgccatacgag

SEQ ID NO: 12118 - DNA, 20 bp, Serratia plymuthica
tcagaatgctacgggaatac

SEQ ID NO: 12119 - DNA, 20 bp, Staphylococcus capitis
ttgacggacctaatcagaaa

SEQ ID NO: 12120 - DNA, 20 bp, Kingella denitrificans
gggaattttggacaatgggg

SEQ ID NO: 12121 - DNA, 20 bp, Pasteurella multocida
ccgcccgtcacccatgggag

SEQ ID NO: 12122 - DNA, 20 bp, Proteus vulgaris
catgcaagcgagcggtaaca

SEQ ID NO: 12123 - DNA, 20 bp, Vibrio harveyi
tagtaatcgggatcagaatg

SEQ ID NO: 12124 - DNA, 20 bp, Corynebacterium renale
agtccatgccgaaacggtgg

SEQ ID NO: 12125 - DNA, 20 bp, Citrobacter freundii
gaagaagcccggctaactcc

SEQ ID NO: 12126 - DNA, 20 bp, Corynebacterium urealyticum
ggggagtacggccgcaggct

SEQ ID NO: 12127 - DNA, 20 bp, Corynebacterium pseudotuberculosis
cgtaacggtgggcgctaggt

SEQ ID NO: 12128 - DNA, 20 bp, Myroides odoratimimus
atccgggaatacgttcccgg

SEQ ID NO: 12129 - DNA, 20 bp, Prevotella intermedia
gtaagccgttaccttccaac

SEQ ID NO: 12130 - DNA, 20 bp, Leifsonia aquatica
aaccttaccaaggctgacat

SEQ ID NO: 12131 - DNA, 20 bp, Bacteroides ovatus
gctcgtgccgtaggtgtcgg

SEQ ID NO: 12132 - DNA, 20 bp, Bacteroides ovatus
gtgccgtaggtgtcggctta

SEQ ID NO: 12133 - DNA, 20 bp, Bacillus psychrosaccharolyticus
tggaggaacccagtggcgaa

SEQ ID NO: 12134 - DNA, 20 bp, Anaerobiospirillum succiniciproducens
cagaatgttgcgggaatacg

SEQ ID NO: 12135 - DNA, 20 bp, Streptococcus infantarius
gctttcgccccggtgttcct

SEQ ID NO: 12136 - DNA, 20 bp, Corynebacterium renale
catgccgaaacggtgggcgc

SEQ ID NO: 12137 - DNA, 30 bp, Haemophilus paraphrophilus
taaaacgacgggccaggttagaggtgttgg

SEQ ID NO: 12138 - DNA, 20 bp, Corynebacterium pseudotuberculosis
atgccgtaacggtgggcgct

SEQ ID NO: 12139 - DNA, 20 bp, Citrobacter freundii
gcagaagaagcccggctaac

SEQ ID NO: 12140 - DNA, 20 bp, Bacteroides uniformis
atgacgtcaaatcagccggc

SEQ ID NO: 12141 - DNA, 20 bp, Proteus vulgaris
actggaaacggggctaatac

SEQ ID NO: 12142 - DNA, 30 bp, Bacillus badius
tggtagtccacgccgaaacgatgagtgcta

SEQ ID NO: 12143 - DNA, 30 bp, Actinomyces radingae
gttctgcgctttccgcatggggggtgtggg

SEQ ID NO: 12144 - DNA, 20 bp, Corynebacterium confusum
ggacgaagtcgtacaaggta

SEQ ID NO: 12145 - DNA, 20 bp, Staphylococcus schleiferi
gccgggacaaaccggaggaa

SEQ ID NO: 12146 - DNA, 20 bp, Unknown Organism
  oligonucleotide from CDC group VB-3
tacccggagtgattcatgac

SEQ ID NO: 12147 - DNA, 20 bp, Vibrio alginolyticus
aactcgactccatgaagcgg

SEQ ID NO: 12148 - DNA, 20 bp, Citrobacter youngae
actccggccagcagccgcgg

SEQ ID NO: 12149 - DNA, 30 bp, Clostridium clostridiiforme
gaccctttcgcaaggaagggaacgtgaaca

SEQ ID NO: 12150 - DNA, 20 bp, Bacteroides uniformis
gcttaagtgccatacgagcg

SEQ ID NO: 12151 - DNA, 20 bp, Bacillus psychrosaccharolyticus
tgtggaggaacccagtggcg

SEQ ID NO: 12152 - DNA, 20 bp, Citrobacter youngae
taactccggccagcagccgc

SEQ ID NO: 12153 - DNA, 20 bp, Bacillus azotoformans
taaggagactgccgggacaa

SEQ ID NO: 12154 - DNA, 20 bp, Rhizobium radiobacter
tgatcatggctcagacgaac

SEQ ID NO: 12155 - DNA, 30 bp, Pseudomonas putida
ggttaccacgggtgattcatgactggggtg

SEQ ID NO: 12156 - DNA, 20 bp, Pasteurella multocida
gggcgtttaccacggatgat

SEQ ID NO: 12157 - DNA, 30 bp, Streptococcus macacae
aagtgggacgcactgatttcacgggagctt

SEQ ID NO: 12158 - DNA, 20 bp, Leclercia adecarboxylata
tggaactgagacacggccag

SEQ ID NO: 12159 - DNA, 30 bp, Myroides odoratimimus
taatcggatatcagccatgatccgggaata

SEQ ID NO: 12160 - DNA, 20 bp, Corynebacterium pseudotuberculosis
tccatgccgtaacggtgggc

SEQ ID NO: 12161 - DNA, 20 bp, Campylobacter jejuni
atacatgcagtcgagcgaac

SEQ ID NO: 12162 - DNA, 20 bp, Anaerobiospirillum succiniciproducens
atgttgcgggaatacgttcc

SEQ ID NO: 12163 - DNA, 20 bp, Myroides odoratimimus
atgatccgggaatacgttcc

SEQ ID NO: 12164 - DNA, 30 bp, Geobacillus stearothermophilus
gaccggattggggcttgccttgattcggtc

SEQ ID NO: 12165 - DNA, 20 bp, Prevotella loescheii
caagcggaggaacatgtggt

SEQ ID NO: 12166 - DNA, 20 bp, Shewanella algae
atcagaatgcccggtgaata

SEQ ID NO: 12167 - DNA, 20 bp, Leptotrichia buccalis
ctggtagtcccagctgtaaa

SEQ ID NO: 12168 - DNA, 20 bp, Pasteurella multocida
gtttaccacggatgattcat

SEQ ID NO: 12169 - DNA, 20 bp, Streptococcus sp.
gtgaggtaccgtaaggagcc

SEQ ID NO: 12170 - DNA, 30 bp, Leuconostoc fallax
tttgaagatgttagagataatattgttctc

SEQ ID NO: 12171 - DNA, 20 bp, Streptococcus criceti
gagccagccgctaaggtggg

SEQ ID NO: 12172 - DNA, 30 bp, Paenibacillus azotofixans
ctctgaatcgtttagagataggcgcggcct

SEQ ID NO: 12173 - DNA, 20 bp, Serratia ficaria
aggggaacctgcggtggatc

SEQ ID NO: 12174 - DNA, 30 bp, Vagococcus fluvialis
gttttcccgcatgggagaataataaaagac

SEQ ID NO: 12175 - DNA, 30 bp, Eubacterium moniliforme
tggggggcgatagtcctccgtgccgaagct

SEQ ID NO: 12176 - DNA, 20 bp, Streptococcus criceti
ggagccagccgctaaggtgg

SEQ ID NO: 12177 - DNA, 30 bp, Clostridium clostridiiforme
agacgaaactggagagcttgagaagcagag

SEQ ID NO: 12178 - DNA, 20 bp, Shigella flexneri
gggaacctgcgttggatcac

SEQ ID NO: 12179 - DNA, 30 bp, Anaerococcus tetradius
acgatgaagatatttagattccttcgggat

SEQ ID NO: 12180 - DNA, 30 bp, Eremococcus coleocola
atcgcctgatggttgattgaaagatggctc

SEQ ID NO: 12181 - DNA, 30 bp, Streptococcus macacae
gttaaggaagcaagttggagagagtggaaa

SEQ ID NO: 12182 - DNA, 20 bp, Bacillus azotoformans
ctacaatggatggacaaagg

SEQ ID NO: 12183 - DNA, 30 bp, Streptococcus acidominimus
ataatagtgtttactgcatggtaaacattt

SEQ ID NO: 12184 - DNA, 30 bp, Oligella urethralis
ggtagcaagaggtcttacgatccccctctt

SEQ ID NO: 12185 - DNA, 20 bp, Vibrio harveyi
agaagtaggtagttaacctt

SEQ ID NO: 12186 - DNA, 30 bp, Dolosicoccus paucivorans
aatgattcgcatgtttcattgacaaagatg

SEQ ID NO: 12187 - DNA, 30 bp, Moellerella wisconsensis
aggcgttgatactaatactatcagcgattg

SEQ ID NO: 12188 - DNA, 30 bp, Clostridium clostridiiforme
tcgggtgctctcaaagccggaggcctaacc

SEQ ID NO: 12189 - DNA, 30 bp, Fusobacterium necrogenes
gccttcgtgccccttcgggggaacctagtg

SEQ ID NO: 12190 - DNA, 30 bp, Bacteroides merdae
aaactgggttacttgagtgtgtttgaggta

SEQ ID NO: 12191 - DNA, 30 bp, Staphylococcus schleiferi
atggtatgcccgtatcggaaagtgccggtg

SEQ ID NO: 12192 - DNA, 20 bp, Shigella boydii
aacgtattcccgtggcattc

SEQ ID NO: 12193 - DNA, 30 bp, Dolosicoccus paucivorans
tgtatcaccgccttctttgaaggcaccgat

SEQ ID NO: 12194 - DNA, 20 bp, Shewanella putrefaciens
gaatgccacgggaatacgtt

SEQ ID NO: 12195 - DNA, 30 bp, Vibrio hollisae
gaaatccccagcgctaataccgctggggga

SEQ ID NO: 12196 - DNA, 30 bp, Citrobacter freundii
gaagtccgtaaaccaagggtaaaccgtagg

SEQ ID NO: 12197 - DNA, 30 bp, Anaerococcus tetradius
tcaatcgcatggtagactaaccaaagattt

SEQ ID NO: 12198 - DNA, 20 bp, Serratia ficaria
ggaacctgcggtggatcacc

SEQ ID NO: 12199 - DNA, 20 bp, Serratia ficaria
ggggaacctgcggtggatca

SEQ ID NO: 12200 - DNA, 20 bp, Rahnella aquatilis
cgtaacaggtaaccgtaggg

SEQ ID NO: 12201 - DNA, 30 bp, Clostridium clostridiiforme
aacgatgtatgctgggtgtgggactagcga

SEQ ID NO: 12202 - DNA, 30 bp, Streptococcus macacae
agcctttagagggattgaaaggtacaacag

SEQ ID NO: 12203 - DNA, 30 bp, Streptococcus acidominimus
cgtagctgctacatttgaattgattgagtc

SEQ ID NO: 12204 - DNA, 30 bp, Streptococcus macacae
gctccacgagatcggtgagtcgcgaacggg

SEQ ID NO: 12205 - DNA, 30 bp, Dolosicoccus paucivorans
tttcattgacaaagatgcttatggtatcgc

SEQ ID NO: 12206 - DNA, 30 bp, Helcococcus kunzii
aaccacggttcggtttagaaactggttaac

SEQ ID NO: 12207 - DNA, 30 bp, Anaerococcus prevotii
aacgacgaataataccctatgatatgatag

SEQ ID NO: 12208 - DNA, 30 bp, Helcococcus kunzii
cggtttagaaactggttaacttgagtagat

SEQ ID NO: 12209 - DNA, 30 bp, Dolosicoccus paucivorans
tatcaccgccttctttgaaggcaccgatac

SEQ ID NO: 12210 - DNA, 30 bp, Peptostreptococcus anaerobius
tgttttgatgcttgcattgatgaaagatga

SEQ ID NO: 12211 - DNA, 30 bp, Brevibacillus centrosporus
cgggttttgggctgtcgctataggatgggc

SEQ ID NO: 12212 - DNA, 30 bp, Paenibacillus lautus
ggttcttctctcgcatgggagaggaaagaa

SEQ ID NO: 12213 - DNA, 20 bp, Serratia ficaria
gggaacctgcggtggatcac

SEQ ID NO: 12214 - DNA, 30 bp, Pediococcus dextrinicus
ttcttttaatgatcaaggtgcttgcaccaa

SEQ ID NO: 12215 - DNA, 20 bp, Bacillus azotoformans
tacaatggatggacaaaggg

SEQ ID NO: 12216 - DNA, 20 bp, Shigella flexneri
ggaacctgcgttggatcacc

SEQ ID NO: 12217 - DNA, 30 bp, Streptococcus macacae
atttcacgggagcttgctccacgagatcgg

SEQ ID NO: 12218 - DNA, 30 bp, Clostridium clostridiiforme
gcttgagaagcagagaggcaaacagaattc

SEQ ID NO: 12219 - DNA, 30 bp, Leuconostoc carnosum
aagaaaagttaaggtagggaatgaccttag

SEQ ID NO: 12220 - DNA, 20 bp, Neisseria subflava
tcgagtccggattgcactct

SEQ ID NO: 12221 - DNA, 30 bp, Clostridium clostridiiforme
gcgaggaaggatccgcctaaagagtgtccg

SEQ ID NO: 12222 - DNA, 30 bp, Leptotrichia buccalis
tggtgttgtcagactgacgcatgtcaggct

SEQ ID NO: 12223 - DNA, 20 bp, Shigella flexneri
ctgcgttggatcacctcctt

SEQ ID NO: 12224 - DNA, 30 bp, Anaerococcus tetradius
ggttcttggaataatctgggagccgcagct

SEQ ID NO: 12225 - DNA, 30 bp, Anaerococcus tetradius
cttttaaaactgttaggcttgagagatgaa

SEQ ID NO: 12226 - DNA, 30 bp, Clostridium clostridiiforme
cggttgctaccagataaagctgagcactcc

SEQ ID NO: 12227 - DNA, 30 bp, Sphingobacterium multivorum
aacatatgtgaccggcatcggttggatatt

SEQ ID NO: 12228 - DNA, 30 bp, Clostridium clostridiiforme
aagcgagcccgaaaggagaagcagatccca

SEQ ID NO: 12229 - DNA, 30 bp, Empedobacter brevis
ccctactgaaaaggatagcccttcgaaagg

SEQ ID NO: 12230 - DNA, 30 bp, Pediococcus dextrinicus
aggtgcttgcaccaaggagatttaaaagta

SEQ ID NO: 12231 - DNA, 30 bp, Anaerococcus tetradius
ccctatgacataaactcttcgcatgaagag

SEQ ID NO: 12232 - DNA, 30 bp, Sphingobacterium multivorum
aggcattcatggcccttacgcttcggggct

SEQ ID NO: 12233 - DNA, 30 bp, Streptococcus acidominimus
agcgggagtggaaaatccgctaagtgacgg

SEQ ID NO: 12234 - DNA, 20 bp, Serratia marcescens
ctggggtgaagcgaacaagg

SEQ ID NO: 12235 - DNA, 30 bp, Arcanobacterium pyogenes
agaagaagcatttttgtgacggtatgtgca

SEQ ID NO: 12236 - DNA, 30 bp, Peptoniphilus asaccharolyticus
gctcaacccttgtaagcatttgaaactaat

SEQ ID NO: 12237 - DNA, 30 bp, Streptococcus macacae
acgctgagtgctaggtgttaggtcctaagg

SEQ ID NO: 12238 - DNA, 20 bp, Raoultella terrigena
tgaacgctgttgtgtaggcc

SEQ ID NO: 12239 - DNA, 30 bp, Bacteroides stercoris
gggatgattattaaagaatttcggttgtcg

SEQ ID NO: 12240 - DNA, 30 bp, Streptococcus macacae
ttaaaagcattggcttaaccaatgtcagct

SEQ ID NO: 12241 - DNA, 20 bp, Unknown Organism
  oligonucleotide from CDC group VB-3
caaggagccgtaggggaacc

SEQ ID NO: 12242 - DNA, 30 bp, Clostridium clostridiiforme
gtcacaccatccgagtcgggtgctctcaaa

SEQ ID NO: 12243 - DNA, 30 bp, Bacteroides ovatus
tacgaatatcgcatgatatttttattaaag

SEQ ID NO: 12244 - DNA, 20 bp, Streptococcus equi
aattatctgtgagtcgcgaa

SEQ ID NO: 12245 - DNA, 30 bp, Dolosicoccus paucivorans
cttatggtatcgctaaaggatggtcccgcg

SEQ ID NO: 12246 - DNA, 30 bp, Bacillus mycoides
tttgcgctgcatggcgcgaaattgaaaggc

SEQ ID NO: 12247 - DNA, 30 bp, Clostridium clostridiiforme
agggcgcgtaggcggcgcttcaagtcgtct

SEQ ID NO: 12248 - DNA, 30 bp, Clostridium clostridiiforme
ggatggtacagagagaagcgagcccgaaag

SEQ ID NO: 12249 - DNA, 30 bp, Psychrobacter phenylpyruvicus
aaaaggcggcttttagctgtcgctagagga

SEQ ID NO: 12250 - DNA, 20 bp, Morganella morganii
cataatgtccacggaccaaa

SEQ ID NO: 12251 - DNA, 30 bp, Bacteroides ovatus
catacgaatatcgcatgatatttttattaa

SEQ ID NO: 12252 - DNA, 30 bp, Anaerococcus tetradius
aaacgacgaataataccctatgacataaac

SEQ ID NO: 12253 - DNA, 30 bp, Prevotella disiens
atgttttgcatgtaccattcgaataaggac

SEQ ID NO: 12254 - DNA, 30 bp, Anaerococcus tetradius
gaaaaatattggattagtggcggacgggtg

SEQ ID NO: 12255 - DNA, 20 bp, Kocuria rosea
atgcaagtctgaacgatgat

SEQ ID NO: 12256 - DNA, 30 bp, Dolosicoccus paucivorans
gcaacgtcgcgagaccaagcggatctctta

SEQ ID NO: 12257 - DNA, 30 bp, Clostridium clostridiiforme
gagaagcagatcccaaaaagccatccccag

SEQ ID NO: 12258 - DNA, 20 bp, Eubacterium moniliforme
cctcgggtggaactgtgagt

SEQ ID NO: 12259 - DNA, 30 bp, Leptotrichia buccalis
atgtaatgcttaacacatgcaagtctttgg

SEQ ID NO: 12260 - DNA, 30 bp, Unknown Organism
  oligonucleotide from CDC group EO-2
cggaggcgagggacttcggttctagcggcg

SEQ ID NO: 12261 - DNA, 30 bp, Bacteroides stercoris
tgactgagctggaaacagttctttcttcgg

SEQ ID NO: 12262 - DNA, 30 bp, Actinomyces radingae
catggggggtgtgggaaaggggctttttta

SEQ ID NO: 12263 - DNA, 30 bp, Eremococcus coleocola
tagtagtaactggctagggattgacggtaa

SEQ ID NO: 12264 - DNA, 30 bp, Gemella morbillorum
ttggacgcgatagctaatcccgcatatcag

SEQ ID NO: 12265 - DNA, 20 bp, Bacillus licheniformis
gggaaccccggggttatatc

SEQ ID NO: 12266 - DNA, 30 bp, Bacteroides capillosus
taggattaaaggtttagcggtaagggatgg

SEQ ID NO: 12267 - DNA, 30 bp, Eremococcus coleocola
taaagcactgttattagccaagaacacccc

SEQ ID NO: 12268 - DNA, 20 bp, Bacteroides capillosus
cctactccttacaacggaat

SEQ ID NO: 12269 - DNA, 30 bp, Corynebacterium group ANF
ctttgtgtggtgtggtgtcgaaggtgggat

SEQ ID NO: 12270 - DNA, 30 bp, Helcococcus kunzii
acaggaatatcctagagataggatagtctt

SEQ ID NO: 12271 - DNA, 30 bp, Peptoniphilus asaccharolyticus
gagcgggcgagctagtgatagtaagcgaat

SEQ ID NO: 12272 - DNA, 30 bp, Streptococcus iniae
attggtgcttgcactaatccaaagagttgc

SEQ ID NO: 12273 - DNA, 30 bp, Streptococcus urinalis
ttttaacacatgttaggaacttaaaaggag

SEQ ID NO: 12274 - DNA, 30 bp, Bacteroides capillosus
cttgaactgtaggcgaacgatctagagata

SEQ ID NO: 12275 - DNA, 20 bp, Eubacterium moniliforme
aactgtgagtatacttagtg

SEQ ID NO: 12276 - DNA, 30 bp, Eremococcus coleocola
acagcaatcatcgcctgatggttgattgaa

SEQ ID NO: 12277 - DNA, 30 bp, Streptococcus acidominimus
taagagaagaacgttagcgggagtggaaaa

SEQ ID NO: 12278 - DNA, 30 bp, Fusobacterium necrogenes
gaagttggcagagatgccttcgtgcccctt

SEQ ID NO: 12279 - DNA, 20 bp, Bacteroides distasonis
ggggccccgcatggggatat

SEQ ID NO: 12280 - DNA, 30 bp, Actinomyces radingae
gggcctttgtggttgtgtggtgagagtggc

SEQ ID NO: 12281 - DNA, 20 bp, Yersinia ruckeri
taaccgaggggaacctgcgg

SEQ ID NO: 12282 - DNA, 30 bp, Suttonella indologenes
cgctggcgggcccaatgcttaacacatgca

SEQ ID NO: 12283 - DNA, 30 bp, Myroides odoratimimus
caacccctattgttagttaccactcgcgtt

SEQ ID NO: 12284 - DNA, 30 bp, Streptococcus acidominimus
ctagagatagggcttctcttttgagcaggg

SEQ ID NO: 12285 - DNA, 20 bp, Rahnella aquatilis
taacaggtaaccgtagggga

SEQ ID NO: 12286 - DNA, 20 bp, Yersinia ruckeri
gtaaccgaggggaacctgcg

SEQ ID NO: 12287 - DNA, 30 bp, Empedobacter brevis
ggtacgattctttcgggaatctgagaccgg

SEQ ID NO: 12288 - DNA, 20 bp, Shigella flexneri
cctgcgttggatcacctcct

SEQ ID NO: 12289 - DNA, 30 bp, Clostridium clostridiiforme
gtgtgggactagcgatagttccgtgccgaa

SEQ ID NO: 12290 - DNA, 20 bp, Anaerococcus prevotii
ctcggtggaagattactaat

SEQ ID NO: 12291 - DNA, 30 bp, Actinomyces radingae
aaaggggcttttttaagtttctggagggag

SEQ ID NO: 12292 - DNA, 20 bp, Vibrio harveyi
gaagtaggtagttaaccttc

SEQ ID NO: 12293 - DNA, 30 bp, Bacteroides stercoris
atactggtatccttgagtgcagcagaggtg

SEQ ID NO: 12294 - DNA, 20 bp, Clostridium clostridiiforme
gggactagcgatagttccgt

SEQ ID NO: 12295 - DNA, 20 bp, Clostridium clostridiiforme
ttaaccgggatccctcttcg

SEQ ID NO: 12296 - DNA, 30 bp, Dolosicoccus paucivorans
tcattgacaaagatgcttatggtatcgcta

SEQ ID NO: 12297 - DNA, 20 bp, Salmonella paratyphi
taggtagctaaccttcggga

SEQ ID NO: 12298 - DNA, 30 bp, Anaerococcus tetradius
tcttcgcatgaagagcttatcaaagattta

SEQ ID NO: 12299 - DNA, 30 bp, Bacteroides capillosus
catggagggttgcttgcaacctttgatggc

SEQ ID NO: 12300 - DNA, 20 bp, Bacteroides thetaiotaomicron
cgggggtactgaagtagtac

SEQ ID NO: 12301 - DNA, 30 bp, Clostridium clostridiiforme
aaagctgagcactccggcgagactgccatc

SEQ ID NO: 12302 - DNA, 30 bp, Corynebacterium coyleae
gatcggccccagagatgctggtttcccttt

SEQ ID NO: 12303 - DNA, 30 bp, Propionibacterium propionicus
aaaccgctttcaattgtgacgaagcttttt

SEQ ID NO: 12304 - DNA, 30 bp, Anaerococcus prevotii
cctcgcatgaagctatcatcaaagatttat

SEQ ID NO: 12305 - DNA, 30 bp, Finegoldia magna
ccagcgaataaatgtccggggactctaagt

SEQ ID NO: 12306 - DNA, 20 bp, Citrobacter freundii
accaagggtaaaccgtaggg

SEQ ID NO: 12307 - DNA, 30 bp, Eubacterium moniliforme
ccccggggttgcacttgaaactgtgtggct

SEQ ID NO: 12308 - DNA, 30 bp, Streptococcus macacae
tgaaaggtacaacagtatcgctaagagatg

SEQ ID NO: 12309 - DNA, 20 bp, Brevibacillus centrosporus
ggatagagtctactctcgca

SEQ ID NO: 12310 - DNA, 30 bp, Gemella morbillorum
aagtagaacgctaaggagagcttcttctct

SEQ ID NO: 12311 - DNA, 30 bp, Streptococcus macacae
cgataggtaataccgcataatatctctcta

SEQ ID NO: 12312 - DNA, 30 bp, Salmonella typhi
ggtatcaggcagcagcttgcttgcttggct

SEQ ID NO: 12313 - DNA, 30 bp, Streptococcus macacae
tttatcgcatgataggagcttaaaaggtgc

SEQ ID NO: 12314 - DNA, 20 bp, Bacteroides thetaiotaomicron
gaaacccataggccgtaagg

SEQ ID NO: 12315 - DNA, 20 bp, Campylobacter curvus
aaagtcgaaccctatatatt

SEQ ID NO: 12316 - DNA, 30 bp, Pediococcus dextrinicus
caagtcgaacgagttttcttttaatgatca

SEQ ID NO: 12317 - DNA, 30 bp, Paenibacillus alvei
ccaggtcttgacatctgaatgcaaactcta

SEQ ID NO: 12318 - DNA, 30 bp, Bacteroides stercoris
agttttcccgcatggaataactattaaaga

SEQ ID NO: 12319 - DNA, 30 bp, Anaerococcus tetradius
ggcttgagagatgaaagggaaagtggaatt

SEQ ID NO: 12320 - DNA, 30 bp, Pseudomonas mendocina
gctggttaataccctgcagttttgacgtta

SEQ ID NO: 12321 - DNA, 30 bp, Bacteroides stercoris
cgggcttaaattgcaactgactgaatcgga

SEQ ID NO: 12322 - DNA, 30 bp, Dolosicoccus paucivorans
tcaatgattcgcatgtttcattgacaaaga

SEQ ID NO: 12323 - DNA, 20 bp, Shewanella putrefaciens
acagaatctcgcttcagaga

SEQ ID NO: 12324 - DNA, 20 bp, Rahnella aquatilis
aacaggtaaccgtaggggaa

SEQ ID NO: 12325 - DNA, 30 bp, Moraxella atlantae
tcctacgggagaaaggagcttatgggtttc

SEQ ID NO: 12326 - DNA, 30 bp, Vibrio vulnificus
cgggaggacgccaccactttgggtcatgac

SEQ ID NO: 12327 - DNA, 30 bp, Bacteroides capillosus
aacctactccttacaacggaataacccggc

SEQ ID NO: 12328 - DNA, 30 bp, Bacteroides capillosus
gcctttcggctatgtgaccaagcgaaagca

SEQ ID NO: 12329 - DNA, 30 bp, Haemophilus paraphrophilus
ggttagaggtgttggatccatggctcagat

SEQ ID NO: 12330 - DNA, 30 bp, Vibrio hollisae
ttctggagagattcagaagtgcccgaaagg

SEQ ID NO: 12331 - DNA, 30 bp, Neisseria mucosa
gtagccgtaggggaacctgcggttggggat

SEQ ID NO: 12332 - DNA, 30 bp, Corynebacterium group ANF
aagccgcttgctccactttgtgtggtgtgg

SEQ ID NO: 12333 - DNA, 30 bp, Peptoniphilus asaccharolyticus
aacccttcggggtgaagtttggaaggatta

SEQ ID NO: 12334 - DNA, 30 bp, Sphingobacterium multivorum
acagactggctgggccaacacgagaggaag

SEQ ID NO: 12335 - DNA, 30 bp, Dolosicoccus paucivorans
atggtacaacgagaagcaacgtcgcgagac

SEQ ID NO: 12336 - DNA, 30 bp, Corynebacterium group ANF
atggtaagaagatgaaaggcggcgcaagct

SEQ ID NO: 12337 - DNA, 30 bp, Paenibacillus alvei
tgaatgcaaactctagagatagagtccctt

SEQ ID NO: 12338 - DNA, 20 bp, Brevibacillus centrosporus
cttccggggaacccggggtt

SEQ ID NO: 12339 - DNA, 20 bp, Streptococcus equi
caattatctgtgagtcgcga

SEQ ID NO: 12340 - DNA, 30 bp, Bacteroides merdae
agcatgatttgtagcaatacagattgatgg

SEQ ID NO: 12341 - DNA, 20 bp, Bacillus licheniformis
ggggaaccccggggttatat

SEQ ID NO: 12342 - DNA, 30 bp, Helcococcus kunzii
tagaaactggttaacttgagtagatgaggg

SEQ ID NO: 12343 - DNA, 30 bp, Anaerococcus prevotii
cctatgatatgatagcctcgcatgaagcta

SEQ ID NO: 12344 - DNA, 30 bp, Anaerococcus tetradius
agattccttcgggatgaaaaatattggatt

SEQ ID NO: 12345 - DNA, 30 bp, Oligella ureolytica
gggggatcatttgacctctcgctattggag

SEQ ID NO: 12346 - DNA, 20 bp, Brevibacillus centrosporus
cggatagagtctactctcgc

SEQ ID NO: 12347 - DNA, 30 bp, Oligella urethralis
cggtagcaagaggtcttacgatccccctct

SEQ ID NO: 12348 - DNA, 30 bp, Bacteroides stercoris
ggcttgaattgcaactgactgagctggaaa

SEQ ID NO: 12349 - DNA, 30 bp, Helcococcus kunzii
ggctcaaccacggttcggtttagaaactgg

SEQ ID NO: 12350 - DNA, 30 bp, Actinomyces radingae
tggatgttctgcgctttccgcatggggggt

SEQ ID NO: 12351 - DNA, 20 bp, Streptococcus constellatus
aggatgcccgtagtttacta

SEQ ID NO: 12352 - DNA, 20 bp, Eubacterium moniliforme
ctgtgagtatacttagtggc

SEQ ID NO: 12353 - DNA, 30 bp, Pediococcus dextrinicus
ggagatttaaaagtaaacgagtggcggacg

SEQ ID NO: 12354 - DNA, 20 bp, Myroides odoratimimus
ctccctacgagtagggactt

SEQ ID NO: 12355 - DNA, 20 bp, Brevibacillus centrosporus
aacccggggttaatcccgaa

SEQ ID NO: 12356 - DNA, 30 bp, Paenibacillus lautus
ccctgggtcgcacccaaaactggatgactt

SEQ ID NO: 12357 - DNA, 20 bp, Bacteroides capilosus
cgcataatgcagctgagtcg

SEQ ID NO: 12358 - DNA, 30 bp, Oligella urethralis
ctccaatctcttgaagcttccgggcatgtc

SEQ ID NO: 12359 - DNA, 20 bp, Brevibacillus centrosporus
gatagagtctactctcgcat

SEQ ID NO: 12360 - DNA, 20 bp, Bacteroides thetaiotaomicron
ccgggggtactgaagtagta

SEQ ID NO: 12361 - DNA, 20 bp, Unknown Organism
  oligonucleotide from CDC group VB-3
acaaggagccgtaggggaac

SEQ ID NO: 12362 - DNA, 20 bp, Bacillus licheniformis
gagctgtgggttactctcgg

SEQ ID NO: 12363 - DNA, 20 bp, Shigella flexneri
gaacctgcgttggatcacct

SEQ ID NO: 12364 - DNA, 30 bp, Propionibacterium propionicus
gtgacgaagcttttttgtgacggtagcagt

SEQ ID NO: 12365 - DNA, 30 bp, Oligella ureolytica
ttctctacggaggaaagggggggatcattt

SEQ ID NO: 12366 - DNA, 20 bp, Bacteroides distasonis
gggccccgcatggggatatt

SEQ ID NO: 12367 - DNA, 30 bp, Vibrio hollisae
acttttgtcggggaggaaatccccagcgct

SEQ ID NO: 12368 - DNA, 30 bp, Bacteroides merdae
cactccttctagcaatagcagattacgagg

SEQ ID NO: 12369 - DNA, 30 bp, Eremococcus coleocola
agggattgacggtaactaatcagaaagcca

SEQ ID NO: 12370 - DNA, 30 bp, Paenibacillus validus
gagcggccctttccttcgggatagcgttag

SEQ ID NO: 12371 - DNA, 30 bp, Dolosicoccus paucivorans
tgcttatggtatcgctaaaggatggtcccg

SEQ ID NO: 12372 - DNA, 30 bp, Dolosicoccus paucivorans
ggtacaacgagaagcaacgtcgcgagacca

SEQ ID NO: 12373 - DNA, 30 bp, Leuconostoc fallax
gaagatgttagagataatattgttctcttc

SEQ ID NO: 12374 - DNA, 30 bp, Enterococcus dispar
acaatagtaaacacatgtttattatttgaa

SEQ ID NO: 12375 - DNA, 20 bp, Brevibacillus brevis
cttaaggtgcttgcacctta

SEQ ID NO: 12376 - DNA, 20 bp, Leptotrichia buccalis
agagagctgcaaggcggtaa

SEQ ID NO: 12377 - DNA, 20 bp, Streptococcus acidominimus
ccgcataatagtgtttactg

SEQ ID NO: 12378 - DNA, 20 bp, Streptococcus macacae
aagtgggacgcactgatttc

SEQ ID NO: 12379 - DNA, 20 bp, Bacteroides merdae
aagtggaggacgtgtccttt

SEQ ID NO: 12380 - DNA, 20 bp, Vibrio harveyi
gtaggtagttaaccttcggg

SEQ ID NO: 12381 - DNA, 20 bp, Achromobacter xylosoxidans
gttaatacctcgcgaaactg

SEQ ID NO: 12382 - DNA, 20 bp, Oligella urethralis
ccgctccggtagcaagaggt

SEQ ID NO: 12383 - DNA, 20 bp, Brevibacillus centrosporus
ggggaacccggggttaatcc

SEQ ID NO: 12384 - DNA, 20 bp, Campylobacter concisus
caaagggagctgcgaaggtg

SEQ ID NO: 12385 - DNA, 20 bp, Bacteroides uniformis
ctagggtaacaactggcgat

SEQ ID NO: 12386 - DNA, 20 bp, Sphingobacterium multivorum
gttcggttgattaaatattt

SEQ ID NO: 12387 - DNA, 20 bp, Clostridium clostridiiforme
gagaagcagagaggcaaaca

SEQ ID NO: 12388 - DNA, 20 bp, Anaerococcus tetradius
acttcggtctactgtattac

SEQ ID NO: 12389 - DNA, 20 bp, Eubacterium moniliforme
tcgaaggtgagatcaatgac

SEQ ID NO: 12390 - DNA, 20 bp, Paenibacillus macerans
gtggagtaactgccaggaga

SEQ ID NO: 12391 - DNA, 20 bp, Brevibacillus centrosporus
aagccgggttttgggctgtc

SEQ ID NO: 12392 - DNA, 20 bp, Bacillus niacini
agcgaatcttgaggtgcttg

SEQ ID NO: 12393 - DNA, 30 bp, Peptoniphilus asaccharolyticus
tattgaccgctctagagatagagctttccc

SEQ ID NO: 12394 - DNA, 20 bp, Eubacterium moniliforme
ggggggcgatagtcctccgt

SEQ ID NO: 12395 - DNA, 20 bp, Eremococcus coleocola
ctagtagtaactggctaggg

SEQ ID NO: 12396 - DNA, 20 bp, Brevibacillus centrosporus
catgaggcgaagacggaaag

SEQ ID NO: 12397 - DNA, 20 bp, Bacteroides merdae
gagtggaaacactccttcta

SEQ ID NO: 12398 - DNA, 30 bp, Gemella morbillorum
gagagcttcttctctggatgagttgcgcac

SEQ ID NO: 12399 - DNA, 20 bp, Clostridium innocuum
taggtatacagagcgcatgc

SEQ ID NO: 12400 - DNA, 20 bp, Staphylococcus schleiferi
aagtgggacacaatgattgg

SEQ ID NO: 12401 - DNA, 30 bp, Streptococcus ferus
accatagtatgctttggaaactgtagggct

SEQ ID NO: 12402 - DNA, 20 bp, Geobacillus stearothermophilus
tggggcttgccttgattcgg

SEQ ID NO: 12403 - DNA, 20 bp, Bacteroides caccae
cgcaaggcatttgtgaaggt

SEQ ID NO: 12404 - DNA, 20 bp, Raoultella ornithinolytica
ctttgtgattacatgactgg

SEQ ID NO: 12405 - DNA, 20 bp, Microbacterium hominis
acgggtgaaggcccagcttg

SEQ ID NO: 12406 - DNA, 20 bp, Citrobacter freundii
tccgtaaaccaagggtaaac

SEQ ID NO: 12407 - DNA, 20 bp, Bacillus smithii
ggtgaagtcgtaacaaaaag

SEQ ID NO: 12408 - DNA, 20 bp, Streptococcus macacae
catgacagcttttatcgcat

SEQ ID NO: 12409 - DNA, 20 bp, Leptotrichia buccalis
gactgacgcatgtcaggctg

SEQ ID NO: 12410 - DNA, 20 bp, Bacteroides distasonis
taccgcatgaagcaggggcc

SEQ ID NO: 12411 - DNA, 30 bp, Leuconostoc carnosum
tatgggaagaaaagttaaggtagggaatga

SEQ ID NO: 12412 - DNA, 20 bp, Bacteroides capilosus
caatggattgggtttcttag

SEQ ID NO: 12413 - DNA, 20 bp, Brevibacillus centrosporus
actctcgcatgaggcgaaga

SEQ ID NO: 12414 - DNA, 20 bp, Fusobacterium necrogenes
tttcgcatggaattcatatg

SEQ ID NO: 12415 - DNA, 20 bp, Sphingobacterium multivorum
cttcggggctatcacacgtg

SEQ ID NO: 12416 - DNA, 20 bp, Sphingobacterium multivorum
gactggctgggccaacacga

SEQ ID NO: 12417 - DNA, 20 bp, Fusobacterium mortiferum
gtctacttgatcctcggggt

SEQ ID NO: 12418 - DNA, 30 bp, Clostridium clostridiiforme
ctcaccaaaccgaagacgggtagccggact

SEQ ID NO: 12419 - DNA, 20 bp, Bacteroides stercoris
tggcgaccttgagtgcaaca

SEQ ID NO: 12420 - DNA, 20 bp, Propionibacterium acnes
cgtacaagataaaagtaccg

SEQ ID NO: 12421 - DNA, 20 bp, Vibrio harveyi
gactccggaagttcggaatc

SEQ ID NO: 12422 - DNA, 20 bp, Eschericchia vulneris
gcgacagatccctagtctgg

SEQ ID NO: 12423 - DNA, 20 bp, Anaerococcus tetradius
cttgacataatacggaggga

SEQ ID NO: 12424 - DNA, 20 bp, Capnocytophaga sp.
tcaggttaagtcctatagac

SEQ ID NO: 12425 - DNA, 30 bp, Corynebacterium auris
gcgcgtgtgcgatactgtgaggtggagcta

SEQ ID NO: 12426 - DNA, 20 bp, Bacteroides capillosus
tgtaggcgaacgatctagag

SEQ ID NO: 12427 - DNA, 20 bp, Unknown Organism
  oligonucleotide from CDC group VB-3
taacaaggagccgtagggga

SEQ ID NO: 12428 - DNA, 20 bp, Anaerococcus prevotii
atacttagttaccagcgaat

SEQ ID NO: 12429 - DNA, 20 bp, Leptotrichia buccalis
acatgtaatgcttaacacat

SEQ ID NO: 12430 - DNA, 20 bp, Sporosarcina ureae
attctcttctggcatgaggg

SEQ ID NO: 12431 - DNA, 30 bp, Empedobacter brevis
atggtaagtacagagggcagctacttggca

SEQ ID NO: 12432 - DNA, 20 bp, Vibrio hollisae
aggaaatccccagcgctaat

SEQ ID NO: 12433 - DNA, 20 bp, Prevotella loescheii
ataactgcttcatggcatac

SEQ ID NO: 12434 - DNA, 20 bp, Pseudomonas fluorescens
ggatgaagtgagcttgctca

SEQ ID NO: 12435 - DNA, 20 bp, Enterobacter cloacae
tacccactttgtgattcatg

SEQ ID NO: 12436 - DNA, 20 bp, Clostridium clostridiiforme
tggttcgagagacttatgtt

SEQ ID NO: 12437 - DNA, 20 bp, Corynebacterium pilosum
gggtgtcttattccgggttt

SEQ ID NO: 12438 - DNA, 20 bp, Dolosicoccus paucivorans
gcataaatcaatgattcgca

SEQ ID NO: 12439 - DNA, 20 bp, Bacteroides capillosus
atgcaggcatctaactagga

SEQ ID NO: 12440 - DNA, 20 bp, Finegoldia magna
acgggatttagtagacagaa

SEQ ID NO: 12441 - DNA, 20 bp, Prevotella loescheii
ggtggataactgcttcatgg

SEQ ID NO: 12442 - DNA, 20 bp, Corynebacterium group ANF
cgcttgctccactttgtgtg

SEQ ID NO: 12443 - DNA, 20 bp, Microbacterium hominis
tgtaatacgatcccgggtct

SEQ ID NO: 12444 - DNA, 20 bp, Myroides odoratimimus
ggtgaaatttcctagcttaa

SEQ ID NO: 12445 - DNA, 20 bp, Propionibacterium avidum
gggggtagccgtcgaatcga

SEQ ID NO: 12446 - DNA, 20 bp, Finegoldia magna
ttagtaaacagaagcctcgg

SEQ ID NO: 12447 - DNA, 20 bp, Bacteroides stercoris
tatgctggggactctacccg

SEQ ID NO: 12448 - DNA, 20 bp, Brevibacillus centrosporus
agtttgggatacttccgggg

SEQ ID NO: 12449 - DNA, 20 bp, Corynebacterium group ANF
gtgaaggtagtggatcgagc

SEQ ID NO: 12450 - DNA, 20 bp, Suttonella indologenes
gggcccaatgcttaacacat

SEQ ID NO: 12451 - DNA, 20 bp, Streptococcus bovis
ctggtacactgagagatgga

SEQ ID NO: 12452 - DNA, 20 bp, Bacteroides capilosus
agagctcatgacagaggatt

SEQ ID NO: 12453 - DNA, 20 bp, Streptococcus constellatus
cgcacaggatgcccgtagtt

SEQ ID NO: 12454 - DNA, 20 bp, Prevotella loescheii
ggataaaggggcccacgtgt

SEQ ID NO: 12455 - DNA, 20 bp, Corynebacterium group ANF
aactaacggatcccttcggg

SEQ ID NO: 12456 - DNA, 20 bp, Unknown Organism
  oligonucleotide from CDC group EO-2
gggaatgtgccacttctact

SEQ ID NO: 12457 - DNA, 20 bp, Corynebacterium group F1
tggtactcgagtggcgacac

SEQ ID NO: 12458 - DNA, 20 bp, Actinomyces naeslundii
cgaccttgccttttgggggg

SEQ ID NO: 12459 - DNA, 20 bp, Proteus mirabilis
gtcgtacaaggcaaccgtca

SEQ ID NO: 12460 - DNA, 20 bp, Corynebacterium group F1
gagtggcgacacgggttgag

SEQ ID NO: 12461 - DNA, 20 bp, Streptococcus macacae
ctaaggggcttagtgccgta

SEQ ID NO: 12462 - DNA, 20 bp, Vibrio hollisae
gcgctaataccgctggggga

SEQ ID NO: 12463 - DNA, 30 bp, Streptococcus criceti
gtaggtagggtaaaggcctacctaggctgc

SEQ ID NO: 12464 - DNA, 20 bp, Streptococcus acidominimus
ctcccgtagctgctacattt

SEQ ID NO: 12465 - DNA, 20 bp, Enterobacter amnigenus
acagagaggcttgttttctg

SEQ ID NO: 12466 - DNA, 20 bp, Haemophilus paraphrophilus
aaacgacgggccaggttaga

SEQ ID NO: 12467 - DNA, 20 bp, Enterobacter gergoviae
aggctacgcgttaaggtagc

SEQ ID NO: 12468 - DNA, 20 bp, Arcanobacterium pyogenes
gaagccggggctttttgttt

SEQ ID NO: 12469 - DNA, 20 bp, Brevibacillus thermoruber
agcggatcctgtttggagct

SEQ ID NO: 12470 - DNA, 20 bp, Staphylococcus schleiferi
ccatggtatgcccgtatcgg

SEQ ID NO: 12471 - DNA, 20 bp, Clostridium clostridiiforme
atgcgcttttggagagactt

SEQ ID NO: 12472 - DNA, 30 bp, Sporosarcina ureae
acaagtacaggagtaactgtcctgtacctt

SEQ ID NO: 12473 - DNA, 20 bp, Streptococcus urinalis
gaggtcatgtgcttgcacaa

SEQ ID NO: 12474 - DNA, 20 bp, Eremococcus coleocola
ccctagtagtaactggctag

SEQ ID NO: 12475 - DNA, 20 bp, Bacillus schlegellii
aggggcgacccgctttagga

SEQ ID NO: 12476 - DNA, 20 bp, Staphylococcus schleiferi
aaagtcgttaccatggtatg

SEQ ID NO: 12477 - DNA, 20 bp, Anaerococcus prevotii
cagaactgtaatacaggtgg

SEQ ID NO: 12478 - DNA, 20 bp, Shigella boydii
ttcccgtggcattctgatcc

SEQ ID NO: 12479 - DNA, 20 bp, Prevotella loescheii
tggataactgcttcatggca

SEQ ID NO: 12480 - DNA, 20 bp, Bacteroides capillosus
aggcgaacgatctagagata

SEQ ID NO: 12481 - DNA, 20 bp, Myroides odoratimimus
taactaggacactgccattg

SEQ ID NO: 12482 - DNA, 30 bp, Prevotella oralis
gttttttaagcgtgctgtgaaatgtaccgg

SEQ ID NO: 12483 - DNA, 30 bp, Staphylococcus epidermidis
cgtgcgtgccctaatacatgcaagtcgagc

SEQ ID NO: 12484 - DNA, 20 bp, Streptococcus infantarius
gctctcagctccctagtgtg

SEQ ID NO: 12485 - DNA, 30 bp, Fusobacterium necrogenes
cgtttgacatcctaggaagttggcagagat

SEQ ID NO: 12486 - DNA, 30 bp, Streptococcus macacae
gataaggattggaaacgataggtaataccg

SEQ ID NO: 12487 - DNA, 20 bp, Empedobacter brevis
cgattctttcgggaatctga

SEQ ID NO: 12488 - DNA, 20 bp, Corynebacterium pilosum
attccgggtttttccttctt

SEQ ID NO: 12489 - DNA, 20 bp, Proteus penneri
acatccagcggatcctttag

SEQ ID NO: 12490 - DNA, 20 bp, Brevibacterium casei
gccagtctcagtttttcgga

SEQ ID NO: 12491 - DNA, 20 bp, Proteus mirabilis
gtacaaggcaaccgtcaggg

SEQ ID NO: 12492 - DNA, 20 bp, Anaerococcus tetradius
accctatgacataaactctt

SEQ ID NO: 12493 - DNA, 20 bp, Clostridium clostridiiforme
cattcaagcagcggacgggt

SEQ ID NO: 12494 - DNA, 20 bp, Streptococcus macacae
accgcatgacagcttttatc

SEQ ID NO: 12495 - DNA, 20 bp, Clostridium clostridiiforme
caaagccggaggcctaaccg

SEQ ID NO: 12496 - DNA, 20 bp, Shewanella algae
ccacagaatcctggtagaga

SEQ ID NO: 12497 - DNA, 30 bp, Moellerella wisconsensis
tgatattaatactatcagcgattgacgtta

SEQ ID NO: 12498 - DNA, 20 bp, Eubacterium moniliforme
cgggtggaactgtgagtata

SEQ ID NO: 12499 - DNA, 30 bp, Providencia stuartii
tccagagaattgagcagagatgctgaagtg

SEQ ID NO: 12500 - DNA, 30 bp, Bacteroides capillosus
ctgctaataccgcataatgcagctgagtcg

SEQ ID NO: 12501 - DNA, 30 bp, Bacteroides stercoris
ttaataccggatggcatagttttcccgcat

SEQ ID NO: 12502 - DNA, 20 bp, Clostridium clostridiiforme
aaggaagggaacgtgaacag

SEQ ID NO: 12503 - DNA, 20 bp, Gemella morbillorum
gggtataactattggacgcg

SEQ ID NO: 12504 - DNA, 30 bp, Oligella urethralis
gatatcggccgctccggtagcaagaggtct

SEQ ID NO: 12505 - DNA, 20 bp, Sphingomonas paucimobilis
gtccgggtgcttggcatttg

SEQ ID NO: 12506 - DNA, 20 bp, Stenotrophomonas maltophilia
gcaagcggaaacccataaag

SEQ ID NO: 12507 - DNA, 20 bp, Eremococcus coleocola
cccctagtagtaactggcta

SEQ ID NO: 12508 - DNA, 20 bp, Anaerococcus tetradius
accttgtattgatttcttcg

SEQ ID NO: 12509 - DNA, 20 bp, Anaerobiospirillum succiniciproducens
gctgttttaggcctaataca

SEQ ID NO: 12510 - DNA, 20 bp, Ochrobactrum intermedium
ccatcactagggaataactc

SEQ ID NO: 12511 - DNA, 20 bp, Bacteroides distasonis
tgaagcaggggccccgcatg

SEQ ID NO: 12512 - DNA, 20 bp, Bacillus licheniformis
tgggttactctcggggaacc

SEQ ID NO: 12513 - DNA, 20 bp, Campylobacter curvus
ctccttgtcgcaaagacgga

SEQ ID NO: 12514 - DNA, 20 bp, Bacillus coagulans
cgaataacactttcgctcgc

SEQ ID NO: 12515 - DNA, 20 bp, Enterococcus casseliflavus
ggacccgcgggcattagcta

SEQ ID NO: 12516 - DNA, 20 bp, Bacteroides capillosus
aataccgtatgatatcctat

SEQ ID NO: 12517 - DNA, 20 bp, Campylobacter concisus
taggacgatggttggatgcc

SEQ ID NO: 12518 - DNA, 20 bp, Eubacterium moniliforme
gaggtaaaaggattcattcg

SEQ ID NO: 12519 - DNA, 20 bp, Bacteroides merdae
atagcagattacgaggtgct

SEQ ID NO: 12520 - DNA, 20 bp, Propionibacterium avidum
ggggtagccgtcgaatcgat

SEQ ID NO: 12521 - DNA, 20 bp, Eubacterium moniliforme
tactaggtgtggggggcgat

SEQ ID NO: 12522 - DNA, 30 bp, Actinomyces naeslundii
caagtcgaacggtgaaggcgaccttgcctt

SEQ ID NO: 12523 - DNA, 20 bp, Clostridium clostridiiforme
aggatccgcctaaagagtgt

SEQ ID NO: 12524 - DNA, 20 bp, Clostridium clostridiiforme
ggatcgaccctttcgcaagg

SEQ ID NO: 12525 - DNA, 30 bp, Dolosicoccus paucivorans
aacgtcgcgagaccaagcggatctcttaaa

SEQ ID NO: 12526 - DNA, 20 bp, Paenibacillus macerans
cttcgcatgagggagttggg

SEQ ID NO: 12527 - DNA, 20 bp, Streptococcus macacae
gcgacgatacatagccgcac

SEQ ID NO: 12528 - DNA, 20 bp, Streptococcus infantarius
agttagccgtttttttttgg

SEQ ID NO: 12529 - DNA, 20 bp, Propionibacterium propionicus
ccgctttcaattgtgacgaa

SEQ ID NO: 12530 - DNA, 20 bp, Campylobacter curvus
agtataaatgggaaagtcga

SEQ ID NO: 12531 - DNA, 20 bp, Brevibacillus brevis
agtgtcttcggagcctagcg

SEQ ID NO: 12532 - DNA, 20 bp, Tetragenococcus halophilus
taccgcatacggcttttttt

SEQ ID NO: 12533 - DNA, 20 bp, Haemophilus influenzae
ggttgatgtgataatagtac

SEQ ID NO: 12534 - DNA, 20 bp, Pseudomonas oryzihabitans
aagggcttacagcgaatacc

SEQ ID NO: 12535 - DNA, 20 bp, Prevotella loescheii
gctcgttgtcggccccttgg

SEQ ID NO: 12536 - DNA, 20 bp, Clostridium clostridiiforme
ggactagcgatagttccgtg

SEQ ID NO: 12537 - DNA, 30 bp, Eremococcus coleocola
attgaaagatggctctgctatcactcaagg

SEQ ID NO: 12538 - DNA, 30 bp, Bacteroides capillosus
gaaagtcggactaataccgtatgatatcct

SEQ ID NO: 12539 - DNA, 20 bp, Anaerococcus tetradius
ttaagacttcggtctactgt

SEQ ID NO: 12540 - DNA, 20 bp, Bacteroides uniformis
gtaaccgcaggagcgcccta

SEQ ID NO: 12541 - DNA, 20 bp, Streptococcus urinalis
agtctacttcgtgacggtaa

SEQ ID NO: 12542 - DNA, 20 bp, Paenibacillus macerans
caactccttcgcatgaggga

SEQ ID NO: 12543 - DNA, 30 bp, Bacteroides stercoris
aataactattaaagaatttcggttatcgat

SEQ ID NO: 12544 - DNA, 20 bp, Propionibacterium avidum
gtgggggtagccgtcgaatc

SEQ ID NO: 12545 - DNA, 20 bp, Unknown Organism
  oligonucleotide from CDC group VB-3
ctaaccttccagggggacgg

SEQ ID NO: 12546 - DNA, 20 bp, Corynebacterium coyleae
aaaggcctctgcttgcagag

SEQ ID NO: 12547 - DNA, 20 bp, Prevotella bivia
tacaggatcgacctagggca

SEQ ID NO: 12548 - DNA, 30 bp, Empedobacter brevis
tagcccttcgaaaggaggattaatacttta

SEQ ID NO: 12549 - DNA, 20 bp, Bordetella bronchiseptica
tcatggctcggattgaacgc

SEQ ID NO: 12550 - DNA, 30 bp, Bacteroides stercoris
tatccaacctgccgacaacactgggatagc

SEQ ID NO: 12551 - DNA, 20 bp, Bacillus schlegellii
gggcggaagcccgtctctta

SEQ ID NO: 12552 - DNA, 20 bp, Sporosarcina ureae
ctcttctggcatgagggaat

SEQ ID NO: 12553 - DNA, 30 bp, Actinomyces odontolyticus
ccatggcctaaccgctttgtgcggggggag

SEQ ID NO: 12554 - DNA, 20 bp, Moraxella atlantae
agaaaggagcttatgggttt

SEQ ID NO: 12555 - DNA, 20 bp, Clostridium clostridiiforme
ctcaaagccggaggcctaac

SEQ ID NO: 12556 - DNA, 20 bp, Eremococcus coleocola
aactggctagggattgacgg

SEQ ID NO: 12557 - DNA, 20 bp, Raoultella terrigena
gattgaacgctgttgtgtag

SEQ ID NO: 12558 - DNA, 20 bp, Peptoniphilus asaccharolyticus
aagtcgagcgatgaaaatca

SEQ ID NO: 12559 - DNA, 20 bp, Corynebacterium falsenii
gaagccatgttgtggtgacg

SEQ ID NO: 12560 - DNA, 20 bp, Dolosicoccus paucivorans
aggcaccgatacatcgagtg

SEQ ID NO: 12561 - DNA, 20 bp, Propionibacterium propionicus
ggcctaacccattttttggg

SEQ ID NO: 12562 - DNA, 20 bp, Staphylococcus schleiferi
gtgaaagtcgttaccatggt

SEQ ID NO: 12563 - DNA, 20 bp, Anaerococcus prevotii
ctatgatatgatagcctcgc

SEQ ID NO: 12564 - DNA, 20 bp, Bacteroides capillosus
ttacaacggaataacccggc

SEQ ID NO: 12565 - DNA, 20 bp, Leuconostoc carnosum
accttagcctgacggtacca

SEQ ID NO: 12566 - DNA, 20 bp, Sphingobacterium multivorum
cacgagaggaagggggggac

SEQ ID NO: 12567 - DNA, 20 bp, Staphylococcus epidermidis
ggcgtgcgtgccctaataca

SEQ ID NO: 12568 - DNA, 20 bp, Streptococcus cristatus
catgatagtcaattaaaagg

SEQ ID NO: 12569 - DNA, 20 bp, Bacteroides thetaiotaomicron
ggtactgaagtagtaccgca

SEQ ID NO: 12570 - DNA, 20 bp, Bacteroides capillosus
tgcaggcatctaactaggat

SEQ ID NO: 12571 - DNA, 20 bp, Streptococcus macacae
gacgcactgatttcacggga

SEQ ID NO: 12572 - DNA, 20 bp, Myroides odoratimimus
agcttaactaggacactgcc

SEQ ID NO: 12573 - DNA, 20 bp, Lactobacillus acidophilus
cgtaacaaggaagccgtagg

SEQ ID NO: 12574 - DNA, 20 bp, Kocuria varians
gttcagagatgttccttccc

SEQ ID NO: 12575 - DNA, 20 bp, Clostridium subterminale
cataatgtatgagaatcgca

SEQ ID NO: 12576 - DNA, 30 bp, Streptococcus equi
atgcaagtggaacgcacagatgatacgtag

SEQ ID NO: 12577 - DNA, 20 bp, Propionibacterium propionicus
accgctttcaattgtgacga

SEQ ID NO: 12578 - DNA, 20 bp, Propionibacterium avidum
tgggctcttgcttgttaggc

SEQ ID NO: 12579 - DNA, 20 bp, Anaerococcus tetradius
tatttagattccttcgggat

SEQ ID NO: 12580 - DNA, 20 bp, Anaerobiospirillum succiniciproducens
gacttttagttgctatcaga

SEQ ID NO: 12581 - DNA, 20 bp, Paenibacillus macerans
gcaactccttcgcatgaggg

SEQ ID NO: 12582 - DNA, 20 bp, Staphylococcus schleiferi
ggaagctaagcccgtcgaaa

SEQ ID NO: 12583 - DNA, 20 bp, Corynebacterium pilosum
ggattagctttgggaactgg

SEQ ID NO: 12584 - DNA, 20 bp, Finegoldia magna
agacagaagcttcggtggaa

SEQ ID NO: 12585 - DNA, 20 bp, Brevibacillus thermoruber
cgagcggatcctgtttggag

SEQ ID NO: 12586 - DNA, 20 bp, Geobacillus stearothermophilus
ggggcttgccttgattcggt

SEQ ID NO: 12587 - DNA, 20 bp, Sporosarcina pasteurii
gccgctaacaaaggaagaaa

SEQ ID NO: 12588 - DNA, 20 bp, Haemophilus paraphrophilus
acgggccaggttagaggtgt

SEQ ID NO: 12589 - DNA, 20 bp, Streptococcus constellatus
ggatgcccgtagtttactac

SEQ ID NO: 12590 - DNA, 20 bp, Bacteroides vulgatus
gcatacccgtttgcatgtac

SEQ ID NO: 12591 - DNA, 20 bp, Streptococcus infantarius
tagtgtgcgccgcatcatcc

SEQ ID NO: 12592 - DNA, 20 bp, Eubacterium moniliforme
tgacgcatatagagatatat

SEQ ID NO: 12593 - DNA, 30 bp, Paenibacillus macerans
gtggagtaactgccaggagagtgacggtac

SEQ ID NO: 12594 - DNA, 20 bp, Prevotella melaninogenica
ctagagctacaggcttaaca

SEQ ID NO: 12595 - DNA, 20 bp, Streptococcus infantarius
tccctagtgtgcgccgcatc

SEQ ID NO: 12596 - DNA, 20 bp, Anaerococcus prevotii
ctttaagagacatccataca

SEQ ID NO: 12597 - DNA, 20 bp, Serratia marcescens
tggggtgaagcgaacaaggt

SEQ ID NO: 12598 - DNA, 20 bp, Streptococcus infantarius
ctccctagtgtgcgccgcat

SEQ ID NO: 12599 - DNA, 20 bp, Streptococcus macacae
ggattggaaacgataggtaa

SEQ ID NO: 12600 - DNA, 20 bp, Achromobacter xylosoxidans
tgggataacactgacgcctc

SEQ ID NO: 12601 - DNA, 30 bp, Dolosicoccus paucivorans
agaacagcgagtagagtaactgttactcgt

SEQ ID NO: 12602 - DNA, 20 bp, Haemophilus paraphrophilus
caggttagaggtgttggatc

SEQ ID NO: 12603 - DNA, 20 bp, Paenibacillus larvae
ccggtttagagacagacctt

SEQ ID NO: 12604 - DNA, 20 bp, Clostridium clostridiiforme
cgaaagagagggacacctgc

SEQ ID NO: 12605 - DNA, 20 bp, Campylobacter curvus
aagacggactttgttcgtct

SEQ ID NO: 12606 - DNA, 20 bp, Sporosarcina ureae
aacccggggttattcccgaa

SEQ ID NO: 12607 - DNA, 20 bp, Anaerococcus prevotii
tcacatatgcacatgcataa

SEQ ID NO: 12608 - DNA, 20 bp, Gemella morbillorum
acgcgatagctaatcccgca

SEQ ID NO: 12609 - DNA, 20 bp, Corynebacterium propinquum
gtggggatcggcgattggga

SEQ ID NO: 12610 - DNA, 20 bp, Granulicatella elegans
gatgcttgcattggtcaatc

SEQ ID NO: 12611 - DNA, 20 bp, Anaerococcus prevotii
ccctatgatatgatagcctc

SEQ ID NO: 12612 - DNA, 20 bp, Enterobacter gergoviae
ttccggaggctacgcgttaa

SEQ ID NO: 12613 - DNA, 20 bp, Corynebacterium group ANF
gtgaaactaacggatccctt

SEQ ID NO: 12614 - DNA, 20 bp, Clostridium clostridiiforme
gcgcgcagacgaaactggag

SEQ ID NO: 12615 - DNA, 20 bp, Prevotella denticola
acgtgtccctatttgcaggt

SEQ ID NO: 12616 - DNA, 20 bp, Streptococcus acidominimus
tgtttactgcatggtaaaca

SEQ ID NO: 12617 - DNA, 20 bp, Lactobacillus acidophilus
gtaacaaggaagccgtagga

SEQ ID NO: 12618 - DNA, 20 bp, Psychrobacter phenylpyruvicus
actaaaaggcggcttttagc

SEQ ID NO: 12619 - DNA, 20 bp, Bacteroides thetaiotaomicron
aatggggggtcacagaaggc

SEQ ID NO: 12620 - DNA, 20 bp, Corynebacterium group ANF
aaactaacggatcccttcgg

SEQ ID NO: 12621 - DNA, 20 bp, Haemophilus paraphrophilus
aaaacgacgggccaggttag

SEQ ID NO: 12622 - DNA, 20 bp, Brevibacillus centrosporus
gggatacttccggggaaccc

SEQ ID NO: 12623 - DNA, 20 bp, Dolosicoccus paucivorans
gagaagcaacgtcgcgagac

SEQ ID NO: 12624 - DNA, 20 bp, Streptococcus urinalis
gaaagtctacttcgtgacgg

SEQ ID NO: 12625 - DNA, 20 bp, Streptococcus acidominimus
gtaagagaagaacgttagcg

SEQ ID NO: 12626 - DNA, 20 bp, Bacteroides uniformis
cctagggtaacaactggcga

SEQ ID NO: 12627 - DNA, 20 bp, Oligella urethralis
ggccgctccggtagcaagag

SEQ ID NO: 12628 - DNA, 20 bp, Bacteroides capilosus
ttgacatccgactaacgaag

SEQ ID NO: 12629 - DNA, 20 bp, Anaerococcus prevotii
taagagacatccatacaggt

SEQ ID NO: 12630 - DNA, 30 bp, Streptococcus criceti
ccgatgccatccctagagatagggagttac

SEQ ID NO: 12631 - DNA, 20 bp, Arcanobacterium haemolyticum
cgttgagttgagggtaggtg

SEQ ID NO: 12632 - DNA, 20 bp, Leptotrichia buccalis
gcttgcacaggcgagccaag

SEQ ID NO: 12633 - DNA, 20 bp, Paenibacillus lautus
cgcacccaaaactggatgac

SEQ ID NO: 12634 - DNA, 20 bp, Staphylococcus schleiferi
aagtcgttaccatggtatgc

SEQ ID NO: 12635 - DNA, 20 bp, Bacteroides distasonis
ccccgcatggggatatttgc

SEQ ID NO: 12636 - DNA, 20 bp, Campylobacter curvus
tgggtcaagggagcgtagct

SEQ ID NO: 12637 - DNA, 20 bp, Clostridium clostridiiforme
agcggatcgaccctttcgca

SEQ ID NO: 12638 - DNA, 20 bp, Streptococcus macacae
cattggcttaaccaatgtca

SEQ ID NO: 12639 - DNA, 20 bp, Oligella urethralis
cgctccggtagcaagaggtc

SEQ ID NO: 12640 - DNA, 20 bp, Campylobacter curvus
aaccgaaagttgcggtgtgc

SEQ ID NO: 12641 - DNA, 20 bp, Clostridium perfringens
accgcataacgttgaaagat

SEQ ID NO: 12642 - DNA, 20 bp, Streptococcus infantarius
gccgtgctctcagctcccta

SEQ ID NO: 12643 - DNA, 20 bp, Bacillus licheniformis
tagagctgtgggttactctc

SEQ ID NO: 12644 - DNA, 20 bp, Anaerococcus prevotii
atgatatgatagcctcgcat

SEQ ID NO: 12645 - DNA, 20 bp, Bacteroides capillosus
ctgtaggcgaacgatctaga

SEQ ID NO: 12646 - DNA, 30 bp, Bacteroides merdae
tgaccggagtggaaacactccttctagcaa

SEQ ID NO: 12647 - DNA, 20 bp, Brevibacillus brevis
tcggaagggcgcgtggatca

SEQ ID NO: 12648 - DNA, 20 bp, Campylobacter curvus
aagttgcggtgtgctttagg

SEQ ID NO: 12649 - DNA, 20 bp, Clostridium clostridiiforme
gaaagagagggacacctgcg

SEQ ID NO: 12650 - DNA, 20 bp, Streptococcus macacae
aggtcctaaggggcttagtg

SEQ ID NO: 12651 - DNA, 20 bp, Eubacterium moniliforme
gtggggggcgatagtcctcc

SEQ ID NO: 12652 - DNA, 20 bp, Streptococcus macacae
ggacgcactgatttcacggg

SEQ ID NO: 12653 - DNA, 20 bp, Paenibacillus macerans
cggatacgcaactccttcgc

SEQ ID NO: 12654 - DNA, 20 bp, Empedobacter brevis
gattctttcgggaatctgag

SEQ ID NO: 12655 - DNA, 20 bp, Prevotella melaninogenica
gatccatagggctccaggaa

SEQ ID NO: 12656 - DNA, 20 bp, Gemella morbillorum
aattgctatcgctaccagat

SEQ ID NO: 12657 - DNA, 20 bp, Clostridium clostridiiforme
gctctcaaagccggaggcct

SEQ ID NO: 12658 - DNA, 20 bp, Gemella morbillorum
cgcgtaggtaccctgcctgg

SEQ ID NO: 12659 - DNA, 30 bp, Eubacterium moniliforme
gtaaggagagagctgtcgaaggtgagatca

SEQ ID NO: 12660 - DNA, 20 bp, Leptotrichia buccalis
acgctgacatgtaatgctta

SEQ ID NO: 12661 - DNA, 20 bp, Sporosarcina pasteurii
ccgctaacaaaggaagaaac

SEQ ID NO: 12662 - DNA, 20 bp, Staphylococcus haemolyticus
taagtaactagtgcacgtct

SEQ ID NO: 12663 - DNA, 20 bp, Bacteroides uniformis
tcaaatcagccggcccttac

SEQ ID NO: 12664 - DNA, 20 bp, Bacteroides capillosus
gagcgtcggtcgtatgcaaa

SEQ ID NO: 12665 - DNA, 20 bp, Gemella morbillorum
ggggtataactattggacgc

SEQ ID NO: 12666 - DNA, 30 bp, Streptococcus criceti
atagtgattaactcatgttaatgacttgaa

SEQ ID NO: 12667 - DNA, 20 bp, Clostridium clostridiiforme
cgcttcaagtcgtctgtcaa

SEQ ID NO: 12668 - DNA, 20 bp, Vibrio hollisae
gtactgaggtagaaagtggg

SEQ ID NO: 12669 - DNA, 20 bp, Neisseria subflava
aaccgatcgagtccggattg

SEQ ID NO: 12670 - DNA, 20 bp, Sphingobacterium multivorum
tgggccaacacgagaggaag

SEQ ID NO: 12671 - DNA, 20 bp, Haemophilus segnis
ggggttgaactttaggtttg

SEQ ID NO: 12672 - DNA, 20 bp, Anaerobiospirillum succiniciproducens
taccgggaggggagggaacc

SEQ ID NO: 12673 - DNA, 20 bp, Stenotrophomonas maltophilia
ccctgatcgttcagtccgga

SEQ ID NO: 12674 - DNA, 30 bp, Oligella urethralis
tacgatccccctctttcctccgtagagaat

SEQ ID NO: 12675 - DNA, 20 bp, Geobacillus thermoglucosidasius
agtccggaggaaggtgggga

SEQ ID NO: 12676 - DNA, 20 bp, Corynebacterium cystitidis
gtagccatgctgaaacgggg

SEQ ID NO: 12677 - DNA, 20 bp, Escherichia vulneris
tgaagtaatgtctgggaaac

SEQ ID NO: 12678 - DNA, 20 bp, Haemophilus paraphrophilus
caaagtacgttctaagtccg

SEQ ID NO: 12679 - DNA, 20 bp, Capnocytophaga sp.
agtcctatagacgagcgcaa

SEQ ID NO: 12680 - DNA, 20 bp, Bacillus mycoides
ggatagccgatcggaagggc

SEQ ID NO: 12681 - DNA, 20 bp, Bacteroides stercoris
aacctgccgacaacactggg

SEQ ID NO: 12682 - DNA, 20 bp, Neisseria flavescens
aacgctgacgagcatgcttt

SEQ ID NO: 12683 - DNA, 20 bp, Anaerococcus prevotii
atagcctcgcatgaagctat

SEQ ID NO: 12684 - DNA, 20 bp, Streptococcus equi
acaattatctgtgagtcgcg

SEQ ID NO: 12685 - DNA, 20 bp, Campylobacter curvus
gggaaagtcgaaccctatat

SEQ ID NO: 12686 - DNA, 20 bp, Oligella ureolytica
catttgacctctcgctattg

SEQ ID NO: 12687 - DNA, 30 bp, Dolosicoccus paucivorans
tgtcggaaacgaccgctaataccgcataaa

SEQ ID NO: 12688 - DNA, 20 bp, Staphylococcus schleiferi
tttggaagctaagcccgtcg

SEQ ID NO: 12689 - DNA, 20 bp, Bacteroides uniformis
acgagcgcacacccttatcg

SEQ ID NO: 12690 - DNA, 20 bp, Stenotrophomonas maltophilia
cccataaagccctgatcgtt

SEQ ID NO: 12691 - DNA, 20 bp, Campylobacter curvus
gttgcggtgtgctttaggtg

SEQ ID NO: 12692 - DNA, 20 bp, Corynebacterium pilosum
tcccaattgccgaccggtta

SEQ ID NO: 12693 - DNA, 20 bp, Bacteroides thetaiotaomicron
cgtaaggcatttgtgaaggt

SEQ ID NO: 12694 - DNA, 20 bp, Corynebacterium pilosum
tgggtgtcttattccgggtt

SEQ ID NO: 12695 - DNA, 20 bp, Campylobacter curvus
acggactttgttcgtctgcg

SEQ ID NO: 12696 - DNA, 20 bp, Streptococcus urinalis
ggaagtaggagtggaaagtc

SEQ ID NO: 12697 - DNA, 20 bp, Corynebacterium pilosum
gattagctttgggaactggg

SEQ ID NO: 12698 - DNA, 20 bp, Myroides odoratimimus
ttcctagcttaactaggaca

SEQ ID NO: 12699 - DNA, 20 bp, Sphingobacterium multivorum
ataacatcaacagttcgcat

SEQ ID NO: 12700 - DNA, 20 bp, Prevotella melaninogenica
agccgggtcccagttcggga

SEQ ID NO: 12701 - DNA, 20 bp, Propionibacterium avidum
gatgggctcttgcttgttag

SEQ ID NO: 12702 - DNA, 20 bp, Enterobacter gergoviae
cttccggaggctacgcgtta

SEQ ID NO: 12703 - DNA, 30 bp, Dolosicoccus paucivorans
tcggaaacgaccgctaataccgcataaatc

SEQ ID NO: 12704 - DNA, 20 bp, Corynebacterium pilosum
ccgttgggtattctggcctg

SEQ ID NO: 12705 - DNA, 20 bp, Leuconostoc carnosum
tagggaatgaccttagcctg

SEQ ID NO: 12706 - DNA, 20 bp, Bacteroides capillosus
gtaggcgaacgatctagaga

SEQ ID NO: 12707 - DNA, 30 bp, Paenibacillus validus
taatacatgcaagtcgagcggccctttcct

SEQ ID NO: 12708 - DNA, 20 bp, Paenibacillus azotofixans
agcttgctctctcattaact

SEQ ID NO: 12709 - DNA, 20 bp, Corynebacterium hoagii
gtgggcgaaggcgggtctct

SEQ ID NO: 12710 - DNA, 20 bp, Veillonella atypica
cggatcagtctagtctgtct

SEQ ID NO: 12711 - DNA, 30 bp, Streptococcus iniae
atgtacttaagttaaaaggagcaaaagctt

SEQ ID NO: 12712 - DNA, 20 bp, Corynebacterium pilosum
gttgggtattctggcctggt

SEQ ID NO: 12713 - DNA, 20 bp, Bacteroides capillosus
ctatgcaggcatctaactag

SEQ ID NO: 12714 - DNA, 20 bp, Brevibacillus centrosporus
gaacccggggttaatcccga

SEQ ID NO: 12715 - DNA, 20 bp, Campylobacter curvus
tttgttcgtctgcgaagtaa

SEQ ID NO: 12716 - DNA, 20 bp, Bacteroides stercoris
ctggggactctacccggact

SEQ ID NO: 12717 - DNA, 20 bp, Clostridium clostridiiforme
accgggatccctcttcggag

SEQ ID NO: 12718 - DNA, 20 bp, Weeksella virosa
taaacctattcacgagctgg

SEQ ID NO: 12719 - DNA, 20 bp, Campylobacter curvus
acctacggcgcaaccgaaag

SEQ ID NO: 12720 - DNA, 20 bp, Staphylococcus schleiferi
tggaagctaagcccgtcgaa

SEQ ID NO: 12721 - DNA, 20 bp, Neisseria mucosa
ggggaacctgcggttgggga

SEQ ID NO: 12722 - DNA, 20 bp, Stenotrophomonas maltophilia
gggttgcaacaagaagtagg

SEQ ID NO: 12723 - DNA, 20 bp, Bacteroides stercoris
accttgagtgcaacagaggt

SEQ ID NO: 12724 - DNA, 20 bp, Stenotrophomonas maltophilia
aaagccctgatcgttcagtc

SEQ ID NO: 12725 - DNA, 20 bp, Paenibacillus lautus
gtcgcacccaaaactggatg

SEQ ID NO: 12726 - DNA, 20 bp, Citrobacter freundii
gtccgtaaaccaagggtaaa

SEQ ID NO: 12727 - DNA, 20 bp, Bacillus lentus
tgatggcaatagccatcttt

SEQ ID NO: 12728 - DNA, 20 bp, Bacteroides uniformis
catacgagcgcacaccctta

SEQ ID NO: 12729 - DNA, 20 bp, Arcanobacterium haemolyticum
acaaggcgttgagttgaggg

SEQ ID NO: 12730 - DNA, 20 bp, Clostridium clostridiiforme
ccgagtcgggtgctctcaaa

SEQ ID NO: 12731 - DNA, 20 bp, Bacteroides merdae
gtggaggacgtgtccttttt

SEQ ID NO: 12732 - DNA, 20 bp, Myroides odoratimimus
cctccctacgagtagggact

SEQ ID NO: 12733 - DNA, 20 bp, Bacillus schlegellii
tggaagcctgtctcttagcg

SEQ ID NO: 12734 - DNA, 20 bp, Bacillus licheniformis
gaaccccggggttatatccg

SEQ ID NO: 12735 - DNA, 20 bp, Corynebacterium group ANF
actttgtgtggtgtggtgtc

SEQ ID NO: 12736 - DNA, 20 bp, Bacteroides thetaiotaomicron
ccgtaaggcatttgtgaagg

SEQ ID NO: 12737 - DNA, 20 bp, Prevotella bivia
catcagccatggcgcgggaa

SEQ ID NO: 12738 - DNA, 20 bp, Streptococcus macacae
tgggacgcactgatttcacg

SEQ ID NO: 12739 - DNA, 30 bp, Streptococcus urinalis
tctgttgttagagaagaatggaagtaggag

SEQ ID NO: 12740 - DNA, 20 bp, Streptococcus infantarius
ccgttcgcaatcttccaact

SEQ ID NO: 12741 - DNA, 20 bp, Streptococcus constellatus
gcaagtagaccgcacaggat

SEQ ID NO: 12742 - DNA, 20 bp, Finegoldia magna
cagcgaataaatgtccgggg

SEQ ID NO: 12743 - DNA, 20 bp, Sporosarcina ureae
gggaacccggggttattccc

SEQ ID NO: 12744 - DNA, 20 bp, Enterobacter gergoviae
gttaaggtagccagcctggg

SEQ ID NO: 12745 - DNA, 20 bp, Citrobacter freundii
ccgtaaaccaagggtaaacc

SEQ ID NO: 12746 - DNA, 20 bp, Streptococcus gallolyticus
taacaaaaaacccgtatcgg

SEQ ID NO: 12747 - DNA, 20 bp, Campylobacter curvus
gtgctttaggtgggtcaagg

SEQ ID NO: 12748 - DNA, 20 bp, Anaerobiospirillum succiniciproducens
atgggagcggatgcaccaga

SEQ ID NO: 12749 - DNA, 20 bp, Haemophilus influenzae
gattaaagtgcgggaccttc

SEQ ID NO: 12750 - DNA, 20 bp, Corynebacterium confusum
tggtcgaaggggggattggc

SEQ ID NO: 12751 - DNA, 20 bp, Neisseria subflava
cgatcgagtccggattgcac

SEQ ID NO: 12752 - DNA, 30 bp, Bacteroides capillosus
actgcaagtcaggtgtgaaaaccacgggct

SEQ ID NO: 12753 - DNA, 20 bp, Anaerococcus prevotii
cccctctctttaagagacat

SEQ ID NO: 12754 - DNA, 20 bp, Bacteroides vulgatus
gtatgcatacccgtttgcat

SEQ ID NO: 12755 - DNA, 20 bp, Sphingobacterium multivorum
ccttacgcttcggggctatc

SEQ ID NO: 12756 - DNA, 20 bp, Brevibacillus centrosporus
ccgggttttgggctgtcgct

SEQ ID NO: 12757 - DNA, 20 bp, Bacteroides capillosus
tggatgcccgttgtatggcc

SEQ ID NO: 12758 - DNA, 20 bp, Staphylococcus schleiferi
ggggtgaaagtcgttaccat

SEQ ID NO: 12759 - DNA, 20 bp, Gemella morbillorum
gtagaacgctaaggagagct

SEQ ID NO: 12760 - DNA, 20 bp, Streptococcus equi
acagatgatacgtagcttgc

SEQ ID NO: 12761 - DNA, 20 bp, Corynebacterium group ANF
tcggggtgaaggtagtggat

SEQ ID NO: 12762 - DNA, 20 bp, Leptotrichia buccalis
gtaacgccaagcgaacctgc

SEQ ID NO: 12763 - DNA, 20 bp, Bacillus coagulans
aacactttcgctcgcatgag

SEQ ID NO: 12764 - DNA, 20 bp, Sphingobacterium multivorum
gcttcggggctatcacacgt

SEQ ID NO: 12765 - DNA, 20 bp, Salmonella typhi
tatcaggcagcagcttgctt

SEQ ID NO: 12766 - DNA, 20 bp, Anaerococcus tetradius
ttcggtctactgtattacag

SEQ ID NO: 12767 - DNA, 20 bp, Myroides odoratimimus
gttagttaccactcgcgtta

SEQ ID NO: 12768 - DNA, 30 bp, Streptococcus macacae
gggagcgcaggcggtctggaaagtcagtag

SEQ ID NO: 12769 - DNA, 20 bp, Streptococcus urinalis
gtctacttcgtgacggtaac

SEQ ID NO: 12770 - DNA, 20 bp, Bacteroides uniformis
gggtaacaactggcgattgg

SEQ ID NO: 12771 - DNA, 20 bp, Haemophilus paraphrophilus
tagaggtgttggatccatgg

SEQ ID NO: 12772 - DNA, 20 bp, Prevotella corporis
gcccacgcgtgggtttttgc

SEQ ID NO: 12773 - DNA, 20 bp, Streptococcus dysgalactiae
gtttaacccatgttaaacat

SEQ ID NO: 12774 - DNA, 20 bp, Streptococcus infantarius
tgctctcagctccctagtgt

SEQ ID NO: 12775 - DNA, 20 bp, Bacillus licheniformis
gtgggttactctcggggaac

SEQ ID NO: 12776 - DNA, 20 bp, Bacteroides uniformis
tgccatacgagcgcacaccc

SEQ ID NO: 12777 - DNA, 20 bp, Yersinia frederiksenii
taatacgtgaagtgattgac

SEQ ID NO: 12778 - DNA, 30 bp, Bacteroides ovatus
attaataccggatagcatacgaatatcgca

SEQ ID NO: 12779 - DNA, 20 bp, Streptococcus iniae
ttgcactaatccaaagagtt

SEQ ID NO: 12780 - DNA, 20 bp, Bacteroides capillosus
atccaacctactccttacaa

SEQ ID NO: 12781 - DNA, 20 bp, Streptococcus acidominimus
aacgttagcgggagtggaaa

SEQ ID NO: 12782 - DNA, 20 bp, Streptococcus gallolyticus
caaaaaacccgtatcggaag

SEQ ID NO: 12783 - DNA, 20 bp, Actinomyces bovis
tactaggagggagccgtgcg

SEQ ID NO: 12784 - DNA, 20 bp, Prevotella loescheii
acgtgtgggtttttgcaggt

SEQ ID NO: 12785 - DNA, 20 bp, Streptococcus urinalis
aagtctacttcgtgacggta

SEQ ID NO: 12786 - DNA, 30 bp, Fusobacterium mortiferum
tacttgatcctcggggtgatggtggcggac

SEQ ID NO: 12787 - DNA, 30 bp, Eubacterium moniliforme
ttgggagcacccgaagccagtggcttaacc

SEQ ID NO: 12788 - DNA, 20 bp, Bacteroides stercoris
ctgactgagctggaaacagt

SEQ ID NO: 12789 - DNA, 30 bp, Clostridium clostridiiforme
gccggaggcctaaccgcgaggaaggatccg

SEQ ID NO: 12790 - DNA, 20 bp, Clostridium clostridiiforme
gggtaggaggtttggatcca

SEQ ID NO: 12791 - DNA, 20 bp, Clostridium clostridiiforme
acctcataagccggaaggtg

SEQ ID NO: 12792 - DNA, 20 bp, Bacteroides merdae
aatagcagattacgaggtgc

SEQ ID NO: 12793 - DNA, 20 bp, Eremococcus coleocola
cctagtagtaactggctagg

SEQ ID NO: 12794 - DNA, 20 bp, Bacillus licheniformis
ggggttatatccggaaggtt

SEQ ID NO: 12795 - DNA, 20 bp, Kocuria varians
ggttcagagatgttccttcc

SEQ ID NO: 12796 - DNA, 20 bp, Sphingobacterium multivorum
agttcgcatgttcggttgat

SEQ ID NO: 12797 - DNA, 30 bp, Empedobacter brevis
gctgttggggtttcggcttcagtggctaag

SEQ ID NO: 12798 - DNA, 20 bp, Clostridium clostridiiforme
atccgcctaaagagtgtccg

SEQ ID NO: 12799 - DNA, 20 bp, Citrobacter freundii
aaccaagggtaaaccgtagg

SEQ ID NO: 12800 - DNA, 20 bp, Myroides odoratimimus
tgttagttaccactcgcgtt

SEQ ID NO: 12801 - DNA, 20 bp, Corynebacterium ulcerans
tgcagtcgaacggaaaggcc

SEQ ID NO: 12802 - DNA, 20 bp, Neisseria mucosa
aacctgcggttggggatcca

SEQ ID NO: 12803 - DNA, 20 bp, Anaerococcus tetradius
ggtctactgtattacaggtg

SEQ ID NO: 12804 - DNA, 20 bp, Actinomyces odontolyticus
accgctttgtgcggggggag

SEQ ID NO: 12805 - DNA, 20 bp, Streptococcus macacae
aaccaatgtcagctattgaa

SEQ ID NO: 12806 - DNA, 20 bp, Oligella ureolytica
atttgacctctcgctattgg

SEQ ID NO: 12807 - DNA, 20 bp, Anaerobiospirillum succiniciproducens
gatgaacgctgttttaggcc

SEQ ID NO: 12808 - DNA, 20 bp, Kocuria rosea
ggtgaatacgcttccccggg

SEQ ID NO: 12809 - DNA, 20 bp, Corynebacterium group ANF
cggggtgaaggtagtggatc

SEQ ID NO: 12810 - DNA, 20 bp, Facklamia ignava
atagttgttctagtcgcatg

SEQ ID NO: 12811 - DNA, 20 bp, Streptococcus acidominimus
cccgtagctgctacatttga

SEQ ID NO: 12812 - DNA, 30 bp, Fusobacterium necrogenes
ttaccagcgtttgacatcctaggaagttgg

SEQ ID NO: 12813 - DNA, 20 bp, Bacteroides stercoris
ggcgaccttgagtgcaacag

SEQ ID NO: 12814 - DNA, 20 bp, Anaerococcus prevotii
agcctcggtggaagattact

SEQ ID NO: 12815 - DNA, 20 bp, Sporosarcina ureae
tcccgaataatcccattctc

SEQ ID NO: 12816 - DNA, 20 bp, Bacillus licheniformis
actctcggggaaccccgggg

SEQ ID NO: 12817 - DNA, 20 bp, Corynebacterium argentoratense
gccagcacactttggtgggg

SEQ ID NO: 12818 - DNA, 20 bp, Anaerococcus tetradius
gtttcttaagacttcggtct

SEQ ID NO: 12819 - DNA, 20 bp, Gemella morbillorum
agaacgctaaggagagcttc

SEQ ID NO: 12820 - DNA, 20 bp, Bacillus schlegellii
gcggaagcccgtctcttagc

SEQ ID NO: 12821 - DNA, 20 bp, Streptococcus iniae
aatccattaccgtgacggta

SEQ ID NO: 12822 - DNA, 20 bp, Anaerococcus tetradius
gttagtcaatcgcatggtag

SEQ ID NO: 12823 - DNA, 20 bp, Geobacillus thermoglucosidasius
ccggttacaagtccggagga

SEQ ID NO: 12824 - DNA, 20 bp, Porphyromonas endodontalis
tctatcgagacagccgtgcg

SEQ ID NO: 12825 - DNA, 20 bp, Yersinia kristensenii
atagcactgagcattgacgt

SEQ ID NO: 12826 - DNA, 20 bp, Vibrio vulnificus
cttgtttctcaggtggcgag

SEQ ID NO: 12827 - DNA, 20 bp, Bacillus schlegellii
gtggaagcctgtctcttagc

SEQ ID NO: 12828 - DNA, 20 bp, Gemella morbillorum
gaacgctaaggagagcttct

SEQ ID NO: 12829 - DNA, 20 bp, Gemella morbillorum
agtagaacgctaaggagagc

SEQ ID NO: 12830 - DNA, 20 bp, Myroides odoratimimus
gttactacgtatttattgac

SEQ ID NO: 12831 - DNA, 20 bp, Bacteroides merdae
gggtttgaacgtagtctgac

SEQ ID NO: 12832 - DNA, 20 bp, Empedobacter brevis
gaaaggaggattaatacttt

SEQ ID NO: 12833 - DNA, 20 bp, Enterococcus cecorum
taccgcatggcagatggatg

SEQ ID NO: 12834 - DNA, 20 bp, Corynebacterium auris
cgaacggaaggctcccgctt

SEQ ID NO: 12835 - DNA, 20 bp, Escherichia hermannii
cctcctgtcatggacaactg

SEQ ID NO: 12836 - DNA, 20 bp, Paenibacillus larvae
ttgtgtttctttcgggagac

SEQ ID NO: 12837 - DNA, 20 bp, Bacteroides uniformis
atcaggttatgctgggggac

SEQ ID NO: 12838 - DNA, 20 bp, Streptococcus macacae
gcataatatctctctaagcc

SEQ ID NO: 12839 - DNA, 20 bp, Unknown Organism
  oligonucleotide from CDC group VB-3
tccagggggacggttacccc

SEQ ID NO: 12840 - DNA, 30 bp, Clostridium clostridiiforme
gtcaaaagccgaggctcaacctcggcgcgc

SEQ ID NO: 12841 - DNA, 20 bp, Corynebacterium pilosum
ccggttagttcccgttgggt

SEQ ID NO: 12842 - DNA, 20 bp, Streptococcus infantarius
gctccctagtgtgcgccgca

SEQ ID NO: 12843 - DNA, 20 bp, Arcanobacterium haemolyticum
gcgttgagttgagggtaggt

SEQ ID NO: 12844 - DNA, 20 bp, Anaerococcus tetradius
taccctatgacataaactct

SEQ ID NO: 12845 - DNA, 20 bp, Arcanobacterium haemolyticum
ttgagttgagggtaggtgtt

SEQ ID NO: 12846 - DNA, 20 bp, Streptococcus acidominimus
ttagcgggagtggaaaatcc

SEQ ID NO: 12847 - DNA, 30 bp, Propionibacterium propionicus
gatgggcgtgcctttttggtcggtttacag

SEQ ID NO: 12848 - DNA, 20 bp, Sphingobacterium multivorum
cgcataacatatgtgaccgg

SEQ ID NO: 12849 - DNA, 20 bp, Clostridium glycolicum
acaggataacataagagatt

SEQ ID NO: 12850 - DNA, 20 bp, Proteus vulgaris
tctctactggctgagagatg

SEQ ID NO: 12851 - DNA, 30 bp, Dolosicoccus paucivorans
cactgttgtgagagaagaacagcgagtaga

SEQ ID NO: 12852 - DNA, 20 bp, Microbacterium hominis
gtgtaatacgatcccgggtc

SEQ ID NO: 12853 - DNA, 20 bp, Campylobacter curvus
taaatgggaaagtcgaaccc

SEQ ID NO: 12854 - DNA, 20 bp, Bacillus schlegellii
agcctttgggtggaagcctg

SEQ ID NO: 12855 - DNA, 20 bp, Propionibacterium avidum
gggctcttgcttgttaggcg

SEQ ID NO: 12856 - DNA, 20 bp, Paenibacillus macerans
ttttcttcgggagacagggg

SEQ ID NO: 12857 - DNA, 20 bp, Corynebacterium pseudotuberculosis
ggtagtccatgccgtaacgg

SEQ ID NO: 12858 - DNA, 20 bp, Corynebacterium cystitidis
tagccatgctgaaacggggg

SEQ ID NO: 12859 - DNA, 20 bp, Bacteroides uniformis
cacacccttatcgatagtta

SEQ ID NO: 12860 - DNA, 20 bp, Bacteroides thetaiotaomicron
catgatagccgggggtactg

SEQ ID NO: 12861 - DNA, 20 bp, Leptotrichia buccalis
cgactgataaaacctggtgt

SEQ ID NO: 12862 - DNA, 30 bp, Leuconostoc carnosum
ccttagcctgacggtaccataccagaaagg

SEQ ID NO: 12863 - DNA, 20 bp, Bacteroides capillosus
ctaactaggattaaaggttt

SEQ ID NO: 12864 - DNA, 20 bp, Clostridium clostridiiforme
agagatgcgcttttggagag

SEQ ID NO: 12865 - DNA, 20 bp, Bacteroides thetaiotaomicron
atggggggtcacagaaggca

SEQ ID NO: 12866 - DNA, 20 bp, Bacteroides ovatus
gtacagctcgtgccgtaggt

SEQ ID NO: 12867 - DNA, 20 bp, Bacteroides capillosus
gaactgtaggcgaacgatct

SEQ ID NO: 12868 - DNA, 20 bp, Paenibacillus azotofixans
tcgtttagagataggcgcgg

SEQ ID NO: 12869 - DNA, 30 bp, Globicatella sanguinis
ctcttgcatatcttagagataagagaaacc

SEQ ID NO: 12870 - DNA, 30 bp, Streptococcus criceti
tagtgattaactcatgttaatgacttgaaa

SEQ ID NO: 12871 - DNA, 20 bp, Clostridium clostridiiforme
tctcaaagccggaggcctaa

SEQ ID NO: 12872 - DNA, 20 bp, Sphingobacterium multivorum
gggacgacgtccaggcattc

SEQ ID NO: 12873 - DNA, 20 bp, Neisseria subflava
aaaccgatcgagtccggatt

SEQ ID NO: 12874 - DNA, 20 bp, Dolosicoccus paucivorans
tgacatcggatgcatagctt

SEQ ID NO: 12875 - DNA, 20 bp, Gemella morbillorum
gcgtaggtaccctgcctggt

SEQ ID NO: 12876 - DNA, 20 bp, Streptococcus infantarius
ccgtaggagctctggcgccg

SEQ ID NO: 12877 - DNA, 20 bp, Clostridium clostridiiforme
gaaagcggatcgaccctttc

SEQ ID NO: 12878 - DNA, 20 bp, Anaerococcus prevotii
tttagtagacagaagcctcg

SEQ ID NO: 12879 - DNA, 30 bp, Oligella urethralis
ttacgatccccctctttcctccgtagagaa

SEQ ID NO: 12880 - DNA, 20 bp, Sporosarcina ureae
acccggggttattcccgaat

SEQ ID NO: 12881 - DNA, 20 bp, Paenibacillus azotofixans
gaacgtcctcaagagtaact

SEQ ID NO: 12882 - DNA, 20 bp, Bacillus schlegellii
aagcccgtctcttagcggcg

SEQ ID NO: 12883 - DNA, 20 bp, Escherichia hermannii
cctgtcatggacaactgtgg

SEQ ID NO: 12884 - DNA, 20 bp, Suttonella indologenes
ggcgggcccaatgcttaaca

SEQ ID NO: 12885 - DNA, 20 bp, Raoultella terrigena
acgctgttgtgtaggcctaa

SEQ ID NO: 12886 - DNA, 20 bp, Streptococcus macacae
ccgcatgacagcttttatcg

SEQ ID NO: 12887 - DNA, 20 bp, Stenotrophomonas maltophilia
tatcgaatgagcccatatgg

SEQ ID NO: 12888 - DNA, 20 bp, Eubacterium moniliforme
gtcctatgggacgaaaaaaa

SEQ ID NO: 12889 - DNA, 30 bp, Psychrobacter phenylpyruvicus
cggggctaataccaaataagctattgtctc

SEQ ID NO: 12890 - DNA, 20 bp, Paenibacillus macerans
tgtcacttagagatggacct

SEQ ID NO: 12891 - DNA, 20 bp, Psychrobacter phenylpyruvicus
accaaataagctattgtctc

SEQ ID NO: 12892 - DNA, 20 bp, Brevibacillus brevis
gaatcttaaggtgcttgcac

SEQ ID NO: 12893 - DNA, 20 bp, Salmonella typhi
aagtcgcgacggtatcaggc

SEQ ID NO: 12894 - DNA, 20 bp, Clostridium clostridiiforme
gatgcgcttttggagagact

SEQ ID NO: 12895 - DNA, 20 bp, Brevibacterium casei
taacacccgtaagccggtgg

SEQ ID NO: 12896 - DNA, 30 bp, Sporosarcina ureae
ccgaataatccattctctcgcatgagggaa

SEQ ID NO: 12897 - DNA, 20 bp, Paenibacillus macerans
tagagcttttcttcgggaga

SEQ ID NO: 12898 - DNA, 20 bp, Sphingobacterium multivorum
ttcggggctatcacacgtgc

SEQ ID NO: 12899 - DNA, 30 bp, Eubacterium moniliforme
tggccggtacaaagggcagcgacctcgtaa

SEQ ID NO: 12900 - DNA, 30 bp, Streptococcus macacae
taccgcatgacagcttttatcgcatgatag

SEQ ID NO: 12901 - DNA, 20 bp, Stenotrophomonas maltophilia
caagcggaaacccataaagc

SEQ ID NO: 12902 - DNA, 20 bp, Dolosicoccus paucivorans
tactcgtttgacggtatctc

SEQ ID NO: 12903 - DNA, 20 bp, Bacillus thuringiensis
gtagccgtatcggaaggctg

SEQ ID NO: 12904 - DNA, 20 bp, Plesiomonas shigelloides
gaggaagggccactagttaa

SEQ ID NO: 12905 - DNA, 20 bp, Bacillus laevolacticus
tcgagcggacctatccttcg

SEQ ID NO: 12906 - DNA, 20 bp, Corynebacterium pilosum
tgggaactgggtgtcttatt

SEQ ID NO: 12907 - DNA, 20 bp, Anaerococcus prevotii
gactcttattgcttcggcag

SEQ ID NO: 12908 - DNA, 20 bp, Yersinia frederiksenii
tcacttaatacgtgaagtga

SEQ ID NO: 12909 - DNA, 20 bp, Eubacterium moniliforme
gggcgatagtcctccgtgcc

SEQ ID NO: 12910 - DNA, 20 bp, Eremococcus coleocola
tagtaactggctagggattg

SEQ ID NO: 12911 - DNA, 20 bp, Brevibacterium linens
tatgacgaccgaaggcatct

SEQ ID NO: 12912 - DNA, 20 bp, Leuconostoc lactis
acagaatgactagggtgaag

SEQ ID NO: 12913 - DNA, 20 bp, Clostridium clostridiiforme
gagatgcgcttttggagaga

SEQ ID NO: 12914 - DNA, 20 bp, Stenotrophomonas maltophilia
ggataactactggaaactta

SEQ ID NO: 12915 - DNA, 20 bp, Vibrio harveyi
aagaagtaggtagttaacct

SEQ ID NO: 12916 - DNA, 20 bp, Streptococcus macacae
gggattgaaaggtacaacag

SEQ ID NO: 12917 - DNA, 20 bp, Eubacterium moniliforme
ccctcgggtggaactgtgag

SEQ ID NO: 12918 - DNA, 20 bp, Finegoldia magna
gcgaataaatgtccggggac

SEQ ID NO: 12919 - DNA, 20 bp, Paenibacillus alvei
cttgcacttctgagacttag

SEQ ID NO: 12920 - DNA, 20 bp, Leptotrichia buccalis
actgacgcatgtcaggctga

SEQ ID NO: 12921 - DNA, 20 bp, Streptococcus acidominimus
aagaacgttagcgggagtgg

SEQ ID NO: 12922 - DNA, 20 bp, Bacteroides vulgatus
ggtatgcatacccgtttgca

SEQ ID NO: 12923 - DNA, 20 bp, Stenotrophomonas maltophilia
acaggagaggcttgtctctc

SEQ ID NO: 12924 - DNA, 20 bp, Myroides odoratus
agggtaaaacctagtaacta

SEQ ID NO: 12925 - DNA, 30 bp, Serratia rubidaea
gaagggtagtgtcttaatacggcattacat

SEQ ID NO: 12926 - DNA, 20 bp, Streptococcus iniae
tgcttgcactaatccaaaga

SEQ ID NO: 12927 - DNA, 20 bp, Staphylococcus sp.
caccccgaagccggtggagt

SEQ ID NO: 12928 - DNA, 20 bp, Bacteroides merdae
tggaggacgtgtcctttttt

SEQ ID NO: 12929 - DNA, 30 bp, Eremococcus coleocola
aacgatcgctaataccgcataacagcaatc

SEQ ID NO: 12930 - DNA, 20 bp, Streptococcus gallolyticus
aaaaaacccgtatcggaagg

SEQ ID NO: 12931 - DNA, 20 bp, Bacillus licheniformis
ttactctcggggaaccccgg

SEQ ID NO: 12932 - DNA, 20 bp, Sphingomonas paucimobilis
aacctgcggtgggatcacct

SEQ ID NO: 12933 - DNA, 20 bp, Bacteroides stercoris
tgcaactgactgaatcggaa

SEQ ID NO: 12934 - DNA, 20 bp, Sphingobacterium multivorum
tgttcggttgattaaatatt

SEQ ID NO: 12935 - DNA, 20 bp, Eremococcus coleocola
attagccaagaacaccccta

SEQ ID NO: 12936 - DNA, 20 bp, Prevotella melaninogenica
ccaatcttgaaagccgggtc

SEQ ID NO: 12937 - DNA, 20 bp, Anaerococcus tetradius
agtgttaggttcttggaata

SEQ ID NO: 12938 - DNA, 20 bp, Neisseria polysaccharea
acctcccttcagtggatcac

SEQ ID NO: 12939 - DNA, 20 bp, Vibrio hollisae
gctaataccgctgggggatg

SEQ ID NO: 12940 - DNA, 20 bp, Shewanella putrefaciens
cacagaatctcgcttcagag

SEQ ID NO: 12941 - DNA, 30 bp, Paenibacillus lautus
aaccccagggctcaaccctgggtcgcaccc

SEQ ID NO: 12942 - DNA, 20 bp, Eschericchia vulneris
cctaggcgacagatccctag

SEQ ID NO: 12943 - DNA, 20 bp, Myroides odoratimimus
aatgctccatggtttatcga

SEQ ID NO: 12944 - DNA, 30 bp, Capnocytophaga sp.
gataggtatttcttcggacagttttcaagg

SEQ ID NO: 12945 - DNA, 20 bp, Clostridium clostridiiforme
ggagagacttgtgtcctatc

SEQ ID NO: 12946 - DNA, 20 bp, Bacillus licheniformis
ttgtttgaccggcagggttc

SEQ ID NO: 12947 - DNA, 20 bp, Sporosarcina ureae
ggaacccggggttattcccg

SEQ ID NO: 12948 - DNA, 20 bp, Bacteroides capilosus
gcatgacactggctgccaaa

SEQ ID NO: 12949 - DNA, 20 bp, Arcanobacterium pyogenes
atttttgtgacggtatgtgc

SEQ ID NO: 12950 - DNA, 20 bp, Eremococcus coleocola
tggctagggattgacggtaa

SEQ ID NO: 12951 - DNA, 20 bp, Bacteroides stercoris
aaattgcaactgactgaatc

SEQ ID NO: 12952 - DNA, 20 bp, Helcococcus kunzii
cggttcggtttagaaactgg

SEQ ID NO: 12953 - DNA, 20 bp, Leptotrichia buccalis
gtgttgtcagactgacgcat

SEQ ID NO: 12954 - DNA, 20 bp, Myroides odoratimimus
aatttcctagcttaactagg

SEQ ID NO: 12955 - DNA, 20 bp, Paenibacillus macerans
gatacgcaactccttcgcat

SEQ ID NO: 12956 - DNA, 20 bp, Eschericchia vulneris
taggcgacagatccctagtc

SEQ ID NO: 12957 - DNA, 20 bp, Bacteroides uniformis
taaccgcaggagcgccctag

SEQ ID NO: 12958 - DNA, 20 bp, Streptococcus bovis
ccaactggtacactgagaga

SEQ ID NO: 12959 - DNA, 20 bp, Sporosarcina ureae
cttctggcatgagggaatgt

SEQ ID NO: 12960 - DNA, 20 bp, Sphingomonas paucimobilis
tccgggtgcttggcatttgg

SEQ ID NO: 12961 - DNA, 20 bp, Sphingobacterium multivorum
aaacagactggctgggccaa

SEQ ID NO: 12962 - DNA, 20 bp, Enterobacter amnigenus
cagagaggcttgttttctgg

SEQ ID NO: 12963 - DNA, 20 bp, Bacteroides capillosus
agcgtcggtcgtatgcaaat

SEQ ID NO: 12964 - DNA, 20 bp, Clostridium clostridiiforme
attgaaaatcatttaaccgg

SEQ ID NO: 12965 - DNA, 20 bp, Streptococcus macacae
cctaaggggcttagtgccgt

SEQ ID NO: 12966 - DNA, 20 bp, Enterobacter gergoviae
ctgtggtccttgaagcgtgg

SEQ ID NO: 12967 - DNA, 20 bp, Campylobacter curvus
gcgtagctccttgtcgcaaa

SEQ ID NO: 12968 - DNA, 30 bp, Eremococcus coleocola
cgctaataccgcataacagcaatcatcgcc

SEQ ID NO: 12969 - DNA, 20 bp, Corynebacterium pilosum
ttagctttgggaactgggtg

SEQ ID NO: 12970 - DNA, 20 bp, Bacteroides stercoris
ttgcgggtagttccatcagg

SEQ ID NO: 12971 - DNA, 20 bp, Prevotella melaninogenica
agggctccaggaatgaacgc

SEQ ID NO: 12972 - DNA, 20 bp, Actinomyces radingae
tttaagtttctggagggaga

SEQ ID NO: 12973 - DNA, 20 bp, Stenotrophomonas maltophilia
tggctcagatgtgaacgctg

SEQ ID NO: 12974 - DNA, 20 bp, Listeria monocytogenes
atggggcccgcggtgcatta

SEQ ID NO: 12975 - DNA, 30 bp, Alloiococcus otitis
tctgctaccgcttatggatagcctcgcggc

SEQ ID NO: 12976 - DNA, 20 bp, Bacteroides stercoris
cgaccttgagtgcaacagag

SEQ ID NO: 12977 - DNA, 20 bp, Myroides odoratimimus
actcgcgttaaggcggggac

SEQ ID NO: 12978 - DNA, 20 bp, Anaerococcus tetradius
agtcaatcgcatggtagact

SEQ ID NO: 12979 - DNA, 20 bp, Eubacterium moniliforme
ggggcgatagtcctccgtgc

SEQ ID NO: 12980 - DNA, 20 bp, Corynebacterium pilosum
tttgggaactgggtgtctta

SEQ ID NO: 12981 - DNA, 20 bp, Clostridium clostridiiforme
agaggcaaacagaattcctg

SEQ ID NO: 12982 - DNA, 20 bp, Leptotrichia buccalis
acagggctggagtattggag

SEQ ID NO: 12983 - DNA, 20 bp, Bacillus licheniformis
agagctgtgggttactctcg

SEQ ID NO: 12984 - DNA, 20 bp, Bacteroides capilosus
agctgagtcgcatgacactg

SEQ ID NO: 12985 - DNA, 20 bp, Unknown Organism
  oligonucleotide from CDC group VB-3
gacggttacccggagtgatt

SEQ ID NO: 12986 - DNA, 30 bp, Paenibacillus alvei
gagatagagtcccttcttcggaacattcaa

SEQ ID NO: 12987 - DNA, 20 bp, Clostridium clostridiiforme
gtatgctgggtgtgggacta

SEQ ID NO: 12988 - DNA, 20 bp, Actinomyces odontolyticus
cgctttgtgcggggggagtg

SEQ ID NO: 12989 - DNA, 20 bp, Anaerococcus tetradius
gcatggtagactaaccaaag

SEQ ID NO: 12990 - DNA, 20 bp, Proteus vulgaris
ataactactggaaacggggc

SEQ ID NO: 12991 - DNA, 20 bp, Bacteroides capillosus
tatgtgaccaagcgaaagca

SEQ ID NO: 12992 - DNA, 20 bp, Vibrio hollisae
agcgctaataccgctggggg

SEQ ID NO: 12993 - DNA, 20 bp, Vibrio mimicus
tcaacacggtagcgctaggt

SEQ ID NO: 12994 - DNA, 20 bp, Porphyromonas endodontalis
gatatgctagagaggagacg

SEQ ID NO: 12995 - DNA, 20 bp, Clostridium clostridiiforme
gatcgaccctttcgcaagga

SEQ ID NO: 12996 - DNA, 20 bp, Facklamia hominis
ttgttcccggcaaagttagt

SEQ ID NO: 12997 - DNA, 30 bp, Helcococcus kunzii
atcgcatgatgtaaatgttaaagaatttcg

SEQ ID NO: 12998 - DNA, 20 bp, Staphylococcus schleiferi
tgaaagtcgttaccatggta

SEQ ID NO: 12999 - DNA, 20 bp, Lactococcus raffinolactis
ccaattggtacactgagaga

SEQ ID NO: 13000 - DNA, 20 bp, Anaerobiospirillum succiniciproducens
ccgggaggggagggaaccca

SEQ ID NO: 13001 - DNA, 20 bp, Facklamia ignava
atgcaagtcggaacgcgccg

SEQ ID NO: 13002 - DNA, 30 bp, Bacteroides stercoris
aataccggatggcatagttttcccgcatgg

SEQ ID NO: 13003 - DNA, 20 bp, Clostridium clostridiiforme
atcatttaaccgggatccct

SEQ ID NO: 13004 - DNA, 20 bp, Salmonella typhi
gcaagtcgcgacggtatcag

SEQ ID NO: 13005 - DNA, 20 bp, Staphylococcus schleiferi
gtcgaaagtgggacacaatg

SEQ ID NO: 13006 - DNA, 20 bp, Gemella morbillorum
tagctaatcccgcatatcag

SEQ ID NO: 13007 - DNA, 20 bp, Paenibacillus lautus
ggtcgcacccaaaactggat

SEQ ID NO: 13008 - DNA, 30 bp, Oligella ureolytica
tctacggaggaaagggggggatcatttgac

SEQ ID NO: 13009 - DNA, 20 bp, Paenibacillus macerans
tggagtaactgccaggagag

SEQ ID NO: 13010 - DNA, 20 bp, Corynebacterium cystitidis
gctgaaacgggggcgctagg

SEQ ID NO: 13011 - DNA, 30 bp, Sporosarcina ureae
tgattttcccttcggggacactggtgacag

SEQ ID NO: 13012 - DNA, 20 bp, Microbacterium hominis
tggtacacgcgcgcccgtca

SEQ ID NO: 13013 - DNA, 20 bp, Achromobacter piechaudii
gcctaaccgccaaggggggc

SEQ ID NO: 13014 - DNA, 20 bp, Anaerobiospirillum succiniciproducens
gataccgggaggggagggaa

SEQ ID NO: 13015 - DNA, 20 bp, Clostridium clostridiiforme
tgttgattggaacattcaag

SEQ ID NO: 13016 - DNA, 20 bp, Corynebacterium coyleae
ccagatcggccccagagatg

SEQ ID NO: 13017 - DNA, 20 bp, Clostridium clostridiiforme
ggatccctcttcggagcaat

SEQ ID NO: 13018 - DNA, 20 bp, Haemophilus influenzae
tgatcatggctcagatttga

SEQ ID NO: 13019 - DNA, 20 bp, Achromobacter piechaudii
cgccaaggggggcgattacc

SEQ ID NO: 13020 - DNA, 20 bp, Haemophilus ducreyi
tgggaatgtattgacgctca

SEQ ID NO: 13021 - DNA, 20 bp, Bacillus licheniformis
cggggttatatccggaaggt

SEQ ID NO: 13022 - DNA, 20 bp, Streptococcus macacae
ccgcataatatctctctaag

SEQ ID NO: 13023 - DNA, 20 bp, Enterobacter gergoviae
tggtccttgaagcgtggctt

SEQ ID NO: 13024 - DNA, 20 bp, Sphingobacterium multivorum
gcattcatggcccttacgct

SEQ ID NO: 13025 - DNA, 20 bp, Bacteroides capillosus
cttcggggcgcctacggagg

SEQ ID NO: 13026 - DNA, 20 bp, Propionibacterium avidum
ccgtcgaatcgatgggctct

SEQ ID NO: 13027 - DNA, 20 bp, Prevotella loescheii
atgctcgttgtcggcccctt

SEQ ID NO: 13028 - DNA, 20 bp, Anaerococcus prevotii
agcctcgcatgaagctatca

SEQ ID NO: 13029 - DNA, 20 bp, Clostridium clostridiiforme
aggtttggatccatggctca

SEQ ID NO: 13030 - DNA, 20 bp, Prevotella denticola
tagggacgtgtccctatttg

SEQ ID NO: 13031 - DNA, 20 bp, Streptococcus urinalis
acgctgaggtcatgtgcttg

SEQ ID NO: 13032 - DNA, 20 bp, Clostridium clostridiiforme
catttaaccgggatccctct

SEQ ID NO: 13033 - DNA, 20 bp, Corynebacterium cystitidis
agccatgctgaaacgggggc

SEQ ID NO: 13034 - DNA, 20 bp, Campylobacter curvus
agcgtagctccttgtcgcaa

SEQ ID NO: 13035 - DNA, 30 bp, Leuconostoc carnosum
taaggtagggaatgaccttagcctgacggt

SEQ ID NO: 13036 - DNA, 30 bp, Eubacterium moniliforme
ttgtcctatgggacgaaaaaaatgacggta

SEQ ID NO: 13037 - DNA, 20 bp, Sporosarcina pasteurii
gaagaaacaagtttcttcct

SEQ ID NO: 13038 - DNA, 20 bp, Campylobacter concisus
ataggacgatggttggatgc

SEQ ID NO: 13039 - DNA, 20 bp, Bacteroides ovatus
cggatagcatacgaatatcg

SEQ ID NO: 13040 - DNA, 20 bp, Macrococcus caseolyticus
ggacccgcgggtattagcta

SEQ ID NO: 13041 - DNA, 20 bp, Myroides odoratimimus
gcaggttactacgtatttat

SEQ ID NO: 13042 - DNA, 30 bp, Dolosicoccus paucivorans
ctaataccgcataaatcaatgattcgcatg

SEQ ID NO: 13043 - DNA, 20 bp, Bacteroides capillosus
tacagagcgtcggtcgtatg

SEQ ID NO: 13044 - DNA, 20 bp, Escherichia hermannii
ctcctgtcatggacaactgt

SEQ ID NO: 13045 - DNA, 20 bp, Vibrio hollisae
gagagattcagaagtgcccg

SEQ ID NO: 13046 - DNA, 20 bp, Bacteroides capillosus
agagcgtcggtcgtatgcaa

SEQ ID NO: 13047 - DNA, 20 bp, Bacillus laevolacticus
gctacagagattgaccttgc

SEQ ID NO: 13048 - DNA, 20 bp, Clostridium hastiforme
gtccgtgagggaaccgtaag

SEQ ID NO: 13049 - DNA, 20 bp, Campylobacter curvus
cttgtcgcaaagacggactt

SEQ ID NO: 13050 - DNA, 20 bp, Clostridium clostridiiforme
gtaggaggtttggatccatg

SEQ ID NO: 13051 - DNA, 20 bp, Finegoldia magna
gtacagagggaagctatata

SEQ ID NO: 13052 - DNA, 20 bp, Streptococcus urinalis
gtcatgtgcttgcacaagac

SEQ ID NO: 13053 - DNA, 20 bp, Veillonella sp.
gcgaatagtgagaaggattg

SEQ ID NO: 13054 - DNA, 20 bp, Vibrio metschnikovii
tgatagcctacggctcaaag

SEQ ID NO: 13055 - DNA, 20 bp, Paenibacillus lautus
tcaaccctgggtcgcaccca

SEQ ID NO: 13056 - DNA, 20 bp, Corynebacterium pilosum
cagggtctcccaattgccga

SEQ ID NO: 13057 - DNA, 20 bp, Stenotrophomonas maltophilia
aacccataaagccctgatcg

SEQ ID NO: 13058 - DNA, 20 bp, Empedobacter brevis
gctacttggcaacaagatgc

SEQ ID NO: 13059 - DNA, 30 bp, Capnocytophaga sp.
actttgatgacggtactctgcgaataagca

SEQ ID NO: 13060 - DNA, 20 bp, Corynebacterium pilosum
gtgtcttattccgggttttt

SEQ ID NO: 13061 - DNA, 20 bp, Bacteroides ovatus
acagaaggcggctacctggc

SEQ ID NO: 13062 - DNA, 20 bp, Bacteroides stercoris
cggatggcatagttttcccg

SEQ ID NO: 13063 - DNA, 20 bp, Haemophilus paraphrophilus
gccaggttagaggtgttgga

SEQ ID NO: 13064 - DNA, 20 bp, Sporosarcina ureae
gtacaggagtaactgtcctg

SEQ ID NO: 13065 - DNA, 30 bp, Bacteroides merdae
gtggaggacgtgtccttttttgtatgtacc

SEQ ID NO: 13066 - DNA, 20 bp, Anaerococcus prevotii
tattacggcggggtctagag

SEQ ID NO: 13067 - DNA, 20 bp, Finegoldia magna
acatgtgggtgaaaggtata

SEQ ID NO: 13068 - DNA, 20 bp, Prevotella melaninogenica
gtaagaggttctgatccata

SEQ ID NO: 13069 - DNA, 20 bp, Brevibacillus thermoruber
gcggatcctgtttggagctt

SEQ ID NO: 13070 - DNA, 30 bp, Streptococcus ratti
acacatgttagacgcttgaaagatgcaaga

SEQ ID NO: 13071 - DNA, 20 bp, Bacillus licheniformis
ctgtgggttactctcgggga

SEQ ID NO: 13072 - DNA, 20 bp, Campylobacter curvus
taggtgggtcaagggagcgt

SEQ ID NO: 13073 - DNA, 20 bp, Bacteroides stercoris
actgaatcggaaacggttct

SEQ ID NO: 13074 - DNA, 20 bp, Empedobacter brevis
cggattaatcagtcagtggt

SEQ ID NO: 13075 - DNA, 20 bp, Sphingobacterium multivorum
ttagtgaagagtgcagagac

SEQ ID NO: 13076 - DNA, 30 bp, Empedobacter brevis
aggattaatactttataacagattgaatgg

SEQ ID NO: 13077 - DNA, 20 bp, Clostridium clostridiiforme
atttaaccgggatccctctt

SEQ ID NO: 13078 - DNA, 30 bp, Anaerococcus tetradius
atacggagggaattagagatagtttcttaa

SEQ ID NO: 13079 - DNA, 20 bp, Anaerobiospirillum succiniciproducens
cgataccgggaggggaggga

SEQ ID NO: 13080 - DNA, 20 bp, Propionibacterium avidum
cttgcttgttaggcggctag

SEQ ID NO: 13081 - DNA, 20 bp, Anaerococcus tetradius
cggtctactgtattacaggt

SEQ ID NO: 13082 - DNA, 20 bp, Bacteroides thetaiotaomicron
tgcaaaccaaagctggcgac

SEQ ID NO: 13083 - DNA, 20 bp, Corynebacterium pilosum
gggtattctggcctggtctt

SEQ ID NO: 13084 - DNA, 20 bp, Campylobacter curvus
atcaaatacctacggcgcaa

SEQ ID NO: 13085 - DNA, 20 bp, Bacteroides uniformis
tgaagtgcgtaaccgcagga

SEQ ID NO: 13086 - DNA, 20 bp, Stenotrophomonas maltophilia
ggagaggcttgtctctctgg

SEQ ID NO: 13087 - DNA, 20 bp, Propionibacterium propionicus
gcctaacccattttttgggg

SEQ ID NO: 13088 - DNA, 20 bp, Bacteroides capilosus
ccaatggattgggtttctta

SEQ ID NO: 13089 - DNA, 20 bp, Streptococcus oralis
taatacatgcgagtagaacg

SEQ ID NO: 13090 - DNA, 20 bp, Corynebacterium pilosum
cggattagctttgggaactg

SEQ ID NO: 13091 - DNA, 20 bp, Streptococcus macacae
ggtctggaaagtcagtagtt

SEQ ID NO: 13092 - DNA, 30 bp, Actinomyces radingae
ttccgcatggggggtgtgggaaaggggcct

SEQ ID NO: 13093 - DNA, 20 bp, Staphylococcus schleiferi
tcgaaagtgggacacaatga

SEQ ID NO: 13094 - DNA, 20 bp, Streptococcus infantarius
agctccctagtgtgcgccgc

SEQ ID NO: 13095 - DNA, 20 bp, Finegoldia magna
tttagtaaacagaagcctcg

SEQ ID NO: 13096 - DNA, 20 bp, Streptococcus macacae
gaaagtcagtagttaaaagc

SEQ ID NO: 13097 - DNA, 20 bp, Sphingobacterium multivorum
tttaaacagactggctgggc

SEQ ID NO: 13098 - DNA, 20 bp, Clostridium clostridiiforme
agttgagcggggatggttcg

SEQ ID NO: 13099 - DNA, 30 bp, Bacillus licheniformis
ttgtttgaccggcagggttcaatcataaaa

SEQ ID NO: 13100 - DNA, 20 bp, Bacillus coagulans
ccgaataacactttcgctcg

SEQ ID NO: 13101 - DNA, 30 bp, Globicatella sanguinis
ttagtagattgacggtatctaaccagaaag

SEQ ID NO: 13102 - DNA, 20 bp, Brevibacillus centrosporus
gatacttccggggaacccgg

SEQ ID NO: 13103 - DNA, 20 bp, Ewingella americana
catggctcagattgaacagc

SEQ ID NO: 13104 - DNA, 20 bp, Clostridium clostridiiforme
gaacattcaagcagcggacg

SEQ ID NO: 13105 - DNA, 20 bp, Eubacterium moniliforme
tcctctgacgcatatagaga

SEQ ID NO: 13106 - DNA, 20 bp, Paenibacillus macerans
atacgcaactccttcgcatg

SEQ ID NO: 13107 - DNA, 20 bp, Pseudomonas putida
cgggtgattcatgactgggg

SEQ ID NO: 13108 - DNA, 20 bp, Neisseria subflava
tgttgctaacatcagcggct

SEQ ID NO: 13109 - DNA, 30 bp, Dolosigranulum pigrum
accactcatggatagcctcgcggcgtatta

SEQ ID NO: 13110 - DNA, 20 bp, Sphingobacterium multivorum
tggctgggccaacacgagag

SEQ ID NO: 13111 - DNA, 20 bp, Brevibacillus centrosporus
ttccggggaacccggggtta

SEQ ID NO: 13112 - DNA, 20 bp, Paenibacillus macerans
ggagtaactgccaggagagt

SEQ ID NO: 13113 - DNA, 20 bp, Yersinia ruckeri
ggtaaccgaggggaacctgc

SEQ ID NO: 13114 - DNA, 20 bp, Proteus vulgaris
ctctactggctgagagatga

SEQ ID NO: 13115 - DNA, 20 bp, Staphylococcus succinus
cgcccttccgaacggctacc

SEQ ID NO: 13116 - DNA, 20 bp, Clostridium clostridiiforme
tatgctgggtgtgggactag

SEQ ID NO: 13117 - DNA, 20 bp, Streptococcus macacae
ttctccaattgacggtactt

SEQ ID NO: 13118 - DNA, 20 bp, Finegoldia magna
tcgaatgttaaagatcgggg

SEQ ID NO: 13119 - DNA, 20 bp, Brevibacillus centrosporus
acttccggggaacccggggt

SEQ ID NO: 13120 - DNA, 20 bp, Streptococcus urinalis
tgcacaagaccaaggagttg

SEQ ID NO: 13121 - DNA, 20 bp, Brevibacillus centrosporus
tttgggatacttccggggaa

SEQ ID NO: 13122 - DNA, 20 bp, Bacillus licheniformis
tgtttgaccggcagggttca

SEQ ID NO: 13123 - DNA, 30 bp, Bacteroides stercoris
caacactgggatagcctttcgaaagaaaga

SEQ ID NO: 13124 - DNA, 20 bp, Paenibacillus larvae
tgaccggtttagagacagac

SEQ ID NO: 13125 - DNA, 20 bp, Anaerococcus tetradius
ataatctgggagccgcagct

SEQ ID NO: 13126 - DNA, 20 bp, Anaerobiospirillum succiniciproducens
aggggagggaacccacaaag

SEQ ID NO: 13127 - DNA, 20 bp, Anaerobiospirillum succiniciproducens
gaggggagggaacccacaaa

SEQ ID NO: 13128 - DNA, 30 bp, Propionibacterium granulosum
ttacctgggtttgacatggatcgggagctt

SEQ ID NO: 13129 - DNA, 20 bp, Propionibacterium acnes
tgattaggactaagtcggta

SEQ ID NO: 13130 - DNA, 20 bp, Stenotrophomonas maltophilia
gagaggcttgtctctctggg

SEQ ID NO: 13131 - DNA, 20 bp, Streptococcus equi
ctacaattatctgtgagtcg

SEQ ID NO: 13132 - DNA, 20 bp, Dolosicoccus paucivorans
aactgttactcgtttgacgg

SEQ ID NO: 13133 - DNA, 20 bp, Streptococcus ratti
tgtcagagacgaacgtgtgt

SEQ ID NO: 13134 - DNA, 20 bp, Anaerococcus prevotii
aatcacatatgcacatgcat

SEQ ID NO: 13135 - DNA, 20 bp, Lactococcus raffinolactis
tggtacactgagagatggac

SEQ ID NO: 13136 - DNA, 20 bp, Streptococcus bovis
aactggtacactgagagatg

SEQ ID NO: 13137 - DNA, 20 bp, Anaerococcus prevotii
ttgacatattacggcggggt

SEQ ID NO: 13138 - DNA, 20 bp, Anaerococcus prevotii
agtagacagaagcctcggtg

SEQ ID NO: 13139 - DNA, 20 bp, Streptococcus equi
acgtagcttgctacaattat

SEQ ID NO: 13140 - DNA, 20 bp, Corynebacterium group ANF
ttgctccactttgtgtggtg

SEQ ID NO: 13141 - DNA, 20 bp, Geobacillus thermoglucosidasius
gcccggttacaagtccggag

SEQ ID NO: 13142 - DNA, 20 bp, Eubacterium moniliforme
aacgaagttgctctttggga

SEQ ID NO: 13143 - DNA, 20 bp, Bacillus coagulans
cactttcgctcgcatgagcg

SEQ ID NO: 13144 - DNA, 20 bp, Achromobacter xylosoxidans
ggttaatacctcgcgaaact

SEQ ID NO: 13145 - DNA, 20 bp, Vibrio hollisae
gttagaatccctggtagcgt

SEQ ID NO: 13146 - DNA, 20 bp, Bacillus lentus
gtgatggcaatagccatctt

SEQ ID NO: 13147 - DNA, 20 bp, Clostridium clostridiiforme
gttgagcggggatggttcga

SEQ ID NO: 13148 - DNA, 20 bp, Sphingobacterium multivorum
gcatcggttggatattaaat

SEQ ID NO: 13149 - DNA, 20 bp, Leuconostoc gelidum
tcgcatgatatcaagctcta

SEQ ID NO: 13150 - DNA, 20 bp, Corynebacterium pilosum
ctgggtgtcttattccgggt

SEQ ID NO: 13151 - DNA, 20 bp, Peptoniphilus indolicus
gaagttgagttggattagcg

SEQ ID NO: 13152 - DNA, 30 bp, Streptococcus macacae
tgcctcttagagggggataaggattggaaa

SEQ ID NO: 13153 - DNA, 30 bp, Porphyromonas maccae
cgtgtcagggtaataccggtgactggggct

SEQ ID NO: 13154 - DNA, 20 bp, Staphylococcus cohnii
cagggatgaacgctggtcgg

SEQ ID NO: 13155 - DNA, 20 bp, Neisseria polysaccharea
cccttcagtggatcactagc

SEQ ID NO: 13156 - DNA, 20 bp, Globicatella sanguinis
gcctaaccaataggagggag

SEQ ID NO: 13157 - DNA, 20 bp, Brevibacillus thermoruber
tcctgtttggagcttgcttc

SEQ ID NO: 13158 - DNA, 20 bp, Corynebacterium pilosum
cgaccggttagttcccgttg

SEQ ID NO: 13159 - DNA, 20 bp, Myroides odoratimimus
ttagttaccactcgcgttaa

SEQ ID NO: 13160 - DNA, 20 bp, Finegoldia magna
taatgcaaaactcgaaagcc

SEQ ID NO: 13161 - DNA, 20 bp, Streptococcus acidominimus
aaaatccgctaagtgacggt

SEQ ID NO: 13162 - DNA, 20 bp, Eubacterium moniliforme
gggggcgatagtcctccgtg

SEQ ID NO: 13163 - DNA, 20 bp, Bacteroides uniformis
agccggcccttacgtccggg

SEQ ID NO: 13164 - DNA, 20 bp, Brevibacillus centrosporus
ggcaaaagcttgaaagccgg

SEQ ID NO: 13165 - DNA, 20 bp, Leuconostoc carnosum
cttagcctgacggtaccata

SEQ ID NO: 13166 - DNA, 20 bp, Globicatella sanguinis
aaatgttagtagattgacgg

SEQ ID NO: 13167 - DNA, 20 bp, Granulicatella elegans
acccagagaaggaaaagagg

SEQ ID NO: 13168 - DNA, 20 bp, Corynebacterium falsenii
gggaagaagccatgttgtgg

SEQ ID NO: 13169 - DNA, 30 bp, Sphingobacterium multivorum
aggtggggactttaaacagactggctgggc

SEQ ID NO: 13170 - DNA, 20 bp, Micrococcus luteus
gccgcgagggggggaccagc

SEQ ID NO: 13171 - DNA, 20 bp, Eubacterium moniliforme
aaaaggattcattcgatgca

SEQ ID NO: 13172 - DNA, 20 bp, Brevibacterium casei
tcagtttttcggatcgtagt

SEQ ID NO: 13173 - DNA, 20 bp, Bacillus licheniformis
accccggggttatatccgga

SEQ ID NO: 13174 - DNA, 20 bp, Bacteroides stercoris
gttttcccgcatggaataac

SEQ ID NO: 13175 - DNA, 20 bp, Enterobacter amnigenus
cacagagaggcttgttttct

SEQ ID NO: 13176 - DNA, 20 bp, Bacteroides capillosus
tgtatggcctttcggctatg

SEQ ID NO: 13177 - DNA, 20 bp, Streptococcus macacae
agtgggacgcactgatttca

SEQ ID NO: 13178 - DNA, 20 bp, Clostridium subterminale
aatcgcatgatttttgtacc

SEQ ID NO: 13179 - DNA, 20 bp, Bacteroides merdae
cgtagtctgaccggagtgga

SEQ ID NO: 13180 - DNA, 20 bp, Eubacterium moniliforme
cgaacgaagttgctctttgg

SEQ ID NO: 13181 - DNA, 30 bp, Streptococcus ferus
tataagtctgaagtgaaaggctatggctca

SEQ ID NO: 13182 - DNA, 20 bp, Prevotella disiens
attacgtgtaatgttttgca

SEQ ID NO: 13183 - DNA, 20 bp, Vibrio harveyi
taggtagttaaccttcggga

SEQ ID NO: 13184 - DNA, 20 bp, Pantoea agglomerans
gcaggagcttggctccttgg

SEQ ID NO: 13185 - DNA, 30 bp, Streptococcus acidominimus
tccgctaagtgacggtaccttaccagaaag

SEQ ID NO: 13186 - DNA, 20 bp, Bacteroides vulgatus
ggatacccgtttgcatgtac

SEQ ID NO: 13187 - DNA, 20 bp, Streptococcus macacae
gcttaaccaatgtcagctat

SEQ ID NO: 13188 - DNA, 20 bp, Eubacterium moniliforme
acgcatatagagatatatgt

SEQ ID NO: 13189 - DNA, 20 bp, Streptococcus equi
tagcttgctacaattatctg

SEQ ID NO: 13190 - DNA, 20 bp, Anaerobiospirillum succiniciproducens
ataccgggaggggagggaac

SEQ ID NO: 13191 - DNA, 20 bp, Raoultella terrigena
ttgtgtaggcctaacacatg

SEQ ID NO: 13192 - DNA, 20 bp, Finegoldia magna
gtgggtgaaaggtatagaga

SEQ ID NO: 13193 - DNA, 20 bp, Campylobacter curvus
aaatgggaaagtcgaaccct

SEQ ID NO: 13194 - DNA, 20 bp, Staphylococcus schleiferi
ggtgaaagtcgttaccatgg

SEQ ID NO: 13195 - DNA, 20 bp, Oligella ureolytica
tcatttgacctctcgctatt

SEQ ID NO: 13196 - DNA, 20 bp, Shewanella putrefaciens
cagaatctcgcttcagagat

SEQ ID NO: 13197 - DNA, 30 bp, Streptococcus cristatus
catgatagtcaattaaaaggtgcaattgca

SEQ ID NO: 13198 - DNA, 20 bp, Micrococcus luteus
ccgcgagggggggaccagcg

SEQ ID NO: 13199 - DNA, 20 bp, Clostridium clostridiiforme
ggaaggatccgcctaaagag

SEQ ID NO: 13200 - DNA, 20 bp, Bacteroides capillosus
gtatggcctttcggctatgt

SEQ ID NO: 13201 - DNA, 20 bp, Corynebacterium argentoratense
accatcctttagtgtgtgat

SEQ ID NO: 13202 - DNA, 20 bp, Bacillus schlegellii
gggtggaagcctgtctctta

SEQ ID NO: 13203 - DNA, 20 bp, Clostridium barati
gaacctgcggtggatcacct

SEQ ID NO: 13204 - DNA, 20 bp, Paenibacillus alvei
gagatagagtcccttcttcg

SEQ ID NO: 13205 - DNA, 20 bp, Vibrio hollisae
ctaataccgctgggggatga

SEQ ID NO: 13206 - DNA, 20 bp, Eubacterium moniliforme
catatagagatatatgttcc

SEQ ID NO: 13207 - DNA, 20 bp, Finegoldia magna
gggatttagtagacagaagc

SEQ ID NO: 13208 - DNA, 20 bp, Bacteroides merdae
cgggtttgaacgtagtctga

SEQ ID NO: 13209 - DNA, 20 bp, Paenibacillus alvei
acatctgaatgcaaactcta

SEQ ID NO: 13210 - DNA, 20 bp, Actinomyces radingae
tttttaagtttctggaggga

SEQ ID NO: 13211 - DNA, 20 bp, Myroides odoratimimus
ccctacgagtagggacttga

SEQ ID NO: 13212 - DNA, 20 bp, Sphingobacterium multivorum
taacatatgtgaccggcatc

SEQ ID NO: 13213 - DNA, 20 bp, Bacteroides capilosus
agctcatgacagaggattcg

SEQ ID NO: 13214 - DNA, 20 bp, Streptococcus macacae
ctcttagagggggataagga

SEQ ID NO: 13215 - DNA, 20 bp, Enterobacter gergoviae
ttaaggtagccagcctgggg

SEQ ID NO: 13216 - DNA, 20 bp, Brevibacillus centrosporus
atgaggcgaagacggaaagg

SEQ ID NO: 13217 - DNA, 20 bp, Bacteroides merdae
tgcgatacaatgtaagctct

SEQ ID NO: 13218 - DNA, 30 bp, Bacteroides capillosus
cttcttttatcagggacgaaataaatgacg

SEQ ID NO: 13219 - DNA, 20 bp, Streptococcus macacae
ggtgttaggtcctaaggggc

SEQ ID NO: 13220 - DNA, 20 bp, Granulicatella elegans
taggttctagagtcgcatga

SEQ ID NO: 13221 - DNA, 20 bp, Paenibacillus macerans
cgtcttgtggagtaactgcc

SEQ ID NO: 13222 - DNA, 20 bp, Brevibacillus centrosporus
atacttccggggaacccggg

SEQ ID NO: 13223 - DNA, 20 bp, Empedobacter brevis
gtacgattctttcgggaatc

SEQ ID NO: 13224 - DNA, 20 bp, Campylobacter curvus
ttatcaaatacctacggcgc

SEQ ID NO: 13225 - DNA, 20 bp, Peptostreptococcus anaerobius
gcgcgtctgttttgatgctt

SEQ ID NO: 13226 - DNA, 20 bp, Peptoniphilus asaccharolyticus
ggcgagctagtgatagtaag

SEQ ID NO: 13227 - DNA, 30 bp, Bacteroides capillosus
catgacactggctgccaaagatttatcgct

SEQ ID NO: 13228 - DNA, 20 bp, Oligella ureolytica
cggccgatattagattagct

SEQ ID NO: 13229 - DNA, 20 bp, Oligella urethralis
gtagcaagaggtcttacgat

SEQ ID NO: 13230 - DNA, 20 bp, Granulicatella elegans
ttctagagtcgcatgaccca

SEQ ID NO: 13231 - DNA, 20 bp, Streptococcus urinalis
catgtgcttgcacaagacca

SEQ ID NO: 13232 - DNA, 20 bp, Campylobacter curvus
ttgtcgcaaagacggacttt

SEQ ID NO: 13233 - DNA, 20 bp, Rhizobium radiobacter
ctaaccacggtagggtccag

SEQ ID NO: 13234 - DNA, 20 bp, Finegoldia magna
acacatgttttaacggtcaa

SEQ ID NO: 13235 - DNA, 30 bp, Helcococcus ovis
accgttaggaggcagacgtcgaaggtaggg

SEQ ID NO: 13236 - DNA, 20 bp, Bacteroides uniformis
gatgacgtcaaatcagccgg

SEQ ID NO: 13237 - DNA, 20 bp, Bacteroides stercoris
ttgcaactgactgagctgga

SEQ ID NO: 13238 - DNA, 20 bp, Achromobacter xylosoxidans
agcgtagcttaataccggca

SEQ ID NO: 13239 - DNA, 20 bp, Clostridium clostridiiforme
agagacttgtgtcctatcag

SEQ ID NO: 13240 - DNA, 20 bp, Arcanobacterium pyogenes
catttttgtgacggtatgtg

SEQ ID NO: 13241 - DNA, 20 bp, Streptococcus equi
cgcacagatgatacgtagct

SEQ ID NO: 13242 - DNA, 20 bp, Paenibacillus lautus
gggtgtttaaccccagggct

SEQ ID NO: 13243 - DNA, 20 bp, Streptococcus macacae
gtcctaaggggcttagtgcc

SEQ ID NO: 13244 - DNA, 20 bp, Campylobacter curvus
aggtgggtcaagggagcgta

SEQ ID NO: 13245 - DNA, 20 bp, Brevibacillus centrosporus
acccggggttaatcccgaat

SEQ ID NO: 13246 - DNA, 20 bp, Clostridium clostridiiforme
ataaagctgagcactccggc

SEQ ID NO: 13247 - DNA, 20 bp, Propionibacterium avidum
tgggggtagccgtcgaatcg

SEQ ID NO: 13248 - DNA, 20 bp, Brevibacillus centrosporus
gtttgggatacttccgggga

SEQ ID NO: 13249 - DNA, 20 bp, Leptotrichia buccalis
gtcaggctgatgaaaggaga

SEQ ID NO: 13250 - DNA, 20 bp, Stenotrophomonas maltophilia
tgtctctctgggtggcgagt

SEQ ID NO: 13251 - DNA, 20 bp, Bacteroides uniformis
gccatacgagcgcacaccct

SEQ ID NO: 13252 - DNA, 20 bp, Bacteroides capillosus
ggcgaacgatctagagatag

SEQ ID NO: 13253 - DNA, 20 bp, Brevibacillus centrosporus
cggggaacccggggttaatc

SEQ ID NO: 13254 - DNA, 20 bp, Streptococcus infantarius
catcatcccatctcaggtcg

SEQ ID NO: 13255 - DNA, 20 bp, Streptococcus infantarius
tttttttttggtaagttacc

SEQ ID NO: 13256 - DNA, 20 bp, Anaerobiospirillum succiniciproducens
acgataccgggaggggaggg

SEQ ID NO: 13257 - DNA, 20 bp, Dolosicoccus paucivorans
tcgaacgcgactgtatcacc

SEQ ID NO: 13258 - DNA, 20 bp, Finegoldia magna
gatatacccctctctttatg

SEQ ID NO: 13259 - DNA, 30 bp, Finegoldia magna
aacagaagcctcggtggaagattactaatg

SEQ ID NO: 13260 - DNA, 20 bp, Rothia dentocariosa
ctcatcctgaggccatgatc

SEQ ID NO: 13261 - DNA, 20 bp, Sporosarcina ureae
cttcagatggggtactccgg

SEQ ID NO: 13262 - DNA, 20 bp, Leuconostoc carnosum
atgaccttagcctgacggta

SEQ ID NO: 13263 - DNA, 30 bp, Moraxella atlantae
gagcttatgggtttctgctataagatgtgc

SEQ ID NO: 13264 - DNA, 20 bp, Arcanobacterium haemolyticum
ggcgttgagttgagggtagg

SEQ ID NO: 13265 - DNA, 20 bp, Leuconostoc pseudomesenteroides
aataaaactcagtgtcgcat

SEQ ID NO: 13266 - DNA, 20 bp, Myroides odoratimimus
tccctacgagtagggacttg

SEQ ID NO: 13267 - DNA, 20 bp, Bacteroides stercoris
aaggatcggctaactcccgt

SEQ ID NO: 13268 - DNA, 20 bp, Anaerobiospirillum succiniciproducens
cttcgggggaaagactttta

SEQ ID NO: 13269 - DNA, 20 bp, Gemella morbillorum
cgcgatagctaatcccgcat

SEQ ID NO: 13270 - DNA, 20 bp, Prevotella melaninogenica
atccatagggctccaggaat

SEQ ID NO: 13271 - DNA, 20 bp, Kocuria varians
agagatgttccttccccctt

SEQ ID NO: 13272 - DNA, 20 bp, Actinomyces radingae
tgcgctttccgcatgggggg

SEQ ID NO: 13273 - DNA, 20 bp, Raoultella ornithinolytica
cttaccactttgtgattaca

SEQ ID NO: 13274 - DNA, 20 bp, Corynebacterium pilosum
ttgggaactgggtgtcttat

SEQ ID NO: 13275 - DNA, 20 bp, Clostridium clostridiiforme
gtcgggtgctctcaaagccg

SEQ ID NO: 13276 - DNA, 20 bp, Micromonas micros
tgtggaaatcctttcgggaa

SEQ ID NO: 13277 - DNA, 20 bp, Aeromonas salmonicida
cggtgtgatgcatgactggg

SEQ ID NO: 13278 - DNA, 20 bp, Sporosarcina pasteurii
cgatccgccgctaacaaagg

SEQ ID NO: 13279 - DNA, 20 bp, Brevibacillus centrosporus
tactctcgcatgaggcgaag

SEQ ID NO: 13280 - DNA, 20 bp, Neisseria subflava
caaccccttgtacattagtt

SEQ ID NO: 13281 - DNA, 20 bp, Bacteroides thetaiotaomicron
ctgaagtagtaccgcaagga

SEQ ID NO: 13282 - DNA, 20 bp, Staphylococcus schleiferi
gttaccatggtatgcccgta

SEQ ID NO: 13283 - DNA, 20 bp, Enterobacter gergoviae
ggaggctacgcgttaaggta

SEQ ID NO: 13284 - DNA, 20 bp, Streptococcus urinalis
gagtggaaagtctacttcgt

SEQ ID NO: 13285 - DNA, 30 bp, Finegoldia magna
ccggggactctaagtagactgccgatgaca

SEQ ID NO: 13286 - DNA, 20 bp, Bacteroides merdae
tagcagattacgaggtgctg

SEQ ID NO: 13287 - DNA, 20 bp, Enterobacter amnigenus
gtcgaagcgagtagcacaga

SEQ ID NO: 13288 - DNA, 20 bp, Vibrio hollisae
cgctaataccgctgggggat

SEQ ID NO: 13289 - DNA, 20 bp, Bacteroides stercoris
tgccgacaacactgggatag

SEQ ID NO: 13290 - DNA, 20 bp, Campylobacter curvus
gaaccctatatattgtttat

SEQ ID NO: 13291 - DNA, 20 bp, Actinomyces naeslundii
aaggcgaccttgccttttgg

SEQ ID NO: 13292 - DNA, 30 bp, Bacteroides capillosus
gcgcctacggaggtgctgcatggttgtcgt

SEQ ID NO: 13293 - DNA, 20 bp, Bacteroides capillosus
ttcggggcgcctacggaggt

SEQ ID NO: 13294 - DNA, 20 bp, Sporosarcina ureae
attcccgaataatcccattc

SEQ ID NO: 13295 - DNA, 30 bp, Corynebacterium group ANF
gaaactaacggatcccttcggggtgaaggt

SEQ ID NO: 13296 - DNA, 30 bp, Streptococcus ratti
gcataagagagtttaacacatgttagacgc

SEQ ID NO: 13297 - DNA, 20 bp, Bacillus licheniformis
atatccggaaggttgttgtt

SEQ ID NO: 13298 - DNA, 20 bp, Sporosarcina ureae
gaacccggggttattcccga

SEQ ID NO: 13299 - DNA, 20 bp, Finegoldia magna
tttatgagacatccatacag

SEQ ID NO: 13300 - DNA, 20 bp, Stenotrophomonas maltophilia
acccttatcgatatgacggt

SEQ ID NO: 13301 - DNA, 20 bp, Eremococcus coleocola
gtaactggctagggattgac

SEQ ID NO: 13302 - DNA, 30 bp, Bacteroides capillosus
caagtcgaacggagagctcatgacagagga

SEQ ID NO: 13303 - DNA, 20 bp, Eubacterium moniliforme
tagtcctccgtgccgaagct

SEQ ID NO: 13304 - DNA, 20 bp, Bacillus mycoides
gtacaaggatagccgatcgg

SEQ ID NO: 13305 - DNA, 20 bp, Campylobacter curvus
aaagacggactttgttcgtc

SEQ ID NO: 13306 - DNA, 20 bp, Bacteroides distasonis
gaataaagtgtgggacgtgt

SEQ ID NO: 13307 - DNA, 20 bp, Arcanobacterium haemolyticum
aggcgttgagttgagggtag

SEQ ID NO: 13308 - DNA, 20 bp, Corynebacterium group ANF
tggaaaacgttttctagtgg

SEQ ID NO: 13309 - DNA, 20 bp, Streptococcus macacae
tcctaaggggcttagtgccg

SEQ ID NO: 13310 - DNA, 20 bp, Prevotella melaninogenica
tctgatccatagggctccag

SEQ ID NO: 13311 - DNA, 20 bp, Leptotrichia buccalis
gctgacatgtaatgcttaac

SEQ ID NO: 13312 - DNA, 20 bp, Brevibacillus brevis
acagatgataggggagaagt

SEQ ID NO: 13313 - DNA, 20 bp, Bacteroides merdae
gacgtgtccttttttgtatg

SEQ ID NO: 13314 - DNA, 20 bp, Shewanella putrefaciens
gcttcagagatagcttagtg

SEQ ID NO: 13315 - DNA, 20 bp, Brevibacterium casei
agccagtctcagtttttcgg

SEQ ID NO: 13316 - DNA, 30 bp, Leptotrichia buccalis
cagaatctgtgcttgcacagcctagccaag

SEQ ID NO: 13317 - DNA, 20 bp, Peptostreptococcus anaerobius
agcgcgtctgttttgatgct

SEQ ID NO: 13318 - DNA, 20 bp, Anaerococcus tetradius
ccttgtattgatttcttcgg

SEQ ID NO: 13319 - DNA, 20 bp, Mannheimia haemolytica
ttcagactgaacaactagag

SEQ ID NO: 13320 - DNA, 20 bp, Anaerococcus prevotii
tacccctctctttaagagac

SEQ ID NO: 13321 - DNA, 20 bp, Clostridium clostridiiforme
gaaaatcatttaaccgggat

SEQ ID NO: 13322 - DNA, 20 bp, Mannheimia haemolytica
gccccttggaaatgtactga

SEQ ID NO: 13323 - DNA, 20 bp, Anaerococcus prevotii
gcctcgcatgaagctatcat

SEQ ID NO: 13324 - DNA, 20 bp, Anaerococcus tetradius
gacttcggtctactgtatta

SEQ ID NO: 13325 - DNA, 20 bp, Eikenella corrodens
cgtacaaggaaaccgtaggg

SEQ ID NO: 13326 - DNA, 20 bp, Moraxella atlantae
atgggtttctgctataagat

SEQ ID NO: 13327 - DNA, 20 bp, Propionibacterium avidum
gtagccgtcgaatcgatggg

SEQ ID NO: 13328 - DNA, 20 bp, Anaerococcus prevotii
acatattacggcggggtcta

SEQ ID NO: 13329 - DNA, 20 bp, Staphylococcus schleiferi
gaaagtcgttaccatggtat

SEQ ID NO: 13330 - DNA, 20 bp, Paenibacillus macerans
acgtcttgtggagtaactgc

SEQ ID NO: 13331 - DNA, 20 bp, Streptococcus infantarius
ccgcatcatcccatctcagg

SEQ ID NO: 13332 - DNA, 20 bp, Streptococcus constellatus
agtttactaccccgtattct

SEQ ID NO: 13333 - DNA, 20 bp, Morganella morganii
gcataatgtccacggaccaa

SEQ ID NO: 13334 - DNA, 20 bp, Bacillus licheniformis
ttatatccggaaggttgttg

SEQ ID NO: 13335 - DNA, 20 bp, Citrobacter amalonaticus
gctcagaatgaacgctgttg

SEQ ID NO: 13336 - DNA, 30 bp, Bacillus fusiformis
aataatctcttttgcttcatggtgaaagac

SEQ ID NO: 13337 - DNA, 20 bp, Peptoniphilus asaccharolyticus
gggcgagctagtgatagtaa

SEQ ID NO: 13338 - DNA, 30 bp, Streptococcus acidominimus
ctcttttgagcaggggagacaggtggtgca

SEQ ID NO: 13339 - DNA, 30 bp, Anaerococcus tetradius
ttgatttcttcggaatgaaaataagcggat

SEQ ID NO: 13340 - DNA, 20 bp, Streptococcus macacae
ataatatctctctaagcctt

SEQ ID NO: 13341 - DNA, 20 bp, Streptococcus equi
gcttgctacaattatctgtg

SEQ ID NO: 13342 - DNA, 20 bp, Streptococcus vestibularis
ataacaataggtgacacatg

SEQ ID NO: 13343 - DNA, 20 bp, Anaerococcus tetradius
cctatgacataaactcttcg

SEQ ID NO: 13344 - DNA, 20 bp, Clostridium clostridiiforme
atacctcataagccggaagg

SEQ ID NO: 13345 - DNA, 20 bp, Anaerococcus prevotii
tgatagcctcgcatgaagct

SEQ ID NO: 13346 - DNA, 20 bp, Paenibacillus alvei
tgcacttctgagacttagcg

SEQ ID NO: 13347 - DNA, 20 bp, Corynebacterium pilosum
ccgaccggttagttcccgtt

SEQ ID NO: 13348 - DNA, 20 bp, Streptococcus acidominimus
gcataatagtgtttactgca

SEQ ID NO: 13349 - DNA, 20 bp, Myroides odoratimimus
gcttaactaggacactgcca

SEQ ID NO: 13350 - DNA, 20 bp, Enterobacter gergoviae
cgcgttaaggtagccagcct

SEQ ID NO: 13351 - DNA, 20 bp, Brevibacillus brevis
cgagcgagtgtcttcggagc

SEQ ID NO: 13352 - DNA, 20 bp, Porphyromonas maccae
tataggggattaaagttatc

SEQ ID NO: 13353 - DNA, 30 bp, Peptoniphilus asaccharolyticus
agcgatgaaatttcgacagattccttcggg

SEQ ID NO: 13354 - DNA, 20 bp, Staphylococcus schleiferi
ttggaagctaagcccgtcga

SEQ ID NO: 13355 - DNA, 20 bp, Arcanobacterium haemolyticum
actgaacaaggcgttgagtt

SEQ ID NO: 13356 - DNA, 20 bp, Leptotrichia buccalis
cctgaagctactggtccaac

SEQ ID NO: 13357 - DNA, 20 bp, Eremococcus coleocola
ccaagaacacccctagtagt

SEQ ID NO: 13358 - DNA, 30 bp, Anaerococcus tetradius
gaaacgaagaataataccctataaagttag

SEQ ID NO: 13359 - DNA, 20 bp, Eremococcus coleocola
agaacacccctagtagtaac

SEQ ID NO: 13360 - DNA, 20 bp, Streptococcus infantarius
ctcagctccctagtgtgcgc

SEQ ID NO: 13361 - DNA, 20 bp, Bacillus licheniformis
agctgtgggttactctcggg

SEQ ID NO: 13362 - DNA, 20 bp, Empedobacter brevis
tcactaagtatcaactgacg

SEQ ID NO: 13363 - DNA, 30 bp, Vibrio hollisae
ttgacatgtacggaattctggagagattca

SEQ ID NO: 13364 - DNA, 30 bp, Bordetella trematum
agaaacggcgccggctaatacctggcgcta

SEQ ID NO: 13365 - DNA, 20 bp, Brevundimonas vesicularis
ggaataactcagggaaaact

SEQ ID NO: 13366 - DNA, 20 bp, Bacteroides thetaiotaomicron
tttcccgcatgggttttata

SEQ ID NO: 13367 - DNA, 20 bp, Staphylococcus schleiferi
gtcgttaccatggtatgccc

SEQ ID NO: 13368 - DNA, 20 bp, Clostridium clostridiiforme
ttgagcggggatggttcgag

SEQ ID NO: 13369 - DNA, 20 bp, Enterobacter amnigenus
gcaagtcgaagcgagtagca

SEQ ID NO: 13370 - DNA, 20 bp, Actinomyces neuii
acgtgcggcgtgcttaacac

SEQ ID NO: 13371 - DNA, 30 bp, Actinomyces radingae
gtgctaatactggatgttctgcgctttccg

SEQ ID NO: 13372 - DNA, 20 bp, Enterobacter amnigenus
gcacagagaggcttgttttc

SEQ ID NO: 13373 - DNA, 20 bp, Staphylococcus epidermidis
cgctggcgtgcgtgccctaa

SEQ ID NO: 13374 - DNA, 20 bp, Bacteroides capillosus
ccttcggggcgcctacggag

SEQ ID NO: 13375 - DNA, 20 bp, Gemella morbillorum
aacgctaaggagagcttctt

SEQ ID NO: 13376 - DNA, 30 bp, Peptoniphilus asaccharolyticus
agtttggaaggattagcggcggacgggtga

SEQ ID NO: 13377 - DNA, 20 bp, Bacillus mycoides
aggatagccgatcggaaggg

SEQ ID NO: 13378 - DNA, 20 bp, Eremococcus coleocola
gaacacccctagtagtaact

SEQ ID NO: 13379 - DNA, 20 bp, Neisseria meningitidis
aggtgatcccaccgcaggtt

SEQ ID NO: 13380 - DNA, 30 bp, Salmonella typhi
catgcaagtcgcgacggtatcaggcagcag

SEQ ID NO: 13381 - DNA, 20 bp, Streptococcus macacae
taggtcctaaggggcttagt

SEQ ID NO: 13382 - DNA, 20 bp, Anaerococcus tetradius
ataccctatgacataaactc

SEQ ID NO: 13383 - DNA, 20 bp, Paenibacillus larvae
ggtttagagacagacctttt

SEQ ID NO: 13384 - DNA, 20 bp, Bacillus mycoides
cgatcggaagggcggtggat

SEQ ID NO: 13385 - DNA, 20 bp, Ochrobactrum intermedium
tgctaataccctatacgacc

SEQ ID NO: 13386 - DNA, 20 bp, Leuconostoc pseudomesenteroides
gaataaaactcagtgtcgca

SEQ ID NO: 13387 - DNA, 20 bp, Streptococcus oralis
gtgcttgcatccgagcggat

SEQ ID NO: 13388 - DNA, 20 bp, Streptococcus macacae
ttggcttaaccaatgtcagc

SEQ ID NO: 13389 - DNA, 20 bp, Yersinia frederiksenii
aggaaggcatttcacttaat

SEQ ID NO: 13390 - DNA, 20 bp, Paenibacillus alvei
gacatctgaatgcaaactct

SEQ ID NO: 13391 - DNA, 20 bp, Clostridium clostridiiforme
atcgaccctttcgcaaggaa

SEQ ID NO: 13392 - DNA, 30 bp, Pediococcus parvulus
agtcgaacgcactttcgttaattgattttg

SEQ ID NO: 13393 - DNA, 20 bp, Capnocytophaga sp.
aagtcctatagacgagcgca

SEQ ID NO: 13394 - DNA, 20 bp, Citrobacter freundii
aaaccaagggtaaaccgtag

SEQ ID NO: 13395 - DNA, 20 bp, Haemophilus paraphrophilus
agaggtgttggatccatggc

SEQ ID NO: 13396 - DNA, 20 bp, Anaerobiospirillum succiniciproducens
tttaggcctaatacatgcaa

SEQ ID NO: 13397 - DNA, 20 bp, Enterococcus saccharolyticus
taatacccgcataacgcttt

SEQ ID NO: 13398 - DNA, 20 bp, Clostridium clostridiiforme
tcgggggacaaagtccttcg

SEQ ID NO: 13399 - DNA, 20 bp, Anaerococcus prevotii
atacccctctctttaagaga

SEQ ID NO: 13400 - DNA, 20 bp, Corynebacterium pilosum
tccggattagctttgggaac

SEQ ID NO: 13401 - DNA, 20 bp, Bacteroides capilosus
tgagtcgcatgacactggct

SEQ ID NO: 13402 - DNA, 20 bp, Corynebacterium pilosum
tccagggtctcccaattgcc

SEQ ID NO: 13403 - DNA, 30 bp, Acinetobacter lwoffii
taggggggacgcttaccacggtgtggcaga

SEQ ID NO: 13404 - DNA, 20 bp, Sporosarcina ureae
ccggggttattcccgaataa

SEQ ID NO: 13405 - DNA, 20 bp, Clostridium clostridiiforme
aagttgagcggggatggttc

SEQ ID NO: 13406 - DNA, 20 bp, Leptotrichia buccalis
gtcagactgacgcatgtcag

SEQ ID NO: 13407 - DNA, 20 bp, Streptococcus ratti
cgcttgaaagatgcaagagc

SEQ ID NO: 13408 - DNA, 20 bp, Bacillus sp
ccgtatcgggaggtgcggtt

SEQ ID NO: 13409 - DNA, 30 bp, Oligella ureolytica
agggggggatcatttgacctctcgctattg

SEQ ID NO: 13410 - DNA, 20 bp, Myroides odoratimimus
cactcgcgttaaggcgggga

SEQ ID NO: 13411 - DNA, 20 bp, Eremococcus coleocola
taactggctagggattgacg

SEQ ID NO: 13412 - DNA, 20 bp, Bacteroides merdae
tagcaatacagattgatggc

SEQ ID NO: 13413 - DNA, 20 bp, Sporosarcina pasteurii
taacaaaggaagaaacaagt

SEQ ID NO: 13414 - DNA, 20 bp, Actinomyces radingae
ttctgcgctttccgcatggg

SEQ ID NO: 13415 - DNA, 20 bp, Streptococcus infantarius
cgtgctctcagctccctagt

SEQ ID NO: 13416 - DNA, 20 bp, Eubacterium moniliforme
cacgaaaccgcatggtttag

SEQ ID NO: 13417 - DNA, 20 bp, Peptostreptococcus anaerobius
tagtcgagcgcgtctgtttt

SEQ ID NO: 13418 - DNA, 20 bp, Bacillus coagulans
acactttcgctcgcatgagc

SEQ ID NO: 13419 - DNA, 20 bp, Myroides odoratimimus
tggtgaaatttcctagctta

SEQ ID NO: 13420 - DNA, 20 bp, Bacillus laevolacticus
tgaccgcgctacagagattg

SEQ ID NO: 13421 - DNA, 20 bp, Anaerococcus tetradius
taaagttagtcaatcgcatg

SEQ ID NO: 13422 - DNA, 20 bp, Bacteroides merdae
agtggaggacgtgtcctttt

SEQ ID NO: 13423 - DNA, 20 bp, Shewanella putrefaciens
tccacagaatctttccagag

SEQ ID NO: 13424 - DNA, 20 bp, Gemella sanguinis
cctttggttggacacagata

SEQ ID NO: 13425 - DNA, 20 bp, Vibrio parahaemolyticus
tgcgaaagtcgagcgaatcc

SEQ ID NO: 13426 - DNA, 20 bp, Empedobacter brevis
attctttcgggaatctgaga

SEQ ID NO: 13427 - DNA, 20 bp, Unknown Organism
  oligonucleotide from CDC group VB-3
gacggttaccccggagtgat

SEQ ID NO: 13428 - DNA, 20 bp, Clostridium clostridiiforme
tgtccgaaagagagggacac

SEQ ID NO: 13429 - DNA, 20 bp, Bacillus schlegellii
gcctttgggtggaagcctgt

SEQ ID NO: 13430 - DNA, 20 bp, Vibrio parahaemolyticus
cgtagtccggattggagctc

SEQ ID NO: 13431 - DNA, 20 bp, Leptotrichia buccalis
agactgacgcatgtcaggct

SEQ ID NO: 13432 - DNA, 20 bp, Sphingobacterium multivorum
aacatcaacagttcgcatgt

SEQ ID NO: 13433 - DNA, 20 bp, Pseudomonas oryzihabitans
gaagggcttacagcgaatac

SEQ ID NO: 13434 - DNA, 20 bp, Streptococcus infantarius
tagttagccgtttttttttg

SEQ ID NO: 13435 - DNA, 20 bp, Granulicatella elegans
ataggttctagagtcgcatg

SEQ ID NO: 13436 - DNA, 20 bp, Streptococcus macacae
aggagcttaaaaggtgcagc

SEQ ID NO: 13437 - DNA, 20 bp, Finegoldia magna
catgtgggtgaaaggtatag

SEQ ID NO: 13438 - DNA, 20 bp, Shewanella putrefaciens
ggatcagaatgccacgggaa

SEQ ID NO: 13439 - DNA, 20 bp, Empedobacter brevis
agccgaggggtacgattctt

SEQ ID NO: 13440 - DNA, 30 bp, Leuconostoc pseudomesenteroides
gaaacttagtgtcgcatgatacgaagttaa

SEQ ID NO: 13441 - DNA, 20 bp, Streptococcus salivarius
aatggatgactcatgtcatt

SEQ ID NO: 13442 - DNA, 20 bp, Anaerococcus tetradius
cgcatggtagactaaccaaa

SEQ ID NO: 13443 - DNA, 20 bp, Streptococcus macacae
taagcctttagagggattga

SEQ ID NO: 13444 - DNA, 20 bp, Enterobacter gergoviae
cggaggctacgcgttaaggt

SEQ ID NO: 13445 - DNA, 20 bp, Eubacterium moniliforme
actgtgagtatacttagtgg

SEQ ID NO: 13446 - DNA, 20 bp, Microbacterium hominis
cgaacgggtgaaggcccagc

SEQ ID NO: 13447 - DNA, 20 bp, Streptococcus acidominimus
gaagaacgttagcgggagtg

SEQ ID NO: 13448 - DNA, 20 bp, Vibrio hollisae
ttagaatccctggtagcgta

SEQ ID NO: 13449 - DNA, 20 bp, Paenibacillus macerans
actccttcgcatgagggagt

SEQ ID NO: 13450 - DNA, 20 bp, Eubacterium moniliforme
gggaagccctcgggtggaac

SEQ ID NO: 13451 - DNA, 20 bp, Eubacterium moniliforme
ggaactgtgagtatacttag

SEQ ID NO: 13452 - DNA, 20 bp, Bacillus mycoides
tagccgatcggaagggcggt

SEQ ID NO: 13453 - DNA, 20 bp, Moellerella wisconsensis
tgatattaatactatcagcg

SEQ ID NO: 13454 - DNA, 20 bp, Finegoldia magna
ataaatgtccggggactcta

SEQ ID NO: 13455 - DNA, 20 bp, Bacteroides uniformis
tagggtaacaactggcgatt

SEQ ID NO: 13456 - DNA, 30 bp, Alloiococcus otitis
gctaccgcttatggatagcctcgcggcgca

SEQ ID NO: 13457 - DNA, 20 bp, Streptococcus urinalis
gtttttaacacatgttagga

SEQ ID NO: 13458 - DNA, 20 bp, Haemophilus parainfluenzae
tttaccacgggatgattcat

SEQ ID NO: 13459 - DNA, 20 bp, Staphylococcus schleiferi
ctaagcccgtcgaaagtggg

SEQ ID NO: 13460 - DNA, 20 bp, Clostridium clostridiiforme
gtccgaaagagagggacacc

SEQ ID NO: 13461 - DNA, 20 bp, Streptococcus infantarius
tttttttggtaagttaccgt

SEQ ID NO: 13462 - DNA, 30 bp, Streptococcus ferus
taaggaagaacggtaatgggagtggaaagt

SEQ ID NO: 13463 - DNA, 20 bp, Stenotrophomonas maltophilia
cacaggagaggcttgtctct

SEQ ID NO: 13464 - DNA, 20 bp, Bacteroides merdae
tgtaggtgtcggcttaagtg

SEQ ID NO: 13465 - DNA, 20 bp, Weeksella virosa
ataaacctattcacgagctg

SEQ ID NO: 13466 - DNA, 30 bp, Anaerococcus tetradius
tacggagggaattagagatagttccttact

SEQ ID NO: 13467 - DNA, 20 bp, Bacteroides capilosus
accgcataatgcagctgagt

SEQ ID NO: 13468 - DNA, 20 bp, Haemophilus paraphrophilus
cgacgggccaggttagaggt

SEQ ID NO: 13469 - DNA, 20 bp, Aeromonas salmonicida
acgtggcttgcggagctaac

SEQ ID NO: 13470 - DNA, 20 bp, Bacillus schlegellii
ctttgggtggaagcctgtct

SEQ ID NO: 13471 - DNA, 30 bp, Pediococcus parvulus
cgttaattgattttgagatgcttgcatcga

SEQ ID NO: 13472 - DNA, 20 bp, Bacteroides capillosus
aacctactccttacaacgga

SEQ ID NO: 13473 - DNA, 20 bp, Eremococcus coleocola
aacacccctagtagtaactg

SEQ ID NO: 13474 - DNA, 20 bp, Paenibacillus apiarius
agcggagctgacggagtgct

SEQ ID NO: 13475 - DNA, 20 bp, Finegoldia magna
gaatgttaaagatcggggct

SEQ ID NO: 13476 - DNA, 20 bp, Bacillus schlegellii
ggcggaagcccgtctcttag

SEQ ID NO: 13477 - DNA, 20 bp, Leptotrichia buccalis
tcagactgacgcatgtcagg

SEQ ID NO: 13478 - DNA, 20 bp, Streptococcus ratti
acgcttgaaagatgcaagag

SEQ ID NO: 13479 - DNA, 20 bp, Staphylococcus epidermidis
gctggcgtgcgtgccctaat

SEQ ID NO: 13480 - DNA, 20 bp, Bacteroides capillosus
tccttacaacggaataaccc

SEQ ID NO: 13481 - DNA, 20 bp, Sporosarcina ureae
cgggaacccggggttattcc

SEQ ID NO: 13482 - DNA, 20 bp, Sporosarcina ureae
ttcagatggggtactccggg

SEQ ID NO: 13483 - DNA, 20 bp, Finegoldia magna
gtagaaacacatgttttaac

SEQ ID NO: 13484 - DNA, 20 bp, Streptococcus ratti
ttgtcagagacgaacgtgtg

SEQ ID NO: 13485 - DNA, 20 bp, Clostridium clostridiiforme
cttcaagtcgtctgtcaaaa

SEQ ID NO: 13486 - DNA, 20 bp, Capnocytophaga sp.
tttaaatggagactgacgta

SEQ ID NO: 13487 - DNA, 20 bp, Sporosarcina ureae
tcttctggcatgagggaatg

SEQ ID NO: 13488 - DNA, 20 bp, Bacteroides thetaiotaomicron
actgaagtagtaccgcaagg

SEQ ID NO: 13489 - DNA, 30 bp, Anaerococcus tetradius
gagatagtttcttaagacttcggtctactg

SEQ ID NO: 13490 - DNA, 20 bp, Prevotella oralis
ttggggacgtgtcccttttt

SEQ ID NO: 13491 - DNA, 20 bp, Oligella ureolytica
atcatggctcagattgacac

SEQ ID NO: 13492 - DNA, 20 bp, Campylobacter curvus
aagtcgaaccctatatattg

SEQ ID NO: 13493 - DNA, 20 bp, Bacteroides capillosus
aactgtaggcgaacgatcta

SEQ ID NO: 13494 - DNA, 30 bp, Prevotella oralis
aagggagcgtaggcagttttttaagcgtgc

SEQ ID NO: 13495 - DNA, 20 bp, Streptococcus urinalis
ttttaacacatgttaggaac

SEQ ID NO: 13496 - DNA, 20 bp, Clostridium clostridiiforme
aaaagcagagatgcgctttt

SEQ ID NO: 13497 - DNA, 20 bp, Bacteroides stercoris
tagttttcccgcatggaata

SEQ ID NO: 13498 - DNA, 20 bp, Myroides odoratimimus
atggtttatcgatatggcat

SEQ ID NO: 13499 - DNA, 20 bp, Geobacillus thermoglucosidasius
ggggactgcccggttacaag

SEQ ID NO: 13500 - DNA, 20 bp, Bacteroides uniformis
aaccgcaggagcgccctagg

SEQ ID NO: 13501 - DNA, 20 bp, Paenibacillus lautus
ccctgggtcgcacccaaaac

SEQ ID NO: 13502 - DNA, 20 bp, Streptococcus macacae
aaaaggtgcagctgcacccc

SEQ ID NO: 13503 - DNA, 20 bp, Actinomyces radingae
ctttccgcatggggggtgtg

SEQ ID NO: 13504 - DNA, 20 bp, Sphingomonas paucimobilis
gtacaagggagccgagggga

SEQ ID NO: 13505 - DNA, 20 bp, Kocuria rosea
cgaaaagttggtaacacccg

SEQ ID NO: 13506 - DNA, 20 bp, Clostridium clostridiiforme
tttaaccgggatccctcttc

SEQ ID NO: 13507 - DNA, 20 bp, Streptococcus macacae
gggacgcactgatttcacgg

SEQ ID NO: 13508 - DNA, 20 bp, Bacteroides stercoris
cttgcgggtagttccatcag

SEQ ID NO: 13509 - DNA, 20 bp, Prevotella melaninogenica
cgtcaagccatgaaagcgcg

SEQ ID NO: 13510 - DNA, 30 bp, Anaerococcus prevotii
cgatgaagcttaaatgatctcttcggagtg

SEQ ID NO: 13511 - DNA, 30 bp, Streptococcus macacae
gttctccaattgacggtacttaaccagaaa

SEQ ID NO: 13512 - DNA, 20 bp, Unknown Organism
  oligonucleotide from CDC group VB-3
tagctagtctaaccttccag

SEQ ID NO: 13513 - DNA, 20 bp, Propionibacterium avidum
ggcggctagccagtacagat

SEQ ID NO: 13514 - DNA, 20 bp, Finegoldia magna
aataaatgtccggggactct

SEQ ID NO: 13515 - DNA, 20 bp, Enterobacter cancerogenus
ggggaacctgcggttggtat

SEQ ID NO: 13516 - DNA, 20 bp, Clostridium clostridiiforme
gcggtttgctggctgcatac

SEQ ID NO: 13517 - DNA, 20 bp, Gemella morbillorum
aactattggacgcgatagct

SEQ ID NO: 13518 - DNA, 20 bp, Bacillus mycoides
gtcgtacaaggatagccgat

SEQ ID NO: 13519 - DNA, 20 bp, Streptococcus macacae
ggtgcagctgcacccctatc

SEQ ID NO: 13520 - DNA, 20 bp, Escherichia hermannii
aactgtggtgacgacgtaac

SEQ ID NO: 13521 - DNA, 20 bp, Bacteroides vulgatus
tgcatacccgtttgcatgta

SEQ ID NO: 13522 - DNA, 30 bp, Actinomyces radingae
caaggcttgacatgcgccctgagcgcctag

SEQ ID NO: 13523 - DNA, 20 bp, Peptoniphilus indolicus
aatattgacccctctagaga

SEQ ID NO: 13524 - DNA, 20 bp, Clostridium clostridiiforme
ggggatggttcgagagactt

SEQ ID NO: 13525 - DNA, 30 bp, Providencia stuartii
tgttaataccatcaacgattgacgttaccg

SEQ ID NO: 13526 - DNA, 20 bp, Sphingobacterium multivorum
ctttaaacagactggctggg

SEQ ID NO: 13527 - DNA, 20 bp, Clostridium clostridiiforme
cttgtccgaaagagagggac

SEQ ID NO: 13528 - DNA, 20 bp, Finegoldia magna
gtccggggactctaagtaga

SEQ ID NO: 13529 - DNA, 20 bp, Clostridium clostridiiforme
agggtaggaggtttggatcc

SEQ ID NO: 13530 - DNA, 20 bp, Anaerobiospirillum succiniciproducens
acgctgttttaggcctaata

SEQ ID NO: 13531 - DNA, 20 bp, Vibrio parahaemolyticus
tcccaaaaaggcgtcgtagt

SEQ ID NO: 13532 - DNA, 20 bp, Sphingobacterium multivorum
taacatcaacagttcgcatg

SEQ ID NO: 13533 - DNA, 30 bp, Vibrio hollisae
actgcgtttggaactgtcagactagagtgc

SEQ ID NO: 13534 - DNA, 20 bp, Clostridium clostridiiforme
actagcgatagttccgtgcc

SEQ ID NO: 13535 - DNA, 30 bp, Eubacterium moniliforme
gatggatactaggtgtggggggcgatagtc

SEQ ID NO: 13536 - DNA, 20 bp, Clostridium clostridiiforme
gatagttccgtgccgaagtt

SEQ ID NO: 13537 - DNA, 30 bp, Vibrio mimicus
caacacggtagcgctaggtggaacctggcg

SEQ ID NO: 13538 - DNA, 30 bp, Oligella urethralis
tgatatcggccgctccggtagcaagaggtc

SEQ ID NO: 13539 - DNA, 30 bp, Bacteroides stercoris
tgatactggcgaccttgagtgcaacagagg

SEQ ID NO: 13540 - DNA, 30 bp, Streptococcus urinalis
gcttgcacaagaccaaggagttgcgaacgg

SEQ ID NO: 13541 - DNA, 20 bp, Campylobacter curvus
atgggaaagtcgaaccctat

SEQ ID NO: 13542 - DNA, 20 bp, Citrobacter freundii
ggggtgaagtccgtaaacca

SEQ ID NO: 13543 - DNA, 20 bp, Bacteroides caccae
gaataaagttgtccacgtgt

SEQ ID NO: 13544 - DNA, 20 bp, Oligella urethralis
ccggtagcaagaggtcttac

SEQ ID NO: 13545 - DNA, 20 bp, Corynebacterium group ANF
tgcactagatgaggcgagag

SEQ ID NO: 13546 - DNA, 20 bp, Sphingobacterium multivorum
atcaacagttcgcatgttcg

SEQ ID NO: 13547 - DNA, 20 bp, Prevotella loescheii
ggataactgcttcatggcat

SEQ ID NO: 13548 - DNA, 30 bp, Empedobacter brevis
attaatcagtcagtggtgaaatcccgcagc

SEQ ID NO: 13549 - DNA, 20 bp, Bacillus licheniformis
ggaaccccggggttatatcc

SEQ ID NO: 13550 - DNA, 20 bp, Sphingobacterium multivorum
cattcatggcccttacgctt

SEQ ID NO: 13551 - DNA, 20 bp, Geobacillus stearothermophilus
ttggggcttgccttgattcg

SEQ ID NO: 13552 - DNA, 20 bp, Corynebacterium kutscheri
gacatgtacaggatcgggct

SEQ ID NO: 13553 - DNA, 20 bp, Enterobacter gergoviae
gcgttaaggtagccagcctg

SEQ ID NO: 13554 - DNA, 30 bp, Sphingobacterium multivorum
catcggttggatattaaatatttataggat

SEQ ID NO: 13555 - DNA, 20 bp, Brevibacterium casei
taaagccagtctcagttttt

SEQ ID NO: 13556 - DNA, 20 bp, Clostridium clostridiiforme
aaagagagggacacctgcgg

SEQ ID NO: 13557 - DNA, 20 bp, Corynebacterium pilosum
gaccggttagttcccgttgg

SEQ ID NO: 13558 - DNA, 20 bp, Pantoea agglomerans
caggagcttggctccttggg

SEQ ID NO: 13559 - DNA, 20 bp, Anaerococcus prevotii
tagactcttattgcttcggc

SEQ ID NO: 13560 - DNA, 20 bp, Moraxella atlantae
aaggagcttatgggtttctg

SEQ ID NO: 13561 - DNA, 20 bp, Corynebacterium pilosum
cccgttgggtattctggcct

SEQ ID NO: 13562 - DNA, 20 bp, Enterobacter gergoviae
gcttccggaggctacgcgtt

SEQ ID NO: 13563 - DNA, 20 bp, Sporosarcina ureae
gttattcccgaataatccca

SEQ ID NO: 13564 - DNA, 20 bp, Stenotrophomonas maltophilia
atcgaatgagcccatatggg

SEQ ID NO: 13565 - DNA, 20 bp, Corynebacterium pilosum
ccaattgccgaccggttagt

SEQ ID NO: 13566 - DNA, 20 bp, Pediococcus dextrinicus
aaggtgcttgcaccaaggag

SEQ ID NO: 13567 - DNA, 20 bp, Vibrio mimicus
caacacggtagcgctaggtg

SEQ ID NO: 13568 - DNA, 20 bp, Moraxella atlantae
gaaaggagcttatgggtttc

SEQ ID NO: 13569 - DNA, 20 bp, Paenibacillus lautus
cctgggtcgcacccaaaact

SEQ ID NO: 13570 - DNA, 20 bp, Eubacterium moniliforme
cctatgggacgaaaaaaatg

SEQ ID NO: 13571 - DNA, 20 bp, Suttonella indologenes
attgaacgctggcgggccca

SEQ ID NO: 13572 - DNA, 20 bp, Yersinia ruckeri
caaggtaaccgaggggaacc

SEQ ID NO: 13573 - DNA, 20 bp, Streptococcus iniae
cttgcactaatccaaagagt

SEQ ID NO: 13574 - DNA, 20 bp, Corynebacterium group ANF
cttgctccactttgtgtggt

SEQ ID NO: 13575 - DNA, 20 bp, Bacteroides distasonis
gtgggacgtgtcctattttg

SEQ ID NO: 13576 - DNA, 20 bp, Haemophilus paraphrophilus
gtgggacctttgggccacat

SEQ ID NO: 13577 - DNA, 20 bp, Bacteroides stercoris
cgtgtggttttttgcatgta

SEQ ID NO: 13578 - DNA, 20 bp, Streptococcus criceti
aggtgcaatggcaccactat

SEQ ID NO: 13579 - DNA, 20 bp, Anaerococcus prevotii
tacggcggggtctagagata

SEQ ID NO: 13580 - DNA, 30 bp, Dolosigranulum pigrum
gtggctttgctaccactcatggatagcctc

SEQ ID NO: 13581 - DNA, 20 bp, Enterobacter hormaechei
gcatgtgttaggcctaaaaa

SEQ ID NO: 13582 - DNA, 20 bp, Clostridium clostridiiforme
tcgaccctttcgcaaggaag

SEQ ID NO: 13583 - DNA, 20 bp, Corynebacterium pilosum
tgccttccagggtctcccaa

SEQ ID NO: 13584 - DNA, 20 bp, Escherichia hermannii
cacctcctgtcatggacaac

SEQ ID NO: 13585 - DNA, 20 bp, Comamonas testosteroni
tgggtcttcattgactcagt

SEQ ID NO: 13586 - DNA, 20 bp, Bacteroides capillosus
gtacagagcgtcggtcgtat

SEQ ID NO: 13587 - DNA, 20 bp, Porphyromonas endodontalis
aaactgatatgctagagagg

SEQ ID NO: 13588 - DNA, 30 bp, Gemella morbillorum
atttagcttaaaaggtgcaattgctatcgc

SEQ ID NO: 13589 - DNA, 20 bp, Unknown Organism
  oligonucleotide from CDC group VB-3
acggttaccccggagtgatt

SEQ ID NO: 13590 - DNA, 30 bp, Leuconostoc fallax
aatattgttctcttcggagacaaagtgaca

SEQ ID NO: 13591 - DNA, 20 bp, Brevibacillus brevis
ctgcggttgggatcaacctc

SEQ ID NO: 13592 - DNA, 20 bp, Bacteroides capillosus
tatgcaggcatctaactagg

SEQ ID NO: 13593 - DNA, 20 bp, Clostridium clostridiiforme
tgggtgtgggactagcgata

SEQ ID NO: 13594 - DNA, 20 bp, Prevotella loescheii
gtgcggtggataactgcttc

SEQ ID NO: 13595 - DNA, 30 bp, Clostridium clostridiiforme
gcgaaggcggtttgctggctgcatactgac

SEQ ID NO: 13596 - DNA, 20 bp, Streptococcus macacae
tacatagccgcacctgagag

SEQ ID NO: 13597 - DNA, 20 bp, Bacteroides capillosus
cgttgtatggcctttcggct

SEQ ID NO: 13598 - DNA, 20 bp, Staphylococcus muscae
tcccataaagatgttctcag

SEQ ID NO: 13599 - DNA, 30 bp, Eubacterium moniliforme
agatatatgttcccttcggggcagagagac

SEQ ID NO: 13600 - DNA, 20 bp, Clostridium clostridiiforme
tccgaaagagagggacacct

SEQ ID NO: 13601 - DNA, 20 bp, Streptococcus ferus
aagatacaatcgtatcgcta

SEQ ID NO: 13602 - DNA, 20 bp, Anaerobiospirillum succiniciproducens
cgctgttttaggcctaatac

SEQ ID NO: 13603 - DNA, 20 bp, Clostridium clostridiiforme
aggaagggaacgtgaacagg

SEQ ID NO: 13604 - DNA, 20 bp, Enterobacter hormaechei
ggcctaaaaaagcgttcatc

SEQ ID NO: 13605 - DNA, 20 bp, Clostridium clostridiiforme
cgggggacaaagtccttcgg

SEQ ID NO: 13606 - DNA, 20 bp, Shewanella putrefaciens
gaatctcgcttcagagatag

SEQ ID NO: 13607 - DNA, 20 bp, Prevotella melaninogenica
cgctagagctacaggcttaa

SEQ ID NO: 13608 - DNA, 20 bp, Prevotella corporis
cccacgcgtgggtttttgca

SEQ ID NO: 13609 - DNA, 20 bp, Corynebacterium cystitidis
catgctgaaacgggggcgct

SEQ ID NO: 13610 - DNA, 20 bp, Clostridium clostridiiforme
ccgggatccctcttcggagc

SEQ ID NO: 13611 - DNA, 30 bp, Anaerococcus tetradius
gacttcggtctactgtattacaggtggtgc

SEQ ID NO: 13612 - DNA, 20 bp, Anaerococcus prevotii
gacatattacggcggggtct

SEQ ID NO: 13613 - DNA, 30 bp, Bacteroides capillosus
tgaaaaccacgggctcaacctgtggcctgc

SEQ ID NO: 13614 - DNA, 20 bp, Dolosicoccus paucivorans
actcgtttgacggtatctca

SEQ ID NO: 13615 - DNA, 20 bp, Bacteroides merdae
ggcagcatgatttgtagcaa

SEQ ID NO: 13616 - DNA, 20 bp, Anaerococcus tetradius
ggcttgagagatgaaaggga

SEQ ID NO: 13617 - DNA, 20 bp, Stenotrophomonas maltophilia
acccataaagccctgatcgt

SEQ ID NO: 13618 - DNA, 20 bp, Bacteroides stercoris
taaattgcaactgactgaat

SEQ ID NO: 13619 - DNA, 20 bp, Eubacterium moniliforme
aagccctcgggtggaactgt

SEQ ID NO: 13620 - DNA, 20 bp, Streptococcus urinalis
gtggaaagtctacttcgtga

SEQ ID NO: 13621 - DNA, 20 bp, Arcanobacterium haemolyticum
cactgaacaaggcgttgagt

SEQ ID NO: 13622 - DNA, 20 bp, Finegoldia magna
cttgacatgtgggtgaaagg

SEQ ID NO: 13623 - DNA, 20 bp, Enterobacter hormaechei
cgtaacaaggaaccgtaggg

SEQ ID NO: 13624 - DNA, 20 bp, Streptococcus urinalis
tgaggtcatgtgcttgcaca

SEQ ID NO: 13625 - DNA, 30 bp, Leptotrichia buccalis
gacgcatgtcaggctgatgaaaggagacgc

SEQ ID NO: 13626 - DNA, 20 bp, Anaerococcus prevotii
atcacatatgcacatgcata

SEQ ID NO: 13627 - DNA, 20 bp, Clostridium clostridiiforme
cgggatccctcttcggagca

SEQ ID NO: 13628 - DNA, 20 bp, Vibrio harveyi
tgggctgcataagaagtagg

SEQ ID NO: 13629 - DNA, 30 bp, Bacteroides distasonis
gtcggactaataccgcatgaagcaggggcc

SEQ ID NO: 13630 - DNA, 20 bp, Neisseria subflava
ggataccgcaaggggccgct

SEQ ID NO: 13631 - DNA, 20 bp, Eubacterium moniliforme
ggcgatagtcctccgtgccg

SEQ ID NO: 13632 - DNA, 20 bp, Eschericchia vulneris
ggcgacagatccctagtctg

SEQ ID NO: 13633 - DNA, 20 bp, Eubacterium moniliforme
gacgcatatagagatatatg

SEQ ID NO: 13634 - DNA, 20 bp, Stenotrophomonas maltophilia
agcggaaacccataaagccc

SEQ ID NO: 13635 - DNA, 20 bp, Paenibacillus alvei
gcacttctgagacttagcgg

SEQ ID NO: 13636 - DNA, 20 bp, Enterobacter gergoviae
aggctgtggttcttgaggcc

SEQ ID NO: 13637 - DNA, 20 bp, Paenibacillus lautus
gaacgtctcttagagtaact

SEQ ID NO: 13638 - DNA, 20 bp, Leptotrichia buccalis
tgacgcatgtcaggctgatg

SEQ ID NO: 13639 - DNA, 20 bp, Streptococcus macacae
gtacaacagtatcgctaaga

SEQ ID NO: 13640 - DNA, 20 bp, Neisseria mucosa
gttggggatccaccctccct

SEQ ID NO: 13641 - DNA, 20 bp, Actinomyces odontolyticus
ccgctttgtgcggggggagt

SEQ ID NO: 13642 - DNA, 30 bp, Streptococcus criceti
cgatgccatccctagagatagggagttact

SEQ ID NO: 13643 - DNA, 20 bp, Clostridium subterminale
gcataatgtatgagaatcgc

SEQ ID NO: 13644 - DNA, 20 bp, Prevotella melaninogenica
tagagctacaggcttaacac

SEQ ID NO: 13645 - DNA, 20 bp, Sphingobacterium multivorum
actttaaacagactggctgg

SEQ ID NO: 13646 - DNA, 20 bp, Bacteroides stercoris
ccttgcgggtagttccatca

SEQ ID NO: 13647 - DNA, 20 bp, Bacteroides thetaiotaomicron
gtactgaagtagtaccgcaa

SEQ ID NO: 13648 - DNA, 20 bp, Dolosicoccus paucivorans
ttctttgaaggcaccgatac

SEQ ID NO: 13649 - DNA, 30 bp, Bacteroides distasonis
catgaagcaggggccccgcatggggatatt

SEQ ID NO: 13650 - DNA, 20 bp, Finegoldia magna
cgaatgttaaagatcggggc

SEQ ID NO: 13651 - DNA, 20 bp, Streptococcus ratti
catgttagacgcttgaaaga

SEQ ID NO: 13652 - DNA, 30 bp, Helcococcus kunzii
ttaatatcgcatgatgtaaatgttaaagaa

SEQ ID NO: 13653 - DNA, 20 bp, Sphingobacterium multivorum
acgtccaggcattcatggcc

SEQ ID NO: 13654 - DNA, 20 bp, Bacteroides thetaiotaomicron
ccataggccgtaaggcattt

SEQ ID NO: 13655 - DNA, 20 bp, Vibrio cholerae
gtcctcccggaaggtaaact

SEQ ID NO: 13656 - DNA, 20 bp, Anaerococcus tetradius
tatgacataaactcttcgca

SEQ ID NO: 13657 - DNA, 20 bp, Paenibacillus macerans
ccttcgcatgagggagttgg

SEQ ID NO: 13658 - DNA, 20 bp, Propionibacterium avidum
cgtcgaatcgatgggctctt

SEQ ID NO: 13659 - DNA, 20 bp, Geobacillus thermoglucosidasius
tgcccggttacaagtccgga

SEQ ID NO: 13660 - DNA, 20 bp, Paenibacillus larvae
gaccggtttagagacagacc

SEQ ID NO: 13661 - DNA, 20 bp, Sporosarcina ureae
cggggttattcccgaataat

SEQ ID NO: 13662 - DNA, 20 bp, Campylobacter curvus
aagtataaatgggaaagtcg

SEQ ID NO: 13663 - DNA, 20 bp, Anaerococcus tetradius
agtttcttaagacttcggtc

SEQ ID NO: 13664 - DNA, 20 bp, Fusobacterium mortiferum
tacttgatcctcggggtgat

SEQ ID NO: 13665 - DNA, 20 bp, Staphylococcus schleiferi
gggtgaaagtcgttaccatg

SEQ ID NO: 13666 - DNA, 30 bp, Streptococcus ferus
ggcggctctataagtctgaagtgaaaggct

SEQ ID NO: 13667 - DNA, 20 bp, Corynebacterium auris
acggaaggctcccgcttgcg

SEQ ID NO: 13668 - DNA, 20 bp, Rothia dentocariosa
cgtctcatcctgaggccatg

SEQ ID NO: 13669 - DNA, 20 bp, Vibrio mimicus
gtcgtcaacacggtagcgct

SEQ ID NO: 13670 - DNA, 20 bp, Leptotrichia buccalis
agggctggagtattggagag

SEQ ID NO: 13671 - DNA, 30 bp, Corynebacterium pseudotuberculosis
tagatacccctggtagtccatgccgtaacg

SEQ ID NO: 13672 - DNA, 20 bp, Leuconostoc carnosum
gcctgacggtaccataccag

SEQ ID NO: 13673 - DNA, 20 bp, Streptococcus infantarius
ctctcagctccctagtgtgc

SEQ ID NO: 13674 - DNA, 30 bp, Providencia alcalifaciens
acgaccggcggcggggtgagtaatgtatgg

SEQ ID NO: 13675 - DNA, 20 bp, Dolosicoccus paucivorans
gaagcaacgtcgcgagacca

SEQ ID NO: 13676 - DNA, 20 bp, Clostridium sordellii
tacgggataaaatatgagag

SEQ ID NO: 13677 - DNA, 20 bp, Campylobacter curvus
ttcgtctgcgaagtaaataa

SEQ ID NO: 13678 - DNA, 20 bp, Clostridium clostridiiforme
cctaaagagtgtccggtgag

SEQ ID NO: 13679 - DNA, 20 bp, Corynebacterium group ANF
gaaactaacggatcccttcg

SEQ ID NO: 13680 - DNA, 20 bp, Kocuria varians
tcagagatgttccttccccc

SEQ ID NO: 13681 - DNA, 20 bp, Peptoniphilus asaccharolyticus
tttcgacagattccttcggg

SEQ ID NO: 13682 - DNA, 30 bp, Peptostreptococcus anaerobius
ctagtcgagcgcgtctgttttgatgcttgc

SEQ ID NO: 13683 - DNA, 20 bp, Weissella paramesenteroides
ttaactgatctgacgagctt

SEQ ID NO: 13684 - DNA, 20 bp, Bacteroides uniformis
gaagtgcgtaaccgcaggag

SEQ ID NO: 13685 - DNA, 20 bp, Clostridium clostridiiforme
ctaaagagtgtccggtgagg

SEQ ID NO: 13686 - DNA, 20 bp, Gemella morbillorum
agcacgcgtaggtaccctgc

SEQ ID NO: 13687 - DNA, 20 bp, Bacteroides stercoris
ttaaattgcaactgactgaa

SEQ ID NO: 13688 - DNA, 20 bp, Streptococcus macacae
ggtcctaaggggcttagtgc

SEQ ID NO: 13689 - DNA, 20 bp, Propionibacterium avidum
gtcgaatcgatgggctcttg

SEQ ID NO: 13690 - DNA, 20 bp, Vibrio hollisae
ctgggggatgacagtacctg

SEQ ID NO: 13691 - DNA, 20 bp, Clostridium clostridiiforme
ggatccgcctaaagagtgtc

SEQ ID NO: 13692 - DNA, 20 bp, Dolosicoccus paucivorans
tctttgaaggcaccgataca

SEQ ID NO: 13693 - DNA, 20 bp, Anaerococcus tetradius
ggtagactaaccaaagattt

SEQ ID NO: 13694 - DNA, 20 bp, Bacillus licheniformis
tactctcggggaaccccggg

SEQ ID NO: 13695 - DNA, 20 bp, Eubacterium moniliforme
tgtgagtatacttagtggcg

SEQ ID NO: 13696 - DNA, 20 bp, Corynebacterium afermentans
gcttcaggtgttccgacttt

SEQ ID NO: 13697 - DNA, 20 bp, Streptococcus anginosus
gttttgtcatggttcaggac

SEQ ID NO: 13698 - DNA, 20 bp, Corynebacterium group ANF
ttgtgtggtgtggtgtcgaa

SEQ ID NO: 13699 - DNA, 20 bp, Kocuria varians
cagagatgttccttccccct

SEQ ID NO: 13700 - DNA, 20 bp, Brevibacillus brevis
cgaatcttaaggtgcttgca

SEQ ID NO: 13701 - DNA, 20 bp, Anaerococcus prevotii
acggcggggtctagagatag

SEQ ID NO: 13702 - DNA, 20 bp, Granulicatella elegans
tcgcatgacccagagaagga

SEQ ID NO: 13703 - DNA, 20 bp, Sporosarcina ureae
tcccattctcttctggcatg

SEQ ID NO: 13704 - DNA, 20 bp, Granulicatella elegans
atgcttgcattggtcaatct

SEQ ID NO: 13705 - DNA, 20 bp, Dolosicoccus paucivorans
tttgaaggcaccgatacatc

SEQ ID NO: 13706 - DNA, 20 bp, Edwardsiella tarda
gcctgctttctctcgctgac

SEQ ID NO: 13707 - DNA, 20 bp, Streptococcus macacae
actgatttcacgggagcttg

SEQ ID NO: 13708 - DNA, 20 bp, Streptococcus urinalis
tctacttcgtgacggtaact

SEQ ID NO: 13709 - DNA, 20 bp, Anaerococcus tetradius
ttagtcaatcgcatggtaga

SEQ ID NO: 13710 - DNA, 20 bp, Corynebacterium pilosum
ccagggtctcccaattgccg

SEQ ID NO: 13711 - DNA, 20 bp, Myroides odoratimimus
catgatccgggaatacgttc

SEQ ID NO: 13712 - DNA, 20 bp, Bacteroides stercoris
gcgaccttgagtgcaacaga

SEQ ID NO: 13713 - DNA, 30 bp, Bacteroides ovatus
taataccggatagcatacgaatatcgcatg

SEQ ID NO: 13714 - DNA, 20 bp, Neisseria polysaccharea
cacctcccttcagtggatca

SEQ ID NO: 13715 - DNA, 20 bp, Campylobacter curvus
tttatcaaatacctacggcg

SEQ ID NO: 13716 - DNA, 30 bp, Dolosicoccus paucivorans
agcactgttgtgagagaagaacagcgagta

SEQ ID NO: 13717 - DNA, 20 bp, Finegoldia magna
gtcgaatgttaaagatcggg

SEQ ID NO: 13718 - DNA, 20 bp, Clostridium clostridiiforme
cgagagacttatgttgattg

SEQ ID NO: 13719 - DNA, 20 bp, Campylobacter curvus
tcgcaaagacggactttgtt

SEQ ID NO: 13720 - DNA, 20 bp, Streptococcus alactolyticus
gcataacagcttttgacaca

SEQ ID NO: 13721 - DNA, 20 bp, Campylobacter curvus
gcaaagacggactttgttcg

SEQ ID NO: 13722 - DNA, 20 bp, Eremococcus coleocola
caagaacacccctagtagta

SEQ ID NO: 13723 - DNA, 20 bp, Vibrio parahaemolyticus
agctctgcaactcgactcca

SEQ ID NO: 13724 - DNA, 20 bp, Bacteroides capillosus
caacctactccttacaacgg

SEQ ID NO: 13725 - DNA, 20 bp, Microbacterium hominis
cgctgcggtgtaatacgatc

SEQ ID NO: 13726 - DNA, 20 bp, Bacillus thuringiensis
gcggcgtgcctaatacaatg

SEQ ID NO: 13727 - DNA, 20 bp, Corynebacterium pilosum
ctcccaattgccgaccggtt

SEQ ID NO: 13728 - DNA, 20 bp, Bacteroides merdae
agcagattacgaggtgctgc

SEQ ID NO: 13729 - DNA, 20 bp, Bacteroides merdae
ggtttgaacgtagtctgacc

SEQ ID NO: 13730 - DNA, 20 bp, Listeria innocua
agccccccggcttaaccggg

SEQ ID NO: 13731 - DNA, 30 bp, Bacteroides stercoris
gggcagcatcatcaaagcttgctttgatgg

SEQ ID NO: 13732 - DNA, 20 bp, Campylobacter curvus
cgcaaagacggactttgttc

SEQ ID NO: 13733 - DNA, 20 bp, Paenibacillus alvei
agagatagagtcccttcttc

SEQ ID NO: 13734 - DNA, 20 bp, Bacteroides merdae
ccggagtggaaacactcctt

SEQ ID NO: 13735 - DNA, 20 bp, Finegoldia magna
ataatgcaaaactcgaaagc

SEQ ID NO: 13736 - DNA, 30 bp, Fusobacterium necrogenes
cagagatgccttcgtgccccttcgggggaa

SEQ ID NO: 13737 - DNA, 20 bp, Clostridium innocuum
gcgcatgctcagtatattaa

SEQ ID NO: 13738 - DNA, 20 bp, Campylobacter curvus
gtagctccttgtcgcaaaga

SEQ ID NO: 13739 - DNA, 20 bp, Neisseria subflava
accccttgtacattagttgc

SEQ ID NO: 13740 - DNA, 20 bp, Lactococcus raffinolactis
atccagccctaagtgacgca

SEQ ID NO: 13741 - DNA, 20 bp, Streptococcus acidominimus
tagtgtttactgcatggtaa

SEQ ID NO: 13742 - DNA, 20 bp, Anaerobiospirillum succiniciproducens
agacttttagttgctatcag

SEQ ID NO: 13743 - DNA, 20 bp, Arcanobacterium haemolyticum
aacaaggcgttgagttgagg

SEQ ID NO: 13744 - DNA, 20 bp, Haemophilus segnis
tgggggttgaactttaggtt

SEQ ID NO: 13745 - DNA, 20 bp, Corynebacterium cystitidis
tgctgaaacgggggcgctag

SEQ ID NO: 13746 - DNA, 20 bp, Leptotrichia buccalis
cagactgacgcatgtcaggc

SEQ ID NO: 13747 - DNA, 20 bp, Peptoniphilus asaccharolyticus
aagtttggaaggattagcgg

SEQ ID NO: 13748 - DNA, 20 bp, Eschericchia vulneris
ctaggcgacagatccctagt

SEQ ID NO: 13749 - DNA, 20 bp, Staphylococcus schleiferi
tcgttaccatggtatgcccg

SEQ ID NO: 13750 - DNA, 20 bp, Streptococcus thermophilus
cacctccttcatggtcatag

SEQ ID NO: 13751 - DNA, 30 bp, Arcanobacterium haemolyticum
actgaacaaggcgttgagttgagggtaggt

SEQ ID NO: 13752 - DNA, 20 bp, Anaerococcus prevotii
tttaagagacatccatacag

SEQ ID NO: 13753 - DNA, 20 bp, Brevibacillus centrosporus
tgggatacttccggggaacc

SEQ ID NO: 13754 - DNA, 20 bp, Pediococcus dextrinicus
gcaccaaggagatttaaaag

SEQ ID NO: 13755 - DNA, 20 bp, Prevotella melaninogenica
catgaaagcgcgggggtgcc

SEQ ID NO: 13756 - DNA, 20 bp, Streptococcus macacae
ggattgaaaggtacaacagt

SEQ ID NO: 13757 - DNA, 30 bp, Bacteroides capillosus
ggtacagagcgtcggtcgtatgcaaatacg

SEQ ID NO: 13758 - DNA, 20 bp, Bacillus laevolacticus
tctgaccgcgctacagagat

SEQ ID NO: 13759 - DNA, 20 bp, Streptococcus acidominimus
tactgcatggtaaacattta

SEQ ID NO: 13760 - DNA, 20 bp, Staphylococcus schleiferi
agtcgttaccatggtatgcc

SEQ ID NO: 13761 - DNA, 20 bp, Campylobacter curvus
ctttgttcgtctgcgaagta

SEQ ID NO: 13762 - DNA, 30 bp, Bacteroides merdae
tagcagattacgaggtgctgcatggttgtc

SEQ ID NO: 13763 - DNA, 20 bp, Bacteroides uniformis
aagtgccatacgagcgcaca

SEQ ID NO: 13764 - DNA, 20 bp, Neisseria mucosa
ttggggatccaccctccctt

SEQ ID NO: 13765 - DNA, 20 bp, Bacillus schlegellii
aagtcgagcggggagcgggc

SEQ ID NO: 13766 - DNA, 20 bp, Dolosicoccus paucivorans
cttgacatcggatgcatagc

SEQ ID NO: 13767 - DNA, 20 bp, Peptoniphilus indolicus
gtaacaagggagccgtatcg

SEQ ID NO: 13768 - DNA, 20 bp, Corynebacterium group ANF
tgaaactaacggatcccttc

SEQ ID NO: 13769 - DNA, 20 bp, Capnocytophaga ochracea
tcaaatcatcgcggccctta

SEQ ID NO: 13770 - DNA, 20 bp, Clostridium subterminale
cgcataatgtatgagaatcg

SEQ ID NO: 13771 - DNA, 20 bp, Clostridium clostridiiforme
cgagtcgggtgctctcaaag

SEQ ID NO: 13772 - DNA, 20 bp, Pasteurella pneumotropica
ttaactctgacgcccgtagc

SEQ ID NO: 13773 - DNA, 20 bp, Bacillus sp
gaagtttggatccatggctc

SEQ ID NO: 13774 - DNA, 20 bp, Streptococcus macacae
cagctgcacccctatcagat

SEQ ID NO: 13775 - DNA, 20 bp, Clostridium clostridiiforme
tccgagtcgggtgctctcaa

SEQ ID NO: 13776 - DNA, 20 bp, Eremococcus coleocola
ttattagccaagaacacccc

SEQ ID NO: 13777 - DNA, 20 bp, Clostridium clostridiiforme
atccctcttcggagcaatgg

SEQ ID NO: 13778 - DNA, 20 bp, Clostridium clostridiiforme
gacgaaactggagagcttga

SEQ ID NO: 13779 - DNA, 20 bp, Unknown Organism
  oligonucleotide from CDC group EO-2
tgggaatgtgccacttctac

SEQ ID NO: 13780 - DNA, 20 bp, Bacteroides capillosus
acctactccttacaacggaa

SEQ ID NO: 13781 - DNA, 20 bp, Corynebacterium pilosum
tggtcttccggattagcttt

SEQ ID NO: 13782 - DNA, 20 bp, Clostridium clostridiiforme
tggagagacttgtgtcctat

SEQ ID NO: 13783 - DNA, 20 bp, Corynebacterium group ANF
gcttgctccactttgtgtgg

SEQ ID NO: 13784 - DNA, 20 bp, Leuconostoc gelidum
tgatatcaagctctaaaagg

SEQ ID NO: 13785 - DNA, 20 bp, Clostridium clostridiiforme
gatccctcttcggagcaatg

SEQ ID NO: 13786 - DNA, 20 bp, Corynebacterium pilosum
tagctttgggaactgggtgt

SEQ ID NO: 13787 - DNA, 20 bp, Streptococcus suis
tcatggctcaggacgaatcg

SEQ ID NO: 13788 - DNA, 20 bp, Neisseria subflava
accgatcgagtccggattgc

SEQ ID NO: 13789 - DNA, 20 bp, Bacteroides capillosus
actgtaggcgaacgatctag

SEQ ID NO: 13790 - DNA, 20 bp, Bacteroides merdae
tgaacgtagtctgaccggag

SEQ ID NO: 13791 - DNA, 20 bp, Neisseria subflava
caaggcagcccgaggggaac

SEQ ID NO: 13792 - DNA, 20 bp, Paenibacillus macerans
ccggatacgcaactccttcg

SEQ ID NO: 13793 - DNA, 20 bp, Actinomyces neuii
aagtgatcaggtcagggaac

SEQ ID NO: 13794 - DNA, 20 bp, Staphylococcus aureus
gcgactttctggctgaactg

SEQ ID NO: 13795 - DNA, 20 bp, Clostridium clostridiiforme
tcatttaaccgggatccctc

SEQ ID NO: 13796 - DNA, 20 bp, Corynebacterium pilosum
ctgccttccagggtctccca

SEQ ID NO: 13797 - DNA, 20 bp, Pseudomonas mendocina
gggctgctggttaataccct

SEQ ID NO: 13798 - DNA, 20 bp, Neisseria mucosa
acctgcggttggggatccac

SEQ ID NO: 13799 - DNA, 20 bp, Capnocytophaga sp.
gatgacgtcaaatcatccgg

SEQ ID NO: 13800 - DNA, 20 bp, Streptococcus macacae
ctaggtgttaggtcctaagg

SEQ ID NO: 13801 - DNA, 30 bp, Paenibacillus lautus
tgggagaggaaagaaagacggagcaatctg

SEQ ID NO: 13802 - DNA, 20 bp, Bacteroides capillosus
ttgtatggcctttcggctat

SEQ ID NO: 13803 - DNA, 20 bp, Eubacterium moniliforme
gtggaactgtgagtatactt

SEQ ID NO: 13804 - DNA, 20 bp, Dolosicoccus paucivorans
cgaacgcgactgtatcaccg

SEQ ID NO: 13805 - DNA, 20 bp, Streptococcus macacae
agctgcacccctatcagatg

SEQ ID NO: 13806 - DNA, 20 bp, Prevotella disiens
tacgtgtaatgttttgcatg

SEQ ID NO: 13807 - DNA, 20 bp, Anaerococcus prevotii
tgacatattacggcggggtc

SEQ ID NO: 13808 - DNA, 20 bp, Streptococcus acidominimus
tctcttttgagcaggggaga

SEQ ID NO: 13809 - DNA, 20 bp, Streptococcus acidominimus
tcccgtagctgctacatttg

SEQ ID NO: 13810 - DNA, 20 bp, Eschericchia vulneris
gccacactggaactgagtac

SEQ ID NO: 13811 - DNA, 20 bp, Moraxella atlantae
ctcatgaagccttagtggcg

SEQ ID NO: 13812 - DNA, 30 bp, Eggerthella lenta
ggtgtggggggctccgccctccgtgccgca

SEQ ID NO: 13813 - DNA, 20 bp, Corynebacterium group ANF
tgctccactttgtgtggtgt

SEQ ID NO: 13814 - DNA, 20 bp, Paenibacillus macerans
cgcaactccttcgcatgagg

SEQ ID NO: 13815 - DNA, 20 bp, Paenibacillus alvei
tgacatctgaatgcaaactc

SEQ ID NO: 13816 - DNA, 20 bp, Brevibacillus centrosporus
ttgaaagccgggttttgggc

SEQ ID NO: 13817 - DNA, 30 bp, Anaerococcus tetradius
acacatgcaagtcgaacgatgaagatattt

SEQ ID NO: 13818 - DNA, 20 bp, Clostridium clostridiiforme
gattggaacattcaagcagc

SEQ ID NO: 13819 - DNA, 20 bp, Prevotella oralis
gcgtaggcagttttttaagc

SEQ ID NO: 13820 - DNA, 20 bp, Haemophilus paraphrophilus
ggtgttggatccatggctca

SEQ ID NO: 13821 - DNA, 20 bp, Streptococcus macacae
gtgggacgcactgatttcac

SEQ ID NO: 13822 - DNA, 20 bp, Aeromonas salmonicida
gacgtggcttgcggagctaa

SEQ ID NO: 13823 - DNA, 30 bp, Leuconostoc fallax
gataatattgttctcttcggagacaaagtg

SEQ ID NO: 13824 - DNA, 20 bp, Bacteroides capilosus
cagctgagtcgcatgacact

SEQ ID NO: 13825 - DNA, 20 bp, Campylobacter concisus
gataggacgatggttggatg

SEQ ID NO: 13826 - DNA, 20 bp, Peptostreptococcus anaerobius
ctagtcgagcgcgtctgttt

SEQ ID NO: 13827 - DNA, 20 bp, Leuconostoc gelidum
gagggagccgactaaggcag

SEQ ID NO: 13828 - DNA, 20 bp, Gemella morbillorum
ggtataactattggacgcga

SEQ ID NO: 13829 - DNA, 20 bp, Vibrio cholerae
agaaggtgatccaccgccag

SEQ ID NO: 13830 - DNA, 30 bp, Clostridium clostridiiforme
tagttccgtgccgaagttaacgcgataagc

SEQ ID NO: 13831 - DNA, 20 bp, Facklamia hominis
cttgttcccggcaaagttag

SEQ ID NO: 13832 - DNA, 20 bp, Corynebacterium pilosum
tctcccaattgccgaccggt

SEQ ID NO: 13833 - DNA, 20 bp, Clostridium clostridiiforme
ccctattgccggttgctacc

SEQ ID NO: 13834 - DNA, 20 bp, Pediococcus dextrinicus
gcttgcaccaaggagattta

SEQ ID NO: 13835 - DNA, 20 bp, Brevibacterium casei
agtctcagtttttcggatcg

SEQ ID NO: 13836 - DNA, 30 bp, Facklamia ignava
gccctaatacatgcaagtcggaacgcgccg

SEQ ID NO: 13837 - DNA, 20 bp, Sporosarcina ureae
tacaggagtaactgtcctgt

SEQ ID NO: 13838 - DNA, 20 bp, Corynebacterium coyleae
cggccccagagatgctggtt

SEQ ID NO: 13839 - DNA, 20 bp, Streptococcus macacae
gctaggtgttaggtcctaag

SEQ ID NO: 13840 - DNA, 20 bp, Pediococcus dextrinicus
ttaatgatcaaggtgcttgc

SEQ ID NO: 13841 - DNA, 20 bp, Bacteroides vulgatus
atgcatacccgtttgcatgt

SEQ ID NO: 13842 - DNA, 20 bp, Unknown Organism
  oligonucleotide from CDC group VB-3
tctaaccttccagggggacg

SEQ ID NO: 13843 - DNA, 20 bp, Sphingobacterium multivorum
aacagactggctgggccaac

SEQ ID NO: 13844 - DNA, 20 bp, Bacillus licheniformis
ccccggggttatatccggaa

SEQ ID NO: 13845 - DNA, 20 bp, Streptococcus infantarius
tcagctccctagtgtgcgcc

SEQ ID NO: 13846 - DNA, 20 bp, Empedobacter brevis
gccgaggggtacgattcttt

SEQ ID NO: 13847 - DNA, 20 bp, Paenibacillus macerans
ggatacgcaactccttcgca

SEQ ID NO: 13848 - DNA, 20 bp, Paenibacillus larvae
gtttagagacagaccttttc

SEQ ID NO: 13849 - DNA, 20 bp, Porphyromonas endodontalis
ggcagcgtaccaggctccgt

SEQ ID NO: 13850 - DNA, 20 bp, Clostridium clostridiiforme
taggaggtttggatccatgg

SEQ ID NO: 13851 - DNA, 20 bp, Clostridium clostridiiforme
acttgacatccacgcggtag

SEQ ID NO: 13852 - DNA, 20 bp, Leptotrichia buccalis
cgctgacatgtaatgcttaa

SEQ ID NO: 13853 - DNA, 20 bp, Arcanobacterium haemolyticum
gaacaaggcgttgagttgag

SEQ ID NO: 13854 - DNA, 20 bp, Streptococcus alactolyticus
gcttttgacacatgttagaa

SEQ ID NO: 13855 - DNA, 20 bp, Stenotrophomonas maltophilia
cagcaagcggaaacccataa

SEQ ID NO: 13856 - DNA, 20 bp, Geobacillus thermoglucosidasius
cggttacaagtccggaggaa

SEQ ID NO: 13857 - DNA, 20 bp, Anaerococcus tetradius
tcaatcgcatggtagactaa

SEQ ID NO: 13858 - DNA, 20 bp, Alloiococcus otitis
cttctgctaccttcagagat

SEQ ID NO: 13859 - DNA, 20 bp, Burkholderia gladioli
gtggggggatagcccggcga

SEQ ID NO: 13860 - DNA, 20 bp, Gemella morbillorum
gtataactattggacgcgat

SEQ ID NO: 13861 - DNA, 20 bp, Eubacterium moniliforme
ggattcattcgatgcaggat

SEQ ID NO: 13862 - DNA, 20 bp, Finegoldia magna
tcgtagaaacacatgtttta

SEQ ID NO: 13863 - DNA, 20 bp, Streptococcus infantarius
ggcacgtagttagccgtttt

SEQ ID NO: 13864 - DNA, 20 bp, Corynebacterium group ANF
ggaaaacgttttctagtggt

SEQ ID NO: 13865 - DNA, 30 bp, Sphingobacterium multivorum
ggggggacgacgtccaggcattcatggccc

SEQ ID NO: 13866 - DNA, 30 bp, Empedobacter brevis
taacagattgaatggcatcatttaattttg

SEQ ID NO: 13867 - DNA, 30 bp, Arcanobacterium pyogenes
agccggggctttttgttttggtggattagt

SEQ ID NO: 13868 - DNA, 20 bp, Staphylococcus epidermidis
ctggcgtgcgtgccctaata

SEQ ID NO: 13869 - DNA, 20 bp, Leuconostoc pseudomesenteroides
cgcatgatacgaagttaaaa

SEQ ID NO: 13870 - DNA, 30 bp, Sphingobacterium multivorum
ttacgcttcggggctatcacacgtgctaca

SEQ ID NO: 13871 - DNA, 20 bp, Finegoldia magna
agaaacacatgttttaacgg

SEQ ID NO: 13872 - DNA, 20 bp, Enterobacter hormaechei
gttaggcctaaaaaagcgtt

SEQ ID NO: 13873 - DNA, 20 bp, Bacteroides capillosus
ggtacagagcgtcggtcgta

SEQ ID NO: 13874 - DNA, 20 bp, Paenibacillus macerans
accggatacgcaactccttc

SEQ ID NO: 13875 - DNA, 20 bp, Campylobacter curvus
aataatatatagggtttctc

SEQ ID NO: 13876 - DNA, 20 bp, Anaerococcus prevotii
cggcggggtctagagataga

SEQ ID NO: 13877 - DNA, 20 bp, Corynebacterium propinquum
ggcggcttaacacatgcaag

SEQ ID NO: 13878 - DNA, 20 bp, Bacteroides merdae
tacttgagtgtgtttgaggt

SEQ ID NO: 13879 - DNA, 20 bp, Sphingomonas paucimobilis
tacaagggagccgaggggaa

SEQ ID NO: 13880 - DNA, 20 bp, Suttonella indologenes
ctggcgggcccaatgcttaa

SEQ ID NO: 13881 - DNA, 20 bp, Microbacterium hominis
ggcggtggccctccccttgt

SEQ ID NO: 13882 - DNA, 20 bp, Empedobacter brevis
agctacttggcaacaagatg

SEQ ID NO: 13883 - DNA, 20 bp, Bacillus smithii
caaaaagccgtatcggaagg

SEQ ID NO: 13884 - DNA, 20 bp, Bacillus licheniformis
ttgttgtttgaccggcaggg

SEQ ID NO: 13885 - DNA, 30 bp, Streptococcus equi
caagtggaacgcacagatgatacgtagctt

SEQ ID NO: 13886 - DNA, 20 bp, Paenibacillus alvei
agtcccttcttcggaacatt

SEQ ID NO: 13887 - DNA, 20 bp, Streptococcus infantarius
ccgtgctctcagctccctag

SEQ ID NO: 13888 - DNA, 30 bp, Bacteroides distasonis
agggaataaagtgtgggacgtgtcctattt

SEQ ID NO: 13889 - DNA, 20 bp, Streptococcus acidominimus
gttagcgggagtggaaaatc

SEQ ID NO: 13890 - DNA, 20 bp, Clostridium innocuum
aaagcgcccatcaaggcgtg

SEQ ID NO: 13891 - DNA, 20 bp, Actinomyces radingae
ttaagtttctggagggagat

SEQ ID NO: 13892 - DNA, 20 bp, Clostridium clostridiiforme
tcaaagccggaggcctaacc

SEQ ID NO: 13893 - DNA, 20 bp, Bacteroides capillosus
acgatctagagatagtgagg

SEQ ID NO: 13894 - DNA, 20 bp, Clostridium clostridiiforme
caaggacttgtccgaaagag

SEQ ID NO: 13895 - DNA, 20 bp, Gemella morbillorum
cggggtataactattggacg

SEQ ID NO: 13896 - DNA, 20 bp, Vibrio harveyi
agtaggtagttaaccttcgg

SEQ ID NO: 13897 - DNA, 20 bp, Campylobacter curvus
ttgcggtgtgctttaggtgg

SEQ ID NO: 13898 - DNA, 20 bp, Eschericchia vulneris
cgacagatccctagtctggt

SEQ ID NO: 13899 - DNA, 20 bp, Prevotella corporis
gttgcccacgcgtgggtttt

SEQ ID NO: 13900 - DNA, 20 bp, Weissella paramesenteroides
tttaactgatctgacgagct

SEQ ID NO: 13901 - DNA, 20 bp, Streptococcus macacae
cggtctggaaagtcagtagt

SEQ ID NO: 13902 - DNA, 20 bp, Clostridium clostridiiforme
ggacttgtccgaaagagagg

SEQ ID NO: 13903 - DNA, 20 bp, Bacteroides distasonis
aggggccccgcatggggata

SEQ ID NO: 13904 - DNA, 30 bp, Clostridium clostridiiforme
ggcgagactgccatcgacaagatggaggaa

SEQ ID NO: 13905 - DNA, 20 bp, Citrobacter youngae
ctcgcagaagcaagcaccgg

SEQ ID NO: 13906 - DNA, 20 bp, Clostridium clostridiiforme
agtcgtctgtcaaaagccga

SEQ ID NO: 13907 - DNA, 20 bp, Alloiococcus otitis
tggggaaatgaaaggtggct

SEQ ID NO: 13908 - DNA, 20 bp, Bacteroides ureolyticus
gtggaatcagtaactggggt

SEQ ID NO: 13909 - DNA, 20 bp, Dolosicoccus paucivorans
aagcaacgtcgcgagaccaa

SEQ ID NO: 13910 - DNA, 20 bp, Corynebacterium mycetoides
ggcgtgcttatacacatgca

SEQ ID NO: 13911 - DNA, 20 bp, Rahnella aquatilis
gtaacaggtaaccgtagggg

SEQ ID NO: 13912 - DNA, 20 bp, Anaerococcus prevotii
ggcggggtctagagatagac

SEQ ID NO: 13913 - DNA, 20 bp, Brevibacillus centrosporus
aaagccgggttttgggctgt

SEQ ID NO: 13914 - DNA, 20 bp, Citrobacter freundii
cgtaaaccaagggtaaaccg

SEQ ID NO: 13915 - DNA, 20 bp, Clostridium innocuum
cgaagtttcaaggaagcttg

SEQ ID NO: 13916 - DNA, 20 bp, Corynebacterium group ANF
gcactagatgaggcgagaga

SEQ ID NO: 13917 - DNA, 20 bp, Arcanobacterium haemolyticum
ttgcgggggttggattagtg

SEQ ID NO: 13918 - DNA, 20 bp, Prevotella melaninogenica
gccgggtcccagttcgggac

SEQ ID NO: 13919 - DNA, 20 bp, Vibrio hollisae
cgtactgaggtagaaagtgg

SEQ ID NO: 13920 - DNA, 20 bp, Sphingobacterium multivorum
acagactggctgggccaaca

SEQ ID NO: 13921 - DNA, 20 bp, Cardiobacterium hominis
atcatggctcagattgagac

SEQ ID NO: 13922 - DNA, 20 bp, Streptococcus ratti
acatgttagacgcttgaaag

SEQ ID NO: 13923 - DNA, 20 bp, Bacteroides distasonis
ggccccgcatggggatattt

SEQ ID NO: 13924 - DNA, 30 bp, Eremococcus coleocola
gagatagagtttctcttcggagcatagaga

SEQ ID NO: 13925 - DNA, 30 bp, Myroides odoratimimus
gttaccactcgcgttaaggcggggactcta

SEQ ID NO: 13926 - DNA, 20 bp, Anaerococcus prevotii
ctagagatagactcttattg

SEQ ID NO: 13927 - DNA, 20 bp, Propionibacterium propionicus
gctttcaattgtgacgaagc

SEQ ID NO: 13928 - DNA, 20 bp, Paenibacillus alvei
ttgcacttctgagacttagc

SEQ ID NO: 13929 - DNA, 20 bp, Leptotrichia buccalis
tgcaaggcggtaacgccaag

SEQ ID NO: 13930 - DNA, 20 bp, Clostridium bifermentans
tcatggctcaggatgaagcg

SEQ ID NO: 13931 - DNA, 20 bp, Listeria welshimeri
ccttcggggacaaagtgcac

SEQ ID NO: 13932 - DNA, 20 bp, Bacillus schlegellii
ggggcgacccgctttaggag

SEQ ID NO: 13933 - DNA, 20 bp, Anaerococcus tetradius
tagtcaatcgcatggtagac

SEQ ID NO: 13934 - DNA, 20 bp, Eschericchia vulneris
cggctcacctaggcgacaga

SEQ ID NO: 13935 - DNA, 20 bp, Bacillus schlegellii
acccgctttaggaggggcct

SEQ ID NO: 13936 - DNA, 20 bp, Vibrio mimicus
gtcaacacggtagcgctagg

SEQ ID NO: 13937 - DNA, 20 bp, Paenibacillus azotofixans
agaacgtcctcaagagtaac

SEQ ID NO: 13938 - DNA, 20 bp, Anaerococcus tetradius
aagacttcggtctactgtat

SEQ ID NO: 13939 - DNA, 20 bp, Clostridium clostridiiforme
ctctcaaagccggaggccta

SEQ ID NO: 13940 - DNA, 20 bp, Sporosarcina pasteurii
cgccgctaacaaaggaagaa

SEQ ID NO: 13941 - DNA, 30 bp, Corynebacterium group ANF
aatactttttatcacatggtaagaagatga

SEQ ID NO: 13942 - DNA, 20 bp, Bacillus licheniformis
tgaccggcagggttcaatca

SEQ ID NO: 13943 - DNA, 20 bp, Leptotrichia buccalis
tgtcagactgacgcatgtca

SEQ ID NO: 13944 - DNA, 20 bp, Fusobacterium necrogenes
agatgccttcgtgccccttc

SEQ ID NO: 13945 - DNA, 20 bp, Streptococcus dysgalactiae
cttgcaccggcccaaggagt

SEQ ID NO: 13946 - DNA, 20 bp, Streptococcus iniae
gtgcttgcactaatccaaag

SEQ ID NO: 13947 - DNA, 20 bp, Alloiococcus otitis
atgctggggaaatgaaaggt

SEQ ID NO: 13948 - DNA, 20 bp, Prevotella loescheii
attcggagacgatgaggccc

SEQ ID NO: 13949 - DNA, 20 bp, Fusobacterium necrogenes
ttcgtgccccttcgggggaa

SEQ ID NO: 13950 - DNA, 20 bp, Enterobacter gergoviae
acgcgttaaggtagccagcc

SEQ ID NO: 13951 - DNA, 20 bp, Bacteroides thetaiotaomicron
ggggtactgaagtagtaccg

SEQ ID NO: 13952 - DNA, 20 bp, Clostridium clostridiiforme
acttgtgtcctatcaggcag

SEQ ID NO: 13953 - DNA, 20 bp, Stenotrophomonas maltophilia
tgggttgcaacaagaagtag

SEQ ID NO: 13954 - DNA, 20 bp, Streptococcus equinus
ccgcctaagggggatagatg

SEQ ID NO: 13955 - DNA, 20 bp, Clostridium clostridiiforme
gatccgcctaaagagtgtcc

SEQ ID NO: 13956 - DNA, 20 bp, Clostridium clostridiiforme
cctattgccggttgctacca

SEQ ID NO: 13957 - DNA, 20 bp, Sphingobacterium multivorum
tcggggctatcacacgtgct

SEQ ID NO: 13958 - DNA, 30 bp, Pediococcus parvulus
caaaattaaccgcatggttgatttttaaaa

SEQ ID NO: 13959 - DNA, 20 bp, Streptococcus infantarius
aagctaagttttcagcgttc

SEQ ID NO: 13960 - DNA, 20 bp, Bacteroides capilosus
gagagctcatgacagaggat

SEQ ID NO: 13961 - DNA, 20 bp, Bacteroides uniformis
ggtaacaactggcgattggg

SEQ ID NO: 13962 - DNA, 20 bp, Myroides odoratimimus
gcagagcttgaatagtatgg

SEQ ID NO: 13963 - DNA, 20 bp, Enterobacter amnigenus
agtagcacagagaggcttgt

SEQ ID NO: 13964 - DNA, 20 bp, Prevotella melaninogenica
agaggttctgatccataggg

SEQ ID NO: 13965 - DNA, 30 bp, Pseudomonas mendocina
ttgggaggaagggctgctggttaataccct

SEQ ID NO: 13966 - DNA, 20 bp, Propionibacterium avidum
atgggctcttgcttgttagg

SEQ ID NO: 13967 - DNA, 20 bp, Salmonella paratyphi
gtaggtagctaaccttcggg

SEQ ID NO: 13968 - DNA, 20 bp, Stenotrophomonas maltophilia
agaggcttgtctctctgggt

SEQ ID NO: 13969 - DNA, 20 bp, Myroides odoratimimus
ggttactacgtatttattga

SEQ ID NO: 13970 - DNA, 30 bp, Porphyromonas endodontalis
ggggcgcttaagggtaataccagtgactgg

SEQ ID NO: 13971 - DNA, 20 bp, Leptotrichia buccalis
aacgctgacatgtaatgctt

SEQ ID NO: 13972 - DNA, 20 bp, Myroides odoratimimus
tagttaccactcgcgttaag

SEQ ID NO: 13973 - DNA, 20 bp, Brevibacterium casei
cgtcccgtcaagtcacgaaa

SEQ ID NO: 13974 - DNA, 20 bp, Prevotella melaninogenica
caggtaagaggttctgatcc

SEQ ID NO: 13975 - DNA, 30 bp, Eggerthella lenta
aaacgatggatactaggtgtggggggctcc

SEQ ID NO: 13976 - DNA, 20 bp, Bacillus coagulans
agcggacttgttagaagctt

SEQ ID NO: 13977 - DNA, 20 bp, Clostridium innocuum
ataggtatacagagcgcatg

SEQ ID NO: 13978 - DNA, 20 bp, Staphylococcus epidermidis
gcgtgcgtgccctaatacat

SEQ ID NO: 13979 - DNA, 20 bp, Geobacillus thermoglucosidasius
atccccaaaaacccgctctc

SEQ ID NO: 13980 - DNA, 20 bp, Micrococcus luteus
gggagccgcgagggggggac

SEQ ID NO: 13981 - DNA, 20 bp, Streptococcus infantarius
tctcagctccctagtgtgcg

SEQ ID NO: 13982 - DNA, 20 bp, Proteus mirabilis
cgtacaaggcaaccgtcagg

SEQ ID NO: 13983 - DNA, 20 bp, Campylobacter curvus
tatagggtttctcgctatgg

SEQ ID NO: 13984 - DNA, 20 bp, Bacteroides vulgatus
tatgcatacccgtttgcatg

SEQ ID NO: 13985 - DNA, 20 bp, Vibrio alginolyticus
aaagaagtaggtagttaacc

SEQ ID NO: 13986 - DNA, 20 bp, Finegoldia magna
taaatgtccggggactctaa

SEQ ID NO: 13987 - DNA, 20 bp, Bacillus mycoides
gcgcgaaattgaaaggcggc

SEQ ID NO: 13988 - DNA, 20 bp, Campylobacter curvus
caaagacggactttgttcgt

SEQ ID NO: 13989 - DNA, 20 bp, Enterobacter amnigenus
gagtagcacagagaggcttg

SEQ ID NO: 13990 - DNA, 20 bp, Haemophilus segnis
aactttaggtttggcgcccg

SEQ ID NO: 13991 - DNA, 20 bp, Eubacterium moniliforme
ttgtcctatgggacgaaaaa

SEQ ID NO: 13992 - DNA, 20 bp, Streptococcus urinalis
tggaaagtctacttcgtgac

SEQ ID NO: 13993 - DNA, 30 bp, Bacteroides capillosus
ctcggagtggggaataacagtccgaaagga

SEQ ID NO: 13994 - DNA, 20 bp, Brevibacillus thermoruber
gagcggatcctgtttggagc

SEQ ID NO: 13995 - DNA, 30 bp, Corynebacterium coyleae
gtacacgtcatgaaagttggtaacacccga

SEQ ID NO: 13996 - DNA, 20 bp, Staphylococcus schleiferi
ccgtcgaaagtgggacacaa

SEQ ID NO: 13997 - DNA, 30 bp, Bacteroides stercoris
tgctggggactctacccggactgccgtcgt

SEQ ID NO: 13998 - DNA, 20 bp, Propionibacterium avidum
aatcgatgggctcttgcttg

SEQ ID NO: 13999 - DNA, 20 bp, Clostridium clostridiiforme
gagtcgggtgctctcaaagc

SEQ ID NO: 14000 - DNA, 20 bp, Corynebacterium renale
catggctcaggacgaacagc

SEQ ID NO: 14001 - DNA, 20 bp, Corynebacterium pilosum
tagttcccgttgggtattct

SEQ ID NO: 14002 - DNA, 20 bp, Sporosarcina ureae
ccattctcttctggcatgag

SEQ ID NO: 14003 - DNA, 20 bp, Corynebacterium group F1
tcgagtggcgacacgggttg

SEQ ID NO: 14004 - DNA, 20 bp, Corynebacterium pilosum
ccgggtttttccttcttgtg

SEQ ID NO: 14005 - DNA, 20 bp, Sphingobacterium multivorum
ccaggcattcatggccctta

SEQ ID NO: 14006 - DNA, 20 bp, Streptococcus macacae
cgcacctgagagggtgaccg

SEQ ID NO: 14007 - DNA, 30 bp, Clostridium clostridiiforme
cccctgacgggccggtaacgcggcctttcc

SEQ ID NO: 14008 - DNA, 20 bp, Anaerococcus tetradius
ctatgacataaactcttcgc

SEQ ID NO: 14009 - DNA, 20 bp, Brevibacillus brevis
tgtcttcggagcctagcggc

SEQ ID NO: 14010 - DNA, 20 bp, Peptoniphilus asaccharolyticus
cttcggggtgaagtttggaa

SEQ ID NO: 14011 - DNA, 20 bp, Bacteroides capillosus
gtcggtcgtatgcaaatacg

SEQ ID NO: 14012 - DNA, 20 bp, Acinetobacter baumannii
tacaggtagccgtaggggaa

SEQ ID NO: 14013 - DNA, 20 bp, Finegoldia magna
ccgcataaaatcgtagaaac

SEQ ID NO: 14014 - DNA, 20 bp, Finegoldia magna
cgggatttagtagacagaag

SEQ ID NO: 14015 - DNA, 30 bp, Streptococcus macacae
tggagagagtggaaagttctccaattgacg

SEQ ID NO: 14016 - DNA, 20 bp, Anaerococcus prevotii
tgcataaatgatcaaagctc

SEQ ID NO: 14017 - DNA, 20 bp, Dermacoccus nishinomiyaensis
gcgattgggactaagtccgt

SEQ ID NO: 14018 - DNA, 20 bp, Bacteroides uniformis
gtgccatacgagcgcacacc

SEQ ID NO: 14019 - DNA, 20 bp, Pseudomonas fluorescens
ggtagagagatgcttgcatc

SEQ ID NO: 14020 - DNA, 20 bp, Campylobacter curvus
gctccttgtcgcaaagacgg

SEQ ID NO: 14021 - DNA, 20 bp, Sphingobacterium multivorum
ttaaacagactggctgggcc

SEQ ID NO: 14022 - DNA, 20 bp, Bacteroides stercoris
tgactgagctggaaacagtt

SEQ ID NO: 14023 - DNA, 20 bp, Streptococcus acidominimus
gtttactgcatggtaaacat

SEQ ID NO: 14024 - DNA, 20 bp, Bacillus laevolacticus
cgagcggacctatccttcgg

SEQ ID NO: 14025 - DNA, 20 bp, Leptotrichia buccalis
agagctgcaaggcggtaacg

SEQ ID NO: 14026 - DNA, 20 bp, Bacillus niacini
gcgaatcttgaggtgcttgc

SEQ ID NO: 14027 - DNA, 20 bp, Sphingobacterium multivorum
gttcgcatgttcggttgatt

SEQ ID NO: 14028 - DNA, 20 bp, Prevotella loescheii
cttgggtcggtgaccaagcg

SEQ ID NO: 14029 - DNA, 20 bp, Eggerthella lenta
ctaggtgtggggggctccgc

SEQ ID NO: 14030 - DNA, 20 bp, Eremococcus coleocola
ctagggattgacggtaacta

SEQ ID NO: 14031 - DNA, 20 bp, Corynebacterium pilosum
cgttgggtattctggcctgg

SEQ ID NO: 14032 - DNA, 20 bp, Clostridium clostridiiforme
taaagagtgtccggtgagga

SEQ ID NO: 14033 - DNA, 20 bp, Bacteroides capilosus
gacactggctgccaaagatt

SEQ ID NO: 14034 - DNA, 20 bp, Eremococcus coleocola
cacccctagtagtaactggc

SEQ ID NO: 14035 - DNA, 20 bp, Peptoniphilus asaccharolyticus
agtttggaaggattagcggc

SEQ ID NO: 14036 - DNA, 20 bp, Fusobacterium necrogenes
cttcgtgccccttcggggga

SEQ ID NO: 14037 - DNA, 20 bp, Streptococcus equi
acgcacagatgatacgtagc

SEQ ID NO: 14038 - DNA, 20 bp, Campylobacter concisus
tcgtaacagggagccgaccg

SEQ ID NO: 14039 - DNA, 20 bp, Paenibacillus macerans
gcatgagggagttgggaaag

SEQ ID NO: 14040 - DNA, 20 bp, Paenibacillus macerans
tgtggagtaactgccaggag

SEQ ID NO: 14041 - DNA, 20 bp, Helcococcus kunzii
cgcatgatgtaaatgttaaa

SEQ ID NO: 14042 - DNA, 20 bp, Corynebacterium pilosum
ccggattagctttgggaact

SEQ ID NO: 14043 - DNA, 20 bp, Eubacterium moniliforme
gaactgtgagtatacttagt

SEQ ID NO: 14044 - DNA, 20 bp, Microbacterium hominis
gtaatacgatcccgggtctg

SEQ ID NO: 14045 - DNA, 20 bp, Leptotrichia buccalis
gcaaggcggtaacgccaagc

SEQ ID NO: 14046 - DNA, 20 bp, Moraxella atlantae
ggagcttatgggtttctgct

SEQ ID NO: 14047 - DNA, 30 bp, Leuconostoc carnosum
agggaatgaccttagcctgacggtaccata

SEQ ID NO: 14048 - DNA, 20 bp, Bacteroides merdae
cgtcagctcgtgccgtgtag

SEQ ID NO: 14049 - DNA, 20 bp, Bacteroides capillosus
tggagggttgcttgcaacct

SEQ ID NO: 14050 - DNA, 20 bp, Streptococcus acidominimus
agaagaacgttagcgggagt

SEQ ID NO: 14051 - DNA, 30 bp, Streptococcus macacae
gaacgggtgtaagagcggaaagtttacact

SEQ ID NO: 14052 - DNA, 20 bp, Streptococcus peroris
acagctgtttaaaaggtgca

SEQ ID NO: 14053 - DNA, 20 bp, Prevotella denticola
catcaggtagtgctgggcac

SEQ ID NO: 14054 - DNA, 20 bp, Eubacterium moniliforme
cctctgacgcatatagagat

SEQ ID NO: 14055 - DNA, 20 bp, Empedobacter brevis
gcggattaatcagtcagtgg

SEQ ID NO: 14056 - DNA, 20 bp, Pseudoramibacter alactolyticus
tattgacccttcggggggat

SEQ ID NO: 14057 - DNA, 20 bp, Clostridium clostridiiforme
ggaacattcaagcagcggac

SEQ ID NO: 14058 - DNA, 20 bp, Aerococcus viridans
gcataatattttcttccgca

SEQ ID NO: 14059 - DNA, 20 bp, Bacteroides uniformis
agggtaacaactggcgattg

SEQ ID NO: 14060 - DNA, 20 bp, Clostridium clostridiiforme
gcttcaagtcgtctgtcaaa

SEQ ID NO: 14061 - DNA, 20 bp, Finegoldia magna
agcgaataaatgtccgggga

SEQ ID NO: 14062 - DNA, 20 bp, Moellerella wisconsensis
gatactaatactatcagcga

SEQ ID NO: 14063 - DNA, 20 bp, Anaerococcus prevotii
ggggtctagagatagactct

SEQ ID NO: 14064 - DNA, 20 bp, Corynebacterium pseudodiphtheriticum
tgatcatggctcaggaccga

SEQ ID NO: 14065 - DNA, 20 bp, Streptococcus acidominimus
cgttagcgggagtggaaaat

SEQ ID NO: 14066 - DNA, 30 bp, Bacteroides capillosus
gtgaggcccttcggggcgcctacggaggtg

SEQ ID NO: 14067 - DNA, 30 bp, Corynebacterium group ANF
cttcggggtgaaggtagtggatcgagcggc

SEQ ID NO: 14068 - DNA, 30 bp, Eremococcus coleocola
agatggctctgctatcactcaaggatgggc

SEQ ID NO: 14069 - DNA, 20 bp, Bacteroides capillosus
taggcgaacgatctagagat

SEQ ID NO: 14070 - DNA, 20 bp, Clostridium clostridiiforme
tccgcctaaagagtgtccgg

SEQ ID NO: 14071 - DNA, 20 bp, Anaerococcus prevotii
cctatgatatgatagcctcg

SEQ ID NO: 14072 - DNA, 20 bp, Bacteroides thetaiotaomicron
ggccgtaaggcatttgtgaa

SEQ ID NO: 14073 - DNA, 20 bp, Anaerococcus tetradius
tcggtctactgtattacagg

SEQ ID NO: 14074 - DNA, 20 bp, Corynebacterium argentoratense
tgccagcacactttggtggg

SEQ ID NO: 14075 - DNA, 20 bp, Anaerococcus tetradius
ttcttaagacttcggtctac

SEQ ID NO: 14076 - DNA, 20 bp, Lactococcus raffinolactis
ctagttgtttggggctatcc

SEQ ID NO: 14077 - DNA, 20 bp, Haemophilus paraphrophilus
ttgggggttgaactttaagt

SEQ ID NO: 14078 - DNA, 20 bp, Paenibacillus lautus
aaccctgggtcgcacccaaa

SEQ ID NO: 14079 - DNA, 20 bp, Anaerococcus tetradius
aggcttgagagatgaaaggg

SEQ ID NO: 14080 - DNA, 20 bp, Arcanobacterium pyogenes
agcatttttgtgacggtatg

SEQ ID NO: 14081 - DNA, 20 bp, Clostridium clostridiiforme
agtcgggtgctctcaaagcc

SEQ ID NO: 14082 - DNA, 20 bp, Clostridium clostridiiforme
gactagcgatagttccgtgc

SEQ ID NO: 14083 - DNA, 20 bp, Staphylococcus schleiferi
cgttaccatggtatgcccgt

SEQ ID NO: 14084 - DNA, 30 bp, Anaerococcus prevotii
aagtcttgacatattacggcggggtctaga

SEQ ID NO: 14085 - DNA, 20 bp, Kocuria varians
cggttcagagatgttccttc

SEQ ID NO: 14086 - DNA, 20 bp, Psychrobacter phenylpyruvicus
agacaatactaaaaggcggc

SEQ ID NO: 14087 - DNA, 20 bp, Granulicatella adiacens
agagcgaccgggcttgcact

SEQ ID NO: 14088 - DNA, 20 bp, Bacillus laevolacticus
gagattgaccttgcccttcg

SEQ ID NO: 14089 - DNA, 20 bp, Corynebacterium coyleae
aaggcctctgcttgcagagg

SEQ ID NO: 14090 - DNA, 20 bp, Gemella morbillorum
tataactattggacgcgata

SEQ ID NO: 14091 - DNA, 30 bp, Porphyromonas endodontalis
ttgaaactgatatgctagagaggagacgag

SEQ ID NO: 14092 - DNA, 20 bp, Streptococcus mutans
gacgcaaggaaacacactgt

SEQ ID NO: 14093 - DNA, 20 bp, Eubacterium moniliforme
gattcattcgatgcaggatg

SEQ ID NO: 14094 - DNA, 20 bp, Proteus mirabilis
tcgtacaaggcaaccgtcag

SEQ ID NO: 14095 - DNA, 20 bp, Sphingobacterium multivorum
gcccttacgcttcggggcta

SEQ ID NO: 14096 - DNA, 20 bp, Bacillus laevolacticus
ggtagctaagccggatagct

SEQ ID NO: 14097 - DNA, 20 bp, Anaerococcus tetradius
tcttaagacttcggtctact

SEQ ID NO: 14098 - DNA, 20 bp, Campylobacter curvus
gtgggtcaagggagcgtagc

SEQ ID NO: 14099 - DNA, 30 bp, Citrobacter freundii
gttgtggttaataaccgtggtgattgacgt

SEQ ID NO: 14100 - DNA, 20 bp, Bacteroides thetaiotaomicron
gggtactgaagtagtaccgc

SEQ ID NO: 14101 - DNA, 20 bp, Clostridium clostridiiforme
aaggcggtttgctggctgca

SEQ ID NO: 14102 - DNA, 20 bp, Providencia alcalifaciens
gcaataatctctaaggagca

SEQ ID NO: 14103 - DNA, 20 bp, Staphylococcus succinus
gatcaaactactatctggtc

SEQ ID NO: 14104 - DNA, 20 bp, Clostridium clostridiiforme
tgcgcttttggagagacttg

SEQ ID NO: 14105 - DNA, 20 bp, Pediococcus dextrinicus
tgcaccaaggagatttaaaa

SEQ ID NO: 14106 - DNA, 20 bp, Streptococcus urinalis
agtggaaagtctacttcgtg

SEQ ID NO: 14107 - DNA, 30 bp, Streptococcus urinalis
tggaaagtctacttcgtgacggtaactaac

SEQ ID NO: 14108 - DNA, 20 bp, Serratia rubidaea
gtgtcttaatacggcattac

SEQ ID NO: 14109 - DNA, 30 bp, Peptoniphilus asaccharolyticus
acagattccttcggggtgaagatgaaatgg

SEQ ID NO: 14110 - DNA, 20 bp, Bacillus niacini
aaagttgaaagtcggtttac

SEQ ID NO: 14111 - DNA, 20 bp, Stenotrophomonas maltophilia
gtgactacaatggcaggaga

SEQ ID NO: 14112 - DNA, 20 bp, Corynebacterium pilosum
tgccgaccggttagttcccg

SEQ ID NO: 14113 - DNA, 20 bp, Enterobacter hormaechei
catgaatcacaaagtgggta

SEQ ID NO: 14114 - DNA, 30 bp, Brevibacterium linens
ggatatgacgaccgaaggcatctttggttg

SEQ ID NO: 14115 - DNA, 20 bp, Bacteroides distasonis
aataaagtgtgggacgtgtc

SEQ ID NO: 14116 - DNA, 20 bp, Propionibacterium avidum
cctaacctgtgtgggggtag

SEQ ID NO: 14117 - DNA, 20 bp, Bacteroides capilosus
ccgcataatgcagctgagtc

SEQ ID NO: 14118 - DNA, 20 bp, Paenibacillus azotofixans
ctctcattaacttagcggcg

SEQ ID NO: 14119 - DNA, 20 bp, Sphingobacterium multivorum
acgggatccatcggagagct

SEQ ID NO: 14120 - DNA, 20 bp, Streptococcus criceti
aagaacgttgagtagagtgg

SEQ ID NO: 14121 - DNA, 20 bp, Corynebacterium pilosum
gccttccagggtctcccaat

SEQ ID NO: 14122 - DNA, 20 bp, Providencia rustigianii
gatgctaatatcgtcaacga

SEQ ID NO: 14123 - DNA, 20 bp, Streptococcus macacae
cgcataatatctctctaagc

SEQ ID NO: 14124 - DNA, 20 bp, Anaerobiospirillum succiniciproducens
aacgataccgggaggggagg

SEQ ID NO: 14125 - DNA, 20 bp, Streptococcus infantarius
ttttttttggtaagttaccg

SEQ ID NO: 14126 - DNA, 30 bp, Providencia stuartii
gtcgggaggaaggcgttgatgttaatacca

SEQ ID NO: 14127 - DNA, 20 bp, Gemella morbillorum
gcacgcgtaggtaccctgcc

SEQ ID NO: 14128 - DNA, 20 bp, Proteus mirabilis
tacaaggcaaccgtcagggg

SEQ ID NO: 14129 - DNA, 20 bp, Bacteroides merdae
acgtagtctgaccggagtgg

SEQ ID NO: 14130 - DNA, 20 bp, Finegoldia magna
cacatgttttaacggtcaaa

SEQ ID NO: 14131 - DNA, 20 bp, Brevibacillus brevis
gtcttcggagcctagcggcg

SEQ ID NO: 14132 - DNA, 30 bp, Dolosicoccus paucivorans
gaagaacagcgagtagagtaactgttactc

SEQ ID NO: 14133 - DNA, 20 bp, Campylobacter concisus
ggataggacgatggttggat

SEQ ID NO: 14134 - DNA, 20 bp, Clostridium clostridiiforme
gtcgtctgtcaaaagccgag

SEQ ID NO: 14135 - DNA, 20 bp, Bacillus laevolacticus
tggccggcgtgccctaatac

SEQ ID NO: 14136 - DNA, 20 bp, Eschericchia vulneris
acagatccctagtctggtct

SEQ ID NO: 14137 - DNA, 20 bp, Bacillus coagulans
cgcatgagcggatgttaaaa

SEQ ID NO: 14138 - DNA, 20 bp, Streptococcus constellatus
cacaggatgcccgtagttta

SEQ ID NO: 14139 - DNA, 30 bp, Bacillus niacini
atgagggaaagttgaaagtcggtttacgct

SEQ ID NO: 14140 - DNA, 20 bp, Propionibacterium avidum
gaatcgatgggctcttgctt

SEQ ID NO: 14141 - DNA, 20 bp, Haemophilus paraphrophilus
gacgggccaggttagaggtg

SEQ ID NO: 14142 - DNA, 20 bp, Clostridium clostridiiforme
aatcatttaaccgggatccc

SEQ ID NO: 14143 - DNA, 20 bp, Eubacterium moniliforme
tttgggaagccctcgggtgg

SEQ ID NO: 14144 - DNA, 20 bp, Citrobacter freundii
gggataactactggaaaacg

SEQ ID NO: 14145 - DNA, 20 bp, Brevibacterium casei
tcaaaatcatcatgcccttt

SEQ ID NO: 14146 - DNA, 30 bp, Gemella morbillorum
agcggggtataactattggacgcgatagct

SEQ ID NO: 14147 - DNA, 20 bp, Bacteroides capillosus
ataccgtatgatatcctatg

SEQ ID NO: 14148 - DNA, 20 bp, Streptococcus macacae
ctgatttcacgggagcttgc

SEQ ID NO: 14149 - DNA, 30 bp, Eubacterium moniliforme
tcgggttgtaaacttttgtcctatgggacg

SEQ ID NO: 14150 - DNA, 20 bp, Lactococcus raffinolactis
tagttgtttggggctatcca

SEQ ID NO: 14151 - DNA, 20 bp, Staphylococcus epidermidis
tggcgtgcgtgccctaatac

SEQ ID NO: 14152 - DNA, 20 bp, Bacillus schlegellii
tttgggtggaagcctgtctc

SEQ ID NO: 14153 - DNA, 20 bp, Escherichia hermannii
caactgtggtgacgacgtaa

SEQ ID NO: 14154 - DNA, 20 bp, Globicatella sanguinis
ggcctaaccaataggaggga

SEQ ID NO: 14155 - DNA, 20 bp, Citrobacter freundii
gtaaaccaagggtaaaccgt

SEQ ID NO: 14156 - DNA, 20 bp, Anaerococcus prevotii
gcataaatgatcaaagctcc

SEQ ID NO: 14157 - DNA, 20 bp, Campylobacter concisus
gtcaaagggagctgcgaagg

SEQ ID NO: 14158 - DNA, 20 bp, Mannheimia haemolytica
agccccttggaaatgtactg

SEQ ID NO: 14159 - DNA, 20 bp, Bacteroides uniformis
tacgagcgcacacccttatc

SEQ ID NO: 14160 - DNA, 20 bp, Haemophilus paraphrophilus
acgacgggccaggttagagg

SEQ ID NO: 14161 - DNA, 20 bp, Paenibacillus amylolyticus
atcctctgatgcttagcggc

SEQ ID NO: 14162 - DNA, 20 bp, Myroides odoratimimus
tactgcagagcttgaatagt

SEQ ID NO: 14163 - DNA, 20 bp, Streptococcus macacae
ccacgagatcggtgagtcgc

SEQ ID NO: 14164 - DNA, 20 bp, Neisseria meningitidis
gtcagtgttgtcccaggagg

SEQ ID NO: 14165 - DNA, 30 bp, Pediococcus dextrinicus
ttttaattgaaagacggcctttggctgtca

SEQ ID NO: 14166 - DNA, 20 bp, Streptococcus macacae
gattggaaacgataggtaat

SEQ ID NO: 14167 - DNA, 20 bp, Neisseria meningitidis
ctcctgggacaacactgacg

SEQ ID NO: 14168 - DNA, 20 bp, Anaerococcus prevotii
gagcaaaccgtaaggaagca

SEQ ID NO: 14169 - DNA, 20 bp, Bacillus mycoides
cggataacattttgcgctgc

SEQ ID NO: 14170 - DNA, 20 bp, Sporosarcina pasteurii
gtataggagtaactgcctgt

SEQ ID NO: 14171 - DNA, 20 bp, Staphylococcus schleiferi
ggaaagtgccggtggatcac

SEQ ID NO: 14172 - DNA, 20 bp, Paenibacillus alvei
gagtcccttcttcggaacat

SEQ ID NO: 14173 - DNA, 20 bp, Anaerobiospirillum succiniciproducens
atcagaatgttgcgggaata

SEQ ID NO: 14174 - DNA, 20 bp, Vibrio harveyi
cataagaagtaggtagttaa

SEQ ID NO: 14175 - DNA, 20 bp, Eschericchia vulneris
gtccagtactcctactggga

SEQ ID NO: 14176 - DNA, 20 bp, Prevotella oralis
cggccttttttggtcggtgg

SEQ ID NO: 14177 - DNA, 20 bp, Haemophilus paraphrophilus
gttggatccatggctcagat

SEQ ID NO: 14178 - DNA, 20 bp, Pseudomonas mendocina
agagtgcccccccgacgtgc

SEQ ID NO: 14179 - DNA, 20 bp, Unknown Organism
  oligonucleotide from CDC group EO-2
aaggtcggaggcgagggact

SEQ ID NO: 14180 - DNA, 20 bp, Paenibacillus alvei
tagagatagagtcccttctt

SEQ ID NO: 14181 - DNA, 20 bp, Paenibacillus macerans
agttcgcactggaaactggt

SEQ ID NO: 14182 - DNA, 20 bp, Neisseria elongata
taatacccgtttctgctgac

SEQ ID NO: 14183 - DNA, 20 bp, Eschericchia vulneris
ccagtactcctactgggagg

SEQ ID NO: 14184 - DNA, 20 bp, Bacteroides uniformis
gtcggcttaagtgccatacg

SEQ ID NO: 14185 - DNA, 20 bp, Sporosarcina ureae
ataatcccattctcttctgg

SEQ ID NO: 14186 - DNA, 20 bp, Bacteroides uniformis
ccctagggtaacaactggcg

SEQ ID NO: 14187 - DNA, 20 bp, Sporosarcina ureae
taactgtcctgtaccttgac

SEQ ID NO: 14188 - DNA, 20 bp, Streptococcus ferus
tgttaaggaagaacggtaat

SEQ ID NO: 14189 - DNA, 20 bp, Bacteroides thetaiotaomicron
agggtaagattggtattggg

SEQ ID NO: 14190 - DNA, 30 bp, Alloiococcus otitis
gcataggttttcccagtgcatgctggggaa

SEQ ID NO: 14191 - DNA, 20 bp, Moellerella wisconsensis
gatattaatactatcagcga

SEQ ID NO: 14192 - DNA, 20 bp, Clostridium innocuum
agtttcaaggaagcttgctt

SEQ ID NO: 14193 - DNA, 20 bp, Sphingobacterium multivorum
gtaaggtggggactttaaac

SEQ ID NO: 14194 - DNA, 20 bp, Brevibacillus centrosporus
caaaagcttgaaagccgggt

SEQ ID NO: 14195 - DNA, 20 bp, Finegoldia magna
taccagcgaataaatgtccg

SEQ ID NO: 14196 - DNA, 20 bp, Weeksella virosa
aataaacctattcacgagct

SEQ ID NO: 14197 - DNA, 20 bp, Citrobacter amalonaticus
gggaggaagggtgaatggtt

SEQ ID NO: 14198 - DNA, 20 bp, Brevibacillus centrosporus
aaagcttgaaagccgggttt

SEQ ID NO: 14199 - DNA, 20 bp, Cedecea lapagei
aggcctgcgcgacagcgttc

SEQ ID NO: 14200 - DNA, 30 bp, Bacillus niacini
ttgaggtgcttgcacctcttggttagcggc

SEQ ID NO: 14201 - DNA, 20 bp, Bacteroides stercoris
gcttaaattgcaactgactg

SEQ ID NO: 14202 - DNA, 20 bp, Streptococcus macacae
acatgcaagtgggacgcact

SEQ ID NO: 14203 - DNA, 20 bp, Prevotella loescheii
cggtggataactgcttcatg

SEQ ID NO: 14204 - DNA, 20 bp, Delftia acidovorans
gcttacccggcggggttcgt

SEQ ID NO: 14205 - DNA, 20 bp, Veillonella atypica
cgcgcaggcggatcagtcta

SEQ ID NO: 14206 - DNA, 20 bp, Neisseria flavescens
ctgacgagcatgctttacac

SEQ ID NO: 14207 - DNA, 20 bp, Nocardia asteroides
aagagagtggacgttactcg

SEQ ID NO: 14208 - DNA, 20 bp, Psychrobacter phenylpyruvicus
gcttttagctgtcgctagag

SEQ ID NO: 14209 - DNA, 20 bp, Anaerococcus prevotii
gcgagcaaaccgtaaggaag

SEQ ID NO: 14210 - DNA, 20 bp, Unknown Organism
  oligonucleotide from CDC group EO-2
aatgtgccacttctactacg

SEQ ID NO: 14211 - DNA, 20 bp, Streptococcus macacae
tccacgagatcggtgagtcg

SEQ ID NO: 14212 - DNA, 20 bp, Anaerococcus tetradius
tcggaatgaaaataagcgga

SEQ ID NO: 14213 - DNA, 20 bp, Bacillus mycoides
accggataacattttgcgct

SEQ ID NO: 14214 - DNA, 20 bp, Actinomyces radingae
acatgcgccctgagcgccta

SEQ ID NO: 14215 - DNA, 20 bp, Corynebacterium pilosum
attctggcctggtcttccgg

SEQ ID NO: 14216 - DNA, 20 bp, Providencia stuartii
attgagcagagatgctgaag

SEQ ID NO: 14217 - DNA, 20 bp, Eschericchia vulneris
ctgagtacacggtccagtac

SEQ ID NO: 14218 - DNA, 20 bp, Alloiococcus otitis
aaatgaaaggtggctctgct

SEQ ID NO: 14219 - DNA, 20 bp, Staphylococcus succinus
ccatgatcaaactactatct

SEQ ID NO: 14220 - DNA, 20 bp, Eremococcus coleocola
aagcactgttattagccaag

SEQ ID NO: 14221 - DNA, 20 bp, Unknown Organism
  oligonucleotide from CDC group EF-4B
cgtttgaaactgggtgacta

SEQ ID NO: 14222 - DNA, 20 bp, Vibrio cholerae
aggtgatccaccgccaggtt

SEQ ID NO: 14223 - DNA, 20 bp, Streptococcus ferus
gagtggaaagtccattacgt

SEQ ID NO: 14224 - DNA, 20 bp, Eggerthella lenta
ccgcaggggcggaggcgtcg

SEQ ID NO: 14225 - DNA, 20 bp, Anaerococcus prevotii
cgatgaagcttaaatgatct

SEQ ID NO: 14226 - DNA, 20 bp, Facklamia hominis
tgttcccggcaaagttagtg

SEQ ID NO: 14227 - DNA, 20 bp, Bordetella trematum
agctaatacctggcgctaat

SEQ ID NO: 14228 - DNA, 20 bp, Pseudomonas mendocina
gctgctggttaataccctgc

SEQ ID NO: 14229 - DNA, 20 bp, Clostridium clostridiiforme
tgggactagcgatagttccg

SEQ ID NO: 14230 - DNA, 20 bp, Serratia rubidaea
cttaatacggcattacattg

SEQ ID NO: 14231 - DNA, 30 bp, Citrobacter amalonaticus
gcggggaggaagggtgaatggttaataacc

SEQ ID NO: 14232 - DNA, 20 bp, Streptococcus ferus
ctgaagtgaaaggctatggc

SEQ ID NO: 14233 - DNA, 20 bp, Shewanella putrefaciens
tctcgcttcagagatagctt

SEQ ID NO: 14234 - DNA, 20 bp, Staphylococcus schleiferi
tcggaaagtgccggtggatc

SEQ ID NO: 14235 - DNA, 20 bp, Clostridium clostridiiforme
gagagacttatgttgattgg

SEQ ID NO: 14236 - DNA, 20 bp, Clostridium clostridiiforme
ccatccgagtcgggtgctct

SEQ ID NO: 14237 - DNA, 20 bp, Bacteroides stercoris
attgcaactgactgagctgg

SEQ ID NO: 14238 - DNA, 20 bp, Bacillus coagulans
ttctatcaagttagcggcgg

SEQ ID NO: 14239 - DNA, 20 bp, Corynebacterium ulcerans
tttcccttgtggttgtatac

SEQ ID NO: 14240 - DNA, 20 bp, Oligella urethralis
aagaggtcttacgatccccc

SEQ ID NO: 14241 - DNA, 30 bp, Bacteroides stercoris
cagttctttcttcggacagttgtgaaggtg

SEQ ID NO: 14242 - DNA, 30 bp, Bacteroides ovatus
gctacctggcgacagtgatgctaatcccaa

SEQ ID NO: 14243 - DNA, 20 bp, Citrobacter amalonaticus
tgaacgctgttggcaggcct

SEQ ID NO: 14244 - DNA, 20 bp, Unknown Organism
  oligonucleotide from CDC group EF-4B
taccgcatacactttgagaa

SEQ ID NO: 14245 - DNA, 20 bp, Citrobacter koseri
aagttttcagagatgagcaa

SEQ ID NO: 14246 - DNA, 20 bp, Granulicatella adiacens
gaacgagagcgaccgggctt

SEQ ID NO: 14247 - DNA, 20 bp, Bacillus laevolacticus
ctctgaccgcgctacagaga

SEQ ID NO: 14248 - DNA, 20 bp, Bacillus niacini
tcctctcatgagggaaagtt

SEQ ID NO: 14249 - DNA, 20 bp, Bacteroides uniformis
cgcaggagcgccctagggta

SEQ ID NO: 14250 - DNA, 20 bp, Streptococcus criceti
gtgcaatggcaccactatca

SEQ ID NO: 14251 - DNA, 20 bp, Paenibacillus macerans
aaccacagttcgcactggaa

SEQ ID NO: 14252 - DNA, 20 bp, Prevotella disiens
tttgtttgggaataatcgac

SEQ ID NO: 14253 - DNA, 20 bp, Micrococcus luteus
agccgcgagggggggaccag

SEQ ID NO: 14254 - DNA, 20 bp, Eubacterium moniliforme
ctgtcgaaggtgagatcaat

SEQ ID NO: 14255 - DNA, 20 bp, Sphingobacterium multivorum
ctgggccaacacgagaggaa

SEQ ID NO: 14256 - DNA, 30 bp, Pseudomonas mendocina
gcccccccgacgtgctggtaactaaggaca

SEQ ID NO: 14257 - DNA, 20 bp, Citrobacter freundii
gttagcagagatgctaacgt

SEQ ID NO: 14258 - DNA, 20 bp, Clostridium clostridiiforme
gggtgctctcaaagccggag

SEQ ID NO: 14259 - DNA, 20 bp, Brevibacillus brevis
gatgataggggagaagtcgt

SEQ ID NO: 14260 - DNA, 20 bp, Cedecea lapagei
tgcgcgacagcgttcaatct

SEQ ID NO: 14261 - DNA, 20 bp, Bacteroides stercoris
catgggatgattattaaaga

SEQ ID NO: 14262 - DNA, 20 bp, Streptococcus urinalis
aaagtctacttcgtgacggt

SEQ ID NO: 14263 - DNA, 20 bp, Brevibacillus brevis
ccggaaggcagccagccgcc

SEQ ID NO: 14264 - DNA, 20 bp, Anaerococcus tetradius
ttcggaatgaaaataagcgg

SEQ ID NO: 14265 - DNA, 20 bp, Prevotella intermedia
gccgtagcctttcactttct

SEQ ID NO: 14266 - DNA, 20 bp, Paenibacillus validus
gcggccctttccttcgggat

SEQ ID NO: 14267 - DNA, 20 bp, Bacteroides ovatus
ggcagctcactagactgtca

SEQ ID NO: 14268 - DNA, 20 bp, Bacteroides uniformis
tgggggactctgtcgagact

SEQ ID NO: 14269 - DNA, 20 bp, Bacillus smithii
gaagtcgtaacaaaaagccg

SEQ ID NO: 14270 - DNA, 20 bp, Corynebacterium group ANF
tgtggtgtggtgtcgaaggt

SEQ ID NO: 14271 - DNA, 20 bp, Globicatella sanguinis
tctcttgcatatcttagaga

SEQ ID NO: 14272 - DNA, 20 bp, Leuconostoc pseudomesenteroides
acttagtgtcgcatgatacg

SEQ ID NO: 14273 - DNA, 20 bp, Bacteroides merdae
atacagattgatggcgaccg

SEQ ID NO: 14274 - DNA, 20 bp, Staphylococcus schleiferi
agcccgtcgaaagtgggaca

SEQ ID NO: 14275 - DNA, 30 bp, Dolosicoccus paucivorans
aataccgcataaatcaatgattcgcatgtt

SEQ ID NO: 14276 - DNA, 20 bp, Finegoldia magna
gtttaataagtcgaatgtta

SEQ ID NO: 14277 - DNA, 20 bp, Empedobacter brevis
taggacgactgccttatggg

SEQ ID NO: 14278 - DNA, 20 bp, Anaerococcus tetradius
aagagcttatcaaagattta

SEQ ID NO: 14279 - DNA, 20 bp, Citrobacter amalonaticus
ggggaggaagggtgaatggt

SEQ ID NO: 14280 - DNA, 20 bp, Paenibacillus macerans
ctagggtgggcactctaacg

SEQ ID NO: 14281 - DNA, 20 bp, Yersinia frederiksenii
tttcacttaatacgtgaagt

SEQ ID NO: 14282 - DNA, 30 bp, Dolosicoccus paucivorans
caacccctatcgtcagttgccagcattcag

SEQ ID NO: 14283 - DNA, 20 bp, Bacteroides thetaiotaomicron
aaaccaaagctggcgaccgg

SEQ ID NO: 14284 - DNA, 20 bp, Peptoniphilus indolicus
gtcggaggatttcggtgccg

SEQ ID NO: 14285 - DNA, 20 bp, Streptococcus macacae
ggtgtaagagcggaaagttt

SEQ ID NO: 14286 - DNA, 20 bp, Capnocytophaga sp.
caggggaagaataaggagta

SEQ ID NO: 14287 - DNA, 30 bp, Globicatella sanguinis
gagataagagaaacccttcggggcaagaag

SEQ ID NO: 14288 - DNA, 20 bp, Bacillus coagulans
ataacactttcgctcgcatg

SEQ ID NO: 14289 - DNA, 30 bp, Bacteroides capillosus
aatggtggttaacagagggaagcaatgccg

SEQ ID NO: 14290 - DNA, 20 bp, Enterobacter amnigenus
ttgttttcgggtgacgagcg

SEQ ID NO: 14291 - DNA, 20 bp, Bacteroides merdae
accggagtggaaacactcct

SEQ ID NO: 14292 - DNA, 20 bp, Paenibacillus macerans
acttagagatggacctgcgg

SEQ ID NO: 14293 - DNA, 20 bp, Prevotella loescheii
cggaagtgcggtggataact

SEQ ID NO: 14294 - DNA, 30 bp, Fusobacterium nucleatum
tgaatgctaatacctgatattatgatttta

SEQ ID NO: 14295 - DNA, 30 bp, Staphylococcus schleiferi
caagtcgagcgaacggacaggagcttgctc

SEQ ID NO: 14296 - DNA, 20 bp, Streptococcus acidominimus
ttaatttaaaaggagcaaca

SEQ ID NO: 14297 - DNA, 20 bp, Unknown Organism
  oligonucleotide from CDC group VB-3
ggacggttacccggagtgat

SEQ ID NO: 14298 - DNA, 20 bp, Enterobacter amnigenus
gaagcgagtagcacagagag

SEQ ID NO: 14299 - DNA, 20 bp, Stenotrophomonas maltophilia
gccagggctacacacgtgac

SEQ ID NO: 14300 - DNA, 20 bp, Sphingomonas paucimobilis
ctgtccgggtgcttggcatt

SEQ ID NO: 14301 - DNA, 20 bp, Eubacterium moniliforme
tatgggacgaaaaaaatgac

SEQ ID NO: 14302 - DNA, 20 bp, Bacteroides stercoris
aataactattaaagaatttc

SEQ ID NO: 14303 - DNA, 20 bp, Prevotella loescheii
gggcccacgtgtgggttttt

SEQ ID NO: 14304 - DNA, 20 bp, Stenotrophomonas maltophilia
gcaaccccgcgagcagcaag

SEQ ID NO: 14305 - DNA, 20 bp, Propionibacterium granulosum
tgacatggatcgggagcttc

SEQ ID NO: 14306 - DNA, 20 bp, Porphyromonas gingivalis
gggcgtaccgcaaggggcgc

SEQ ID NO: 14307 - DNA, 20 bp, Finegoldia magna
tacccctctctttatgagac

SEQ ID NO: 14308 - DNA, 20 bp, Bacteroides thetaiotaomicron
ggcgcggtgaatagttcccg

SEQ ID NO: 14309 - DNA, 20 bp, Peptoniphilus asaccharolyticus
tcggggtgaagtttggaagg

SEQ ID NO: 14310 - DNA, 20 bp, Streptococcus criceti
agtgattaactcatgttaat

SEQ ID NO: 14311 - DNA, 20 bp, Paenibacillus pabuli
aaagcttgcttttcttgata

SEQ ID NO: 14312 - DNA, 20 bp, Bacillus coagulans
tgcttctatcaagttagcgg

SEQ ID NO: 14313 - DNA, 20 bp, Streptococcus macacae
gcttgctccacgagatcggt

SEQ ID NO: 14314 - DNA, 20 bp, Anaerococcus prevotii
tgatataatgcaaaactcca

SEQ ID NO: 14315 - DNA, 20 bp, Nocardia asteroides
taaagagagtggacgttact

SEQ ID NO: 14316 - DNA, 20 bp, Sphingobacterium multivorum
tgtaaggtggggactttaaa

SEQ ID NO: 14317 - DNA, 20 bp, Vibrio parahaemolyticus
gaatcccaaaaaggcgtcgt

SEQ ID NO: 14318 - DNA, 20 bp, Neisseria subflava
gataccgcaaggggccgctt

SEQ ID NO: 14319 - DNA, 20 bp, Achromobacter xylosoxidans
ctgggataacactgacgcct

SEQ ID NO: 14320 - DNA, 30 bp, Prevotella oralis
actgcttttatgcggggataaagttgggga

SEQ ID NO: 14321 - DNA, 20 bp, Clostridium clostridiiforme
tttggagagacttgtgtcct

SEQ ID NO: 14322 - DNA, 20 bp, Campylobacter concisus
cgtaacagggagccgaccgg

SEQ ID NO: 14323 - DNA, 20 bp, Suttonella indologenes
gcttgctgcggacctagtgg

SEQ ID NO: 14324 - DNA, 20 bp, Unknown Organism
  oligonucleotide from CDC group EO-2
tgccacttctactacggaat

SEQ ID NO: 14325 - DNA, 20 bp, Clostridium clostridiiforme
agtcttgacatcccattgaa

SEQ ID NO: 14326 - DNA, 20 bp, Finegoldia magna
gggtgaaaggtatagagata

SEQ ID NO: 14327 - DNA, 30 bp, Brevibacillus reuszeri
aggtttttggaccgcatggtccgaaaagaa

SEQ ID NO: 14328 - DNA, 20 bp, Myroides odoratimimus
tcgtattgataataaagatt

SEQ ID NO: 14329 - DNA, 20 bp, Brevibacterium linens
ccgaaggcatctttggttgt

SEQ ID NO: 14330 - DNA, 20 bp, Oligella urethralis
tccggtagcaagaggtctta

SEQ ID NO: 14331 - DNA, 20 bp, Gemella sanguinis
tcgggaaggtgcggttggat

SEQ ID NO: 14332 - DNA, 20 bp, Dolosicoccus paucivorans
gtatcaccgccttctttgaa

SEQ ID NO: 14333 - DNA, 20 bp, Clostridium clostridiiforme
ccctttcgcaaggaagggaa

SEQ ID NO: 14334 - DNA, 20 bp, Staphylococcus saccharolyticus
atcgaggatggatgaaaggt

SEQ ID NO: 14335 - DNA, 20 bp, Bacteroides capilosus
taatgcagctgagtcgcatg

SEQ ID NO: 14336 - DNA, 20 bp, Campylobacter concisus
ggacgatggttggatgccat

SEQ ID NO: 14337 - DNA, 20 bp, Leuconostoc gelidum
gataacattctggaaacaga

SEQ ID NO: 14338 - DNA, 20 bp, Brevibacillus brevis
gcaccttatggttagcggcg

SEQ ID NO: 14339 - DNA, 20 bp, Streptococcus iniae
gcactaatccaaagagttgc

SEQ ID NO: 14340 - DNA, 20 bp, Propionibacterium propionicus
tcatctctgggataacagtc

SEQ ID NO: 14341 - DNA, 20 bp, Corynebacterium group ANF
aagaagatgaaaggcggcgc

SEQ ID NO: 14342 - DNA, 20 bp, Staphylococcus condimenti
aggatgaacgctggcgggcg

SEQ ID NO: 14343 - DNA, 20 bp, Arcanobacterium pyogenes
tcagtacagaagaagcattt

SEQ ID NO: 14344 - DNA, 20 bp, Finegoldia magna
ccctctctttatgagacatc

SEQ ID NO: 14345 - DNA, 20 bp, Streptococcus equi
gcacagatgatacgtagctt

SEQ ID NO: 14346 - DNA, 20 bp, Microbacterium terregens
ctgaagccgggggcccaacc

SEQ ID NO: 14347 - DNA, 20 bp, Staphylococcus schleiferi
ctaagttgactgccgggaca

SEQ ID NO: 14348 - DNA, 20 bp, Bacteroides stercoris
ttgcaactgactgaatcgga

SEQ ID NO: 14349 - DNA, 20 bp, Streptococcus acidominimus
gaacgttagcgggagtggaa

SEQ ID NO: 14350 - DNA, 20 bp, Vibrio harveyi
ataagaagtaggtagttaac

SEQ ID NO: 14351 - DNA, 20 bp, Brevibacillus brevis
acgccctagaaatagggaac

SEQ ID NO: 14352 - DNA, 20 bp, Clostridium clostridiiforme
gacatccacgcggtagagaa

SEQ ID NO: 14353 - DNA, 20 bp, Anaerococcus prevotii
ttaagagacatccatacagg

SEQ ID NO: 14354 - DNA, 20 bp, Oligella ureolytica
ttgacctctcgctattggag

SEQ ID NO: 14355 - DNA, 20 bp, Clostridium clostridiiforme
gctgcatactgacgctgaag

SEQ ID NO: 14356 - DNA, 20 bp, Streptococcus infantis
accgcataagagtagatatc

SEQ ID NO: 14357 - DNA, 20 bp, Finegoldia magna
taaacagaagcctcggtgga

SEQ ID NO: 14358 - DNA, 30 bp, Sphingobacterium multivorum
gtgaagagtgcagagacgcactcgtccttc

SEQ ID NO: 14359 - DNA, 20 bp, Eremococcus coleocola
gccaagaacacccctagtag

SEQ ID NO: 14360 - DNA, 20 bp, Moraxella atlantae
cttacccggtgtggtcgatg

SEQ ID NO: 14361 - DNA, 20 bp, Dolosicoccus paucivorans
gcgagaccaagcggatctct

SEQ ID NO: 14362 - DNA, 20 bp, Empedobacter brevis
aaaggatagcccttcgaaag

SEQ ID NO: 14363 - DNA, 20 bp, Clostridium glycolicum
gggggctagcgttatcccgg

SEQ ID NO: 14364 - DNA, 20 bp, Sporosarcina pasteurii
acaagtttcttccttgttcg

SEQ ID NO: 14365 - DNA, 20 bp, Stenotrophomonas maltophilia
actacaatggcaggagacaa

SEQ ID NO: 14366 - DNA, 20 bp, Streptococcus infantarius
agctaagttttcagcgttct

SEQ ID NO: 14367 - DNA, 20 bp, Clostridium clostridiiforme
agtaaacgatgtatgctggg

SEQ ID NO: 14368 - DNA, 20 bp, Clostridium glycolicum
atcccggatttactgggcgt

SEQ ID NO: 14369 - DNA, 20 bp, Streptococcus vestibularis
cgcataacaataggtgacac

SEQ ID NO: 14370 - DNA, 20 bp, Leptotrichia buccalis
actggtccaaccgcaagggg

SEQ ID NO: 14371 - DNA, 20 bp, Bacteroides distasonis
gtcctattttgtatgtacct

SEQ ID NO: 14372 - DNA, 20 bp, Enterobacter gergoviae
ggtccttgaagcgtggcttc

SEQ ID NO: 14373 - DNA, 20 bp, Myroides odoratimimus
tattgttagttaccactcgc

SEQ ID NO: 14374 - DNA, 20 bp, Porphyromonas endodontalis
cgttgaaactgatatgctag

SEQ ID NO: 14375 - DNA, 20 bp, Anaerococcus prevotii
cttgacatattacggcgggg

SEQ ID NO: 14376 - DNA, 20 bp, Clostridium clostridiiforme
ggcaaacagaattcctggtg

SEQ ID NO: 14377 - DNA, 20 bp, Paenibacillus azotofixans
tgtagagggagcttgctctc

SEQ ID NO: 14378 - DNA, 20 bp, Bacteroides capillosus
tgttctcagttgccatcggg

SEQ ID NO: 14379 - DNA, 20 bp, Kocuria rosea
aatcgcagatgcagcaacgc

SEQ ID NO: 14380 - DNA, 20 bp, Streptococcus ratti
ataccgcataagagagttta

SEQ ID NO: 14381 - DNA, 20 bp, Eubacterium moniliforme
cgaagttgctctttgggaag

SEQ ID NO: 14382 - DNA, 20 bp, Neisseria mucosa
atccatgggctcagattgaa

SEQ ID NO: 14383 - DNA, 20 bp, Staphylococcus schleiferi
ggtatgcccgtatcggaaag

SEQ ID NO: 14384 - DNA, 30 bp, Bacteroides capillosus
tttgcacaacgttggcggaattcgtcgtgt

SEQ ID NO: 14385 - DNA, 20 bp, Achromobacter xylosoxidans
ttaatacctcgcgaaactga

SEQ ID NO: 14386 - DNA, 20 bp, Enterococcus durans
cgtacaaggtagccgatcgg

SEQ ID NO: 14387 - DNA, 20 bp, Finegoldia magna
cgcataaaatcgtagaaaca

SEQ ID NO: 14388 - DNA, 20 bp, Weissella paramesenteroides
actgatactgacgagcttgc

SEQ ID NO: 14389 - DNA, 20 bp, Streptococcus macacae
cttaaccaatgtcagctatt

SEQ ID NO: 14390 - DNA, 20 bp, Burkholderia gladioli
ggtagccgtaatcggaaggt

SEQ ID NO: 14391 - DNA, 20 bp, Dolosicoccus paucivorans
agctcttgacatcggatgca

SEQ ID NO: 14392 - DNA, 20 bp, Klebsiella pneumoniae
ttaataacctcggcgattga

SEQ ID NO: 14393 - DNA, 30 bp, Vibrio mimicus
ctggggtgaagtcgtcaacacggtagcgct

SEQ ID NO: 14394 - DNA, 20 bp, Brevibacillus centrosporus
gccgggttttgggctgtcgc

SEQ ID NO: 14395 - DNA, 20 bp, Leuconostoc carnosum
ggagaacgctggtggcgtgc

SEQ ID NO: 14396 - DNA, 20 bp, Myroides odoratus
gcatcgtttatataataaag

SEQ ID NO: 14397 - DNA, 20 bp, Streptococcus acidominimus
cgctaagtgacggtacctta

SEQ ID NO: 14398 - DNA, 20 bp, Citrobacter werkmanii
tgaacgctgcgcgcgcagcg

SEQ ID NO: 14399 - DNA, 20 bp, Salmonella paratyphi
tccacagaacaatccagaga

SEQ ID NO: 14400 - DNA, 20 bp, Prevotella oralis
ctttttgcaggtaccgcatg

SEQ ID NO: 14401 - DNA, 20 bp, Prevotella melaninogenica
ggctccaggaatgaacgcta

SEQ ID NO: 14402 - DNA, 20 bp, Globicatella sanguinis
atgttagtagattgacggta

SEQ ID NO: 14403 - DNA, 20 bp, Helcococcus kunzii
acagggatatcctagagata

SEQ ID NO: 14404 - DNA, 20 bp, Psychrobacter phenylpyruvicus
ggcttttagctgtcgctaga

SEQ ID NO: 14405 - DNA, 20 bp, Prevotella oralis
gcagtcatctaatttggacg

SEQ ID NO: 14406 - DNA, 20 bp, Vibrio harveyi
tggtggacgacgtcaaagtc

SEQ ID NO: 14407 - DNA, 20 bp, Bacteroides merdae
tttgtagcaatacagattga

SEQ ID NO: 14408 - DNA, 20 bp, Leuconostoc gelidum
catgatatcaagctctaaaa

SEQ ID NO: 14409 - DNA, 20 bp, Unknown Organism
  oligonucleotide from CDC group EF-4B
ctgcgtttgaaactgggtga

SEQ ID NO: 14410 - DNA, 20 bp, Leptotrichia buccalis
agcgaacctgcaaagccggt

SEQ ID NO: 14411 - DNA, 20 bp, Streptococcus macacae
cagtatcgctaagagatgga

SEQ ID NO: 14412 - DNA, 20 bp, Bacteroides stercoris
tggggactctacccggactg

SEQ ID NO: 14413 - DNA, 20 bp, Bacteroides uniformis
gccggcccttacgtccgggg

SEQ ID NO: 14414 - DNA, 20 bp, Citrobacter amalonaticus
cagagatgccaaagtgcctt

SEQ ID NO: 14415 - DNA, 20 bp, Listeria seeligeri
atcgcttacagatgggccgc

SEQ ID NO: 14416 - DNA, 20 bp, Bacteroides stercoris
actgagctggaaacagttct

SEQ ID NO: 14417 - DNA, 20 bp, Peptoniphilus asaccharolyticus
caaacagaacccttcggggt

SEQ ID NO: 14418 - DNA, 20 bp, Aeromonas hydrophila
gctaatacccaccagctgtg

SEQ ID NO: 14419 - DNA, 20 bp, Campylobacter curvus
gcaaccgaaagttgcggtgt

SEQ ID NO: 14420 - DNA, 20 bp, Unknown Organism
  oligonucleotide from CDC group EO-2
atgcaaggtcggaggcgagg

SEQ ID NO: 14421 - DNA, 20 bp, Vibrio vulnificus
cttcgggaggacgccaccac

SEQ ID NO: 14422 - DNA, 20 bp, Corynebacterium seminale
caaccggtttaccgggggga

SEQ ID NO: 14423 - DNA, 30 bp, Neisseria subflava
gagccaatctcacaaaaccgatcgagtccg

SEQ ID NO: 14424 - DNA, 20 bp, Cedecea lapagei
caggagagcaagctctcccg

SEQ ID NO: 14425 - DNA, 20 bp, Oligella urethralis
agctacagatcccgccttgg

SEQ ID NO: 14426 - DNA, 20 bp, Leuconostoc gelidum
tatcaagctctaaaaggcgc

SEQ ID NO: 14427 - DNA, 20 bp, Shewanella algae
agaatcctggtagagatgcc

SEQ ID NO: 14428 - DNA, 20 bp, Bacillus niacini
gcacctcttggttagcggcg

SEQ ID NO: 14429 - DNA, 20 bp, Bacillus mycoides
taacattttgcgctgcatgg

SEQ ID NO: 14430 - DNA, 20 bp, Peptoniphilus indolicus
cttcgggaagaagttgagtt

SEQ ID NO: 14431 - DNA, 20 bp, Bacteroides capilosus
cagggtgtgaaaaccacggg

SEQ ID NO: 14432 - DNA, 20 bp, Leuconostoc fallax
ttgacatcctttgaagatgt

SEQ ID NO: 14433 - DNA, 20 bp, Prevotella loescheii
ccttgggtcggtgaccaagc

SEQ ID NO: 14434 - DNA, 20 bp, Anaerococcus tetradius
tataaagttagtcaatcgca

SEQ ID NO: 14435 - DNA, 20 bp, Finegoldia magna
ctttatgagacatccataca

SEQ ID NO: 14436 - DNA, 20 bp, Eubacterium moniliforme
taagagtaagcgaatctcaa

SEQ ID NO: 14437 - DNA, 20 bp, Kocuria varians
ggaccggttcagagatgttc

SEQ ID NO: 14438 - DNA, 20 bp, Actinomyces naeslundii
ggtgtgggaaagatgcgcct

SEQ ID NO: 14439 - DNA, 20 bp, Citrobacter werkmanii
cagattgaacgctgcgcgcg

SEQ ID NO: 14440 - DNA, 20 bp, Myroides odoratus
tagaaggagcttgctttttt

SEQ ID NO: 14441 - DNA, 20 bp, Clostridium clostridiiforme
tcccattgaaaatcatttaa

SEQ ID NO: 14442 - DNA, 20 bp, Pasteurella multocida
agcttggtgctcgaagctaa

SEQ ID NO: 14443 - DNA, 20 bp, Oligella ureolytica
atcaagctagagtatgtcag

SEQ ID NO: 14444 - DNA, 30 bp, Pseudomonas fluorescens
ttgctcacggatttagcggcggacgggtga

SEQ ID NO: 14445 - DNA, 20 bp, Bacteroides capilosus
tgtggcctgcatttgaaact

SEQ ID NO: 14446 - DNA, 30 bp, Streptococcus ferus
aaaggctatggctcaaccatagtatgcttt

SEQ ID NO: 14447 - DNA, 20 bp, Bacteroides thetaiotaomicron
tagtaccgcaaggagcgtct

SEQ ID NO: 14448 - DNA, 20 bp, Myroides odoratus
ggcatcgtttatataataaa

SEQ ID NO: 14449 - DNA, 20 bp, Leuconostoc gelidum
cgctacggcgtcacctagga

SEQ ID NO: 14450 - DNA, 20 bp, Bacteroides thetaiotaomicron
gatagccgggggtactgaag

SEQ ID NO: 14451 - DNA, 20 bp, Providencia alcalifaciens
gatattagcatcaacgcctt

SEQ ID NO: 14452 - DNA, 20 bp, Clostridium clostridiiforme
agtcgagcgaagcggtttcg

SEQ ID NO: 14453 - DNA, 20 bp, Anaerococcus tetradius
atgacataaactcttcgcat

SEQ ID NO: 14454 - DNA, 20 bp, Clostridium clostridiiforme
taatacctcataagccggaa

SEQ ID NO: 14455 - DNA, 20 bp, Alloiococcus otitis
taccttcagagatgaagggt

SEQ ID NO: 14456 - DNA, 20 bp, Streptococcus macacae
taaaagcattggcttaacca

SEQ ID NO: 14457 - DNA, 20 bp, Myroides odoratimimus
ttatcgatatggcatcgtat

SEQ ID NO: 14458 - DNA, 20 bp, Alicyclobacillus acidocaldarius
ccgggggcttcctcactcgg

SEQ ID NO: 14459 - DNA, 20 bp, Campylobacter concisus
tgtcaaagggagctgcgaag

SEQ ID NO: 14460 - DNA, 20 bp, Ignavigranum ruoffiae
cctaaccttagggagggagc

SEQ ID NO: 14461 - DNA, 20 bp, Streptococcus macacae
cacccctatcagatggacct

SEQ ID NO: 14462 - DNA, 20 bp, Finegoldia magna
atgttttaacggtcaaagat

SEQ ID NO: 14463 - DNA, 20 bp, Finegoldia magna
agagatatacccctctcttt

SEQ ID NO: 14464 - DNA, 20 bp, Clostridium clostridiiforme
aagtcgtctgtcaaaagccg

SEQ ID NO: 14465 - DNA, 20 bp, Finegoldia magna
agaaggtattcgtatcgtaa

SEQ ID NO: 14466 - DNA, 20 bp, Streptococcus dysgalactiae
tttaacccatgttaaacatt

SEQ ID NO: 14467 - DNA, 20 bp, Escherichia hermannii
ttggatcacctcctgtcatg

SEQ ID NO: 14468 - DNA, 20 bp, Campylobacter curvus
ttgtttatttatcaaatacc

SEQ ID NO: 14469 - DNA, 20 bp, Bacteroides stercoris
gttggcgatacaatgtcagc

SEQ ID NO: 14470 - DNA, 20 bp, Dolosicoccus paucivorans
ctttgaaggcaccgatacat

SEQ ID NO: 14471 - DNA, 20 bp, Bacteroides ovatus
atatcgcatgatatttttat

SEQ ID NO: 14472 - DNA, 20 bp, Anaerococcus tetradius
ataccctataaagttagtca

SEQ ID NO: 14473 - DNA, 20 bp, Streptococcus macacae
aagcctttagagggattgaa

SEQ ID NO: 14474 - DNA, 20 bp, Providencia rustigianii
caggagcaaagcaggggaac

SEQ ID NO: 14475 - DNA, 20 bp, Eubacterium moniliforme
aagttgctctttgggaagcc

SEQ ID NO: 14476 - DNA, 20 bp, Neisseria subflava
cccgcttacccggtatgctt

SEQ ID NO: 14477 - DNA, 20 bp, Bacteroides stercoris
acccggactgccgtcgtaag

SEQ ID NO: 14478 - DNA, 20 bp, Bacteroides capilosus
cgaacggagagctcatgaca

SEQ ID NO: 14479 - DNA, 20 bp, Pediococcus parvulus
acaaaattaaccgcatggtt

SEQ ID NO: 14480 - DNA, 20 bp, Pseudomonas mendocina
ccttagagtgcccccccgac

SEQ ID NO: 14481 - DNA, 20 bp, Bacteroides stercoris
gttatgctggggactctacc

SEQ ID NO: 14482 - DNA, 20 bp, Myroides odoratimimus
ttactacgtatttattgacg

SEQ ID NO: 14483 - DNA, 20 bp, Enterobacter gergoviae
ggctgtggttcttgaggccg

SEQ ID NO: 14484 - DNA, 20 bp, Clostridium perfringens
gtacaaggtagccgtaggag

SEQ ID NO: 14485 - DNA, 20 bp, Globicatella sanguinis
aggaaatgttagtagattga

SEQ ID NO: 14486 - DNA, 20 bp, Staphylococcus muscae
cccataaagatgttctcagt

SEQ ID NO: 14487 - DNA, 20 bp, Bacillus fusiformis
tcttttgcttcatggtgaaa

SEQ ID NO: 14488 - DNA, 20 bp, Streptococcus equi
gtagccgttcggaaggcgtt

SEQ ID NO: 14489 - DNA, 20 bp, Staphylococcus succinus
tcaaactactatctggtccc

SEQ ID NO: 14490 - DNA, 20 bp, Paenibacillus alvei
ttcttcggaacattcaagac

SEQ ID NO: 14491 - DNA, 20 bp, Leptotrichia buccalis
ggcgagccaaggcggacggg

SEQ ID NO: 14492 - DNA, 20 bp, Citrobacter koseri
agcaatgtgccttcgggaac

SEQ ID NO: 14493 - DNA, 20 bp, Fusobacterium mortiferum
ttgtgccccttcgggggaac

SEQ ID NO: 14494 - DNA, 20 bp, Corynebacterium group ANF
gcgtgaaactaacggatccc

SEQ ID NO: 14495 - DNA, 20 bp, Corynebacterium coyleae
agatcggccccagagatgct

SEQ ID NO: 14496 - DNA, 20 bp, Globicatella sanguinis
acgaaccataactagaactt

SEQ ID NO: 14497 - DNA, 20 bp, Brevibacterium linens
cgaaggcatctttggttgtg

SEQ ID NO: 14498 - DNA, 20 bp, Staphylococcus schleiferi
ttggggtgaaagtcgttacc

SEQ ID NO: 14499 - DNA, 20 bp, Vibrio vulnificus
ccactttgggtcatgactgg

SEQ ID NO: 14500 - DNA, 20 bp, Prevotella loescheii
tcgttgtcggccccttgggt

SEQ ID NO: 14501 - DNA, 20 bp, Clostridium innocuum
tcagtatattaaagcgccca

SEQ ID NO: 14502 - DNA, 20 bp, Clostridium clostridiiforme
tgagtaaagcacaaggactt

SEQ ID NO: 14503 - DNA, 30 bp, Actinomyces radingae
ggttgtgtggtgagagtggcgaacgggtga

SEQ ID NO: 14504 - DNA, 20 bp, Leuconostoc pseudomesenteroides
aataccgaatgaaacttagt

SEQ ID NO: 14505 - DNA, 20 bp, Lactococcus raffinolactis
taccaaatggtacactgaga

SEQ ID NO: 14506 - DNA, 20 bp, Bacillus mycoides
atcggaagggcggtggatca

SEQ ID NO: 14507 - DNA, 20 bp, Enterococcus dispar
cgcataacaatagtaaacac

SEQ ID NO: 14508 - DNA, 20 bp, Vibrio hollisae
attctggagagattcagaag

SEQ ID NO: 14509 - DNA, 20 bp, Corynebacterium auris
cagcgcgtgtgcgatactgt

SEQ ID NO: 14510 - DNA, 20 bp, Prevotella loescheii
ataaaggggcccacgtgtgg

SEQ ID NO: 14511 - DNA, 30 bp, Bacteroides vulgatus
ggcagcatggtcttagcttgctaaggccga

SEQ ID NO: 14512 - DNA, 20 bp, Clostridium clostridiiforme
cttgacatcccattgaaaat

SEQ ID NO: 14513 - DNA, 20 bp, Brevibacillus brevis
gccctagaaatagggaactc

SEQ ID NO: 14514 - DNA, 20 bp, Corynebacterium pilosum
gtctcccaattgccgaccgg

SEQ ID NO: 14515 - DNA, 20 bp, Bacteroides merdae
ggttacttgagtgtgtttga

SEQ ID NO: 14516 - DNA, 20 bp, Escherichia hermannii
tgtggtgacgacgtaacaag

SEQ ID NO: 14517 - DNA, 20 bp, Vibrio cholerae
ctccacctcggcggtatcgc

SEQ ID NO: 14518 - DNA, 20 bp, Brevibacillus thermoruber
ccgggataacgtagggaaac

SEQ ID NO: 14519 - DNA, 20 bp, Campylobacter curvus
ccctatatattgtttattta

SEQ ID NO: 14520 - DNA, 20 bp, Aeromonas hydrophila
cccaccagctgtgacgttac

SEQ ID NO: 14521 - DNA, 20 bp, Citrobacter youngae
tcgcagaagcaagcaccggc

SEQ ID NO: 14522 - DNA, 20 bp, Clostridium sordellii
ggtaaggtgcggttggatca

SEQ ID NO: 14523 - DNA, 30 bp, Leuconostoc fallax
cgtatacaacgagttgcgaaccggcgacgg

SEQ ID NO: 14524 - DNA, 20 bp, Clostridium clostridiiforme
atggatttgaaattgactta

SEQ ID NO: 14525 - DNA, 20 bp, Corynebacterium ulcerans
gttttcccttgtggttgtat

SEQ ID NO: 14526 - DNA, 20 bp, Pseudomonas luteola
cggtaccacgggtgattcat

SEQ ID NO: 14527 - DNA, 20 bp, Bacteroides stercoris
atcggaaacggttcttttct

SEQ ID NO: 14528 - DNA, 20 bp, Gracilibacillus dipsosauri
gtgagcatgctgatctacga

SEQ ID NO: 14529 - DNA, 20 bp, Leuconostoc gelidum
tttgacggtaccatacccag

SEQ ID NO: 14530 - DNA, 20 bp, Prevotella corporis
agttgcccacgcgtgggttt

SEQ ID NO: 14531 - DNA, 20 bp, Leptotrichia buccalis
aagtctttggcagaatctgt

SEQ ID NO: 14532 - DNA, 20 bp, Bacteroides distasonis
cgcatgaagcaggggccccg

SEQ ID NO: 14533 - DNA, 30 bp, Oligella ureolytica
tgcactattaactatcaagctagagtatgt

SEQ ID NO: 14534 - DNA, 20 bp, Prevotella loescheii
atgcggggataaaggggccc

SEQ ID NO: 14535 - DNA, 20 bp, Bacteroides capillosus
gggttgcttgcaacctttga

SEQ ID NO: 14536 - DNA, 20 bp, Haemophilus paraphrophilus
ggttgaactttaagtttggc

SEQ ID NO: 14537 - DNA, 20 bp, Citrobacter farmeri
gagatgaggtagtgccttcg

SEQ ID NO: 14538 - DNA, 30 bp, Arcanobacterium pyogenes
aactcctttcagtacagaagaagcattttt

SEQ ID NO: 14539 - DNA, 20 bp, Campylobacter curvus
aatgggaaagtcgaacccta

SEQ ID NO: 14540 - DNA, 20 bp, Streptococcus criceti
gaaagttactcaagtgacgg

SEQ ID NO: 14541 - DNA, 20 bp, Propionibacterium granulosum
cagagatggttgtgcctctt

SEQ ID NO: 14542 - DNA, 20 bp, Dolosicoccus paucivorans
gaagaacagcgagtagagta

SEQ ID NO: 14543 - DNA, 20 bp, Bacillus coagulans
taataacctcgccgattgac

SEQ ID NO: 14544 - DNA, 20 bp, Paenibacillus macerans
tagagatggacctgcggtgc

SEQ ID NO: 14545 - DNA, 20 bp, Proteus mirabilis
ggcaaccgtcaggggaacct

SEQ ID NO: 14546 - DNA, 20 bp, Psychrobacter phenylpyruvicus
gcagcttgcgctctcgctat

SEQ ID NO: 14547 - DNA, 20 bp, Anaerococcus tetradius
agatgaaagggaaagtggaa

SEQ ID NO: 14548 - DNA, 20 bp, Anaerococcus prevotii
catgaagctatcatcaaaga

SEQ ID NO: 14549 - DNA, 20 bp, Streptococcus gallolyticus
tcgtaacaaaaaacccgtat

SEQ ID NO: 14550 - DNA, 20 bp, Achromobacter xylosoxidans
acactgacgcctcatgcacg

SEQ ID NO: 14551 - DNA, 20 bp, Bacteroides stercoris
ccggatggcatagttttccc

SEQ ID NO: 14552 - DNA, 20 bp, Paenibacillus macerans
gctcaaccacagttcgcact

SEQ ID NO: 14553 - DNA, 20 bp, Corynebacterium cystitidis
acactggatcgccatggaga

SEQ ID NO: 14554 - DNA, 20 bp, Finegoldia magna
ggtatagagatatacccctc

SEQ ID NO: 14555 - DNA, 20 bp, Eubacterium moniliforme
cctgcaatgggggacaacag

SEQ ID NO: 14556 - DNA, 20 bp, Sphingobacterium multivorum
catgtaaggtggggacttta

SEQ ID NO: 14557 - DNA, 20 bp, Bacteroides merdae
tttgaacgtagtctgaccgg

SEQ ID NO: 14558 - DNA, 20 bp, Paenibacillus lautus
agggaagaacgtctcttaga

SEQ ID NO: 14559 - DNA, 20 bp, Achromobacter xylosoxidans
ccggcatacgccctacgggg

SEQ ID NO: 14560 - DNA, 20 bp, Actinomyces radingae
gcgtggcctttgtggttgtg

SEQ ID NO: 14561 - DNA, 30 bp, Eubacterium moniliforme
ccaaggcttgacatcctctgacgcatatag

SEQ ID NO: 14562 - DNA, 20 bp, Bacteroides capillosus
ggatgcccgttgtatggcct

SEQ ID NO: 14563 - DNA, 20 bp, Anaerococcus tetradius
ggaattagagatagtttctt

SEQ ID NO: 14564 - DNA, 20 bp, Acinetobacter baumannii
gtacaggtagccgtagggga

SEQ ID NO: 14565 - DNA, 20 bp, Prevotella corporis
aagttgcccacgcgtgggtt

SEQ ID NO: 14566 - DNA, 20 bp, Moellerella wisconsensis
ggcgttgatactaatactat

SEQ ID NO: 14567 - DNA, 20 bp, Campylobacter curvus
aagtaaataatatatagggt

SEQ ID NO: 14568 - DNA, 20 bp, Peptoniphilus indolicus
tgctaggtgtcggaggattt

SEQ ID NO: 14569 - DNA, 20 bp, Leclercia adecarboxylata
cggttggatcaccttccctt

SEQ ID NO: 14570 - DNA, 20 bp, Moraxella atlantae
tatgagaggaaagtagaatt

SEQ ID NO: 14571 - DNA, 20 bp, Sphingobacterium multivorum
agagacgcactcgtccttcg

SEQ ID NO: 14572 - DNA, 20 bp, Prevotella bivia
aagttggactaataccttat

SEQ ID NO: 14573 - DNA, 20 bp, Arthrobacter globiformis
cccgaagccggggcctaacc

SEQ ID NO: 14574 - DNA, 20 bp, Microbacterium hominis
tctggtacacgcgcgcccgt

SEQ ID NO: 14575 - DNA, 20 bp, Anaerococcus prevotii
caggataaagcgctggcggc

SEQ ID NO: 14576 - DNA, 20 bp, Bacillus schlegellii
gctaggtgtgggtggggcga

SEQ ID NO: 14577 - DNA, 20 bp, Microbacterium hominis
agagtttttgtcatggctca

SEQ ID NO: 14578 - DNA, 20 bp, Empedobacter brevis
tttcggcttcagtggctaag

SEQ ID NO: 14579 - DNA, 20 bp, Eubacterium moniliforme
ttgctctttgggaagccctc

SEQ ID NO: 14580 - DNA, 20 bp, Eremococcus coleocola
tgttattagccaagaacacc

SEQ ID NO: 14581 - DNA, 20 bp, Bacteroides capilosus
gcagctgagtcgcatgacac

SEQ ID NO: 14582 - DNA, 20 bp, Vibrio cholerae
aaagaaggtgatccaccgcc

SEQ ID NO: 14583 - DNA, 30 bp, Suttonella indologenes
ttgctgcggacctagtggcggacgggtgag

SEQ ID NO: 14584 - DNA, 20 bp, Prevotella melaninogenica
gttctgatccatagggctcc

SEQ ID NO: 14585 - DNA, 20 bp, Clostridium barati
cgattggggtcgaagtcgta

SEQ ID NO: 14586 - DNA, 20 bp, Kocuria varians
cggaccggttcagagatgtt

SEQ ID NO: 14587 - DNA, 20 bp, Streptococcus criceti
ggcctacctaggctgcgata

SEQ ID NO: 14588 - DNA, 20 bp, Pediococcus parvulus
cataacaaaattaaccgcat

SEQ ID NO: 14589 - DNA, 20 bp, Streptococcus equi
gtagcttgctacaattatct

SEQ ID NO: 14590 - DNA, 20 bp, Anaerococcus tetradius
ctataaagttagtcaatcgc

SEQ ID NO: 14591 - DNA, 20 bp, Corynebacterium pilosum
cttccagggtctcccaattg

SEQ ID NO: 14592 - DNA, 20 bp, Eubacterium moniliforme
tctgccctgcaatgggggac

SEQ ID NO: 14593 - DNA, 20 bp, Porphyromonas endodontalis
atatgctagagaggagacga

SEQ ID NO: 14594 - DNA, 20 bp, Klebsiella pneumoniae
ctcgtgagacaggtgctgca

SEQ ID NO: 14595 - DNA, 20 bp, Arcanobacterium pyogenes
tacagaagaagcatttttgt

SEQ ID NO: 14596 - DNA, 20 bp, Prevotella oralis
gtaggcagttttttaagcgt

SEQ ID NO: 14597 - DNA, 20 bp, Streptococcus bovis
taccaactggtacactgaga

SEQ ID NO: 14598 - DNA, 20 bp, Proteus vulgaris
caacgatctctactggctga

SEQ ID NO: 14599 - DNA, 20 bp, Campylobacter concisus
cgatggttggatgccattgt

SEQ ID NO: 14600 - DNA, 20 bp, Shewanella putrefaciens
tcgcttcagagatagcttag

SEQ ID NO: 14601 - DNA, 20 bp, Streptococcus ferus
taaggaagaacggtaatggg

SEQ ID NO: 14602 - DNA, 20 bp, Bacteroides thetaiotaomicron
ttttggaaacaggatagccg

SEQ ID NO: 14603 - DNA, 20 bp, Streptococcus infantarius
gcacgtagttagccgttttt

SEQ ID NO: 14604 - DNA, 20 bp, Streptococcus ratti
agagttttacttttgtacat

SEQ ID NO: 14605 - DNA, 20 bp, Veillonella parvula
ggaaactgccgatctagagt

SEQ ID NO: 14606 - DNA, 20 bp, Sphingobacterium multivorum
atcggttggatattaaatat

SEQ ID NO: 14607 - DNA, 20 bp, Empedobacter brevis
ggaatctgagaccggcgcac

SEQ ID NO: 14608 - DNA, 20 bp, Brevibacillus laterosporus
tgccatttaaataaggtggc

SEQ ID NO: 14609 - DNA, 20 bp, Achromobacter xylosoxidans
cgtaacaaggaaaccgtatc

SEQ ID NO: 14610 - DNA, 20 bp, Rothia mucilaginosa
tgaagcctaggcttgctagg

SEQ ID NO: 14611 - DNA, 20 bp, Vibrio hollisae
tacggaattctggagagatt

SEQ ID NO: 14612 - DNA, 20 bp, Streptococcus urinalis
tagaacgctgaggtcatgtg

SEQ ID NO: 14613 - DNA, 20 bp, Paenibacillus azotofixans
agcttgctcttgatcaactt

SEQ ID NO: 14614 - DNA, 20 bp, Myroides odoratimimus
agcttgaataatatggaagt

SEQ ID NO: 14615 - DNA, 20 bp, Bacteroides stercoris
ctgagctggaaacagttctt

SEQ ID NO: 14616 - DNA, 20 bp, Streptococcus iniae
cacatgtacttaagttaaaa

SEQ ID NO: 14617 - DNA, 20 bp, Streptococcus criceti
aaccaatgtttgctttggaa

SEQ ID NO: 14618 - DNA, 20 bp, Streptococcus urinalis
tagagaagaatggaagtagg

SEQ ID NO: 14619 - DNA, 20 bp, Streptococcus macacae
gcggaaagtttacactgtga

SEQ ID NO: 14620 - DNA, 20 bp, Streptococcus acidominimus
gcatggtaaacatttaaaag

SEQ ID NO: 14621 - DNA, 20 bp, Actinomyces radingae
ttgtggttgtgtggtgagag

SEQ ID NO: 14622 - DNA, 20 bp, Bacteroides ovatus
tatcgcatgatatttttatt

SEQ ID NO: 14623 - DNA, 20 bp, Proteus vulgaris
ctagcaacgatctctactgg

SEQ ID NO: 14624 - DNA, 20 bp, Sporosarcina pasteurii
caggcagttactcctgtact

SEQ ID NO: 14625 - DNA, 20 bp, Vibrio vulnificus
tcgggaggacgccaccactt

SEQ ID NO: 14626 - DNA, 30 bp, Oligella ureolytica
actattaactatcaagctagagtatgtcag

SEQ ID NO: 14627 - DNA, 20 bp, Prevotella melaninogenica
ctgatccatagggctccagg

SEQ ID NO: 14628 - DNA, 20 bp, Bacteroides merdae
aggtggtgatttaagtcagc

SEQ ID NO: 14629 - DNA, 20 bp, Clostridium hastiforme
tccgtgagggaaccgtaagg

SEQ ID NO: 14630 - DNA, 20 bp, Bacteroides merdae
aggagtttgcgatacaatgt

SEQ ID NO: 14631 - DNA, 20 bp, Dolosicoccus paucivorans
ccttctttgaaggcaccgat

SEQ ID NO: 14632 - DNA, 20 bp, Streptococcus macacae
acagcttttatcgcatgata

SEQ ID NO: 14633 - DNA, 20 bp, Capnocytophaga sp.
atggagactgacgtacttag

SEQ ID NO: 14634 - DNA, 20 bp, Aeromonas hydrophila
tggctaatacccaccagctg

SEQ ID NO: 14635 - DNA, 20 bp, Prevotella melaninogenica
tcttcagttgtccatcaggt

SEQ ID NO: 14636 - DNA, 20 bp, Enterococcus dispar
cataacaatagtaaacacat

SEQ ID NO: 14637 - DNA, 20 bp, Enterococcus dispar
gtctggcgtgcctaatacat

SEQ ID NO: 14638 - DNA, 20 bp, Serratia grimesii
gaggaagggctcagtgttaa

SEQ ID NO: 14639 - DNA, 20 bp, Sporosarcina ureae
tggcatgagggaatgttgaa

SEQ ID NO: 14640 - DNA, 20 bp, Salmonella typhi
caagtcgcgacggtatcagg

SEQ ID NO: 14641 - DNA, 20 bp, Bacteroides thetaiotaomicron
aagtagtaccgcaaggagcg

SEQ ID NO: 14642 - DNA, 20 bp, Bacteroides thetaiotaomicron
gaagtagtaccgcaaggagc

SEQ ID NO: 14643 - DNA, 20 bp, Streptococcus infantarius
cgccgtgctctcagctccct

SEQ ID NO: 14644 - DNA, 20 bp, Prevotella melaninogenica
atagggctccaggaatgaac

SEQ ID NO: 14645 - DNA, 20 bp, Actinomyces radingae
ttttttaagtttctggaggg

SEQ ID NO: 14646 - DNA, 20 bp, Prevotella oralis
ggatgcccgctgtcggcctt

SEQ ID NO: 14647 - DNA, 30 bp, Moraxella atlantae
gaaagagggcgcttacccggtgtggtcgat

SEQ ID NO: 14648 - DNA, 20 bp, Finegoldia magna
cttagttaccagcgaataaa

SEQ ID NO: 14649 - DNA, 20 bp, Pseudomonas fluorescens
aagtgagcttgctcacggat

SEQ ID NO: 14650 - DNA, 20 bp, Leptotrichia buccalis
ggctggagtattggagaggt

SEQ ID NO: 14651 - DNA, 20 bp, Citrobacter freundii
taacaaggtaaccccgtagg

SEQ ID NO: 14652 - DNA, 20 bp, Bacillus sp
gggaagcaagtagaacccct

SEQ ID NO: 14653 - DNA, 20 bp, Peptoniphilus indolicus
ctaggtgtcggaggatttcg

SEQ ID NO: 14654 - DNA, 20 bp, Neisseria subflava
gcaaccccttgtacattagt

SEQ ID NO: 14655 - DNA, 20 bp, Peptoniphilus asaccharolyticus
ctaggtgtcggagaatttcg

SEQ ID NO: 14656 - DNA, 20 bp, Streptococcus bovis
caactggtacactgagagat

SEQ ID NO: 14657 - DNA, 20 bp, Clostridium clostridiiforme
cgaaaaactccggtggtgta

SEQ ID NO: 14658 - DNA, 20 bp, Plesiomonas shigelloides
ggaggaagggccactagtta

SEQ ID NO: 14659 - DNA, 20 bp, Brevibacillus laterosporus
tttgcttcgcatgaagcgaa

SEQ ID NO: 14660 - DNA, 20 bp, Corynebacterium pilosum
gctttgggaactgggtgtct

SEQ ID NO: 14661 - DNA, 20 bp, Bacillus mycoides
aagtcgtacaaggatagccg

SEQ ID NO: 14662 - DNA, 20 bp, Escherichia hermannii
tggtgacgacgtaacaaggt

SEQ ID NO: 14663 - DNA, 20 bp, Paenibacillus validus
tttccttcgggatagcgtta

SEQ ID NO: 14664 - DNA, 20 bp, Alicyclobacillus acidocaldarius
cgaagggacccctcatctct

SEQ ID NO: 14665 - DNA, 20 bp, Paenibacillus alvei
tcttcggaacattcaagaca

SEQ ID NO: 14666 - DNA, 20 bp, Shigella flexneri
aaccgaggggaacctgcgtt

SEQ ID NO: 14667 - DNA, 20 bp, Prevotella bivia
acaggatcgacctagggcaa

SEQ ID NO: 14668 - DNA, 20 bp, Bacteroides merdae
ggaaacactccttctagcaa

SEQ ID NO: 14669 - DNA, 20 bp, Campylobacter curvus
cgaaccctatatattgttta

SEQ ID NO: 14670 - DNA, 20 bp, Sporosarcina ureae
acatcccagtgaccgtcatg

SEQ ID NO: 14671 - DNA, 20 bp, Bacteroides merdae
taccccataaaacaggggtc

SEQ ID NO: 14672 - DNA, 20 bp, Helcococcus kunzii
atacaggaatatcctagaga

SEQ ID NO: 14673 - DNA, 20 bp, Clostridium clostridiiforme
ggtctggtgcgaaaaactcc

SEQ ID NO: 14674 - DNA, 20 bp, Nocardia asteroides
tagttaatacctaaagagag

SEQ ID NO: 14675 - DNA, 20 bp, Gemella morbillorum
gagcacgcgtaggtaccctg

SEQ ID NO: 14676 - DNA, 20 bp, Corynebacterium group ANF
aggtagtggatcgagcggcg

SEQ ID NO: 14677 - DNA, 20 bp, Corynebacterium group ANF
tcacatggtaagaagatgaa

SEQ ID NO: 14678 - DNA, 20 bp, Clostridium subterminale
gctaaacttataaaaccaat

SEQ ID NO: 14679 - DNA, 20 bp, Neisseria subflava
ccccttgtacattagttgcc

SEQ ID NO: 14680 - DNA, 20 bp, Bacteroides capillosus
tgcgggagcaaaactgacgc

SEQ ID NO: 14681 - DNA, 20 bp, Streptococcus criceti
tgagtagagtggaaagttac

SEQ ID NO: 14682 - DNA, 20 bp, Finegoldia magna
tgtccggggactctaagtag

SEQ ID NO: 14683 - DNA, 20 bp, Streptococcus ferus
ctctataagtctgaagtgaa

SEQ ID NO: 14684 - DNA, 20 bp, Capnocytophaga sp.
gtatttcttcggacagtttt

SEQ ID NO: 14685 - DNA, 20 bp, Pediococcus parvulus
aaattaaccgcatggttgat

SEQ ID NO: 14686 - DNA, 20 bp, Sphingobacterium multivorum
ttcgcatgttcggttgatta

SEQ ID NO: 14687 - DNA, 30 bp, Pseudoramibacter alactolyticus
ggatcggtaattggggtgaagtcgtacaag

SEQ ID NO: 14688 - DNA, 20 bp, Fusobacterium mortiferum
gatcctcggggtgatggtgg

SEQ ID NO: 14689 - DNA, 20 bp, Leptotrichia buccalis
tgttgtcagactgacgcatg

SEQ ID NO: 14690 - DNA, 20 bp, Streptococcus infantarius
agagagccgctttcgccccg

SEQ ID NO: 14691 - DNA, 20 bp, Anaerococcus prevotii
aaagcgctggcggcgtgcat

SEQ ID NO: 14692 - DNA, 20 bp, Brevibacterium linens
aacacatgcagtcgaacgct

SEQ ID NO: 14693 - DNA, 20 bp, Bacillus fusiformis
aatctcttttgcttcatggt

SEQ ID NO: 14694 - DNA, 20 bp, Serratia marcescens
catgactggggtgaagcgaa

SEQ ID NO: 14695 - DNA, 20 bp, Vibrio mimicus
tcgtcaacacggtagcgcta

SEQ ID NO: 14696 - DNA, 20 bp, Streptococcus criceti
actcatgttaatgacttgaa

SEQ ID NO: 14697 - DNA, 20 bp, Proteus mirabilis
agtcgtacaaggcaaccgtc

SEQ ID NO: 14698 - DNA, 20 bp, Streptococcus macacae
atgcaagtgggacgcactga

SEQ ID NO: 14699 - DNA, 20 bp, Bacteroides capilosus
gtcgcatgacactggctgcc

SEQ ID NO: 14700 - DNA, 20 bp, Tatumella ptyseos
agaactttgcagagatggca

SEQ ID NO: 14701 - DNA, 20 bp, Bacillus mycoides
atagccgatcggaagggcgg

SEQ ID NO: 14702 - DNA, 20 bp, Clostridium subterminale
ttgtaccaaaggagcaatcc

SEQ ID NO: 14703 - DNA, 20 bp, Actinomyces odontolyticus
ctaaccgctttgtgcggggg

SEQ ID NO: 14704 - DNA, 20 bp, Providencia alcalifaciens
ctcgctgacgaccggcggcg

SEQ ID NO: 14705 - DNA, 20 bp, Bacteroides thetaiotaomicron
tggaaacaggatagccgtaa

SEQ ID NO: 14706 - DNA, 20 bp, Paenibacillus azotofixans
tagagggagcttgctctctc

SEQ ID NO: 14707 - DNA, 30 bp, Clostridium limosum
catcatttcaatgcatgttgaaatgattaa

SEQ ID NO: 14708 - DNA, 20 bp, Dolosicoccus paucivorans
ttgtgagagaagaacagcga

SEQ ID NO: 14709 - DNA, 20 bp, Bacillus marinus
accggataaccctgactctc

SEQ ID NO: 14710 - DNA, 20 bp, Morganella morganii
gggcggtaacagggagaagc

SEQ ID NO: 14711 - DNA, 20 bp, Prevotella melaninogenica
atgaacgctagagctacagg

SEQ ID NO: 14712 - DNA, 20 bp, Clostridium limosum
cgcataacatcatttcaatg

SEQ ID NO: 14713 - DNA, 20 bp, Lactococcus raffinolactis
ttgaaagtaccaattggtac

SEQ ID NO: 14714 - DNA, 20 bp, Bacillus niacini
catgagggaaagttgaaagt

SEQ ID NO: 14715 - DNA, 20 bp, Geobacillus thermoglucosidasius
caatacaaagggctgcgaac

SEQ ID NO: 14716 - DNA, 20 bp, Campylobacter curvus
acggcgcaaccgaaagttgc

SEQ ID NO: 14717 - DNA, 20 bp, Enterobacter amnigenus
tagcacagagaggcttgttt

SEQ ID NO: 14718 - DNA, 30 bp, Paenibacillus azotofixans
aagagtaactgcttaaggagtgacggtacc

SEQ ID NO: 14719 - DNA, 20 bp, Morganella morganii
agtcgggaggaaggtggcaa

SEQ ID NO: 14720 - DNA, 20 bp, Salmonella paratyphi
ggtagctaaccttcgggagg

SEQ ID NO: 14721 - DNA, 20 bp, Anaerococcus prevotii
agatagactcttattgcttc

SEQ ID NO: 14722 - DNA, 20 bp, Citrobacter freundii
gaacggtagcgcagaggagc

SEQ ID NO: 14723 - DNA, 20 bp, Streptococcus acidominimus
cgtagctgctacatttgaat

SEQ ID NO: 14724 - DNA, 30 bp, Moellerella wisconsensis
cgagagccagcggaactcataaagtgcgtc

SEQ ID NO: 14725 - DNA, 20 bp, Clostridium clostridiiforme
gatgtatgctgggtgtggga

SEQ ID NO: 14726 - DNA, 20 bp, Paenibacillus macerans
ttcttcgggagacaggggac

SEQ ID NO: 14727 - DNA, 20 bp, Microbacterium hominis
gcgcgcccgtcaagtcatga

SEQ ID NO: 14728 - DNA, 20 bp, Eubacterium moniliforme
tgagcaatctgccctgcaat

SEQ ID NO: 14729 - DNA, 20 bp, Bacteroides merdae
gaggacgtgtccttttttgt

SEQ ID NO: 14730 - DNA, 20 bp, Streptococcus acidominimus
agtgtttactgcatggtaaa

SEQ ID NO: 14731 - DNA, 20 bp, Bacillus sp
cggttggatcaccttctaca

SEQ ID NO: 14732 - DNA, 20 bp, Myroides odoratimimus
gggtagaaaaagcttgcttt

SEQ ID NO: 14733 - DNA, 20 bp, Prevotella loescheii
ccttcggggccgccgcggag

SEQ ID NO: 14734 - DNA, 30 bp, Listeria seeligeri
tatcgcttacagatgggccgcggtgcatta

SEQ ID NO: 14735 - DNA, 20 bp, Clostridium clostridiiforme
ttggatccatggctcaggat

SEQ ID NO: 14736 - DNA, 20 bp, Stenotrophomonas maltophilia
gatcgttcagtccggattgg

SEQ ID NO: 14737 - DNA, 20 bp, Clostridium clostridiiforme
aggcggcgcttcaagtcgtc

SEQ ID NO: 14738 - DNA, 20 bp, Providencia rustigianii
ttgatgctaatatcatcagc

SEQ ID NO: 14739 - DNA, 20 bp, Vibrio hollisae
aatccccagcgctaataccg

SEQ ID NO: 14740 - DNA, 20 bp, Streptococcus equi
atgatacgtagcttgctaca

SEQ ID NO: 14741 - DNA, 30 bp, Providencia alcalifaciens
ggaaacggtagctaatccgcaataatctct

SEQ ID NO: 14742 - DNA, 20 bp, Oligella ureolytica
tattaactatcaagctagag

SEQ ID NO: 14743 - DNA, 20 bp, Haemophilus influenzae
ccgcgtagtagtcgagagat

SEQ ID NO: 14744 - DNA, 20 bp, Myroides odoratimimus
tccatggtttatcgatatgg

SEQ ID NO: 14745 - DNA, 20 bp, Corynebacterium group ANF
actaacggatcccttcgggg

SEQ ID NO: 14746 - DNA, 20 bp, Neisseria subflava
aggataccgcaaggggccgc

SEQ ID NO: 14747 - DNA, 20 bp, Eremococcus coleocola
actggctagggattgacggt

SEQ ID NO: 14748 - DNA, 20 bp, Eubacterium moniliforme
taccgcataagaccacgaaa

SEQ ID NO: 14749 - DNA, 20 bp, Sphingobacterium multivorum
gaagagtgcagagacgcact

SEQ ID NO: 14750 - DNA, 20 bp, Sporosarcina ureae
ggttattcccgaataatccc

SEQ ID NO: 14751 - DNA, 20 bp, Bacillus fusiformis
tgcttcatggtgaaagactg

SEQ ID NO: 14752 - DNA, 20 bp, Empedobacter brevis
gtgtaggacgactgccttat

SEQ ID NO: 14753 - DNA, 20 bp, Streptococcus macacae
gaaagttctccaattgacgg

SEQ ID NO: 14754 - DNA, 20 bp, Corynebacterium group ANF
cgcgtgaaactaacggatcc

SEQ ID NO: 14755 - DNA, 20 bp, Prevotella oralis
aggcagttttttaagcgtgc

SEQ ID NO: 14756 - DNA, 20 bp, Gemella morbillorum
cgcacgggtgagcacgcgta

SEQ ID NO: 14757 - DNA, 20 bp, Microbacterium hominis
gtcgaacgggtgaaggccca

SEQ ID NO: 14758 - DNA, 20 bp, Bacteroides capilosus
taccgcataatgcagctgag

SEQ ID NO: 14759 - DNA, 20 bp, Peptostreptococcus anaerobius
ctgatttgatgcttgcatta

SEQ ID NO: 14760 - DNA, 20 bp, Streptococcus infantarius
tgtgcgccgcatcatcccat

SEQ ID NO: 14761 - DNA, 20 bp, Streptococcus macacae
acagtatcgctaagagatgg

SEQ ID NO: 14762 - DNA, 20 bp, Bacillus licheniformis
tccggaaggttgttgtttga

SEQ ID NO: 14763 - DNA, 20 bp, Neisseria subflava
ataccgcaaggggccgctta

SEQ ID NO: 14764 - DNA, 20 bp, Myroides odoratimimus
gaaaaagcttgcttttttga

SEQ ID NO: 14765 - DNA, 20 bp, Staphylococcus succinus
cttccgaacggctaccttgt

SEQ ID NO: 14766 - DNA, 20 bp, Actinomyces naeslundii
gccttttggggggtgtggat

SEQ ID NO: 14767 - DNA, 20 bp, Haemophilus paraphrophilus
tacaaggtaacctagggaat

SEQ ID NO: 14768 - DNA, 20 bp, Bacteroides thetaiotaomicron
atgatagccgggggtactga

SEQ ID NO: 14769 - DNA, 20 bp, Haemophilus paraphrophilus
agtcgtacaaggtaacctag

SEQ ID NO: 14770 - DNA, 20 bp, Anaerococcus tetradius
atgaaccttgtattgatttc

SEQ ID NO: 14771 - DNA, 20 bp, Streptococcus sp.
agtcggtgaggtaccgtaag

SEQ ID NO: 14772 - DNA, 20 bp, Sphingobacterium multivorum
atggcccttacgcttcgggg

SEQ ID NO: 14773 - DNA, 20 bp, Bacteroides thetaiotaomicron
gtagtaccgcaaggagcgtc

SEQ ID NO: 14774 - DNA, 20 bp, Paenibacillus lautus
ccaaaactggatgacttgag

SEQ ID NO: 14775 - DNA, 20 bp, Paenibacillus azotofixans
ctgaatcgtttagagatagg

SEQ ID NO: 14776 - DNA, 20 bp, Corynebacterium pilosum
cgggtttttccttcttgtgt

SEQ ID NO: 14777 - DNA, 20 bp, Pasteurella multocida
ctctgaggagtaaagggtgg

SEQ ID NO: 14778 - DNA, 20 bp, Anaerococcus tetradius
gatagtttcttaagacttcg

SEQ ID NO: 14779 - DNA, 20 bp, Anaerococcus prevotii
ggatttagtagacagaagcc

SEQ ID NO: 14780 - DNA, 20 bp, Paenibacillus lautus
caggcggtcatttaagttgg

SEQ ID NO: 14781 - DNA, 20 bp, Burkholderia gladioli
acggggtgcttgcacctggt

SEQ ID NO: 14782 - DNA, 20 bp, Prevotella melaninogenica
agagctacaggcttaacaca

SEQ ID NO: 14783 - DNA, 20 bp, Paenibacillus lautus
tgccagggaagaacgtctct

SEQ ID NO: 14784 - DNA, 30 bp, Paenibacillus alvei
agtgcttgcacttctgagacttagcggcgg

SEQ ID NO: 14785 - DNA, 20 bp, Empedobacter brevis
ccgaggggtacgattctttc

SEQ ID NO: 14786 - DNA, 20 bp, Actinomyces neuii
ggtcagggaacgtgcggcgt

SEQ ID NO: 14787 - DNA, 20 bp, Streptococcus acidominimus
  misc_feature (1)..(1): n is a, c, g, or t
ntggatcacctccttcatgg

SEQ ID NO: 14788 - DNA, 20 bp, Myroides odoratimimus
cgatatggcatcgtattgat

SEQ ID NO: 14789 - DNA, 20 bp, Bacteroides stercoris
gtggttttttgcatgtaccg

SEQ ID NO: 14790 - DNA, 20 bp, Anaerococcus tetradius
agcttatcaaagatttatcg

SEQ ID NO: 14791 - DNA, 20 bp, Stenotrophomonas maltophilia
gcactatcgaatgagcccat

SEQ ID NO: 14792 - DNA, 20 bp, Capnocytophaga sp.
tggtatataggtgtggcatc

SEQ ID NO: 14793 - DNA, 20 bp, Gemella morbillorum
tgcaattgctatcgctacca

SEQ ID NO: 14794 - DNA, 20 bp, Bacteroides capilosus
tcttttatcagggacgaaat

SEQ ID NO: 14795 - DNA, 20 bp, Paenibacillus lautus
ggaaagaaagacggagcaat

SEQ ID NO: 14796 - DNA, 20 bp, Campylobacter curvus
gtgtgctttaggtgggtcaa

SEQ ID NO: 14797 - DNA, 20 bp, Brevibacillus centrosporus
gaagacggaaaggcggcgca

SEQ ID NO: 14798 - DNA, 20 bp, Anaerococcus tetradius
agatatttagattccttcgg

SEQ ID NO: 14799 - DNA, 20 bp, Pseudomonas luteola
acggtaccacgggtgattca

SEQ ID NO: 14800 - DNA, 20 bp, Capnocytophaga sp.
aaatcatccggcccttacat

SEQ ID NO: 14801 - DNA, 20 bp, Neisseria sicca
ggaaccttccggagacggaa

SEQ ID NO: 14802 - DNA, 20 bp, Pediococcus inopinatus
atgatttagagatgcttgca

SEQ ID NO: 14803 - DNA, 30 bp, Clostridium clostridiiforme
aaaagccatccccagttcggattgcagtct

SEQ ID NO: 14804 - DNA, 20 bp, Bacillus mycoides
caaggatagccgatcggaag

SEQ ID NO: 14805 - DNA, 20 bp, Corynebacterium coyleae
agatgctggtttccctttgt

SEQ ID NO: 14806 - DNA, 20 bp, Bacteroides stercoris
ttttttgcatgtaccgtatg

SEQ ID NO: 14807 - DNA, 20 bp, Corynebacterium pilosum
aactgggtgtcttattccgg

SEQ ID NO: 14808 - DNA, 20 bp, Bacteroides ovatus
gtatagccgtaaggctgttg

SEQ ID NO: 14809 - DNA, 30 bp, Staphylococcus schleiferi
gacaggagcttgctcctttgaagttagcgg

SEQ ID NO: 14810 - DNA, 20 bp, Sphingomonas paucimobilis
tcgtacaagggagccgaggg

SEQ ID NO: 14811 - DNA, 20 bp, Gordonia bronchialis
cgaagccgggggcctaaccc

SEQ ID NO: 14812 - DNA, 20 bp, Leuconostoc gelidum
tctaaaaggcgctacggcgt

SEQ ID NO: 14813 - DNA, 20 bp, Capnocytophaga sp.
catcacatttatattaaagc

SEQ ID NO: 14814 - DNA, 20 bp, Peptostreptococcus anaerobius
gagcgcgtctgttttgatgc

SEQ ID NO: 14815 - DNA, 20 bp, Sphingobacterium multivorum
atgtaaggtggggactttaa

SEQ ID NO: 14816 - DNA, 20 bp, Enterococcus raffinosus
atcactctggagacagagtt

SEQ ID NO: 14817 - DNA, 20 bp, Streptococcus criceti
taggctgcgatacatagccg

SEQ ID NO: 14818 - DNA, 20 bp, Dolosicoccus paucivorans
tgaaggcaccgatacatcga

SEQ ID NO: 14819 - DNA, 20 bp, Myroides odoratimimus
gtcgaggggtagaaaaagct

SEQ ID NO: 14820 - DNA, 20 bp, Neisseria subflava
cgcaaccccttgtacattag

SEQ ID NO: 14821 - DNA, 30 bp, Streptococcus acidominimus
gcatggtaaacatttaaaaggtgcaactgc

SEQ ID NO: 14822 - DNA, 20 bp, Bacteroides capillosus
cctatttgcaggtaccgtat

SEQ ID NO: 14823 - DNA, 20 bp, Proteus mirabilis
caaccgtcaggggaacctgc

SEQ ID NO: 14824 - DNA, 20 bp, Streptococcus ratti
gtgctttggaaactgcagga

SEQ ID NO: 14825 - DNA, 20 bp, Moellerella wisconsensis
tgtatggggatctgcctgac

SEQ ID NO: 14826 - DNA, 20 bp, Anaerococcus tetradius
taataccctatgacataaac

SEQ ID NO: 14827 - DNA, 20 bp, Finegoldia magna
ctcgaaagccaatcccagtt

SEQ ID NO: 14828 - DNA, 20 bp, Abiotrophia defectiva
tgggatcacatgattccgtg

SEQ ID NO: 14829 - DNA, 20 bp, Corynebacterium auris
tacagcgcgtgtgcgatact

SEQ ID NO: 14830 - DNA, 20 bp, Myroides odoratus
gtagaaggagcttgcttttt

SEQ ID NO: 14831 - DNA, 20 bp, Anaerococcus tetradius
atagtttcttaagacttcgg

SEQ ID NO: 14832 - DNA, 20 bp, Serratia fonticola
gaagggttcggtgttaatag

SEQ ID NO: 14833 - DNA, 20 bp, Corynebacterium jeikeium
tagggaagaagccttttggt

SEQ ID NO: 14834 - DNA, 20 bp, Peptoniphilus asaccharolyticus
agatgaaatggattagcggc

SEQ ID NO: 14835 - DNA, 20 bp, Campylobacter concisus
cctgtcaaagggagctgcga

SEQ ID NO: 14836 - DNA, 30 bp, Leuconostoc carnosum
gcactgttgtatgggaagaaaagttaaggt

SEQ ID NO: 14837 - DNA, 20 bp, Actinomyces radingae
gggggtgtgggaaaggggct

SEQ ID NO: 14838 - DNA, 20 bp, Finegoldia magna
aggtatagagatatacccct

SEQ ID NO: 14839 - DNA, 20 bp, Bacteroides capilosus
agtcgcatgacactggctgc

SEQ ID NO: 14840 - DNA, 20 bp, Anaerococcus prevotii
ttcggcagaactgtaataca

SEQ ID NO: 14841 - DNA, 20 bp, Prevotella intermedia
gtgcgatgcaaatagcatcc

SEQ ID NO: 14842 - DNA, 20 bp, Clostridium clostridiiforme
aggaaggatccgcctaaaga

SEQ ID NO: 14843 - DNA, 20 bp, Oligella urethralis
accagctacagatcccgcct

SEQ ID NO: 14844 - DNA, 20 bp, Bacillus coagulans
taataccgaataacactttc

SEQ ID NO: 14845 - DNA, 20 bp, Streptococcus criceti
tgtaagagaagaacgttgag

SEQ ID NO: 14846 - DNA, 20 bp, Staphylococcus epidermidis
cgtgcgtgccctaatacatg

SEQ ID NO: 14847 - DNA, 20 bp, Bacillus schlegellii
tgggtggaagcctgtctctt

SEQ ID NO: 14848 - DNA, 20 bp, Sphingobacterium multivorum
ggcccttacgcttcggggct

SEQ ID NO: 14849 - DNA, 20 bp, Leuconostoc fallax
gcttcggcctcacttagaga

SEQ ID NO: 14850 - DNA, 20 bp, Leptotrichia buccalis
tgtgcttgcacaggcgagcc

SEQ ID NO: 14851 - DNA, 20 bp, Sphingobacterium multivorum
acgcttcggggctatcacac

SEQ ID NO: 14852 - DNA, 20 bp, Citrobacter farmeri
tgtcagagatgaggtagtgc

SEQ ID NO: 14853 - DNA, 20 bp, Vibrio hollisae
atgtacggaattctggagag

SEQ ID NO: 14854 - DNA, 20 bp, Paenibacillus azotofixans
ataggcgcggccttcgggac

SEQ ID NO: 14855 - DNA, 20 bp, Haemophilus influenzae
agtcgagagatgaaagtgcg

SEQ ID NO: 14856 - DNA, 20 bp, Bacteroides capilosus
tcggagtggggaataacagt

SEQ ID NO: 14857 - DNA, 20 bp, Actinomyces odontolyticus
taaccgctttgtgcgggggg

SEQ ID NO: 14858 - DNA, 20 bp, Porphyromonas endodontalis
gaaactgatatgctagagag

SEQ ID NO: 14859 - DNA, 30 bp, Bacteroides eggerthii
tgatactgggcgccttgagtgcagcatagg

SEQ ID NO: 14860 - DNA, 20 bp, Clostridium clostridiiforme
cagggtaggaggtttggatc

SEQ ID NO: 14861 - DNA, 20 bp, Peptostreptococcus anaerobius
cattgatgaaagatgagcgg

SEQ ID NO: 14862 - DNA, 20 bp, Bacteroides capilosus
agtcagggtgtgaaaaccac

SEQ ID NO: 14863 - DNA, 20 bp, Sphingobacterium multivorum
gactttaaacagactggctg

SEQ ID NO: 14864 - DNA, 20 bp, Anaerococcus tetradius
tgtctggaataatctgggtg

SEQ ID NO: 14865 - DNA, 20 bp, Pseudomonas oryzihabitans
cttacagcgaatacctgtga

SEQ ID NO: 14866 - DNA, 20 bp, Gemella morbillorum
ttgcgcacgggtgagcacgc

SEQ ID NO: 14867 - DNA, 20 bp, Bacteroides merdae
ttgtagcaatacagattgat

SEQ ID NO: 14868 - DNA, 20 bp, Haemophilus parahaemolyticus
gaacgctggccggcaggctt

SEQ ID NO: 14869 - DNA, 20 bp, Anaerococcus prevotii
ctcttattgcttcggcagaa

SEQ ID NO: 14870 - DNA, 20 bp, Peptoniphilus asaccharolyticus
aatattgaccgctctagaga

SEQ ID NO: 14871 - DNA, 20 bp, Sporosarcina ureae
tctggcatgagggaatgttg

SEQ ID NO: 14872 - DNA, 20 bp, Streptococcus acidominimus
gattctcccgtagctgctac

SEQ ID NO: 14873 - DNA, 20 bp, Prevotella loescheii
cgatgaggcccttcggggcc

SEQ ID NO: 14874 - DNA, 20 bp, Peptoniphilus indolicus
ttgagttggattagcggcgg

SEQ ID NO: 14875 - DNA, 20 bp, Anaerococcus tetradius
acataaactcttcgcatgaa

SEQ ID NO: 14876 - DNA, 20 bp, Psychrobacter phenylpyruvicus
cccgttgaccgctgtagaga

SEQ ID NO: 14877 - DNA, 20 bp, Geobacillus thermoglucosidasius
accgaacggaagcttgcttc

SEQ ID NO: 14878 - DNA, 20 bp, Oligella urethralis
tcccgccttggtaggccgtt

SEQ ID NO: 14879 - DNA, 20 bp, Eubacterium moniliforme
ctttgggaagccctcgggtg

SEQ ID NO: 14880 - DNA, 20 bp, Stenotrophomonas maltophilia
ggggaaggaaggtgataagg

SEQ ID NO: 14881 - DNA, 20 bp, Bacillus schlegellii
gcgcgtgcagcgctgaaggc

SEQ ID NO: 14882 - DNA, 20 bp, Bacteroides capillosus
aggtttagcggtaagggatg

SEQ ID NO: 14883 - DNA, 20 bp, Bacillus sp
ttggatcaccttctacatgg

SEQ ID NO: 14884 - DNA, 20 bp, Staphylococcus schleiferi
aagctaagcccgtcgaaagt

SEQ ID NO: 14885 - DNA, 20 bp, Neisseria subflava
ccgatcgagtccggattgca

SEQ ID NO: 14886 - DNA, 20 bp, Anaerococcus tetradius
tagtttcttaagacttcggt

SEQ ID NO: 14887 - DNA, 20 bp, Helcococcus kunzii
ggttcggtttagaaactggt

SEQ ID NO: 14888 - DNA, 30 bp, Streptococcus sanguinis
tcacactgtgaccggatcttaccagaaagg

SEQ ID NO: 14889 - DNA, 20 bp, Corynebacterium pseudotuberculosis
agttcgaacggaaaggcccc

SEQ ID NO: 14890 - DNA, 20 bp, Finegoldia magna
aagtcgaatgttaaagatcg

SEQ ID NO: 14891 - DNA, 20 bp, Bacteroides stercoris
atacgggaataaagttagcc

SEQ ID NO: 14892 - DNA, 20 bp, Streptococcus macacae
gtaagcgaagaacgggtgta

SEQ ID NO: 14893 - DNA, 20 bp, Bacteroides ovatus
taccggatagcatacgaata

SEQ ID NO: 14894 - DNA, 20 bp, Streptococcus infantarius
atcccatctcaggtcggcta

SEQ ID NO: 14895 - DNA, 20 bp, Suttonella indologenes
ttgctgcggacctagtggcg

SEQ ID NO: 14896 - DNA, 20 bp, Streptococcus macacae
tcgcatgataggagcttaaa

SEQ ID NO: 14897 - DNA, 20 bp, Clostridium clostridiiforme
caagtcgtctgtcaaaagcc

SEQ ID NO: 14898 - DNA, 20 bp, Microbacterium hominis
cgatcccgggtctggtacac

SEQ ID NO: 14899 - DNA, 20 bp, Finegoldia magna
aagattactaatgagagtgg

SEQ ID NO: 14900 - DNA, 20 bp, Streptococcus macacae
aagcattggcttaaccaatg

SEQ ID NO: 14901 - DNA, 20 bp, Streptococcus pyogenes
agaacgctgagaactgggtg

SEQ ID NO: 14902 - DNA, 20 bp, Eubacterium moniliforme
cgacctcgtaagagtaagcg

SEQ ID NO: 14903 - DNA, 20 bp, Bacteroides merdae
ttgttaaagattcatcgctg

SEQ ID NO: 14904 - DNA, 20 bp, Sporosarcina pasteurii
caaaggaagaaacaagtttc

SEQ ID NO: 14905 - DNA, 20 bp, Campylobacter concisus
agtcgtaacagggagccgac

SEQ ID NO: 14906 - DNA, 20 bp, Prevotella loescheii
cttcggggccgccgcggagg

SEQ ID NO: 14907 - DNA, 20 bp, Bacteroides merdae
ccttctagcaatagcagatt

SEQ ID NO: 14908 - DNA, 20 bp, Anaerobiospirillum succiniciproducens
aggaatctttcagagataag

SEQ ID NO: 14909 - DNA, 20 bp, Helcococcus kunzii
catatacaggaatatcctag

SEQ ID NO: 14910 - DNA, 20 bp, Clostridium clostridiiforme
ctaatacctcataagccgga

SEQ ID NO: 14911 - DNA, 20 bp, Brevibacterium casei
gtctcagtttttcggatcgt

SEQ ID NO: 14912 - DNA, 20 bp, Eubacterium moniliforme
gcgacctcgtaagagtaagc

SEQ ID NO: 14913 - DNA, 20 bp, Eubacterium moniliforme
gagagctgtcgaaggtgaga

SEQ ID NO: 14914 - DNA, 20 bp, Sporosarcina ureae
atcccattctcttctggcat

SEQ ID NO: 14915 - DNA, 20 bp, Vibrio harveyi
cgagttccggatcggagtct

SEQ ID NO: 14916 - DNA, 20 bp, Bacteroides capillosus
tcgcggggcagcatggaggg

SEQ ID NO: 14917 - DNA, 20 bp, Clostridium clostridiiforme
gggatggttcgagagactta

SEQ ID NO: 14918 - DNA, 20 bp, Streptococcus ratti
taataccgcataagagagtt

SEQ ID NO: 14919 - DNA, 20 bp, Corynebacterium group F1
tggcgacacgggttgagtaa

SEQ ID NO: 14920 - DNA, 20 bp, Nocardia asteroides
ctaaagagagtggacgttac

SEQ ID NO: 14921 - DNA, 20 bp, Vibrio harveyi
atcccataaagtgcgtcgag

SEQ ID NO: 14922 - DNA, 20 bp, Fusobacterium mortiferum
tgtgccccttcgggggaact

SEQ ID NO: 14923 - DNA, 20 bp, Sphingobacterium multivorum
ttcggttgattaaatattta

SEQ ID NO: 14924 - DNA, 20 bp, Haemophilus parainfluenzae
atagactagatgattgacgt

SEQ ID NO: 14925 - DNA, 20 bp, Anaerobiospirillum succiniciproducens
aatgttgcgggaatacgttc

SEQ ID NO: 14926 - DNA, 20 bp, Dolosigranulum pigrum
gctaccactcatggatagcc

SEQ ID NO: 14927 - DNA, 20 bp, Fusobacterium mortiferum
acttgatcctcggggtgatg

SEQ ID NO: 14928 - DNA, 20 bp, Serratia proteamaculans
ttaatagcgcatcacattga

SEQ ID NO: 14929 - DNA, 20 bp, Gemella morbillorum
ctaatcccgcatatcagcta

SEQ ID NO: 14930 - DNA, 20 bp, Paenibacillus alvei
ttctgagacttagcggcgga

SEQ ID NO: 14931 - DNA, 20 bp, Campylobacter curvus
ggagcgtagctccttgtcgc

SEQ ID NO: 14932 - DNA, 20 bp, Anaerococcus prevotii
tgaaatcttgacagaaccct

SEQ ID NO: 14933 - DNA, 20 bp, Morganella morganii
ggtggcaaggttaataacct

SEQ ID NO: 14934 - DNA, 20 bp, Enterococcus saccharolyticus
atcatgcaagtcgaacgctt

SEQ ID NO: 14935 - DNA, 20 bp, Proteus mirabilis
gcttctggaggctaacgcgt

SEQ ID NO: 14936 - DNA, 20 bp, Porphyromonas endodontalis
agacagccgtgcgtaagacg

SEQ ID NO: 14937 - DNA, 20 bp, Streptococcus bovis
tttgaaagtaccaactggta

SEQ ID NO: 14938 - DNA, 20 bp, Microbacterium hominis
ccgggtctggtacacgcgcg

SEQ ID NO: 14939 - DNA, 20 bp, Clostridium clostridiiforme
gccgcatggtctggtgcgaa

SEQ ID NO: 14940 - DNA, 20 bp, Pediococcus parvulus
cgttaattgattttgagatg

SEQ ID NO: 14941 - DNA, 20 bp, Empedobacter brevis
catcatttaattttgaaaga

SEQ ID NO: 14942 - DNA, 20 bp, Alloiococcus otitis
cttgacatcttctgccacct

SEQ ID NO: 14943 - DNA, 30 bp, Kocuria rosea
gcagatgcagcaacgctgcggtgaatacgc

SEQ ID NO: 14944 - DNA, 20 bp, Enterobacter amnigenus
ggcttgttttctgggtgacg

SEQ ID NO: 14945 - DNA, 20 bp, Sporosarcina ureae
tcatggagacatgattttcc

SEQ ID NO: 14946 - DNA, 20 bp, Brevibacillus brevis
gacagatgataggggagaag

SEQ ID NO: 14947 - DNA, 20 bp, Leuconostoc carnosum
gctcaggagaacgctggtgg

SEQ ID NO: 14948 - DNA, 20 bp, Propionibacterium propionicus
accctgagcttgctttcgat

SEQ ID NO: 14949 - DNA, 20 bp, Bacteroides stercoris
atagttttcccgcatggaat

SEQ ID NO: 14950 - DNA, 20 bp, Dolosicoccus paucivorans
ttcgcatgtttcattgacaa

SEQ ID NO: 14951 - DNA, 20 bp, Clostridium clostridiiforme
aaagccggaggcctaaccgc

SEQ ID NO: 14952 - DNA, 20 bp, Bacteroides thetaiotaomicron
ataggccgtaaggcatttgt

SEQ ID NO: 14953 - DNA, 20 bp, Bacillus coagulans
tctatcaagttagcggcgga

SEQ ID NO: 14954 - DNA, 20 bp, Peptoniphilus asaccharolyticus
gctcaacccttgtaagcatt

SEQ ID NO: 14955 - DNA, 20 bp, Microbacterium hominis
ctccccttgtggagggagcc

SEQ ID NO: 14956 - DNA, 20 bp, Globicatella sanguinis
tgacatctcttgcatatctt

SEQ ID NO: 14957 - DNA, 20 bp, Pseudomonas mendocina
aataccctgcagttttgacg

SEQ ID NO: 14958 - DNA, 20 bp, Eschericchia vulneris
acggtccagtactcctactg

SEQ ID NO: 14959 - DNA, 20 bp, Pediococcus parvulus
taccgcataacaaaattaac

SEQ ID NO: 14960 - DNA, 20 bp, Peptoniphilus asaccharolyticus
tcggagaatttcggtgccgc

SEQ ID NO: 14961 - DNA, 30 bp, Vibrio metschnikovii
cgcatgatagcctacggctcaaagaggggg

SEQ ID NO: 14962 - DNA, 20 bp, Serratia proteamaculans
aatagcgcatcacattgacg

SEQ ID NO: 14963 - DNA, 20 bp, Bacteroides vulgatus
catacccgtttgcatgtact

SEQ ID NO: 14964 - DNA, 20 bp, Weissella paramesenteroides
ctgatctgacgagcttgctc

SEQ ID NO: 14965 - DNA, 20 bp, Propionibacterium acnes
gattaggactaagtcggtac

SEQ ID NO: 14966 - DNA, 20 bp, Lactococcus raffinolactis
gtacactgagagatggaccc

SEQ ID NO: 14967 - DNA, 20 bp, Sphingobacterium multivorum
aacatatgtgaccggcatcg

SEQ ID NO: 14968 - DNA, 20 bp, Vibrio cholerae
agcgtcctcccggaaggtaa

SEQ ID NO: 14969 - DNA, 20 bp, Facklamia ignava
cggaacgcgccgagaaggga

SEQ ID NO: 14970 - DNA, 20 bp, Escherichia fergusonii
ggatcagcttgctgattcgc

SEQ ID NO: 14971 - DNA, 20 bp, Finegoldia magna
agttaccagcgaataaatgt

SEQ ID NO: 14972 - DNA, 20 bp, Clostridium clostridiiforme
tcgagcgaagcggtttcgat

SEQ ID NO: 14973 - DNA, 20 bp, Anaerococcus prevotii
gatatgatagcctcgcatga

SEQ ID NO: 14974 - DNA, 20 bp, Actinomyces naeslundii
aagatgcgcctttgggtgtt

SEQ ID NO: 14975 - DNA, 20 bp, Clostridium clostridiiforme
ttgtgtcctatcaggcagtt

SEQ ID NO: 14976 - DNA, 20 bp, Bacillus licheniformis
gttgttgtttgaccggcagg

SEQ ID NO: 14977 - DNA, 20 bp, Clostridium clostridiiforme
gcctaaagagtgtccggtga

SEQ ID NO: 14978 - DNA, 20 bp, Enterococcus dispar
aaacacatgtttattatttg

SEQ ID NO: 14979 - DNA, 20 bp, Oligella ureolytica
ggccgatattagattagcta

SEQ ID NO: 14980 - DNA, 20 bp, Bacillus laevolacticus
attgaccttgcccttcgggg

SEQ ID NO: 14981 - DNA, 20 bp, Campylobacter curvus
tataagtataaatgggaaag

SEQ ID NO: 14982 - DNA, 20 bp, Bacteroides stercoris
agcgagcgcaacccttgcgg

SEQ ID NO: 14983 - DNA, 20 bp, Sphingobacterium multivorum
cgcatgttcggttgattaaa

SEQ ID NO: 14984 - DNA, 20 bp, Streptococcus ratti
aagagagtttaacacatgtt

SEQ ID NO: 14985 - DNA, 20 bp, Leptotrichia buccalis
cgtatgcccgtgagagcggg

SEQ ID NO: 14986 - DNA, 30 bp, Vibrio harveyi
aaggtggtggacgacgtcaaagtcatcatg

SEQ ID NO: 14987 - DNA, 20 bp, Peptoniphilus asaccharolyticus
caagtcgagcgatgaaaatc

SEQ ID NO: 14988 - DNA, 20 bp, Unknown Organism
  oligonucleotide from CDC group EO-2
gcaaggtcggaggcgaggga

SEQ ID NO: 14989 - DNA, 20 bp, Brevibacillus centrosporus
cttgaaagccgggttttggg

SEQ ID NO: 14990 - DNA, 20 bp, Neisseria subflava
taggtaggataccgcaaggg

SEQ ID NO: 14991 - DNA, 20 bp, Burkholderia stabilis
gggtagccgtatcggagggt

SEQ ID NO: 14992 - DNA, 20 bp, Sphingobacterium multivorum
cattcacaggtcggattggg

SEQ ID NO: 14993 - DNA, 20 bp, Pediococcus dextrinicus
gaacgagttttcttttaatg

SEQ ID NO: 14994 - DNA, 20 bp, Campylobacter curvus
agggtttctcgctatgggat

SEQ ID NO: 14995 - DNA, 20 bp, Leuconostoc gelidum
tcaagctctaaaaggcgcta

SEQ ID NO: 14996 - DNA, 20 bp, Empedobacter brevis
ccgtaggcggattaatcagt

SEQ ID NO: 14997 - DNA, 20 bp, Streptococcus infantarius
ggagccgtatcggaagggcg

SEQ ID NO: 14998 - DNA, 20 bp, Finegoldia magna
ggatttagtagacagaagct

SEQ ID NO: 14999 - DNA, 20 bp, Vagococcus fluvialis
gcatgggagaataataaaag

SEQ ID NO: 15000 - DNA, 20 bp, Empedobacter brevis
tgatgttgaagtggctggaa

SEQ ID NO: 15001 - DNA, 20 bp, Paenibacillus azotofixans
caagagtaactgctaaagga

SEQ ID NO: 15002 - DNA, 20 bp, Leuconostoc carnosum
gaccttagcctgacggtacc

SEQ ID NO: 15003 - DNA, 20 bp, Clostridium limosum
taacatcatttcaatgcatg

SEQ ID NO: 15004 - DNA, 20 bp, Bacteroides capilosus
  misc_feature (20)..(20): n is a, c, g, or t
cgaaataaatgacggtactn

SEQ ID NO: 15005 - DNA, 20 bp, Clostridium clostridiiforme
tttcggatggatttgaaatt

SEQ ID NO: 15006 - DNA, 20 bp, Clostridium clostridiiforme
aaccgcgaggaaggatccgc

SEQ ID NO: 15007 - DNA, 20 bp, Streptococcus acidominimus
tggaaaatccgctaagtgac

SEQ ID NO: 15008 - DNA, 20 bp, Bacillus niacini
gtcgagcgaatcttgaggtg

SEQ ID NO: 15009 - DNA, 20 bp, Anaerococcus tetradius
aaccttgtattgatttcttc

SEQ ID NO: 15010 - DNA, 30 bp, Moellerella wisconsensis
tactatcagcgattgacgttaccgacagaa

SEQ ID NO: 15011 - DNA, 20 bp, Globicatella sanguinis
agccggtggcctaaccaata

SEQ ID NO: 15012 - DNA, 20 bp, Corynebacterium group ANF
atcacatggtaagaagatga

SEQ ID NO: 15013 - DNA, 20 bp, Paenibacillus alvei
agatgagaaaggcggagcaa

SEQ ID NO: 15014 - DNA, 20 bp, Achromobacter xylosoxidans
agtcccgcccctaaacgatg

SEQ ID NO: 15015 - DNA, 20 bp, Corynebacterium pilosum
ttgggtattctggcctggtc

SEQ ID NO: 15016 - DNA, 20 bp, Myroides odoratimimus
tatcgatatggcatcgtatt

SEQ ID NO: 15017 - DNA, 20 bp, Streptococcus urinalis
ggaaagtctacttcgtgacg

SEQ ID NO: 15018 - DNA, 20 bp, Morganella morganii
cgggggacctccgggcctcg

SEQ ID NO: 15019 - DNA, 20 bp, Anaerobiospirillum succiniciproducens
actttcagggggaggaaaca

SEQ ID NO: 15020 - DNA, 20 bp, Streptococcus macacae
taccgcatgacagcttttat

SEQ ID NO: 15021 - DNA, 20 bp, Actinomyces bovis
gtgcgaaggtaggatcgatg

SEQ ID NO: 15022 - DNA, 20 bp, Providencia rettgeri
ctaatatcatcaacgattga

SEQ ID NO: 15023 - DNA, 20 bp, Alloiococcus otitis
tggctctgctaccgcttatg

SEQ ID NO: 15024 - DNA, 20 bp, Streptococcus sp.
cggtgaggtaccgtaaggag

SEQ ID NO: 15025 - DNA, 20 bp, Anaerobiospirillum succiniciproducens
accatgggagcggatgcacc

SEQ ID NO: 15026 - DNA, 20 bp, Vibrio parahaemolyticus
gctaaaagaagtaggctagt

SEQ ID NO: 15027 - DNA, 20 bp, Unknown Organism
  oligonucleotide from CDC group EF-4B
gttaatacccatgactgatg

SEQ ID NO: 15028 - DNA, 20 bp, Haemophilus segnis
gggttgaactttaggtttgg

SEQ ID NO: 15029 - DNA, 20 bp, Vibrio vulnificus
ggacgccaccactttgggtc

SEQ ID NO: 15030 - DNA, 20 bp, Paenibacillus pabuli
tgcttttcttgatacttagc

SEQ ID NO: 15031 - DNA, 20 bp, Staphylococcus schleiferi
agtaaccatttggaagctaa

SEQ ID NO: 15032 - DNA, 20 bp, Myroides odoratimimus
ccatggtttatcgatatggc

SEQ ID NO: 15033 - DNA, 20 bp, Anaerobiospirillum succiniciproducens
agggggaggaaacactgacg

SEQ ID NO: 15034 - DNA, 20 bp, Facklamia sourekii
catgagtttaagttgaaaga

SEQ ID NO: 15035 - DNA, 20 bp, Burkholderia stabilis
cgtatcggagggtgcggttg

SEQ ID NO: 15036 - DNA, 20 bp, Corynebacterium diphtheriae
aggtccatgccgtaaacggt

SEQ ID NO: 15037 - DNA, 20 bp, Streptococcus ferus
acgtgacggtacttaaccag

SEQ ID NO: 15038 - DNA, 20 bp, Leptotrichia buccalis
ttgtcagactgacgcatgtc

SEQ ID NO: 15039 - DNA, 20 bp, Achromobacter xylosoxidans
atttggagcggccgatatcg

SEQ ID NO: 15040 - DNA, 20 bp, Cedecea lapagei
ggcctgcgcgacagcgttca

SEQ ID NO: 15041 - DNA, 20 bp, Proteus vulgaris
tcacctagcaacgatctcta

SEQ ID NO: 15042 - DNA, 20 bp, Moellerella wisconsensis
aaggcgttgatattaatact

SEQ ID NO: 15043 - DNA, 20 bp, Clostridium clostridiiforme
tgtgggactagcgatagttc

SEQ ID NO: 15044 - DNA, 20 bp, Pseudomonas luteola
ggtaccacgggtgattcatg

SEQ ID NO: 15045 - DNA, 20 bp, Bacillus mycoides
cggaagggcggtggatcacc

SEQ ID NO: 15046 - DNA, 20 bp, Leptotrichia buccalis
ctggagtattggagaggtgg

SEQ ID NO: 15047 - DNA, 20 bp, Corynebacterium kutscheri
gcctaaccacgtttgtggag

SEQ ID NO: 15048 - DNA, 20 bp, Shewanella putrefaciens
agaatctcgcttcagagata

SEQ ID NO: 15049 - DNA, 20 bp, Enterobacter gergoviae
acttggaggctgtggtcctt

SEQ ID NO: 15050 - DNA, 30 bp, Arcanobacterium haemolyticum
aggctcctgcttgcgggggttggattagtg

SEQ ID NO: 15051 - DNA, 20 bp, Paenibacillus alvei
agagtcccttcttcggaaca

SEQ ID NO: 15052 - DNA, 20 bp, Paenibacillus macerans
gtcacttagagatggacctg

SEQ ID NO: 15053 - DNA, 20 bp, Prevotella loescheii
tcggagacgatgaggccctt

SEQ ID NO: 15054 - DNA, 20 bp, Streptococcus thermophilus
tcacctccttcatggtcata

SEQ ID NO: 15055 - DNA, 30 bp, Suttonella indologenes
aacgagggaagcagcttgctgcggacctag

SEQ ID NO: 15056 - DNA, 20 bp, Peptoniphilus indolicus
gctaggtgtcggaggatttc

SEQ ID NO: 15057 - DNA, 20 bp, Eubacterium moniliforme
ctctgacgcatatagagata

SEQ ID NO: 15058 - DNA, 20 bp, Citrobacter koseri
cagagatgagcaatgtgcct

SEQ ID NO: 15059 - DNA, 20 bp, Lactococcus raffinolactis
gagtgctagttgtttggggc

SEQ ID NO: 15060 - DNA, 20 bp, Leuconostoc carnosum
gttaaggtagggaatgacct

SEQ ID NO: 15061 - DNA, 20 bp, Dolosicoccus paucivorans
gaacagcgagtagagtaact

SEQ ID NO: 15062 - DNA, 20 bp, Sporosarcina ureae
acaggagtaactgcctgtac

SEQ ID NO: 15063 - DNA, 20 bp, Gemella morbillorum
gggtgagcacgcgtaggtac

SEQ ID NO: 15064 - DNA, 20 bp, Finegoldia magna
tttaataagtcgaatgttaa

SEQ ID NO: 15065 - DNA, 20 bp, Bacteroides capillosus
gaacggcctagggcgaaact

SEQ ID NO: 15066 - DNA, 20 bp, Anaerococcus tetradius
gtattgatttcttcggaatg

SEQ ID NO: 15067 - DNA, 20 bp, Aerococcus viridans
agcgagtcgcgaacccgcga

SEQ ID NO: 15068 - DNA, 20 bp, Streptococcus criceti
cgcataatagtgattaactc

SEQ ID NO: 15069 - DNA, 20 bp, Streptococcus infantarius
gtgtgcgccgcatcatccca

SEQ ID NO: 15070 - DNA, 20 bp, Bacillus laevolacticus
atggctcagggccgaacgct

SEQ ID NO: 15071 - DNA, 20 bp, Streptococcus macacae
aagtcagtagttaaaagcat

SEQ ID NO: 15072 - DNA, 20 bp, Paenibacillus amylolyticus
gcttgcatcctctgatgctt

SEQ ID NO: 15073 - DNA, 20 bp, Unknown Organism
  oligonucleotide from CDC group EF-4B
tgcgtttgaaactgggtgac

SEQ ID NO: 15074 - DNA, 20 bp, Clostridium clostridiiforme
tcttgacatcccattgaaaa

SEQ ID NO: 15075 - DNA, 20 bp, Lactococcus raffinolactis
ttggtacactgagagatgga

SEQ ID NO: 15076 - DNA, 20 bp, Vibrio alginolyticus
atgccacggggaatacgttc

SEQ ID NO: 15077 - DNA, 20 bp, Finegoldia magna
attcgtatcgtaaagttctg

SEQ ID NO: 15078 - DNA, 20 bp, Anaerobiospirillum succiniciproducens
aaacgataccgggaggggag

SEQ ID NO: 15079 - DNA, 20 bp, Anaerococcus prevotii
agagggcagctatatagtga

SEQ ID NO: 15080 - DNA, 20 bp, Paenibacillus alvei
gagttgatgaagtgcttgca

SEQ ID NO: 15081 - DNA, 20 bp, Clostridium clostridiiforme
ttgattggaacattcaagca

SEQ ID NO: 15082 - DNA, 20 bp, Staphylococcus schleiferi
gtatcggaaagtgccggtgg

SEQ ID NO: 15083 - DNA, 30 bp, Leptotrichia buccalis
catgcaagtctttggcagaatctgtgcttg

SEQ ID NO: 15084 - DNA, 20 bp, Corynebacterium matruchotii
accccgtaccggaaggtgcg

SEQ ID NO: 15085 - DNA, 20 bp, Bacillus laevolacticus
cgctggccggcgtgccctaa

SEQ ID NO: 15086 - DNA, 20 bp, Streptococcus criceti
aggcctacctaggctgcgat

SEQ ID NO: 15087 - DNA, 20 bp, Leuconostoc carnosum
aaaagttaaggtagggaatg

SEQ ID NO: 15088 - DNA, 20 bp, Arthrobacter globiformis
tcgaacgatgaagcccaggc

SEQ ID NO: 15089 - DNA, 20 bp, Bacteroides merdae
gaaacactccttctagcaat

SEQ ID NO: 15090 - DNA, 20 bp, Gemella morbillorum
gcatatcagctagatgttgc

SEQ ID NO: 15091 - DNA, 20 bp, Granulicatella adiacens
gaccgggcttgcactggtca

SEQ ID NO: 15092 - DNA, 20 bp, Vibrio cholerae
tggcaagcgtcctcccggaa

SEQ ID NO: 15093 - DNA, 20 bp, Porphyromonas endodontalis
cgaggtatgcggaatgtgtg

SEQ ID NO: 15094 - DNA, 20 bp, Oligella urethralis
atctcttgaagcttccgggc

SEQ ID NO: 15095 - DNA, 20 bp, Actinomyces naeslundii
ggatattctgtgcctgctgc

SEQ ID NO: 15096 - DNA, 20 bp, Acinetobacter baumannii
gtgaagtcgtacaggtagcc

SEQ ID NO: 15097 - DNA, 20 bp, Streptococcus macacae
agttggagagagtggaaagt

SEQ ID NO: 15098 - DNA, 20 bp, Finegoldia magna
agtcgaatgttaaagatcgg

SEQ ID NO: 15099 - DNA, 20 bp, Streptococcus oralis
atccgagcggatgagttgcg

SEQ ID NO: 15100 - DNA, 30 bp, Sphingobacterium multivorum
gttagtgaagagtgcagagacgcactcgtc

SEQ ID NO: 15101 - DNA, 20 bp, Campylobacter concisus
cgaatcgctatcaaagccgg

SEQ ID NO: 15102 - DNA, 20 bp, Clostridium clostridiiforme
ggtttggatccatggctcag

SEQ ID NO: 15103 - DNA, 20 bp, Streptococcus peroris
accgcataagagcagttgtt

SEQ ID NO: 15104 - DNA, 20 bp, Staphylococcus schleiferi
gtcgagcgaacggacaggag

SEQ ID NO: 15105 - DNA, 20 bp, Stenotrophomonas maltophilia
aatgcatgcgggatctgccc

SEQ ID NO: 15106 - DNA, 20 bp, Suttonella indologenes
agcttgctgcggacctagtg

SEQ ID NO: 15107 - DNA, 20 bp, Kocuria rosea
tcgagcgaactgacgagagt

SEQ ID NO: 15108 - DNA, 20 bp, Unknown Organism
  oligonucleotide from CDC group VB-3
aaccttccagggggacggtt

SEQ ID NO: 15109 - DNA, 20 bp, Brevibacillus brevis
aggggaacctgcggttggga

SEQ ID NO: 15110 - DNA, 20 bp, Pediococcus parvulus
ccgcatggttgatttttaaa

SEQ ID NO: 15111 - DNA, 20 bp, Psychrobacter phenylpyruvicus
tacggggaaaagggggcagc

SEQ ID NO: 15112 - DNA, 20 bp, Oligella urethralis
aacccgctgtcctgaccatt

SEQ ID NO: 15113 - DNA, 20 bp, Finegoldia magna
tactaatgagagtggcgaac

SEQ ID NO: 15114 - DNA, 20 bp, Corynebacterium kutscheri
ggcctaaccacgtttgtgga

SEQ ID NO: 15115 - DNA, 20 bp, Streptococcus urinalis
ttgcacaagaccaaggagtt

SEQ ID NO: 15116 - DNA, 20 bp, Acinetobacter johnsonii
tagccgttggagcctttgag

SEQ ID NO: 15117 - DNA, 20 bp, Porphyromonas endodontalis
gcagcattattttagcttgc

SEQ ID NO: 15118 - DNA, 20 bp, Alloiococcus otitis
ggctctgctaccgcttatgg

SEQ ID NO: 15119 - DNA, 20 bp, Leptotrichia buccalis
agtctttggcagaatctgtg

SEQ ID NO: 15120 - DNA, 20 bp, Clostridium clostridiiforme
atccacgcggtagagaagcg

SEQ ID NO: 15121 - DNA, 20 bp, Anaerococcus prevotii
atgcacatgcataaatgatc

SEQ ID NO: 15122 - DNA, 20 bp, Streptococcus acidominimus
ctgcatggtaaacatttaaa

SEQ ID NO: 15123 - DNA, 20 bp, Corynebacterium pilosum
tcttattccgggtttttcct

SEQ ID NO: 15124 - DNA, 20 bp, Vibrio metschnikovii
ccgcatgatagcctacggct

SEQ ID NO: 15125 - DNA, 20 bp, Paenibacillus alvei
tagagtcccttcttcggaac

SEQ ID NO: 15126 - DNA, 20 bp, Bacteroides stercoris
gcatcatcaaagcttgcttt

SEQ ID NO: 15127 - DNA, 20 bp, Listeria welshimeri
ggacaaagtgcacaggtggt

SEQ ID NO: 15128 - DNA, 20 bp, Porphyromonas gingivalis
agggcgtaccgcaaggggcg

SEQ ID NO: 15129 - DNA, 20 bp, Clostridium clostridiiforme
ggtgtcgggggacaaagtcc

SEQ ID NO: 15130 - DNA, 20 bp, Streptococcus infantarius
tggcgccgtgctctcagctc

SEQ ID NO: 15131 - DNA, 30 bp, Leptotrichia buccalis
aggatgaacgctgacatgtaatgcttaaca

SEQ ID NO: 15132 - DNA, 20 bp, Arcanobacterium haemolyticum
ccctttctcttgggataagc

SEQ ID NO: 15133 - DNA, 20 bp, Alloiococcus otitis
aaaataaaaggtggctctgc

SEQ ID NO: 15134 - DNA, 20 bp, Prevotella oralis
gatgcccgctgtcggccttt

SEQ ID NO: 15135 - DNA, 20 bp, Finegoldia magna
tcggtcatagatgggctcgc

SEQ ID NO: 15136 - DNA, 20 bp, Bacillus azotoformans
agccgcgaggcttgagccaa

SEQ ID NO: 15137 - DNA, 20 bp, Streptococcus macacae
tcacgggagcttgctccacg

SEQ ID NO: 15138 - DNA, 20 bp, Bacillus schlegellii
gggagcgggcggaagccttt

SEQ ID NO: 15139 - DNA, 20 bp, Clostridium clostridiiforme
aaagagtgtccggtgaggag

SEQ ID NO: 15140 - DNA, 20 bp, Prevotella bivia
catgagattacgaataaaga

SEQ ID NO: 15141 - DNA, 20 bp, Clostridium clostridiiforme
caaaagccgaggctcaacct

SEQ ID NO: 15142 - DNA, 20 bp, Serratia marcescens
ggtgaagcgaacaaggtaac

SEQ ID NO: 15143 - DNA, 20 bp, Clostridium clostridiiforme
tcgatgaagttttcggatgg

SEQ ID NO: 15144 - DNA, 20 bp, Paenibacillus validus
ttcgggatagcgttagcggc

SEQ ID NO: 15145 - DNA, 20 bp, Staphylococcus succinus
cgaacggctaccttgtacga

SEQ ID NO: 15146 - DNA, 20 bp, Enterococcus saccharolyticus
ctaatacccgcataacgctt

SEQ ID NO: 15147 - DNA, 20 bp, Streptococcus acidominimus
tttgagcaggggagacaggt

SEQ ID NO: 15148 - DNA, 20 bp, Eubacterium moniliforme
aagagtaagcgaatctcaaa

SEQ ID NO: 15149 - DNA, 20 bp, Brevibacillus laterosporus
agtgccatttaaataaggtg

SEQ ID NO: 15150 - DNA, 20 bp, Helcococcus kunzii
ttgacatatacaggaatatc

SEQ ID NO: 15151 - DNA, 20 bp, Bacillus smithii
tcggtgaggtaacccttcac

SEQ ID NO: 15152 - DNA, 20 bp, Microbacterium hominis
gtttttgtcatggctcagga

SEQ ID NO: 15153 - DNA, 20 bp, Citrobacter farmeri
gaacttgtcagagatgaggt

SEQ ID NO: 15154 - DNA, 20 bp, Brevibacillus brevis
gagaacgccctagaaatagg

SEQ ID NO: 15155 - DNA, 20 bp, Gemella morbillorum
acgctaaggagagcttcttc

SEQ ID NO: 15156 - DNA, 20 bp, Eremococcus coleocola
aatcatcgcctgatggttga

SEQ ID NO: 15157 - DNA, 20 bp, Granulicatella elegans
gtcgcatgacccagagaagg

SEQ ID NO: 15158 - DNA, 30 bp, Clostridium limosum
aacacgggagtgcccttcggggaacttggt

SEQ ID NO: 15159 - DNA, 30 bp, Anaerococcus tetradius
actaaccaaagatttatcggtgtaagatgg

SEQ ID NO: 15160 - DNA, 20 bp, Anaerococcus tetradius
ccctataaagttagtcaatc

SEQ ID NO: 15161 - DNA, 20 bp, Bacillus smithii
taacaaaaagccgtatcgga

SEQ ID NO: 15162 - DNA, 20 bp, Moellerella wisconsensis
ctaatactatcagcgattga

SEQ ID NO: 15163 - DNA, 20 bp, Anaerococcus prevotii
caaaactccaaagccaatcc

SEQ ID NO: 15164 - DNA, 30 bp, Vibrio hollisae
ccgagtagtgggggataacgcagcgaaagt

SEQ ID NO: 15165 - DNA, 20 bp, Streptococcus macacae
tctgttgttaaggaagcaag

SEQ ID NO: 15166 - DNA, 20 bp, Vibrio harveyi
acaccatgggtagtgggctg

SEQ ID NO: 15167 - DNA, 20 bp, Anaerococcus tetradius
aataataccctatgacataa

SEQ ID NO: 15168 - DNA, 20 bp, Edwardsiella tarda
ctgctttctctcgctgacga

SEQ ID NO: 15169 - DNA, 20 bp, Streptococcus vestibularis
aataggtgacacatgtcatt

SEQ ID NO: 15170 - DNA, 20 bp, Gemella morbillorum
cttcttctctggatgagttg

SEQ ID NO: 15171 - DNA, 20 bp, Anaerococcus tetradius
ttcgcatgaagagcttatca

SEQ ID NO: 15172 - DNA, 30 bp, Providencia stuartii
ttgatgttaataccatcaacgattgacgtt

SEQ ID NO: 15173 - DNA, 20 bp, Salmonella typhi
ggcaggcctatcacatgcaa

SEQ ID NO: 15174 - DNA, 20 bp, Eubacterium moniliforme
gagcaatctgccctgcaatg

SEQ ID NO: 15175 - DNA, 20 bp, Rothia dentocariosa
tctcatcctgaggccatgat

SEQ ID NO: 15176 - DNA, 20 bp, Alloiococcus otitis
cttctgccaccttcagagat

SEQ ID NO: 15177 - DNA, 20 bp, Streptococcus iniae
taagttaaaaggagcaaaag

SEQ ID NO: 15178 - DNA, 20 bp, Empedobacter brevis
aagccgaggggtacgattct

SEQ ID NO: 15179 - DNA, 20 bp, Leuconostoc gelidum
caagctctaaaaggcgctac

SEQ ID NO: 15180 - DNA, 20 bp, Capnocytophaga sp.
tactttgatgacggtactct

SEQ ID NO: 15181 - DNA, 20 bp, Haemophilus paraphrophilus
gtacaaggtaacctagggaa

SEQ ID NO: 15182 - DNA, 20 bp, Anaerococcus prevotii
agatatacccctctctttaa

SEQ ID NO: 15183 - DNA, 20 bp, Peptostreptococcus anaerobius
gatgcttgcattaatgaaag

SEQ ID NO: 15184 - DNA, 20 bp, Shigella boydii
gaacgtattcccgtggcatt

SEQ ID NO: 15185 - DNA, 20 bp, Paenibacillus alvei
ctgaatgcaaactctagaga

SEQ ID NO: 15186 - DNA, 20 bp, Clostridium clostridiiforme
tgaaaatcatttaaccggga

SEQ ID NO: 15187 - DNA, 20 bp, Bacteroides vulgatus
tggatacccgtttgcatgta

SEQ ID NO: 15188 - DNA, 20 bp, Leuconostoc lactis
cagaatgactagggtgaagt

SEQ ID NO: 15189 - DNA, 20 bp, Bacillus coagulans
atgagcggatgttaaaagac

SEQ ID NO: 15190 - DNA, 20 bp, Brevibacillus brevis
tgcggttgggatcaacctcc

SEQ ID NO: 15191 - DNA, 20 bp, Paenibacillus azotofixans
taagagtaactgcttaagga

SEQ ID NO: 15192 - DNA, 20 bp, Peptoniphilus asaccharolyticus
cgagctagtgatagtaagcg

SEQ ID NO: 15193 - DNA, 20 bp, Prevotella loescheii
ggggcccacgtgtgggtttt

SEQ ID NO: 15194 - DNA, 20 bp, Bacteroides capillosus
gcctttcggctatgtgacca

SEQ ID NO: 15195 - DNA, 20 bp, Suttonella indologenes
cttgctgcggacctagtggc

SEQ ID NO: 15196 - DNA, 20 bp, Achromobacter xylosoxidans
agcttaataccggcatacgc

SEQ ID NO: 15197 - DNA, 20 bp, Sporosarcina ureae
atgttgaaagccggtttcgg

SEQ ID NO: 15198 - DNA, 20 bp, Pediococcus dextrinicus
tttaatgatcaaggtgcttg

SEQ ID NO: 15199 - DNA, 20 bp, Eubacterium moniliforme
gcaggatgagctcgcgtccc

SEQ ID NO: 15200 - DNA, 20 bp, Bacteroides stercoris
ccttgagtgcaacagaggta

SEQ ID NO: 15201 - DNA, 20 bp, Moellerella wisconsensis
tggggatctgcctgacagag

SEQ ID NO: 15202 - DNA, 20 bp, Leptotrichia buccalis
caaccgcaagggggaaggta

SEQ ID NO: 15203 - DNA, 20 bp, Enterobacter cancerogenus
ctgcggttggtatcacctcc

SEQ ID NO: 15204 - DNA, 20 bp, Providencia rustigianii
tatcatcagcgattgacgtt

SEQ ID NO: 15205 - DNA, 20 bp, Citrobacter freundii
taaaccaagggtaaaccgta

SEQ ID NO: 15206 - DNA, 20 bp, Leuconostoc fallax
gtataacaacacatttcgca

SEQ ID NO: 15207 - DNA, 20 bp, Dolosicoccus paucivorans
ccgatacatcgagtggcgaa

SEQ ID NO: 15208 - DNA, 20 bp, Clostridium clostridiiforme
aaggacttgtccgaaagaga

SEQ ID NO: 15209 - DNA, 20 bp, Corynebacterium group ANF
ctccactttgtgtggtgtgg

SEQ ID NO: 15210 - DNA, 30 bp, Sphingobacterium multivorum
gggatccatcggagagcttgctcgaagatg

SEQ ID NO: 15211 - DNA, 20 bp, Bacteroides caccae
agttgtccacgtgtggattt

SEQ ID NO: 15212 - DNA, 20 bp, Campylobacter sputorum
ttaataaagcgaaaaaaaag

SEQ ID NO: 15213 - DNA, 20 bp, Bacteroides capilosus
cctgtggcctgcatttgaaa

SEQ ID NO: 15214 - DNA, 20 bp, Fusobacterium necrogenes
cccttcgggggaacctagtg

SEQ ID NO: 15215 - DNA, 20 bp, Clostridium clostridiiforme
cgagactgccatcgacaaga

SEQ ID NO: 15216 - DNA, 20 bp, Salmonella paratyphi
agctaaccttcgggagggcg

SEQ ID NO: 15217 - DNA, 20 bp, Leuconostoc fallax
cgagttgcgaaccggcgacg

SEQ ID NO: 15218 - DNA, 20 bp, Sporosarcina ureae
acaggagtaactgtcctgta

SEQ ID NO: 15219 - DNA, 20 bp, Veillonella sp.
catgtaagctatcactgaag

SEQ ID NO: 15220 - DNA, 20 bp, Salmonella typhi
cagcttgcttgcttggctga

SEQ ID NO: 15221 - DNA, 30 bp, Leptotrichia buccalis
tggcgaagctgtgcttgcacaggcgagcca

SEQ ID NO: 15222 - DNA, 20 bp, Anaerococcus prevotii
cctcggtggaagattactaa

SEQ ID NO: 15223 - DNA, 20 bp, Citrobacter freundii
gggtaaaccgtagggggaac

SEQ ID NO: 15224 - DNA, 20 bp, Stenotrophomonas maltophilia
agcgctgagcacaggtgctg

SEQ ID NO: 15225 - DNA, 20 bp, Finegoldia magna
tgacatgtgggtgaaaggta

SEQ ID NO: 15226 - DNA, 20 bp, Kocuria rosea
taacacgtggtaacctacct

SEQ ID NO: 15227 - DNA, 20 bp, Paenibacillus macerans
agggagttgggaaaggcgga

SEQ ID NO: 15228 - DNA, 20 bp, Clostridium clostridiiforme
gcgaggaaggatccgcctaa

SEQ ID NO: 15229 - DNA, 20 bp, Methylobacterium extorquens
gcgaccacggaggggtcagc

SEQ ID NO: 15230 - DNA, 30 bp, Gemella sanguinis
agctaactcgcgagagcaagcaaacctcac

SEQ ID NO: 15231 - DNA, 20 bp, Prevotella melaninogenica
ccatagggctccaggaatga

SEQ ID NO: 15232 - DNA, 20 bp, Escherichia hermannii
tggatcacctcctgtcatgg

SEQ ID NO: 15233 - DNA, 20 bp, Clostridium clostridiiforme
gatggttcgagagacttatg

SEQ ID NO: 15234 - DNA, 20 bp, Prevotella loescheii
ggtttggcggtgaaggatgg

SEQ ID NO: 15235 - DNA, 20 bp, Bacillus azotoformans
tggacaaagggctgctaagc

SEQ ID NO: 15236 - DNA, 30 bp, Prevotella bivia
ccctttctttagttgccatcaggttctgct

SEQ ID NO: 15237 - DNA, 20 bp, Sporosarcina ureae
agatggggtactccgggaac

SEQ ID NO: 15238 - DNA, 20 bp, Lactococcus raffinolactis
atggtacactgagagatgga

SEQ ID NO: 15239 - DNA, 20 bp, Propionibacterium propionicus
tgtaaaccgctttcaattgt

SEQ ID NO: 15240 - DNA, 20 bp, Pediococcus dextrinicus
gttttcttttaatgatcaag

SEQ ID NO: 15241 - DNA, 20 bp, Achromobacter xylosoxidans
gtagtcccgcccctaaacga

SEQ ID NO: 15242 - DNA, 20 bp, Fusobacterium necrogenes
gtcaaactagagtactggag

SEQ ID NO: 15243 - DNA, 20 bp, Clostridium clostridiiforme
gagcggggatggttcgagag

SEQ ID NO: 15244 - DNA, 20 bp, Peptoniphilus asaccharolyticus
attccttcggggtgaagatg

SEQ ID NO: 15245 - DNA, 20 bp, Campylobacter curvus
ggaaagtcgaaccctatata

SEQ ID NO: 15246 - DNA, 20 bp, Bacillus niacini
aatcttgaggtgcttgcacc

SEQ ID NO: 15247 - DNA, 20 bp, Stenotrophomonas maltophilia
cagcacaggagaggcttgtc

SEQ ID NO: 15248 - DNA, 20 bp, Paenibacillus alvei
gagggagatgagaaaggcgg

SEQ ID NO: 15249 - DNA, 20 bp, Brevibacillus brevis
cgagaacgccctagaaatag

SEQ ID NO: 15250 - DNA, 20 bp, Bacteroides stercoris
atccaacctgccgacaacac

SEQ ID NO: 15251 - DNA, 20 bp, Bacteroides capillosus
aagtcaggtgtgaaaaccac

SEQ ID NO: 15252 - DNA, 20 bp, Brevibacillus centrosporus
agcttgaaagccgggttttg

SEQ ID NO: 15253 - DNA, 20 bp, Microbacterium hominis
cggtaacaccagcaggcggt

SEQ ID NO: 15254 - DNA, 20 bp, Helcococcus kunzii
atgaaacggaaaaaggaaag

SEQ ID NO: 15255 - DNA, 20 bp, Vibrio mimicus
acggtagcgctaggtggaac

SEQ ID NO: 15256 - DNA, 20 bp, Pasteurella multocida
tctgaggagtaaagggtggg

SEQ ID NO: 15257 - DNA, 20 bp, Streptococcus ferus
ggagtggaaagtccattacg

SEQ ID NO: 15258 - DNA, 20 bp, Streptococcus criceti
cataatagtgattaactcat

SEQ ID NO: 15259 - DNA, 20 bp, Leuconostoc carnosum
gggaatgaccttagcctgac

SEQ ID NO: 15260 - DNA, 30 bp, Proteus mirabilis
taaggttaatacccttgtcaattgacgtta

SEQ ID NO: 15261 - DNA, 20 bp, Peptoniphilus asaccharolyticus
gggtgaagatgaaatggatt

SEQ ID NO: 15262 - DNA, 20 bp, Psychrobacter phenylpyruvicus
tttatggttaatacccatag

SEQ ID NO: 15263 - DNA, 20 bp, Gemella morbillorum
gatgttgcatgacatttagc

SEQ ID NO: 15264 - DNA, 20 bp, Eubacterium moniliforme
aggtgtggggggcgatagtc

SEQ ID NO: 15265 - DNA, 20 bp, Brevibacillus centrosporus
gtttcatggcaaaagcttga

SEQ ID NO: 15266 - DNA, 20 bp, Granulicatella elegans
ctagagtcgcatgacccaga

SEQ ID NO: 15267 - DNA, 20 bp, Bacteroides merdae
gtggaaacactccttctagc

SEQ ID NO: 15268 - DNA, 20 bp, Actinomyces radingae
gttctgcgctttccgcatgg

SEQ ID NO: 15269 - DNA, 20 bp, Bacteroides ovatus
ataccggatagcatacgaat

SEQ ID NO: 15270 - DNA, 20 bp, Vibrio cholerae
cccggaaggtaaactacctg

SEQ ID NO: 15271 - DNA, 20 bp, Finegoldia magna
accgcataaaatcgtagaaa

SEQ ID NO: 15272 - DNA, 20 bp, Stenotrophomonas maltophilia
acgctaataccgcataatgt

SEQ ID NO: 15273 - DNA, 20 bp, Clostridium clostridiiforme
gcgaaagcggatcgaccctt

SEQ ID NO: 15274 - DNA, 20 bp, Bacteroides stercoris
atggcatagttttcccgcat

SEQ ID NO: 15275 - DNA, 20 bp, Granulicatella elegans
gcatgacccagagaaggaaa

SEQ ID NO: 15276 - DNA, 20 bp, Bacteroides ovatus
tagcatacgaatatcgcatg

SEQ ID NO: 15277 - DNA, 20 bp, Fusobacterium mortiferum
gccccttcgggggaacttag

SEQ ID NO: 15278 - DNA, 20 bp, Lactococcus raffinolactis
acactgagagatggacccgc

SEQ ID NO: 15279 - DNA, 20 bp, Psychrobacter phenylpyruvicus
aaagggggcagcttgcgctc

SEQ ID NO: 15280 - DNA, 20 bp, Geobacillus thermoglucosidasius
tggttgaaaggtggcttttg

SEQ ID NO: 15281 - DNA, 20 bp, Dolosicoccus paucivorans
aatgattcgcatgtttcatt

SEQ ID NO: 15282 - DNA, 20 bp, Campylobacter curvus
tgtcgcaaagacggactttg

SEQ ID NO: 15283 - DNA, 20 bp, Moraxella osloensis
aagcaggcggcaggcttaac

SEQ ID NO: 15284 - DNA, 20 bp, Vibrio vulnificus
acgccaccactttgggtcat

SEQ ID NO: 15285 - DNA, 20 bp, Clostridium limosum
ccgcataacatcatttcaat

SEQ ID NO: 15286 - DNA, 20 bp, Bacteroides distasonis
ccttttctaggcaatagccg

SEQ ID NO: 15287 - DNA, 20 bp, Streptococcus infantarius
agtgtgcgccgcatcatccc

SEQ ID NO: 15288 - DNA, 20 bp, Clostridium clostridiiforme
aacgcggcctttccttcggg

SEQ ID NO: 15289 - DNA, 20 bp, Bacteroides ovatus
gtaggtgtcggcttaagtgc

SEQ ID NO: 15290 - DNA, 20 bp, Anaerococcus prevotii
aaactccaaagccaatccca

SEQ ID NO: 15291 - DNA, 20 bp, Clostridium clostridiiforme
ttgctggctgcatactgacg

SEQ ID NO: 15292 - DNA, 20 bp, Clostridium clostridiiforme
cagatcccaaaaagccatcc

SEQ ID NO: 15293 - DNA, 20 bp, Morganella morganii
cgggcggtaacagggagaag

SEQ ID NO: 15294 - DNA, 20 bp, Clostridium clostridiiforme
cggaatacgtagggggcaag

SEQ ID NO: 15295 - DNA, 20 bp, Eremococcus coleocola
ttagccaagaacacccctag

SEQ ID NO: 15296 - DNA, 20 bp, Salmonella typhi
tcaggcagcagcttgcttgc

SEQ ID NO: 15297 - DNA, 20 bp, Achromobacter xylosoxidans
gtcccgcccctaaacgatgt

SEQ ID NO: 15298 - DNA, 20 bp, Brevibacillus centrosporus
agagtctactctcgcatgag

SEQ ID NO: 15299 - DNA, 20 bp, Actinomyces naeslundii
tcccttgtgggtgggttgac

SEQ ID NO: 15300 - DNA, 20 bp, Prevotella loescheii
ttgtcggccccttgggtcgg

SEQ ID NO: 15301 - DNA, 20 bp, Corynebacterium coyleae
accagatcggccccagagat

SEQ ID NO: 15302 - DNA, 20 bp, Bacteroides merdae
cggagtggaaacactccttc

SEQ ID NO: 15303 - DNA, 20 bp, Serratia rubidaea
acggcattacattgacgtta

SEQ ID NO: 15304 - DNA, 20 bp, Anaerococcus prevotii
agagatagactcttattgct

SEQ ID NO: 15305 - DNA, 20 bp, Paenibacillus macerans
cttttcttcgggagacaggg

SEQ ID NO: 15306 - DNA, 20 bp, Bacteroides stercoris
gatggcatagttttcccgca

SEQ ID NO: 15307 - DNA, 20 bp, Anaerococcus prevotii
cgaagcctgcgagcaaaccg

SEQ ID NO: 15308 - DNA, 20 bp, Bacteroides capillosus
ggcccttcggggcgcctacg

SEQ ID NO: 15309 - DNA, 20 bp, Vibrio metschnikovii
ggacgcttgccactttgggt

SEQ ID NO: 15310 - DNA, 20 bp, Streptococcus urinalis
agagaagaatggaagtagga

SEQ ID NO: 15311 - DNA, 20 bp, Corynebacterium renale
aggacgaacagctggcggcg

SEQ ID NO: 15312 - DNA, 20 bp, Peptoniphilus indolicus
tcggaggatttcggtgccgc

SEQ ID NO: 15313 - DNA, 20 bp, Bacillus niacini
cttgaggtgcttgcacctct

SEQ ID NO: 15314 - DNA, 20 bp, Streptococcus oralis
gaagcttggtgcttgcatcc

SEQ ID NO: 15315 - DNA, 20 bp, Unknown Organism
  oligonucleotide from CDC group VB-3
cggttacccggagtgattca

SEQ ID NO: 15316 - DNA, 20 bp, Bacteroides merdae
ggagtttgcgatacaatgta

SEQ ID NO: 15317 - DNA, 20 bp, Anaerococcus prevotii
acccctctctttaagagaca

SEQ ID NO: 15318 - DNA, 20 bp, Dolosigranulum pigrum
aacaaggtagccgttcggaa

SEQ ID NO: 15319 - DNA, 20 bp, Providencia rustigianii
tcatcagcgattgacgttac

SEQ ID NO: 15320 - DNA, 20 bp, Myroides odoratimimus
ggtagaaaaagcttgctttt

SEQ ID NO: 15321 - DNA, 20 bp, Raoultella terrigena
gtgtaggcctaacacatgca

SEQ ID NO: 15322 - DNA, 20 bp, Bacillus niacini
gttgaaagtcggtttacgct

SEQ ID NO: 15323 - DNA, 20 bp, Veillonella sp.
caggcggataggtcagtctg

SEQ ID NO: 15324 - DNA, 20 bp, Bacillus laevolacticus
tgaccttgcccttcggggca

SEQ ID NO: 15325 - DNA, 20 bp, Brevibacillus brevis
agcttgctctagggaattag

SEQ ID NO: 15326 - DNA, 20 bp, Brevibacillus brevis
atcggaagggcgcgtggatc

SEQ ID NO: 15327 - DNA, 20 bp, Providencia rustigianii
atcgtcaacgattgacgtta

SEQ ID NO: 15328 - DNA, 20 bp, Empedobacter brevis
gcaacaagatgcgaatctcg

SEQ ID NO: 15329 - DNA, 20 bp, Eubacterium moniliforme
gaacgaagttgctctttggg

SEQ ID NO: 15330 - DNA, 20 bp, Streptococcus macacae
agcctttagagggattgaaa

SEQ ID NO: 15331 - DNA, 20 bp, Paenibacillus azotofixans
ctcaagagtaactgctaaag

SEQ ID NO: 15332 - DNA, 20 bp, Oligella urethralis
ccaatctcttgaagcttccg

SEQ ID NO: 15333 - DNA, 20 bp, Helcococcus kunzii
acatatacaggaatatccta

SEQ ID NO: 15334 - DNA, 20 bp, Shewanella algae
aatcctggtagagatgcctc

SEQ ID NO: 15335 - DNA, 20 bp, Geobacillus thermoglucosidasius
gcggaccgaacggaagcttg

SEQ ID NO: 15336 - DNA, 20 bp, Neisseria subflava
gtaggataccgcaaggggcc

SEQ ID NO: 15337 - DNA, 20 bp, Clostridium clostridiiforme
tcgagagacttatgttgatt

SEQ ID NO: 15338 - DNA, 20 bp, Streptococcus criceti
caaccaatgtttgctttgga

SEQ ID NO: 15339 - DNA, 20 bp, Pseudomonas fluorescens
agtgagcttgctcacggatt

SEQ ID NO: 15340 - DNA, 20 bp, Leptotrichia buccalis
caggcgagccaaggcggacg

SEQ ID NO: 15341 - DNA, 20 bp, Bacteroides stercoris
ccgcatggaataactattaa

SEQ ID NO: 15342 - DNA, 20 bp, Globicatella sanguinis
ggtggcctaaccaataggag

SEQ ID NO: 15343 - DNA, 20 bp, Bacteroides capillosus
gttgcttgcaacctttgatg

SEQ ID NO: 15344 - DNA, 20 bp, Bacillus licheniformis
tatccggaaggttgttgttt

SEQ ID NO: 15345 - DNA, 20 bp, Anaerococcus tetradius
tgaaaataagcggattagtg

SEQ ID NO: 15346 - DNA, 20 bp, Sphingobacterium multivorum
cataacatatgtgaccggca

SEQ ID NO: 15347 - DNA, 20 bp, Streptococcus alactolyticus
cgcataacagcttttgacac

SEQ ID NO: 15348 - DNA, 20 bp, Vibrio metschnikovii
gcttgccactttgggttcat

SEQ ID NO: 15349 - DNA, 30 bp, Corynebacterium group ANF
gcaagtcgagcgcgtgaaactaacggatcc

SEQ ID NO: 15350 - DNA, 20 bp, Bacteroides capillosus
tttgcacaacgttggcggaa

SEQ ID NO: 15351 - DNA, 20 bp, Prevotella oralis
gcagttttttaagcgtgctg

SEQ ID NO: 15352 - DNA, 20 bp, Streptococcus equi
ggaacgcacagatgatacgt

SEQ ID NO: 15353 - DNA, 30 bp, Leuconostoc fallax
tggcgaacttgagtgcagtagaggcaagtg

SEQ ID NO: 15354 - DNA, 30 bp, Streptococcus criceti
tagagtggaaagttactcaagtgacggtat

SEQ ID NO: 15355 - DNA, 20 bp, Vibrio harveyi
caccatgggtagtgggctgc

SEQ ID NO: 15356 - DNA, 20 bp, Shewanella algae
gaatcctggtagagatgcct

SEQ ID NO: 15357 - DNA, 20 bp, Citrobacter farmeri
ataaccgcatccattgacgt

SEQ ID NO: 15358 - DNA, 20 bp, Clostridium clostridiiforme
agaagcgagcccgaaaggag

SEQ ID NO: 15359 - DNA, 20 bp, Clostridium innocuum
gtcgaagtaggaccgatgac

SEQ ID NO: 15360 - DNA, 20 bp, Anaerococcus tetradius
gcttgagagatgaaagggaa

SEQ ID NO: 15361 - DNA, 20 bp, Sphingobacterium multivorum
cccttacgcttcggggctat

SEQ ID NO: 15362 - DNA, 20 bp, Eremococcus coleocola
aataccgcataacagcaatc

SEQ ID NO: 15363 - DNA, 20 bp, Peptoniphilus asaccharolyticus
cggagaatttcggtgccgca

SEQ ID NO: 15364 - DNA, 20 bp, Pediococcus dextrinicus
taatgatcaaggtgcttgca

SEQ ID NO: 15365 - DNA, 20 bp, Clostridium clostridiiforme
cggggatggttcgagagact

SEQ ID NO: 15366 - DNA, 20 bp, Corynebacterium argentoratense
cctttagtgtgtgatggtgg

SEQ ID NO: 15367 - DNA, 20 bp, Finegoldia magna
taagtcgaatgttaaagatc

SEQ ID NO: 15368 - DNA, 20 bp, Bacillus laevolacticus
ctggccggcgtgccctaata

SEQ ID NO: 15369 - DNA, 20 bp, Corynebacterium group ANF
aaggtagtggatcgagcggc

SEQ ID NO: 15370 - DNA, 20 bp, Clostridium clostridiiforme
gtgtcctatcaggcagttgg

SEQ ID NO: 15371 - DNA, 20 bp, Staphylococcus schleiferi
cgaacggacaggagcttgct

SEQ ID NO: 15372 - DNA, 20 bp, Anaerococcus tetradius
ctctagatatactgccggtg

SEQ ID NO: 15373 - DNA, 20 bp, Pseudomonas fluorescens
tgagcttgctcacggattta

SEQ ID NO: 15374 - DNA, 20 bp, Clostridium clostridiiforme
agaagcagatcccaaaaagc

SEQ ID NO: 15375 - DNA, 20 bp, Bacillus schlegellii
aaggggcgacccgctttagg

SEQ ID NO: 15376 - DNA, 20 bp, Kocuria rosea
gaaaagttggtaacacccga

SEQ ID NO: 15377 - DNA, 30 bp, Globicatella sanguinis
ctagaggaaatgttagtagattgacggtat

SEQ ID NO: 15378 - DNA, 20 bp, Clostridium clostridiiforme
cgcttttggagagacttgtg

SEQ ID NO: 15379 - DNA, 20 bp, Leptotrichia buccalis
taaaacctggtgttgtcaga

SEQ ID NO: 15380 - DNA, 20 bp, Providencia rustigianii
aggcgttgatgctaatatca

SEQ ID NO: 15381 - DNA, 20 bp, Leptotrichia buccalis
cctgcaaagccggtccaagt

SEQ ID NO: 15382 - DNA, 20 bp, Corynebacterium falsenii
ctagggaagaagccatgttg

SEQ ID NO: 15383 - DNA, 20 bp, Prevotella loescheii
cccttgggtcggtgaccaag

SEQ ID NO: 15384 - DNA, 20 bp, Bacteroides stercoris
acgtgtggttttttgcatgt

SEQ ID NO: 15385 - DNA, 20 bp, Anaerococcus tetradius
atcgcatggtagactaacca

SEQ ID NO: 15386 - DNA, 20 bp, Lactococcus raffinolactis
gggtaacctacctatcagcg

SEQ ID NO: 15387 - DNA, 20 bp, Paenibacillus amylolyticus
acttgatgaggtgcttgcat

SEQ ID NO: 15388 - DNA, 20 bp, Globicatella sanguinis
gttagtagattgacggtatc

SEQ ID NO: 15389 - DNA, 20 bp, Sporosarcina pasteurii
gtttcttccttgttcgctcg

SEQ ID NO: 15390 - DNA, 20 bp, Capnocytophaga sp.
atataggtgtggcatcacat

SEQ ID NO: 15391 - DNA, 20 bp, Bacillus laevolacticus
tttgatcatggctcagggcc

SEQ ID NO: 15392 - DNA, 30 bp, Aeromonas schubertii
atacgagggtgccttcgggaatcagaacac

SEQ ID NO: 15393 - DNA, 20 bp, Anaerobiospirillum succiniciproducens
ttttagttgctatcagatga

SEQ ID NO: 15394 - DNA, 20 bp, Capnocytophaga sp.
agctgaggcggtgaaagatg

SEQ ID NO: 15395 - DNA, 20 bp, Peptoniphilus indolicus
cgtaacaagggagccgtatc

SEQ ID NO: 15396 - DNA, 20 bp, Sporosarcina ureae
gggaatgttgaaagccggtt

SEQ ID NO: 15397 - DNA, 20 bp, Paenibacillus alvei
ttgatgaagtgcttgcactt

SEQ ID NO: 15398 - DNA, 20 bp, Finegoldia magna
tgtgggtgaaaggtatagag

SEQ ID NO: 15399 - DNA, 20 bp, Empedobacter brevis
ctgaaaaggatagcccttcg

SEQ ID NO: 15400 - DNA, 20 bp, Pasteurella trehalosi
cagactggctgtctagagta

SEQ ID NO: 15401 - DNA, 20 bp, Capnocytophaga sp.
ctaatggtatataggtgtgg

SEQ ID NO: 15402 - DNA, 20 bp, Bacteroides stercoris
tagcgagcgcaacccttgcg

SEQ ID NO: 15403 - DNA, 20 bp, Bacillus licheniformis
ggttgttgtttgaccggcag

SEQ ID NO: 15404 - DNA, 20 bp, Streptococcus criceti
gttgagtagagtggaaagtt

SEQ ID NO: 15405 - DNA, 20 bp, Enterococcus faecium
ccgaagtcgggaggtaacct

SEQ ID NO: 15406 - DNA, 20 bp, Peptoniphilus asaccharolyticus
ctaataaacttgagtagtga

SEQ ID NO: 15407 - DNA, 20 bp, Shewanella putrefaciens
gctaaccttcgggggggcgc

SEQ ID NO: 15408 - DNA, 20 bp, Actinomyces radingae
ggcttttttaagtttctgga

SEQ ID NO: 15409 - DNA, 20 bp, Sporosarcina ureae
aataatcccattctcttctg

SEQ ID NO: 15410 - DNA, 20 bp, Bacteroides capilosus
catgacactggctgccaaag

SEQ ID NO: 15411 - DNA, 20 bp, Pediococcus acidilactici
cggctgtctggtctgtactg

SEQ ID NO: 15412 - DNA, 20 bp, Anaerococcus tetradius
ctggaataatctgggtgccg

SEQ ID NO: 15413 - DNA, 20 bp, Bacteroides thetaiotaomicron
tctagggtaagattggtatt

SEQ ID NO: 15414 - DNA, 20 bp, Enterobacter gergoviae
ggtagccagcctggggagta

SEQ ID NO: 15415 - DNA, 20 bp, Bacillus sp
tatgaagtttggatccatgg

SEQ ID NO: 15416 - DNA, 20 bp, Leptotrichia buccalis
ccgcaagggggaaggtatct

SEQ ID NO: 15417 - DNA, 20 bp, Dolosicoccus paucivorans
tgagagaagaacagcgagta

SEQ ID NO: 15418 - DNA, 20 bp, Anaerococcus prevotii
tgacagaacccttcggggtg

SEQ ID NO: 15419 - DNA, 20 bp, Propionibacterium acnes
aagataaaagtaccggaagg

SEQ ID NO: 15420 - DNA, 20 bp, Anaerobiospirillum succiniciproducens
accgggaggggagggaaccc

SEQ ID NO: 15421 - DNA, 20 bp, Enterococcus dispar
aatagtaaacacatgtttat

SEQ ID NO: 15422 - DNA, 20 bp, Streptococcus macacae
tcagacttgagtacagaagg

SEQ ID NO: 15423 - DNA, 20 bp, Bacteroides merdae
gagtttgcgatacaatgtaa

SEQ ID NO: 15424 - DNA, 20 bp, Corynebacterium group F1
cgagtggcgacacgggttga

SEQ ID NO: 15425 - DNA, 20 bp, Porphyromonas endodontalis
gaggggcagcattattttag

SEQ ID NO: 15426 - DNA, 20 bp, Finegoldia magna
agatatacccctctctttat

SEQ ID NO: 15427 - DNA, 20 bp, Sphingobacterium multivorum
gggggacgacgtccaggcat

SEQ ID NO: 15428 - DNA, 20 bp, Empedobacter brevis
cgaaaggaggattaatactt

SEQ ID NO: 15429 - DNA, 20 bp, Streptococcus acidominimus
ttgagcaggggagacaggtg

SEQ ID NO: 15430 - DNA, 20 bp, Prevotella melaninogenica
acgctagagctacaggctta

SEQ ID NO: 15431 - DNA, 20 bp, Lactococcus raffinolactis
cgtgggtaacctacctttca

SEQ ID NO: 15432 - DNA, 20 bp, Unknown Organism
  oligonucleotide from CDC group VB-3
accttccagggggacggtta

SEQ ID NO: 15433 - DNA, 20 bp, Stenotrophomonas maltophilia
agcagcaagcggaaacccat

SEQ ID NO: 15434 - DNA, 20 bp, Myroides odoratimimus
taaggcggggactctagcaa

SEQ ID NO: 15435 - DNA, 20 bp, Citrobacter amalonaticus
ttaataaccattttcattga

SEQ ID NO: 15436 - DNA, 20 bp, Psychrobacter phenylpyruvicus
gaagaagactttatggttaa

SEQ ID NO: 15437 - DNA, 20 bp, Pediococcus dextrinicus
ttttcttttaatgatcaagg

SEQ ID NO: 15438 - DNA, 20 bp, Streptococcus sanguinis
tcacactgtgaccggatctt

SEQ ID NO: 15439 - DNA, 20 bp, Eremococcus coleocola
ctctgctatcactcaaggat

SEQ ID NO: 15440 - DNA, 20 bp, Clostridium clostridiiforme
gcgcttcaagtcgtctgtca

SEQ ID NO: 15441 - DNA, 20 bp, Eubacterium moniliforme
ataccgcataagaccacgaa

SEQ ID NO: 15442 - DNA, 30 bp, Gemella morbillorum
tgcaattgctatcgctaccagatggacctg

SEQ ID NO: 15443 - DNA, 20 bp, Streptococcus iniae
ttaaaaggagcaaaagcttc

SEQ ID NO: 15444 - DNA, 20 bp, Haemophilus segnis
gtgacgaggaaggcgtgatg

SEQ ID NO: 15445 - DNA, 20 bp, Brevibacillus brevis
aatcttaaggtgcttgcacc

SEQ ID NO: 15446 - DNA, 20 bp, Clostridium clostridiiforme
actggagagcttgagaagca

SEQ ID NO: 15447 - DNA, 20 bp, Propionibacterium avidum
gcttgttaggcggctagcca

SEQ ID NO: 15448 - DNA, 20 bp, Sphingobacterium multivorum
taacaccgcataacatcaac

SEQ ID NO: 15449 - DNA, 30 bp, Leptotrichia buccalis
acgactgataaaacctggtgttgtcagact

SEQ ID NO: 15450 - DNA, 20 bp, Staphylococcus kloosii
accgcgagggcatgcaaatc

SEQ ID NO: 15451 - DNA, 20 bp, Paenibacillus alvei
cgcatgagggagatgagaaa

SEQ ID NO: 15452 - DNA, 20 bp, Propionibacterium propionicus
catatgccggaagcgttcag

SEQ ID NO: 15453 - DNA, 20 bp, Micrococcus luteus
gagccgcgagggggggacca

SEQ ID NO: 15454 - DNA, 20 bp, Clostridium innocuum
cgcatgctcagtatattaaa

SEQ ID NO: 15455 - DNA, 20 bp, Unknown Organism
  oligonucleotide from CDC group EO-2
acatgcaaggtcggaggcga

SEQ ID NO: 15456 - DNA, 20 bp, Bacteroides stercoris
cgctgttggcgatacaatgt

SEQ ID NO: 15457 - DNA, 20 bp, Eschericchia vulneris
agtactcctactgggaggca

SEQ ID NO: 15458 - DNA, 20 bp, Clostridium clostridiiforme
ggatggatttgaaattgact

SEQ ID NO: 15459 - DNA, 20 bp, Prevotella corporis
cagaggagcaagctctgtct

SEQ ID NO: 15460 - DNA, 20 bp, Kingella kingae
acggcagcacgagtacttgt

SEQ ID NO: 15461 - DNA, 20 bp, Corynebacterium coyleae
ctctgcttgcagaggtactc

SEQ ID NO: 15462 - DNA, 20 bp, Vibrio harveyi
ccataaagtgcgtcgagttc

SEQ ID NO: 15463 - DNA, 20 bp, Alicyclobacillus acidocaldarius
tctgccccgaagggacccct

SEQ ID NO: 15464 - DNA, 20 bp, Staphylococcus schleiferi
tgcccgtatcggaaagtgcc

SEQ ID NO: 15465 - DNA, 20 bp, Bacteroides distasonis
caggggccccgcatggggat

SEQ ID NO: 15466 - DNA, 30 bp, Streptococcus macacae
tagaggcttaccaaggcgacgatacatagc

SEQ ID NO: 15467 - DNA, 20 bp, Anaerococcus prevotii
tcgtagaaacacatgtttca

SEQ ID NO: 15468 - DNA, 20 bp, Neisseria flavescens
acgctgacgagcatgcttta

SEQ ID NO: 15469 - DNA, 20 bp, Leuconostoc gelidum
agctctaaaaggcgctacgg

SEQ ID NO: 15470 - DNA, 20 bp, Bacteroides merdae
ggacgtgtccttttttgtat

SEQ ID NO: 15471 - DNA, 20 bp, Eggerthella lenta
aggtgtggggggctccgccc

SEQ ID NO: 15472 - DNA, 20 bp, Peptoniphilus asaccharolyticus
aaatcaaacagaacccttcg

SEQ ID NO: 15473 - DNA, 30 bp, Providencia stuartii
ggaggaaggcgttgatgttaataccatcaa

SEQ ID NO: 15474 - DNA, 20 bp, Streptococcus mitis
aatagcagttattgcatgat

SEQ ID NO: 15475 - DNA, 20 bp, Serratia proteamaculans
taatagcgcatcacattgac

SEQ ID NO: 15476 - DNA, 20 bp, Oligella urethralis
aaaccagctacagatcccgc

SEQ ID NO: 15477 - DNA, 20 bp, Shewanella putrefaciens
atctttccagagatggcttg

SEQ ID NO: 15478 - DNA, 30 bp, Streptococcus ferus
gtaaagctctgttgttaaggaagaacggta

SEQ ID NO: 15479 - DNA, 20 bp, Sporosarcina pasteurii
catcctgcagtgacagcata

SEQ ID NO: 15480 - DNA, 20 bp, Prevotella oralis
ggagcgtaggcagtttttta

SEQ ID NO: 15481 - DNA, 20 bp, Streptococcus sanguinis
accggatcttaccagaaagg

SEQ ID NO: 15482 - DNA, 20 bp, Clostridium clostridiiforme
cgatgtatgctgggtgtggg

SEQ ID NO: 15483 - DNA, 20 bp, Microbacterium hominis
ggtggccctccccttgtgga

SEQ ID NO: 15484 - DNA, 20 bp, Brevibacillus brevis
gcgagtgtcttcggagccta

SEQ ID NO: 15485 - DNA, 20 bp, Eubacterium moniliforme
accgcataagaccacgaaac

SEQ ID NO: 15486 - DNA, 20 bp, Providencia alcalifaciens
tctcgctgacgaccggcggc

SEQ ID NO: 15487 - DNA, 20 bp, Microbacterium hominis
acgatcccgggtctggtaca

SEQ ID NO: 15488 - DNA, 20 bp, Dolosicoccus paucivorans
gtatcgctaaaggatggtcc

SEQ ID NO: 15489 - DNA, 20 bp, Bacillus mycoides
aaggatagccgatcggaagg

SEQ ID NO: 15490 - DNA, 20 bp, Bacillus laevolacticus
gaacgctggccggcgtgccc

SEQ ID NO: 15491 - DNA, 20 bp, Bacteroides thetaiotaomicron
gtttgcttgcaaaccaaagc

SEQ ID NO: 15492 - DNA, 20 bp, Bacteroides thetaiotaomicron
cgcatgggttttatattaaa

SEQ ID NO: 15493 - DNA, 20 bp, Porphyromonas maccae
cttcttttataggggattaa

SEQ ID NO: 15494 - DNA, 20 bp, Paenibacillus azotofixans
tgctctctcattaacttagc

SEQ ID NO: 15495 - DNA, 20 bp, Brevibacterium casei
ctggacagagagaggcgaac

SEQ ID NO: 15496 - DNA, 20 bp, Fusobacterium mortiferum
ttgatcctcggggtgatggt

SEQ ID NO: 15497 - DNA, 20 bp, Campylobacter curvus
tcgtctgcgaagtaaataat

SEQ ID NO: 15498 - DNA, 30 bp, Porphyromonas endodontalis
ggcagcattattttagcttgctaagataga

SEQ ID NO: 15499 - DNA, 20 bp, Bacillus coagulans
agcttgcttctatcaagtta

SEQ ID NO: 15500 - DNA, 20 bp, Empedobacter brevis
gagtgatgttgaagtggctg

SEQ ID NO: 15501 - DNA, 20 bp, Gemella morbillorum
tggacgcgatagctaatccc

SEQ ID NO: 15502 - DNA, 20 bp, Bacteroides thetaiotaomicron
cgcccgcccgtcaagccatg

SEQ ID NO: 15503 - DNA, 20 bp, Peptoniphilus asaccharolyticus
gtcgagcgatgaaaatcaaa

SEQ ID NO: 15504 - DNA, 20 bp, Porphyromonas endodontalis
agagaggagacgaggtatgc

SEQ ID NO: 15505 - DNA, 20 bp, Peptoniphilus asaccharolyticus
cgggcgagctagtgatagta

SEQ ID NO: 15506 - DNA, 20 bp, Eubacterium moniliforme
ttgtaaacttttgtcctatg

SEQ ID NO: 15507 - DNA, 20 bp, Sphingobacterium multivorum
acatcaacagttcgcatgtt

SEQ ID NO: 15508 - DNA, 20 bp, Salmonella typhi
ggtatcaggcagcagcttgc

SEQ ID NO: 15509 - DNA, 20 bp, Anaerobiospirillum succiniciproducens
ggaaacgataccgggagggg

SEQ ID NO: 15510 - DNA, 20 bp, Campylobacter curvus
tactccatactccatttata

SEQ ID NO: 15511 - DNA, 20 bp, Peptoniphilus asaccharolyticus
cggggtgaagtttggaagga

SEQ ID NO: 15512 - DNA, 20 bp, Anaerococcus prevotii
tatacttagttaccagcgaa

SEQ ID NO: 15513 - DNA, 20 bp, Streptococcus infantarius
ccctagtgtgcgccgcatca

SEQ ID NO: 15514 - DNA, 20 bp, Enterobacter gergoviae
ctacttggaggctgtggttc

SEQ ID NO: 15515 - DNA, 20 bp, Dolosigranulum pigrum
gcggtctgtttagtctaatg

SEQ ID NO: 15516 - DNA, 30 bp, Clostridium tetani
taccctgaattactcgtaactgaggaagtc

SEQ ID NO: 15517 - DNA, 20 bp, Paenibacillus validus
tcgagcggccctttccttcg

SEQ ID NO: 15518 - DNA, 20 bp, Sphingomonas paucimobilis
cgaggggaacctgcggggga

SEQ ID NO: 15519 - DNA, 20 bp, Dolosicoccus paucivorans
gaacgcgactgtatcaccgc

SEQ ID NO: 15520 - DNA, 20 bp, Clostridium clostridiiforme
tcaaccccggtactgctttg

SEQ ID NO: 15521 - DNA, 20 bp, Neisseria subflava
tacattagttgccatcattt

SEQ ID NO: 15522 - DNA, 20 bp, Morganella morganii
tgtcaaggttaataaccttg

SEQ ID NO: 15523 - DNA, 20 bp, Clostridium innocuum
cgaacgaagtttcaaggaag

SEQ ID NO: 15524 - DNA, 20 bp, Bacillus schlegellii
cctgtctcttagcggcggac

SEQ ID NO: 15525 - DNA, 20 bp, Achromobacter xylosoxidans
aaagcgtagcttaataccgg

SEQ ID NO: 15526 - DNA, 20 bp, Corynebacterium pilosum
gccctgccttccagggtctc

SEQ ID NO: 15527 - DNA, 20 bp, Leptotrichia buccalis
cgaacctgcaaagccggtcc

SEQ ID NO: 15528 - DNA, 20 bp, Eubacterium moniliforme
tatatgttcccttcggggca

SEQ ID NO: 15529 - DNA, 20 bp, Microbacterium hominis
aacgggtgaaggcccagctt

SEQ ID NO: 15530 - DNA, 20 bp, Vibrio vulnificus
gccaccactttgggtcatga

SEQ ID NO: 15531 - DNA, 20 bp, Paenibacillus azotofixans
tcaagagtaactgctaaagg

SEQ ID NO: 15532 - DNA, 20 bp, Corynebacterium pilosum
gtttttccttcttgtgttgg

SEQ ID NO: 15533 - DNA, 20 bp, Staphylococcus aureus
caggattagataccctggag

SEQ ID NO: 15534 - DNA, 20 bp, Campylobacter curvus
gtcgaaccctatatattgtt

SEQ ID NO: 15535 - DNA, 20 bp, Bacteroides capillosus
cttacaacggaataacccgg

SEQ ID NO: 15536 - DNA, 20 bp, Actinomyces neuii
tcagggaacgtgcggcgtgc

SEQ ID NO: 15537 - DNA, 20 bp, Moellerella wisconsensis
aggaaggcgttgatactaat

SEQ ID NO: 15538 - DNA, 20 bp, Raoultella terrigena
gaacgctgttgtgtaggcct

SEQ ID NO: 15539 - DNA, 20 bp, Eubacterium moniliforme
aatctgccctgcaatggggg

SEQ ID NO: 15540 - DNA, 20 bp, Streptococcus macacae
cccggtgccatttctagaga

SEQ ID NO: 15541 - DNA, 20 bp, Actinomyces radingae
ctgcgctttccgcatggggg

SEQ ID NO: 15542 - DNA, 20 bp, Propionibacterium propionicus
gcttttttgtgacggtagca

SEQ ID NO: 15543 - DNA, 20 bp, Morganella morganii
aggaaggtggcaaggttaat

SEQ ID NO: 15544 - DNA, 20 bp, Staphylococcus aureus
tttctggctgaactgacgct

SEQ ID NO: 15545 - DNA, 20 bp, Peptostreptococcus anaerobius
cgcgtctgttttgatgcttg

SEQ ID NO: 15546 - DNA, 20 bp, Bacteroides merdae
agtggaaacactccttctag

SEQ ID NO: 15547 - DNA, 20 bp, Corynebacterium coyleae
atcggccccagagatgctgg

SEQ ID NO: 15548 - DNA, 20 bp, Streptococcus macacae
accgcataatatctctctaa

SEQ ID NO: 15549 - DNA, 20 bp, Clostridium innocuum
atacagagcgcatgctcagt

SEQ ID NO: 15550 - DNA, 20 bp, Clostridium clostridiiforme
cggttgctaccagataaagc

SEQ ID NO: 15551 - DNA, 20 bp, Streptococcus bovis
agtaccaactggtacactga

SEQ ID NO: 15552 - DNA, 20 bp, Helcococcus kunzii
acggaaaaaggaaagtagcg

SEQ ID NO: 15553 - DNA, 20 bp, Atopobium parvulum
tagccacgggaaaccgtgga

SEQ ID NO: 15554 - DNA, 20 bp, Anaerococcus prevotii
ataccaaatgaaatcacata

SEQ ID NO: 15555 - DNA, 20 bp, Vibrio hollisae
gacatgtacggaattctgga

SEQ ID NO: 15556 - DNA, 20 bp, Anaerococcus prevotii
acagagggcagctatatagt

SEQ ID NO: 15557 - DNA, 20 bp, Leptotrichia buccalis
tgacatgtaatgcttaacac

SEQ ID NO: 15558 - DNA, 30 bp, Sphingomonas paucimobilis
cgtacaagggagccgaggggaacctgcggg

SEQ ID NO: 15559 - DNA, 20 bp, Providencia rustigianii
tgctaatatcatcagcgatt

SEQ ID NO: 15560 - DNA, 20 bp, Vibrio cholerae
aagcgtcctcccggaaggta

SEQ ID NO: 15561 - DNA, 20 bp, Moellerella wisconsensis
cagcgattgacgttaccgac

SEQ ID NO: 15562 - DNA, 20 bp, Brevibacillus thermoruber
ggatcctgtttggagcttgc

SEQ ID NO: 15563 - DNA, 20 bp, Citrobacter amalonaticus
gaatgaacgctgttggcagg

SEQ ID NO: 15564 - DNA, 20 bp, Vibrio metschnikovii
tagcctacggctcaaagagg

SEQ ID NO: 15565 - DNA, 20 bp, Leuconostoc fallax
gcaagtcgaacgctagtcgc

SEQ ID NO: 15566 - DNA, 20 bp, Neisseria polysaccharea
cctcccttcagtggatcact

SEQ ID NO: 15567 - DNA, 20 bp, Prevotella loescheii
cggggccgccgcggaggtgc

SEQ ID NO: 15568 - DNA, 20 bp, Micrococcus luteus
ggggagccgcgaggggggga

SEQ ID NO: 15569 - DNA, 20 bp, Streptococcus urinalis
aataccgcatgagagttttt

SEQ ID NO: 15570 - DNA, 20 bp, Sphingobacterium multivorum
aacaccgcataacatcaaca

SEQ ID NO: 15571 - DNA, 20 bp, Leuconostoc fallax
aacgctagtcgcggacctga

SEQ ID NO: 15572 - DNA, 20 bp, Streptococcus urinalis
cgctgaggtcatgtgcttgc

SEQ ID NO: 15573 - DNA, 20 bp, Proteus vulgaris
gctcacctagcaacgatctc

SEQ ID NO: 15574 - DNA, 20 bp, Campylobacter concisus
aaagggagctgcgaaggtgg

SEQ ID NO: 15575 - DNA, 20 bp, Bacteroides stercoris
tgcaacagaggtaggcggaa

SEQ ID NO: 15576 - DNA, 20 bp, Citrobacter freundii
ggaaaacggtagctaatacc

SEQ ID NO: 15577 - DNA, 20 bp, Providencia stuartii
tgttaataccatcaacgatt

SEQ ID NO: 15578 - DNA, 20 bp, Mannheimia haemolytica
tttcagactgaacaactaga

SEQ ID NO: 15579 - DNA, 20 bp, Psychrobacter phenylpyruvicus
caatactaaaaggcggcttt

SEQ ID NO: 15580 - DNA, 20 bp, Bacteroides distasonis
ataccgcatgaagcaggggc

SEQ ID NO: 15581 - DNA, 20 bp, Finegoldia magna
ctaatgagagtggcgaacgg

SEQ ID NO: 15582 - DNA, 20 bp, Bacillus schlegellii
gaagcctgtctcttagcggc

SEQ ID NO: 15583 - DNA, 20 bp, Paenibacillus macerans
ctggtgtttaaggctgtggc

SEQ ID NO: 15584 - DNA, 20 bp, Pseudomonas mendocina
ggttacatgctcttcctccc

SEQ ID NO: 15585 - DNA, 20 bp, Stenotrophomonas maltophilia
ctacaatggcaggagacaaa

SEQ ID NO: 15586 - DNA, 20 bp, Eubacterium moniliforme
ccggggttgcacttgaaact

SEQ ID NO: 15587 - DNA, 20 bp, Empedobacter brevis
gtaagattagttagttggag

SEQ ID NO: 15588 - DNA, 20 bp, Campylobacter concisus
tggttggatgccattgtgga

SEQ ID NO: 15589 - DNA, 20 bp, Sphingobacterium multivorum
caccgcataacatatgtgac

SEQ ID NO: 15590 - DNA, 20 bp, Bacteroides stercoris
ctgccgacaacactgggata

SEQ ID NO: 15591 - DNA, 20 bp, Corynebacterium coyleae
cagatcggccccagagatgc

SEQ ID NO: 15592 - DNA, 20 bp, Prevotella loescheii
cggagacgatgaggcccttc

SEQ ID NO: 15593 - DNA, 20 bp, Gemella morbillorum
caattgctatcgctaccaga

SEQ ID NO: 15594 - DNA, 20 bp, Streptococcus macacae
agaacgggtgtaagagcgga

SEQ ID NO: 15595 - DNA, 20 bp, Neisseria subflava
tcgtaacaaggcagcccgag

SEQ ID NO: 15596 - DNA, 20 bp, Actinomyces radingae
tttccgcatggggggtgtgg

SEQ ID NO: 15597 - DNA, 20 bp, Corynebacterium falsenii
gaagaagccatgttgtggtg

SEQ ID NO: 15598 - DNA, 20 bp, Capnocytophaga sp.
aaatggagactgacgtactt

SEQ ID NO: 15599 - DNA, 20 bp, Bacteroides stercoris
tgatactggtatccttgagt

SEQ ID NO: 15600 - DNA, 20 bp, Yersinia frederiksenii
aggaggaaggcatttcactt

SEQ ID NO: 15601 - DNA, 20 bp, Weeksella virosa
attcacgagctggatagttg

SEQ ID NO: 15602 - DNA, 30 bp, Bacteroides stercoris
tgaatactcgctgttggcgatacaatgtca

SEQ ID NO: 15603 - DNA, 20 bp, Leptotrichia buccalis
taacgccaagcgaacctgca

SEQ ID NO: 15604 - DNA, 20 bp, Empedobacter brevis
gggtacgattctttcgggaa

SEQ ID NO: 15605 - DNA, 20 bp, Bacteroides capillosus
taaaggtttagcggtaaggg

SEQ ID NO: 15606 - DNA, 20 bp, Providencia stuartii
cagagaattgagcagagatg

SEQ ID NO: 15607 - DNA, 20 bp, Leptotrichia buccalis
tatgcccgtgagagcgggca

SEQ ID NO: 15608 - DNA, 20 bp, Vibrio hollisae
aactgcgtttggaactgtca

SEQ ID NO: 15609 - DNA, 20 bp, Serratia rubidaea
gtcttaatacggcattacat

SEQ ID NO: 15610 - DNA, 20 bp, Bacteroides stercoris
tgctggggactctacccgga

SEQ ID NO: 15611 - DNA, 20 bp, Aerococcus viridans
gatggtacagcgagtcgcga

SEQ ID NO: 15612 - DNA, 20 bp, Providencia stuartii
gttgatgttaataccatcaa

SEQ ID NO: 15613 - DNA, 20 bp, Oligella urethralis
acgatccccctctttcctcc

SEQ ID NO: 15614 - DNA, 20 bp, Actinomyces radingae
aggggcttttttaagtttct

SEQ ID NO: 15615 - DNA, 20 bp, Bacteroides stercoris
ctgttggcgatacaatgtca

SEQ ID NO: 15616 - DNA, 20 bp, Enterobacter gergoviae
ccgtggcttccggaggctac

SEQ ID NO: 15617 - DNA, 20 bp, Vagococcus fluvialis
gggagaataataaaagacgc

SEQ ID NO: 15618 - DNA, 20 bp, Bacteroides distasonis
tcctattttgtatgtacctt

SEQ ID NO: 15619 - DNA, 20 bp, Oligella ureolytica
ggatcatttgacctctcgct

SEQ ID NO: 15620 - DNA, 20 bp, Brevibacillus centrosporus
tacttccggggaacccgggg

SEQ ID NO: 15621 - DNA, 20 bp, Porphyromonas endodontalis
gcagcgtaccaggctccgtc

SEQ ID NO: 15622 - DNA, 20 bp, Actinomyces radingae
ctgcgtggcctttgtggttg

SEQ ID NO: 15623 - DNA, 20 bp, Sphingobacterium multivorum
catcaacagttcgcatgttc

SEQ ID NO: 15624 - DNA, 20 bp, Bifidobacterium adolescentis
cattaacctaatactttgct

SEQ ID NO: 15625 - DNA, 20 bp, Empedobacter brevis
gtatcaactgacgctgatgg

SEQ ID NO: 15626 - DNA, 30 bp, Actinomyces naeslundii
gtgtgggaaagatgcgcctttgggtgtttt

SEQ ID NO: 15627 - DNA, 30 bp, Haemophilus haemolyticus
gagggtggcgatgccgcgaggtggagcgaa

SEQ ID NO: 15628 - DNA, 20 bp, Anaerococcus tetradius
ataataccctatgacataaa

SEQ ID NO: 15629 - DNA, 20 bp, Brevibacillus centrosporus
cggggttaatcccgaatatt

SEQ ID NO: 15630 - DNA, 20 bp, Bacteroides capillosus
acagagcgtcggtcgtatgc

SEQ ID NO: 15631 - DNA, 20 bp, Bacteroides stercoris
gcagcatcatcaaagcttgc

SEQ ID NO: 15632 - DNA, 20 bp, Staphylococcus schleiferi
gcccgtcgaaagtgggacac

SEQ ID NO: 15633 - DNA, 20 bp, Streptococcus acidominimus
aagagaagaacgttagcggg

SEQ ID NO: 15634 - DNA, 20 bp, Enterococcus dispar
acacatgtttattatttgaa

SEQ ID NO: 15635 - DNA, 20 bp, Vibrio parahaemolyticus
aggcgtcgtagtccggattg

SEQ ID NO: 15636 - DNA, 20 bp, Prevotella melaninogenica
catagggctccaggaatgaa

SEQ ID NO: 15637 - DNA, 20 bp, Streptococcus constellatus
gcacaggatgcccgtagttt

SEQ ID NO: 15638 - DNA, 20 bp, Capnocytophaga sp.
aatggagactgacgtactta

SEQ ID NO: 15639 - DNA, 20 bp, Streptococcus macacae
agagggggataaggattgga

SEQ ID NO: 15640 - DNA, 20 bp, Sphingomonas paucimobilis
aggggaacctgcgggggatc

SEQ ID NO: 15641 - DNA, 20 bp, Leptotrichia buccalis
gacgcatgtcaggctgatga

SEQ ID NO: 15642 - DNA, 20 bp, Streptococcus suis
catttaggagccagccgtcc

SEQ ID NO: 15643 - DNA, 20 bp, Bacteroides thetaiotaomicron
gcgtctagggtaagattggt

SEQ ID NO: 15644 - DNA, 20 bp, Finegoldia magna
atcggtcatagatgggctcg

SEQ ID NO: 15645 - DNA, 20 bp, Clostridium clostridiiforme
tcggatggatttgaaattga

SEQ ID NO: 15646 - DNA, 30 bp, Bacteroides capillosus
cgaccgcaaggaacggcctagggcgaaact

SEQ ID NO: 15647 - DNA, 20 bp, Leuconostoc carnosum
ggtagggaatgaccttagcc

SEQ ID NO: 15648 - DNA, 20 bp, Staphylococcus schleiferi
atcggaaagtgccggtggat

SEQ ID NO: 15649 - DNA, 20 bp, Finegoldia magna
aagcttcggtggaagattac

SEQ ID NO: 15650 - DNA, 20 bp, Anaerococcus prevotii
ttaaatgatctcttcggagt

SEQ ID NO: 15651 - DNA, 20 bp, Finegoldia magna
ataccgcataaaatcgtaga

SEQ ID NO: 15652 - DNA, 20 bp, Bacillus schlegellii
gtgggtggggcgacccatcc

SEQ ID NO: 15653 - DNA, 20 bp, Clostridium clostridiiforme
caagttgagcggggatggtt

SEQ ID NO: 15654 - DNA, 20 bp, Streptococcus macacae
aaaggtgcagctgcacccct

SEQ ID NO: 15655 - DNA, 20 bp, Finegoldia magna
ctctttatgagacatccata

SEQ ID NO: 15656 - DNA, 20 bp, Bacteroides thetaiotaomicron
catggcgcggtgaatagttc

SEQ ID NO: 15657 - DNA, 20 bp, Leuconostoc carnosum
agcttttagaaatagaagtg

SEQ ID NO: 15658 - DNA, 20 bp, Paenibacillus lautus
ctctcgcatgggagaggaaa

SEQ ID NO: 15659 - DNA, 20 bp, Sporosarcina pasteurii
atcctgcagtgacagcatag

SEQ ID NO: 15660 - DNA, 20 bp, Paenibacillus glucanolyticus
ttattacatagcattatgtg

SEQ ID NO: 15661 - DNA, 20 bp, Eubacterium moniliforme
gccctcgggtggaactgtga

SEQ ID NO: 15662 - DNA, 20 bp, Eremococcus coleocola
gataacggtcggaaacgatc

SEQ ID NO: 15663 - DNA, 20 bp, Streptococcus sanguinis
acactgtgaccggatcttac

SEQ ID NO: 15664 - DNA, 20 bp, Oligella ureolytica
cgagccatcccgcgtgtggg

SEQ ID NO: 15665 - DNA, 20 bp, Clostridium clostridiiforme
acgggccggtaacgcggcct

SEQ ID NO: 15666 - DNA, 30 bp, Achromobacter xylosoxidans
taaacgatgtcactagctgttggggccttc

SEQ ID NO: 15667 - DNA, 20 bp, Paenibacillus pabuli
aagcttgcttttcttgatac

SEQ ID NO: 15668 - DNA, 20 bp, Leptotrichia buccalis
ctacagggctggagtattgg

SEQ ID NO: 15669 - DNA, 20 bp, Dolosicoccus paucivorans
tcggatgcatagcttagaga

SEQ ID NO: 15670 - DNA, 20 bp, Finegoldia magna
aaacacatgttttaacggtc

SEQ ID NO: 15671 - DNA, 20 bp, Staphylococcus epidermidis
aacgctggcgtgcgtgccct

SEQ ID NO: 15672 - DNA, 20 bp, Clostridium clostridiiforme
cgaaactggagagcttgaga

SEQ ID NO: 15673 - DNA, 20 bp, Staphylococcus aureus
ggtgatccaaccgcaccctt

SEQ ID NO: 15674 - DNA, 20 bp, Microbacterium hominis
ggtaacaccagcaggcggtg

SEQ ID NO: 15675 - DNA, 20 bp, Bacteroides merdae
aggacgtgtccttttttgta

SEQ ID NO: 15676 - DNA, 20 bp, Helcococcus ovis
ttaggaggcagacgtcgaag

SEQ ID NO: 15677 - DNA, 20 bp, Bacillus licheniformis
accggcagggttcaatcata

SEQ ID NO: 15678 - DNA, 20 bp, Salmonella typhi
gcagcttgcttgcttggctg

SEQ ID NO: 15679 - DNA, 20 bp, Sphingobacterium multivorum
caacacgagaggaagggggg

SEQ ID NO: 15680 - DNA, 20 bp, Haemophilus paraphrophilus
gaactttaagtttggcgccc

SEQ ID NO: 15681 - DNA, 20 bp, Corynebacterium pilosum
gtattctggcctggtcttcc

SEQ ID NO: 15682 - DNA, 20 bp, Morganella morganii
tcagtcgggaggaaggtggc

SEQ ID NO: 15683 - DNA, 20 bp, Bacteroides capillosus
ttgagtttgcacaacgttgg

SEQ ID NO: 15684 - DNA, 20 bp, Myroides odoratimimus
aggttactacgtatttattg

SEQ ID NO: 15685 - DNA, 20 bp, Anaerococcus prevotii
ctctttaagagacatccata

SEQ ID NO: 15686 - DNA, 20 bp, Alloiococcus otitis
ggggaaatgaaaggtggctc

SEQ ID NO: 15687 - DNA, 20 bp, Anaerobiospirillum succiniciproducens
aagacttttagttgctatca

SEQ ID NO: 15688 - DNA, 20 bp, Actinomyces radingae
gcgctttccgcatggggggt

SEQ ID NO: 15689 - DNA, 20 bp, Finegoldia magna
gagcaacctgcctatgacag

SEQ ID NO: 15690 - DNA, 20 bp, Stenotrophomonas maltophilia
ttgcactatcgaatgagccc

SEQ ID NO: 15691 - DNA, 20 bp, Microbacterium hominis
tcgaacgggtgaaggcccag

SEQ ID NO: 15692 - DNA, 20 bp, Sphingobacterium multivorum
tcggttggatattaaatatt

SEQ ID NO: 15693 - DNA, 20 bp, Clostridium clostridiiforme
aagggaacgtgaacaggtgc

SEQ ID NO: 15694 - DNA, 20 bp, Sphingobacterium multivorum
ggacgacgtccaggcattca

SEQ ID NO: 15695 - DNA, 20 bp, Eubacterium moniliforme
ctcgggtggaactgtgagta

SEQ ID NO: 15696 - DNA, 20 bp, Actinomyces radingae
tctgcgctttccgcatgggg

SEQ ID NO: 15697 - DNA, 20 bp, Staphylococcus succinus
ccttccgaacggctaccttg

SEQ ID NO: 15698 - DNA, 20 bp, Bacillus schlegellii
cgcccgaaggcgcgtgcagc

SEQ ID NO: 15699 - DNA, 20 bp, Leuconostoc fallax
ttagagataatattgttctc

SEQ ID NO: 15700 - DNA, 20 bp, Oligella urethralis
gcacactccaatctcttgaa

SEQ ID NO: 15701 - DNA, 20 bp, Paenibacillus macerans
tacgcaactccttcgcatga

SEQ ID NO: 15702 - DNA, 20 bp, Streptococcus acidominimus
cataatagtgtttactgcat

SEQ ID NO: 15703 - DNA, 20 bp, Bacteroides stercoris
atacaatgtcagcggccaag

SEQ ID NO: 15704 - DNA, 20 bp, Finegoldia magna
aatgttaaagatcggggctc

SEQ ID NO: 15705 - DNA, 20 bp, Bacteroides thetaiotaomicron
gccttgtacgcccgcccgtc

SEQ ID NO: 15706 - DNA, 20 bp, Alloiococcus otitis
tgacatcttctgccaccttc

SEQ ID NO: 15707 - DNA, 20 bp, Gemella morbillorum
gcggggtataactattggac

SEQ ID NO: 15708 - DNA, 20 bp, Eschericchia vulneris
aggcgacagatccctagtct

SEQ ID NO: 15709 - DNA, 20 bp, Bacillus schlegellii
ggcgacccatccgtgccgga

SEQ ID NO: 15710 - DNA, 20 bp, Bacteroides stercoris
aagtgccatagcgagcgcaa

SEQ ID NO: 15711 - DNA, 20 bp, Brevibacterium casei
gtggggatgacgtcaaaatc

SEQ ID NO: 15712 - DNA, 20 bp, Sphingomonas paucimobilis
acaagggagccgaggggaac

SEQ ID NO: 15713 - DNA, 20 bp, Empedobacter brevis
ggaggattaatactttataa

SEQ ID NO: 15714 - DNA, 20 bp, Bacteroides merdae
acttgagtgtgtttgaggta

SEQ ID NO: 15715 - DNA, 20 bp, Bacillus mycoides
cgtacaaggatagccgatcg

SEQ ID NO: 15716 - DNA, 20 bp, Anaerococcus tetradius
caatcgcatggtagactaac

SEQ ID NO: 15717 - DNA, 20 bp, Moellerella wisconsensis
tcgggaggaaggcgttgata

SEQ ID NO: 15718 - DNA, 30 bp, Edwardsiella tarda
ctgctttctctcgctgacgagcggcggacg

SEQ ID NO: 15719 - DNA, 20 bp, Eubacterium moniliforme
cgaaaccgcatggtttagag

SEQ ID NO: 15720 - DNA, 20 bp, Streptococcus bovis
gtaccaactggtacactgag

SEQ ID NO: 15721 - DNA, 20 bp, Paenibacillus macerans
gtcttgtggagtaactgcca

SEQ ID NO: 15722 - DNA, 20 bp, Yersinia frederiksenii
ggaggaaggcatttcactta

SEQ ID NO: 15723 - DNA, 20 bp, Bacteroides capilosus
ctgtggcctgcatttgaaac

SEQ ID NO: 15724 - DNA, 20 bp, Eremococcus coleocola
cctgatggttgattgaaaga

SEQ ID NO: 15725 - DNA, 20 bp, Staphylococcus capitis
cgtcttgacggacctaatca

SEQ ID NO: 15726 - DNA, 20 bp, Anaerococcus tetradius
gttaggttcttggaataatc

SEQ ID NO: 15727 - DNA, 20 bp, Campylobacter curvus
gaaagttgcggtgtgcttta

SEQ ID NO: 15728 - DNA, 20 bp, Neisseria flavescens
ttgaacgctgacgagcatgc

SEQ ID NO: 15729 - DNA, 20 bp, Psychrobacter phenylpyruvicus
taataccaaataagctattg

SEQ ID NO: 15730 - DNA, 20 bp, Prevotella melaninogenica
gctccaggaatgaacgctag

SEQ ID NO: 15731 - DNA, 20 bp, Clostridium clostridiiforme
cagtaaacgatgtatgctgg

SEQ ID NO: 15732 - DNA, 20 bp, Myroides odoratimimus
cctattgttagttaccactc

SEQ ID NO: 15733 - DNA, 20 bp, Streptococcus acidominimus
ttctcccgtagctgctacat

SEQ ID NO: 15734 - DNA, 20 bp, Prevotella bivia
aataccttatgtattcgttt

SEQ ID NO: 15735 - DNA, 20 bp, Geobacillus stearothermophilus
cggaccggattggggcttgc

SEQ ID NO: 15736 - DNA, 20 bp, Corynebacterium pilosum
ctggcctggtcttccggatt

SEQ ID NO: 15737 - DNA, 20 bp, Streptococcus oralis
aatacatgcgagtagaacgc

SEQ ID NO: 15738 - DNA, 20 bp, Leuconostoc carnosum
gcttttagaaatagaagtgt

SEQ ID NO: 15739 - DNA, 20 bp, Moraxella atlantae
gggtttctgctataagatgt

SEQ ID NO: 15740 - DNA, 20 bp, Neisseria lactamica
gttaataccctcggctgatg

SEQ ID NO: 15741 - DNA, 20 bp, Salmonella typhi
atcacatgcaagtcgcgacg

SEQ ID NO: 15742 - DNA, 20 bp, Clostridium innocuum
cagagcgcatgctcagtata

SEQ ID NO: 15743 - DNA, 20 bp, Streptococcus anginosus
tgtcatggttcaggacgaac

SEQ ID NO: 15744 - DNA, 20 bp, Anaerococcus prevotii
taaatgatctcttcggagtg

SEQ ID NO: 15745 - DNA, 30 bp, Empedobacter brevis
ggcagctacttggcaacaagatgcgaatct

SEQ ID NO: 15746 - DNA, 20 bp, Stenotrophomonas maltophilia
agcacaggagaggcttgtct

SEQ ID NO: 15747 - DNA, 20 bp, Eggerthella lenta
gcaggggcggaggcgtcgaa

SEQ ID NO: 15748 - DNA, 20 bp, Bacteroides stercoris
ggcagcatcatcaaagcttg

SEQ ID NO: 15749 - DNA, 20 bp, Clostridium clostridiiforme
ggacttgacatccacgcggt

SEQ ID NO: 15750 - DNA, 20 bp, Clostridium clostridiiforme
ccgcctaaagagtgtccggt

SEQ ID NO: 15751 - DNA, 20 bp, Streptococcus macacae
cgggagcttgctccacgaga

SEQ ID NO: 15752 - DNA, 20 bp, Bacteroides stercoris
ttgcagttgatactggcgac

SEQ ID NO: 15753 - DNA, 20 bp, Oligella ureolytica
gaggaaagggggggatcatt

SEQ ID NO: 15754 - DNA, 20 bp, Bacteroides stercoris
accggatggcatagttttcc

SEQ ID NO: 15755 - DNA, 20 bp, Propionibacterium propionicus
acccattttttgggggggag

SEQ ID NO: 15756 - DNA, 20 bp, Corynebacterium cystitidis
ataccctggtagccatgctg

SEQ ID NO: 15757 - DNA, 20 bp, Dolosicoccus paucivorans
cagctcttgacatcggatgc

SEQ ID NO: 15758 - DNA, 20 bp, Bacteroides vulgatus
ggtcttagcttgctaaggcc

SEQ ID NO: 15759 - DNA, 20 bp, Gemella morbillorum
ataactattggacgcgatag

SEQ ID NO: 15760 - DNA, 20 bp, Bacteroides stercoris
agttccatcaggttatgctg

SEQ ID NO: 15761 - DNA, 20 bp, Peptoniphilus indolicus
aggatttcggtgccgcagtt

SEQ ID NO: 15762 - DNA, 30 bp, Anaerococcus tetradius
cttatcaaagatttatcggtgtaagatgga

SEQ ID NO: 15763 - DNA, 20 bp, Providencia alcalifaciens
cggcggggtgagtaatgtat

SEQ ID NO: 15764 - DNA, 20 bp, Dolosicoccus paucivorans
cgactgtatcaccgccttct

SEQ ID NO: 15765 - DNA, 20 bp, Leuconostoc carnosum
atgggaagaaaagttaaggt

SEQ ID NO: 15766 - DNA, 20 bp, Gemella morbillorum
tatcgctaccagatggacct

SEQ ID NO: 15767 - DNA, 20 bp, Anaerococcus tetradius
gtcaatcgcatggtagacta

SEQ ID NO: 15768 - DNA, 20 bp, Sporosarcina ureae
ggcatgagggaatgttgaaa

SEQ ID NO: 15769 - DNA, 20 bp, Leuconostoc fallax
gagttgcgaaccggcgacgg

SEQ ID NO: 15770 - DNA, 20 bp, Sporosarcina pasteurii
agaaacaagtttcttccttg

SEQ ID NO: 15771 - DNA, 20 bp, Stenotrophomonas maltophilia
tgatcgttcagtccggattg

SEQ ID NO: 15772 - DNA, 20 bp, Abiotrophia defectiva
acatgattccgtgaggaaag

SEQ ID NO: 15773 - DNA, 20 bp, Sporosarcina ureae
ttctcttctggcatgaggga

SEQ ID NO: 15774 - DNA, 20 bp, Lactococcus raffinolactis
tgggtaacctacctttcagc

SEQ ID NO: 15775 - DNA, 20 bp, Microbacterium hominis
ctggtacacgcgcgcccgtc

SEQ ID NO: 15776 - DNA, 20 bp, Clostridium clostridiiforme
gcaaggaagggaacgtgaac

SEQ ID NO: 15777 - DNA, 20 bp, Anaerobiospirillum succiniciproducens
ttttaggcctaatacatgca

SEQ ID NO: 15778 - DNA, 20 bp, Anaerococcus tetradius
attagagatagtttcttaag

SEQ ID NO: 15779 - DNA, 20 bp, Clostridium clostridiiforme
gccggtaacgcggcctttcc

SEQ ID NO: 15780 - DNA, 20 bp, Bacteroides uniformis
aacaactggcgattggggct

SEQ ID NO: 15781 - DNA, 20 bp, Campylobacter curvus
tttatttatcaaatacctac

SEQ ID NO: 15782 - DNA, 20 bp, Brevibacillus centrosporus
ttttgggctgtcgctatagg

SEQ ID NO: 15783 - DNA, 20 bp, Clostridium clostridiiforme
gaggtttggatccatggctc

SEQ ID NO: 15784 - DNA, 20 bp, Pseudomonas mendocina
tgcccccccgacgtgctggt

SEQ ID NO: 15785 - DNA, 20 bp, Stenotrophomonas maltophilia
ccgtatcggcaaggtgcggt

SEQ ID NO: 15786 - DNA, 20 bp, Helcococcus kunzii
caggaatatcctagagatag

SEQ ID NO: 15787 - DNA, 20 bp, Proteus mirabilis
acaaggcaaccgtcagggga

SEQ ID NO: 15788 - DNA, 20 bp, Bacteroides capilosus
acgggctcaacctgtggcct

SEQ ID NO: 15789 - DNA, 20 bp, Prevotella loescheii
gggataaaggggcccacgtg

SEQ ID NO: 15790 - DNA, 20 bp, Clostridium limosum
ataacatcatttcaatgcat

SEQ ID NO: 15791 - DNA, 20 bp, Clostridium clostridiiforme
agcttgagaagcagagaggc

SEQ ID NO: 15792 - DNA, 20 bp, Dermacoccus nishinomiyaensis
tggatatgaccgatctccgc

SEQ ID NO: 15793 - DNA, 20 bp, Delftia acidovorans
tacccggcggggttcgtgac

SEQ ID NO: 15794 - DNA, 20 bp, Moellerella wisconsensis
atactaatactatcagcgat

SEQ ID NO: 15795 - DNA, 20 bp, Bacteroides capillosus
caacggaataacccggcgaa

SEQ ID NO: 15796 - DNA, 20 bp, Bacillus laevolacticus
cggtagctaagccggatagc

SEQ ID NO: 15797 - DNA, 20 bp, Paenibacillus macerans
cacagttcgcactggaaact

SEQ ID NO: 15798 - DNA, 20 bp, Prevotella corporis
ggagcaagctctgtctgttc

SEQ ID NO: 15799 - DNA, 20 bp, Arcanobacterium pyogenes
ggggctttttgttttggtgg

SEQ ID NO: 15800 - DNA, 20 bp, Myroides odoratimimus
gagcttgcttttttgagacc

SEQ ID NO: 15801 - DNA, 20 bp, Campylobacter coli
ggtgaagtcgtacaaggcta

SEQ ID NO: 15802 - DNA, 20 bp, Empedobacter brevis
aagattagttagttggagag

SEQ ID NO: 15803 - DNA, 20 bp, Brevibacillus centrosporus
taccggatagagtctactct

SEQ ID NO: 15804 - DNA, 20 bp, Eubacterium moniliforme
ctgacgcatatagagatata

SEQ ID NO: 15805 - DNA, 20 bp, Brevibacillus thermoruber
gtctgatgtcaaagcccggg

SEQ ID NO: 15806 - DNA, 20 bp, Brevibacillus centrosporus
aagacggaaaggcggcgcaa

SEQ ID NO: 15807 - DNA, 20 bp, Corynebacterium ulcerans
acgttttcccttgtggttgt

SEQ ID NO: 15808 - DNA, 20 bp, Streptococcus ratti
gtgtgctttggaaactgcag

SEQ ID NO: 15809 - DNA, 20 bp, Bacillus megaterium
acaaggtagccgatcggaag

SEQ ID NO: 15810 - DNA, 20 bp, Paenibacillus alvei
catgagggagatgagaaagg

SEQ ID NO: 15811 - DNA, 20 bp, Stenotrophomonas maltophilia
gagcgctgagcacaggtgct

SEQ ID NO: 15812 - DNA, 20 bp, Clostridium clostridiiforme
cgcaaggaagggaacgtgaa

SEQ ID NO: 15813 - DNA, 20 bp, Staphylococcus schleiferi
catttggaagctaagcccgt

SEQ ID NO: 15814 - DNA, 20 bp, Proteus vulgaris
acgatctctactggctgaga

SEQ ID NO: 15815 - DNA, 20 bp, Neisseria flavescens
attgaacgctgacgagcatg

SEQ ID NO: 15816 - DNA, 20 bp, Myroides odoratimimus
agagcttgcttttttgagac

SEQ ID NO: 15817 - DNA, 20 bp, Staphylococcus schleiferi
cccgtatcggaaagtgccgg

SEQ ID NO: 15818 - DNA, 20 bp, Clostridium clostridiiforme
ccgaaagagagggacacctg

SEQ ID NO: 15819 - DNA, 20 bp, Streptococcus criceti
tagtgattaactcatgttaa

SEQ ID NO: 15820 - DNA, 20 bp, Finegoldia magna
taatgacagtaccatagaag

SEQ ID NO: 15821 - DNA, 20 bp, Citrobacter amalonaticus
gggtgaatggttaataacca

SEQ ID NO: 15822 - DNA, 20 bp, Bacteroides thetaiotaomicron
attttggaaacaggatagcc

SEQ ID NO: 15823 - DNA, 20 bp, Moellerella wisconsensis
ccttgcgctgtcggatgaac

SEQ ID NO: 15824 - DNA, 20 bp, Brevibacillus centrosporus
gaaagccgggttttgggctg

SEQ ID NO: 15825 - DNA, 20 bp, Finegoldia magna
aaggtattcgtatcgtaaag

SEQ ID NO: 15826 - DNA, 20 bp, Corynebacterium group ANF
gagcgcgtgaaactaacgga

SEQ ID NO: 15827 - DNA, 20 bp, Morganella morganii
aaggtggcaaggttaataac

SEQ ID NO: 15828 - DNA, 20 bp, Escherichia fergusonii
cagcttgctgattcgctgac

SEQ ID NO: 15829 - DNA, 20 bp, Bacteroides capillosus
aagtccgcgaccgcaaggaa

SEQ ID NO: 15830 - DNA, 20 bp, Paenibacillus lautus
ggagaggaaagaaagacgga

SEQ ID NO: 15831 - DNA, 20 bp, Stenotrophomonas maltophilia
aaggctaatacccttatcga

SEQ ID NO: 15832 - DNA, 20 bp, Finegoldia magna
gttaccagcgaataaatgtc

SEQ ID NO: 15833 - DNA, 20 bp, Corynebacterium cystitidis
acgggggcgctaggtgtgag

SEQ ID NO: 15834 - DNA, 20 bp, Sphingomonas paucimobilis
gggagccgaggggaacctgc

SEQ ID NO: 15835 - DNA, 20 bp, Pseudomonas fluorescens
ttgctcacggatttagcggc

SEQ ID NO: 15836 - DNA, 20 bp, Anaerococcus tetradius
actcacaaagtctgtcccag

SEQ ID NO: 15837 - DNA, 20 bp, Streptococcus ferus
ccattacgtgacggtactta

SEQ ID NO: 15838 - DNA, 20 bp, Alloiococcus otitis
cgcttatggatagcctcgcg

SEQ ID NO: 15839 - DNA, 20 bp, Eremococcus coleocola
ataccgcataacagcaatca

SEQ ID NO: 15840 - DNA, 20 bp, Streptococcus urinalis
agtttttaacacatgttagg

SEQ ID NO: 15841 - DNA, 20 bp, Morganella morganii
gtggcaaggttaataacctt

SEQ ID NO: 15842 - DNA, 20 bp, Clostridium clostridiiforme
gcgatagttccgtgccgaag

SEQ ID NO: 15843 - DNA, 30 bp, Serratia rubidaea
aatacggcattacattgacgttactcgcag

SEQ ID NO: 15844 - DNA, 30 bp, Peptoniphilus indolicus
tgagttggattagcggcggacgggtgagta

SEQ ID NO: 15845 - DNA, 20 bp, Finegoldia magna
acagaagcttcggtggaaga

SEQ ID NO: 15846 - DNA, 20 bp, Morganella morganii
cagtcgggaggaaggtggca

SEQ ID NO: 15847 - DNA, 20 bp, Neisseria subflava
aacaaggcagcccgagggga

SEQ ID NO: 15848 - DNA, 20 bp, Anaerococcus tetradius
gaaaaatattggattagtgg

SEQ ID NO: 15849 - DNA, 30 bp, Yersinia frederiksenii
tttcacttaatacgtgaagtgattgacgtt

SEQ ID NO: 15850 - DNA, 20 bp, Empedobacter brevis
gaatctgagaccggcgcacg

SEQ ID NO: 15851 - DNA, 20 bp, Empedobacter brevis
tgcgtgttaatagcacgtgc

SEQ ID NO: 15852 - DNA, 20 bp, Providencia alcalifaciens
cggcggcggggtgagtaatg

SEQ ID NO: 15853 - DNA, 20 bp, Bacteroides stercoris
cttcggacagttgtgaaggt

SEQ ID NO: 15854 - DNA, 20 bp, Empedobacter brevis
gctgttggggtttcggcttc

SEQ ID NO: 15855 - DNA, 20 bp, Bacteroides merdae
caatacagattgatggcgac

SEQ ID NO: 15856 - DNA, 20 bp, Arthrobacter globiformis
tgaagcccaggcttgctggg

SEQ ID NO: 15857 - DNA, 20 bp, Brevibacillus centrosporus
gcgaagacggaaaggcggcg

SEQ ID NO: 15858 - DNA, 20 bp, Aeromonas schubertii
acatgtctggaaccttgtag

SEQ ID NO: 15859 - DNA, 20 bp, Paenibacillus popilliae
gggaagaacgccttgtagag

SEQ ID NO: 15860 - DNA, 20 bp, Mannheimia haemolytica
cacataggagtttgctcctt

SEQ ID NO: 15861 - DNA, 20 bp, Moraxella atlantae
cctacgggagaaaggagctt

SEQ ID NO: 15862 - DNA, 20 bp, Brevibacillus centrosporus
ttttcttttgtttcatggca

SEQ ID NO: 15863 - DNA, 20 bp, Staphylococcus schleiferi
ccgtatcggaaagtgccggt

SEQ ID NO: 15864 - DNA, 20 bp, Eubacterium moniliforme
gccctgcaatgggggacaac

SEQ ID NO: 15865 - DNA, 20 bp, Bacillus coagulans
tcgagcggacttgttagaag

SEQ ID NO: 15866 - DNA, 20 bp, Empedobacter brevis
agtatcaactgacgctgatg

SEQ ID NO: 15867 - DNA, 20 bp, Streptococcus criceti
agtagagtggaaagttactc

SEQ ID NO: 15868 - DNA, 20 bp, Fusobacterium mortiferum
ttttgtgccccttcggggga

SEQ ID NO: 15869 - DNA, 20 bp, Geobacillus thermoglucosidasius
gaatccccaaaaacccgctc

SEQ ID NO: 15870 - DNA, 20 bp, Sphingobacterium multivorum
atgttcggttgattaaatat

SEQ ID NO: 15871 - DNA, 20 bp, Bacillus laevolacticus
ctacagagattgaccttgcc

SEQ ID NO: 15872 - DNA, 20 bp, Brevibacillus brevis
ttgggatcaacctccttcaa

SEQ ID NO: 15873 - DNA, 20 bp, Bacteroides ureolyticus
cacagtggaatcagtaactg

SEQ ID NO: 15874 - DNA, 20 bp, Streptococcus equi
catgcaagtggaacgcacag

SEQ ID NO: 15875 - DNA, 20 bp, Finegoldia magna
gtaaacagaagcctcggtgg

SEQ ID NO: 15876 - DNA, 20 bp, Clostridium clostridiiforme
ttggagagacttgtgtccta

SEQ ID NO: 15877 - DNA, 20 bp, Alloiococcus otitis
ataaaaggtggctctgctac

SEQ ID NO: 15878 - DNA, 20 bp, Eubacterium moniliforme
gagcacccgaagccagtggc

SEQ ID NO: 15879 - DNA, 20 bp, Lactococcus raffinolactis
ggtacactgagagatggacc

SEQ ID NO: 15880 - DNA, 20 bp, Staphylococcus carnosus
agcgaacagaatgaggagct

SEQ ID NO: 15881 - DNA, 20 bp, Streptococcus macacae
aggattggaaacgataggta

SEQ ID NO: 15882 - DNA, 20 bp, Bacteroides merdae
gaagctgaggactctggtga

SEQ ID NO: 15883 - DNA, 20 bp, Peptoniphilus indolicus
cggaggatttcggtgccgca

SEQ ID NO: 15884 - DNA, 20 bp, Paenibacillus azotofixans
ttgctctctcattaacttag

SEQ ID NO: 15885 - DNA, 20 bp, Anaerobiospirillum succiniciproducens
gcggatgcaccagaagtagt

SEQ ID NO: 15886 - DNA, 20 bp, Streptococcus infantarius
tctggcgccgtgctctcagc

SEQ ID NO: 15887 - DNA, 30 bp, Propionibacterium propionicus
cggccttcgggttgtaaaccgctttcaatt

SEQ ID NO: 15888 - DNA, 20 bp, Myroides odoratimimus
gcagagcttgaataatatgg

SEQ ID NO: 15889 - DNA, 20 bp, Leptotrichia buccalis
cagagagctgcaaggcggta

SEQ ID NO: 15890 - DNA, 20 bp, Clostridium clostridiiforme
gaaggatccgcctaaagagt

SEQ ID NO: 15891 - DNA, 20 bp, Clostridium clostridiiforme
agtaaagcacaaggacttgt

SEQ ID NO: 15892 - DNA, 20 bp, Bacteroides ovatus
atacgaatatcgcatgatat

SEQ ID NO: 15893 - DNA, 30 bp, Dolosicoccus paucivorans
ggaaacctgccctttagtgggggataactg

SEQ ID NO: 15894 - DNA, 20 bp, Enterobacter amnigenus
agcacagagaggcttgtttt

SEQ ID NO: 15895 - DNA, 20 bp, Sphingobacterium multivorum
gttgattaaatatttatagg

SEQ ID NO: 15896 - DNA, 20 bp, Streptococcus macacae
ataccgcatgacagctttta

SEQ ID NO: 15897 - DNA, 20 bp, Streptococcus criceti
aatgacttgaaaggtgcaat

SEQ ID NO: 15898 - DNA, 20 bp, Bacteroides ureolyticus
ttaaccactaaactgcttag

SEQ ID NO: 15899 - DNA, 20 bp, Propionibacterium avidum
ttgttaggcggctagccagt

SEQ ID NO: 15900 - DNA, 20 bp, Corynebacterium coyleae
ccccagagatgctggtttcc

SEQ ID NO: 15901 - DNA, 20 bp, Anaerococcus tetradius
gaataatctgggagccgcag

SEQ ID NO: 15902 - DNA, 20 bp, Lactococcus raffinolactis
ccaaatggtacactgagaga

SEQ ID NO: 15903 - DNA, 20 bp, Suttonella indologenes
gattgaacgctggcgggccc

SEQ ID NO: 15904 - DNA, 30 bp, Streptococcus macacae
tcgtaaagctctgttgttaaggaagcaagt

SEQ ID NO: 15905 - DNA, 20 bp, Streptococcus acidominimus
taatttaaaaggagcaacag

SEQ ID NO: 15906 - DNA, 20 bp, Clostridium clostridiiforme
acgggtgagtaaagcacaag

SEQ ID NO: 15907 - DNA, 20 bp, Bacillus coagulans
taacactttcgctcgcatga

SEQ ID NO: 15908 - DNA, 20 bp, Streptococcus acidominimus
ccgctaagtgacggtacctt

SEQ ID NO: 15909 - DNA, 30 bp, Eubacterium moniliforme
ctccgtgccgaagctaacgcattaagtatc

SEQ ID NO: 15910 - DNA, 20 bp, Bacteroides uniformis
ctcgtgccgtcaggtgtcgg

SEQ ID NO: 15911 - DNA, 20 bp, Atopobium parvulum
tggataataccgaatacttc

SEQ ID NO: 15912 - DNA, 20 bp, Streptococcus ratti
ccgcataagagagtttaaca

SEQ ID NO: 15913 - DNA, 20 bp, Clostridium glycolicum
tacaggataacataagagat

SEQ ID NO: 15914 - DNA, 20 bp, Staphylococcus delphini
aaatcccataaagttgtttc

SEQ ID NO: 15915 - DNA, 20 bp, Haemophilus segnis
gatttgggggttgaacttta

SEQ ID NO: 15916 - DNA, 20 bp, Peptoniphilus asaccharolyticus
ggtgaagtttggaaggatta

SEQ ID NO: 15917 - DNA, 20 bp, Citrobacter freundii
gttgtggttaataaccgtgg

SEQ ID NO: 15918 - DNA, 20 bp, Streptococcus macacae
ttaaccaatgtcagctattg

SEQ ID NO: 15919 - DNA, 20 bp, Streptococcus equi
cacagatgatacgtagcttg

SEQ ID NO: 15920 - DNA, 20 bp, Finegoldia magna
aaatgtccggggactctaag

SEQ ID NO: 15921 - DNA, 20 bp, Anaerococcus tetradius
taaactcttcgcatgaagag

SEQ ID NO: 15922 - DNA, 20 bp, Bacteroides capillosus
cttgaactgtaggcgaacga

SEQ ID NO: 15923 - DNA, 20 bp, Pseudomonas mendocina
attaggttacatgctcttcc

SEQ ID NO: 15924 - DNA, 20 bp, Eremococcus coleocola
accgcataacagcaatcatc

SEQ ID NO: 15925 - DNA, 20 bp, Propionibacterium avidum
gcctaacctgtgtgggggta

SEQ ID NO: 15926 - DNA, 20 bp, Anaerococcus prevotii
gcatgaagctatcatcaaag

SEQ ID NO: 15927 - DNA, 20 bp, Sporosarcina ureae
tgcttccttcagttagcggc

SEQ ID NO: 15928 - DNA, 20 bp, Bacteroides capillosus
cccttcggggcgcctacgga

SEQ ID NO: 15929 - DNA, 20 bp, Finegoldia magna
atacttagttaccagcgagt

SEQ ID NO: 15930 - DNA, 20 bp, Clostridium innocuum
agtatattaaagcgcccatc

SEQ ID NO: 15931 - DNA, 20 bp, Enterococcus casseliflavus
tgatggatggacccgcgggc

SEQ ID NO: 15932 - DNA, 20 bp, Anaerococcus prevotii
aagcttaaatgatctcttcg

SEQ ID NO: 15933 - DNA, 20 bp, Shigella boydii
gcgaatcagcaagctgattc

SEQ ID NO: 15934 - DNA, 20 bp, Achromobacter xylosoxidans
cgcccctaaacgatgtcact

SEQ ID NO: 15935 - DNA, 20 bp, Clostridium innocuum
gagccgtcgaagtaggaccg

SEQ ID NO: 15936 - DNA, 20 bp, Clostridium clostridiiforme
taaacgatgtatgctgggtg

SEQ ID NO: 15937 - DNA, 20 bp, Pediococcus parvulus
aattaaccgcatggttgatt

SEQ ID NO: 15938 - DNA, 20 bp, Anaerococcus prevotii
taataccctatgatatgata

SEQ ID NO: 15939 - DNA, 20 bp, Unknown Organism
  oligonucleotide from CDC group EO-2
tactacggaatagccctggg

SEQ ID NO: 15940 - DNA, 20 bp, Paenibacillus pabuli
cttttcttgatacttagcgg

SEQ ID NO: 15941 - DNA, 20 bp, Propionibacterium propionicus
ggtggcctaacccatttttt

SEQ ID NO: 15942 - DNA, 20 bp, Clostridium clostridiiforme
cgggccggtaacgcggcctt

SEQ ID NO: 15943 - DNA, 20 bp, Anaerococcus prevotii
ctcgcatgaagctatcatca

SEQ ID NO: 15944 - DNA, 20 bp, Cellulosimicrobium cellulans
ggggagtgggcgaaggtggg

SEQ ID NO: 15945 - DNA, 20 bp, Bacillus laevolacticus
gcgctacagagattgacctt

SEQ ID NO: 15946 - DNA, 20 bp, Propionibacterium propionicus
agcttgcaaggcatcttgtg

SEQ ID NO: 15947 - DNA, 20 bp, Cedecea lapagei
cctgcgcgacagcgttcaat

SEQ ID NO: 15948 - DNA, 20 bp, Sporosarcina ureae
ccattctctcgcatgaggga

SEQ ID NO: 15949 - DNA, 20 bp, Bacteroides capillosus
tccgcgaccgcaaggaacgg

SEQ ID NO: 15950 - DNA, 20 bp, Bacteroides distasonis
gacgtgtcccgttttgtatg

SEQ ID NO: 15951 - DNA, 20 bp, Bacteroides stercoris
tgaatcggaaacggttcttt

SEQ ID NO: 15952 - DNA, 20 bp, Myroides odoratimimus
gagtagggacttgacggtac

SEQ ID NO: 15953 - DNA, 20 bp, Proteus mirabilis
gcaaccgtcaggggaacctg

SEQ ID NO: 15954 - DNA, 20 bp, Facklamia ignava
tagttgttctagtcgcatga

SEQ ID NO: 15955 - DNA, 20 bp, Bacteroides stercoris
gaatcggaaacggttctttt

SEQ ID NO: 15956 - DNA, 20 bp, Propionibacterium avidum
tcgatgggctcttgcttgtt

SEQ ID NO: 15957 - DNA, 20 bp, Providencia rustigianii
gcgattgacgttaccaacag

SEQ ID NO: 15958 - DNA, 30 bp, Capnocytophaga sp.
ttttgcaggggaagaataaggagtacgtgt

SEQ ID NO: 15959 - DNA, 20 bp, Fusobacterium mortiferum
gagatgcttttgtgcccctt

SEQ ID NO: 15960 - DNA, 20 bp, Streptococcus criceti
ctcaagtgacggtatcttac

SEQ ID NO: 15961 - DNA, 20 bp, Paenibacillus pabuli
atcggtacagagatgtatct

SEQ ID NO: 15962 - DNA, 20 bp, Eremococcus coleocola
ttgagcgggggataacggtc

SEQ ID NO: 15963 - DNA, 20 bp, Bacteroides thetaiotaomicron
catgggttttatattaaaga

SEQ ID NO: 15964 - DNA, 20 bp, Vibrio harveyi
ctagtaatcgggatcagaat

SEQ ID NO: 15965 - DNA, 20 bp, Brevibacillus centrosporus
cccgaatattttcttttgtt

SEQ ID NO: 15966 - DNA, 20 bp, Vibrio cholerae
cgtcctcccggaaggtaaac

SEQ ID NO: 15967 - DNA, 20 bp, Streptococcus acidominimus
agtacgcttttgaaactgtc

SEQ ID NO: 15968 - DNA, 30 bp, Bacteroides merdae
tgcgatacaatgtaagctctacagcgaaag

SEQ ID NO: 15969 - DNA, 20 bp, Stenotrophomonas maltophilia
gctgagcacaggtgctgcat

SEQ ID NO: 15970 - DNA, 20 bp, Bacillus licheniformis
cccggggttatatccggaag

SEQ ID NO: 15971 - DNA, 20 bp, Salmonella paratyphi
gtagctaaccttcgggaggg

SEQ ID NO: 15972 - DNA, 20 bp, Bacillus firmus
ttcttttcctcacatgaggg

SEQ ID NO: 15973 - DNA, 20 bp, Bacteroides stercoris
tggttttttgcatgtaccgt

SEQ ID NO: 15974 - DNA, 20 bp, Peptoniphilus asaccharolyticus
ttgtaagcatttgaaactaa

SEQ ID NO: 15975 - DNA, 20 bp, Bacteroides stercoris
tcgctgttggcgatacaatg

SEQ ID NO: 15976 - DNA, 20 bp, Bacteroides merdae
ttgcgatacaatgtaagctc

SEQ ID NO: 15977 - DNA, 20 bp, Geobacillus thermoglucosidasius
aacggaagcttgcttctgtt

SEQ ID NO: 15978 - DNA, 20 bp, Paenibacillus apiarius
ggagctgacggagtgcttgc

SEQ ID NO: 15979 - DNA, 20 bp, Bacteroides merdae
caatgtaagctctacagcga

SEQ ID NO: 15980 - DNA, 20 bp, Leptotrichia buccalis
aaacctggtgttgtcagact

SEQ ID NO: 15981 - DNA, 20 bp, Helcococcus kunzii
cggaaaaaggaaagtagcga

SEQ ID NO: 15982 - DNA, 20 bp, Peptoniphilus asaccharolyticus
tgatagtaagcgaatctcaa

SEQ ID NO: 15983 - DNA, 20 bp, Finegoldia magna
gttttaacggtcaaagattt

SEQ ID NO: 15984 - DNA, 20 bp, Moellerella wisconsensis
ggcgttgatattaatactat

SEQ ID NO: 15985 - DNA, 20 bp, Fusobacterium necrogenes
gagatgccttcgtgcccctt

SEQ ID NO: 15986 - DNA, 20 bp, Bacteroides capillosus
gtccctatttgcaggtaccg

SEQ ID NO: 15987 - DNA, 20 bp, Actinomyces naeslundii
gaagcaggcctgtcccttgt

SEQ ID NO: 15988 - DNA, 20 bp, Helcococcus ovis
gctaaccgttaggaggcaga

SEQ ID NO: 15989 - DNA, 20 bp, Vibrio fluvialis
aacctggcggtggatcacct

SEQ ID NO: 15990 - DNA, 20 bp, Eubacterium moniliforme
gtggccatgtaagtcaggtg

SEQ ID NO: 15991 - DNA, 20 bp, Propionibacterium avidum
cgatgggctcttgcttgtta

SEQ ID NO: 15992 - DNA, 20 bp, Corynebacterium hoagii
tgggcgaaggcgggtctctg

SEQ ID NO: 15993 - DNA, 20 bp, Moellerella wisconsensis
aatactatcagcgattgacg

SEQ ID NO: 15994 - DNA, 20 bp, Arthrobacter globiformis
atttattggtcttggatgga

SEQ ID NO: 15995 - DNA, 20 bp, Leuconostoc fallax
acatttcgcatgaagtgtgt

SEQ ID NO: 15996 - DNA, 20 bp, Brevibacillus centrosporus
ttgtttcatggcaaaagctt

SEQ ID NO: 15997 - DNA, 20 bp, Streptococcus thermophilus
atcacctccttcatggtcat

SEQ ID NO: 15998 - DNA, 20 bp, Eubacterium moniliforme
gagatatatgttcccttcgg

SEQ ID NO: 15999 - DNA, 20 bp, Porphyromonas gingivalis
cgtaccgcaaggggcgcact

SEQ ID NO: 16000 - DNA, 20 bp, Paenibacillus azotofixans
aatcgtttagagataggcgc

SEQ ID NO: 16001 - DNA, 20 bp, Psychrobacter phenylpyruvicus
taccaaataagctattgtct

SEQ ID NO: 16002 - DNA, 20 bp, Corynebacterium pilosum
attagctttgggaactgggt

SEQ ID NO: 16003 - DNA, 20 bp, Buttiauxella agrestis
aacccgcagtgattgacgtt

SEQ ID NO: 16004 - DNA, 20 bp, Myroides odoratimimus
ctgcagagcttgaatagtat

SEQ ID NO: 16005 - DNA, 30 bp, Unknown Organism
  oligonucleotide from CDC group EF-4B
gggaactgcgtttgaaactgggtgactaga

SEQ ID NO: 16006 - DNA, 20 bp, Bacteroides capilosus
aacggagagctcatgacaga

SEQ ID NO: 16007 - DNA, 20 bp, Bacillus thuringiensis
ggtagccgtatcggaaggct

SEQ ID NO: 16008 - DNA, 20 bp, Granulicatella adiacens
cgaacgagagcgaccgggct

SEQ ID NO: 16009 - DNA, 20 bp, Bacteroides stercoris
gaggggcagcatcatcaaag

SEQ ID NO: 16010 - DNA, 20 bp, Unknown Organism
  oligonucleotide from CDC group EO-2
ggaggcgagggacttcggtt

SEQ ID NO: 16011 - DNA, 20 bp, Yersinia frederiksenii
acttaatacgtgaagtgatt

SEQ ID NO: 16012 - DNA, 20 bp, Anaerobiospirillum succiniciproducens
atgaacgctgttttaggcct

SEQ ID NO: 16013 - DNA, 20 bp, Bacteroides capillosus
aaaggtttagcggtaaggga

SEQ ID NO: 16014 - DNA, 20 bp, Bacteroides uniformis
gccctagggtaacaactggc

SEQ ID NO: 16015 - DNA, 20 bp, Enterobacter amnigenus
aagtcgaagcgagtagcaca

SEQ ID NO: 16016 - DNA, 30 bp, Clostridium clostridiiforme
tgtcctatcaggcagttggtgaggtaacgg

SEQ ID NO: 16017 - DNA, 20 bp, Helcococcus kunzii
ggtttagaaactggttaact

SEQ ID NO: 16018 - DNA, 20 bp, Corynebacterium argentoratense
tagtgtgtgatggtggaaag

SEQ ID NO: 16019 - DNA, 20 bp, Anaerococcus tetradius
aaactgttaggcttgagaga

SEQ ID NO: 16020 - DNA, 20 bp, Veillonella sp.
atgtaagctatcactgaagg

SEQ ID NO: 16021 - DNA, 20 bp, Myroides odoratimimus
agttaccactcgcgttaagg

SEQ ID NO: 16022 - DNA, 20 bp, Eubacterium moniliforme
aaagggcagcgacctcgtaa

SEQ ID NO: 16023 - DNA, 20 bp, Finegoldia magna
aaactcgaaagccaatccca

SEQ ID NO: 16024 - DNA, 20 bp, Vibrio parahaemolyticus
atcccaaaaaggcgtcgtag

SEQ ID NO: 16025 - DNA, 30 bp, Clostridium clostridiiforme
aagggaacgtgaacaggtgctgcatggctg

SEQ ID NO: 16026 - DNA, 20 bp, Bacteroides capillosus
gcttgcaacctttgatggcg

SEQ ID NO: 16027 - DNA, 20 bp, Paenibacillus amylolyticus
cttgcatcctctgatgctta

SEQ ID NO: 16028 - DNA, 20 bp, Sphingomonas paucimobilis
gtcgtacaagggagccgagg

SEQ ID NO: 16029 - DNA, 20 bp, Brevibacillus brevis
ggggtaaccggaaggcagcc

SEQ ID NO: 16030 - DNA, 20 bp, Dolosicoccus paucivorans
ttatggtatcgctaaaggat

SEQ ID NO: 16031 - DNA, 20 bp, Moraxella atlantae
ttatgggtttctgctataag

SEQ ID NO: 16032 - DNA, 20 bp, Paenibacillus lautus
gtgtttaaccccagggctca

SEQ ID NO: 16033 - DNA, 20 bp, Sphingomonas paucimobilis
ggtgcttggcatttgggtgg

SEQ ID NO: 16034 - DNA, 20 bp, Helcococcus kunzii
cggtttagaaactggttaac

SEQ ID NO: 16035 - DNA, 20 bp, Anaerococcus tetradius
aagtcgaacgatgaagatat

SEQ ID NO: 16036 - DNA, 20 bp, Paenibacillus alvei
agatagagtcccttcttcgg

SEQ ID NO: 16037 - DNA, 20 bp, Suttonella indologenes
cccaatgcttaacacatgca

SEQ ID NO: 16038 - DNA, 20 bp, Bacteroides capillosus
gcaggcatctaactaggatt

SEQ ID NO: 16039 - DNA, 20 bp, Finegoldia magna
ttagtagacagaagcttcgg

SEQ ID NO: 16040 - DNA, 20 bp, Prevotella loescheii
ccgcggaggtgctgcatggt

SEQ ID NO: 16041 - DNA, 20 bp, Anaerococcus prevotii
atgaagctatcatcaaagat

SEQ ID NO: 16042 - DNA, 20 bp, Prevotella melaninogenica
ggttctgatccatagggctc

SEQ ID NO: 16043 - DNA, 20 bp, Corynebacterium coyleae
gccccagagatgctggtttc

SEQ ID NO: 16044 - DNA, 30 bp, Globicatella sanguinis
accaggtcttgacatctcttgcatatctta

SEQ ID NO: 16045 - DNA, 20 bp, Myroides odoratimimus
attgttagttaccactcgcg

SEQ ID NO: 16046 - DNA, 20 bp, Actinomyces naeslundii
caggcctgtcccttgtgggt

SEQ ID NO: 16047 - DNA, 20 bp, Streptococcus alactolyticus
taacagcttttgacacatgt

SEQ ID NO: 16048 - DNA, 20 bp, Weeksella virosa
aacctattcacgagctggat

SEQ ID NO: 16049 - DNA, 20 bp, Bacillus mycoides
ccgatcggaagggcggtgga

SEQ ID NO: 16050 - DNA, 20 bp, Bacteroides stercoris
ttttcttcggacagttgtga

SEQ ID NO: 16051 - DNA, 20 bp, Streptococcus ratti
agtttaacacatgttagacg

SEQ ID NO: 16052 - DNA, 20 bp, Myroides odoratimimus
ttaaggcggggactctagca

SEQ ID NO: 16053 - DNA, 20 bp, Peptoniphilus asaccharolyticus
tcggggtgaagatgaaatgg

SEQ ID NO: 16054 - DNA, 20 bp, Staphylococcus aureus
actttctggctgaactgacg

SEQ ID NO: 16055 - DNA, 20 bp, Pediococcus acidilactici
ggtctgtactgcgctgaggc

SEQ ID NO: 16056 - DNA, 20 bp, Propionibacterium propionicus
aaagattttttttggttggg

SEQ ID NO: 16057 - DNA, 20 bp, Dolosicoccus paucivorans
gccttctttgaaggcaccga

SEQ ID NO: 16058 - DNA, 20 bp, Streptococcus macacae
aagttctccaattgacggta

SEQ ID NO: 16059 - DNA, 20 bp, Burkholderia gladioli
tggggggatagcccggcgaa

SEQ ID NO: 16060 - DNA, 20 bp, Corynebacterium group ANF
ggtgaaggtagtggatcgag

SEQ ID NO: 16061 - DNA, 20 bp, Vibrio cholerae
tcccggaaggtaaactacct

SEQ ID NO: 16062 - DNA, 20 bp, Brevibacillus centrosporus
gggttttgggctgtcgctat

SEQ ID NO: 16063 - DNA, 20 bp, Eubacterium moniliforme
catggtttagaggtaaaagg

SEQ ID NO: 16064 - DNA, 20 bp, Campylobacter curvus
tcgaaccctatatattgttt

SEQ ID NO: 16065 - DNA, 20 bp, Bacteroides capillosus
ttgcacaacgttggcggaat

SEQ ID NO: 16066 - DNA, 20 bp, Anaerococcus tetradius
gaaaataagcggattagtgg

SEQ ID NO: 16067 - DNA, 20 bp, Corynebacterium group ANF
gtggtgtggtgtcgaaggtg

SEQ ID NO: 16068 - DNA, 20 bp, Propionibacterium granulosum
tttgacatggatcgggagct

SEQ ID NO: 16069 - DNA, 20 bp, Propionibacterium acnes
actaagtcgtacaagataaa

SEQ ID NO: 16070 - DNA, 20 bp, Anaerococcus tetradius
aaactcttcgcatgaagagc

SEQ ID NO: 16071 - DNA, 20 bp, Streptococcus macacae
cacgggagcttgctccacga

SEQ ID NO: 16072 - DNA, 20 bp, Paenibacillus azotofixans
aagagtaactgcttaaggag

SEQ ID NO: 16073 - DNA, 20 bp, Leptotrichia buccalis
tgcttgcacaggcgagccaa

SEQ ID NO: 16074 - DNA, 20 bp, Corynebacterium pilosum
aaggccctgccttccagggt

SEQ ID NO: 16075 - DNA, 20 bp, Clostridium clostridiiforme
ggtttgctggctgcatactg

SEQ ID NO: 16076 - DNA, 20 bp, Eubacterium moniliforme
agggcagcgacctcgtaaga

SEQ ID NO: 16077 - DNA, 20 bp, Kocuria varians
ccggttcagagatgttcctt

SEQ ID NO: 16078 - DNA, 20 bp, Arcanobacterium pyogenes
gtacagaagaagcatttttg

SEQ ID NO: 16079 - DNA, 20 bp, Enterobacter hormaechei
cacgaaggaggtgatccacc

SEQ ID NO: 16080 - DNA, 30 bp, Vibrio vulnificus
tgggtagtttaccttcgggaggacgccacc

SEQ ID NO: 16081 - DNA, 20 bp, Actinomyces neuii
atcaggtcagggaacgtgcg

SEQ ID NO: 16082 - DNA, 20 bp, Eubacterium moniliforme
tgtcctatgggacgaaaaaa

SEQ ID NO: 16083 - DNA, 20 bp, Eremococcus coleocola
aagaacacccctagtagtaa

SEQ ID NO: 16084 - DNA, 20 bp, Corynebacterium pilosum
gccgaccggttagttcccgt

SEQ ID NO: 16085 - DNA, 20 bp, Leptotrichia buccalis
ctgcaaggcggtaacgccaa

SEQ ID NO: 16086 - DNA, 20 bp, Bacteroides capillosus
tgaagtccgcgaccgcaagg

SEQ ID NO: 16087 - DNA, 20 bp, Bacillus schlegellii
cgacgggtccagagatgggc

SEQ ID NO: 16088 - DNA, 20 bp, Clostridium clostridiiforme
taaccgcgaggaaggatccg

SEQ ID NO: 16089 - DNA, 20 bp, Listeria welshimeri
aagtgcacaggtggtgcatg

SEQ ID NO: 16090 - DNA, 20 bp, Finegoldia magna
catagaagaaagctccggct

SEQ ID NO: 16091 - DNA, 20 bp, Staphylococcus schleiferi
cccgtcgaaagtgggacaca

SEQ ID NO: 16092 - DNA, 20 bp, Shewanella putrefaciens
ccacagaatctcgcttcaga

SEQ ID NO: 16093 - DNA, 20 bp, Bacteroides uniformis
acgtgatgccaatccctaaa

SEQ ID NO: 16094 - DNA, 20 bp, Kocuria varians
accggttcagagatgttcct

SEQ ID NO: 16095 - DNA, 20 bp, Yersinia frederiksenii
ggcatttcacttaatacgtg

SEQ ID NO: 16096 - DNA, 20 bp, Weissella paramesenteroides
ctgatactgacgagcttgct

SEQ ID NO: 16097 - DNA, 20 bp, Microbacterium hominis
gaacgggtgaaggcccagct

SEQ ID NO: 16098 - DNA, 30 bp, Alloiococcus otitis
gacatcttctgctaccttcagagatgaagg

SEQ ID NO: 16099 - DNA, 20 bp, Haemophilus influenzae
gtcgagagatgaaagtgcgg

SEQ ID NO: 16100 - DNA, 20 bp, Anaerococcus prevotii
gcagctatatagtgatataa

SEQ ID NO: 16101 - DNA, 20 bp, Weissella paramesenteroides
ctttgtctttaactgatact

SEQ ID NO: 16102 - DNA, 20 bp, Lactococcus raffinolactis
ggggctatccagccctaagt

SEQ ID NO: 16103 - DNA, 20 bp, Vibrio hollisae
cgctgggggatgacagtacc

SEQ ID NO: 16104 - DNA, 20 bp, Enterococcus durans
cgctaacaaggtagccgtat

SEQ ID NO: 16105 - DNA, 20 bp, Geobacillus thermoglucosidasius
tccccaaaaacccgctctca

SEQ ID NO: 16106 - DNA, 20 bp, Oligella urethralis
ttggcaacccgctgtcctga

SEQ ID NO: 16107 - DNA, 20 bp, Citrobacter freundii
ttgtggttaataaccgtggt

SEQ ID NO: 16108 - DNA, 20 bp, Actinomyces radingae
gtgggaaaggggctttttta

SEQ ID NO: 16109 - DNA, 20 bp, Streptococcus macacae
ggaaagttctccaattgacg

SEQ ID NO: 16110 - DNA, 20 bp, Anaerococcus prevotii
ccgtaaggaagcagcagtcg

SEQ ID NO: 16111 - DNA, 20 bp, Burkholderia gladioli
cggggtgcttgcacctggtg

SEQ ID NO: 16112 - DNA, 20 bp, Sporosarcina pasteurii
ccgatccgccgctaacaaag

SEQ ID NO: 16113 - DNA, 20 bp, Sporosarcina pasteurii
tataggagtaactgcctgta

SEQ ID NO: 16114 - DNA, 20 bp, Bacteroides capillosus
ggcctagggcgaaactggtg

SEQ ID NO: 16115 - DNA, 20 bp, Streptococcus sanguinis
cgcatgatattgaatatcgc

SEQ ID NO: 16116 - DNA, 20 bp, Bacteroides distasonis
gccccgcatggggatatttg

SEQ ID NO: 16117 - DNA, 20 bp, Clostridium cadaveris
gcatattatggtttttctgc

SEQ ID NO: 16118 - DNA, 20 bp, Bacteroides capillosus
cgatctagagatagtgaggc

SEQ ID NO: 16119 - DNA, 20 bp, Bacteroides capillosus
ttatacggggataaagttag

SEQ ID NO: 16120 - DNA, 20 bp, Clostridium clostridiiforme
agtgtccggtgaggagggtg

SEQ ID NO: 16121 - DNA, 20 bp, Prevotella buccae
ggcctagggcaaaaccggga

SEQ ID NO: 16122 - DNA, 20 bp, Anaerococcus prevotii
gatagcctcgcatgaagcta

SEQ ID NO: 16123 - DNA, 20 bp, Streptococcus macacae
gatcggtgagtcgcgaacgg

SEQ ID NO: 16124 - DNA, 20 bp, Bacillus schlegellii
ccgatggcgaaggcagcgca

SEQ ID NO: 16125 - DNA, 20 bp, Lactococcus raffinolactis
gtgctagttgtttggggcta

SEQ ID NO: 16126 - DNA, 20 bp, Granulicatella elegans
ccagagaaggaaaagaggct

SEQ ID NO: 16127 - DNA, 20 bp, Unknown Organism
  oligonucleotide from CDC group EF-4B
gtttgaaactgggtgactag

SEQ ID NO: 16128 - DNA, 20 bp, Clostridium clostridiiforme
atttgaaattgacttagcgg

SEQ ID NO: 16129 - DNA, 20 bp, Bacteroides ovatus
cgcatgatatttttattaaa

SEQ ID NO: 16130 - DNA, 20 bp, Propionibacterium propionicus
tgtgacggtagcagtagaag

SEQ ID NO: 16131 - DNA, 20 bp, Pediococcus parvulus
cgcatggttgatttttaaaa

SEQ ID NO: 16132 - DNA, 20 bp, Anaerococcus prevotii
atatacccctctctttaaga

SEQ ID NO: 16133 - DNA, 20 bp, Myroides odoratimimus
actaggacactgccattgat

SEQ ID NO: 16134 - DNA, 20 bp, Bacteroides capillosus
cgcgaccgcaaggaacggcc

SEQ ID NO: 16135 - DNA, 20 bp, Budvicia aquatica
gtagtccggatcggagttct

SEQ ID NO: 16136 - DNA, 20 bp, Prevotella denticola
agggacgtgtccctatttgc

SEQ ID NO: 16137 - DNA, 20 bp, Eubacterium moniliforme
caatctgccctgcaatgggg

SEQ ID NO: 16138 - DNA, 20 bp, Bacteroides capillosus
cggggcgcctacggaggtgc

SEQ ID NO: 16139 - DNA, 20 bp, Prevotella denticola
gggacgtgtccctatttgca

SEQ ID NO: 16140 - DNA, 30 bp, Granulicatella adiacens
gtcgaacgagagcgaccgggcttgcactgg

SEQ ID NO: 16141 - DNA, 20 bp, Streptococcus alactolyticus
aacagcttttgacacatgtt

SEQ ID NO: 16142 - DNA, 20 bp, Leptotrichia buccalis
actacagggctggagtattg

SEQ ID NO: 16143 - DNA, 20 bp, Haemophilus segnis
aggtttggcgcccgtagcta

SEQ ID NO: 16144 - DNA, 20 bp, Providencia stuartii
ttgagcagagatgctgaagt

SEQ ID NO: 16145 - DNA, 20 bp, Streptococcus ratti
ggttttgtaagtctgaagtc

SEQ ID NO: 16146 - DNA, 20 bp, Vibrio vulnificus
tttgggtcatgactggggtg

SEQ ID NO: 16147 - DNA, 20 bp, Bacteroides capillosus
atggcctttcggctatgtga

SEQ ID NO: 16148 - DNA, 20 bp, Paenibacillus azotofixans
ggagcttgctctctcattaa

SEQ ID NO: 16149 - DNA, 20 bp, Streptococcus acidominimus
cagaaggggggagtggaatt

SEQ ID NO: 16150 - DNA, 30 bp, Bacteroides stercoris
ccgtaaaattgcagttgatactggcgacct

SEQ ID NO: 16151 - DNA, 20 bp, Anaerococcus prevotii
atgatagcctcgcatgaagc

SEQ ID NO: 16152 - DNA, 20 bp, Finegoldia magna
acatgttttaacggtcaaag

SEQ ID NO: 16153 - DNA, 20 bp, Bacteroides stercoris
ctctacccggactgccgtcg

SEQ ID NO: 16154 - DNA, 20 bp, Empedobacter brevis
cttgctgttggggtttcggc

SEQ ID NO: 16155 - DNA, 20 bp, Arcanobacterium pyogenes
gctttttgttttggtggatt

SEQ ID NO: 16156 - DNA, 20 bp, Budvicia aquatica
aatagctgcaacgattgacg

SEQ ID NO: 16157 - DNA, 20 bp, Paenibacillus azotofixans
tttagagataggcgcggcct

SEQ ID NO: 16158 - DNA, 30 bp, Porphyromonas endodontalis
acatgcaagtcgaggggcagcattatttta

SEQ ID NO: 16159 - DNA, 20 bp, Clostridium clostridiiforme
gtgagtaaagcacaaggact

SEQ ID NO: 16160 - DNA, 20 bp, Paenibacillus azotofixans
agagggagcttgctctctca

SEQ ID NO: 16161 - DNA, 20 bp, Psychrobacter phenylpyruvicus
ttagctgtcgctagaggatg

SEQ ID NO: 16162 - DNA, 20 bp, Bacteroides ovatus
cagctcactagactgtcact

SEQ ID NO: 16163 - DNA, 20 bp, Peptoniphilus asaccharolyticus
gatgaaaatcaaacagaacc

SEQ ID NO: 16164 - DNA, 20 bp, Campylobacter curvus
agacggactttgttcgtctg

SEQ ID NO: 16165 - DNA, 20 bp, Finegoldia magna
tagtgatataatgcaaaact

SEQ ID NO: 16166 - DNA, 20 bp, Streptococcus acidominimus
taatagtgtttactgcatgg

SEQ ID NO: 16167 - DNA, 20 bp, Myroides odoratimimus
gcttgcttttttgagaccgg

SEQ ID NO: 16168 - DNA, 20 bp, Leptotrichia buccalis
tgtcaggctgatgaaaggag

SEQ ID NO: 16169 - DNA, 20 bp, Bacteroides vulgatus
tgcgatatacggcaagcggc

SEQ ID NO: 16170 - DNA, 20 bp, Campylobacter curvus
ggtgtgctttaggtgggtca

SEQ ID NO: 16171 - DNA, 20 bp, Streptococcus cristatus
agtcaattaaaaggtgcaat

SEQ ID NO: 16172 - DNA, 20 bp, Delftia acidovorans
cgcttacccggcggggttcg

SEQ ID NO: 16173 - DNA, 20 bp, Bacteroides capillosus
ctactccttacaacggaata

SEQ ID NO: 16174 - DNA, 20 bp, Eggerthella lenta
tactaggtgtggggggctcc

SEQ ID NO: 16175 - DNA, 20 bp, Clostridium clostridiiforme
tgctaccagataaagctgag

SEQ ID NO: 16176 - DNA, 20 bp, Vibrio hollisae
cgcatacgtactgaggtaga

SEQ ID NO: 16177 - DNA, 20 bp, Bacteroides stercoris
tcatcaaagcttgctttgat

SEQ ID NO: 16178 - DNA, 20 bp, Actinomyces naeslundii
tgtgggaaagatgcgccttt

SEQ ID NO: 16179 - DNA, 20 bp, Eubacterium moniliforme
atgcaggatgagctcgcgtc

SEQ ID NO: 16180 - DNA, 20 bp, Eubacterium moniliforme
gttgggagcacccgaagcca

SEQ ID NO: 16181 - DNA, 20 bp, Corynebacterium group ANF
ctttgtgtggtgtggtgtcg

SEQ ID NO: 16182 - DNA, 30 bp, Dolosicoccus paucivorans
agctcttgacatcggatgcatagcttagag

SEQ ID NO: 16183 - DNA, 20 bp, Pseudomonas mendocina
gttaataccctgcagttttg

SEQ ID NO: 16184 - DNA, 20 bp, Streptococcus macacae
taccgcataatatctctcta

SEQ ID NO: 16185 - DNA, 20 bp, Bacteroides ureolyticus
acagtggaatcagtaactgg

SEQ ID NO: 16186 - DNA, 20 bp, Haemophilus influenzae
attaaagtgcgggaccttca

SEQ ID NO: 16187 - DNA, 20 bp, Corynebacterium group ANF
gataatactttttatcacat

SEQ ID NO: 16188 - DNA, 20 bp, Enterococcus saccharolyticus
gaggagtggcgaacggggtg

SEQ ID NO: 16189 - DNA, 20 bp, Citrobacter freundii
gtggttaataaccgtggtga

SEQ ID NO: 16190 - DNA, 20 bp, Prevotella oralis
acgtgtccctttttgcaggt

SEQ ID NO: 16191 - DNA, 20 bp, Kocuria varians
ctgggactggcgatctggga

SEQ ID NO: 16192 - DNA, 20 bp, Vibrio hollisae
ggggaggaaatccccagcgc

SEQ ID NO: 16193 - DNA, 20 bp, Enterobacter gergoviae
taaggtagccagcctgggga

SEQ ID NO: 16194 - DNA, 20 bp, Neisseria flavescens
gacgagcatgctttacacat

SEQ ID NO: 16195 - DNA, 20 bp, Streptococcus macacae
agcttaaaaggtgcagctgc

SEQ ID NO: 16196 - DNA, 20 bp, Leuconostoc carnosum
ggaagaaaagttaaggtagg

SEQ ID NO: 16197 - DNA, 20 bp, Brevibacterium linens
atgacgaccgaaggcatctt

SEQ ID NO: 16198 - DNA, 20 bp, Collinsella aerofaciens
cgtcaaggggggaggcgccg

SEQ ID NO: 16199 - DNA, 20 bp, Streptococcus macacae
caggcggtctggaaagtcag

SEQ ID NO: 16200 - DNA, 20 bp, Clostridium clostridiiforme
gcgcttttggagagacttgt

SEQ ID NO: 16201 - DNA, 20 bp, Propionibacterium granulosum
cttccagagatggttgtgcc

SEQ ID NO: 16202 - DNA, 20 bp, Corynebacterium pilosum
tcttccggattagctttggg

SEQ ID NO: 16203 - DNA, 20 bp, Anaerobiospirillum succiniciproducens
tttagttgctatcagatgag

SEQ ID NO: 16204 - DNA, 20 bp, Leptotrichia buccalis
gcgaagctgtgcttgcacag

SEQ ID NO: 16205 - DNA, 20 bp, Clostridium clostridiiforme
aagcggtttcgatgaagttt

SEQ ID NO: 16206 - DNA, 20 bp, Campylobacter curvus
cggcgcaaccgaaagttgcg

SEQ ID NO: 16207 - DNA, 20 bp, Clostridium clostridiiforme
tcggcgcgcagacgaaactg

SEQ ID NO: 16208 - DNA, 20 bp, Leuconostoc fallax
gagataatattgttctcttc

SEQ ID NO: 16209 - DNA, 20 bp, Acinetobacter baumannii
gaagtcgtacaggtagccgt

SEQ ID NO: 16210 - DNA, 20 bp, Sphingobacterium multivorum
ccattcacaggtcggattgg

SEQ ID NO: 16211 - DNA, 20 bp, Moraxella atlantae
cgggagaaaggagcttatgg

SEQ ID NO: 16212 - DNA, 20 bp, Anaerococcus prevotii
gtgatataatgcaaaactcc

SEQ ID NO: 16213 - DNA, 20 bp, Propionibacterium propionicus
attttttttggttggggatg

SEQ ID NO: 16214 - DNA, 20 bp, Streptococcus urinalis
gctaataccgcatgagagtt

SEQ ID NO: 16215 - DNA, 20 bp, Streptococcus cristatus
cattgactattgcatgatag

SEQ ID NO: 16216 - DNA, 20 bp, Bacillus schlegellii
gggcgcccgaaggcgcgtgc

SEQ ID NO: 16217 - DNA, 20 bp, Leptotrichia buccalis
gatgaacgctgacatgtaat

SEQ ID NO: 16218 - DNA, 20 bp, Sphingobacterium multivorum
catatgtgaccggcatcggt

SEQ ID NO: 16219 - DNA, 20 bp, Anaerococcus tetradius
agttagaagtgaaataatat

SEQ ID NO: 16220 - DNA, 20 bp, Finegoldia magna
ccggggactctaagtagact

SEQ ID NO: 16221 - DNA, 20 bp, Neisseria polysaccharea
ggatcacctcccttcagtgg

SEQ ID NO: 16222 - DNA, 20 bp, Corynebacterium group ANF
ggttgacatgcactagatga

SEQ ID NO: 16223 - DNA, 20 bp, Unknown Organism
  oligonucleotide from CDC group EO-2
tgcaaggtcggaggcgaggg

SEQ ID NO: 16224 - DNA, 20 bp, Streptococcus acidominimus
gaaaatccgctaagtgacgg

SEQ ID NO: 16225 - DNA, 20 bp, Clostridium clostridiiforme
ctggagagcttgagaagcag

SEQ ID NO: 16226 - DNA, 20 bp, Paenibacillus macerans
taacctgcctctaagactgg

SEQ ID NO: 16227 - DNA, 20 bp, Prevotella intermedia
agccgtagcctttcactttc

SEQ ID NO: 16228 - DNA, 20 bp, Streptococcus infantarius
gagccgctttcgccccggtg

SEQ ID NO: 16229 - DNA, 20 bp, Bacillus coagulans
aataacctcgccgattgacg

SEQ ID NO: 16230 - DNA, 20 bp, Dolosicoccus paucivorans
tgtatcaccgccttctttga

SEQ ID NO: 16231 - DNA, 20 bp, Abiotrophia defectiva
aatcacatgattccgtgagg

SEQ ID NO: 16232 - DNA, 20 bp, Actinomyces radingae
gggaaaggggcttttttaag

SEQ ID NO: 16233 - DNA, 20 bp, Propionibacterium avidum
ttaggcggctagccagtaca

SEQ ID NO: 16234 - DNA, 20 bp, Brevibacillus centrosporus
gacggaaaggcggcgcaagc

SEQ ID NO: 16235 - DNA, 20 bp, Anaerococcus tetradius
actcttcgcatgaagagctt

SEQ ID NO: 16236 - DNA, 20 bp, Corynebacterium group ANF
ggtaagaagatgaaaggcgg

SEQ ID NO: 16237 - DNA, 20 bp, Bacteroides capillosus
atcctatgcaggcatctaac

SEQ ID NO: 16238 - DNA, 20 bp, Finegoldia magna
tatagagatatacccctctc

SEQ ID NO: 16239 - DNA, 20 bp, Providencia rustigianii
aatatcgtcaacgattgacg

SEQ ID NO: 16240 - DNA, 20 bp, Corynebacterium falsenii
tagggaagaagccatgttgt

SEQ ID NO: 16241 - DNA, 20 bp, Streptococcus macacae
taaggattggaaacgatagg

SEQ ID NO: 16242 - DNA, 20 bp, Propionibacterium avidum
cttgttaggcggctagccag

SEQ ID NO: 16243 - DNA, 20 bp, Leptotrichia buccalis
gcgaacctgcaaagccggtc

SEQ ID NO: 16244 - DNA, 20 bp, Vibrio hollisae
cagaagtgcccgaaagggag

SEQ ID NO: 16245 - DNA, 20 bp, Oligella urethralis
gactacgatcaggtttaaga

SEQ ID NO: 16246 - DNA, 20 bp, Bacteroides ovatus
agctcactagactgtcactg

SEQ ID NO: 16247 - DNA, 20 bp, Enterobacter gergoviae
tggttcttgaggccgtggct

SEQ ID NO: 16248 - DNA, 20 bp, Leptotrichia buccalis
ctgcgtatgcccgtgagagc

SEQ ID NO: 16249 - DNA, 20 bp, Dolosicoccus paucivorans
taactgttactcgtttgacg

SEQ ID NO: 16250 - DNA, 20 bp, Streptococcus ratti
tttacttttgtacatcggtg

SEQ ID NO: 16251 - DNA, 20 bp, Eubacterium moniliforme
cccggggttgcacttgaaac

SEQ ID NO: 16252 - DNA, 20 bp, Actinomyces neuii
taagtgatcaggtcagggaa

SEQ ID NO: 16253 - DNA, 20 bp, Enterobacter gergoviae
ggttcttgaggccgtggctt

SEQ ID NO: 16254 - DNA, 20 bp, Streptococcus sanguinis
accgcatgatattgaatatc

SEQ ID NO: 16255 - DNA, 20 bp, Eremococcus coleocola
ttgacatcctatgaccactc

SEQ ID NO: 16256 - DNA, 20 bp, Haemophilus paraphrophilus
gggggttgaactttaagttt

SEQ ID NO: 16257 - DNA, 20 bp, Providencia alcalifaciens
accggcggcggggtgagtaa

SEQ ID NO: 16258 - DNA, 20 bp, Haemophilus parainfluenzae
aatagactagatgattgacg

SEQ ID NO: 16259 - DNA, 30 bp, Streptococcus sanguinis
gacggctaactccggtgccagcagccgcgg

SEQ ID NO: 16260 - DNA, 20 bp, Oligella urethralis
gctccggtagcaagaggtct

SEQ ID NO: 16261 - DNA, 20 bp, Staphylococcus schleiferi
accatttggaagctaagccc

SEQ ID NO: 16262 - DNA, 20 bp, Clostridium innocuum
agagcgcatgctcagtatat

SEQ ID NO: 16263 - DNA, 20 bp, Moraxella atlantae
gtttctgctataagatgtgc

SEQ ID NO: 16264 - DNA, 20 bp, Empedobacter brevis
aggtcactaagtatcaactg

SEQ ID NO: 16265 - DNA, 20 bp, Anaerococcus tetradius
gttaggcttgagagatgaaa

SEQ ID NO: 16266 - DNA, 20 bp, Peptoniphilus asaccharolyticus
atgaaatggattagcggcgg

SEQ ID NO: 16267 - DNA, 20 bp, Finegoldia magna
gaaacacatgttttaacggt

SEQ ID NO: 16268 - DNA, 20 bp, Sphingobacterium multivorum
ggccaacacgagaggaaggg

SEQ ID NO: 16269 - DNA, 20 bp, Providencia rustigianii
atgctaatatcatcagcgat

SEQ ID NO: 16270 - DNA, 20 bp, Clostridium clostridiiforme
acaaagtccttcggtgccgc

SEQ ID NO: 16271 - DNA, 20 bp, Vibrio metschnikovii
gatagcctacggctcaaaga

SEQ ID NO: 16272 - DNA, 20 bp, Prevotella loescheii
gattagccagacggcggggt

SEQ ID NO: 16273 - DNA, 20 bp, Dolosigranulum pigrum
tgctaccactcatggatagc

SEQ ID NO: 16274 - DNA, 20 bp, Finegoldia magna
aacgggatttagtagacaga

SEQ ID NO: 16275 - DNA, 20 bp, Pediococcus dextrinicus
gagttttcttttaatgatca

SEQ ID NO: 16276 - DNA, 20 bp, Klebsiella pneumoniae
ataaggttaataacctcggc

SEQ ID NO: 16277 - DNA, 20 bp, Bacillus coagulans
tgagcggatgttaaaagacg

SEQ ID NO: 16278 - DNA, 20 bp, Campylobacter curvus
ctccatttatatataagtat

SEQ ID NO: 16279 - DNA, 20 bp, Bacteroides stercoris
aatttcggttgtcgatgggg

SEQ ID NO: 16280 - DNA, 20 bp, Clostridium clostridiiforme
caccatccgagtcgggtgct

SEQ ID NO: 16281 - DNA, 20 bp, Bacillus niacini
ctcatgagggaaagttgaaa

SEQ ID NO: 16282 - DNA, 20 bp, Enterococcus dispar
gaacgctgtctggcgtgcct

SEQ ID NO: 16283 - DNA, 20 bp, Finegoldia magna
ttatcggtcatagatgggct

SEQ ID NO: 16284 - DNA, 20 bp, Streptococcus sobrinus
aaagaagcaacggcttcact

SEQ ID NO: 16285 - DNA, 20 bp, Bacteroides capilosus
aagtcgaacggagagctcat

SEQ ID NO: 16286 - DNA, 20 bp, Paenibacillus pabuli
cttgcttttcttgatactta

SEQ ID NO: 16287 - DNA, 20 bp, Finegoldia magna
ggatttagtaaacagaagcc

SEQ ID NO: 16288 - DNA, 20 bp, Corynebacterium group ANF
aagccgcttgctccactttg

SEQ ID NO: 16289 - DNA, 20 bp, Streptococcus acidominimus
ttactgcatggtaaacattt

SEQ ID NO: 16290 - DNA, 20 bp, Empedobacter brevis
tataacagattgaatggcat

SEQ ID NO: 16291 - DNA, 20 bp, Corynebacterium group ANF
tcccttcggggtgaaggtag

SEQ ID NO: 16292 - DNA, 20 bp, Clostridium clostridiiforme
ttttggagagacttgtgtcc

SEQ ID NO: 16293 - DNA, 20 bp, Staphylococcus schleiferi
gaagctaagcccgtcgaaag

SEQ ID NO: 16294 - DNA, 30 bp, Bacteroides ovatus
atatttttattaaagaatttcggttatcga

SEQ ID NO: 16295 - DNA, 20 bp, Brevibacillus laterosporus
gtgccatttaaataaggtgg

SEQ ID NO: 16296 - DNA, 20 bp, Staphylococcus cohnii
gggatgaacgctggtcggcg

SEQ ID NO: 16297 - DNA, 20 bp, Paenibacillus amylolyticus
ttgcatcctctgatgcttag

SEQ ID NO: 16298 - DNA, 20 bp, Clostridium clostridiiforme
cgcggtagagaagcgaaagc

SEQ ID NO: 16299 - DNA, 20 bp, Stenotrophomonas maltophilia
gtaatgcatgcgggatctgc

SEQ ID NO: 16300 - DNA, 20 bp, Corynebacterium auris
agtcgaacggaaggctcccg

SEQ ID NO: 16301 - DNA, 20 bp, Streptococcus iniae
atgtacttaagttaaaagga

SEQ ID NO: 16302 - DNA, 20 bp, Eubacterium moniliforme
actaggtgtggggggcgata

SEQ ID NO: 16303 - DNA, 30 bp, Oligella urethralis
ctctcaaaccagctacagatcccgccttgg

SEQ ID NO: 16304 - DNA, 20 bp, Citrobacter freundii
taacgtgccttcgggaactc

SEQ ID NO: 16305 - DNA, 20 bp, Streptococcus criceti
cctagagatagggagttact

SEQ ID NO: 16306 - DNA, 20 bp, Leptotrichia buccalis
gcaagggggaaggtatctaa

SEQ ID NO: 16307 - DNA, 20 bp, Corynebacterium cystitidis
ccatgctgaaacgggggcgc

SEQ ID NO: 16308 - DNA, 20 bp, Streptococcus acidominimus
ttgtaagagaagaacgttag

SEQ ID NO: 16309 - DNA, 20 bp, Arcanobacterium pyogenes
tttcagtacagaagaagcat

SEQ ID NO: 16310 - DNA, 20 bp, Haemophilus paraphrophilus
gtgaatctcggaaagtacgt

SEQ ID NO: 16311 - DNA, 20 bp, Paenibacillus azotofixans
cctcaagagtaactgctaaa

SEQ ID NO: 16312 - DNA, 20 bp, Microbacterium hominis
acgctgcggtgtaatacgat

SEQ ID NO: 16313 - DNA, 20 bp, Bacillus schlegellii
gagttcacacattaagcacc

SEQ ID NO: 16314 - DNA, 20 bp, Clostridium clostridiiforme
gcgagcccgaaaggagaagc

SEQ ID NO: 16315 - DNA, 20 bp, Porphyromonas maccae
ttcttttataggggattaaa

SEQ ID NO: 16316 - DNA, 20 bp, Clostridium clostridiiforme
cttttggagagacttgtgtc

SEQ ID NO: 16317 - DNA, 20 bp, Pseudomonas fluorescens
atgaagtgagcttgctcacg

SEQ ID NO: 16318 - DNA, 20 bp, Paenibacillus lautus
tctctcgcatgggagaggaa

SEQ ID NO: 16319 - DNA, 20 bp, Dolosigranulum pigrum
cggtctgtttagtctaatgt

SEQ ID NO: 16320 - DNA, 20 bp, Bacteroides distasonis
ccgcatggggatatttgcta

SEQ ID NO: 16321 - DNA, 20 bp, Staphylococcus schleiferi
cgtcgaaagtgggacacaat

SEQ ID NO: 16322 - DNA, 20 bp, Bacteroides ovatus
atgctgaggagctctagaga

SEQ ID NO: 16323 - DNA, 20 bp, Streptococcus vestibularis
cataacaataggtgacacat

SEQ ID NO: 16324 - DNA, 20 bp, Clostridium clostridiiforme
agtccttcggtgccgccgct

SEQ ID NO: 16325 - DNA, 20 bp, Bacteroides stercoris
gcagttgatactggtatcct

SEQ ID NO: 16326 - DNA, 20 bp, Streptococcus macacae
ccgttaaggggccagccgcc

SEQ ID NO: 16327 - DNA, 20 bp, Streptococcus urinalis
acacatgttaggaacttaaa

SEQ ID NO: 16328 - DNA, 20 bp, Streptococcus sanguinis
tgaccggatcttaccagaaa

SEQ ID NO: 16329 - DNA, 20 bp, Clostridium innocuum
tacagagcgcatgctcagta

SEQ ID NO: 16330 - DNA, 20 bp, Streptococcus criceti
agttactcaagtgacggtat

SEQ ID NO: 16331 - DNA, 20 bp, Citrobacter farmeri
taaccgcatccattgacgtt

SEQ ID NO: 16332 - DNA, 20 bp, Prevotella oralis
taggcagttttttaagcgtg

SEQ ID NO: 16333 - DNA, 20 bp, Bacteroides thetaiotaomicron
attggtattggggtaagtcg

SEQ ID NO: 16334 - DNA, 20 bp, Finegoldia magna
gataatacccgaagcctgtg

SEQ ID NO: 16335 - DNA, 30 bp, Unknown Organism
  oligonucleotide from CDC group EO-2
cgtgggaatgtgccacttctactacggaat

SEQ ID NO: 16336 - DNA, 20 bp, Sporosarcina ureae
ctggcatgagggaatgttga

SEQ ID NO: 16337 - DNA, 20 bp, Brevibacterium linens
cgaccgaaggcatctttggt

SEQ ID NO: 16338 - DNA, 20 bp, Prevotella disiens
ggggaaacggcaaagagtgc

SEQ ID NO: 16339 - DNA, 20 bp, Eubacterium limosum
gaaggttttgatggatcctt

SEQ ID NO: 16340 - DNA, 30 bp, Bacteroides capillosus
agcggtaagggatggggatgcgtctgatta

SEQ ID NO: 16341 - DNA, 20 bp, Vibrio cholerae
aagaaggtgatccaccgcca

SEQ ID NO: 16342 - DNA, 20 bp, Oligella urethralis
gcacctgtgctccggttctc

SEQ ID NO: 16343 - DNA, 20 bp, Citrobacter youngae
gctaactccggccagcagcc

SEQ ID NO: 16344 - DNA, 20 bp, Providencia rettgeri
atgctaatatcatcaacgat

SEQ ID NO: 16345 - DNA, 20 bp, Bacteroides capillosus
ggtttagcggtaagggatgg

SEQ ID NO: 16346 - DNA, 20 bp, Streptococcus urinalis
aatggaagtaggagtggaaa

SEQ ID NO: 16347 - DNA, 20 bp, Providencia alcalifaciens
cggtagctaatccgcaataa

SEQ ID NO: 16348 - DNA, 20 bp, Streptococcus criceti
cctacctaggctgcgataca

SEQ ID NO: 16349 - DNA, 20 bp, Abiotrophia defectiva
ggaatcacatgattccgtga

SEQ ID NO: 16350 - DNA, 20 bp, Streptococcus infantarius
taggagctctggcgccgtgc

SEQ ID NO: 16351 - DNA, 20 bp, Lactococcus raffinolactis
tgagagatggacccgcgttg

SEQ ID NO: 16352 - DNA, 20 bp, Bacteroides capillosus
cccgttgtatggcctttcgg

SEQ ID NO: 16353 - DNA, 20 bp, Gracilibacillus dipsosauri
ggaacgtattcaccgtgagc

SEQ ID NO: 16354 - DNA, 20 bp, Clostridium subterminale
atttttgtaccaaaggagca

SEQ ID NO: 16355 - DNA, 20 bp, Prevotella oralis
tccctttttgcaggtaccgc

SEQ ID NO: 16356 - DNA, 20 bp, Serratia proteamaculans
tgtgttaatagcgcatcaca

SEQ ID NO: 16357 - DNA, 30 bp, Dolosicoccus paucivorans
agtgggggataactgtcggaaacgaccgct

SEQ ID NO: 16358 - DNA, 20 bp, Prevotella denticola
agttagggacgtgtccctat

SEQ ID NO: 16359 - DNA, 20 bp, Bacteroides stercoris
ggtagttccatcaggttatg

SEQ ID NO: 16360 - DNA, 20 bp, Prevotella denticola
ggacgtgtccctatttgcag

SEQ ID NO: 16361 - DNA, 30 bp, Enterococcus dispar
ggacgaacgctgtctggcgtgcctaataca

SEQ ID NO: 16362 - DNA, 20 bp, Eschericchia vulneris
gatccctagtctggtctgag

SEQ ID NO: 16363 - DNA, 20 bp, Raoultella terrigena
aacgctgttgtgtaggccta

SEQ ID NO: 16364 - DNA, 20 bp, Corynebacterium cystitidis
ccctggtagccatgctgaaa

SEQ ID NO: 16365 - DNA, 20 bp, Streptococcus ferus
atgctttggaaactgtaggg

SEQ ID NO: 16366 - DNA, 20 bp, Providencia rustigianii
agcgattgacgttaccaaca

SEQ ID NO: 16367 - DNA, 20 bp, Peptoniphilus asaccharolyticus
ttcggggtgaagatgaaatg

SEQ ID NO: 16368 - DNA, 20 bp, Actinomyces radingae
tctgcgtggcctttgtggtt

SEQ ID NO: 16369 - DNA, 20 bp, Streptococcus sobrinus
tgtttaaaagaagcaacggc

SEQ ID NO: 16370 - DNA, 20 bp, Staphylococcus capitis
tatgcacgtcttgacggacc

SEQ ID NO: 16371 - DNA, 20 bp, Streptococcus dysgalactiae
ttgcaccggcccaaggagtt

SEQ ID NO: 16372 - DNA, 20 bp, Campylobacter curvus
agctccttgtcgcaaagacg

SEQ ID NO: 16373 - DNA, 20 bp, Pediococcus parvulus
gaacgcactttcgttaattg

SEQ ID NO: 16374 - DNA, 20 bp, Streptococcus infantarius
ctcccgtaggagctctggcg

SEQ ID NO: 16375 - DNA, 30 bp, Brevibacillus brevis
aacggaagctaataccggatatgacgcacg

SEQ ID NO: 16376 - DNA, 20 bp, Moellerella wisconsensis
tggcatctaaaactggtcag

SEQ ID NO: 16377 - DNA, 20 bp, Bacillus schlegellii
ctcgtaacagggtatccgta

SEQ ID NO: 16378 - DNA, 20 bp, Moellerella wisconsensis
agcgattgacgttaccgaca

SEQ ID NO: 16379 - DNA, 20 bp, Actinomyces naeslundii
gtgaaggcgaccttgccttt

SEQ ID NO: 16380 - DNA, 20 bp, Staphylococcus epidermidis
gtgcgtgccctaatacatgc

SEQ ID NO: 16381 - DNA, 20 bp, Anaerococcus tetradius
aacgatgaaccttgtattga

SEQ ID NO: 16382 - DNA, 20 bp, Bacteroides stercoris
gaaacggttcttttcttcgg

SEQ ID NO: 16383 - DNA, 20 bp, Streptococcus criceti
tagagatagggagttacttc

SEQ ID NO: 16384 - DNA, 20 bp, Bacteroides capilosus
gcgggactgcaagtcagggt

SEQ ID NO: 16385 - DNA, 20 bp, Streptococcus infantarius
tatcggaagggcgggtggat

SEQ ID NO: 16386 - DNA, 20 bp, Actinomyces naeslundii
ggaaagatgcgcctttgggt

SEQ ID NO: 16387 - DNA, 20 bp, Bacteroides thetaiotaomicron
caaaccaaagctggcgaccg

SEQ ID NO: 16388 - DNA, 20 bp, Finegoldia magna
tctttatgagacatccatac

SEQ ID NO: 16389 - DNA, 20 bp, Bacteroides distasonis
tgggacgtgtcctattttgt

SEQ ID NO: 16390 - DNA, 20 bp, Vibrio mimicus
acacggtagcgctaggtgga

SEQ ID NO: 16391 - DNA, 20 bp, Actinomyces radingae
cgggatctgcgtggcctttg

SEQ ID NO: 16392 - DNA, 20 bp, Finegoldia magna
atttagtagacagaagcttc

SEQ ID NO: 16393 - DNA, 20 bp, Citrobacter amalonaticus
ggtgaatggttaataaccat

SEQ ID NO: 16394 - DNA, 20 bp, Bacteroides capillosus
tatgatatcctatgcaggca

SEQ ID NO: 16395 - DNA, 20 bp, Brevibacillus brevis
gtagccgcatcggaagggcg

SEQ ID NO: 16396 - DNA, 20 bp, Dolosicoccus paucivorans
gactgtatcaccgccttctt

SEQ ID NO: 16397 - DNA, 20 bp, Streptococcus ferus
tacgtgacggtacttaacca

SEQ ID NO: 16398 - DNA, 20 bp, Myroides odoratimimus
gcgaatctccaaagcttgtc

SEQ ID NO: 16399 - DNA, 20 bp, Dolosicoccus paucivorans
aatccttcgggacatccaga

SEQ ID NO: 16400 - DNA, 20 bp, Methylobacterium extorquens
cgaccacggaggggtcagcg

SEQ ID NO: 16401 - DNA, 20 bp, Clostridium limosum
aacatcatttcaatgcatgt

SEQ ID NO: 16402 - DNA, 20 bp, Corynebacterium argentoratense
ccatcctttagtgtgtgatg

SEQ ID NO: 16403 - DNA, 20 bp, Leuconostoc carnosum
gaaaagttaaggtagggaat

SEQ ID NO: 16404 - DNA, 20 bp, Bacteroides thetaiotaomicron
tacgcccgcccgtcaagcca

SEQ ID NO: 16405 - DNA, 20 bp, Providencia alcalifaciens
acgaccggcggcggggtgag

SEQ ID NO: 16406 - DNA, 30 bp, Dolosigranulum pigrum
ctcatggatagcctcgcggcgtattagcta

SEQ ID NO: 16407 - DNA, 20 bp, Streptococcus constellatus
caggatgcccgtagtttact

SEQ ID NO: 16408 - DNA, 20 bp, Streptococcus infantarius
ttagccgtttttttttggta

SEQ ID NO: 16409 - DNA, 20 bp, Peptoniphilus asaccharolyticus
tgaagatgaaatggattagc

SEQ ID NO: 16410 - DNA, 20 bp, Eubacterium moniliforme
gttgctctttgggaagccct

SEQ ID NO: 16411 - DNA, 20 bp, Brevibacillus centrosporus
taatcccgaatattttcttt

SEQ ID NO: 16412 - DNA, 20 bp, Bacteroides thetaiotaomicron
gcaaaccaaagctggcgacc

SEQ ID NO: 16413 - DNA, 20 bp, Bacteroides stercoris
ggttcttttcttcggacagt

SEQ ID NO: 16414 - DNA, 20 bp, Anaerococcus prevotii
cagctatatagtgatataat

SEQ ID NO: 16415 - DNA, 20 bp, Vibrio harveyi
gtgggctgcataagaagtag

SEQ ID NO: 16416 - DNA, 20 bp, Leuconostoc carnosum
agaaaagttaaggtagggaa

SEQ ID NO: 16417 - DNA, 20 bp, Paenibacillus macerans
tgagggagttgggaaaggcg

SEQ ID NO: 16418 - DNA, 20 bp, Empedobacter brevis
ggggtacgattctttcggga

SEQ ID NO: 16419 - DNA, 20 bp, Bacillus sp
gccgtatcgggaggtgcggt

SEQ ID NO: 16420 - DNA, 20 bp, Bacteroides stercoris
tggtatccttgagtgcagca

SEQ ID NO: 16421 - DNA, 20 bp, Anaerococcus prevotii
caaacctcagtgccgaagtt

SEQ ID NO: 16422 - DNA, 30 bp, Clostridium histolyticum
aacataggagtgcccttcggggaactcggt

SEQ ID NO: 16423 - DNA, 20 bp, Propionibacterium acnes
agtcggtacaaggtagcccg

SEQ ID NO: 16424 - DNA, 20 bp, Porphyromonas endodontalis
ttattttagcttgctaagat

SEQ ID NO: 16425 - DNA, 20 bp, Paenibacillus apiarius
cggagctgacggagtgcttg

SEQ ID NO: 16426 - DNA, 20 bp, Leclercia adecarboxylata
tgcggttggatcaccttccc

SEQ ID NO: 16427 - DNA, 20 bp, Pediococcus parvulus
ttaaccgcatggttgatttt

SEQ ID NO: 16428 - DNA, 20 bp, Escherichia hermannii
gtcatggacaactgtggtga

SEQ ID NO: 16429 - DNA, 20 bp, Anaerococcus prevotii
gctatcatcaaagatttatc

SEQ ID NO: 16430 - DNA, 30 bp, Bacteroides stercoris
tacacggcgacgtgatgctaatcccaaaaa

SEQ ID NO: 16431 - DNA, 20 bp, Capnocytophaga sp.
gagactgacgtacttagaga

SEQ ID NO: 16432 - DNA, 20 bp, Eggerthella lenta
ccgaacccgcaggggcggag

SEQ ID NO: 16433 - DNA, 30 bp, Streptococcus criceti
aatgtttgctttggaaactgttaaacttga

SEQ ID NO: 16434 - DNA, 20 bp, Oligella ureolytica
actatcaagctagagtatgt

SEQ ID NO: 16435 - DNA, 20 bp, Anaerococcus tetradius
cttgtattgatttcttcgga

SEQ ID NO: 16436 - DNA, 20 bp, Peptoniphilus asaccharolyticus
gtgtcggagaatttcggtgc

SEQ ID NO: 16437 - DNA, 20 bp, Clostridium clostridiiforme
cctcttcggagcaatggaga

SEQ ID NO: 16438 - DNA, 20 bp, Brevibacillus agri
tacaacgggacgctacctcg

SEQ ID NO: 16439 - DNA, 20 bp, Leptotrichia buccalis
tggtgttgtcagactgacgc

SEQ ID NO: 16440 - DNA, 20 bp, Oligella urethralis
acagatcccgccttggtagg

SEQ ID NO: 16441 - DNA, 20 bp, Stenotrophomonas maltophilia
atcgttcagtccggattgga

SEQ ID NO: 16442 - DNA, 20 bp, Streptococcus macacae
caagttggagagagtggaaa

SEQ ID NO: 16443 - DNA, 20 bp, Escherichia hermannii
gtgacgacgtaacaaggtaa

SEQ ID NO: 16444 - DNA, 20 bp, Stenotrophomonas maltophilia
gcacaggagaggcttgtctc

SEQ ID NO: 16445 - DNA, 20 bp, Corynebacterium argentoratense
ggaaaggcctaagcttgctt

SEQ ID NO: 16446 - DNA, 20 bp, Anaerococcus prevotii
catattacggcggggtctag

SEQ ID NO: 16447 - DNA, 20 bp, Psychrobacter phenylpyruvicus
cagcttgcgctctcgctatt

SEQ ID NO: 16448 - DNA, 20 bp, Propionibacterium propionicus
tgcaaggcatcttgtgggtt

SEQ ID NO: 16449 - DNA, 20 bp, Eubacterium moniliforme
gtttagaggtaaaaggattc

SEQ ID NO: 16450 - DNA, 20 bp, Geobacillus thermoglucosidasius
cgagcggaccgaacggaagc

SEQ ID NO: 16451 - DNA, 20 bp, Corynebacterium cystitidis
ctggtagccatgctgaaacg

SEQ ID NO: 16452 - DNA, 30 bp, Unknown Organism
  oligonucleotide from CDC group EF-4B
gcagacggttacttaagtcagatgtgaaat

SEQ ID NO: 16453 - DNA, 20 bp, Brevibacillus brevis
atcaacctccttcaattggt

SEQ ID NO: 16454 - DNA, 20 bp, Propionibacterium propionicus
agattttttttggttgggga

SEQ ID NO: 16455 - DNA, 20 bp, Anaerococcus tetradius
atcttttttatgggatgaaa

SEQ ID NO: 16456 - DNA, 20 bp, Streptococcus anginosus
ttgtcatggttcaggacgaa

SEQ ID NO: 16457 - DNA, 20 bp, Streptococcus macacae
tagttaaaagcattggctta

SEQ ID NO: 16458 - DNA, 20 bp, Bacillus schlegellii
gcggggagcgggcggaagcc

SEQ ID NO: 16459 - DNA, 20 bp, Anaerococcus prevotii
tagagatagactcttattgc

SEQ ID NO: 16460 - DNA, 20 bp, Vibrio parahaemolyticus
acgagttatcagaaccttcg

SEQ ID NO: 16461 - DNA, 30 bp, Arcanobacterium haemolyticum
aacgaggtctaatactagatattctgctct

SEQ ID NO: 16462 - DNA, 20 bp, Myroides odoratus
aaaacctagtaactagggct

SEQ ID NO: 16463 - DNA, 20 bp, Streptococcus constellatus
atgcccgtagtttactaccc

SEQ ID NO: 16464 - DNA, 20 bp, Sporosarcina pasteurii
aaacaagtttcttccttgtt

SEQ ID NO: 16465 - DNA, 20 bp, Anaerococcus prevotii
cacatatgcacatgcataaa

SEQ ID NO: 16466 - DNA, 20 bp, Brevibacillus centrosporus
tctcgcatgaggcgaagacg

SEQ ID NO: 16467 - DNA, 20 bp, Bacteroides merdae
ctagcaatagcagattacga

SEQ ID NO: 16468 - DNA, 20 bp, Corynebacterium group ANF
acatggtaagaagatgaaag

SEQ ID NO: 16469 - DNA, 20 bp, Bacteroides capillosus
atctagagatagtgaggccc

SEQ ID NO: 16470 - DNA, 20 bp, Prevotella oris
gaaggcagcctgcgggagca

SEQ ID NO: 16471 - DNA, 20 bp, Bacillus schlegellii
agcgggcggaagcctttggg

SEQ ID NO: 16472 - DNA, 20 bp, Anaerococcus tetradius
cctataaagttagtcaatcg

SEQ ID NO: 16473 - DNA, 20 bp, Bacteroides merdae
ggaggacgtgtccttttttg

SEQ ID NO: 16474 - DNA, 20 bp, Empedobacter brevis
aaggatagcccttcgaaagg

SEQ ID NO: 16475 - DNA, 20 bp, Dermacoccus nishinomiyaensis
ggactaagtccgtaacaagg

SEQ ID NO: 16476 - DNA, 20 bp, Bacillus schlegellii
gcgtgcagcgctgaaggcga

SEQ ID NO: 16477 - DNA, 20 bp, Brevibacillus centrosporus
gcaaaagcttgaaagccggg

SEQ ID NO: 16478 - DNA, 20 bp, Streptococcus equi
attatctgtgagtcgcgaac

SEQ ID NO: 16479 - DNA, 20 bp, Anaerobiospirillum succiniciproducens
ttaggcctaatacatgcaag

SEQ ID NO: 16480 - DNA, 20 bp, Sphingobacterium multivorum
ggactttaaacagactggct

SEQ ID NO: 16481 - DNA, 20 bp, Anaerococcus prevotii
accctatgatatgatagcct

SEQ ID NO: 16482 - DNA, 20 bp, Clostridium clostridiiforme
taggtgtcgggggacaaagt

SEQ ID NO: 16483 - DNA, 30 bp, Eremococcus coleocola
cttgagcgggggataacggtcggaaacgat

SEQ ID NO: 16484 - DNA, 20 bp, Brevibacterium linens
atatgacgaccgaaggcatc

SEQ ID NO: 16485 - DNA, 20 bp, Eubacterium moniliforme
gggagcacccgaagccagtg

SEQ ID NO: 16486 - DNA, 20 bp, Moellerella wisconsensis
ggaggaaggcgttgatatta

SEQ ID NO: 16487 - DNA, 20 bp, Bacteroides merdae
acagattgatggcgaccggc

SEQ ID NO: 16488 - DNA, 20 bp, Staphylococcus aureus
ttctggctgaactgacgctg

SEQ ID NO: 16489 - DNA, 20 bp, Citrobacter werkmanii
ttgaacgctgcgcgcgcagc

SEQ ID NO: 16490 - DNA, 20 bp, Pediococcus inopinatus
accgcataataaagtaaacc

SEQ ID NO: 16491 - DNA, 30 bp, Vibrio harveyi
gtctgcaactcgactccggaagttcggaat

SEQ ID NO: 16492 - DNA, 20 bp, Bacillus niacini
tctcatgagggaaagttgaa

SEQ ID NO: 16493 - DNA, 20 bp, Clostridium clostridiiforme
tggtctggtgcgaaaaactc

SEQ ID NO: 16494 - DNA, 20 bp, Vibrio hollisae
gcagcgaaagttgtgctaat

SEQ ID NO: 16495 - DNA, 20 bp, Gemella morbillorum
atcagctagatgttgcatga

SEQ ID NO: 16496 - DNA, 20 bp, Enterococcus raffinosus
atcctttgatcactctggag

SEQ ID NO: 16497 - DNA, 20 bp, Corynebacterium cystitidis
ggtagccatgctgaaacggg

SEQ ID NO: 16498 - DNA, 20 bp, Brevibacterium linens
cggatatgacgaccgaaggc

SEQ ID NO: 16499 - DNA, 20 bp, Microbacterium hominis
tgtcatggctcaggatgaac

SEQ ID NO: 16500 - DNA, 20 bp, Bacillus alcalophilus
ggtcggcaccttgacggacc

SEQ ID NO: 16501 - DNA, 20 bp, Unknown Organism
  oligonucleotide from CDC group EF-4B
acggttacttaagtcagatg

SEQ ID NO: 16502 - DNA, 20 bp, Sporosarcina ureae
tgttgaaagccggtttcggc

SEQ ID NO: 16503 - DNA, 20 bp, Bacillus mycoides
acattttgcgctgcatggcg

SEQ ID NO: 16504 - DNA, 20 bp, Aerococcus viridans
ggatggtacagcgagtcgcg

SEQ ID NO: 16505 - DNA, 20 bp, Anaerococcus prevotii
gatcatggctaaggacgaac

SEQ ID NO: 16506 - DNA, 20 bp, Lactococcus raffinolactis
ttggggctatccagccctaa

SEQ ID NO: 16507 - DNA, 20 bp, Geobacillus thermoglucosidasius
agcgaatccccaaaaacccg

SEQ ID NO: 16508 - DNA, 20 bp, Streptococcus acidominimus
ttgattctcccgtagctgct

SEQ ID NO: 16509 - DNA, 20 bp, Yersinia frederiksenii
cttaatacgtgaagtgattg

SEQ ID NO: 16510 - DNA, 20 bp, Shigella boydii
attcccgtggcattctgatc

SEQ ID NO: 16511 - DNA, 20 bp, Bacteroides stercoris
tgggatgattattaaagaat

SEQ ID NO: 16512 - DNA, 20 bp, Geobacillus stearothermophilus
ccttgattcggtcagcggcg

SEQ ID NO: 16513 - DNA, 20 bp, Enterococcus casseliflavus
gcgggcattagctagttggt

SEQ ID NO: 16514 - DNA, 20 bp, Pseudomonas mendocina
gaagggctgctggttaatac

SEQ ID NO: 16515 - DNA, 20 bp, Bacteroides caccae
gagcgtctagggtaaaactg

SEQ ID NO: 16516 - DNA, 20 bp, Streptococcus acidominimus
accgcataatagtgtttact

SEQ ID NO: 16517 - DNA, 20 bp, Eubacterium limosum
ttgatggatccttcgggtga

SEQ ID NO: 16518 - DNA, 20 bp, Neisseria subflava
tctcacaaaaccgatcgagt

SEQ ID NO: 16519 - DNA, 30 bp, Porphyromonas gingivalis
ggggtacctgaagggcgtaccgcaaggggc

SEQ ID NO: 16520 - DNA, 20 bp, Brevibacillus laterosporus
gaaacagtgccatttaaata

SEQ ID NO: 16521 - DNA, 20 bp, Leuconostoc fallax
aatattgttctcttcggaga

SEQ ID NO: 16522 - DNA, 20 bp, Prevotella melaninogenica
acccctctcttcagttgtcc

SEQ ID NO: 16523 - DNA, 20 bp, Anaerococcus prevotii
gaactgtaatacaggtggtg

SEQ ID NO: 16524 - DNA, 20 bp, Actinomyces radingae
actggatgttctgcgctttc

SEQ ID NO: 16525 - DNA, 20 bp, Vibrio harveyi
tcgagttccggatcggagtc

SEQ ID NO: 16526 - DNA, 30 bp, Corynebacterium kutscheri
tcgggctagagatagtttttcctttttagg

SEQ ID NO: 16527 - DNA, 30 bp, Brevibacterium linens
actgggtctaataccggatatgacgaccga

SEQ ID NO: 16528 - DNA, 20 bp, Pediococcus pentosaceus
ctgagagggcaatcggccac

SEQ ID NO: 16529 - DNA, 20 bp, Streptococcus urinalis
cttgcacaagaccaaggagt

SEQ ID NO: 16530 - DNA, 20 bp, Corynebacterium afermentans
ttcaggtgttccgactttca

SEQ ID NO: 16531 - DNA, 30 bp, Streptococcus criceti
agctaataccgcataatagtgattaactca

SEQ ID NO: 16532 - DNA, 20 bp, Clostridium clostridiiforme
gacaaagtccttcggtgccg

SEQ ID NO: 16533 - DNA, 20 bp, Campylobacter curvus
tcaagggagcgtagctcctt

SEQ ID NO: 16534 - DNA, 20 bp, Haemophilus paraphrophilus
caaggtaacctagggaatcg

SEQ ID NO: 16535 - DNA, 20 bp, Streptococcus ratti
tttgtaagtctgaagtcaaa

SEQ ID NO: 16536 - DNA, 20 bp, Globicatella sanguinis
tagtagattgacggtatcta

SEQ ID NO: 16537 - DNA, 20 bp, Unknown Organism
  oligonucleotide from CDC group VB-3
ttccagggggacggttaccc

SEQ ID NO: 16538 - DNA, 20 bp, Granulicatella elegans
tagagtcgcatgacccagag

SEQ ID NO: 16539 - DNA, 20 bp, Bacteroides thetaiotaomicron
gtcacagaaggcagctacct

SEQ ID NO: 16540 - DNA, 20 bp, Propionibacterium acnes
actaagtcggtacaaggtag

SEQ ID NO: 16541 - DNA, 20 bp, Bacteroides merdae
gagtgtgtttgaggtaggcg

SEQ ID NO: 16542 - DNA, 20 bp, Brevibacillus brevis
tgataggggagaagtcgtaa

SEQ ID NO: 16543 - DNA, 20 bp, Propionibacterium acnes
gactaagtcgtacaagataa

SEQ ID NO: 16544 - DNA, 20 bp, Myroides odoratimimus
taggacactgccattgatac

SEQ ID NO: 16545 - DNA, 20 bp, Bacteroides merdae
aaacactccttctagcaata

SEQ ID NO: 16546 - DNA, 20 bp, Campylobacter curvus
cgtctgcgaagtaaataata

SEQ ID NO: 16547 - DNA, 20 bp, Leuconostoc fallax
ctttgaagatgttagagata

SEQ ID NO: 16548 - DNA, 20 bp, Sphingobacterium multivorum
ttcatggcccttacgcttcg

SEQ ID NO: 16549 - DNA, 20 bp, Finegoldia magna
agtgatataatgcaaaactc

SEQ ID NO: 16550 - DNA, 20 bp, Pediococcus dextrinicus
caccaaggagatttaaaagt

SEQ ID NO: 16551 - DNA, 20 bp, Bacteroides distasonis
ggaaacaccttttctaggca

SEQ ID NO: 16552 - DNA, 20 bp, Bacteroides capilosus
ggaataacagtccgaaagga

SEQ ID NO: 16553 - DNA, 20 bp, Neisseria subflava
aagtaggtaggataccgcaa

SEQ ID NO: 16554 - DNA, 20 bp, Streptococcus macacae
agagggattgaaaggtacaa

SEQ ID NO: 16555 - DNA, 20 bp, Propionibacterium propionicus
atgggcgtgcctttttggtc

SEQ ID NO: 16556 - DNA, 20 bp, Vibrio hollisae
ggaggaaatccccagcgcta

SEQ ID NO: 16557 - DNA, 20 bp, Corynebacterium group ANF
aaacgttttctagtggttgg

SEQ ID NO: 16558 - DNA, 20 bp, Vibrio cholerae
gagattcgctccacctcggc

SEQ ID NO: 16559 - DNA, 20 bp, Brevibacillus brevis
aacctgcggttgggatcaac

SEQ ID NO: 16560 - DNA, 20 bp, Bacteroides stercoris
tatccttgagtgcagcagag

SEQ ID NO: 16561 - DNA, 20 bp, Finegoldia magna
accagcgaataaatgtccgg

SEQ ID NO: 16562 - DNA, 20 bp, Clostridium clostridiiforme
cataagccggaaggtgaaaa

SEQ ID NO: 16563 - DNA, 20 bp, Sphingomonas paucimobilis
gtgcttggcatttgggtggc

SEQ ID NO: 16564 - DNA, 20 bp, Corynebacterium pilosum
gaactgggtgtcttattccg

SEQ ID NO: 16565 - DNA, 20 bp, Corynebacterium falsenii
aagaagccatgttgtggtga

SEQ ID NO: 16566 - DNA, 20 bp, Bacteroides merdae
tacagattgatggcgaccgg

SEQ ID NO: 16567 - DNA, 20 bp, Actinomyces naeslundii
ccttgccttttggggggtgt

SEQ ID NO: 16568 - DNA, 20 bp, Anaerococcus tetradius
gactaaccaaagatttatcg

SEQ ID NO: 16569 - DNA, 20 bp, Lactococcus raffinolactis
tggggctatccagccctaag

SEQ ID NO: 16570 - DNA, 20 bp, Paenibacillus macerans
tgtataatcctggggctcaa

SEQ ID NO: 16571 - DNA, 20 bp, Vibrio hollisae
cgtttggaactgtcagacta

SEQ ID NO: 16572 - DNA, 20 bp, Pseudomonas mendocina
aaaatctcaaggattcccaa

SEQ ID NO: 16573 - DNA, 20 bp, Empedobacter brevis
acttggcaacaagatgcgaa

SEQ ID NO: 16574 - DNA, 20 bp, Clostridium clostridiiforme
gggtgagtaaagcacaagga

SEQ ID NO: 16575 - DNA, 20 bp, Paenibacillus macerans
tcttgtggagtaactgccag

SEQ ID NO: 16576 - DNA, 20 bp, Haemophilus influenzae
agtgcgggaccttcaggcca

SEQ ID NO: 16577 - DNA, 20 bp, Streptococcus dysgalactiae
agtgtttaacccatgttaaa

SEQ ID NO: 16578 - DNA, 20 bp, Unknown Organism
  oligonucleotide from CDC group VB-3
ttcggggggacggttacccg

SEQ ID NO: 16579 - DNA, 20 bp, Anaerococcus prevotii
ggagtgaccttaagtggatt

SEQ ID NO: 16580 - DNA, 20 bp, Bacillus coagulans
gaataacactttcgctcgca

SEQ ID NO: 16581 - DNA, 20 bp, Globicatella sanguinis
aatgttagtagattgacggt

SEQ ID NO: 16582 - DNA, 20 bp, Prevotella loescheii
aaggggcccacgtgtgggtt

SEQ ID NO: 16583 - DNA, 20 bp, Streptococcus cristatus
agtcaattaaaaggtgcaaa

SEQ ID NO: 16584 - DNA, 20 bp, Leptotrichia buccalis
gttgtcagactgacgcatgt

SEQ ID NO: 16585 - DNA, 20 bp, Weeksella virosa
ttcacgagctggatagttga

SEQ ID NO: 16586 - DNA, 20 bp, Prevotella melaninogenica
cgggactggggtctgcaacc

SEQ ID NO: 16587 - DNA, 20 bp, Pseudomonas mendocina
tgggaggaagggctgctggt

SEQ ID NO: 16588 - DNA, 20 bp, Bacteroides capilosus
cggggaaagtcgagacaggt

SEQ ID NO: 16589 - DNA, 20 bp, Enterobacter gergoviae
tacttggaggctgtggttct

SEQ ID NO: 16590 - DNA, 20 bp, Prevotella melaninogenica
aggttctgatccatagggct

SEQ ID NO: 16591 - DNA, 20 bp, Corynebacterium cystitidis
atcttttgtgggtgtgtgga

SEQ ID NO: 16592 - DNA, 20 bp, Anaerococcus tetradius
gatgaaccttgtattgattt

SEQ ID NO: 16593 - DNA, 20 bp, Bacteroides capillosus
tcaggtgtgaaaaccacggg

SEQ ID NO: 16594 - DNA, 20 bp, Bacteroides stercoris
caacccttgcgggtagttcc

SEQ ID NO: 16595 - DNA, 20 bp, Dolosicoccus paucivorans
gtacaacgagaagcaacgtc

SEQ ID NO: 16596 - DNA, 20 bp, Leptotrichia buccalis
caagtctttggcgaagctgt

SEQ ID NO: 16597 - DNA, 20 bp, Granulicatella elegans
cgcatgacccagagaaggaa

SEQ ID NO: 16598 - DNA, 20 bp, Anaerococcus prevotii
ggcagctatatagtgatata

SEQ ID NO: 16599 - DNA, 20 bp, Campylobacter concisus
cgctatcaaagccggtcgta

SEQ ID NO: 16600 - DNA, 20 bp, Streptococcus sp.
aagtcggtgaggtaccgtaa

SEQ ID NO: 16601 - DNA, 20 bp, Achromobacter xylosoxidans
tacctcgcgaaactgacggt

SEQ ID NO: 16602 - DNA, 20 bp, Anaerococcus tetradius
ttcgggatgaaaaatattgg

SEQ ID NO: 16603 - DNA, 20 bp, Clostridium clostridiiforme
aaactggagagcttgagaag

SEQ ID NO: 16604 - DNA, 20 bp, Clostridium clostridiiforme
ctcataagccggaaggtgaa

SEQ ID NO: 16605 - DNA, 20 bp, Pediococcus inopinatus
gttgaatgatttagagatgc

SEQ ID NO: 16606 - DNA, 20 bp, Providencia rettgeri
gctaatatcatcaacgattg

SEQ ID NO: 16607 - DNA, 20 bp, Paenibacillus azotofixans
gtgatggagcttgctcttga

SEQ ID NO: 16608 - DNA, 20 bp, Streptococcus suis
tcaggacgaatcgctggcgg

SEQ ID NO: 16609 - DNA, 20 bp, Streptococcus urinalis
gcatgagagtttttaacaca

SEQ ID NO: 16610 - DNA, 20 bp, Dolosicoccus paucivorans
acgcgactgtatcaccgcct

SEQ ID NO: 16611 - DNA, 20 bp, Campylobacter curvus
taagtataaatgggaaagtc

SEQ ID NO: 16612 - DNA, 20 bp, Abiotrophia defectiva
gatcacatgattccgtgagg

SEQ ID NO: 16613 - DNA, 20 bp, Streptococcus gallolyticus
agtcgtaacaaaaaacccgt

SEQ ID NO: 16614 - DNA, 20 bp, Sporosarcina pasteurii
tcctgcagtgacagcatagc

SEQ ID NO: 16615 - DNA, 30 bp, Streptococcus criceti
tgttaatgacttgaaaggtgcaatggcacc

SEQ ID NO: 16616 - DNA, 20 bp, Capnocytophaga sp.
ggcatcacatttatattaaa

SEQ ID NO: 16617 - DNA, 30 bp, Leuconostoc fallax
aacgctagtcgcggacctgatcacttcggt

SEQ ID NO: 16618 - DNA, 20 bp, Bacteroides capillosus
aactaggattaaaggtttag

SEQ ID NO: 16619 - DNA, 20 bp, Staphylococcus schleiferi
cgtatcggaaagtgccggtg

SEQ ID NO: 16620 - DNA, 20 bp, Clostridium subterminale
accgcataatgtatgagaat

SEQ ID NO: 16621 - DNA, 20 bp, Proteus mirabilis
aggcaaccgtcaggggaacc

SEQ ID NO: 16622 - DNA, 20 bp, Clostridium clostridiiforme
ggcgcgtaggcggcgcttca

SEQ ID NO: 16623 - DNA, 20 bp, Capnocytophaga sp.
gctgaggcggtgaaagatga

SEQ ID NO: 16624 - DNA, 20 bp, Propionibacterium acnes
acaagataaaagtaccggaa

SEQ ID NO: 16625 - DNA, 30 bp, Bacillus alcalophilus
cgaataggtcggcaccttgacggacctaac

SEQ ID NO: 16626 - DNA, 20 bp, Salmonella typhi
gcgacggtatcaggcagcag

SEQ ID NO: 16627 - DNA, 20 bp, Enterococcus dispar
caatagtaaacacatgttta

SEQ ID NO: 16628 - DNA, 30 bp, Ignavigranum ruoffiae
accttagggagggagccgtcgaaggtggga

SEQ ID NO: 16629 - DNA, 20 bp, Vibrio vulnificus
ttgggtcatgactggggtga

SEQ ID NO: 16630 - DNA, 20 bp, Clostridium clostridiiforme
aaagcagagatgcgcttttg

SEQ ID NO: 16631 - DNA, 20 bp, Streptococcus acidominimus
ggagtggaaaatccgctaag

SEQ ID NO: 16632 - DNA, 20 bp, Porphyromonas endodontalis
ggcagcattattttagcttg

SEQ ID NO: 16633 - DNA, 20 bp, Myroides odoratimimus
taatatggaagtaactagaa

SEQ ID NO: 16634 - DNA, 30 bp, Leuconostoc fallax
caggtcttgacatcctttgaagatgttaga

SEQ ID NO: 16635 - DNA, 20 bp, Dolosicoccus paucivorans
gcaagtcgaacgcgactgta

SEQ ID NO: 16636 - DNA, 20 bp, Pseudomonas mendocina
ccctgcagttttgacgttac

SEQ ID NO: 16637 - DNA, 20 bp, Finegoldia magna
aacccctatacttagttacc

SEQ ID NO: 16638 - DNA, 20 bp, Pediococcus dextrinicus
aacgagttttcttttaatga

SEQ ID NO: 16639 - DNA, 20 bp, Streptococcus acidominimus
agaacgttagcgggagtgga

SEQ ID NO: 16640 - DNA, 20 bp, Propionibacterium propionicus
tttttgtgacggtagcagta

SEQ ID NO: 16641 - DNA, 20 bp, Arthrobacter globiformis
ttcctgaccgccgtagagat

SEQ ID NO: 16642 - DNA, 20 bp, Anaerococcus tetradius
tgttaggcttgagagatgaa

SEQ ID NO: 16643 - DNA, 20 bp, Campylobacter rectus
gtaactggtctgagagatga

SEQ ID NO: 16644 - DNA, 20 bp, Streptococcus suis
atcatggctcaggacgaatc

SEQ ID NO: 16645 - DNA, 20 bp, Bacillus thuringiensis
atcggaaggctgcggttgga

SEQ ID NO: 16646 - DNA, 20 bp, Enterococcus dispar
gtaaacacatgtttattatt

SEQ ID NO: 16647 - DNA, 20 bp, Granulicatella adiacens
cgagagcgaccgggcttgca

SEQ ID NO: 16648 - DNA, 20 bp, Propionibacterium acnes
taagtcgtacaagataaaag

SEQ ID NO: 16649 - DNA, 20 bp, Paenibacillus larvae
ctgaccggtttagagacaga

SEQ ID NO: 16650 - DNA, 20 bp, Prevotella loescheii
gggccgccgcggaggtgctg

SEQ ID NO: 16651 - DNA, 20 bp, Bacillus schlegellii
cttgacatcccgccgacggg

SEQ ID NO: 16652 - DNA, 20 bp, Bacteroides stercoris
ctatagttaccatcaggtca

SEQ ID NO: 16653 - DNA, 20 bp, Bacteroides stercoris
tggcgatacaatgtcagcgg

SEQ ID NO: 16654 - DNA, 20 bp, Bacillus azotoformans
ctaagccgcgaggcttgagc

SEQ ID NO: 16655 - DNA, 20 bp, Unknown Organism
  oligonucleotide from CDC group VB-3
ccagggggacggttaccccg

SEQ ID NO: 16656 - DNA, 30 bp, Corynebacterium group ANF
ggtggaaaacgttttctagtggttggggat

SEQ ID NO: 16657 - DNA, 20 bp, Clostridium clostridiiforme
acctcggcgcgcagacgaaa

SEQ ID NO: 16658 - DNA, 20 bp, Bacteroides thetaiotaomicron
ttgcttgcaaaccaaagctg

SEQ ID NO: 16659 - DNA, 20 bp, Brevibacillus centrosporus
ataccggatagagtctactc

SEQ ID NO: 16660 - DNA, 20 bp, Bacillus schlegellii
cttcgggcggaagcccgtct

SEQ ID NO: 16661 - DNA, 20 bp, Streptococcus criceti
cttcgggagccagccgctaa

SEQ ID NO: 16662 - DNA, 20 bp, Empedobacter brevis
cgaggggtacgattctttcg

SEQ ID NO: 16663 - DNA, 20 bp, Proteus vulgaris
tctactggctgagagatgat

SEQ ID NO: 16664 - DNA, 20 bp, Brevibacillus thermoruber
tcgagcggatcctgtttgga

SEQ ID NO: 16665 - DNA, 20 bp, Bacillus licheniformis
gggttactctcggggaaccc

SEQ ID NO: 16666 - DNA, 20 bp, Suttonella indologenes
acgctggcgggcccaatgct

SEQ ID NO: 16667 - DNA, 20 bp, Paenibacillus lautus
gagaggaaagaaagacggag

SEQ ID NO: 16668 - DNA, 20 bp, Bacteroides thetaiotaomicron
taagattggtattggggtaa

SEQ ID NO: 16669 - DNA, 20 bp, Corynebacterium pilosum
aaaggcctttgggcggtatg

SEQ ID NO: 16670 - DNA, 20 bp, Micromonas micros
acgagaagctagatagagat

SEQ ID NO: 16671 - DNA, 20 bp, Unknown Organism
  oligonucleotide from CDC group EO-2
tcggaggcgagggacttcgg

SEQ ID NO: 16672 - DNA, 20 bp, Alloiococcus otitis
gcatgctggggaaatgaaag

SEQ ID NO: 16673 - DNA, 30 bp, Bacteroides merdae
ttataggggaataaagtggaggacgtgtcc

SEQ ID NO: 16674 - DNA, 20 bp, Paenibacillus validus
agcggccctttccttcggga

SEQ ID NO: 16675 - DNA, 20 bp, Stenotrophomonas maltophilia
acggcagcacaggagaggct

SEQ ID NO: 16676 - DNA, 20 bp, Clostridium clostridiiforme
cggtagagaagcgaaagcgg

SEQ ID NO: 16677 - DNA, 20 bp, Shigella boydii
cgggaacgtattcccgtggc

SEQ ID NO: 16678 - DNA, 20 bp, Anaerobiospirillum succiniciproducens
gtaggaatctttcagagata

SEQ ID NO: 16679 - DNA, 20 bp, Paenibacillus lautus
ggttcttctctcgcatggga

SEQ ID NO: 16680 - DNA, 20 bp, Providencia stuartii
gcgttgatgttaataccatc

SEQ ID NO: 16681 - DNA, 20 bp, Bacteroides uniformis
gcgtaaccgcaggagcgccc

SEQ ID NO: 16682 - DNA, 20 bp, Campylobacter concisus
taacagggagccgaccggaa

SEQ ID NO: 16683 - DNA, 20 bp, Myroides odoratimimus
agtcgaggggtagaaaaagc

SEQ ID NO: 16684 - DNA, 20 bp, Leptotrichia buccalis
cacatgcaagtctttggcag

SEQ ID NO: 16685 - DNA, 20 bp, Propionibacterium propionicus
ttggaaagattttttttggt

SEQ ID NO: 16686 - DNA, 20 bp, Actinomyces odontolyticus
agccgcaacagtggttgtgg

SEQ ID NO: 16687 - DNA, 20 bp, Staphylococcus aureus
cgactttctggctgaactga

SEQ ID NO: 16688 - DNA, 20 bp, Eubacterium moniliforme
gggcagcgacctcgtaagag

SEQ ID NO: 16689 - DNA, 20 bp, Moellerella wisconsensis
ccagcggaactcataaagtg

SEQ ID NO: 16690 - DNA, 20 bp, Bacillus schlegellii
ccgacgggtccagagatggg

SEQ ID NO: 16691 - DNA, 20 bp, Porphyromonas endodontalis
acgaggtatgcggaatgtgt

SEQ ID NO: 16692 - DNA, 20 bp, Leptotrichia buccalis
agacgctgcgggagagcctt

SEQ ID NO: 16693 - DNA, 20 bp, Paenibacillus macerans
atctgtcacttagagatgga

SEQ ID NO: 16694 - DNA, 20 bp, Psychrobacter phenylpyruvicus
atgagacaatactaaaaggc

SEQ ID NO: 16695 - DNA, 20 bp, Paenibacillus amylolyticus
ggtgcttgcatcctctgatg

SEQ ID NO: 16696 - DNA, 20 bp, Micrococcus luteus
cccttgtggggggagccgcg

SEQ ID NO: 16697 - DNA, 20 bp, Streptococcus macacae
gcatgataggagcttaaaag

SEQ ID NO: 16698 - DNA, 30 bp, Streptococcus ferus
gtagggcttgagtgcagaaggggagagtgg

SEQ ID NO: 16699 - DNA, 20 bp, Gemella morbillorum
gagcttcttctctggatgag

SEQ ID NO: 16700 - DNA, 20 bp, Paenibacillus macerans
gagacaggggacacaggtgg

SEQ ID NO: 16701 - DNA, 20 bp, Empedobacter brevis
tgaaaaggatagcccttcga

SEQ ID NO: 16702 - DNA, 20 bp, Bacteroides capillosus
taccgtatgatatcctatgc

SEQ ID NO: 16703 - DNA, 20 bp, Anaerococcus tetradius
tcgcatgaagagcttatcaa

SEQ ID NO: 16704 - DNA, 20 bp, Actinomyces naeslundii
ggtgggtgtgggaaagatgc

SEQ ID NO: 16705 - DNA, 20 bp, Anaerococcus tetradius
atgaaaaatattggattagt

SEQ ID NO: 16706 - DNA, 20 bp, Dolosicoccus paucivorans
gagaccaagcggatctctta

SEQ ID NO: 16707 - DNA, 20 bp, Paenibacillus macerans
acagttcgcactggaaactg

SEQ ID NO: 16708 - DNA, 20 bp, Dermacoccus nishinomiyaensis
ggcgattgggactaagtccg

SEQ ID NO: 16709 - DNA, 20 bp, Bacteroides uniformis
atacgagcgcacacccttat

SEQ ID NO: 16710 - DNA, 20 bp, Capnocytophaga sp.
acctaatggtatataggtgt

SEQ ID NO: 16711 - DNA, 20 bp, Streptococcus acidominimus
agcgggagtggaaaatccgc

SEQ ID NO: 16712 - DNA, 20 bp, Methylobacterium extorquens
aggcgaccacggaggggtca

SEQ ID NO: 16713 - DNA, 20 bp, Streptococcus anginosus
catggttcaggacgaacgcc

SEQ ID NO: 16714 - DNA, 20 bp, Streptococcus alactolyticus
ccgcataacagcttttgaca

SEQ ID NO: 16715 - DNA, 20 bp, Eremococcus coleocola
taacagcaatcatcgcctga

SEQ ID NO: 16716 - DNA, 20 bp, Anaerobiospirillum succiniciproducens
ttcagagataagagagtgcc

SEQ ID NO: 16717 - DNA, 20 bp, Capnocytophaga sp.
tggagactgacgtacttaga

SEQ ID NO: 16718 - DNA, 20 bp, Dolosicoccus paucivorans
aacgcgactgtatcaccgcc

SEQ ID NO: 16719 - DNA, 20 bp, Bacteroides stercoris
tctacccggactgccgtcgt

SEQ ID NO: 16720 - DNA, 20 bp, Clostridium clostridiiforme
acagagagaagcgagcccga

SEQ ID NO: 16721 - DNA, 20 bp, Prevotella disiens
acgtgtaatgttttgcatgt

SEQ ID NO: 16722 - DNA, 20 bp, Empedobacter brevis
atgttgaagtggctggaatg

SEQ ID NO: 16723 - DNA, 20 bp, Leuconostoc fallax
aagtcgaacgctagtcgcgg

SEQ ID NO: 16724 - DNA, 20 bp, Myroides odoratimimus
ggggtagaaagagcttgctt

SEQ ID NO: 16725 - DNA, 20 bp, Brevibacillus centrosporus
ctactctcgcatgaggcgaa

SEQ ID NO: 16726 - DNA, 20 bp, Acinetobacter radioresistens
gccttgacatacagagaaac

SEQ ID NO: 16727 - DNA, 20 bp, Corynebacterium ulcerans
cgttttcccttgtggttgta

SEQ ID NO: 16728 - DNA, 20 bp, Eubacterium moniliforme
ttttgtcctatgggacgaaa

SEQ ID NO: 16729 - DNA, 30 bp, Actinomyces radingae
ctgcgtggcctttgtggttgtgtggtgaga

SEQ ID NO: 16730 - DNA, 20 bp, Corynebacterium group F1
gtggcgacacgggttgagta

SEQ ID NO: 16731 - DNA, 20 bp, Stenotrophomonas maltophilia
tgctttcttggctgacgagc

SEQ ID NO: 16732 - DNA, 20 bp, Campylobacter concisus
agatcgccgcagagatacgg

SEQ ID NO: 16733 - DNA, 20 bp, Oligella urethralis
cacactccaatctcttgaag

SEQ ID NO: 16734 - DNA, 20 bp, Enterobacter gergoviae
ggccgtggcttccggaggct

SEQ ID NO: 16735 - DNA, 30 bp, Bacteroides merdae
tgggtttaaagggtgcgtaggtggtgattt

SEQ ID NO: 16736 - DNA, 30 bp, Streptococcus criceti
ggcctacctaggctgcgatacatagccgac

SEQ ID NO: 16737 - DNA, 20 bp, Peptoniphilus asaccharolyticus
aatcaaacagaacccttcgg

SEQ ID NO: 16738 - DNA, 20 bp, Providencia alcalifaciens
tcgctgacgaccggcggcgg

SEQ ID NO: 16739 - DNA, 20 bp, Pasteurella multocida
tttaccacggatgattcatg

SEQ ID NO: 16740 - DNA, 20 bp, Macrococcus caseolyticus
tagatggacccgcgggtatt

SEQ ID NO: 16741 - DNA, 20 bp, Prevotella oralis
cagttttttaagcgtgctgt

SEQ ID NO: 16742 - DNA, 20 bp, Empedobacter brevis
aggaggattaatactttata

SEQ ID NO: 16743 - DNA, 20 bp, Corynebacterium afermentans
ccaccgcttcaggtgttccg

SEQ ID NO: 16744 - DNA, 20 bp, Bacillus schlegellii
gtgcagcgctgaaggcgaac

SEQ ID NO: 16745 - DNA, 20 bp, Dolosicoccus paucivorans
cgagtagagtaactgttact

SEQ ID NO: 16746 - DNA, 20 bp, Serratia grimesii
gtgtgttaatagcacatcac

SEQ ID NO: 16747 - DNA, 20 bp, Stenotrophomonas maltophilia
agcaaccccgcgagcagcaa

SEQ ID NO: 16748 - DNA, 20 bp, Empedobacter brevis
ttataacagattgaatggca

SEQ ID NO: 16749 - DNA, 20 bp, Streptococcus sobrinus
ttaaaagaagcaacggcttc

SEQ ID NO: 16750 - DNA, 20 bp, Moraxella atlantae
acatagtgaggatcctgcag

SEQ ID NO: 16751 - DNA, 20 bp, Streptococcus infantarius
ccgtttttttttggtaagtt

SEQ ID NO: 16752 - DNA, 20 bp, Anaerococcus prevotii
gagtgaccttaagtggatta

SEQ ID NO: 16753 - DNA, 20 bp, Enterobacter gergoviae
tccggaggctacgcgttaag

SEQ ID NO: 16754 - DNA, 30 bp, Vibrio parahaemolyticus
tacagagggcagccaacttgcgaaagtcga

SEQ ID NO: 16755 - DNA, 20 bp, Bacteroides capillosus
caaaccgacgatcagtaggg

SEQ ID NO: 16756 - DNA, 20 bp, Citrobacter werkmanii
agattgaacgctgcgcgcgc

SEQ ID NO: 16757 - DNA, 20 bp, Actinomyces naeslundii
cttgccttttggggggtgtg

SEQ ID NO: 16758 - DNA, 20 bp, Enterobacter amnigenus
gtagcacagagaggcttgtt

SEQ ID NO: 16759 - DNA, 20 bp, Haemophilus influenzae
gcgggaccttcaggccacat

SEQ ID NO: 16760 - DNA, 20 bp, Brevibacillus laterosporus
tagagttttgcttcgcatga

SEQ ID NO: 16761 - DNA, 20 bp, Capnocytophaga sp.
gtttggttgcaagactgagt

SEQ ID NO: 16762 - DNA, 20 bp, Clostridium clostridiiforme
tggacttgacatccacgcgg

SEQ ID NO: 16763 - DNA, 20 bp, Campylobacter curvus
ttgttcgtctgcgaagtaaa

SEQ ID NO: 16764 - DNA, 20 bp, Sphingobacterium multivorum
agactggctgggccaacacg

SEQ ID NO: 16765 - DNA, 20 bp, Empedobacter brevis
aaaaggatagcccttcgaaa

SEQ ID NO: 16766 - DNA, 20 bp, Leptotrichia buccalis
atgcaagtctttggcagaat

SEQ ID NO: 16767 - DNA, 20 bp, Helcococcus kunzii
aggaatatcctagagatagg

SEQ ID NO: 16768 - DNA, 20 bp, Microbacterium hominis
caggcggtggccctcccctt

SEQ ID NO: 16769 - DNA, 20 bp, Streptococcus infantarius
tggcacgtagttagccgttt

SEQ ID NO: 16770 - DNA, 20 bp, Myroides odoratimimus
actgcagagcttgaataata

SEQ ID NO: 16771 - DNA, 20 bp, Neisseria sicca
ccctgggatggcactgacgt

SEQ ID NO: 16772 - DNA, 20 bp, Propionibacterium acnes
gattaggactaagtcgtaca

SEQ ID NO: 16773 - DNA, 20 bp, Citrobacter amalonaticus
ggaggaagggtgaatggtta

SEQ ID NO: 16774 - DNA, 20 bp, Vibrio harveyi
aagtaggtagttaaccttcg

SEQ ID NO: 16775 - DNA, 20 bp, Paenibacillus macerans
catgagggagttgggaaagg

SEQ ID NO: 16776 - DNA, 20 bp, Capnocytophaga sp.
gataggtatttcttcggaca

SEQ ID NO: 16777 - DNA, 20 bp, Enterobacter gergoviae
cgtggcttccggaggctacg

SEQ ID NO: 16778 - DNA, 20 bp, Prevotella loescheii
gatttggacgaaaggtttgg

SEQ ID NO: 16779 - DNA, 20 bp, Moraxella atlantae
gcttacccggtgtggtcgat

SEQ ID NO: 16780 - DNA, 20 bp, Arcanobacterium haemolyticum
cttgcgggggttggattagt

SEQ ID NO: 16781 - DNA, 20 bp, Corynebacterium group ANF
cttacctggggttgacatgc

SEQ ID NO: 16782 - DNA, 20 bp, Leuconostoc carnosum
gtagggaatgaccttagcct

SEQ ID NO: 16783 - DNA, 20 bp, Bifidobacterium adolescentis
gggaagccttgagctcttag

SEQ ID NO: 16784 - DNA, 20 bp, Bacteroides thetaiotaomicron
cataggccgtaaggcatttg

SEQ ID NO: 16785 - DNA, 20 bp, Vibrio hollisae
taataccgctgggggatgac

SEQ ID NO: 16786 - DNA, 20 bp, Bacillus laevolacticus
aacggtagctaagccggata

SEQ ID NO: 16787 - DNA, 20 bp, Helcococcus ovis
cgttaggaggcagacgtcga

SEQ ID NO: 16788 - DNA, 20 bp, Fusobacterium necrogenes
tgccccttcgggggaaccta

SEQ ID NO: 16789 - DNA, 20 bp, Streptococcus macacae
gtaagagcggaaagtttaca

SEQ ID NO: 16790 - DNA, 20 bp, Enterobacter gergoviae
gtggtccttgaagcgtggct

SEQ ID NO: 16791 - DNA, 20 bp, Streptococcus ratti
cttgaaagatgcaagagcat

SEQ ID NO: 16792 - DNA, 20 bp, Bacillus schlegellii
gggcggaagcctttgggtgg

SEQ ID NO: 16793 - DNA, 20 bp, Abiotrophia defectiva
tgcttgcactaggtcaaggt

SEQ ID NO: 16794 - DNA, 20 bp, Shigella boydii
aatcagcaagctgattcctg

SEQ ID NO: 16795 - DNA, 20 bp, Myroides odoratimimus
gatgcgaatctccaaagctt

SEQ ID NO: 16796 - DNA, 20 bp, Eubacterium moniliforme
tgctctttgggaagccctcg

SEQ ID NO: 16797 - DNA, 20 bp, Lactococcus raffinolactis
agccctaagtgacgcagcaa

SEQ ID NO: 16798 - DNA, 20 bp, Geobacillus thermoglucosidasius
actgcccggttacaagtccg

SEQ ID NO: 16799 - DNA, 20 bp, Salmonella paratyphi
aggtagctaaccttcgggag

SEQ ID NO: 16800 - DNA, 20 bp, Corynebacterium coyleae
ccagagatgctggtttccct

SEQ ID NO: 16801 - DNA, 30 bp, Burkholderia stabilis
agggtagccgtatcggagggtgcggttgga

SEQ ID NO: 16802 - DNA, 20 bp, Bacillus schlegellii
ttgggtggaagcctgtctct

SEQ ID NO: 16803 - DNA, 20 bp, Paenibacillus azotofixans
tgctcttgatcaacttagcg

SEQ ID NO: 16804 - DNA, 20 bp, Bacteroides stercoris
cccgcatgggatgattatta

SEQ ID NO: 16805 - DNA, 20 bp, Granulicatella adiacens
gagcgaccgggcttgcactg

SEQ ID NO: 16806 - DNA, 20 bp, Neisseria mucosa
ctgcggttggggatccaccc

SEQ ID NO: 16807 - DNA, 20 bp, Yersinia frederiksenii
tacgtgaagtgattgacgtt

SEQ ID NO: 16808 - DNA, 20 bp, Enterobacter amnigenus
tgttttcgggtgacgagcgg

SEQ ID NO: 16809 - DNA, 20 bp, Nocardia asteroides
aatacctaaagagagtggac

SEQ ID NO: 16810 - DNA, 20 bp, Bacteroides thetaiotaomicron
tagggtaagattggtattgg

SEQ ID NO: 16811 - DNA, 20 bp, Brevibacillus centrosporus
tagagtctactctcgcatga

SEQ ID NO: 16812 - DNA, 20 bp, Anaerococcus tetradius
gttagaagtgaaataatata

SEQ ID NO: 16813 - DNA, 20 bp, Finegoldia magna
aatcgtagaaacacatgttt

SEQ ID NO: 16814 - DNA, 20 bp, Streptococcus acidominimus
cttttgagcaggggagacag

SEQ ID NO: 16815 - DNA, 20 bp, Bacteroides thetaiotaomicron
aaacccataggccgtaaggc

SEQ ID NO: 16816 - DNA, 20 bp, Streptococcus macacae
ctctgttgttaaggaagcaa

SEQ ID NO: 16817 - DNA, 20 bp, Corynebacterium kutscheri
cctaaccacgtttgtggagg

SEQ ID NO: 16818 - DNA, 20 bp, Gemella morbillorum
agctaatcccgcatatcagc

SEQ ID NO: 16819 - DNA, 20 bp, Anaerococcus prevotii
agacagaagcctcggtggaa

SEQ ID NO: 16820 - DNA, 20 bp, Vibrio cholerae
taaggtattagcttaaccac

SEQ ID NO: 16821 - DNA, 20 bp, Paenibacillus macerans
cgggagacaggggacacagg

SEQ ID NO: 16822 - DNA, 20 bp, Paenibacillus lautus
taggttcttctctcgcatgg

SEQ ID NO: 16823 - DNA, 20 bp, Unknown Organism
  oligonucleotide from CDC group EO-2
gtgccacttctactacggaa

SEQ ID NO: 16824 - DNA, 30 bp, Actinomyces odontolyticus
tttgtgcggggggagtggtcgaaggtggga

SEQ ID NO: 16825 - DNA, 20 bp, Corynebacterium group ANF
tggtggaaaacgttttctag

SEQ ID NO: 16826 - DNA, 20 bp, Anaerococcus prevotii
cgaataataccctatgatat

SEQ ID NO: 16827 - DNA, 30 bp, Finegoldia magna
aagtcgaacgggatttagtagacagaagct

SEQ ID NO: 16828 - DNA, 30 bp, Eggerthella lenta
gatggatactaggtgtggggggctccgccc

SEQ ID NO: 16829 - DNA, 20 bp, Enterobacter gergoviae
aaggtagccagcctggggag

SEQ ID NO: 16830 - DNA, 20 bp, Geobacillus thermoglucosidasius
gaacggaagcttgcttctgt

SEQ ID NO: 16831 - DNA, 20 bp, Microbacterium hominis
tacacgcgcgcccgtcaagt

SEQ ID NO: 16832 - DNA, 20 bp, Finegoldia magna
aataagtcgaatgttaaaga

SEQ ID NO: 16833 - DNA, 20 bp, Prevotella denticola
aagttagggacgtgtcccta

SEQ ID NO: 16834 - DNA, 20 bp, Bacillus mycoides
catggcgcgaaattgaaagg

SEQ ID NO: 16835 - DNA, 20 bp, Corynebacterium coyleae
gcctctgcttgcagaggtac

SEQ ID NO: 16836 - DNA, 20 bp, Brevibacterium linens
gcagtcgaacgctgaagccc

SEQ ID NO: 16837 - DNA, 30 bp, Corynebacterium jeikeium
tcctttcgctagggaagaagccttttggtg

SEQ ID NO: 16838 - DNA, 20 bp, Bacteroides stercoris
cttgagtgcaacagaggtag

SEQ ID NO: 16839 - DNA, 20 bp, Paenibacillus lautus
atgggagaggaaagaaagac

SEQ ID NO: 16840 - DNA, 20 bp, Leuconostoc gelidum
gatatcaagctctaaaaggc

SEQ ID NO: 16841 - DNA, 20 bp, Bacteroides capilosus
tccaatggattgggtttctt

SEQ ID NO: 16842 - DNA, 20 bp, Haemophilus paraphrophilus
ttagaggtgttggatccatg

SEQ ID NO: 16843 - DNA, 20 bp, Brevibacillus brevis
ggttgggatcaacctccttc

SEQ ID NO: 16844 - DNA, 20 bp, Shigella boydii
tcagcgaatcagcaagctga

SEQ ID NO: 16845 - DNA, 20 bp, Vibrio alginolyticus
aatgccacggggaatacgtt

SEQ ID NO: 16846 - DNA, 20 bp, Neisseria meningitidis
aagcataccgggtaagcggg

SEQ ID NO: 16847 - DNA, 20 bp, Bacteroides capillosus
tatttgcaggtaccgtatga

SEQ ID NO: 16848 - DNA, 20 bp, Geobacillus thermoglucosidasius
gagcggaccgaacggaagct

SEQ ID NO: 16849 - DNA, 20 bp, Prevotella oralis
cctttttgcaggtaccgcat

SEQ ID NO: 16850 - DNA, 20 bp, Paenibacillus lautus
tttaagttgggtgtttaacc

SEQ ID NO: 16851 - DNA, 20 bp, Globicatella sanguinis
agagaaacccttcggggcaa

SEQ ID NO: 16852 - DNA, 20 bp, Prevotella oralis
tgtcggccttttttggtcgg

SEQ ID NO: 16853 - DNA, 20 bp, Empedobacter brevis
aggattaatactttataaca

SEQ ID NO: 16854 - DNA, 20 bp, Anaerobiospirillum succiniciproducens
ctttcagggggaggaaacac

SEQ ID NO: 16855 - DNA, 20 bp, Salmonella typhi
gacggtatcaggcagcagct

SEQ ID NO: 16856 - DNA, 20 bp, Prevotella loescheii
cccttcggggccgccgcgga

SEQ ID NO: 16857 - DNA, 20 bp, Eschericchia vulneris
tgagtacacggtccagtact

SEQ ID NO: 16858 - DNA, 20 bp, Eubacterium moniliforme
tggccatgtaagtcaggtgt

SEQ ID NO: 16859 - DNA, 20 bp, Vibrio hollisae
tcagactagagtgcgtcaga

SEQ ID NO: 16860 - DNA, 20 bp, Citrobacter farmeri
agaacttgtcagagatgagg

SEQ ID NO: 16861 - DNA, 20 bp, Campylobacter sputorum
agctttatattaataaagcg

SEQ ID NO: 16862 - DNA, 20 bp, Corynebacterium group F1
tctgccctgtacttcgggta

SEQ ID NO: 16863 - DNA, 30 bp, Globicatella sanguinis
catctcttgcatatcttagagataagagaa

SEQ ID NO: 16864 - DNA, 20 bp, Stenotrophomonas maltophilia
gacaaagagaagcaaccccg

SEQ ID NO: 16865 - DNA, 20 bp, Anaerobiospirillum succiniciproducens
gggaaacgataccgggaggg

SEQ ID NO: 16866 - DNA, 20 bp, Streptococcus criceti
tacctaggctgcgatacata

SEQ ID NO: 16867 - DNA, 20 bp, Oligella urethralis
ctacagatcccgccttggta

SEQ ID NO: 16868 - DNA, 20 bp, Gemella morbillorum
ggtgcaattgctatcgctac

SEQ ID NO: 16869 - DNA, 20 bp, Pseudomonas fluorescens
gaagtgagcttgctcacgga

SEQ ID NO: 16870 - DNA, 20 bp, Sporosarcina ureae
gcttccttcagttagcggcg

SEQ ID NO: 16871 - DNA, 20 bp, Paenibacillus lautus
gggtcgcacccaaaactgga

SEQ ID NO: 16872 - DNA, 20 bp, Anaerococcus tetradius
ataaagttagtcaatcgcat

SEQ ID NO: 16873 - DNA, 20 bp, Corynebacterium renale
gtccatgccgaaacggtggg

SEQ ID NO: 16874 - DNA, 20 bp, Eubacterium moniliforme
cgaaggtgagatcaatgact

SEQ ID NO: 16875 - DNA, 20 bp, Bacteroides thetaiotaomicron
atttcccgcatgggttttat

SEQ ID NO: 16876 - DNA, 20 bp, Capnocytophaga sp.
tgtggcatcacatttatatt

SEQ ID NO: 16877 - DNA, 20 bp, Vagococcus fluvialis
ccgcatgggagaataataaa

SEQ ID NO: 16878 - DNA, 20 bp, Brevibacterium casei
tacaatggctggacagagag

SEQ ID NO: 16879 - DNA, 30 bp, Streptococcus iniae
aatccaaagagttgcgaacgggtgagtaac

SEQ ID NO: 16880 - DNA, 20 bp, Bacteroides capillosus
gtccgcgaccgcaaggaacg

SEQ ID NO: 16881 - DNA, 20 bp, Bacteroides stercoris
ggagcgtaggcggggtatta

SEQ ID NO: 16882 - DNA, 20 bp, Alloiococcus otitis
cagtgcatgctggggaaatg

SEQ ID NO: 16883 - DNA, 20 bp, Sphingobacterium multivorum
gggactttaaacagactggc

SEQ ID NO: 16884 - DNA, 20 bp, Brevibacillus centrosporus
cgaagacggaaaggcggcgc

SEQ ID NO: 16885 - DNA, 20 bp, Anaerococcus tetradius
aagatatttagattccttcg

SEQ ID NO: 16886 - DNA, 30 bp, Bacteroides capillosus
aacggcccaccaaaccgacgatcagtaggg

SEQ ID NO: 16887 - DNA, 20 bp, Neisseria flavescens
cgctgacgagcatgctttac

SEQ ID NO: 16888 - DNA, 20 bp, Bacteroides capilosus
cggagagctcatgacagagg

SEQ ID NO: 16889 - DNA, 20 bp, Empedobacter brevis
tacttggcaacaagatgcga

SEQ ID NO: 16890 - DNA, 20 bp, Granulicatella adiacens
agcgaccgggcttgcactgg

SEQ ID NO: 16891 - DNA, 20 bp, Vibrio hollisae
catacgtactgaggtagaaa

SEQ ID NO: 16892 - DNA, 20 bp, Eubacterium moniliforme
attcattcgatgcaggatga

SEQ ID NO: 16893 - DNA, 20 bp, Capnocytophaga sp.
gtatataggtgtggcatcac

SEQ ID NO: 16894 - DNA, 20 bp, Leptotrichia buccalis
gtctttggcgaagctgtgct

SEQ ID NO: 16895 - DNA, 20 bp, Corynebacterium coyleae
acaccagatcggccccagag

SEQ ID NO: 16896 - DNA, 20 bp, Paenibacillus lautus
accctgggtcgcacccaaaa

SEQ ID NO: 16897 - DNA, 20 bp, Pantoea agglomerans
agcaggagcttggctccttg

SEQ ID NO: 16898 - DNA, 20 bp, Campylobacter jejuni
gtgctaatacatgcagtcga

SEQ ID NO: 16899 - DNA, 20 bp, Paenibacillus validus
gagcggccctttccttcggg

SEQ ID NO: 16900 - DNA, 20 bp, Suttonella indologenes
gaacgctggcgggcccaatg

SEQ ID NO: 16901 - DNA, 20 bp, Bacteroides ovatus
tacgaatatcgcatgatatt

SEQ ID NO: 16902 - DNA, 20 bp, Streptococcus vestibularis
taggtgacacatgtcattta

SEQ ID NO: 16903 - DNA, 20 bp, Eremococcus coleocola
aaagcactgttattagccaa

SEQ ID NO: 16904 - DNA, 20 bp, Clostridium clostridiiforme
gaagcggtttcgatgaagtt

SEQ ID NO: 16905 - DNA, 20 bp, Corynebacterium coyleae
acatacaccagatcggcccc

SEQ ID NO: 16906 - DNA, 20 bp, Myroides odoratimimus
agaaagagcttgcttttttg

SEQ ID NO: 16907 - DNA, 20 bp, Finegoldia magna
cggtttaataagtcgaatgt

SEQ ID NO: 16908 - DNA, 20 bp, Myroides odoratimimus
ggtttatcgatatggcatcg

SEQ ID NO: 16909 - DNA, 20 bp, Prevotella corporis
cacgcgtgggtttttgcagg

SEQ ID NO: 16910 - DNA, 20 bp, Bacteroides capillosus
acaacggaataacccggcga

SEQ ID NO: 16911 - DNA, 20 bp, Prevotella loescheii
gccccttgggtcggtgacca

SEQ ID NO: 16912 - DNA, 20 bp, Streptococcus parasanguinis
accgagcggaagagttgcga

SEQ ID NO: 16913 - DNA, 20 bp, Campylobacter curvus
ccgaaagttgcggtgtgctt

SEQ ID NO: 16914 - DNA, 20 bp, Alicyclobacillus acidocaldarius
gacccctcatctctgagggt

SEQ ID NO: 16915 - DNA, 20 bp, Actinomyces naeslundii
cctgtcccttgtgggtgggt

SEQ ID NO: 16916 - DNA, 20 bp, Capnocytophaga sp.
caaatcatccggcccttaca

SEQ ID NO: 16917 - DNA, 20 bp, Bacteroides capillosus
tccctatttgcaggtaccgt

SEQ ID NO: 16918 - DNA, 20 bp, Cedecea lapagei
tgttaggcctgcgcgacagc

SEQ ID NO: 16919 - DNA, 20 bp, Geobacillus thermoglucosidasius
gcgaatccccaaaaacccgc

SEQ ID NO: 16920 - DNA, 20 bp, Campylobacter curvus
caagggagcgtagctccttg

SEQ ID NO: 16921 - DNA, 20 bp, Myroides odoratimimus
agcttgaatagtatggaagt

SEQ ID NO: 16922 - DNA, 20 bp, Bacillus schlegellii
aagcctgtctcttagcggcg

SEQ ID NO: 16923 - DNA, 20 bp, Brevibacillus centrosporus
tgaggcgaagacggaaaggc

SEQ ID NO: 16924 - DNA, 20 bp, Bacillus laevolacticus
gaaacggtagctaagccgga

SEQ ID NO: 16925 - DNA, 20 bp, Propionibacterium propionicus
ctaacccattttttgggggg

SEQ ID NO: 16926 - DNA, 30 bp, Empedobacter brevis
ctaagtatcaactgacgctgatggacgaaa

SEQ ID NO: 16927 - DNA, 20 bp, Prevotella oralis
gcggggataaagttggggac

SEQ ID NO: 16928 - DNA, 20 bp, Anaerococcus tetradius
tcttcggaatgaaaataagc

SEQ ID NO: 16929 - DNA, 20 bp, Clostridium clostridiiforme
gcgaagcggtttcgatgaag

SEQ ID NO: 16930 - DNA, 20 bp, Anaerobiospirillum succiniciproducens
acactgacggtacccacaga

SEQ ID NO: 16931 - DNA, 20 bp, Actinomyces naeslundii
agcaggcctgtcccttgtgg

SEQ ID NO: 16932 - DNA, 20 bp, Citrobacter koseri
aggaaggtgctgtggttaat

SEQ ID NO: 16933 - DNA, 20 bp, Bacillus azotoformans
aggcttgagccaatcccata

SEQ ID NO: 16934 - DNA, 20 bp, Nocardia asteroides
agttaatacctaaagagagt

SEQ ID NO: 16935 - DNA, 20 bp, Vibrio vulnificus
ccactttgtggtcatgactg

SEQ ID NO: 16936 - DNA, 20 bp, Clostridium clostridiiforme
agccggaaggtgaaaagcag

SEQ ID NO: 16937 - DNA, 20 bp, Gemella morbillorum
aagtagaacgctaaggagag

SEQ ID NO: 16938 - DNA, 20 bp, Arcanobacterium pyogenes
gggctttttgttttggtgga

SEQ ID NO: 16939 - DNA, 20 bp, Helcococcus ovis
ccgttaggaggcagacgtcg

SEQ ID NO: 16940 - DNA, 20 bp, Bacteroides stercoris
atggaataactattaaagaa

SEQ ID NO: 16941 - DNA, 20 bp, Citrobacter freundii
agaagttagcagagatgcta

SEQ ID NO: 16942 - DNA, 20 bp, Bacillus coagulans
agtcgagcggacttgttaga

SEQ ID NO: 16943 - DNA, 20 bp, Brevibacterium epidermidis
accggatacgaccgtcggac

SEQ ID NO: 16944 - DNA, 20 bp, Moraxella atlantae
cttatgggtttctgctataa

SEQ ID NO: 16945 - DNA, 20 bp, Anaerococcus tetradius
gatgaaaaatattggattag

SEQ ID NO: 16946 - DNA, 30 bp, Streptococcus criceti
agtaggtagggtaaaggcctacctaggctg

SEQ ID NO: 16947 - DNA, 20 bp, Bifidobacterium adolescentis
acctaatactttgctgtttt

SEQ ID NO: 16948 - DNA, 30 bp, Geobacillus stearothermophilus
catgcaagtcgagcggaccggattggggct

SEQ ID NO: 16949 - DNA, 20 bp, Clostridium clostridiiforme
tcaagtcgtctgtcaaaagc

SEQ ID NO: 16950 - DNA, 20 bp, Bacteroides stercoris
ctggcgaccttgagtgcaac

SEQ ID NO: 16951 - DNA, 20 bp, Bacteroides thetaiotaomicron
ggccttgtacgcccgcccgt

SEQ ID NO: 16952 - DNA, 20 bp, Peptoniphilus asaccharolyticus
aaatttcgacagattccttc

SEQ ID NO: 16953 - DNA, 20 bp, Moellerella wisconsensis
tgatactaatactatcagcg

SEQ ID NO: 16954 - DNA, 20 bp, Propionibacterium propionicus
aaaccgctttcaattgtgac

SEQ ID NO: 16955 - DNA, 20 bp, Bacillus smithii
accggataacatcttccttc

SEQ ID NO: 16956 - DNA, 20 bp, Dermacoccus nishinomiyaensis
ggatatgaccgatctccgca

SEQ ID NO: 16957 - DNA, 20 bp, Leptotrichia buccalis
tttggcgaagctgtgcttgc

SEQ ID NO: 16958 - DNA, 20 bp, Empedobacter brevis
ttaatactttataacagatt

SEQ ID NO: 16959 - DNA, 20 bp, Anaerococcus tetradius
tttagattccttcgggatga

SEQ ID NO: 16960 - DNA, 20 bp, Actinomyces bovis
ttactaggagggagccgtgc

SEQ ID NO: 16961 - DNA, 20 bp, Dietzia maris
acgaagtcgtcaacaaggta

SEQ ID NO: 16962 - DNA, 20 bp, Anaerococcus prevotii
taatgcaaaactccaaagcc

SEQ ID NO: 16963 - DNA, 20 bp, Peptostreptococcus anaerobius
gttttgatgcttgcattgat

SEQ ID NO: 16964 - DNA, 20 bp, Bacillus laevolacticus
catggctcagggccgaacgc

SEQ ID NO: 16965 - DNA, 20 bp, Streptococcus macacae
taaaaggtgcagctgcaccc

SEQ ID NO: 16966 - DNA, 20 bp, Neisseria mucosa
cctgcggttggggatccacc

SEQ ID NO: 16967 - DNA, 20 bp, Bacillus schlegellii
ggcttgacatcccgccgacg

SEQ ID NO: 16968 - DNA, 30 bp, Streptococcus ratti
tttacttttgtacatcggtgacaggtggtg

SEQ ID NO: 16969 - DNA, 20 bp, Paenibacillus alvei
ttcctcgcatgagggagatg

SEQ ID NO: 16970 - DNA, 20 bp, Helcococcus kunzii
aacggaaaaaggaaagtagc

SEQ ID NO: 16971 - DNA, 20 bp, Streptococcus acidominimus
tcaaccatagtacgcttttg

SEQ ID NO: 16972 - DNA, 20 bp, Bacteroides merdae
acaatgtaagctctacagcg

SEQ ID NO: 16973 - DNA, 20 bp, Shewanella putrefaciens
tctttccagagatggcttgg

SEQ ID NO: 16974 - DNA, 20 bp, Pseudomonas oryzihabitans
ttgggaggaagggcttacag

SEQ ID NO: 16975 - DNA, 20 bp, Dolosicoccus paucivorans
tgttactcgtttgacggtat

SEQ ID NO: 16976 - DNA, 20 bp, Streptococcus infantarius
tgcgccgcatcatcccatct

SEQ ID NO: 16977 - DNA, 20 bp, Streptococcus acidominimus
  misc_feature (4)..(4): n is a, c, g, or t
cggntggatcacctccttca

SEQ ID NO: 16978 - DNA, 20 bp, Moellerella wisconsensis
gaaggcgttgatactaatac

SEQ ID NO: 16979 - DNA, 20 bp, Empedobacter brevis
cgggaatctgagaccggcgc

SEQ ID NO: 16980 - DNA, 20 bp, Kocuria varians
ggctgggactggcgatctgg

SEQ ID NO: 16981 - DNA, 20 bp, Streptococcus criceti
catgttaatgacttgaaagg

SEQ ID NO: 16982 - DNA, 20 bp, Finegoldia magna
taatgagagtggcgaacggg

SEQ ID NO: 16983 - DNA, 20 bp, Citrobacter farmeri
cttgtcagagatgaggtagt

SEQ ID NO: 16984 - DNA, 20 bp, Streptococcus macacae
tgctccacgagatcggtgag

SEQ ID NO: 16985 - DNA, 20 bp, Streptococcus iniae
gagtggaaaatccattaccg

SEQ ID NO: 16986 - DNA, 20 bp, Eubacterium moniliforme
ccgcataagaccacgaaacc

SEQ ID NO: 16987 - DNA, 20 bp, Oligella ureolytica
ctattaactatcaagctaga

SEQ ID NO: 16988 - DNA, 20 bp, Myroides odoratimimus
ctacgagtagggacttgacg

SEQ ID NO: 16989 - DNA, 20 bp, Fusobacterium necrogenes
caccaaggccatgataggta

SEQ ID NO: 16990 - DNA, 20 bp, Streptococcus acidominimus
agggcttctcttttgagcag

SEQ ID NO: 16991 - DNA, 20 bp, Providencia stuartii
gttaataccatcaacgattg

SEQ ID NO: 16992 - DNA, 20 bp, Stenotrophomonas maltophilia
ataaagccctgatcgttcag

SEQ ID NO: 16993 - DNA, 20 bp, Prevotella bivia
tggactaataccttatgtat

SEQ ID NO: 16994 - DNA, 20 bp, Eubacterium moniliforme
aacttttgtcctatgggacg

SEQ ID NO: 16995 - DNA, 20 bp, Gemella morbillorum
gtgcaattgctatcgctacc

SEQ ID NO: 16996 - DNA, 30 bp, Granulicatella adiacens
ccgggcttgcactggtcaatctagtggcga

SEQ ID NO: 16997 - DNA, 20 bp, Clostridium clostridiiforme
cgtctgtcaaaagccgaggc

SEQ ID NO: 16998 - DNA, 20 bp, Streptococcus macacae
ttagagggggataaggattg

SEQ ID NO: 16999 - DNA, 20 bp, Providencia alcalifaciens
gcatcaacgccttcctccca

SEQ ID NO: 17000 - DNA, 20 bp, Listeria seeligeri
acagatgggccgcggtgcat

SEQ ID NO: 17001 - DNA, 20 bp, Finegoldia magna
atgtccggggactctaagta

SEQ ID NO: 17002 - DNA, 30 bp, Clostridium clostridiiforme
ggtaccctgcgaggaagctccggctaacta

SEQ ID NO: 17003 - DNA, 20 bp, Sporosarcina ureae
tctcttctggcatgagggaa

SEQ ID NO: 17004 - DNA, 20 bp, Streptococcus macacae
tagagggattgaaaggtaca

SEQ ID NO: 17005 - DNA, 30 bp, Gemella morbillorum
ggtaccctgcctggtagcggggtataacta

SEQ ID NO: 17006 - DNA, 20 bp, Campylobacter concisus
agggtgagcgaatcgctatc

SEQ ID NO: 17007 - DNA, 20 bp, Brevibacillus centrosporus
tctactctcgcatgaggcga

SEQ ID NO: 17008 - DNA, 20 bp, Clostridium clostridiiforme
agggacacctgcgggaaacc

SEQ ID NO: 17009 - DNA, 20 bp, Campylobacter curvus
actttgttcgtctgcgaagt

SEQ ID NO: 17010 - DNA, 20 bp, Myroides odoratus
gaaggagcttgcttttttga

SEQ ID NO: 17011 - DNA, 20 bp, Veillonella sp.
tacgatctaatcctcggcat

SEQ ID NO: 17012 - DNA, 30 bp, Oligella ureolytica
gacatgcctggaagctttaagagattaaag

SEQ ID NO: 17013 - DNA, 20 bp, Clostridium subterminale
ataccgcataatgtatgaga

SEQ ID NO: 17014 - DNA, 20 bp, Myroides odoratimimus
acgagtagggacttgacggt

SEQ ID NO: 17015 - DNA, 20 bp, Stenotrophomonas maltophilia
cccttatcgatatgacggta

SEQ ID NO: 17016 - DNA, 20 bp, Pediococcus dextrinicus
atcaaggtgcttgcaccaag

SEQ ID NO: 17017 - DNA, 20 bp, Neisseria subflava
gcgcaaccccttgtacatta

SEQ ID NO: 17018 - DNA, 30 bp, Porphyromonas endodontalis
tagagaggagacgaggtatgcggaatgtgt

SEQ ID NO: 17019 - DNA, 20 bp, Streptococcus macacae
tctaagcctttagagggatt

SEQ ID NO: 17020 - DNA, 20 bp, Eubacterium moniliforme
atatagagatatatgttccc

SEQ ID NO: 17021 - DNA, 20 bp, Bacteroides stercoris
ggcttaaattgcaactgact

SEQ ID NO: 17022 - DNA, 20 bp, Brevibacillus brevis
tggagcttgctctagggaat

SEQ ID NO: 17023 - DNA, 20 bp, Weeksella virosa
acctattcacgagctggata

SEQ ID NO: 17024 - DNA, 20 bp, Bacteroides merdae
aggggaataaagtggaggac

SEQ ID NO: 17025 - DNA, 20 bp, Vibrio alginolyticus
agttaaccttcggggggacg

SEQ ID NO: 17026 - DNA, 20 bp, Clostridium clostridiiforme
tgtcgggggacaaagtcctt

SEQ ID NO: 17027 - DNA, 20 bp, Streptococcus macacae
aataccgcatgacagctttt

SEQ ID NO: 17028 - DNA, 20 bp, Vibrio harveyi
tgcgtcgagttccggatcgg

SEQ ID NO: 17029 - DNA, 20 bp, Dolosicoccus paucivorans
gagaagaacagcgagtagag

SEQ ID NO: 17030 - DNA, 20 bp, Streptococcus iniae
aaaaggagcaaaagcttcac

SEQ ID NO: 17031 - DNA, 20 bp, Vibrio harveyi
actccggaagttcggaatcg

SEQ ID NO: 17032 - DNA, 30 bp, Empedobacter brevis
taagattagttagttggagaggtaacggct

SEQ ID NO: 17033 - DNA, 20 bp, Propionibacterium propionicus
atatgccggaagcgttcaga

SEQ ID NO: 17034 - DNA, 20 bp, Empedobacter brevis
ttctttcgggaatctgagac

SEQ ID NO: 17035 - DNA, 20 bp, Actinomyces radingae
tgtgggaaaggggctttttt

SEQ ID NO: 17036 - DNA, 20 bp, Corynebacterium confusum
ggtcgaaggggggattggcg

SEQ ID NO: 17037 - DNA, 20 bp, Peptoniphilus indolicus
gaaatcgtagtgacacatgt

SEQ ID NO: 17038 - DNA, 20 bp, Bacteroides capillosus
cctatgcaggcatctaacta

SEQ ID NO: 17039 - DNA, 20 bp, Micromonas micros
tttgtggaaatcctttcggg

SEQ ID NO: 17040 - DNA, 20 bp, Clostridium clostridiiforme
cgaccctttcgcaaggaagg

SEQ ID NO: 17041 - DNA, 20 bp, Bacteroides distasonis
gggacgtgtcctattttgta

SEQ ID NO: 17042 - DNA, 20 bp, Corynebacterium pilosum
ttctggcctggtcttccgga

SEQ ID NO: 17043 - DNA, 20 bp, Myroides odoratimimus
ctaggacactgccattgata

SEQ ID NO: 17044 - DNA, 20 bp, Streptococcus infantarius
gtgcgccgcatcatcccatc

SEQ ID NO: 17045 - DNA, 20 bp, Pediococcus dextrinicus
gtgcttgcaccaaggagatt

SEQ ID NO: 17046 - DNA, 20 bp, Alloiococcus otitis
ctggggaaatgaaaggtggc

SEQ ID NO: 17047 - DNA, 20 bp, Clostridium limosum
acatcatttcaatgcatgtt

SEQ ID NO: 17048 - DNA, 20 bp, Bacteroides stercoris
gagcgcaacccttgcgggta

SEQ ID NO: 17049 - DNA, 20 bp, Bacteroides stercoris
gttccatcaggttatgctgg

SEQ ID NO: 17050 - DNA, 20 bp, Alloiococcus otitis
gctaccttcagagatgaagg

SEQ ID NO: 17051 - DNA, 20 bp, Finegoldia magna
tagtaaacagaagcctcggt

SEQ ID NO: 17052 - DNA, 20 bp, Paenibacillus larvae
tctgaccggtttagagacag

SEQ ID NO: 17053 - DNA, 20 bp, Helcococcus ovis
agctaaccgttaggaggcag

SEQ ID NO: 17054 - DNA, 20 bp, Weissella paramesenteroides
gtctttaactgatactgacg

SEQ ID NO: 17055 - DNA, 20 bp, Bacteroides stercoris
attaataccggatggcatag

SEQ ID NO: 17056 - DNA, 20 bp, Campylobacter curvus
gctttaggtgggtcaaggga

SEQ ID NO: 17057 - DNA, 20 bp, Corynebacterium group ANF
ctgtggtggaaaacgttttc

SEQ ID NO: 17058 - DNA, 20 bp, Microbacterium hominis
gtacacgcgcgcccgtcaag

SEQ ID NO: 17059 - DNA, 20 bp, Actinomyces naeslundii
gaaagatgcgcctttgggtg

SEQ ID NO: 17060 - DNA, 20 bp, Eubacterium moniliforme
cttttgtcctatgggacgaa

SEQ ID NO: 17061 - DNA, 20 bp, Myroides odoratimimus
cctacgagtagggacttgac

SEQ ID NO: 17062 - DNA, 20 bp, Geobacillus thermoglucosidasius
ccgaacggaagcttgcttct

SEQ ID NO: 17063 - DNA, 30 bp, Eremococcus coleocola
acggtcggaaacgatcgctaataccgcata

SEQ ID NO: 17064 - DNA, 20 bp, Prevotella melaninogenica
gtccatcaggttaagctggg

SEQ ID NO: 17065 - DNA, 20 bp, Paenibacillus lautus
agaggaaagaaagacggagc

SEQ ID NO: 17066 - DNA, 20 bp, Corynebacterium pilosum
caattgccgaccggttagtt

SEQ ID NO: 17067 - DNA, 20 bp, Bacteroides capillosus
gcatctaactaggattaaag

SEQ ID NO: 17068 - DNA, 30 bp, Corynebacterium auris
acaatggtcggtacagcgcgtgtgcgatac

SEQ ID NO: 17069 - DNA, 20 bp, Campylobacter curvus
taaataatatatagggtttc

SEQ ID NO: 17070 - DNA, 20 bp, Leptotrichia buccalis
gccaagcgaacctgcaaagc

SEQ ID NO: 17071 - DNA, 30 bp, Unknown Organism
  oligonucleotide from CDC group EF-4B
cgggcgcagacggttacttaagtcagatgt

SEQ ID NO: 17072 - DNA, 30 bp, Peptostreptococcus anaerobius
attgatgaaagatgagcggcggacgggtga

SEQ ID NO: 17073 - DNA, 20 bp, Prevotella corporis
agaggagcaagctctgtctg

SEQ ID NO: 17074 - DNA, 30 bp, Bacteroides stercoris
agtgccatagcgagcgcaacccttgcgggt

SEQ ID NO: 17075 - DNA, 20 bp, Bacillus schlegellii
tgggtggggcgacccatccg

SEQ ID NO: 17076 - DNA, 20 bp, Bacteroides merdae
cgtgccgtgtaggtgtcggc

SEQ ID NO: 17077 - DNA, 20 bp, Gemella morbillorum
gttgcgcacgggtgagcacg

SEQ ID NO: 17078 - DNA, 20 bp, Bacillus licheniformis
ctcggggaaccccggggtta

SEQ ID NO: 17079 - DNA, 20 bp, Capnocytophaga sp.
tttgcaggggaagaataagg

SEQ ID NO: 17080 - DNA, 20 bp, Citrobacter farmeri
acttgtcagagatgaggtag

SEQ ID NO: 17081 - DNA, 20 bp, Bacillus azotoformans
gaggcttgagccaatcccat

SEQ ID NO: 17082 - DNA, 20 bp, Pasteurella multocida
taaatagatggcatcattga

SEQ ID NO: 17083 - DNA, 20 bp, Neisseria mucosa
cggttggggatccaccctcc

SEQ ID NO: 17084 - DNA, 20 bp, Leptotrichia buccalis
aaaacctggtgttgtcagac

SEQ ID NO: 17085 - DNA, 20 bp, Yersinia frederiksenii
gaagtcgtaccaaggtaacc

SEQ ID NO: 17086 - DNA, 20 bp, Eremococcus coleocola
ggctagggattgacggtaac

SEQ ID NO: 17087 - DNA, 20 bp, Bacteroides stercoris
ggggcagcatcatcaaagct

SEQ ID NO: 17088 - DNA, 20 bp, Bacteroides thetaiotaomicron
ttcccgcatgggttttatat

SEQ ID NO: 17089 - DNA, 20 bp, Arcanobacterium haemolyticum
aatactagatattctgctct

SEQ ID NO: 17090 - DNA, 20 bp, Leuconostoc fallax
gataatattgttctcttcgg

SEQ ID NO: 17091 - DNA, 20 bp, Achromobacter xylosoxidans
gtagcttaataccggcatac

SEQ ID NO: 17092 - DNA, 20 bp, Actinomyces radingae
ggatctgcgtggcctttgtg

SEQ ID NO: 17093 - DNA, 20 bp, Propionibacterium propionicus
ggaaagattttttttggttg

SEQ ID NO: 17094 - DNA, 20 bp, Granulicatella elegans
ggttctagagtcgcatgacc

SEQ ID NO: 17095 - DNA, 20 bp, Corynebacterium group ANF
gctccactttgtgtggtgtg

SEQ ID NO: 17096 - DNA, 20 bp, Gemella morbillorum
agctagatgttgcatgacat

SEQ ID NO: 17097 - DNA, 20 bp, Providencia stuartii
gagcagagatgctgaagtgc

SEQ ID NO: 17098 - DNA, 20 bp, Bacteroides uniformis
agtgcgtaaccgcaggagcg

SEQ ID NO: 17099 - DNA, 20 bp, Unknown Organism
  oligonucleotide from CDC group EO-2
gaatgtgccacttctactac

SEQ ID NO: 17100 - DNA, 20 bp, Bacillus coagulans
gagcggacttgttagaagct

SEQ ID NO: 17101 - DNA, 20 bp, Paenibacillus alvei
ttgacatctgaatgcaaact

SEQ ID NO: 17102 - DNA, 20 bp, Bacteroides stercoris
aacggttcttttcttcggac

SEQ ID NO: 17103 - DNA, 20 bp, Leuconostoc pseudomesenteroides
tacgaagttaaaaggcgctt

SEQ ID NO: 17104 - DNA, 20 bp, Campylobacter concisus
cagggagccgaccggaaggt

SEQ ID NO: 17105 - DNA, 20 bp, Anaerococcus tetradius
tgaaccttgtattgatttct

SEQ ID NO: 17106 - DNA, 20 bp, Vagococcus fluvialis
catgggagaataataaaaga

SEQ ID NO: 17107 - DNA, 20 bp, Bacteroides merdae
gcagattacgaggtgctgca

SEQ ID NO: 17108 - DNA, 20 bp, Paenibacillus validus
cctttccttcgggatagcgt

SEQ ID NO: 17109 - DNA, 20 bp, Prevotella bivia
gttggactaataccttatgt

SEQ ID NO: 17110 - DNA, 20 bp, Peptostreptococcus anaerobius
gtctgatttgatgcttgcat

SEQ ID NO: 17111 - DNA, 30 bp, Leuconostoc carnosum
cctgacggtaccataccagaaagggacggc

SEQ ID NO: 17112 - DNA, 20 bp, Finegoldia magna
atgagacatccatacaggtg

SEQ ID NO: 17113 - DNA, 20 bp, Collinsella aerofaciens
gtcaaggggggaggcgccga

SEQ ID NO: 17114 - DNA, 20 bp, Clostridium clostridiiforme
ttatgttgattggaacattc

SEQ ID NO: 17115 - DNA, 20 bp, Bacillus schlegellii
gtggggcgacccatccgtgc

SEQ ID NO: 17116 - DNA, 20 bp, Dolosicoccus paucivorans
gcatgtttcattgacaaaga

SEQ ID NO: 17117 - DNA, 20 bp, Streptococcus urinalis
gttaggaacttaaaaggagc

SEQ ID NO: 17118 - DNA, 30 bp, Streptococcus criceti
agagtggaaagttactcaagtgacggtatc

SEQ ID NO: 17119 - DNA, 30 bp, Pediococcus dextrinicus
gtaagggagctagccgtctaaggtgggaca

SEQ ID NO: 17120 - DNA, 30 bp, Sphingobacterium multivorum
atcacacgtgctacaatggatggtacagcg

SEQ ID NO: 17121 - DNA, 20 bp, Dolosicoccus paucivorans
tggtatcgctaaaggatggt

SEQ ID NO: 17122 - DNA, 20 bp, Bacillus coagulans
agcggatgttaaaagacggt

SEQ ID NO: 17123 - DNA, 20 bp, Providencia alcalifaciens
tcaatcgttgatgatattag

SEQ ID NO: 17124 - DNA, 20 bp, Bacteroides stercoris
gagctggaaacagttctttc

SEQ ID NO: 17125 - DNA, 20 bp, Haemophilus influenzae
tgcgggaccttcaggccaca

SEQ ID NO: 17126 - DNA, 20 bp, Anaerococcus prevotii
gatataatgcaaaactccaa

SEQ ID NO: 17127 - DNA, 20 bp, Paenibacillus lautus
aggaaagaaagacggagcaa

SEQ ID NO: 17128 - DNA, 20 bp, Unknown Organism
  oligonucleotide from CDC group EO-2
aacgcgtgggaatgtgccac

SEQ ID NO: 17129 - DNA, 20 bp, Finegoldia magna
atataatgcaaaactcgaaa

SEQ ID NO: 17130 - DNA, 20 bp, Citrobacter amalonaticus
tggttaataaccattttcat

SEQ ID NO: 17131 - DNA, 20 bp, Anaerococcus prevotii
tctttaagagacatccatac

SEQ ID NO: 17132 - DNA, 20 bp, Streptococcus macacae
gggtgtaagagcggaaagtt

SEQ ID NO: 17133 - DNA, 20 bp, Enterobacter amnigenus
cacagagagcttgttttcgg

SEQ ID NO: 17134 - DNA, 20 bp, Staphylococcus schleiferi
cggaaagtgccggtggatca

SEQ ID NO: 17135 - DNA, 20 bp, Leptotrichia buccalis
agtctttggcgaagctgtgc

SEQ ID NO: 17136 - DNA, 20 bp, Citrobacter freundii
gaagtccgtaaaccaagggt

SEQ ID NO: 17137 - DNA, 20 bp, Bacteroides merdae
acactccttctagcaatagc

SEQ ID NO: 17138 - DNA, 30 bp, Arcanobacterium haemolyticum
taatacgtgagtaacctgcccctttctctt

SEQ ID NO: 17139 - DNA, 20 bp, Providencia alcalifaciens
aatccgcaataatctctaag

SEQ ID NO: 17140 - DNA, 20 bp, Campylobacter concisus
gagctgcgaaggtgggatcg

SEQ ID NO: 17141 - DNA, 20 bp, Streptococcus constellatus
gaccgcacaggatgcccgta

SEQ ID NO: 17142 - DNA, 20 bp, Streptococcus ratti
agttttacttttgtacatcg

SEQ ID NO: 17143 - DNA, 20 bp, Streptococcus criceti
gccgctaaggtgggacggat

SEQ ID NO: 17144 - DNA, 20 bp, Vibrio vulnificus
tccccgggccttgacacacc

SEQ ID NO: 17145 - DNA, 20 bp, Clostridium clostridiiforme
ttgacatcccattgaaaatc

SEQ ID NO: 17146 - DNA, 20 bp, Leuconostoc gelidum
ttctggaaacagatgctaat

SEQ ID NO: 17147 - DNA, 20 bp, Eschericchia vulneris
cacggtccagtactcctact

SEQ ID NO: 17148 - DNA, 20 bp, Staphylococcus aureus
gactttctggctgaactgac

SEQ ID NO: 17149 - DNA, 20 bp, Finegoldia magna
acagtaccatagaagaaagc

SEQ ID NO: 17150 - DNA, 20 bp, Prevotella oralis
aagccgggcactctgtgaat

SEQ ID NO: 17151 - DNA, 20 bp, Bacteroides stercoris
ttcttttcttcggacagttg

SEQ ID NO: 17152 - DNA, 20 bp, Prevotella melaninogenica
tgaacgctagagctacaggc

SEQ ID NO: 17153 - DNA, 20 bp, Vibrio hollisae
tactgaggtagaaagtgggg

SEQ ID NO: 17154 - DNA, 20 bp, Dolosigranulum pigrum
taacaaggtagccgttcgga

SEQ ID NO: 17155 - DNA, 20 bp, Corynebacterium ulcerans
ctcaggacgatacgctggcg

SEQ ID NO: 17156 - DNA, 20 bp, Eikenella corrodens
aaggaaaccgtaggggaacg

SEQ ID NO: 17157 - DNA, 20 bp, Streptococcus macacae
tggaaagttctccaattgac

SEQ ID NO: 17158 - DNA, 20 bp, Sporosarcina ureae
tggggtactccgggaacccg

SEQ ID NO: 17159 - DNA, 20 bp, Eremococcus coleocola
caatcatcgcctgatggttg

SEQ ID NO: 17160 - DNA, 20 bp, Streptococcus criceti
tgcaatggcaccactatcag

SEQ ID NO: 17161 - DNA, 20 bp, Streptococcus macacae
tgatttcacgggagcttgct

SEQ ID NO: 17162 - DNA, 20 bp, Bacillus megaterium
caaggtagccgatcggaagg

SEQ ID NO: 17163 - DNA, 20 bp, Streptococcus sanguinis
actgtgaccggatcttacca

SEQ ID NO: 17164 - DNA, 20 bp, Paenibacillus azotofixans
gtcgagcggagttgtagagg

SEQ ID NO: 17165 - DNA, 20 bp, Anaerococcus prevotii
agaaacacatgtttcaacgg

SEQ ID NO: 17166 - DNA, 20 bp, Bacteroides stercoris
tgagtgcaacagaggtaggc

SEQ ID NO: 17167 - DNA, 20 bp, Vibrio vulnificus
ggaggacgccaccactttgg

SEQ ID NO: 17168 - DNA, 20 bp, Streptococcus macacae
ggcttaaccaatgtcagcta

SEQ ID NO: 17169 - DNA, 20 bp, Serratia rubidaea
tcttaatacggcattacatt

SEQ ID NO: 17170 - DNA, 20 bp, Corynebacterium argentoratense
tcctttagtgtgtgatggtg

SEQ ID NO: 17171 - DNA, 20 bp, Pseudomonas mendocina
gcccccccgacgtgctggta

SEQ ID NO: 17172 - DNA, 20 bp, Pediococcus dextrinicus
atgatcaaggtgcttgcacc

SEQ ID NO: 17173 - DNA, 20 bp, Myroides odoratimimus
agagcttgaatagtatggaa

SEQ ID NO: 17174 - DNA, 20 bp, Suttonella indologenes
tgctgcggacctagtggcgg

SEQ ID NO: 17175 - DNA, 20 bp, Bacillus laevolacticus
gatcatggctcagggccgaa

SEQ ID NO: 17176 - DNA, 20 bp, Stenotrophomonas maltophilia
aactactggaaacttacgct

SEQ ID NO: 17177 - DNA, 20 bp, Anaerococcus prevotii
tcttattgcttcggcagaac

SEQ ID NO: 17178 - DNA, 20 bp, Leptotrichia buccalis
aagtctttggcgaagctgtg

SEQ ID NO: 17179 - DNA, 20 bp, Streptococcus sanguinis
ggacggctaactccggtgcc

SEQ ID NO: 17180 - DNA, 30 bp, Vibrio harveyi
gtagtgggctgcataagaagtaggtagtta

SEQ ID NO: 17181 - DNA, 20 bp, Bifidobacterium adolescentis
aacctaatactttgctgttt

SEQ ID NO: 17182 - DNA, 20 bp, Leuconostoc lactis
gacagaatgactagggtgaa

SEQ ID NO: 17183 - DNA, 20 bp, Bacteroides capillosus
cgcctacggaggtgctgcat

SEQ ID NO: 17184 - DNA, 20 bp, Corynebacterium group F1
cgacacgggttgagtaacac

SEQ ID NO: 17185 - DNA, 20 bp, Prevotella disiens
gtgtaatgttttgcatgtac

SEQ ID NO: 17186 - DNA, 20 bp, Prevotella melaninogenica
aatgaacgctagagctacag

SEQ ID NO: 17187 - DNA, 20 bp, Haemophilus haemolyticus
cagagggtggcgatgccgcg

SEQ ID NO: 17188 - DNA, 20 bp, Brevibacillus centrosporus
gttaatcccgaatattttct

SEQ ID NO: 17189 - DNA, 20 bp, Vibrio hollisae
aattctggagagattcagaa

SEQ ID NO: 17190 - DNA, 20 bp, Corynebacterium coyleae
tacaccagatcggccccaga

SEQ ID NO: 17191 - DNA, 20 bp, Pseudomonas fluorescens
gagcttgctcacggatttag

SEQ ID NO: 17192 - DNA, 20 bp, Dolosicoccus paucivorans
tcgtttgacggtatctcacc

SEQ ID NO: 17193 - DNA, 20 bp, Propionibacterium acnes
gtcgtacaagataaaagtac

SEQ ID NO: 17194 - DNA, 20 bp, Gemella morbillorum
ctaaggagagcttcttctct

SEQ ID NO: 17195 - DNA, 20 bp, Suttonella indologenes
cagcttgctgcggacctagt

SEQ ID NO: 17196 - DNA, 20 bp, Stenotrophomonas maltophilia
ggctaatacccttatcgata

SEQ ID NO: 17197 - DNA, 20 bp, Shewanella algae
tggtagagatgcctcagtgc

SEQ ID NO: 17198 - DNA, 20 bp, Shewanella algae
atcctggtagagatgcctca

SEQ ID NO: 17199 - DNA, 20 bp, Bacteroides capilosus
cttttatcagggacgaaata

SEQ ID NO: 17200 - DNA, 20 bp, Bacillus azotoformans
cgtgctacaatggatggaca

SEQ ID NO: 17201 - DNA, 30 bp, Leuconostoc fallax
gttgcgaaccggcgacggtaagctaatctc

SEQ ID NO: 17202 - DNA, 20 bp, Streptococcus criceti
tggaaagttactcaagtgac

SEQ ID NO: 17203 - DNA, 20 bp, Moellerella wisconsensis
ctatcagcgattgacgttac

SEQ ID NO: 17204 - DNA, 20 bp, Enterobacter cancerogenus
tgcggttggtatcacctcct

SEQ ID NO: 17205 - DNA, 20 bp, Gemella morbillorum
gctaatcccgcatatcagct

SEQ ID NO: 17206 - DNA, 20 bp, Paenibacillus azotofixans
agataggcgcggccttcggg

SEQ ID NO: 17207 - DNA, 20 bp, Paenibacillus azotofixans
agagataggcgcggccttcg

SEQ ID NO: 17208 - DNA, 20 bp, Eubacterium moniliforme
gtgcgtaggtggccatgtaa

SEQ ID NO: 17209 - DNA, 20 bp, Eremococcus coleocola
acccctagtagtaactggct

SEQ ID NO: 17210 - DNA, 20 bp, Porphyromonas gingivalis
atcggtagttactaacagtt

SEQ ID NO: 17211 - DNA, 20 bp, Clostridium clostridiiforme
ccggttgctaccagataaag

SEQ ID NO: 17212 - DNA, 20 bp, Streptococcus macacae
gcagctgcacccctatcaga

SEQ ID NO: 17213 - DNA, 20 bp, Microbacterium hominis
acgcgcgcccgtcaagtcat

SEQ ID NO: 17214 - DNA, 20 bp, Neisseria flavescens
cagattgaacgctgacgagc

SEQ ID NO: 17215 - DNA, 20 bp, Myroides odoratimimus
ttgataataaagatttatcg

SEQ ID NO: 17216 - DNA, 20 bp, Escherichia fergusonii
gggatcagcttgctgattcg

SEQ ID NO: 17217 - DNA, 20 bp, Bacteroides capillosus
ccttacaacggaataacccg

SEQ ID NO: 17218 - DNA, 20 bp, Campylobacter jejuni
gcagtcgagcgaacagataa

SEQ ID NO: 17219 - DNA, 20 bp, Shigella boydii
agcgaatcagcaagctgatt

SEQ ID NO: 17220 - DNA, 20 bp, Helcococcus kunzii
tttttcagtcgatttcttcg

SEQ ID NO: 17221 - DNA, 20 bp, Kocuria varians
ccgtcgaaggctgggactgg

SEQ ID NO: 17222 - DNA, 20 bp, Campylobacter curvus
aatacctacggcgcaaccga

SEQ ID NO: 17223 - DNA, 20 bp, Streptococcus sanguinis
tgatattgaatatcgcatga

SEQ ID NO: 17224 - DNA, 20 bp, Neisseria mucosa
tggggatccaccctcccttc

SEQ ID NO: 17225 - DNA, 20 bp, Bacteroides stercoris
gcatagttttcccgcatggg

SEQ ID NO: 17226 - DNA, 20 bp, Brevibacterium linens
atgcagtcgaacgctgaagc

SEQ ID NO: 17227 - DNA, 20 bp, Unknown Organism
  oligonucleotide from CDC group EO-2
gaggcgagggacttcggttc

SEQ ID NO: 17228 - DNA, 20 bp, Bacillus fusiformis
ataatctcttttgcttcatg

SEQ ID NO: 17229 - DNA, 20 bp, Bacteroides thetaiotaomicron
ccgcatgggttttatattaa

SEQ ID NO: 17230 - DNA, 20 bp, Clostridium clostridiiforme
acgatgtatgctgggtgtgg

SEQ ID NO: 17231 - DNA, 20 bp, Clostridium subterminale
tttgtaccaaaggagcaatc

SEQ ID NO: 17232 - DNA, 20 bp, Prevotella melaninogenica
ccgtcaagccatgaaagcgc

SEQ ID NO: 17233 - DNA, 20 bp, Enterococcus durans
gccgatcggaaggtgcggct

SEQ ID NO: 17234 - DNA, 20 bp, Anaerococcus prevotii
tagacagaagcctcggtgga

SEQ ID NO: 17235 - DNA, 20 bp, Streptococcus anginosus
cgccggcggcgggcctaata

SEQ ID NO: 17236 - DNA, 20 bp, Capnocytophaga sp.
gcatcacatttatattaaag

SEQ ID NO: 17237 - DNA, 20 bp, Corynebacterium group ANF
ggagctaatccttttaaagc

SEQ ID NO: 17238 - DNA, 20 bp, Streptococcus equi
accccgaagtcggtgaggta

SEQ ID NO: 17239 - DNA, 20 bp, Streptococcus acidominimus
gatagggcttctcttttgag

SEQ ID NO: 17240 - DNA, 20 bp, Aerococcus viridans
tggtacagcgagtcgcgaac

SEQ ID NO: 17241 - DNA, 20 bp, Finegoldia magna
agtcggggactctaagtaga

SEQ ID NO: 17242 - DNA, 20 bp, Leuconostoc carnosum
gaatgaccttagcctgacgg

SEQ ID NO: 17243 - DNA, 20 bp, Streptococcus peroris
atcccgatgccatttctaga

SEQ ID NO: 17244 - DNA, 20 bp, Leptotrichia buccalis
acgcatgtcaggctgatgaa

SEQ ID NO: 17245 - DNA, 20 bp, Streptococcus acidominimus
tgcatggtaaacatttaaaa

SEQ ID NO: 17246 - DNA, 20 bp, Lactococcus raffinolactis
caattggtacactgagagat

SEQ ID NO: 17247 - DNA, 20 bp, Bacteroides capillosus
gtcaggtgtgaaaaccacgg

SEQ ID NO: 17248 - DNA, 20 bp, Anaerococcus tetradius
cttcgggatgaaaaatattg

SEQ ID NO: 17249 - DNA, 20 bp, Empedobacter brevis
aaggcaggtcactaagtatc

SEQ ID NO: 17250 - DNA, 20 bp, Finegoldia magna
tgataaacttgagtagtgga

SEQ ID NO: 17251 - DNA, 20 bp, Gemella morbillorum
gagttgcgcacgggtgagca

SEQ ID NO: 17252 - DNA, 20 bp, Clostridium clostridiiforme
atccgagtcgggtgctctca

SEQ ID NO: 17253 - DNA, 20 bp, Ralstonia gilardii
aagcgggggcccgtaaggcc

SEQ ID NO: 17254 - DNA, 20 bp, Anaerococcus tetradius
atgaaaataagcggattagt

SEQ ID NO: 17255 - DNA, 20 bp, Bacillus schlegellii
gccttcgggcggaagcccgt

SEQ ID NO: 17256 - DNA, 20 bp, Achromobacter xylosoxidans
aatacctcgcgaaactgacg

SEQ ID NO: 17257 - DNA, 20 bp, Leptotrichia buccalis
gctgcaaggcggtaacgcca

SEQ ID NO: 17258 - DNA, 20 bp, Peptoniphilus asaccharolyticus
ttggaaggattagcggcgga

SEQ ID NO: 17259 - DNA, 20 bp, Moraxella atlantae
tatgggtttctgctataaga

SEQ ID NO: 17260 - DNA, 20 bp, Streptococcus macacae
cgcactgatttcacgggagc

SEQ ID NO: 17261 - DNA, 20 bp, Campylobacter curvus
atatattgtttatttatcaa

SEQ ID NO: 17262 - DNA, 20 bp, Bacteroides capillosus
tctagagatagtgaggccct

SEQ ID NO: 17263 - DNA, 20 bp, Myroides odoratimimus
tttatcgatatggcatcgta

SEQ ID NO: 17264 - DNA, 20 bp, Rothia dentocariosa
cagcgtctcatcctgaggcc

SEQ ID NO: 17265 - DNA, 20 bp, Streptococcus macacae
atgataggagcttaaaaggt

SEQ ID NO: 17266 - DNA, 20 bp, Oligella ureolytica
gaactgcactattaactatc

SEQ ID NO: 17267 - DNA, 20 bp, Finegoldia magna
gtggaagattactaatgaga

SEQ ID NO: 17268 - DNA, 20 bp, Anaerococcus tetradius
ttagattccttcgggatgaa

SEQ ID NO: 17269 - DNA, 30 bp, Bacteroides merdae
aatacagattgatggcgaccggcgcacggg

SEQ ID NO: 17270 - DNA, 20 bp, Gemella morbillorum
tgagttgcgcacgggtgagc

SEQ ID NO: 17271 - DNA, 20 bp, Haemophilus influenzae
gttgatgtgataatagtaca

SEQ ID NO: 17272 - DNA, 20 bp, Bacillus laevolacticus
cagggccgaacgctggccgg

SEQ ID NO: 17273 - DNA, 20 bp, Lactococcus raffinolactis
tttgaaagtaccaattggta

SEQ ID NO: 17274 - DNA, 20 bp, Actinomyces naeslundii
ggcgaccttgccttttgggg

SEQ ID NO: 17275 - DNA, 20 bp, Bacteroides capilosus
acggagagctcatgacagag

SEQ ID NO: 17276 - DNA, 20 bp, Streptococcus macacae
aataccgcataatatctctc

SEQ ID NO: 17277 - DNA, 20 bp, Dolosicoccus paucivorans
gtcgaacgcgactgtatcac

SEQ ID NO: 17278 - DNA, 20 bp, Corynebacterium coyleae
atgctggtttccctttgtgg

SEQ ID NO: 17279 - DNA, 20 bp, Eubacterium moniliforme
tctgacgcatatagagatat

SEQ ID NO: 17280 - DNA, 20 bp, Streptococcus equi
ggtagccgttcggaaggcgt

SEQ ID NO: 17281 - DNA, 20 bp, Lactococcus raffinolactis
caaatggtacactgagagat

SEQ ID NO: 17282 - DNA, 20 bp, Myroides odoratimimus
tggcatcgtattgataataa

SEQ ID NO: 17283 - DNA, 20 bp, Streptococcus macacae
aagttggagagagtggaaag

SEQ ID NO: 17284 - DNA, 20 bp, Streptococcus equi
gtggaacgcacagatgatac

SEQ ID NO: 17285 - DNA, 20 bp, Clostridium clostridiiforme
ggccgcatggtctggtgcga

SEQ ID NO: 17286 - DNA, 20 bp, Anaerococcus prevotii
cggggtctagagatagactc

SEQ ID NO: 17287 - DNA, 20 bp, Eschericchia vulneris
agatccctagtctggtctga

SEQ ID NO: 17288 - DNA, 20 bp, Anaerococcus prevotii
tccaaagccaatcccagttc

SEQ ID NO: 17289 - DNA, 20 bp, Raoultella ornithinolytica
cgattcggtccgggaactca

SEQ ID NO: 17290 - DNA, 20 bp, Leuconostoc mesenteroides
gatcatggctcaggatgacg

SEQ ID NO: 17291 - DNA, 20 bp, Finegoldia magna
caggcggtttaataagtcga

SEQ ID NO: 17292 - DNA, 20 bp, Anaerococcus tetradius
ctcttcgcatgaagagctta

SEQ ID NO: 17293 - DNA, 20 bp, Vibrio hollisae
gaattctggagagattcaga

SEQ ID NO: 17294 - DNA, 20 bp, Paenibacillus azotofixans
cgtttagagataggcgcggc

SEQ ID NO: 17295 - DNA, 20 bp, Actinomyces radingae
gtgtgggaaaggggcttttt

SEQ ID NO: 17296 - DNA, 20 bp, Granulicatella elegans
gagtcgcatgacccagagaa

SEQ ID NO: 17297 - DNA, 20 bp, Bacillus licheniformis
tgttgtttgaccggcagggt

SEQ ID NO: 17298 - DNA, 20 bp, Corynebacterium group ANF
tcgagcgcgtgaaactaacg

SEQ ID NO: 17299 - DNA, 30 bp, Bacteroides stercoris
cacatgcaagtcgaggggcagcatcatcaa

SEQ ID NO: 17300 - DNA, 20 bp, Citrobacter farmeri
gtcagagatgaggtagtgcc

SEQ ID NO: 17301 - DNA, 20 bp, Clostridium clostridiiforme
ggacaaagtccttcggtgcc

SEQ ID NO: 17302 - DNA, 30 bp, Neisseria flavescens
cagattgaacgctgacgagcatgctttaca

SEQ ID NO: 17303 - DNA, 20 bp, Dolosicoccus paucivorans
catcggatgcatagcttaga

SEQ ID NO: 17304 - DNA, 20 bp, Bacillus coagulans
ttcgctcgcatgagcggatg

SEQ ID NO: 17305 - DNA, 20 bp, Anaerococcus tetradius
agattccttcgggatgaaaa

SEQ ID NO: 17306 - DNA, 20 bp, Corynebacterium falsenii
agccatgttgtggtgacggt

SEQ ID NO: 17307 - DNA, 20 bp, Staphylococcus carnosus
agtcgtaacaaaatagccgt

SEQ ID NO: 17308 - DNA, 20 bp, Citrobacter werkmanii
cgcgcagcgcctaacacatg

SEQ ID NO: 17309 - DNA, 20 bp, Streptococcus urinalis
aggagtggaaagtctacttc

SEQ ID NO: 17310 - DNA, 20 bp, Bacteroides stercoris
tagttttcccgcatgggatg

SEQ ID NO: 17311 - DNA, 20 bp, Suttonella indologenes
gctggcgggcccaatgctta

SEQ ID NO: 17312 - DNA, 20 bp, Prevotella melaninogenica
gggctccaggaatgaacgct

SEQ ID NO: 17313 - DNA, 20 bp, Eschericchia vulneris
agtacacggtccagtactcc

SEQ ID NO: 17314 - DNA, 20 bp, Sporosarcina ureae
ccgggaacccggggttattc

SEQ ID NO: 17315 - DNA, 20 bp, Streptococcus macacae
gttaaggaagcaagttggag

SEQ ID NO: 17316 - DNA, 20 bp, Pantoea agglomerans
agcacagcaggagcttggct

SEQ ID NO: 17317 - DNA, 20 bp, Eremococcus coleocola
gatggttgattgaaagatgg

SEQ ID NO: 17318 - DNA, 20 bp, Vibrio harveyi
ggaagttcggaatcgctagt

SEQ ID NO: 17319 - DNA, 20 bp, Clostridium clostridiiforme
gtaaagcacaaggacttgtc

SEQ ID NO: 17320 - DNA, 20 bp, Corynebacterium group ANF
ccttcggggtgaaggtagtg

SEQ ID NO: 17321 - DNA, 20 bp, Clostridium clostridiiforme
cagagatgcgcttttggaga

SEQ ID NO: 17322 - DNA, 20 bp, Leuconostoc carnosum
aaggtagggaatgaccttag

SEQ ID NO: 17323 - DNA, 20 bp, Anaerobiospirillum succiniciproducens
cagggggaggaaacactgac

SEQ ID NO: 17324 - DNA, 20 bp, Clostridium clostridiiforme
aaggtgaaaagcagagatgc

SEQ ID NO: 17325 - DNA, 20 bp, Clostridium clostridiiforme
gccggttgctaccagataaa

SEQ ID NO: 17326 - DNA, 20 bp, Staphylococcus aureus
ctgaactgacgctgatgtgc

SEQ ID NO: 17327 - DNA, 20 bp, Yersinia frederiksenii
ttaatacgtgaagtgattga

SEQ ID NO: 17328 - DNA, 20 bp, Anaerobiospirillum succiniciproducens
ggggagggaacccacaaagc

SEQ ID NO: 17329 - DNA, 30 bp, Bacillus badius
ggtctggagacaggcctttcccttcgggga

SEQ ID NO: 17330 - DNA, 20 bp, Sphingobacterium multivorum
aggcattcatggcccttacg

SEQ ID NO: 17331 - DNA, 20 bp, Campylobacter concisus
aatcgctatcaaagccggtc

SEQ ID NO: 17332 - DNA, 20 bp, Myroides odoratus
agaaggagcttgcttttttg

SEQ ID NO: 17333 - DNA, 20 bp, Leuconostoc gelidum
gctctaaaaggcgctacggc

SEQ ID NO: 17334 - DNA, 20 bp, Enterobacter amnigenus
agagaggcttgttttctggg

SEQ ID NO: 17335 - DNA, 20 bp, Finegoldia magna
ggtattcgtatcgtaaagtt

SEQ ID NO: 17336 - DNA, 20 bp, Actinomyces bovis
gggagccgtgcgaaggtagg

SEQ ID NO: 17337 - DNA, 20 bp, Bacteroides merdae
tagcaatagcagattacgag

SEQ ID NO: 17338 - DNA, 20 bp, Pediococcus dextrinicus
ggtgcttgcaccaaggagat

SEQ ID NO: 17339 - DNA, 20 bp, Clostridium innocuum
acgaagtttcaaggaagctt

SEQ ID NO: 17340 - DNA, 20 bp, Streptococcus criceti
gacatcccgatgccatccct

SEQ ID NO: 17341 - DNA, 20 bp, Corynebacterium renale
cgaaacggtgggcgctaggt

SEQ ID NO: 17342 - DNA, 20 bp, Paenibacillus azotofixans
gttgtagagggagcttgctc

SEQ ID NO: 17343 - DNA, 20 bp, Bacteroides thetaiotaomicron
agtagtaccgcaaggagcgt

SEQ ID NO: 17344 - DNA, 30 bp, Bacteroides capillosus
gagtaacacgtatccaacctactccttaca

SEQ ID NO: 17345 - DNA, 20 bp, Clostridium subterminale
atcgcatgatttttgtacca

SEQ ID NO: 17346 - DNA, 20 bp, Streptococcus infantarius
cgcatcatcccatctcaggt

SEQ ID NO: 17347 - DNA, 20 bp, Streptococcus urinalis
gaagtaggagtggaaagtct

SEQ ID NO: 17348 - DNA, 20 bp, Eschericchia vulneris
cagatccctagtctggtctg

SEQ ID NO: 17349 - DNA, 20 bp, Campylobacter curvus
catactccatttatatataa

SEQ ID NO: 17350 - DNA, 20 bp, Staphylococcus schleiferi
atttggaagctaagcccgtc

SEQ ID NO: 17351 - DNA, 20 bp, Vibrio cholerae
ctcccggaaggtaaactacc

SEQ ID NO: 17352 - DNA, 20 bp, Streptococcus macacae
agcttttatcgcatgatagg

SEQ ID NO: 17353 - DNA, 20 bp, Neisseria subflava
taggataccgcaaggggccg

SEQ ID NO: 17354 - DNA, 20 bp, Microbacterium hominis
cgcgcgcccgtcaagtcatg

SEQ ID NO: 17355 - DNA, 20 bp, Gemella morbillorum
cttaaaaggtgcaattgcta

SEQ ID NO: 17356 - DNA, 20 bp, Pediococcus dextrinicus
cttttaatgatcaaggtgct

SEQ ID NO: 17357 - DNA, 20 bp, Weeksella virosa
tcacgagctggatagttgaa

SEQ ID NO: 17358 - DNA, 20 bp, Streptococcus urinalis
taataccgcatgagagtttt

SEQ ID NO: 17359 - DNA, 20 bp, Globicatella sanguinis
tagaggaaatgttagtagat

SEQ ID NO: 17360 - DNA, 20 bp, Capnocytophaga sp.
tatataggtgtggcatcaca

SEQ ID NO: 17361 - DNA, 20 bp, Macrococcus caseolyticus
aaggggcggtggatcacctc

SEQ ID NO: 17362 - DNA, 20 bp, Streptococcus infantarius
actttagcaagctaagtttt

SEQ ID NO: 17363 - DNA, 20 bp, Streptococcus macacae
taaggggcttagtgccgtag

SEQ ID NO: 17364 - DNA, 20 bp, Stenotrophomonas maltophilia
ccctttcagcggggaaggaa

SEQ ID NO: 17365 - DNA, 20 bp, Myroides odoratimimus
aaatttcctagcttaactag

SEQ ID NO: 17366 - DNA, 20 bp, Geobacillus thermoglucosidasius
tagggggactgcccggttac

SEQ ID NO: 17367 - DNA, 20 bp, Streptococcus ratti
tagagttttacttttgtaca

SEQ ID NO: 17368 - DNA, 20 bp, Vibrio harveyi
ctcgactccggaagttcgga

SEQ ID NO: 17369 - DNA, 30 bp, Paenibacillus lautus
cttagagtaactgctaagagagtgacggta

SEQ ID NO: 17370 - DNA, 20 bp, Paenibacillus lautus
tctcgcatgggagaggaaag

SEQ ID NO: 17371 - DNA, 20 bp, Peptoniphilus asaccharolyticus
aatttcgacagattccttcg

SEQ ID NO: 17372 - DNA, 20 bp, Micrococcus luteus
agggggggaccagcgattgg

SEQ ID NO: 17373 - DNA, 20 bp, Paenibacillus lautus
ctcaaccctgggtcgcaccc

SEQ ID NO: 17374 - DNA, 20 bp, Brevibacillus brevis
gcggttgggatcaacctcct

SEQ ID NO: 17375 - DNA, 20 bp, Corynebacterium argentoratense
atcctttagtgtgtgatggt

SEQ ID NO: 17376 - DNA, 20 bp, Clostridium clostridiiforme
taaagcacaaggacttgtcc

SEQ ID NO: 17377 - DNA, 20 bp, Achromobacter xylosoxidans
tcactagctgttggggcctt

SEQ ID NO: 17378 - DNA, 20 bp, Clostridium sordellii
ccgtatcggtaaggtgcggt

SEQ ID NO: 17379 - DNA, 30 bp, Bacteroides merdae
tgcaagtcgaggggcagcatgatttgtagc

SEQ ID NO: 17380 - DNA, 20 bp, Finegoldia magna
aaggtatagagatatacccc

SEQ ID NO: 17381 - DNA, 20 bp, Streptococcus gallolyticus
aacaaaaaacccgtatcgga

SEQ ID NO: 17382 - DNA, 20 bp, Sphingobacterium multivorum
aacagttcgcatgttcggtt

SEQ ID NO: 17383 - DNA, 20 bp, Bifidobacterium adolescentis
attaacctaatactttgctg

SEQ ID NO: 17384 - DNA, 20 bp, Eubacterium moniliforme
ccccggggttgcacttgaaa

SEQ ID NO: 17385 - DNA, 20 bp, Gemella morbillorum
ccctgcctggtagcggggta

SEQ ID NO: 17386 - DNA, 20 bp, Finegoldia magna
agaagcttcggtggaagatt

SEQ ID NO: 17387 - DNA, 20 bp, Eremococcus coleocola
cactgttattagccaagaac

SEQ ID NO: 17388 - DNA, 20 bp, Campylobacter curvus
ctgcgaagtaaataatatat

SEQ ID NO: 17389 - DNA, 20 bp, Propionibacterium propionicus
tgggcgtgcctttttggtcg

SEQ ID NO: 17390 - DNA, 20 bp, Helcococcus ovis
aaccgttaggaggcagacgt

SEQ ID NO: 17391 - DNA, 20 bp, Campylobacter curvus
tatataagtataaatgggaa

SEQ ID NO: 17392 - DNA, 20 bp, Bacteroides stercoris
aataccggatggcatagttt

SEQ ID NO: 17393 - DNA, 20 bp, Helcococcus kunzii
gttcggtttagaaactggtt

SEQ ID NO: 17394 - DNA, 20 bp, Paenibacillus alvei
gcaaactctagagatagagt

SEQ ID NO: 17395 - DNA, 20 bp, Helcococcus kunzii
aaacggaaaaaggaaagtag

SEQ ID NO: 17396 - DNA, 20 bp, Pseudomonas mendocina
gtattaggttacatgctctt

SEQ ID NO: 17397 - DNA, 20 bp, Stenotrophomonas maltophilia
cagcacaagaaagcttgctt

SEQ ID NO: 17398 - DNA, 20 bp, Porphyromonas gingivalis
gaagggcgtaccgcaagggg

SEQ ID NO: 17399 - DNA, 20 bp, Bacillus fusiformis
ctcttttgcttcatggtgaa

SEQ ID NO: 17400 - DNA, 20 bp, Citrobacter koseri
agagatgagcaatgtgcctt

SEQ ID NO: 17401 - DNA, 20 bp, Geobacillus thermoglucosidasius
tacaagtccggaggaaggtg

SEQ ID NO: 17402 - DNA, 20 bp, Bacteroides stercoris
aacactgggatagcctttcg

SEQ ID NO: 17403 - DNA, 20 bp, Peptostreptococcus anaerobius
tgcttgcattgatgaaagat

SEQ ID NO: 17404 - DNA, 20 bp, Paenibacillus larvae
accggtttagagacagacct

SEQ ID NO: 17405 - DNA, 20 bp, Clostridium clostridiiforme
acatcccattgaaaatcatt

SEQ ID NO: 17406 - DNA, 20 bp, Prevotella disiens
cgtgtaatgttttgcatgta

SEQ ID NO: 17407 - DNA, 20 bp, Oligella ureolytica
actattaactatcaagctag

SEQ ID NO: 17408 - DNA, 20 bp, Streptococcus anginosus
tttgtcatggttcaggacga

SEQ ID NO: 17409 - DNA, 20 bp, Bacteroides stercoris
gcaacccttgcgggtagttc

SEQ ID NO: 17410 - DNA, 20 bp, Myroides odoratimimus
catcgtattgataataaaga

SEQ ID NO: 17411 - DNA, 20 bp, Morganella morganii
cttggcaattgacgttaccg

SEQ ID NO: 17412 - DNA, 20 bp, Bacteroides merdae
atttgtagcaatacagattg

SEQ ID NO: 17413 - DNA, 20 bp, Lactococcus raffinolactis
cctacctatcagcgggggat

SEQ ID NO: 17414 - DNA, 20 bp, Alicyclobacillus acidocaldarius
ggacccctcatctctgaggg

SEQ ID NO: 17415 - DNA, 20 bp, Bacteroides capilosus
tttatcagggacgaaataaa

SEQ ID NO: 17416 - DNA, 20 bp, Streptococcus macacae
ttgctccacgagatcggtga

SEQ ID NO: 17417 - DNA, 20 bp, Haemophilus segnis
actttaggtttggcgcccgt

SEQ ID NO: 17418 - DNA, 20 bp, Paenibacillus lautus
gggagaggaaagaaagacgg

SEQ ID NO: 17419 - DNA, 20 bp, Corynebacterium group ANF
ttttatcacatggtaagaag

SEQ ID NO: 17420 - DNA, 20 bp, Streptococcus infantarius
gtttccaaagcgaacaagtg

SEQ ID NO: 17421 - DNA, 20 bp, Citrobacter freundii
ggtaaccccgtaggggaacc

SEQ ID NO: 17422 - DNA, 20 bp, Arcanobacterium pyogenes
gccggggctttttgttttgg

SEQ ID NO: 17423 - DNA, 20 bp, Brevibacillus laterosporus
gccatttaaataaggtggca

SEQ ID NO: 17424 - DNA, 20 bp, Leifsonia aquatica
aaggctgacatatacgagaa

SEQ ID NO: 17425 - DNA, 20 bp, Actinomyces radingae
acgggatctgcgtggccttt

SEQ ID NO: 17426 - DNA, 20 bp, Pediococcus dextrinicus
tttcttttaatgatcaaggt

SEQ ID NO: 17427 - DNA, 20 bp, Clostridium innocuum
ggagtgagccgtcgaagtag

SEQ ID NO: 17428 - DNA, 20 bp, Campylobacter curvus
tttctcgctatgggatgagg

SEQ ID NO: 17429 - DNA, 20 bp, Capnocytophaga sp.
gtactttgatgacggtactc

SEQ ID NO: 17430 - DNA, 20 bp, Corynebacterium kutscheri
gacgaagcttattttgtgac

SEQ ID NO: 17431 - DNA, 20 bp, Leptotrichia buccalis
ccggtacagagagctgcaag

SEQ ID NO: 17432 - DNA, 20 bp, Peptoniphilus asaccharolyticus
acccttcggggtgaagtttg

SEQ ID NO: 17433 - DNA, 20 bp, Gemella morbillorum
gtagcggggtataactattg

SEQ ID NO: 17434 - DNA, 20 bp, Bacteroides thetaiotaomicron
atttgaatattttggaaaca

SEQ ID NO: 17435 - DNA, 20 bp, Sporosarcina ureae
ctccgggaacccggggttat

SEQ ID NO: 17436 - DNA, 20 bp, Stenotrophomonas maltophilia
agccagggctacacacgtga

SEQ ID NO: 17437 - DNA, 20 bp, Actinomyces radingae
gctttccgcatggggggtgt

SEQ ID NO: 17438 - DNA, 20 bp, Bacillus smithii
tcgtaacaaaaagccgtatc

SEQ ID NO: 17439 - DNA, 20 bp, Clostridium clostridiiforme
gctgggtgtgggactagcga

SEQ ID NO: 17440 - DNA, 20 bp, Prevotella loescheii
gctcaacatccggcttgcag

SEQ ID NO: 17441 - DNA, 20 bp, Paenibacillus lautus
gtaactgctaagagagtgac

SEQ ID NO: 17442 - DNA, 20 bp, Pediococcus dextrinicus
ttcttttaatgatcaaggtg

SEQ ID NO: 17443 - DNA, 20 bp, Clostridium innocuum
gtttcaaggaagcttgcttc

SEQ ID NO: 17444 - DNA, 20 bp, Streptococcus urinalis
tttttaacacatgttaggaa

SEQ ID NO: 17445 - DNA, 20 bp, Prevotella loescheii
tgagtgcgctgaaagtaggc

SEQ ID NO: 17446 - DNA, 20 bp, Bacteroides capillosus
gcaacctttgatggcgaccg

SEQ ID NO: 17447 - DNA, 20 bp, Clostridium clostridiiforme
cggaaggtgaaaagcagaga

SEQ ID NO: 17448 - DNA, 20 bp, Corynebacterium pilosum
tcttgtgttggaaaggcctt

SEQ ID NO: 17449 - DNA, 20 bp, Corynebacterium coyleae
aggcctctgcttgcagaggt

SEQ ID NO: 17450 - DNA, 20 bp, Propionibacterium granulosum
gacatggatcgggagcttcc

SEQ ID NO: 17451 - DNA, 20 bp, Bacteroides stercoris
tacccggactgccgtcgtaa

SEQ ID NO: 17452 - DNA, 20 bp, Myroides odoratimimus
accactcgcgttaaggcggg

SEQ ID NO: 17453 - DNA, 20 bp, Eremococcus coleocola
tggacgatacaacgagcagc

SEQ ID NO: 17454 - DNA, 20 bp, Propionibacterium acnes
gataaaagtaccggaaggtg

SEQ ID NO: 17455 - DNA, 20 bp, Pediococcus acidilactici
gtctggtctgtactgcgctg

SEQ ID NO: 17456 - DNA, 20 bp, Bacteroides capillosus
ttgcaacctttgatggcgac

SEQ ID NO: 17457 - DNA, 20 bp, Bacillus schlegellii
ggtggaagcctgtctcttag

SEQ ID NO: 17458 - DNA, 20 bp, Streptococcus acidominimus
gtacgcttttgaaactgtca

SEQ ID NO: 17459 - DNA, 20 bp, Eremococcus coleocola
tcggagcatagagacaggtg

SEQ ID NO: 17460 - DNA, 20 bp, Anaerobiospirillum succiniciproducens
tttcagagataagagagtgc

SEQ ID NO: 17461 - DNA, 20 bp, Peptoniphilus asaccharolyticus
gaagtttggaaggattagcg

SEQ ID NO: 17462 - DNA, 20 bp, Moellerella wisconsensis
gcgttgatactaatactatc

SEQ ID NO: 17463 - DNA, 30 bp, Peptoniphilus asaccharolyticus
gcatttgaaactaataaacttgagtagtga

SEQ ID NO: 17464 - DNA, 20 bp, Oligella ureolytica
gggatcatttgacctctcgc

SEQ ID NO: 17465 - DNA, 20 bp, Dolosicoccus paucivorans
ctgttactcgtttgacggta

SEQ ID NO: 17466 - DNA, 20 bp, Achromobacter xylosoxidans
cctggtagtcccgcccctaa

SEQ ID NO: 17467 - DNA, 20 bp, Paenibacillus amylolyticus
tgcttgcatcctctgatgct

SEQ ID NO: 17468 - DNA, 20 bp, Escherichia hermannii
tcctgtcatggacaactgtg

SEQ ID NO: 17469 - DNA, 30 bp, Streptococcus ferus
tggaaagtccattacgtgacggtacttaac

SEQ ID NO: 17470 - DNA, 20 bp, Bacteroides thetaiotaomicron
gggttttatattaaagaaat

SEQ ID NO: 17471 - DNA, 20 bp, Clostridium clostridiiforme
tgccatcgacaagatggagg

SEQ ID NO: 17472 - DNA, 20 bp, Clostridium clostridiiforme
tgacatcccattgaaaatca

SEQ ID NO: 17473 - DNA, 20 bp, Haemophilus influenzae
cgcgtagtagtcgagagatg

SEQ ID NO: 17474 - DNA, 20 bp, Fusobacterium mortiferum
cttgatcctcggggtgatgg

SEQ ID NO: 17475 - DNA, 20 bp, Clostridium clostridiiforme
acgcggtagagaagcgaaag

SEQ ID NO: 17476 - DNA, 20 bp, Bacillus schlegellii
cgaaggcgcgtgcagcgctg

SEQ ID NO: 17477 - DNA, 20 bp, Brevibacillus brevis
gtggggtaaccggaaggcag

SEQ ID NO: 17478 - DNA, 20 bp, Salmonella typhi
aggcagcagcttgcttgctt

SEQ ID NO: 17479 - DNA, 20 bp, Anaerococcus prevotii
gaaatcacatatgcacatgc

SEQ ID NO: 17480 - DNA, 20 bp, Serratia rubidaea
tacggcattacattgacgtt

SEQ ID NO: 17481 - DNA, 20 bp, Providencia rustigianii
gtcaacgattgacgttacca

SEQ ID NO: 17482 - DNA, 20 bp, Clostridium innocuum
tatacagagcgcatgctcag

SEQ ID NO: 17483 - DNA, 20 bp, Geobacillus thermoglucosidasius
gcttctgttcggttagcggc

SEQ ID NO: 17484 - DNA, 20 bp, Capnocytophaga sp.
ttgcaggggaagaataagga

SEQ ID NO: 17485 - DNA, 20 bp, Brevibacillus brevis
gcttgcaccttatggttagc

SEQ ID NO: 17486 - DNA, 20 bp, Pseudomonas mendocina
aacgtattaggttacatgct

SEQ ID NO: 17487 - DNA, 20 bp, Bacteroides merdae
gggcagcatgatttgtagca

SEQ ID NO: 17488 - DNA, 20 bp, Prevotella corporis
cagagatgatgaagtcccct

SEQ ID NO: 17489 - DNA, 20 bp, Prevotella loescheii
ggcggtgaaggatggggatg

SEQ ID NO: 17490 - DNA, 20 bp, Salmonella choleraesuis
ggggataaggctaataacct

SEQ ID NO: 17491 - DNA, 20 bp, Streptococcus infantarius
cggaagggcgggtggatcac

SEQ ID NO: 17492 - DNA, 20 bp, Bacillus fusiformis
atctcttttgcttcatggtg

SEQ ID NO: 17493 - DNA, 20 bp, Anaerococcus tetradius
tgagagatgaaagggaaagt

SEQ ID NO: 17494 - DNA, 20 bp, Bacteroides caccae
gttgtccacgtgtggatttt

SEQ ID NO: 17495 - DNA, 20 bp, Bacillus schlegellii
gacccatccgtgccggagtt

SEQ ID NO: 17496 - DNA, 20 bp, Paenibacillus azotofixans
agcggagttgtagagggagc

SEQ ID NO: 17497 - DNA, 20 bp, Brevibacterium linens
ccggatatgacgaccgaagg

SEQ ID NO: 17498 - DNA, 20 bp, Anaerococcus prevotii
cctgcgagcaaaccgtaagg

SEQ ID NO: 17499 - DNA, 20 bp, Campylobacter concisus
gcgaatcgctatcaaagccg

SEQ ID NO: 17500 - DNA, 30 bp, Propionibacterium granulosum
ccagagatggttgtgcctcttttggggtcg

SEQ ID NO: 17501 - DNA, 20 bp, Sporosarcina ureae
catggagacatgattttccc

SEQ ID NO: 17502 - DNA, 20 bp, Pediococcus dextrinicus
gcataatattaaaaaccaca

SEQ ID NO: 17503 - DNA, 20 bp, Clostridium butyricum
ccgtaggagtaacctgcggt

SEQ ID NO: 17504 - DNA, 20 bp, Anaerococcus prevotii
ttgcttcggcagaactgtaa

SEQ ID NO: 17505 - DNA, 20 bp, Kocuria kristinae
gctggtggtggaaagggtta

SEQ ID NO: 17506 - DNA, 20 bp, Microbacterium hominis
gagtttttgtcatggctcag

SEQ ID NO: 17507 - DNA, 20 bp, Campylobacter concisus
tcgctatcaaagccggtcgt

SEQ ID NO: 17508 - DNA, 20 bp, Propionibacterium propionicus
gcaaggcatcttgtgggttg

SEQ ID NO: 17509 - DNA, 20 bp, Eubacterium moniliforme
ggtggccatgtaagtcaggt

SEQ ID NO: 17510 - DNA, 20 bp, Arcanobacterium pyogenes
acgatgaagccggggctttt

SEQ ID NO: 17511 - DNA, 20 bp, Sporosarcina pasteurii
ccgccgctaacaaaggaaga

SEQ ID NO: 17512 - DNA, 20 bp, Empedobacter brevis
ggtccgtaggcggattaatc

SEQ ID NO: 17513 - DNA, 20 bp, Dietzia maris
gatatgaccgcagcatgcat

SEQ ID NO: 17514 - DNA, 20 bp, Campylobacter curvus
gcgaagtaaataatatatag

SEQ ID NO: 17515 - DNA, 20 bp, Dolosicoccus paucivorans
actgtatcaccgccttcttt

SEQ ID NO: 17516 - DNA, 20 bp, Clostridium clostridiiforme
aagccggaaggtgaaaagca

SEQ ID NO: 17517 - DNA, 20 bp, Bacteroides merdae
agcatgatttgtagcaatac

SEQ ID NO: 17518 - DNA, 20 bp, Bacillus coagulans
acttgttagaagcttgcttc

SEQ ID NO: 17519 - DNA, 30 bp, Moellerella wisconsensis
tcgggaggaaggcgttgatattaatactat

SEQ ID NO: 17520 - DNA, 20 bp, Leptotrichia buccalis
gtatgcccgtgagagcgggc

SEQ ID NO: 17521 - DNA, 20 bp, Dolosicoccus paucivorans
attcgcatgtttcattgaca

SEQ ID NO: 17522 - DNA, 20 bp, Proteus vulgaris
tactggctgagagatgatca

SEQ ID NO: 17523 - DNA, 20 bp, Vibrio hollisae
acttttgtcggggaggaaat

SEQ ID NO: 17524 - DNA, 20 bp, Dolosicoccus paucivorans
gaaggcaccgatacatcgag

SEQ ID NO: 17525 - DNA, 20 bp, Helcococcus ovis
gttaggaggcagacgtcgaa

SEQ ID NO: 17526 - DNA, 20 bp, Streptococcus anginosus
agagttttgtcatggttcag

SEQ ID NO: 17527 - DNA, 20 bp, Moraxella atlantae
tacgggagaaaggagcttat

SEQ ID NO: 17528 - DNA, 20 bp, Bacteroides stercoris
cactgggatagcctttcgaa

SEQ ID NO: 17529 - DNA, 20 bp, Moellerella wisconsensis
atattaatactatcagcgat

SEQ ID NO: 17530 - DNA, 30 bp, Bordetella trematum
aacggcgccagctaatacctggcgctaatg

SEQ ID NO: 17531 - DNA, 20 bp, Bacillus alcalophilus
gtcggcaccttgacggacct

SEQ ID NO: 17532 - DNA, 20 bp, Enterobacter gergoviae
aggctgtggtccttgaagcg

SEQ ID NO: 17533 - DNA, 20 bp, Anaerococcus prevotii
aataataccctatgatatga

SEQ ID NO: 17534 - DNA, 20 bp, Finegoldia magna
aatgcaaaactcgaaagcca

SEQ ID NO: 17535 - DNA, 20 bp, Actinomyces radingae
atactggatgttctgcgctt

SEQ ID NO: 17536 - DNA, 20 bp, Brevibacillus brevis
aaggtgcttgcaccttatgg

SEQ ID NO: 17537 - DNA, 20 bp, Kocuria rosea
cgcttccccgggccttgtac

SEQ ID NO: 17538 - DNA, 20 bp, Clostridium clostridiiforme
gtccttcggtgccgccgcta

SEQ ID NO: 17539 - DNA, 20 bp, Bacillus mycoides
agtcgtacaaggatagccga

SEQ ID NO: 17540 - DNA, 20 bp, Alloiococcus otitis
ctaccgcttatggatagcct

SEQ ID NO: 17541 - DNA, 20 bp, Streptococcus sanguinis
aaagttcacactgtgaccgg

SEQ ID NO: 17542 - DNA, 20 bp, Providencia rettgeri
tgctaatatcatcaacgatt

SEQ ID NO: 17543 - DNA, 20 bp, Streptococcus macacae
tacaacagtatcgctaagag

SEQ ID NO: 17544 - DNA, 20 bp, Prevotella bivia
aaagttggactaatacctta

SEQ ID NO: 17545 - DNA, 20 bp, Pediococcus dextrinicus
tcttttaatgatcaaggtgc

SEQ ID NO: 17546 - DNA, 20 bp, Enterobacter hormaechei
catgtgttaggcctaaaaaa

SEQ ID NO: 17547 - DNA, 20 bp, Brevibacillus reuszeri
ttggaccgcatggtccgaaa

SEQ ID NO: 17548 - DNA, 20 bp, Myroides odoratimimus
attgataataaagatttatc

SEQ ID NO: 17549 - DNA, 20 bp, Corynebacterium cystitidis
tacactggatcgccatggag

SEQ ID NO: 17550 - DNA, 20 bp, Weissella paramesenteroides
taactgatactgacgagctt

SEQ ID NO: 17551 - DNA, 20 bp, Propionibacterium propionicus
ttgcaaggcatcttgtgggt

SEQ ID NO: 17552 - DNA, 20 bp, Eremococcus coleocola
cctacccttgagcgggggat

SEQ ID NO: 17553 - DNA, 20 bp, Streptococcus urinalis
aggtcatgtgcttgcacaag

SEQ ID NO: 17554 - DNA, 20 bp, Clostridium butyricum
agtaacctgcggttggatca

SEQ ID NO: 17555 - DNA, 20 bp, Sporosarcina ureae
agtacaggagtaactgcctg

SEQ ID NO: 17556 - DNA, 20 bp, Bacteroides uniformis
taacaactggcgattggggc

SEQ ID NO: 17557 - DNA, 20 bp, Streptococcus urinalis
agaagaatggaagtaggagt

SEQ ID NO: 17558 - DNA, 20 bp, Escherichia hermannii
gtggtgacgacgtaacaagg

SEQ ID NO: 17559 - DNA, 20 bp, Bacillus schlegellii
gcccgtctcttagcggcgga

SEQ ID NO: 17560 - DNA, 20 bp, Empedobacter brevis
cgtgtaggacgactgcctta

SEQ ID NO: 17561 - DNA, 20 bp, Sphingobacterium multivorum
acgagaggaagggggggacg

SEQ ID NO: 17562 - DNA, 20 bp, Salmonella typhi
cagcagcttgcttgcttggc

SEQ ID NO: 17563 - DNA, 20 bp, Vibrio harveyi
actcgactccggaagttcgg

SEQ ID NO: 17564 - DNA, 20 bp, Bacillus badius
tttagctgtcgcttacagat

SEQ ID NO: 17565 - DNA, 20 bp, Citrobacter amalonaticus
cagaatgaacgctgttggca

SEQ ID NO: 17566 - DNA, 20 bp, Actinomyces naeslundii
acggtgaaggcgaccttgcc

SEQ ID NO: 17567 - DNA, 20 bp, Citrobacter koseri
gcaatgtgccttcgggaacc

SEQ ID NO: 17568 - DNA, 20 bp, Bacillus niacini
aaagtcggtttacgctgaca

SEQ ID NO: 17569 - DNA, 20 bp, Bacteroides stercoris
gactctacccggactgccgt

SEQ ID NO: 17570 - DNA, 20 bp, Brevibacterium epidermidis
tacgaccgtcggacgcatgt

SEQ ID NO: 17571 - DNA, 20 bp, Eubacterium moniliforme
tcattcgatgcaggatgagc

SEQ ID NO: 17572 - DNA, 20 bp, Finegoldia magna
ctatatagtgatataatgca

SEQ ID NO: 17573 - DNA, 20 bp, Pseudomonas oryzihabitans
tgggaggaagggcttacagc

SEQ ID NO: 17574 - DNA, 20 bp, Fusobacterium mortiferum
tttgtgccccttcgggggaa

SEQ ID NO: 17575 - DNA, 20 bp, Paenibacillus alvei
catccaaaactgcatagctt

SEQ ID NO: 17576 - DNA, 20 bp, Capnocytophaga sp.
ttgatgacggtactctgcga

SEQ ID NO: 17577 - DNA, 20 bp, Myroides odoratus
aaggagcttgcttttttgag

SEQ ID NO: 17578 - DNA, 20 bp, Peptoniphilus asaccharolyticus
agcgggcgagctagtgatag

SEQ ID NO: 17579 - DNA, 20 bp, Bacteroides stercoris
gagtgcaacagaggtaggcg

SEQ ID NO: 17580 - DNA, 20 bp, Streptococcus infantarius
tttagcaagctaagttttca

SEQ ID NO: 17581 - DNA, 20 bp, Prevotella loescheii
ggagacgatgaggcccttcg

SEQ ID NO: 17582 - DNA, 20 bp, Leptotrichia buccalis
caagtctttggcagaatctg

SEQ ID NO: 17583 - DNA, 20 bp, Globicatella sanguinis
ctcttgcatatcttagagat

SEQ ID NO: 17584 - DNA, 20 bp, Lactococcus raffinolactis
gccctaagtgacgcagcaaa

SEQ ID NO: 17585 - DNA, 20 bp, Myroides odoratimimus
tttcctagcttaactaggac

SEQ ID NO: 17586 - DNA, 20 bp, Bacteroides capillosus
atggatgcccgttgtatggc

SEQ ID NO: 17587 - DNA, 20 bp, Bacteroides capillosus
gcctacggaggtgctgcatg

SEQ ID NO: 17588 - DNA, 20 bp, Clostridium clostridiiforme
gaggcctaaccgcgaggaag

SEQ ID NO: 17589 - DNA, 20 bp, Pediococcus parvulus
caaaattaaccgcatggttg

SEQ ID NO: 17590 - DNA, 20 bp, Corynebacterium pilosum
ttccggattagctttgggaa

SEQ ID NO: 17591 - DNA, 20 bp, Finegoldia magna
cttcggtggaagattactaa

SEQ ID NO: 17592 - DNA, 20 bp, Citrobacter amalonaticus
aagggtgaatggttaataac

SEQ ID NO: 17593 - DNA, 20 bp, Streptococcus macacae
tttatcgcatgataggagct

SEQ ID NO: 17594 - DNA, 20 bp, Leptotrichia buccalis
acagagagctgcaaggcggt

SEQ ID NO: 17595 - DNA, 20 bp, Staphylococcus delphini
aatcccataaagttgtttct

SEQ ID NO: 17596 - DNA, 20 bp, Pediococcus parvulus
tcgaacgcactttcgttaat

SEQ ID NO: 17597 - DNA, 20 bp, Bacteroides thetaiotaomicron
gggaaacccataggccgtaa

SEQ ID NO: 17598 - DNA, 20 bp, Stenotrophomonas maltophilia
tgcgggatctgcccgatacg

SEQ ID NO: 17599 - DNA, 20 bp, Streptococcus bovis
tgaaagtaccaactggtaca

SEQ ID NO: 17600 - DNA, 20 bp, Bacillus schlegellii
gaaggcgcgtgcagcgctga

SEQ ID NO: 17601 - DNA, 20 bp, Clostridium clostridiiforme
gaaggcggtttgctggctgc

SEQ ID NO: 17602 - DNA, 20 bp, Eubacterium moniliforme
gtgagtatacttagtggcgg

SEQ ID NO: 17603 - DNA, 30 bp, Weeksella virosa
tttatatgtgaataaacctattcacgagct

SEQ ID NO: 17604 - DNA, 20 bp, Pediococcus parvulus
ttgattttgagatgcttgca

SEQ ID NO: 17605 - DNA, 20 bp, Prevotella oralis
agttggggacgtgtcccttt

SEQ ID NO: 17606 - DNA, 20 bp, Arcanobacterium pyogenes
attctgcttttgccgcatgg

SEQ ID NO: 17607 - DNA, 20 bp, Bacillus niacini
cctctcatgagggaaagttg

SEQ ID NO: 17608 - DNA, 20 bp, Buttiauxella agrestis
cattgtggttaataacccgc

SEQ ID NO: 17609 - DNA, 20 bp, Streptococcus gallolyticus
ggtgaagtcgtaacaaaaaa

SEQ ID NO: 17610 - DNA, 20 bp, Prevotella bivia
catggcgcgggaatacgttc

SEQ ID NO: 17611 - DNA, 20 bp, Finegoldia magna
tagagatatacccctctctt

SEQ ID NO: 17612 - DNA, 20 bp, Anaerococcus prevotii
aaatgaaatcacatatgcac

SEQ ID NO: 17613 - DNA, 20 bp, Shewanella putrefaciens
atccacagaatctcgcttca

SEQ ID NO: 17614 - DNA, 20 bp, Bacillus schlegellii
tggggtgaagctcgtaacag

SEQ ID NO: 17615 - DNA, 20 bp, Anaerococcus tetradius
tagagatagtttcttaagac

SEQ ID NO: 17616 - DNA, 20 bp, Helcococcus kunzii
acggttcggtttagaaactg

SEQ ID NO: 17617 - DNA, 30 bp, Actinomyces naeslundii
tcccttgtgggtgggttgacggtagctgga

SEQ ID NO: 17618 - DNA, 20 bp, Bacillus fusiformis
tttgcttcatggtgaaagac

SEQ ID NO: 17619 - DNA, 20 bp, Streptococcus ratti
gttttgtaagtctgaagtca

SEQ ID NO: 17620 - DNA, 20 bp, Clostridium clostridiiforme
aagcgagcccgaaaggagaa

SEQ ID NO: 17621 - DNA, 20 bp, Enterococcus dispar
gcataacaatagtaaacaca

SEQ ID NO: 17622 - DNA, 30 bp, Dolosicoccus paucivorans
ttagtgggggataactgtcggaaacgaccg

SEQ ID NO: 17623 - DNA, 20 bp, Streptococcus sobrinus
aagaagcaacggcttcacta

SEQ ID NO: 17624 - DNA, 20 bp, Bacteroides merdae
actgggttacttgagtgtgt

SEQ ID NO: 17625 - DNA, 20 bp, Streptococcus macacae
ggcgacgatacatagccgca

SEQ ID NO: 17626 - DNA, 20 bp, Pediococcus parvulus
cactttcgttaattgatttt

SEQ ID NO: 17627 - DNA, 20 bp, Peptostreptococcus anaerobius
cgagcgcgtctgttttgatg

SEQ ID NO: 17628 - DNA, 20 bp, Oligella urethralis
gctacagatcccgccttggt

SEQ ID NO: 17629 - DNA, 20 bp, Leclercia adecarboxylata
gatcaccttccctttttcca

SEQ ID NO: 17630 - DNA, 20 bp, Kocuria rosea
gtggtaacctacctataaga

SEQ ID NO: 17631 - DNA, 20 bp, Leptotrichia buccalis
ctgacatgtaatgcttaaca

SEQ ID NO: 17632 - DNA, 20 bp, Myroides odoratimimus
ggggtagaaaaagcttgctt

SEQ ID NO: 17633 - DNA, 20 bp, Clostridium innocuum
taaagcgcccatcaaggcgt

SEQ ID NO: 17634 - DNA, 20 bp, Campylobacter curvus
gggtcaagggagcgtagctc

SEQ ID NO: 17635 - DNA, 20 bp, Haemophilus paraphrophilus
tgggggttgaactttaagtt

SEQ ID NO: 17636 - DNA, 20 bp, Bacteroides capillosus
gatctaatctttaaaaccgg

SEQ ID NO: 17637 - DNA, 20 bp, Providencia rustigianii
tcagcgattgacgttaccaa

SEQ ID NO: 17638 - DNA, 20 bp, Stenotrophomonas maltophilia
gactacaatggcaggagaca

SEQ ID NO: 17639 - DNA, 20 bp, Eubacterium moniliforme
gaccacgaaaccgcatggtt

SEQ ID NO: 17640 - DNA, 20 bp, Escherichia hermannii
atggacaactgtggtgacga

SEQ ID NO: 17641 - DNA, 30 bp, Eremococcus coleocola
tacaatggacgatacaacgagcagcaaact

SEQ ID NO: 17642 - DNA, 20 bp, Stenotrophomonas maltophilia
gctaatacccttatcgatat

SEQ ID NO: 17643 - DNA, 20 bp, Enterococcus saccharolyticus
acgtgggtaccctgcccatc

SEQ ID NO: 17644 - DNA, 20 bp, Bacillus schlegellii
tcgagcggggagcgggcgga

SEQ ID NO: 17645 - DNA, 20 bp, Eremococcus coleocola
tgatggttgattgaaagatg

SEQ ID NO: 17646 - DNA, 20 bp, Capnocytophaga sp.
gaggcggtgaaagatgagta

SEQ ID NO: 17647 - DNA, 20 bp, Eremococcus coleocola
tagtagtaactggctaggga

SEQ ID NO: 17648 - DNA, 20 bp, Providencia rustigianii
tcaggagcaaagcaggggaa

SEQ ID NO: 17649 - DNA, 20 bp, Eremococcus coleocola
tgctatcactcaaggatggg

SEQ ID NO: 17650 - DNA, 30 bp, Vibrio hollisae
aataccgctgggggatgacagtacctgaag

SEQ ID NO: 17651 - DNA, 20 bp, Clostridium clostridiiforme
gtttcgatgaagttttcgga

SEQ ID NO: 17652 - DNA, 20 bp, Leuconostoc fallax
atattgttctcttcggagac

SEQ ID NO: 17653 - DNA, 20 bp, Sporosarcina pasteurii
aacaagtttcttccttgttc

SEQ ID NO: 17654 - DNA, 20 bp, Prevotella oralis
gctgtcggccttttttggtc

SEQ ID NO: 17655 - DNA, 20 bp, Streptococcus macacae
cataatatctctctaagcct

SEQ ID NO: 17656 - DNA, 20 bp, Finegoldia magna
tgggtgaaaggtatagagat

SEQ ID NO: 17657 - DNA, 20 bp, Streptococcus urinalis
aagtaggagtggaaagtcta

SEQ ID NO: 17658 - DNA, 20 bp, Enterococcus raffinosus
tcactctggagacagagttt

SEQ ID NO: 17659 - DNA, 20 bp, Peptostreptococcus anaerobius
tctgttttgatgcttgcatt

SEQ ID NO: 17660 - DNA, 20 bp, Streptococcus mutans
ggacgcaaggaaacacactg

SEQ ID NO: 17661 - DNA, 20 bp, Lactococcus raffinolactis
cctaagtgacgcagcaaacg

SEQ ID NO: 17662 - DNA, 20 bp, Finegoldia magna
gtcgaacgggatttagtaga

SEQ ID NO: 17663 - DNA, 20 bp, Bacteroides distasonis
aagtgtgggacgtgtcctat

SEQ ID NO: 17664 - DNA, 20 bp, Bacteroides merdae
tcgtcagctcgtgccgtgta

SEQ ID NO: 17665 - DNA, 20 bp, Nocardia asteroides
cctaaagagagtggacgtta

SEQ ID NO: 17666 - DNA, 20 bp, Anaerococcus prevotii
atatgcacatgcataaatga

SEQ ID NO: 17667 - DNA, 20 bp, Corynebacterium coyleae
agagatgctggtttcccttt

SEQ ID NO: 17668 - DNA, 20 bp, Bacillus schlegellii
cgggcggaagcccgtctctt

SEQ ID NO: 17669 - DNA, 20 bp, Bacteroides capillosus
gcgcctacggaggtgctgca

SEQ ID NO: 17670 - DNA, 20 bp, Sphingobacterium multivorum
gtgaccggcatcggttggat

SEQ ID NO: 17671 - DNA, 20 bp, Clostridium clostridiiforme
ctaccagataaagctgagca

SEQ ID NO: 17672 - DNA, 20 bp, Geobacillus thermoglucosidasius
gactgcccggttacaagtcc

SEQ ID NO: 17673 - DNA, 20 bp, Anaerococcus tetradius
aaaaatattggattagtggc

SEQ ID NO: 17674 - DNA, 20 bp, Bacteroides capillosus
tttagcggtaagggatgggg

SEQ ID NO: 17675 - DNA, 20 bp, Capnocytophaga sp.
ggatgacgtcaaatcatccg

SEQ ID NO: 17676 - DNA, 20 bp, Streptococcus urinalis
cttcgtgacggtaactaacc

SEQ ID NO: 17677 - DNA, 20 bp, Staphylococcus schleiferi
gtaaccatttggaagctaag

SEQ ID NO: 17678 - DNA, 20 bp, Providencia rustigianii
atcagcgattgacgttacca

SEQ ID NO: 17679 - DNA, 20 bp, Microbacterium hominis
tacgatcccgggtctggtac

SEQ ID NO: 17680 - DNA, 20 bp, Bacteroides capillosus
gatatcctatgcaggcatct

SEQ ID NO: 17681 - DNA, 20 bp, Eschericchia vulneris
actgggaggcaagcagtggg

SEQ ID NO: 17682 - DNA, 20 bp, Corynebacterium group ANF
gtggtggaaaacgttttcta

SEQ ID NO: 17683 - DNA, 20 bp, Gemella morbillorum
atgacatttagcttaaaagg

SEQ ID NO: 17684 - DNA, 20 bp, Myroides odoratimimus
ctattgttagttaccactcg

SEQ ID NO: 17685 - DNA, 20 bp, Vibrio hollisae
gtttggaactgtcagactag

SEQ ID NO: 17686 - DNA, 20 bp, Anaerococcus prevotii
tgcttcggcagaactgtaat

SEQ ID NO: 17687 - DNA, 20 bp, Empedobacter brevis
gtttcggcttcagtggctaa

SEQ ID NO: 17688 - DNA, 20 bp, Leptotrichia buccalis
acgccaagcgaacctgcaaa

SEQ ID NO: 17689 - DNA, 20 bp, Leptotrichia buccalis
actgataaaacctggtgttg

SEQ ID NO: 17690 - DNA, 20 bp, Globicatella sanguinis
gtagattgacggtatctaac

SEQ ID NO: 17691 - DNA, 20 bp, Anaerococcus prevotii
gagggcagctatatagtgat

SEQ ID NO: 17692 - DNA, 20 bp, Stenotrophomonas maltophilia
agagaagcaaccccgcgagc

SEQ ID NO: 17693 - DNA, 20 bp, Vibrio vulnificus
ttgtttctcaggtggcgagc

SEQ ID NO: 17694 - DNA, 20 bp, Streptococcus criceti
tcatgttaatgacttgaaag

SEQ ID NO: 17695 - DNA, 20 bp, Stenotrophomonas maltophilia
cttatcgatatgacggtacc

SEQ ID NO: 17696 - DNA, 30 bp, Pediococcus parvulus
gctaataccgcataacaaaattaaccgcat

SEQ ID NO: 17697 - DNA, 20 bp, Anaerobiospirillum succiniciproducens
tgttttaggcctaatacatg

SEQ ID NO: 17698 - DNA, 30 bp, Streptococcus ferus
ctgaagtgaaaggctatggctcaaccatag

SEQ ID NO: 17699 - DNA, 20 bp, Haemophilus paraphrophilus
cgggccaggttagaggtgtt

SEQ ID NO: 17700 - DNA, 20 bp, Clostridium clostridiiforme
catcccattgaaaatcattt

SEQ ID NO: 17701 - DNA, 20 bp, Porphyromonas endodontalis
ccgcaaggggcgcttaaggg

SEQ ID NO: 17702 - DNA, 20 bp, Leptotrichia buccalis
tcaggctgatgaaaggagac

SEQ ID NO: 17703 - DNA, 20 bp, Providencia alcalifaciens
aatcgttgatgatattagca

SEQ ID NO: 17704 - DNA, 20 bp, Aerococcus viridans
gcgagtcgcgaacccgcgag

SEQ ID NO: 17705 - DNA, 20 bp, Pseudomonas luteola
aggacggtaccacgggtgat

SEQ ID NO: 17706 - DNA, 20 bp, Morganella morganii
ggaaggtggcaaggttaata

SEQ ID NO: 17707 - DNA, 20 bp, Paenibacillus macerans
tgttagttgccagcacctag

SEQ ID NO: 17708 - DNA, 20 bp, Bacillus schlegellii
cctttgggtggaagcctgtc

SEQ ID NO: 17709 - DNA, 20 bp, Pediococcus dextrinicus
cgcataatattaaaaaccac

SEQ ID NO: 17710 - DNA, 20 bp, Dolosicoccus paucivorans
gacatcggatgcatagctta

SEQ ID NO: 17711 - DNA, 30 bp, Globicatella sanguinis
aattggagggagccgtcgaaggtgggatgg

SEQ ID NO: 17712 - DNA, 30 bp, Bacillus laevolacticus
accggaaacggtagctaagccggatagctg

SEQ ID NO: 17713 - DNA, 20 bp, Serratia rubidaea
ggcattacattgacgttact

SEQ ID NO: 17714 - DNA, 20 bp, Bacteroides stercoris
ttgatactggtatccttgag

SEQ ID NO: 17715 - DNA, 20 bp, Arcanobacterium haemolyticum
tattctgctcttgccgcatg

SEQ ID NO: 17716 - DNA, 20 bp, Bacteroides capillosus
attaaaggtttagcggtaag

SEQ ID NO: 17717 - DNA, 20 bp, Enterobacter gergoviae
gaggctgtggttcttgaggc

SEQ ID NO: 17718 - DNA, 20 bp, Stenotrophomonas maltophilia
tcgttcagtccggattggag

SEQ ID NO: 17719 - DNA, 20 bp, Corynebacterium coyleae
gctggtttccctttgtggtt

SEQ ID NO: 17720 - DNA, 20 bp, Vibrio metschnikovii
tgccactttgggttcatgac

SEQ ID NO: 17721 - DNA, 20 bp, Porphyromonas endodontalis
ggggcagcattattttagct

SEQ ID NO: 17722 - DNA, 20 bp, Prevotella loescheii
atgaggcccttcggggccgc

SEQ ID NO: 17723 - DNA, 30 bp, Bacillus azotoformans
gccgcgaggcttgagccaatcccataaagc

SEQ ID NO: 17724 - DNA, 20 bp, Brevibacillus centrosporus
agtctactctcgcatgaggc

SEQ ID NO: 17725 - DNA, 20 bp, Brevibacillus brevis
gcgaatcttaaggtgcttgc

SEQ ID NO: 17726 - DNA, 20 bp, Bacteroides stercoris
agcatcatcaaagcttgctt

SEQ ID NO: 17727 - DNA, 20 bp, Finegoldia magna
caaccccgtaaagcattgga

SEQ ID NO: 17728 - DNA, 20 bp, Stenotrophomonas maltophilia
gagccagggctacacacgtg

SEQ ID NO: 17729 - DNA, 20 bp, Streptococcus ferus
aggaagaacggtaatgggag

SEQ ID NO: 17730 - DNA, 20 bp, Streptococcus alactolyticus
cttttgacacatgttagaag

SEQ ID NO: 17731 - DNA, 20 bp, Bacillus licheniformis
gaccggcagggttcaatcat

SEQ ID NO: 17732 - DNA, 20 bp, Streptococcus macacae
gagatcggtgagtcgcgaac

SEQ ID NO: 17733 - DNA, 20 bp, Leuconostoc carnosum
taaggtagggaatgacctta

SEQ ID NO: 17734 - DNA, 20 bp, Campylobacter curvus
cgcaaccgaaagttgcggtg

SEQ ID NO: 17735 - DNA, 20 bp, Dolosicoccus paucivorans
aacgtcgcgagaccaagcgg

SEQ ID NO: 17736 - DNA, 20 bp, Eubacterium moniliforme
gctctttgggaagccctcgg

SEQ ID NO: 17737 - DNA, 20 bp, Enterobacter amnigenus
cttgttttctgggtgacgag

SEQ ID NO: 17738 - DNA, 20 bp, Bacteroides stercoris
ttgagtgcaacagaggtagg

SEQ ID NO: 17739 - DNA, 20 bp, Finegoldia magna
agagggaagctatatagtga

SEQ ID NO: 17740 - DNA, 20 bp, Bacillus schlegellii
gggcggaagccttcgggcgg

SEQ ID NO: 17741 - DNA, 20 bp, Enterococcus raffinosus
ggagacagagttttcccctt

SEQ ID NO: 17742 - DNA, 20 bp, Actinomyces radingae
gggtctgcaattcgacctcg

SEQ ID NO: 17743 - DNA, 20 bp, Paenibacillus larvae
ttagagacagaccttttcct

SEQ ID NO: 17744 - DNA, 20 bp, Arcanobacterium pyogenes
atgaagccggggctttttgt

SEQ ID NO: 17745 - DNA, 30 bp, Unknown Organism
  oligonucleotide from CDC group EF-4B
ggaagaaaaggttgtggttaatacccatga

SEQ ID NO: 17746 - DNA, 20 bp, Campylobacter curvus
atactccatactccatttat

SEQ ID NO: 17747 - DNA, 20 bp, Enterobacter hormaechei
gacacgaaggaggtgatcca

SEQ ID NO: 17748 - DNA, 20 bp, Anaerococcus tetradius
agagatagtttcttaagact

SEQ ID NO: 17749 - DNA, 20 bp, Bacteroides capilosus
cataatgcagctgagtcgca

SEQ ID NO: 17750 - DNA, 20 bp, Clostridium subterminale
gaatcgcatgatttttgtac

SEQ ID NO: 17751 - DNA, 20 bp, Bacillus psychrosaccharolyticus
tagagatgtggaggaaccca

SEQ ID NO: 17752 - DNA, 20 bp, Brevibacillus brevis
tcttaaggtgcttgcacctt

SEQ ID NO: 17753 - DNA, 20 bp, Neisseria subflava
atctcacaaaaccgatcgag

SEQ ID NO: 17754 - DNA, 20 bp, Micrococcus luteus
gagggggggaccagcgattg

SEQ ID NO: 17755 - DNA, 20 bp, Streptococcus macacae
aaaagcattggcttaaccaa

SEQ ID NO: 17756 - DNA, 20 bp, Prevotella disiens
ttttgtttgggaataatcga

SEQ ID NO: 17757 - DNA, 20 bp, Eubacterium moniliforme
accccggggttgcacttgaa

SEQ ID NO: 17758 - DNA, 20 bp, Aerococcus urinae
aaggtcaccgcatggtgacc

SEQ ID NO: 17759 - DNA, 20 bp, Psychrobacter phenylpyruvicus
aaaagggggcagcttgcgct

SEQ ID NO: 17760 - DNA, 20 bp, Pediococcus dextrinicus
aaggagatttaaaagtaaac

SEQ ID NO: 17761 - DNA, 20 bp, Vagococcus fluvialis
atgggagaataataaaagac

SEQ ID NO: 17762 - DNA, 30 bp, Moellerella wisconsensis
tgacagagggggataactactggaaacggt

SEQ ID NO: 17763 - DNA, 20 bp, Streptococcus equi
agcttgctacaattatctgt

SEQ ID NO: 17764 - DNA, 20 bp, Anaerococcus tetradius
gttcttggaataatctggga

SEQ ID NO: 17765 - DNA, 20 bp, Proteus vulgaris
acctagcaacgatctctact

SEQ ID NO: 17766 - DNA, 20 bp, Capnocytophaga sp.
atggtatataggtgtggcat

SEQ ID NO: 17767 - DNA, 20 bp, Arcanobacterium haemolyticum
acactgaacaaggcgttgag

SEQ ID NO: 17768 - DNA, 20 bp, Staphylococcus schleiferi
ttaccatggtatgcccgtat

SEQ ID NO: 17769 - DNA, 20 bp, Propionibacterium propionicus
attttttgggggggagccgt

SEQ ID NO: 17770 - DNA, 20 bp, Brevibacterium casei
aagccagtctcagtttttcg

SEQ ID NO: 17771 - DNA, 20 bp, Pseudomonas oryzihabitans
aggaagggcttacagcgaat

SEQ ID NO: 17772 - DNA, 20 bp, Bacillus smithii
aagtcgtaacaaaaagccgt

SEQ ID NO: 17773 - DNA, 20 bp, Arcanobacterium haemolyticum
atactagatattctgctctt

SEQ ID NO: 17774 - DNA, 30 bp, Pseudomonas fluorescens
gcggatgaagtgagcttgctcacggattta

SEQ ID NO: 17775 - DNA, 20 bp, Paenibacillus alvei
cttcttcggaacattcaaga

SEQ ID NO: 17776 - DNA, 20 bp, Leptotrichia buccalis
cggtaacgccaagcgaacct

SEQ ID NO: 17777 - DNA, 20 bp, Bacillus laevolacticus
tcagggccgaacgctggccg

SEQ ID NO: 17778 - DNA, 20 bp, Eschericchia vulneris
ggtccagtactcctactggg

SEQ ID NO: 17779 - DNA, 20 bp, Paenibacillus larvae
tagagacagaccttttcctt

SEQ ID NO: 17780 - DNA, 20 bp, Brevibacterium casei
cagtttttcggatcgtagtc

SEQ ID NO: 17781 - DNA, 30 bp, Yersinia frederiksenii
gcgaggaggaaggcatttcacttaatacgt

SEQ ID NO: 17782 - DNA, 20 bp, Streptococcus ratti
ttgtaagtctgaagtcaaag

SEQ ID NO: 17783 - DNA, 20 bp, Leptotrichia buccalis
agaatctgtgcttgcacagc

SEQ ID NO: 17784 - DNA, 20 bp, Kocuria rosea
tgcagcaacgctgcggtgaa

SEQ ID NO: 17785 - DNA, 20 bp, Anaerobiospirillum succiniciproducens
gggggaggaaacactgacgg

SEQ ID NO: 17786 - DNA, 20 bp, Dermacoccus nishinomiyaensis
tgaccgatctccgcatggag

SEQ ID NO: 17787 - DNA, 20 bp, Stenotrophomonas maltophilia
cataaagccctgatcgttca

SEQ ID NO: 17788 - DNA, 20 bp, Brevibacillus centrosporus
atcccgaatattttcttttg

SEQ ID NO: 17789 - DNA, 20 bp, Streptococcus macacae
aaggtgcagctgcaccccta

SEQ ID NO: 17790 - DNA, 20 bp, Bacteroides stercoris
gttttcccgcatgggatgat

SEQ ID NO: 17791 - DNA, 20 bp, Moraxella atlantae
gagcttatgggtttctgcta

SEQ ID NO: 17792 - DNA, 20 bp, Rothia dentocariosa
tcatcctgaggccatgatca

SEQ ID NO: 17793 - DNA, 20 bp, Shewanella putrefaciens
agaatctttccagagatggc

SEQ ID NO: 17794 - DNA, 20 bp, Stenotrophomonas maltophilia
taactactggaaacttacgc

SEQ ID NO: 17795 - DNA, 20 bp, Bacteroides merdae
ttaaagattcatcgctgata

SEQ ID NO: 17796 - DNA, 20 bp, Paenibacillus alvei
gaatgcaaactctagagata

SEQ ID NO: 17797 - DNA, 20 bp, Prevotella melaninogenica
atccaacctacccattactg

SEQ ID NO: 17798 - DNA, 20 bp, Bacteroides capillosus
ccgtatgatatcctatgcag

SEQ ID NO: 17799 - DNA, 20 bp, Bacteroides capillosus
acacgtatccaacctactcc

SEQ ID NO: 17800 - DNA, 20 bp, Paenibacillus validus
gccctttccttcgggatagc

SEQ ID NO: 17801 - DNA, 20 bp, Geobacillus thermoglucosidasius
cgaatccccaaaaacccgct

SEQ ID NO: 17802 - DNA, 20 bp, Actinomyces radingae
ggaaaggggcttttttaagt

SEQ ID NO: 17803 - DNA, 20 bp, Gemella morbillorum
gcaattgctatcgctaccag

SEQ ID NO: 17804 - DNA, 20 bp, Citrobacter freundii
agtccgtaaaccaagggtaa

SEQ ID NO: 17805 - DNA, 20 bp, Streptococcus infantarius
cgccgcatcatcccatctca

SEQ ID NO: 17806 - DNA, 20 bp, Bacteroides merdae
taggggaataaagtggagga

SEQ ID NO: 17807 - DNA, 20 bp, Achromobacter xylosoxidans
acctcgcgaaactgacggta

SEQ ID NO: 17808 - DNA, 20 bp, Salmonella typhi
tatcacatgcaagtcgcgac

SEQ ID NO: 17809 - DNA, 20 bp, Eubacterium moniliforme
gtaaacttttgtcctatggg

SEQ ID NO: 17810 - DNA, 20 bp, Eremococcus coleocola
taaagcactgttattagcca

SEQ ID NO: 17811 - DNA, 20 bp, Corynebacterium group ANF
cgagcgcgtgaaactaacgg

SEQ ID NO: 17812 - DNA, 20 bp, Brevibacterium casei
caatggctggacagagagag

SEQ ID NO: 17813 - DNA, 20 bp, Bacillus lentus
cttcacccccatcatctgtc

SEQ ID NO: 17814 - DNA, 20 bp, Streptococcus infantarius
ctcacccgttcgcaatcttc

SEQ ID NO: 17815 - DNA, 20 bp, Leptotrichia buccalis
cttgcacaggcgagccaagg

SEQ ID NO: 17816 - DNA, 20 bp, Bacteroides ureolyticus
agtggaatcagtaactgggg

SEQ ID NO: 17817 - DNA, 20 bp, Yersinia aldovae
ccacagaacgtagcagagat

SEQ ID NO: 17818 - DNA, 20 bp, Bacillus schlegellii
cccgctttaggaggggcctg

SEQ ID NO: 17819 - DNA, 20 bp, Clostridium barati
gggtcagcgattggggtcga

SEQ ID NO: 17820 - DNA, 20 bp, Streptococcus ratti
taaccattgtgtgctttgga

SEQ ID NO: 17821 - DNA, 20 bp, Brevibacterium epidermidis
acgaccgtcggacgcatgtc

SEQ ID NO: 17822 - DNA, 20 bp, Bacteroides capillosus
gcccgttgtatggcctttcg

SEQ ID NO: 17823 - DNA, 20 bp, Streptococcus criceti
agtggaaagttactcaagtg

SEQ ID NO: 17824 - DNA, 20 bp, Peptoniphilus asaccharolyticus
gagcgggcgagctagtgata

SEQ ID NO: 17825 - DNA, 20 bp, Vagococcus fluvialis
cccgcatgggagaataataa

SEQ ID NO: 17826 - DNA, 20 bp, Bacteroides capillosus
tgcaacctttgatggcgacc

SEQ ID NO: 17827 - DNA, 20 bp, Staphylococcus schleiferi
aacggacaggagcttgctcc

SEQ ID NO: 17828 - DNA, 20 bp, Porphyromonas endodontalis
cgcaaggggcgcttaagggt

SEQ ID NO: 17829 - DNA, 20 bp, Peptostreptococcus anaerobius
gatgcttgcattgatgaaag

SEQ ID NO: 17830 - DNA, 20 bp, Propionibacterium propionicus
tcaattgtgacgaagctttt

SEQ ID NO: 17831 - DNA, 20 bp, Prevotella oralis
gggagcgtaggcagtttttt

SEQ ID NO: 17832 - DNA, 20 bp, Corynebacterium pilosum
agctttgggaactgggtgtc

SEQ ID NO: 17833 - DNA, 20 bp, Vibrio harveyi
ggtagtgggctgcataagaa

SEQ ID NO: 17834 - DNA, 20 bp, Microbacterium hominis
agtcggtaacaccagcaggc

SEQ ID NO: 17835 - DNA, 20 bp, Paenibacillus alvei
ggtcttgacatctgaatgca

SEQ ID NO: 17836 - DNA, 20 bp, Bacillus schlegellii
gctttaggaggggcctgcgg

SEQ ID NO: 17837 - DNA, 20 bp, Rothia dentocariosa
gtctcatcctgaggccatga

SEQ ID NO: 17838 - DNA, 20 bp, Peptoniphilus asaccharolyticus
gatgaaatggattagcggcg

SEQ ID NO: 17839 - DNA, 20 bp, Aeromonas hydrophila
atacccaccagctgtgacgt

SEQ ID NO: 17840 - DNA, 20 bp, Helcococcus kunzii
tcgcatgatgtaaatgttaa

SEQ ID NO: 17841 - DNA, 20 bp, Streptococcus sp.
ccgaagtcggtgaggtaccg

SEQ ID NO: 17842 - DNA, 20 bp, Neisseria flavescens
tgacgagcatgctttacaca

SEQ ID NO: 17843 - DNA, 20 bp, Prevotella melaninogenica
taagaggttctgatccatag

SEQ ID NO: 17844 - DNA, 20 bp, Lactococcus raffinolactis
ggtaacctacctatcagcgg

SEQ ID NO: 17845 - DNA, 20 bp, Corynebacterium group ANF
taagaagatgaaaggcggcg

SEQ ID NO: 17846 - DNA, 20 bp, Bacteroides merdae
gtagcaatacagattgatgg

SEQ ID NO: 17847 - DNA, 20 bp, Campylobacter curvus
tacctacggcgcaaccgaaa

SEQ ID NO: 17848 - DNA, 20 bp, Bacteroides capillosus
cgaacgatctagagatagtg

SEQ ID NO: 17849 - DNA, 20 bp, Sphingomonas paucimobilis
gggtgcttggcatttgggtg

SEQ ID NO: 17850 - DNA, 20 bp, Prevotella oralis
agcgtaggcagttttttaag

SEQ ID NO: 17851 - DNA, 20 bp, Myroides odoratimimus
atatcagccatgatccggga

SEQ ID NO: 17852 - DNA, 20 bp, Anaerococcus prevotii
gtctagagatagactcttat

SEQ ID NO: 17853 - DNA, 20 bp, Peptoniphilus asaccharolyticus
gcgggcgagctagtgatagt

SEQ ID NO: 17854 - DNA, 20 bp, Neisseria subflava
gtaacaaggcagcccgaggg

SEQ ID NO: 17855 - DNA, 20 bp, Streptococcus urinalis
tgtgcttgcacaagaccaag

SEQ ID NO: 17856 - DNA, 20 bp, Clostridium clostridiiforme
tgccggttgctaccagataa

SEQ ID NO: 17857 - DNA, 20 bp, Actinomyces radingae
aacgggatctgcgtggcctt

SEQ ID NO: 17858 - DNA, 20 bp, Streptococcus macacae
tgacagcttttatcgcatga

SEQ ID NO: 17859 - DNA, 20 bp, Streptococcus vestibularis
aggtgacacatgtcatttat

SEQ ID NO: 17860 - DNA, 20 bp, Peptoniphilus asaccharolyticus
aagagcgggcgagctagtga

SEQ ID NO: 17861 - DNA, 20 bp, Anaerococcus tetradius
aaaatattggattagtggcg

SEQ ID NO: 17862 - DNA, 20 bp, Unknown Organism
  oligonucleotide from CDC group EO-2
gtcggaggcgagggacttcg

SEQ ID NO: 17863 - DNA, 20 bp, Abiotrophia defectiva
gaatcacatgattccgtgag

SEQ ID NO: 17864 - DNA, 20 bp, Pseudomonas fluorescens
ctcacggatttagcggcgga

SEQ ID NO: 17865 - DNA, 20 bp, Porphyromonas endodontalis
gacagccgtgcgtaagacgc

SEQ ID NO: 17866 - DNA, 20 bp, Streptococcus macacae
cttgctccacgagatcggtg

SEQ ID NO: 17867 - DNA, 20 bp, Eubacterium moniliforme
tggaactgtgagtatactta

SEQ ID NO: 17868 - DNA, 20 bp, Psychrobacter phenylpyruvicus
tgagacaatactaaaaggcg

SEQ ID NO: 17869 - DNA, 20 bp, Moraxella osloensis
agattgaaagcaggcggcag

SEQ ID NO: 17870 - DNA, 20 bp, Peptoniphilus indolicus
aagaagttgagttggattag

SEQ ID NO: 17871 - DNA, 20 bp, Pseudomonas mendocina
accctgcagttttgacgtta

SEQ ID NO: 17872 - DNA, 20 bp, Morganella morganii
ggaggaaggtgtcaaggtta

SEQ ID NO: 17873 - DNA, 20 bp, Clostridium clostridiiforme
accctttcgcaaggaaggga

SEQ ID NO: 17874 - DNA, 20 bp, Streptococcus vestibularis
gcataacaataggtgacaca

SEQ ID NO: 17875 - DNA, 20 bp, Corynebacterium pilosum
ttccgggtttttccttcttg

SEQ ID NO: 17876 - DNA, 20 bp, Paenibacillus alvei
cctcgcatgagggagatgag

SEQ ID NO: 17877 - DNA, 20 bp, Kocuria rosea
gcttaacacatgcaagtctg

SEQ ID NO: 17878 - DNA, 20 bp, Moellerella wisconsensis
tactatcagcgattgacgtt

SEQ ID NO: 17879 - DNA, 30 bp, Paenibacillus azotofixans
gcggagcaatctgtcaccaagggatgggcc

SEQ ID NO: 17880 - DNA, 20 bp, Leptotrichia buccalis
aagctgtgcttgcacaggcg

SEQ ID NO: 17881 - DNA, 20 bp, Eubacterium moniliforme
cgcatatagagatatatgtt

SEQ ID NO: 17882 - DNA, 20 bp, Brevibacillus brevis
gggatcaacctccttcaatt

SEQ ID NO: 17883 - DNA, 20 bp, Streptococcus macacae
agagcggaaagtttacactg

SEQ ID NO: 17884 - DNA, 20 bp, Oligella ureolytica
ggggggatcatttgacctct

SEQ ID NO: 17885 - DNA, 20 bp, Bacteroides capillosus
ctgttctcagttgccatcgg

SEQ ID NO: 17886 - DNA, 20 bp, Chromobacterium violaceum
ggctaaccgtaaggaggccg

SEQ ID NO: 17887 - DNA, 20 bp, Streptococcus infantarius
cgtatcggaagggcgggtgg

SEQ ID NO: 17888 - DNA, 20 bp, Dolosicoccus paucivorans
ttactcgtttgacggtatct

SEQ ID NO: 17889 - DNA, 20 bp, Pseudomonas mendocina
cctaacgtattaggttacat

SEQ ID NO: 17890 - DNA, 20 bp, Brevibacillus centrosporus
attttcttttgtttcatggc

SEQ ID NO: 17891 - DNA, 20 bp, Campylobacter coli
cgtacaaggctaaccgtagg

SEQ ID NO: 17892 - DNA, 20 bp, Clostridium glycolicum
gattcacatggatttcttat

SEQ ID NO: 17893 - DNA, 20 bp, Paenibacillus lautus
cagggaagaacgtctcttag

SEQ ID NO: 17894 - DNA, 20 bp, Citrobacter freundii
aacgtgccttcgggaactct

SEQ ID NO: 17895 - DNA, 20 bp, Eubacterium moniliforme
aaaccgcatggtttagaggt

SEQ ID NO: 17896 - DNA, 20 bp, Granulicatella elegans
catgacccagagaaggaaaa

SEQ ID NO: 17897 - DNA, 20 bp, Corynebacterium pilosum
actgggtgtcttattccggg

SEQ ID NO: 17898 - DNA, 20 bp, Peptoniphilus asaccharolyticus
gaaatttcgacagattcctt

SEQ ID NO: 17899 - DNA, 20 bp, Streptococcus criceti
taactcatgttaatgacttg

SEQ ID NO: 17900 - DNA, 20 bp, Streptococcus acidominimus
cttctcttttgagcagggga

SEQ ID NO: 17901 - DNA, 20 bp, Peptoniphilus asaccharolyticus
cgagcgatgaaaatcaaaca

SEQ ID NO: 17902 - DNA, 20 bp, Eubacterium moniliforme
tgggaagccctcgggtggaa

SEQ ID NO: 17903 - DNA, 20 bp, Propionibacterium acnes
ggactaagtcgtacaagata

SEQ ID NO: 17904 - DNA, 20 bp, Campylobacter coli
tcgtacaaggctaaccgtag

SEQ ID NO: 17905 - DNA, 20 bp, Bacillus licheniformis
ttgaccggcagggttcaatc

SEQ ID NO: 17906 - DNA, 20 bp, Proteus vulgaris
gtaatggctcacctagcaac

SEQ ID NO: 17907 - DNA, 20 bp, Vibrio mimicus
agtcgtcaacacggtagcgc

SEQ ID NO: 17908 - DNA, 20 bp, Leuconostoc carnosum
ggaatgaccttagcctgacg

SEQ ID NO: 17909 - DNA, 20 bp, Streptococcus urinalis
gcttgcacaagaccaaggag

SEQ ID NO: 17910 - DNA, 20 bp, Burkholderia stabilis
agggtagccgtatcggaggg

SEQ ID NO: 17911 - DNA, 20 bp, Corynebacterium pilosum
cccaattgccgaccggttag

SEQ ID NO: 17912 - DNA, 20 bp, Prevotella intermedia
tgcgatgcaaatagcatcca

SEQ ID NO: 17913 - DNA, 20 bp, Prevotella oralis
agggagcgtaggcagttttt

SEQ ID NO: 17914 - DNA, 20 bp, Stenotrophomonas maltophilia
ctcgtagctggtctgagagg

SEQ ID NO: 17915 - DNA, 20 bp, Bacteroides stercoris
gcgatacaatgtcagcggcc

SEQ ID NO: 17916 - DNA, 30 bp, Peptoniphilus asaccharolyticus
catgcaagtcgagcgatgaaaatcaaacag

SEQ ID NO: 17917 - DNA, 20 bp, Enterococcus dispar
cacatgtttattatttgaaa

SEQ ID NO: 17918 - DNA, 20 bp, Prevotella oralis
gagcgtaggcagttttttaa

SEQ ID NO: 17919 - DNA, 20 bp, Dolosicoccus paucivorans
actgtcggaaacgaccgcta

SEQ ID NO: 17920 - DNA, 20 bp, Streptococcus infantarius
tcccgtaggagctctggcgc

SEQ ID NO: 17921 - DNA, 20 bp, Finegoldia magna
ttgacatgtgggtgaaaggt

SEQ ID NO: 17922 - DNA, 20 bp, Bacillus coagulans
cctcacgccaccggatgtgc

SEQ ID NO: 17923 - DNA, 20 bp, Capnocytophaga sp.
agactgacgtacttagagat

SEQ ID NO: 17924 - DNA, 20 bp, Prevotella loescheii
aaaggggcccacgtgtgggt

SEQ ID NO: 17925 - DNA, 20 bp, Enterobacter amnigenus
tgttttctgggtgacgagcg

SEQ ID NO: 17926 - DNA, 20 bp, Oligella ureolytica
gagaaccggtgcacaggtgc

SEQ ID NO: 17927 - DNA, 20 bp, Streptococcus macacae
ctccaattgacggtacttaa

SEQ ID NO: 17928 - DNA, 20 bp, Paenibacillus alvei
atagagtcccttcttcggaa

SEQ ID NO: 17929 - DNA, 20 bp, Clostridium clostridiiforme
tcccaaaaagccatccccag

SEQ ID NO: 17930 - DNA, 20 bp, Streptococcus vestibularis
ataccgcataacaataggtg

SEQ ID NO: 17931 - DNA, 20 bp, Paenibacillus lautus
ggtgtttaaccccagggctc

SEQ ID NO: 17932 - DNA, 20 bp, Bacteroides capillosus
gcagcatggagggttgcttg

SEQ ID NO: 17933 - DNA, 20 bp, Enterobacter hormaechei
gtgttaggcctaaaaaagcg

SEQ ID NO: 17934 - DNA, 20 bp, Streptococcus macacae
cttaaaaggtgcagctgcac

SEQ ID NO: 17935 - DNA, 30 bp, Leptotrichia buccalis
ccccggaaactacagggctggagtattgga

SEQ ID NO: 17936 - DNA, 20 bp, Myroides odoratimimus
tgcagagcttgaatagtatg

SEQ ID NO: 17937 - DNA, 20 bp, Aeromonas hydrophila
ttggtggctaatacccacca

SEQ ID NO: 17938 - DNA, 20 bp, Neisseria subflava
gtacattagttgccatcatt

SEQ ID NO: 17939 - DNA, 20 bp, Prevotella loescheii
gagtgcgctgaaagtaggcg

SEQ ID NO: 17940 - DNA, 20 bp, Anaerococcus tetradius
atattggattagtggcggac

SEQ ID NO: 17941 - DNA, 20 bp, Bacteroides capilosus
aatggattgggtttcttagt

SEQ ID NO: 17942 - DNA, 20 bp, Vibrio alginolyticus
ggtagttaaccttcgggggg

SEQ ID NO: 17943 - DNA, 20 bp, Brevibacillus brevis
cggttgggatcaacctcctt

SEQ ID NO: 17944 - DNA, 20 bp, Paenibacillus macerans
gtataatcctggggctcaac

SEQ ID NO: 17945 - DNA, 20 bp, Bacteroides capillosus
catggagggttgcttgcaac

SEQ ID NO: 17946 - DNA, 20 bp, Clostridium clostridiiforme
ttgacatccacgcggtagag

SEQ ID NO: 17947 - DNA, 20 bp, Vagococcus fluvialis
tgggagaataataaaagacg

SEQ ID NO: 17948 - DNA, 20 bp, Fusobacterium mortiferum
tgatcctcggggtgatggtg

SEQ ID NO: 17949 - DNA, 30 bp, Streptococcus alactolyticus
agcttttgacacatgttagaagcttgaaag

SEQ ID NO: 17950 - DNA, 20 bp, Corynebacterium jeikeium
gggaagaagccttttggtga

SEQ ID NO: 17951 - DNA, 20 bp, Acinetobacter haemolyticus
agcggggaagtgtagcttgc

SEQ ID NO: 17952 - DNA, 20 bp, Anaerococcus prevotii
cttattgcttcggcagaact

SEQ ID NO: 17953 - DNA, 20 bp, Eremococcus coleocola
cttcggagcatagagacagg

SEQ ID NO: 17954 - DNA, 20 bp, Pseudomonas oryzihabitans
gggcttacagcgaatacctg

SEQ ID NO: 17955 - DNA, 20 bp, Dolosicoccus paucivorans
cggatgcatagcttagagat

SEQ ID NO: 17956 - DNA, 20 bp, Providencia rustigianii
atatcatcagcgattgacgt

SEQ ID NO: 17957 - DNA, 20 bp, Anaerococcus prevotii
gcttcggcagaactgtaata

SEQ ID NO: 17958 - DNA, 20 bp, Shewanella putrefaciens
aatgccacgggaatacgttc

SEQ ID NO: 17959 - DNA, 20 bp, Leclercia adecarboxylata
ttggatcaccttcccttttt

SEQ ID NO: 17960 - DNA, 20 bp, Corynebacterium afermentans
ccgcttcaggtgttccgact

SEQ ID NO: 17961 - DNA, 20 bp, Campylobacter curvus
ataaatgggaaagtcgaacc

SEQ ID NO: 17962 - DNA, 20 bp, Vibrio vulnificus
tgtggtcatgactggggtga

SEQ ID NO: 17963 - DNA, 20 bp, Pediococcus parvulus
acgcactttcgttaattgat

SEQ ID NO: 17964 - DNA, 20 bp, Leptotrichia buccalis
ctttggcgaagctgtgcttg

SEQ ID NO: 17965 - DNA, 20 bp, Bacteroides capilosus
gtccaatggattgggtttct

SEQ ID NO: 17966 - DNA, 20 bp, Moellerella wisconsensis
tattaatactatcagcgatt

SEQ ID NO: 17967 - DNA, 20 bp, Prevotella intermedia
cgatgcaaatagcatccaat

SEQ ID NO: 17968 - DNA, 20 bp, Rhizobium radiobacter
gctaaccacggtagggtcca

SEQ ID NO: 17969 - DNA, 20 bp, Myroides odoratimimus
cgagtagggacttgacggta

SEQ ID NO: 17970 - DNA, 20 bp, Granulicatella adiacens
gagagcgaccgggcttgcac

SEQ ID NO: 17971 - DNA, 20 bp, Bacteroides merdae
ataaagtggaggacgtgtcc

SEQ ID NO: 17972 - DNA, 20 bp, Arcanobacterium pyogenes
tgaagccggggctttttgtt

SEQ ID NO: 17973 - DNA, 20 bp, Leuconostoc carnosum
tgaccttagcctgacggtac

SEQ ID NO: 17974 - DNA, 20 bp, Leclercia adecarboxylata
ggttggatcaccttcccttt

SEQ ID NO: 17975 - DNA, 20 bp, Helcococcus kunzii
atatacaggaatatcctaga

SEQ ID NO: 17976 - DNA, 20 bp, Eremococcus coleocola
aacagcaatcatcgcctgat

SEQ ID NO: 17977 - DNA, 20 bp, Brevibacillus brevis
cgccctagaaatagggaact

SEQ ID NO: 17978 - DNA, 20 bp, Anaerococcus tetradius
agatagtttcttaagacttc

SEQ ID NO: 17979 - DNA, 20 bp, Clostridium clostridiiforme
gcggggatggttcgagagac

SEQ ID NO: 17980 - DNA, 20 bp, Globicatella sanguinis
ataactagaacttgttctgg

SEQ ID NO: 17981 - DNA, 20 bp, Helcococcus kunzii
gtttagaaactggttaactt

SEQ ID NO: 17982 - DNA, 20 bp, Oligella urethralis
cttggcaacccgctgtcctg

SEQ ID NO: 17983 - DNA, 30 bp, Streptococcus urinalis
ttcgctttggaaactgtagaacttgagtgc

SEQ ID NO: 17984 - DNA, 20 bp, Haemophilus paraphrophilus
tcgtacaaggtaacctaggg

SEQ ID NO: 17985 - DNA, 20 bp, Fusobacterium necrogenes
ccttcgtgccccttcggggg

SEQ ID NO: 17986 - DNA, 20 bp, Moraxella osloensis
aaagcaggcggcaggcttaa

SEQ ID NO: 17987 - DNA, 20 bp, Staphylococcus schleiferi
tctaagttgactgccgggac

SEQ ID NO: 17988 - DNA, 20 bp, Anaerococcus prevotii
ataataccctatgatatgat

SEQ ID NO: 17989 - DNA, 20 bp, Clostridium clostridiiforme
aaccgggatccctcttcgga

SEQ ID NO: 17990 - DNA, 20 bp, Enterococcus durans
agccgatcggaaggtgcggc

SEQ ID NO: 17991 - DNA, 20 bp, Bacteroides capillosus
ggactaataccgtatgatat

SEQ ID NO: 17992 - DNA, 20 bp, Streptococcus sanguinis
gttcacactgtgaccggatc

SEQ ID NO: 17993 - DNA, 20 bp, Campylobacter curvus
ggtgggtcaagggagcgtag

SEQ ID NO: 17994 - DNA, 20 bp, Vibrio vulnificus
acgttccccgggccttgaca

SEQ ID NO: 17995 - DNA, 20 bp, Campylobacter rectus
tgagagatgatcagtcacac

SEQ ID NO: 17996 - DNA, 20 bp, Clostridium clostridiiforme
agaagcagagaggcaaacag

SEQ ID NO: 17997 - DNA, 20 bp, Empedobacter brevis
gcgtgtaggacgactgcctt

SEQ ID NO: 17998 - DNA, 20 bp, Stenotrophomonas maltophilia
gcataatgtcctacggacca

SEQ ID NO: 17999 - DNA, 20 bp, Paenibacillus macerans
ctgtcacttagagatggacc

SEQ ID NO: 18000 - DNA, 20 bp, Myroides odoratimimus
aaagcagctacctggcaaca

SEQ ID NO: 18001 - DNA, 20 bp, Campylobacter concisus
gggagccgaccggaaggtgc

SEQ ID NO: 18002 - DNA, 20 bp, Paenibacillus macerans
caggagagtgacggtaccta

SEQ ID NO: 18003 - DNA, 20 bp, Neisseria mucosa
gaacctgcggttggggatcc

SEQ ID NO: 18004 - DNA, 20 bp, Brevibacillus brevis
gagtgtcttcggagcctagc

SEQ ID NO: 18005 - DNA, 20 bp, Streptococcus macacae
aatatctctctaagccttta

SEQ ID NO: 18006 - DNA, 20 bp, Propionibacterium propionicus
aaccgctttcaattgtgacg

SEQ ID NO: 18007 - DNA, 20 bp, Myroides odoratimimus
ccctattgttagttaccact

SEQ ID NO: 18008 - DNA, 20 bp, Clostridium clostridiiforme
tcgcaaggaagggaacgtga

SEQ ID NO: 18009 - DNA, 20 bp, Actinomyces radingae
tgcgtggcctttgtggttgt

SEQ ID NO: 18010 - DNA, 20 bp, Finegoldia magna
taaagtcggggactctaagt

SEQ ID NO: 18011 - DNA, 20 bp, Anaerococcus tetradius
cagggaagcgagactgcgaa

SEQ ID NO: 18012 - DNA, 20 bp, Clostridium clostridiiforme
gagtaaagcacaaggacttg

SEQ ID NO: 18013 - DNA, 20 bp, Finegoldia magna
gataaacttgagtagtggag

SEQ ID NO: 18014 - DNA, 20 bp, Bacillus laevolacticus
gaccttgcccttcggggcag

SEQ ID NO: 18015 - DNA, 20 bp, Clostridium clostridiiforme
agaagcgaaagcggatcgac

SEQ ID NO: 18016 - DNA, 20 bp, Pseudomonas mendocina
gctggttaataccctgcagt

SEQ ID NO: 18017 - DNA, 20 bp, Kocuria rosea
gtgaatacgcttccccgggc

SEQ ID NO: 18018 - DNA, 20 bp, Globicatella sanguinis
gccggtggcctaaccaatag

SEQ ID NO: 18019 - DNA, 20 bp, Bacillus schlegellii
ctttaggaggggcctgcggc

SEQ ID NO: 18020 - DNA, 20 bp, Propionibacterium acnes
caagataaaagtaccggaag

SEQ ID NO: 18021 - DNA, 20 bp, Empedobacter brevis
cactaagtatcaactgacgc

SEQ ID NO: 18022 - DNA, 20 bp, Leptotrichia buccalis
gcggtaacgccaagcgaacc

SEQ ID NO: 18023 - DNA, 20 bp, Peptoniphilus indolicus
gggaagaagttgagttggat

SEQ ID NO: 18024 - DNA, 20 bp, Streptococcus ratti
taagagagtttaacacatgt

SEQ ID NO: 18025 - DNA, 20 bp, Anaerobiospirillum succiniciproducens
gaaacgataccgggagggga

SEQ ID NO: 18026 - DNA, 20 bp, Collinsella aerofaciens
acgctggcggcgcgctaaca

SEQ ID NO: 18027 - DNA, 20 bp, Prevotella disiens
acattacgtgtaatgttttg

SEQ ID NO: 18028 - DNA, 20 bp, Moraxella atlantae
tgggtttctgctataagatg

SEQ ID NO: 18029 - DNA, 20 bp, Kocuria varians
ccggaccggttcagagatgt

SEQ ID NO: 18030 - DNA, 30 bp, Corynebacterium cystitidis
ggattagataccctggtagccatgctgaaa

SEQ ID NO: 18031 - DNA, 20 bp, Arcanobacterium pyogenes
ttcagtacagaagaagcatt

SEQ ID NO: 18032 - DNA, 20 bp, Peptoniphilus asaccharolyticus
cggggtgaagatgaaatgga

SEQ ID NO: 18033 - DNA, 20 bp, Clostridium clostridiiforme
gccgaggctcaacctcggcg

SEQ ID NO: 18034 - DNA, 20 bp, Campylobacter curvus
gcgcaaccgaaagttgcggt

SEQ ID NO: 18035 - DNA, 20 bp, Empedobacter brevis
attaatactttataacagat

SEQ ID NO: 18036 - DNA, 20 bp, Actinomyces odontolyticus
ctttgtgcggggggagtggt

SEQ ID NO: 18037 - DNA, 20 bp, Alloiococcus otitis
caccttcagagatgaagggt

SEQ ID NO: 18038 - DNA, 20 bp, Anaerococcus tetradius
gtcgaacgatgaagatattt

SEQ ID NO: 18039 - DNA, 30 bp, Pseudomonas mendocina
aacgtcaaaacacctaacgtattaggttac

SEQ ID NO: 18040 - DNA, 20 bp, Eschericchia vulneris
ctgggaggcaagcagtgggg

SEQ ID NO: 18041 - DNA, 20 bp, Streptococcus ferus
tgaagtgaaaggctatggct

SEQ ID NO: 18042 - DNA, 20 bp, Clostridium clostridiiforme
cctttcgcaaggaagggaac

SEQ ID NO: 18043 - DNA, 20 bp, Leclercia adecarboxylata
gttggatcaccttccctttt

SEQ ID NO: 18044 - DNA, 20 bp, Raoultella terrigena
ctgttgtgtaggcctaacac

SEQ ID NO: 18045 - DNA, 20 bp, Paenibacillus azotofixans
ttgtagagggagcttgctct

SEQ ID NO: 18046 - DNA, 20 bp, Prevotella corporis
acgcgtgggtttttgcaggt

SEQ ID NO: 18047 - DNA, 20 bp, Kocuria rosea
gcgtgcctaatacatgcagt

SEQ ID NO: 18048 - DNA, 20 bp, Bacteroides capillosus
tgcttgcaacctttgatggc

SEQ ID NO: 18049 - DNA, 20 bp, Pseudomonas luteola
ggaggacggtaccacgggtg

SEQ ID NO: 18050 - DNA, 30 bp, Propionibacterium propionicus
tgtgacggtagcagtagaagaagcaccggc

SEQ ID NO: 18051 - DNA, 20 bp, Dolosicoccus paucivorans
aacagcgagtagagtaactg

SEQ ID NO: 18052 - DNA, 20 bp, Clostridium clostridiiforme
ggcggcgcttcaagtcgtct

SEQ ID NO: 18053 - DNA, 20 bp, Enterobacter gergoviae
ccggaggctacgcgttaagg

SEQ ID NO: 18054 - DNA, 20 bp, Arcanobacterium pyogenes
cagtacagaagaagcatttt

SEQ ID NO: 18055 - DNA, 20 bp, Finegoldia magna
gcataaaatcgtagaaacac

SEQ ID NO: 18056 - DNA, 20 bp, Weissella paramesenteroides
gtctttaactgatctgacga

SEQ ID NO: 18057 - DNA, 20 bp, Streptococcus infantarius
cccgtaggagctctggcgcc

SEQ ID NO: 18058 - DNA, 20 bp, Bacteroides stercoris
actctacccggactgccgtc

SEQ ID NO: 18059 - DNA, 20 bp, Corynebacterium pilosum
agttcccgttgggtattctg

SEQ ID NO: 18060 - DNA, 20 bp, Gemella morbillorum
cgctaaggagagcttcttct

SEQ ID NO: 18061 - DNA, 20 bp, Vibrio harveyi
cggaagttcggaatcgctag

SEQ ID NO: 18062 - DNA, 20 bp, Bacteroides stercoris
cagcatcatcaaagcttgct

SEQ ID NO: 18063 - DNA, 20 bp, Vibrio hollisae
gtacggaattctggagagat

SEQ ID NO: 18064 - DNA, 20 bp, Anaerobiospirillum succiniciproducens
catgggagcggatgcaccag

SEQ ID NO: 18065 - DNA, 20 bp, Weissella paramesenteroides
aactgatactgacgagcttg

SEQ ID NO: 18066 - DNA, 20 bp, Corynebacterium pilosum
tgggtattctggcctggtct

SEQ ID NO: 18067 - DNA, 20 bp, Oligella urethralis
tacgatccccctctttcctc

SEQ ID NO: 18068 - DNA, 20 bp, Streptococcus macacae
ctattgaaactgtcagactt

SEQ ID NO: 18069 - DNA, 20 bp, Sporosarcina pasteurii
cttccttgttcgctcgactt

SEQ ID NO: 18070 - DNA, 20 bp, Bacteroides stercoris
caactgactgaatcggaaac

SEQ ID NO: 18071 - DNA, 20 bp, Clostridium clostridiiforme
ttcgagagacttatgttgat

SEQ ID NO: 18072 - DNA, 20 bp, Paenibacillus alvei
tcttgacatctgaatgcaaa

SEQ ID NO: 18073 - DNA, 20 bp, Gemella morbillorum
gcttcttctctggatgagtt

SEQ ID NO: 18074 - DNA, 20 bp, Eremococcus coleocola
catcgcctgatggttgattg

SEQ ID NO: 18075 - DNA, 20 bp, Weissella paramesenteroides
tgtctttaactgatctgacg

SEQ ID NO: 18076 - DNA, 20 bp, Brevibacterium epidermidis
cgtcggacgcatgtctggtg

SEQ ID NO: 18077 - DNA, 20 bp, Enterobacter amnigenus
caagtcgaagcgagtagcac

SEQ ID NO: 18078 - DNA, 20 bp, Brevibacillus brevis
cgagcgaatcttaaggtgct

SEQ ID NO: 18079 - DNA, 20 bp, Ochrobactrum intermedium
gctaataccctatacgaccg

SEQ ID NO: 18080 - DNA, 20 bp, Ochrobactrum intermedium
cccatcactagggaataact

SEQ ID NO: 18081 - DNA, 20 bp, Finegoldia magna
tcaaccccgtaaagcattgg

SEQ ID NO: 18082 - DNA, 20 bp, Campylobacter curvus
agggagcgtagctccttgtc

SEQ ID NO: 18083 - DNA, 20 bp, Clostridium clostridiiforme
gagtgtccggtgaggagggt

SEQ ID NO: 18084 - DNA, 20 bp, Brevibacillus centrosporus
ggaacccggggttaatcccg

SEQ ID NO: 18085 - DNA, 20 bp, Vibrio hollisae
gaggaaatccccagcgctaa

SEQ ID NO: 18086 - DNA, 20 bp, Anaerococcus prevotii
aaatcacatatgcacatgca

SEQ ID NO: 18087 - DNA, 20 bp, Arcanobacterium pyogenes
cggggctttttgttttggtg

SEQ ID NO: 18088 - DNA, 30 bp, Leptotrichia buccalis
agagctgcaaggcggtaacgccaagcgaac

SEQ ID NO: 18089 - DNA, 20 bp, Brevibacillus centrosporus
ttaatcccgaatattttctt

SEQ ID NO: 18090 - DNA, 30 bp, Paenibacillus pabuli
aagcttgcttttcttgatacttagcggcgg

SEQ ID NO: 18091 - DNA, 20 bp, Bacteroides distasonis
taggcaatagccgtttgcga

SEQ ID NO: 18092 - DNA, 20 bp, Prevotella melaninogenica
gcgcgggggtgcctgaagtc

SEQ ID NO: 18093 - DNA, 20 bp, Granulicatella adiacens
gcgaccgggcttgcactggt

SEQ ID NO: 18094 - DNA, 20 bp, Dolosicoccus paucivorans
cgtcgcgagaccaagcggat

SEQ ID NO: 18095 - DNA, 20 bp, Clostridium clostridiiforme
agggaacgtgaacaggtgct

SEQ ID NO: 18096 - DNA, 20 bp, Corynebacterium group ANF
catggtaagaagatgaaagg

SEQ ID NO: 18097 - DNA, 20 bp, Campylobacter curvus
ctccatactccatttatata

SEQ ID NO: 18098 - DNA, 20 bp, Providencia rustigianii
gaaggcgttgatgctaatat

SEQ ID NO: 18099 - DNA, 20 bp, Bacteroides uniformis
ccgcaggagcgccctagggt

SEQ ID NO: 18100 - DNA, 20 bp, Stenotrophomonas maltophilia
gaggcttgtctctctgggtg

SEQ ID NO: 18101 - DNA, 20 bp, Bacillus laevolacticus
ctaagccggatagctggttt

SEQ ID NO: 18102 - DNA, 20 bp, Enterobacter hormaechei
tcatgaatcacaaagtgggt

SEQ ID NO: 18103 - DNA, 20 bp, Streptococcus sanguinis
gatattgaatatcgcatgat

SEQ ID NO: 18104 - DNA, 20 bp, Streptococcus iniae
aatccaaagagttgcgaacg

SEQ ID NO: 18105 - DNA, 20 bp, Haemophilus segnis
ggtgacgaggaaggcgtgat

SEQ ID NO: 18106 - DNA, 20 bp, Corynebacterium group ANF
cgaggaagccacctggttgg

SEQ ID NO: 18107 - DNA, 30 bp, Corynebacterium coyleae
tgctggtttccctttgtggttggtgtacag

SEQ ID NO: 18108 - DNA, 20 bp, Bacteroides capilosus
gaataacagtccgaaaggac

SEQ ID NO: 18109 - DNA, 20 bp, Campylobacter curvus
agttgcggtgtgctttaggt

SEQ ID NO: 18110 - DNA, 20 bp, Streptococcus infantarius
gccgtttttttttggtaagt

SEQ ID NO: 18111 - DNA, 20 bp, Pseudomonas putida
gttaccacgggtgattcatg

SEQ ID NO: 18112 - DNA, 20 bp, Enterobacter amnigenus
agtcgaagcgagtagcacag

SEQ ID NO: 18113 - DNA, 20 bp, Alloiococcus otitis
ataccgcataggttttccca

SEQ ID NO: 18114 - DNA, 20 bp, Propionibacterium propionicus
aattgtgacgaagctttttt

SEQ ID NO: 18115 - DNA, 20 bp, Prevotella loescheii
gtggataactgcttcatggc

SEQ ID NO: 18116 - DNA, 20 bp, Streptococcus macacae
agcattggcttaaccaatgt

SEQ ID NO: 18117 - DNA, 20 bp, Anaerococcus prevotii
tctcttcggagtgaccttaa

SEQ ID NO: 18118 - DNA, 20 bp, Clostridium sordellii
catggctcaggatgaaccgc

SEQ ID NO: 18119 - DNA, 20 bp, Dietzia maris
ggatatgaccgcagcatgca

SEQ ID NO: 18120 - DNA, 20 bp, Anaerococcus prevotii
acgatgaagcttaaatgatc

SEQ ID NO: 18121 - DNA, 20 bp, Propionibacterium avidum
gggtagccgtcgaatcgatg

SEQ ID NO: 18122 - DNA, 20 bp, Streptococcus criceti
ttgtaagagaagaacgttga

SEQ ID NO: 18123 - DNA, 20 bp, Bacillus sp
ggttggatcaccttctacat

SEQ ID NO: 18124 - DNA, 30 bp, Abiotrophia defectiva
catggaatcacatgattccgtgaggaaagg

SEQ ID NO: 18125 - DNA, 20 bp, Eubacterium moniliforme
cattcgatgcaggatgagct

SEQ ID NO: 18126 - DNA, 20 bp, Citrobacter freundii
ccaagggtaaaccgtagggg

SEQ ID NO: 18127 - DNA, 20 bp, Providencia stuartii
gatgttaataccatcaacga

SEQ ID NO: 18128 - DNA, 20 bp, Vibrio metschnikovii
atgatagcctacggctcaaa

SEQ ID NO: 18129 - DNA, 20 bp, Paenibacillus larvae
cctctgaccggtttagagac

SEQ ID NO: 18130 - DNA, 20 bp, Brevibacillus brevis
tcaacctccttcaattggtt

SEQ ID NO: 18131 - DNA, 20 bp, Eubacterium moniliforme
atcctctgacgcatatagag

SEQ ID NO: 18132 - DNA, 20 bp, Vibrio cholerae
cgggtgtactaggcccggga

SEQ ID NO: 18133 - DNA, 20 bp, Paenibacillus pabuli
gcttttcttgatacttagcg

SEQ ID NO: 18134 - DNA, 20 bp, Propionibacterium avidum
ctcttgcttgttaggcggct

SEQ ID NO: 18135 - DNA, 20 bp, Streptococcus ferus
gctctataagtctgaagtga

SEQ ID NO: 18136 - DNA, 20 bp, Bacillus schlegellii
ccgtgccggagttcacacat

SEQ ID NO: 18137 - DNA, 20 bp, Bacillus laevolacticus
cgctacagagattgaccttg

SEQ ID NO: 18138 - DNA, 20 bp, Eremococcus coleocola
agcactgttattagccaaga

SEQ ID NO: 18139 - DNA, 20 bp, Prevotella loescheii
aactgcttcatggcatactg

SEQ ID NO: 18140 - DNA, 20 bp, Streptococcus ratti
gtctgaagtcaaaggcagtg

SEQ ID NO: 18141 - DNA, 20 bp, Peptoniphilus asaccharolyticus
gctaggtgtcggagaatttc

SEQ ID NO: 18142 - DNA, 20 bp, Propionibacterium propionicus
ttgtgacgaagcttttttgt

SEQ ID NO: 18143 - DNA, 20 bp, Stenotrophomonas maltophilia
tacgagggggataactactg

SEQ ID NO: 18144 - DNA, 20 bp, Campylobacter curvus
tgctttaggtgggtcaaggg

SEQ ID NO: 18145 - DNA, 20 bp, Leuconostoc fallax
tgaagatgttagagataata

SEQ ID NO: 18146 - DNA, 20 bp, Globicatella sanguinis
cgaacgaaccataactagaa

SEQ ID NO: 18147 - DNA, 20 bp, Escherichia fergusonii
cagggatcagcttgctgatt

SEQ ID NO: 18148 - DNA, 20 bp, Cellulosimicrobium cellulans
gggggagtgggcgaaggtgg

SEQ ID NO: 18149 - DNA, 20 bp, Bacteroides capillosus
atatcctatgcaggcatcta

SEQ ID NO: 18150 - DNA, 20 bp, Bacillus coagulans
tgttagaagcttgcttctat

SEQ ID NO: 18151 - DNA, 20 bp, Clostridium subterminale
taccgcataatgtatgagaa

SEQ ID NO: 18152 - DNA, 20 bp, Empedobacter brevis
aacaagatgcgaatctcgaa

SEQ ID NO: 18153 - DNA, 20 bp, Streptococcus gallolyticus
gaagtcgtaacaaaaaaccc

SEQ ID NO: 18154 - DNA, 20 bp, Dolosigranulum pigrum
accactcatggatagcctcg

SEQ ID NO: 18155 - DNA, 20 bp, Escherichia hermannii
ggatcacctcctgtcatgga

SEQ ID NO: 18156 - DNA, 30 bp, Neisseria subflava
acgagcgcaaccccttgtacattagttgcc

SEQ ID NO: 18157 - DNA, 20 bp, Bacteroides capillosus
ctttcggctatgtgaccaag

SEQ ID NO: 18158 - DNA, 20 bp, Streptococcus urinalis
aggaacttaaaaggagcaac

SEQ ID NO: 18159 - DNA, 20 bp, Clostridium clostridiiforme
gagactgccatcgacaagat

SEQ ID NO: 18160 - DNA, 20 bp, Vibrio harveyi
gtagtgggctgcataagaag

SEQ ID NO: 18161 - DNA, 20 bp, Paenibacillus lautus
agaacgtctcttagagtaac

SEQ ID NO: 18162 - DNA, 20 bp, Leptotrichia buccalis
catcctgcgtatgcccgtga

SEQ ID NO: 18163 - DNA, 20 bp, Dolosicoccus paucivorans
aagtcgaacgcgactgtatc

SEQ ID NO: 18164 - DNA, 20 bp, Weissella paramesenteroides
actgacgagcttgctctgat

SEQ ID NO: 18165 - DNA, 20 bp, Eschericchia vulneris
acggttaataaccgtgtcga

SEQ ID NO: 18166 - DNA, 20 bp, Bacteroides merdae
ctgggttacttgagtgtgtt

SEQ ID NO: 18167 - DNA, 20 bp, Paenibacillus validus
caagtcgagcggccctttcc

SEQ ID NO: 18168 - DNA, 20 bp, Clostridium clostridiiforme
acattcaagcagcggacggg

SEQ ID NO: 18169 - DNA, 20 bp, Clostridium clostridiiforme
cccaaaaagccatccccagt

SEQ ID NO: 18170 - DNA, 20 bp, Psychrobacter phenylpyruvicus
aagaagactttatggttaat

SEQ ID NO: 18171 - DNA, 20 bp, Corynebacterium pilosum
ttgccgaccggttagttccc

SEQ ID NO: 18172 - DNA, 20 bp, Clostridium clostridiiforme
gcggatcgaccctttcgcaa

SEQ ID NO: 18173 - DNA, 20 bp, Budvicia aquatica
atagctgcaacgattgacgt

SEQ ID NO: 18174 - DNA, 20 bp, Enterococcus dispar
atgtttattatttgaaaggc

SEQ ID NO: 18175 - DNA, 20 bp, Alloiococcus otitis
tgaaaggtggctctgctacc

SEQ ID NO: 18176 - DNA, 20 bp, Bacteroides capilosus
caacctgtggcctgcatttg

SEQ ID NO: 18177 - DNA, 20 bp, Eremococcus coleocola
gattgacggtaactaatcag

SEQ ID NO: 18178 - DNA, 20 bp, Delftia acidovorans
ttacccggcggggttcgtga

SEQ ID NO: 18179 - DNA, 20 bp, Lactococcus raffinolactis
tgggtaacctacctatcagc

SEQ ID NO: 18180 - DNA, 20 bp, Empedobacter brevis
tgttggggtttcggcttcag

SEQ ID NO: 18181 - DNA, 20 bp, Paenibacillus lautus
cgcatgggagaggaaagaaa

SEQ ID NO: 18182 - DNA, 20 bp, Eremococcus coleocola
tctgctatcactcaaggatg

SEQ ID NO: 18183 - DNA, 30 bp, Bacteroides capillosus
gcaacctttgatggcgaccggcgcacgggt

SEQ ID NO: 18184 - DNA, 20 bp, Propionibacterium avidum
tagccgtcgaatcgatgggc

SEQ ID NO: 18185 - DNA, 30 bp, Streptococcus vestibularis
taataccgcataacaataggtgacacatgt

SEQ ID NO: 18186 - DNA, 20 bp, Vibrio metschnikovii
acgcttgccactttgggttc

SEQ ID NO: 18187 - DNA, 20 bp, Myroides odoratimimus
tagaaagagcttgctttttt

SEQ ID NO: 18188 - DNA, 20 bp, Peptoniphilus asaccharolyticus
gtgaagatgaaatggattag

SEQ ID NO: 18189 - DNA, 20 bp, Paenibacillus macerans
gtgtttaaggctgtggctca

SEQ ID NO: 18190 - DNA, 20 bp, Vibrio harveyi
ataaagtgcgtcgagttccg

SEQ ID NO: 18191 - DNA, 20 bp, Escherichia hermannii
ctgtcatggacaactgtggt

SEQ ID NO: 18192 - DNA, 20 bp, Streptococcus macacae
gacagcttttatcgcatgat

SEQ ID NO: 18193 - DNA, 20 bp, Oligella ureolytica
tgcactattaactatcaagc

SEQ ID NO: 18194 - DNA, 20 bp, Sphingobacterium multivorum
tatgtgaccggcatcggttg

SEQ ID NO: 18195 - DNA, 20 bp, Brevibacillus centrosporus
cccggggttaatcccgaata

SEQ ID NO: 18196 - DNA, 20 bp, Bacteroides stercoris
tcttttcttcggacagttgt

SEQ ID NO: 18197 - DNA, 20 bp, Anaerococcus prevotii
ttgacagaacccttcggggt

SEQ ID NO: 18198 - DNA, 20 bp, Bacteroides stercoris
cccggactgccgtcgtaaga

SEQ ID NO: 18199 - DNA, 20 bp, Clostridium clostridiiforme
ggacacctgcgggaaaccgg

SEQ ID NO: 18200 - DNA, 20 bp, Anaerococcus tetradius
tgttaggttcttggaataat

SEQ ID NO: 18201 - DNA, 20 bp, Myroides odoratimimus
ggttcgtaggcggctttgta

SEQ ID NO: 18202 - DNA, 20 bp, Anaerococcus tetradius
tgtattgatttcttcggaat

SEQ ID NO: 18203 - DNA, 20 bp, Bacteroides uniformis
aagtgcgtaaccgcaggagc

SEQ ID NO: 18204 - DNA, 20 bp, Bacteroides stercoris
gcgcaacccttgcgggtagt

SEQ ID NO: 18205 - DNA, 20 bp, Streptococcus infantarius
tcccatctcaggtcggctat

SEQ ID NO: 18206 - DNA, 20 bp, Eubacterium moniliforme
cgcatggtttagaggtaaaa

SEQ ID NO: 18207 - DNA, 20 bp, Streptococcus anginosus
gtcatggttcaggacgaacg

SEQ ID NO: 18208 - DNA, 30 bp, Helcococcus kunzii
catatacagggatatcctagagataggata

SEQ ID NO: 18209 - DNA, 20 bp, Proteus vulgaris
aacgatctctactggctgag

SEQ ID NO: 18210 - DNA, 20 bp, Anaerococcus tetradius
ttgtattgatttcttcggaa

SEQ ID NO: 18211 - DNA, 20 bp, Dolosicoccus paucivorans
tagagtaactgttactcgtt

SEQ ID NO: 18212 - DNA, 20 bp, Stenotrophomonas maltophilia
gagaagcaaccccgcgagca

SEQ ID NO: 18213 - DNA, 20 bp, Globicatella sanguinis
atctcttgcatatcttagag

SEQ ID NO: 18214 - DNA, 20 bp, Streptococcus constellatus
accgcacaggatgcccgtag

SEQ ID NO: 18215 - DNA, 20 bp, Eubacterium moniliforme
cctcgtaagagtaagcgaat

SEQ ID NO: 18216 - DNA, 20 bp, Paenibacillus azotofixans
tctcattaacttagcggcgg

SEQ ID NO: 18217 - DNA, 20 bp, Streptococcus constellatus
agtagaccgcacaggatgcc

SEQ ID NO: 18218 - DNA, 20 bp, Empedobacter brevis
cttgagtgatgttgaagtgg

SEQ ID NO: 18219 - DNA, 20 bp, Enterobacter amnigenus
gcgagtagcacagagaggct

SEQ ID NO: 18220 - DNA, 20 bp, Streptococcus dysgalactiae
ttaacccatgttaaacattt

SEQ ID NO: 18221 - DNA, 20 bp, Corynebacterium auris
gtacagcgcgtgtgcgatac

SEQ ID NO: 18222 - DNA, 20 bp, Brevibacterium linens
gcatctttggttgtggaaag

SEQ ID NO: 18223 - DNA, 20 bp, Vibrio hollisae
gattcagaagtgcccgaaag

SEQ ID NO: 18224 - DNA, 20 bp, Propionibacterium avidum
agccgtcgaatcgatgggct

SEQ ID NO: 18225 - DNA, 20 bp, Escherichia hermannii
tcacctcctgtcatggacaa

SEQ ID NO: 18226 - DNA, 20 bp, Aeromonas caviae
atatctgtcaactgtgacgt

SEQ ID NO: 18227 - DNA, 20 bp, Lactococcus raffinolactis
aatggtacactgagagatgg

SEQ ID NO: 18228 - DNA, 20 bp, Psychrobacter phenylpyruvicus
taagctattgtctctcatga

SEQ ID NO: 18229 - DNA, 20 bp, Paenibacillus macerans
ttgtggagtaactgccagga

SEQ ID NO: 18230 - DNA, 20 bp, Eubacterium moniliforme
cggaagttgggagcacccga

SEQ ID NO: 18231 - DNA, 30 bp, Brevibacterium linens
aggcatctttggttgtggaaagttttttcg

SEQ ID NO: 18232 - DNA, 30 bp, Dolosicoccus paucivorans
cgcaacccctatcgtcagttgccagcattc

SEQ ID NO: 18233 - DNA, 20 bp, Proteus vulgaris
ctcacctagcaacgatctct

SEQ ID NO: 18234 - DNA, 20 bp, Pseudomonas mendocina
cgtattaggttacatgctct

SEQ ID NO: 18235 - DNA, 20 bp, Bacteroides vulgatus
gcgatatacggcaagcggcc

SEQ ID NO: 18236 - DNA, 20 bp, Finegoldia magna
acgaagaaggtattcgtatc

SEQ ID NO: 18237 - DNA, 20 bp, Bacteroides capilosus
ttcttttatcagggacgaaa

SEQ ID NO: 18238 - DNA, 20 bp, Granulicatella elegans
agagtcgcatgacccagaga

SEQ ID NO: 18239 - DNA, 20 bp, Enterococcus durans
gtcgtacaaggtagccgatc

SEQ ID NO: 18240 - DNA, 20 bp, Bacillus schlegellii
gacccgctttaggaggggcc

SEQ ID NO: 18241 - DNA, 20 bp, Bacteroides thetaiotaomicron
gcttgcaaaccaaagctggc

SEQ ID NO: 18242 - DNA, 20 bp, Peptostreptococcus anaerobius
ttgcattgatgaaagatgag

SEQ ID NO: 18243 - DNA, 20 bp, Citrobacter amalonaticus
cggggaggaagggtgaatgg

SEQ ID NO: 18244 - DNA, 20 bp, Corynebacterium pilosum
tgtcttattccgggtttttc

SEQ ID NO: 18245 - DNA, 20 bp, Dolosicoccus paucivorans
atcaatgattcgcatgtttc

SEQ ID NO: 18246 - DNA, 20 bp, Pantoea agglomerans
gcacagcaggagcttggctc

SEQ ID NO: 18247 - DNA, 20 bp, Leuconostoc pseudomesenteroides
tagtgtcgcatgatacgaag

SEQ ID NO: 18248 - DNA, 20 bp, Vagococcus fluvialis
agaataataaaagacgcttc

SEQ ID NO: 18249 - DNA, 20 bp, Prevotella bivia
agttggactaataccttatg

SEQ ID NO: 18250 - DNA, 20 bp, Bacillus schlegellii
tggcgactggggtgaagctc

SEQ ID NO: 18251 - DNA, 20 bp, Gemella morbillorum
cccgcatatcagctagatgt

SEQ ID NO: 18252 - DNA, 20 bp, Bacteroides distasonis
atgaagcaggggccccgcat

SEQ ID NO: 18253 - DNA, 20 bp, Bacillus mycoides
attttgcgctgcatggcgcg

SEQ ID NO: 18254 - DNA, 20 bp, Streptococcus urinalis
tgcttgcacaagaccaagga

SEQ ID NO: 18255 - DNA, 20 bp, Serratia proteamaculans
agggtggtgtgttaatagcg

SEQ ID NO: 18256 - DNA, 30 bp, Salmonella choleraesuis
ataaggctaataaccttgttcattgacgtt

SEQ ID NO: 18257 - DNA, 20 bp, Leptotrichia buccalis
gcacaggcgagccaaggcgg

SEQ ID NO: 18258 - DNA, 20 bp, Providencia rustigianii
tcgtcaacgattgacgttac

SEQ ID NO: 18259 - DNA, 20 bp, Helcococcus ovis
tcgagctaaccgttaggagg

SEQ ID NO: 18260 - DNA, 30 bp, Bacteroides capillosus
ggcgcctgaagtccgcgaccgcaaggaacg

SEQ ID NO: 18261 - DNA, 20 bp, Sporosarcina ureae
caggagtaactgtcctgtac

SEQ ID NO: 18262 - DNA, 20 bp, Brevibacillus brevis
accggaaggcagccagccgc

SEQ ID NO: 18263 - DNA, 20 bp, Myroides odoratimimus
tatggcatcgtattgataat

SEQ ID NO: 18264 - DNA, 20 bp, Corynebacterium group ANF
ctttttatcacatggtaaga

SEQ ID NO: 18265 - DNA, 20 bp, Anaerococcus tetradius
aaagttagtcaatcgcatgg

SEQ ID NO: 18266 - DNA, 20 bp, Oligella urethralis
agcgtcagtaccatcccagg

SEQ ID NO: 18267 - DNA, 20 bp, Streptococcus ratti
gagtttaacacatgttagac

SEQ ID NO: 18268 - DNA, 20 bp, Bacteroides capillosus
agcggtaagggatggggatg

SEQ ID NO: 18269 - DNA, 20 bp, Campylobacter jejuni
gcgtgctaatacatgcagtc

SEQ ID NO: 18270 - DNA, 20 bp, Streptococcus urinalis
tttaacacatgttaggaact

SEQ ID NO: 18271 - DNA, 20 bp, Empedobacter brevis
tttataacagattgaatggc

SEQ ID NO: 18272 - DNA, 30 bp, Leptotrichia buccalis
ggctggagtattggagaggtggacggaact

SEQ ID NO: 18273 - DNA, 20 bp, Bacteroides capillosus
ggcatctaactaggattaaa

SEQ ID NO: 18274 - DNA, 20 bp, Myroides odoratimimus
cttaactaggacactgccat

SEQ ID NO: 18275 - DNA, 20 bp, Streptococcus macacae
gaacgggtgtaagagcggaa

SEQ ID NO: 18276 - DNA, 20 bp, Empedobacter brevis
aggaaggtgtgcgtgttaat

SEQ ID NO: 18277 - DNA, 20 bp, Brevibacillus brevis
gtgcttgcaccttatggtta

SEQ ID NO: 18278 - DNA, 20 bp, Psychrobacter phenylpyruvicus
aacctaccctctagtttggg

SEQ ID NO: 18279 - DNA, 20 bp, Klebsiella oxytoca
taataacctcggcaattgac

SEQ ID NO: 18280 - DNA, 20 bp, Sphingomonas paucimobilis
caagggagccgaggggaacc

SEQ ID NO: 18281 - DNA, 20 bp, Brevibacillus brevis
ggatatgacgcacggaggca

SEQ ID NO: 18282 - DNA, 20 bp, Clostridium subterminale
gagaatcgcatgatttttgt

SEQ ID NO: 18283 - DNA, 20 bp, Sporosarcina pasteurii
tacaggcagttactcctgta

SEQ ID NO: 18284 - DNA, 20 bp, Eggerthella lenta
cccgcaggggcggaggcgtc

SEQ ID NO: 18285 - DNA, 20 bp, Sphingobacterium multivorum
ccaacacgagaggaaggggg

SEQ ID NO: 18286 - DNA, 20 bp, Unknown Organism
  oligonucleotide from CDC group EF-4B
tggttaatacccatgactga

SEQ ID NO: 18287 - DNA, 20 bp, Rhizobium radiobacter
taacaaggtacccgtaggga

SEQ ID NO: 18288 - DNA, 20 bp, Paenibacillus alvei
gtgcttgcacttctgagact

SEQ ID NO: 18289 - DNA, 20 bp, Clostridium clostridiiforme
aagagagggacacctgcggg

SEQ ID NO: 18290 - DNA, 20 bp, Anaerococcus prevotii
aaacacatgtttcaacggtc

SEQ ID NO: 18291 - DNA, 20 bp, Brevibacillus brevis
ggtaaccggaaggcagccag

SEQ ID NO: 18292 - DNA, 20 bp, Providencia rustigianii
gcgttgatgctaatatcatc

SEQ ID NO: 18293 - DNA, 30 bp, Corynebacterium falsenii
agggaagaagccatgttgtggtgacggtac

SEQ ID NO: 18294 - DNA, 20 bp, Campylobacter curvus
tataaatgggaaagtcgaac

SEQ ID NO: 18295 - DNA, 20 bp, Bacteroides stercoris
actgggatagcctttcgaaa

SEQ ID NO: 18296 - DNA, 30 bp, Eremococcus coleocola
cctacccttgagcgggggataacggtcgga

SEQ ID NO: 18297 - DNA, 20 bp, Eremococcus coleocola
gcctgatggttgattgaaag

SEQ ID NO: 18298 - DNA, 20 bp, Geobacillus thermoglucosidasius
cccttatgaattgggctaca

SEQ ID NO: 18299 - DNA, 20 bp, Serratia proteamaculans
gtggtgtgttaatagcgcat

SEQ ID NO: 18300 - DNA, 20 bp, Vibrio vulnificus
ccttcgggaggacgccacca

SEQ ID NO: 18301 - DNA, 20 bp, Stenotrophomonas maltophilia
taaggctaatacccttatcg

SEQ ID NO: 18302 - DNA, 20 bp, Leptotrichia buccalis
ggcgaagctgtgcttgcaca

SEQ ID NO: 18303 - DNA, 30 bp, Leuconostoc fallax
gaagtgtgtttaaaaggggcttcggcctca

SEQ ID NO: 18304 - DNA, 20 bp, Brevibacillus laterosporus
catttaaataaggtggcacc

SEQ ID NO: 18305 - DNA, 20 bp, Sphingomonas paucimobilis
aagtcgtacaagggagccga

SEQ ID NO: 18306 - DNA, 30 bp, Pediococcus inopinatus
aagtcggacgcactttcgttgaatgattta

SEQ ID NO: 18307 - DNA, 20 bp, Eubacterium moniliforme
aagggcagcgacctcgtaag

SEQ ID NO: 18308 - DNA, 20 bp, Corynebacterium pilosum
attcaacttttgttggaaag

SEQ ID NO: 18309 - DNA, 20 bp, Bacillus niacini
ttgaggtgcttgcacctctt

SEQ ID NO: 18310 - DNA, 20 bp, Finegoldia magna
agctatatagtgatataatg

SEQ ID NO: 18311 - DNA, 20 bp, Sphingomonas paucimobilis
ccgaggggaacctgcggggg

SEQ ID NO: 18312 - DNA, 20 bp, Corynebacterium falsenii
agggaagaagccatgttgtg

SEQ ID NO: 18313 - DNA, 20 bp, Clostridium clostridiiforme
gtctgtcaaaagccgaggct

SEQ ID NO: 18314 - DNA, 20 bp, Anaerococcus prevotii
tgcaaaactccaaagccaat

SEQ ID NO: 18315 - DNA, 20 bp, Bacteroides capilosus
gaacctgcctcggagtgggg

SEQ ID NO: 18316 - DNA, 20 bp, Bacteroides thetaiotaomicron
cccataggccgtaaggcatt

SEQ ID NO: 18317 - DNA, 30 bp, Burkholderia gladioli
tacatcggaacatgtcctgtagtgggggga

SEQ ID NO: 18318 - DNA, 20 bp, Globicatella sanguinis
gtcgaacgaaccataactag

SEQ ID NO: 18319 - DNA, 20 bp, Empedobacter brevis
gaaaaggatagcccttcgaa

SEQ ID NO: 18320 - DNA, 20 bp, Corynebacterium pilosum
ggttagttcccgttgggtat

SEQ ID NO: 18321 - DNA, 20 bp, Empedobacter brevis
aatgacagatctagaaatag

SEQ ID NO: 18322 - DNA, 20 bp, Gracilibacillus dipsosauri
gcctccaaatggttactcca

SEQ ID NO: 18323 - DNA, 20 bp, Clostridium clostridiiforme
gcaaacagaattcctggtgt

SEQ ID NO: 18324 - DNA, 20 bp, Sporosarcina pasteurii
tttcttccttgttcgctcga

SEQ ID NO: 18325 - DNA, 20 bp, Anaerococcus tetradius
taccctataaagttagtcaa

SEQ ID NO: 18326 - DNA, 20 bp, Corynebacterium coyleae
tcggccccagagatgctggt

SEQ ID NO: 18327 - DNA, 20 bp, Campylobacter coli
gtacaaggctaaccgtagga

SEQ ID NO: 18328 - DNA, 20 bp, Streptococcus infantarius
ctctggcgccgtgctctcag

SEQ ID NO: 18329 - DNA, 20 bp, Streptococcus vestibularis
caataggtgacacatgtcat

SEQ ID NO: 18330 - DNA, 20 bp, Eubacterium moniliforme
tgtggggggcgatagtcctc

SEQ ID NO: 18331 - DNA, 20 bp, Bacteroides capillosus
cgtcggtcgtatgcaaatac

SEQ ID NO: 18332 - DNA, 20 bp, Stenotrophomonas maltophilia
ttatcgatatgacggtaccc

SEQ ID NO: 18333 - DNA, 20 bp, Providencia rustigianii
tgatgctaatatcgtcaacg

SEQ ID NO: 18334 - DNA, 20 bp, Enterobacter amnigenus
aagcgagtagcacagagagg

SEQ ID NO: 18335 - DNA, 20 bp, Anaerobiospirillum succiniciproducens
aacactgacggtacccacag

SEQ ID NO: 18336 - DNA, 20 bp, Actinomyces bovis
agggagccgtgcgaaggtag

SEQ ID NO: 18337 - DNA, 20 bp, Moellerella wisconsensis
ggcatctaaaactggtcagc

SEQ ID NO: 18338 - DNA, 20 bp, Aeromonas schubertii
gtctggaaccttgtagagat

SEQ ID NO: 18339 - DNA, 20 bp, Bacteroides merdae
ccttttttgtatgtacccta

SEQ ID NO: 18340 - DNA, 20 bp, Sporosarcina ureae
aagtacaggagtaactgtcc

SEQ ID NO: 18341 - DNA, 20 bp, Prevotella loescheii
ggacgaaaggtttggcggtg

SEQ ID NO: 18342 - DNA, 20 bp, Geobacillus stearothermophilus
gtcgagcggaccggattggg

SEQ ID NO: 18343 - DNA, 20 bp, Empedobacter brevis
gcaagccgaggggtacgatt

SEQ ID NO: 18344 - DNA, 20 bp, Dolosicoccus paucivorans
cgccttctttgaaggcaccg

SEQ ID NO: 18345 - DNA, 20 bp, Morganella morganii
ggcggtaacagggagaagct

SEQ ID NO: 18346 - DNA, 20 bp, Leptotrichia buccalis
catgtaatgcttaacacatg

SEQ ID NO: 18347 - DNA, 20 bp, Peptoniphilus asaccharolyticus
cttgtaagcatttgaaacta

SEQ ID NO: 18348 - DNA, 20 bp, Corynebacterium ulcerans
tcaggacgatacgctggcgg

SEQ ID NO: 18349 - DNA, 20 bp, Stenotrophomonas maltophilia
cggaaacccataaagccctg

SEQ ID NO: 18350 - DNA, 20 bp, Capnocytophaga sp.
taaatggagactgacgtact

SEQ ID NO: 18351 - DNA, 20 bp, Stenotrophomonas maltophilia
aaacccataaagccctgatc

SEQ ID NO: 18352 - DNA, 20 bp, Paenibacillus azotofixans
gcttgctctctcattaactt

SEQ ID NO: 18353 - DNA, 20 bp, Eggerthella lenta
aacccgcaggggcggaggcg

SEQ ID NO: 18354 - DNA, 20 bp, Empedobacter brevis
ataacagattgaatggcatc

SEQ ID NO: 18355 - DNA, 20 bp, Brevibacterium casei
gcatgctacaatggctggac

SEQ ID NO: 18356 - DNA, 20 bp, Shewanella putrefaciens
acatccacagaatctcgctt

SEQ ID NO: 18357 - DNA, 20 bp, Arthrobacter globiformis
acccgaagccggggcctaac

SEQ ID NO: 18358 - DNA, 20 bp, Proteus mirabilis
taaggttaatacccttgtca

SEQ ID NO: 18359 - DNA, 20 bp, Neisseria flavescens
gattgaacgctgacgagcat

SEQ ID NO: 18360 - DNA, 20 bp, Eubacterium moniliforme
taaaaggattcattcgatgc

SEQ ID NO: 18361 - DNA, 20 bp, Clostridium clostridiiforme
gcggcgcttcaagtcgtctg

SEQ ID NO: 18362 - DNA, 20 bp, Leuconostoc fallax
gttagagataatattgttct

SEQ ID NO: 18363 - DNA, 20 bp, Arthrobacter globiformis
tgttcctgaccgccgtagag

SEQ ID NO: 18364 - DNA, 20 bp, Streptococcus infantarius
cacccgttcgcaatcttcca

SEQ ID NO: 18365 - DNA, 20 bp, Vibrio hollisae
gcatacgtactgaggtagaa

SEQ ID NO: 18366 - DNA, 20 bp, Anaerococcus tetradius
ccctatgacataaactcttc

SEQ ID NO: 18367 - DNA, 20 bp, Psychrobacter phenylpyruvicus
acaatactaaaaggcggctt

SEQ ID NO: 18368 - DNA, 20 bp, Anaerococcus prevotii
agaactgtaatacaggtggt

SEQ ID NO: 18369 - DNA, 20 bp, Bacteroides thetaiotaomicron
gcccgcccgtcaagccatga

SEQ ID NO: 18370 - DNA, 20 bp, Stenotrophomonas maltophilia
cgtgactacaatggcaggag

SEQ ID NO: 18371 - DNA, 20 bp, Bacteroides stercoris
tggcatagttttcccgcatg

SEQ ID NO: 18372 - DNA, 20 bp, Streptococcus macacae
atcgcatgataggagcttaa

SEQ ID NO: 18373 - DNA, 20 bp, Streptococcus criceti
gattaactcatgttaatgac

SEQ ID NO: 18374 - DNA, 20 bp, Finegoldia magna
tggaagattactaatgagag

SEQ ID NO: 18375 - DNA, 20 bp, Bacillus laevolacticus
gctaagccggatagctggtt

SEQ ID NO: 18376 - DNA, 20 bp, Staphylococcus schleiferi
atgcccgtatcggaaagtgc

SEQ ID NO: 18377 - DNA, 20 bp, Prevotella corporis
tctgtctgttcgctcgactt

SEQ ID NO: 18378 - DNA, 20 bp, Paenibacillus apiarius
agtcgagcggagctgacgga

SEQ ID NO: 18379 - DNA, 20 bp, Shewanella algae
tcctggtagagatgcctcag

SEQ ID NO: 18380 - DNA, 20 bp, Eubacterium moniliforme
tcctatgggacgaaaaaaat

SEQ ID NO: 18381 - DNA, 20 bp, Unknown Organism
  oligonucleotide from CDC group EO-2
ggcgagggacttcggttcta

SEQ ID NO: 18382 - DNA, 20 bp, Streptococcus iniae
aggagcaaaagcttcactat

SEQ ID NO: 18383 - DNA, 20 bp, Porphyromonas endodontalis
attattttagcttgctaaga

SEQ ID NO: 18384 - DNA, 20 bp, Streptococcus macacae
gctgcacccctatcagatgg

SEQ ID NO: 18385 - DNA, 20 bp, Prevotella oralis
gtcggccttttttggtcggt

SEQ ID NO: 18386 - DNA, 20 bp, Neisseria mucosa
acgctggcggcatgccttta

SEQ ID NO: 18387 - DNA, 30 bp, Capnocytophaga sp.
aatcatccggcccttacatcttgggctaca

SEQ ID NO: 18388 - DNA, 20 bp, Yersinia frederiksenii
atacgtgaagtgattgacgt

SEQ ID NO: 18389 - DNA, 20 bp, Sporosarcina pasteurii
aggaagaaacaagtttcttc

SEQ ID NO: 18390 - DNA, 20 bp, Bacteroides merdae
tcgaggggcagcatgatttg

SEQ ID NO: 18391 - DNA, 20 bp, Anaerococcus prevotii
atgatctcttcggagtgacc

SEQ ID NO: 18392 - DNA, 20 bp, Corynebacterium group F1
gtacttcgggtataagcttg

SEQ ID NO: 18393 - DNA, 20 bp, Actinomyces radingae
tggttgtgtggtgagagtgg

SEQ ID NO: 18394 - DNA, 20 bp, Stenotrophomonas maltophilia
gtcctacggaccaaagcagg

SEQ ID NO: 18395 - DNA, 20 bp, Stenotrophomonas maltophilia
gcgagcagcaagcggaaacc

SEQ ID NO: 18396 - DNA, 20 bp, Enterobacter amnigenus
aggcttgttttctgggtgac

SEQ ID NO: 18397 - DNA, 20 bp, Dolosicoccus paucivorans
acgtcgcgagaccaagcgga

SEQ ID NO: 18398 - DNA, 20 bp, Campylobacter curvus
ccatactccatttatatata

SEQ ID NO: 18399 - DNA, 30 bp, Anaerococcus tetradius
aaacgatgagtgttaggttcttggaataat

SEQ ID NO: 18400 - DNA, 20 bp, Prevotella loescheii
gaaaggtttggcggtgaagg

SEQ ID NO: 18401 - DNA, 20 bp, Clostridium clostridiiforme
gggtgtgggactagcgatag

SEQ ID NO: 18402 - DNA, 20 bp, Prevotella loescheii
acgaaaggtttggcggtgaa

SEQ ID NO: 18403 - DNA, 30 bp, Paenibacillus lautus
ttaagttgggtgtttaaccccagggctcaa

SEQ ID NO: 18404 - DNA, 20 bp, Propionibacterium propionicus
cattttttgggggggagccg

SEQ ID NO: 18405 - DNA, 20 bp, Bacteroides capillosus
gcccttcggggcgcctacgg

SEQ ID NO: 18406 - DNA, 20 bp, Eubacterium moniliforme
caagtcgaacgaagttgctc

SEQ ID NO: 18407 - DNA, 20 bp, Corynebacterium pilosum
gggtttttccttcttgtgtt

SEQ ID NO: 18408 - DNA, 20 bp, Streptococcus criceti
gcataatagtgattaactca

SEQ ID NO: 18409 - DNA, 20 bp, Capnocytophaga sp.
tcacatttatattaaagctg

SEQ ID NO: 18410 - DNA, 20 bp, Pediococcus dextrinicus
agttttcttttaatgatcaa

SEQ ID NO: 18411 - DNA, 20 bp, Bacillus niacini
tcatgagggaaagttgaaag

SEQ ID NO: 18412 - DNA, 20 bp, Bacillus schlegellii
aggtgtgggtggggcgaccc

SEQ ID NO: 18413 - DNA, 20 bp, Clostridium clostridiiforme
tggatttgaaattgacttag

SEQ ID NO: 18414 - DNA, 20 bp, Haemophilus paraphrophilus
gttagaggtgttggatccat

SEQ ID NO: 18415 - DNA, 20 bp, Bacteroides thetaiotaomicron
tgcttgcaaaccaaagctgg

SEQ ID NO: 18416 - DNA, 30 bp, Leptotrichia buccalis
accgcaagggggaaggtatctaaggtgtgg

SEQ ID NO: 18417 - DNA, 30 bp, Enterococcus dispar
tgctaataccgcataacaatagtaaacaca

SEQ ID NO: 18418 - DNA, 20 bp, Clostridium clostridiiforme
ggtgtgggactagcgatagt

SEQ ID NO: 18419 - DNA, 20 bp, Myroides odoratimimus
cctagcttaactaggacact

SEQ ID NO: 18420 - DNA, 20 bp, Clostridium subterminale
ataatgtatgagaatcgcat

SEQ ID NO: 18421 - DNA, 20 bp, Arcanobacterium pyogenes
atggtgcagctttcggggtg

SEQ ID NO: 18422 - DNA, 20 bp, Geobacillus stearothermophilus
ccggattggggcttgccttg

SEQ ID NO: 18423 - DNA, 20 bp, Streptococcus macacae
taaccaatgtcagctattga

SEQ ID NO: 18424 - DNA, 20 bp, Clostridium clostridiiforme
gagcgaagcggtttcgatga

SEQ ID NO: 18425 - DNA, 20 bp, Leptotrichia buccalis
gcccgtgagagcgggcagtg

SEQ ID NO: 18426 - DNA, 20 bp, Brevibacillus brevis
aacgccctagaaatagggaa

SEQ ID NO: 18427 - DNA, 20 bp, Klebsiella oxytoca
aataacctcggcaattgacg

SEQ ID NO: 18428 - DNA, 20 bp, Bacteroides thetaiotaomicron
gcggtgaatagttcccgggc

SEQ ID NO: 18429 - DNA, 20 bp, Bacteroides distasonis
agtgtgggacgtgtcctatt

SEQ ID NO: 18430 - DNA, 20 bp, Bacteroides merdae
gtttgaacgtagtctgaccg

SEQ ID NO: 18431 - DNA, 20 bp, Bacillus schlegellii
gatggcgaaggcagcgcact

SEQ ID NO: 18432 - DNA, 20 bp, Dolosicoccus paucivorans
aaggcaccgatacatcgagt

SEQ ID NO: 18433 - DNA, 20 bp, Bacillus schlegellii
catgctggggcaaggaaagg

SEQ ID NO: 18434 - DNA, 20 bp, Paenibacillus macerans
gctaataccggatacgcaac

SEQ ID NO: 18435 - DNA, 20 bp, Vagococcus fluvialis
ttcccgcatgggagaataat

SEQ ID NO: 18436 - DNA, 20 bp, Campylobacter curvus
ggactttgttcgtctgcgaa

SEQ ID NO: 18437 - DNA, 20 bp, Eremococcus coleocola
ctggctagggattgacggta

SEQ ID NO: 18438 - DNA, 20 bp, Streptococcus infantarius
cacgtagttagccgtttttt

SEQ ID NO: 18439 - DNA, 20 bp, Anaerococcus prevotii
aaacctcaaaaagtctttcc

SEQ ID NO: 18440 - DNA, 20 bp, Streptococcus infantarius
caagctaagttttcagcgtt

SEQ ID NO: 18441 - DNA, 20 bp, Streptococcus macacae
tgctaggtgttaggtcctaa

SEQ ID NO: 18442 - DNA, 20 bp, Enterococcus dispar
tagtaaacacatgtttatta

SEQ ID NO: 18443 - DNA, 20 bp, Brevibacillus brevis
aggtagccgcatcggaaggg

SEQ ID NO: 18444 - DNA, 20 bp, Bacillus coagulans
gcttgcttctatcaagttag

SEQ ID NO: 18445 - DNA, 20 bp, Paenibacillus azotofixans
caagtcgagcggagttgtag

SEQ ID NO: 18446 - DNA, 20 bp, Bordetella trematum
ggaaagaaacggcgccagct

SEQ ID NO: 18447 - DNA, 20 bp, Brevibacterium casei
tggctggacagagagaggcg

SEQ ID NO: 18448 - DNA, 20 bp, Anaerococcus prevotii
catatgcacatgcataaatg

SEQ ID NO: 18449 - DNA, 20 bp, Pseudomonas fluorescens
gatgaagtgagcttgctcac

SEQ ID NO: 18450 - DNA, 20 bp, Eschericchia vulneris
cagtactcctactgggaggc

SEQ ID NO: 18451 - DNA, 20 bp, Prevotella oralis
aagttggggacgtgtccctt

SEQ ID NO: 18452 - DNA, 20 bp, Capnocytophaga sp.
atttatattaaagctgaggc

SEQ ID NO: 18453 - DNA, 20 bp, Streptococcus vestibularis
accgcataacaataggtgac

SEQ ID NO: 18454 - DNA, 20 bp, Paenibacillus macerans
agtctggtgtttaaggctgt

SEQ ID NO: 18455 - DNA, 20 bp, Paenibacillus lautus
tgggtgtttaaccccagggc

SEQ ID NO: 18456 - DNA, 20 bp, Empedobacter brevis
tgagtgatgttgaagtggct

SEQ ID NO: 18457 - DNA, 20 bp, Bacteroides merdae
cactccttctagcaatagca

SEQ ID NO: 18458 - DNA, 30 bp, Streptococcus alactolyticus
ctaataccgcataacagcttttgacacatg

SEQ ID NO: 18459 - DNA, 20 bp, Corynebacterium group ANF
tactttttatcacatggtaa

SEQ ID NO: 18460 - DNA, 20 bp, Oligella urethralis
tagcaagaggtcttacgatc

SEQ ID NO: 18461 - DNA, 20 bp, Acinetobacter baumannii
gtcgtacaggtagccgtagg

SEQ ID NO: 18462 - DNA, 20 bp, Brevibacillus brevis
ctccttcaattggttctata

SEQ ID NO: 18463 - DNA, 20 bp, Lactococcus raffinolactis
tgaaagtaccaattggtaca

SEQ ID NO: 18464 - DNA, 20 bp, Propionibacterium avidum
ggtagccgtcgaatcgatgg

SEQ ID NO: 18465 - DNA, 20 bp, Streptococcus acidominimus
  misc_feature (3)..(3): n is a, c, g, or t
ggntggatcacctccttcat

SEQ ID NO: 18466 - DNA, 20 bp, Lactococcus raffinolactis
ctaagtgacgcagcaaacgc

SEQ ID NO: 18467 - DNA, 20 bp, Veillonella sp.
acgatctaatcctcggcatc

SEQ ID NO: 18468 - DNA, 20 bp, Corynebacterium pilosum
ttcttgtgttggaaaggcct

SEQ ID NO: 18469 - DNA, 20 bp, Oligella urethralis
cccacacgcgagatggctcg

SEQ ID NO: 18470 - DNA, 30 bp, Gemella morbillorum
ggatgagttgcgcacgggtgagcacgcgta

SEQ ID NO: 18471 - DNA, 20 bp, Bacillus niacini
ttcctctcatgagggaaagt

SEQ ID NO: 18472 - DNA, 20 bp, Eubacterium moniliforme
ggggttgcacttgaaactgt

SEQ ID NO: 18473 - DNA, 20 bp, Finegoldia magna
agtaccatagaagaaagctc

SEQ ID NO: 18474 - DNA, 20 bp, Kingella denitrificans
cggaccttgtgctatttgag

SEQ ID NO: 18475 - DNA, 20 bp, Unknown Organism
  oligonucleotide from CDC group VB-3
acggttacccggagtgattc

SEQ ID NO: 18476 - DNA, 30 bp, Dolosicoccus paucivorans
gtttgacggtatctcaccagaaagccacgg

SEQ ID NO: 18477 - DNA, 30 bp, Streptococcus sanguinis
gatagctaataccgcatgatattgaatatc

SEQ ID NO: 18478 - DNA, 20 bp, Prevotella melaninogenica
cgcgggggtgcctgaagtcc

SEQ ID NO: 18479 - DNA, 20 bp, Pseudomonas fluorescens
gctcacggatttagcggcgg

SEQ ID NO: 18480 - DNA, 20 bp, Campylobacter curvus
ataatatatagggtttctcg

SEQ ID NO: 18481 - DNA, 20 bp, Myroides odoratus
gggtagaaggagcttgcttt

SEQ ID NO: 18482 - DNA, 20 bp, Citrobacter amalonaticus
gcggggaggaagggtgaatg

SEQ ID NO: 18483 - DNA, 20 bp, Streptococcus acidominimus
gcgggagtggaaaatccgct

SEQ ID NO: 18484 - DNA, 20 bp, Vibrio mimicus
tagcgctaggtggaacctgg

SEQ ID NO: 18485 - DNA, 20 bp, Sporosarcina ureae
agggaatgttgaaagccggt

SEQ ID NO: 18486 - DNA, 20 bp, Streptococcus infantarius
gctctggcgccgtgctctca

SEQ ID NO: 18487 - DNA, 20 bp, Prevotella disiens
tgtaatgttttgcatgtacc

SEQ ID NO: 18488 - DNA, 20 bp, Leclercia adecarboxylata
tggatcaccttccctttttc

SEQ ID NO: 18489 - DNA, 20 bp, Dolosicoccus paucivorans
tcaccgccttctttgaaggc

SEQ ID NO: 18490 - DNA, 20 bp, Helcococcus kunzii
gcatgatgtaaatgttaaag

SEQ ID NO: 18491 - DNA, 20 bp, Alloiococcus otitis
gtgcatgctggggaaatgaa

SEQ ID NO: 18492 - DNA, 20 bp, Shewanella algae
tggatcagaatgcccggtga

SEQ ID NO: 18493 - DNA, 20 bp, Streptococcus macacae
gcttttatcgcatgatagga

SEQ ID NO: 18494 - DNA, 20 bp, Paenibacillus azotofixans
ctctgaatcgtttagagata

SEQ ID NO: 18495 - DNA, 20 bp, Brevibacillus brevis
ggtgcttgcaccttatggtt

SEQ ID NO: 18496 - DNA, 30 bp, Corynebacterium group ANF
ggtggagctaatccttttaaagctggtcgt

SEQ ID NO: 18497 - DNA, 20 bp, Peptoniphilus indolicus
gaggatttcggtgccgcagt

SEQ ID NO: 18498 - DNA, 20 bp, Prevotella oris
aaacacgatccaatccttaa

SEQ ID NO: 18499 - DNA, 20 bp, Granulicatella elegans
cccagagaaggaaaagaggc

SEQ ID NO: 18500 - DNA, 20 bp, Finegoldia magna
cccctctctttatgagacat

SEQ ID NO: 18501 - DNA, 20 bp, Dolosicoccus paucivorans
cagcgagtagagtaactgtt

SEQ ID NO: 18502 - DNA, 20 bp, Streptococcus infantarius
tacttgcatgtattaggccg

SEQ ID NO: 18503 - DNA, 20 bp, Atopobium parvulum
gtggataataccgaatactt

SEQ ID NO: 18504 - DNA, 20 bp, Bacteroides stercoris
agttttcccgcatgggatga

SEQ ID NO: 18505 - DNA, 20 bp, Prevotella denticola
gttagggacgtgtccctatt

SEQ ID NO: 18506 - DNA, 20 bp, Finegoldia magna
atacccctctctttatgaga

SEQ ID NO: 18507 - DNA, 20 bp, Clostridium clostridiiforme
cttgtgtcctatcaggcagt

SEQ ID NO: 18508 - DNA, 20 bp, Streptococcus suis
gtcctaaggtgggatagatg

SEQ ID NO: 18509 - DNA, 20 bp, Anaerococcus prevotii
aacacatgtttcaacggtca

SEQ ID NO: 18510 - DNA, 20 bp, Paenibacillus macerans
ctcaaccacagttcgcactg

SEQ ID NO: 18511 - DNA, 20 bp, Corynebacterium pilosum
tccgggtttttccttcttgt

SEQ ID NO: 18512 - DNA, 20 bp, Brevibacillus laterosporus
gagttttgcttcgcatgaag

SEQ ID NO: 18513 - DNA, 20 bp, Anaerococcus prevotii
ctctctttaagagacatcca

SEQ ID NO: 18514 - DNA, 20 bp, Brevibacterium casei
tctcagtttttcggatcgta

SEQ ID NO: 18515 - DNA, 20 bp, Empedobacter brevis
actttataacagattgaatg

SEQ ID NO: 18516 - DNA, 20 bp, Clostridium innocuum
gtatacagagcgcatgctca

SEQ ID NO: 18517 - DNA, 20 bp, Gemella morbillorum
gcacgggtgagcacgcgtag

SEQ ID NO: 18518 - DNA, 20 bp, Anaerococcus prevotii
aataccctatgatatgatag

SEQ ID NO: 18519 - DNA, 30 bp, Paenibacillus lautus
aaaactggatgacttgagtgcagaagagga

SEQ ID NO: 18520 - DNA, 20 bp, Leptotrichia buccalis
aaccgcaagggggaaggtat

SEQ ID NO: 18521 - DNA, 20 bp, Finegoldia magna
cgggatttagtaaacagaag

SEQ ID NO: 18522 - DNA, 20 bp, Peptoniphilus asaccharolyticus
agcgatgaaatttcgacaga

SEQ ID NO: 18523 - DNA, 20 bp, Clostridium clostridiiforme
cattgaaaatcatttaaccg

SEQ ID NO: 18524 - DNA, 20 bp, Leptotrichia buccalis
ggcggtaacgccaagcgaac

SEQ ID NO: 18525 - DNA, 20 bp, Yersinia frederiksenii
gaggaggaaggcatttcact

SEQ ID NO: 18526 - DNA, 20 bp, Bacteroides ovatus
cgaatatcgcatgatatttt

SEQ ID NO: 18527 - DNA, 20 bp, Propionibacterium propionicus
cttgtgggttggaaagattt

SEQ ID NO: 18528 - DNA, 20 bp, Citrobacter freundii
ttagcagagatgctaacgtg

SEQ ID NO: 18529 - DNA, 20 bp, Aeromonas schubertii
catgtctggaaccttgtaga

SEQ ID NO: 18530 - DNA, 20 bp, Tatumella ptyseos
gagaactttgcagagatggc

SEQ ID NO: 18531 - DNA, 30 bp, Bacteroides merdae
cgtaggtggtgatttaagtcagcggtgaaa

SEQ ID NO: 18532 - DNA, 20 bp, Bacteroides stercoris
ctggtatccttgagtgcagc

SEQ ID NO: 18533 - DNA, 20 bp, Sphingomonas paucimobilis
cttggcatttgggtggcgca

SEQ ID NO: 18534 - DNA, 20 bp, Staphylococcus schleiferi
gcccgtatcggaaagtgccg

SEQ ID NO: 18535 - DNA, 20 bp, Leptotrichia buccalis
acatcctgcgtatgcccgtg

SEQ ID NO: 18536 - DNA, 20 bp, Vibrio hollisae
agagattcagaagtgcccga

SEQ ID NO: 18537 - DNA, 20 bp, Edwardsiella tarda
aaagcctgctttctctcgct

SEQ ID NO: 18538 - DNA, 20 bp, Staphylococcus schleiferi
aagttgactgccgggacaaa

SEQ ID NO: 18539 - DNA, 20 bp, Helcococcus kunzii
tttagaaactggttaacttg

SEQ ID NO: 18540 - DNA, 20 bp, Prevotella loescheii
tgcggggataaaggggccca

SEQ ID NO: 18541 - DNA, 20 bp, Clostridium limosum
catcatttcaatgcatgttg

SEQ ID NO: 18542 - DNA, 20 bp, Bacteroides capillosus
actccttacaacggaataac

SEQ ID NO: 18543 - DNA, 20 bp, Empedobacter brevis
gggaatctgagaccggcgca

SEQ ID NO: 18544 - DNA, 20 bp, Streptococcus equi
tggaacgcacagatgatacg

SEQ ID NO: 18545 - DNA, 20 bp, Prevotella loescheii
taaaggggcccacgtgtggg

SEQ ID NO: 18546 - DNA, 20 bp, Paenibacillus alvei
tcctcgcatgagggagatga

SEQ ID NO: 18547 - DNA, 20 bp, Dolosicoccus paucivorans
tcgcatgtttcattgacaaa

SEQ ID NO: 18548 - DNA, 20 bp, Corynebacterium group ANF
ttacctggggttgacatgca

SEQ ID NO: 18549 - DNA, 20 bp, Bacteroides uniformis
caactggcgattggggctaa

SEQ ID NO: 18550 - DNA, 20 bp, Bacillus licheniformis
ccggaaggttgttgtttgac

SEQ ID NO: 18551 - DNA, 20 bp, Anaerococcus prevotii
tgaagctatcatcaaagatt

SEQ ID NO: 18552 - DNA, 20 bp, Streptococcus cristatus
tgatagtcaattaaaaggtg

SEQ ID NO: 18553 - DNA, 20 bp, Bacteroides stercoris
acagaggtaggcggaattcg

SEQ ID NO: 18554 - DNA, 20 bp, Haemophilus paraphrophilus
ggccaggttagaggtgttgg

SEQ ID NO: 18555 - DNA, 30 bp, Empedobacter brevis
acatgcaagccgaggggtacgattctttcg

SEQ ID NO: 18556 - DNA, 20 bp, Streptococcus equi
tgcaagtggaacgcacagat

SEQ ID NO: 18557 - DNA, 20 bp, Streptococcus ferus
cattacgtgacggtacttaa

SEQ ID NO: 18558 - DNA, 20 bp, Dolosicoccus paucivorans
accaagcggatctcttaaag

SEQ ID NO: 18559 - DNA, 20 bp, Staphylococcus schleiferi
cgagcgaacggacaggagct

SEQ ID NO: 18560 - DNA, 20 bp, Brevibacillus centrosporus
ccggggaacccggggttaat

SEQ ID NO: 18561 - DNA, 20 bp, Leptotrichia buccalis
ggcagaatctgtgcttgcac

SEQ ID NO: 18562 - DNA, 20 bp, Bacillus niacini
aggtgcttgcacctcttggt

SEQ ID NO: 18563 - DNA, 20 bp, Finegoldia magna
attactaatgagagtggcga

SEQ ID NO: 18564 - DNA, 20 bp, Staphylococcus capitis
tacaagacagacgtagagat

SEQ ID NO: 18565 - DNA, 20 bp, Bacteroides stercoris
cccgcatggaataactatta

SEQ ID NO: 18566 - DNA, 20 bp, Campylobacter concisus
gcctgtcaaagggagctgcg

SEQ ID NO: 18567 - DNA, 20 bp, Leuconostoc carnosum
cctgacggtaccataccaga

SEQ ID NO: 18568 - DNA, 20 bp, Bacteroides thetaiotaomicron
cttgcaaaccaaagctggcg

SEQ ID NO: 18569 - DNA, 20 bp, Sphingobacterium multivorum
gggggggacgacgtccaggc

SEQ ID NO: 18570 - DNA, 20 bp, Anaerococcus prevotii
tcaaacctcagtgccgaagt

SEQ ID NO: 18571 - DNA, 20 bp, Clostridium clostridiiforme
agagggacacctgcgggaaa

SEQ ID NO: 18572 - DNA, 20 bp, Globicatella sanguinis
aagtcgaacgaaccataact

SEQ ID NO: 18573 - DNA, 20 bp, Capnocytophaga sp.
gcttttgcaggggaagaata

SEQ ID NO: 18574 - DNA, 20 bp, Clostridium clostridiiforme
acatccacgcggtagagaag

SEQ ID NO: 18575 - DNA, 20 bp, Vibrio fluvialis
gaacctggcggtggatcacc

SEQ ID NO: 18576 - DNA, 20 bp, Stenotrophomonas maltophilia
cgaatgagcccatatgggat

SEQ ID NO: 18577 - DNA, 20 bp, Pseudomonas mendocina
aggaagggctgctggttaat

SEQ ID NO: 18578 - DNA, 20 bp, Empedobacter brevis
gtcactaagtatcaactgac

SEQ ID NO: 18579 - DNA, 20 bp, Bacillus badius
agctgtcgcttacagatgga

SEQ ID NO: 18580 - DNA, 20 bp, Vibrio hollisae
ttgtcggggaggaaatcccc

SEQ ID NO: 18581 - DNA, 20 bp, Bacillus mycoides
gccgatcggaagggcggtgg

SEQ ID NO: 18582 - DNA, 20 bp, Enterobacter hormaechei
gcatgacacgaaggaggtga

SEQ ID NO: 18583 - DNA, 20 bp, Proteus vulgaris
gattagctagtaggtgagta

SEQ ID NO: 18584 - DNA, 20 bp, Dolosicoccus paucivorans
caacgtcgcgagaccaagcg

SEQ ID NO: 18585 - DNA, 20 bp, Pseudomonas mendocina
ttaataccctgcagttttga

SEQ ID NO: 18586 - DNA, 20 bp, Oligella urethralis
cggtagcaagaggtcttacg

SEQ ID NO: 18587 - DNA, 20 bp, Streptococcus urinalis
aagaatggaagtaggagtgg

SEQ ID NO: 18588 - DNA, 20 bp, Peptoniphilus asaccharolyticus
atttcgacagattccttcgg

SEQ ID NO: 18589 - DNA, 20 bp, Actinobacillus ureae
atcctggctcagattgagac

SEQ ID NO: 18590 - DNA, 20 bp, Prevotella loescheii
gataactgcttcatggcata

SEQ ID NO: 18591 - DNA, 20 bp, Sphingomonas paucimobilis
gctgtccgggtgcttggcat

SEQ ID NO: 18592 - DNA, 20 bp, Streptococcus alactolyticus
ataacagcttttgacacatg

SEQ ID NO: 18593 - DNA, 20 bp, Finegoldia magna
tgataatacccgaagcctgt

SEQ ID NO: 18594 - DNA, 20 bp, Peptostreptococcus anaerobius
tcgagcgcgtctgttttgat

SEQ ID NO: 18595 - DNA, 20 bp, Bacteroides thetaiotaomicron
tgggttttatattaaagaaa

SEQ ID NO: 18596 - DNA, 20 bp, Macrococcus caseolyticus
tatagatggacccgcgggta

SEQ ID NO: 18597 - DNA, 20 bp, Alloiococcus otitis
acatcttctgccaccttcag

SEQ ID NO: 18598 - DNA, 20 bp, Cardiobacterium hominis
aaaggcctcgcggcaagaga

SEQ ID NO: 18599 - DNA, 20 bp, Enterococcus dispar
aacacatgtttattatttga

SEQ ID NO: 18600 - DNA, 20 bp, Prevotella bivia
gcatcagccatggcgcggga

SEQ ID NO: 18601 - DNA, 20 bp, Psychrobacter phenylpyruvicus
aagctattgtctctcatgag

SEQ ID NO: 18602 - DNA, 20 bp, Propionibacterium propionicus
ctttcaattgtgacgaagct

SEQ ID NO: 18603 - DNA, 20 bp, Microbacterium hominis
cagcaggcggtggccctccc

SEQ ID NO: 18604 - DNA, 20 bp, Prevotella corporis
gagcaagctctgtctgttcg

SEQ ID NO: 18605 - DNA, 20 bp, Vibrio fluvialis
agcatcatggcccttacgag

SEQ ID NO: 18606 - DNA, 20 bp, Micrococcus luteus
acccgcccgtcaagtcacga

SEQ ID NO: 18607 - DNA, 20 bp, Brevibacillus centrosporus
ttcttttgtttcatggcaaa

SEQ ID NO: 18608 - DNA, 20 bp, Geobacillus thermoglucosidasius
ttacaagtccggaggaaggt

SEQ ID NO: 18609 - DNA, 20 bp, Actinomyces naeslundii
gcaggcctgtcccttgtggg

SEQ ID NO: 18610 - DNA, 20 bp, Raoultella terrigena
gttgtgtaggcctaacacat

SEQ ID NO: 18611 - DNA, 20 bp, Bacteroides capillosus
aacgatctagagatagtgag

SEQ ID NO: 18612 - DNA, 20 bp, Brevibacillus brevis
cctggagcttgctctaggga

SEQ ID NO: 18613 - DNA, 20 bp, Microbacterium hominis
acacgcgcgcccgtcaagtc

SEQ ID NO: 18614 - DNA, 20 bp, Bacillus schlegellii
tggcgaaggcagcgcactgg

SEQ ID NO: 18615 - DNA, 20 bp, Actinomyces naeslundii
tgaagcaggcctgtcccttg

SEQ ID NO: 18616 - DNA, 20 bp, Dolosigranulum pigrum
gtagccgttcggaaggtgcg

SEQ ID NO: 18617 - DNA, 20 bp, Proteus vulgaris
cctagcaacgatctctactg

SEQ ID NO: 18618 - DNA, 20 bp, Bacillus flexus
ataacattttctcttgcata

SEQ ID NO: 18619 - DNA, 20 bp, Empedobacter brevis
tactgaaaaggatagccctt

SEQ ID NO: 18620 - DNA, 20 bp, Unknown Organism
  oligonucleotide from CDC group EO-2
agggacttcggttctagcgg

SEQ ID NO: 18621 - DNA, 20 bp, Bacteroides thetaiotaomicron
tcacagaaggcagctacctg

SEQ ID NO: 18622 - DNA, 30 bp, Vibrio hollisae
tacgtactgaggtagaaagtgggggacctt

SEQ ID NO: 18623 - DNA, 20 bp, Vibrio hollisae
tacgtactgaggtagaaagt

SEQ ID NO: 18624 - DNA, 20 bp, Bacteroides merdae
catgatttgtagcaatacag

SEQ ID NO: 18625 - DNA, 20 bp, Finegoldia magna
gagggaagctatatagtgat

SEQ ID NO: 18626 - DNA, 20 bp, Staphylococcus succinus
acgcccttccgaacggctac

SEQ ID NO: 18627 - DNA, 20 bp, Bacteroides vulgatus
gtcttagcttgctaaggccg

SEQ ID NO: 18628 - DNA, 20 bp, Haemophilus paraphrophilus
tgaactttaagtttggcgcc

SEQ ID NO: 18629 - DNA, 20 bp, Actinomyces naeslundii
gtgtgggaaagatgcgcctt

SEQ ID NO: 18630 - DNA, 20 bp, Oligella urethralis
ggcagttaatagtgcagttc

SEQ ID NO: 18631 - DNA, 20 bp, Prevotella intermedia
gacggtgcgatgcaaatagc

SEQ ID NO: 18632 - DNA, 20 bp, Aeromonas hydrophila
tacccaccagctgtgacgtt

SEQ ID NO: 18633 - DNA, 20 bp, Dolosicoccus paucivorans
ccagctcttgacatcggatg

SEQ ID NO: 18634 - DNA, 20 bp, Anaerococcus tetradius
gagtgttaggttcttggaat

SEQ ID NO: 18635 - DNA, 20 bp, Corynebacterium pseudotuberculosis
acatgcaagttcgaacggaa

SEQ ID NO: 18636 - DNA, 20 bp, Enterococcus dispar
ggacgaacgctgtctggcgt

SEQ ID NO: 18637 - DNA, 30 bp, Globicatella sanguinis
gtagattgacggtatctaaccagaaagcca

SEQ ID NO: 18638 - DNA, 20 bp, Streptococcus ferus
gagaacgcatgatggatacc

SEQ ID NO: 18639 - DNA, 20 bp, Paenibacillus pabuli
atccctctgatcggtacaga

SEQ ID NO: 18640 - DNA, 20 bp, Campylobacter concisus
tgagcgaatcgctatcaaag

SEQ ID NO: 18641 - DNA, 20 bp, Brevibacillus brevis
atctcctgtgcgtggaaaga

SEQ ID NO: 18642 - DNA, 20 bp, Stenotrophomonas maltophilia
gttcagtccggattggagtc

SEQ ID NO: 18643 - DNA, 20 bp, Sporosarcina pasteurii
cttcggctgtctctgcagga

SEQ ID NO: 18644 - DNA, 20 bp, Paenibacillus macerans
atagagcttttcttcgggag

SEQ ID NO: 18645 - DNA, 20 bp, Proteus vulgaris
atggctcacctagcaacgat

SEQ ID NO: 18646 - DNA, 20 bp, Neisseria subflava
gaagtaggtaggataccgca

SEQ ID NO: 18647 - DNA, 20 bp, Bacteroides capilosus
tcaacctgtggcctgcattt

SEQ ID NO: 18648 - DNA, 20 bp, Streptococcus macacae
ttgttaaggaagcaagttgg

SEQ ID NO: 18649 - DNA, 20 bp, Peptoniphilus asaccharolyticus
gcgagctagtgatagtaagc

SEQ ID NO: 18650 - DNA, 20 bp, Haemophilus influenzae
agggcttaacacatgcaagt

SEQ ID NO: 18651 - DNA, 20 bp, Corynebacterium pilosum
cttattccgggtttttcctt

SEQ ID NO: 18652 - DNA, 20 bp, Vibrio metschnikovii
ttgccactttgggttcatga

SEQ ID NO: 18653 - DNA, 20 bp, Vibrio hollisae
ataccgctgggggatgacag

SEQ ID NO: 18654 - DNA, 20 bp, Paenibacillus amylolyticus
catcctctgatgcttagcgg

SEQ ID NO: 18655 - DNA, 20 bp, Psychrobacter phenylpyruvicus
ataccaaataagctattgtc

SEQ ID NO: 18656 - DNA, 20 bp, Eggerthella lenta
actaggtgtggggggctccg

SEQ ID NO: 18657 - DNA, 20 bp, Fusobacterium necrogenes
gccccttcgggggaacctag

SEQ ID NO: 18658 - DNA, 20 bp, Citrobacter freundii
ggggataactactggaaaac

SEQ ID NO: 18659 - DNA, 20 bp, Bacillus azotoformans
ctgctaagccgcgaggcttg

SEQ ID NO: 18660 - DNA, 20 bp, Empedobacter brevis
gttggggtttcggcttcagt

SEQ ID NO: 18661 - DNA, 20 bp, Helcococcus ovis
accgttaggaggcagacgtc

SEQ ID NO: 18662 - DNA, 20 bp, Stenotrophomonas maltophilia
gcagcaagcggaaacccata

SEQ ID NO: 18663 - DNA, 20 bp, Gemella morbillorum
gcgatagctaatcccgcata

SEQ ID NO: 18664 - DNA, 20 bp, Paenibacillus azotofixans
gctctctcattaacttagcg

SEQ ID NO: 18665 - DNA, 20 bp, Streptococcus macacae
gagcggaaagtttacactgt

SEQ ID NO: 18666 - DNA, 20 bp, Paenibacillus alvei
ggctttccttcgggacattc

SEQ ID NO: 18667 - DNA, 20 bp, Leuconostoc fallax
cttcggcctcacttagagat

SEQ ID NO: 18668 - DNA, 20 bp, Sporosarcina ureae
ttattcccgaataatcccat

SEQ ID NO: 18669 - DNA, 20 bp, Myroides odoratimimus
gtagaaaaagcttgcttttt

SEQ ID NO: 18670 - DNA, 20 bp, Bacteroides thetaiotaomicron
tactgaagtagtaccgcaag

SEQ ID NO: 18671 - DNA, 20 bp, Prevotella melaninogenica
tccaatcttgaaagccgggt

SEQ ID NO: 18672 - DNA, 20 bp, Stenotrophomonas maltophilia
gatgtgaacgctggcggcta

SEQ ID NO: 18673 - DNA, 20 bp, Bacteroides thetaiotaomicron
acccgatggcataattagac

SEQ ID NO: 18674 - DNA, 20 bp, Clostridium clostridiiforme
ggttgctaccagataaagct

SEQ ID NO: 18675 - DNA, 20 bp, Myroides odoratimimus
tacgagtagggacttgacgg

SEQ ID NO: 18676 - DNA, 20 bp, Brevibacterium casei
atggctggacagagagaggc

SEQ ID NO: 18677 - DNA, 20 bp, Bacillus laevolacticus
gaccgcgctacagagattga

SEQ ID NO: 18678 - DNA, 20 bp, Arthrobacter globiformis
tgacatgttcctgaccgccg

SEQ ID NO: 18679 - DNA, 20 bp, Dolosicoccus paucivorans
cgcatgtttcattgacaaag

SEQ ID NO: 18680 - DNA, 20 bp, Klebsiella oxytoca
gatgaggttaataacctcgg

SEQ ID NO: 18681 - DNA, 20 bp, Actinomyces radingae
gtggcctttgtggttgtgtg

SEQ ID NO: 18682 - DNA, 20 bp, Bacteroides capilosus
gtcgaacggagagctcatga

SEQ ID NO: 18683 - DNA, 20 bp, Corynebacterium group ANF
ccgcttgctccactttgtgt

SEQ ID NO: 18684 - DNA, 20 bp, Bacteroides capillosus
atactggtttacttgagttt

SEQ ID NO: 18685 - DNA, 20 bp, Capnocytophaga sp.
taggtgtggcatcacattta

SEQ ID NO: 18686 - DNA, 20 bp, Bacteroides stercoris
ttcccgcatggaataactat

SEQ ID NO: 18687 - DNA, 20 bp, Achromobacter xylosoxidans
aagcgtagcttaataccggc

SEQ ID NO: 18688 - DNA, 20 bp, Anaerococcus prevotii
cagagggcagctatatagtg

SEQ ID NO: 18689 - DNA, 20 bp, Clostridium clostridiiforme
gagcttgagaagcagagagg

SEQ ID NO: 18690 - DNA, 20 bp, Propionibacterium propionicus
gagcttgcaaggcatcttgt

SEQ ID NO: 18691 - DNA, 20 bp, Corynebacterium pilosum
gcctggtcttccggattagc

SEQ ID NO: 18692 - DNA, 20 bp, Unknown Organism
  oligonucleotide from CDC group EO-2
gtgggaatgtgccacttcta

SEQ ID NO: 18693 - DNA, 20 bp, Bacteroides thetaiotaomicron
atttgaatattctggaaaca

SEQ ID NO: 18694 - DNA, 20 bp, Peptostreptococcus anaerobius
agtcgagcgcgtctgttttg

SEQ ID NO: 18695 - DNA, 20 bp, Anaerococcus prevotii
tatgatatgatagcctcgca

SEQ ID NO: 18696 - DNA, 20 bp, Anaerococcus tetradius
ttccttcgggatgaaaaata

SEQ ID NO: 18697 - DNA, 20 bp, Moellerella wisconsensis
cgggaggaaggcgttgatat

SEQ ID NO: 18698 - DNA, 20 bp, Enterococcus dispar
atagtaaacacatgtttatt

SEQ ID NO: 18699 - DNA, 20 bp, Sporosarcina ureae
aataatccattctctcgcat

SEQ ID NO: 18700 - DNA, 20 bp, Achromobacter xylosoxidans
tacctggtagtcccgcccct

SEQ ID NO: 18701 - DNA, 20 bp, Bacteroides capilosus
atggattgggtttcttagtg

SEQ ID NO: 18702 - DNA, 20 bp, Bacteroides capillosus
tacttgagtttgcacaacgt

SEQ ID NO: 18703 - DNA, 20 bp, Leuconostoc fallax
catcctttgaagatgttaga

SEQ ID NO: 18704 - DNA, 20 bp, Streptococcus acidominimus
atagtgtttactgcatggta

SEQ ID NO: 18705 - DNA, 20 bp, Peptoniphilus indolicus
aggtgtcggaggatttcggt

SEQ ID NO: 18706 - DNA, 20 bp, Oligella urethralis
ctccaatctcttgaagcttc

SEQ ID NO: 18707 - DNA, 20 bp, Sporosarcina ureae
tcagatggggtactccggga

SEQ ID NO: 18708 - DNA, 20 bp, Clostridium clostridiiforme
cgaggaaggatccgcctaaa

SEQ ID NO: 18709 - DNA, 20 bp, Corynebacterium kutscheri
ttaggtctgtatacaggctg

SEQ ID NO: 18710 - DNA, 30 bp, Paenibacillus azotofixans
aatacgttagagatagcgtaggccttcggg

SEQ ID NO: 18711 - DNA, 20 bp, Serratia proteamaculans
ggtgtgttaatagcgcatca

SEQ ID NO: 18712 - DNA, 20 bp, Dolosicoccus paucivorans
tcaatgattcgcatgtttca

SEQ ID NO: 18713 - DNA, 20 bp, Anaerococcus prevotii
tgaaatcacatatgcacatg

SEQ ID NO: 18714 - DNA, 20 bp, Bacteroides merdae
tgtagcaatacagattgatg

SEQ ID NO: 18715 - DNA, 30 bp, Anaerococcus tetradius
tcattaagttggggactctagatatactgc

SEQ ID NO: 18716 - DNA, 20 bp, Kocuria varians
ttcagagatgttccttcccc

SEQ ID NO: 18717 - DNA, 20 bp, Stenotrophomonas maltophilia
gccctttcagcggggaagga

SEQ ID NO: 18718 - DNA, 20 bp, Bacteroides stercoris
acactgggatagcctttcga

SEQ ID NO: 18719 - DNA, 20 bp, Bacteroides capillosus
atgcccgttgtatggccttt

SEQ ID NO: 18720 - DNA, 30 bp, Prevotella bivia
aaagttggactaataccttatgtattcgtt

SEQ ID NO: 18721 - DNA, 20 bp, Brevibacillus centrosporus
ctcgcatgaggcgaagacgg

SEQ ID NO: 18722 - DNA, 20 bp, Streptococcus pyogenes
ctgggtgcttgcaccggttc

SEQ ID NO: 18723 - DNA, 30 bp, Pseudomonas luteola
aggacggtaccacgggtgattcatgactgg

SEQ ID NO: 18724 - DNA, 20 bp, Leuconostoc fallax
cacatttcgcatgaagtgtg

SEQ ID NO: 18725 - DNA, 20 bp, Fusobacterium necrogenes
cgggggaacctagtgacagg

SEQ ID NO: 18726 - DNA, 20 bp, Aeromonas schubertii
aacccctaggggaacctgcg

SEQ ID NO: 18727 - DNA, 20 bp, Bacillus coagulans
cggacttgttagaagcttgc

SEQ ID NO: 18728 - DNA, 30 bp, Bacteroides capillosus
caacctgtggcctgcatttgaaactgtagt

SEQ ID NO: 18729 - DNA, 20 bp, Sphingobacterium multivorum
gcatgttcggttgattaaat

SEQ ID NO: 18730 - DNA, 20 bp, Clostridium clostridiiforme
cagataaagctgagcactcc

SEQ ID NO: 18731 - DNA, 20 bp, Campylobacter curvus
cggactttgttcgtctgcga

SEQ ID NO: 18732 - DNA, 30 bp, Eremococcus coleocola
ggatcgtaaagcactgttattagccaagaa

SEQ ID NO: 18733 - DNA, 20 bp, Propionibacterium propionicus
ttgtgacggtagcagtagaa

SEQ ID NO: 18734 - DNA, 20 bp, Eremococcus coleocola
gtttctcttcggagcataga

SEQ ID NO: 18735 - DNA, 20 bp, Clostridium subterminale
ccgcataatgtatgagaatc

SEQ ID NO: 18736 - DNA, 20 bp, Bacillus niacini
ttgaaagtcggtttacgctg

SEQ ID NO: 18737 - DNA, 20 bp, Providencia alcalifaciens
gacgaccggcggcggggtga

SEQ ID NO: 18738 - DNA, 20 bp, Prevotella bivia
gtgaccgtacaggatcgacc

SEQ ID NO: 18739 - DNA, 20 bp, Propionibacterium propionicus
tttcaattgtgacgaagctt

SEQ ID NO: 18740 - DNA, 20 bp, Anaerococcus tetradius
aatgaaaataagcggattag

SEQ ID NO: 18741 - DNA, 20 bp, Haemophilus influenzae
ttgatcatggctcagatttg

SEQ ID NO: 18742 - DNA, 20 bp, Bacteroides thetaiotaomicron
ggggaaacccataggccgta

SEQ ID NO: 18743 - DNA, 20 bp, Leuconostoc fallax
tgacatcctttgaagatgtt

SEQ ID NO: 18744 - DNA, 20 bp, Clostridium subterminale
catgatttttgtaccaaagg

SEQ ID NO: 18745 - DNA, 30 bp, Streptococcus ferus
tctgttgttaaggaagaacggtaatgggag

SEQ ID NO: 18746 - DNA, 20 bp, Propionibacterium propionicus
ttttttgtgacggtagcagt

SEQ ID NO: 18747 - DNA, 30 bp, Streptococcus macacae
cggaaagtttacactgtgacggtagcttac

SEQ ID NO: 18748 - DNA, 20 bp, Shewanella putrefaciens
catccacagaatctcgcttc

SEQ ID NO: 18749 - DNA, 20 bp, Corynebacterium kutscheri
ttattttgtgacggtaccta

SEQ ID NO: 18750 - DNA, 20 bp, Eubacterium moniliforme
tgccctgcaatgggggacaa

SEQ ID NO: 18751 - DNA, 20 bp, Sphingobacterium multivorum
caggcattcatggcccttac

SEQ ID NO: 18752 - DNA, 20 bp, Dolosicoccus paucivorans
ggtatcgctaaaggatggtc

SEQ ID NO: 18753 - DNA, 20 bp, Atopobium parvulum
agccacgggaaaccgtggat

SEQ ID NO: 18754 - DNA, 20 bp, Moraxella atlantae
aggagcttatgggtttctgc

SEQ ID NO: 18755 - DNA, 20 bp, Staphylococcus succinus
cacgcccttccgaacggcta

SEQ ID NO: 18756 - DNA, 20 bp, Bacteroides ovatus
atagcatacgaatatcgcat

SEQ ID NO: 18757 - DNA, 20 bp, Bacteroides thetaiotaomicron
accgcaaggagcgtctaggg

SEQ ID NO: 18758 - DNA, 20 bp, Globicatella sanguinis
gtggcctaaccaataggagg

SEQ ID NO: 18759 - DNA, 20 bp, Lactococcus raffinolactis
agtaccaaatggtacactga

SEQ ID NO: 18760 - DNA, 20 bp, Myroides odoratimimus
aggacactgccattgatact

SEQ ID NO: 18761 - DNA, 20 bp, Alloiococcus otitis
accgcttatggatagcctcg

SEQ ID NO: 18762 - DNA, 20 bp, Empedobacter brevis
tactttataacagattgaat

SEQ ID NO: 18763 - DNA, 20 bp, Bacteroides ovatus
tacagaaggcggctacctgg

SEQ ID NO: 18764 - DNA, 20 bp, Leptotrichia buccalis
agctgtgcttgcacaggcga

SEQ ID NO: 18765 - DNA, 20 bp, Campylobacter curvus
catttatatataagtataaa

SEQ ID NO: 18766 - DNA, 20 bp, Empedobacter brevis
caacaagatgcgaatctcga

SEQ ID NO: 18767 - DNA, 20 bp, Finegoldia magna
taaagcattggaaactgata

SEQ ID NO: 18768 - DNA, 30 bp, Capnocytophaga sp.
ctgaggcggtgaaagatgagtatgcgttct

SEQ ID NO: 18769 - DNA, 20 bp, Paenibacillus validus
ggccctttccttcgggatag

SEQ ID NO: 18770 - DNA, 20 bp, Leptotrichia buccalis
gcatgtcaggctgatgaaag

SEQ ID NO: 18771 - DNA, 20 bp, Clostridium clostridiiforme
ccggcgagactgccatcgac

SEQ ID NO: 18772 - DNA, 20 bp, Bacteroides merdae
taggagtttgcgatacaatg

SEQ ID NO: 18773 - DNA, 20 bp, Pediococcus acidilactici
ctgtctggtctgtactgcgc

SEQ ID NO: 18774 - DNA, 20 bp, Clostridium clostridiiforme
agagaagcgagcccgaaagg

SEQ ID NO: 18775 - DNA, 20 bp, Anaerococcus prevotii
gcttaaatgatctcttcgga

SEQ ID NO: 18776 - DNA, 20 bp, Empedobacter brevis
ctgttggggtttcggcttca

SEQ ID NO: 18777 - DNA, 20 bp, Leptotrichia buccalis
gtgcttgcacaggcgagcca

SEQ ID NO: 18778 - DNA, 20 bp, Empedobacter brevis
gcgtgttaatagcacgtgca

SEQ ID NO: 18779 - DNA, 20 bp, Corynebacterium kutscheri
ccacgtttgtggagggagtg

SEQ ID NO: 18780 - DNA, 20 bp, Bacteroides capillosus
tgagtttgcacaacgttggc

SEQ ID NO: 18781 - DNA, 20 bp, Bacillus laevolacticus
ccgcgctacagagattgacc

SEQ ID NO: 18782 - DNA, 20 bp, Lactococcus raffinolactis
aagtaccaattggtacactg

SEQ ID NO: 18783 - DNA, 20 bp, Clostridium clostridiiforme
tccctcttcggagcaatgga

SEQ ID NO: 18784 - DNA, 20 bp, Bacteroides stercoris
attgcaactgactgaatcgg

SEQ ID NO: 18785 - DNA, 20 bp, Ochrobactrum intermedium
cactagggaataactcaggg

SEQ ID NO: 18786 - DNA, 20 bp, Paenibacillus azotofixans
ggagcttgctcttgatcaac

SEQ ID NO: 18787 - DNA, 20 bp, Bacteroides capillosus
tggcctttcggctatgtgac

SEQ ID NO: 18788 - DNA, 20 bp, Sphingobacterium multivorum
aagagtgcagagacgcactc

SEQ ID NO: 18789 - DNA, 20 bp, Pseudomonas mendocina
gtgcccccccgacgtgctgg

SEQ ID NO: 18790 - DNA, 20 bp, Vagococcus fluvialis
ggagaataataaaagacgct

SEQ ID NO: 18791 - DNA, 20 bp, Shewanella putrefaciens
aatctcgcttcagagatagc

SEQ ID NO: 18792 - DNA, 20 bp, Stenotrophomonas maltophilia
ccgcgagcagcaagcggaaa

SEQ ID NO: 18793 - DNA, 20 bp, Unknown Organism
  oligonucleotide from CDC group VB-3
gggggacggttacccggagt

SEQ ID NO: 18794 - DNA, 20 bp, Enterobacter gergoviae
tgtggttcttgaggccgtgg

SEQ ID NO: 18795 - DNA, 20 bp, Oligella urethralis
cggccgctccggtagcaaga

SEQ ID NO: 18796 - DNA, 20 bp, Suttonella indologenes
gctgcggacctagtggcgga

SEQ ID NO: 18797 - DNA, 20 bp, Clostridium clostridiiforme
gcgcagacgaaactggagag

SEQ ID NO: 18798 - DNA, 20 bp, Vibrio parahaemolyticus
ttgcgaaagtcgagcgaatc

SEQ ID NO: 18799 - DNA, 20 bp, Paenibacillus alvei
ccttcttcggaacattcaag

SEQ ID NO: 18800 - DNA, 20 bp, Streptococcus macacae
tgcagctgcacccctatcag

SEQ ID NO: 18801 - DNA, 20 bp, Brevibacterium casei
gtaacacccgtaagccggtg

SEQ ID NO: 18802 - DNA, 20 bp, Listeria welshimeri
gacaaagtgcacaggtggtg

SEQ ID NO: 18803 - DNA, 20 bp, Providencia alcalifaciens
tgacgaccggcggcggggtg

SEQ ID NO: 18804 - DNA, 20 bp, Streptococcus criceti
ttaatgacttgaaaggtgca

SEQ ID NO: 18805 - DNA, 20 bp, Leuconostoc carnosum
ctcaggagaacgctggtggc

SEQ ID NO: 18806 - DNA, 20 bp, Bacteroides thetaiotaomicron
tatttcccgcatgggtttta

SEQ ID NO: 18807 - DNA, 20 bp, Streptococcus criceti
atggcaccactatcagatgg

SEQ ID NO: 18808 - DNA, 20 bp, Myroides odoratimimus
caggttactacgtatttatt

SEQ ID NO: 18809 - DNA, 20 bp, Streptococcus macacae
tctccaattgacggtactta

SEQ ID NO: 18810 - DNA, 20 bp, Bacillus sp
aaggggttctacttgcttcc

SEQ ID NO: 18811 - DNA, 30 bp, Vibrio harveyi
cccgtcacaccatgggtagtgggctgcata

SEQ ID NO: 18812 - DNA, 20 bp, Streptococcus cristatus
attgcatgatagtcaattaa

SEQ ID NO: 18813 - DNA, 20 bp, Bacteroides capilosus
gggtgtgaaaaccacgggct

SEQ ID NO: 18814 - DNA, 20 bp, Empedobacter brevis
aaggaggattaatactttat

SEQ ID NO: 18815 - DNA, 20 bp, Bacillus azotoformans
tgctaagccgcgaggcttga

SEQ ID NO: 18816 - DNA, 20 bp, Eremococcus coleocola
atcatcgcctgatggttgat

SEQ ID NO: 18817 - DNA, 20 bp, Globicatella sanguinis
agattgacggtatctaacca

SEQ ID NO: 18818 - DNA, 20 bp, Brevibacterium casei
cagtctcagtttttcggatc

SEQ ID NO: 18819 - DNA, 20 bp, Bacillus laevolacticus
cagagattgaccttgccctt

SEQ ID NO: 18820 - DNA, 20 bp, Bacteroides thetaiotaomicron
agcgtctagggtaagattgg

SEQ ID NO: 18821 - DNA, 20 bp, Moellerella wisconsensis
ggaggaaggcgttgatacta

SEQ ID NO: 18822 - DNA, 20 bp, Vibrio harveyi
atgggtagtgggctgcataa

SEQ ID NO: 18823 - DNA, 20 bp, Lactococcus raffinolactis
taccaattggtacactgaga

SEQ ID NO: 18824 - DNA, 20 bp, Citrobacter werkmanii
gcgcgcagcgcctaacacat

SEQ ID NO: 18825 - DNA, 20 bp, Anaerococcus tetradius
gaatgaaaataagcggatta

SEQ ID NO: 18826 - DNA, 20 bp, Bacteroides capilosus
tcgtccaatggattgggttt

SEQ ID NO: 18827 - DNA, 20 bp, Actinomyces meyeri
cggtttttgctggggggagt

SEQ ID NO: 18828 - DNA, 20 bp, Haemophilus paraphrophilus
gggccaggttagaggtgttg

SEQ ID NO: 18829 - DNA, 20 bp, Achromobacter xylosoxidans
ccctaaacgatgtcactagc

SEQ ID NO: 18830 - DNA, 20 bp, Brevibacillus brevis
cggatatgacgcacggaggc

SEQ ID NO: 18831 - DNA, 20 bp, Dolosicoccus paucivorans
cgagaagcaacgtcgcgaga

SEQ ID NO: 18832 - DNA, 20 bp, Citrobacter freundii
gaagttagcagagatgctaa

SEQ ID NO: 18833 - DNA, 20 bp, Eubacterium moniliforme
caaagggcagcgacctcgta

SEQ ID NO: 18834 - DNA, 20 bp, Sporosarcina ureae
cagatggggtactccgggaa

SEQ ID NO: 18835 - DNA, 20 bp, Citrobacter werkmanii
gaacgctgcgcgcgcagcgc

SEQ ID NO: 18836 - DNA, 20 bp, Sporosarcina ureae
gatggggtactccgggaacc

SEQ ID NO: 18837 - DNA, 20 bp, Leuconostoc fallax
agttgcgaaccggcgacggt

SEQ ID NO: 18838 - DNA, 20 bp, Campylobacter curvus
tactccatttatatataagt

SEQ ID NO: 18839 - DNA, 20 bp, Streptococcus macacae
cagctattgaaactgtcaga

SEQ ID NO: 18840 - DNA, 30 bp, Streptococcus criceti
gctaataccgcataatagtgattaactcat

SEQ ID NO: 18841 - DNA, 20 bp, Clostridium clostridiiforme
caaccccggtactgctttgg

SEQ ID NO: 18842 - DNA, 20 bp, Anaerococcus tetradius
gatgaagatatttagattcc

SEQ ID NO: 18843 - DNA, 20 bp, Leuconostoc pseudomesenteroides
agtgtcgcatgatacgaagt

SEQ ID NO: 18844 - DNA, 20 bp, Stenotrophomonas maltophilia
gaaacccataaagccctgat

SEQ ID NO: 18845 - DNA, 20 bp, Eubacterium moniliforme
gtaaaaggattcattcgatg

SEQ ID NO: 18846 - DNA, 20 bp, Streptococcus vestibularis
taacaataggtgacacatgt

SEQ ID NO: 18847 - DNA, 20 bp, Streptococcus infantarius
ccgtatcggaagggcgggtg

SEQ ID NO: 18848 - DNA, 20 bp, Achromobacter xylosoxidans
gggttaatacctcgcgaaac

SEQ ID NO: 18849 - DNA, 20 bp, Myroides odoratimimus
cttgcttttttgagaccggc

SEQ ID NO: 18850 - DNA, 20 bp, Eubacterium moniliforme
ttgacatcctctgacgcata

SEQ ID NO: 18851 - DNA, 20 bp, Paenibacillus macerans
tctaagactgggataacatt

SEQ ID NO: 18852 - DNA, 20 bp, Finegoldia magna
catgttttaacggtcaaaga

SEQ ID NO: 18853 - DNA, 20 bp, Clostridium clostridiiforme
ctcggcgcgcagacgaaact

SEQ ID NO: 18854 - DNA, 20 bp, Leptotrichia buccalis
gctggagtattggagaggtg

SEQ ID NO: 18855 - DNA, 20 bp, Paenibacillus azotofixans
gttgtgatggagcttgctct

SEQ ID NO: 18856 - DNA, 20 bp, Empedobacter brevis
ctttcgggaatctgagaccg

SEQ ID NO: 18857 - DNA, 20 bp, Bacteroides stercoris
tgcaactgactgagctggaa

SEQ ID NO: 18858 - DNA, 20 bp, Staphylococcus succinus
atgatcaaactactatctgg

SEQ ID NO: 18859 - DNA, 20 bp, Unknown Organism
  oligonucleotide from CDC group EF-4B
ttaatacccatgactgatga

SEQ ID NO: 18860 - DNA, 20 bp, Citrobacter freundii
aggatgccagccacactgga

SEQ ID NO: 18861 - DNA, 20 bp, Bacteroides thetaiotaomicron
ccatgatagccgggggtact

SEQ ID NO: 18862 - DNA, 20 bp, Corynebacterium propinquum
gcggcttaacacatgcaagt

SEQ ID NO: 18863 - DNA, 20 bp, Sphingobacterium multivorum
tacgcttcggggctatcaca

SEQ ID NO: 18864 - DNA, 20 bp, Corynebacterium group ANF
gtgtggtgtcgaaggtggga

SEQ ID NO: 18865 - DNA, 20 bp, Leptotrichia buccalis
tctttggcgaagctgtgctt

SEQ ID NO: 18866 - DNA, 20 bp, Microbacterium hominis
cgcgcccgtcaagtcatgaa

SEQ ID NO: 18867 - DNA, 20 bp, Streptococcus acidominimus
gcttctcttttgagcagggg

SEQ ID NO: 18868 - DNA, 20 bp, Anaerococcus prevotii
ctcttcggagtgaccttaag

SEQ ID NO: 18869 - DNA, 20 bp, Helcococcus kunzii
tcggtttagaaactggttaa

SEQ ID NO: 18870 - DNA, 20 bp, Streptococcus criceti
gcctacctaggctgcgatac

SEQ ID NO: 18871 - DNA, 20 bp, Streptococcus urinalis
ctacttcgtgacggtaacta

SEQ ID NO: 18872 - DNA, 20 bp, Anaerococcus prevotii
cttaaatgatctcttcggag

SEQ ID NO: 18873 - DNA, 20 bp, Finegoldia magna
aatgtccggggactctaagt

SEQ ID NO: 18874 - DNA, 20 bp, Vibrio hollisae
attcagaagtgcccgaaagg

SEQ ID NO: 18875 - DNA, 20 bp, Moellerella wisconsensis
cgttgatattaatactatca

SEQ ID NO: 18876 - DNA, 20 bp, Staphylococcus schleiferi
gctaagcccgtcgaaagtgg

SEQ ID NO: 18877 - DNA, 20 bp, Micrococcus luteus
gggggagccgcgaggggggg

SEQ ID NO: 18878 - DNA, 20 bp, Streptococcus sanguinis
gggacggctaactccggtgc

SEQ ID NO: 18879 - DNA, 20 bp, Anaerococcus tetradius
cgcatgaagagcttatcaaa

SEQ ID NO: 18880 - DNA, 20 bp, Burkholderia gladioli
attaatccgcatacgatcca

SEQ ID NO: 18881 - DNA, 20 bp, Capnocytophaga sp.
gtcaggttaagtcctataga

SEQ ID NO: 18882 - DNA, 20 bp, Pediococcus dextrinicus
ttgcaccaaggagatttaaa

SEQ ID NO: 18883 - DNA, 20 bp, Shigella boydii
gggaacgtattcccgtggca

SEQ ID NO: 18884 - DNA, 20 bp, Sporosarcina ureae
caggagtaactgcctgtacc

SEQ ID NO: 18885 - DNA, 20 bp, Clostridium bifermentans
atcatggctcaggatgaagc

SEQ ID NO: 18886 - DNA, 20 bp, Bacillus schlegellii
cccgtctcttagcggcggac

SEQ ID NO: 18887 - DNA, 20 bp, Sporosarcina ureae
gtacaggagtaactgcctgt

SEQ ID NO: 18888 - DNA, 20 bp, Bacillus schlegellii
ctaggtgtgggtggggcgac

SEQ ID NO: 18889 - DNA, 20 bp, Bacteroides thetaiotaomicron
gtttggtttgcttgcaaacc

SEQ ID NO: 18890 - DNA, 30 bp, Weissella paramesenteroides
gtctttaactgatactgacgagcttgctct

SEQ ID NO: 18891 - DNA, 20 bp, Myroides odoratimimus
ctcgcgttaaggcggggact

SEQ ID NO: 18892 - DNA, 20 bp, Streptococcus anginosus
acgccggcggcgggcctaat

SEQ ID NO: 18893 - DNA, 20 bp, Actinomyces meyeri
tgatgctccagctttgttgg

SEQ ID NO: 18894 - DNA, 20 bp, Stenotrophomonas maltophilia
tacccttatcgatatgacgg

SEQ ID NO: 18895 - DNA, 20 bp, Vibrio parahaemolyticus
cccaaaaaggcgtcgtagtc

SEQ ID NO: 18896 - DNA, 20 bp, Neisseria meningitidis
cctcctgggacaacactgac

SEQ ID NO: 18897 - DNA, 20 bp, Streptococcus macacae
cctttagagggattgaaagg

SEQ ID NO: 18898 - DNA, 20 bp, Bacteroides stercoris
catcaaagcttgctttgatg

SEQ ID NO: 18899 - DNA, 20 bp, Streptococcus infantarius
ctaagttttcagcgttctac

SEQ ID NO: 18900 - DNA, 20 bp, Bacteroides thetaiotaomicron
tacccgatggcataattaga

SEQ ID NO: 18901 - DNA, 20 bp, Streptococcus thermophilus
ctccttcatggtcatagctg

SEQ ID NO: 18902 - DNA, 20 bp, Leptotrichia buccalis
gcaagtctttggcagaatct

SEQ ID NO: 18903 - DNA, 20 bp, Bacteroides merdae
acccgggtttgaacgtagtc

SEQ ID NO: 18904 - DNA, 20 bp, Bacteroides thetaiotaomicron
accaaagctggcgaccggcg

SEQ ID NO: 18905 - DNA, 20 bp, Anaerococcus tetradius
gggatgaaaaatattggatt

SEQ ID NO: 18906 - DNA, 20 bp, Kocuria varians
gaccggttcagagatgttcc

SEQ ID NO: 18907 - DNA, 20 bp, Proteus vulgaris
aactactggaaacggggcta

SEQ ID NO: 18908 - DNA, 20 bp, Capnocytophaga sp.
attaaagctgaggcggtgaa

SEQ ID NO: 18909 - DNA, 20 bp, Prevotella loescheii
tgtcggccccttgggtcggt

SEQ ID NO: 18910 - DNA, 20 bp, Sphingobacterium multivorum
gctcgaagatggtgagagtg

SEQ ID NO: 18911 - DNA, 30 bp, Dolosicoccus paucivorans
gtcccgtaacgagcgcaacccctatcgtca

SEQ ID NO: 18912 - DNA, 20 bp, Sporosarcina pasteurii
caagtttcttccttgttcgc

SEQ ID NO: 18913 - DNA, 20 bp, Myroides odoratimimus
atactgcagagcttgaataa

SEQ ID NO: 18914 - DNA, 20 bp, Arcanobacterium pyogenes
ttgtgacggtatgtgcagaa

SEQ ID NO: 18915 - DNA, 20 bp, Proteus mirabilis
aaggttaatacccttgtcaa

SEQ ID NO: 18916 - DNA, 20 bp, Corynebacterium group F1
ctcgagtggcgacacgggtt

SEQ ID NO: 18917 - DNA, 20 bp, Paenibacillus lautus
tttaaccccagggctcaacc

SEQ ID NO: 18918 - DNA, 20 bp, Vibrio hollisae
tgtcggggaggaaatcccca

SEQ ID NO: 18919 - DNA, 20 bp, Globicatella sanguinis
tcgaacgaaccataactaga

SEQ ID NO: 18920 - DNA, 20 bp, Streptococcus infantarius
cccgttcgcaatcttccaac

SEQ ID NO: 18921 - DNA, 20 bp, Pediococcus dextrinicus
caaggtgcttgcaccaagga

SEQ ID NO: 18922 - DNA, 20 bp, Peptoniphilus asaccharolyticus
ggtgtcggagaatttcggtg

SEQ ID NO: 18923 - DNA, 20 bp, Streptococcus ratti
gttttacttttgtacatcgg

SEQ ID NO: 18924 - DNA, 20 bp, Paenibacillus alvei
ctagagatagagtcccttct

SEQ ID NO: 18925 - DNA, 20 bp, Bacillus schlegellii
cccgccgacgggtccagaga

SEQ ID NO: 18926 - DNA, 20 bp, Porphyromonas endodontalis
aggggcagcattattttagc

SEQ ID NO: 18927 - DNA, 20 bp, Helcococcus kunzii
tatacaggaatatcctagag

SEQ ID NO: 18928 - DNA, 20 bp, Peptoniphilus asaccharolyticus
aggtgtcggagaatttcggt

SEQ ID NO: 18929 - DNA, 20 bp, Clostridium clostridiiforme
aacgatgtatgctgggtgtg

SEQ ID NO: 18930 - DNA, 20 bp, Streptococcus macacae
ttaaggaagcaagttggaga

SEQ ID NO: 18931 - DNA, 20 bp, Prevotella loescheii
gtttggcggtgaaggatggg

SEQ ID NO: 18932 - DNA, 20 bp, Myroides odoratimimus
cgaggggtagaaaaagcttg

SEQ ID NO: 18933 - DNA, 20 bp, Capnocytophaga sp.
gacgtcaaatcatccggccc

SEQ ID NO: 18934 - DNA, 20 bp, Facklamia hominis
gaacttgttcccggcaaagt

SEQ ID NO: 18935 - DNA, 20 bp, Neisseria subflava
ttgggcaacctgattgcttg

SEQ ID NO: 18936 - DNA, 20 bp, Dolosicoccus paucivorans
acatcggatgcatagcttag

SEQ ID NO: 18937 - DNA, 20 bp, Anaerococcus tetradius
aataagcggattagtggcga

SEQ ID NO: 18938 - DNA, 20 bp, Streptococcus acidominimus
tgattctcccgtagctgcta

SEQ ID NO: 18939 - DNA, 20 bp, Paenibacillus macerans
ccacagttcgcactggaaac

SEQ ID NO: 18940 - DNA, 20 bp, Fusobacterium necrogenes
tcctaggaagttggcagaga

SEQ ID NO: 18941 - DNA, 20 bp, Paenibacillus macerans
aacgtcttgtggagtaactg

SEQ ID NO: 18942 - DNA, 20 bp, Bacillus schlegellii
ggaagcctttgggtggaagc

SEQ ID NO: 18943 - DNA, 20 bp, Pediococcus parvulus
taaccgcatggttgattttt

SEQ ID NO: 18944 - DNA, 20 bp, Paenibacillus pabuli
tgagagaaagcttgcttttc

SEQ ID NO: 18945 - DNA, 20 bp, Campylobacter concisus
atcgctatcaaagccggtcg

SEQ ID NO: 18946 - DNA, 20 bp, Salmonella choleraesuis
ggataaggctaataaccttg

SEQ ID NO: 18947 - DNA, 20 bp, Prevotella corporis
cgtgggtttttgcaggtacc

SEQ ID NO: 18948 - DNA, 20 bp, Actinomyces neuii
agggaacgtgcggcgtgctt

SEQ ID NO: 18949 - DNA, 20 bp, Eubacterium moniliforme
gggtggaactgtgagtatac

SEQ ID NO: 18950 - DNA, 20 bp, Ignavigranum ruoffiae
gagtcgcctgactcattggg

SEQ ID NO: 18951 - DNA, 20 bp, Haemophilus segnis
atttgggggttgaactttag

SEQ ID NO: 18952 - DNA, 20 bp, Bacillus licheniformis
ctctcggggaaccccggggt

SEQ ID NO: 18953 - DNA, 20 bp, Clostridium bifermentans
caggatgaagcgctggcggc

SEQ ID NO: 18954 - DNA, 20 bp, Bacillus laevolacticus
agggccgaacgctggccggc

SEQ ID NO: 18955 - DNA, 20 bp, Citrobacter amalonaticus
gaggaagggtgaatggttaa

SEQ ID NO: 18956 - DNA, 30 bp, Achromobacter xylosoxidans
tggtagtcccgcccctaaacgatgtcacta

SEQ ID NO: 18957 - DNA, 20 bp, Paenibacillus azotofixans
cttgctctctcattaactta

SEQ ID NO: 18958 - DNA, 20 bp, Moraxella atlantae
gaaagagggcgcttacccgg

SEQ ID NO: 18959 - DNA, 20 bp, Haemophilus influenzae
cgggaccttcaggccacatg

SEQ ID NO: 18960 - DNA, 20 bp, Enterobacter amnigenus
gaggcttgttttctgggtga

SEQ ID NO: 18961 - DNA, 20 bp, Streptococcus macacae
cttcggtacaccggagacag

SEQ ID NO: 18962 - DNA, 20 bp, Finegoldia magna
aagaaggtattcgtatcgta

SEQ ID NO: 18963 - DNA, 20 bp, Citrobacter freundii
tgtggttaataaccgtggtg

SEQ ID NO: 18964 - DNA, 20 bp, Providencia rustigianii
taatatcatcagcgattgac

SEQ ID NO: 18965 - DNA, 20 bp, Porphyromonas endodontalis
atgctagagaggagacgagg

SEQ ID NO: 18966 - DNA, 20 bp, Clostridium clostridiiforme
atcccaaaaagccatcccca

SEQ ID NO: 18967 - DNA, 20 bp, Bacteroides capilosus
attgggtttcttagtggcgg

SEQ ID NO: 18968 - DNA, 20 bp, Propionibacterium avidum
taggcggctagccagtacag

SEQ ID NO: 18969 - DNA, 20 bp, Brevibacillus brevis
tgcgtggaaagaacttcggt

SEQ ID NO: 18970 - DNA, 20 bp, Bacteroides capillosus
tgcccgttgtatggcctttc

SEQ ID NO: 18971 - DNA, 20 bp, Brevibacterium linens
gatatgacgaccgaaggcat

SEQ ID NO: 18972 - DNA, 20 bp, Pseudomonas fluorescens
gtgagcttgctcacggattt

SEQ ID NO: 18973 - DNA, 20 bp, Myroides odoratimimus
aagtcgaggggtagaaaaag

SEQ ID NO: 18974 - DNA, 20 bp, Brevibacillus centrosporus
tcttttgtttcatggcaaaa

SEQ ID NO: 18975 - DNA, 20 bp, Granulicatella adiacens
ccgggcttgcactggtcaat

SEQ ID NO: 18976 - DNA, 20 bp, Eubacterium moniliforme
accgcatggtttagaggtaa

SEQ ID NO: 18977 - DNA, 20 bp, Dolosicoccus paucivorans
gtagagtaactgttactcgt

SEQ ID NO: 18978 - DNA, 20 bp, Streptococcus infantarius
agagccgctttcgccccggt

SEQ ID NO: 18979 - DNA, 20 bp, Brevibacillus brevis
ggatcaacctccttcaattg

SEQ ID NO: 18980 - DNA, 20 bp, Paenibacillus macerans
cgcactggaaactggttaac

SEQ ID NO: 18981 - DNA, 20 bp, Leptotrichia buccalis
caaggcggtaacgccaagcg

SEQ ID NO: 18982 - DNA, 20 bp, Anaerococcus tetradius
tgacataaactcttcgcatg

SEQ ID NO: 18983 - DNA, 20 bp, Clostridium clostridiiforme
attgccggttgctaccagat

SEQ ID NO: 18984 - DNA, 20 bp, Myroides odoratimimus
gcttgaataatatggaagta

SEQ ID NO: 18985 - DNA, 20 bp, Serratia rubidaea
tgtcttaatacggcattaca

SEQ ID NO: 18986 - DNA, 20 bp, Streptococcus macacae
aaagtcagtagttaaaagca

SEQ ID NO: 18987 - DNA, 20 bp, Bacteroides distasonis
tgtcctattttgtatgtacc

SEQ ID NO: 18988 - DNA, 20 bp, Pediococcus dextrinicus
tgcttgcaccaaggagattt

SEQ ID NO: 18989 - DNA, 20 bp, Citrobacter werkmanii
tgcgcgcgcagcgcctaaca

SEQ ID NO: 18990 - DNA, 20 bp, Campylobacter curvus
gactttgttcgtctgcgaag

SEQ ID NO: 18991 - DNA, 20 bp, Myroides odoratimimus
gctccatggtttatcgatat

SEQ ID NO: 18992 - DNA, 20 bp, Neisseria subflava
agcgcaaccccttgtacatt

SEQ ID NO: 18993 - DNA, 20 bp, Paenibacillus macerans
gtctggtgtttaaggctgtg

SEQ ID NO: 18994 - DNA, 20 bp, Dolosicoccus paucivorans
gaccaagcggatctcttaaa

SEQ ID NO: 18995 - DNA, 20 bp, Bacteroides stercoris
gtgcaacagaggtaggcgga

SEQ ID NO: 18996 - DNA, 20 bp, Streptococcus macacae
cagacttgagtacagaaggg

SEQ ID NO: 18997 - DNA, 20 bp, Streptococcus macacae
agcggaaagtttacactgtg

SEQ ID NO: 18998 - DNA, 20 bp, Clostridium clostridiiforme
aactggagagcttgagaagc

SEQ ID NO: 18999 - DNA, 20 bp, Paenibacillus azotofixans
cgagcggagttgtagaggga

SEQ ID NO: 19000 - DNA, 20 bp, Serratia rubidaea
atacggcattacattgacgt

SEQ ID NO: 19001 - DNA, 20 bp, Achromobacter xylosoxidans
tatttggagcggccgatatc

SEQ ID NO: 19002 - DNA, 20 bp, Streptococcus thermophilus
tccttcatggtcatagctgt

SEQ ID NO: 19003 - DNA, 20 bp, Bacteroides capillosus
tagagatagtgaggcccttc

SEQ ID NO: 19004 - DNA, 20 bp, Proteus vulgaris
ctactggctgagagatgatc

SEQ ID NO: 19005 - DNA, 20 bp, Vibrio cholerae
ccggaaggtaaactacctgc

SEQ ID NO: 19006 - DNA, 20 bp, Bacillus badius
ttagctgtcgcttacagatg

SEQ ID NO: 19007 - DNA, 20 bp, Bacteroides merdae
ctccttctagcaatagcaga

SEQ ID NO: 19008 - DNA, 20 bp, Eremococcus coleocola
ctgatggttgattgaaagat

SEQ ID NO: 19009 - DNA, 20 bp, Peptoniphilus indolicus
tcgggaagaagttgagttgg

SEQ ID NO: 19010 - DNA, 20 bp, Pediococcus dextrinicus
aatgatcaaggtgcttgcac

SEQ ID NO: 19011 - DNA, 20 bp, Neisseria flavescens
tgaacgctgacgagcatgct

SEQ ID NO: 19012 - DNA, 30 bp, Gemella morbillorum
gggtgagcacgcgtaggtaccctgcctggt

SEQ ID NO: 19013 - DNA, 20 bp, Streptococcus thermophilus
cctccttcatggtcatagct

SEQ ID NO: 19014 - DNA, 20 bp, Bacteroides stercoris
ctcgctgttggcgatacaat

SEQ ID NO: 19015 - DNA, 20 bp, Empedobacter brevis
gatgttgaagtggctggaat

SEQ ID NO: 19016 - DNA, 20 bp, Prevotella corporis
ttgcccacgcgtgggttttt

SEQ ID NO: 19017 - DNA, 20 bp, Streptococcus macacae
gcacctgagagggtgaccgg

SEQ ID NO: 19018 - DNA, 20 bp, Providencia alcalifaciens
gcggggtgagtaatgtatgg

SEQ ID NO: 19019 - DNA, 20 bp, Anaerococcus prevotii
tagaaacacatgtttcaacg

SEQ ID NO: 19020 - DNA, 20 bp, Ralstonia gilardii
aaagcgggggcccgtaaggc

SEQ ID NO: 19021 - DNA, 20 bp, Campylobacter curvus
tccatactccatttatatat

SEQ ID NO: 19022 - DNA, 20 bp, Shigella boydii
tattcccgtggcattctgat

SEQ ID NO: 19023 - DNA, 20 bp, Providencia alcalifaciens
gaccggcggcggggtgagta

SEQ ID NO: 19024 - DNA, 20 bp, Bacillus niacini
gaaagttgaaagtcggttta

SEQ ID NO: 19025 - DNA, 20 bp, Porphyromonas endodontalis
cagcattattttagcttgct

SEQ ID NO: 19026 - DNA, 20 bp, Dolosicoccus paucivorans
atggtatcgctaaaggatgg

SEQ ID NO: 19027 - DNA, 20 bp, Clostridium clostridiiforme
aaggatccgcctaaagagtg

SEQ ID NO: 19028 - DNA, 20 bp, Alicyclobacillus acidocaldarius
ctgccccgaagggacccctc

SEQ ID NO: 19029 - DNA, 20 bp, Clostridium clostridiiforme
gtgtgggactagcgatagtt

SEQ ID NO: 19030 - DNA, 20 bp, Bacteroides thetaiotaomicron
aagattggtattggggtaag

SEQ ID NO: 19031 - DNA, 20 bp, Macrococcus caseolyticus
cggataatatctagcttcgc

SEQ ID NO: 19032 - DNA, 20 bp, Streptococcus vestibularis
taccgcataacaataggtga

SEQ ID NO: 19033 - DNA, 20 bp, Leuconostoc pseudomesenteroides
tcgcatgatacgaagttaaa

SEQ ID NO: 19034 - DNA, 20 bp, Leuconostoc carnosum
gtatgggaagaaaagttaag

SEQ ID NO: 19035 - DNA, 20 bp, Streptococcus anginosus
gagttttgtcatggttcagg

SEQ ID NO: 19036 - DNA, 20 bp, Bacteroides ovatus
gcagctcactagactgtcac

SEQ ID NO: 19037 - DNA, 20 bp, Moellerella wisconsensis
gggaggaaggcgttgatact

SEQ ID NO: 19038 - DNA, 20 bp, Paenibacillus macerans
ttcgcactggaaactggtta

SEQ ID NO: 19039 - DNA, 20 bp, Providencia rustigianii
aggcgttgatgctaatatcg

SEQ ID NO: 19040 - DNA, 20 bp, Bacteroides merdae
ttctagcaatagcagattac

SEQ ID NO: 19041 - DNA, 20 bp, Clostridium clostridiiforme
gacttgtgtcctatcaggca

SEQ ID NO: 19042 - DNA, 20 bp, Enterococcus durans
tagccgatcggaaggtgcgg

SEQ ID NO: 19043 - DNA, 20 bp, Propionibacterium granulosum
atggatcgggagcttccaga

SEQ ID NO: 19044 - DNA, 30 bp, Helcococcus kunzii
caaggcttgacatatacaggaatatcctag

SEQ ID NO: 19045 - DNA, 20 bp, Brevibacterium casei
ccagtctcagtttttcggat

SEQ ID NO: 19046 - DNA, 20 bp, Streptococcus acidominimus
aatccgctaagtgacggtac

SEQ ID NO: 19047 - DNA, 20 bp, Myroides odoratimimus
gcatcgtattgataataaag

SEQ ID NO: 19048 - DNA, 20 bp, Citrobacter freundii
ttaataaccgtagtgattga

SEQ ID NO: 19049 - DNA, 20 bp, Campylobacter curvus
ccatttatatataagtataa

SEQ ID NO: 19050 - DNA, 30 bp, Empedobacter brevis
tgcgaaggcaggtcactaagtatcaactga

SEQ ID NO: 19051 - DNA, 20 bp, Anaerobiospirillum succiniciproducens
cacaccatgggagcggatgc

SEQ ID NO: 19052 - DNA, 20 bp, Corynebacterium ulcerans
ccttgtggttgtatacaggt

SEQ ID NO: 19053 - DNA, 20 bp, Pseudoramibacter alactolyticus
cggggggatataagagacag

SEQ ID NO: 19054 - DNA, 20 bp, Eremococcus coleocola
taccgcataacagcaatcat

SEQ ID NO: 19055 - DNA, 20 bp, Paenibacillus apiarius
gagcggagctgacggagtgc

SEQ ID NO: 19056 - DNA, 20 bp, Pediococcus parvulus
gcataacaaaattaaccgca

SEQ ID NO: 19057 - DNA, 20 bp, Enterococcus saccharolyticus
cccgcataacgctttttctc

SEQ ID NO: 19058 - DNA, 20 bp, Bacillus schlegellii
ggggcgcccgaaggcgcgtg

SEQ ID NO: 19059 - DNA, 20 bp, Bacteroides capilosus
ataatgcagctgagtcgcat

SEQ ID NO: 19060 - DNA, 20 bp, Dolosicoccus paucivorans
gatgcttatggtatcgctaa

SEQ ID NO: 19061 - DNA, 20 bp, Leptotrichia buccalis
cccgtgagagcgggcagtgc

SEQ ID NO: 19062 - DNA, 20 bp, Brevibacillus thermoruber
cctgtttggagcttgcttca

SEQ ID NO: 19063 - DNA, 20 bp, Unknown Organism
  oligonucleotide from CDC group VB-3
cagggggacggttaccccgg

SEQ ID NO: 19064 - DNA, 20 bp, Bacteroides thetaiotaomicron
gcatgggttttatattaaag

SEQ ID NO: 19065 - DNA, 20 bp, Brevibacillus centrosporus
cgaatattttcttttgtttc

SEQ ID NO: 19066 - DNA, 20 bp, Bacillus niacini
agtcgagcgaatcttgaggt

SEQ ID NO: 19067 - DNA, 20 bp, Fusobacterium mortiferum
cctcggggtgatggtggcgg

SEQ ID NO: 19068 - DNA, 20 bp, Clostridium clostridiiforme
gcagagatgcgcttttggag

SEQ ID NO: 19069 - DNA, 20 bp, Bacteroides distasonis
accgcatgaagcaggggccc

SEQ ID NO: 19070 - DNA, 20 bp, Bacillus licheniformis
ggttatatccggaaggttgt

SEQ ID NO: 19071 - DNA, 20 bp, Bacillus laevolacticus
acagagattgaccttgccct

SEQ ID NO: 19072 - DNA, 20 bp, Anaerococcus tetradius
cgaacgatgaaccttgtatt

SEQ ID NO: 19073 - DNA, 20 bp, Pediococcus dextrinicus
cttgcaccaaggagatttaa

SEQ ID NO: 19074 - DNA, 20 bp, Bordetella trematum
gccggctaatacctggcgct

SEQ ID NO: 19075 - DNA, 20 bp, Leuconostoc fallax
agataatattgttctcttcg

SEQ ID NO: 19076 - DNA, 20 bp, Anaerococcus prevotii
gatcaaagctccggcggtct

SEQ ID NO: 19077 - DNA, 20 bp, Brevibacillus laterosporus
agagttttgcttcgcatgaa

SEQ ID NO: 19078 - DNA, 20 bp, Weissella paramesenteroides
ctgacgagcttgctctgatg

SEQ ID NO: 19079 - DNA, 20 bp, Capnocytophaga sp.
cgtcaaatcatccggccctt

SEQ ID NO: 19080 - DNA, 20 bp, Providencia rustigianii
aacttcggtccttgcgctat

SEQ ID NO: 19081 - DNA, 20 bp, Yersinia frederiksenii
acgtgaagtgattgacgtta

SEQ ID NO: 19082 - DNA, 20 bp, Bacillus laevolacticus
gctggccggcgtgccctaat

SEQ ID NO: 19083 - DNA, 20 bp, Bacillus mycoides
tgcgctgcatggcgcgaaat

SEQ ID NO: 19084 - DNA, 20 bp, Propionibacterium propionicus
gcttgcaaggcatcttgtgg

SEQ ID NO: 19085 - DNA, 20 bp, Streptococcus macacae
ctgcacccctatcagatgga

SEQ ID NO: 19086 - DNA, 20 bp, Myroides odoratimimus
caagtcgaggggtagaaaaa

SEQ ID NO: 19087 - DNA, 20 bp, Haemophilus paraphrophilus
aacgacgggccaggttagag

SEQ ID NO: 19088 - DNA, 20 bp, Corynebacterium coyleae
cctctgcttgcagaggtact

SEQ ID NO: 19089 - DNA, 20 bp, Brevibacterium casei
ttttcggatcgtagtctgca

SEQ ID NO: 19090 - DNA, 20 bp, Dolosicoccus paucivorans
taaatcaatgattcgcatgt

SEQ ID NO: 19091 - DNA, 20 bp, Bacteroides capilosus
acctgtggcctgcatttgaa

SEQ ID NO: 19092 - DNA, 20 bp, Bacteroides capillosus
ttagcggtaagggatgggga

SEQ ID NO: 19093 - DNA, 20 bp, Clostridium clostridiiforme
aaagcggatcgaccctttcg

SEQ ID NO: 19094 - DNA, 20 bp, Sphingobacterium multivorum
cgacgtccaggcattcatgg

SEQ ID NO: 19095 - DNA, 20 bp, Providencia stuartii
tgatgttaataccatcaacg

SEQ ID NO: 19096 - DNA, 20 bp, Campylobacter curvus
tgtttatttatcaaatacct

SEQ ID NO: 19097 - DNA, 20 bp, Anaerococcus prevotii
gcacatgcataaatgatcaa

SEQ ID NO: 19098 - DNA, 20 bp, Prevotella disiens
atgacatctgatttgaatta

SEQ ID NO: 19099 - DNA, 20 bp, Facklamia sourekii
gcatgagtttaagttgaaag

SEQ ID NO: 19100 - DNA, 20 bp, Empedobacter brevis
gggcagctacttggcaacaa

SEQ ID NO: 19101 - DNA, 20 bp, Leptotrichia buccalis
gagctgcaaggcggtaacgc

SEQ ID NO: 19102 - DNA, 20 bp, Gemella morbillorum
ggtgagcacgcgtaggtacc

SEQ ID NO: 19103 - DNA, 20 bp, Bacillus mycoides
agggcggtggatcacctcct

SEQ ID NO: 19104 - DNA, 20 bp, Bacteroides distasonis
gacgtgtcctattttgtatg

SEQ ID NO: 19105 - DNA, 20 bp, Streptococcus acidominimus
gagatagggcttctcttttg

SEQ ID NO: 19106 - DNA, 20 bp, Prevotella loescheii
atttggacgaaaggtttggc

SEQ ID NO: 19107 - DNA, 20 bp, Bacteroides stercoris
aaagcttgctttgatggatg

SEQ ID NO: 19108 - DNA, 20 bp, Streptococcus acidominimus
gagaagaacgttagcgggag

SEQ ID NO: 19109 - DNA, 20 bp, Corynebacterium kutscheri
gtatacaggctggtgcatgg

SEQ ID NO: 19110 - DNA, 20 bp, Eschericchia vulneris
actgagtacacggtccagta

SEQ ID NO: 19111 - DNA, 20 bp, Corynebacterium renale
tccatgccgaaacggtgggc

SEQ ID NO: 19112 - DNA, 20 bp, Streptococcus infantarius
ttagcaagctaagttttcag

SEQ ID NO: 19113 - DNA, 20 bp, Clostridium clostridiiforme
atcccattgaaaatcattta

SEQ ID NO: 19114 - DNA, 20 bp, Bacillus azotoformans
acaatggatggacaaagggc

SEQ ID NO: 19115 - DNA, 20 bp, Eubacterium moniliforme
ttagaggtaaaaggattcat

SEQ ID NO: 19116 - DNA, 20 bp, Proteus vulgaris
tggctcacctagcaacgatc

SEQ ID NO: 19117 - DNA, 20 bp, Leuconostoc pseudomesenteroides
gcatgatacgaagttaaaag

SEQ ID NO: 19118 - DNA, 20 bp, Oligella urethralis
gagcacactccaatctcttg

SEQ ID NO: 19119 - DNA, 20 bp, Achromobacter piechaudii
gccaaggggggcgattacca

SEQ ID NO: 19120 - DNA, 20 bp, Enterobacter gergoviae
ggaggctgtggtccttgaag

SEQ ID NO: 19121 - DNA, 20 bp, Propionibacterium propionicus
taacccattttttggggggg

SEQ ID NO: 19122 - DNA, 20 bp, Globicatella sanguinis
gaggaaatgttagtagattg

SEQ ID NO: 19123 - DNA, 30 bp, Staphylococcus cohnii
ctcagggatgaacgctggtcggcgtgccta

SEQ ID NO: 19124 - DNA, 20 bp, Anaerococcus prevotii
ataccctatgatatgatagc

SEQ ID NO: 19125 - DNA, 20 bp, Burkholderia stabilis
ccgtatcggagggtgcggtt

SEQ ID NO: 19126 - DNA, 20 bp, Facklamia languida
tctggtctgagactgacgct

SEQ ID NO: 19127 - DNA, 30 bp, Clostridium histolyticum
atttaagtgggatgtgaaatcccggggctt

SEQ ID NO: 19128 - DNA, 20 bp, Bacteroides distasonis
cgtgtcctattttgtatgta

SEQ ID NO: 19129 - DNA, 20 bp, Unknown Organism
  oligonucleotide from CDC group VB-3
gtagctagtctaaccttcca

SEQ ID NO: 19130 - DNA, 20 bp, Achromobacter xylosoxidans
gcttaataccggcatacgcc

SEQ ID NO: 19131 - DNA, 20 bp, Bordetella trematum
ccagctaatacctggcgcta

SEQ ID NO: 19132 - DNA, 20 bp, Sphingobacterium multivorum
aaccgataattggggctaag

SEQ ID NO: 19133 - DNA, 20 bp, Streptococcus macacae
gtcagtagttaaaagcattg

SEQ ID NO: 19134 - DNA, 20 bp, Vibrio alginolyticus
tgcccggtgataaaccggag

SEQ ID NO: 19135 - DNA, 20 bp, Sphingobacterium multivorum
taaacagactggctgggcca

SEQ ID NO: 19136 - DNA, 20 bp, Bacteroides capillosus
gtttagcggtaagggatggg

SEQ ID NO: 19137 - DNA, 20 bp, Moraxella osloensis
attgaaagcaggcggcaggc

SEQ ID NO: 19138 - DNA, 20 bp, Bacillus marinus
taccggataaccctgactct

SEQ ID NO: 19139 - DNA, 20 bp, Streptococcus ferus
tccattacgtgacggtactt

SEQ ID NO: 19140 - DNA, 20 bp, Campylobacter curvus
aatatatagggtttctcgct

SEQ ID NO: 19141 - DNA, 20 bp, Morganella morganii
gtcgggaggaaggtggcaag

SEQ ID NO: 19142 - DNA, 20 bp, Gracilibacillus dipsosauri
tgagcatgctgatctacgat

SEQ ID NO: 19143 - DNA, 20 bp, Leuconostoc fallax
acgagttgcgaaccggcgac

SEQ ID NO: 19144 - DNA, 20 bp, Moellerella wisconsensis
ttgatattaatactatcagc

SEQ ID NO: 19145 - DNA, 20 bp, Peptoniphilus asaccharolyticus
ttcgacagattccttcgggg

SEQ ID NO: 19146 - DNA, 20 bp, Bacteroides distasonis
cccgcatggggatatttgct

SEQ ID NO: 19147 - DNA, 20 bp, Clostridium clostridiiforme
atgctgggtgtgggactagc

SEQ ID NO: 19148 - DNA, 30 bp, Corynebacterium kutscheri
gcttgacatgtacaggatcgggctagagat

SEQ ID NO: 19149 - DNA, 20 bp, Leuconostoc fallax
ttgaagatgttagagataat

SEQ ID NO: 19150 - DNA, 20 bp, Escherichia hermannii
catggacaactgtggtgacg

SEQ ID NO: 19151 - DNA, 20 bp, Brevibacillus brevis
acctgcggttgggatcaacc

SEQ ID NO: 19152 - DNA, 20 bp, Dolosicoccus paucivorans
atcaccgccttctttgaagg

SEQ ID NO: 19153 - DNA, 20 bp, Bacillus schlegellii
cccgaaggcgcgtgcagcgc

SEQ ID NO: 19154 - DNA, 20 bp, Paenibacillus macerans
agacaggggacacaggtggt

SEQ ID NO: 19155 - DNA, 20 bp, Staphylococcus auricularis
gtgggtaacttacctataag

SEQ ID NO: 19156 - DNA, 20 bp, Shigella boydii
cagcgaatcagcaagctgat

SEQ ID NO: 19157 - DNA, 20 bp, Myroides odoratimimus
gatactgcagagcttgaata

SEQ ID NO: 19158 - DNA, 20 bp, Bacteroides capillosus
cgatctaatctttaaaaccg

SEQ ID NO: 19159 - DNA, 20 bp, Brevibacillus thermoruber
cggatcctgtttggagcttg

SEQ ID NO: 19160 - DNA, 20 bp, Lactococcus raffinolactis
agttgtttggggctatccag

SEQ ID NO: 19161 - DNA, 20 bp, Paenibacillus alvei
acttctgagacttagcggcg

SEQ ID NO: 19162 - DNA, 20 bp, Bacteroides stercoris
tgaattgcaactgactgagc

SEQ ID NO: 19163 - DNA, 20 bp, Enterobacter amnigenus
agcttgttttcgggtgacga

SEQ ID NO: 19164 - DNA, 20 bp, Yersinia frederiksenii
atttcacttaatacgtgaag

SEQ ID NO: 19165 - DNA, 20 bp, Listeria monocytogenes
atcgcttacagatggggccc

SEQ ID NO: 19166 - DNA, 20 bp, Haemophilus segnis
ttgggggttgaactttaggt

SEQ ID NO: 19167 - DNA, 30 bp, Unknown Organism
  oligonucleotide from CDC group EF-4B
cgcatacactttgagaaggaaagcaggggc

SEQ ID NO: 19168 - DNA, 20 bp, Providencia rustigianii
cgttgatgctaatatcgtca

SEQ ID NO: 19169 - DNA, 20 bp, Burkholderia gladioli
cggattaatccgcatacgat

SEQ ID NO: 19170 - DNA, 20 bp, Bacteroides stercoris
acaacactgggatagccttt

SEQ ID NO: 19171 - DNA, 20 bp, Bacillus schlegellii
cgggcagcgctgaaggcgaa

SEQ ID NO: 19172 - DNA, 20 bp, Alloiococcus otitis
gccaccttcagagatgaagg

SEQ ID NO: 19173 - DNA, 20 bp, Anaerococcus tetradius
aattagagatagtttcttaa

SEQ ID NO: 19174 - DNA, 20 bp, Lactococcus raffinolactis
ctgagagatggacccgcgtt

SEQ ID NO: 19175 - DNA, 20 bp, Pseudoramibacter alactolyticus
ttattgacccttcgggggga

SEQ ID NO: 19176 - DNA, 20 bp, Eschericchia vulneris
tccagtactcctactgggag

SEQ ID NO: 19177 - DNA, 20 bp, Streptococcus macacae
tatcgcatgataggagctta

SEQ ID NO: 19178 - DNA, 20 bp, Bacillus azotoformans
ggatggacaaagggctgcta

SEQ ID NO: 19179 - DNA, 20 bp, Prevotella loescheii
catccggcttgcagcgcgaa

SEQ ID NO: 19180 - DNA, 20 bp, Shewanella putrefaciens
ctcgcttcagagatagctta

SEQ ID NO: 19181 - DNA, 20 bp, Streptococcus acidominimus
cgggagtggaaaatccgcta

SEQ ID NO: 19182 - DNA, 20 bp, Achromobacter xylosoxidans
tggtagtcccgcccctaaac

SEQ ID NO: 19183 - DNA, 20 bp, Bacteroides stercoris
ggtatccttgagtgcagcag

SEQ ID NO: 19184 - DNA, 20 bp, Streptococcus cristatus
gatagtcaattaaaaggtgc

SEQ ID NO: 19185 - DNA, 20 bp, Streptococcus acidominimus
tccgctaagtgacggtacct

SEQ ID NO: 19186 - DNA, 20 bp, Facklamia hominis
aacttgttcccggcaaagtt

SEQ ID NO: 19187 - DNA, 20 bp, Propionibacterium granulosum
gatcgggagcttccagagat

SEQ ID NO: 19188 - DNA, 20 bp, Bacteroides distasonis
gaagcaggggccccgcatgg

SEQ ID NO: 19189 - DNA, 20 bp, Rothia dentocariosa
agcgtctcatcctgaggcca

SEQ ID NO: 19190 - DNA, 20 bp, Vibrio harveyi
gtcgagttccggatcggagt

SEQ ID NO: 19191 - DNA, 20 bp, Corynebacterium pilosum
ggtcttccggattagctttg

SEQ ID NO: 19192 - DNA, 20 bp, Proteus vulgaris
ctagtaggtgagtaatggct

SEQ ID NO: 19193 - DNA, 20 bp, Corynebacterium pseudodiphtheriticum
ttgatcatggctcaggaccg

SEQ ID NO: 19194 - DNA, 30 bp, Streptococcus criceti
tcaagtgacggtatcttaccagaaagggac

SEQ ID NO: 19195 - DNA, 20 bp, Pseudomonas mendocina
ggaagggctgctggttaata

SEQ ID NO: 19196 - DNA, 20 bp, Dolosicoccus paucivorans
aagaacagcgagtagagtaa

SEQ ID NO: 19197 - DNA, 20 bp, Bacillus schlegellii
tggggcgacccatccgtgcc

SEQ ID NO: 19198 - DNA, 20 bp, Dolosicoccus paucivorans
caatgattcgcatgtttcat

SEQ ID NO: 19199 - DNA, 20 bp, Corynebacterium group F1
acacgggttgagtaacacgt

SEQ ID NO: 19200 - DNA, 20 bp, Peptostreptococcus anaerobius
cttgcattgatgaaagatga

SEQ ID NO: 19201 - DNA, 20 bp, Bacteroides capillosus
aaggtttagcggtaagggat

SEQ ID NO: 19202 - DNA, 20 bp, Bacteroides stercoris
tcccgcatgggatgattatt

SEQ ID NO: 19203 - DNA, 30 bp, Globicatella sanguinis
gaagccggtggcctaaccaataggagggag

SEQ ID NO: 19204 - DNA, 20 bp, Pseudomonas mendocina
ctgctggttaataccctgca

SEQ ID NO: 19205 - DNA, 20 bp, Prevotella oralis
gggataaagttggggacgtg

SEQ ID NO: 19206 - DNA, 20 bp, Neisseria meningitidis
cgggtaagcgggctccttgc

SEQ ID NO: 19207 - DNA, 20 bp, Bacteroides merdae
gcgatacaatgtaagctcta

SEQ ID NO: 19208 - DNA, 20 bp, Vibrio cholerae
cctcccggaaggtaaactac

SEQ ID NO: 19209 - DNA, 20 bp, Eubacterium moniliforme
tgcaatgggggacaacagtt

SEQ ID NO: 19210 - DNA, 20 bp, Anaerococcus tetradius
tcttttttatgggatgaaaa

SEQ ID NO: 19211 - DNA, 20 bp, Corynebacterium group ANF
tgaaggtagtggatcgagcg

SEQ ID NO: 19212 - DNA, 20 bp, Streptococcus suis
taacagtattaaccgcatgg

SEQ ID NO: 19213 - DNA, 20 bp, Leuconostoc carnosum
tagcctgacggtaccatacc

SEQ ID NO: 19214 - DNA, 20 bp, Bacteroides capillosus
agtttgcacaacgttggcgg

SEQ ID NO: 19215 - DNA, 20 bp, Stenotrophomonas maltophilia
aagccctgatcgttcagtcc

SEQ ID NO: 19216 - DNA, 20 bp, Streptococcus acidominimus
ataatagtgtttactgcatg

SEQ ID NO: 19217 - DNA, 20 bp, Anaerococcus prevotii
atatgatagcctcgcatgaa

SEQ ID NO: 19218 - DNA, 20 bp, Proteus mirabilis
caggggaacctgcggcttgg

SEQ ID NO: 19219 - DNA, 20 bp, Anaerococcus tetradius
atgaagagcttatcaaagat

SEQ ID NO: 19220 - DNA, 20 bp, Haemophilus paraphrophilus
aggttagaggtgttggatcc

SEQ ID NO: 19221 - DNA, 20 bp, Cedecea lapagei
cgcgacagcgttcaatctga

SEQ ID NO: 19222 - DNA, 20 bp, Enterobacter amnigenus
gcttgttttctgggtgacga

SEQ ID NO: 19223 - DNA, 20 bp, Peptoniphilus asaccharolyticus
agtgctaggtgtcggagaat

SEQ ID NO: 19224 - DNA, 20 bp, Bacteroides ovatus
tacagctcgtgccgtaggtg

SEQ ID NO: 19225 - DNA, 20 bp, Paenibacillus macerans
agtaactgccaggagagtga

SEQ ID NO: 19226 - DNA, 20 bp, Stenotrophomonas maltophilia
cgttcagtccggattggagt

SEQ ID NO: 19227 - DNA, 20 bp, Streptococcus acidominimus
ctcaaccatagtacgctttt

SEQ ID NO: 19228 - DNA, 20 bp, Brevibacillus centrosporus
tcgcatgaggcgaagacgga

SEQ ID NO: 19229 - DNA, 20 bp, Vibrio harveyi
gtgcgtcgagttccggatcg

SEQ ID NO: 19230 - DNA, 20 bp, Bacteroides capillosus
tcggggcgcctacggaggtg

SEQ ID NO: 19231 - DNA, 20 bp, Brevibacillus brevis
gccgcatcggaagggcgcgt

SEQ ID NO: 19232 - DNA, 20 bp, Lactococcus raffinolactis
gggtaacctacctttcagcg

SEQ ID NO: 19233 - DNA, 20 bp, Vibrio parahaemolyticus
gctgctaaaagaagtaggct

SEQ ID NO: 19234 - DNA, 20 bp, Streptococcus criceti
gctaaggtgggacggatgat

SEQ ID NO: 19235 - DNA, 20 bp, Dolosicoccus paucivorans
atgtttcattgacaaagatg

SEQ ID NO: 19236 - DNA, 20 bp, Prevotella melaninogenica
aggtaagaggttctgatcca

SEQ ID NO: 19237 - DNA, 20 bp, Streptococcus macacae
gagggattgaaaggtacaac

SEQ ID NO: 19238 - DNA, 20 bp, Empedobacter brevis
ttggggtttcggcttcagtg

SEQ ID NO: 19239 - DNA, 20 bp, Corynebacterium group ANF
tttgtgtggtgtggtgtcga

SEQ ID NO: 19240 - DNA, 20 bp, Enterococcus raffinosus
gatcactctggagacagagt

SEQ ID NO: 19241 - DNA, 20 bp, Stenotrophomonas maltophilia
cgggatctgcccgatacgag

SEQ ID NO: 19242 - DNA, 20 bp, Paenibacillus macerans
ctccttcgcatgagggagtt

SEQ ID NO: 19243 - DNA, 20 bp, Anaerococcus prevotii
gaagcctcggtggaagatta

SEQ ID NO: 19244 - DNA, 20 bp, Globicatella sanguinis
gaaatgttagtagattgacg

SEQ ID NO: 19245 - DNA, 20 bp, Brevibacillus brevis
agatgataggggagaagtcg

SEQ ID NO: 19246 - DNA, 20 bp, Bacteroides capillosus
catactggtttacttgagtt

SEQ ID NO: 19247 - DNA, 20 bp, Achromobacter xylosoxidans
gcccctaaacgatgtcacta

SEQ ID NO: 19248 - DNA, 20 bp, Neisseria flavescens
gctgacgagcatgctttaca

SEQ ID NO: 19249 - DNA, 20 bp, Streptococcus sanguinis
aagttcacactgtgaccgga

SEQ ID NO: 19250 - DNA, 20 bp, Corynebacterium pilosum
ggccctgccttccagggtct

SEQ ID NO: 19251 - DNA, 20 bp, Prevotella corporis
cgcgtgggtttttgcaggta

SEQ ID NO: 19252 - DNA, 20 bp, Corynebacterium coyleae
tgctggtttccctttgtggt

SEQ ID NO: 19253 - DNA, 20 bp, Pediococcus acidilactici
tgtactgcgctgaggctcga

SEQ ID NO: 19254 - DNA, 20 bp, Rahnella aquatilis
tcgtaacaggtaaccgtagg

SEQ ID NO: 19255 - DNA, 20 bp, Empedobacter brevis
tccgtaggcggattaatcag

SEQ ID NO: 19256 - DNA, 20 bp, Streptococcus criceti
ttgacatcccgatgccatcc

SEQ ID NO: 19257 - DNA, 20 bp, Pediococcus inopinatus
gcgaggttaagctaatcctc

SEQ ID NO: 19258 - DNA, 20 bp, Streptococcus criceti
ttcgggagccagccgctaag

SEQ ID NO: 19259 - DNA, 20 bp, Brevibacillus centrosporus
tggcaaaagcttgaaagccg

SEQ ID NO: 19260 - DNA, 20 bp, Sphingobacterium multivorum
gtccaggcattcatggccct

SEQ ID NO: 19261 - DNA, 20 bp, Bacteroides capillosus
cggactaataccgtatgata

SEQ ID NO: 19262 - DNA, 20 bp, Clostridium clostridiiforme
catccacgcggtagagaagc

SEQ ID NO: 19263 - DNA, 20 bp, Finegoldia magna
aagtcggggactctaagtag

SEQ ID NO: 19264 - DNA, 20 bp, Peptoniphilus asaccharolyticus
taggtgtcggagaatttcgg

SEQ ID NO: 19265 - DNA, 20 bp, Gemella morbillorum
tgagcacgcgtaggtaccct

SEQ ID NO: 19266 - DNA, 20 bp, Alloiococcus otitis
taccgcttatggatagcctc

SEQ ID NO: 19267 - DNA, 20 bp, Anaerobiospirillum succiniciproducens
gaaagacttttagttgctat

SEQ ID NO: 19268 - DNA, 20 bp, Vagococcus fluvialis
gaataataaaagacgcttcg

SEQ ID NO: 19269 - DNA, 20 bp, Propionibacterium propionicus
taaaccgctttcaattgtga

SEQ ID NO: 19270 - DNA, 20 bp, Clostridium clostridiiforme
gttgctaccagataaagctg

SEQ ID NO: 19271 - DNA, 20 bp, Bacillus sp
gcggttggatcaccttctac

SEQ ID NO: 19272 - DNA, 20 bp, Brevibacillus centrosporus
ccgaatattttcttttgttt

SEQ ID NO: 19273 - DNA, 20 bp, Morganella morganii
aggtggcaaggttaataacc

SEQ ID NO: 19274 - DNA, 20 bp, Clostridium clostridiiforme
tggaacattcaagcagcgga

SEQ ID NO: 19275 - DNA, 20 bp, Veillonella sp.
tgcgaatagtgagaaggatt

SEQ ID NO: 19276 - DNA, 20 bp, Enterobacter gergoviae
ctacgcgttaaggtagccag

SEQ ID NO: 19277 - DNA, 20 bp, Bacteroides merdae
agcaatagcagattacgagg

SEQ ID NO: 19278 - DNA, 20 bp, Clostridium clostridiiforme
cctaaccgcgaggaaggatc

SEQ ID NO: 19279 - DNA, 20 bp, Clostridium clostridiiforme
gcctaaccgcgaggaaggat

SEQ ID NO: 19280 - DNA, 20 bp, Bacteroides capillosus
gatgcccgttgtatggcctt

SEQ ID NO: 19281 - DNA, 30 bp, Bacteroides capillosus
actggtttacttgagtttgcacaacgttgg

SEQ ID NO: 19282 - DNA, 20 bp, Anaerococcus prevotii
agcctgcgagcaaaccgtaa

SEQ ID NO: 19283 - DNA, 20 bp, Delftia acidovorans
gcgcttacccggcggggttc

SEQ ID NO: 19284 - DNA, 20 bp, Streptococcus macacae
ttggagagagtggaaagttc

SEQ ID NO: 19285 - DNA, 20 bp, Myroides odoratimimus
ccactcgcgttaaggcgggg

SEQ ID NO: 19286 - DNA, 30 bp, Eubacterium moniliforme
gagtaagcgaatctcaaaaagccggcccca

SEQ ID NO: 19287 - DNA, 20 bp, Bacteroides stercoris
catcatcaaagcttgctttg

SEQ ID NO: 19288 - DNA, 30 bp, Fusobacterium necrogenes
atcctaggaagttggcagagatgccttcgt

SEQ ID NO: 19289 - DNA, 20 bp, Stenotrophomonas maltophilia
taaagccctgatcgttcagt

SEQ ID NO: 19290 - DNA, 20 bp, Corynebacterium auris
agcgcgtgtgcgatactgtg

SEQ ID NO: 19291 - DNA, 20 bp, Bacillus azotoformans
gcttgagccaatcccataaa

SEQ ID NO: 19292 - DNA, 20 bp, Peptoniphilus indolicus
gttgagttggattagcggcg

SEQ ID NO: 19293 - DNA, 20 bp, Paenibacillus macerans
ttgtgagagtaactgctcac

SEQ ID NO: 19294 - DNA, 20 bp, Enterobacter gergoviae
gaggctgtggtccttgaagc

SEQ ID NO: 19295 - DNA, 30 bp, Bacteroides stercoris
tgagtgcaacagaggtaggcggaattcgtg

SEQ ID NO: 19296 - DNA, 20 bp, Enterococcus faecium
cgagagtttgaacacccgaa

SEQ ID NO: 19297 - DNA, 20 bp, Enterococcus cecorum
accgcatggcagatggatga

SEQ ID NO: 19298 - DNA, 20 bp, Listeria monocytogenes
tggggcccgcggtgcattag

SEQ ID NO: 19299 - DNA, 20 bp, Streptococcus criceti
taatagtgattaactcatgt

SEQ ID NO: 19300 - DNA, 20 bp, Empedobacter brevis
actgaaaaggatagcccttc

SEQ ID NO: 19301 - DNA, 20 bp, Serratia ficaria
ttaccagagatggcattggt

SEQ ID NO: 19302 - DNA, 20 bp, Pediococcus parvulus
gttaattgattttgagatgc

SEQ ID NO: 19303 - DNA, 20 bp, Streptococcus macacae
taggagcttaaaaggtgcag

SEQ ID NO: 19304 - DNA, 20 bp, Bacteroides stercoris
agtgccatagcgagcgcaac

SEQ ID NO: 19305 - DNA, 20 bp, Bacteroides capillosus
gtatgatatcctatgcaggc

SEQ ID NO: 19306 - DNA, 20 bp, Corynebacterium coyleae
atacaccagatcggccccag

SEQ ID NO: 19307 - DNA, 20 bp, Enterobacter amnigenus
cttgttttcgggtgacgagc

SEQ ID NO: 19308 - DNA, 20 bp, Providencia alcalifaciens
gctaatccgcaataatctct

SEQ ID NO: 19309 - DNA, 20 bp, Propionibacterium propionicus
aaccctgagcttgctttcga

SEQ ID NO: 19310 - DNA, 20 bp, Providencia alcalifaciens
atattagcatcaacgccttc

SEQ ID NO: 19311 - DNA, 20 bp, Brevibacillus laterosporus
gctatcacttgcagatgggc

SEQ ID NO: 19312 - DNA, 20 bp, Alloiococcus otitis
ggtggctctgctaccgctta

SEQ ID NO: 19313 - DNA, 20 bp, Peptoniphilus asaccharolyticus
tcgagcgatgaaaatcaaac

SEQ ID NO: 19314 - DNA, 20 bp, Bacillus fusiformis
gcttcatggtgaaagactga

SEQ ID NO: 19315 - DNA, 20 bp, Bacteroides stercoris
cgaggggcagcatcatcaaa

SEQ ID NO: 19316 - DNA, 20 bp, Peptoniphilus asaccharolyticus
caagggctcaacccttgtaa

SEQ ID NO: 19317 - DNA, 20 bp, Streptococcus macacae
ttttatcgcatgataggagc

SEQ ID NO: 19318 - DNA, 20 bp, Enterobacter amnigenus
agcgagtagcacagagaggc

SEQ ID NO: 19319 - DNA, 20 bp, Eubacterium moniliforme
gaagccctcgggtggaactg

SEQ ID NO: 19320 - DNA, 20 bp, Enterococcus dispar
aggacgaacgctgtctggcg

SEQ ID NO: 19321 - DNA, 20 bp, Clostridium clostridiiforme
ccaaaaagccatccccagtt

SEQ ID NO: 19322 - DNA, 20 bp, Bacteroides capillosus
tcggtcgtatgcaaatacga

SEQ ID NO: 19323 - DNA, 20 bp, Haemophilus segnis
ttgaactttaggtttggcgc

SEQ ID NO: 19324 - DNA, 20 bp, Corynebacterium group ANF
taatactttttatcacatgg

SEQ ID NO: 19325 - DNA, 20 bp, Shewanella putrefaciens
cgcttcagagatagcttagt

SEQ ID NO: 19326 - DNA, 20 bp, Haemophilus influenzae
taaagtgcgggaccttcagg

SEQ ID NO: 19327 - DNA, 20 bp, Clostridium clostridiiforme
ttggaacattcaagcagcgg

SEQ ID NO: 19328 - DNA, 20 bp, Pantoea agglomerans
tagcacagcaggagcttggc

SEQ ID NO: 19329 - DNA, 20 bp, Paenibacillus azotofixans
tagagataggcgcggccttc

SEQ ID NO: 19330 - DNA, 20 bp, Bacteroides capilosus
tggattgggtttcttagtgg

SEQ ID NO: 19331 - DNA, 20 bp, Citrobacter amalonaticus
gaatggttaataaccatttt

SEQ ID NO: 19332 - DNA, 20 bp, Clostridium clostridiiforme
gcagacgaaactggagagct

SEQ ID NO: 19333 - DNA, 20 bp, Paenibacillus macerans
tgagagtaactgctcacaag

SEQ ID NO: 19334 - DNA, 20 bp, Erysipelothrix rhusiopathiae
cgtacaaggtaaccctaccg

SEQ ID NO: 19335 - DNA, 30 bp, Streptococcus criceti
gttaatgacttgaaaggtgcaatggcacca

SEQ ID NO: 19336 - DNA, 20 bp, Corynebacterium pilosum
ggtattctggcctggtcttc

SEQ ID NO: 19337 - DNA, 30 bp, Bacteroides distasonis
ggacgtgtcctattttgtatgtaccttatg

SEQ ID NO: 19338 - DNA, 20 bp, Porphyromonas maccae
acttcttttataggggatta

SEQ ID NO: 19339 - DNA, 20 bp, Anaerococcus tetradius
tcgaacgatgaaccttgtat

SEQ ID NO: 19340 - DNA, 20 bp, Brevibacillus centrosporus
gaggcgaagacggaaaggcg

SEQ ID NO: 19341 - DNA, 20 bp, Brevibacillus brevis
taaggtgcttgcaccttatg

SEQ ID NO: 19342 - DNA, 20 bp, Anaerococcus prevotii
gcctgcgagcaaaccgtaag

SEQ ID NO: 19343 - DNA, 20 bp, Streptococcus criceti
gcaatggcaccactatcaga

SEQ ID NO: 19344 - DNA, 20 bp, Streptococcus infantarius
ggaagggcgggtggatcacc

SEQ ID NO: 19345 - DNA, 20 bp, Pseudomonas mendocina
gggaggaagggctgctggtt

SEQ ID NO: 19346 - DNA, 20 bp, Anaerobiospirillum succiniciproducens
gagggaacccacaaagcgtc

SEQ ID NO: 19347 - DNA, 20 bp, Clostridium clostridiiforme
cgcggaatacgtagggggca

SEQ ID NO: 19348 - DNA, 20 bp, Prevotella bivia
tcatgagattacgaataaag

SEQ ID NO: 19349 - DNA, 20 bp, Fusobacterium necrogenes
agagatgccttcgtgcccct

SEQ ID NO: 19350 - DNA, 20 bp, Eremococcus coleocola
gacgatacaacgagcagcaa

SEQ ID NO: 19351 - DNA, 20 bp, Anaerococcus prevotii
agagacatccatacaggtgg

SEQ ID NO: 19352 - DNA, 20 bp, Dolosigranulum pigrum
aaggtagccgttcggaaggt

SEQ ID NO: 19353 - DNA, 20 bp, Arcanobacterium pyogenes
cctttcagtacagaagaagc

SEQ ID NO: 19354 - DNA, 20 bp, Vibrio hollisae
tgtacggaattctggagaga

SEQ ID NO: 19355 - DNA, 20 bp, Bacteroides vulgatus
taacaggttctgctgaggac

SEQ ID NO: 19356 - DNA, 20 bp, Morganella morganii
cagtcgggaggaaggtgtca

SEQ ID NO: 19357 - DNA, 20 bp, Bacillus coagulans
gacttgttagaagcttgctt

SEQ ID NO: 19358 - DNA, 20 bp, Bacteroides stercoris
tcggaaacggttcttttctt

SEQ ID NO: 19359 - DNA, 20 bp, Empedobacter brevis
atcccgcgtgtaggacgact

SEQ ID NO: 19360 - DNA, 20 bp, Anaerobiospirillum succiniciproducens
taggaatctttcagagataa

SEQ ID NO: 19361 - DNA, 20 bp, Burkholderia gladioli
atgtcctgtagtggggggat

SEQ ID NO: 19362 - DNA, 20 bp, Bacteroides stercoris
agtgcaacagaggtaggcgg

SEQ ID NO: 19363 - DNA, 20 bp, Porphyromonas gingivalis
tcggtagttactaacagttt

SEQ ID NO: 19364 - DNA, 20 bp, Bordetella trematum
aatacctggcgctaatgacg

SEQ ID NO: 19365 - DNA, 20 bp, Vibrio hollisae
gtcggggaggaaatccccag

SEQ ID NO: 19366 - DNA, 20 bp, Bacillus circulans
gaagggcggttggatcacct

SEQ ID NO: 19367 - DNA, 20 bp, Bacillus schlegellii
agtcgagcggggagcgggcg

SEQ ID NO: 19368 - DNA, 30 bp, Streptococcus ratti
gtcaaaggcagtggcttaaccattgtgtgc

SEQ ID NO: 19369 - DNA, 20 bp, Paenibacillus alvei
gagatgagaaaggcggagca

SEQ ID NO: 19370 - DNA, 20 bp, Moraxella atlantae
acgggagaaaggagcttatg

SEQ ID NO: 19371 - DNA, 20 bp, Corynebacterium coyleae
gatcggccccagagatgctg

SEQ ID NO: 19372 - DNA, 20 bp, Prevotella loescheii
aacatccggcttgcagcgcg

SEQ ID NO: 19373 - DNA, 20 bp, Eremococcus coleocola
ctcttcggagcatagagaca

SEQ ID NO: 19374 - DNA, 20 bp, Haemophilus paraphrophilus
aagtcgtacaaggtaaccta

SEQ ID NO: 19375 - DNA, 20 bp, Clostridium clostridiiforme
aaatcatttaaccgggatcc

SEQ ID NO: 19376 - DNA, 20 bp, Corynebacterium group ANF
gcgcgtgaaactaacggatc

SEQ ID NO: 19377 - DNA, 20 bp, Anaerococcus tetradius
cgatgaaccttgtattgatt

SEQ ID NO: 19378 - DNA, 20 bp, Haemophilus influenzae
gtgcgggaccttcaggccac

SEQ ID NO: 19379 - DNA, 20 bp, Staphylococcus muscae
aagggtagccgtatcggaag

SEQ ID NO: 19380 - DNA, 20 bp, Finegoldia magna
atcgtagaaacacatgtttt

SEQ ID NO: 19381 - DNA, 20 bp, Leuconostoc fallax
gttgcgaaccggcgacggta

SEQ ID NO: 19382 - DNA, 20 bp, Corynebacterium coyleae
gagatgctggtttccctttg

SEQ ID NO: 19383 - DNA, 20 bp, Corynebacterium auris
acagcgcgtgtgcgatactg

SEQ ID NO: 19384 - DNA, 20 bp, Streptococcus ferus
gtccattacgtgacggtact

SEQ ID NO: 19385 - DNA, 20 bp, Peptoniphilus asaccharolyticus
gtgaagtttggaaggattag

SEQ ID NO: 19386 - DNA, 20 bp, Dolosicoccus paucivorans
attgacaaagatgcttatgg

SEQ ID NO: 19387 - DNA, 20 bp, Sporosarcina pasteurii
cggcttcggctgtctctgca

SEQ ID NO: 19388 - DNA, 20 bp, Fusobacterium necrogenes
gtttcgcatggaattcatat

SEQ ID NO: 19389 - DNA, 20 bp, Providencia stuartii
ccagagaattgagcagagat

SEQ ID NO: 19390 - DNA, 20 bp, Clostridium clostridiiforme
atgtatgctgggtgtgggac

SEQ ID NO: 19391 - DNA, 20 bp, Vibrio hollisae
tccccagcgctaataccgct

SEQ ID NO: 19392 - DNA, 20 bp, Clostridium innocuum
aacgaagtttcaaggaagct

SEQ ID NO: 19393 - DNA, 20 bp, Brevibacillus brevis
tgggacagatgataggggag

SEQ ID NO: 19394 - DNA, 20 bp, Bacillus mycoides
gatcggaagggcggtggatc

SEQ ID NO: 19395 - DNA, 20 bp, Vibrio vulnificus
cgttccccgggccttgacac

SEQ ID NO: 19396 - DNA, 20 bp, Anaerococcus tetradius
cttaagacttcggtctactg

SEQ ID NO: 19397 - DNA, 20 bp, Bacillus schlegellii
gaagcccgtctcttagcggc

SEQ ID NO: 19398 - DNA, 20 bp, Brevibacillus centrosporus
tagtttgggatacttccggg

SEQ ID NO: 19399 - DNA, 20 bp, Eubacterium moniliforme
catcctctgacgcatataga

SEQ ID NO: 19400 - DNA, 20 bp, Anaerococcus prevotii
caaaccgtaaggaagcagca

SEQ ID NO: 19401 - DNA, 20 bp, Pediococcus acidilactici
tgcgctgaggctcgaaagca

SEQ ID NO: 19402 - DNA, 20 bp, Prevotella loescheii
aaaggtttggcggtgaagga

SEQ ID NO: 19403 - DNA, 20 bp, Brevibacillus brevis
tccttcaattggttctataa

SEQ ID NO: 19404 - DNA, 20 bp, Prevotella corporis
ggggagcccgcacaagcgga

SEQ ID NO: 19405 - DNA, 20 bp, Clostridium clostridiiforme
cggtttgctggctgcatact

SEQ ID NO: 19406 - DNA, 20 bp, Kocuria varians
cgtcgaaggctgggactggc

SEQ ID NO: 19407 - DNA, 20 bp, Actinomyces naeslundii
gcctgtcccttgtgggtggg

SEQ ID NO: 19408 - DNA, 20 bp, Streptococcus macacae
agcaagttggagagagtgga

SEQ ID NO: 19409 - DNA, 20 bp, Psychrobacter phenylpyruvicus
catgagacaatactaaaagg

SEQ ID NO: 19410 - DNA, 30 bp, Brevibacterium linens
aaccgctttcagcagggaagaagcctttcg

SEQ ID NO: 19411 - DNA, 20 bp, Finegoldia magna
caaaactcgaaagccaatcc

SEQ ID NO: 19412 - DNA, 20 bp, Bacteroides thetaiotaomicron
gggggtactgaagtagtacc

SEQ ID NO: 19413 - DNA, 20 bp, Streptococcus infantarius
cgttcgcaatcttccaactt

SEQ ID NO: 19414 - DNA, 20 bp, Anaerococcus prevotii
cgtagaaacacatgtttcaa

SEQ ID NO: 19415 - DNA, 20 bp, Leuconostoc fallax
atcctttgaagatgttagag

SEQ ID NO: 19416 - DNA, 20 bp, Streptococcus thermophilus
ggatcacctccttcatggtc

SEQ ID NO: 19417 - DNA, 20 bp, Streptococcus iniae
cactaatccaaagagttgcg

SEQ ID NO: 19418 - DNA, 20 bp, Dolosicoccus paucivorans
gtaactgttactcgtttgac

SEQ ID NO: 19419 - DNA, 20 bp, Microbacterium hominis
gagtcggtaacaccagcagg

SEQ ID NO: 19420 - DNA, 20 bp, Haemophilus paraphrophilus
ccaggttagaggtgttggat

SEQ ID NO: 19421 - DNA, 20 bp, Microbacterium hominis
atgaagagtcggtaacacca

SEQ ID NO: 19422 - DNA, 20 bp, Pseudomonas mendocina
cacctaacgtattaggttac

SEQ ID NO: 19423 - DNA, 20 bp, Vibrio hollisae
cagcgctaataccgctgggg

SEQ ID NO: 19424 - DNA, 20 bp, Bacillus mycoides
cgctgcatggcgcgaaattg

SEQ ID NO: 19425 - DNA, 20 bp, Bacteroides merdae
tacaatgtaagctctacagc

SEQ ID NO: 19426 - DNA, 20 bp, Bacillus schlegellii
agccttcgggcggaagcccg

SEQ ID NO: 19427 - DNA, 20 bp, Anaerococcus tetradius
agtcgaacgatgaaccttgt

SEQ ID NO: 19428 - DNA, 20 bp, Burkholderia cepacia
cgtatcggaaggtgcggtct

SEQ ID NO: 19429 - DNA, 20 bp, Streptococcus macacae
cagcttttatcgcatgatag

SEQ ID NO: 19430 - DNA, 20 bp, Corynebacterium group ANF
cgttttctagtggttgggga

SEQ ID NO: 19431 - DNA, 20 bp, Sporosarcina pasteurii
acccgatccgccgctaacaa

SEQ ID NO: 19432 - DNA, 20 bp, Sporosarcina ureae
ctcgcatgagggaatgttga

SEQ ID NO: 19433 - DNA, 20 bp, Dolosicoccus paucivorans
acagcgagtagagtaactgt

SEQ ID NO: 19434 - DNA, 20 bp, Bacteroides capillosus
actaggattaaaggtttagc

SEQ ID NO: 19435 - DNA, 20 bp, Bacteroides capillosus
cgtatgatatcctatgcagg

SEQ ID NO: 19436 - DNA, 20 bp, Stenotrophomonas maltophilia
agaagcaaccccgcgagcag

SEQ ID NO: 19437 - DNA, 20 bp, Prevotella intermedia
ctttctggcttgaaagaccg

SEQ ID NO: 19438 - DNA, 20 bp, Citrobacter freundii
agttagcagagatgctaacg

SEQ ID NO: 19439 - DNA, 20 bp, Vibrio hollisae
cagcgaaagttgtgctaata

SEQ ID NO: 19440 - DNA, 20 bp, Empedobacter brevis
cttggcaacaagatgcgaat

SEQ ID NO: 19441 - DNA, 20 bp, Neisseria polysaccharea
atgacgctgcggcatgcttt

SEQ ID NO: 19442 - DNA, 20 bp, Anaerococcus prevotii
tctctttaagagacatccat

SEQ ID NO: 19443 - DNA, 20 bp, Arthrobacter globiformis
aacacccgaagccggggcct

SEQ ID NO: 19444 - DNA, 20 bp, Eggerthella lenta
tgtggggggctccgccctcc

SEQ ID NO: 19445 - DNA, 20 bp, Leuconostoc fallax
aataccgtataacaacacat

SEQ ID NO: 19446 - DNA, 30 bp, Brevibacillus brevis
gaggcatctcctgtgcgtggaaagaacttc

SEQ ID NO: 19447 - DNA, 20 bp, Citrobacter farmeri
aacttgtcagagatgaggta

SEQ ID NO: 19448 - DNA, 20 bp, Campylobacter curvus
gggagcgtagctccttgtcg

SEQ ID NO: 19449 - DNA, 20 bp, Anaerococcus prevotii
attgcttcggcagaactgta

SEQ ID NO: 19450 - DNA, 20 bp, Moellerella wisconsensis
ctgacagagggggataacta

SEQ ID NO: 19451 - DNA, 20 bp, Eubacterium moniliforme
ggagcacccgaagccagtgg

SEQ ID NO: 19452 - DNA, 20 bp, Paenibacillus alvei
tctgaatgcaaactctagag

SEQ ID NO: 19453 - DNA, 20 bp, Bacteroides vulgatus
tcgggtatgcatacccgttt

SEQ ID NO: 19454 - DNA, 20 bp, Empedobacter brevis
ggtttcggcttcagtggcta

SEQ ID NO: 19455 - DNA, 20 bp, Moraxella atlantae
catagtgaggatcctgcaga

SEQ ID NO: 19456 - DNA, 20 bp, Streptococcus gallolyticus
cgtaacaaaaaacccgtatc

SEQ ID NO: 19457 - DNA, 20 bp, Bacteroides stercoris
gcatagttttcccgcatgga

SEQ ID NO: 19458 - DNA, 20 bp, Sphingobacterium multivorum
ggttgattaaatatttatag

SEQ ID NO: 19459 - DNA, 20 bp, Streptococcus sanguinis
aagggacggctaactccggt

SEQ ID NO: 19460 - DNA, 20 bp, Campylobacter curvus
atatataagtataaatggga

SEQ ID NO: 19461 - DNA, 30 bp, Streptococcus sanguinis
atcttaccagaaagggacggctaactccgg

SEQ ID NO: 19462 - DNA, 20 bp, Actinomyces radingae
gggcctttgtggttgtgtgg

SEQ ID NO: 19463 - DNA, 20 bp, Staphylococcus schleiferi
agtgggacacaatgattggg

SEQ ID NO: 19464 - DNA, 20 bp, Vibrio mimicus
aacacggtagcgctaggtgg

SEQ ID NO: 19465 - DNA, 20 bp, Clostridium clostridiiforme
atagttccgtgccgaagtta

SEQ ID NO: 19466 - DNA, 20 bp, Bacteroides capillosus
actaataccgtatgatatcc

SEQ ID NO: 19467 - DNA, 30 bp, Bacillus fusiformis
ttcatggtgaaagactgaaagacggtttcg

SEQ ID NO: 19468 - DNA, 20 bp, Bacteroides stercoris
caaagcttgctttgatggat

SEQ ID NO: 19469 - DNA, 20 bp, Anaerococcus prevotii
ataatgcaaaactccaaagc

SEQ ID NO: 19470 - DNA, 20 bp, Burkholderia cepacia
gggtgcttgccacctggtgg

SEQ ID NO: 19471 - DNA, 20 bp, Streptococcus gallolyticus
gtaacaaaaaacccgtatcg

SEQ ID NO: 19472 - DNA, 20 bp, Dolosicoccus paucivorans
ctgtatcaccgccttctttg

SEQ ID NO: 19473 - DNA, 20 bp, Shigella boydii
gtattcccgtggcattctga

SEQ ID NO: 19474 - DNA, 20 bp, Bacillus mycoides
gatagccgatcggaagggcg

SEQ ID NO: 19475 - DNA, 20 bp, Brevibacterium casei
acgactgccggacgcatgtc

SEQ ID NO: 19476 - DNA, 20 bp, Corynebacterium cystitidis
tggtagccatgctgaaacgg

SEQ ID NO: 19477 - DNA, 20 bp, Sphingomonas paucimobilis
agtcgtacaagggagccgag

SEQ ID NO: 19478 - DNA, 20 bp, Haemophilus haemolyticus
gagggtggcgatgccgcgag

SEQ ID NO: 19479 - DNA, 20 bp, Streptococcus macacae
aattgacggtacttaaccag

SEQ ID NO: 19480 - DNA, 20 bp, Streptococcus macacae
caagtgggacgcactgattt

SEQ ID NO: 19481 - DNA, 20 bp, Leptotrichia buccalis
cggtacagagagctgcaagg

SEQ ID NO: 19482 - DNA, 20 bp, Alicyclobacillus acidocaldarius
tgccccgaagggacccctca

SEQ ID NO: 19483 - DNA, 20 bp, Arcanobacterium haemolyticum
ggctcctgcttgcgggggtt

SEQ ID NO: 19484 - DNA, 20 bp, Eremococcus coleocola
cgcctgatggttgattgaaa

SEQ ID NO: 19485 - DNA, 20 bp, Campylobacter curvus
tatatattgtttatttatca

SEQ ID NO: 19486 - DNA, 20 bp, Corynebacterium pilosum
ggtctcccaattgccgaccg

SEQ ID NO: 19487 - DNA, 20 bp, Clostridium clostridiiforme
tgattggaacattcaagcag

SEQ ID NO: 19488 - DNA, 20 bp, Clostridium clostridiiforme
cgaaaggagaagcagatccc

SEQ ID NO: 19489 - DNA, 20 bp, Enterobacter amnigenus
cgagtagcacagagaggctt

SEQ ID NO: 19490 - DNA, 30 bp, Prevotella oralis
cgctgtcggccttttttggtcggtggccaa

SEQ ID NO: 19491 - DNA, 20 bp, Campylobacter coli
tacaaggctaaccgtaggag

SEQ ID NO: 19492 - DNA, 20 bp, Prevotella loescheii
gacgaaaggtttggcggtga

SEQ ID NO: 19493 - DNA, 20 bp, Staphylococcus succinus
gcccttccgaacggctacct

SEQ ID NO: 19494 - DNA, 20 bp, Campylobacter curvus
gcggtgtgctttaggtgggt

SEQ ID NO: 19495 - DNA, 20 bp, Paenibacillus macerans
aggagagtgacggtacctag

SEQ ID NO: 19496 - DNA, 20 bp, Eubacterium moniliforme
ggtggaactgtgagtatact

SEQ ID NO: 19497 - DNA, 20 bp, Clostridium clostridiiforme
ggtgaaaagcagagatgcgc

SEQ ID NO: 19498 - DNA, 20 bp, Prevotella loescheii
agtgcggtggataactgctt

SEQ ID NO: 19499 - DNA, 20 bp, Finegoldia magna
tagtagacagaagcttcggt

SEQ ID NO: 19500 - DNA, 20 bp, Bacteroides merdae
tctagcaatagcagattacg

SEQ ID NO: 19501 - DNA, 20 bp, Bacteroides thetaiotaomicron
acccataggccgtaaggcat

SEQ ID NO: 19502 - DNA, 20 bp, Paenibacillus azotofixans
ttagagataggcgcggcctt

SEQ ID NO: 19503 - DNA, 20 bp, Bacteroides merdae
tcgtgccgtgtaggtgtcgg

SEQ ID NO: 19504 - DNA, 20 bp, Sphingobacterium multivorum
caacagttcgcatgttcggt

SEQ ID NO: 19505 - DNA, 20 bp, Anaerococcus tetradius
actaaccaaagatttatcgg

SEQ ID NO: 19506 - DNA, 20 bp, Oligella urethralis
gcaagaggtcttacgatccc

SEQ ID NO: 19507 - DNA, 20 bp, Dolosicoccus paucivorans
agagtaactgttactcgttt

SEQ ID NO: 19508 - DNA, 20 bp, Streptococcus macacae
ctaagcctttagagggattg

SEQ ID NO: 19509 - DNA, 20 bp, Corynebacterium pilosum
tctggcctggtcttccggat

SEQ ID NO: 19510 - DNA, 20 bp, Bacteroides capilosus
tgacactggctgccaaagat

SEQ ID NO: 19511 - DNA, 20 bp, Eremococcus coleocola
ctgttattagccaagaacac

SEQ ID NO: 19512 - DNA, 20 bp, Raoultella terrigena
attgaacgctgttgtgtagg

SEQ ID NO: 19513 - DNA, 20 bp, Micrococcus luteus
cgcgagggggggaccagcga

SEQ ID NO: 19514 - DNA, 20 bp, Pseudomonas mendocina
ttgggaggaagggctgctgg

SEQ ID NO: 19515 - DNA, 20 bp, Prevotella oralis
aaagccgggcactctgtgaa

SEQ ID NO: 19516 - DNA, 20 bp, Bacteroides stercoris
aattgcaactgactgagctg

SEQ ID NO: 19517 - DNA, 20 bp, Clostridium subterminale
ctaaacttataaaaccaatc

SEQ ID NO: 19518 - DNA, 20 bp, Oligella urethralis
ttgaagcttccgggcatgtc

SEQ ID NO: 19519 - DNA, 30 bp, Bacteroides capillosus
acgaaataaatgacggtacctgatgaataa

SEQ ID NO: 19520 - DNA, 20 bp, Prevotella corporis
tcccctcgggactcctgtga

SEQ ID NO: 19521 - DNA, 20 bp, Streptococcus urinalis
agaacgctgaggtcatgtgc

SEQ ID NO: 19522 - DNA, 20 bp, Streptococcus macacae
tgttaaggaagcaagttgga

SEQ ID NO: 19523 - DNA, 20 bp, Oligella urethralis
atcggccgctccggtagcaa

SEQ ID NO: 19524 - DNA, 20 bp, Anaerobiospirillum succiniciproducens
tagttgctatcagatgagcc

SEQ ID NO: 19525 - DNA, 20 bp, Neisseria polysaccharea
tcacctcccttcagtggatc

SEQ ID NO: 19526 - DNA, 20 bp, Clostridium clostridiiforme
gcgaaggcggtttgctggct

SEQ ID NO: 19527 - DNA, 20 bp, Pediococcus parvulus
aaaattaaccgcatggttga

SEQ ID NO: 19528 - DNA, 20 bp, Ignavigranum ruoffiae
agtcgcctgactcattgggg

SEQ ID NO: 19529 - DNA, 20 bp, Proteus vulgaris
aatggctcacctagcaacga

SEQ ID NO: 19530 - DNA, 20 bp, Eggerthella lenta
atactaggtgtggggggctc

SEQ ID NO: 19531 - DNA, 20 bp, Empedobacter brevis
ggcagctacttggcaacaag

SEQ ID NO: 19532 - DNA, 20 bp, Streptococcus criceti
ccgatgccatccctagagat

SEQ ID NO: 19533 - DNA, 20 bp, Corynebacterium pilosum
gttcccgttgggtattctgg

SEQ ID NO: 19534 - DNA, 30 bp, Clostridium innocuum
agcgcatgctcagtatattaaagcgcccat

SEQ ID NO: 19535 - DNA, 20 bp, Streptococcus macacae
agtagttaaaagcattggct

SEQ ID NO: 19536 - DNA, 30 bp, Bacteroides uniformis
agtgccatacgagcgcacacccttatcgat

SEQ ID NO: 19537 - DNA, 20 bp, Sporosarcina ureae
tgggcggcatgcctaataca

SEQ ID NO: 19538 - DNA, 20 bp, Streptococcus infantarius
tagccgtttttttttggtaa

SEQ ID NO: 19539 - DNA, 20 bp, Corynebacterium coyleae
catacaccagatcggcccca

SEQ ID NO: 19540 - DNA, 20 bp, Staphylococcus schleiferi
gtggagtaaccatttggaag

SEQ ID NO: 19541 - DNA, 20 bp, Facklamia hominis
taactttatgagggagccgt

SEQ ID NO: 19542 - DNA, 20 bp, Streptococcus urinalis
gaatggaagtaggagtggaa

SEQ ID NO: 19543 - DNA, 20 bp, Vibrio harveyi
gcataagaagtaggtagtta

SEQ ID NO: 19544 - DNA, 20 bp, Geobacillus thermoglucosidasius
ggaagcttgcttctgttcgg

SEQ ID NO: 19545 - DNA, 20 bp, Prevotella oralis
aaggcggcctaattccgtat

SEQ ID NO: 19546 - DNA, 20 bp, Peptoniphilus asaccharolyticus
agagcgggcgagctagtgat

SEQ ID NO: 19547 - DNA, 20 bp, Finegoldia magna
gagatatacccctctcttta

SEQ ID NO: 19548 - DNA, 20 bp, Leptotrichia buccalis
ctgacgcatgtcaggctgat

SEQ ID NO: 19549 - DNA, 20 bp, Bacillus licheniformis
ggttactctcggggaacccc

SEQ ID NO: 19550 - DNA, 20 bp, Staphylococcus schleiferi
cgaaagtgggacacaatgat

SEQ ID NO: 19551 - DNA, 30 bp, Bacteroides merdae
ttttttgtatgtaccctatgaataagcatc

SEQ ID NO: 19552 - DNA, 20 bp, Ochrobactrum intermedium
tcactagggaataactcagg

SEQ ID NO: 19553 - DNA, 20 bp, Gemella morbillorum
ggacgcgatagctaatcccg

SEQ ID NO: 19554 - DNA, 20 bp, Neisseria subflava
ctgttgctaacatcagcggc

SEQ ID NO: 19555 - DNA, 20 bp, Staphylococcus aureus
ggcgactttctggctgaact

SEQ ID NO: 19556 - DNA, 30 bp, Moellerella wisconsensis
gtgagtaatgtatggggatctgcctgacag

SEQ ID NO: 19557 - DNA, 20 bp, Streptococcus dysgalactiae
gtgtttaacccatgttaaac

SEQ ID NO: 19558 - DNA, 20 bp, Alloiococcus otitis
ggaaatgaaaggtggctctg

SEQ ID NO: 19559 - DNA, 20 bp, Psychrobacter phenylpyruvicus
cgctgtagagatatagtttt

SEQ ID NO: 19560 - DNA, 20 bp, Capnocytophaga sp.
aaagctgaggcggtgaaaga

SEQ ID NO: 19561 - DNA, 20 bp, Weissella paramesenteroides
ttgtctttaactgatctgac

SEQ ID NO: 19562 - DNA, 20 bp, Sporosarcina pasteurii
tcggctgtctctgcaggatg

SEQ ID NO: 19563 - DNA, 20 bp, Prevotella denticola
ttagggacgtgtccctattt

SEQ ID NO: 19564 - DNA, 20 bp, Brevibacillus centrosporus
ttgggatacttccggggaac

SEQ ID NO: 19565 - DNA, 20 bp, Streptococcus macacae
ctgttgttaaggaagcaagt

SEQ ID NO: 19566 - DNA, 20 bp, Anaerococcus tetradius
cataaactcttcgcatgaag

SEQ ID NO: 19567 - DNA, 20 bp, Streptococcus urinalis
gaagaatggaagtaggagtg

SEQ ID NO: 19568 - DNA, 20 bp, Anaerococcus tetradius
taggttcttggaataatctg

SEQ ID NO: 19569 - DNA, 20 bp, Granulicatella elegans
agtcgcatgacccagagaag

SEQ ID NO: 19570 - DNA, 20 bp, Streptococcus sanguinis
aataccgcatgatattgaat

SEQ ID NO: 19571 - DNA, 20 bp, Streptococcus infantarius
gctaagttttcagcgttcta

SEQ ID NO: 19572 - DNA, 20 bp, Anaerococcus prevotii
cttcggcagaactgtaatac

SEQ ID NO: 19573 - DNA, 20 bp, Streptococcus cristatus
ttgcatgatagtcaattaaa

SEQ ID NO: 19574 - DNA, 20 bp, Sphingobacterium multivorum
tgtgaccggcatcggttgga

SEQ ID NO: 19575 - DNA, 20 bp, Clostridium clostridiiforme
cgaaggcggtttgctggctg

SEQ ID NO: 19576 - DNA, 20 bp, Clostridium clostridiiforme
agcggggatggttcgagaga

SEQ ID NO: 19577 - DNA, 20 bp, Streptococcus iniae
aaggagcaaaagcttcacta

SEQ ID NO: 19578 - DNA, 20 bp, Streptococcus ratti
tgtgctttggaaactgcagg

SEQ ID NO: 19579 - DNA, 20 bp, Raoultella terrigena
gctgttgtgtaggcctaaca

SEQ ID NO: 19580 - DNA, 20 bp, Staphylococcus capitis
cggtggagtatccttttgga

SEQ ID NO: 19581 - DNA, 20 bp, Paenibacillus lautus
gcacccaaaactggatgact

SEQ ID NO: 19582 - DNA, 20 bp, Citrobacter freundii
tcgtaacaaggtaaccccgt

SEQ ID NO: 19583 - DNA, 20 bp, Streptococcus ferus
agatacaatcgtatcgctaa

SEQ ID NO: 19584 - DNA, 20 bp, Prevotella intermedia
actttctggcttgaaagacc

SEQ ID NO: 19585 - DNA, 20 bp, Anaerococcus prevotii
aaatgatctcttcggagtga

SEQ ID NO: 19586 - DNA, 20 bp, Streptococcus criceti
gagtagagtggaaagttact

SEQ ID NO: 19587 - DNA, 20 bp, Unknown Organism
  oligonucleotide from CDC group VB-3
ccttccagggggacggttac

SEQ ID NO: 19588 - DNA, 20 bp, Bacillus licheniformis
tctcggggaaccccggggtt

SEQ ID NO: 19589 - DNA, 20 bp, Clostridium clostridiiforme
cgaaagcggatcgacccttt

SEQ ID NO: 19590 - DNA, 30 bp, Streptococcus ratti
ttttgtaagtctgaagtcaaaggcagtggc

SEQ ID NO: 19591 - DNA, 20 bp, Peptoniphilus asaccharolyticus
ggggtgaagatgaaatggat

SEQ ID NO: 19592 - DNA, 30 bp, Eremococcus coleocola
tgctatcactcaaggatgggcccgcggtgc

SEQ ID NO: 19593 - DNA, 20 bp, Myroides odoratimimus
ggcatcgtattgataataaa

SEQ ID NO: 19594 - DNA, 20 bp, Paenibacillus popilliae
ggaagaacgccttgtagagt

SEQ ID NO: 19595 - DNA, 20 bp, Streptococcus alactolyticus
cagcttttgacacatgttag

SEQ ID NO: 19596 - DNA, 20 bp, Bacteroides thetaiotaomicron
ggagcgtctagggtaagatt

SEQ ID NO: 19597 - DNA, 30 bp, Vibrio hollisae
tgtgctaataccgcatacgtactgaggtag

SEQ ID NO: 19598 - DNA, 20 bp, Clostridium subterminale
atgtatgagaatcgcatgat

SEQ ID NO: 19599 - DNA, 20 bp, Corynebacterium kutscheri
cgtgagggattgaaggcctt

SEQ ID NO: 19600 - DNA, 30 bp, Paenibacillus alvei
catccaaaactgcatagcttgagtacagaa

SEQ ID NO: 19601 - DNA, 20 bp, Bacteroides capillosus
taataccgtatgatatccta

SEQ ID NO: 19602 - DNA, 20 bp, Streptococcus criceti
gatgccatccctagagatag

SEQ ID NO: 19603 - DNA, 20 bp, Sporosarcina pasteurii
gatccgccgctaacaaagga

SEQ ID NO: 19604 - DNA, 20 bp, Streptococcus criceti
ccatccctagagatagggag

SEQ ID NO: 19605 - DNA, 20 bp, Brevibacillus centrosporus
cgggttttgggctgtcgcta

SEQ ID NO: 19606 - DNA, 20 bp, Oligella urethralis
tcggccgctccggtagcaag

SEQ ID NO: 19607 - DNA, 20 bp, Bacillus coagulans
gctcgcatgagcggatgtta

SEQ ID NO: 19608 - DNA, 20 bp, Actinomyces naeslundii
gatgcgcctttgggtgtttt

SEQ ID NO: 19609 - DNA, 30 bp, Corynebacterium group F1
gggttgagtaacacgtgggtgatctgccct

SEQ ID NO: 19610 - DNA, 20 bp, Streptococcus equinus
gtttgatcatggctcaggcg

SEQ ID NO: 19611 - DNA, 20 bp, Finegoldia magna
ccatagaagaaagctccggc

SEQ ID NO: 19612 - DNA, 20 bp, Myroides odoratimimus
aggggtagaaaaagcttgct

SEQ ID NO: 19613 - DNA, 20 bp, Vibrio hollisae
acatgtacggaattctggag

SEQ ID NO: 19614 - DNA, 20 bp, Enterobacter gergoviae
ggctgtggtccttgaagcgt

SEQ ID NO: 19615 - DNA, 20 bp, Bacteroides stercoris
atccttgagtgcagcagagg

SEQ ID NO: 19616 - DNA, 20 bp, Streptococcus macacae
tgcaagtgggacgcactgat

SEQ ID NO: 19617 - DNA, 20 bp, Delftia acidovorans
gagggcgcttacccggcggg

SEQ ID NO: 19618 - DNA, 20 bp, Brevibacillus centrosporus
taataccggatagagtctac

SEQ ID NO: 19619 - DNA, 20 bp, Finegoldia magna
ttactaatgagagtggcgaa

SEQ ID NO: 19620 - DNA, 20 bp, Streptococcus macacae
gttctccaattgacggtact

SEQ ID NO: 19621 - DNA, 30 bp, Streptococcus ratti
acgatagctaataccgcataagagagttta

SEQ ID NO: 19622 - DNA, 20 bp, Yersinia frederiksenii
ttcacttaatacgtgaagtg

SEQ ID NO: 19623 - DNA, 20 bp, Clostridium clostridiiforme
ttcgcaaggaagggaacgtg

SEQ ID NO: 19624 - DNA, 20 bp, Porphyromonas maccae
tcttttataggggattaaag

SEQ ID NO: 19625 - DNA, 20 bp, Peptoniphilus asaccharolyticus
tccttcggggtgaagatgaa

SEQ ID NO: 19626 - DNA, 20 bp, Haemophilus paraphrophilus
aggtgttggatccatggctc

SEQ ID NO: 19627 - DNA, 20 bp, Corynebacterium pilosum
attgccgaccggttagttcc

SEQ ID NO: 19628 - DNA, 30 bp, Bacteroides stercoris
aacggttcttttcttcggacagttgtgaag

SEQ ID NO: 19629 - DNA, 20 bp, Helcococcus kunzii
aatgaaacggaaaaaggaaa

SEQ ID NO: 19630 - DNA, 20 bp, Leuconostoc carnosum
cagacggttggttaagtctg

SEQ ID NO: 19631 - DNA, 20 bp, Eubacterium moniliforme
gggttgcacttgaaactgtg

SEQ ID NO: 19632 - DNA, 20 bp, Nocardia asteroides
tttagttaatacctaaagag

SEQ ID NO: 19633 - DNA, 20 bp, Suttonella indologenes
tggcgggcccaatgcttaac

SEQ ID NO: 19634 - DNA, 20 bp, Bacteroides capillosus
aacggcctagggcgaaactg

SEQ ID NO: 19635 - DNA, 20 bp, Corynebacterium group ANF
gaggaagccacctggttgga

SEQ ID NO: 19636 - DNA, 20 bp, Alicyclobacillus acidocaldarius
aagggacccctcatctctga

SEQ ID NO: 19637 - DNA, 20 bp, Pantoea agglomerans
gtagcacagcaggagcttgg

SEQ ID NO: 19638 - DNA, 30 bp, Eremococcus coleocola
ttcggagcatagagacaggtggtgcatggt

SEQ ID NO: 19639 - DNA, 30 bp, Clostridium clostridiiforme
cgcaacccctattgccggttgctaccagat

SEQ ID NO: 19640 - DNA, 20 bp, Bacteroides capillosus
aaaccgacgatcagtagggg

SEQ ID NO: 19641 - DNA, 20 bp, Clostridium clostridiiforme
aggtgaaaagcagagatgcg

SEQ ID NO: 19642 - DNA, 20 bp, Anaerococcus prevotii
atgaaatcacatatgcacat

SEQ ID NO: 19643 - DNA, 20 bp, Neisseria subflava
aaccccttgtacattagttg

SEQ ID NO: 19644 - DNA, 20 bp, Kocuria rosea
tctgaacgatgatgcccagc

SEQ ID NO: 19645 - DNA, 20 bp, Streptococcus iniae
agtggaaaatccattaccgt

SEQ ID NO: 19646 - DNA, 30 bp, Corynebacterium kutscheri
tggcctaaccacgtttgtggagggagtggt

SEQ ID NO: 19647 - DNA, 20 bp, Streptococcus infantarius
cctagtgtgcgccgcatcat

SEQ ID NO: 19648 - DNA, 20 bp, Bacillus laevolacticus
ttgaccttgcccttcggggc

SEQ ID NO: 19649 - DNA, 30 bp, Morganella morganii
gggaagcgaccctgcgaaggcaagcggaac

SEQ ID NO: 19650 - DNA, 30 bp, Leptotrichia buccalis
taacgccaagcgaacctgcaaagccggtcc

SEQ ID NO: 19651 - DNA, 20 bp, Finegoldia magna
gcttcggtggaagattacta

SEQ ID NO: 19652 - DNA, 20 bp, Delftia acidovorans
gggcgcttacccggcggggt

SEQ ID NO: 19653 - DNA, 20 bp, Paenibacillus pabuli
tgttttcttctcctgaagag

SEQ ID NO: 19654 - DNA, 20 bp, Anaerococcus prevotii
tgatctcttcggagtgacct

SEQ ID NO: 19655 - DNA, 20 bp, Sporosarcina ureae
atgagggaatgttgaaagcc

SEQ ID NO: 19656 - DNA, 20 bp, Finegoldia magna
tctctttatgagacatccat

SEQ ID NO: 19657 - DNA, 20 bp, Streptococcus infantarius
gccgcatcatcccatctcag

SEQ ID NO: 19658 - DNA, 20 bp, Lactobacillus acidophilus
ggtgatgacgttgggaacgc

SEQ ID NO: 19659 - DNA, 20 bp, Macrococcus caseolyticus
ggataatatctagcttcgca

SEQ ID NO: 19660 - DNA, 20 bp, Gemella morbillorum
taactattggacgcgatagc

SEQ ID NO: 19661 - DNA, 20 bp, Haemophilus segnis
gaactttaggtttggcgccc

SEQ ID NO: 19662 - DNA, 20 bp, Finegoldia magna
atatacccctctctttatga

SEQ ID NO: 19663 - DNA, 20 bp, Shewanella putrefaciens
atctcgcttcagagatagct

SEQ ID NO: 19664 - DNA, 20 bp, Brevibacterium casei
tttttcggatcgtagtctgc

SEQ ID NO: 19665 - DNA, 20 bp, Bacteroides stercoris
atcatcaaagcttgctttga

SEQ ID NO: 19666 - DNA, 20 bp, Bacillus schlegellii
cgggcggaagccttcgggcg

SEQ ID NO: 19667 - DNA, 20 bp, Brevibacillus brevis
aggtgcttgcaccttatggt

SEQ ID NO: 19668 - DNA, 20 bp, Brevibacillus centrosporus
agccgggttttgggctgtcg

SEQ ID NO: 19669 - DNA, 20 bp, Prevotella intermedia
taccttccaactagctaatc

SEQ ID NO: 19670 - DNA, 20 bp, Leuconostoc fallax
tgttagagataatattgttc

SEQ ID NO: 19671 - DNA, 20 bp, Sporosarcina ureae
cattctctcgcatgagggaa

SEQ ID NO: 19672 - DNA, 20 bp, Gemella morbillorum
aaggagagcttcttctctgg

SEQ ID NO: 19673 - DNA, 20 bp, Propionibacterium acnes
ctaagtcggtacaaggtagc

SEQ ID NO: 19674 - DNA, 20 bp, Clostridium clostridiiforme
aagcagagatgcgcttttgg

SEQ ID NO: 19675 - DNA, 20 bp, Streptococcus macacae
agagtggaaagttctccaat

SEQ ID NO: 19676 - DNA, 20 bp, Clostridium subterminale
gatttttgtaccaaaggagc

SEQ ID NO: 19677 - DNA, 20 bp, Actinomyces radingae
ggttgtgtggtgagagtggc

SEQ ID NO: 19678 - DNA, 20 bp, Empedobacter brevis
taacagattgaatggcatca

SEQ ID NO: 19679 - DNA, 20 bp, Streptococcus dysgalactiae
tgtttaacccatgttaaaca

SEQ ID NO: 19680 - DNA, 20 bp, Streptococcus sobrinus
actgtttaaaagaagcaacg

SEQ ID NO: 19681 - DNA, 20 bp, Morganella morganii
gaggaaggtggcaaggttaa

SEQ ID NO: 19682 - DNA, 20 bp, Brevibacillus brevis
ctggagcttgctctagggaa

SEQ ID NO: 19683 - DNA, 20 bp, Brevibacillus brevis
atcttaaggtgcttgcacct

SEQ ID NO: 19684 - DNA, 20 bp, Staphylococcus succinus
tgagccatgatcaaactact

SEQ ID NO: 19685 - DNA, 20 bp, Anaerococcus tetradius
ggaataatctgggagccgca

SEQ ID NO: 19686 - DNA, 20 bp, Sphingobacterium multivorum
gccaacacgagaggaagggg

SEQ ID NO: 19687 - DNA, 20 bp, Prevotella melaninogenica
tcgggactggggtctgcaac

SEQ ID NO: 19688 - DNA, 20 bp, Citrobacter freundii
aggtaaccccgtaggggaac

SEQ ID NO: 19689 - DNA, 20 bp, Actinomyces radingae
gggcttttttaagtttctgg

SEQ ID NO: 19690 - DNA, 20 bp, Paenibacillus azotofixans
agttgtagagggagcttgct

SEQ ID NO: 19691 - DNA, 20 bp, Myroides odoratimimus
cagtggtgaaatttcctagc

SEQ ID NO: 19692 - DNA, 20 bp, Vibrio hollisae
atccccagcgctaataccgc

SEQ ID NO: 19693 - DNA, 20 bp, Tetragenococcus halophilus
gatggctggccccgcggtgc

SEQ ID NO: 19694 - DNA, 20 bp, Streptococcus cristatus
taccgcataacattgactat

SEQ ID NO: 19695 - DNA, 20 bp, Bacillus schlegellii
gccgacgggtccagagatgg

SEQ ID NO: 19696 - DNA, 20 bp, Geobacillus stearothermophilus
gattggggcttgccttgatt

SEQ ID NO: 19697 - DNA, 20 bp, Rothia dentocariosa
ccgccagcgtctcatcctga

SEQ ID NO: 19698 - DNA, 20 bp, Bacteroides uniformis
tccgcatggtggaactatta

SEQ ID NO: 19699 - DNA, 20 bp, Bacteroides stercoris
actgactgagctggaaacag

SEQ ID NO: 19700 - DNA, 20 bp, Streptococcus suis
caggacgaatcgctggcggc

SEQ ID NO: 19701 - DNA, 20 bp, Eschericchia vulneris
acggctcacctaggcgacag

SEQ ID NO: 19702 - DNA, 20 bp, Corynebacterium pilosum
tccttcttgtgttggaaagg

SEQ ID NO: 19703 - DNA, 20 bp, Bacteroides capilosus
gaacggagagctcatgacag

SEQ ID NO: 19704 - DNA, 30 bp, Bacillus badius
ggaaaggcggcttttagctgtcgcttacag

SEQ ID NO: 19705 - DNA, 20 bp, Paenibacillus lautus
acccaaaactggatgacttg

SEQ ID NO: 19706 - DNA, 20 bp, Streptococcus sobrinus
ctgtttaaaagaagcaacgg

SEQ ID NO: 19707 - DNA, 20 bp, Bacteroides capilosus
gcataatgcagctgagtcgc

SEQ ID NO: 19708 - DNA, 20 bp, Anaerococcus tetradius
cgatgaagatatttagattc

SEQ ID NO: 19709 - DNA, 20 bp, Finegoldia magna
tgacagtaccatagaagaaa

SEQ ID NO: 19710 - DNA, 20 bp, Bacteroides merdae
gtccttttttgtatgtaccc

SEQ ID NO: 19711 - DNA, 20 bp, Moellerella wisconsensis
ggaaggcgttgatactaata

SEQ ID NO: 19712 - DNA, 20 bp, Finegoldia magna
gcgtgagcaacctgcctatg

SEQ ID NO: 19713 - DNA, 30 bp, Arcanobacterium haemolyticum
tagatattctgctcttgccgcatggtgggg

SEQ ID NO: 19714 - DNA, 20 bp, Unknown Organism
  oligonucleotide from CDC group EO-2
catgcaaggtcggaggcgag

SEQ ID NO: 19715 - DNA, 20 bp, Staphylococcus cohnii
ctcagggatgaacgctggtc

SEQ ID NO: 19716 - DNA, 20 bp, Pseudomonas luteola
gacggtaccacgggtgattc

SEQ ID NO: 19717 - DNA, 20 bp, Clostridium clostridiiforme
ggatttgaaattgacttagc

SEQ ID NO: 19718 - DNA, 20 bp, Bacteroides stercoris
ttcccgcatgggatgattat

SEQ ID NO: 19719 - DNA, 20 bp, Dolosicoccus paucivorans
ttgacatcggatgcatagct

SEQ ID NO: 19720 - DNA, 20 bp, Streptococcus criceti
ggaaagttactcaagtgacg

SEQ ID NO: 19721 - DNA, 20 bp, Microbacterium hominis
aagagtttttgtcatggctc

SEQ ID NO: 19722 - DNA, 20 bp, Pseudomonas fluorescens
tgctcacggatttagcggcg

SEQ ID NO: 19723 - DNA, 30 bp, Haemophilus parahaemolyticus
ggttaatagcctatcaaattgacgttaatc

SEQ ID NO: 19724 - DNA, 20 bp, Actinomyces naeslundii
gaaggcgaccttgccttttg

SEQ ID NO: 19725 - DNA, 20 bp, Sphingobacterium multivorum
tatcacacgtgctacaatgg

SEQ ID NO: 19726 - DNA, 20 bp, Streptococcus cristatus
tagtcaattaaaaggtgcaa

SEQ ID NO: 19727 - DNA, 20 bp, Paenibacillus macerans
gtaactgctcacaaggtgac

SEQ ID NO: 19728 - DNA, 30 bp, Streptococcus criceti
ggtgcaatggcaccactatcagatggacct

SEQ ID NO: 19729 - DNA, 30 bp, Propionibacterium acnes
ggtgattaggactaagtcgtacaagataaa

SEQ ID NO: 19730 - DNA, 20 bp, Raoultella terrigena
agattgaacgctgttgtgta

SEQ ID NO: 19731 - DNA, 20 bp, Streptococcus ratti
ttttacttttgtacatcggt

SEQ ID NO: 19732 - DNA, 20 bp, Paenibacillus lautus
cttagagtaactgctaagag

SEQ ID NO: 19733 - DNA, 20 bp, Clostridium clostridiiforme
ccgaaaggagaagcagatcc

SEQ ID NO: 19734 - DNA, 20 bp, Staphylococcus haemolyticus
catacgtgtaagtaactagt

SEQ ID NO: 19735 - DNA, 20 bp, Streptococcus ratti
agatgcaagagcatcactag

SEQ ID NO: 19736 - DNA, 20 bp, Oligella ureolytica
attaactatcaagctagagt

SEQ ID NO: 19737 - DNA, 20 bp, Sphingobacterium multivorum
tcggttgattaaatatttat

SEQ ID NO: 19738 - DNA, 20 bp, Escherichia hermannii
gatcacctcctgtcatggac

SEQ ID NO: 19739 - DNA, 20 bp, Bacillus schlegellii
gggcgacccatccgtgccgg

SEQ ID NO: 19740 - DNA, 20 bp, Citrobacter freundii
gatgccagccacactggaac

SEQ ID NO: 19741 - DNA, 20 bp, Enterobacter gergoviae
ggaggctgtggttcttgagg

SEQ ID NO: 19742 - DNA, 20 bp, Vibrio cholerae
agattcgctccacctcggcg

SEQ ID NO: 19743 - DNA, 20 bp, Streptococcus thermophilus
tggatcacctccttcatggt

SEQ ID NO: 19744 - DNA, 20 bp, Providencia alcalifaciens
ctaatccgcaataatctcta

SEQ ID NO: 19745 - DNA, 20 bp, Suttonella indologenes
aacgctggcgggcccaatgc

SEQ ID NO: 19746 - DNA, 20 bp, Brevundimonas vesicularis
acctgcggtgggatcacctc

SEQ ID NO: 19747 - DNA, 20 bp, Bacillus coagulans
cttgcttctatcaagttagc

SEQ ID NO: 19748 - DNA, 30 bp, Paenibacillus azotofixans
agcttgctctctcattaacttagcggcgga

SEQ ID NO: 19749 - DNA, 20 bp, Peptoniphilus asaccharolyticus
gaaaatcaaacagaaccctt

SEQ ID NO: 19750 - DNA, 20 bp, Psychrobacter phenylpyruvicus
ctaataccaaataagctatt

SEQ ID NO: 19751 - DNA, 20 bp, Streptococcus macacae
aggtgcagctgcacccctat

SEQ ID NO: 19752 - DNA, 20 bp, Streptococcus criceti
tagagtggaaagttactcaa

SEQ ID NO: 19753 - DNA, 30 bp, Sphingobacterium multivorum
agattaacaccgcataacatatgtgaccgg

SEQ ID NO: 19754 - DNA, 20 bp, Campylobacter concisus
aacagggagccgaccggaag

SEQ ID NO: 19755 - DNA, 20 bp, Citrobacter freundii
aaggtaaccccgtaggggaa

SEQ ID NO: 19756 - DNA, 20 bp, Anaerococcus prevotii
caaatgaaatcacatatgca

SEQ ID NO: 19757 - DNA, 20 bp, Eremococcus coleocola
gcactgttattagccaagaa

SEQ ID NO: 19758 - DNA, 20 bp, Sphingobacterium multivorum
cggttggatattaaatattt

SEQ ID NO: 19759 - DNA, 30 bp, Dermabacter hominis
gaccttggcccgcatgggttgtggtggaaa

SEQ ID NO: 19760 - DNA, 20 bp, Eubacterium moniliforme
agccagtggcttaaccgtaa

SEQ ID NO: 19761 - DNA, 20 bp, Finegoldia magna
tagacagaagcttcggtgga

SEQ ID NO: 19762 - DNA, 20 bp, Haemophilus paraphrophilus
gaatctcacaaagtacgttc

SEQ ID NO: 19763 - DNA, 20 bp, Anaerococcus tetradius
gtctggaataatctgggtgc

SEQ ID NO: 19764 - DNA, 20 bp, Streptococcus macacae
aggcggtctggaaagtcagt

SEQ ID NO: 19765 - DNA, 20 bp, Streptococcus iniae
aaaggagcaaaagcttcact

SEQ ID NO: 19766 - DNA, 20 bp, Stenotrophomonas maltophilia
ataactactggaaacttacg

SEQ ID NO: 19767 - DNA, 20 bp, Kingella kingae
cggcagcacgagtacttgta

SEQ ID NO: 19768 - DNA, 30 bp, Weeksella virosa
acctattcacgagctggatagttgaaggta

SEQ ID NO: 19769 - DNA, 20 bp, Porphyromonas gingivalis
ctgaagggcgtaccgcaagg

SEQ ID NO: 19770 - DNA, 20 bp, Oligella ureolytica
gacacgctagcgggatgctt

SEQ ID NO: 19771 - DNA, 20 bp, Haemophilus paraphrophilus
atttgggggttgaactttaa

SEQ ID NO: 19772 - DNA, 20 bp, Eubacterium moniliforme
gaaaccgcatggtttagagg

SEQ ID NO: 19773 - DNA, 20 bp, Eremococcus coleocola
gtagtaactggctagggatt

SEQ ID NO: 19774 - DNA, 20 bp, Clostridium clostridiiforme
cttgacatccacgcggtaga

SEQ ID NO: 19775 - DNA, 20 bp, Gemella morbillorum
tatcagctagatgttgcatg

SEQ ID NO: 19776 - DNA, 20 bp, Corynebacterium jeikeium
acccgcccgtcgcgtcatga

SEQ ID NO: 19777 - DNA, 20 bp, Streptococcus infantarius
gagagccgctttcgccccgg

SEQ ID NO: 19778 - DNA, 20 bp, Leuconostoc lactis
ggacagaatgactagggtga

SEQ ID NO: 19779 - DNA, 20 bp, Capnocytophaga sp.
atgacgtcaaatcatccggc

SEQ ID NO: 19780 - DNA, 20 bp, Myroides odoratimimus
tgcgaatctccaaagcttgt

SEQ ID NO: 19781 - DNA, 20 bp, Providencia rustigianii
tatcgtcaacgattgacgtt

SEQ ID NO: 19782 - DNA, 20 bp, Finegoldia magna
gacatgtgggtgaaaggtat

SEQ ID NO: 19783 - DNA, 20 bp, Brevibacillus centrosporus
ggcgaagacggaaaggcggc

SEQ ID NO: 19784 - DNA, 20 bp, Peptoniphilus asaccharolyticus
ccttcggggtgaagatgaaa

SEQ ID NO: 19785 - DNA, 20 bp, Hafnia alvei
tcccccgagcttaacttggg

SEQ ID NO: 19786 - DNA, 20 bp, Bacteroides ovatus
aacaggttatgctgaggagc

SEQ ID NO: 19787 - DNA, 20 bp, Streptococcus criceti
aatagtgattaactcatgtt

SEQ ID NO: 19788 - DNA, 20 bp, Brevibacillus centrosporus
catggcaaaagcttgaaagc

SEQ ID NO: 19789 - DNA, 20 bp, Eubacterium moniliforme
tcgggtggaactgtgagtat

SEQ ID NO: 19790 - DNA, 20 bp, Streptococcus acidominimus
ggcttctcttttgagcaggg

SEQ ID NO: 19791 - DNA, 30 bp, Streptococcus ferus
ccattacgtgacggtacttaaccagaaagg

SEQ ID NO: 19792 - DNA, 20 bp, Streptococcus criceti
ccgctaaggtgggacggatg

SEQ ID NO: 19793 - DNA, 30 bp, Pediococcus dextrinicus
ccgtaagggagctagccgtctaaggtggga

SEQ ID NO: 19794 - DNA, 20 bp, Stenotrophomonas maltophilia
cgcgagcagcaagcggaaac

SEQ ID NO: 19795 - DNA, 20 bp, Providencia rustigianii
gctaatatcatcagcgattg

SEQ ID NO: 19796 - DNA, 20 bp, Bacteroides merdae
ttacccgggtttgaacgtag

SEQ ID NO: 19797 - DNA, 20 bp, Streptococcus pyogenes
tgggtgcttgcaccggttca

SEQ ID NO: 19798 - DNA, 20 bp, Bacillus schlegellii
ccgccgacgggtccagagat

SEQ ID NO: 19799 - DNA, 20 bp, Paenibacillus alvei
aaactctagagatagagtcc

SEQ ID NO: 19800 - DNA, 20 bp, Bacteroides stercoris
taaggatcggctaactcccg

SEQ ID NO: 19801 - DNA, 20 bp, Dolosicoccus paucivorans
gtttcattgacaaagatgct

SEQ ID NO: 19802 - DNA, 20 bp, Alloiococcus otitis
gctctgctaccgcttatgga

SEQ ID NO: 19803 - DNA, 20 bp, Pediococcus parvulus
actttcgttaattgattttg

SEQ ID NO: 19804 - DNA, 20 bp, Helcococcus kunzii
cagggatatcctagagatag

SEQ ID NO: 19805 - DNA, 20 bp, Leptotrichia buccalis
ttggcgaagctgtgcttgca

SEQ ID NO: 19806 - DNA, 20 bp, Clostridium clostridiiforme
agcggtttcgatgaagtttt

SEQ ID NO: 19807 - DNA, 20 bp, Moellerella wisconsensis
tgacagagggggataactac

SEQ ID NO: 19808 - DNA, 20 bp, Anaerococcus prevotii
gatagactcttattgcttcg

SEQ ID NO: 19809 - DNA, 20 bp, Lactococcus raffinolactis
accaaatggtacactgagag

SEQ ID NO: 19810 - DNA, 20 bp, Aerococcus viridans
ggtacagcgagtcgcgaacc

SEQ ID NO: 19811 - DNA, 20 bp, Geobacillus stearothermophilus
gccttgattcggtcagcggc

SEQ ID NO: 19812 - DNA, 20 bp, Streptococcus equi
acaaggtagccgttcggaag

SEQ ID NO: 19813 - DNA, 20 bp, Leuconostoc gelidum
gcatgatatcaagctctaaa

SEQ ID NO: 19814 - DNA, 20 bp, Empedobacter brevis
ttgagtgatgttgaagtggc

SEQ ID NO: 19815 - DNA, 20 bp, Brevibacillus centrosporus
ccggggttaatcccgaatat

SEQ ID NO: 19816 - DNA, 20 bp, Abiotrophia defectiva
ggatcacatgattccgtgag

SEQ ID NO: 19817 - DNA, 20 bp, Prevotella loescheii
tgctcgttgtcggccccttg

SEQ ID NO: 19818 - DNA, 20 bp, Clostridium clostridiiforme
ctagcgatagttccgtgccg

SEQ ID NO: 19819 - DNA, 20 bp, Leclercia adecarboxylata
caccttccctttttccattg

SEQ ID NO: 19820 - DNA, 20 bp, Streptococcus acidominimus
gggcttctcttttgagcagg

SEQ ID NO: 19821 - DNA, 20 bp, Anaerococcus tetradius
tcttggaataatctgggagc

SEQ ID NO: 19822 - DNA, 30 bp, Clostridium clostridiiforme
atatgtccagggcgacacacatgctacaat

SEQ ID NO: 19823 - DNA, 20 bp, Bacteroides capillosus
gatggatgcccgttgtatgg

SEQ ID NO: 19824 - DNA, 20 bp, Paenibacillus macerans
gccaggagagtgacggtacc

SEQ ID NO: 19825 - DNA, 20 bp, Vibrio hollisae
acggaattctggagagattc

SEQ ID NO: 19826 - DNA, 20 bp, Clostridium clostridiiforme
cgcagacgaaactggagagc

SEQ ID NO: 19827 - DNA, 20 bp, Gemella morbillorum
actattggacgcgatagcta

SEQ ID NO: 19828 - DNA, 20 bp, Streptococcus sanguinis
taccgcatgatattgaatat

SEQ ID NO: 19829 - DNA, 20 bp, Bacteroides uniformis
ccatacgagcgcacaccctt

SEQ ID NO: 19830 - DNA, 20 bp, Brevibacillus centrosporus
aagcttgaaagccgggtttt

SEQ ID NO: 19831 - DNA, 20 bp, Streptococcus infantarius
atcatcccatctcaggtcgg

SEQ ID NO: 19832 - DNA, 20 bp, Bacteroides stercoris
gttttttgcatgtaccgtat

SEQ ID NO: 19833 - DNA, 20 bp, Propionibacterium propionicus
atgagcttgcaaggcatctt

SEQ ID NO: 19834 - DNA, 20 bp, Finegoldia magna
ttagttaccagcgaataaat

SEQ ID NO: 19835 - DNA, 20 bp, Eubacterium moniliforme
taagaccacgaaaccgcatg

SEQ ID NO: 19836 - DNA, 20 bp, Bacteroides capillosus
ccgttgtatggcctttcggc

SEQ ID NO: 19837 - DNA, 20 bp, Eubacterium moniliforme
gcagcgacctcgtaagagta

SEQ ID NO: 19838 - DNA, 20 bp, Bacillus laevolacticus
tgatcatggctcagggccga

SEQ ID NO: 19839 - DNA, 20 bp, Finegoldia magna
gacagaagcttcggtggaag

SEQ ID NO: 19840 - DNA, 20 bp, Streptococcus macacae
aggtacaacagtatcgctaa

SEQ ID NO: 19841 - DNA, 20 bp, Finegoldia magna
gatttagtaaacagaagcct

SEQ ID NO: 19842 - DNA, 20 bp, Paenibacillus lautus
taactgctaagagagtgacg

SEQ ID NO: 19843 - DNA, 20 bp, Corynebacterium coyleae
tacacgtcatgaaagttggt

SEQ ID NO: 19844 - DNA, 20 bp, Streptococcus gallolyticus
gtgaagtcgtaacaaaaaac

SEQ ID NO: 19845 - DNA, 20 bp, Stenotrophomonas maltophilia
atacccttatcgatatgacg

SEQ ID NO: 19846 - DNA, 20 bp, Bacteroides capilosus
ggtgtgaaaaccacgggctc

SEQ ID NO: 19847 - DNA, 20 bp, Bacteroides ovatus
ggttgtcgtacagctcgtgc

SEQ ID NO: 19848 - DNA, 20 bp, Eubacterium moniliforme
ggaagccctcgggtggaact

SEQ ID NO: 19849 - DNA, 20 bp, Anaerococcus tetradius
actgttaggcttgagagatg

SEQ ID NO: 19850 - DNA, 20 bp, Fusobacterium mortiferum
tcctcggggtgatggtggcg

SEQ ID NO: 19851 - DNA, 20 bp, Streptococcus macacae
tagagggggataaggattgg

SEQ ID NO: 19852 - DNA, 20 bp, Providencia stuartii
agcagagatgctgaagtgcc

SEQ ID NO: 19853 - DNA, 30 bp, Leuconostoc fallax
caacacatttcgcatgaagtgtgtttaaaa

SEQ ID NO: 19854 - DNA, 30 bp, Leuconostoc pseudomesenteroides
atgatacgaagttaaaaggcgctttggcgt

SEQ ID NO: 19855 - DNA, 20 bp, Anaerococcus tetradius
catgaagagcttatcaaaga

SEQ ID NO: 19856 - DNA, 20 bp, Paenibacillus macerans
aactccttcgcatgagggag

SEQ ID NO: 19857 - DNA, 20 bp, Weissella paramesenteroides
ctttaactgatactgacgag

SEQ ID NO: 19858 - DNA, 20 bp, Enterobacter amnigenus
agagagcttgttttcgggtg

SEQ ID NO: 19859 - DNA, 20 bp, Bacillus coagulans
gcggatgttaaaagacggtt

SEQ ID NO: 19860 - DNA, 20 bp, Finegoldia magna
ataatgacagtaccatagaa

SEQ ID NO: 19861 - DNA, 20 bp, Brevibacillus brevis
tcctgtgcgtggaaagaact

SEQ ID NO: 19862 - DNA, 20 bp, Oligella urethralis
atcccgccttggtaggccgt

SEQ ID NO: 19863 - DNA, 20 bp, Peptostreptococcus anaerobius
tctgatttgatgcttgcatt

SEQ ID NO: 19864 - DNA, 20 bp, Vibrio hollisae
accgctgggggatgacagta

SEQ ID NO: 19865 - DNA, 20 bp, Sphingobacterium multivorum
ttggatattaaatatttata

SEQ ID NO: 19866 - DNA, 20 bp, Brevibacillus brevis
gagcgagtgtcttcggagcc

SEQ ID NO: 19867 - DNA, 20 bp, Clostridium clostridiiforme
cctcggcgcgcagacgaaac

SEQ ID NO: 19868 - DNA, 20 bp, Providencia rustigianii
atcatcagcgattgacgtta

SEQ ID NO: 19869 - DNA, 20 bp, Bacteroides stercoris
agctggaaacagttctttct

SEQ ID NO: 19870 - DNA, 20 bp, Pasteurella multocida
gcttggtgctcgaagctaac

SEQ ID NO: 19871 - DNA, 20 bp, Bacillus mycoides
ttgcgctgcatggcgcgaaa

SEQ ID NO: 19872 - DNA, 20 bp, Leptotrichia buccalis
accgcaagggggaaggtatc

SEQ ID NO: 19873 - DNA, 20 bp, Eubacterium moniliforme
cgcataagaccacgaaaccg

SEQ ID NO: 19874 - DNA, 20 bp, Providencia alcalifaciens
gtagctaatccgcaataatc

SEQ ID NO: 19875 - DNA, 20 bp, Brevibacillus centrosporus
gagtctactctcgcatgagg

SEQ ID NO: 19876 - DNA, 20 bp, Anaerobiospirillum succiniciproducens
aaatcagaatgttgcgggaa

SEQ ID NO: 19877 - DNA, 20 bp, Brevibacillus reuszeri
tttttggaccgcatggtccg

SEQ ID NO: 19878 - DNA, 20 bp, Bacteroides thetaiotaomicron
gtaagattggtattggggta

SEQ ID NO: 19879 - DNA, 20 bp, Cedecea davisae
taataacctcggtgattgac

SEQ ID NO: 19880 - DNA, 20 bp, Paenibacillus macerans
ccaggagagtgacggtacct

SEQ ID NO: 19881 - DNA, 20 bp, Bacillus laevolacticus
gggccgaacgctggccggcg

SEQ ID NO: 19882 - DNA, 20 bp, Peptoniphilus asaccharolyticus
cgagcgatgaaatttcgaca

SEQ ID NO: 19883 - DNA, 20 bp, Paenibacillus lautus
cccaaaactggatgacttga

SEQ ID NO: 19884 - DNA, 20 bp, Streptococcus macacae
tcagtagttaaaagcattgg

SEQ ID NO: 19885 - DNA, 20 bp, Clostridium clostridiiforme
agccgaggctcaacctcggc

SEQ ID NO: 19886 - DNA, 20 bp, Streptococcus macacae
agttctccaattgacggtac

SEQ ID NO: 19887 - DNA, 20 bp, Myroides odoratimimus
ctccatggtttatcgatatg

SEQ ID NO: 19888 - DNA, 20 bp, Prevotella loescheii
actgcttcatggcatactgt

SEQ ID NO: 19889 - DNA, 20 bp, Paenibacillus macerans
accacagttcgcactggaaa

SEQ ID NO: 19890 - DNA, 20 bp, Streptococcus acidominimus
ccgtagctgctacatttgaa

SEQ ID NO: 19891 - DNA, 20 bp, Finegoldia magna
ttcggtggaagattactaat

SEQ ID NO: 19892 - DNA, 20 bp, Enterobacter gergoviae
gtggcttccggaggctacgc

SEQ ID NO: 19893 - DNA, 20 bp, Sporosarcina ureae
tccattctctcgcatgaggg

SEQ ID NO: 19894 - DNA, 20 bp, Staphylococcus succinus
tgatcaaactactatctggt

SEQ ID NO: 19895 - DNA, 20 bp, Stenotrophomonas maltophilia
ggaaacccataaagccctga

SEQ ID NO: 19896 - DNA, 30 bp, Empedobacter brevis
gtgtaggacgactgccttatgggttgtaaa

SEQ ID NO: 19897 - DNA, 20 bp, Achromobacter xylosoxidans
aaacgatgtcactagctgtt

SEQ ID NO: 19898 - DNA, 20 bp, Anaerococcus prevotii
gaagcctgcgagcaaaccgt

SEQ ID NO: 19899 - DNA, 20 bp, Bacteroides capilosus
atgacactggctgccaaaga

SEQ ID NO: 19900 - DNA, 20 bp, Paenibacillus macerans
acggtacctagagaagaaag

SEQ ID NO: 19901 - DNA, 20 bp, Bacteroides thetaiotaomicron
gattggtattggggtaagtc

SEQ ID NO: 19902 - DNA, 20 bp, Peptoniphilus asaccharolyticus
atgaaaatcaaacagaaccc

SEQ ID NO: 19903 - DNA, 20 bp, Campylobacter curvus
cgtagctccttgtcgcaaag

SEQ ID NO: 19904 - DNA, 20 bp, Prevotella loescheii
tgctcaacatccggcttgca

SEQ ID NO: 19905 - DNA, 20 bp, Streptococcus criceti
tactcaagtgacggtatctt

SEQ ID NO: 19906 - DNA, 20 bp, Moellerella wisconsensis
aggcgttgatactaatacta

SEQ ID NO: 19907 - DNA, 20 bp, Clostridium innocuum
gcataaaagacgatatcgca

SEQ ID NO: 19908 - DNA, 20 bp, Vibrio metschnikovii
cttgccactttgggttcatg

SEQ ID NO: 19909 - DNA, 20 bp, Bacteroides merdae
tgttaaagattcatcgctga

SEQ ID NO: 19910 - DNA, 20 bp, Dolosicoccus paucivorans
gacaaagatgcttatggtat

SEQ ID NO: 19911 - DNA, 30 bp, Corynebacterium mycetoides
tcaggatgagcgctggcggcgtgcttatac

SEQ ID NO: 19912 - DNA, 20 bp, Porphyromonas gingivalis
tgaagggcgtaccgcaaggg

SEQ ID NO: 19913 - DNA, 20 bp, Pediococcus dextrinicus
tgatcaaggtgcttgcacca

SEQ ID NO: 19914 - DNA, 20 bp, Finegoldia magna
gattactaatgagagtggcg

SEQ ID NO: 19915 - DNA, 20 bp, Paenibacillus lautus
gaggaaagaaagacggagca

SEQ ID NO: 19916 - DNA, 20 bp, Anaerococcus tetradius
gaataatctgggtgccgcag

SEQ ID NO: 19917 - DNA, 20 bp, Finegoldia magna
aaagtcggggactctaagta

SEQ ID NO: 19918 - DNA, 20 bp, Prevotella corporis
tgcccacgcgtgggtttttg

SEQ ID NO: 19919 - DNA, 20 bp, Leifsonia aquatica
ccaaggctgacatatacgag

SEQ ID NO: 19920 - DNA, 20 bp, Bordetella trematum
aaagaaacggcgccagctaa

SEQ ID NO: 19921 - DNA, 20 bp, Streptococcus macacae
agagagtggaaagttctcca

SEQ ID NO: 19922 - DNA, 20 bp, Bacillus schlegellii
atcccgccgacgggtccaga

SEQ ID NO: 19923 - DNA, 20 bp, Prevotella oralis
cggggataaagttggggacg

SEQ ID NO: 19924 - DNA, 30 bp, Corynebacterium xerosis
cctttcgacagggacgaagcgttatgtgac

SEQ ID NO: 19925 - DNA, 20 bp, Anaerobiospirillum succiniciproducens
ttcagggggaggaaacactg

SEQ ID NO: 19926 - DNA, 20 bp, Staphylococcus schleiferi
gacaggagcttgctcctttg

SEQ ID NO: 19927 - DNA, 20 bp, Streptococcus sanguinis
aaagggacggctaactccgg

SEQ ID NO: 19928 - DNA, 20 bp, Streptococcus ferus
aaggaagaacggtaatggga

SEQ ID NO: 19929 - DNA, 30 bp, Clostridium clostridiiforme
ggaagaataccagtggcgaaggcggtttgc

SEQ ID NO: 19930 - DNA, 20 bp, Fusobacterium mortiferum
tgccccttcgggggaactta

SEQ ID NO: 19931 - DNA, 20 bp, Prevotella loescheii
tccggcttgcagcgcgaact

SEQ ID NO: 19932 - DNA, 20 bp, Prevotella intermedia
agggacggtgcgatgcaaat

SEQ ID NO: 19933 - DNA, 20 bp, Clostridium innocuum
cgcataaaagacgatatcgc

SEQ ID NO: 19934 - DNA, 20 bp, Capnocytophaga sp.
gcaggggaagaataaggagt

SEQ ID NO: 19935 - DNA, 30 bp, Paenibacillus alvei
gcattttcctcgcatgagggagatgagaaa

SEQ ID NO: 19936 - DNA, 20 bp, Vibrio hollisae
cccagcgctaataccgctgg

SEQ ID NO: 19937 - DNA, 20 bp, Citrobacter werkmanii
ctgcgcgcgcagcgcctaac

SEQ ID NO: 19938 - DNA, 20 bp, Porphyromonas gingivalis
gcgtaccgcaaggggcgcac

SEQ ID NO: 19939 - DNA, 20 bp, Globicatella sanguinis
cgaaccataactagaacttg

SEQ ID NO: 19940 - DNA, 20 bp, Abiotrophia defectiva
acatggaatcacatgattcc

SEQ ID NO: 19941 - DNA, 20 bp, Campylobacter curvus
accgaaagttgcggtgtgct

SEQ ID NO: 19942 - DNA, 20 bp, Streptococcus macacae
tccaattgacggtacttaac

SEQ ID NO: 19943 - DNA, 20 bp, Leuconostoc carnosum
gaagaaaagttaaggtaggg

SEQ ID NO: 19944 - DNA, 20 bp, Brevibacterium linens
ctttggttgtggaaagtttt

SEQ ID NO: 19945 - DNA, 20 bp, Globicatella sanguinis
cggtggcctaaccaatagga

SEQ ID NO: 19946 - DNA, 20 bp, Staphylococcus schleiferi
agtcgagcgaacggacagga

SEQ ID NO: 19947 - DNA, 20 bp, Stenotrophomonas maltophilia
tgactacaatggcaggagac

SEQ ID NO: 19948 - DNA, 20 bp, Arcanobacterium haemolyticum
aacactgaacaaggcgttga

SEQ ID NO: 19949 - DNA, 20 bp, Kocuria rosea
cggtggcctacccccttgtg

SEQ ID NO: 19950 - DNA, 20 bp, Eubacterium moniliforme
agttgctctttgggaagccc

SEQ ID NO: 19951 - DNA, 20 bp, Gracilibacillus dipsosauri
ccaccttcgacggctagcct

SEQ ID NO: 19952 - DNA, 20 bp, Granulicatella elegans
tgacccagagaaggaaaaga

SEQ ID NO: 19953 - DNA, 20 bp, Clostridium clostridiiforme
tcatggcccatatgtccagg

SEQ ID NO: 19954 - DNA, 20 bp, Clostridium clostridiiforme
agacttatgttgattggaac

SEQ ID NO: 19955 - DNA, 20 bp, Neisseria subflava
gtaggtaggataccgcaagg

SEQ ID NO: 19956 - DNA, 20 bp, Bacteroides distasonis
aagcaggggccccgcatggg

SEQ ID NO: 19957 - DNA, 20 bp, Myroides odoratimimus
ggcaacgatgattaggggtc

SEQ ID NO: 19958 - DNA, 20 bp, Dolosigranulum pigrum
ctaccactcatggatagcct

SEQ ID NO: 19959 - DNA, 20 bp, Bacteroides stercoris
ttgagtgcagcagaggtggg

SEQ ID NO: 19960 - DNA, 20 bp, Escherichia hermannii
ggttggatcacctcctgtca

SEQ ID NO: 19961 - DNA, 20 bp, Empedobacter brevis
gaggattaatactttataac

SEQ ID NO: 19962 - DNA, 20 bp, Clostridium clostridiiforme
tatgttgattggaacattca

SEQ ID NO: 19963 - DNA, 20 bp, Actinobacillus ureae
gactgtgagtttggtgcccg

SEQ ID NO: 19964 - DNA, 20 bp, Yersinia frederiksenii
aaggcatttcacttaatacg

SEQ ID NO: 19965 - DNA, 20 bp, Eubacterium moniliforme
gtcgaaggtgagatcaatga

SEQ ID NO: 19966 - DNA, 20 bp, Bacteroides stercoris
gggactctacccggactgcc

SEQ ID NO: 19967 - DNA, 20 bp, Neisseria polysaccharea
ggttggatcacctcccttca

SEQ ID NO: 19968 - DNA, 20 bp, Serratia grimesii
ggaggaagggctcagtgtta

SEQ ID NO: 19969 - DNA, 20 bp, Anaerococcus prevotii
atcatggctaaggacgaacg

SEQ ID NO: 19970 - DNA, 20 bp, Streptococcus constellatus
gtagaccgcacaggatgccc

SEQ ID NO: 19971 - DNA, 20 bp, Streptococcus macacae
cttagagggggataaggatt

SEQ ID NO: 19972 - DNA, 20 bp, Campylobacter concisus
acagggagccgaccggaagg

SEQ ID NO: 19973 - DNA, 20 bp, Weissella paramesenteroides
tactgacgagcttgctctga

SEQ ID NO: 19974 - DNA, 20 bp, Streptococcus urinalis
gtaggagtggaaagtctact

SEQ ID NO: 19975 - DNA, 20 bp, Staphylococcus schleiferi
catggtatgcccgtatcgga

SEQ ID NO: 19976 - DNA, 20 bp, Dolosicoccus paucivorans
gagtaactgttactcgtttg

SEQ ID NO: 19977 - DNA, 20 bp, Acinetobacter baumannii
cgtacaggtagccgtagggg

SEQ ID NO: 19978 - DNA, 20 bp, Burkholderia gladioli
atccgcatacgatccacgga

SEQ ID NO: 19979 - DNA, 20 bp, Sphingobacterium multivorum
ccgcataacatcaacagttc

SEQ ID NO: 19980 - DNA, 20 bp, Bacillus circulans
agggcggttggatcacctcc

SEQ ID NO: 19981 - DNA, 20 bp, Anaerococcus tetradius
ataaactcttcgcatgaaga

SEQ ID NO: 19982 - DNA, 20 bp, Neisseria polysaccharea
tggatcacctcccttcagtg

SEQ ID NO: 19983 - DNA, 20 bp, Alloiococcus otitis
tgctaccgcttatggatagc

SEQ ID NO: 19984 - DNA, 20 bp, Clostridium clostridiiforme
ccacgcggtagagaagcgaa

SEQ ID NO: 19985 - DNA, 20 bp, Streptococcus macacae
gataggagcttaaaaggtgc

SEQ ID NO: 19986 - DNA, 30 bp, Clostridium innocuum
caagtcgaacgaagtttcaaggaagcttgc

SEQ ID NO: 19987 - DNA, 20 bp, Oligella urethralis
ggtagcaagaggtcttacga

SEQ ID NO: 19988 - DNA, 20 bp, Yersinia ruckeri
aaggtaaccgaggggaacct

SEQ ID NO: 19989 - DNA, 20 bp, Corynebacterium pilosum
ccttccagggtctcccaatt

SEQ ID NO: 19990 - DNA, 20 bp, Paenibacillus alvei
gcatgagggagatgagaaag

SEQ ID NO: 19991 - DNA, 20 bp, Myroides odoratimimus
cgaatctccaaagcttgtct

SEQ ID NO: 19992 - DNA, 20 bp, Campylobacter concisus
acgatggttggatgccattg

SEQ ID NO: 19993 - DNA, 20 bp, Finegoldia magna
cgaacgggatttagtagaca

SEQ ID NO: 19994 - DNA, 20 bp, Bacteroides merdae
gaacgtagtctgaccggagt

SEQ ID NO: 19995 - DNA, 20 bp, Sporosarcina pasteurii
aaaggaagaaacaagtttct

SEQ ID NO: 19996 - DNA, 20 bp, Streptococcus iniae
agttaaaaggagcaaaagct

SEQ ID NO: 19997 - DNA, 30 bp, Peptostreptococcus anaerobius
tgatttgatgcttgcattaatgaaagatga

SEQ ID NO: 19998 - DNA, 20 bp, Streptococcus constellatus
gtttactaccccgtattctg

SEQ ID NO: 19999 - DNA, 20 bp, Peptoniphilus asaccharolyticus
ctcaacccttgtaagcattt

SEQ ID NO: 20000 - DNA, 20 bp, Finegoldia magna
accatagaagaaagctccgg

SEQ ID NO: 20001 - DNA, 20 bp, Bacteroides uniformis
tcgtgccgtcaggtgtcggc

SEQ ID NO: 20002 - DNA, 20 bp, Bacillus coagulans
ctatcaagttagcggcggac

SEQ ID NO: 20003 - DNA, 20 bp, Prevotella oralis
cccgctgtcggccttttttg

SEQ ID NO: 20004 - DNA, 20 bp, Geobacillus stearothermophilus
agcggaccggattggggctt

SEQ ID NO: 20005 - DNA, 20 bp, Neisseria sicca
gaaccttccggagacggaag

SEQ ID NO: 20006 - DNA, 20 bp, Myroides odoratimimus
tgctccatggtttatcgata

SEQ ID NO: 20007 - DNA, 20 bp, Streptococcus macacae
agtggaaagttctccaattg

SEQ ID NO: 20008 - DNA, 20 bp, Providencia stuartii
agaattgagcagagatgctg

SEQ ID NO: 20009 - DNA, 20 bp, Neisseria gonorrhoeae
cgggcatgctttacacatgc

SEQ ID NO: 20010 - DNA, 20 bp, Paenibacillus lautus
cacccaaaactggatgactt

SEQ ID NO: 20011 - DNA, 30 bp, Enterococcus saccharolyticus
atcatgcaagtcgaacgcttcttttccgcc

SEQ ID NO: 20012 - DNA, 20 bp, Bacteroides capilosus
ttgggtttcttagtggcgga

SEQ ID NO: 20013 - DNA, 20 bp, Leuconostoc gelidum
agggagccgactaaggcagg

SEQ ID NO: 20014 - DNA, 20 bp, Streptococcus urinalis
agaatggaagtaggagtgga

SEQ ID NO: 20015 - DNA, 20 bp, Eremococcus coleocola
gcaatcatcgcctgatggtt

SEQ ID NO: 20016 - DNA, 30 bp, Bacteroides merdae
tgattactaggagtttgcgatacaatgtaa

SEQ ID NO: 20017 - DNA, 20 bp, Prevotella disiens
gtaatgttttgcatgtacca

SEQ ID NO: 20018 - DNA, 20 bp, Bacteroides thetaiotaomicron
atgggttttatattaaagaa

SEQ ID NO: 20019 - DNA, 20 bp, Vibrio harveyi
ggtggacgacgtcaaagtca

SEQ ID NO: 20020 - DNA, 20 bp, Brevibacillus brevis
gatcaacctccttcaattgg

SEQ ID NO: 20021 - DNA, 20 bp, Leuconostoc carnosum
aggtagggaatgaccttagc

SEQ ID NO: 20022 - DNA, 20 bp, Bacillus schlegellii
ttaggaggggcctgcggcgc

SEQ ID NO: 20023 - DNA, 20 bp, Empedobacter brevis
acgattctttcgggaatctg

SEQ ID NO: 20024 - DNA, 20 bp, Sphingobacterium multivorum
ctggctgggccaacacgaga

SEQ ID NO: 20025 - DNA, 20 bp, Haemophilus paraphrophilus
taaaacgacgggccaggtta

SEQ ID NO: 20026 - DNA, 20 bp, Prevotella oralis
gtccctttttgcaggtaccg

SEQ ID NO: 20027 - DNA, 20 bp, Corynebacterium coyleae
ggcctctgcttgcagaggta

SEQ ID NO: 20028 - DNA, 20 bp, Micrococcus luteus
gcgagggggggaccagcgat

SEQ ID NO: 20029 - DNA, 20 bp, Bacteroides stercoris
acaatgtcagcggccaagcg

SEQ ID NO: 20030 - DNA, 20 bp, Streptococcus urinalis
acttcgtgacggtaactaac

SEQ ID NO: 20031 - DNA, 20 bp, Bacteroides thetaiotaomicron
tgatagccgggggtactgaa

SEQ ID NO: 20032 - DNA, 20 bp, Clostridium clostridiiforme
agactgccatcgacaagatg

SEQ ID NO: 20033 - DNA, 20 bp, Corynebacterium falsenii
gccatgttgtggtgacggta

SEQ ID NO: 20034 - DNA, 20 bp, Pediococcus parvulus
aattgattttgagatgcttg

SEQ ID NO: 20035 - DNA, 20 bp, Paenibacillus macerans
gagggagttgggaaaggcgg

SEQ ID NO: 20036 - DNA, 30 bp, Bacillus circulans
ttaaaagcttgcttttaaagttagcggcgg

SEQ ID NO: 20037 - DNA, 20 bp, Anaerococcus tetradius
aagttggggactctagatat

SEQ ID NO: 20038 - DNA, 20 bp, Neisseria subflava
cgcaaggggccgcttaccac

SEQ ID NO: 20039 - DNA, 20 bp, Bacillus schlegellii
gggtggggcgacccatccgt

SEQ ID NO: 20040 - DNA, 20 bp, Neisseria meningitidis
caagcaatcaggttgcccaa

SEQ ID NO: 20041 - DNA, 20 bp, Salmonella typhi
tcgcgacggtatcaggcagc

SEQ ID NO: 20042 - DNA, 20 bp, Peptostreptococcus anaerobius
tgcattgatgaaagatgagc

SEQ ID NO: 20043 - DNA, 20 bp, Globicatella sanguinis
agaggaaatgttagtagatt

SEQ ID NO: 20044 - DNA, 20 bp, Finegoldia magna
gatttagtagacagaagctt

SEQ ID NO: 20045 - DNA, 20 bp, Campylobacter curvus
agtaaataatatatagggtt

SEQ ID NO: 20046 - DNA, 20 bp, Anaerobiospirillum succiniciproducens
gggaaagacttttagttgct

SEQ ID NO: 20047 - DNA, 20 bp, Bacillus schlegellii
taggtgtgggtggggcgacc

SEQ ID NO: 20048 - DNA, 20 bp, Dolosicoccus paucivorans
tgtcggaaacgaccgctaat

SEQ ID NO: 20049 - DNA, 20 bp, Myroides odoratus
ggtagaaggagcttgctttt

SEQ ID NO: 20050 - DNA, 20 bp, Dolosicoccus paucivorans
cttctttgaaggcaccgata

SEQ ID NO: 20051 - DNA, 20 bp, Clostridium clostridiiforme
acgaaactggagagcttgag

SEQ ID NO: 20052 - DNA, 20 bp, Stenotrophomonas maltophilia
cactgtgtgactcatgactg

SEQ ID NO: 20053 - DNA, 20 bp, Psychrobacter phenylpyruvicus
agtcgagcggacagagaagg

SEQ ID NO: 20054 - DNA, 20 bp, Vibrio harveyi
cataaagtgcgtcgagttcc

SEQ ID NO: 20055 - DNA, 20 bp, Haemophilus parainfluenzae
gtagaatcgaaagatgaaag

SEQ ID NO: 20056 - DNA, 20 bp, Anaerococcus prevotii
attacggcggggtctagaga

SEQ ID NO: 20057 - DNA, 20 bp, Paenibacillus macerans
tcgcactggaaactggttaa

SEQ ID NO: 20058 - DNA, 20 bp, Dolosigranulum pigrum
catggatagcctcgcggcgt

SEQ ID NO: 20059 - DNA, 20 bp, Sphingobacterium multivorum
caccgcataacatcaacagt

SEQ ID NO: 20060 - DNA, 20 bp, Paenibacillus alvei
aatgcaaactctagagatag

SEQ ID NO: 20061 - DNA, 20 bp, Anaerococcus tetradius
aactgttaggcttgagagat

SEQ ID NO: 20062 - DNA, 20 bp, Bacteroides capilosus
cactggctgccaaagattta

SEQ ID NO: 20063 - DNA, 20 bp, Gemella morbillorum
atagctaatcccgcatatca

SEQ ID NO: 20064 - DNA, 20 bp, Streptococcus criceti
tgattaactcatgttaatga

SEQ ID NO: 20065 - DNA, 20 bp, Suttonella indologenes
attggattagctagttggta

SEQ ID NO: 20066 - DNA, 20 bp, Campylobacter curvus
tgcggtgtgctttaggtggg

SEQ ID NO: 20067 - DNA, 20 bp, Paenibacillus alvei
tcctagggtgacggtacctg

SEQ ID NO: 20068 - DNA, 20 bp, Clostridium clostridiiforme
gatggatttgaaattgactt

SEQ ID NO: 20069 - DNA, 20 bp, Leptotrichia buccalis
tgcacaggcgagccaaggcg

SEQ ID NO: 20070 - DNA, 20 bp, Actinomyces neuii
tgatcaggtcagggaacgtg

SEQ ID NO: 20071 - DNA, 20 bp, Prevotella corporis
gaggagcaagctctgtctgt

SEQ ID NO: 20072 - DNA, 20 bp, Campylobacter curvus
aaagttgcggtgtgctttag

SEQ ID NO: 20073 - DNA, 20 bp, Streptococcus acidominimus
tagcgggagtggaaaatccg

SEQ ID NO: 20074 - DNA, 20 bp, Capnocytophaga sp.
tttgatgacggtactctgcg

SEQ ID NO: 20075 - DNA, 20 bp, Clostridium clostridiiforme
tcgtctgtcaaaagccgagg

SEQ ID NO: 20076 - DNA, 20 bp, Actinomyces neuii
aagggtagccgtaccggaag

SEQ ID NO: 20077 - DNA, 20 bp, Finegoldia magna
ctatacttagttaccagcga

SEQ ID NO: 20078 - DNA, 20 bp, Leptotrichia buccalis
tgataaaacctggtgttgtc

SEQ ID NO: 20079 - DNA, 20 bp, Clostridium clostridiiforme
acttgtccgaaagagaggga

SEQ ID NO: 20080 - DNA, 20 bp, Leuconostoc carnosum
agcctgacggtaccatacca

SEQ ID NO: 20081 - DNA, 20 bp, Tatumella ptyseos
tgcagagatggcattggtgc

SEQ ID NO: 20082 - DNA, 20 bp, Brevibacillus agri
acaacgggacgctacctcgc

SEQ ID NO: 20083 - DNA, 20 bp, Streptococcus urinalis
acaagaccaaggagttgcga

SEQ ID NO: 20084 - DNA, 20 bp, Shigella boydii
gaatcagcaagctgattcct

SEQ ID NO: 20085 - DNA, 20 bp, Clostridium clostridiiforme
cccgaaaggagaagcagatc

SEQ ID NO: 20086 - DNA, 20 bp, Sphingobacterium multivorum
tccaggcattcatggccctt

SEQ ID NO: 20087 - DNA, 20 bp, Neisseria subflava
cgtaacaaggcagcccgagg

SEQ ID NO: 20088 - DNA, 20 bp, Neisseria subflava
cagaagtaggtaggataccg

SEQ ID NO: 20089 - DNA, 20 bp, Alloiococcus otitis
gcttatggatagcctcgcgg

SEQ ID NO: 20090 - DNA, 20 bp, Stenotrophomonas maltophilia
accccgcgagcagcaagcgg

SEQ ID NO: 20091 - DNA, 20 bp, Peptoniphilus asaccharolyticus
ccttcggggtgaagtttgga

SEQ ID NO: 20092 - DNA, 20 bp, Eubacterium moniliforme
ctcaaccccggggttgcact

SEQ ID NO: 20093 - DNA, 20 bp, Corynebacterium group ANF
cacatggtaagaagatgaaa

SEQ ID NO: 20094 - DNA, 20 bp, Psychrobacter phenylpyruvicus
ctgtcgctagaggatgggcc

SEQ ID NO: 20095 - DNA, 20 bp, Eubacterium moniliforme
gctgtcgaaggtgagatcaa

SEQ ID NO: 20096 - DNA, 20 bp, Micromonas micros
aacgagaagctagatagaga

SEQ ID NO: 20097 - DNA, 20 bp, Leptotrichia buccalis
tgcaaagccggtccaagttc

SEQ ID NO: 20098 - DNA, 20 bp, Clostridium clostridiiforme
gatttgaaattgacttagcg

SEQ ID NO: 20099 - DNA, 20 bp, Clostridium clostridiiforme
gacttatgttgattggaaca

SEQ ID NO: 20100 - DNA, 20 bp, Oligella ureolytica
tttgacctctcgctattgga

SEQ ID NO: 20101 - DNA, 20 bp, Bacillus schlegellii
gaagcctttgggtggaagcc

SEQ ID NO: 20102 - DNA, 20 bp, Anaerococcus prevotii
aatgcaaaactccaaagcca

SEQ ID NO: 20103 - DNA, 20 bp, Vibrio hollisae
gaactgcgtttggaactgtc

SEQ ID NO: 20104 - DNA, 20 bp, Vibrio harveyi
tgggtagtgggctgcataag

SEQ ID NO: 20105 - DNA, 20 bp, Unknown Organism
  oligonucleotide from CDC group EF-4B
gtggttaatacccatgactg

SEQ ID NO: 20106 - DNA, 20 bp, Porphyromonas endodontalis
tgcgtaagacgcgaggaagg

SEQ ID NO: 20107 - DNA, 20 bp, Bacteroides stercoris
tcttcggacagttgtgaagg

SEQ ID NO: 20108 - DNA, 20 bp, Enterobacter hormaechei
tgcatgtgttaggcctaaaa

SEQ ID NO: 20109 - DNA, 30 bp, Ignavigranum ruoffiae
gaagccggtggcctaaccttagggagggag

SEQ ID NO: 20110 - DNA, 20 bp, Dolosicoccus paucivorans
agaacagcgagtagagtaac

SEQ ID NO: 20111 - DNA, 20 bp, Paenibacillus pabuli
gcttgcttttcttgatactt

SEQ ID NO: 20112 - DNA, 20 bp, Clostridium innocuum
cgaagtaggaccgatgactg

SEQ ID NO: 20113 - DNA, 20 bp, Capnocytophaga sp.
aatcatccggcccttacatc

SEQ ID NO: 20114 - DNA, 20 bp, Raoultella ornithinolytica
gcttaccactttgtgattac

SEQ ID NO: 20115 - DNA, 30 bp, Peptoniphilus indolicus
ccttcgggaagaagttgagttggattagcg

SEQ ID NO: 20116 - DNA, 20 bp, Streptococcus acidominimus
atagggcttctcttttgagc

SEQ ID NO: 20117 - DNA, 20 bp, Bordetella trematum
aggaaagaaacggcgccagc

SEQ ID NO: 20118 - DNA, 20 bp, Sphingobacterium multivorum
ttgccagcatgtaaggtggg

SEQ ID NO: 20119 - DNA, 20 bp, Propionibacterium granulosum
tccagagatggttgtgcctc

SEQ ID NO: 20120 - DNA, 20 bp, Sporosarcina ureae
taatcccattctcttctggc

SEQ ID NO: 20121 - DNA, 20 bp, Clostridium clostridiiforme
gccggaggcctaaccgcgag

SEQ ID NO: 20122 - DNA, 20 bp, Brevibacillus laterosporus
atagagttttgcttcgcatg

SEQ ID NO: 20123 - DNA, 30 bp, Bacteroides stercoris
gtaaaattgcagttgatactggtatccttg

SEQ ID NO: 20124 - DNA, 20 bp, Haemophilus ducreyi
gggaatgtattgacgctcat

SEQ ID NO: 20125 - DNA, 20 bp, Providencia alcalifaciens
taatccgcaataatctctaa

SEQ ID NO: 20126 - DNA, 20 bp, Methylobacterium extorquens
ggcgaccacggaggggtcag

SEQ ID NO: 20127 - DNA, 20 bp, Eubacterium moniliforme
caaccccggggttgcacttg

SEQ ID NO: 20128 - DNA, 20 bp, Campylobacter curvus
tagggtttctcgctatggga

SEQ ID NO: 20129 - DNA, 20 bp, Clostridium clostridiiforme
agcgagcccgaaaggagaag

SEQ ID NO: 20130 - DNA, 20 bp, Leuconostoc gelidum
gtttgacggtaccataccca

SEQ ID NO: 20131 - DNA, 20 bp, Geobacillus thermoglucosidasius
ggttgaaaggtggcttttgc

SEQ ID NO: 20132 - DNA, 20 bp, Shewanella putrefaciens
gccacgggaatacgttcccg

SEQ ID NO: 20133 - DNA, 20 bp, Streptococcus macacae
gcactgatttcacgggagct

SEQ ID NO: 20134 - DNA, 20 bp, Brevibacillus centrosporus
ttcatggcaaaagcttgaaa

SEQ ID NO: 20135 - DNA, 20 bp, Brevibacillus brevis
gtaaccggaaggcagccagc

SEQ ID NO: 20136 - DNA, 20 bp, Streptococcus oralis
catccgagcggatgagttgc

SEQ ID NO: 20137 - DNA, 20 bp, Bacillus schlegellii
gaagccttcgggcggaagcc

SEQ ID NO: 20138 - DNA, 20 bp, Neisseria meningitidis
cataccgggtaagcgggctc

SEQ ID NO: 20139 - DNA, 20 bp, Streptococcus criceti
aaggcctacctaggctgcga

SEQ ID NO: 20140 - DNA, 20 bp, Gemella morbillorum
ctattggacgcgatagctaa

SEQ ID NO: 20141 - DNA, 20 bp, Anaerococcus tetradius
tttcttaagacttcggtcta

SEQ ID NO: 20142 - DNA, 20 bp, Streptococcus macacae
ttaaaaggtgcagctgcacc

SEQ ID NO: 20143 - DNA, 20 bp, Leptotrichia buccalis
ttgcacaggcgagccaaggc

SEQ ID NO: 20144 - DNA, 20 bp, Campylobacter curvus
gtcgcaaagacggactttgt

SEQ ID NO: 20145 - DNA, 30 bp, Empedobacter brevis
ggaatctgagaccggcgcacgggtgcgtaa

SEQ ID NO: 20146 - DNA, 20 bp, Bacteroides capilosus
  misc_feature (15)..(15): n is a, c, g, or t
taaatgacggtactngatga

SEQ ID NO: 20147 - DNA, 20 bp, Lactococcus raffinolactis
tacactgagagatggacccg

SEQ ID NO: 20148 - DNA, 20 bp, Arcanobacterium pyogenes
tattctgcttttgccgcatg

SEQ ID NO: 20149 - DNA, 20 bp, Anaerococcus prevotii
aaaccgtaaggaagcagcag

SEQ ID NO: 20150 - DNA, 20 bp, Clostridium sordellii
acgggataaaatatgagagt

SEQ ID NO: 20151 - DNA, 20 bp, Microbacterium hominis
gtctggtacacgcgcgcccg

SEQ ID NO: 20152 - DNA, 20 bp, Stenotrophomonas maltophilia
gaagcaaccccgcgagcagc

SEQ ID NO: 20153 - DNA, 20 bp, Streptococcus macacae
acgggtgtaagagcggaaag

SEQ ID NO: 20154 - DNA, 20 bp, Kocuria varians
gactggcgatctgggactaa

SEQ ID NO: 20155 - DNA, 20 bp, Stenotrophomonas maltophilia
tcctacggaccaaagcaggg

SEQ ID NO: 20156 - DNA, 20 bp, Escherichia hermannii
acgacgtaacaaggtaaccg

SEQ ID NO: 20157 - DNA, 20 bp, Bacillus mycoides
ggcgcgaaattgaaaggcgg

SEQ ID NO: 20158 - DNA, 20 bp, Bacteroides thetaiotaomicron
cgtgttacaatggggggtca

SEQ ID NO: 20159 - DNA, 20 bp, Bacteroides capilosus
tgcagctgagtcgcatgaca

SEQ ID NO: 20160 - DNA, 20 bp, Streptococcus macacae
aaggggcttagtgccgtagc

SEQ ID NO: 20161 - DNA, 20 bp, Moellerella wisconsensis
actaatactatcagcgattg

SEQ ID NO: 20162 - DNA, 20 bp, Eubacterium moniliforme
ggtgtggggggcgatagtcc

SEQ ID NO: 20163 - DNA, 20 bp, Prevotella loescheii
gataaaggggcccacgtgtg

SEQ ID NO: 20164 - DNA, 20 bp, Bacteroides capilosus
ttttatcagggacgaaataa

SEQ ID NO: 20165 - DNA, 20 bp, Anaerobiospirillum succiniciproducens
cttttagttgctatcagatg

SEQ ID NO: 20166 - DNA, 20 bp, Bacteroides stercoris
tatagttaccatcaggtcat

SEQ ID NO: 20167 - DNA, 20 bp, Actinomyces radingae
ctttgtggttgtgtggtgag

SEQ ID NO: 20168 - DNA, 20 bp, Neisseria subflava
agtaggtaggataccgcaag

SEQ ID NO: 20169 - DNA, 20 bp, Bacillus licheniformis
ccggggttatatccggaagg

SEQ ID NO: 20170 - DNA, 20 bp, Leuconostoc fallax
tattgttctcttcggagaca

SEQ ID NO: 20171 - DNA, 20 bp, Prevotella melaninogenica
ttctgatccatagggctcca

SEQ ID NO: 20172 - DNA, 20 bp, Citrobacter farmeri
cagaacttgtcagagatgag

SEQ ID NO: 20173 - DNA, 20 bp, Anaerococcus tetradius
gaacgatgaaccttgtattg

SEQ ID NO: 20174 - DNA, 30 bp, Psychrobacter phenylpyruvicus
ataagctattgtctctcatgagacaatact

SEQ ID NO: 20175 - DNA, 20 bp, Dolosicoccus paucivorans
ggcaccgatacatcgagtgg

SEQ ID NO: 20176 - DNA, 20 bp, Morganella morganii
cgggaggaaggtggcaaggt

SEQ ID NO: 20177 - DNA, 20 bp, Clostridium clostridiiforme
ttttcggatggatttgaaat

SEQ ID NO: 20178 - DNA, 20 bp, Eubacterium moniliforme
acgaaaccgcatggtttaga

SEQ ID NO: 20179 - DNA, 20 bp, Peptoniphilus indolicus
agaagttgagttggattagc

SEQ ID NO: 20180 - DNA, 20 bp, Paenibacillus macerans
tcgggagacaggggacacag

SEQ ID NO: 20181 - DNA, 20 bp, Anaerococcus tetradius
cggaatgaaaataagcggat

SEQ ID NO: 20182 - DNA, 20 bp, Anaerococcus prevotii
tatgcacatgcataaatgat

SEQ ID NO: 20183 - DNA, 20 bp, Bacteroides uniformis
catcaggttatgctggggga

SEQ ID NO: 20184 - DNA, 20 bp, Prevotella oralis
aggcggcctaattccgtatg

SEQ ID NO: 20185 - DNA, 20 bp, Helcococcus ovis
ggcagacgtcgaaggtaggg

SEQ ID NO: 20186 - DNA, 20 bp, Lactococcus garvieae
gtcggtacaaggtagccgta

SEQ ID NO: 20187 - DNA, 20 bp, Finegoldia magna
ggtgaaaggtatagagatat

SEQ ID NO: 20188 - DNA, 20 bp, Fusobacterium necrogenes
tcgggggaacctagtgacag

SEQ ID NO: 20189 - DNA, 20 bp, Finegoldia magna
ctctctttatgagacatcca

SEQ ID NO: 20190 - DNA, 20 bp, Prevotella disiens
ttgtttgggaataatcgaca

SEQ ID NO: 20191 - DNA, 20 bp, Proteus vulgaris
ctactggaaacggggctaat

SEQ ID NO: 20192 - DNA, 20 bp, Serratia rubidaea
aatacggcattacattgacg

SEQ ID NO: 20193 - DNA, 20 bp, Bacteroides stercoris
ttgctttgatggatggcgac

SEQ ID NO: 20194 - DNA, 20 bp, Granulicatella adiacens
cgggcttgcactggtcaatc

SEQ ID NO: 20195 - DNA, 20 bp, Peptoniphilus asaccharolyticus
gagcgatgaaatttcgacag

SEQ ID NO: 20196 - DNA, 20 bp, Sporosarcina pasteurii
acaaaggaagaaacaagttt

SEQ ID NO: 20197 - DNA, 20 bp, Oligella urethralis
caagaggtcttacgatcccc

SEQ ID NO: 20198 - DNA, 20 bp, Vibrio harveyi
cgtcgagttccggatcggag

SEQ ID NO: 20199 - DNA, 20 bp, Myroides odoratimimus
gggtagaaagagcttgcttt

SEQ ID NO: 20200 - DNA, 20 bp, Bacteroides merdae
ttactaaaccataactgaca

SEQ ID NO: 20201 - DNA, 20 bp, Corynebacterium seminale
gtggctcatgtacaggtggt

SEQ ID NO: 20202 - DNA, 20 bp, Arthrobacter globiformis
cacccgaagccggggcctaa

SEQ ID NO: 20203 - DNA, 20 bp, Brevibacillus choshinensis
gagcgagtctccttcggggg

SEQ ID NO: 20204 - DNA, 20 bp, Streptococcus infantarius
cgcaatcttccaactttagc

SEQ ID NO: 20205 - DNA, 20 bp, Geobacillus thermoglucosidasius
tgcttctgttcggttagcgg

SEQ ID NO: 20206 - DNA, 20 bp, Capnocytophaga sp.
ttaaagctgaggcggtgaaa

SEQ ID NO: 20207 - DNA, 20 bp, Bifidobacterium adolescentis
cctaatactttgctgttttg

SEQ ID NO: 20208 - DNA, 20 bp, Pseudomonas mendocina
tagagtgcccccccgacgtg

SEQ ID NO: 20209 - DNA, 20 bp, Bacteroides merdae
caatagcagattacgaggtg

SEQ ID NO: 20210 - DNA, 20 bp, Ralstonia pickettii
cgtatcggaagggcggtgga

SEQ ID NO: 20211 - DNA, 20 bp, Capnocytophaga sp.
ggtgtggcatcacatttata

SEQ ID NO: 20212 - DNA, 20 bp, Streptococcus equi
gctacaattatctgtgagtc

SEQ ID NO: 20213 - DNA, 30 bp, Salmonella choleraesuis
tccacagaagtttgcagagatgcgaatgtg

SEQ ID NO: 20214 - DNA, 20 bp, Bacillus schlegellii
caagtcgagcggggagcggg

SEQ ID NO: 20215 - DNA, 20 bp, Shigella boydii
cagcaagctgattcctgtta

SEQ ID NO: 20216 - DNA, 20 bp, Bacteroides stercoris
cggaaacggttcttttcttc

SEQ ID NO: 20217 - DNA, 20 bp, Brevibacillus reuszeri
taggtttttggaccgcatgg

SEQ ID NO: 20218 - DNA, 20 bp, Anaerococcus prevotii
ataaatgatcaaagctccgg

SEQ ID NO: 20219 - DNA, 20 bp, Bacteroides capilosus
gagctcatgacagaggattc

SEQ ID NO: 20220 - DNA, 20 bp, Prevotella loescheii
ggcccacgtgtgggtttttg

SEQ ID NO: 20221 - DNA, 20 bp, Dolosicoccus paucivorans
accgccttctttgaaggcac

SEQ ID NO: 20222 - DNA, 20 bp, Moellerella wisconsensis
gaggaaggcgttgatactaa

SEQ ID NO: 20223 - DNA, 20 bp, Enterococcus hirae
tcgaacaaggtagccgttcg

SEQ ID NO: 20224 - DNA, 20 bp, Vibrio metschnikovii
gcatgatagcctacggctca

SEQ ID NO: 20225 - DNA, 20 bp, Actinomyces radingae
tggatgttctgcgctttccg

SEQ ID NO: 20226 - DNA, 20 bp, Geobacillus stearothermophilus
accggattggggcttgcctt

SEQ ID NO: 20227 - DNA, 20 bp, Bacteroides capilosus
tgcaagtcagggtgtgaaaa

SEQ ID NO: 20228 - DNA, 20 bp, Peptoniphilus asaccharolyticus
ttcggggtgaagtttggaag

SEQ ID NO: 20229 - DNA, 30 bp, Aeromonas schubertii
tggccttgacatgtctggaaccttgtagag

SEQ ID NO: 20230 - DNA, 20 bp, Corynebacterium pilosum
cttcttgtgttggaaaggcc

SEQ ID NO: 20231 - DNA, 30 bp, Streptococcus criceti
ctcaagtgacggtatcttaccagaaaggga

SEQ ID NO: 20232 - DNA, 20 bp, Pediococcus dextrinicus
ttttaatgatcaaggtgctt

SEQ ID NO: 20233 - DNA, 20 bp, Leptotrichia buccalis
tactggtccaaccgcaaggg

SEQ ID NO: 20234 - DNA, 20 bp, Bacteroides thetaiotaomicron
gtacgcccgcccgtcaagcc

SEQ ID NO: 20235 - DNA, 20 bp, Suttonella indologenes
gcccaatgcttaacacatgc

SEQ ID NO: 20236 - DNA, 20 bp, Microbacterium hominis
agcaggcggtggccctcccc

SEQ ID NO: 20237 - DNA, 20 bp, Globicatella sanguinis
catagacaatttaaccgcct

SEQ ID NO: 20238 - DNA, 20 bp, Capnocytophaga sp.
ataggtgtggcatcacattt

SEQ ID NO: 20239 - DNA, 20 bp, Arcanobacterium haemolyticum
atattctgctcttgccgcat

SEQ ID NO: 20240 - DNA, 20 bp, Pediococcus parvulus
aacgcactttcgttaattga

SEQ ID NO: 20241 - DNA, 20 bp, Streptococcus macacae
ttcggtacaccggagacagg

SEQ ID NO: 20242 - DNA, 20 bp, Leptotrichia buccalis
agctgcaaggcggtaacgcc

SEQ ID NO: 20243 - DNA, 20 bp, Psychrobacter phenylpyruvicus
ggctaataccaaataagcta

SEQ ID NO: 20244 - DNA, 20 bp, Prevotella oralis
atgcccgctgtcggcctttt

SEQ ID NO: 20245 - DNA, 20 bp, Bacteroides ovatus
cgacagtgatgctaatccca

SEQ ID NO: 20246 - DNA, 20 bp, Brevibacterium casei
cgactgccggacgcatgtct

SEQ ID NO: 20247 - DNA, 20 bp, Staphylococcus succinus
tccgaacggctaccttgtac

SEQ ID NO: 20248 - DNA, 20 bp, Corynebacterium group ANF
gtggaaaacgttttctagtg

SEQ ID NO: 20249 - DNA, 20 bp, Alloiococcus otitis
gggaaatgaaaggtggctct

SEQ ID NO: 20250 - DNA, 30 bp, Peptoniphilus asaccharolyticus
atgaaaatcaaacagaacccttcggggtga

SEQ ID NO: 20251 - DNA, 20 bp, Empedobacter brevis
caagccgaggggtacgattc

SEQ ID NO: 20252 - DNA, 20 bp, Streptococcus thermophilus
ggttggatcacctccttcat

SEQ ID NO: 20253 - DNA, 20 bp, Leuconostoc gelidum
atatcaagctctaaaaggcg

SEQ ID NO: 20254 - DNA, 20 bp, Alloiococcus otitis
aataaaaggtggctctgcta

SEQ ID NO: 20255 - DNA, 20 bp, Clostridium clostridiiforme
cgggtgagtaaagcacaagg

SEQ ID NO: 20256 - DNA, 30 bp, Corynebacterium jeikeium
ctttcgctagggaagaagccttttggtgac

SEQ ID NO: 20257 - DNA, 20 bp, Enterococcus hirae
cgaacaaggtagccgttcgg

SEQ ID NO: 20258 - DNA, 20 bp, Bacteroides capillosus
tccaacctactccttacaac

SEQ ID NO: 20259 - DNA, 30 bp, Pseudomonas oryzihabitans
ggcttacagcgaatacctgtgagttttgac

SEQ ID NO: 20260 - DNA, 20 bp, Bacillus laevolacticus
gtagctaagccggatagctg

SEQ ID NO: 20261 - DNA, 20 bp, Sphingomonas paucimobilis
acctgcgggggatcacctcc

SEQ ID NO: 20262 - DNA, 20 bp, Vibrio harveyi
cgcccgtcacaccatgggta

SEQ ID NO: 20263 - DNA, 20 bp, Propionibacterium propionicus
tgcctttttggtcggtttac

SEQ ID NO: 20264 - DNA, 20 bp, Capnocytophaga sp.
tattaaagctgaggcggtga

SEQ ID NO: 20265 - DNA, 20 bp, Pseudomonas fluorescens
agcttgctcacggatttagc

SEQ ID NO: 20266 - DNA, 20 bp, Prevotella melaninogenica
tgatccatagggctccagga

SEQ ID NO: 20267 - DNA, 20 bp, Leuconostoc lactis
cttgctcctgattgataaac

SEQ ID NO: 20268 - DNA, 20 bp, Aeromonas schubertii
atgtctggaaccttgtagag

SEQ ID NO: 20269 - DNA, 20 bp, Aeromonas hydrophila
acccaccagctgtgacgtta

SEQ ID NO: 20270 - DNA, 20 bp, Eubacterium moniliforme
gacatcctctgacgcatata

SEQ ID NO: 20271 - DNA, 20 bp, Bacteroides thetaiotaomicron
tgtacgcccgcccgtcaagc

SEQ ID NO: 20272 - DNA, 20 bp, Eschericchia vulneris
gatacggttaataaccgtgt

SEQ ID NO: 20273 - DNA, 20 bp, Sporosarcina ureae
agtacaggagtaactgtcct

SEQ ID NO: 20274 - DNA, 20 bp, Bacillus smithii
ttcacgggagccagccgccg

SEQ ID NO: 20275 - DNA, 20 bp, Facklamia hominis
ctaactttatgagggagccg

SEQ ID NO: 20276 - DNA, 20 bp, Enterobacter hormaechei
taggcctaaaaaagcgttca

SEQ ID NO: 20277 - DNA, 20 bp, Clostridium clostridiiforme
ccattgaaaatcatttaacc

SEQ ID NO: 20278 - DNA, 20 bp, Peptostreptococcus anaerobius
ttttgatgcttgcattgatg

SEQ ID NO: 20279 - DNA, 20 bp, Clostridium clostridiiforme
ctgccatcgacaagatggag

SEQ ID NO: 20280 - DNA, 20 bp, Eremococcus coleocola
cataacagcaatcatcgcct

SEQ ID NO: 20281 - DNA, 20 bp, Eubacterium moniliforme
tgtcgaaggtgagatcaatg

SEQ ID NO: 20282 - DNA, 20 bp, Dolosicoccus paucivorans
atcggatgcatagcttagag

SEQ ID NO: 20283 - DNA, 20 bp, Corynebacterium pilosum
ttagttcccgttgggtattc

SEQ ID NO: 20284 - DNA, 20 bp, Clostridium limosum
accgcataacatcatttcaa

SEQ ID NO: 20285 - DNA, 20 bp, Anaerococcus tetradius
tggtagactaaccaaagatt

SEQ ID NO: 20286 - DNA, 20 bp, Propionibacterium granulosum
gcttccagagatggttgtgc

SEQ ID NO: 20287 - DNA, 20 bp, Streptococcus criceti
cctaggctgcgatacatagc

SEQ ID NO: 20288 - DNA, 20 bp, Paenibacillus azotofixans
gagataggcgcggccttcgg

SEQ ID NO: 20289 - DNA, 20 bp, Gemella morbillorum
gcgcacgggtgagcacgcgt

SEQ ID NO: 20290 - DNA, 30 bp, Enterobacter amnigenus
agcggtagcacagagagcttgttttcgggt

SEQ ID NO: 20291 - DNA, 20 bp, Bacteroides capillosus
cttgagtttgcacaacgttg

SEQ ID NO: 20292 - DNA, 20 bp, Streptococcus cristatus
acattgactattgcatgata

SEQ ID NO: 20293 - DNA, 20 bp, Capnocytophaga sp.
taaagctgaggcggtgaaag

SEQ ID NO: 20294 - DNA, 30 bp, Arcanobacterium pyogenes
caagtcgaacgatgaagccggggctttttg

SEQ ID NO: 20295 - DNA, 20 bp, Paenibacillus azotofixans
tgtgatggagcttgctcttg

SEQ ID NO: 20296 - DNA, 20 bp, Prevotella loescheii
taactgcttcatggcatact

SEQ ID NO: 20297 - DNA, 20 bp, Corynebacterium group ANF
aacgttttctagtggttggg

SEQ ID NO: 20298 - DNA, 20 bp, Brevibacillus brevis
ggaagggcgcgtggatcacc

SEQ ID NO: 20299 - DNA, 20 bp, Haemophilus haemolyticus
tatacagagggtggcgatgc

SEQ ID NO: 20300 - DNA, 20 bp, Clostridium clostridiiforme
gagagcttgagaagcagaga

SEQ ID NO: 20301 - DNA, 20 bp, Anaerococcus prevotii
tctagagatagactcttatt

SEQ ID NO: 20302 - DNA, 20 bp, Enterobacter gergoviae
gtccttgaagcgtggcttcc

SEQ ID NO: 20303 - DNA, 20 bp, Streptococcus criceti
ctcatgttaatgacttgaaa

SEQ ID NO: 20304 - DNA, 20 bp, Stenotrophomonas maltophilia
tgcatgcgggatctgcccga

SEQ ID NO: 20305 - DNA, 20 bp, Anaerococcus tetradius
tcgcatggtagactaaccaa

SEQ ID NO: 20306 - DNA, 20 bp, Bacteroides fragilis
taccggaggtgcggttggat

SEQ ID NO: 20307 - DNA, 20 bp, Bacteroides merdae
gtggtgatttaagtcagcgg

SEQ ID NO: 20308 - DNA, 20 bp, Streptococcus thermophilus
ttggatcacctccttcatgg

SEQ ID NO: 20309 - DNA, 20 bp, Clostridium clostridiiforme
cgaagcggtttcgatgaagt

SEQ ID NO: 20310 - DNA, 20 bp, Bacillus licheniformis
gttatatccggaaggttgtt

SEQ ID NO: 20311 - DNA, 20 bp, Bacillus schlegellii
gggcgacccgctttaggagg

SEQ ID NO: 20312 - DNA, 20 bp, Neisseria meningitidis
cgtcagtgttgtcccaggag

SEQ ID NO: 20313 - DNA, 20 bp, Finegoldia magna
atcggggctcaaccccgtaa

SEQ ID NO: 20314 - DNA, 20 bp, Capnocytophaga sp.
taatggtatataggtgtggc

SEQ ID NO: 20315 - DNA, 20 bp, Dolosicoccus paucivorans
ttgaaggcaccgatacatcg

SEQ ID NO: 20316 - DNA, 20 bp, Leuconostoc pseudomesenteroides
tgatacgaagttaaaaggcg

SEQ ID NO: 20317 - DNA, 20 bp, Actinomyces radingae
gatgttctgcgctttccgca

SEQ ID NO: 20318 - DNA, 20 bp, Peptostreptococcus anaerobius
ttgatgcttgcattgatgaa

SEQ ID NO: 20319 - DNA, 20 bp, Paenibacillus macerans
ttcgcatgagggagttggga

SEQ ID NO: 20320 - DNA, 20 bp, Finegoldia magna
acagagggaagctatatagt

SEQ ID NO: 20321 - DNA, 20 bp, Paenibacillus macerans
agaacgcttgtgagagtaac

SEQ ID NO: 20322 - DNA, 20 bp, Bacillus schlegellii
gtacaaggtaccgtaccgga

SEQ ID NO: 20323 - DNA, 20 bp, Gemella morbillorum
aatcccgcatatcagctaga

SEQ ID NO: 20324 - DNA, 30 bp, Oligella ureolytica
atgcctggaagctttaagagattaaagtgt

SEQ ID NO: 20325 - DNA, 20 bp, Enterobacter gergoviae
gctgtggttcttgaggccgt

SEQ ID NO: 20326 - DNA, 20 bp, Paenibacillus macerans
ggctcaaccacagttcgcac

SEQ ID NO: 20327 - DNA, 20 bp, Enterococcus dispar
ataacaatagtaaacacatg

SEQ ID NO: 20328 - DNA, 20 bp, Streptococcus criceti
acctaggctgcgatacatag

SEQ ID NO: 20329 - DNA, 20 bp, Sporosarcina pasteurii
aggcagttactcctgtactt

SEQ ID NO: 20330 - DNA, 20 bp, Finegoldia magna
gtaccatagaagaaagctcc

SEQ ID NO: 20331 - DNA, 20 bp, Pseudomonas fluorescens
tcacggatttagcggcggac

SEQ ID NO: 20332 - DNA, 20 bp, Bacteroides capilosus
tgaggaacctgcctcggagt

SEQ ID NO: 20333 - DNA, 20 bp, Providencia alcalifaciens
atgatattagcatcaacgcc

SEQ ID NO: 20334 - DNA, 20 bp, Sporosarcina ureae
aggagtaactgtcctgtacc

SEQ ID NO: 20335 - DNA, 20 bp, Clostridium clostridiiforme
tgtatgctgggtgtgggact

SEQ ID NO: 20336 - DNA, 20 bp, Clostridium clostridiiforme
ggaagggaacgtgaacaggt

SEQ ID NO: 20337 - DNA, 20 bp, Moraxella osloensis
ttgaaagcaggcggcaggct

SEQ ID NO: 20338 - DNA, 20 bp, Paenibacillus azotofixans
gagttgtagagggagcttgc

SEQ ID NO: 20339 - DNA, 20 bp, Leptotrichia buccalis
gtacagagagctgcaaggcg

SEQ ID NO: 20340 - DNA, 20 bp, Citrobacter freundii
gtaacaaggtaaccccgtag

SEQ ID NO: 20341 - DNA, 20 bp, Bordetella trematum
aacggcgccagctaatacct

SEQ ID NO: 20342 - DNA, 20 bp, Clostridium clostridiiforme
ccggaaggtgaaaagcagag

SEQ ID NO: 20343 - DNA, 20 bp, Empedobacter brevis
tttcgggaatctgagaccgg

SEQ ID NO: 20344 - DNA, 20 bp, Providencia stuartii
ttaataccatcaacgattga

SEQ ID NO: 20345 - DNA, 20 bp, Providencia alcalifaciens
cggggtgagtaatgtatggg

SEQ ID NO: 20346 - DNA, 20 bp, Clostridium clostridiiforme
tgaaaagcagagatgcgctt

SEQ ID NO: 20347 - DNA, 20 bp, Veillonella sp.
gcaggcggataggtcagtct

SEQ ID NO: 20348 - DNA, 20 bp, Haemophilus influenzae
aagtgcgggaccttcaggcc

SEQ ID NO: 20349 - DNA, 20 bp, Streptococcus macacae
gcacccctatcagatggacc

SEQ ID NO: 20350 - DNA, 20 bp, Paenibacillus macerans
ttaattaagtctggtgttta

SEQ ID NO: 20351 - DNA, 20 bp, Streptococcus bovis
gaaagtaccaactggtacac

SEQ ID NO: 20352 - DNA, 20 bp, Staphylococcus saprophyticus
cggaaggtgccggttggatc

SEQ ID NO: 20353 - DNA, 20 bp, Paenibacillus validus
ccctttccttcgggatagcg

SEQ ID NO: 20354 - DNA, 20 bp, Prevotella melaninogenica
ggtaagaggttctgatccat

SEQ ID NO: 20355 - DNA, 20 bp, Campylobacter curvus
gtctgcgaagtaaataatat

SEQ ID NO: 20356 - DNA, 20 bp, Geobacillus stearothermophilus
gggcttgccttgattcggtc

SEQ ID NO: 20357 - DNA, 20 bp, Vibrio hollisae
gaaatccccagcgctaatac

SEQ ID NO: 20358 - DNA, 20 bp, Citrobacter amalonaticus
agggtgaatggttaataacc

SEQ ID NO: 20359 - DNA, 20 bp, Corynebacterium coyleae
ctggtttccctttgtggttg

SEQ ID NO: 20360 - DNA, 20 bp, Weissella paramesenteroides
taactgatctgacgagcttg

SEQ ID NO: 20361 - DNA, 20 bp, Dolosicoccus paucivorans
agagaagaacagcgagtaga

SEQ ID NO: 20362 - DNA, 20 bp, Gemella morbillorum
agttgcgcacgggtgagcac

SEQ ID NO: 20363 - DNA, 20 bp, Kocuria rosea
ggtggcctacccccttgtgg

SEQ ID NO: 20364 - DNA, 20 bp, Bacteroides thetaiotaomicron
aggagcgtctagggtaagat

SEQ ID NO: 20365 - DNA, 20 bp, Clostridium clostridiiforme
cggatcgaccctttcgcaag

SEQ ID NO: 20366 - DNA, 20 bp, Bacillus laevolacticus
ctgaccgcgctacagagatt

SEQ ID NO: 20367 - DNA, 20 bp, Fusobacterium necrogenes
gcgtttgacatcctaggaag

SEQ ID NO: 20368 - DNA, 20 bp, Citrobacter amalonaticus
aggaagggtgaatggttaat

SEQ ID NO: 20369 - DNA, 20 bp, Campylobacter curvus
gtttctcgctatgggatgag

SEQ ID NO: 20370 - DNA, 20 bp, Anaerococcus tetradius
tattgatttcttcggaatga

SEQ ID NO: 20371 - DNA, 20 bp, Bacteroides thetaiotaomicron
aatattttggaaacaggata

SEQ ID NO: 20372 - DNA, 20 bp, Gemella morbillorum
attggacgcgatagctaatc

SEQ ID NO: 20373 - DNA, 20 bp, Prevotella disiens
atgttggttgcatgtaaatg

SEQ ID NO: 20374 - DNA, 20 bp, Rahnella aquatilis
acaggtaaccgtaggggaac

SEQ ID NO: 20375 - DNA, 20 bp, Bacteroides thetaiotaomicron
caaagctggcgaccggcgca

SEQ ID NO: 20376 - DNA, 20 bp, Actinomyces odontolyticus
gctttgtgcggggggagtgg

SEQ ID NO: 20377 - DNA, 20 bp, Enterobacter hormaechei
tgttaggcctaaaaaagcgt

SEQ ID NO: 20378 - DNA, 20 bp, Sphingobacterium multivorum
tggcccttacgcttcggggc

SEQ ID NO: 20379 - DNA, 20 bp, Gemella morbillorum
cagctagatgttgcatgaca

SEQ ID NO: 20380 - DNA, 20 bp, Arcanobacterium haemolyticum
ctgaacaaggcgttgagttg

SEQ ID NO: 20381 - DNA, 20 bp, Bacteroides stercoris
agcgcaacccttgcgggtag

SEQ ID NO: 20382 - DNA, 20 bp, Enterobacter gergoviae
gaggctacgcgttaaggtag

SEQ ID NO: 20383 - DNA, 20 bp, Peptoniphilus indolicus
ggaagcagatgccgaaggta

SEQ ID NO: 20384 - DNA, 20 bp, Bacillus niacini
tcgagcgaatcttgaggtgc

SEQ ID NO: 20385 - DNA, 20 bp, Bacteroides ovatus
ccggatagcatacgaatatc

SEQ ID NO: 20386 - DNA, 20 bp, Anaerococcus prevotii
ttattgcttcggcagaactg

SEQ ID NO: 20387 - DNA, 20 bp, Streptococcus acidominimus
gggagtggaaaatccgctaa

SEQ ID NO: 20388 - DNA, 20 bp, Brevibacillus laterosporus
taaataaggtggcaccttga

SEQ ID NO: 20389 - DNA, 20 bp, Brevibacillus brevis
ctgtgcgtggaaagaacttc

SEQ ID NO: 20390 - DNA, 20 bp, Peptoniphilus indolicus
ggaggatttcggtgccgcag

SEQ ID NO: 20391 - DNA, 20 bp, Corynebacterium group ANF
ttcggggtgaaggtagtgga

SEQ ID NO: 20392 - DNA, 20 bp, Bacteroides ovatus
agctctagagagactgccgt

SEQ ID NO: 20393 - DNA, 20 bp, Stenotrophomonas maltophilia
ccccgcgagcagcaagcgga

SEQ ID NO: 20394 - DNA, 20 bp, Geobacillus thermoglucosidasius
ttggttgaaaggtggctttt

SEQ ID NO: 20395 - DNA, 20 bp, Finegoldia magna
gtgagcaacctgcctatgac

SEQ ID NO: 20396 - DNA, 20 bp, Streptococcus criceti
atagtgattaactcatgtta

SEQ ID NO: 20397 - DNA, 20 bp, Bacteroides distasonis
agcaggggccccgcatgggg

SEQ ID NO: 20398 - DNA, 20 bp, Streptococcus macacae
gtctggaaagtcagtagtta

SEQ ID NO: 20399 - DNA, 20 bp, Bacillus schlegellii
gggcagcgctgaaggcgaac

SEQ ID NO: 20400 - DNA, 20 bp, Neisseria subflava
gcaaggagcccgcttacccg

SEQ ID NO: 20401 - DNA, 20 bp, Pediococcus parvulus
attgattttgagatgcttgc

SEQ ID NO: 20402 - DNA, 20 bp, Streptococcus macacae
cctcttagagggggataagg

SEQ ID NO: 20403 - DNA, 20 bp, Prevotella loescheii
cgtgtgggtttttgcaggta

SEQ ID NO: 20404 - DNA, 20 bp, Bacteroides capillosus
gcgtcggtcgtatgcaaata

SEQ ID NO: 20405 - DNA, 20 bp, Bacteroides capillosus
aggtgtgaaaaccacgggct

SEQ ID NO: 20406 - DNA, 20 bp, Streptococcus anginosus
atggttcaggacgaacgccg

SEQ ID NO: 20407 - DNA, 20 bp, Vibrio hollisae
acgtactgaggtagaaagtg

SEQ ID NO: 20408 - DNA, 20 bp, Brevibacillus centrosporus
ctaataccggatagagtcta

SEQ ID NO: 20409 - DNA, 20 bp, Sporosarcina ureae
ttctggcatgagggaatgtt

SEQ ID NO: 20410 - DNA, 20 bp, Enterococcus saccharolyticus
cacgtgggtaccctgcccat

SEQ ID NO: 20411 - DNA, 20 bp, Prevotella oralis
gttttttaagcgtgctgtga

SEQ ID NO: 20412 - DNA, 20 bp, Finegoldia magna
gaacgggatttagtaaacag

SEQ ID NO: 20413 - DNA, 20 bp, Enterobacter gergoviae
gaggccgtggcttccggagg

SEQ ID NO: 20414 - DNA, 20 bp, Yersinia frederiksenii
gcgaggaggaaggcatttca

SEQ ID NO: 20415 - DNA, 20 bp, Streptococcus criceti
aagttactcaagtgacggta

SEQ ID NO: 20416 - DNA, 20 bp, Vagococcus fluvialis
cgcatgggagaataataaaa

SEQ ID NO: 20417 - DNA, 30 bp, Streptococcus ratti
ttaaccattgtgtgctttggaaactgcagg

SEQ ID NO: 20418 - DNA, 20 bp, Anaerobiospirillum succiniciproducens
ccttcgggggaaagactttt

SEQ ID NO: 20419 - DNA, 20 bp, Streptococcus equi
cagatgatacgtagcttgct

SEQ ID NO: 20420 - DNA, 20 bp, Vibrio hollisae
ccccagcgctaataccgctg

SEQ ID NO: 20421 - DNA, 20 bp, Anaerococcus tetradius
cttcggtctactgtattaca

SEQ ID NO: 20422 - DNA, 20 bp, Bacteroides thetaiotaomicron
tgaatattttggaaacagga

SEQ ID NO: 20423 - DNA, 20 bp, Bacteroides distasonis
gacaaagggaagccacctgg

SEQ ID NO: 20424 - DNA, 20 bp, Microbacterium hominis
cggtggccctccccttgtgg

SEQ ID NO: 20425 - DNA, 20 bp, Brevibacillus brevis
agcgagtgtcttcggagcct

SEQ ID NO: 20426 - DNA, 20 bp, Anaerococcus tetradius
atttcttcggaatgaaaata

SEQ ID NO: 20427 - DNA, 20 bp, Unknown Organism
  oligonucleotide from CDC group EO-2
cggaggcgagggacttcggt

SEQ ID NO: 20428 - DNA, 20 bp, Streptococcus parasanguinis
ccgagcggaagagttgcgaa

SEQ ID NO: 20429 - DNA, 20 bp, Moellerella wisconsensis
gggatctgcctgacagaggg

SEQ ID NO: 20430 - DNA, 20 bp, Pseudomonas fluorescens
gcggatgaagtgagcttgct

SEQ ID NO: 20431 - DNA, 20 bp, Dolosicoccus paucivorans
cgtttgacggtatctcacca

SEQ ID NO: 20432 - DNA, 20 bp, Clostridium clostridiiforme
cgcgcagacgaaactggaga

SEQ ID NO: 20433 - DNA, 20 bp, Eremococcus coleocola
tctcttcggagcatagagac

SEQ ID NO: 20434 - DNA, 20 bp, Bacillus thuringiensis
ggctgcggttggatcacctc

SEQ ID NO: 20435 - DNA, 20 bp, Anaerococcus prevotii
atgaaatcttgacagaaccc

SEQ ID NO: 20436 - DNA, 20 bp, Enterobacter hormaechei
ttaggcctaaaaaagcgttc

SEQ ID NO: 20437 - DNA, 20 bp, Actinomyces radingae
ggatgttctgcgctttccgc

SEQ ID NO: 20438 - DNA, 20 bp, Clostridium clostridiiforme
gataaagctgagcactccgg

SEQ ID NO: 20439 - DNA, 20 bp, Prevotella bivia
cgtgaccgtacaggatcgac

SEQ ID NO: 20440 - DNA, 20 bp, Streptococcus infantarius
ggagctctggcgccgtgctc

SEQ ID NO: 20441 - DNA, 20 bp, Oligella ureolytica
acacgctagcgggatgcttt

SEQ ID NO: 20442 - DNA, 20 bp, Actinomyces naeslundii
ctgtcccttgtgggtgggtt

SEQ ID NO: 20443 - DNA, 20 bp, Anaerococcus tetradius
aactcacaaagtctgtccca

SEQ ID NO: 20444 - DNA, 20 bp, Anaerococcus prevotii
tcggcagaactgtaatacag

SEQ ID NO: 20445 - DNA, 30 bp, Bacillus niacini
aatccttttcctctcatgagggaaagttga

SEQ ID NO: 20446 - DNA, 20 bp, Prevotella oralis
cagtcatctaatttggacga

SEQ ID NO: 20447 - DNA, 20 bp, Vibrio vulnificus
cactttgtggtcatgactgg

SEQ ID NO: 20448 - DNA, 20 bp, Stenotrophomonas maltophilia
agcaagcggaaacccataaa

SEQ ID NO: 20449 - DNA, 20 bp, Leptotrichia buccalis
catgtcaggctgatgaaagg

SEQ ID NO: 20450 - DNA, 20 bp, Capnocytophaga sp.
tgaggcggtgaaagatgagt

SEQ ID NO: 20451 - DNA, 20 bp, Bacillus coagulans
ggacttgttagaagcttgct

SEQ ID NO: 20452 - DNA, 20 bp, Eubacterium moniliforme
aagttgggagcacccgaagc

SEQ ID NO: 20453 - DNA, 20 bp, Streptococcus criceti
acttgaaaggtgcaatggca

SEQ ID NO: 20454 - DNA, 20 bp, Paenibacillus azotofixans
cttgctcttgatcaacttag

SEQ ID NO: 20455 - DNA, 20 bp, Salmonella typhi
cgacggtatcaggcagcagc

SEQ ID NO: 20456 - DNA, 20 bp, Corynebacterium group ANF
ctaacggatcccttcggggt

SEQ ID NO: 20457 - DNA, 20 bp, Helcococcus ovis
ctaaccgttaggaggcagac

SEQ ID NO: 20458 - DNA, 20 bp, Alloiococcus otitis
tcttctgctaccttcagaga

SEQ ID NO: 20459 - DNA, 20 bp, Citrobacter freundii
tggttaataaccgtggtgat

SEQ ID NO: 20460 - DNA, 30 bp, Chromobacterium violaceum
tcagggaggaaatcccgctggttaataccc

SEQ ID NO: 20461 - DNA, 20 bp, Dolosicoccus paucivorans
ataaatcaatgattcgcatg

SEQ ID NO: 20462 - DNA, 20 bp, Kocuria varians
actggcgatctgggactaag

SEQ ID NO: 20463 - DNA, 20 bp, Vibrio vulnificus
ccaccactttgggtcatgac

SEQ ID NO: 20464 - DNA, 20 bp, Enterococcus saccharolyticus
atacccgcataacgcttttt

SEQ ID NO: 20465 - DNA, 20 bp, Leuconostoc carnosum
ccttagcctgacggtaccat

SEQ ID NO: 20466 - DNA, 20 bp, Bacteroides stercoris
atttcggttgtcgatgggga

SEQ ID NO: 20467 - DNA, 30 bp, Sphingobacterium multivorum
agttgccagcatgtaaggtggggactttaa

SEQ ID NO: 20468 - DNA, 20 bp, Paenibacillus macerans
ttcgggagacaggggacaca

SEQ ID NO: 20469 - DNA, 20 bp, Bacteroides stercoris
tatacgggaataaagttagc

SEQ ID NO: 20470 - DNA, 20 bp, Ewingella americana
agattgaacagctggcggca

SEQ ID NO: 20471 - DNA, 20 bp, Streptococcus iniae
taccgtgacggtaactaacc

SEQ ID NO: 20472 - DNA, 20 bp, Streptococcus criceti
tcccgatgccatccctagag

SEQ ID NO: 20473 - DNA, 30 bp, Arcanobacterium haemolyticum
taaactccttttaacactgaacaaggcgtt

SEQ ID NO: 20474 - DNA, 20 bp, Bacteroides stercoris
gactgagctggaaacagttc

SEQ ID NO: 20475 - DNA, 20 bp, Bacteroides thetaiotaomicron
tttggaaacaggatagccgt

SEQ ID NO: 20476 - DNA, 20 bp, Dolosicoccus paucivorans
agtaactgttactcgtttga

SEQ ID NO: 20477 - DNA, 20 bp, Stenotrophomonas maltophilia
agcggcagcacaagaaagct

SEQ ID NO: 20478 - DNA, 20 bp, Neisseria mucosa
aggggaacctgcggttgggg

SEQ ID NO: 20479 - DNA, 20 bp, Bacillus niacini
tgcacctcttggttagcggc

SEQ ID NO: 20480 - DNA, 20 bp, Helcococcus ovis
gaggcagacgtcgaaggtag

SEQ ID NO: 20481 - DNA, 20 bp, Bacteroides caccae
ttgtccacgtgtggattttt

SEQ ID NO: 20482 - DNA, 20 bp, Corynebacterium cystitidis
tgaaacgggggcgctaggtg

SEQ ID NO: 20483 - DNA, 20 bp, Finegoldia magna
gacagtaccatagaagaaag

SEQ ID NO: 20484 - DNA, 20 bp, Bacillus niacini
ctctcatgagggaaagttga

SEQ ID NO: 20485 - DNA, 20 bp, Staphylococcus simulans
gtaagtaactgtgcatccct

SEQ ID NO: 20486 - DNA, 20 bp, Haemophilus segnis
taggtttggcgcccgtagct

SEQ ID NO: 20487 - DNA, 20 bp, Prevotella oralis
gacgtgtccctttttgcagg

SEQ ID NO: 20488 - DNA, 20 bp, Streptococcus macacae
ttaggtcctaaggggcttag

SEQ ID NO: 20489 - DNA, 20 bp, Campylobacter curvus
atttatatataagtataaat

SEQ ID NO: 20490 - DNA, 20 bp, Paenibacillus alvei
actctagagatagagtccct

SEQ ID NO: 20491 - DNA, 20 bp, Paenibacillus azotofixans
ggagttgtagagggagcttg

SEQ ID NO: 20492 - DNA, 20 bp, Bacteroides capilosus
  misc_feature (13)..(13): n is a, c, g, or t
aatgacggtactngatgaat

SEQ ID NO: 20493 - DNA, 20 bp, Eubacterium moniliforme
tagagatatatgttcccttc

SEQ ID NO: 20494 - DNA, 20 bp, Anaerococcus tetradius
gagcttatcaaagatttatc

SEQ ID NO: 20495 - DNA, 20 bp, Providencia rustigianii
atgctaatatcgtcaacgat

SEQ ID NO: 20496 - DNA, 20 bp, Enterococcus saccharolyticus
agaggagtggcgaacggggt

SEQ ID NO: 20497 - DNA, 20 bp, Staphylococcus capitis
ctatgcacgtcttgacggac

SEQ ID NO: 20498 - DNA, 20 bp, Bacillus mycoides
tttgcgctgcatggcgcgaa

SEQ ID NO: 20499 - DNA, 20 bp, Sporosarcina pasteurii
aggagtaactgcctgtacct

SEQ ID NO: 20500 - DNA, 20 bp, Anaerococcus prevotii
tcgcatgaagctatcatcaa

SEQ ID NO: 20501 - DNA, 20 bp, Streptococcus sanguinis
ccgcatgatattgaatatcg

SEQ ID NO: 20502 - DNA, 20 bp, Proteus mirabilis
gaaccgtggcttctggaggc

SEQ ID NO: 20503 - DNA, 20 bp, Prevotella melaninogenica
aagaggttctgatccatagg

SEQ ID NO: 20504 - DNA, 20 bp, Dolosicoccus paucivorans
agcgagtagagtaactgtta

SEQ ID NO: 20505 - DNA, 20 bp, Paenibacillus macerans
aagtctggtgtttaaggctg

SEQ ID NO: 20506 - DNA, 20 bp, Shigella flexneri
accgaggggaacctgcgttg

SEQ ID NO: 20507 - DNA, 20 bp, Streptococcus bovis
accaactggtacactgagag

SEQ ID NO: 20508 - DNA, 20 bp, Brevibacterium epidermidis
ggatacgaccgtcggacgca

SEQ ID NO: 20509 - DNA, 20 bp, Anaerococcus tetradius
taatacgtatggaccgagcg

SEQ ID NO: 20510 - DNA, 20 bp, Bacteroides stercoris
ggatggcatagttttcccgc

SEQ ID NO: 20511 - DNA, 20 bp, Chromobacterium violaceum
aggctaaccgtaaggaggcc

SEQ ID NO: 20512 - DNA, 30 bp, Corynebacterium kutscheri
catggcctaaccacgtttgtggagggagtg

SEQ ID NO: 20513 - DNA, 20 bp, Sphingobacterium multivorum
cggcatcggttggatattaa

SEQ ID NO: 20514 - DNA, 20 bp, Burkholderia gladioli
catgtcctgtagtgggggga

SEQ ID NO: 20515 - DNA, 20 bp, Streptococcus constellatus
tgcaagtagaccgcacagga

SEQ ID NO: 20516 - DNA, 20 bp, Campylobacter curvus
tatattgtttatttatcaaa

SEQ ID NO: 20517 - DNA, 30 bp, Bacteroides stercoris
ttttttgcatgtaccgtatgaataaggatc

SEQ ID NO: 20518 - DNA, 30 bp, Eremococcus coleocola
tgatggttgattgaaagatggctctgctat

SEQ ID NO: 20519 - DNA, 20 bp, Dolosicoccus paucivorans
agtcgaacgcgactgtatca

SEQ ID NO: 20520 - DNA, 20 bp, Corynebacterium matruchotii
taccccgtaccggaaggtgc

SEQ ID NO: 20521 - DNA, 20 bp, Enterococcus casseliflavus
cgggcattagctagttggtg

SEQ ID NO: 20522 - DNA, 20 bp, Acinetobacter baumannii
aagtcgtacaggtagccgta

SEQ ID NO: 20523 - DNA, 20 bp, Microbacterium hominis
agagtcggtaacaccagcag

SEQ ID NO: 20524 - DNA, 20 bp, Campylobacter rectus
gcgtaactggtctgagagat

SEQ ID NO: 20525 - DNA, 20 bp, Eubacterium moniliforme
tcaaccccggggttgcactt

SEQ ID NO: 20526 - DNA, 20 bp, Gemella morbillorum
tcagctagatgttgcatgac

SEQ ID NO: 20527 - DNA, 20 bp, Enterobacter gergoviae
aggccgtggcttccggaggc

SEQ ID NO: 20528 - DNA, 20 bp, Bacteroides stercoris
gcgggtagttccatcaggtt

SEQ ID NO: 20529 - DNA, 20 bp, Bacteroides capillosus
ctatttgcaggtaccgtatg

SEQ ID NO: 20530 - DNA, 20 bp, Bacteroides merdae
actccttctagcaatagcag

SEQ ID NO: 20531 - DNA, 20 bp, Anaerobiospirillum succiniciproducens
aaagacttttagttgctatc

SEQ ID NO: 20532 - DNA, 20 bp, Lactococcus raffinolactis
gtgggtaacctacctttcag

SEQ ID NO: 20533 - DNA, 20 bp, Empedobacter brevis
aaacctactcacgtgtgagt

SEQ ID NO: 20534 - DNA, 20 bp, Bacillus schlegellii
agctcgtaacagggtatccg

SEQ ID NO: 20535 - DNA, 20 bp, Clostridium clostridiiforme
aatacctcataagccggaag

SEQ ID NO: 20536 - DNA, 20 bp, Peptoniphilus indolicus
gaagaagttgagttggatta

SEQ ID NO: 20537 - DNA, 20 bp, Brevibacillus thermoruber
gatcctgtttggagcttgct

SEQ ID NO: 20538 - DNA, 20 bp, Serratia marcescens
actggggtgaagcgaacaag

SEQ ID NO: 20539 - DNA, 20 bp, Streptococcus bovis
aaagtaccaactggtacact

SEQ ID NO: 20540 - DNA, 20 bp, Bacteroides thetaiotaomicron
catttgaatattctggaaac

SEQ ID NO: 20541 - DNA, 20 bp, Actinomyces naeslundii
tgtcccttgtgggtgggttg

SEQ ID NO: 20542 - DNA, 20 bp, Campylobacter curvus
gtataaatgggaaagtcgaa

SEQ ID NO: 20543 - DNA, 20 bp, Bacteroides capillosus
ggttgcttgcaacctttgat

SEQ ID NO: 20544 - DNA, 20 bp, Finegoldia magna
ctcaaccccgtaaagcattg

SEQ ID NO: 20545 - DNA, 20 bp, Achromobacter xylosoxidans
cccgcccctaaacgatgtca

SEQ ID NO: 20546 - DNA, 20 bp, Streptococcus macacae
atcggtgagtcgcgaacggg

SEQ ID NO: 20547 - DNA, 20 bp, Bacillus schlegellii
aaggcgcgggcagcgctgaa

SEQ ID NO: 20548 - DNA, 20 bp, Haemophilus paraphrophilus
acaaggtaacctagggaatc

SEQ ID NO: 20549 - DNA, 20 bp, Arcanobacterium haemolyticum
tactagatattctgctcttg

SEQ ID NO: 20550 - DNA, 20 bp, Bacillus coagulans
gcatgagcggatgttaaaag

SEQ ID NO: 20551 - DNA, 20 bp, Capnocytophaga sp.
ggtatataggtgtggcatca

SEQ ID NO: 20552 - DNA, 30 bp, Citrobacter youngae
agaagcaagcaccggctaactccggccagc

SEQ ID NO: 20553 - DNA, 20 bp, Peptoniphilus asaccharolyticus
tgtcggagaatttcggtgcc

SEQ ID NO: 20554 - DNA, 20 bp, Helcococcus kunzii
atttttcagtcgatttcttc

SEQ ID NO: 20555 - DNA, 20 bp, Edwardsiella tarda
cctgctttctctcgctgacg

SEQ ID NO: 20556 - DNA, 20 bp, Empedobacter brevis
atagcacgtgcaattgacgt

SEQ ID NO: 20557 - DNA, 20 bp, Dolosicoccus paucivorans
accagctcttgacatcggat

SEQ ID NO: 20558 - DNA, 20 bp, Anaerobiospirillum succiniciproducens
gaacgctgttttaggcctaa

SEQ ID NO: 20559 - DNA, 20 bp, Paenibacillus macerans
tggctcaaccacagttcgca

SEQ ID NO: 20560 - DNA, 20 bp, Prevotella oralis
aaagttggggacgtgtccct

SEQ ID NO: 20561 - DNA, 20 bp, Ochrobactrum intermedium
catcactagggaataactca

SEQ ID NO: 20562 - DNA, 20 bp, Propionibacterium propionicus
cctaacccattttttggggg

SEQ ID NO: 20563 - DNA, 20 bp, Shewanella algae
ggtagagatgcctcagtgcc

SEQ ID NO: 20564 - DNA, 20 bp, Anaerococcus tetradius
gaataataccctatgacata

SEQ ID NO: 20565 - DNA, 20 bp, Leptotrichia buccalis
gctgtgcttgcacaggcgag

SEQ ID NO: 20566 - DNA, 30 bp, Actinomyces naeslundii
cctgctgcatggtgggtgtgggaaagatgc

SEQ ID NO: 20567 - DNA, 30 bp, Streptococcus criceti
caatgtttgctttggaaactgttaaacttg

SEQ ID NO: 20568 - DNA, 20 bp, Enterobacter gergoviae
tccttgaagcgtggcttccg

SEQ ID NO: 20569 - DNA, 20 bp, Streptococcus peroris
taccgcataagagcagttgt

SEQ ID NO: 20570 - DNA, 20 bp, Sporosarcina ureae
cccgaataatcccattctct

SEQ ID NO: 20571 - DNA, 20 bp, Bacillus licheniformis
cggcagggttcaatcataaa

SEQ ID NO: 20572 - DNA, 20 bp, Pseudomonas mendocina
agtgcccccccgacgtgctg

SEQ ID NO: 20573 - DNA, 20 bp, Actinomyces neuii
catgctacattggtgtctac

SEQ ID NO: 20574 - DNA, 20 bp, Streptococcus criceti
ctaggctgcgatacatagcc

SEQ ID NO: 20575 - DNA, 20 bp, Anaerococcus tetradius
aaataagcggattagtggcg

SEQ ID NO: 20576 - DNA, 20 bp, Streptococcus iniae
gttaaaaggagcaaaagctt

SEQ ID NO: 20577 - DNA, 20 bp, Myroides odoratimimus
acctccctacgagtagggac

SEQ ID NO: 20578 - DNA, 20 bp, Myroides odoratimimus
cagagcttgaatagtatgga

SEQ ID NO: 20579 - DNA, 20 bp, Bacteroides merdae
aataaagtggaggacgtgtc

SEQ ID NO: 20580 - DNA, 20 bp, Neisseria subflava
tacccggtatgcttcatgac

SEQ ID NO: 20581 - DNA, 20 bp, Empedobacter brevis
tgctgttggggtttcggctt

SEQ ID NO: 20582 - DNA, 20 bp, Corynebacterium afermentans
caccgcttcaggtgttccga

SEQ ID NO: 20583 - DNA, 20 bp, Haemophilus segnis
gggggttgaactttaggttt

SEQ ID NO: 20584 - DNA, 20 bp, Campylobacter curvus
ttatttatcaaatacctacg

SEQ ID NO: 20585 - DNA, 20 bp, Bacillus schlegellii
gcgacccatccgtgccggag

SEQ ID NO: 20586 - DNA, 20 bp, Raoultella ornithinolytica
tttgtgattacatgactggg

SEQ ID NO: 20587 - DNA, 20 bp, Bacteroides capillosus
cctgttctcagttgccatcg

SEQ ID NO: 20588 - DNA, 20 bp, Prevotella loescheii
gcccttcggggccgccgcgg

SEQ ID NO: 20589 - DNA, 20 bp, Bacteroides thetaiotaomicron
taaggcatttgtgaaggtgc

SEQ ID NO: 20590 - DNA, 20 bp, Staphylococcus schleiferi
taagcccgtcgaaagtggga

SEQ ID NO: 20591 - DNA, 30 bp, Pediococcus inopinatus
ataaagtaaaccgcatggttttcttttaaa

SEQ ID NO: 20592 - DNA, 20 bp, Leuconostoc gelidum
taggagatggatccgcggtg

SEQ ID NO: 20593 - DNA, 20 bp, Clostridium clostridiiforme
ctaaccgcgaggaaggatcc

SEQ ID NO: 20594 - DNA, 20 bp, Prevotella corporis
ccacgcgtgggtttttgcag

SEQ ID NO: 20595 - DNA, 20 bp, Bacillus schlegellii
ggaagcccgtctcttagcgg

SEQ ID NO: 20596 - DNA, 20 bp, Eubacterium moniliforme
acctcgtaagagtaagcgaa

SEQ ID NO: 20597 - DNA, 20 bp, Clostridium clostridiiforme
cccattgaaaatcatttaac

SEQ ID NO: 20598 - DNA, 20 bp, Streptococcus macacae
tgtcagctattgaaactgtc

SEQ ID NO: 20599 - DNA, 20 bp, Bacillus niacini
gcttgcacctcttggttagc

SEQ ID NO: 20600 - DNA, 20 bp, Oligella ureolytica
atcatttgacctctcgctat

SEQ ID NO: 20601 - DNA, 20 bp, Empedobacter brevis
cgtaagattagttagttgga

SEQ ID NO: 20602 - DNA, 20 bp, Finegoldia magna
ttggtacagagggaagctat

SEQ ID NO: 20603 - DNA, 20 bp, Anaerococcus prevotii
cgcatgaagctatcatcaaa

SEQ ID NO: 20604 - DNA, 20 bp, Leuconostoc pseudomesenteroides
cttagtgtcgcatgatacga

SEQ ID NO: 20605 - DNA, 20 bp, Geobacillus thermoglucosidasius
agcggaccgaacggaagctt

SEQ ID NO: 20606 - DNA, 20 bp, Streptococcus equi
agtggaacgcacagatgata

SEQ ID NO: 20607 - DNA, 20 bp, Paenibacillus azotofixans
atcgtttagagataggcgcg

SEQ ID NO: 20608 - DNA, 20 bp, Paenibacillus alvei
cgcatccaaaactgcatagc

SEQ ID NO: 20609 - DNA, 20 bp, Finegoldia magna
cgaacgggatttagtaaaca

SEQ ID NO: 20610 - DNA, 30 bp, Actinomyces radingae
cctagagataggtgtgcatttggttggggg

SEQ ID NO: 20611 - DNA, 20 bp, Streptococcus sanguinis
gaccggatcttaccagaaag

SEQ ID NO: 20612 - DNA, 20 bp, Ewingella americana
cagattgaacagctggcggc

SEQ ID NO: 20613 - DNA, 20 bp, Fusobacterium necrogenes
gtgccccttcgggggaacct

SEQ ID NO: 20614 - DNA, 20 bp, Brevibacillus brevis
ccgcatcggaagggcgcgtg

SEQ ID NO: 20615 - DNA, 20 bp, Eubacterium moniliforme
agaccacgaaaccgcatggt

SEQ ID NO: 20616 - DNA, 30 bp, Sporosarcina ureae
aacaagtacaggagtaactgcctgtacctt

SEQ ID NO: 20617 - DNA, 20 bp, Sporosarcina pasteurii
gaacaagtataggagtaact

SEQ ID NO: 20618 - DNA, 20 bp, Psychrobacter phenylpyruvicus
aataccaaataagctattgt

SEQ ID NO: 20619 - DNA, 20 bp, Sporosarcina ureae
gagacatgattttcccttcg

SEQ ID NO: 20620 - DNA, 20 bp, Sporosarcina pasteurii
acggcttcggctgtctctgc

SEQ ID NO: 20621 - DNA, 20 bp, Leifsonia aquatica
gctgacatatacgagaacgg

SEQ ID NO: 20622 - DNA, 20 bp, Citrobacter freundii
cgttgtggttaataaccgtg

SEQ ID NO: 20623 - DNA, 20 bp, Stenotrophomonas maltophilia
tcgaatgagcccatatggga

SEQ ID NO: 20624 - DNA, 30 bp, Corynebacterium coyleae
acggaaaggcctctgcttgcagaggtactc

SEQ ID NO: 20625 - DNA, 30 bp, Porphyromonas gingivalis
cgtaccgcaaggggcgcactagggtaatac

SEQ ID NO: 20626 - DNA, 20 bp, Oligella urethralis
acccgctgtcctgaccattg

SEQ ID NO: 20627 - DNA, 30 bp, Enterococcus saccharolyticus
gtgctaatacccgcataacgctttttctcg

SEQ ID NO: 20628 - DNA, 20 bp, Prevotella intermedia
gccccctacgtattaccggc

SEQ ID NO: 20629 - DNA, 20 bp, Cardiobacterium hominis
gatcatggctcagattgaga

SEQ ID NO: 20630 - DNA, 20 bp, Streptococcus acidominimus
tctcccgtagctgctacatt

SEQ ID NO: 20631 - DNA, 20 bp, Leuconostoc carnosum
tcaggagaacgctggtggcg

SEQ ID NO: 20632 - DNA, 20 bp, Actinomyces radingae
tgggaaaggggcttttttaa

SEQ ID NO: 20633 - DNA, 20 bp, Streptococcus macacae
ctttagagggattgaaaggt

SEQ ID NO: 20634 - DNA, 20 bp, Bacillus licheniformis
cggaaggttgttgtttgacc

SEQ ID NO: 20635 - DNA, 20 bp, Leptotrichia buccalis
gcgtatgcccgtgagagcgg

SEQ ID NO: 20636 - DNA, 20 bp, Streptococcus macacae
gtggaaagttctccaattga

SEQ ID NO: 20637 - DNA, 20 bp, Streptococcus infantarius
gcgccgtgctctcagctccc

SEQ ID NO: 20638 - DNA, 20 bp, Bacteroides merdae
cccgggtttgaacgtagtct

SEQ ID NO: 20639 - DNA, 20 bp, Eubacterium moniliforme
aagaccacgaaaccgcatgg

SEQ ID NO: 20640 - DNA, 20 bp, Gemella morbillorum
gctaaggagagcttcttctc

SEQ ID NO: 20641 - DNA, 20 bp, Streptococcus thermophilus
tcgggaaggtgcggtggatc

SEQ ID NO: 20642 - DNA, 30 bp, Dolosicoccus paucivorans
gagtaactgttactcgtttgacggtatctc

SEQ ID NO: 20643 - DNA, 20 bp, Pseudomonas mendocina
acgtattaggttacatgctc

SEQ ID NO: 20644 - DNA, 20 bp, Unknown Organism
  oligonucleotide from CDC group EO-2
ccacttctactacggaatag

SEQ ID NO: 20645 - DNA, 20 bp, Pseudomonas fluorescens
tgaagtgagcttgctcacgg

SEQ ID NO: 20646 - DNA, 20 bp, Corynebacterium group ANF
tccactttgtgtggtgtggt

SEQ ID NO: 20647 - DNA, 20 bp, Clostridium clostridiiforme
aagcgaaagcggatcgaccc

SEQ ID NO: 20648 - DNA, 20 bp, Psychrobacter phenylpyruvicus
gctattgtctctcatgagac

SEQ ID NO: 20649 - DNA, 20 bp, Bacillus alcalophilus
aggtcggcaccttgacggac

SEQ ID NO: 20650 - DNA, 20 bp, Sphingobacterium multivorum
ggttggatattaaatattta

SEQ ID NO: 20651 - DNA, 30 bp, Bacteroides merdae
ataaaattgccgttgaaactgggttacttg

SEQ ID NO: 20652 - DNA, 20 bp, Streptococcus acidominimus
  misc_feature (2)..(2): n is a, c, g, or t
gntggatcacctccttcatg

SEQ ID NO: 20653 - DNA, 20 bp, Bacteroides stercoris
ataccggatggcatagtttt

SEQ ID NO: 20654 - DNA, 20 bp, Leuconostoc carnosum
agggaatgaccttagcctga

SEQ ID NO: 20655 - DNA, 20 bp, Bacillus schlegellii
ggagcgggcggaagcctttg

SEQ ID NO: 20656 - DNA, 20 bp, Bacillus licheniformis
tgtgggttactctcggggaa

SEQ ID NO: 20657 - DNA, 20 bp, Bacteroides thetaiotaomicron
gcaaggagcgtctagggtaa

SEQ ID NO: 20658 - DNA, 20 bp, Bacillus licheniformis
gttgtttgaccggcagggtt

SEQ ID NO: 20659 - DNA, 20 bp, Peptostreptococcus anaerobius
gatttgatgcttgcattaat

SEQ ID NO: 20660 - DNA, 20 bp, Clostridium clostridiiforme
agccggaggcctaaccgcga

SEQ ID NO: 20661 - DNA, 20 bp, Clostridium subterminale
aatgtatgagaatcgcatga

SEQ ID NO: 20662 - DNA, 20 bp, Clostridium clostridiiforme
ttcggatggatttgaaattg

SEQ ID NO: 20663 - DNA, 20 bp, Corynebacterium pilosum
ggtttttccttcttgtgttg

SEQ ID NO: 20664 - DNA, 20 bp, Citrobacter amalonaticus
atggttaataaccattttca

SEQ ID NO: 20665 - DNA, 20 bp, Clostridium clostridiiforme
gacttgtccgaaagagaggg

SEQ ID NO: 20666 - DNA, 30 bp, Haemophilus haemolyticus
acaatggcgtatacagagggtggcgatgcc

SEQ ID NO: 20667 - DNA, 20 bp, Streptococcus macacae
acgcactgatttcacgggag

SEQ ID NO: 20668 - DNA, 20 bp, Finegoldia magna
acccctctctttatgagaca

SEQ ID NO: 20669 - DNA, 20 bp, Bacteroides stercoris
gcaactgactgaatcggaaa

SEQ ID NO: 20670 - DNA, 20 bp, Bacteroides ureolyticus
cttaaccactaaactgctta

SEQ ID NO: 20671 - DNA, 20 bp, Streptococcus macacae
cactgatttcacgggagctt

SEQ ID NO: 20672 - DNA, 20 bp, Moraxella atlantae
ttacccggtgtggtcgatga

SEQ ID NO: 20673 - DNA, 20 bp, Leptotrichia buccalis
atgtcaggctgatgaaagga

SEQ ID NO: 20674 - DNA, 20 bp, Staphylococcus capitis
acaagacagacgtagagata

SEQ ID NO: 20675 - DNA, 20 bp, Bacteroides vulgatus
gtcgggtatgcatacccgtt

SEQ ID NO: 20676 - DNA, 20 bp, Bacteroides vulgatus
ctaacaggttctgctgagga

SEQ ID NO: 20677 - DNA, 20 bp, Anaerococcus prevotii
gatatacccctctctttaag

SEQ ID NO: 20678 - DNA, 20 bp, Prevotella oralis
gcccgctgtcggcctttttt

SEQ ID NO: 20679 - DNA, 20 bp, Actinomyces naeslundii
gtgggaaagatgcgcctttg

SEQ ID NO: 20680 - DNA, 20 bp, Clostridium clostridiiforme
cacaaggacttgtccgaaag

SEQ ID NO: 20681 - DNA, 20 bp, Globicatella sanguinis
ggcctaaccaattggaggga

SEQ ID NO: 20682 - DNA, 20 bp, Eubacterium moniliforme
ggtgcgtaggtggccatgta

SEQ ID NO: 20683 - DNA, 20 bp, Sporosarcina ureae
gggttattcccgaataatcc

SEQ ID NO: 20684 - DNA, 20 bp, Neisseria mucosa
gggaacctgcggttggggat

SEQ ID NO: 20685 - DNA, 20 bp, Campylobacter curvus
gtaaataatatatagggttt

SEQ ID NO: 20686 - DNA, 20 bp, Peptoniphilus indolicus
aggaagcagatgccgaaggt

SEQ ID NO: 20687 - DNA, 20 bp, Dolosicoccus paucivorans
cgatacatcgagtggcgaac

SEQ ID NO: 20688 - DNA, 20 bp, Sphingobacterium multivorum
ggcattcatggcccttacgc

SEQ ID NO: 20689 - DNA, 20 bp, Shewanella putrefaciens
gaatctttccagagatggct

SEQ ID NO: 20690 - DNA, 20 bp, Myroides odoratimimus
gttaccactcgcgttaaggc

SEQ ID NO: 20691 - DNA, 20 bp, Alloiococcus otitis
ccttcagagatgaagggttc

SEQ ID NO: 20692 - DNA, 20 bp, Leuconostoc carnosum
aggagaacgctggtggcgtg

SEQ ID NO: 20693 - DNA, 20 bp, Vibrio vulnificus
aggacgccaccactttgggt

SEQ ID NO: 20694 - DNA, 20 bp, Pseudomonas mendocina
agggctgctggttaataccc

SEQ ID NO: 20695 - DNA, 20 bp, Prevotella loescheii
gcccacgtgtgggtttttgc

SEQ ID NO: 20696 - DNA, 30 bp, Staphylococcus aureus
gaccgcaagggtgaaactcaaagggaattg

SEQ ID NO: 20697 - DNA, 20 bp, Streptococcus urinalis
ggagtggaaagtctacttcg

SEQ ID NO: 20698 - DNA, 20 bp, Bacillus coagulans
accgaataacactttcgctc

SEQ ID NO: 20699 - DNA, 20 bp, Streptococcus criceti
ttgagtagagtggaaagtta

SEQ ID NO: 20700 - DNA, 20 bp, Unknown Organism
  oligonucleotide from CDC group EF-4B
ggttaatacccatgactgat

SEQ ID NO: 20701 - DNA, 20 bp, Bacteroides capillosus
aggcccttcggggcgcctac

SEQ ID NO: 20702 - DNA, 20 bp, Staphylococcus succinus
gccatgatcaaactactatc

SEQ ID NO: 20703 - DNA, 20 bp, Bacteroides ovatus
ggatagcatacgaatatcgc

SEQ ID NO: 20704 - DNA, 20 bp, Clostridium clostridiiforme
gggatccctcttcggagcaa

SEQ ID NO: 20705 - DNA, 20 bp, Corynebacterium group F1
gcgacacgggttgagtaaca

SEQ ID NO: 20706 - DNA, 20 bp, Moellerella wisconsensis
atcagcgattgacgttaccg

SEQ ID NO: 20707 - DNA, 20 bp, Suttonella indologenes
cgctggcgggcccaatgctt

SEQ ID NO: 20708 - DNA, 20 bp, Staphylococcus schleiferi
acacaatgattggggtgaaa

SEQ ID NO: 20709 - DNA, 20 bp, Paenibacillus azotofixans
taggcgcggccttcgggaca

SEQ ID NO: 20710 - DNA, 20 bp, Anaerococcus prevotii
aacgatgaagcttaaatgat

SEQ ID NO: 20711 - DNA, 20 bp, Myroides odoratimimus
gtttatcgatatggcatcgt

SEQ ID NO: 20712 - DNA, 20 bp, Neisseria meningitidis
agcataccgggtaagcgggc

SEQ ID NO: 20713 - DNA, 20 bp, Anaerococcus tetradius
gtaatacgtatggaccgagc

SEQ ID NO: 20714 - DNA, 20 bp, Corynebacterium group ANF
actttttatcacatggtaag

SEQ ID NO: 20715 - DNA, 20 bp, Dolosigranulum pigrum
taccactcatggatagcctc

SEQ ID NO: 20716 - DNA, 20 bp, Vibrio fluvialis
ggtggggacgacgtcaagca

SEQ ID NO: 20717 - DNA, 20 bp, Bacillus schlegellii
cgtgccggagttcacacatt

SEQ ID NO: 20718 - DNA, 20 bp, Capnocytophaga sp.
agacgagcgcaacccctgcc

SEQ ID NO: 20719 - DNA, 20 bp, Finegoldia magna
tgcaaaactcgaaagccaat

SEQ ID NO: 20720 - DNA, 20 bp, Moellerella wisconsensis
gatctgcctgacagaggggg

SEQ ID NO: 20721 - DNA, 20 bp, Stenotrophomonas maltophilia
aatgagcccatatgggatta

SEQ ID NO: 20722 - DNA, 20 bp, Clostridium innocuum
gagtgagccgtcgaagtagg

SEQ ID NO: 20723 - DNA, 30 bp, Streptococcus macacae
taaccaatgtcagctattgaaactgtcaga

SEQ ID NO: 20724 - DNA, 20 bp, Campylobacter concisus
cggataggacgatggttgga

SEQ ID NO: 20725 - DNA, 20 bp, Clostridium clostridiiforme
gagaagcgagcccgaaagga

SEQ ID NO: 20726 - DNA, 20 bp, Psychrobacter phenylpyruvicus
aggtaacctgttggagccag

SEQ ID NO: 20727 - DNA, 20 bp, Bacteroides capillosus
tactccttacaacggaataa

SEQ ID NO: 20728 - DNA, 20 bp, Providencia alcalifaciens
ccggcggcggggtgagtaat

SEQ ID NO: 20729 - DNA, 20 bp, Leptotrichia buccalis
tacctgatacaattgccagc

SEQ ID NO: 20730 - DNA, 20 bp, Bacteroides distasonis
tggaaacaccttttctaggc

SEQ ID NO: 20731 - DNA, 30 bp, Sporosarcina ureae
aactgcctgtaccttgacggtaccttacca

SEQ ID NO: 20732 - DNA, 30 bp, Eremococcus coleocola
ggacgatacaacgagcagcaaactcgcgag

SEQ ID NO: 20733 - DNA, 20 bp, Dolosicoccus paucivorans
ttgacaaagatgcttatggt

SEQ ID NO: 20734 - DNA, 20 bp, Enterobacter gergoviae
tggcttccggaggctacgcg

SEQ ID NO: 20735 - DNA, 20 bp, Streptococcus macacae
acccctatcagatggacctg

SEQ ID NO: 20736 - DNA, 20 bp, Bacillus mycoides
tcgtacaaggatagccgatc

SEQ ID NO: 20737 - DNA, 20 bp, Streptococcus macacae
gcattggcttaaccaatgtc

SEQ ID NO: 20738 - DNA, 20 bp, Leptotrichia buccalis
gggctggagtattggagagg

SEQ ID NO: 20739 - DNA, 20 bp, Listeria seeligeri
cttacagatgggccgcggtg

SEQ ID NO: 20740 - DNA, 20 bp, Bacteroides stercoris
tggaataactattaaagaat

SEQ ID NO: 20741 - DNA, 20 bp, Bacteroides capillosus
tactggtttacttgagtttg

SEQ ID NO: 20742 - DNA, 20 bp, Dolosicoccus paucivorans
cttatggtatcgctaaagga

SEQ ID NO: 20743 - DNA, 20 bp, Eremococcus coleocola
atggacgatacaacgagcag

SEQ ID NO: 20744 - DNA, 20 bp, Stenotrophomonas maltophilia
aagcaaccccgcgagcagca

SEQ ID NO: 20745 - DNA, 20 bp, Gemella morbillorum
tcccgcatatcagctagatg

SEQ ID NO: 20746 - DNA, 20 bp, Enterococcus casseliflavus
ccgcgggcattagctagttg

SEQ ID NO: 20747 - DNA, 20 bp, Helcococcus ovis
aggcagacgtcgaaggtagg

SEQ ID NO: 20748 - DNA, 20 bp, Actinomyces radingae
gttgtgtggtgagagtggcg

SEQ ID NO: 20749 - DNA, 20 bp, Bacteroides merdae
tacccgggtttgaacgtagt

SEQ ID NO: 20750 - DNA, 20 bp, Streptococcus macacae
cttttatcgcatgataggag

SEQ ID NO: 20751 - DNA, 20 bp, Paenibacillus azotofixans
gtttagagataggcgcggcc

SEQ ID NO: 20752 - DNA, 20 bp, Finegoldia magna
gtcatagatgggctcgcgtc

SEQ ID NO: 20753 - DNA, 20 bp, Clostridium clostridiiforme
ggcgcttcaagtcgtctgtc

SEQ ID NO: 20754 - DNA, 20 bp, Moraxella osloensis
tgaaagcaggcggcaggctt

SEQ ID NO: 20755 - DNA, 30 bp, Bacteroides stercoris
atagttttcccgcatgggatgattattaaa

SEQ ID NO: 20756 - DNA, 20 bp, Bacillus azotoformans
gctaagccgcgaggcttgag

SEQ ID NO: 20757 - DNA, 20 bp, Pediococcus parvulus
ttcgttaattgattttgaga

SEQ ID NO: 20758 - DNA, 20 bp, Oligella urethralis
aatctcttgaagcttccggg

SEQ ID NO: 20759 - DNA, 20 bp, Peptostreptococcus anaerobius
tttgatgcttgcattgatga

SEQ ID NO: 20760 - DNA, 20 bp, Cedecea lapagei
gcgcgacagcgttcaatctg

SEQ ID NO: 20761 - DNA, 20 bp, Gemella morbillorum
ggtagcggggtataactatt

SEQ ID NO: 20762 - DNA, 20 bp, Enterococcus faecium
cagaaaccgcatggttttga

SEQ ID NO: 20763 - DNA, 20 bp, Streptococcus urinalis
cacatgttaggaacttaaaa

SEQ ID NO: 20764 - DNA, 20 bp, Gemella morbillorum
gctagatgttgcatgacatt

SEQ ID NO: 20765 - DNA, 20 bp, Enterobacter gergoviae
aggtagccagcctggggagt

SEQ ID NO: 20766 - DNA, 20 bp, Finegoldia magna
tatgagacatccatacaggt

SEQ ID NO: 20767 - DNA, 20 bp, Corynebacterium pilosum
tattctggcctggtcttccg

SEQ ID NO: 20768 - DNA, 20 bp, Clostridium clostridiiforme
attggaacattcaagcagcg

SEQ ID NO: 20769 - DNA, 20 bp, Peptoniphilus asaccharolyticus
gtcgagcgatgaaatttcga

SEQ ID NO: 20770 - DNA, 20 bp, Paenibacillus alvei
gtcccttcttcggaacattc

SEQ ID NO: 20771 - DNA, 30 bp, Streptococcus macacae
gtgcctaatacatgcaagtgggacgcactg

SEQ ID NO: 20772 - DNA, 20 bp, Eubacterium moniliforme
taggtgtggggggcgatagt

SEQ ID NO: 20773 - DNA, 20 bp, Bacteroides capilosus
gaggaacctgcctcggagtg

SEQ ID NO: 20774 - DNA, 20 bp, Peptoniphilus asaccharolyticus
cttcggggtgaagatgaaat

SEQ ID NO: 20775 - DNA, 20 bp, Brevibacterium linens
acgaccgaaggcatctttgg

SEQ ID NO: 20776 - DNA, 20 bp, Propionibacterium propionicus
ttcaattgtgacgaagcttt

SEQ ID NO: 20777 - DNA, 20 bp, Dolosigranulum pigrum
ccactcatggatagcctcgc

SEQ ID NO: 20778 - DNA, 20 bp, Corynebacterium group ANF
ggtggaaaacgttttctagt

SEQ ID NO: 20779 - DNA, 20 bp, Alloiococcus otitis
gacatcttctgccaccttca

SEQ ID NO: 20780 - DNA, 20 bp, Paenibacillus alvei
atccaaaactgcatagcttg

SEQ ID NO: 20781 - DNA, 20 bp, Geobacillus thermoglucosidasius
ccccaaaaacccgctctcag

SEQ ID NO: 20782 - DNA, 20 bp, Clostridium innocuum
gtgttggaggaattcagtgc

SEQ ID NO: 20783 - DNA, 20 bp, Streptococcus urinalis
ggtcatgtgcttgcacaaga

SEQ ID NO: 20784 - DNA, 20 bp, Veillonella sp.
taccgcatacgatctaatcc

SEQ ID NO: 20785 - DNA, 20 bp, Aeromonas hydrophila
gttggtggctaatacccacc

SEQ ID NO: 20786 - DNA, 20 bp, Paenibacillus lautus
gcatgggagaggaaagaaag

SEQ ID NO: 20787 - DNA, 20 bp, Bacteroides capillosus
tttcggctatgtgaccaagc

SEQ ID NO: 20788 - DNA, 20 bp, Bacteroides stercoris
cgatacaatgtcagcggcca

SEQ ID NO: 20789 - DNA, 20 bp, Micrococcus luteus
ggggggagccgcgagggggg

SEQ ID NO: 20790 - DNA, 20 bp, Propionibacterium propionicus
tcttgtgggttggaaagatt

SEQ ID NO: 20791 - DNA, 30 bp, Vibrio metschnikovii
ttcgggaggacgcttgccactttgggttca

SEQ ID NO: 20792 - DNA, 20 bp, Stenotrophomonas maltophilia
cgctggcggctaggcctaac

SEQ ID NO: 20793 - DNA, 20 bp, Geobacillus thermoglucosidasius
ggggagcgaatccccaaaaa

SEQ ID NO: 20794 - DNA, 20 bp, Vibrio hollisae
accgcatacgtactgaggta

SEQ ID NO: 20795 - DNA, 20 bp, Bacteroides ovatus
cagctacctggcgacagtga

SEQ ID NO: 20796 - DNA, 20 bp, Bacillus licheniformis
ggcagggttcaatcataaaa

SEQ ID NO: 20797 - DNA, 20 bp, Capnocytophaga sp.
catttatattaaagctgagg

SEQ ID NO: 20798 - DNA, 20 bp, Empedobacter brevis
ggcaggtcactaagtatcaa

SEQ ID NO: 20799 - DNA, 20 bp, Unknown Organism
  oligonucleotide from CDC group EO-2
atgtgccacttctactacgg

SEQ ID NO: 20800 - DNA, 20 bp, Microbacterium hominis
ccagcaggcggtggccctcc

SEQ ID NO: 20801 - DNA, 20 bp, Finegoldia magna
agggaagctatatagtgata

SEQ ID NO: 20802 - DNA, 20 bp, Oligella urethralis
cgatccccctctttcctccg

SEQ ID NO: 20803 - DNA, 20 bp, Eubacterium moniliforme
tggggggcgatagtcctccg

SEQ ID NO: 20804 - DNA, 20 bp, Bacillus smithii
gtgaagtcgtaacaaaaagc

SEQ ID NO: 20805 - DNA, 20 bp, Clostridium clostridiiforme
cacctgcgggaaaccggagc

SEQ ID NO: 20806 - DNA, 20 bp, Helcococcus kunzii
ttcggaatgaaacggaaaaa

SEQ ID NO: 20807 - DNA, 20 bp, Clostridium innocuum
tcgaacgaagtttcaaggaa

SEQ ID NO: 20808 - DNA, 20 bp, Myroides odoratimimus
gatatggcatcgtattgata

SEQ ID NO: 20809 - DNA, 20 bp, Campylobacter concisus
gacgatggttggatgccatt

SEQ ID NO: 20810 - DNA, 20 bp, Providencia rustigianii
gttgatgctaatatcgtcaa

SEQ ID NO: 20811 - DNA, 20 bp, Propionibacterium avidum
tgcttgttaggcggctagcc

SEQ ID NO: 20812 - DNA, 20 bp, Actinomyces neuii
cagggaacgtgcggcgtgct

SEQ ID NO: 20813 - DNA, 20 bp, Psychrobacter phenylpyruvicus
ataagctattgtctctcatg

SEQ ID NO: 20814 - DNA, 20 bp, Peptostreptococcus anaerobius
agcgcgtctgatttgatgct

SEQ ID NO: 20815 - DNA, 20 bp, Staphylococcus delphini
tgaagtcgtcacaaggtacc

SEQ ID NO: 20816 - DNA, 20 bp, Bacteroides merdae
tggaaacactccttctagca

SEQ ID NO: 20817 - DNA, 20 bp, Bacteroides capillosus
atgatatcctatgcaggcat

SEQ ID NO: 20818 - DNA, 20 bp, Geobacillus thermoglucosidasius
ttgaaaggtggcttttgcta

SEQ ID NO: 20819 - DNA, 20 bp, Streptococcus ratti
agtctgaagtcaaaggcagt

SEQ ID NO: 20820 - DNA, 20 bp, Brevibacterium casei
aatggctggacagagagagg

SEQ ID NO: 20821 - DNA, 20 bp, Eubacterium moniliforme
aaaggattcattcgatgcag

SEQ ID NO: 20822 - DNA, 30 bp, Vibrio alginolyticus
agggcctaacacatgcaagtcgagcggaaa

SEQ ID NO: 20823 - DNA, 20 bp, Paenibacillus lautus
gttgggtgtttaaccccagg

SEQ ID NO: 20824 - DNA, 30 bp, Bacteroides vulgatus
ggtatgcatacccgtttgcatgtactttat

SEQ ID NO: 20825 - DNA, 20 bp, Finegoldia magna
ataatacccgaagcctgtga

SEQ ID NO: 20826 - DNA, 20 bp, Pseudomonas mendocina
ataccctgcagttttgacgt

SEQ ID NO: 20827 - DNA, 20 bp, Peptoniphilus asaccharolyticus
tgtaagcatttgaaactaat

SEQ ID NO: 20828 - DNA, 20 bp, Streptococcus equi
gatgatacgtagcttgctac

SEQ ID NO: 20829 - DNA, 20 bp, Bacteroides capillosus
aacggaataacccggcgaaa

SEQ ID NO: 20830 - DNA, 20 bp, Citrobacter freundii
aataaccgcaacgattgacg

SEQ ID NO: 20831 - DNA, 20 bp, Actinomyces neuii
aggtcagggaacgtgcggcg

SEQ ID NO: 20832 - DNA, 20 bp, Clostridium clostridiiforme
agcgcacagggccgcatggt

SEQ ID NO: 20833 - DNA, 20 bp, Anaerococcus prevotii
agctatcatcaaagatttat

SEQ ID NO: 20834 - DNA, 20 bp, Campylobacter curvus
gtttatttatcaaataccta

SEQ ID NO: 20835 - DNA, 20 bp, Sporosarcina ureae
tggagacatgattttccctt

SEQ ID NO: 20836 - DNA, 20 bp, Corynebacterium auris
cggaaggctcccgcttgcgg

SEQ ID NO: 20837 - DNA, 20 bp, Actinomyces naeslundii
gatattctgtgcctgctgca

SEQ ID NO: 20838 - DNA, 20 bp, Myroides odoratimimus
atatggcatcgtattgataa

SEQ ID NO: 20839 - DNA, 20 bp, Bacteroides capillosus
gttctcagttgccatcgggt

SEQ ID NO: 20840 - DNA, 20 bp, Myroides odoratimimus
gagcttgaataatatggaag

SEQ ID NO: 20841 - DNA, 20 bp, Prevotella loescheii
gatgaggcccttcggggccg

SEQ ID NO: 20842 - DNA, 20 bp, Alloiococcus otitis
ctgccaccttcagagatgaa

SEQ ID NO: 20843 - DNA, 20 bp, Gemella morbillorum
aaaggtgcaattgctatcgc

SEQ ID NO: 20844 - DNA, 30 bp, Corynebacterium kutscheri
gatcgggctagagatagtttttccttttta

SEQ ID NO: 20845 - DNA, 20 bp, Sphingobacterium multivorum
ggcatcggttggatattaaa

SEQ ID NO: 20846 - DNA, 20 bp, Microbacterium terregens
tgaagccgggggcccaaccc

SEQ ID NO: 20847 - DNA, 20 bp, Paenibacillus validus
gtcgagcggccctttccttc

SEQ ID NO: 20848 - DNA, 20 bp, Clostridium clostridiiforme
ataagccggaaggtgaaaag

SEQ ID NO: 20849 - DNA, 20 bp, Finegoldia magna
atttagtaaacagaagcctc

SEQ ID NO: 20850 - DNA, 20 bp, Prevotella intermedia
ccgttaccttccaactagct

SEQ ID NO: 20851 - DNA, 20 bp, Lactococcus raffinolactis
taacctacctatcagcgggg

SEQ ID NO: 20852 - DNA, 20 bp, Clostridium clostridiiforme
cgtagacggttaagcaagtc

SEQ ID NO: 20853 - DNA, 20 bp, Leuconostoc gelidum
gctacggcgtcacctaggag

SEQ ID NO: 20854 - DNA, 20 bp, Sporosarcina pasteurii
gctaacaaaggaagaaacaa

SEQ ID NO: 20855 - DNA, 20 bp, Bacteroides merdae
gtgtttgaggtaggcggaat

SEQ ID NO: 20856 - DNA, 20 bp, Campylobacter concisus
catgcgagcctgtgagggtg

SEQ ID NO: 20857 - DNA, 20 bp, Leuconostoc gelidum
tatcgcatgatatcaagctc

SEQ ID NO: 20858 - DNA, 20 bp, Neisseria mucosa
tgcggttggggatccaccct

SEQ ID NO: 20859 - DNA, 20 bp, Citrobacter freundii
acaaggtaaccccgtagggg

SEQ ID NO: 20860 - DNA, 20 bp, Cedecea davisae
ttaataacctcggtgattga

SEQ ID NO: 20861 - DNA, 20 bp, Clostridium clostridiiforme
gcggaatacgtagggggcaa

SEQ ID NO: 20862 - DNA, 20 bp, Capnocytophaga sp.
ggagactgacgtacttagag

SEQ ID NO: 20863 - DNA, 20 bp, Leuconostoc gelidum
atcgcatgatatcaagctct

SEQ ID NO: 20864 - DNA, 20 bp, Campylobacter concisus
cagatcgccgcagagatacg

SEQ ID NO: 20865 - DNA, 20 bp, Corynebacterium group ANF
atcccttcggggtgaaggta

SEQ ID NO: 20866 - DNA, 20 bp, Citrobacter amalonaticus
aatggttaataaccattttc

SEQ ID NO: 20867 - DNA, 20 bp, Brevibacillus centrosporus
ggggttaatcccgaatattt

SEQ ID NO: 20868 - DNA, 20 bp, Providencia rustigianii
gcgttgatgctaatatcgtc

SEQ ID NO: 20869 - DNA, 20 bp, Brevibacillus laterosporus
aaacagtgccatttaaataa

SEQ ID NO: 20870 - DNA, 20 bp, Campylobacter sputorum
gcagtcgaacgatgaagtcc

SEQ ID NO: 20871 - DNA, 20 bp, Anaerococcus tetradius
aatcgcatggtagactaacc

SEQ ID NO: 20872 - DNA, 20 bp, Neisseria flavescens
acgagcatgctttacacatg

SEQ ID NO: 20873 - DNA, 20 bp, Salmonella typhi
gtatcaggcagcagcttgct

SEQ ID NO: 20874 - DNA, 20 bp, Bacteroides capilosus
gagtcgcatgacactggctg

SEQ ID NO: 20875 - DNA, 20 bp, Oligella ureolytica
ctgcactattaactatcaag

SEQ ID NO: 20876 - DNA, 20 bp, Abiotrophia defectiva
catgggatcacatgattccg

SEQ ID NO: 20877 - DNA, 20 bp, Bacteroides capilosus
taataccgcataatgcagct

SEQ ID NO: 20878 - DNA, 20 bp, Corynebacterium group ANF
cccttcggggtgaaggtagt

SEQ ID NO: 20879 - DNA, 30 bp, Clostridium limosum
ttaataccgcataacatcatttcaatgcat

SEQ ID NO: 20880 - DNA, 20 bp, Pantoea agglomerans
acagcaggagcttggctcct

SEQ ID NO: 20881 - DNA, 20 bp, Sporosarcina ureae
tcgcatgagggaatgttgaa

SEQ ID NO: 20882 - DNA, 20 bp, Vibrio hollisae
aaatccccagcgctaatacc

SEQ ID NO: 20883 - DNA, 20 bp, Streptococcus vestibularis
ataggtgacacatgtcattt

SEQ ID NO: 20884 - DNA, 20 bp, Microbacterium hominis
gatcccgggtctggtacacg

SEQ ID NO: 20885 - DNA, 20 bp, Arcanobacterium pyogenes
tttttgtgacggtatgtgca

SEQ ID NO: 20886 - DNA, 20 bp, Vibrio vulnificus
gacgccaccactttgggtca

SEQ ID NO: 20887 - DNA, 20 bp, Sphingobacterium multivorum
ggggacgacgtccaggcatt

SEQ ID NO: 20888 - DNA, 30 bp, Leuconostoc fallax
gctaataccgtataacaacacatttcgcat

SEQ ID NO: 20889 - DNA, 20 bp, Peptoniphilus indolicus
tgaaatcgtagtgacacatg

SEQ ID NO: 20890 - DNA, 30 bp, Bacteroides capillosus
ggatgcgtctgattaggcagttggcggggt

SEQ ID NO: 20891 - DNA, 20 bp, Vibrio vulnificus
accactttgggtcatgactg

SEQ ID NO: 20892 - DNA, 20 bp, Streptococcus criceti
tgacatcccgatgccatccc

SEQ ID NO: 20893 - DNA, 20 bp, Campylobacter curvus
atataagtataaatgggaaa

SEQ ID NO: 20894 - DNA, 20 bp, Streptococcus macacae
aacagtatcgctaagagatg

SEQ ID NO: 20895 - DNA, 20 bp, Corynebacterium group F1
ctggtactcgagtggcgaca

SEQ ID NO: 20896 - DNA, 20 bp, Unknown Organism
  oligonucleotide from CDC group EO-2
acttctactacggaatagcc

SEQ ID NO: 20897 - DNA, 20 bp, Facklamia hominis
aactttatgagggagccgtc

SEQ ID NO: 20898 - DNA, 20 bp, Dolosicoccus paucivorans
actgttactcgtttgacggt

SEQ ID NO: 20899 - DNA, 20 bp, Arcanobacterium haemolyticum
aaggcgttgagttgagggta

SEQ ID NO: 20900 - DNA, 20 bp, Pediococcus parvulus
ttaattgattttgagatgct

SEQ ID NO: 20901 - DNA, 20 bp, Prevotella loescheii
tcaacatccggcttgcagcg

SEQ ID NO: 20902 - DNA, 20 bp, Empedobacter brevis
aacagattgaatggcatcat

SEQ ID NO: 20903 - DNA, 20 bp, Paenibacillus lautus
tcgcacccaaaactggatga

SEQ ID NO: 20904 - DNA, 20 bp, Leptotrichia buccalis
tggcagaatctgtgcttgca

SEQ ID NO: 20905 - DNA, 20 bp, Clostridium clostridiiforme
tctgtcaaaagccgaggctc

SEQ ID NO: 20906 - DNA, 20 bp, Bacillus lentus
acttcacccccatcatctgt

SEQ ID NO: 20907 - DNA, 20 bp, Bacillus laevolacticus
ttgatcatggctcagggccg

SEQ ID NO: 20908 - DNA, 20 bp, Bacillus sp
atgaagtttggatccatggc

SEQ ID NO: 20909 - DNA, 20 bp, Finegoldia magna
actcgaaagccaatcccagt

SEQ ID NO: 20910 - DNA, 20 bp, Bacillus smithii
acaaaaagccgtatcggaag

SEQ ID NO: 20911 - DNA, 20 bp, Dolosicoccus paucivorans
aaatcaatgattcgcatgtt

SEQ ID NO: 20912 - DNA, 20 bp, Paenibacillus macerans
aatgttagttgccagcacct

SEQ ID NO: 20913 - DNA, 20 bp, Leuconostoc fallax
tagagataatattgttctct

SEQ ID NO: 20914 - DNA, 20 bp, Empedobacter brevis
cgcgtgtaggacgactgcct

SEQ ID NO: 20915 - DNA, 20 bp, Psychrobacter phenylpyruvicus
acctaccctctagtttggga

SEQ ID NO: 20916 - DNA, 20 bp, Yersinia frederiksenii
cacttaatacgtgaagtgat

SEQ ID NO: 20917 - DNA, 20 bp, Leptotrichia buccalis
catgcaagtctttggcgaag

SEQ ID NO: 20918 - DNA, 20 bp, Oligella urethralis
ccagctacagatcccgcctt

SEQ ID NO: 20919 - DNA, 20 bp, Stenotrophomonas maltophilia
agtaatgcatgcgggatctg

SEQ ID NO: 20920 - DNA, 20 bp, Helcococcus kunzii
gaaacggaaaaaggaaagta

SEQ ID NO: 20921 - DNA, 20 bp, Kocuria varians
atgttccttcccccttgtgg

SEQ ID NO: 20922 - DNA, 20 bp, Streptococcus criceti
atgttaatgacttgaaaggt

SEQ ID NO: 20923 - DNA, 30 bp, Streptococcus alactolyticus
ataacagcttttgacacatgttagaagctt

SEQ ID NO: 20924 - DNA, 20 bp, Anaerococcus prevotii
ttacggcggggtctagagat

SEQ ID NO: 20925 - DNA, 20 bp, Gemella morbillorum
tattggacgcgatagctaat

SEQ ID NO: 20926 - DNA, 20 bp, Bacteroides caccae
aagttgtccacgtgtggatt

SEQ ID NO: 20927 - DNA, 20 bp, Corynebacterium group F1
ggcgacacgggttgagtaac

SEQ ID NO: 20928 - DNA, 20 bp, Bacteroides thetaiotaomicron
tgaagtagtaccgcaaggag

SEQ ID NO: 20929 - DNA, 30 bp, Corynebacterium coyleae
gcttgacatacaccagatcggccccagaga

SEQ ID NO: 20930 - DNA, 20 bp, Clostridium clostridiiforme
gccgcggaatacgtaggggg

SEQ ID NO: 20931 - DNA, 20 bp, Eubacterium moniliforme
gttgtaaacttttgtcctat

SEQ ID NO: 20932 - DNA, 20 bp, Corynebacterium group F1
gacacgggttgagtaacacg

SEQ ID NO: 20933 - DNA, 20 bp, Leuconostoc pseudomesenteroides
catgatacgaagttaaaagg

SEQ ID NO: 20934 - DNA, 20 bp, Clostridium clostridiiforme
agcccgaaaggagaagcaga

SEQ ID NO: 20935 - DNA, 20 bp, Finegoldia magna
taccatagaagaaagctccg

SEQ ID NO: 20936 - DNA, 20 bp, Streptococcus equi
aacgcacagatgatacgtag

SEQ ID NO: 20937 - DNA, 20 bp, Vibrio hollisae
cggaattctggagagattca

SEQ ID NO: 20938 - DNA, 20 bp, Paenibacillus azotofixans
ttaagagtaactgcttaagg

SEQ ID NO: 20939 - DNA, 20 bp, Capnocytophaga sp.
cctaatggtatataggtgtg

SEQ ID NO: 20940 - DNA, 20 bp, Bacteroides capillosus
gagtttgcacaacgttggcg

SEQ ID NO: 20941 - DNA, 20 bp, Finegoldia magna
tagttaccagcgaataaatg

SEQ ID NO: 20942 - DNA, 20 bp, Paenibacillus lautus
gggaagaacgtctcttagag

SEQ ID NO: 20943 - DNA, 20 bp, Bacteroides capillosus
agtcaggtgtgaaaaccacg

SEQ ID NO: 20944 - DNA, 20 bp, Providencia alcalifaciens
caataatctctaaggagcaa

SEQ ID NO: 20945 - DNA, 20 bp, Brevibacillus centrosporus
tgtttcatggcaaaagcttg

SEQ ID NO: 20946 - DNA, 20 bp, Peptostreptococcus anaerobius
gtctgttttgatgcttgcat

SEQ ID NO: 20947 - DNA, 20 bp, Sporosarcina pasteurii
aagtataggagtaactgcct

SEQ ID NO: 20948 - DNA, 20 bp, Clostridium clostridiiforme
agacgaaactggagagcttg

SEQ ID NO: 20949 - DNA, 20 bp, Fusobacterium mortiferum
atcctcggggtgatggtggc

SEQ ID NO: 20950 - DNA, 20 bp, Gemella morbillorum
ctatcgctaccagatggacc

SEQ ID NO: 20951 - DNA, 20 bp, Myroides odoratimimus
tgcagagcttgaataatatg

SEQ ID NO: 20952 - DNA, 20 bp, Eubacterium moniliforme
tggtttagaggtaaaaggat

SEQ ID NO: 20953 - DNA, 20 bp, Clostridium clostridiiforme
agacttgtgtcctatcaggc

SEQ ID NO: 20954 - DNA, 20 bp, Eubacterium moniliforme
aaccccggggttgcacttga

SEQ ID NO: 20955 - DNA, 20 bp, Propionibacterium propionicus
caaggcatcttgtgggttgg

SEQ ID NO: 20956 - DNA, 20 bp, Prevotella melaninogenica
tccatagggctccaggaatg

SEQ ID NO: 20957 - DNA, 20 bp, Escherichia vulneris
gaagtaatgtctgggaaact

SEQ ID NO: 20958 - DNA, 20 bp, Paenibacillus alvei
cccttcttcggaacattcaa

SEQ ID NO: 20959 - DNA, 20 bp, Clostridium clostridiiforme
gcagagaggcaaacagaatt

SEQ ID NO: 20960 - DNA, 20 bp, Corynebacterium group ANF
agaagatgaaaggcggcgca

SEQ ID NO: 20961 - DNA, 20 bp, Bacteroides stercoris
caatgtcagcggccaagcga

SEQ ID NO: 20962 - DNA, 20 bp, Streptococcus sanguinis
ttcacactgtgaccggatct

SEQ ID NO: 20963 - DNA, 20 bp, Leptotrichia buccalis
ggagtattggagaggtggac

SEQ ID NO: 20964 - DNA, 30 bp, Streptococcus ferus
atggctcaaccatagtatgctttggaaact

SEQ ID NO: 20965 - DNA, 20 bp, Weissella paramesenteroides
aactgatctgacgagcttgc

SEQ ID NO: 20966 - DNA, 20 bp, Pseudomonas oryzihabitans
gggaggaagggcttacagcg

SEQ ID NO: 20967 - DNA, 20 bp, Capnocytophaga sp.
gactgacgtacttagagata

SEQ ID NO: 20968 - DNA, 20 bp, Anaerococcus prevotii
ggcagaactgtaatacaggt

SEQ ID NO: 20969 - DNA, 20 bp, Bacillus azotoformans
tctaaggagactgccgggac

SEQ ID NO: 20970 - DNA, 20 bp, Streptococcus macacae
gttgttaaggaagcaagttg

SEQ ID NO: 20971 - DNA, 20 bp, Corynebacterium hoagii
aggaggaacaccggtgggcg

SEQ ID NO: 20972 - DNA, 20 bp, Bacteroides stercoris
cccttgcgggtagttccatc

SEQ ID NO: 20973 - DNA, 20 bp, Myroides odoratimimus
aatatggaagtaactagaat

SEQ ID NO: 20974 - DNA, 20 bp, Staphylococcus epidermidis
acgctggcgtgcgtgcccta

SEQ ID NO: 20975 - DNA, 20 bp, Bacteroides capillosus
atgtgaccaagcgaaagcat

SEQ ID NO: 20976 - DNA, 20 bp, Paenibacillus apiarius
gagctgacggagtgcttgca

SEQ ID NO: 20977 - DNA, 20 bp, Bacteroides thetaiotaomicron
catcagtttggtttgcttgc

SEQ ID NO: 20978 - DNA, 20 bp, Unknown Organism
  oligonucleotide from CDC group EO-2
acacatgcaaggtcggaggc

SEQ ID NO: 20979 - DNA, 20 bp, Leuconostoc fallax
gacatcctttgaagatgtta

SEQ ID NO: 20980 - DNA, 20 bp, Streptococcus macacae
ctctctaagcctttagaggg

SEQ ID NO: 20981 - DNA, 20 bp, Helcococcus kunzii
tgacatatacaggaatatcc

SEQ ID NO: 20982 - DNA, 20 bp, Stenotrophomonas maltophilia
gggataactactggaaactt

SEQ ID NO: 20983 - DNA, 20 bp, Anaerococcus tetradius
gtctactgtattacaggtgg

SEQ ID NO: 20984 - DNA, 20 bp, Streptococcus ratti
agacgcttgaaagatgcaag

SEQ ID NO: 20985 - DNA, 20 bp, Citrobacter freundii
ataaccgcaacgattgacgt

SEQ ID NO: 20986 - DNA, 20 bp, Yersinia frederiksenii
cgaggaggaaggcatttcac

SEQ ID NO: 20987 - DNA, 20 bp, Bacillus azotoformans
atggacaaagggctgctaag

SEQ ID NO: 20988 - DNA, 20 bp, Propionibacterium propionicus
gaaagattttttttggttgg

SEQ ID NO: 20989 - DNA, 20 bp, Pantoea agglomerans
cacagcaggagcttggctcc

SEQ ID NO: 20990 - DNA, 20 bp, Staphylococcus schleiferi
tggggtgaaagtcgttacca

SEQ ID NO: 20991 - DNA, 20 bp, Peptoniphilus asaccharolyticus
gtcggagaatttcggtgccg

SEQ ID NO: 20992 - DNA, 20 bp, Dolosicoccus paucivorans
ctgtcggaaacgaccgctaa

SEQ ID NO: 20993 - DNA, 30 bp, Corynebacterium xerosis
gaagcgttatgtgacggtacctgtataaga

SEQ ID NO: 20994 - DNA, 20 bp, Dolosicoccus paucivorans
aataccgcataaatcaatga

SEQ ID NO: 20995 - DNA, 20 bp, Bacteroides capillosus
taggattaaaggtttagcgg

SEQ ID NO: 20996 - DNA, 20 bp, Lactococcus garvieae
cggtacaaggtagccgtatc

SEQ ID NO: 20997 - DNA, 20 bp, Corynebacterium coyleae
caccagatcggccccagaga

SEQ ID NO: 20998 - DNA, 20 bp, Enterobacter amnigenus
tgcaagtcgaagcgagtagc

SEQ ID NO: 20999 - DNA, 20 bp, Anaerococcus prevotii
agaagcctcggtggaagatt

SEQ ID NO: 21000 - DNA, 20 bp, Alloiococcus otitis
taccgcataggttttcccag

SEQ ID NO: 21001 - DNA, 20 bp, Anaerococcus prevotii
aagctatcatcaaagattta

SEQ ID NO: 21002 - DNA, 20 bp, Prevotella loescheii
tttggcggtgaaggatgggg

SEQ ID NO: 21003 - DNA, 20 bp, Paenibacillus lautus
gctaagagagtgacggtacc

SEQ ID NO: 21004 - DNA, 20 bp, Streptococcus equi
caagtggaacgcacagatga

SEQ ID NO: 21005 - DNA, 20 bp, Bacillus niacini
tcttgaggtgcttgcacctc

SEQ ID NO: 21006 - DNA, 20 bp, Propionibacterium propionicus
gttgtaaaccgctttcaatt

SEQ ID NO: 21007 - DNA, 20 bp, Prevotella bivia
atggcgcgggaatacgttcc

SEQ ID NO: 21008 - DNA, 20 bp, Alloiococcus otitis
accttcagagatgaagggtt

SEQ ID NO: 21009 - DNA, 20 bp, Haemophilus influenzae
ttaaagtgcgggaccttcag

SEQ ID NO: 21010 - DNA, 20 bp, Leuconostoc fallax
tgcaagtcgaacgctagtcg

SEQ ID NO: 21011 - DNA, 20 bp, Anaerobiospirillum succiniciproducens
tgggagcggatgcaccagaa

SEQ ID NO: 21012 - DNA, 20 bp, Campylobacter sputorum
tgcagtcgaacgatgaagtc

SEQ ID NO: 21013 - DNA, 20 bp, Dolosicoccus paucivorans
gagagaagaacagcgagtag

SEQ ID NO: 21014 - DNA, 20 bp, Brevibacillus centrosporus
atggcaaaagcttgaaagcc

SEQ ID NO: 21015 - DNA, 20 bp, Weissella paramesenteroides
actgatctgacgagcttgct

SEQ ID NO: 21016 - DNA, 20 bp, Anaerococcus tetradius
gagatagtttcttaagactt

SEQ ID NO: 21017 - DNA, 20 bp, Paenibacillus validus
aagtcgagcggccctttcct

SEQ ID NO: 21018 - DNA, 30 bp, Clostridium clostridiiforme
aggcaaacagaattcctggtgtagcggtga

SEQ ID NO: 21019 - DNA, 20 bp, Streptococcus acidominimus
actgcatggtaaacatttaa

SEQ ID NO: 21020 - DNA, 20 bp, Finegoldia magna
tccggggactctaagtagac

SEQ ID NO: 21021 - DNA, 20 bp, Corynebacterium afermentans
cttcaggtgttccgactttc

SEQ ID NO: 21022 - DNA, 20 bp, Paenibacillus lautus
tgggagaggaaagaaagacg

SEQ ID NO: 21023 - DNA, 20 bp, Vibrio harveyi
catgggtagtgggctgcata

SEQ ID NO: 21024 - DNA, 20 bp, Paenibacillus glucanolyticus
cggacttgaaggagtgcttg

SEQ ID NO: 21025 - DNA, 20 bp, Anaerococcus tetradius
tctggaataatctgggtgcc

SEQ ID NO: 21026 - DNA, 20 bp, Streptococcus infantarius
gtatcggaagggcgggtgga

SEQ ID NO: 21027 - DNA, 20 bp, Clostridium clostridiiforme
ggcgcgcagacgaaactgga

SEQ ID NO: 21028 - DNA, 20 bp, Brevibacterium casei
ttaaagccagtctcagtttt

SEQ ID NO: 21029 - DNA, 20 bp, Anaerococcus tetradius
acagggaagcgagactgcga

SEQ ID NO: 21030 - DNA, 20 bp, Myroides odoratimimus
tactgcagagcttgaataat

SEQ ID NO: 21031 - DNA, 20 bp, Vibrio mimicus
cggtagcgctaggtggaacc

SEQ ID NO: 21032 - DNA, 20 bp, Streptococcus urinalis
taggaacttaaaaggagcaa

SEQ ID NO: 21033 - DNA, 20 bp, Anaerococcus tetradius
aataatctgggagccgcagc

SEQ ID NO: 21034 - DNA, 20 bp, Eremococcus coleocola
ggctctgctatcactcaagg

SEQ ID NO: 21035 - DNA, 20 bp, Bacillus fusiformis
taatctcttttgcttcatgg

SEQ ID NO: 21036 - DNA, 20 bp, Dolosicoccus paucivorans
tgattcgcatgtttcattga

SEQ ID NO: 21037 - DNA, 20 bp, Eggerthella lenta
cggccgaacccgcaggggcg

SEQ ID NO: 21038 - DNA, 20 bp, Rhizobium radiobacter
aacaaggtacccgtagggaa

SEQ ID NO: 21039 - DNA, 20 bp, Corynebacterium coyleae
cccagagatgctggtttccc

SEQ ID NO: 21040 - DNA, 20 bp, Campylobacter curvus
atacctacggcgcaaccgaa

SEQ ID NO: 21041 - DNA, 20 bp, Streptococcus urinalis
tcatgtgcttgcacaagacc

SEQ ID NO: 21042 - DNA, 20 bp, Campylobacter curvus
gaaagtcgaaccctatatat

SEQ ID NO: 21043 - DNA, 30 bp, Unknown Organism
  oligonucleotide from CDC group EF-4B
ggttaatacccatgactgatgacggtacct

SEQ ID NO: 21044 - DNA, 20 bp, Streptococcus infantarius
cccatctcaggtcggctatg

SEQ ID NO: 21045 - DNA, 20 bp, Stenotrophomonas maltophilia
tgtgaacgctggcggctagg

SEQ ID NO: 21046 - DNA, 30 bp, Dolosicoccus paucivorans
gtaactgttactcgtttgacggtatctcac

SEQ ID NO: 21047 - DNA, 20 bp, Bacillus coagulans
ataccgaataacactttcgc

SEQ ID NO: 21048 - DNA, 20 bp, Staphylococcus cohnii
agggatgaacgctggtcggc

SEQ ID NO: 21049 - DNA, 20 bp, Finegoldia magna
atgtgggtgaaaggtataga

SEQ ID NO: 21050 - DNA, 20 bp, Brevibacillus centrosporus
ggttttgggctgtcgctata

SEQ ID NO: 21051 - DNA, 20 bp, Abiotrophia defectiva
gggatcacatgattccgtga

SEQ ID NO: 21052 - DNA, 20 bp, Paenibacillus azotofixans
ttgctcttgatcaacttagc

SEQ ID NO: 21053 - DNA, 20 bp, Streptococcus macacae
gcatgacagcttttatcgca

SEQ ID NO: 21054 - DNA, 20 bp, Paenibacillus macerans
gtcttgacatgcctctgacc

SEQ ID NO: 21055 - DNA, 20 bp, Citrobacter freundii
gtgaagtccgtaaaccaagg

SEQ ID NO: 21056 - DNA, 20 bp, Eubacterium moniliforme
ataagaccacgaaaccgcat

SEQ ID NO: 21057 - DNA, 20 bp, Weissella paramesenteroides
tttgtctttaactgatactg

SEQ ID NO: 21058 - DNA, 20 bp, Propionibacterium granulosum
catggatcgggagcttccag

SEQ ID NO: 21059 - DNA, 20 bp, Clostridium clostridiiforme
ggttcgagagacttatgttg

SEQ ID NO: 21060 - DNA, 20 bp, Eremococcus coleocola
tcgcctgatggttgattgaa

SEQ ID NO: 21061 - DNA, 20 bp, Clostridium clostridiiforme
gttcgagagacttatgttga

SEQ ID NO: 21062 - DNA, 20 bp, Microbacterium hominis
taagagtttttgtcatggct

SEQ ID NO: 21063 - DNA, 20 bp, Prevotella disiens
cttttgtttgggaataatcg

SEQ ID NO: 21064 - DNA, 20 bp, Pseudoramibacter alactolyticus
tcggggggatataagagaca

SEQ ID NO: 21065 - DNA, 20 bp, Streptococcus equi
aggtagccgttcggaaggcg

SEQ ID NO: 21066 - DNA, 20 bp, Clostridium clostridiiforme
gggacaaagtccttcggtgc

SEQ ID NO: 21067 - DNA, 20 bp, Microbacterium hominis
gcgcccgtcaagtcatgaag

SEQ ID NO: 21068 - DNA, 20 bp, Vibrio cholerae
tcggcggtatcgctgccctc

SEQ ID NO: 21069 - DNA, 20 bp, Eremococcus coleocola
gggattgacggtaactaatc

SEQ ID NO: 21070 - DNA, 20 bp, Bacillus fusiformis
ttttgcttcatggtgaaaga

SEQ ID NO: 21071 - DNA, 20 bp, Micrococcus luteus
ttgtggggggagccgcgagg

SEQ ID NO: 21072 - DNA, 20 bp, Facklamia hominis
acttgttcccggcaaagtta

SEQ ID NO: 21073 - DNA, 30 bp, Alloiococcus otitis
aaaataaaaggtggctctgctaccgcttat

SEQ ID NO: 21074 - DNA, 20 bp, Dolosicoccus paucivorans
gctcttgacatcggatgcat

SEQ ID NO: 21075 - DNA, 20 bp, Clostridium clostridiiforme
agctaatacctcataagccg

SEQ ID NO: 21076 - DNA, 20 bp, Clostridium clostridiiforme
tggagagcttgagaagcaga

SEQ ID NO: 21077 - DNA, 20 bp, Staphylococcus carnosus
gtgaagtcgtaacaaaatag

SEQ ID NO: 21078 - DNA, 20 bp, Finegoldia magna
gaacgggatttagtagacag

SEQ ID NO: 21079 - DNA, 20 bp, Moellerella wisconsensis
gttgatactaatactatcag

SEQ ID NO: 21080 - DNA, 20 bp, Actinomyces neuii
gatcaggtcagggaacgtgc

SEQ ID NO: 21081 - DNA, 20 bp, Peptoniphilus indolicus
gtgtcggaggatttcggtgc

SEQ ID NO: 21082 - DNA, 20 bp, Hafnia alvei
tcagatgtgaaatcccccga

SEQ ID NO: 21083 - DNA, 20 bp, Rothia mucilaginosa
aggcttgctaggtggattag

SEQ ID NO: 21084 - DNA, 20 bp, Streptococcus infantarius
atcggaagggcgggtggatc

SEQ ID NO: 21085 - DNA, 20 bp, Bacillus mycoides
ttttgcgctgcatggcgcga

SEQ ID NO: 21086 - DNA, 20 bp, Campylobacter curvus
caaatacctacggcgcaacc

SEQ ID NO: 21087 - DNA, 30 bp, Bacteroides stercoris
taccatcaggtcatgctggggactctatgg

SEQ ID NO: 21088 - DNA, 20 bp, Vibrio hollisae
ggagagattcagaagtgccc

SEQ ID NO: 21089 - DNA, 20 bp, Bacteroides stercoris
aggggcagcatcatcaaagc

SEQ ID NO: 21090 - DNA, 20 bp, Prevotella bivia
ggactaataccttatgtatt

SEQ ID NO: 21091 - DNA, 20 bp, Corynebacterium group ANF
gggtgaaggtagtggatcga

SEQ ID NO: 21092 - DNA, 20 bp, Streptococcus macacae
gagcttgctccacgagatcg

SEQ ID NO: 21093 - DNA, 20 bp, Oligella urethralis
ctcttgaagcttccgggcat

SEQ ID NO: 21094 - DNA, 30 bp, Bacteroides merdae
cgaaagtcggattaataccccataaaacag

SEQ ID NO: 21095 - DNA, 30 bp, Bacillus azotoformans
acaaagggctgctaagccgcgaggcttgag

SEQ ID NO: 21096 - DNA, 20 bp, Finegoldia magna
tagaaacacatgttttaacg

SEQ ID NO: 21097 - DNA, 20 bp, Prevotella melaninogenica
ctccaggaatgaacgctaga

SEQ ID NO: 21098 - DNA, 20 bp, Globicatella sanguinis
accataactagaacttgttc

SEQ ID NO: 21099 - DNA, 20 bp, Oligella ureolytica
tatcaagctagagtatgtca

SEQ ID NO: 21100 - DNA, 20 bp, Prevotella loescheii
cgaaaggtttggcggtgaag

SEQ ID NO: 21101 - DNA, 20 bp, Brevibacillus brevis
gggacagatgataggggaga

SEQ ID NO: 21102 - DNA, 20 bp, Bacteroides ovatus
atcgcatgatatttttatta

SEQ ID NO: 21103 - DNA, 20 bp, Pasteurella pneumotropica
tttaactctgacgcccgtag

SEQ ID NO: 21104 - DNA, 20 bp, Myroides odoratimimus
cgtattgataataaagattt

SEQ ID NO: 21105 - DNA, 20 bp, Clostridium clostridiiforme
gacgggtgagtaaagcacaa

SEQ ID NO: 21106 - DNA, 20 bp, Erysipelothrix rhusiopathiae
gattggggttaagtcgtaca

SEQ ID NO: 21107 - DNA, 20 bp, Paenibacillus azotofixans
gagcggagttgtagagggag

SEQ ID NO: 21108 - DNA, 20 bp, Bacteroides capilosus
atcagggacgaaataaatga

SEQ ID NO: 21109 - DNA, 20 bp, Bacteroides ovatus
taactccggaatagcctttc

SEQ ID NO: 21110 - DNA, 20 bp, Pediococcus inopinatus
cgttgaatgatttagagatg

SEQ ID NO: 21111 - DNA, 20 bp, Propionibacterium granulosum
atcgggagcttccagagatg

SEQ ID NO: 21112 - DNA, 20 bp, Paenibacillus amylolyticus
ttgatgaggtgcttgcatcc

SEQ ID NO: 21113 - DNA, 20 bp, Clostridium clostridiiforme
caaacagaattcctggtgta

SEQ ID NO: 21114 - DNA, 20 bp, Bacteroides thetaiotaomicron
cgcaaggagcgtctagggta

SEQ ID NO: 21115 - DNA, 20 bp, Brevibacillus brevis
cgcatcggaagggcgcgtgg

SEQ ID NO: 21116 - DNA, 20 bp, Bacillus schlegellii
acccatccgtgccggagttc

SEQ ID NO: 21117 - DNA, 20 bp, Gemella morbillorum
taatcccgcatatcagctag

SEQ ID NO: 21118 - DNA, 20 bp, Bacteroides merdae
ttacttgagtgtgtttgagg

SEQ ID NO: 21119 - DNA, 20 bp, Peptoniphilus asaccharolyticus
gagctagtgatagtaagcga

SEQ ID NO: 21120 - DNA, 20 bp, Eremococcus coleocola
ttctcttcggagcatagaga

SEQ ID NO: 21121 - DNA, 20 bp, Citrobacter amalonaticus
tgaatggttaataaccattt

SEQ ID NO: 21122 - DNA, 20 bp, Bacillus licheniformis
gggttatatccggaaggttg

SEQ ID NO: 21123 - DNA, 20 bp, Bacteroides stercoris
actggtatccttgagtgcag

SEQ ID NO: 21124 - DNA, 20 bp, Neisseria subflava
gtcgtaacaaggcagcccga

SEQ ID NO: 21125 - DNA, 30 bp, Cedecea davisae
cggtaacagggagtagcttgctactccgct

SEQ ID NO: 21126 - DNA, 20 bp, Propionibacterium granulosum
agcttccagagatggttgtg

SEQ ID NO: 21127 - DNA, 20 bp, Bacteroides thetaiotaomicron
ttggtttgcttgcaaaccaa

SEQ ID NO: 21128 - DNA, 20 bp, Streptococcus infantarius
gttcgcaatcttccaacttt

SEQ ID NO: 21129 - DNA, 20 bp, Clostridium subterminale
taatgtatgagaatcgcatg

SEQ ID NO: 21130 - DNA, 20 bp, Propionibacterium granulosum
ttgacatggatcgggagctt

SEQ ID NO: 21131 - DNA, 30 bp, Weissella paramesenteroides
gctttgtctttaactgatctgacgagcttg

SEQ ID NO: 21132 - DNA, 20 bp, Sphingobacterium multivorum
aaaccgataattggggctaa

SEQ ID NO: 21133 - DNA, 20 bp, Anaerococcus tetradius
ttcttggaataatctgggag

SEQ ID NO: 21134 - DNA, 20 bp, Staphylococcus schleiferi
tatcggaaagtgccggtgga

SEQ ID NO: 21135 - DNA, 20 bp, Sporosarcina ureae
tacaggagtaactgcctgta

SEQ ID NO: 21136 - DNA, 20 bp, Brevibacillus centrosporus
gaatattttcttttgtttca

SEQ ID NO: 21137 - DNA, 20 bp, Anaerococcus tetradius
tcttgacataatacggaggg

SEQ ID NO: 21138 - DNA, 20 bp, Kingella kingae
ggcagcacgagtacttgtac

SEQ ID NO: 21139 - DNA, 20 bp, Eubacterium moniliforme
ttcattcgatgcaggatgag

SEQ ID NO: 21140 - DNA, 20 bp, Pediococcus inopinatus
tcgttgaatgatttagagat

SEQ ID NO: 21141 - DNA, 20 bp, Streptococcus gallolyticus
acaaaaaacccgtatcggaa

SEQ ID NO: 21142 - DNA, 20 bp, Facklamia sourekii
gagcgcaggcagtttgttaa

SEQ ID NO: 21143 - DNA, 20 bp, Anaerococcus tetradius
atggtagactaaccaaagat

SEQ ID NO: 21144 - DNA, 20 bp, Gemella morbillorum
taaggagagcttcttctctg

SEQ ID NO: 21145 - DNA, 20 bp, Bacillus alcalophilus
accttgacggacctaaccag

SEQ ID NO: 21146 - DNA, 20 bp, Capnocytophaga ochracea
caaatcatcgcggcccttac

SEQ ID NO: 21147 - DNA, 20 bp, Sphingobacterium multivorum
catcggttggatattaaata

SEQ ID NO: 21148 - DNA, 20 bp, Shigella boydii
cgaatcagcaagctgattcc

SEQ ID NO: 21149 - DNA, 20 bp, Staphylococcus schleiferi
ttgactgccgggacaaaccg

SEQ ID NO: 21150 - DNA, 20 bp, Sporosarcina pasteurii
ccatcctgcagtgacagcat

SEQ ID NO: 21151 - DNA, 20 bp, Bacillus laevolacticus
tacagagattgaccttgccc

SEQ ID NO: 21152 - DNA, 20 bp, Leclercia adecarboxylata
atcaccttccctttttccat

SEQ ID NO: 21153 - DNA, 20 bp, Leptotrichia buccalis
ggtacagagagctgcaaggc

SEQ ID NO: 21154 - DNA, 20 bp, Pantoea agglomerans
agtcgggcggtagcacagca

SEQ ID NO: 21155 - DNA, 20 bp, Arcanobacterium pyogenes
ctttcagtacagaagaagca

SEQ ID NO: 21156 - DNA, 20 bp, Yersinia frederiksenii
aggcatttcacttaatacgt

SEQ ID NO: 21157 - DNA, 20 bp, Paenibacillus larvae
agagacagaccttttccttc

SEQ ID NO: 21158 - DNA, 20 bp, Enterococcus dispar
tgtctggcgtgcctaataca

SEQ ID NO: 21159 - DNA, 20 bp, Proteus vulgaris
gtgagtaatggctcacctag

SEQ ID NO: 21160 - DNA, 20 bp, Staphylococcus auricularis
cgtgggtaacttacctataa

SEQ ID NO: 21161 - DNA, 20 bp, Finegoldia magna
cgaataaatgtccggggact

SEQ ID NO: 21162 - DNA, 20 bp, Clostridium clostridiiforme
agagagggacacctgcggga

SEQ ID NO: 21163 - DNA, 20 bp, Propionibacterium avidum
tgttaggcggctagccagta

SEQ ID NO: 21164 - DNA, 20 bp, Bacteroides capilosus
atgcagctgagtcgcatgac

SEQ ID NO: 21165 - DNA, 20 bp, Bacillus schlegellii
acatcccgccgacgggtcca

SEQ ID NO: 21166 - DNA, 20 bp, Citrobacter amalonaticus
ggaagggtgaatggttaata

SEQ ID NO: 21167 - DNA, 20 bp, Streptococcus cristatus
gtcaattaaaaggtgcaatt

SEQ ID NO: 21168 - DNA, 30 bp, Streptococcus equi
gctacaattatctgtgagtcgcgaacgggt

SEQ ID NO: 21169 - DNA, 20 bp, Abiotrophia defectiva
atgggatcacatgattccgt

SEQ ID NO: 21170 - DNA, 20 bp, Actinomyces radingae
cgtggcctttgtggttgtgt

SEQ ID NO: 21171 - DNA, 20 bp, Neisseria mucosa
gatccatgggctcagattga

SEQ ID NO: 21172 - DNA, 20 bp, Dolosicoccus paucivorans
agcaacgtcgcgagaccaag

SEQ ID NO: 21173 - DNA, 20 bp, Kocuria varians
gaaggctgggactggcgatc

SEQ ID NO: 21174 - DNA, 20 bp, Microbacterium hominis
acaccagcaggcggtggccc

SEQ ID NO: 21175 - DNA, 20 bp, Citrobacter freundii
aacaaggtaaccccgtaggg

SEQ ID NO: 21176 - DNA, 30 bp, Eubacterium moniliforme
aagaccggggctcaaccccggggttgcact

SEQ ID NO: 21177 - DNA, 20 bp, Staphylococcus schleiferi
tggtatgcccgtatcggaaa

SEQ ID NO: 21178 - DNA, 20 bp, Microbacterium hominis
ggtctggtacacgcgcgccc

SEQ ID NO: 21179 - DNA, 20 bp, Haemophilus paraphrophilus
agtgaatctcggaaagtacg

SEQ ID NO: 21180 - DNA, 20 bp, Clostridium clostridiiforme
ggggacaaagtccttcggtg

SEQ ID NO: 21181 - DNA, 20 bp, Eubacterium moniliforme
acttttgtcctatgggacga

SEQ ID NO: 21182 - DNA, 20 bp, Streptococcus iniae
aagttaaaaggagcaaaagc

SEQ ID NO: 21183 - DNA, 20 bp, Clostridium innocuum
gaacgaagtttcaaggaagc

SEQ ID NO: 21184 - DNA, 20 bp, Stenotrophomonas maltophilia
gccgtatcggcaaggtgcgg

SEQ ID NO: 21185 - DNA, 20 bp, Leptotrichia buccalis
cgcatgtcaggctgatgaaa

SEQ ID NO: 21186 - DNA, 20 bp, Bacteroides ovatus
catacgaatatcgcatgata

SEQ ID NO: 21187 - DNA, 20 bp, Bacteroides stercoris
gggcagcatcatcaaagctt

SEQ ID NO: 21188 - DNA, 20 bp, Sporosarcina ureae
tccgggaacccggggttatt

SEQ ID NO: 21189 - DNA, 20 bp, Vibrio vulnificus
gggaggacgccaccactttg

SEQ ID NO: 21190 - DNA, 20 bp, Staphylococcus schleiferi
tatgcccgtatcggaaagtg

SEQ ID NO: 21191 - DNA, 20 bp, Leptotrichia buccalis
ggatgaacgctgacatgtaa

SEQ ID NO: 21192 - DNA, 30 bp, Vibrio harveyi
gagttccggatcggagtctgcaactcgact

SEQ ID NO: 21193 - DNA, 20 bp, Raoultella terrigena
cgctgttgtgtaggcctaac

SEQ ID NO: 21194 - DNA, 20 bp, Sporosarcina ureae
catgagggaatgttgaaagc

SEQ ID NO: 21195 - DNA, 20 bp, Bacteroides thetaiotaomicron
ggaaacccataggccgtaag

SEQ ID NO: 21196 - DNA, 30 bp, Alloiococcus otitis
tagcctcgcggcgcattagctagttggtag

SEQ ID NO: 21197 - DNA, 20 bp, Anaerococcus prevotii
tagcctcgcatgaagctatc

SEQ ID NO: 21198 - DNA, 20 bp, Campylobacter concisus
gtcgtaacagggagccgacc

SEQ ID NO: 21199 - DNA, 20 bp, Campylobacter curvus
tcaaatacctacggcgcaac

SEQ ID NO: 21200 - DNA, 20 bp, Brevibacillus brevis
atgataggggagaagtcgta

SEQ ID NO: 21201 - DNA, 20 bp, Actinomyces radingae
ggcggcgtgacttaacacat

SEQ ID NO: 21202 - DNA, 20 bp, Paenibacillus macerans
cttcgggagacaggggacac

SEQ ID NO: 21203 - DNA, 30 bp, Pasteurella multocida
ctgaggagtaaagggtgggacctcttggcc

SEQ ID NO: 21204 - DNA, 20 bp, Bacteroides merdae
gatttgtagcaatacagatt

SEQ ID NO: 21205 - DNA, 20 bp, Finegoldia magna
tttatcggtcatagatgggc

SEQ ID NO: 21206 - DNA, 20 bp, Bacteroides fragilis
ccgtaccggaggtgcggttg

SEQ ID NO: 21207 - DNA, 20 bp, Pseudomonas mendocina
taggttacatgctcttcctc

SEQ ID NO: 21208 - DNA, 20 bp, Bacillus schlegellii
gctcgtaacagggtatccgt

SEQ ID NO: 21209 - DNA, 20 bp, Bacteroides stercoris
ttttcccgcatgggatgatt

SEQ ID NO: 21210 - DNA, 20 bp, Enterobacter gergoviae
tacgcgttaaggtagccagc

SEQ ID NO: 21211 - DNA, 20 bp, Facklamia hominis
cctaactttatgagggagcc

SEQ ID NO: 21212 - DNA, 20 bp, Sporosarcina pasteurii
gcttcggctgtctctgcagg

SEQ ID NO: 21213 - DNA, 20 bp, Vibrio hollisae
tctggagagattcagaagtg

SEQ ID NO: 21214 - DNA, 20 bp, Pediococcus parvulus
aacaaaattaaccgcatggt

SEQ ID NO: 21215 - DNA, 20 bp, Leuconostoc carnosum
aatgaccttagcctgacggt

SEQ ID NO: 21216 - DNA, 20 bp, Citrobacter freundii
ggatgccagccacactggaa

SEQ ID NO: 21217 - DNA, 20 bp, Actinomyces neuii
gtgatcaggtcagggaacgt

SEQ ID NO: 21218 - DNA, 20 bp, Clostridium subterminale
atgatttttgtaccaaagga

SEQ ID NO: 21219 - DNA, 20 bp, Bacteroides capillosus
ggagggttgcttgcaacctt

SEQ ID NO: 21220 - DNA, 20 bp, Delftia acidovorans
ggcgcttacccggcggggtt

SEQ ID NO: 21221 - DNA, 20 bp, Pediococcus dextrinicus
caaggagatttaaaagtaaa

SEQ ID NO: 21222 - DNA, 20 bp, Clostridium clostridiiforme
taacgcggcctttccttcgg

SEQ ID NO: 21223 - DNA, 20 bp, Prevotella loescheii
tgcggtggataactgcttca

SEQ ID NO: 21224 - DNA, 20 bp, Leuconostoc gelidum
aggagatggatccgcggtgc

SEQ ID NO: 21225 - DNA, 20 bp, Serratia rubidaea
cggcattacattgacgttac

SEQ ID NO: 21226 - DNA, 20 bp, Bacteroides stercoris
atactggtatccttgagtgc

SEQ ID NO: 21227 - DNA, 20 bp, Oligella urethralis
tgaagcttccgggcatgtca

SEQ ID NO: 21228 - DNA, 20 bp, Streptococcus macacae
aaggtacaacagtatcgcta

SEQ ID NO: 21229 - DNA, 20 bp, Capnocytophaga sp.
caagtcgagcactctagtgg

SEQ ID NO: 21230 - DNA, 20 bp, Psychrobacter phenylpyruvicus
gagacaatactaaaaggcgg

SEQ ID NO: 21231 - DNA, 20 bp, Eubacterium moniliforme
acatcctctgacgcatatag

SEQ ID NO: 21232 - DNA, 20 bp, Bacillus coagulans
aataacactttcgctcgcat

SEQ ID NO: 21233 - DNA, 20 bp, Porphyromonas endodontalis
tcgaggggcagcattatttt

SEQ ID NO: 21234 - DNA, 20 bp, Neisseria elongata
gaacgtaccgggtaatgggg

SEQ ID NO: 21235 - DNA, 20 bp, Leuconostoc pseudomesenteroides
atgatacgaagttaaaaggc

SEQ ID NO: 21236 - DNA, 20 bp, Shewanella putrefaciens
gtgggtagctaaccttcggg

SEQ ID NO: 21237 - DNA, 20 bp, Serratia proteamaculans
atagcgcatcacattgacgt

SEQ ID NO: 21238 - DNA, 20 bp, Proteus vulgaris
gagtaatggctcacctagca

SEQ ID NO: 21239 - DNA, 30 bp, Clostridium clostridiiforme
gtagtcctggcagtaaacgatgtatgctgg

SEQ ID NO: 21240 - DNA, 20 bp, Helcococcus kunzii
cggaatgaaacggaaaaagg

SEQ ID NO: 21241 - DNA, 20 bp, Dolosigranulum pigrum
aggtagccgttcggaaggtg

SEQ ID NO: 21242 - DNA, 20 bp, Citrobacter freundii
agcagagatgctaacgtgcc

SEQ ID NO: 21243 - DNA, 20 bp, Paenibacillus azotofixans
tcgagcggagttgtagaggg

SEQ ID NO: 21244 - DNA, 20 bp, Fusobacterium mortiferum
cttttgtgccccttcggggg

SEQ ID NO: 21245 - DNA, 20 bp, Clostridium clostridiiforme
acacctgcgggaaaccggag

SEQ ID NO: 21246 - DNA, 20 bp, Fusobacterium necrogenes
tttgacatcctaggaagttg

SEQ ID NO: 21247 - DNA, 20 bp, Stenotrophomonas maltophilia
gagcagcaagcggaaaccca

SEQ ID NO: 21248 - DNA, 20 bp, Paenibacillus azotofixans
tggagcttgctcttgatcaa

SEQ ID NO: 21249 - DNA, 20 bp, Leptotrichia buccalis
catctaggcggccctgtaag

SEQ ID NO: 21250 - DNA, 20 bp, Streptococcus sanguinis
ctgtgaccggatcttaccag

SEQ ID NO: 21251 - DNA, 20 bp, Clostridium clostridiiforme
ttgccggttgctaccagata

SEQ ID NO: 21252 - DNA, 20 bp, Anaerococcus tetradius
ttcttcggaagactgtaata

SEQ ID NO: 21253 - DNA, 20 bp, Prevotella buccae
ctagggcaaaaccgggattg

SEQ ID NO: 21254 - DNA, 20 bp, Corynebacterium falsenii
tgttgtggtgacggtacctg

SEQ ID NO: 21255 - DNA, 30 bp, Prevotella corporis
ccgccgctaacgtcagaggagcaagctctg

SEQ ID NO: 21256 - DNA, 20 bp, Leptotrichia buccalis
cctgcgtatgcccgtgagag

SEQ ID NO: 21257 - DNA, 20 bp, Providencia alcalifaciens
ggcggggtgagtaatgtatg

SEQ ID NO: 21258 - DNA, 20 bp, Suttonella indologenes
ttgaacgctggcgggcccaa

SEQ ID NO: 21259 - DNA, 20 bp, Bacteroides thetaiotaomicron
gagcgtctagggtaagattg

SEQ ID NO: 21260 - DNA, 20 bp, Bacillus laevolacticus
acgctggccggcgtgcccta

SEQ ID NO: 21261 - DNA, 20 bp, Leuconostoc fallax
tcctttgaagatgttagaga

SEQ ID NO: 21262 - DNA, 20 bp, Gemella morbillorum
tgcgcacgggtgagcacgcg

SEQ ID NO: 21263 - DNA, 20 bp, Dolosicoccus paucivorans
gataactgtcggaaacgacc

SEQ ID NO: 21264 - DNA, 20 bp, Prevotella intermedia
gggacggtgcgatgcaaata

SEQ ID NO: 21265 - DNA, 20 bp, Haemophilus paraphrophilus
gaggtgttggatccatggct

SEQ ID NO: 21266 - DNA, 20 bp, Geobacillus thermoglucosidasius
cggaccgaacggaagcttgc

SEQ ID NO: 21267 - DNA, 20 bp, Streptococcus macacae
taagagcggaaagtttacac

SEQ ID NO: 21268 - DNA, 20 bp, Campylobacter curvus
tatatagggtttctcgctat

SEQ ID NO: 21269 - DNA, 20 bp, Streptococcus urinalis
ttgttagagaagaatggaag

SEQ ID NO: 21270 - DNA, 20 bp, Bacteroides capilosus
gcaagtcagggtgtgaaaac

SEQ ID NO: 21271 - DNA, 20 bp, Neisseria subflava
gaatacgttcccgggtctgt

SEQ ID NO: 21272 - DNA, 30 bp, Bacteroides ovatus
aacagaatatattggaaacagtatagccgt

SEQ ID NO: 21273 - DNA, 20 bp, Bacteroides capillosus
cctacggaggtgctgcatgg

SEQ ID NO: 21274 - DNA, 20 bp, Eremococcus coleocola
tattagccaagaacacccct

SEQ ID NO: 21275 - DNA, 20 bp, Helcococcus kunzii
ggaatgaaacggaaaaagga

SEQ ID NO: 21276 - DNA, 20 bp, Bacillus schlegellii
tcgtacaaggtaccgtaccg

SEQ ID NO: 21277 - DNA, 20 bp, Bacteroides merdae
cgaggggcagcatgatttgt

SEQ ID NO: 21278 - DNA, 20 bp, Streptococcus macacae
cgagatcggtgagtcgcgaa

SEQ ID NO: 21279 - DNA, 20 bp, Bacillus niacini
acctcttggttagcggcgga

SEQ ID NO: 21280 - DNA, 20 bp, Prevotella bivia
ctaataccttatgtattcgt

SEQ ID NO: 21281 - DNA, 20 bp, Campylobacter curvus
tgtgctttaggtgggtcaag

SEQ ID NO: 21282 - DNA, 20 bp, Anaerococcus tetradius
tagactaaccaaagatttat

SEQ ID NO: 21283 - DNA, 20 bp, Bacillus licheniformis
gtagagctgtgggttactct

SEQ ID NO: 21284 - DNA, 20 bp, Finegoldia magna
gctcaaccccgtaaagcatt

SEQ ID NO: 21285 - DNA, 20 bp, Sphingomonas paucimobilis
ttggcatttgggtggcgcag

SEQ ID NO: 21286 - DNA, 20 bp, Sphingomonas paucimobilis
tgtccgggtgcttggcattt

SEQ ID NO: 21287 - DNA, 30 bp, Arcanobacterium haemolyticum
ctgcccctttctcttgggataagccttgga

SEQ ID NO: 21288 - DNA, 30 bp, Bacteroides merdae
gaggaaccttacccgggtttgaacgtagtc

SEQ ID NO: 21289 - DNA, 20 bp, Streptococcus macacae
gatttcacgggagcttgctc

SEQ ID NO: 21290 - DNA, 20 bp, Streptococcus sobrinus
gaagcaacggcttcactatc

SEQ ID NO: 21291 - DNA, 20 bp, Streptococcus criceti
ataatagtgattaactcatg

SEQ ID NO: 21292 - DNA, 20 bp, Peptoniphilus indolicus
tgtcggaggatttcggtgcc

SEQ ID NO: 21293 - DNA, 20 bp, Enterococcus faecium
cggtgaggtacccttttgga

SEQ ID NO: 21294 - DNA, 20 bp, Bacteroides stercoris
ccgcatgggatgattattaa

SEQ ID NO: 21295 - DNA, 20 bp, Anaerococcus prevotii
atgaagcttaaatgatctct

SEQ ID NO: 21296 - DNA, 30 bp, Bacteroides stercoris
tgggtttaaagggagcgtaggcggggtatt

SEQ ID NO: 21297 - DNA, 20 bp, Salmonella typhi
tcacatgcaagtcgcgacgg

SEQ ID NO: 21298 - DNA, 20 bp, Leptotrichia buccalis
gataaaacctggtgttgtca

SEQ ID NO: 21299 - DNA, 20 bp, Anaerococcus tetradius
agagcttatcaaagatttat

SEQ ID NO: 21300 - DNA, 20 bp, Paenibacillus alvei
catctgaatgcaaactctag

SEQ ID NO: 21301 - DNA, 20 bp, Bacillus schlegellii
gcgggcggaagccttcgggc

SEQ ID NO: 21302 - DNA, 30 bp, Paenibacillus alvei
gagcggagttgatgaagtgcttgcacttct

SEQ ID NO: 21303 - DNA, 20 bp, Oligella urethralis
tcttgaagcttccgggcatg

SEQ ID NO: 21304 - DNA, 20 bp, Bacillus schlegellii
cgctttaggaggggcctgcg

SEQ ID NO: 21305 - DNA, 20 bp, Bacillus licheniformis
cggggaaccccggggttata

SEQ ID NO: 21306 - DNA, 20 bp, Propionibacterium propionicus
gtgcctttttggtcggttta

SEQ ID NO: 21307 - DNA, 30 bp, Paenibacillus azotofixans
agataggcgcggccttcgggacagaggaga

SEQ ID NO: 21308 - DNA, 20 bp, Oligella ureolytica
ctcagattgacacgctagcg

SEQ ID NO: 21309 - DNA, 20 bp, Dolosicoccus paucivorans
cgcataaatcaatgattcgc

SEQ ID NO: 21310 - DNA, 20 bp, Burkholderia cepacia
tgccacctggtggcgagtgg

SEQ ID NO: 21311 - DNA, 30 bp, Paenibacillus pabuli
agcggagttgagagaaagcttgcttttctt

SEQ ID NO: 21312 - DNA, 20 bp, Anaerococcus tetradius
acacagggaagcgagactgc

SEQ ID NO: 21313 - DNA, 20 bp, Bacillus schlegellii
cgtgcagcgctgaaggcgaa

SEQ ID NO: 21314 - DNA, 30 bp, Brevibacterium linens
agccctggtgcttgcaccggggtggatgag

SEQ ID NO: 21315 - DNA, 20 bp, Finegoldia magna
cctctctttatgagacatcc

SEQ ID NO: 21316 - DNA, 20 bp, Actinomyces radingae
ggcctttgtggttgtgtggt

SEQ ID NO: 21317 - DNA, 20 bp, Propionibacterium granulosum
acatggatcgggagcttcca

SEQ ID NO: 21318 - DNA, 30 bp, Atopobium parvulum
gagaaagctccggcggagagggatgggccc

SEQ ID NO: 21319 - DNA, 20 bp, Pseudomonas stutzeri
gatgaagggggcttgctccc

SEQ ID NO: 21320 - DNA, 20 bp, Streptococcus equi
tgctacaattatctgtgagt

SEQ ID NO: 21321 - DNA, 20 bp, Finegoldia magna
taccgcataaaatcgtagaa

SEQ ID NO: 21322 - DNA, 20 bp, Bacteroides stercoris
cgcatggaataactattaaa

SEQ ID NO: 21323 - DNA, 20 bp, Morganella morganii
gggaggaaggtggcaaggtt

SEQ ID NO: 21324 - DNA, 20 bp, Clostridium clostridiiforme
ggatggttcgagagacttat

SEQ ID NO: 21325 - DNA, 20 bp, Leuconostoc gelidum
ctctaaaaggcgctacggcg

SEQ ID NO: 21326 - DNA, 20 bp, Campylobacter concisus
aagggagctgcgaaggtggg

SEQ ID NO: 21327 - DNA, 20 bp, Paenibacillus alvei
gcttgcacttctgagactta

SEQ ID NO: 21328 - DNA, 20 bp, Granulicatella elegans
cagagaaggaaaagaggctt

SEQ ID NO: 21329 - DNA, 20 bp, Campylobacter sputorum
taataaagcgaaaaaaaagc

SEQ ID NO: 21330 - DNA, 20 bp, Streptococcus infantarius
catcccatctcaggtcggct

SEQ ID NO: 21331 - DNA, 20 bp, Collinsella aerofaciens
agtcgccggcccaaccgtca

SEQ ID NO: 21332 - DNA, 20 bp, Clostridium clostridiiforme
aggcggtttgctggctgcat

SEQ ID NO: 21333 - DNA, 20 bp, Streptococcus criceti
caatggcaccactatcagat

SEQ ID NO: 21334 - DNA, 20 bp, Empedobacter brevis
tggcaacaagatgcgaatct

SEQ ID NO: 21335 - DNA, 30 bp, Morganella morganii
acatgcaagtcgggcggtaacagggagaag

SEQ ID NO: 21336 - DNA, 20 bp, Eubacterium moniliforme
ctctttgggaagccctcggg

SEQ ID NO: 21337 - DNA, 20 bp, Vibrio parahaemolyticus
cgagttatcagaaccttcgg

SEQ ID NO: 21338 - DNA, 20 bp, Myroides odoratimimus
atactgcagagcttgaatag

SEQ ID NO: 21339 - DNA, 30 bp, Providencia alcalifaciens
gcttgcttctcgctgacgaccggcggcggg

SEQ ID NO: 21340 - DNA, 20 bp, Sporosarcina pasteurii
aaggaagaaacaagtttctt

SEQ ID NO: 21341 - DNA, 20 bp, Anaerococcus tetradius
taatctgggagccgcagcta

SEQ ID NO: 21342 - DNA, 30 bp, Capnocytophaga sp.
actgacgtacttagagataggtatttcttc

SEQ ID NO: 21343 - DNA, 20 bp, Globicatella sanguinis
cataactagaacttgttctg

SEQ ID NO: 21344 - DNA, 20 bp, Proteus vulgaris
actactggaaacggggctaa

SEQ ID NO: 21345 - DNA, 20 bp, Bacteroides merdae
gttaaagattcatcgctgat

SEQ ID NO: 21346 - DNA, 20 bp, Oligella urethralis
caatctcttgaagcttccgg

SEQ ID NO: 21347 - DNA, 20 bp, Bacteroides thetaiotaomicron
cccgcccgtcaagccatgat

SEQ ID NO: 21348 - DNA, 20 bp, Pantoea agglomerans
cagcaggagcttggctcctt

SEQ ID NO: 21349 - DNA, 20 bp, Bacillus coagulans
cggatgttaaaagacggttt

SEQ ID NO: 21350 - DNA, 20 bp, Campylobacter curvus
ctatatattgtttatttatc

SEQ ID NO: 21351 - DNA, 30 bp, Prevotella oralis
taaacgatggatgcccgctgtcggcctttt

SEQ ID NO: 21352 - DNA, 20 bp, Anaerococcus prevotii
ctatcatcaaagatttatcg

SEQ ID NO: 21353 - DNA, 30 bp, Bacteroides capillosus
gcgtgaggaacctgcctcggagtggggaat

SEQ ID NO: 21354 - DNA, 20 bp, Pseudomonas oryzihabitans
ttacagcgaatacctgtgag

SEQ ID NO: 21355 - DNA, 20 bp, Bacteroides merdae
cgatacaatgtaagctctac

SEQ ID NO: 21356 - DNA, 20 bp, Bacillus schlegellii
ggcgaaggcagcgcactggc

SEQ ID NO: 21357 - DNA, 20 bp, Lactococcus raffinolactis
gtaccaaatggtacactgag

SEQ ID NO: 21358 - DNA, 20 bp, Dolosicoccus paucivorans
accgcataaatcaatgattc

SEQ ID NO: 21359 - DNA, 20 bp, Shigella boydii
gtcagcgaatcagcaagctg

SEQ ID NO: 21360 - DNA, 20 bp, Clostridium subterminale
tcgcatgatttttgtaccaa

SEQ ID NO: 21361 - DNA, 20 bp, Bacteroides thetaiotaomicron
tggcgcggtgaatagttccc

SEQ ID NO: 21362 - DNA, 20 bp, Neisseria subflava
cgagtccggattgcactctg

SEQ ID NO: 21363 - DNA, 20 bp, Eremococcus coleocola
ataacagcaatcatcgcctg

SEQ ID NO: 21364 - DNA, 20 bp, Bacteroides stercoris
ttgaattgcaactgactgag

SEQ ID NO: 21365 - DNA, 20 bp, Escherichia hermannii
tggacaactgtggtgacgac

SEQ ID NO: 21366 - DNA, 20 bp, Bacteroides stercoris
ggatgattattaaagaattt

SEQ ID NO: 21367 - DNA, 20 bp, Delftia acidovorans
gcaaggagggcgcttacccg

SEQ ID NO: 21368 - DNA, 20 bp, Microbacterium hominis
agtttttgtcatggctcagg

SEQ ID NO: 21369 - DNA, 20 bp, Bacteroides merdae
agcaatacagattgatggcg

SEQ ID NO: 21370 - DNA, 20 bp, Eremococcus coleocola
agtagtaactggctagggat

SEQ ID NO: 21371 - DNA, 20 bp, Streptococcus macacae
taaggaagcaagttggagag

SEQ ID NO: 21372 - DNA, 20 bp, Bacteroides ureolyticus
cagtggaatcagtaactggg

SEQ ID NO: 21373 - DNA, 20 bp, Finegoldia magna
agcaacctgcctatgacagt

SEQ ID NO: 21374 - DNA, 20 bp, Fusobacterium nucleatum
ggcatcctaggattatgaaa

SEQ ID NO: 21375 - DNA, 20 bp, Serratia grimesii
cacatcacattgacgttact

SEQ ID NO: 21376 - DNA, 20 bp, Globicatella sanguinis
tggcctaaccaataggaggg

SEQ ID NO: 21377 - DNA, 20 bp, Microbacterium hominis
gtaagagtttttgtcatggc

SEQ ID NO: 21378 - DNA, 20 bp, Vagococcus fluvialis
gagaataataaaagacgctt

SEQ ID NO: 21379 - DNA, 20 bp, Clostridium clostridiiforme
tgacatccacgcggtagaga

SEQ ID NO: 21380 - DNA, 20 bp, Streptococcus ferus
attacgtgacggtacttaac

SEQ ID NO: 21381 - DNA, 20 bp, Methylobacterium extorquens
caggcgaccacggaggggtc

SEQ ID NO: 21382 - DNA, 20 bp, Brevibacillus centrosporus
ccggatagagtctactctcg

SEQ ID NO: 21383 - DNA, 20 bp, Streptococcus thermophilus
acctccttcatggtcatagc

SEQ ID NO: 21384 - DNA, 20 bp, Staphylococcus cohnii
tttgatcatggctcagggat

SEQ ID NO: 21385 - DNA, 20 bp, Bacillus mycoides
tggcgcgaaattgaaaggcg

SEQ ID NO: 21386 - DNA, 20 bp, Corynebacterium pilosum
tattcaacttttgttggaaa

SEQ ID NO: 21387 - DNA, 20 bp, Anaerococcus tetradius
aataataccctataaagtta

SEQ ID NO: 21388 - DNA, 20 bp, Bacteroides merdae
ccgggtttgaacgtagtctg

SEQ ID NO: 21389 - DNA, 20 bp, Ewingella americana
cagctggcggcaggcctaac

SEQ ID NO: 21390 - DNA, 20 bp, Empedobacter brevis
ctacttggcaacaagatgcg

SEQ ID NO: 21391 - DNA, 20 bp, Stenotrophomonas maltophilia
aagcggaaacccataaagcc

SEQ ID NO: 21392 - DNA, 20 bp, Bacteroides capillosus
cctttcggctatgtgaccaa

SEQ ID NO: 21393 - DNA, 20 bp, Bacteroides thetaiotaomicron
ttgtacgcccgcccgtcaag

SEQ ID NO: 21394 - DNA, 20 bp, Prevotella corporis
aggagcaagctctgtctgtt

SEQ ID NO: 21395 - DNA, 20 bp, Bacteroides capillosus
caggtgtgaaaaccacgggc

SEQ ID NO: 21396 - DNA, 20 bp, Haemophilus influenzae
gtagtcgagagatgaaagtg

SEQ ID NO: 21397 - DNA, 20 bp, Corynebacterium kutscheri
tgtacaggatcgggctagag

SEQ ID NO: 21398 - DNA, 30 bp, Eubacterium moniliforme
gccagtggcttaaccgtaaggagagagctg

SEQ ID NO: 21399 - DNA, 20 bp, Anaerococcus prevotii
catgcataaatgatcaaagc

SEQ ID NO: 21400 - DNA, 20 bp, Myroides odoratimimus
aataatatggaagtaactag

SEQ ID NO: 21401 - DNA, 20 bp, Peptostreptococcus anaerobius
tgatgcttgcattaatgaaa

SEQ ID NO: 21402 - DNA, 20 bp, Bacteroides thetaiotaomicron
tatatttcccgcatgggttt

SEQ ID NO: 21403 - DNA, 20 bp, Bacteroides capillosus
caggcatctaactaggatta

SEQ ID NO: 21404 - DNA, 20 bp, Streptococcus macacae
caatgtcagctattgaaact

SEQ ID NO: 21405 - DNA, 20 bp, Corynebacterium pilosum
ggaactgggtgtcttattcc

SEQ ID NO: 21406 - DNA, 20 bp, Streptococcus criceti
cgctaaggtgggacggatga

SEQ ID NO: 21407 - DNA, 20 bp, Empedobacter brevis
gggtttcggcttcagtggct

SEQ ID NO: 21408 - DNA, 20 bp, Streptococcus urinalis
caagaccaaggagttgcgaa

SEQ ID NO: 21409 - DNA, 20 bp, Bacillus smithii
aacaaaaagccgtatcggaa

SEQ ID NO: 21410 - DNA, 20 bp, Morganella morganii
caaggttaataaccttggca

SEQ ID NO: 21411 - DNA, 20 bp, Proteus mirabilis
tcaggggaacctgcggcttg

SEQ ID NO: 21412 - DNA, 20 bp, Stenotrophomonas maltophilia
ttgatcatggctcagatgtg

SEQ ID NO: 21413 - DNA, 20 bp, Streptococcus ratti
taccgcataagagagtttaa

SEQ ID NO: 21414 - DNA, 20 bp, Paenibacillus validus
agtcgagcggccctttcctt

SEQ ID NO: 21415 - DNA, 20 bp, Vibrio hollisae
catgtacggaattctggaga

SEQ ID NO: 21416 - DNA, 20 bp, Streptococcus equi
atacgtagcttgctacaatt

SEQ ID NO: 21417 - DNA, 20 bp, Psychrobacter phenylpyruvicus
tagctgtcgctagaggatgg

SEQ ID NO: 21418 - DNA, 20 bp, Bacillus schlegellii
ccgtctcttagcggcggacg

SEQ ID NO: 21419 - DNA, 20 bp, Bacillus laevolacticus
ctcagggccgaacgctggcc

SEQ ID NO: 21420 - DNA, 20 bp, Actinomyces radingae
cttttttaagtttctggagg

SEQ ID NO: 21421 - DNA, 20 bp, Stenotrophomonas maltophilia
caggagaggcttgtctctct

SEQ ID NO: 21422 - DNA, 20 bp, Streptococcus equi
caaggtagccgttcggaagg

SEQ ID NO: 21423 - DNA, 20 bp, Capnocytophaga sp.
acttagagataggtatttct

SEQ ID NO: 21424 - DNA, 20 bp, Prevotella loescheii
acatccggcttgcagcgcga

SEQ ID NO: 21425 - DNA, 20 bp, Geobacillus thermoglucosidasius
gggactgcccggttacaagt

SEQ ID NO: 21426 - DNA, 20 bp, Eggerthella lenta
gaacccgcaggggcggaggc

SEQ ID NO: 21427 - DNA, 20 bp, Eremococcus coleocola
gctagggattgacggtaact

SEQ ID NO: 21428 - DNA, 20 bp, Bacillus smithii
ccgcttgcagatgggccccg

SEQ ID NO: 21429 - DNA, 20 bp, Haemophilus haemolyticus
gtatacagagggtggcgatg

SEQ ID NO: 21430 - DNA, 20 bp, Psychrobacter phenylpyruvicus
agctattgtctctcatgaga

SEQ ID NO: 21431 - DNA, 20 bp, Staphylococcus hyicus
cttttgaccagctctagaga

SEQ ID NO: 21432 - DNA, 20 bp, Brevibacillus reuszeri
aggtttttggaccgcatggt

SEQ ID NO: 21433 - DNA, 20 bp, Propionibacterium avidum
cgaatcgatgggctcttgct

SEQ ID NO: 21434 - DNA, 20 bp, Streptococcus sanguinis
ataccgcatgatattgaata

SEQ ID NO: 21435 - DNA, 20 bp, Streptococcus criceti
tgacttgaaaggtgcaatgg

SEQ ID NO: 21436 - DNA, 20 bp, Bacillus sp
ttatgaagtttggatccatg

SEQ ID NO: 21437 - DNA, 20 bp, Peptoniphilus asaccharolyticus
cgacagattccttcggggtg

SEQ ID NO: 21438 - DNA, 20 bp, Microbacterium hominis
atcccgggtctggtacacgc

SEQ ID NO: 21439 - DNA, 20 bp, Fusobacterium necrogenes
gccttcgtgccccttcgggg

SEQ ID NO: 21440 - DNA, 20 bp, Enterobacter amnigenus
cgaagcgagtagcacagaga

SEQ ID NO: 21441 - DNA, 30 bp, Bacillus badius
cggtctggagacaggcctttcccttcgggg

SEQ ID NO: 21442 - DNA, 20 bp, Brevibacillus centrosporus
aataccggatagagtctact

SEQ ID NO: 21443 - DNA, 20 bp, Campylobacter curvus
ctttaggtgggtcaagggag

SEQ ID NO: 21444 - DNA, 20 bp, Leuconostoc gelidum
aagctctaaaaggcgctacg

SEQ ID NO: 21445 - DNA, 20 bp, Anaerococcus tetradius
ctgttaggcttgagagatga

SEQ ID NO: 21446 - DNA, 20 bp, Stenotrophomonas maltophilia
ccttatcgatatgacggtac

SEQ ID NO: 21447 - DNA, 20 bp, Bacteroides capillosus
ttaaaggtttagcggtaagg

SEQ ID NO: 21448 - DNA, 20 bp, Bacteroides capillosus
acttgagtttgcacaacgtt

SEQ ID NO: 21449 - DNA, 20 bp, Pediococcus parvulus
gcactttcgttaattgattt

SEQ ID NO: 21450 - DNA, 20 bp, Brevibacterium epidermidis
acatacaccggaccgtcctg

SEQ ID NO: 21451 - DNA, 20 bp, Anaerococcus prevotii
tatacccctctctttaagag

SEQ ID NO: 21452 - DNA, 20 bp, Alloiococcus otitis
ctctgctaccgcttatggat

SEQ ID NO: 21453 - DNA, 20 bp, Brevibacillus centrosporus
gttttgggctgtcgctatag

SEQ ID NO: 21454 - DNA, 20 bp, Leptotrichia buccalis
aacgccaagcgaacctgcaa

SEQ ID NO: 21455 - DNA, 20 bp, Clostridium clostridiiforme
gtacagagagaagcgagccc

SEQ ID NO: 21456 - DNA, 20 bp, Anaerococcus prevotii
gggtctagagatagactctt

SEQ ID NO: 21457 - DNA, 20 bp, Eubacterium moniliforme
aggattcattcgatgcagga

SEQ ID NO: 21458 - DNA, 20 bp, Shigella flexneri
ccgaggggaacctgcgttgg

SEQ ID NO: 21459 - DNA, 20 bp, Finegoldia magna
gtgatataatgcaaaactcg

SEQ ID NO: 21460 - DNA, 20 bp, Porphyromonas endodontalis
tgatatgctagagaggagac

SEQ ID NO: 21461 - DNA, 20 bp, Campylobacter curvus
ataagtataaatgggaaagt

SEQ ID NO: 21462 - DNA, 20 bp, Anaerococcus tetradius
cttcggaatgaaaataagcg

SEQ ID NO: 21463 - DNA, 20 bp, Eremococcus coleocola
ctgctatcactcaaggatgg

SEQ ID NO: 21464 - DNA, 20 bp, Sporosarcina pasteurii
aggtacaggcagttactcct

SEQ ID NO: 21465 - DNA, 30 bp, Unknown Organism
  oligonucleotide from CDC group EF-4B
gttgtggttaatacccatgactgatgacgg

SEQ ID NO: 21466 - DNA, 20 bp, Corynebacterium pilosum
ttcccgttgggtattctggc

SEQ ID NO: 21467 - DNA, 20 bp, Pediococcus acidilactici
tctggtctgtactgcgctga

SEQ ID NO: 21468 - DNA, 20 bp, Finegoldia magna
gtcgaacgggatttagtaaa

SEQ ID NO: 21469 - DNA, 20 bp, Clostridium clostridiiforme
aaaggagaagcagatcccaa

SEQ ID NO: 21470 - DNA, 20 bp, Eremococcus coleocola
atggctctgctatcactcaa

SEQ ID NO: 21471 - DNA, 20 bp, Pasteurella multocida
acccatgggagtgggttgta

SEQ ID NO: 21472 - DNA, 20 bp, Sporosarcina ureae
gagggaatgttgaaagccgg

SEQ ID NO: 21473 - DNA, 20 bp, Streptococcus equi
ttgctacaattatctgtgag

SEQ ID NO: 21474 - DNA, 20 bp, Anaerococcus tetradius
attagagatagttccttact

SEQ ID NO: 21475 - DNA, 20 bp, Peptostreptococcus anaerobius
atgctagtcgagcgcgtctg

SEQ ID NO: 21476 - DNA, 20 bp, Paenibacillus macerans
tctggtgtttaaggctgtgg

SEQ ID NO: 21477 - DNA, 20 bp, Bacteroides distasonis
gcaggggccccgcatgggga

SEQ ID NO: 21478 - DNA, 20 bp, Morganella morganii
gtcgggaggaaggtgtcaag

SEQ ID NO: 21479 - DNA, 20 bp, Eubacterium moniliforme
tgtaaacttttgtcctatgg

SEQ ID NO: 21480 - DNA, 20 bp, Bacillus sp
tgaagtttggatccatggct

SEQ ID NO: 21481 - DNA, 30 bp, Sporosarcina ureae
actgtcctgtaccttgacggtaccttacca

SEQ ID NO: 21482 - DNA, 20 bp, Brevibacillus centrosporus
atagtttgggatacttccgg

SEQ ID NO: 21483 - DNA, 20 bp, Paenibacillus apiarius
cgagcggagctgacggagtg

SEQ ID NO: 21484 - DNA, 20 bp, Brevibacterium linens
ccctggtgcttgcaccgggg

SEQ ID NO: 21485 - DNA, 20 bp, Eschericchia vulneris
tactcctactgggaggcaag

SEQ ID NO: 21486 - DNA, 20 bp, Propionibacterium avidum
gctcttgcttgttaggcggc

SEQ ID NO: 21487 - DNA, 20 bp, Finegoldia magna
tgttttaacggtcaaagatt

SEQ ID NO: 21488 - DNA, 20 bp, Corynebacterium pilosum
gggaactgggtgtcttattc

SEQ ID NO: 21489 - DNA, 20 bp, Pantoea agglomerans
ggtagcacagcaggagcttg

SEQ ID NO: 21490 - DNA, 20 bp, Bacteroides stercoris
gtatccttgagtgcagcaga

SEQ ID NO: 21491 - DNA, 20 bp, Dolosicoccus paucivorans
tatggtatcgctaaaggatg

SEQ ID NO: 21492 - DNA, 20 bp, Clostridium clostridiiforme
gtgggactagcgatagttcc

SEQ ID NO: 21493 - DNA, 20 bp, Haemophilus paraphrophilus
gtcgtacaaggtaacctagg

SEQ ID NO: 21494 - DNA, 20 bp, Anaerococcus tetradius
taagacttcggtctactgta

SEQ ID NO: 21495 - DNA, 20 bp, Staphylococcus schleiferi
agcgaacggacaggagcttg

SEQ ID NO: 21496 - DNA, 20 bp, Providencia stuartii
tgagcagagatgctgaagtg

SEQ ID NO: 21497 - DNA, 20 bp, Bacillus sp
tggatcaccttctacatggc

SEQ ID NO: 21498 - DNA, 20 bp, Clostridium innocuum
gaagtttcaaggaagcttgc

SEQ ID NO: 21499 - DNA, 20 bp, Geobacillus thermoglucosidasius
gtggcttttgctaccactta

SEQ ID NO: 21500 - DNA, 20 bp, Myroides odoratimimus
agtggtgaaatttcctagct

SEQ ID NO: 21501 - DNA, 20 bp, Clostridium clostridiiforme
gcagatcccaaaaagccatc

SEQ ID NO: 21502 - DNA, 20 bp, Streptococcus iniae
cgctgaggattggtgcttgc

SEQ ID NO: 21503 - DNA, 20 bp, Paenibacillus macerans
gagtaactgccaggagagtg

SEQ ID NO: 21504 - DNA, 20 bp, Streptococcus macacae
gtgcagctgcacccctatca

SEQ ID NO: 21505 - DNA, 20 bp, Actinomyces radingae
gggtgtgggaaaggggcttt

SEQ ID NO: 21506 - DNA, 20 bp, Streptococcus infantarius
aagcgaacaagtggttaagc

SEQ ID NO: 21507 - DNA, 20 bp, Finegoldia magna
tatagtgatataatgcaaaa

SEQ ID NO: 21508 - DNA, 20 bp, Sphingobacterium multivorum
cttacgcttcggggctatca

SEQ ID NO: 21509 - DNA, 20 bp, Bacillus schlegellii
gcgacccgctttaggagggg

SEQ ID NO: 21510 - DNA, 20 bp, Gemella morbillorum
attgctatcgctaccagatg

SEQ ID NO: 21511 - DNA, 20 bp, Pediococcus dextrinicus
aggagatttaaaagtaaacg

SEQ ID NO: 21512 - DNA, 20 bp, Paenibacillus amylolyticus
gtgcttgcatcctctgatgc

SEQ ID NO: 21513 - DNA, 20 bp, Porphyromonas maccae
aacttcttttataggggatt

SEQ ID NO: 21514 - DNA, 20 bp, Unknown Organism
  oligonucleotide from CDC group EO-2
acggccgtgcgccaacctcg

SEQ ID NO: 21515 - DNA, 30 bp, Dolosigranulum pigrum
cctcgcggcgtattagctagttggtaaggt

SEQ ID NO: 21516 - DNA, 20 bp, Campylobacter curvus
actccatttatatataagta

SEQ ID NO: 21517 - DNA, 20 bp, Myroides odoratimimus
agtagggacttgacggtact

SEQ ID NO: 21518 - DNA, 20 bp, Bacteroides stercoris
cttttcttcggacagttgtg

SEQ ID NO: 21519 - DNA, 20 bp, Vibrio parahaemolyticus
taaaagaagtaggctagttt

SEQ ID NO: 21520 - DNA, 20 bp, Empedobacter brevis
catgcaagccgaggggtacg

SEQ ID NO: 21521 - DNA, 20 bp, Streptococcus anginosus
gccggcggcgggcctaatac

SEQ ID NO: 21522 - DNA, 20 bp, Moellerella wisconsensis
gggaggaaggcgttgatatt

SEQ ID NO: 21523 - DNA, 20 bp, Campylobacter curvus
agtcgaaccctatatattgt

SEQ ID NO: 21524 - DNA, 20 bp, Bacillus coagulans
ctcacgccaccggatgtgcc

SEQ ID NO: 21525 - DNA, 20 bp, Geobacillus thermoglucosidasius
gggagcgaatccccaaaaac

SEQ ID NO: 21526 - DNA, 20 bp, Pseudomonas oryzihabitans
gaggaagggcttacagcgaa

SEQ ID NO: 21527 - DNA, 20 bp, Globicatella sanguinis
tgttagtagattgacggtat

SEQ ID NO: 21528 - DNA, 20 bp, Streptococcus urinalis
agtaggagtggaaagtctac

SEQ ID NO: 21529 - DNA, 20 bp, Sphingobacterium multivorum
ggtggggactttaaacagac

SEQ ID NO: 21530 - DNA, 20 bp, Bacillus laevolacticus
tagctaagccggatagctgg

SEQ ID NO: 21531 - DNA, 20 bp, Capnocytophaga sp.
gatgacggtactctgcgaat

SEQ ID NO: 21532 - DNA, 20 bp, Streptococcus infantarius
acccgttcgcaatcttccaa

SEQ ID NO: 21533 - DNA, 20 bp, Haemophilus segnis
ggttgaactttaggtttggc

SEQ ID NO: 21534 - DNA, 20 bp, Bacillus coagulans
ctcgcatgagcggatgttaa

SEQ ID NO: 21535 - DNA, 20 bp, Streptococcus macacae
acgggagcttgctccacgag

SEQ ID NO: 21536 - DNA, 20 bp, Anaerococcus tetradius
ccttcgggatgaaaaatatt

SEQ ID NO: 21537 - DNA, 20 bp, Prevotella loescheii
ttggacgaaaggtttggcgg

SEQ ID NO: 21538 - DNA, 20 bp, Actinomyces naeslundii
gaacggtgaaggcgaccttg

SEQ ID NO: 21539 - DNA, 20 bp, Sporosarcina pasteurii
cgctaacaaaggaagaaaca

SEQ ID NO: 21540 - DNA, 20 bp, Anaerococcus tetradius
agagatgaaagggaaagtgg

SEQ ID NO: 21541 - DNA, 20 bp, Campylobacter curvus
actccatactccatttatat

SEQ ID NO: 21542 - DNA, 20 bp, Bacteroides capillosus
ggattaaaggtttagcggta

SEQ ID NO: 21543 - DNA, 30 bp, Bacteroides stercoris
ccggactgccgtcgtaagatgtgaggaagg

SEQ ID NO: 21544 - DNA, 20 bp, Bacteroides stercoris
taaagtgagccacgtgtggc

SEQ ID NO: 21545 - DNA, 20 bp, Cedecea lapagei
gttaggcctgcgcgacagcg

SEQ ID NO: 21546 - DNA, 20 bp, Myroides odoratimimus
atcgtattgataataaagat

SEQ ID NO: 21547 - DNA, 20 bp, Vibrio hollisae
gctgggggatgacagtacct

SEQ ID NO: 21548 - DNA, 20 bp, Streptococcus macacae
ctctaagcctttagagggat

SEQ ID NO: 21549 - DNA, 20 bp, Actinomyces neuii
caggtcagggaacgtgcggc

SEQ ID NO: 21550 - DNA, 20 bp, Sporosarcina ureae
tactccgggaacccggggtt

SEQ ID NO: 21551 - DNA, 20 bp, Stenotrophomonas maltophilia
ggcaaggtgcggttggatca

SEQ ID NO: 21552 - DNA, 20 bp, Corynebacterium group ANF
tgtggtggaaaacgttttct

SEQ ID NO: 21553 - DNA, 20 bp, Myroides odoratimimus
tggtttatcgatatggcatc

SEQ ID NO: 21554 - DNA, 20 bp, Anaerococcus tetradius
gacataaactcttcgcatga

SEQ ID NO: 21555 - DNA, 20 bp, Corynebacterium afermentans
accgcttcaggtgttccgac

SEQ ID NO: 21556 - DNA, 20 bp, Brochothrix campestris
tgggtaacctgcctcacagc

SEQ ID NO: 21557 - DNA, 20 bp, Clostridium clostridiiforme
gctaatacctcataagccgg

SEQ ID NO: 21558 - DNA, 20 bp, Bacteroides thetaiotaomicron
aaggagcgtctagggtaaga

SEQ ID NO: 21559 - DNA, 20 bp, Prevotella corporis
aagctctgtctgttcgctcg

SEQ ID NO: 21560 - DNA, 20 bp, Eubacterium moniliforme
gacctcgtaagagtaagcga

SEQ ID NO: 21561 - DNA, 20 bp, Eubacterium moniliforme
ttgggagcacccgaagccag

SEQ ID NO: 21562 - DNA, 30 bp, Bacteroides capillosus
acccctgttctcagttgccatcgggtgatg

SEQ ID NO: 21563 - DNA, 20 bp, Pseudomonas mendocina
tggttaataccctgcagttt

SEQ ID NO: 21564 - DNA, 20 bp, Clostridium clostridiiforme
gttgattggaacattcaagc

SEQ ID NO: 21565 - DNA, 20 bp, Providencia rustigianii
ctaatatcatcagcgattga

SEQ ID NO: 21566 - DNA, 30 bp, Corynebacterium cystitidis
cgggggcgctaggtgtgagatccttccacg

SEQ ID NO: 21567 - DNA, 20 bp, Vibrio metschnikovii
atagcctacggctcaaagag

SEQ ID NO: 21568 - DNA, 20 bp, Corynebacterium kutscheri
catgtacaggatcgggctag

SEQ ID NO: 21569 - DNA, 30 bp, Corynebacterium ulcerans
cgttttcccttgtggttgtatacaggtggt

SEQ ID NO: 21570 - DNA, 20 bp, Eubacterium moniliforme
cataagaccacgaaaccgca

SEQ ID NO: 21571 - DNA, 20 bp, Enterobacter gergoviae
tggaggctgtggttcttgag

SEQ ID NO: 21572 - DNA, 20 bp, Bacillus thuringiensis
caatgcaagtcgagcgaatg

SEQ ID NO: 21573 - DNA, 20 bp, Bacteroides stercoris
tcccgcatggaataactatt

SEQ ID NO: 21574 - DNA, 20 bp, Globicatella sanguinis
gacatctcttgcatatctta

SEQ ID NO: 21575 - DNA, 20 bp, Microbacterium testaceum
ggtcaactctggaggaaggt

SEQ ID NO: 21576 - DNA, 20 bp, Bacillus niacini
aagttgaaagtcggtttacg

SEQ ID NO: 21577 - DNA, 20 bp, Nocardia asteroides
gttaatacctaaagagagtg

SEQ ID NO: 21578 - DNA, 20 bp, Oligella urethralis
acactccaatctcttgaagc

SEQ ID NO: 21579 - DNA, 20 bp, Bacteroides capillosus
accgtatgatatcctatgca

SEQ ID NO: 21580 - DNA, 20 bp, Corynebacterium group ANF
atccttttaaagctggtcgt

SEQ ID NO: 21581 - DNA, 20 bp, Finegoldia magna
cagaagcttcggtggaagat

SEQ ID NO: 21582 - DNA, 20 bp, Bacteroides ovatus
ctggcgacagtgatgctaat

SEQ ID NO: 21583 - DNA, 30 bp, Eremococcus coleocola
cgcgagggcaagcgaatctcttaaagtcgt

SEQ ID NO: 21584 - DNA, 20 bp, Finegoldia magna
ggtcatagatgggctcgcgt

SEQ ID NO: 21585 - DNA, 20 bp, Streptococcus criceti
ggtgcaatggcaccactatc

SEQ ID NO: 21586 - DNA, 20 bp, Clostridium clostridiiforme
gtgctctcaaagccggaggc

SEQ ID NO: 21587 - DNA, 30 bp, Bacillus azotoformans
acatgcaagtcgagcggatgataaaggagc

SEQ ID NO: 21588 - DNA, 20 bp, Sporosarcina ureae
atccattctctcgcatgagg

SEQ ID NO: 21589 - DNA, 20 bp, Helcococcus kunzii
tgaaacggaaaaaggaaagt

SEQ ID NO: 21590 - DNA, 20 bp, Neisseria subflava
accgcaaggggccgcttacc

SEQ ID NO: 21591 - DNA, 20 bp, Morganella morganii
gcaaggttaataaccttggc

SEQ ID NO: 21592 - DNA, 20 bp, Sphingobacterium multivorum
ggggactttaaacagactgg

SEQ ID NO: 21593 - DNA, 20 bp, Sporosarcina ureae
atggggtactccgggaaccc

SEQ ID NO: 21594 - DNA, 20 bp, Vibrio parahaemolyticus
cgaatcccaaaaaggcgtcg

SEQ ID NO: 21595 - DNA, 30 bp, Propionibacterium granulosum
atggatcgggagcttccagagatggttgtg

SEQ ID NO: 21596 - DNA, 20 bp, Actinomyces naeslundii
aggcctgtcccttgtgggtg

SEQ ID NO: 21597 - DNA, 20 bp, Fusobacterium mortiferum
ctcggggtgatggtggcgga

SEQ ID NO: 21598 - DNA, 20 bp, Helcococcus kunzii
ttcggtttagaaactggtta

SEQ ID NO: 21599 - DNA, 20 bp, Clostridium clostridiiforme
ccgcggaatacgtagggggc

SEQ ID NO: 21600 - DNA, 20 bp, Myroides odoratimimus
atggcatcgtattgataata

SEQ ID NO: 21601 - DNA, 20 bp, Prevotella buccae
gcctagggcaaaaccgggat

SEQ ID NO: 21602 - DNA, 20 bp, Vibrio hollisae
ggaattctggagagattcag

SEQ ID NO: 21603 - DNA, 20 bp, Corynebacterium pilosum
cttccggattagctttggga

SEQ ID NO: 21604 - DNA, 20 bp, Peptoniphilus asaccharolyticus
aaagagcgggcgagctagtg

SEQ ID NO: 21605 - DNA, 20 bp, Bacteroides merdae
agtgtgtttgaggtaggcgg

SEQ ID NO: 21606 - DNA, 20 bp, Peptoniphilus asaccharolyticus
aataaacttgagtagtgaag

SEQ ID NO: 21607 - DNA, 20 bp, Paenibacillus alvei
atctgaatgcaaactctaga

SEQ ID NO: 21608 - DNA, 20 bp, Streptococcus macacae
taatatctctctaagccttt

SEQ ID NO: 21609 - DNA, 20 bp, Streptococcus equi
gcaagtggaacgcacagatg

SEQ ID NO: 21610 - DNA, 30 bp, Paenibacillus macerans
agggaagaacgtcttgtggagtaactgcca

SEQ ID NO: 21611 - DNA, 20 bp, Granulicatella adiacens
accgggcttgcactggtcaa

SEQ ID NO: 21612 - DNA, 20 bp, Bacteroides stercoris
aacccttgcgggtagttcca

SEQ ID NO: 21613 - DNA, 20 bp, Anaerococcus prevotii
cggcagaactgtaatacagg

SEQ ID NO: 21614 - DNA, 20 bp, Vibrio hollisae
gcgtttggaactgtcagact

SEQ ID NO: 21615 - DNA, 20 bp, Bacteroides merdae
tccttttttgtatgtaccct

SEQ ID NO: 21616 - DNA, 20 bp, Bacteroides ureolyticus
ctcctatttgacataagtta

SEQ ID NO: 21617 - DNA, 30 bp, Helcococcus kunzii
atgaaacggaaaaaggaaagtagcgaacgg

SEQ ID NO: 21618 - DNA, 20 bp, Campylobacter curvus
atatatagggtttctcgcta

SEQ ID NO: 21619 - DNA, 20 bp, Salmonella choleraesuis
gggataaggctaataacctt

SEQ ID NO: 21620 - DNA, 20 bp, Dolosicoccus paucivorans
acaacgagaagcaacgtcgc

SEQ ID NO: 21621 - DNA, 20 bp, Bacteroides stercoris
catggaataactattaaaga

SEQ ID NO: 21622 - DNA, 30 bp, Anaerococcus tetradius
atgggatgaaaatgacagtaccataagaat

SEQ ID NO: 21623 - DNA, 20 bp, Propionibacterium propionicus
ttttgtgacggtagcagtag

SEQ ID NO: 21624 - DNA, 20 bp, Neisseria mucosa
gcggttggggatccaccctc

SEQ ID NO: 21625 - DNA, 20 bp, Alloiococcus otitis
gtggctctgctaccgcttat

SEQ ID NO: 21626 - DNA, 20 bp, Corynebacterium mycetoides
ggggatcggcgattggggac

SEQ ID NO: 21627 - DNA, 20 bp, Bacteroides capillosus
catctaactaggattaaagg

SEQ ID NO: 21628 - DNA, 20 bp, Pseudomonas mendocina
ttaggttacatgctcttcct

SEQ ID NO: 21629 - DNA, 20 bp, Cedecea davisae
agggagtagcttgctactcc

SEQ ID NO: 21630 - DNA, 20 bp, Bacillus licheniformis
tcggggaaccccggggttat

SEQ ID NO: 21631 - DNA, 20 bp, Bacteroides stercoris
acagttctttcttcggacag

SEQ ID NO: 21632 - DNA, 20 bp, Bacteroides thetaiotaomicron
gccatggcgcggtgaatagt

SEQ ID NO: 21633 - DNA, 20 bp, Streptococcus infantarius
aagggcgggtggatcacctc

SEQ ID NO: 21634 - DNA, 20 bp, Paenibacillus alvei
tgcttgcacttctgagactt

SEQ ID NO: 21635 - DNA, 20 bp, Bacteroides capilosus
ggagtggggaataacagtcc

SEQ ID NO: 21636 - DNA, 20 bp, Streptococcus sanguinis
cactgtgaccggatcttacc

SEQ ID NO: 21637 - DNA, 20 bp, Porphyromonas endodontalis
agcattattttagcttgcta

SEQ ID NO: 21638 - DNA, 30 bp, Vibrio harveyi
cccataaagtgcgtcgagttccggatcgga

SEQ ID NO: 21639 - DNA, 20 bp, Eggerthella lenta
gtgtggggggctccgccctc

SEQ ID NO: 21640 - DNA, 30 bp, Leptotrichia buccalis
gaagctactggtccaaccgcaagggggaag

SEQ ID NO: 21641 - DNA, 20 bp, Porphyromonas gingivalis
gtaccgcaaggggcgcacta

SEQ ID NO: 21642 - DNA, 20 bp, Escherichia hermannii
ggacaactgtggtgacgacg

SEQ ID NO: 21643 - DNA, 20 bp, Paenibacillus larvae
cttgtgtttctttcgggaga

SEQ ID NO: 21644 - DNA, 20 bp, Bacteroides stercoris
gttcttttcttcggacagtt

SEQ ID NO: 21645 - DNA, 20 bp, Paenibacillus lautus
ctgggtcgcacccaaaactg

SEQ ID NO: 21646 - DNA, 20 bp, Streptococcus urinalis
gtgcttgcacaagaccaagg

SEQ ID NO: 21647 - DNA, 20 bp, Kocuria rosea
ctgaacgatgatgcccagct

SEQ ID NO: 21648 - DNA, 20 bp, Nocardia asteroides
ctcctttagttaatacctaa

SEQ ID NO: 21649 - DNA, 20 bp, Prevotella oralis
ggacgtgtccctttttgcag

SEQ ID NO: 21650 - DNA, 20 bp, Leptotrichia buccalis
gcagaatctgtgcttgcaca

SEQ ID NO: 21651 - DNA, 20 bp, Vibrio harveyi
ccatgggtagtgggctgcat

SEQ ID NO: 21652 - DNA, 20 bp, Actinomyces odontolyticus
tgtgcggggggagtggtcga

SEQ ID NO: 21653 - DNA, 20 bp, Paenibacillus macerans
tagggtgggcactctaacgt

SEQ ID NO: 21654 - DNA, 20 bp, Clostridium subterminale
tgagaatcgcatgatttttg

SEQ ID NO: 21655 - DNA, 20 bp, Psychrobacter phenylpyruvicus
gctaataccaaataagctat

SEQ ID NO: 21656 - DNA, 20 bp, Neisseria subflava
gcaaggggccgcttaccacg

SEQ ID NO: 21657 - DNA, 20 bp, Streptococcus infantarius
aagtggttaagccactgcct

SEQ ID NO: 21658 - DNA, 20 bp, Corynebacterium group ANF
gaaaacgttttctagtggtt

SEQ ID NO: 21659 - DNA, 20 bp, Finegoldia magna
gctatatagtgatataatgc

SEQ ID NO: 21660 - DNA, 20 bp, Oligella urethralis
agcaagaggtcttacgatcc

SEQ ID NO: 21661 - DNA, 20 bp, Eubacterium moniliforme
aaccgcatggtttagaggta

SEQ ID NO: 21662 - DNA, 20 bp, Actinomyces radingae
cctgagcgcctagagatagg

SEQ ID NO: 21663 - DNA, 20 bp, Haemophilus influenzae
agtagtcgagagatgaaagt

SEQ ID NO: 21664 - DNA, 20 bp, Globicatella sanguinis
tagattgacggtatctaacc

SEQ ID NO: 21665 - DNA, 20 bp, Actinomyces bovis
tgcgaaggtaggatcgatga

SEQ ID NO: 21666 - DNA, 20 bp, Sphingobacterium multivorum
tgctcgaagatggtgagagt

SEQ ID NO: 21667 - DNA, 20 bp, Clostridium clostridiiforme
ccggtaacgcggcctttcct

SEQ ID NO: 21668 - DNA, 20 bp, Sporosarcina ureae
gtactccgggaacccggggt

SEQ ID NO: 21669 - DNA, 20 bp, Bacteroides capillosus
ctacggaggtgctgcatggt

SEQ ID NO: 21670 - DNA, 20 bp, Vibrio parahaemolyticus
aaaaaggcgtcgtagtccgg

SEQ ID NO: 21671 - DNA, 20 bp, Paenibacillus macerans
ataccggatacgcaactcct

SEQ ID NO: 21672 - DNA, 20 bp, Providencia rustigianii
aaggcgttgatgctaatatc

SEQ ID NO: 21673 - DNA, 20 bp, Clostridium innocuum
gtcgaacgaagtttcaagga

SEQ ID NO: 21674 - DNA, 20 bp, Bacteroides stercoris
cagttgatactggtatcctt

SEQ ID NO: 21675 - DNA, 20 bp, Clostridium innocuum
tcaaggaagcttgcttccaa

SEQ ID NO: 21676 - DNA, 20 bp, Suttonella indologenes
cgggcccaatgcttaacaca

SEQ ID NO: 21677 - DNA, 20 bp, Brevibacillus choshinensis
ctccttcgggggctagcggc

SEQ ID NO: 21678 - DNA, 20 bp, Eubacterium moniliforme
tctttgggaagccctcgggt

SEQ ID NO: 21679 - DNA, 20 bp, Anaerococcus prevotii
gcagaactgtaatacaggtg

SEQ ID NO: 21680 - DNA, 30 bp, Paenibacillus azotofixans
tgctcttgatcaacttagcggcggacgggt

SEQ ID NO: 21681 - DNA, 20 bp, Vibrio metschnikovii
gacgcttgccactttgggtt

SEQ ID NO: 21682 - DNA, 20 bp, Empedobacter brevis
ggaaggtgtgcgtgttaata

SEQ ID NO: 21683 - DNA, 30 bp, Eremococcus coleocola
gttctcttaacgtgagtggcggacgggtga

SEQ ID NO: 21684 - DNA, 20 bp, Serratia rubidaea
agtgtcttaatacggcatta

SEQ ID NO: 21685 - DNA, 20 bp, Prevotella corporis
gcaagctctgtctgttcgct

SEQ ID NO: 21686 - DNA, 20 bp, Bacteroides capilosus
ttatcagggacgaaataaat

SEQ ID NO: 21687 - DNA, 20 bp, Corynebacterium group ANF
gccgcttgctccactttgtg

SEQ ID NO: 21688 - DNA, 20 bp, Facklamia hominis
gtggcctaactttatgaggg

SEQ ID NO: 21689 - DNA, 20 bp, Streptococcus infantarius
ttttttggtaagttaccgtc

SEQ ID NO: 21690 - DNA, 20 bp, Finegoldia magna
aaacagaagcctcggtggaa

SEQ ID NO: 21691 - DNA, 20 bp, Eubacterium moniliforme
atggtttagaggtaaaagga

SEQ ID NO: 21692 - DNA, 20 bp, Staphylococcus simulans
taagtaactgtgcatccctt

SEQ ID NO: 21693 - DNA, 20 bp, Anaerococcus prevotii
actcttattgcttcggcaga

SEQ ID NO: 21694 - DNA, 20 bp, Geobacillus thermoglucosidasius
gagcgaatccccaaaaaccc

SEQ ID NO: 21695 - DNA, 20 bp, Anaerococcus tetradius
acgatgaaccttgtattgat

SEQ ID NO: 21696 - DNA, 20 bp, Eubacterium moniliforme
agtcgaacgaagttgctctt

SEQ ID NO: 21697 - DNA, 20 bp, Stenotrophomonas maltophilia
tgcccgatacgagggggata

SEQ ID NO: 21698 - DNA, 20 bp, Prevotella intermedia
gatgcaaatagcatccaatc

SEQ ID NO: 21699 - DNA, 20 bp, Propionibacterium acnes
gtacaagataaaagtaccgg

SEQ ID NO: 21700 - DNA, 20 bp, Paenibacillus lautus
aggttcttctctcgcatggg

SEQ ID NO: 21701 - DNA, 20 bp, Alicyclobacillus acidocaldarius
ccccgaagggacccctcatc

SEQ ID NO: 21702 - DNA, 20 bp, Haemophilus paraphrophilus
tttgggggttgaactttaag

SEQ ID NO: 21703 - DNA, 20 bp, Vibrio hollisae
gtcagactagagtgcgtcag

SEQ ID NO: 21704 - DNA, 30 bp, Clostridium clostridiiforme
taacgcggcctttccttcgggacaggggag

SEQ ID NO: 21705 - DNA, 20 bp, Myroides odoratimimus
atgcgaatctccaaagcttg

SEQ ID NO: 21706 - DNA, 20 bp, Brevibacillus centrosporus
cgcatgaggcgaagacggaa

SEQ ID NO: 21707 - DNA, 20 bp, Propionibacterium propionicus
gatatgagcttgcaaggcat

SEQ ID NO: 21708 - DNA, 20 bp, Dolosicoccus paucivorans
catgtttcattgacaaagat

SEQ ID NO: 21709 - DNA, 20 bp, Streptococcus acidominimus
acgttagcgggagtggaaaa

SEQ ID NO: 21710 - DNA, 20 bp, Clostridium clostridiiforme
gggggacaaagtccttcggt

SEQ ID NO: 21711 - DNA, 20 bp, Budvicia aquatica
accgtaggggaacctgccgg

SEQ ID NO: 21712 - DNA, 20 bp, Myroides odoratimimus
tgaataatatggaagtaact

SEQ ID NO: 21713 - DNA, 20 bp, Empedobacter brevis
gcagctacttggcaacaaga

SEQ ID NO: 21714 - DNA, 20 bp, Brevibacterium casei
tacacaccgtcccgtcaagt

SEQ ID NO: 21715 - DNA, 20 bp, Providencia alcalifaciens
atagcgcaaggaccgaagtt

SEQ ID NO: 21716 - DNA, 20 bp, Enterococcus durans
gtacaaggtagccgatcgga

SEQ ID NO: 21717 - DNA, 20 bp, Finegoldia magna
gggatttagtaaacagaagc

SEQ ID NO: 21718 - DNA, 20 bp, Dolosicoccus paucivorans
gcgactgtatcaccgccttc

SEQ ID NO: 21719 - DNA, 20 bp, Brevibacillus centrosporus
gtctactctcgcatgaggcg

SEQ ID NO: 21720 - DNA, 20 bp, Macrococcus caseolyticus
ttatagatggacccgcgggt

SEQ ID NO: 21721 - DNA, 20 bp, Helcococcus kunzii
gacatatacaggaatatcct

SEQ ID NO: 21722 - DNA, 20 bp, Streptococcus urinalis
tggaagtaggagtggaaagt

SEQ ID NO: 21723 - DNA, 30 bp, Streptococcus alactolyticus
gatagctaataccgcataacagcttttgac

SEQ ID NO: 21724 - DNA, 20 bp, Bacteroides capillosus
tgatatcctatgcaggcatc

SEQ ID NO: 21725 - DNA, 20 bp, Streptococcus equi
tgatacgtagcttgctacaa

SEQ ID NO: 21726 - DNA, 20 bp, Neisseria polysaccharea
atcacctcccttcagtggat

SEQ ID NO: 21727 - DNA, 20 bp, Finegoldia magna
ataagtcgaatgttaaagat

SEQ ID NO: 21728 - DNA, 20 bp, Serratia marcescens
gcgaacaaggtaaccgtagg

SEQ ID NO: 21729 - DNA, 20 bp, Staphylococcus capitis
gcacgtcttgacggacctaa

SEQ ID NO: 21730 - DNA, 20 bp, Pediococcus parvulus
ataacaaaattaaccgcatg

SEQ ID NO: 21731 - DNA, 20 bp, Propionibacterium propionicus
tgagcttgcaaggcatcttg

SEQ ID NO: 21732 - DNA, 20 bp, Streptococcus ferus
gttaaggaagaacggtaatg

SEQ ID NO: 21733 - DNA, 30 bp, Streptococcus criceti
gcctacctaggctgcgatacatagccgacc

SEQ ID NO: 21734 - DNA, 20 bp, Campylobacter curvus
aagggagcgtagctccttgt

SEQ ID NO: 21735 - DNA, 20 bp, Clostridium clostridiiforme
ggaggtttggatccatggct

SEQ ID NO: 21736 - DNA, 20 bp, Prevotella loescheii
tcggccccttgggtcggtga

SEQ ID NO: 21737 - DNA, 20 bp, Geobacillus thermoglucosidasius
cgaacggaagcttgcttctg

SEQ ID NO: 21738 - DNA, 20 bp, Myroides odoratimimus
aggggtagaaagagcttgct

SEQ ID NO: 21739 - DNA, 20 bp, Unknown Organism
  oligonucleotide from CDC group EO-2
ggtcggaggcgagggacttc

SEQ ID NO: 21740 - DNA, 20 bp, Moellerella wisconsensis
gccttgcgctgtcggatgaa

SEQ ID NO: 21741 - DNA, 20 bp, Leptotrichia buccalis
cacaggcgagccaaggcgga

SEQ ID NO: 21742 - DNA, 20 bp, Bacillus schlegellii
ggcgacccgctttaggaggg

SEQ ID NO: 21743 - DNA, 20 bp, Bacteroides capillosus
tatccaacctactccttaca

SEQ ID NO: 21744 - DNA, 20 bp, Bacteroides capilosus
aatgcagctgagtcgcatga

SEQ ID NO: 21745 - DNA, 20 bp, Oligella urethralis
aagctctctcatgctgccgt

SEQ ID NO: 21746 - DNA, 20 bp, Bacillus megaterium
taacaaggtagccgatcgga

SEQ ID NO: 21747 - DNA, 20 bp, Bacteroides capillosus
acggggataaagttagggac

SEQ ID NO: 21748 - DNA, 20 bp, Actinomyces naeslundii
agatgcgcctttgggtgttt

SEQ ID NO: 21749 - DNA, 20 bp, Prevotella corporis
gtcccctcgggactcctgtg

SEQ ID NO: 21750 - DNA, 20 bp, Staphylococcus schleiferi
gaaagtgccggtggatcacc

SEQ ID NO: 21751 - DNA, 20 bp, Bacillus circulans
atcggaagggcggttggatc

SEQ ID NO: 21752 - DNA, 20 bp, Prevotella melaninogenica
tgtccatcaggttaagctgg

SEQ ID NO: 21753 - DNA, 20 bp, Prevotella oralis
tatgcggggataaagttggg

SEQ ID NO: 21754 - DNA, 20 bp, Anaerococcus tetradius
cttcgcatgaagagcttatc

SEQ ID NO: 21755 - DNA, 20 bp, Proteus vulgaris
gcgagcggtaacaggaaaaa

SEQ ID NO: 21756 - DNA, 20 bp, Sphingobacterium multivorum
aacacgagaggaaggggggg

SEQ ID NO: 21757 - DNA, 20 bp, Prevotella intermedia
gagggacggtgcgatgcaaa

SEQ ID NO: 21758 - DNA, 20 bp, Moraxella osloensis
cagattgaaagcaggcggca

SEQ ID NO: 21759 - DNA, 20 bp, Bacteroides caccae
taaccgcaaggagcgtctag

SEQ ID NO: 21760 - DNA, 20 bp, Rhizobium radiobacter
agacgaacgctgggcggcag

SEQ ID NO: 21761 - DNA, 20 bp, Helcococcus ovis
taaccgttaggaggcagacg

SEQ ID NO: 21762 - DNA, 20 bp, Corynebacterium afermentans
caggtgttccgactttcatg

SEQ ID NO: 21763 - DNA, 20 bp, Geobacillus thermoglucosidasius
aaccccgtaagggagccagc

SEQ ID NO: 21764 - DNA, 20 bp, Prevotella melaninogenica
gaacgctagagctacaggct

SEQ ID NO: 21765 - DNA, 20 bp, Streptococcus macacae
cgggtgtaagagcggaaagt

SEQ ID NO: 21766 - DNA, 20 bp, Arcanobacterium haemolyticum
ctagatattctgctcttgcc

SEQ ID NO: 21767 - DNA, 20 bp, Enterococcus dispar
agtaaacacatgtttattat

SEQ ID NO: 21768 - DNA, 20 bp, Brevibacillus laterosporus
ccatttaaataaggtggcac

SEQ ID NO: 21769 - DNA, 20 bp, Gemella morbillorum
aggagagcttcttctctgga

SEQ ID NO: 21770 - DNA, 20 bp, Dolosicoccus paucivorans
caagtcgaacgcgactgtat

SEQ ID NO: 21771 - DNA, 20 bp, Kingella denitrificans
tcggaccttgtgctatttga

SEQ ID NO: 21772 - DNA, 20 bp, Bacillus niacini
cgagcgaatcttgaggtgct

SEQ ID NO: 21773 - DNA, 20 bp, Sphingobacterium multivorum
gctgggccaacacgagagga

SEQ ID NO: 21774 - DNA, 20 bp, Anaerococcus prevotii
atcaaagctccggcggtcta

SEQ ID NO: 21775 - DNA, 20 bp, Clostridium clostridiiforme
atgttgattggaacattcaa

SEQ ID NO: 21776 - DNA, 20 bp, Peptostreptococcus anaerobius
tgctagtcgagcgcgtctgt

SEQ ID NO: 21777 - DNA, 20 bp, Leuconostoc gelidum
cgtcacctaggagatggatc

SEQ ID NO: 21778 - DNA, 20 bp, Paenibacillus lautus
tgtttaaccccagggctcaa

SEQ ID NO: 21779 - DNA, 20 bp, Empedobacter brevis
ttggcaacaagatgcgaatc

SEQ ID NO: 21780 - DNA, 20 bp, Weeksella virosa
ctattcacgagctggatagt

SEQ ID NO: 21781 - DNA, 20 bp, Edwardsiella tarda
aagcctgctttctctcgctg

SEQ ID NO: 21782 - DNA, 20 bp, Eubacterium moniliforme
tgcgtaggtggccatgtaag

SEQ ID NO: 21783 - DNA, 20 bp, Clostridium clostridiiforme
gaagcgagcccgaaaggaga

SEQ ID NO: 21784 - DNA, 20 bp, Vibrio mimicus
agcgctaggtggaacctggc

SEQ ID NO: 21785 - DNA, 20 bp, Bacteroides thetaiotaomicron
aacccataggccgtaaggca

SEQ ID NO: 21786 - DNA, 20 bp, Globicatella sanguinis
ccataactagaacttgttct

SEQ ID NO: 21787 - DNA, 20 bp, Eubacterium moniliforme
cgatagtcctccgtgccgaa

SEQ ID NO: 21788 - DNA, 20 bp, Enterobacter amnigenus
agaggcttgttttctgggtg

SEQ ID NO: 21789 - DNA, 20 bp, Brevibacillus brevis
tgcaccttatggttagcggc

SEQ ID NO: 21790 - DNA, 20 bp, Brevibacillus brevis
agcgaatcttaaggtgcttg

SEQ ID NO: 21791 - DNA, 20 bp, Oligella urethralis
tacagatcccgccttggtag

SEQ ID NO: 21792 - DNA, 20 bp, Bacillus mycoides
ataacattttgcgctgcatg

SEQ ID NO: 21793 - DNA, 20 bp, Porphyromonas gingivalis
cctgaagggcgtaccgcaag

SEQ ID NO: 21794 - DNA, 20 bp, Bacillus schlegellii
cgccgacgggtccagagatg

SEQ ID NO: 21795 - DNA, 20 bp, Bacillus schlegellii
ttcgggcggaagcccgtctc

SEQ ID NO: 21796 - DNA, 20 bp, Leptotrichia buccalis
aggctgatgaaaggagacgc

SEQ ID NO: 21797 - DNA, 20 bp, Bacteroides thetaiotaomicron
ttggaaacaggatagccgta

SEQ ID NO: 21798 - DNA, 20 bp, Unknown Organism
  oligonucleotide from CDC group VB-3
tcgtaacaaggagccgtagg

SEQ ID NO: 21799 - DNA, 20 bp, Prevotella loescheii
atccggcttgcagcgcgaac

SEQ ID NO: 21800 - DNA, 20 bp, Anaerococcus tetradius
tagattccttcgggatgaaa

SEQ ID NO: 21801 - DNA, 20 bp, Streptococcus criceti
ttaactcatgttaatgactt

SEQ ID NO: 21802 - DNA, 20 bp, Oligella ureolytica
taactatcaagctagagtat

SEQ ID NO: 21803 - DNA, 20 bp, Bacillus schlegellii
agcctgtctcttagcggcgg

SEQ ID NO: 21804 - DNA, 20 bp, Enterococcus dispar
acaatagtaaacacatgttt

SEQ ID NO: 21805 - DNA, 20 bp, Micrococcus luteus
tggggggagccgcgaggggg

SEQ ID NO: 21806 - DNA, 20 bp, Anaerococcus prevotii
atgcaaaactccaaagccaa

SEQ ID NO: 21807 - DNA, 20 bp, Globicatella sanguinis
agtagattgacggtatctaa

SEQ ID NO: 21808 - DNA, 30 bp, Bacillus laevolacticus
taagccggatagctggtttctccgcatggg

SEQ ID NO: 21809 - DNA, 20 bp, Bacillus mycoides
gcgctgcatggcgcgaaatt

SEQ ID NO: 21810 - DNA, 20 bp, Clostridium clostridiiforme
ctgcgaggaagctccggcta

SEQ ID NO: 21811 - DNA, 20 bp, Empedobacter brevis
ggtacgattctttcgggaat

SEQ ID NO: 21812 - DNA, 20 bp, Gemella morbillorum
atatcagctagatgttgcat

SEQ ID NO: 21813 - DNA, 20 bp, Streptococcus macacae
gtgtaagagcggaaagttta

SEQ ID NO: 21814 - DNA, 20 bp, Streptococcus acidominimus
tagggcttctcttttgagca

SEQ ID NO: 21815 - DNA, 20 bp, Capnocytophaga sp.
tccggcccttacatcttggg

SEQ ID NO: 21816 - DNA, 30 bp, Kingella kingae
ggcagcacgagtacttgtacttggtggcga

SEQ ID NO: 21817 - DNA, 20 bp, Streptococcus ratti
cgcataagagagtttaacac

SEQ ID NO: 21818 - DNA, 20 bp, Clostridium clostridiiforme
gacttgacatccacgcggta

SEQ ID NO: 21819 - DNA, 20 bp, Microbacterium hominis
gcccgtcaagtcatgaagag

SEQ ID NO: 21820 - DNA, 20 bp, Clostridium clostridiiforme
agatcccaaaaagccatccc

SEQ ID NO: 21821 - DNA, 20 bp, Citrobacter freundii
agatgctaacgtgccttcgg

SEQ ID NO: 21822 - DNA, 20 bp, Actinomyces neuii
gtcagggaacgtgcggcgtg

SEQ ID NO: 21823 - DNA, 20 bp, Vibrio vulnificus
cgccaccactttgggtcatg

SEQ ID NO: 21824 - DNA, 20 bp, Bacillus mycoides
acaaggatagccgatcggaa

SEQ ID NO: 21825 - DNA, 20 bp, Pseudomonas mendocina
taataccctgcagttttgac

SEQ ID NO: 21826 - DNA, 20 bp, Streptococcus macacae
gcctttagagggattgaaag

SEQ ID NO: 21827 - DNA, 20 bp, Sphingobacterium multivorum
cggttgattaaatatttata

SEQ ID NO: 21828 - DNA, 20 bp, Leptotrichia buccalis
atgcaagtctttggcgaagc

SEQ ID NO: 21829 - DNA, 20 bp, Bacteroides merdae
tccttctagcaatagcagat

SEQ ID NO: 21830 - DNA, 20 bp, Neisseria flavescens
agattgaacgctgacgagca

SEQ ID NO: 21831 - DNA, 20 bp, Bacteroides capilosus
tcagggtgtgaaaaccacgg

SEQ ID NO: 21832 - DNA, 20 bp, Campylobacter curvus
cgaaagttgcggtgtgcttt

SEQ ID NO: 21833 - DNA, 20 bp, Pediococcus parvulus
cgcataacaaaattaaccgc

SEQ ID NO: 21834 - DNA, 20 bp, Bacteroides capillosus
tctaactaggattaaaggtt

SEQ ID NO: 21835 - DNA, 20 bp, Finegoldia magna
tgagacatccatacaggtgg

SEQ ID NO: 21836 - DNA, 20 bp, Sporosarcina ureae
cccattctcttctggcatga

SEQ ID NO: 21837 - DNA, 20 bp, Psychrobacter phenylpyruvicus
aagtcgagcggacagagaag

SEQ ID NO: 21838 - DNA, 20 bp, Staphylococcus schleiferi
tgactgccgggacaaaccgg

SEQ ID NO: 21839 - DNA, 20 bp, Bacillus megaterium
aaggtagccgatcggaaggt

SEQ ID NO: 21840 - DNA, 20 bp, Bacteroides capillosus
ggggcgcctacggaggtgct

SEQ ID NO: 21841 - DNA, 20 bp, Finegoldia magna
aagctatatagtgatataat

SEQ ID NO: 21842 - DNA, 20 bp, Finegoldia magna
cagagggaagctatatagtg

SEQ ID NO: 21843 - DNA, 20 bp, Bacillus mycoides
ggataacattttgcgctgca

SEQ ID NO: 21844 - DNA, 20 bp, Prevotella loescheii
tggcggtgaaggatggggat

SEQ ID NO: 21845 - DNA, 20 bp, Prevotella melaninogenica
caggaatgaacgctagagct

SEQ ID NO: 21846 - DNA, 20 bp, Micromonas micros
ttgtggaaatcctttcggga

SEQ ID NO: 21847 - DNA, 20 bp, Vibrio hollisae
ccagcgctaataccgctggg

SEQ ID NO: 21848 - DNA, 20 bp, Vibrio parahaemolyticus
agccaacttgcgaaagtcga

SEQ ID NO: 21849 - DNA, 20 bp, Moellerella wisconsensis
aatggcatctaaaactggtc

SEQ ID NO: 21850 - DNA, 20 bp, Brevibacillus laterosporus
aaataaggtggcaccttgac

SEQ ID NO: 21851 - DNA, 20 bp, Pediococcus inopinatus
taccgcataataaagtaaac

SEQ ID NO: 21852 - DNA, 20 bp, Anaerococcus tetradius
tggaataatctgggtgccgc

SEQ ID NO: 21853 - DNA, 30 bp, Corynebacterium group ANF
ctggggttgacatgcactagatgaggcgag

SEQ ID NO: 21854 - DNA, 30 bp, Dolosicoccus paucivorans
aagtgaaatccttcgggacatccagacagg

SEQ ID NO: 21855 - DNA, 20 bp, Corynebacterium auris
aacggaaggctcccgcttgc

SEQ ID NO: 21856 - DNA, 20 bp, Sphingobacterium multivorum
gacgggatccatcggagagc

SEQ ID NO: 21857 - DNA, 20 bp, Arcanobacterium haemolyticum
taacactgaacaaggcgttg

SEQ ID NO: 21858 - DNA, 20 bp, Enterobacter amnigenus
gttttctgggtgacgagcgg

SEQ ID NO: 21859 - DNA, 20 bp, Streptococcus iniae
actagagtacacatgtactt

SEQ ID NO: 21860 - DNA, 20 bp, Alloiococcus otitis
tctgctaccgcttatggata

SEQ ID NO: 21861 - DNA, 20 bp, Leuconostoc fallax
gcagtagaggcaagtggaac

SEQ ID NO: 21862 - DNA, 20 bp, Bacteroides stercoris
ttctttcttcggacagttgt

SEQ ID NO: 21863 - DNA, 20 bp, Providencia alcalifaciens
taaggagcaaagcaggggaa

SEQ ID NO: 21864 - DNA, 20 bp, Bacteroides merdae
aacgtagtctgaccggagtg

SEQ ID NO: 21865 - DNA, 20 bp, Moellerella wisconsensis
atggggatctgcctgacaga

SEQ ID NO: 21866 - DNA, 20 bp, Stenotrophomonas maltophilia
gaatgagcccatatgggatt

SEQ ID NO: 21867 - DNA, 20 bp, Streptococcus criceti
cccgatgccatccctagaga

SEQ ID NO: 21868 - DNA, 30 bp, Clostridium clostridiiforme
gccttcgggttgtaaacctctgttgcaggg

SEQ ID NO: 21869 - DNA, 20 bp, Shewanella algae
tcgtggatcagaatgcccgg

SEQ ID NO: 21870 - DNA, 20 bp, Bacteroides capillosus
ccgcgaccgcaaggaacggc

SEQ ID NO: 21871 - DNA, 20 bp, Clostridium clostridiiforme
taccagataaagctgagcac

SEQ ID NO: 21872 - DNA, 20 bp, Shewanella algae
atcgtggatcagaatgcccg

SEQ ID NO: 21873 - DNA, 20 bp, Bacillus niacini
aagtcggtttacgctgacac

SEQ ID NO: 21874 - DNA, 20 bp, Bacteroides merdae
ttgaacgtagtctgaccgga

SEQ ID NO: 21875 - DNA, 20 bp, Enterococcus faecium
ggtgaggtacccttttggag

SEQ ID NO: 21876 - DNA, 20 bp, Enterobacter amnigenus
gagcttgttttcgggtgacg

SEQ ID NO: 21877 - DNA, 20 bp, Streptococcus sp.
gtaccgtaaggagccagccg

SEQ ID NO: 21878 - DNA, 20 bp, Eremococcus coleocola
cgatacaacgagcagcaaac

SEQ ID NO: 21879 - DNA, 20 bp, Anaerococcus tetradius
tttcttcggaatgaaaataa

SEQ ID NO: 21880 - DNA, 20 bp, Actinomyces radingae
ttccgcatggggggtgtggg

SEQ ID NO: 21881 - DNA, 20 bp, Bacteroides merdae
gaggggcagcatgatttgta

SEQ ID NO: 21882 - DNA, 20 bp, Bacillus schlegellii
ggaagcctgtctcttagcgg

SEQ ID NO: 21883 - DNA, 20 bp, Granulicatella adiacens
acgagagcgaccgggcttgc

SEQ ID NO: 21884 - DNA, 20 bp, Bacillus schlegellii
gcctgtctcttagcggcgga

SEQ ID NO: 21885 - DNA, 20 bp, Citrobacter freundii
caagggtaaaccgtaggggg

SEQ ID NO: 21886 - DNA, 20 bp, Bacteroides thetaiotaomicron
gccgtaaggcatttgtgaag

SEQ ID NO: 21887 - DNA, 20 bp, Sphingomonas paucimobilis
aacctgcgggggatcacctc

SEQ ID NO: 21888 - DNA, 20 bp, Moraxella atlantae
cgaaagagggcgcttacccg

SEQ ID NO: 21889 - DNA, 20 bp, Bacteroides stercoris
gaattgcaactgactgagct

SEQ ID NO: 21890 - DNA, 20 bp, Comamonas testosteroni
acatggcaggaatcctttag

SEQ ID NO: 21891 - DNA, 20 bp, Myroides odoratimimus
cagagcttgaataatatgga

SEQ ID NO: 21892 - DNA, 20 bp, Anaerococcus tetradius
gtgttaggttcttggaataa

SEQ ID NO: 21893 - DNA, 20 bp, Achromobacter xylosoxidans
gtaacaaggaaaccgtatcg

SEQ ID NO: 21894 - DNA, 20 bp, Bacillus schlegellii
gcttgacatcccgccgacgg

SEQ ID NO: 21895 - DNA, 20 bp, Gemella morbillorum
aaaaggtgcaattgctatcg

SEQ ID NO: 21896 - DNA, 20 bp, Paenibacillus macerans
agcttttcttcgggagacag

SEQ ID NO: 21897 - DNA, 20 bp, Staphylococcus schleiferi
accatggtatgcccgtatcg

SEQ ID NO: 21898 - DNA, 20 bp, Bacteroides stercoris
ggcgatacaatgtcagcggc

SEQ ID NO: 21899 - DNA, 20 bp, Clostridium clostridiiforme
taggcggcgcttcaagtcgt

SEQ ID NO: 21900 - DNA, 20 bp, Prevotella oralis
tgtccctttttgcaggtacc

SEQ ID NO: 21901 - DNA, 20 bp, Microbacterium hominis
agtcatgaagagtcggtaac

SEQ ID NO: 21902 - DNA, 20 bp, Dolosicoccus paucivorans
agaccaagcggatctcttaa

SEQ ID NO: 21903 - DNA, 20 bp, Capnocytophaga sp.
taggtatttcttcggacagt

SEQ ID NO: 21904 - DNA, 20 bp, Clostridium innocuum
agtgttggaggaattcagtg

SEQ ID NO: 21905 - DNA, 20 bp, Porphyromonas endodontalis
actgatatgctagagaggag

SEQ ID NO: 21906 - DNA, 20 bp, Ralstonia pickettii
gtatcggaagggcggtggat

SEQ ID NO: 21907 - DNA, 20 bp, Campylobacter concisus
gctatcaaagccggtcgtag

SEQ ID NO: 21908 - DNA, 20 bp, Campylobacter curvus
aaatacctacggcgcaaccg

SEQ ID NO: 21909 - DNA, 20 bp, Clostridium clostridiiforme
aagcggatcgaccctttcgc

SEQ ID NO: 21910 - DNA, 20 bp, Bacteroides capilosus
ggagagctcatgacagagga

SEQ ID NO: 21911 - DNA, 20 bp, Paenibacillus lautus
tctcttagagtaactgctaa

SEQ ID NO: 21912 - DNA, 20 bp, Leptotrichia buccalis
ctgtgcttgcacaggcgagc

SEQ ID NO: 21913 - DNA, 20 bp, Anaerococcus prevotii
gatgaagcttaaatgatctc

SEQ ID NO: 21914 - DNA, 20 bp, Paenibacillus alvei
caaactctagagatagagtc

SEQ ID NO: 21915 - DNA, 20 bp, Bacteroides thetaiotaomicron
tcccgcatgggttttatatt

SEQ ID NO: 21916 - DNA, 20 bp, Dolosicoccus paucivorans
caccgccttctttgaaggca

SEQ ID NO: 21917 - DNA, 20 bp, Stenotrophomonas maltophilia
gcggaaacccataaagccct

SEQ ID NO: 21918 - DNA, 20 bp, Comamonas testosteroni
gggtcttcattgactcagta

SEQ ID NO: 21919 - DNA, 20 bp, Eremococcus coleocola
cccttgagcgggggataacg

SEQ ID NO: 21920 - DNA, 20 bp, Peptoniphilus indolicus
ttcgggaagaagttgagttg

SEQ ID NO: 21921 - DNA, 20 bp, Clostridium clostridiiforme
ggagagcttgagaagcagag

SEQ ID NO: 21922 - DNA, 20 bp, Clostridium subterminale
gcatgatttttgtaccaaag

SEQ ID NO: 21923 - DNA, 20 bp, Clostridium clostridiiforme
aagcacaaggacttgtccga

SEQ ID NO: 21924 - DNA, 20 bp, Sphingobacterium multivorum
acaccgcataacatatgtga

SEQ ID NO: 21925 - DNA, 20 bp, Bacteroides capilosus
  misc_feature (17)..(17): n is a, c, g, or t
aataaatgacggtactngat

SEQ ID NO: 21926 - DNA, 20 bp, Actinomyces radingae
tgttctgcgctttccgcatg

SEQ ID NO: 21927 - DNA, 20 bp, Porphyromonas gingivalis
aagggcgtaccgcaaggggc

SEQ ID NO: 21928 - DNA, 20 bp, Brevibacillus brevis
aacctccttcaattggttct

SEQ ID NO: 21929 - DNA, 20 bp, Clostridium clostridiiforme
cggcgcgcagacgaaactgg

SEQ ID NO: 21930 - DNA, 20 bp, Paenibacillus macerans
ggagacaggggacacaggtg

SEQ ID NO: 21931 - DNA, 20 bp, Morganella morganii
ggaggaaggtggcaaggtta

SEQ ID NO: 21932 - DNA, 20 bp, Streptococcus macacae
ttaaaagcattggcttaacc

SEQ ID NO: 21933 - DNA, 20 bp, Streptococcus sobrinus
gtttaaaagaagcaacggct

SEQ ID NO: 21934 - DNA, 20 bp, Brevibacillus laterosporus
taccggatagagttttgctt

SEQ ID NO: 21935 - DNA, 30 bp, Burkholderia gladioli
cggattaatccgcatacgatccacggatga

SEQ ID NO: 21936 - DNA, 20 bp, Bacillus schlegellii
tcgggcggaagcccgtctct

SEQ ID NO: 21937 - DNA, 20 bp, Prevotella disiens
atgttttgcatgtaccattc

SEQ ID NO: 21938 - DNA, 20 bp, Myroides odoratimimus
atcgatatggcatcgtattg

SEQ ID NO: 21939 - DNA, 20 bp, Finegoldia magna
agtagacagaagcttcggtg

SEQ ID NO: 21940 - DNA, 20 bp, Bacteroides ovatus
cactagactgtcactgacac

SEQ ID NO: 21941 - DNA, 20 bp, Alicyclobacillus acidocaldarius
ccgaagggacccctcatctc

SEQ ID NO: 21942 - DNA, 30 bp, Corynebacterium mycetoides
attggggacgaagtcgtaacaagggtagcc

SEQ ID NO: 21943 - DNA, 20 bp, Citrobacter freundii
aagcttggcagagatgcgtt

SEQ ID NO: 21944 - DNA, 20 bp, Bordetella trematum
gaaagaaacggcgccagcta

SEQ ID NO: 21945 - DNA, 20 bp, Haemophilus paraphrophilus
aactttaagtttggcgcccg

SEQ ID NO: 21946 - DNA, 20 bp, Bacillus schlegellii
ggggcgacccatccgtgccg

SEQ ID NO: 21947 - DNA, 20 bp, Bacillus schlegellii
cgcgtgcagcgctgaaggcg

SEQ ID NO: 21948 - DNA, 20 bp, Finegoldia magna
ccagcgaataaatgtccggg

SEQ ID NO: 21949 - DNA, 20 bp, Clostridium clostridiiforme
agcacaaggacttgtccgaa

SEQ ID NO: 21950 - DNA, 20 bp, Brevibacillus brevis
gtcgagcgaatcttaaggtg

SEQ ID NO: 21951 - DNA, 20 bp, Capnocytophaga sp.
atcacatttatattaaagct

SEQ ID NO: 21952 - DNA, 20 bp, Peptostreptococcus anaerobius
tgatgcttgcattgatgaaa

SEQ ID NO: 21953 - DNA, 30 bp, Corynebacterium argentoratense
ggaccatcctttagtgtgtgatggtggaaa

SEQ ID NO: 21954 - DNA, 20 bp, Brevibacillus brevis
ccttcaattggttctataag

SEQ ID NO: 21955 - DNA, 20 bp, Actinomyces neuii
gcatgctacattggtgtcta

SEQ ID NO: 21956 - DNA, 20 bp, Campylobacter concisus
atggttggatgccattgtgg

SEQ ID NO: 21957 - DNA, 20 bp, Empedobacter brevis
taatactttataacagattg

SEQ ID NO: 21958 - DNA, 20 bp, Bacteroides stercoris
tgctttgatggatggcgacc

SEQ ID NO: 21959 - DNA, 20 bp, Streptococcus acidominimus
ttctcttttgagcaggggag

SEQ ID NO: 21960 - DNA, 20 bp, Moellerella wisconsensis
tatggggatctgcctgacag

SEQ ID NO: 21961 - DNA, 20 bp, Globicatella sanguinis
aacgaaccataactagaact

SEQ ID NO: 21962 - DNA, 20 bp, Citrobacter freundii
agcttggcagagatgcgttg

SEQ ID NO: 21963 - DNA, 20 bp, Bacteroides vulgatus
cttgctaaggccgatggcga

SEQ ID NO: 21964 - DNA, 20 bp, Anaerobiospirillum succiniciproducens
cgggggaaagacttttagtt

SEQ ID NO: 21965 - DNA, 20 bp, Actinomyces radingae
ggggtgtgggaaaggggctt

SEQ ID NO: 21966 - DNA, 20 bp, Paenibacillus alvei
atgcaaactctagagataga

SEQ ID NO: 21967 - DNA, 20 bp, Paenibacillus alvei
gatagagtcccttcttcgga

SEQ ID NO: 21968 - DNA, 20 bp, Corynebacterium pilosum
aggccctgccttccagggtc

SEQ ID NO: 21969 - DNA, 20 bp, Stenotrophomonas maltophilia
cctgatcgttcagtccggat

SEQ ID NO: 21970 - DNA, 20 bp, Arcanobacterium haemolyticum
acctgcccctttctcttggg

SEQ ID NO: 21971 - DNA, 20 bp, Leptotrichia buccalis
gaagctgtgcttgcacaggc

SEQ ID NO: 21972 - DNA, 20 bp, Brevibacillus brevis
cctgtgcgtggaaagaactt

SEQ ID NO: 21973 - DNA, 20 bp, Prevotella loescheii
cgttgtcggccccttgggtc

SEQ ID NO: 21974 - DNA, 20 bp, Geobacillus stearothermophilus
gcggaccggattggggcttg

SEQ ID NO: 21975 - DNA, 20 bp, Propionibacterium acnes
aagtcgtacaagataaaagt

SEQ ID NO: 21976 - DNA, 20 bp, Sporosarcina ureae
catcccagtgaccgtcatgg

SEQ ID NO: 21977 - DNA, 20 bp, Listeria welshimeri
cccttcggggacaaagtgca

SEQ ID NO: 21978 - DNA, 20 bp, Anaerococcus tetradius
aaatattggattagtggcgg

SEQ ID NO: 21979 - DNA, 20 bp, Clostridium clostridiiforme
aggacttgtccgaaagagag

SEQ ID NO: 21980 - DNA, 20 bp, Propionibacterium propionicus
catctctgggataacagtcg

SEQ ID NO: 21981 - DNA, 20 bp, Proteus vulgaris
agcaacgatctctactggct

SEQ ID NO: 21982 - DNA, 20 bp, Myroides odoratimimus
cataccaaggcaacgatgat

SEQ ID NO: 21983 - DNA, 20 bp, Yersinia frederiksenii
cgtgaagtgattgacgttac

SEQ ID NO: 21984 - DNA, 20 bp, Vibrio harveyi
gtggtggacgacgtcaaagt

SEQ ID NO: 21985 - DNA, 20 bp, Streptococcus urinalis
ttaggaacttaaaaggagca

SEQ ID NO: 21986 - DNA, 20 bp, Peptoniphilus asaccharolyticus
ggtgaagatgaaatggatta

SEQ ID NO: 21987 - DNA, 20 bp, Campylobacter curvus
aatactccatactccattta

SEQ ID NO: 21988 - DNA, 20 bp, Staphylococcus haemolyticus
tagtgcacgtcttgacggta

SEQ ID NO: 21989 - DNA, 20 bp, Clostridium clostridiiforme
taaccgggatccctcttcgg

SEQ ID NO: 21990 - DNA, 20 bp, Brevibacillus laterosporus
ggatagagttttgcttcgca

SEQ ID NO: 21991 - DNA, 20 bp, Vibrio hollisae
atacgtactgaggtagaaag

SEQ ID NO: 21992 - DNA, 30 bp, Sphingobacterium multivorum
caacacgagaggaagggggggacgacgtcc

SEQ ID NO: 21993 - DNA, 20 bp, Raoultella terrigena
tgttgtgtaggcctaacaca

SEQ ID NO: 21994 - DNA, 20 bp, Cedecea lapagei
gcctgcgcgacagcgttcaa

SEQ ID NO: 21995 - DNA, 20 bp, Bacteroides distasonis
ggacgtgtcctattttgtat

SEQ ID NO: 21996 - DNA, 20 bp, Bacillus schlegellii
cggaagcccgtctcttagcg

SEQ ID NO: 21997 - DNA, 20 bp, Anaerococcus tetradius
accctataaagttagtcaat

SEQ ID NO: 21998 - DNA, 20 bp, Eubacterium moniliforme
acgaagttgctctttgggaa

SEQ ID NO: 21999 - DNA, 20 bp, Pseudomonas oryzihabitans
ggaggaagggcttacagcga

SEQ ID NO: 22000 - DNA, 20 bp, Clostridium clostridiiforme
ccagggtaggaggtttggat

SEQ ID NO: 22001 - DNA, 20 bp, Moraxella atlantae
ctacgggagaaaggagctta

SEQ ID NO: 22002 - DNA, 20 bp, Finegoldia magna
gtagacagaagcttcggtgg

SEQ ID NO: 22003 - DNA, 20 bp, Eubacterium moniliforme
cagcgacctcgtaagagtaa

SEQ ID NO: 22004 - DNA, 20 bp, Kocuria kristinae
tacccggatgcgactactgc

SEQ ID NO: 22005 - DNA, 20 bp, Pediococcus acidilactici
tgtctggtctgtactgcgct

SEQ ID NO: 22006 - DNA, 30 bp, Kingella kingae
aggagcccgtttaccacggtatgtttcatg

SEQ ID NO: 22007 - DNA, 20 bp, Porphyromonas gingivalis
acctgaagggcgtaccgcaa

SEQ ID NO: 22008 - DNA, 20 bp, Burkholderia cepacia
aaggtgcggtctggatcacc

SEQ ID NO: 22009 - DNA, 20 bp, Eubacterium moniliforme
gatgcaggatgagctcgcgt

SEQ ID NO: 22010 - DNA, 20 bp, Streptococcus equi
atgcaagtggaacgcacaga

SEQ ID NO: 22011 - DNA, 20 bp, Streptococcus cristatus
tattgcatgatagtcaatta

SEQ ID NO: 22012 - DNA, 20 bp, Abiotrophia defectiva
aggacatgggatcacatgat

SEQ ID NO: 22013 - DNA, 20 bp, Streptococcus oralis
ggtgcttgcatccgagcgga

SEQ ID NO: 22014 - DNA, 20 bp, Eremococcus coleocola
ccttgagcgggggataacgg

SEQ ID NO: 22015 - DNA, 20 bp, Bacteroides merdae
ttgagtgtgtttgaggtagg

SEQ ID NO: 22016 - DNA, 20 bp, Bacteroides stercoris
ggaaacggttcttttcttcg

SEQ ID NO: 22017 - DNA, 20 bp, Sporosarcina ureae
tctctcgcatgagggaatgt

SEQ ID NO: 22018 - DNA, 20 bp, Unknown Organism
  oligonucleotide from CDC group EO-2
tatcggggaaagatttatcg

SEQ ID NO: 22019 - DNA, 20 bp, Prevotella oralis
tcggccttttttggtcggtg

SEQ ID NO: 22020 - DNA, 20 bp, Anaerococcus prevotii
cataaatgatcaaagctccg

SEQ ID NO: 22021 - DNA, 20 bp, Anaerococcus prevotii
ccaaatgaaatcacatatgc

SEQ ID NO: 22022 - DNA, 30 bp, Citrobacter amalonaticus
gaatggttaataaccattttcattgacgtt

SEQ ID NO: 22023 - DNA, 20 bp, Paenibacillus amylolyticus
gcatcctctgatgcttagcg

SEQ ID NO: 22024 - DNA, 30 bp, Paenibacillus lautus
cagggaagaacgtctcttagagtaactgct

SEQ ID NO: 22025 - DNA, 20 bp, Dolosicoccus paucivorans
agaagaacagcgagtagagt

SEQ ID NO: 22026 - DNA, 20 bp, Bacteroides stercoris
agcgtaggcggggtattaag

SEQ ID NO: 22027 - DNA, 20 bp, Lactococcus raffinolactis
cagccctaagtgacgcagca

SEQ ID NO: 22028 - DNA, 20 bp, Bacteroides stercoris
tcaaagcttgctttgatgga

SEQ ID NO: 22029 - DNA, 20 bp, Porphyromonas gingivalis
ggcgtaccgcaaggggcgca

SEQ ID NO: 22030 - DNA, 20 bp, Bacteroides capillosus
ctagagatagtgaggccctt

SEQ ID NO: 22031 - DNA, 20 bp, Anaerococcus prevotii
acttagttaccagcgaataa

SEQ ID NO: 22032 - DNA, 20 bp, Clostridium clostridiiforme
tgtgtcctatcaggcagttg

SEQ ID NO: 22033 - DNA, 20 bp, Alloiococcus otitis
tgccaccttcagagatgaag

SEQ ID NO: 22034 - DNA, 20 bp, Actinomyces naeslundii
ccttttggggggtgtggatg

SEQ ID NO: 22035 - DNA, 20 bp, Bacteroides capillosus
tatcctatgcaggcatctaa

SEQ ID NO: 22036 - DNA, 20 bp, Oligella ureolytica
gcactattaactatcaagct

SEQ ID NO: 22037 - DNA, 20 bp, Bacillus schlegellii
cgcccgaaggcgcgggcagc

SEQ ID NO: 22038 - DNA, 20 bp, Brevibacillus brevis
tagccgcatcggaagggcgc

SEQ ID NO: 22039 - DNA, 20 bp, Streptococcus constellatus
acaggatgcccgtagtttac

SEQ ID NO: 22040 - DNA, 20 bp, Sphingobacterium multivorum
ttaacaccgcataacatcaa

SEQ ID NO: 22041 - DNA, 20 bp, Peptostreptococcus anaerobius
cgtctgatttgatgcttgca

SEQ ID NO: 22042 - DNA, 20 bp, Clostridium clostridiiforme
tcgggtgctctcaaagccgg

SEQ ID NO: 22043 - DNA, 20 bp, Bacillus mycoides
aagggcggtggatcacctcc

SEQ ID NO: 22044 - DNA, 20 bp, Dolosicoccus paucivorans
ctcgtttgacggtatctcac

SEQ ID NO: 22045 - DNA, 20 bp, Bacteroides distasonis
tgtgggacgtgtcctatttt

SEQ ID NO: 22046 - DNA, 30 bp, Pediococcus acidilactici
cgaaggcggctgtctggtctgtactgcgct

SEQ ID NO: 22047 - DNA, 20 bp, Lactococcus raffinolactis
agtgctagttgtttggggct

SEQ ID NO: 22048 - DNA, 20 bp, Paenibacillus macerans
gagcttttcttcgggagaca

SEQ ID NO: 22049 - DNA, 20 bp, Salmonella typhi
atcaggcagcagcttgcttg

SEQ ID NO: 22050 - DNA, 20 bp, Leuconostoc lactis
agaatgactagggtgaagtc

SEQ ID NO: 22051 - DNA, 20 bp, Vibrio cholerae
ggtgatccaccgccaggttc

SEQ ID NO: 22052 - DNA, 20 bp, Bacillus schlegellii
cgacccatccgtgccggagt

SEQ ID NO: 22053 - DNA, 20 bp, Bacillus schlegellii
cgtacaaggtaccgtaccgg

SEQ ID NO: 22054 - DNA, 20 bp, Alloiococcus otitis
gaaatgaaaggtggctctgc

SEQ ID NO: 22055 - DNA, 20 bp, Brevibacillus brevis
gaaggcagccagccgcctaa

SEQ ID NO: 22056 - DNA, 20 bp, Clostridium clostridiiforme
gcggtagagaagcgaaagcg

SEQ ID NO: 22057 - DNA, 20 bp, Vibrio harveyi
ctccggaagttcggaatcgc

SEQ ID NO: 22058 - DNA, 20 bp, Bacillus circulans
tatcggaagggcggttggat

SEQ ID NO: 22059 - DNA, 20 bp, Corynebacterium mycetoides
tggggatcggcgattgggga

SEQ ID NO: 22060 - DNA, 20 bp, Campylobacter curvus
atagtggaggacaacagttg

SEQ ID NO: 22061 - DNA, 20 bp, Sphingomonas paucimobilis
tgcttggcatttgggtggcg

SEQ ID NO: 22062 - DNA, 20 bp, Stenotrophomonas maltophilia
gcgggatctgcccgatacga

SEQ ID NO: 22063 - DNA, 20 bp, Clostridium clostridiiforme
gtgtcgggggacaaagtcct

SEQ ID NO: 22064 - DNA, 20 bp, Clostridium clostridiiforme
tccacgcggtagagaagcga

SEQ ID NO: 22065 - DNA, 20 bp, Bacteroides stercoris
catagttttcccgcatggaa

SEQ ID NO: 22066 - DNA, 20 bp, Bacteroides stercoris
gctgttggcgatacaatgtc

SEQ ID NO: 22067 - DNA, 20 bp, Bacillus flexus
taacattttctcttgcataa

SEQ ID NO: 22068 - DNA, 20 bp, Alloiococcus otitis
ctgctaccgcttatggatag

SEQ ID NO: 22069 - DNA, 20 bp, Weeksella virosa
aaacctattcacgagctgga

SEQ ID NO: 22070 - DNA, 20 bp, Streptococcus infantarius
agtttccaaagcgaacaagt

SEQ ID NO: 22071 - DNA, 20 bp, Myroides odoratimimus
ataatatggaagtaactaga

SEQ ID NO: 22072 - DNA, 20 bp, Clostridium clostridiiforme
gggccggtaacgcggccttt

SEQ ID NO: 22073 - DNA, 20 bp, Paenibacillus macerans
cctagggtgggcactctaac

SEQ ID NO: 22074 - DNA, 20 bp, Campylobacter curvus
ggtttctcgctatgggatga

SEQ ID NO: 22075 - DNA, 20 bp, Geobacillus stearothermophilus
cggattggggcttgccttga

SEQ ID NO: 22076 - DNA, 20 bp, Paenibacillus apiarius
gcggagctgacggagtgctt

SEQ ID NO: 22077 - DNA, 20 bp, Actinomyces naeslundii
tcgaacggtgaaggcgacct

SEQ ID NO: 22078 - DNA, 20 bp, Myroides odoratimimus
gtgaaatttcctagcttaac

SEQ ID NO: 22079 - DNA, 20 bp, Bacillus schlegellii
agcggggagcgggcggaagc

SEQ ID NO: 22080 - DNA, 20 bp, Streptococcus criceti
tcaagtgacggtatcttacc

SEQ ID NO: 22081 - DNA, 20 bp, Bacteroides stercoris
ttggcgatacaatgtcagcg

SEQ ID NO: 22082 - DNA, 20 bp, Edwardsiella tarda
agcctgctttctctcgctga

SEQ ID NO: 22083 - DNA, 20 bp, Anaerobiospirillum succiniciproducens
aacgctgttttaggcctaat

SEQ ID NO: 22084 - DNA, 20 bp, Streptococcus sanguinis
catgatattgaatatcgcat

SEQ ID NO: 22085 - DNA, 20 bp, Myroides odoratimimus
tagcttaactaggacactgc

SEQ ID NO: 22086 - DNA, 20 bp, Clostridium clostridiiforme
ggtagagaagcgaaagcgga

SEQ ID NO: 22087 - DNA, 20 bp, Paenibacillus lautus
ttgggtgtttaaccccaggg

SEQ ID NO: 22088 - DNA, 30 bp, Prevotella corporis
gaggagcaagctctgtctgttcgctcgact

SEQ ID NO: 22089 - DNA, 20 bp, Brevibacillus centrosporus
ggatacttccggggaacccg

SEQ ID NO: 22090 - DNA, 20 bp, Pediococcus dextrinicus
ggagatttaaaagtaaacga

SEQ ID NO: 22091 - DNA, 20 bp, Paenibacillus validus
cggccctttccttcgggata

SEQ ID NO: 22092 - DNA, 20 bp, Myroides odoratimimus
ttaactaggacactgccatt

SEQ ID NO: 22093 - DNA, 20 bp, Pediococcus parvulus
ttttgagatgcttgcatcga

SEQ ID NO: 22094 - DNA, 20 bp, Microbacterium hominis
accagcaggcggtggccctc

SEQ ID NO: 22095 - DNA, 20 bp, Propionibacterium avidum
tgtgtgggggtagccgtcga

SEQ ID NO: 22096 - DNA, 20 bp, Bacillus azotoformans
ctaaggagactgccgggaca

SEQ ID NO: 22097 - DNA, 20 bp, Brevibacillus centrosporus
cttttgtttcatggcaaaag

SEQ ID NO: 22098 - DNA, 30 bp, Arcanobacterium haemolyticum
gaaggctcctgcttgcgggggttggattag

SEQ ID NO: 22099 - DNA, 20 bp, Pediococcus dextrinicus
agatttaaaagtaaacgagt

SEQ ID NO: 22100 - DNA, 20 bp, Staphylococcus schleiferi
acaatgattggggtgaaagt

SEQ ID NO: 22101 - DNA, 20 bp, Achromobacter xylosoxidans
cttaataccggcatacgccc

SEQ ID NO: 22102 - DNA, 20 bp, Clostridium clostridiiforme
cggcgagactgccatcgaca

SEQ ID NO: 22103 - DNA, 20 bp, Bacillus sp
aagtttggatccatggctca

SEQ ID NO: 22104 - DNA, 20 bp, Neisseria polysaccharea
tcccttcagtggatcactag

SEQ ID NO: 22105 - DNA, 20 bp, Anaerococcus tetradius
agttagtcaatcgcatggta

SEQ ID NO: 22106 - DNA, 20 bp, Streptococcus infantarius
gcaagctaagttttcagcgt

SEQ ID NO: 22107 - DNA, 20 bp, Clostridium clostridiiforme
actccggcgagactgccatc

SEQ ID NO: 22108 - DNA, 20 bp, Finegoldia magna
ttttaacggtcaaagattta

SEQ ID NO: 22109 - DNA, 20 bp, Sphingobacterium multivorum
atcacacgtgctacaatgga

SEQ ID NO: 22110 - DNA, 20 bp, Streptococcus acidominimus
tcttttgagcaggggagaca

SEQ ID NO: 22111 - DNA, 20 bp, Enterobacter hormaechei
acacgaaggaggtgatccac

SEQ ID NO: 22112 - DNA, 20 bp, Bacillus schlegellii
cgacccgctttaggaggggc

SEQ ID NO: 22113 - DNA, 20 bp, Clostridium clostridiiforme
tcaaaagccgaggctcaacc

SEQ ID NO: 22114 - DNA, 30 bp, Peptoniphilus asaccharolyticus
atgtgaaaggcaagggctcaacccttgtaa

SEQ ID NO: 22115 - DNA, 20 bp, Capnocytophaga sp.
aggtatttcttcggacagtt

SEQ ID NO: 22116 - DNA, 20 bp, Leptotrichia buccalis
ataaaacctggtgttgtcag

SEQ ID NO: 22117 - DNA, 20 bp, Staphylococcus carnosus
gaagtcgtaacaaaatagcc

SEQ ID NO: 22118 - DNA, 20 bp, Enterobacter amnigenus
gagaggcttgttttctgggt

SEQ ID NO: 22119 - DNA, 20 bp, Prevotella buccae
gcaaaaccgggattggggct

SEQ ID NO: 22120 - DNA, 20 bp, Bacillus laevolacticus
cctctgaccgcgctacagag

SEQ ID NO: 22121 - DNA, 20 bp, Brevibacillus brevis
tggggtaaccggaaggcagc

SEQ ID NO: 22122 - DNA, 20 bp, Clostridium clostridiiforme
gtagagaagcgaaagcggat

SEQ ID NO: 22123 - DNA, 20 bp, Prevotella corporis
caagctctgtctgttcgctc

SEQ ID NO: 22124 - DNA, 20 bp, Bacteroides capilosus
ataccgcataatgcagctga

SEQ ID NO: 22125 - DNA, 20 bp, Peptoniphilus asaccharolyticus
gattccttcggggtgaagat

SEQ ID NO: 22126 - DNA, 20 bp, Streptococcus iniae
ggtgcttgcactaatccaaa

SEQ ID NO: 22127 - DNA, 20 bp, Bacteroides stercoris
acccttgcgggtagttccat

SEQ ID NO: 22128 - DNA, 20 bp, Enterococcus durans
aacaaggtacgccgtatcgg

SEQ ID NO: 22129 - DNA, 20 bp, Prevotella loescheii
gaagtgcggtggataactgc

SEQ ID NO: 22130 - DNA, 30 bp, Listeria monocytogenes
ggtttcggctatcgcttacagatggggccc

SEQ ID NO: 22131 - DNA, 20 bp, Actinomyces radingae
aagtttctggagggagatgg

SEQ ID NO: 22132 - DNA, 20 bp, Citrobacter werkmanii
gattgaacgctgcgcgcgca

SEQ ID NO: 22133 - DNA, 20 bp, Acinetobacter baumannii
tcgtacaggtagccgtaggg

SEQ ID NO: 22134 - DNA, 20 bp, Prevotella denticola
gacgtgtccctatttgcagg

SEQ ID NO: 22135 - DNA, 20 bp, Streptococcus bovis
actggtacactgagagatgg

SEQ ID NO: 22136 - DNA, 20 bp, Gemella morbillorum
cgatagctaatcccgcatat

SEQ ID NO: 22137 - DNA, 20 bp, Actinomyces radingae
ggtgtgggaaaggggctttt

SEQ ID NO: 22138 - DNA, 30 bp, Unknown Organism
  oligonucleotide from CDC group VB-3
gtagctagtctaaccttccagggggacggt

SEQ ID NO: 22139 - DNA, 20 bp, Bacteroides ovatus
acgaatatcgcatgatattt

SEQ ID NO: 22140 - DNA, 20 bp, Citrobacter freundii
gagatgctaacgtgccttcg

SEQ ID NO: 22141 - DNA, 20 bp, Alicyclobacillus acidocaldarius
cccgaagggacccctcatct

SEQ ID NO: 22142 - DNA, 20 bp, Pseudomonas mendocina
ctggttaataccctgcagtt

SEQ ID NO: 22143 - DNA, 20 bp, Propionibacterium propionicus
caattgtgacgaagcttttt

SEQ ID NO: 22144 - DNA, 20 bp, Brevibacillus brevis
tgtgcgtggaaagaacttcg

SEQ ID NO: 22145 - DNA, 20 bp, Dolosicoccus paucivorans
atgattcgcatgtttcattg

SEQ ID NO: 22146 - DNA, 20 bp, Globicatella sanguinis
gcatagacaatttaaccgcc

SEQ ID NO: 22147 - DNA, 20 bp, Pediococcus dextrinicus
tcaaggtgcttgcaccaagg

SEQ ID NO: 22148 - DNA, 20 bp, Anaerococcus tetradius
ataatctgggtgccgcagct

SEQ ID NO: 22149 - DNA, 20 bp, Fusobacterium necrogenes
tcaccaaggccatgataggt

SEQ ID NO: 22150 - DNA, 20 bp, Pseudomonas mendocina
cttagagtgcccccccgacg

SEQ ID NO: 22151 - DNA, 20 bp, Unknown Organism
  oligonucleotide from CDC group EF-4B
agacggttacttaagtcaga

SEQ ID NO: 22152 - DNA, 20 bp, Citrobacter amalonaticus
atgaacgctgttggcaggcc

SEQ ID NO: 22153 - DNA, 20 bp, Staphylococcus carnosus
ggtgaagtcgtaacaaaata

SEQ ID NO: 22154 - DNA, 20 bp, Moellerella wisconsensis
gaaggcgttgatattaatac

SEQ ID NO: 22155 - DNA, 20 bp, Dolosicoccus paucivorans
ataccgcataaatcaatgat

SEQ ID NO: 22156 - DNA, 20 bp, Geobacillus thermoglucosidasius
ctagggggactgcccggtta

SEQ ID NO: 22157 - DNA, 20 bp, Lactococcus raffinolactis
tgagtgctagttgtttgggg

SEQ ID NO: 22158 - DNA, 20 bp, Neisseria meningitidis
gtcatgaagcataccgggta

SEQ ID NO: 22159 - DNA, 20 bp, Helcococcus kunzii
acaggaatatcctagagata

SEQ ID NO: 22160 - DNA, 20 bp, Bacillus laevolacticus
accgcgctacagagattgac

SEQ ID NO: 22161 - DNA, 20 bp, Myroides odoratus
tctagagaccggcggatggg

SEQ ID NO: 22162 - DNA, 20 bp, Bacillus smithii
cgtaacaaaaagccgtatcg

SEQ ID NO: 22163 - DNA, 20 bp, Anaerococcus tetradius
cgaataataccctatgacat

SEQ ID NO: 22164 - DNA, 20 bp, Dolosicoccus paucivorans
atggtacaacgagaagcaac

SEQ ID NO: 22165 - DNA, 20 bp, Kocuria rosea
gcccgtcaagtcacgaaaag

SEQ ID NO: 22166 - DNA, 20 bp, Paenibacillus macerans
tttcttcgggagacagggga

SEQ ID NO: 22167 - DNA, 20 bp, Clostridium clostridiiforme
caaggaagggaacgtgaaca

SEQ ID NO: 22168 - DNA, 20 bp, Corynebacterium auris
gaacggaaggctcccgcttg

SEQ ID NO: 22169 - DNA, 20 bp, Bacteroides merdae
aaagtggaggacgtgtcctt

SEQ ID NO: 22170 - DNA, 20 bp, Microbacterium hominis
cccgggtctggtacacgcgc

SEQ ID NO: 22171 - DNA, 20 bp, Empedobacter brevis
aggggtacgattctttcggg

SEQ ID NO: 22172 - DNA, 20 bp, Shewanella putrefaciens
cttcagagatagcttagtgc

SEQ ID NO: 22173 - DNA, 20 bp, Vibrio harveyi
tcgactccggaagttcggaa

SEQ ID NO: 22174 - DNA, 20 bp, Geobacillus thermoglucosidasius
ggaccgaacggaagcttgct

SEQ ID NO: 22175 - DNA, 20 bp, Corynebacterium group ANF
ccactttgtgtggtgtggtg

SEQ ID NO: 22176 - DNA, 20 bp, Fusobacterium necrogenes
tgccttcgtgccccttcggg

SEQ ID NO: 22177 - DNA, 20 bp, Streptococcus equi
tacaattatctgtgagtcgc

SEQ ID NO: 22178 - DNA, 20 bp, Kocuria rosea
atcgcagatgcagcaacgct

SEQ ID NO: 22179 - DNA, 20 bp, Vibrio hollisae
cggggaggaaatccccagcg

SEQ ID NO: 22180 - DNA, 20 bp, Peptoniphilus indolicus
tgagttggattagcggcgga

SEQ ID NO: 22181 - DNA, 20 bp, Vibrio hollisae
ccgctgggggatgacagtac

SEQ ID NO: 22182 - DNA, 20 bp, Paenibacillus alvei
tgagggagatgagaaaggcg

SEQ ID NO: 22183 - DNA, 20 bp, Streptococcus macacae
atgacagcttttatcgcatg

SEQ ID NO: 22184 - DNA, 20 bp, Sporosarcina pasteurii
ggcttcggctgtctctgcag

SEQ ID NO: 22185 - DNA, 20 bp, Bacteroides capillosus
tacaacggaataacccggcg

SEQ ID NO: 22186 - DNA, 20 bp, Anaerococcus prevotii
atcgtagaaacacatgtttc

SEQ ID NO: 22187 - DNA, 20 bp, Neisseria subflava
gagcgcaaccccttgtacat

SEQ ID NO: 22188 - DNA, 20 bp, Pseudoramibacter alactolyticus
tatggcttaacacatgcaag

SEQ ID NO: 22189 - DNA, 20 bp, Staphylococcus succinus
aaactactatctggtcccgt

SEQ ID NO: 22190 - DNA, 20 bp, Ralstonia pickettii
tatcggaagggcggtggatc

SEQ ID NO: 22191 - DNA, 20 bp, Fusobacterium necrogenes
gtttgacatcctaggaagtt

SEQ ID NO: 22192 - DNA, 20 bp, Escherichia fergusonii
aacagggatcagcttgctga

SEQ ID NO: 22193 - DNA, 20 bp, Streptococcus macacae
cggaaagtttacactgtgac

SEQ ID NO: 22194 - DNA, 20 bp, Propionibacterium acnes
agtcgtacaagataaaagta

SEQ ID NO: 22195 - DNA, 20 bp, Clostridium clostridiiforme
agataaagctgagcactccg

SEQ ID NO: 22196 - DNA, 20 bp, Finegoldia magna
aatgacagtaccatagaaga

SEQ ID NO: 22197 - DNA, 20 bp, Eubacterium moniliforme
ttgggaagccctcgggtgga

SEQ ID NO: 22198 - DNA, 20 bp, Brevibacterium epidermidis
cgaccgtcggacgcatgtct

SEQ ID NO: 22199 - DNA, 20 bp, Haemophilus segnis
ttaggtttggcgcccgtagc

SEQ ID NO: 22200 - DNA, 20 bp, Anaerobiospirillum succiniciproducens
gggaggggagggaacccaca

SEQ ID NO: 22201 - DNA, 20 bp, Brevibacillus thermoruber
gtcgagcggatcctgtttgg

SEQ ID NO: 22202 - DNA, 20 bp, Anaerococcus tetradius
tgaaaaatattggattagtg

SEQ ID NO: 22203 - DNA, 20 bp, Porphyromonas endodontalis
cattattttagcttgctaag

SEQ ID NO: 22204 - DNA, 20 bp, Sporosarcina ureae
cccggggttattcccgaata

SEQ ID NO: 22205 - DNA, 20 bp, Streptococcus iniae
cttaagttaaaaggagcaaa

SEQ ID NO: 22206 - DNA, 20 bp, Bacteroides merdae
gcagcatgatttgtagcaat

SEQ ID NO: 22207 - DNA, 20 bp, Streptococcus sanguinis
agttcacactgtgaccggat

SEQ ID NO: 22208 - DNA, 20 bp, Yersinia frederiksenii
gaggaaggcatttcacttaa

SEQ ID NO: 22209 - DNA, 20 bp, Anaerococcus prevotii
gacagaagcctcggtggaag

SEQ ID NO: 22210 - DNA, 20 bp, Streptococcus criceti
catcccgatgccatccctag

SEQ ID NO: 22211 - DNA, 20 bp, Peptoniphilus asaccharolyticus
agtcgagcgatgaaaatcaa

SEQ ID NO: 22212 - DNA, 20 bp, Bacteroides capilosus
ctgagtcgcatgacactggc

SEQ ID NO: 22213 - DNA, 30 bp, Corynebacterium kutscheri
tttgtggagggagtggtcgaaggtgggatt

SEQ ID NO: 22214 - DNA, 20 bp, Leuconostoc fallax
caagtcgaacgctagtcgcg

SEQ ID NO: 22215 - DNA, 20 bp, Bacillus fusiformis
catggtgaaagactgaaaga

SEQ ID NO: 22216 - DNA, 20 bp, Geobacillus thermoglucosidasius
tctagggggactgcccggtt

SEQ ID NO: 22217 - DNA, 20 bp, Prevotella loescheii
cgggtgctcaacatccggct

SEQ ID NO: 22218 - DNA, 20 bp, Streptococcus criceti
acgttgagtagagtggaaag

SEQ ID NO: 22219 - DNA, 20 bp, Finegoldia magna
aggtattcgtatcgtaaagt

SEQ ID NO: 22220 - DNA, 20 bp, Eubacterium moniliforme
gcatatagagatatatgttc

SEQ ID NO: 22221 - DNA, 20 bp, Prevotella bivia
tgaagttcgtgaccgtacag

SEQ ID NO: 22222 - DNA, 20 bp, Suttonella indologenes
tgaacgctggcgggcccaat

SEQ ID NO: 22223 - DNA, 20 bp, Corynebacterium pilosum
ctggtcttccggattagctt

SEQ ID NO: 22224 - DNA, 30 bp, Bacteroides capillosus
gcacggtaaacgatggatgcccgttgtatg

SEQ ID NO: 22225 - DNA, 20 bp, Paenibacillus macerans
atgagggagttgggaaaggc

SEQ ID NO: 22226 - DNA, 30 bp, Corynebacterium cystitidis
tcacgtatcttttgtgggtgtgtggaaagg

SEQ ID NO: 22227 - DNA, 20 bp, Bacteroides stercoris
tatccaacctgccgacaaca

SEQ ID NO: 22228 - DNA, 20 bp, Leuconostoc pseudomesenteroides
gtcgcatgatacgaagttaa

SEQ ID NO: 22229 - DNA, 20 bp, Anaerobiospirillum succiniciproducens
ggggaaagacttttagttgc

SEQ ID NO: 22230 - DNA, 20 bp, Pediococcus dextrinicus
gagatttaaaagtaaacgag

SEQ ID NO: 22231 - DNA, 20 bp, Streptococcus macacae
agttaaaagcattggcttaa

SEQ ID NO: 22232 - DNA, 20 bp, Bacillus azotoformans
ggcttgagccaatcccataa

SEQ ID NO: 22233 - DNA, 20 bp, Globicatella sanguinis
acatctcttgcatatcttag

SEQ ID NO: 22234 - DNA, 20 bp, Streptococcus gallolyticus
gtcgtaacaaaaaacccgta

SEQ ID NO: 22235 - DNA, 20 bp, Bacteroides ovatus
attaataccggatagcatac

SEQ ID NO: 22236 - DNA, 20 bp, Staphylococcus schleiferi
tcgagcgaacggacaggagc

SEQ ID NO: 22237 - DNA, 20 bp, Sphingobacterium multivorum
attcatggcccttacgcttc

SEQ ID NO: 22238 - DNA, 20 bp, Prevotella loescheii
gatgctcgttgtcggcccct

SEQ ID NO: 22239 - DNA, 20 bp, Propionibacterium propionicus
gattttttttggttggggat

SEQ ID NO: 22240 - DNA, 20 bp, Geobacillus thermoglucosidasius
cccggttacaagtccggagg

SEQ ID NO: 22241 - DNA, 20 bp, Brevibacillus laterosporus
gatagagttttgcttcgcat

SEQ ID NO: 22242 - DNA, 20 bp, Paenibacillus alvei
tcccttcttcggaacattca

SEQ ID NO: 22243 - DNA, 20 bp, Stenotrophomonas maltophilia
aggcttgtctctctgggtgg

SEQ ID NO: 22244 - DNA, 20 bp, Facklamia sourekii
agcgcaggcagtttgttaag

SEQ ID NO: 22245 - DNA, 20 bp, Staphylococcus auricularis
gttaggggggttccgcccct

SEQ ID NO: 22246 - DNA, 20 bp, Sphingobacterium multivorum
agagtgcagagacgcactcg

SEQ ID NO: 22247 - DNA, 20 bp, Streptococcus infantarius
acgtagttagccgttttttt

SEQ ID NO: 22248 - DNA, 20 bp, Propionibacterium acnes
tacaagataaaagtaccgga

SEQ ID NO: 22249 - DNA, 30 bp, Pediococcus inopinatus
tcgttgaatgatttagagatgcttgcatcg

SEQ ID NO: 22250 - DNA, 20 bp, Streptococcus macacae
agctattgaaactgtcagac

SEQ ID NO: 22251 - DNA, 20 bp, Sphingobacterium multivorum
gggccaacacgagaggaagg

SEQ ID NO: 22252 - DNA, 20 bp, Corynebacterium cystitidis
cctggtagccatgctgaaac

SEQ ID NO: 22253 - DNA, 20 bp, Campylobacter concisus
ggtgagcgaatcgctatcaa

SEQ ID NO: 22254 - DNA, 20 bp, Finegoldia magna
agtcgaacgggatttagtag

SEQ ID NO: 22255 - DNA, 20 bp, Capnocytophaga sp.
aagctgaggcggtgaaagat

SEQ ID NO: 22256 - DNA, 20 bp, Proteus mirabilis
caaggcaaccgtcaggggaa

SEQ ID NO: 22257 - DNA, 20 bp, Vibrio hollisae
ttctggagagattcagaagt

SEQ ID NO: 22258 - DNA, 20 bp, Shewanella putrefaciens
agaagtgggtagctaacctt

SEQ ID NO: 22259 - DNA, 20 bp, Clostridium cadaveris
catattatggtttttctgca

SEQ ID NO: 22260 - DNA, 20 bp, Prevotella loescheii
aagtgcggtggataactgct

SEQ ID NO: 22261 - DNA, 20 bp, Sporosarcina pasteurii
tccgccgctaacaaaggaag

SEQ ID NO: 22262 - DNA, 20 bp, Campylobacter concisus
gtaacagggagccgaccgga

SEQ ID NO: 22263 - DNA, 20 bp, Bacteroides capillosus
gcgaacgatctagagatagt

SEQ ID NO: 22264 - DNA, 20 bp, Streptococcus macacae
gattgaaaggtacaacagta

SEQ ID NO: 22265 - DNA, 20 bp, Leptotrichia buccalis
gaacctgcaaagccggtcca

SEQ ID NO: 22266 - DNA, 20 bp, Psychrobacter phenylpyruvicus
ccaaataagctattgtctct

SEQ ID NO: 22267 - DNA, 20 bp, Streptococcus ferus
agtctgaagtgaaaggctat

SEQ ID NO: 22268 - DNA, 20 bp, Corynebacterium coyleae
ggccccagagatgctggttt

SEQ ID NO: 22269 - DNA, 20 bp, Bacteroides capillosus
taactaggattaaaggttta

SEQ ID NO: 22270 - DNA, 20 bp, Vibrio vulnificus
actttgggtcatgactgggg

SEQ ID NO: 22271 - DNA, 20 bp, Paenibacillus apiarius
gtcgagcggagctgacggag

SEQ ID NO: 22272 - DNA, 20 bp, Pediococcus parvulus
ctttcgttaattgattttga

SEQ ID NO: 22273 - DNA, 20 bp, Anaerococcus tetradius
aataatctgggtgccgcagc

SEQ ID NO: 22274 - DNA, 20 bp, Brevibacillus brevis
accttatggttagcggcgga

SEQ ID NO: 22275 - DNA, 20 bp, Unknown Organism
  oligonucleotide from CDC group VB-3
cttccagggggacggttacc

SEQ ID NO: 22276 - DNA, 20 bp, Prevotella bivia
ttggactaataccttatgta

SEQ ID NO: 22277 - DNA, 20 bp, Streptococcus macacae
ctccacgagatcggtgagtc

SEQ ID NO: 22278 - DNA, 20 bp, Vibrio harveyi
gcgtcgagttccggatcgga

SEQ ID NO: 22279 - DNA, 20 bp, Leptotrichia buccalis
acaggcgagccaaggcggac

SEQ ID NO: 22280 - DNA, 20 bp, Propionibacterium propionicus
cctcatctctgggataacag

SEQ ID NO: 22281 - DNA, 20 bp, Shewanella putrefaciens
aagtgggtagctaaccttcg

SEQ ID NO: 22282 - DNA, 20 bp, Stenotrophomonas maltophilia
atcgatatgacggtacccgc

SEQ ID NO: 22283 - DNA, 20 bp, Dolosicoccus paucivorans
tggtacaacgagaagcaacg

SEQ ID NO: 22284 - DNA, 20 bp, Brevibacillus thermoruber
atcctgtttggagcttgctt

SEQ ID NO: 22285 - DNA, 20 bp, Bacillus coagulans
gcggacttgttagaagcttg

SEQ ID NO: 22286 - DNA, 20 bp, Leuconostoc fallax
agatgttagagataatattg

SEQ ID NO: 22287 - DNA, 20 bp, Stenotrophomonas maltophilia
cccgcgagcagcaagcggaa

SEQ ID NO: 22288 - DNA, 20 bp, Cedecea davisae
gggagtagcttgctactccg

SEQ ID NO: 22289 - DNA, 20 bp, Vibrio hollisae
gggaggaaatccccagcgct

SEQ ID NO: 22290 - DNA, 20 bp, Porphyromonas endodontalis
tatgctagagaggagacgag

SEQ ID NO: 22291 - DNA, 20 bp, Unknown Organism
  oligonucleotide from CDC group EF-4B
accgcatacactttgagaag

SEQ ID NO: 22292 - DNA, 20 bp, Bacillus mycoides
gcatggcgcgaaattgaaag

SEQ ID NO: 22293 - DNA, 20 bp, Sporosarcina ureae
catgattttcccttcgggga

SEQ ID NO: 22294 - DNA, 20 bp, Capnocytophaga sp.
tgacgtcaaatcatccggcc

SEQ ID NO: 22295 - DNA, 20 bp, Vibrio vulnificus
ttaccttcgggaggacgcca

SEQ ID NO: 22296 - DNA, 20 bp, Bacteroides distasonis
tattttgtatgtaccttatg

SEQ ID NO: 22297 - DNA, 20 bp, Vibrio hollisae
tgcgtttggaactgtcagac

SEQ ID NO: 22298 - DNA, 20 bp, Arcanobacterium haemolyticum
caaggcgttgagttgagggt

SEQ ID NO: 22299 - DNA, 20 bp, Streptococcus criceti
atgacttgaaaggtgcaatg

SEQ ID NO: 22300 - DNA, 20 bp, Oligella ureolytica
gatcatggctcagattgaca

SEQ ID NO: 22301 - DNA, 30 bp, Streptococcus criceti
aggtgcaatggcaccactatcagatggacc

SEQ ID NO: 22302 - DNA, 20 bp, Achromobacter xylosoxidans
tcgcgaaactgacggtacct

SEQ ID NO: 22303 - DNA, 20 bp, Globicatella sanguinis
ggaaatgttagtagattgac

SEQ ID NO: 22304 - DNA, 20 bp, Staphylococcus schleiferi
gagcgaacggacaggagctt

SEQ ID NO: 22305 - DNA, 30 bp, Shewanella putrefaciens
aagtgggtagctaaccttcgggggggcgct

SEQ ID NO: 22306 - DNA, 20 bp, Myroides odoratimimus
tcgatatggcatcgtattga

SEQ ID NO: 22307 - DNA, 20 bp, Streptococcus macacae
aaggattggaaacgataggt

SEQ ID NO: 22308 - DNA, 20 bp, Brevibacillus centrosporus
acggaaaggcggcgcaagct

SEQ ID NO: 22309 - DNA, 20 bp, Bacillus mycoides
gctgcatggcgcgaaattga

SEQ ID NO: 22310 - DNA, 20 bp, Staphylococcus schleiferi
taccatggtatgcccgtatc

SEQ ID NO: 22311 - DNA, 20 bp, Corynebacterium coyleae
gatgctggtttccctttgtg

SEQ ID NO: 22312 - DNA, 20 bp, Paenibacillus macerans
taccggatacgcaactcctt

SEQ ID NO: 22313 - DNA, 20 bp, Peptostreptococcus anaerobius
ctgttttgatgcttgcattg

SEQ ID NO: 22314 - DNA, 20 bp, Enterobacter gergoviae
tcttgaggccgtggcttccg

SEQ ID NO: 22315 - DNA, 20 bp, Vibrio cholerae
gcgggtgtactaggcccggg

SEQ ID NO: 22316 - DNA, 20 bp, Gemella morbillorum
caccaaggcggcgatgcata

SEQ ID NO: 22317 - DNA, 20 bp, Eubacterium moniliforme
agatatatgttcccttcggg

SEQ ID NO: 22318 - DNA, 20 bp, Ochrobactrum intermedium
actagggaataactcaggga

SEQ ID NO: 22319 - DNA, 20 bp, Escherichia coli
gtggggtaacaggctcacct

SEQ ID NO: 22320 - DNA, 20 bp, Campylobacter curvus
gacggactttgttcgtctgc

SEQ ID NO: 22321 - DNA, 20 bp, Streptococcus criceti
tgttaatgacttgaaaggtg

SEQ ID NO: 22322 - DNA, 20 bp, Myroides odoratimimus
ttgaataatatggaagtaac

SEQ ID NO: 22323 - DNA, 20 bp, Empedobacter brevis
ggtcactaagtatcaactga

SEQ ID NO: 22324 - DNA, 20 bp, Bacteroides stercoris
ccgacaacactgggatagcc

SEQ ID NO: 22325 - DNA, 20 bp, Weissella paramesenteroides
tgtctttaactgatactgac

SEQ ID NO: 22326 - DNA, 20 bp, Campylobacter curvus
tctgcgaagtaaataatata

SEQ ID NO: 22327 - DNA, 20 bp, Streptococcus equi
tatctgtgagtcgcgaacgg

SEQ ID NO: 22328 - DNA, 20 bp, Vibrio hollisae
tggagagattcagaagtgcc

SEQ ID NO: 22329 - DNA, 20 bp, Streptococcus infantarius
gcgccgcatcatcccatctc

SEQ ID NO: 22330 - DNA, 20 bp, Facklamia hominis
ctttatgagggagccgtcga

SEQ ID NO: 22331 - DNA, 20 bp, Suttonella indologenes
agcagcttgctgcggaccta

SEQ ID NO: 22332 - DNA, 20 bp, Prevotella disiens
gatgacatctgatttgaatt

SEQ ID NO: 22333 - DNA, 20 bp, Eubacterium moniliforme
agccctcgggtggaactgtg

SEQ ID NO: 22334 - DNA, 30 bp, Bacteroides thetaiotaomicron
cataattagaccgcatggtcttattattaa

SEQ ID NO: 22335 - DNA, 20 bp, Arcanobacterium pyogenes
cagaagaagcatttttgtga

SEQ ID NO: 22336 - DNA, 20 bp, Streptococcus acidominimus
aaatccgctaagtgacggta

SEQ ID NO: 22337 - DNA, 20 bp, Kocuria kristinae
acccggatgcgactactgcc

SEQ ID NO: 22338 - DNA, 20 bp, Moellerella wisconsensis
actatcagcgattgacgtta

SEQ ID NO: 22339 - DNA, 20 bp, Alicyclobacillus acidocaldarius
gaagggacccctcatctctg

SEQ ID NO: 22340 - DNA, 20 bp, Leptotrichia buccalis
ccaagcgaacctgcaaagcc

SEQ ID NO: 22341 - DNA, 20 bp, Bacteroides stercoris
caacctgccgacaacactgg

SEQ ID NO: 22342 - DNA, 20 bp, Neisseria polysaccharea
gttggatcacctcccttcag

SEQ ID NO: 22343 - DNA, 20 bp, Geobacillus stearothermophilus
ggattggggcttgccttgat

SEQ ID NO: 22344 - DNA, 20 bp, Neisseria meningitidis
gaggtgatcccaccgcaggt

SEQ ID NO: 22345 - DNA, 20 bp, Campylobacter concisus
gagcgaatcgctatcaaagc

SEQ ID NO: 22346 - DNA, 20 bp, Propionibacterium acnes
agataaaagtaccggaaggt

SEQ ID NO: 22347 - DNA, 20 bp, Eubacterium moniliforme
atagtcctccgtgccgaagc

SEQ ID NO: 22348 - DNA, 20 bp, Moellerella wisconsensis
aggcgttgatattaatacta

SEQ ID NO: 22349 - DNA, 20 bp, Capnocytophaga sp.
tgtttggttgcaagactgag

SEQ ID NO: 22350 - DNA, 20 bp, Leptotrichia buccalis
catgcaagtctttggcagaa

SEQ ID NO: 22351 - DNA, 20 bp, Eubacterium moniliforme
gcaatctgccctgcaatggg

SEQ ID NO: 22352 - DNA, 20 bp, Yersinia aldovae
tccacagaacgtagcagaga

SEQ ID NO: 22353 - DNA, 30 bp, Bacteroides ovatus
gaaggcagctcactagactgtcactgacac

SEQ ID NO: 22354 - DNA, 20 bp, Brevibacillus brevis
ttaaggtgcttgcaccttat

SEQ ID NO: 22355 - DNA, 20 bp, Corynebacterium pilosum
ccttcttgtgttggaaaggc

SEQ ID NO: 22356 - DNA, 20 bp, Streptococcus criceti
aagagaagaacgttgagtag

SEQ ID NO: 22357 - DNA, 20 bp, Clostridium clostridiiforme
ctgggtgtgggactagcgat

SEQ ID NO: 22358 - DNA, 20 bp, Stenotrophomonas maltophilia
gggaaggaaggtgataaggc

SEQ ID NO: 22359 - DNA, 20 bp, Bacteroides thetaiotaomicron
gtaaggcatttgtgaaggtg

SEQ ID NO: 22360 - DNA, 30 bp, Bacillus smithii
agatgattggggtgaagtcgtaacaaaaag

SEQ ID NO: 22361 - DNA, 20 bp, Moraxella atlantae
atatgagaggaaagtagaat

SEQ ID NO: 22362 - DNA, 20 bp, Clostridium clostridiiforme
gaggctcaacctcggcgcgc

SEQ ID NO: 22363 - DNA, 20 bp, Streptococcus infantarius
gcaatcttccaactttagca

SEQ ID NO: 22364 - DNA, 20 bp, Enterobacter amnigenus
tcgaagcgagtagcacagag

SEQ ID NO: 22365 - DNA, 20 bp, Eubacterium moniliforme
atatatgttcccttcggggc

SEQ ID NO: 22366 - DNA, 20 bp, Clostridium clostridiiforme
gtcgagcgaagcggtttcga

SEQ ID NO: 22367 - DNA, 20 bp, Brevibacterium linens
gaccgaaggcatctttggtt

SEQ ID NO: 22368 - DNA, 30 bp, Leptotrichia buccalis
atcctgcgtatgcccgtgagagcgggcagt

SEQ ID NO: 22369 - DNA, 20 bp, Bacteroides stercoris
cctgccgacaacactgggat

SEQ ID NO: 22370 - DNA, 20 bp, Corynebacterium mycetoides
agcgctggcggcgtgcttat

SEQ ID NO: 22371 - DNA, 20 bp, Sphingobacterium multivorum
gaccggcatcggttggatat

SEQ ID NO: 22372 - DNA, 20 bp, Globicatella sanguinis
actagaggaaatgttagtag

SEQ ID NO: 22373 - DNA, 20 bp, Leuconostoc carnosum
ttagcctgacggtaccatac

SEQ ID NO: 22374 - DNA, 30 bp, Eubacterium moniliforme
gtaagtcaggtgtgaaagaccggggctcaa

SEQ ID NO: 22375 - DNA, 20 bp, Bacteroides thetaiotaomicron
gggtaagattggtattgggg

SEQ ID NO: 22376 - DNA, 20 bp, Bacillus schlegellii
gcatgctggggcaaggaaag

SEQ ID NO: 22377 - DNA, 20 bp, Corynebacterium pilosum
gtcttattccgggtttttcc

SEQ ID NO: 22378 - DNA, 20 bp, Paenibacillus amylolyticus
tgcatcctctgatgcttagc

SEQ ID NO: 22379 - DNA, 30 bp, Arcanobacterium haemolyticum
gcccctttctcttgggataagccttggaaa

SEQ ID NO: 22380 - DNA, 20 bp, Prevotella oralis
gttggggacgtgtccctttt

SEQ ID NO: 22381 - DNA, 20 bp, Bacteroides stercoris
gttctttcttcggacagttg

SEQ ID NO: 22382 - DNA, 20 bp, Capnocytophaga sp.
aggtgtggcatcacatttat

SEQ ID NO: 22383 - DNA, 20 bp, Streptococcus macacae
cagtagttaaaagcattggc

SEQ ID NO: 22384 - DNA, 20 bp, Finegoldia magna
atgcaaaactcgaaagccaa

SEQ ID NO: 22385 - DNA, 20 bp, Dolosicoccus paucivorans
aacgagaagcaacgtcgcga

SEQ ID NO: 22386 - DNA, 20 bp, Paenibacillus pabuli
tgatcggtacagagatgtat

SEQ ID NO: 22387 - DNA, 20 bp, Unknown Organism
  oligonucleotide from CDC group VB-3
gctagtctaaccttccaggg

SEQ ID NO: 22388 - DNA, 20 bp, Pediococcus dextrinicus
ccaaggagatttaaaagtaa

SEQ ID NO: 22389 - DNA, 20 bp, Bacteroides capillosus
ctccttacaacggaataacc

SEQ ID NO: 22390 - DNA, 20 bp, Oligella urethralis
ctccggtagcaagaggtctt

SEQ ID NO: 22391 - DNA, 20 bp, Actinomyces naeslundii
aagcaggcctgtcccttgtg

SEQ ID NO: 22392 - DNA, 20 bp, Sphingomonas paucimobilis
gggaacctgcgggggatcac

SEQ ID NO: 22393 - DNA, 20 bp, Arcanobacterium haemolyticum
actagatattctgctcttgc

SEQ ID NO: 22394 - DNA, 20 bp, Streptococcus criceti
aaggtgcaatggcaccacta

SEQ ID NO: 22395 - DNA, 20 bp, Granulicatella elegans
gacccagagaaggaaaagag

SEQ ID NO: 22396 - DNA, 20 bp, Peptostreptococcus anaerobius
tgttttgatgcttgcattga

SEQ ID NO: 22397 - DNA, 20 bp, Bacteroides capillosus
aggcatctaactaggattaa

SEQ ID NO: 22398 - DNA, 30 bp, Aerococcus viridans
aatggatggtacagcgagtcgcgaacccgc

SEQ ID NO: 22399 - DNA, 20 bp, Streptococcus anginosus
ttttgtcatggttcaggacg

SEQ ID NO: 22400 - DNA, 20 bp, Bacillus alcalophilus
caccttgacggacctaacca

SEQ ID NO: 22401 - DNA, 20 bp, Abiotrophia defectiva
catggaatcacatgattccg

SEQ ID NO: 22402 - DNA, 20 bp, Campylobacter sputorum
gaaaaaaaagcaaagcagtt

SEQ ID NO: 22403 - DNA, 20 bp, Campylobacter curvus
ttaggtgggtcaagggagcg

SEQ ID NO: 22404 - DNA, 20 bp, Proteus vulgaris
ctggctgagagatgatcagc

SEQ ID NO: 22405 - DNA, 20 bp, Campylobacter concisus
gagggtgagcgaatcgctat

SEQ ID NO: 22406 - DNA, 20 bp, Clostridium tertium
tttgatcatggctcaggaac

SEQ ID NO: 22407 - DNA, 30 bp, Vibrio cholerae
aaagaaggtgatccaccgccaggttcccct

SEQ ID NO: 22408 - DNA, 20 bp, Streptococcus macacae
taggtgttaggtcctaaggg

SEQ ID NO: 22409 - DNA, 20 bp, Citrobacter amalonaticus
tcagaatgaacgctgttggc

SEQ ID NO: 22410 - DNA, 30 bp, Streptococcus cristatus
catgatagtcaattaaaaggtgcaaatgca

SEQ ID NO: 22411 - DNA, 20 bp, Kocuria rosea
gcagtcgagcgaactgacga

SEQ ID NO: 22412 - DNA, 20 bp, Anaerococcus tetradius
actctagatatactgccggt

SEQ ID NO: 22413 - DNA, 20 bp, Bacillus circulans
gtatcggaagggcggttgga

SEQ ID NO: 22414 - DNA, 20 bp, Anaerococcus prevotii
aataccaaatgaaatcacat

SEQ ID NO: 22415 - DNA, 20 bp, Bacteroides capilosus
  misc_feature (14)..(14): n is a, c, g, or t
aaatgacggtactngatgaa

SEQ ID NO: 22416 - DNA, 20 bp, Pediococcus dextrinicus
cgagttttcttttaatgatc

SEQ ID NO: 22417 - DNA, 20 bp, Bacillus schlegellii
ggcagcgctgaaggcgaacc

SEQ ID NO: 22418 - DNA, 20 bp, Bacteroides uniformis
tgcgtaaccgcaggagcgcc

SEQ ID NO: 22419 - DNA, 20 bp, Sphingobacterium multivorum
acacgagaggaaggggggga

SEQ ID NO: 22420 - DNA, 20 bp, Bacteroides ovatus
aggcagctcactagactgtc

SEQ ID NO: 22421 - DNA, 20 bp, Finegoldia magna
actaatgagagtggcgaacg

SEQ ID NO: 22422 - DNA, 20 bp, Eremococcus coleocola
cagcaatcatcgcctgatgg

SEQ ID NO: 22423 - DNA, 20 bp, Peptoniphilus indolicus
ggaagaagttgagttggatt

SEQ ID NO: 22424 - DNA, 20 bp, Clostridium clostridiiforme
aacctcggcgcgcagacgaa

SEQ ID NO: 22425 - DNA, 20 bp, Empedobacter brevis
gcaggtcactaagtatcaac

SEQ ID NO: 22426 - DNA, 20 bp, Anaerococcus tetradius
gagagatgaaagggaaagtg

SEQ ID NO: 22427 - DNA, 20 bp, Brevibacillus brevis
cgagtgtcttcggagcctag

SEQ ID NO: 22428 - DNA, 20 bp, Anaerobiospirillum succiniciproducens
agggaacccacaaagcgtcc

SEQ ID NO: 22429 - DNA, 20 bp, Corynebacterium pilosum
ggtgtcttattccgggtttt

SEQ ID NO: 22430 - DNA, 30 bp, Paenibacillus apiarius
gcggagctgacggagtgcttgcactcctga

SEQ ID NO: 22431 - DNA, 20 bp, Streptococcus iniae
atccaaagagttgcgaacgg

SEQ ID NO: 22432 - DNA, 20 bp, Prevotella melaninogenica
aagccgggtcccagttcggg

SEQ ID NO: 22433 - DNA, 20 bp, Arcanobacterium haemolyticum
tgaacaaggcgttgagttga

SEQ ID NO: 22434 - DNA, 20 bp, Sphingomonas paucimobilis
agggagccgaggggaacctg

SEQ ID NO: 22435 - DNA, 20 bp, Sphingobacterium multivorum
atgtgaccggcatcggttgg

SEQ ID NO: 22436 - DNA, 20 bp, Bacillus licheniformis
ccggcagggttcaatcataa

SEQ ID NO: 22437 - DNA, 20 bp, Microbacterium hominis
gccctccccttgtggaggga

SEQ ID NO: 22438 - DNA, 20 bp, Stenotrophomonas maltophilia
agacaaagagaagcaacccc

SEQ ID NO: 22439 - DNA, 20 bp, Leuconostoc carnosum
aagaaaagttaaggtaggga

SEQ ID NO: 22440 - DNA, 20 bp, Anaerococcus prevotii
gaagctatcatcaaagattt

SEQ ID NO: 22441 - DNA, 20 bp, Bacillus coagulans
gagcggatgttaaaagacgg

SEQ ID NO: 22442 - DNA, 20 bp, Nocardia asteroides
atacctaaagagagtggacg

SEQ ID NO: 22443 - DNA, 20 bp, Stenotrophomonas maltophilia
ctggaaacttacgctaatac

SEQ ID NO: 22444 - DNA, 30 bp, Helcococcus ovis
gaagccgtcgagctaaccgttaggaggcag

SEQ ID NO: 22445 - DNA, 20 bp, Streptococcus acidominimus
cgcataatagtgtttactgc

SEQ ID NO: 22446 - DNA, 20 bp, Bacillus schlegellii
gagcgggcggaagcctttgg

SEQ ID NO: 22447 - DNA, 20 bp, Actinomyces radingae
cctttgtggttgtgtggtga

SEQ ID NO: 22448 - DNA, 20 bp, Enterococcus dispar
cgctgtctggcgtgcctaat

SEQ ID NO: 22449 - DNA, 20 bp, Budvicia aquatica
agttctgcaactcgactccg

SEQ ID NO: 22450 - DNA, 30 bp, Prevotella oralis
ggataaagttggggacgtgtccctttttgc

SEQ ID NO: 22451 - DNA, 20 bp, Eggerthella lenta
cgcaggggcggaggcgtcga

SEQ ID NO: 22452 - DNA, 20 bp, Brevibacterium casei
gtcccgtcaagtcacgaaag

SEQ ID NO: 22453 - DNA, 20 bp, Streptococcus macacae
aaaggtacaacagtatcgct

SEQ ID NO: 22454 - DNA, 20 bp, Salmonella typhi
agtcgcgacggtatcaggca

SEQ ID NO: 22455 - DNA, 20 bp, Bacteroides thetaiotaomicron
aaccaaagctggcgaccggc

SEQ ID NO: 22456 - DNA, 20 bp, Capnocytophaga sp.
aagtcgagcactctagtggg

SEQ ID NO: 22457 - DNA, 20 bp, Alloiococcus otitis
ccgcttatggatagcctcgc

SEQ ID NO: 22458 - DNA, 20 bp, Microbacterium hominis
gcggtggccctccccttgtg

SEQ ID NO: 22459 - DNA, 20 bp, Clostridium clostridiiforme
ccctcttcggagcaatggag

SEQ ID NO: 22460 - DNA, 20 bp, Oligella urethralis
gccgctccggtagcaagagg

SEQ ID NO: 22461 - DNA, 20 bp, Prevotella buccae
accgggattggggctaagtc

SEQ ID NO: 22462 - DNA, 20 bp, Myroides odoratimimus
ttgttagttaccactcgcgt

SEQ ID NO: 22463 - DNA, 20 bp, Bacillus mycoides
gataacattttgcgctgcat

SEQ ID NO: 22464 - DNA, 20 bp, Streptococcus macacae
catgataggagcttaaaagg

SEQ ID NO: 22465 - DNA, 20 bp, Prevotella loescheii
accggaagtgcggtggataa

SEQ ID NO: 22466 - DNA, 20 bp, Sphingobacterium multivorum
ccggcatcggttggatatta

SEQ ID NO: 22467 - DNA, 20 bp, Brevibacillus brevis
agaacgccctagaaataggg

SEQ ID NO: 22468 - DNA, 20 bp, Actinomyces radingae
catgcgccctgagcgcctag

SEQ ID NO: 22469 - DNA, 20 bp, Kocuria varians
gatgttccttcccccttgtg

SEQ ID NO: 22470 - DNA, 20 bp, Bacteroides stercoris
ctgaatcggaaacggttctt

SEQ ID NO: 22471 - DNA, 20 bp, Pediococcus dextrinicus
accaaggagatttaaaagta

SEQ ID NO: 22472 - DNA, 20 bp, Bacteroides thetaiotaomicron
atggcgcggtgaatagttcc

SEQ ID NO: 22473 - DNA, 20 bp, Dermacoccus nishinomiyaensis
gtccgtaacaaggtagcccg

SEQ ID NO: 22474 - DNA, 20 bp, Prevotella melaninogenica
tccaggaatgaacgctagag

SEQ ID NO: 22475 - DNA, 20 bp, Bacillus schlegellii
ggcgcgtgcagcgctgaagg

SEQ ID NO: 22476 - DNA, 20 bp, Sphingomonas paucimobilis
cgtacaagggagccgagggg

SEQ ID NO: 22477 - DNA, 30 bp, Peptoniphilus asaccharolyticus
gtgaagatgaaatggattagcggcggacgg

SEQ ID NO: 22478 - DNA, 20 bp, Streptococcus ratti
tgtgtgctttggaaactgca

SEQ ID NO: 22479 - DNA, 20 bp, Porphyromonas endodontalis
gtgcgtaagacgcgaggaag

SEQ ID NO: 22480 - DNA, 20 bp, Leptotrichia buccalis
gacatgtaatgcttaacaca

SEQ ID NO: 22481 - DNA, 20 bp, Kingella kingae
cagcacgagtacttgtactt

SEQ ID NO: 22482 - DNA, 20 bp, Micrococcus luteus
cctgagagggagaccggcca

SEQ ID NO: 22483 - DNA, 20 bp, Streptococcus criceti
gagtggaaagttactcaagt

SEQ ID NO: 22484 - DNA, 20 bp, Paenibacillus larvae
cggtttagagacagaccttt

SEQ ID NO: 22485 - DNA, 20 bp, Capnocytophaga sp.
tttatattaaagctgaggcg

SEQ ID NO: 22486 - DNA, 20 bp, Actinomyces naeslundii
cttttggggggtgtggatga

SEQ ID NO: 22487 - DNA, 30 bp, Citrobacter freundii
attcatgactggggtgaagtccgtaaacca

SEQ ID NO: 22488 - DNA, 20 bp, Moellerella wisconsensis
ttgatactaatactatcagc

SEQ ID NO: 22489 - DNA, 20 bp, Vibrio vulnificus
cactttgggtcatgactggg

SEQ ID NO: 22490 - DNA, 20 bp, Sphingobacterium multivorum
ataacatatgtgaccggcat

SEQ ID NO: 22491 - DNA, 20 bp, Weissella paramesenteroides
ctttaactgatctgacgagc

SEQ ID NO: 22492 - DNA, 20 bp, Corynebacterium kutscheri
atgtacaggatcgggctaga

SEQ ID NO: 22493 - DNA, 20 bp, Lactococcus raffinolactis
aaagtaccaattggtacact

SEQ ID NO: 22494 - DNA, 20 bp, Corynebacterium cystitidis
gtatcttttgtgggtgtgtg

SEQ ID NO: 22495 - DNA, 30 bp, Streptococcus ratti
tgtcagagacgaacgtgtgtgagagtggaa

SEQ ID NO: 22496 - DNA, 20 bp, Brevibacillus centrosporus
atagagtctactctcgcatg

SEQ ID NO: 22497 - DNA, 20 bp, Streptococcus infantarius
cagctccctagtgtgcgccg

SEQ ID NO: 22498 - DNA, 20 bp, Vibrio harveyi
aaagtgcgtcgagttccgga

SEQ ID NO: 22499 - DNA, 20 bp, Anaerococcus prevotii
aaacctcagtgccgaagtta

SEQ ID NO: 22500 - DNA, 20 bp, Bacillus licheniformis
atccggaaggttgttgtttg

SEQ ID NO: 22501 - DNA, 20 bp, Oligella ureolytica
tcagattgacacgctagcgg

SEQ ID NO: 22502 - DNA, 20 bp, Bacillus schlegellii
tgtgggtggggcgacccatc

SEQ ID NO: 22503 - DNA, 20 bp, Brevibacillus brevis
cttgcaccttatggttagcg

SEQ ID NO: 22504 - DNA, 20 bp, Corynebacterium kutscheri
tgacatgtacaggatcgggc

SEQ ID NO: 22505 - DNA, 20 bp, Providencia alcalifaciens
atcgttgatgatattagcat

SEQ ID NO: 22506 - DNA, 20 bp, Paenibacillus macerans
taactgctcacaaggtgacg

SEQ ID NO: 22507 - DNA, 20 bp, Fusobacterium necrogenes
cgtttgacatcctaggaagt

SEQ ID NO: 22508 - DNA, 20 bp, Pediococcus parvulus
taattgattttgagatgctt

SEQ ID NO: 22509 - DNA, 20 bp, Bacillus schlegellii
tcccgccgacgggtccagag

SEQ ID NO: 22510 - DNA, 20 bp, Bacillus coagulans
tcgctcgcatgagcggatgt

SEQ ID NO: 22511 - DNA, 20 bp, Streptococcus iniae
acatgtacttaagttaaaag

SEQ ID NO: 22512 - DNA, 20 bp, Moellerella wisconsensis
ggggatctgcctgacagagg

SEQ ID NO: 22513 - DNA, 20 bp, Anaerococcus tetradius
aaaataagcggattagtggc

SEQ ID NO: 22514 - DNA, 20 bp, Campylobacter curvus
tagctccttgtcgcaaagac

SEQ ID NO: 22515 - DNA, 20 bp, Citrobacter freundii
ggtgaagtccgtaaaccaag

SEQ ID NO: 22516 - DNA, 20 bp, Sphingobacterium multivorum
accggcatcggttggatatt

SEQ ID NO: 22517 - DNA, 20 bp, Gemella morbillorum
gatagctaatcccgcatatc

SEQ ID NO: 22518 - DNA, 20 bp, Paenibacillus azotofixans
cggagttgtagagggagctt

SEQ ID NO: 22519 - DNA, 20 bp, Anaerococcus tetradius
ctaaccaaagatttatcggt

SEQ ID NO: 22520 - DNA, 20 bp, Paenibacillus azotofixans
ttgtgatggagcttgctctt

SEQ ID NO: 22521 - DNA, 20 bp, Bacillus mycoides
ctgcatggcgcgaaattgaa

SEQ ID NO: 22522 - DNA, 20 bp, Serratia marcescens
tcatgactggggtgaagcga

SEQ ID NO: 22523 - DNA, 30 bp, Vagococcus fluvialis
agaataataaaagacgcttcggtgtcactg

SEQ ID NO: 22524 - DNA, 20 bp, Campylobacter curvus
ggtcaagggagcgtagctcc

SEQ ID NO: 22525 - DNA, 20 bp, Enterobacter gergoviae
tgtggtccttgaagcgtggc

SEQ ID NO: 22526 - DNA, 20 bp, Bacteroides capillosus
acgatggatgcccgttgtat

SEQ ID NO: 22527 - DNA, 20 bp, Microbacterium hominis
gtggccctccccttgtggag

SEQ ID NO: 22528 - DNA, 20 bp, Actinobacillus ureae
actgtgagtttggtgcccga

SEQ ID NO: 22529 - DNA, 20 bp, Eubacterium moniliforme
tgacatcctctgacgcatat

SEQ ID NO: 22530 - DNA, 20 bp, Streptococcus macacae
tgttaggtcctaaggggctt

SEQ ID NO: 22531 - DNA, 20 bp, Geobacillus thermoglucosidasius
gttacaagtccggaggaagg

SEQ ID NO: 22532 - DNA, 20 bp, Unknown Organism
  oligonucleotide from CDC group EF-4B
gcgtttgaaactgggtgact

SEQ ID NO: 22533 - DNA, 20 bp, Streptococcus thermophilus
gatcacctccttcatggtca

SEQ ID NO: 22534 - DNA, 20 bp, Brevibacterium epidermidis
acgcatgttgggtggtggaa

SEQ ID NO: 22535 - DNA, 20 bp, Salmonella typhi
ggcagcagcttgcttgcttg

SEQ ID NO: 22536 - DNA, 20 bp, Campylobacter curvus
tacggcgcaaccgaaagttg

SEQ ID NO: 22537 - DNA, 20 bp, Bacillus niacini
gaatcttgaggtgcttgcac

SEQ ID NO: 22538 - DNA, 20 bp, Prevotella oralis
cgtgtccctttttgcaggta

SEQ ID NO: 22539 - DNA, 20 bp, Clostridium clostridiiforme
ggtaggaggtttggatccat

SEQ ID NO: 22540 - DNA, 20 bp, Paenibacillus pabuli
ttttcttgatacttagcggc

SEQ ID NO: 22541 - DNA, 20 bp, Actinomyces neuii
agtgatcaggtcagggaacg

SEQ ID NO: 22542 - DNA, 20 bp, Prevotella melaninogenica
aggaatgaacgctagagcta

SEQ ID NO: 22543 - DNA, 20 bp, Bacteroides capillosus
tcggctatgtgaccaagcga

SEQ ID NO: 22544 - DNA, 20 bp, Paenibacillus apiarius
agctgacggagtgcttgcac

SEQ ID NO: 22545 - DNA, 20 bp, Campylobacter sputorum
tttgaagctttatattaata

SEQ ID NO: 22546 - DNA, 20 bp, Streptococcus criceti
atcccgatgccatccctaga

SEQ ID NO: 22547 - DNA, 20 bp, Globicatella sanguinis
catctcttgcatatcttaga

SEQ ID NO: 22548 - DNA, 20 bp, Yersinia frederiksenii
ggaaggcatttcacttaata

SEQ ID NO: 22549 - DNA, 20 bp, Finegoldia magna
aacagaagcctcggtggaag

SEQ ID NO: 22550 - DNA, 20 bp, Enterococcus saccharolyticus
aatacccgcataacgctttt

SEQ ID NO: 22551 - DNA, 20 bp, Clostridium clostridiiforme
gcgtgagggaagacagcctt

SEQ ID NO: 22552 - DNA, 20 bp, Neisseria polysaccharea
gatgacgctgcggcatgctt

SEQ ID NO: 22553 - DNA, 20 bp, Corynebacterium group ANF
tgtgtggtgtggtgtcgaag

SEQ ID NO: 22554 - DNA, 20 bp, Leuconostoc fallax
cttgacatcctttgaagatg

SEQ ID NO: 22555 - DNA, 20 bp, Pseudomonas fluorescens
cggatgaagtgagcttgctc

SEQ ID NO: 22556 - DNA, 30 bp, Macrococcus caseolyticus
gctgtcacttatagatggacccgcgggtat

SEQ ID NO: 22557 - DNA, 20 bp, Pseudomonas oryzihabitans
ggaagggcttacagcgaata

SEQ ID NO: 22558 - DNA, 20 bp, Streptococcus ferus
tagggcttgagtgcagaagg

SEQ ID NO: 22559 - DNA, 20 bp, Corynebacterium group F1
agtggcgacacgggttgagt

SEQ ID NO: 22560 - DNA, 20 bp, Eubacterium moniliforme
ggtttagaggtaaaaggatt

SEQ ID NO: 22561 - DNA, 30 bp, Salmonella typhi
gcggcaggcctatcacatgcaagtcgcgac

SEQ ID NO: 22562 - DNA, 20 bp, Globicatella sanguinis
gaacgaaccataactagaac

SEQ ID NO: 22563 - DNA, 20 bp, Actinomyces radingae
cctagagataggtgtgcatt

SEQ ID NO: 22564 - DNA, 20 bp, Bacteroides distasonis
cctattttgtatgtacctta

SEQ ID NO: 22565 - DNA, 20 bp, Streptococcus macacae
cgcatgataggagcttaaaa

SEQ ID NO: 22566 - DNA, 20 bp, Clostridium clostridiiforme
cggtaacgcggcctttcctt

SEQ ID NO: 22567 - DNA, 20 bp, Empedobacter brevis
aagtatcaactgacgctgat

SEQ ID NO: 22568 - DNA, 20 bp, Streptococcus infantarius
ctagtgtgcgccgcatcatc

SEQ ID NO: 22569 - DNA, 20 bp, Clostridium clostridiiforme
cgagcgaagcggtttcgatg

SEQ ID NO: 22570 - DNA, 20 bp, Oligella urethralis
ggcaacccgctgtcctgacc

SEQ ID NO: 22571 - DNA, 20 bp, Eggerthella lenta
ccggccgaacccgcaggggc

SEQ ID NO: 22572 - DNA, 20 bp, Actinomyces radingae
tactggatgttctgcgcttt

SEQ ID NO: 22573 - DNA, 20 bp, Sphingobacterium multivorum
ggctgggccaacacgagagg

SEQ ID NO: 22574 - DNA, 20 bp, Dolosicoccus paucivorans
caaagatgcttatggtatcg

SEQ ID NO: 22575 - DNA, 20 bp, Sporosarcina ureae
atggagacatgattttccct

SEQ ID NO: 22576 - DNA, 30 bp, Dolosigranulum pigrum
agagatagagcgttcccttcggggacagaa

SEQ ID NO: 22577 - DNA, 20 bp, Clostridium clostridiiforme
cgtgagggaagacagccttc

SEQ ID NO: 22578 - DNA, 20 bp, Eubacterium moniliforme
ccctgcaatgggggacaaca

SEQ ID NO: 22579 - DNA, 20 bp, Bacillus schlegellii
aggcgcgtgcagcgctgaag

SEQ ID NO: 22580 - DNA, 30 bp, Methylobacterium extorquens
caggcgaccacggaggggtcagcgactggg

SEQ ID NO: 22581 - DNA, 20 bp, Stenotrophomonas maltophilia
tatcgatatgacggtacccg

SEQ ID NO: 22582 - DNA, 20 bp, Providencia alcalifaciens
gatgatattagcatcaacgc

SEQ ID NO: 22583 - DNA, 20 bp, Stenotrophomonas maltophilia
actatcgaatgagcccatat

SEQ ID NO: 22584 - DNA, 20 bp, Corynebacterium pilosum
gaaaggccctgccttccagg

SEQ ID NO: 22585 - DNA, 20 bp, Anaerococcus prevotii
tgcacatgcataaatgatca

SEQ ID NO: 22586 - DNA, 20 bp, Stenotrophomonas maltophilia
agccctgatcgttcagtccg

SEQ ID NO: 22587 - DNA, 20 bp, Dolosicoccus paucivorans
tatcaccgccttctttgaag

SEQ ID NO: 22588 - DNA, 20 bp, Bacteroides thetaiotaomicron
ggtttgcttgcaaaccaaag

SEQ ID NO: 22589 - DNA, 20 bp, Lactococcus raffinolactis
aattggtacactgagagatg

SEQ ID NO: 22590 - DNA, 20 bp, Burkholderia gladioli
aatccgcatacgatccacgg

SEQ ID NO: 22591 - DNA, 20 bp, Anaerobiospirillum succiniciproducens
ggaaagacttttagttgcta

SEQ ID NO: 22592 - DNA, 20 bp, Bacteroides capilosus
aataccgcataatgcagctg

SEQ ID NO: 22593 - DNA, 20 bp, Morganella morganii
cgggaggaaggtgtcaaggt

SEQ ID NO: 22594 - DNA, 20 bp, Brevibacillus brevis
agccgcatcggaagggcgcg

SEQ ID NO: 22595 - DNA, 20 bp, Capnocytophaga sp.
tgcttttgcaggggaagaat

SEQ ID NO: 22596 - DNA, 20 bp, Prevotella loescheii
ctcaacatccggcttgcagc

SEQ ID NO: 22597 - DNA, 20 bp, Streptococcus criceti
gttaatgacttgaaaggtgc

SEQ ID NO: 22598 - DNA, 20 bp, Moraxella atlantae
agcgatgtgacgcgaatctc

SEQ ID NO: 22599 - DNA, 20 bp, Aneurinibacillus thermoaerophilus
gagatggaggcttccttcgg

SEQ ID NO: 22600 - DNA, 20 bp, Actinomyces radingae
aaaggggcttttttaagttt

SEQ ID NO: 22601 - DNA, 20 bp, Vibrio harveyi
tccggaagttcggaatcgct

SEQ ID NO: 22602 - DNA, 20 bp, Sporosarcina ureae
gaataatcccattctcttct

SEQ ID NO: 22603 - DNA, 20 bp, Anaerococcus prevotii
aatgatctcttcggagtgac

SEQ ID NO: 22604 - DNA, 20 bp, Fusobacterium necrogenes
cgtgccccttcgggggaacc

SEQ ID NO: 22605 - DNA, 20 bp, Brevibacillus brevis
taaccggaaggcagccagcc

SEQ ID NO: 22606 - DNA, 20 bp, Paenibacillus larvae
tttagagacagaccttttcc

SEQ ID NO: 22607 - DNA, 20 bp, Bacteroides capillosus
acggcctagggcgaaactgg

SEQ ID NO: 22608 - DNA, 20 bp, Rothia dentocariosa
gcgtctcatcctgaggccat

SEQ ID NO: 22609 - DNA, 20 bp, Pediococcus dextrinicus
gatttaaaagtaaacgagtg

SEQ ID NO: 22610 - DNA, 20 bp, Finegoldia magna
agtaaacagaagcctcggtg

SEQ ID NO: 22611 - DNA, 20 bp, Haemophilus segnis
ctttaggtttggcgcccgta

SEQ ID NO: 22612 - DNA, 30 bp, Leuconostoc fallax
gtcttgacatcctttgaagatgttagagat

SEQ ID NO: 22613 - DNA, 20 bp, Leuconostoc gelidum
aaggctggggataacattct

SEQ ID NO: 22614 - DNA, 30 bp, Alloiococcus otitis
cttgacatcttctgccaccttcagagatga

SEQ ID NO: 22615 - DNA, 20 bp, Bacillus laevolacticus
agagattgaccttgcccttc

SEQ ID NO: 22616 - DNA, 20 bp, Serratia rubidaea
taatacggcattacattgac

SEQ ID NO: 22617 - DNA, 20 bp, Propionibacterium propionicus
attgtgacgaagcttttttg

SEQ ID NO: 22618 - DNA, 20 bp, Brevibacillus laterosporus
accggatagagttttgcttc

SEQ ID NO: 22619 - DNA, 20 bp, Capnocytophaga sp.
tcatccggcccttacatctt

SEQ ID NO: 22620 - DNA, 20 bp, Leptotrichia buccalis
gtctttggcagaatctgtgc

SEQ ID NO: 22621 - DNA, 20 bp, Brevibacillus centrosporus
aatcccgaatattttctttt

SEQ ID NO: 22622 - DNA, 20 bp, Brevibacillus brevis
cctccttcaattggttctat

SEQ ID NO: 22623 - DNA, 20 bp, Oligella ureolytica
tcgagccatcccgcgtgtgg

SEQ ID NO: 22624 - DNA, 20 bp, Prevotella loescheii
ttgggtcggtgaccaagcga

SEQ ID NO: 22625 - DNA, 20 bp, Brevibacillus centrosporus
ggttaatcccgaatattttc

SEQ ID NO: 22626 - DNA, 20 bp, Eubacterium moniliforme
gtgtggggggcgatagtcct

SEQ ID NO: 22627 - DNA, 20 bp, Microbacterium hominis
tgaagagtcggtaacaccag

SEQ ID NO: 22628 - DNA, 20 bp, Bordetella trematum
cgccagctaatacctggcgc

SEQ ID NO: 22629 - DNA, 20 bp, Microbacterium hominis
atacgatcccgggtctggta

SEQ ID NO: 22630 - DNA, 20 bp, Vibrio hollisae
ctggagagattcagaagtgc

SEQ ID NO: 22631 - DNA, 20 bp, Bacillus circulans
aagggcggttggatcacctc

SEQ ID NO: 22632 - DNA, 20 bp, Actinomyces naeslundii
tgccttttggggggtgtgga

SEQ ID NO: 22633 - DNA, 30 bp, Leptotrichia buccalis
tgcacaggcgagccaaggcggacgggtgag

SEQ ID NO: 22634 - DNA, 20 bp, Bacillus circulans
cttgcttttaaagttagcgg

SEQ ID NO: 22635 - DNA, 20 bp, Klebsiella pneumoniae
taataacctcggcgattgac

SEQ ID NO: 22636 - DNA, 20 bp, Streptococcus macacae
gttggagagagtggaaagtt

SEQ ID NO: 22637 - DNA, 20 bp, Citrobacter freundii
agggtaaaccgtagggggaa

SEQ ID NO: 22638 - DNA, 20 bp, Campylobacter curvus
gagcgtagctccttgtcgca

SEQ ID NO: 22639 - DNA, 20 bp, Paenibacillus validus
tcgggatagcgttagcggcg

SEQ ID NO: 22640 - DNA, 20 bp, Bacteroides stercoris
gatacaatgtcagcggccaa

SEQ ID NO: 22641 - DNA, 20 bp, Sphingobacterium multivorum
gcatgtaaggtggggacttt

SEQ ID NO: 22642 - DNA, 30 bp, Streptococcus vestibularis
ataggtgacacatgtcatttatttgaaagg

SEQ ID NO: 22643 - DNA, 20 bp, Bacillus schlegellii
gtgtgggtggggcgacccat

SEQ ID NO: 22644 - DNA, 20 bp, Pseudomonas oryzihabitans
gttgggaggaagggcttaca

SEQ ID NO: 22645 - DNA, 20 bp, Neisseria lactamica
ttaataccctcggctgatga

SEQ ID NO: 22646 - DNA, 20 bp, Bacteroides thetaiotaomicron
cttgtacgcccgcccgtcaa

SEQ ID NO: 22647 - DNA, 20 bp, Leuconostoc pseudomesenteroides
gtgtcgcatgatacgaagtt

SEQ ID NO: 22648 - DNA, 20 bp, Streptococcus criceti
aatggcaccactatcagatg

SEQ ID NO: 22649 - DNA, 20 bp, Nocardia asteroides
acctaaagagagtggacgtt

SEQ ID NO: 22650 - DNA, 20 bp, Anaerococcus prevotii
tatgatagcctcgcatgaag

SEQ ID NO: 22651 - DNA, 20 bp, Bacillus niacini
ggtgcttgcacctcttggtt

SEQ ID NO: 22652 - DNA, 20 bp, Microbacterium hominis
tcccgggtctggtacacgcg

SEQ ID NO: 22653 - DNA, 20 bp, Campylobacter curvus
atactccatttatatataag

SEQ ID NO: 22654 - DNA, 20 bp, Brevibacillus centrosporus
tgaaagccgggttttgggct

SEQ ID NO: 22655 - DNA, 20 bp, Actinomyces radingae
gggatctgcgtggcctttgt

SEQ ID NO: 22656 - DNA, 20 bp, Geobacillus thermoglucosidasius
aatccccaaaaacccgctct

SEQ ID NO: 22657 - DNA, 20 bp, Shewanella putrefaciens
tccacagaatctcgcttcag

SEQ ID NO: 22658 - DNA, 20 bp, Streptococcus macacae
aagagcggaaagtttacact

SEQ ID NO: 22659 - DNA, 20 bp, Bacteroides stercoris
ccaacctgccgacaacactg

SEQ ID NO: 22660 - DNA, 20 bp, Oligella urethralis
gaagcttccgggcatgtcaa

SEQ ID NO: 22661 - DNA, 20 bp, Prevotella loescheii
gcggggataaaggggcccac

SEQ ID NO: 22662 - DNA, 20 bp, Facklamia ignava
tcggaacgcgccgagaaggg

SEQ ID NO: 22663 - DNA, 20 bp, Eubacterium moniliforme
attcgatgcaggatgagctc

SEQ ID NO: 22664 - DNA, 20 bp, Gemella morbillorum
cacgcgtaggtaccctgcct

SEQ ID NO: 22665 - DNA, 20 bp, Eubacterium moniliforme
atatgttcccttcggggcag

SEQ ID NO: 22666 - DNA, 20 bp, Actinomyces radingae
tggcctttgtggttgtgtgg

SEQ ID NO: 22667 - DNA, 20 bp, Leptotrichia buccalis
gcgagccaaggcggacgggt

SEQ ID NO: 22668 - DNA, 20 bp, Streptococcus thermophilus
gttggatcacctccttcatg

SEQ ID NO: 22669 - DNA, 20 bp, Vibrio parahaemolyticus
ccaaaaaggcgtcgtagtcc

SEQ ID NO: 22670 - DNA, 20 bp, Bacillus schlegellii
ctggcgactggggtgaagct

SEQ ID NO: 22671 - DNA, 20 bp, Streptococcus criceti
agccgctaaggtgggacgga

SEQ ID NO: 22672 - DNA, 20 bp, Corynebacterium group ANF
cgtgaaactaacggatccct

SEQ ID NO: 22673 - DNA, 20 bp, Alloiococcus otitis
agtgcatgctggggaaatga

SEQ ID NO: 22674 - DNA, 20 bp, Corynebacterium group F1
tacttcgggtataagcttgg

SEQ ID NO: 22675 - DNA, 20 bp, Enterobacter gergoviae
ctgtggttcttgaggccgtg

SEQ ID NO: 22676 - DNA, 20 bp, Anaerococcus prevotii
atagactcttattgcttcgg

SEQ ID NO: 22677 - DNA, 20 bp, Shigella dysenteriae
cagattgacgctggcggcag

SEQ ID NO: 22678 - DNA, 20 bp, Fusobacterium nucleatum
acctgatattatgattttaa

SEQ ID NO: 22679 - DNA, 20 bp, Paenibacillus azotofixans
gagggagcttgctctctcat

SEQ ID NO: 22680 - DNA, 20 bp, Haemophilus paraphrophilus
cgttctaagtccggattgga

SEQ ID NO: 22681 - DNA, 20 bp, Corynebacterium propinquum
tggggatcggcgattgggac

SEQ ID NO: 22682 - DNA, 20 bp, Arcanobacterium haemolyticum
tagatattctgctcttgccg

SEQ ID NO: 22683 - DNA, 20 bp, Arcanobacterium pyogenes
agtacagaagaagcattttt

SEQ ID NO: 22684 - DNA, 20 bp, Bacillus laevolacticus
agctaagccggatagctggt

SEQ ID NO: 22685 - DNA, 20 bp, Peptoniphilus asaccharolyticus
gtgctaggtgtcggagaatt

SEQ ID NO: 22686 - DNA, 30 bp, Paenibacillus polymyxa
gcgaagccgcgatgtggagccaatcctaga

SEQ ID NO: 22687 - DNA, 20 bp, Eschericchia vulneris
gagtacacggtccagtactc

SEQ ID NO: 22688 - DNA, 20 bp, Corynebacterium coyleae
tctgcttgcagaggtactcg

SEQ ID NO: 22689 - DNA, 20 bp, Weissella paramesenteroides
tctttaactgatactgacga

SEQ ID NO: 22690 - DNA, 20 bp, Corynebacterium pilosum
ttttccttcttgtgttggaa

SEQ ID NO: 22691 - DNA, 20 bp, Streptococcus macacae
ggcggtctggaaagtcagta

SEQ ID NO: 22692 - DNA, 20 bp, Streptococcus anginosus
ccggcggcgggcctaataca

SEQ ID NO: 22693 - DNA, 20 bp, Eremococcus coleocola
attgacggtaactaatcaga

SEQ ID NO: 22694 - DNA, 20 bp, Propionibacterium acnes
aggactaagtcgtacaagat

SEQ ID NO: 22695 - DNA, 20 bp, Finegoldia magna
tgagcaacctgcctatgaca

SEQ ID NO: 22696 - DNA, 20 bp, Eremococcus coleocola
actgttattagccaagaaca

SEQ ID NO: 22697 - DNA, 20 bp, Empedobacter brevis
aacctactcacgtgtgagta

SEQ ID NO: 22698 - DNA, 20 bp, Bacteroides stercoris
ggaataactattaaagaatt

SEQ ID NO: 22699 - DNA, 30 bp, Providencia alcalifaciens
tccgcaataatctctaaggagcaaagcagg

SEQ ID NO: 22700 - DNA, 20 bp, Comamonas testosteroni
gacatggcaggaatccttta

SEQ ID NO: 22701 - DNA, 20 bp, Haemophilus paraphrophilus
ggttagaggtgttggatcca

SEQ ID NO: 22702 - DNA, 20 bp, Propionibacterium avidum
aggcggctagccagtacaga

SEQ ID NO: 22703 - DNA, 20 bp, Globicatella sanguinis
gaaccataactagaacttgt

SEQ ID NO: 22704 - DNA, 20 bp, Brevibacterium casei
ggctggacagagagaggcga

SEQ ID NO: 22705 - DNA, 20 bp, Streptococcus criceti
ctacctaggctgcgatacat

SEQ ID NO: 22706 - DNA, 20 bp, Facklamia languida
tcacagatcgcatgatcaat

SEQ ID NO: 22707 - DNA, 20 bp, Anaerococcus tetradius
aataccctatgacataaact

SEQ ID NO: 22708 - DNA, 20 bp, Brevibacterium linens
accgaaggcatctttggttg

SEQ ID NO: 22709 - DNA, 20 bp, Paenibacillus macerans
ggagttgggaaaggcggagc

SEQ ID NO: 22710 - DNA, 20 bp, Bacillus coagulans
aagtcgagcggacttgttag

SEQ ID NO: 22711 - DNA, 20 bp, Anaerobiospirillum succiniciproducens
ggaggggagggaacccacaa

SEQ ID NO: 22712 - DNA, 20 bp, Citrobacter werkmanii
cgcgcgcagcgcctaacaca

SEQ ID NO: 22713 - DNA, 20 bp, Staphylococcus aureus
ctggctgaactgacgctgat

SEQ ID NO: 22714 - DNA, 20 bp, Vibrio vulnificus
ttcgggaggacgccaccact

SEQ ID NO: 22715 - DNA, 20 bp, Clostridium clostridiiforme
gtaaacgatgtatgctgggt

SEQ ID NO: 22716 - DNA, 20 bp, Anaerococcus prevotii
ggtctagagatagactctta

SEQ ID NO: 22717 - DNA, 20 bp, Streptococcus sanguinis
gacggctaactccggtgcca

SEQ ID NO: 22718 - DNA, 20 bp, Anaerococcus prevotii
gacagaacccttcggggtga

SEQ ID NO: 22719 - DNA, 20 bp, Bacillus azotoformans
taagccgcgaggcttgagcc

SEQ ID NO: 22720 - DNA, 20 bp, Enterococcus dispar
taacaatagtaaacacatgt

SEQ ID NO: 22721 - DNA, 20 bp, Clostridium clostridiiforme
cagagagaagcgagcccgaa

SEQ ID NO: 22722 - DNA, 20 bp, Suttonella indologenes
gcagcttgctgcggacctag

SEQ ID NO: 22723 - DNA, 20 bp, Neisseria subflava
gcccgcttacccggtatgct

SEQ ID NO: 22724 - DNA, 20 bp, Citrobacter freundii
tggggtgaagtccgtaaacc

SEQ ID NO: 22725 - DNA, 20 bp, Peptoniphilus asaccharolyticus
tcgacagattccttcggggt

SEQ ID NO: 22726 - DNA, 20 bp, Citrobacter koseri
gagacgctggcggcaggcct

SEQ ID NO: 22727 - DNA, 20 bp, Bacteroides merdae
cttctagcaatagcagatta

SEQ ID NO: 22728 - DNA, 20 bp, Salmonella typhi
cgcgacggtatcaggcagca

SEQ ID NO: 22729 - DNA, 20 bp, Prevotella loescheii
aggtttggcggtgaaggatg

SEQ ID NO: 22730 - DNA, 20 bp, Peptoniphilus asaccharolyticus
tcgagcgatgaaatttcgac

SEQ ID NO: 22731 - DNA, 20 bp, Acinetobacter radioresistens
ccttgacatacagagaaact

SEQ ID NO: 22732 - DNA, 20 bp, Neisseria weaveri
cgttaacaaggtagccgtag

SEQ ID NO: 22733 - DNA, 20 bp, Bacteroides ovatus
gcatgatatttttattaaag

SEQ ID NO: 22734 - DNA, 20 bp, Streptococcus criceti
aactcatgttaatgacttga

SEQ ID NO: 22735 - DNA, 20 bp, Globicatella sanguinis
ttgacatctcttgcatatct

SEQ ID NO: 22736 - DNA, 20 bp, Propionibacterium freudenreichii
gaatctcagaaagccggttc

SEQ ID NO: 22737 - DNA, 20 bp, Peptoniphilus asaccharolyticus
ttccttcggggtgaagatga

SEQ ID NO: 22738 - DNA, 20 bp, Eubacterium moniliforme
gatatatgttcccttcgggg

SEQ ID NO: 22739 - DNA, 20 bp, Brevibacterium casei
gtttttcggatcgtagtctg

SEQ ID NO: 22740 - DNA, 20 bp, Empedobacter brevis
cagctacttggcaacaagat

SEQ ID NO: 22741 - DNA, 20 bp, Moellerella wisconsensis
ggatctgcctgacagagggg

SEQ ID NO: 22742 - DNA, 20 bp, Bacteroides capilosus
ggattgggtttcttagtggc

SEQ ID NO: 22743 - DNA, 20 bp, Geobacillus thermoglucosidasius
gttgaaaggtggcttttgct

SEQ ID NO: 22744 - DNA, 20 bp, Clostridium innocuum
tttcaaggaagcttgcttcc

SEQ ID NO: 22745 - DNA, 20 bp, Finegoldia magna
gaagctatatagtgatataa

SEQ ID NO: 22746 - DNA, 20 bp, Streptococcus criceti
gacttgaaaggtgcaatggc

SEQ ID NO: 22747 - DNA, 30 bp, Streptococcus macacae
tctgttgtaagcgaagaacgggtgtaagag

SEQ ID NO: 22748 - DNA, 20 bp, Fusobacterium necrogenes
gatgccttcgtgccccttcg

SEQ ID NO: 22749 - DNA, 20 bp, Myroides odoratimimus
tcagtggtgaaatttcctag

SEQ ID NO: 22750 - DNA, 20 bp, Geobacillus stearothermophilus
tgccttgattcggtcagcgg

SEQ ID NO: 22751 - DNA, 20 bp, Streptococcus infantarius
ctggcgccgtgctctcagct

SEQ ID NO: 22752 - DNA, 20 bp, Empedobacter brevis
gtccgtaggcggattaatca

SEQ ID NO: 22753 - DNA, 20 bp, Staphylococcus succinus
caaactactatctggtcccg

SEQ ID NO: 22754 - DNA, 20 bp, Paenibacillus macerans
tccttcgcatgagggagttg

SEQ ID NO: 22755 - DNA, 20 bp, Unknown Organism
  oligonucleotide from CDC group EF-4B
gcagacggttacttaagtca

SEQ ID NO: 22756 - DNA, 20 bp, Clostridium clostridiiforme
gaagggaacgtgaacaggtg

SEQ ID NO: 22757 - DNA, 20 bp, Neisseria subflava
cgagcgcaaccccttgtaca

SEQ ID NO: 22758 - DNA, 20 bp, Proteus mirabilis
aaggcaaccgtcaggggaac

SEQ ID NO: 22759 - DNA, 20 bp, Abiotrophia defectiva
cacatgattccgtgaggaaa

SEQ ID NO: 22760 - DNA, 20 bp, Arcanobacterium pyogenes
aagccggggctttttgtttt

SEQ ID NO: 22761 - DNA, 20 bp, Enterococcus dispar
tgtttattatttgaaaggcg

SEQ ID NO: 22762 - DNA, 20 bp, Fusobacterium mortiferum
ccccttcgggggaacttagt

SEQ ID NO: 22763 - DNA, 30 bp, Streptococcus criceti
gagaagaacgttgagtagagtggaaagtta

SEQ ID NO: 22764 - DNA, 20 bp, Propionibacterium avidum
gccgtcgaatcgatgggctc

SEQ ID NO: 22765 - DNA, 20 bp, Vibrio harveyi
agtgcgtcgagttccggatc

SEQ ID NO: 22766 - DNA, 20 bp, Suttonella indologenes
gcgggcccaatgcttaacac

SEQ ID NO: 22767 - DNA, 20 bp, Enterobacter gergoviae
gtggttcttgaggccgtggc

SEQ ID NO: 22768 - DNA, 20 bp, Staphylococcus aureus
ggagtccacgccgaaacgat

SEQ ID NO: 22769 - DNA, 20 bp, Bacteroides thetaiotaomicron
ggtaagattggtattggggt

SEQ ID NO: 22770 - DNA, 20 bp, Corynebacterium auris
tcgaacggaaggctcccgct

SEQ ID NO: 22771 - DNA, 20 bp, Clostridium clostridiiforme
cggtttcgatgaagttttcg

SEQ ID NO: 22772 - DNA, 20 bp, Prevotella corporis
agctctgtctgttcgctcga

SEQ ID NO: 22773 - DNA, 20 bp, Clostridium clostridiiforme
aaagcacaaggacttgtccg

SEQ ID NO: 22774 - DNA, 20 bp, Paenibacillus alvei
cttctgagacttagcggcgg

SEQ ID NO: 22775 - DNA, 20 bp, Brevibacillus brevis
ggacagatgataggggagaa

SEQ ID NO: 22776 - DNA, 30 bp, Eubacterium moniliforme
ggatgagctcgcgtcccattagatagttgg

SEQ ID NO: 22777 - DNA, 20 bp, Paenibacillus lautus
tgggtcgcacccaaaactgg

SEQ ID NO: 22778 - DNA, 20 bp, Campylobacter curvus
taatatatagggtttctcgc

SEQ ID NO: 22779 - DNA, 20 bp, Bacillus circulans
gcttgcttttaaagttagcg

SEQ ID NO: 22780 - DNA, 20 bp, Unknown Organism
  oligonucleotide from CDC group EO-2
aggtcggaggcgagggactt

SEQ ID NO: 22781 - DNA, 20 bp, Capnocytophaga sp.
aatggtatataggtgtggca

SEQ ID NO: 22782 - DNA, 20 bp, Eubacterium moniliforme
cggggttgcacttgaaactg

SEQ ID NO: 22783 - DNA, 20 bp, Prevotella corporis
tcagaggagcaagctctgtc

SEQ ID NO: 22784 - DNA, 20 bp, Geobacillus stearothermophilus
ggcttgccttgattcggtca

SEQ ID NO: 22785 - DNA, 20 bp, Haemophilus paraphrophilus
ttgaactttaagtttggcgc

SEQ ID NO: 22786 - DNA, 20 bp, Bacteroides thetaiotaomicron
tttgcttgcaaaccaaagct

SEQ ID NO: 22787 - DNA, 20 bp, Corynebacterium group ANF
gaaggtagtggatcgagcgg

SEQ ID NO: 22788 - DNA, 20 bp, Anaerococcus prevotii
gaagcttaaatgatctcttc

SEQ ID NO: 22789 - DNA, 20 bp, Buttiauxella agrestis
gcattgtggttaataacccg

SEQ ID NO: 22790 - DNA, 20 bp, Anaerococcus prevotii
cacatgcataaatgatcaaa

SEQ ID NO: 22791 - DNA, 20 bp, Finegoldia magna
tacagagggaagctatatag

SEQ ID NO: 22792 - DNA, 20 bp, Anaerobiospirillum succiniciproducens
tgaacgctgttttaggccta

SEQ ID NO: 22793 - DNA, 20 bp, Streptococcus ratti
gagttttacttttgtacatc

SEQ ID NO: 22794 - DNA, 20 bp, Arcanobacterium pyogenes
aagcatttttgtgacggtat

SEQ ID NO: 22795 - DNA, 20 bp, Stenotrophomonas maltophilia
actgtgtgactcatgactgg

SEQ ID NO: 22796 - DNA, 20 bp, Clostridium clostridiiforme
ctggacttgacatccacgcg

SEQ ID NO: 22797 - DNA, 20 bp, Sporosarcina pasteurii
ggtacaggcagttactcctg

SEQ ID NO: 22798 - DNA, 20 bp, Vibrio mimicus
cgtcaacacggtagcgctag

SEQ ID NO: 22799 - DNA, 20 bp, Paenibacillus lautus
ctcttagagtaactgctaag

SEQ ID NO: 22800 - DNA, 20 bp, Bacteroides merdae
gcaatacagattgatggcga

SEQ ID NO: 22801 - DNA, 20 bp, Aeromonas hydrophila
tggtggctaatacccaccag

SEQ ID NO: 22802 - DNA, 30 bp, Leuconostoc fallax
gtgtgtttaaaaggggcttcggcctcactt

SEQ ID NO: 22803 - DNA, 20 bp, Anaerococcus tetradius
gaaccttgtattgatttctt

SEQ ID NO: 22804 - DNA, 20 bp, Sporosarcina ureae
ttcccgaataatcccattct

SEQ ID NO: 22805 - DNA, 20 bp, Microbacterium hominis
cctccccttgtggagggagc

SEQ ID NO: 22806 - DNA, 20 bp, Finegoldia magna
atatagtgatataatgcaaa

SEQ ID NO: 22807 - DNA, 20 bp, Microbacterium hominis
gctgcggtgtaatacgatcc

SEQ ID NO: 22808 - DNA, 20 bp, Alicyclobacillus acidocaldarius
ctacgttttaaccgcggctg

SEQ ID NO: 22809 - DNA, 20 bp, Streptococcus mitis
atagcagttattgcatgata

SEQ ID NO: 22810 - DNA, 20 bp, Proteus vulgaris
acggggctaataccgcatga

SEQ ID NO: 22811 - DNA, 20 bp, Campylobacter curvus
gggtttctcgctatgggatg

SEQ ID NO: 22812 - DNA, 20 bp, Streptococcus acidominimus
atccgctaagtgacggtacc

SEQ ID NO: 22813 - DNA, 20 bp, Dolosicoccus paucivorans
tgtttcattgacaaagatgc

SEQ ID NO: 22814 - DNA, 20 bp, Shewanella algae
cctggtagagatgcctcagt

SEQ ID NO: 22815 - DNA, 20 bp, Prevotella oralis
cgtaggcagttttttaagcg

SEQ ID NO: 22816 - DNA, 20 bp, Streptococcus ratti
ttgtgtgctttggaaactgc

SEQ ID NO: 22817 - DNA, 20 bp, Propionibacterium propionicus
aagattttttttggttgggg

SEQ ID NO: 22818 - DNA, 20 bp, Clostridium clostridiiforme
catccgagtcgggtgctctc

SEQ ID NO: 22819 - DNA, 20 bp, Empedobacter brevis
cagattgaatggcatcattt

SEQ ID NO: 22820 - DNA, 20 bp, Porphyromonas endodontalis
cgaggggcagcattatttta

SEQ ID NO: 22821 - DNA, 20 bp, Bacillus coagulans
gaagcttgcttctatcaagt

SEQ ID NO: 22822 - DNA, 20 bp, Bacteroides stercoris
tccaacctgccgacaacact

SEQ ID NO: 22823 - DNA, 20 bp, Bacteroides capillosus
tcctatgcaggcatctaact

SEQ ID NO: 22824 - DNA, 20 bp, Empedobacter brevis
atgcaagccgaggggtacga

SEQ ID NO: 22825 - DNA, 20 bp, Psychrobacter phenylpyruvicus
cttttagctgtcgctagagg

SEQ ID NO: 22826 - DNA, 20 bp, Achromobacter xylosoxidans
gcgtagcttaataccggcat

SEQ ID NO: 22827 - DNA, 20 bp, Streptococcus urinalis
catgagagtttttaacacat

SEQ ID NO: 22828 - DNA, 20 bp, Peptoniphilus asaccharolyticus
gagcgatgaaaatcaaacag

SEQ ID NO: 22829 - DNA, 20 bp, Brevibacillus centrosporus
tttcatggcaaaagcttgaa

SEQ ID NO: 22830 - DNA, 20 bp, Paenibacillus alvei
tcgcatgagggagatgagaa

SEQ ID NO: 22831 - DNA, 20 bp, Leptotrichia buccalis
atgtaatgcttaacacatgc

SEQ ID NO: 22832 - DNA, 20 bp, Clostridium clostridiiforme
gctggctgcatactgacgct

SEQ ID NO: 22833 - DNA, 30 bp, Bacteroides merdae
taccccataaaacaggggtcccgcatggga

SEQ ID NO: 22834 - DNA, 30 bp, Streptococcus cristatus
taatattgactattgcatgatagtcaatta

SEQ ID NO: 22835 - DNA, 20 bp, Prevotella melaninogenica
ccatgaaagcgcgggggtgc

SEQ ID NO: 22836 - DNA, 20 bp, Peptoniphilus asaccharolyticus
gtttggaaggattagcggcg

SEQ ID NO: 22837 - DNA, 20 bp, Paenibacillus azotofixans
gggagcttgctctctcatta

SEQ ID NO: 22838 - DNA, 20 bp, Sphingobacterium multivorum
gtggggactttaaacagact

SEQ ID NO: 22839 - DNA, 20 bp, Bacteroides capilosus
actggctgccaaagatttat

SEQ ID NO: 22840 - DNA, 20 bp, Moraxella osloensis
gaaagcaggcggcaggctta

SEQ ID NO: 22841 - DNA, 20 bp, Anaerobiospirillum succiniciproducens
gggggaaagacttttagttg

SEQ ID NO: 22842 - DNA, 20 bp, Bacteroides capillosus
cagagcgtcggtcgtatgca

SEQ ID NO: 22843 - DNA, 20 bp, Prevotella disiens
gttttgcatgtaccattcga

SEQ ID NO: 22844 - DNA, 20 bp, Streptococcus macacae
acatagccgcacctgagagg

SEQ ID NO: 22845 - DNA, 20 bp, Bacillus niacini
tgagggaaagttgaaagtcg

SEQ ID NO: 22846 - DNA, 20 bp, Campylobacter curvus
cgaagtaaataatatatagg

SEQ ID NO: 22847 - DNA, 20 bp, Macrococcus caseolyticus
atcggaaggggcggtggatc

SEQ ID NO: 22848 - DNA, 20 bp, Empedobacter brevis
tgttgaagtggctggaatgt

SEQ ID NO: 22849 - DNA, 20 bp, Proteus penneri
catccagcggatcctttaga

SEQ ID NO: 22850 - DNA, 20 bp, Sporosarcina ureae
aatcccattctcttctggca

SEQ ID NO: 22851 - DNA, 20 bp, Clostridium clostridiiforme
ggaggcctaaccgcgaggaa

SEQ ID NO: 22852 - DNA, 20 bp, Anaerococcus tetradius
catggtagactaaccaaaga

SEQ ID NO: 22853 - DNA, 20 bp, Leptotrichia buccalis
ggtaacgccaagcgaacctg

SEQ ID NO: 22854 - DNA, 20 bp, Prevotella disiens
taatgttttgcatgtaccat

SEQ ID NO: 22855 - DNA, 20 bp, Prevotella oralis
ggccttttttggtcggtggc

SEQ ID NO: 22856 - DNA, 20 bp, Eubacterium moniliforme
aaggattcattcgatgcagg

SEQ ID NO: 22857 - DNA, 20 bp, Streptococcus criceti
gtggaaagttactcaagtga

SEQ ID NO: 22858 - DNA, 20 bp, Providencia alcalifaciens
ggtagctaatccgcaataat

SEQ ID NO: 22859 - DNA, 30 bp, Unknown Organism
  oligonucleotide from CDC group EF-4B
aacctgggaactgcgtttgaaactgggtga

SEQ ID NO: 22860 - DNA, 20 bp, Sporosarcina pasteurii
ttcttccttgttcgctcgac

SEQ ID NO: 22861 - DNA, 20 bp, Streptococcus macacae
tcttagagggggataaggat

SEQ ID NO: 22862 - DNA, 20 bp, Finegoldia magna
gcaaaactcgaaagccaatc

SEQ ID NO: 22863 - DNA, 20 bp, Raoultella terrigena
tgtgtaggcctaacacatgc

SEQ ID NO: 22864 - DNA, 20 bp, Actinomyces radingae
ttttaagtttctggagggag

SEQ ID NO: 22865 - DNA, 20 bp, Clostridium clostridiiforme
gcacaaggacttgtccgaaa

SEQ ID NO: 22866 - DNA, 30 bp, Streptococcus ratti
atcgtaaagctctgttgtcagagacgaacg

SEQ ID NO: 22867 - DNA, 30 bp, Bacteroides capillosus
ctttcgggttgtaaacttcttttatcaggg

SEQ ID NO: 22868 - DNA, 30 bp, Geobacillus stearothermophilus
tgccttgattcggtcagcggcggacgggtg

SEQ ID NO: 22869 - DNA, 30 bp, Bacteroides capillosus
aacgatctagagatagtgaggcccttcggg

SEQ ID NO: 22870 - DNA, 20 bp, Providencia alcalifaciens
atccgcaataatctctaagg

SEQ ID NO: 22871 - DNA, 20 bp, Actinomyces naeslundii
tgaaggcgaccttgcctttt

SEQ ID NO: 22872 - DNA, 20 bp, Escherichia vulneris
gagtggcggacgggtgaagt

SEQ ID NO: 22873 - DNA, 20 bp, Finegoldia magna
gaagaaggtattcgtatcgt

SEQ ID NO: 22874 - DNA, 20 bp, Leptotrichia buccalis
aaggcggtaacgccaagcga

SEQ ID NO: 22875 - DNA, 20 bp, Sphingobacterium multivorum
agggggggacgacgtccagg

SEQ ID NO: 22876 - DNA, 20 bp, Leifsonia aquatica
caaggctgacatatacgaga

SEQ ID NO: 22877 - DNA, 20 bp, Anaerococcus tetradius
gtcgaacgatgaaccttgta

SEQ ID NO: 22878 - DNA, 30 bp, Oligella ureolytica
caacctcggaactgcactattaactatcaa

SEQ ID NO: 22879 - DNA, 20 bp, Achromobacter xylosoxidans
taatacctcgcgaaactgac

SEQ ID NO: 22880 - DNA, 20 bp, Prevotella loescheii
ggaagtgcggtggataactg

SEQ ID NO: 22881 - DNA, 20 bp, Bacteroides ureolyticus
actcctatttgacataagtt

SEQ ID NO: 22882 - DNA, 20 bp, Microbacterium hominis
aatacgatcccgggtctggt

SEQ ID NO: 22883 - DNA, 20 bp, Bacillus azotoformans
agactgccgggacaaaccgg

SEQ ID NO: 22884 - DNA, 20 bp, Sporosarcina ureae
tattcccgaataatcccatt

SEQ ID NO: 22885 - DNA, 30 bp, Shewanella putrefaciens
agtgggctgcaaaagaagtgggtagctaac

SEQ ID NO: 22886 - DNA, 20 bp, Paenibacillus pabuli
ttgcttttcttgatacttag

SEQ ID NO: 22887 - DNA, 20 bp, Empedobacter brevis
aggcaggtcactaagtatca

SEQ ID NO: 22888 - DNA, 20 bp, Propionibacterium avidum
ttgcttgttaggcggctagc

SEQ ID NO: 22889 - DNA, 20 bp, Vibrio parahaemolyticus
cagccaacttgcgaaagtcg

SEQ ID NO: 22890 - DNA, 20 bp, Salmonella typhi
agcttgcttgcttggctgac

SEQ ID NO: 22891 - DNA, 20 bp, Proteus mirabilis
aggttaatacccttgtcaat

SEQ ID NO: 22892 - DNA, 20 bp, Paenibacillus alvei
tgaatgcaaactctagagat

SEQ ID NO: 22893 - DNA, 20 bp, Globicatella sanguinis
taaccaataggagggagccg

SEQ ID NO: 22894 - DNA, 20 bp, Campylobacter concisus
agcgaatcgctatcaaagcc

SEQ ID NO: 22895 - DNA, 20 bp, Bacteroides stercoris
gcaactgactgagctggaaa

SEQ ID NO: 22896 - DNA, 20 bp, Budvicia aquatica
gttctgcaactcgactccgt

SEQ ID NO: 22897 - DNA, 20 bp, Anaerococcus tetradius
tcgggatgaaaaatattgga

SEQ ID NO: 22898 - DNA, 20 bp, Peptostreptococcus anaerobius
gcttgcattgatgaaagatg

SEQ ID NO: 22899 - DNA, 20 bp, Corynebacterium group ANF
tatcacatggtaagaagatg

SEQ ID NO: 22900 - DNA, 20 bp, Campylobacter concisus
aggacgatggttggatgcca

SEQ ID NO: 22901 - DNA, 20 bp, Anaerococcus prevotii
tattgcttcggcagaactgt

SEQ ID NO: 22902 - DNA, 20 bp, Bacillus schlegellii
cggggagcgggcggaagcct

SEQ ID NO: 22903 - DNA, 20 bp, Bacteroides stercoris
tactggcgaccttgagtgca

SEQ ID NO: 22904 - DNA, 20 bp, Sporosarcina pasteurii
tcttccttgttcgctcgact

SEQ ID NO: 22905 - DNA, 20 bp, Eremococcus coleocola
agcaatcatcgcctgatggt

SEQ ID NO: 22906 - DNA, 20 bp, Microbacterium hominis
ggccctccccttgtggaggg

SEQ ID NO: 22907 - DNA, 20 bp, Dermacoccus nishinomiyaensis
tactggatatgaccgatctc

SEQ ID NO: 22908 - DNA, 20 bp, Eubacterium moniliforme
tgcacttgaaactgtgtggc

SEQ ID NO: 22909 - DNA, 20 bp, Corynebacterium group ANF
agccgcttgctccactttgt

SEQ ID NO: 22910 - DNA, 20 bp, Dolosicoccus paucivorans
taccgcataaatcaatgatt

SEQ ID NO: 22911 - DNA, 20 bp, Brevibacterium casei
aaagccagtctcagtttttc

SEQ ID NO: 22912 - DNA, 20 bp, Anaerobiospirillum succiniciproducens
tcagggggaggaaacactga

SEQ ID NO: 22913 - DNA, 20 bp, Propionibacterium propionicus
cgctttcaattgtgacgaag

SEQ ID NO: 22914 - DNA, 20 bp, Propionibacterium granulosum
tggatcgggagcttccagag

SEQ ID NO: 22915 - DNA, 20 bp, Campylobacter concisus
tcaaagggagctgcgaaggt

SEQ ID NO: 22916 - DNA, 20 bp, Bacteroides vulgatus
cgggtatgcatacccgtttg

SEQ ID NO: 22917 - DNA, 20 bp, Finegoldia magna
ggtggaagattactaatgag

SEQ ID NO: 22918 - DNA, 20 bp, Peptoniphilus asaccharolyticus
aatttcggtgccgcagttaa

SEQ ID NO: 22919 - DNA, 20 bp, Streptococcus macacae
caacagtatcgctaagagat

SEQ ID NO: 22920 - DNA, 20 bp, Empedobacter brevis
tctttcgggaatctgagacc

SEQ ID NO: 22921 - DNA, 30 bp, Bacteroides stercoris
ttatacgggaataaagttagccacgtgtgg

SEQ ID NO: 22922 - DNA, 20 bp, Escherichia hermannii
acaactgtggtgacgacgta

SEQ ID NO: 22923 - DNA, 20 bp, Leptotrichia buccalis
tgcaagtctttggcagaatc

SEQ ID NO: 22924 - DNA, 20 bp, Paenibacillus validus
cgagcggccctttccttcgg

SEQ ID NO: 22925 - DNA, 20 bp, Finegoldia magna
tatacttagttaccagcgag

SEQ ID NO: 22926 - DNA, 20 bp, Lactococcus raffinolactis
aagtaccaaatggtacactg

SEQ ID NO: 22927 - DNA, 20 bp, Streptococcus sanguinis
cggatcttaccagaaaggga

SEQ ID NO: 22928 - DNA, 20 bp, Bacillus schlegellii
ggcgcccgaaggcgcgtgca

SEQ ID NO: 22929 - DNA, 20 bp, Escherichia hermannii
actgtggtgacgacgtaaca

SEQ ID NO: 22930 - DNA, 20 bp, Arcanobacterium pyogenes
tttgtgacggtatgtgcaga

SEQ ID NO: 22931 - DNA, 20 bp, Citrobacter freundii
gggtgaagtccgtaaaccaa

SEQ ID NO: 22932 - DNA, 20 bp, Leuconostoc carnosum
tgggaagaaaagttaaggta

SEQ ID NO: 22933 - DNA, 20 bp, Streptococcus sobrinus
aagcaacggcttcactatca

SEQ ID NO: 22934 - DNA, 20 bp, Leptotrichia buccalis
cagggctggagtattggaga

SEQ ID NO: 22935 - DNA, 20 bp, Streptococcus macacae
gaaaggtacaacagtatcgc

SEQ ID NO: 22936 - DNA, 20 bp, Vibrio mimicus
aagtcgtcaacacggtagcg

SEQ ID NO: 22937 - DNA, 20 bp, Bacillus schlegellii
agcccgtctcttagcggcgg

SEQ ID NO: 22938 - DNA, 20 bp, Dermabacter hominis
ccttggcccgcatgggttgt

SEQ ID NO: 22939 - DNA, 20 bp, Clostridium subterminale
cgcatgatttttgtaccaaa

SEQ ID NO: 22940 - DNA, 20 bp, Streptococcus macacae
ttgaaaggtacaacagtatc

SEQ ID NO: 22941 - DNA, 20 bp, Paenibacillus azotofixans
gcggagttgtagagggagct

SEQ ID NO: 22942 - DNA, 20 bp, Bacteroides stercoris
agttgatactggtatccttg

SEQ ID NO: 22943 - DNA, 20 bp, Capnocytophaga sp.
tcaaatcatccggcccttac

SEQ ID NO: 22944 - DNA, 20 bp, Providencia rustigianii
tgggaggaaggcgttgatgc

SEQ ID NO: 22945 - DNA, 20 bp, Bacteroides stercoris
tttcccgcatggaataacta

SEQ ID NO: 22946 - DNA, 20 bp, Bacillus schlegellii
gcgggcggaagcctttgggt

SEQ ID NO: 22947 - DNA, 20 bp, Bacillus smithii
gggtgaagtcgtaacaaaaa

SEQ ID NO: 22948 - DNA, 20 bp, Stenotrophomonas maltophilia
ctgatcgttcagtccggatt

SEQ ID NO: 22949 - DNA, 20 bp, Finegoldia magna
gcttgacatgtgggtgaaag

SEQ ID NO: 22950 - DNA, 20 bp, Corynebacterium falsenii
ggaagaagccatgttgtggt

SEQ ID NO: 22951 - DNA, 20 bp, Dolosicoccus paucivorans
acgagaagcaacgtcgcgag

SEQ ID NO: 22952 - DNA, 20 bp, Bacillus sp
ggatcaccttctacatggca

SEQ ID NO: 22953 - DNA, 20 bp, Myroides odoratimimus
gaggggtagaaaaagcttgc

SEQ ID NO: 22954 - DNA, 20 bp, Unknown Organism
  oligonucleotide from CDC group VB-3
cgtaacaaggagccgtaggg

SEQ ID NO: 22955 - DNA, 20 bp, Streptococcus sobrinus
aactgtttaaaagaagcaac

SEQ ID NO: 22956 - DNA, 20 bp, Pediococcus acidilactici
tggtctgtactgcgctgagg

SEQ ID NO: 22957 - DNA, 20 bp, Clostridium clostridiiforme
agagtgtccggtgaggaggg

SEQ ID NO: 22958 - DNA, 20 bp, Enterococcus dispar
taaacacatgtttattattt

SEQ ID NO: 22959 - DNA, 20 bp, Prevotella oralis
ggggataaagttggggacgt

SEQ ID NO: 22960 - DNA, 20 bp, Stenotrophomonas maltophilia
ctaatacccttatcgatatg

SEQ ID NO: 22961 - DNA, 20 bp, Streptococcus infantarius
cgtttttttttggtaagtta

SEQ ID NO: 22962 - DNA, 20 bp, Bacteroides uniformis
accgcaggagcgccctaggg

SEQ ID NO: 22963 - DNA, 20 bp, Bacteroides thetaiotaomicron
gaatattttggaaacaggat

SEQ ID NO: 22964 - DNA, 20 bp, Streptococcus infantarius
agccgtttttttttggtaag

SEQ ID NO: 22965 - DNA, 20 bp, Streptococcus urinalis
aacgctgaggtcatgtgctt

SEQ ID NO: 22966 - DNA, 20 bp, Eggerthella lenta
ggccgaacccgcaggggcgg

SEQ ID NO: 22967 - DNA, 20 bp, Achromobacter xylosoxidans
ccgcccctaaacgatgtcac

SEQ ID NO: 22968 - DNA, 30 bp, Streptococcus ferus
ggaaactgtagggcttgagtgcagaagggg

SEQ ID NO: 22969 - DNA, 20 bp, Finegoldia magna
tcggggctcaaccccgtaaa

SEQ ID NO: 22970 - DNA, 30 bp, Aeromonas hydrophila
ggtggctaatacccaccagctgtgacgtta

SEQ ID NO: 22971 - DNA, 30 bp, Eubacterium moniliforme
tcgaaggtgagatcaatgactggggtgaag

SEQ ID NO: 22972 - DNA, 20 bp, Streptococcus constellatus
cccgtagtttactaccccgt

SEQ ID NO: 22973 - DNA, 20 bp, Aerococcus viridans
gtacagcgagtcgcgaaccc

SEQ ID NO: 22974 - DNA, 20 bp, Providencia alcalifaciens
acggtagctaatccgcaata

SEQ ID NO: 22975 - DNA, 20 bp, Bacillus schlegellii
tgctaggtgtgggtggggcg

SEQ ID NO: 22976 - DNA, 30 bp, Globicatella sanguinis
tcgaacgaaccataactagaacttgttctg

SEQ ID NO: 22977 - DNA, 20 bp, Bacillus thuringiensis
gcctaatacaatgcaagtcg

SEQ ID NO: 22978 - DNA, 20 bp, Bacteroides merdae
aacactccttctagcaatag

SEQ ID NO: 22979 - DNA, 30 bp, Streptococcus acidominimus
gatagctaataccgcataatagtgtttact

SEQ ID NO: 22980 - DNA, 20 bp, Serratia proteamaculans
gtgtgttaatagcgcatcac

SEQ ID NO: 22981 - DNA, 20 bp, Bacteroides merdae
aatacagattgatggcgacc

SEQ ID NO: 22982 - DNA, 20 bp, Pseudomonas fluorescens
cggtagagagatgcttgcat

SEQ ID NO: 22983 - DNA, 20 bp, Neisseria polysaccharea
gatcacctcccttcagtgga

SEQ ID NO: 22984 - DNA, 20 bp, Clostridium clostridiiforme
ggtgctctcaaagccggagg

SEQ ID NO: 22985 - DNA, 20 bp, Aeromonas hydrophila
gtggctaatacccaccagct

SEQ ID NO: 22986 - DNA, 20 bp, Clostridium clostridiiforme
agatgcgcttttggagagac

SEQ ID NO: 22987 - DNA, 20 bp, Corynebacterium pilosum
gttagttcccgttgggtatt

SEQ ID NO: 22988 - DNA, 20 bp, Streptococcus acidominimus
agtggaaaatccgctaagtg

SEQ ID NO: 22989 - DNA, 20 bp, Bacillus schlegellii
ctgtctcttagcggcggacg

SEQ ID NO: 22990 - DNA, 20 bp, Sporosarcina pasteurii
ataggagtaactgcctgtac

SEQ ID NO: 22991 - DNA, 20 bp, Streptococcus macacae
gagcttaaaaggtgcagctg

SEQ ID NO: 22992 - DNA, 20 bp, Sporosarcina pasteurii
atccgccgctaacaaaggaa

SEQ ID NO: 22993 - DNA, 20 bp, Streptococcus urinalis
gttcgctttggaaactgtag

SEQ ID NO: 22994 - DNA, 20 bp, Clostridium butyricum
gccgtaggagtaacctgcgg

SEQ ID NO: 22995 - DNA, 20 bp, Bacteroides stercoris
gatactggtatccttgagtg

SEQ ID NO: 22996 - DNA, 20 bp, Actinomyces radingae
ctgagcgcctagagataggt

SEQ ID NO: 22997 - DNA, 20 bp, Eremococcus coleocola
acctacccttgagcggggga

SEQ ID NO: 22998 - DNA, 20 bp, Corynebacterium argentoratense
ttagtgtgtgatggtggaaa

SEQ ID NO: 22999 - DNA, 20 bp, Streptococcus infantarius
agcgaacaagtggttaagcc

SEQ ID NO: 23000 - DNA, 20 bp, Brevibacillus brevis
cctgcggttgggatcaacct

SEQ ID NO: 23001 - DNA, 20 bp, Bacteroides stercoris
actggcgaccttgagtgcaa

SEQ ID NO: 23002 - DNA, 20 bp, Dermacoccus nishinomiyaensis
ctggatatgaccgatctccg

SEQ ID NO: 23003 - DNA, 20 bp, Moellerella wisconsensis
tcagcgattgacgttaccga

SEQ ID NO: 23004 - DNA, 20 bp, Moraxella atlantae
gcttatgggtttctgctata

SEQ ID NO: 23005 - DNA, 20 bp, Campylobacter curvus
tgggaaagtcgaaccctata

SEQ ID NO: 23006 - DNA, 20 bp, Bacillus laevolacticus
agccggatagctggtttctc

SEQ ID NO: 23007 - DNA, 30 bp, Dolosicoccus paucivorans
ctcttgacatcggatgcatagcttagagat

SEQ ID NO: 23008 - DNA, 20 bp, Myroides odoratimimus
gaaatttcctagcttaacta

SEQ ID NO: 23009 - DNA, 20 bp, Anaerobiospirillum succiniciproducens
gttttaggcctaatacatgc

SEQ ID NO: 23010 - DNA, 20 bp, Prevotella bivia
ctgaagttcgtgaccgtaca

SEQ ID NO: 23011 - DNA, 20 bp, Corynebacterium group ANF
acgttttctagtggttgggg

SEQ ID NO: 23012 - DNA, 20 bp, Shewanella putrefaciens
tgccacgggaatacgttccc

SEQ ID NO: 23013 - DNA, 20 bp, Bacillus sp
gttggatcaccttctacatg

SEQ ID NO: 23014 - DNA, 20 bp, Propionibacterium propionicus
tttgtgacggtagcagtaga

SEQ ID NO: 23015 - DNA, 20 bp, Streptococcus sanguinis
gtgaccggatcttaccagaa

SEQ ID NO: 23016 - DNA, 20 bp, Bacteroides stercoris
gccgacaacactgggatagc

SEQ ID NO: 23017 - DNA, 20 bp, Dolosicoccus paucivorans
atccttcgggacatccagac

SEQ ID NO: 23018 - DNA, 20 bp, Pseudomonas mendocina
ggctgctggttaataccctg

SEQ ID NO: 23019 - DNA, 20 bp, Klebsiella oxytoca
ccgtagggggaactgcggtg

SEQ ID NO: 23020 - DNA, 20 bp, Achromobacter xylosoxidans
ggtagtcccgcccctaaacg

SEQ ID NO: 23021 - DNA, 20 bp, Escherichia hermannii
gacgacgtaacaaggtaacc

SEQ ID NO: 23022 - DNA, 20 bp, Oligella ureolytica
agagaaccggtgcacaggtg

SEQ ID NO: 23023 - DNA, 30 bp, Facklamia hominis
gccggtggcctaactttatgagggagccgt

SEQ ID NO: 23024 - DNA, 20 bp, Enterobacter amnigenus
tagcacagagagcttgtttt

SEQ ID NO: 23025 - DNA, 20 bp, Stenotrophomonas maltophilia
gccctgatcgttcagtccgg

SEQ ID NO: 23026 - DNA, 20 bp, Anaerococcus tetradius
tggaataatctgggagccgc

SEQ ID NO: 23027 - DNA, 20 bp, Prevotella buccae
gggcaaaaccgggattgggg

SEQ ID NO: 23028 - DNA, 20 bp, Eubacterium moniliforme
acaaagggcagcgacctcgt

SEQ ID NO: 23029 - DNA, 20 bp, Anaerococcus prevotii
acatgcataaatgatcaaag

SEQ ID NO: 23030 - DNA, 20 bp, Bacteroides merdae
gatacaatgtaagctctaca

SEQ ID NO: 23031 - DNA, 20 bp, Leptotrichia buccalis
cgccaagcgaacctgcaaag

SEQ ID NO: 23032 - DNA, 20 bp, Pseudomonas luteola
gggaggacggtaccacgggt

SEQ ID NO: 23033 - DNA, 20 bp, Eubacterium moniliforme
aaaaaatgacggtaccatag

SEQ ID NO: 23034 - DNA, 20 bp, Streptococcus infantarius
tcgcaatcttccaactttag

SEQ ID NO: 23035 - DNA, 20 bp, Brevibacillus reuszeri
gtttttggaccgcatggtcc

SEQ ID NO: 23036 - DNA, 20 bp, Unknown Organism
  oligonucleotide from CDC group EO-2
cacatgcaaggtcggaggcg

SEQ ID NO: 23037 - DNA, 20 bp, Granulicatella elegans
gttctagagtcgcatgaccc

SEQ ID NO: 23038 - DNA, 20 bp, Clostridium clostridiiforme
gacacctgcgggaaaccgga

SEQ ID NO: 23039 - DNA, 20 bp, Eremococcus coleocola
aatggacgatacaacgagca

SEQ ID NO: 23040 - DNA, 20 bp, Actinomyces neuii
gggaacgtgcggcgtgctta

SEQ ID NO: 23041 - DNA, 20 bp, Clostridium clostridiiforme
gatcccaaaaagccatcccc

SEQ ID NO: 23042 - DNA, 20 bp, Streptococcus criceti
ccgcataatagtgattaact

SEQ ID NO: 23043 - DNA, 20 bp, Alloiococcus otitis
atcttctgccaccttcagag

SEQ ID NO: 23044 - DNA, 20 bp, Eubacterium moniliforme
gaagttgctctttgggaagc

SEQ ID NO: 23045 - DNA, 20 bp, Bacteroides uniformis
ggagcgccctagggtaacaa

SEQ ID NO: 23046 - DNA, 20 bp, Stenotrophomonas maltophilia
ctatcgaatgagcccatatg

SEQ ID NO: 23047 - DNA, 20 bp, Brevibacillus centrosporus
gggaacccggggttaatccc

SEQ ID NO: 23048 - DNA, 20 bp, Bacteroides stercoris
tgttggcgatacaatgtcag

SEQ ID NO: 23049 - DNA, 20 bp, Gemella morbillorum
ccgcatatcagctagatgtt

SEQ ID NO: 23050 - DNA, 20 bp, Paenibacillus azotofixans
tcctcaagagtaactgctaa

SEQ ID NO: 23051 - DNA, 20 bp, Vibrio vulnificus
gaggacgccaccactttggg

SEQ ID NO: 23052 - DNA, 20 bp, Prevotella corporis
agagatgatgaagtcccctc

SEQ ID NO: 23053 - DNA, 20 bp, Finegoldia magna
aacgggatttagtaaacaga

SEQ ID NO: 23054 - DNA, 20 bp, Veillonella atypica
tctagtctgtcttaaaagtt

SEQ ID NO: 23055 - DNA, 20 bp, Enterococcus saccharolyticus
acccgcataacgctttttct

SEQ ID NO: 23056 - DNA, 20 bp, Anaerococcus tetradius
ttaggcttgagagatgaaag

SEQ ID NO: 23057 - DNA, 20 bp, Vibrio harveyi
cgactccggaagttcggaat

SEQ ID NO: 23058 - DNA, 20 bp, Streptococcus ferus
tgagaacgcatgatggatac

SEQ ID NO: 23059 - DNA, 20 bp, Bacteroides thetaiotaomicron
tggggaaacccataggccgt

SEQ ID NO: 23060 - DNA, 20 bp, Leptotrichia buccalis
acatgcaagtctttggcaga

SEQ ID NO: 23061 - DNA, 20 bp, Vibrio metschnikovii
cgcatgatagcctacggctc

SEQ ID NO: 23062 - DNA, 20 bp, Actinomyces naeslundii
accttgccttttggggggtg

SEQ ID NO: 23063 - DNA, 20 bp, Bacteroides capillosus
atgcaaatacgatctaatct

SEQ ID NO: 23064 - DNA, 20 bp, Streptococcus acidominimus
tagctgctacatttgaattg

SEQ ID NO: 23065 - DNA, 20 bp, Pediococcus parvulus
taacaaaattaaccgcatgg

SEQ ID NO: 23066 - DNA, 20 bp, Prevotella disiens
gcttttgtttgggaataatc

SEQ ID NO: 23067 - DNA, 20 bp, Lactococcus raffinolactis
taagtgacgcagcaaacgca

SEQ ID NO: 23068 - DNA, 20 bp, Streptococcus macacae
agggggataaggattggaaa

SEQ ID NO: 23069 - DNA, 20 bp, Peptostreptococcus anaerobius
gctagtcgagcgcgtctgtt

SEQ ID NO: 23070 - DNA, 20 bp, Bacteroides capilosus
tcgaacggagagctcatgac

SEQ ID NO: 23071 - DNA, 20 bp, Prevotella bivia
ggcgcgggaatacgttcccg

SEQ ID NO: 23072 - DNA, 20 bp, Pediococcus parvulus
accgcataacaaaattaacc

SEQ ID NO: 23073 - DNA, 20 bp, Clostridium clostridiiforme
gctaccagataaagctgagc

SEQ ID NO: 23074 - DNA, 20 bp, Anaerococcus prevotii
tgcgagcaaaccgtaaggaa

SEQ ID NO: 23075 - DNA, 20 bp, Prevotella loescheii
gtcggccccttgggtcggtg

SEQ ID NO: 23076 - DNA, 20 bp, Bacillus schlegellii
tgacatcccgccgacgggtc

SEQ ID NO: 23077 - DNA, 20 bp, Neisseria subflava
acaaggcagcccgaggggaa

SEQ ID NO: 23078 - DNA, 20 bp, Prevotella disiens
ttacgtgtaatgttttgcat

SEQ ID NO: 23079 - DNA, 20 bp, Corynebacterium cystitidis
tatcttttgtgggtgtgtgg

SEQ ID NO: 23080 - DNA, 20 bp, Myroides odoratimimus
taccactcgcgttaaggcgg

SEQ ID NO: 23081 - DNA, 20 bp, Providencia rustigianii
ggcgttgatgctaatatcat

SEQ ID NO: 23082 - DNA, 20 bp, Oligella urethralis
cttgaagcttccgggcatgt

SEQ ID NO: 23083 - DNA, 20 bp, Eremococcus coleocola
ggattgacggtaactaatca

SEQ ID NO: 23084 - DNA, 20 bp, Finegoldia magna
cagtaccatagaagaaagct

SEQ ID NO: 23085 - DNA, 20 bp, Corynebacterium renale
tcatggctcaggacgaacag

SEQ ID NO: 23086 - DNA, 20 bp, Bacteroides stercoris
gctggggactctacccggac

SEQ ID NO: 23087 - DNA, 20 bp, Bacteroides ovatus
tcgcatgatatttttattaa

SEQ ID NO: 23088 - DNA, 20 bp, Leptotrichia buccalis
caagcgaacctgcaaagccg

SEQ ID NO: 23089 - DNA, 20 bp, Bacteroides caccae
tgtccacgtgtggatttttg

SEQ ID NO: 23090 - DNA, 20 bp, Leuconostoc fallax
tataacaacacatttcgcat

SEQ ID NO: 23091 - DNA, 20 bp, Brevibacillus brevis
cggaagggcgcgtggatcac

SEQ ID NO: 23092 - DNA, 20 bp, Stenotrophomonas maltophilia
atatgacggtacccgcagaa

SEQ ID NO: 23093 - DNA, 20 bp, Weeksella virosa
gaataaacctattcacgagc

SEQ ID NO: 23094 - DNA, 20 bp, Streptococcus infantarius
tcatcccatctcaggtcggc

SEQ ID NO: 23095 - DNA, 20 bp, Streptococcus infantarius
agcaagctaagttttcagcg

SEQ ID NO: 23096 - DNA, 20 bp, Clostridium subterminale
tgatttttgtaccaaaggag

SEQ ID NO: 23097 - DNA, 20 bp, Leptotrichia buccalis
gaacttgccccgcagacagg

SEQ ID NO: 23098 - DNA, 20 bp, Corynebacterium pilosum
ctttgggaactgggtgtctt

SEQ ID NO: 23099 - DNA, 20 bp, Dolosigranulum pigrum
actcatggatagcctcgcgg

SEQ ID NO: 23100 - DNA, 20 bp, Moellerella wisconsensis
aaggcgttgatactaatact

SEQ ID NO: 23101 - DNA, 20 bp, Rhizobium radiobacter
gctaatctccgaaagccatc

SEQ ID NO: 23102 - DNA, 20 bp, Anaerococcus prevotii
cgtaaggaagcagcagtcga

SEQ ID NO: 23103 - DNA, 20 bp, Bacillus schlegellii
ggggagcgggcggaagcctt

SEQ ID NO: 23104 - DNA, 20 bp, Prevotella disiens
tgcttttgtttgggaataat

SEQ ID NO: 23105 - DNA, 20 bp, Bacteroides thetaiotaomicron
taggccgtaaggcatttgtg

SEQ ID NO: 23106 - DNA, 30 bp, Oligella urethralis
cggcttggcaacccgctgtcctgaccattg

SEQ ID NO: 23107 - DNA, 20 bp, Citrobacter freundii
tgaagtccgtaaaccaaggg

SEQ ID NO: 23108 - DNA, 20 bp, Clostridium clostridiiforme
ttgaaaatcatttaaccggg

SEQ ID NO: 23109 - DNA, 20 bp, Globicatella sanguinis
ttagtagattgacggtatct

SEQ ID NO: 23110 - DNA, 20 bp, Myroides odoratimimus
atgctccatggtttatcgat

SEQ ID NO: 23111 - DNA, 20 bp, Staphylococcus saccharolyticus
ctctagaggagtcagaggat

SEQ ID NO: 23112 - DNA, 20 bp, Streptococcus ferus
ggctctataagtctgaagtg

SEQ ID NO: 23113 - DNA, 20 bp, Capnocytophaga sp.
atattaaagctgaggcggtg

SEQ ID NO: 23114 - DNA, 20 bp, Prevotella buccae
agggcaaaaccgggattggg

SEQ ID NO: 23115 - DNA, 20 bp, Finegoldia magna
cgaagaaggtattcgtatcg

SEQ ID NO: 23116 - DNA, 20 bp, Clostridium clostridiiforme
gagagacttgtgtcctatca

SEQ ID NO: 23117 - DNA, 20 bp, Campylobacter concisus
ctgtcaaagggagctgcgaa

SEQ ID NO: 23118 - DNA, 20 bp, Bacillus schlegellii
cgagcggggagcgggcggaa

SEQ ID NO: 23119 - DNA, 20 bp, Corynebacterium group F
ggacgaagcatttttgtgac

SEQ ID NO: 23120 - DNA, 20 bp, Leuconostoc gelidum
aggctggggataacattctg

SEQ ID NO: 23121 - DNA, 20 bp, Bordetella trematum
cagctaatacctggcgctaa

SEQ ID NO: 23122 - DNA, 20 bp, Brevibacterium casei
caaaatcatcatgcccttta

SEQ ID NO: 23123 - DNA, 20 bp, Stenotrophomonas maltophilia
ggtgataaggctaataccct

SEQ ID NO: 23124 - DNA, 20 bp, Finegoldia magna
cgtagaaacacatgttttaa

SEQ ID NO: 23125 - DNA, 20 bp, Sphingobacterium multivorum
actggctgggccaacacgag

SEQ ID NO: 23126 - DNA, 20 bp, Corynebacterium pilosum
ttattccgggtttttccttc

SEQ ID NO: 23127 - DNA, 20 bp, Anaerococcus prevotii
gcaaaactccaaagccaatc

SEQ ID NO: 23128 - DNA, 20 bp, Psychrobacter phenylpyruvicus
gacaatactaaaaggcggct

SEQ ID NO: 23129 - DNA, 20 bp, Peptoniphilus asaccharolyticus
agaatttcggtgccgcagtt

SEQ ID NO: 23130 - DNA, 20 bp, Campylobacter curvus
ccttgtcgcaaagacggact

SEQ ID NO: 23131 - DNA, 20 bp, Vibrio harveyi
gggtagtgggctgcataaga

SEQ ID NO: 23132 - DNA, 20 bp, Paenibacillus lautus
aagttgggtgtttaacccca

SEQ ID NO: 23133 - DNA, 20 bp, Prevotella corporis
gcgtgggtttttgcaggtac

SEQ ID NO: 23134 - DNA, 20 bp, Streptococcus macacae
aagaacgggtgtaagagcgg

SEQ ID NO: 23135 - DNA, 20 bp, Peptoniphilus indolicus
atattgacccctctagagat

SEQ ID NO: 23136 - DNA, 20 bp, Alloiococcus otitis
gctaccgcttatggatagcc

SEQ ID NO: 23137 - DNA, 30 bp, Bacteroides ovatus
tgatatttttattaaagaatttcggttatc

SEQ ID NO: 23138 - DNA, 20 bp, Yersinia ruckeri
cgaggggaacctgcgggtgg

SEQ ID NO: 23139 - DNA, 20 bp, Bacteroides capillosus
ttcggctatgtgaccaagcg

SEQ ID NO: 23140 - DNA, 20 bp, Streptococcus salivarius
atggatgactcatgtcattt

SEQ ID NO: 23141 - DNA, 20 bp, Myroides odoratimimus
ctagcttaactaggacactg

SEQ ID NO: 23142 - DNA, 20 bp, Dolosicoccus paucivorans
agtagagtaactgttactcg

SEQ ID NO: 23143 - DNA, 20 bp, Morganella morganii
cggttgattgagtcagatgt

SEQ ID NO: 23144 - DNA, 20 bp, Klebsiella pneumoniae
acgagaacttagcagagatg

SEQ ID NO: 23145 - DNA, 20 bp, Porphyromonas endodontalis
gcattattttagcttgctaa

SEQ ID NO: 23146 - DNA, 30 bp, Clostridium innocuum
ttcaaggaagcttgcttccaaagagactta

SEQ ID NO: 23147 - DNA, 20 bp, Bacteroides capilosus
ggaacctgcctcggagtggg

SEQ ID NO: 23148 - DNA, 20 bp, Dolosicoccus paucivorans
ggtacaacgagaagcaacgt

SEQ ID NO: 23149 - DNA, 20 bp, Peptoniphilus asaccharolyticus
caaagagcgggcgagctagt

SEQ ID NO: 23150 - DNA, 20 bp, Yersinia frederiksenii
gaaggcatttcacttaatac

SEQ ID NO: 23151 - DNA, 20 bp, Bacteroides ovatus
ataactccggaatagccttt

SEQ ID NO: 23152 - DNA, 20 bp, Cardiobacterium hominis
ctcagattgagacgctggcg

SEQ ID NO: 23153 - DNA, 20 bp, Paenibacillus macerans
tcttcgggagacaggggaca

SEQ ID NO: 23154 - DNA, 20 bp, Bacteroides capilosus
gattgggtttcttagtggcg

SEQ ID NO: 23155 - DNA, 20 bp, Streptococcus infantarius
gtaggagctctggcgccgtg

SEQ ID NO: 23156 - DNA, 20 bp, Bacteroides thetaiotaomicron
cccgcatgggttttatatta

SEQ ID NO: 23157 - DNA, 20 bp, Brevibacillus brevis
ggggaacctgcggttgggat

SEQ ID NO: 23158 - DNA, 20 bp, Bacteroides stercoris
acctgccgacaacactggga

SEQ ID NO: 23159 - DNA, 20 bp, Micromonas micros
atttttgtggaaatcctttc

SEQ ID NO: 23160 - DNA, 20 bp, Eubacterium moniliforme
aagtcgaacgaagttgctct

SEQ ID NO: 23161 - DNA, 20 bp, Streptococcus cristatus
tgcatgatagtcaattaaaa

SEQ ID NO: 23162 - DNA, 30 bp, Weeksella virosa
atgatgcggtgaatacgttcccgggccctt

SEQ ID NO: 23163 - DNA, 20 bp, Bacteroides stercoris
cgggtagttccatcaggtta

SEQ ID NO: 23164 - DNA, 20 bp, Bacillus licheniformis
aaccccggggttatatccgg

SEQ ID NO: 23165 - DNA, 20 bp, Bifidobacterium adolescentis
ttaacctaatactttgctgt

SEQ ID NO: 23166 - DNA, 20 bp, Bacteroides capilosus
tatcagggacgaaataaatg

SEQ ID NO: 23167 - DNA, 20 bp, Bacillus mycoides
aacattttgcgctgcatggc

SEQ ID NO: 23168 - DNA, 30 bp, Capnocytophaga sp.
acatttatattaaagctgaggcggtgaaag

SEQ ID NO: 23169 - DNA, 20 bp, Clostridium clostridiiforme
gcggtttcgatgaagttttc

SEQ ID NO: 23170 - DNA, 20 bp, Corynebacterium cystitidis
ctgaaacgggggcgctaggt

SEQ ID NO: 23171 - DNA, 20 bp, Bacillus mycoides
atggcgcgaaattgaaaggc

SEQ ID NO: 23172 - DNA, 20 bp, Vibrio vulnificus
tttaccttcgggaggacgcc

SEQ ID NO: 23173 - DNA, 20 bp, Bacteroides capilosus
tcgcatgacactggctgcca

SEQ ID NO: 23174 - DNA, 30 bp, Helcococcus ovis
agccgtcgagctaaccgttaggaggcagac

SEQ ID NO: 23175 - DNA, 20 bp, Bacteroides capilosus
agtcgaacggagagctcatg

SEQ ID NO: 23176 - DNA, 20 bp, Bacillus mycoides
tacaaggatagccgatcgga

SEQ ID NO: 23177 - DNA, 20 bp, Serratia marcescens
agcgaacaaggtaaccgtag

SEQ ID NO: 23178 - DNA, 20 bp, Streptococcus sanguinis
gcatgatattgaatatcgca

SEQ ID NO: 23179 - DNA, 20 bp, Finegoldia magna
atgacagtaccatagaagaa

SEQ ID NO: 23180 - DNA, 20 bp, Sporosarcina pasteurii
cccgatccgccgctaacaaa

SEQ ID NO: 23181 - DNA, 20 bp, Bacillus coagulans
tcgcatgagcggatgttaaa

SEQ ID NO: 23182 - DNA, 20 bp, Leptotrichia buccalis
aacctgcaaagccggtccaa

SEQ ID NO: 23183 - DNA, 20 bp, Actinomyces radingae
atctgcgtggcctttgtggt

SEQ ID NO: 23184 - DNA, 20 bp, Myroides odoratimimus
gtggtgaaatttcctagctt

SEQ ID NO: 23185 - DNA, 20 bp, Bacteroides stercoris
gcatgggatgattattaaag

SEQ ID NO: 23186 - DNA, 20 bp, Sporosarcina ureae
ggagacatgattttcccttc

SEQ ID NO: 23187 - DNA, 30 bp, Morganella morganii
gcaagtcgggcggtaacagggagaagcttg

SEQ ID NO: 23188 - DNA, 20 bp, Stenotrophomonas maltophilia
aatacccttatcgatatgac

SEQ ID NO: 23189 - DNA, 20 bp, Streptococcus macacae
aacgggtgtaagagcggaaa

SEQ ID NO: 23190 - DNA, 20 bp, Clostridium clostridiiforme
cactccggcgagactgccat

SEQ ID NO: 23191 - DNA, 20 bp, Paenibacillus macerans
tcttgacatgcctctgaccg

SEQ ID NO: 23192 - DNA, 20 bp, Streptococcus macacae
ggggataaggattggaaacg

SEQ ID NO: 23193 - DNA, 20 bp, Corynebacterium pilosum
agggtctcccaattgccgac

SEQ ID NO: 23194 - DNA, 20 bp, Gemella morbillorum
gagagcttcttctctggatg

SEQ ID NO: 23195 - DNA, 20 bp, Leptotrichia buccalis
ctggtgttgtcagactgacg

SEQ ID NO: 23196 - DNA, 20 bp, Pseudomonas oryzihabitans
tacagcgaatacctgtgagt

SEQ ID NO: 23197 - DNA, 20 bp, Streptococcus constellatus
gcccgtagtttactaccccg

SEQ ID NO: 23198 - DNA, 20 bp, Bacteroides capilosus
  misc_feature (16)..(16): n is a, c, g, or t
ataaatgacggtactngatg

SEQ ID NO: 23199 - DNA, 20 bp, Bacillus niacini
agttgaaagtcggtttacgc

SEQ ID NO: 23200 - DNA, 20 bp, Bacteroides stercoris
cgacaacactgggatagcct

SEQ ID NO: 23201 - DNA, 20 bp, Capnocytophaga sp.
actttgatgacggtactctg

SEQ ID NO: 23202 - DNA, 20 bp, Eggerthella lenta
acccgcaggggcggaggcgt

SEQ ID NO: 23203 - DNA, 20 bp, Geobacillus thermoglucosidasius
agggggactgcccggttaca

SEQ ID NO: 23204 - DNA, 20 bp, Sporosarcina pasteurii
agtataggagtaactgcctg

SEQ ID NO: 23205 - DNA, 20 bp, Corynebacterium argentoratense
taggaccatcctttagtgtg

SEQ ID NO: 23206 - DNA, 20 bp, Yersinia ruckeri
aggtaaccgaggggaacctg

SEQ ID NO: 23207 - DNA, 20 bp, Streptococcus ferus
tgttgttaaggaagaacggt

SEQ ID NO: 23208 - DNA, 20 bp, Rhizobium radiobacter
ctaatctccgaaagccatct

SEQ ID NO: 23209 - DNA, 20 bp, Gemella morbillorum
tgctatcgctaccagatgga

SEQ ID NO: 23210 - DNA, 20 bp, Prevotella loescheii
ttatgcggggataaaggggc

SEQ ID NO: 23211 - DNA, 20 bp, Leuconostoc carnosum
aaagttaaggtagggaatga

SEQ ID NO: 23212 - DNA, 20 bp, Sphingobacterium multivorum
gcataacatatgtgaccggc

SEQ ID NO: 23213 - DNA, 20 bp, Eubacterium moniliforme
agagatatatgttcccttcg

SEQ ID NO: 23214 - DNA, 20 bp, Finegoldia magna
aactcgaaagccaatcccag

SEQ ID NO: 23215 - DNA, 20 bp, Leuconostoc pseudomesenteroides
ttagtgtcgcatgatacgaa

SEQ ID NO: 23216 - DNA, 20 bp, Finegoldia magna
aaaactcgaaagccaatccc

SEQ ID NO: 23217 - DNA, 20 bp, Acinetobacter baumannii
ggtgaagtcgtacaggtagc

SEQ ID NO: 23218 - DNA, 20 bp, Propionibacterium avidum
gtgtgggggtagccgtcgaa

SEQ ID NO: 23219 - DNA, 20 bp, Paenibacillus alvei
cacttctgagacttagcggc

SEQ ID NO: 23220 - DNA, 20 bp, Serratia grimesii
agcacatcacattgacgtta

SEQ ID NO: 23221 - DNA, 20 bp, Gemella morbillorum
atcccgcatatcagctagat

SEQ ID NO: 23222 - DNA, 20 bp, Unknown Organism
  oligonucleotide from CDC group EO-2
tgaaactatcggtctggagt

SEQ ID NO: 23223 - DNA, 20 bp, Anaerococcus tetradius
atttagattccttcgggatg

SEQ ID NO: 23224 - DNA, 20 bp, Bacteroides capillosus
agtgaggcccttcggggcgc

SEQ ID NO: 23225 - DNA, 20 bp, Corynebacterium pilosum
ggaaaggccctgccttccag

SEQ ID NO: 23226 - DNA, 20 bp, Dermacoccus nishinomiyaensis
atactggatatgaccgatct

SEQ ID NO: 23227 - DNA, 20 bp, Sporosarcina ureae
ggaatgttgaaagccggttt

SEQ ID NO: 23228 - DNA, 20 bp, Bacteroides stercoris
caactgactgagctggaaac

SEQ ID NO: 23229 - DNA, 20 bp, Brevibacillus brevis
cagatgataggggagaagtc

SEQ ID NO: 23230 - DNA, 20 bp, Morganella morganii
ttggcaattgacgttaccga

SEQ ID NO: 23231 - DNA, 20 bp, Bacteroides thetaiotaomicron
atattttggaaacaggatag

SEQ ID NO: 23232 - DNA, 20 bp, Finegoldia magna
agcttcggtggaagattact

SEQ ID NO: 23233 - DNA, 20 bp, Enterobacter amnigenus
gagagcttgttttcgggtga

SEQ ID NO: 23234 - DNA, 20 bp, Propionibacterium avidum
gttaggcggctagccagtac

SEQ ID NO: 23235 - DNA, 20 bp, Streptococcus urinalis
gagaagaatggaagtaggag

SEQ ID NO: 23236 - DNA, 20 bp, Myroides odoratimimus
catggtttatcgatatggca

SEQ ID NO: 23237 - DNA, 20 bp, Paenibacillus azotofixans
atctgtcaccaagggatggg

SEQ ID NO: 23238 - DNA, 20 bp, Dolosicoccus paucivorans
cataaatcaatgattcgcat

SEQ ID NO: 23239 - DNA, 20 bp, Prevotella corporis
cgtcagaggagcaagctctg

SEQ ID NO: 23240 - DNA, 20 bp, Bacteroides stercoris
tgagtgcagcagaggtgggc

SEQ ID NO: 23241 - DNA, 30 bp, Paenibacillus larvae
tgaccggtttagagacagaccttttccttc

SEQ ID NO: 23242 - DNA, 20 bp, Bacteroides capillosus
gagggttgcttgcaaccttt

SEQ ID NO: 23243 - DNA, 20 bp, Bacteroides thetaiotaomicron
tttggtttgcttgcaaacca

SEQ ID NO: 23244 - DNA, 20 bp, Brevibacillus brevis
acctccttcaattggttcta

SEQ ID NO: 23245 - DNA, 20 bp, Sphingobacterium multivorum
gcataacatcaacagttcgc

SEQ ID NO: 23246 - DNA, 20 bp, Bacteroides capillosus
gttgtatggcctttcggcta

SEQ ID NO: 23247 - DNA, 20 bp, Streptococcus constellatus
tgcccgtagtttactacccc

SEQ ID NO: 23248 - DNA, 20 bp, Bacteroides stercoris
tacaatgtcagcggccaagc

SEQ ID NO: 23249 - DNA, 20 bp, Finegoldia magna
tatacccctctctttatgag

SEQ ID NO: 23250 - DNA, 20 bp, Hafnia alvei
atcccccgagcttaacttgg

SEQ ID NO: 23251 - DNA, 20 bp, Sphingobacterium multivorum
tagtgaagagtgcagagacg

SEQ ID NO: 23252 - DNA, 20 bp, Clostridium clostridiiforme
gggcgcgtaggcggcgcttc

SEQ ID NO: 23253 - DNA, 30 bp, Paenibacillus lautus
aggtaaggctgggcactctaaggtgactgc

SEQ ID NO: 23254 - DNA, 20 bp, Enterobacter gergoviae
gctgtggtccttgaagcgtg

SEQ ID NO: 23255 - DNA, 20 bp, Propionibacterium avidum
ggctcttgcttgttaggcgg

SEQ ID NO: 23256 - DNA, 20 bp, Achromobacter xylosoxidans
atacctcgcgaaactgacgg

SEQ ID NO: 23257 - DNA, 20 bp, Microbacterium hominis
aagtcatgaagagtcggtaa

SEQ ID NO: 23258 - DNA, 20 bp, Bacteroides distasonis
acgtgtcctattttgtatgt

SEQ ID NO: 23259 - DNA, 20 bp, Eubacterium moniliforme
atactaggtgtggggggcga

SEQ ID NO: 23260 - DNA, 20 bp, Proteus vulgaris
tagcaacgatctctactggc

SEQ ID NO: 23261 - DNA, 20 bp, Bacteroides stercoris
gggagcgtaggcggggtatt

SEQ ID NO: 23262 - DNA, 20 bp, Eubacterium moniliforme
aggtaaaaggattcattcga

SEQ ID NO: 23263 - DNA, 20 bp, Staphylococcus schleiferi
ccatttggaagctaagcccg

SEQ ID NO: 23264 - DNA, 20 bp, Globicatella sanguinis
gataagagaaacccttcggg

SEQ ID NO: 23265 - DNA, 20 bp, Actinomyces radingae
ctggatgttctgcgctttcc

SEQ ID NO: 23266 - DNA, 20 bp, Vibrio hollisae
ccgcatacgtactgaggtag

SEQ ID NO: 23267 - DNA, 20 bp, Dolosicoccus paucivorans
ctcttgacatcggatgcata

SEQ ID NO: 23268 - DNA, 20 bp, Bacteroides capilosus
cgtccaatggattgggtttc

SEQ ID NO: 23269 - DNA, 20 bp, Vibrio cholerae
aaggtattagcttaaccacc

SEQ ID NO: 23270 - DNA, 20 bp, Granulicatella adiacens
aacgagagcgaccgggcttg

SEQ ID NO: 23271 - DNA, 20 bp, Microbacterium hominis
ggtaagagtttttgtcatgg

SEQ ID NO: 23272 - DNA, 20 bp, Oligella ureolytica
aactgcactattaactatca

SEQ ID NO: 23273 - DNA, 20 bp, Prevotella corporis
agcaagctctgtctgttcgc

SEQ ID NO: 23274 - DNA, 20 bp, Ralstonia paucula
ggtgaaagcaggggaccgaa

SEQ ID NO: 23275 - DNA, 20 bp, Brevibacillus brevis
ctcctgtgcgtggaaagaac

SEQ ID NO: 23276 - DNA, 20 bp, Providencia alcalifaciens
tccgcaataatctctaagga

SEQ ID NO: 23277 - DNA, 20 bp, Gracilibacillus dipsosauri
tttagtcaccggcagtcaac

SEQ ID NO: 23278 - DNA, 20 bp, Sphingobacterium multivorum
cagagacgcactcgtccttc

SEQ ID NO: 23279 - DNA, 20 bp, Serratia marcescens
tgaagcgaacaaggtaaccg

SEQ ID NO: 23280 - DNA, 20 bp, Streptococcus equi
tcgtacaaggtagccgttcg

SEQ ID NO: 23281 - DNA, 20 bp, Eubacterium moniliforme
ttgcacttgaaactgtgtgg

SEQ ID NO: 23282 - DNA, 20 bp, Proteus vulgaris
atctctactggctgagagat

SEQ ID NO: 23283 - DNA, 20 bp, Haemophilus paraphrophilus
aatctcacaaagtacgttct

SEQ ID NO: 23284 - DNA, 20 bp, Microbacterium hominis
gaagagtcggtaacaccagc

SEQ ID NO: 23285 - DNA, 20 bp, Globicatella sanguinis
ataagagaaacccttcgggg

SEQ ID NO: 23286 - DNA, 20 bp, Alloiococcus otitis
tgctggggaaatgaaaggtg

SEQ ID NO: 23287 - DNA, 20 bp, Staphylococcus carnosus
aagtcgtaacaaaatagccg

SEQ ID NO: 23288 - DNA, 20 bp, Brevibacillus brevis
gtgtcttcggagcctagcgg

SEQ ID NO: 23289 - DNA, 20 bp, Brevibacillus centrosporus
accggatagagtctactctc

SEQ ID NO: 23290 - DNA, 20 bp, Clostridium limosum
gcataacatcatttcaatgc

SEQ ID NO: 23291 - DNA, 20 bp, Sporosarcina ureae
ataatccattctctcgcatg

SEQ ID NO: 23292 - DNA, 20 bp, Campylobacter curvus
tatcaaatacctacggcgca

SEQ ID NO: 23293 - DNA, 20 bp, Propionibacterium propionicus
atctctgggataacagtcgg

SEQ ID NO: 23294 - DNA, 20 bp, Bacillus smithii
gtaacaaaaagccgtatcgg

SEQ ID NO: 23295 - DNA, 20 bp, Bacteroides capillosus
ggcctttcggctatgtgacc

SEQ ID NO: 23296 - DNA, 20 bp, Pseudomonas luteola
ggacggtaccacgggtgatt

SEQ ID NO: 23297 - DNA, 20 bp, Providencia rustigianii
ctaatatcgtcaacgattga

SEQ ID NO: 23298 - DNA, 20 bp, Unknown Organism
  oligonucleotide from CDC group EO-2
ctactacggaatagccctgg

SEQ ID NO: 23299 - DNA, 20 bp, Streptococcus ratti
ataagagagtttaacacatg

SEQ ID NO: 23300 - DNA, 20 bp, Staphylococcus schleiferi
aaagtgccggtggatcacct

SEQ ID NO: 23301 - DNA, 20 bp, Bacteroides capillosus
tacggggataaagttaggga

SEQ ID NO: 23302 - DNA, 30 bp, Morganella morganii
agggaagcgaccctgcgaaggcaagcggaa

SEQ ID NO: 23303 - DNA, 20 bp, Brevibacillus centrosporus
tattttcttttgtttcatgg

SEQ ID NO: 23304 - DNA, 20 bp, Unknown Organism
  oligonucleotide from CDC group VB-3
agctagtctaaccttccagg

SEQ ID NO: 23305 - DNA, 20 bp, Finegoldia magna
gactctaagtagactgccga

SEQ ID NO: 23306 - DNA, 20 bp, Weissella paramesenteroides
ttaactgatactgacgagct

SEQ ID NO: 23307 - DNA, 20 bp, Streptococcus macacae
caattgacggtacttaacca

SEQ ID NO: 23308 - DNA, 20 bp, Morganella morganii
ggcaaggttaataaccttgg

SEQ ID NO: 23309 - DNA, 20 bp, Rhizobium radiobacter
gctcagacgaacgctgggcg

SEQ ID NO: 23310 - DNA, 20 bp, Streptococcus macacae
ataaggattggaaacgatag

SEQ ID NO: 23311 - DNA, 20 bp, Citrobacter werkmanii
attgaacgctgcgcgcgcag

SEQ ID NO: 23312 - DNA, 20 bp, Arcanobacterium haemolyticum
cccctttctcttgggataag

SEQ ID NO: 23313 - DNA, 20 bp, Brevibacillus brevis
catcggaagggcgcgtggat

SEQ ID NO: 23314 - DNA, 20 bp, Clostridium clostridiiforme
gaccctttcgcaaggaaggg

SEQ ID NO: 23315 - DNA, 20 bp, Brevibacterium epidermidis
atacgaccgtcggacgcatg

SEQ ID NO: 23316 - DNA, 20 bp, Shewanella putrefaciens
agtgggtagctaaccttcgg

SEQ ID NO: 23317 - DNA, 20 bp, Sporosarcina ureae
ccgaataatcccattctctt

SEQ ID NO: 23318 - DNA, 20 bp, Clostridium clostridiiforme
ttgctaccagataaagctga

SEQ ID NO: 23319 - DNA, 30 bp, Facklamia hominis
ttatgagggagccgtcgaaggtgggacaga

SEQ ID NO: 23320 - DNA, 20 bp, Actinomyces naeslundii
gtgggtgtgggaaagatgcg

SEQ ID NO: 23321 - DNA, 20 bp, Empedobacter brevis
gcatcatttaattttgaaag

SEQ ID NO: 23322 - DNA, 20 bp, Campylobacter concisus
tatcaaagccggtcgtagtt

SEQ ID NO: 23323 - DNA, 20 bp, Leuconostoc pseudomesenteroides
gatacgaagttaaaaggcgc

SEQ ID NO: 23324 - DNA, 20 bp, Prevotella loescheii
tatgcggggataaaggggcc

SEQ ID NO: 23325 - DNA, 20 bp, Bacillus thuringiensis
tatcggaaggctgcggttgg

SEQ ID NO: 23326 - DNA, 20 bp, Moellerella wisconsensis
atactatcagcgattgacgt

SEQ ID NO: 23327 - DNA, 20 bp, Paenibacillus lautus
tcttagagtaactgctaaga

SEQ ID NO: 23328 - DNA, 20 bp, Helcococcus kunzii
tcggaatgaaacggaaaaag

SEQ ID NO: 23329 - DNA, 20 bp, Bacteroides capillosus
cggtacagagcgtcggtcgt

SEQ ID NO: 23330 - DNA, 20 bp, Finegoldia magna
tatcggtcatagatgggctc

SEQ ID NO: 23331 - DNA, 20 bp, Streptococcus ratti
tcagagacgaacgtgtgtga

SEQ ID NO: 23332 - DNA, 20 bp, Shigella boydii
tcagcaagctgattcctgtt

SEQ ID NO: 23333 - DNA, 20 bp, Staphylococcus schleiferi
cacaatgattggggtgaaag

SEQ ID NO: 23334 - DNA, 20 bp, Klebsiella pneumoniae
tgacatccacgagaacttag

SEQ ID NO: 23335 - DNA, 20 bp, Bacteroides merdae
aggggcagcatgatttgtag

SEQ ID NO: 23336 - DNA, 20 bp, Streptococcus macacae
gaagcaagttggagagagtg

SEQ ID NO: 23337 - DNA, 20 bp, Vibrio hollisae
ggaaatccccagcgctaata

SEQ ID NO: 23338 - DNA, 20 bp, Campylobacter curvus
aaataatatatagggtttct

SEQ ID NO: 23339 - DNA, 20 bp, Clostridium clostridiiforme
gagagggacacctgcgggaa

SEQ ID NO: 23340 - DNA, 20 bp, Corynebacterium cystitidis
cgccccgcctggggagtgac

SEQ ID NO: 23341 - DNA, 20 bp, Eubacterium moniliforme
gccagtggcttaaccgtaag

SEQ ID NO: 23342 - DNA, 20 bp, Bacteroides capilosus
acactggctgccaaagattt

SEQ ID NO: 23343 - DNA, 20 bp, Shigella flexneri
cgaggggaacctgcgttgga

SEQ ID NO: 23344 - DNA, 20 bp, Paenibacillus azotofixans
gagcttgctctctcattaac

SEQ ID NO: 23345 - DNA, 20 bp, Corynebacterium kutscheri
tggcctaaccacgtttgtgg

SEQ ID NO: 23346 - DNA, 20 bp, Eubacterium moniliforme
acggaagttgggagcacccg

SEQ ID NO: 23347 - DNA, 20 bp, Finegoldia magna
aacgaagaaggtattcgtat

SEQ ID NO: 23348 - DNA, 20 bp, Sphingobacterium multivorum
tcgcatgttcggttgattaa

SEQ ID NO: 23349 - DNA, 20 bp, Myroides odoratimimus
taatgctccatggtttatcg

SEQ ID NO: 23350 - DNA, 20 bp, Streptococcus macacae
gtcagctattgaaactgtca

SEQ ID NO: 23351 - DNA, 20 bp, Bacteroides uniformis
agtgccatacgagcgcacac

SEQ ID NO: 23352 - DNA, 20 bp, Eremococcus coleocola
ccgcataacagcaatcatcg

SEQ ID NO: 23353 - DNA, 20 bp, Anaerococcus prevotii
gtagaaacacatgtttcaac

SEQ ID NO: 23354 - DNA, 30 bp, Prevotella intermedia
gggacggtgcgatgcaaatagcatccaatc

SEQ ID NO: 23355 - DNA, 20 bp, Stenotrophomonas maltophilia
aaccccgcgagcagcaagcg

SEQ ID NO: 23356 - DNA, 20 bp, Finegoldia magna
atagtgatataatgcaaaac

SEQ ID NO: 23357 - DNA, 20 bp, Bacteroides capilosus
gctcatgacagaggattcgt

SEQ ID NO: 23358 - DNA, 20 bp, Bacillus laevolacticus
aaacggtagctaagccggat

SEQ ID NO: 23359 - DNA, 20 bp, Pseudomonas mendocina
cccccccgacgtgctggtaa

SEQ ID NO: 23360 - DNA, 20 bp, Clostridium subterminale
ttttgtaccaaaggagcaat

SEQ ID NO: 23361 - DNA, 20 bp, Brevibacillus centrosporus
gcttgaaagccgggttttgg

SEQ ID NO: 23362 - DNA, 20 bp, Globicatella sanguinis
cctaaccaataggagggagc

SEQ ID NO: 23363 - DNA, 20 bp, Bacteroides stercoris
cagttctttcttcggacagt

SEQ ID NO: 23364 - DNA, 20 bp, Streptococcus criceti
catccctagagatagggagt

SEQ ID NO: 23365 - DNA, 20 bp, Actinomyces radingae
gaaaggggcttttttaagtt

SEQ ID NO: 23366 - DNA, 20 bp, Clostridium innocuum
aggagtgagccgtcgaagta

SEQ ID NO: 23367 - DNA, 20 bp, Prevotella oralis
ccgctgtcggccttttttgg

SEQ ID NO: 23368 - DNA, 20 bp, Sphingobacterium multivorum
cagactggctgggccaacac

SEQ ID NO: 23369 - DNA, 30 bp, Leuconostoc fallax
aactggcgaacttgagtgcagtagaggcaa

SEQ ID NO: 23370 - DNA, 20 bp, Clostridium clostridiiforme
ccggaggcctaaccgcgagg

SEQ ID NO: 23371 - DNA, 20 bp, Bacillus schlegellii
tgcagcgctgaaggcgaacc

SEQ ID NO: 23372 - DNA, 20 bp, Escherichia hermannii
acctcctgtcatggacaact

SEQ ID NO: 23373 - DNA, 20 bp, Escherichia hermannii
atcacctcctgtcatggaca

SEQ ID NO: 23374 - DNA, 20 bp, Clostridium clostridiiforme
aggaggtttggatccatggc

SEQ ID NO: 23375 - DNA, 20 bp, Serratia marcescens
gtgaagcgaacaaggtaacc

SEQ ID NO: 23376 - DNA, 20 bp, Streptococcus infantarius
gagctctggcgccgtgctct

SEQ ID NO: 23377 - DNA, 20 bp, Propionibacterium propionicus
tgtgacgaagcttttttgtg

SEQ ID NO: 23378 - DNA, 20 bp, Finegoldia magna
ggaagctatatagtgatata

SEQ ID NO: 23379 - DNA, 30 bp, Streptococcus criceti
tcgggagccagccgctaaggtgggacggat

SEQ ID NO: 23380 - DNA, 20 bp, Arcanobacterium pyogenes
gatgaagccggggctttttg

SEQ ID NO: 23381 - DNA, 20 bp, Campylobacter curvus
cctacggcgcaaccgaaagt

SEQ ID NO: 23382 - DNA, 20 bp, Providencia alcalifaciens
ttcccctgctttgctcctta

SEQ ID NO: 23383 - DNA, 20 bp, Streptococcus infantarius
gttagccgtttttttttggt

SEQ ID NO: 23384 - DNA, 20 bp, Brevibacillus reuszeri
ttttggaccgcatggtccga

SEQ ID NO: 23385 - DNA, 20 bp, Anaerococcus prevotii
tgatatgatagcctcgcatg

SEQ ID NO: 23386 - DNA, 20 bp, Lactococcus raffinolactis
gctagttgtttggggctatc

SEQ ID NO: 23387 - DNA, 20 bp, Providencia alcalifaciens
ctgacgaccggcggcggggt

SEQ ID NO: 23388 - DNA, 20 bp, Bacillus coagulans
ctttcgctcgcatgagcgga

SEQ ID NO: 23389 - DNA, 20 bp, Yersinia frederiksenii
tgaagtgattgacgttactc

SEQ ID NO: 23390 - DNA, 20 bp, Propionibacterium propionicus
actggatatgagcttgcaag

SEQ ID NO: 23391 - DNA, 20 bp, Myroides odoratimimus
atttcctagcttaactagga

SEQ ID NO: 23392 - DNA, 20 bp, Clostridium clostridiiforme
tgctggctgcatactgacgc

SEQ ID NO: 23393 - DNA, 20 bp, Propionibacterium propionicus
atatgagcttgcaaggcatc

SEQ ID NO: 23394 - DNA, 20 bp, Facklamia hominis
gttcccggcaaagttagtgg

SEQ ID NO: 23395 - DNA, 20 bp, Stenotrophomonas maltophilia
cactatcgaatgagcccata

SEQ ID NO: 23396 - DNA, 20 bp, Enterococcus dispar
ctgtctggcgtgcctaatac

SEQ ID NO: 23397 - DNA, 20 bp, Bacteroides stercoris
gagcgtaggcggggtattaa

SEQ ID NO: 23398 - DNA, 20 bp, Escherichia hermannii
tcatggacaactgtggtgac

SEQ ID NO: 23399 - DNA, 20 bp, Microbacterium hominis
aggcggtggccctccccttg

SEQ ID NO: 23400 - DNA, 20 bp, Streptococcus criceti
tggcaccactatcagatgga

SEQ ID NO: 23401 - DNA, 20 bp, Bacteroides capillosus
agggttgcttgcaacctttg

SEQ ID NO: 23402 - DNA, 20 bp, Staphylococcus schleiferi
atggtatgcccgtatcggaa

SEQ ID NO: 23403 - DNA, 20 bp, Clostridium clostridiiforme
gtgaaaagcagagatgcgct

SEQ ID NO: 23404 - DNA, 20 bp, Anaerococcus prevotii
tgaagcttaaatgatctctt

SEQ ID NO: 23405 - DNA, 30 bp, Dolosicoccus paucivorans
gaagaaccttaccagctcttgacatcggat

SEQ ID NO: 23406 - DNA, 20 bp, Fusobacterium necrogenes
atcctaggaagttggcagag

SEQ ID NO: 23407 - DNA, 20 bp, Pediococcus dextrinicus
taattgaaagacggcctttg

SEQ ID NO: 23408 - DNA, 20 bp, Leuconostoc fallax
gatgttagagataatattgt

SEQ ID NO: 23409 - DNA, 20 bp, Eggerthella lenta
ggtgtggggggctccgccct

SEQ ID NO: 23410 - DNA, 20 bp, Bacillus smithii
tgaagtcgtaacaaaaagcc

SEQ ID NO: 23411 - DNA, 20 bp, Shewanella putrefaciens
atcagaatgccacgggaata

SEQ ID NO: 23412 - DNA, 20 bp, Streptococcus urinalis
gttgttagagaagaatggaa

SEQ ID NO: 23413 - DNA, 20 bp, Ralstonia paucula
gggtgaaagcaggggaccga

SEQ ID NO: 23414 - DNA, 20 bp, Unknown Organism
  oligonucleotide from CDC group EF-4B
acaccatggaagtgggggat

SEQ ID NO: 23415 - DNA, 20 bp, Bacillus schlegellii
gagcggggagcgggcggaag

SEQ ID NO: 23416 - DNA, 20 bp, Streptococcus infantarius
gtgctctcagctccctagtg

SEQ ID NO: 23417 - DNA, 20 bp, Kocuria varians
aggctgggactggcgatctg

SEQ ID NO: 23418 - DNA, 20 bp, Bacillus schlegellii
gacatcccgccgacgggtcc

SEQ ID NO: 23419 - DNA, 20 bp, Moellerella wisconsensis
ttaatactatcagcgattga

SEQ ID NO: 23420 - DNA, 20 bp, Eubacterium moniliforme
agtcctccgtgccgaagcta

SEQ ID NO: 23421 - DNA, 20 bp, Gemella morbillorum
ttggacgcgatagctaatcc

SEQ ID NO: 23422 - DNA, 20 bp, Propionibacterium propionicus
ttgtaaaccgctttcaattg

SEQ ID NO: 23423 - DNA, 20 bp, Streptococcus urinalis
taggagtggaaagtctactt

SEQ ID NO: 23424 - DNA, 20 bp, Streptococcus vestibularis
aacaataggtgacacatgtc

SEQ ID NO: 23425 - DNA, 20 bp, Anaerococcus tetradius
gaataataccctataaagtt

SEQ ID NO: 23426 - DNA, 20 bp, Bacillus schlegellii
gcgcccgaaggcgcgtgcag

SEQ ID NO: 23427 - DNA, 20 bp, Streptococcus infantarius
cgtaggagctctggcgccgt

SEQ ID NO: 23428 - DNA, 20 bp, Bacteroides capilosus
ggggaaagtcgagacaggtg

SEQ ID NO: 23429 - DNA, 20 bp, Oligella urethralis
cgagcacactccaatctctt

SEQ ID NO: 23430 - DNA, 20 bp, Shewanella algae
cagaatcctggtagagatgc

SEQ ID NO: 23431 - DNA, 20 bp, Eubacterium moniliforme
gcatggtttagaggtaaaag

SEQ ID NO: 23432 - DNA, 20 bp, Morganella morganii
gggaggaaggtgtcaaggtt

SEQ ID NO: 23433 - DNA, 20 bp, Arthrobacter globiformis
acacccgaagccggggccta

SEQ ID NO: 23434 - DNA, 20 bp, Streptococcus criceti
taagagaagaacgttgagta

SEQ ID NO: 23435 - DNA, 20 bp, Bacillus coagulans
gcttctatcaagttagcggc

SEQ ID NO: 23436 - DNA, 20 bp, Clostridium clostridiiforme
aaaatcatttaaccgggatc

SEQ ID NO: 23437 - DNA, 20 bp, Clostridium clostridiiforme
aggagaagcagatcccaaaa

SEQ ID NO: 23438 - DNA, 20 bp, Bacteroides capillosus
agtccgcgaccgcaaggaac

SEQ ID NO: 23439 - DNA, 20 bp, Campylobacter curvus
accctatatattgtttattt

SEQ ID NO: 23440 - DNA, 20 bp, Clostridium clostridiiforme
cgatagttccgtgccgaagt

SEQ ID NO: 23441 - DNA, 20 bp, Staphylococcus aureus
ctggagtccacgccgaaacg

SEQ ID NO: 23442 - DNA, 20 bp, Enterobacter gergoviae
ggcttccggaggctacgcgt

SEQ ID NO: 23443 - DNA, 20 bp, Bacteroides capillosus
tagcggtaagggatggggat

SEQ ID NO: 23444 - DNA, 20 bp, Corynebacterium pseudotuberculosis
gtaacggtgggcgctaggtg

SEQ ID NO: 23445 - DNA, 20 bp, Anaerococcus prevotii
gagatagactcttattgctt

SEQ ID NO: 23446 - DNA, 20 bp, Bacillus mycoides
cattttgcgctgcatggcgc

SEQ ID NO: 23447 - DNA, 20 bp, Shigella boydii
atcagcaagctgattcctgt

SEQ ID NO: 23448 - DNA, 20 bp, Prevotella oralis
ttttttggtcggtggccaag

SEQ ID NO: 23449 - DNA, 20 bp, Leclercia adecarboxylata
ggatcaccttccctttttcc

SEQ ID NO: 23450 - DNA, 20 bp, Bacteroides caccae
agcgtctagggtaaaactgg

SEQ ID NO: 23451 - DNA, 20 bp, Bacillus megaterium
aacaaggtagccgatcggaa

SEQ ID NO: 23452 - DNA, 20 bp, Microbacterium hominis
ccctccccttgtggagggag

SEQ ID NO: 23453 - DNA, 20 bp, Anaerococcus prevotii
ctgcgagcaaaccgtaagga

SEQ ID NO: 23454 - DNA, 20 bp, Dermabacter hominis
cttggcccgcatgggttgtg

SEQ ID NO: 23455 - DNA, 20 bp, Pasteurella multocida
tacacccgcccgtcacccat

SEQ ID NO: 23456 - DNA, 20 bp, Corynebacterium group ANF
gggttgacatgcactagatg

SEQ ID NO: 23457 - DNA, 20 bp, Actinomyces odontolyticus
gccgcaacagtggttgtggt

SEQ ID NO: 23458 - DNA, 20 bp, Geobacillus stearothermophilus
attggggcttgccttgattc

SEQ ID NO: 23459 - DNA, 20 bp, Anaerococcus prevotii
tcaggataaagcgctggcgg

SEQ ID NO: 23460 - DNA, 20 bp, Streptococcus acidominimus
taagagaagaacgttagcgg

SEQ ID NO: 23461 - DNA, 20 bp, Eremococcus coleocola
gtaaagcactgttattagcc

SEQ ID NO: 23462 - DNA, 20 bp, Corynebacterium pilosum
cggttagttcccgttgggta

SEQ ID NO: 23463 - DNA, 20 bp, Providencia alcalifaciens
gcggcggggtgagtaatgta

SEQ ID NO: 23464 - DNA, 20 bp, Arcanobacterium haemolyticum
tgagttgagggtaggtgttg

SEQ ID NO: 23465 - DNA, 30 bp, Streptococcus ferus
gagcgcaggcggctctataagtctgaagtg

SEQ ID NO: 23466 - DNA, 20 bp, Dolosigranulum pigrum
cactcatggatagcctcgcg

SEQ ID NO: 23467 - DNA, 20 bp, Campylobacter concisus
gaatcgctatcaaagccggt

SEQ ID NO: 23468 - DNA, 20 bp, Stenotrophomonas maltophilia
tactggaaacttacgctaat

SEQ ID NO: 23469 - DNA, 20 bp, Citrobacter freundii
gcttggcagagatgcgttgg

SEQ ID NO: 23470 - DNA, 20 bp, Streptococcus iniae
actaatccaaagagttgcga

SEQ ID NO: 23471 - DNA, 20 bp, Anaerobiospirillum succiniciproducens
cgggaggggagggaacccac

SEQ ID NO: 23472 - DNA, 20 bp, Prevotella melaninogenica
gctagagctacaggcttaac

SEQ ID NO: 23473 - DNA, 20 bp, Vibrio hollisae
aataccgctgggggatgaca

SEQ ID NO: 23474 - DNA, 20 bp, Myroides odoratimimus
gtagaaagagcttgcttttt

SEQ ID NO: 23475 - DNA, 20 bp, Streptococcus urinalis
gaacgctgaggtcatgtgct

SEQ ID NO: 23476 - DNA, 20 bp, Streptococcus macacae
ctggaaagtcagtagttaaa

SEQ ID NO: 23477 - DNA, 20 bp, Moraxella atlantae
gaggaagagctagtggagaa

SEQ ID NO: 23478 - DNA, 20 bp, Bacteroides thetaiotaomicron
aggccgtaaggcatttgtga

SEQ ID NO: 23479 - DNA, 20 bp, Anaerococcus tetradius
aatattggattagtggcgga

SEQ ID NO: 23480 - DNA, 20 bp, Pseudomonas mendocina
aggttacatgctcttcctcc

SEQ ID NO: 23481 - DNA, 20 bp, Brevibacterium epidermidis
ccggatacgaccgtcggacg

SEQ ID NO: 23482 - DNA, 30 bp, Leuconostoc fallax
acatgcaagtcgaacgctagtcgcggacct

SEQ ID NO: 23483 - DNA, 20 bp, Staphylococcus cohnii
tcagggatgaacgctggtcg

SEQ ID NO: 23484 - DNA, 20 bp, Corynebacterium group ANF
agcgcgtgaaactaacggat

SEQ ID NO: 23485 - DNA, 20 bp, Oligella urethralis
tatcggccgctccggtagca

SEQ ID NO: 23486 - DNA, 20 bp, Streptococcus macacae
accgttaaggggccagccgc

SEQ ID NO: 23487 - DNA, 20 bp, Prevotella bivia
tggcgcgggaatacgttccc

SEQ ID NO: 23488 - DNA, 20 bp, Vibrio harveyi
aactcgactccggaagttcg

SEQ ID NO: 23489 - DNA, 20 bp, Streptococcus macacae
agggattgaaaggtacaaca

SEQ ID NO: 23490 - DNA, 20 bp, Corynebacterium afermentans
tcaggtgttccgactttcat

SEQ ID NO: 23491 - DNA, 20 bp, Streptococcus acidominimus
agatagggcttctcttttga

SEQ ID NO: 23492 - DNA, 20 bp, Streptococcus alactolyticus
cataacagcttttgacacat

SEQ ID NO: 23493 - DNA, 20 bp, Gemella morbillorum
gctatcgctaccagatggac

SEQ ID NO: 23494 - DNA, 20 bp, Streptococcus acidominimus
gtgtttactgcatggtaaac

SEQ ID NO: 23495 - DNA, 20 bp, Achromobacter xylosoxidans
tagtcccgcccctaaacgat

SEQ ID NO: 23496 - DNA, 20 bp, Paenibacillus alvei
agggagatgagaaaggcgga

SEQ ID NO: 23497 - DNA, 20 bp, Streptococcus macacae
gcaagttggagagagtggaa

SEQ ID NO: 23498 - DNA, 20 bp, Enterobacter amnigenus
gcttgttttcgggtgacgag

SEQ ID NO: 23499 - DNA, 20 bp, Vibrio harveyi
tcccataaagtgcgtcgagt

SEQ ID NO: 23500 - DNA, 30 bp, Capnocytophaga sp.
taatacctaatggtatataggtgtggcatc

SEQ ID NO: 23501 - DNA, 20 bp, Porphyromonas gingivalis
ggtacctgaagggcgtaccg

SEQ ID NO: 23502 - DNA, 20 bp, Brevibacillus brevis
gcttgctctagggaattagt

SEQ ID NO: 23503 - DNA, 20 bp, Finegoldia magna
tcgaaagccaatcccagttc

SEQ ID NO: 23504 - DNA, 20 bp, Streptococcus acidominimus
tttactgcatggtaaacatt

SEQ ID NO: 23505 - DNA, 20 bp, Clostridium clostridiiforme
gagcccgaaaggagaagcag

SEQ ID NO: 23506 - DNA, 20 bp, Bacteroides stercoris
atgctggggactctacccgg

SEQ ID NO: 23507 - DNA, 30 bp, Pseudomonas oryzihabitans
taagttgggaggaagggcttacagcgaata

SEQ ID NO: 23508 - DNA, 20 bp, Myroides odoratimimus
agagcttgaataatatggaa

SEQ ID NO: 23509 - DNA, 20 bp, Clostridium clostridiiforme
tccggcgagactgccatcga

SEQ ID NO: 23510 - DNA, 20 bp, Micrococcus luteus
gtggggggagccgcgagggg

SEQ ID NO: 23511 - DNA, 20 bp, Prevotella melaninogenica
gaggttctgatccatagggc

SEQ ID NO: 23512 - DNA, 20 bp, Clostridium clostridiiforme
ggcggtttgctggctgcata

SEQ ID NO: 23513 - DNA, 20 bp, Streptococcus acidominimus
ctcttttgagcaggggagac

SEQ ID NO: 23514 - DNA, 20 bp, Proteus mirabilis
cgtggcttctggaggctaac

SEQ ID NO: 23515 - DNA, 30 bp, Psychrobacter phenylpyruvicus
gctgtagagatatagttttcccttcgggga

SEQ ID NO: 23516 - DNA, 20 bp, Gordonia bronchialis
ccgaagccgggggcctaacc

SEQ ID NO: 23517 - DNA, 20 bp, Peptostreptococcus anaerobius
cgtctgttttgatgcttgca

SEQ ID NO: 23518 - DNA, 20 bp, Bacteroides stercoris
gggtagttccatcaggttat

SEQ ID NO: 23519 - DNA, 20 bp, Leuconostoc fallax
cctttgaagatgttagagat

SEQ ID NO: 23520 - DNA, 20 bp, Paenibacillus pabuli
ttgagagaaagcttgctttt

SEQ ID NO: 23521 - DNA, 20 bp, Moellerella wisconsensis
attaatactatcagcgattg

SEQ ID NO: 23522 - DNA, 20 bp, Morganella morganii
tcgggaggaaggtgtcaagg

SEQ ID NO: 23523 - DNA, 20 bp, Streptococcus acidominimus
agctgctacatttgaattga

SEQ ID NO: 23524 - DNA, 20 bp, Lactococcus raffinolactis
tgctagttgtttggggctat

SEQ ID NO: 23525 - DNA, 20 bp, Yersinia frederiksenii
aatacgtgaagtgattgacg

SEQ ID NO: 23526 - DNA, 20 bp, Leuconostoc fallax
cagtagaggcaagtggaact

SEQ ID NO: 23527 - DNA, 20 bp, Finegoldia magna
gaataaatgtccggggactc

SEQ ID NO: 23528 - DNA, 20 bp, Providencia rustigianii
cagcgattgacgttaccaac

SEQ ID NO: 23529 - DNA, 30 bp, Sporosarcina ureae
accgtcatggagacatgattttcccttcgg

SEQ ID NO: 23530 - DNA, 20 bp, Pseudomonas fluorescens
gcttgctcacggatttagcg

SEQ ID NO: 23531 - DNA, 20 bp, Brevibacillus brevis
gtgggacagatgatagggga

SEQ ID NO: 23532 - DNA, 20 bp, Bacillus laevolacticus
gattgaccttgcccttcggg

SEQ ID NO: 23533 - DNA, 20 bp, Myroides odoratimimus
gaatctccaaagcttgtctc

SEQ ID NO: 23534 - DNA, 20 bp, Anaerococcus tetradius
atgaagatatttagattcct

SEQ ID NO: 23535 - DNA, 20 bp, Streptococcus equi
tacgtagcttgctacaatta

SEQ ID NO: 23536 - DNA, 20 bp, Streptococcus macacae
tctggaaagtcagtagttaa

SEQ ID NO: 23537 - DNA, 20 bp, Photobacterium damselae
aagggtagccctaggggaac

SEQ ID NO: 23538 - DNA, 20 bp, Providencia alcalifaciens
agctaatccgcaataatctc

SEQ ID NO: 23539 - DNA, 20 bp, Leptotrichia buccalis
caggctgatgaaaggagacg

SEQ ID NO: 23540 - DNA, 20 bp, Prevotella oralis
cgctgtcggccttttttggt

SEQ ID NO: 23541 - DNA, 20 bp, Bacteroides merdae
tacctatcagagggggatag

SEQ ID NO: 23542 - DNA, 20 bp, Bacillus azotoformans
atggatggacaaagggctgc

SEQ ID NO: 23543 - DNA, 20 bp, Clostridium innocuum
ccacggctaactacgtggcc

SEQ ID NO: 23544 - DNA, 20 bp, Arthrobacter globiformis
ctttggggcaggttcacagg

SEQ ID NO: 23545 - DNA, 30 bp, Clostridium limosum
attaataccgcataacatcatttcaatgca

SEQ ID NO: 23546 - DNA, 20 bp, Peptostreptococcus anaerobius
attgatgaaagatgagcggc

SEQ ID NO: 23547 - DNA, 20 bp, Enterobacter cloacae
acccactttgtgattcatga

SEQ ID NO: 23548 - DNA, 20 bp, Bacillus schlegellii
ccgaaggcgcgtgcagcgct

SEQ ID NO: 23549 - DNA, 20 bp, Brevibacillus brevis
ggtggggtaaccggaaggca

SEQ ID NO: 23550 - DNA, 20 bp, Geobacillus stearothermophilus
ggaccggattggggcttgcc

SEQ ID NO: 23551 - DNA, 20 bp, Anaerococcus tetradius
gaattagagatagtttctta

SEQ ID NO: 23552 - DNA, 20 bp, Eikenella corrodens
tcgtacaaggaaaccgtagg

SEQ ID NO: 23553 - DNA, 20 bp, Bacillus schlegellii
ggtgtgggtggggcgaccca

SEQ ID NO: 23554 - DNA, 30 bp, Citrobacter freundii
ggaaaacggtagctaataccgcataacgtc

SEQ ID NO: 23555 - DNA, 20 bp, Bacillus coagulans
catgagcggatgttaaaaga

SEQ ID NO: 23556 - DNA, 20 bp, Veillonella sp.
aatcctcggcatcgaggata

SEQ ID NO: 23557 - DNA, 20 bp, Brevibacillus centrosporus
tcccgaatattttcttttgt

SEQ ID NO: 23558 - DNA, 20 bp, Sporosarcina pasteurii
aagaaacaagtttcttcctt

SEQ ID NO: 23559 - DNA, 30 bp, Bacillus mycoides
aataccggataacattttgcgctgcatggc

SEQ ID NO: 23560 - DNA, 20 bp, Propionibacterium acnes
gtgattaggactaagtcggt

SEQ ID NO: 23561 - DNA, 20 bp, Psychrobacter phenylpyruvicus
gctgtcgctagaggatgggc

SEQ ID NO: 23562 - DNA, 30 bp, Pseudomonas mendocina
aacgtattaggttacatgctcttcctccca

SEQ ID NO: 23563 - DNA, 20 bp, Finegoldia magna
ggtttaataagtcgaatgtt

SEQ ID NO: 23564 - DNA, 20 bp, Streptococcus macacae
gcctcttagagggggataag

SEQ ID NO: 23565 - DNA, 20 bp, Pediococcus dextrinicus
aggtgcttgcaccaaggaga

SEQ ID NO: 23566 - DNA, 20 bp, Corynebacterium pilosum
gggtctcccaattgccgacc

SEQ ID NO: 23567 - DNA, 20 bp, Gemella morbillorum
accctgcctggtagcggggt

SEQ ID NO: 23568 - DNA, 20 bp, Actinomyces turicensis
gtgggtggaaaggtttttct

SEQ ID NO: 23569 - DNA, 20 bp, Bacillus sp
ggaagcaagtagaacccctt

SEQ ID NO: 23570 - DNA, 20 bp, Neisseria subflava
ctcacaaaaccgatcgagtc

SEQ ID NO: 23571 - DNA, 20 bp, Brevibacillus brevis
ggtagccgcatcggaagggc

SEQ ID NO: 23572 - DNA, 20 bp, Leuconostoc pseudomesenteroides
tgtcgcatgatacgaagtta

SEQ ID NO: 23573 - DNA, 20 bp, Corynebacterium kutscheri
tttaggtctgtatacaggct

SEQ ID NO: 23574 - DNA, 20 bp, Streptococcus macacae
atatctctctaagcctttag

SEQ ID NO: 23575 - DNA, 20 bp, Microbacterium hominis
taacaccagcaggcggtggc

SEQ ID NO: 23576 - DNA, 20 bp, Anaerobiospirillum succiniciproducens
ttcgggggaaagacttttag

SEQ ID NO: 23577 - DNA, 20 bp, Achromobacter xylosoxidans
ctcgcgaaactgacggtacc

SEQ ID NO: 23578 - DNA, 20 bp, Clostridium clostridiiforme
agcgaaagcggatcgaccct

SEQ ID NO: 23579 - DNA, 20 bp, Streptococcus acidominimus
attctcccgtagctgctaca

SEQ ID NO: 23580 - DNA, 20 bp, Streptococcus iniae
gcttgcactaatccaaagag

SEQ ID NO: 23581 - DNA, 20 bp, Empedobacter brevis
gtaggacgactgccttatgg

SEQ ID NO: 23582 - DNA, 20 bp, Streptococcus criceti
agagtggaaagttactcaag

SEQ ID NO: 23583 - DNA, 20 bp, Bacteroides capillosus
gctatgtgaccaagcgaaag

SEQ ID NO: 23584 - DNA, 20 bp, Weissella paramesenteroides
tgctctgatgtgattttatc

SEQ ID NO: 23585 - DNA, 20 bp, Stenotrophomonas maltophilia
gagcggcagcacaagaaagc

SEQ ID NO: 23586 - DNA, 20 bp, Propionibacterium propionicus
gtaaaccgctttcaattgtg

SEQ ID NO: 23587 - DNA, 20 bp, Streptococcus macacae
gctccacgagatcggtgagt

SEQ ID NO: 23588 - DNA, 30 bp, Dolosicoccus paucivorans
gcgaagaaccttaccagctcttgacatcgg

SEQ ID NO: 23589 - DNA, 20 bp, Streptococcus dysgalactiae
taacccatgttaaacattta

SEQ ID NO: 23590 - DNA, 20 bp, Corynebacterium pilosum
tgttggaaaggcctttgggc

SEQ ID NO: 23591 - DNA, 20 bp, Enterobacter gergoviae
gctacgcgttaaggtagcca

SEQ ID NO: 23592 - DNA, 20 bp, Facklamia hominis
ttcccggcaaagttagtggc

SEQ ID NO: 23593 - DNA, 20 bp, Streptococcus macacae
catgcaagtgggacgcactg

SEQ ID NO: 23594 - DNA, 20 bp, Anaerobiospirillum succiniciproducens
tttcagggggaggaaacact

SEQ ID NO: 23595 - DNA, 20 bp, Alloiococcus otitis
tgcatgctggggaaatgaaa

SEQ ID NO: 23596 - DNA, 30 bp, Corynebacterium group ANF
gagctaataccggataatactttttatcac

SEQ ID NO: 23597 - DNA, 20 bp, Clostridium clostridiiforme
gaggaaggatccgcctaaag

SEQ ID NO: 23598 - DNA, 20 bp, Prevotella intermedia
cggtgcgatgcaaatagcat

SEQ ID NO: 23599 - DNA, 20 bp, Corynebacterium group ANF
tttatcacatggtaagaaga

SEQ ID NO: 23600 - DNA, 20 bp, Acinetobacter johnsonii
agccgttggagcctttgagg

SEQ ID NO: 23601 - DNA, 20 bp, Streptococcus criceti
attaactcatgttaatgact

SEQ ID NO: 23602 - DNA, 20 bp, Aeromonas salmonicida
acggtgtgatgcatgactgg

SEQ ID NO: 23603 - DNA, 20 bp, Prevotella intermedia
ggacggtgcgatgcaaatag

SEQ ID NO: 23604 - DNA, 20 bp, Leptotrichia buccalis
aggatgaacgctgacatgta

SEQ ID NO: 23605 - DNA, 20 bp, Sporosarcina ureae
cgaataatcccattctcttc

SEQ ID NO: 23606 - DNA, 20 bp, Weeksella virosa
tattcacgagctggatagtt

SEQ ID NO: 23607 - DNA, 20 bp, Campylobacter concisus
ggagccgaccggaaggtgcg

SEQ ID NO: 23608 - DNA, 20 bp, Anaerococcus prevotii
cctcgcatgaagctatcatc

SEQ ID NO: 23609 - DNA, 20 bp, Clostridium innocuum
tcgaagtaggaccgatgact

SEQ ID NO: 23610 - DNA, 20 bp, Bacillus schlegellii
aaggcgcgtgcagcgctgaa

SEQ ID NO: 23611 - DNA, 20 bp, Cedecea davisae
ggagtagcttgctactccgc

SEQ ID NO: 23612 - DNA, 20 bp, Bacillus laevolacticus
cgcgctacagagattgacct

SEQ ID NO: 23613 - DNA, 20 bp, Corynebacterium group ANF
atggtaagaagatgaaaggc

SEQ ID NO: 23614 - DNA, 20 bp, Salmonella typhi
atgcaagtcgcgacggtatc

SEQ ID NO: 23615 - DNA, 20 bp, Streptococcus acidominimus
agagaagaacgttagcggga

SEQ ID NO: 23616 - DNA, 30 bp, Bacteroides uniformis
cgggggtacctgaagtgcgtaaccgcagga

SEQ ID NO: 23617 - DNA, 20 bp, Finegoldia magna
gggaagctatatagtgatat

SEQ ID NO: 23618 - DNA, 20 bp, Clostridium clostridiiforme
ttcaagtcgtctgtcaaaag

SEQ ID NO: 23619 - DNA, 20 bp, Anaerococcus prevotii
agactcttattgcttcggca

SEQ ID NO: 23620 - DNA, 20 bp, Corynebacterium jeikeium
agggaagaagccttttggtg

SEQ ID NO: 23621 - DNA, 20 bp, Anaerococcus prevotii
gcctcggtggaagattacta

SEQ ID NO: 23622 - DNA, 20 bp, Haemophilus paraphrophilus
tgttggatccatggctcaga

SEQ ID NO: 23623 - DNA, 30 bp, Oligella urethralis
cagatcccgccttggtaggccgttacccca

SEQ ID NO: 23624 - DNA, 20 bp, Bacteroides ovatus
agtatagccgtaaggctgtt

SEQ ID NO: 23625 - DNA, 20 bp, Paenibacillus lautus
ttaaccccagggctcaaccc

SEQ ID NO: 23626 - DNA, 20 bp, Streptococcus pyogenes
tagaacgctgagaactgggt

SEQ ID NO: 23627 - DNA, 20 bp, Vibrio hollisae
tcagaagtgcccgaaaggga

SEQ ID NO: 23628 - DNA, 30 bp, Salmonella typhi
tccacagaactttccagagatgaaatggtg

SEQ ID NO: 23629 - DNA, 20 bp, Lactococcus raffinolactis
gtaacctacctatcagcggg

SEQ ID NO: 23630 - DNA, 20 bp, Corynebacterium kutscheri
cacgtttgtggagggagtgg

SEQ ID NO: 23631 - DNA, 20 bp, Clostridium clostridiiforme
gaaaggagaagcagatccca

SEQ ID NO: 23632 - DNA, 20 bp, Anaerococcus prevotii
gtaaggaagcagcagtcgaa

SEQ ID NO: 23633 - DNA, 20 bp, Achromobacter xylosoxidans
tcccgcccctaaacgatgtc

SEQ ID NO: 23634 - DNA, 20 bp, Proteus mirabilis
ggttaatacccttgtcaatt

SEQ ID NO: 23635 - DNA, 20 bp, Bacteroides stercoris
taccggatggcatagttttc

SEQ ID NO: 23636 - DNA, 20 bp, Anaerobiospirillum succiniciproducens
tctaaactggctttctagag

SEQ ID NO: 23637 - DNA, 20 bp, Streptococcus infantarius
gtagttagccgttttttttt

SEQ ID NO: 23638 - DNA, 20 bp, Clostridium clostridiiforme
cacgcggtagagaagcgaaa

SEQ ID NO: 23639 - DNA, 20 bp, Bacteroides caccae
gtaaccgcaaggagcgtcta

SEQ ID NO: 23640 - DNA, 20 bp, Bacteroides ovatus
gcatacgaatatcgcatgat

SEQ ID NO: 23641 - DNA, 20 bp, Brevibacterium casei
agtttttcggatcgtagtct

SEQ ID NO: 23642 - DNA, 20 bp, Prevotella bivia
taataccttatgtattcgtt

SEQ ID NO: 23643 - DNA, 20 bp, Moellerella wisconsensis
tatcagcgattgacgttacc

SEQ ID NO: 23644 - DNA, 20 bp, Dolosicoccus paucivorans
gtgagagaagaacagcgagt

SEQ ID NO: 23645 - DNA, 20 bp, Bacteroides stercoris
atgattattaaagaatttcg

SEQ ID NO: 23646 - DNA, 20 bp, Clostridium innocuum
agccgtcgaagtaggaccga

SEQ ID NO: 23647 - DNA, 20 bp, Salmonella typhi
cggtatcaggcagcagcttg

SEQ ID NO: 23648 - DNA, 20 bp, Enterococcus dispar
gctgtctggcgtgcctaata

SEQ ID NO: 23649 - DNA, 20 bp, Geobacillus thermoglucosidasius
gaccgaacggaagcttgctt

SEQ ID NO: 23650 - DNA, 20 bp, Microbacterium testaceum
gggtcaactctggaggaagg

SEQ ID NO: 23651 - DNA, 20 bp, Actinomyces radingae
ccgcatggggggtgtgggaa

SEQ ID NO: 23652 - DNA, 20 bp, Rothia mucilaginosa
taggcttgctaggtggatta

SEQ ID NO: 23653 - DNA, 20 bp, Corynebacterium pilosum
accggttagttcccgttggg

SEQ ID NO: 23654 - DNA, 20 bp, Eschericchia vulneris
gacagatccctagtctggtc

SEQ ID NO: 23655 - DNA, 20 bp, Streptococcus peroris
cagctgtttaaaaggtgcaa

SEQ ID NO: 23656 - DNA, 20 bp, Weeksella virosa
cctattcacgagctggatag

SEQ ID NO: 23657 - DNA, 20 bp, Enterobacter hormaechei
tgtgttaggcctaaaaaagc

SEQ ID NO: 23658 - DNA, 20 bp, Stenotrophomonas maltophilia
atgcatgcgggatctgcccg

SEQ ID NO: 23659 - DNA, 20 bp, Weissella paramesenteroides
tctttaactgatctgacgag

SEQ ID NO: 23660 - DNA, 20 bp, Anaerococcus tetradius
gaagagcttatcaaagattt

SEQ ID NO: 23661 - DNA, 20 bp, Brevibacillus centrosporus
aaaagcttgaaagccgggtt

SEQ ID NO: 23662 - DNA, 20 bp, Anaerococcus tetradius
tactgtattacaggtggtgc

SEQ ID NO: 23663 - DNA, 20 bp, Arthrobacter globiformis
tcctgaccgccgtagagata

SEQ ID NO: 23664 - DNA, 20 bp, Campylobacter curvus
tgcgaagtaaataatatata

SEQ ID NO: 23665 - DNA, 20 bp, Anaerococcus prevotii
aatgaaatcacatatgcaca

SEQ ID NO: 23666 - DNA, 20 bp, Bacillus coagulans
aagcttgcttctatcaagtt

SEQ ID NO: 23667 - DNA, 20 bp, Streptococcus acidominimus
tgataagtcagaagtaaaag

SEQ ID NO: 23668 - DNA, 20 bp, Bacteroides stercoris
caacactgggatagcctttc

SEQ ID NO: 23669 - DNA, 20 bp, Anaerococcus prevotii
gggcagctatatagtgatat

SEQ ID NO: 23670 - DNA, 20 bp, Leuconostoc gelidum
atcaagctctaaaaggcgct

SEQ ID NO: 23671 - DNA, 20 bp, Salmonella typhi
acggtatcaggcagcagctt

SEQ ID NO: 23672 - DNA, 20 bp, Eschericchia vulneris
gtactcctactgggaggcaa

SEQ ID NO: 23673 - DNA, 20 bp, Streptococcus sp.
tcggtgaggtaccgtaagga

SEQ ID NO: 23674 - DNA, 20 bp, Unknown Organism
  oligonucleotide from CDC group EF-4B
cacaccatggaagtggggga

SEQ ID NO: 23675 - DNA, 20 bp, Prevotella loescheii
caacatccggcttgcagcgc

SEQ ID NO: 23676 - DNA, 20 bp, Bacillus schlegellii
gcccgaaggcgcgtgcagcg

SEQ ID NO: 23677 - DNA, 20 bp, Bacillus laevolacticus
tcatggctcagggccgaacg

SEQ ID NO: 23678 - DNA, 20 bp, Bacteroides capillosus
tttatacggggataaagtta

SEQ ID NO: 23679 - DNA, 20 bp, Bacteroides ovatus
gaatatcgcatgatattttt

SEQ ID NO: 23680 - DNA, 20 bp, Eremococcus coleocola
tagggattgacggtaactaa

SEQ ID NO: 23681 - DNA, 20 bp, Clostridium clostridiiforme
agagagaagcgagcccgaaa

SEQ ID NO: 23682 - DNA, 20 bp, Morganella morganii
ggcaattgacgttaccgaca

SEQ ID NO: 23683 - DNA, 30 bp, Moellerella wisconsensis
gtatggggatctgcctgacagagggggata

SEQ ID NO: 23684 - DNA, 20 bp, Finegoldia magna
ttaccagcgaataaatgtcc

SEQ ID NO: 23685 - DNA, 20 bp, Prevotella loescheii
tgggtcggtgaccaagcgaa

SEQ ID NO: 23686 - DNA, 20 bp, Capnocytophaga sp.
acgtcaaatcatccggccct

SEQ ID NO: 23687 - DNA, 20 bp, Pseudomonas mendocina
ttagagtgcccccccgacgt

SEQ ID NO: 23688 - DNA, 20 bp, Yersinia frederiksenii
gcatttcacttaatacgtga

SEQ ID NO: 23689 - DNA, 20 bp, Oligella ureolytica
ggaactgcactattaactat

SEQ ID NO: 23690 - DNA, 30 bp, Bacteroides vulgatus
aaaggaataaagtcgggtatgcatacccgt

SEQ ID NO: 23691 - DNA, 30 bp, Brevibacillus reuszeri
gataggtttttggaccgcatggtccgaaaa

SEQ ID NO: 23692 - DNA, 20 bp, Paenibacillus alvei
tctagagatagagtcccttc

SEQ ID NO: 23693 - DNA, 20 bp, Burkholderia cepacia
gccacctggtggcgagtggc

SEQ ID NO: 23694 - DNA, 20 bp, Enterobacter hormaechei
tgacacgaaggaggtgatcc

SEQ ID NO: 23695 - DNA, 20 bp, Haemophilus paraphrophilus
actttaagtttggcgcccgt

SEQ ID NO: 23696 - DNA, 20 bp, Bacillus smithii
agtcgtaacaaaaagccgta

SEQ ID NO: 23697 - DNA, 20 bp, Alloiococcus otitis
ccaccttcagagatgaaggg

SEQ ID NO: 23698 - DNA, 20 bp, Bacillus azotoformans
gctacaatggatggacaaag

SEQ ID NO: 23699 - DNA, 20 bp, Streptococcus ferus
agtccattacgtgacggtac

SEQ ID NO: 23700 - DNA, 20 bp, Arthrobacter globiformis
cctgaccgccgtagagatac

SEQ ID NO: 23701 - DNA, 20 bp, Fusobacterium mortiferum
ctacttgatcctcggggtga

SEQ ID NO: 23702 - DNA, 20 bp, Bacteroides capillosus
gggcgcctacggaggtgctg

SEQ ID NO: 23703 - DNA, 20 bp, Anaerococcus tetradius
ataagcggattagtggcgaa

SEQ ID NO: 23704 - DNA, 20 bp, Bacteroides merdae
aagctgaggactctggtgag

SEQ ID NO: 23705 - DNA, 20 bp, Macrococcus caseolyticus
tatcggaaggggcggtggat

SEQ ID NO: 23706 - DNA, 20 bp, Staphylococcus kloosii
aaccgcgagggcatgcaaat

SEQ ID NO: 23707 - DNA, 20 bp, Bacillus sp
aggggttctacttgcttccc

SEQ ID NO: 23708 - DNA, 20 bp, Bacillus licheniformis
gtttgaccggcagggttcaa

SEQ ID NO: 23709 - DNA, 20 bp, Brevibacillus laterosporus
agttttgcttcgcatgaagc

SEQ ID NO: 23710 - DNA, 20 bp, Paenibacillus macerans
atgttagttgccagcaccta

SEQ ID NO: 23711 - DNA, 20 bp, Bacteroides stercoris
atagttttcccgcatgggat

SEQ ID NO: 23712 - DNA, 20 bp, Corynebacterium group ANF
ccgaagccgcttgctccact

SEQ ID NO: 23713 - DNA, 20 bp, Sphingobacterium multivorum
tgaagagtgcagagacgcac

SEQ ID NO: 23714 - DNA, 20 bp, Eggerthella lenta
cgaacccgcaggggcggagg

SEQ ID NO: 23715 - DNA, 20 bp, Porphyromonas endodontalis
aagggtaataccagtgactg

SEQ ID NO: 23716 - DNA, 20 bp, Corynebacterium coyleae
ctgcttgcagaggtactcga

SEQ ID NO: 23717 - DNA, 20 bp, Bacillus licheniformis
tatatccggaaggttgttgt

SEQ ID NO: 23718 - DNA, 20 bp, Bacteroides merdae
ggagtggaaacactccttct

SEQ ID NO: 23719 - DNA, 20 bp, Enterobacter hormaechei
catgacacgaaggaggtgat

SEQ ID NO: 23720 - DNA, 20 bp, Prevotella intermedia
ggtgcgatgcaaatagcatc

SEQ ID NO: 23721 - DNA, 20 bp, Eremococcus coleocola
gttattagccaagaacaccc

SEQ ID NO: 23722 - DNA, 20 bp, Clostridium sordellii
tcatggctcaggatgaaccg

SEQ ID NO: 23723 - DNA, 20 bp, Streptococcus cristatus
atgatagtcaattaaaaggt

SEQ ID NO: 23724 - DNA, 20 bp, Corynebacterium diphtheriae
taggtccatgccgtaaacgg

SEQ ID NO: 23725 - DNA, 20 bp, Clostridium clostridiiforme
ctccggcgagactgccatcg

SEQ ID NO: 23726 - DNA, 20 bp, Sporosarcina ureae
ttctctcgcatgagggaatg

SEQ ID NO: 23727 - DNA, 20 bp, Alloiococcus otitis
catcttctgccaccttcaga

SEQ ID NO: 23728 - DNA, 20 bp, Clostridium clostridiiforme
gcgcacagggccgcatggtc

SEQ ID NO: 23729 - DNA, 30 bp, Streptococcus cristatus
taacattgactattgcatgatagtcaatta

SEQ ID NO: 23730 - DNA, 20 bp, Stenotrophomonas maltophilia
ctgcccgatacgagggggat

SEQ ID NO: 23731 - DNA, 20 bp, Bacteroides capillosus
gcttgaactgtaggcgaacg

SEQ ID NO: 23732 - DNA, 20 bp, Eremococcus coleocola
tagccaagaacacccctagt

SEQ ID NO: 23733 - DNA, 20 bp, Streptococcus bovis
ttgaaagtaccaactggtac

SEQ ID NO: 23734 - DNA, 30 bp, Enterococcus saccharolyticus
aacggggtgagtaacacgtgggtaccctgc

SEQ ID NO: 23735 - DNA, 20 bp, Gemella morbillorum
aggtgcaattgctatcgcta

SEQ ID NO: 23736 - DNA, 20 bp, Leptotrichia buccalis
ctgcaaagccggtccaagtt

SEQ ID NO: 23737 - DNA, 20 bp, Bacteroides ovatus
acaggttatgctgaggagct

SEQ ID NO: 23738 - DNA, 20 bp, Finegoldia magna
aagcattggaaactgataaa

SEQ ID NO: 23739 - DNA, 20 bp, Bacteroides merdae
tggtgatttaagtcagcggt

SEQ ID NO: 23740 - DNA, 20 bp, Empedobacter brevis
caggtcactaagtatcaact

SEQ ID NO: 23741 - DNA, 20 bp, Clostridium clostridiiforme
ttgtccgaaagagagggaca

SEQ ID NO: 23742 - DNA, 20 bp, Stenotrophomonas maltophilia
gtgataaggctaataccctt

SEQ ID NO: 23743 - DNA, 20 bp, Actinomyces odontolyticus
aaccgctttgtgcgggggga

SEQ ID NO: 23744 - DNA, 20 bp, Bacillus licheniformis
aggttgttgtttgaccggca

SEQ ID NO: 23745 - DNA, 20 bp, Corynebacterium group ANF
tgtggtgtcgaaggtgggat

SEQ ID NO: 23746 - DNA, 20 bp, Bacteroides capillosus
ctaggattaaaggtttagcg

SEQ ID NO: 23747 - DNA, 20 bp, Finegoldia magna
gaaggtattcgtatcgtaaa

SEQ ID NO: 23748 - DNA, 20 bp, Finegoldia magna
ggaagattactaatgagagt

SEQ ID NO: 23749 - DNA, 20 bp, Anaerococcus tetradius
tgaagatatttagattcctt

SEQ ID NO: 23750 - DNA, 20 bp, Anaerobiospirillum succiniciproducens
ccatgggagcggatgcacca

SEQ ID NO: 23751 - DNA, 20 bp, Bordetella trematum
gccagctaatacctggcgct

SEQ ID NO: 23752 - DNA, 20 bp, Bacteroides uniformis
ccgcatggtggaactattaa

SEQ ID NO: 23753 - DNA, 20 bp, Stenotrophomonas maltophilia
tgcactatcgaatgagccca

SEQ ID NO: 23754 - DNA, 20 bp, Nocardia asteroides
cctttagttaatacctaaag

SEQ ID NO: 23755 - DNA, 20 bp, Aeromonas schubertii
tctggaaccttgtagagata

SEQ ID NO: 23756 - DNA, 20 bp, Arcanobacterium pyogenes
gcatttttgtgacggtatgt

SEQ ID NO: 23757 - DNA, 20 bp, Neisseria flavescens
cgagcatgctttacacatgc

SEQ ID NO: 23758 - DNA, 20 bp, Paenibacillus lautus
gtttaaccccagggctcaac

SEQ ID NO: 23759 - DNA, 20 bp, Streptococcus equi
atctgtgagtcgcgaacggg

SEQ ID NO: 23760 - DNA, 20 bp, Campylobacter curvus
ctacggcgcaaccgaaagtt

SEQ ID NO: 23761 - DNA, 20 bp, Streptococcus macacae
gtgttaggtcctaaggggct

SEQ ID NO: 23762 - DNA, 20 bp, Bacteroides capilosus
agggtgtgaaaaccacgggc

SEQ ID NO: 23763 - DNA, 20 bp, Moellerella wisconsensis
gtatggggatctgcctgaca

SEQ ID NO: 23764 - DNA, 20 bp, Streptococcus criceti
aaagttactcaagtgacggt

SEQ ID NO: 23765 - DNA, 20 bp, Sporosarcina ureae
acatgattttcccttcgggg

SEQ ID NO: 23766 - DNA, 20 bp, Arcanobacterium pyogenes
ggctttttgttttggtggat

SEQ ID NO: 23767 - DNA, 20 bp, Paenibacillus macerans
gtgagagtaactgctcacaa

SEQ ID NO: 23768 - DNA, 20 bp, Stenotrophomonas maltophilia
gcatgcgggatctgcccgat

SEQ ID NO: 23769 - DNA, 20 bp, Bacteroides stercoris
ttatgctggggactctaccc

SEQ ID NO: 23770 - DNA, 20 bp, Serratia marcescens
gactggggtgaagcgaacaa

SEQ ID NO: 23771 - DNA, 20 bp, Eubacterium moniliforme
gatagtcctccgtgccgaag

SEQ ID NO: 23772 - DNA, 30 bp, Dolosicoccus paucivorans
ataagtgaaatccttcgggacatccagaca

SEQ ID NO: 23773 - DNA, 20 bp, Bacteroides ovatus
tcactagactgtcactgaca

SEQ ID NO: 23774 - DNA, 20 bp, Leptotrichia buccalis
acctgaagctactggtccaa

SEQ ID NO: 23775 - DNA, 20 bp, Serratia proteamaculans
gtgttaatagcgcatcacat

SEQ ID NO: 23776 - DNA, 20 bp, Peptostreptococcus anaerobius
gagcgcgtctgatttgatgc

SEQ ID NO: 23777 - DNA, 20 bp, Bacillus niacini
tgcttgcacctcttggttag

SEQ ID NO: 23778 - DNA, 20 bp, Actinomyces radingae
tggcggcgtgacttaacaca

SEQ ID NO: 23779 - DNA, 20 bp, Streptococcus criceti
ccttcgggagccagccgcta

SEQ ID NO: 23780 - DNA, 20 bp, Pediococcus acidilactici
ctggtctgtactgcgctgag

SEQ ID NO: 23781 - DNA, 20 bp, Brevibacterium epidermidis
cggatacgaccgtcggacgc

SEQ ID NO: 23782 - DNA, 20 bp, Clostridium clostridiiforme
gagggacacctgcgggaaac

SEQ ID NO: 23783 - DNA, 20 bp, Bacteroides stercoris
acggttcttttcttcggaca

SEQ ID NO: 23784 - DNA, 20 bp, Microbacterium hominis
aacaccagcaggcggtggcc

SEQ ID NO: 23785 - DNA, 20 bp, Streptococcus ratti
gcttgaaagatgcaagagca

SEQ ID NO: 23786 - DNA, 20 bp, Sphingobacterium multivorum
ttacgcttcggggctatcac

SEQ ID NO: 23787 - DNA, 20 bp, Leptotrichia buccalis
cagaatctgtgcttgcacag

SEQ ID NO: 23788 - DNA, 20 bp, Propionibacterium avidum
tcttgcttgttaggcggcta

SEQ ID NO: 23789 - DNA, 20 bp, Bacteroides ovatus
tgctgcatggttgtcgtaca

SEQ ID NO: 23790 - DNA, 20 bp, Bacteroides stercoris
cgcatgggatgattattaaa

SEQ ID NO: 23791 - DNA, 20 bp, Propionibacterium propionicus
tggaaagattttttttggtt

SEQ ID NO: 23792 - DNA, 20 bp, Anaerococcus tetradius
gaagatatttagattccttc

SEQ ID NO: 23793 - DNA, 20 bp, Streptococcus macacae
tgcacccctatcagatggac

SEQ ID NO: 23794 - DNA, 20 bp, Dolosicoccus paucivorans
gtcgcgagaccaagcggatc

SEQ ID NO: 23795 - DNA, 20 bp, Serratia marcescens
gaagcgaacaaggtaaccgt

SEQ ID NO: 23796 - DNA, 20 bp, Paenibacillus pabuli
gatcggtacagagatgtatc

SEQ ID NO: 23797 - DNA, 20 bp, Arcanobacterium pyogenes
agccggggctttttgttttg

SEQ ID NO: 23798 - DNA, 20 bp, Proteus mirabilis
gtcaggggaacctgcggctt

SEQ ID NO: 23799 - DNA, 20 bp, Brevibacillus centrosporus
tccggggaacccggggttaa

SEQ ID NO: 23800 - DNA, 20 bp, Clostridium clostridiiforme
tgtcctatcaggcagttggt

SEQ ID NO: 23801 - DNA, 20 bp, Bacillus smithii
ggtaacccttcacgggagcc

SEQ ID NO: 23802 - DNA, 20 bp, Brevibacillus centrosporus
gggttaatcccgaatatttt

SEQ ID NO: 23803 - DNA, 20 bp, Prevotella melaninogenica
ttagagataatgacgccctt

SEQ ID NO: 23804 - DNA, 20 bp, Microbacterium hominis
gtcggtaacaccagcaggcg

SEQ ID NO: 23805 - DNA, 30 bp, Actinomyces naeslundii
agtgaagcaggcctgtcccttgtgggtggg

SEQ ID NO: 23806 - DNA, 20 bp, Vibrio metschnikovii
cgcttgccactttgggttca

SEQ ID NO: 23807 - DNA, 20 bp, Paenibacillus azotofixans
tctgaatcgtttagagatag

SEQ ID NO: 23808 - DNA, 20 bp, Streptococcus infantarius
gcatcatcccatctcaggtc

SEQ ID NO: 23809 - DNA, 20 bp, Anaerococcus tetradius
gcatgaagagcttatcaaag

SEQ ID NO: 23810 - DNA, 20 bp, Dolosicoccus paucivorans
gcaccgatacatcgagtggc

SEQ ID NO: 23811 - DNA, 20 bp, Streptococcus ratti
gcataagagagtttaacaca

SEQ ID NO: 23812 - DNA, 20 bp, Bacteroides merdae
ggggaataaagtggaggacg

SEQ ID NO: 23813 - DNA, 20 bp, Stenotrophomonas maltophilia
aggctaatacccttatcgat

SEQ ID NO: 23814 - DNA, 20 bp, Arcanobacterium pyogenes
ccggggctttttgttttggt

SEQ ID NO: 23815 - DNA, 20 bp, Moraxella atlantae
gggagaaaggagcttatggg

SEQ ID NO: 23816 - DNA, 20 bp, Unknown Organism
  oligonucleotide from CDC group EO-2
gccacttctactacggaata

SEQ ID NO: 23817 - DNA, 20 bp, Bifidobacterium adolescentis
gcattaacctaatactttgc

SEQ ID NO: 23818 - DNA, 20 bp, Bacteroides distasonis
gtgtgggacgtgtcctattt

SEQ ID NO: 23819 - DNA, 20 bp, Moraxella osloensis
agcaggcggcaggcttaaca

SEQ ID NO: 23820 - DNA, 20 bp, Prevotella melaninogenica
ggaatgaacgctagagctac

SEQ ID NO: 23821 - DNA, 20 bp, Prevotella oralis
tgcggggataaagttgggga

SEQ ID NO: 23822 - DNA, 20 bp, Clostridium clostridiiforme
cgagcccgaaaggagaagca

SEQ ID NO: 23823 - DNA, 20 bp, Finegoldia magna
agattactaatgagagtggc

SEQ ID NO: 23824 - DNA, 20 bp, Shewanella putrefaciens
aatctttccagagatggctt

SEQ ID NO: 23825 - DNA, 20 bp, Abiotrophia defectiva
acatgggatcacatgattcc

SEQ ID NO: 23826 - DNA, 20 bp, Sporosarcina pasteurii
acaggcagttactcctgtac

SEQ ID NO: 23827 - DNA, 30 bp, Streptococcus urinalis
atacatgcaagtagaacgctgaggtcatgt

SEQ ID NO: 23828 - DNA, 20 bp, Nocardia asteroides
tcctttagttaatacctaaa

SEQ ID NO: 23829 - DNA, 20 bp, Actinomyces radingae
taagtttctggagggagatg

SEQ ID NO: 23830 - DNA, 20 bp, Serratia ficaria
agaacttaccagagatggca

SEQ ID NO: 23831 - DNA, 20 bp, Bordetella trematum
ccggctaatacctggcgcta

SEQ ID NO: 23832 - DNA, 20 bp, Brevibacillus brevis
caccttatggttagcggcgg

SEQ ID NO: 23833 - DNA, 20 bp, Bacteroides stercoris
actgactgaatcggaaacgg

SEQ ID NO: 23834 - DNA, 20 bp, Streptococcus sanguinis
cacactgtgaccggatctta

SEQ ID NO: 23835 - DNA, 30 bp, Vibrio hollisae
gtcagactagagtgcgtcagaggggggtgg

SEQ ID NO: 23836 - DNA, 20 bp, Streptococcus criceti
gtgattaactcatgttaatg

SEQ ID NO: 23837 - DNA, 20 bp, Stenotrophomonas maltophilia
gcagcacaggagaggcttgt

SEQ ID NO: 23838 - DNA, 20 bp, Streptococcus macacae
cgaagaacgggtgtaagagc

SEQ ID NO: 23839 - DNA, 20 bp, Streptococcus macacae
gcttaaaaggtgcagctgca

SEQ ID NO: 23840 - DNA, 20 bp, Actinomyces naeslundii
ttgccttttggggggtgtgg

SEQ ID NO: 23841 - DNA, 20 bp, Sporosarcina pasteurii
aacaaaggaagaaacaagtt

SEQ ID NO: 23842 - DNA, 20 bp, Lactococcus raffinolactis
aaatggtacactgagagatg

SEQ ID NO: 23843 - DNA, 20 bp, Streptococcus iniae
taaaaggagcaaaagcttca

SEQ ID NO: 23844 - DNA, 20 bp, Prevotella oralis
gtgtccctttttgcaggtac

SEQ ID NO: 23845 - DNA, 20 bp, Serratia marcescens
ggggtgaagcgaacaaggta

SEQ ID NO: 23846 - DNA, 20 bp, Bacteroides stercoris
gaccttgagtgcaacagagg

SEQ ID NO: 23847 - DNA, 20 bp, Achromobacter xylosoxidans
cctcgcgaaactgacggtac

SEQ ID NO: 23848 - DNA, 20 bp, Aeromonas hydrophila
ggtggctaatacccaccagc

SEQ ID NO: 23849 - DNA, 30 bp, Prevotella buccae
gggtcggcctagggcaaaaccgggattggg

SEQ ID NO: 23850 - DNA, 20 bp, Bacillus mycoides
agccgatcggaagggcggtg

SEQ ID NO: 23851 - DNA, 20 bp, Vibrio hollisae
ttcagaagtgcccgaaaggg

SEQ ID NO: 23852 - DNA, 20 bp, Leptotrichia buccalis
aagcgaacctgcaaagccgg

SEQ ID NO: 23853 - DNA, 30 bp, Alloiococcus otitis
caccttcagagatgaagggttcccttcggg

SEQ ID NO: 23854 - DNA, 20 bp, Capnocytophaga sp.
ttatattaaagctgaggcgg

SEQ ID NO: 23855 - DNA, 20 bp, Salmonella choleraesuis
tccacagaagtttgcagaga

SEQ ID NO: 23856 - DNA, 20 bp, Lactococcus raffinolactis
tttggggctatccagcccta

SEQ ID NO: 23857 - DNA, 20 bp, Peptoniphilus indolicus
cgggaagaagttgagttgga

SEQ ID NO: 23858 - DNA, 20 bp, Moellerella wisconsensis
gttgatattaatactatcag

SEQ ID NO: 23859 - DNA, 20 bp, Shewanella algae
acagaatcctggtagagatg

SEQ ID NO: 23860 - DNA, 20 bp, Streptococcus equi
gaacgcacagatgatacgta

SEQ ID NO: 23861 - DNA, 20 bp, Anaerobiospirillum succiniciproducens
ttagttgctatcagatgagc

SEQ ID NO: 23862 - DNA, 20 bp, Corynebacterium ulcerans
tcccttgtggttgtatacag

SEQ ID NO: 23863 - DNA, 20 bp, Paenibacillus macerans
tgtttaaggctgtggctcaa

SEQ ID NO: 23864 - DNA, 20 bp, Abiotrophia defectiva
taggacatgggatcacatga

SEQ ID NO: 23865 - DNA, 20 bp, Finegoldia magna
tttagtagacagaagcttcg

SEQ ID NO: 23866 - DNA, 20 bp, Staphylococcus carnosus
tgaagtcgtaacaaaatagc

SEQ ID NO: 23867 - DNA, 20 bp, Sphingomonas paucimobilis
cgggtgcttggcatttgggt

SEQ ID NO: 23868 - DNA, 20 bp, Leuconostoc carnosum
caggagaacgctggtggcgt

SEQ ID NO: 23869 - DNA, 20 bp, Bacteroides thetaiotaomicron
acgcccgcccgtcaagccat

SEQ ID NO: 23870 - DNA, 20 bp, Geobacillus stearothermophilus
ttgccttgattcggtcagcg

SEQ ID NO: 23871 - DNA, 20 bp, Moraxella atlantae
ggtttctgctataagatgtg

SEQ ID NO: 23872 - DNA, 20 bp, Actinomyces neuii
tcaggtcagggaacgtgcgg

SEQ ID NO: 23873 - DNA, 20 bp, Bacteroides stercoris
atgggatgattattaaagaa

SEQ ID NO: 23874 - DNA, 20 bp, Empedobacter brevis
tacgattctttcgggaatct

SEQ ID NO: 23875 - DNA, 20 bp, Finegoldia magna
ttatgagacatccatacagg

SEQ ID NO: 23876 - DNA, 20 bp, Streptococcus urinalis
ctaataccgcatgagagttt

SEQ ID NO: 23877 - DNA, 20 bp, Brevibacillus brevis
gttgggatcaacctccttca

SEQ ID NO: 23878 - DNA, 20 bp, Sphingobacterium multivorum
acaccgcataacatcaacag

SEQ ID NO: 23879 - DNA, 20 bp, Peptostreptococcus anaerobius
gcgtctgttttgatgcttgc

SEQ ID NO: 23880 - DNA, 20 bp, Paenibacillus azotofixans
ctcattaacttagcggcgga

SEQ ID NO: 23881 - DNA, 20 bp, Bacteroides capillosus
ctgaagtccgcgaccgcaag

SEQ ID NO: 23882 - DNA, 20 bp, Paenibacillus macerans
gggagacaggggacacaggt

SEQ ID NO: 23883 - DNA, 20 bp, Empedobacter brevis
acagattgaatggcatcatt

SEQ ID NO: 23884 - DNA, 20 bp, Staphylococcus schleiferi
gtatgcccgtatcggaaagt

SEQ ID NO: 23885 - DNA, 20 bp, Peptoniphilus indolicus
agttgagttggattagcggc

SEQ ID NO: 23886 - DNA, 20 bp, Streptococcus gordonii
aggacgaacgctggcgggcg

SEQ ID NO: 23887 - DNA, 20 bp, Bacteroides capilosus
cacgggctcaacctgtggcc

SEQ ID NO: 23888 - DNA, 20 bp, Anaerococcus prevotii
atgcataaatgatcaaagct

SEQ ID NO: 23889 - DNA, 20 bp, Sporosarcina pasteurii
ggaagaaacaagtttcttcc

SEQ ID NO: 23890 - DNA, 20 bp, Vibrio hollisae
gagattcagaagtgcccgaa

SEQ ID NO: 23891 - DNA, 20 bp, Propionibacterium propionicus
cttttttgtgacggtagcag

SEQ ID NO: 23892 - DNA, 20 bp, Corynebacterium group ANF
tggtgtggtgtcgaaggtgg

SEQ ID NO: 23893 - DNA, 20 bp, Sporosarcina ureae
taggggagctagccgccgaa

SEQ ID NO: 23894 - DNA, 20 bp, Leuconostoc gelidum
atgatatcaagctctaaaag

SEQ ID NO: 23895 - DNA, 20 bp, Bacillus mycoides
ccggataacattttgcgctg

SEQ ID NO: 23896 - DNA, 20 bp, Leuconostoc fallax
agagataatattgttctctt

SEQ ID NO: 23897 - DNA, 20 bp, Myroides odoratimimus
gcaacgatgattaggggtcc

SEQ ID NO: 23898 - DNA, 20 bp, Clostridium clostridiiforme
gtaggcggcgcttcaagtcg

SEQ ID NO: 23899 - DNA, 20 bp, Propionibacterium propionicus
aacccattttttggggggga

SEQ ID NO: 23900 - DNA, 20 bp, Stenotrophomonas maltophilia
cgagcagcaagcggaaaccc

SEQ ID NO: 23901 - DNA, 20 bp, Leptotrichia buccalis
tgaacgctgacatgtaatgc

SEQ ID NO: 23902 - DNA, 20 bp, Anaerococcus prevotii
acacatgtttcaacggtcaa

SEQ ID NO: 23903 - DNA, 20 bp, Unknown Organism
  oligonucleotide from CDC group EO-2
aggcgagggacttcggttct

SEQ ID NO: 23904 - DNA, 20 bp, Unknown Organism
  oligonucleotide from CDC group EO-2
gagggacttcggttctagcg

SEQ ID NO: 23905 - DNA, 20 bp, Corynebacterium ulcerans
gcagtcgaacggaaaggccc

SEQ ID NO: 23906 - DNA, 20 bp, Brevibacillus brevis
gggtaaccggaaggcagcca

SEQ ID NO: 23907 - DNA, 20 bp, Enterobacter hormaechei
atgacacgaaggaggtgatc

SEQ ID NO: 23908 - DNA, 20 bp, Capnocytophaga sp.
catccggcccttacatcttg

SEQ ID NO: 23909 - DNA, 20 bp, Corynebacterium kutscheri
atggcctaaccacgtttgtg

SEQ ID NO: 23910 - DNA, 20 bp, Geobacillus stearothermophilus
gagcggaccggattggggct

SEQ ID NO: 23911 - DNA, 20 bp, Enterobacter amnigenus
agcacagagagcttgttttc

SEQ ID NO: 23912 - DNA, 20 bp, Haemophilus paraphrophilus
gggttgaactttaagtttgg

SEQ ID NO: 23913 - DNA, 20 bp, Bacillus laevolacticus
taagccggatagctggtttc

SEQ ID NO: 23914 - DNA, 30 bp, Oligella urethralis
gcagttaatagtgcagttccgaggttgagc

SEQ ID NO: 23915 - DNA, 20 bp, Bacteroides capilosus
gtcagggtgtgaaaaccacg

SEQ ID NO: 23916 - DNA, 30 bp, Actinomyces radingae
caagtcgaacgggatctgcgtggcctttgt

SEQ ID NO: 23917 - DNA, 20 bp, Eubacterium moniliforme
accacgaaaccgcatggttt

SEQ ID NO: 23918 - DNA, 20 bp, Staphylococcus schleiferi
taaccatttggaagctaagc

SEQ ID NO: 23919 - DNA, 20 bp, Corynebacterium pilosum
tttccttcttgtgttggaaa

SEQ ID NO: 23920 - DNA, 20 bp, Collinsella aerofaciens
gctggcggcgcgctaacaca

SEQ ID NO: 23921 - DNA, 20 bp, Staphylococcus schleiferi
ctctaagttgactgccggga

SEQ ID NO: 23922 - DNA, 20 bp, Finegoldia magna
tcggtggaagattactaatg

SEQ ID NO: 23923 - DNA, 20 bp, Bacteroides capillosus
cggtcgtatgcaaatacgat

SEQ ID NO: 23924 - DNA, 20 bp, Clostridium clostridiiforme
tgagcggggatggttcgaga

SEQ ID NO: 23925 - DNA, 30 bp, Prevotella oralis
cgtgtccctttttgcaggtaccgcatgaat

SEQ ID NO: 23926 - DNA, 20 bp, Anaerococcus tetradius
cgaacgatgaagatatttag

SEQ ID NO: 23927 - DNA, 20 bp, Bacillus azotoformans
aatggatggacaaagggctg

SEQ ID NO: 23928 - DNA, 20 bp, Leuconostoc carnosum
tatgggaagaaaagttaagg

SEQ ID NO: 23929 - DNA, 30 bp, Streptococcus constellatus
atgcccgtagtttactaccccgtattctgt

SEQ ID NO: 23930 - DNA, 20 bp, Morganella morganii
agtcgggaggaaggtgtcaa

SEQ ID NO: 23931 - DNA, 20 bp, Bacillus licheniformis
gctgtgggttactctcgggg

SEQ ID NO: 23932 - DNA, 20 bp, Pediococcus parvulus
tcgttaattgattttgagat

SEQ ID NO: 23933 - DNA, 20 bp, Leuconostoc fallax
acatcctttgaagatgttag

SEQ ID NO: 23934 - DNA, 20 bp, Aeromonas hydrophila
ggttggtggctaatacccac

SEQ ID NO: 23935 - DNA, 20 bp, Bacteroides stercoris
ccttgagtgcagcagaggtg

SEQ ID NO: 23936 - DNA, 20 bp, Sphingomonas paucimobilis
ccgggtgcttggcatttggg

SEQ ID NO: 23937 - DNA, 20 bp, Bacteroides stercoris
gcgagcgcaacccttgcggg

SEQ ID NO: 23938 - DNA, 20 bp, Streptococcus equi
aagtggaacgcacagatgat

SEQ ID NO: 23939 - DNA, 20 bp, Eschericchia vulneris
atacggttaataaccgtgtc

SEQ ID NO: 23940 - DNA, 20 bp, Prevotella loescheii
ccggaagtgcggtggataac

SEQ ID NO: 23941 - DNA, 20 bp, Streptococcus macacae
ggaaagtcagtagttaaaag

SEQ ID NO: 23942 - DNA, 20 bp, Dolosicoccus paucivorans
gcgagtagagtaactgttac

SEQ ID NO: 23943 - DNA, 20 bp, Corynebacterium kutscheri
tgtatacaggctggtgcatg

SEQ ID NO: 23944 - DNA, 20 bp, Streptococcus macacae
agtcagtagttaaaagcatt

SEQ ID NO: 23945 - DNA, 20 bp, Peptoniphilus asaccharolyticus
gaatttcggtgccgcagtta

SEQ ID NO: 23946 - DNA, 20 bp, Eremococcus coleocola
acacccctagtagtaactgg

SEQ ID NO: 23947 - DNA, 20 bp, Actinobacillus ureae
gatcctggctcagattgaga

SEQ ID NO: 23948 - DNA, 20 bp, Corynebacterium pilosum
tcccgttgggtattctggcc

SEQ ID NO: 23949 - DNA, 20 bp, Propionibacterium avidum
tgtgggggtagccgtcgaat

SEQ ID NO: 23950 - DNA, 20 bp, Eremococcus coleocola
tgttctcttaacgtgagtgg

SEQ ID NO: 23951 - DNA, 20 bp, Eremococcus coleocola
agggattgacggtaactaat

SEQ ID NO: 23952 - DNA, 20 bp, Facklamia hominis
tggcctaactttatgaggga

SEQ ID NO: 23953 - DNA, 20 bp, Actinomyces meyeri
ggtttttgctggggggagtg

SEQ ID NO: 23954 - DNA, 20 bp, Serratia rubidaea
ttaatacggcattacattga

SEQ ID NO: 23955 - DNA, 20 bp, Citrobacter werkmanii
gctgcgcgcgcagcgcctaa

SEQ ID NO: 23956 - DNA, 20 bp, Stenotrophomonas maltophilia
aatggcaggagacaaagaga

SEQ ID NO: 23957 - DNA, 20 bp, Providencia stuartii
atgttaataccatcaacgat

SEQ ID NO: 23958 - DNA, 30 bp, Alloiococcus otitis
gtgcatgctggggaaatgaaaggtggctct

SEQ ID NO: 23959 - DNA, 20 bp, Corynebacterium falsenii
ccatgttgtggtgacggtac

SEQ ID NO: 23960 - DNA, 20 bp, Salmonella typhi
tgcaagtcgcgacggtatca

SEQ ID NO: 23961 - DNA, 20 bp, Streptococcus bovis
ggtagccgtcatcggaaggt

SEQ ID NO: 23962 - DNA, 20 bp, Myroides odoratimimus
gagcttgaatagtatggaag

SEQ ID NO: 23963 - DNA, 20 bp, Pediococcus parvulus
tttcgttaattgattttgag

SEQ ID NO: 23964 - DNA, 20 bp, Stenotrophomonas maltophilia
ccataaagccctgatcgttc

SEQ ID NO: 23965 - DNA, 20 bp, Myroides odoratimimus
tgaaatttcctagcttaact

SEQ ID NO: 23966 - DNA, 20 bp, Yersinia frederiksenii
catttcacttaatacgtgaa

SEQ ID NO: 23967 - DNA, 20 bp, Geobacillus stearothermophilus
gaccggattggggcttgcct

SEQ ID NO: 23968 - DNA, 20 bp, Vibrio parahaemolyticus
ctgctaaaagaagtaggcta

SEQ ID NO: 23969 - DNA, 20 bp, Brevibacillus brevis
ttgcaccttatggttagcgg

SEQ ID NO: 23970 - DNA, 20 bp, Finegoldia magna
atttatcggtcatagatggg

SEQ ID NO: 23971 - DNA, 20 bp, Empedobacter brevis
tggggtttcggcttcagtgg

SEQ ID NO: 23972 - DNA, 20 bp, Pseudomonas fluorescens
cttgctcacggatttagcgg

SEQ ID NO: 23973 - DNA, 20 bp, Psychrobacter phenylpyruvicus
ccgttgaccgctgtagagat

SEQ ID NO: 23974 - DNA, 20 bp, Brevibacillus centrosporus
ctctcgcatgaggcgaagac

SEQ ID NO: 23975 - DNA, 20 bp, Microbacterium hominis
caccagcaggcggtggccct

SEQ ID NO: 23976 - DNA, 20 bp, Microbacterium hominis
gtaacaccagcaggcggtgg

SEQ ID NO: 23977 - DNA, 20 bp, Raoultella terrigena
ttgaacgctgttgtgtaggc

SEQ ID NO: 23978 - DNA, 20 bp, Eremococcus coleocola
gctctgctatcactcaagga

SEQ ID NO: 23979 - DNA, 30 bp, Weissella paramesenteroides
gatctgacgagcttgctctgatgtgatttt

SEQ ID NO: 23980 - DNA, 20 bp, Brevibacillus thermoruber
agtctgatgtcaaagcccgg

SEQ ID NO: 23981 - DNA, 20 bp, Streptococcus criceti
gtagagtggaaagttactca

SEQ ID NO: 23982 - DNA, 20 bp, Granulicatella elegans
tctagagtcgcatgacccag

SEQ ID NO: 23983 - DNA, 20 bp, Empedobacter brevis
gaggggtacgattctttcgg

SEQ ID NO: 23984 - DNA, 20 bp, Streptococcus alactolyticus
acagcttttgacacatgtta

SEQ ID NO: 23985 - DNA, 20 bp, Listeria innocua
gccccccggcttaaccgggg

SEQ ID NO: 23986 - DNA, 20 bp, Bacteroides capillosus
gtatccaacctactccttac

SEQ ID NO: 23987 - DNA, 30 bp, Bacteroides stercoris
gcaacccttgcgggtagttccatcaggtta

SEQ ID NO: 23988 - DNA, 20 bp, Sphingobacterium multivorum
gacgtccaggcattcatggc

SEQ ID NO: 23989 - DNA, 20 bp, Gemella morbillorum
cgcatatcagctagatgttg

SEQ ID NO: 23990 - DNA, 20 bp, Bordetella bronchiseptica
atcatggctcggattgaacg

SEQ ID NO: 23991 - DNA, 20 bp, Enterobacter amnigenus
gcacagagagcttgttttcg

SEQ ID NO: 23992 - DNA, 20 bp, Streptococcus criceti
cgatgccatccctagagata

SEQ ID NO: 23993 - DNA, 20 bp, Actinomyces radingae
gatctgcgtggcctttgtgg

SEQ ID NO: 23994 - DNA, 20 bp, Corynebacterium pilosum
cctggtcttccggattagct

SEQ ID NO: 23995 - DNA, 20 bp, Clostridium clostridiiforme
gagacttgtgtcctatcagg

SEQ ID NO: 23996 - DNA, 20 bp, Streptococcus criceti
cgttgagtagagtggaaagt

SEQ ID NO: 23997 - DNA, 20 bp, Microbacterium hominis
cgcccgtcaagtcatgaaga

SEQ ID NO: 23998 - DNA, 20 bp, Streptococcus ratti
ttttgtaagtctgaagtcaa

SEQ ID NO: 23999 - DNA, 20 bp, Clostridium innocuum
caaggaagcttgcttccaaa

SEQ ID NO: 24000 - DNA, 20 bp, Dolosicoccus paucivorans
cgagaccaagcggatctctt

SEQ ID NO: 24001 - DNA, 20 bp, Leptotrichia buccalis
cgaagctgtgcttgcacagg

SEQ ID NO: 24002 - DNA, 20 bp, Streptococcus macacae
acaacagtatcgctaagaga

SEQ ID NO: 24003 - DNA, 20 bp, Actinomyces naeslundii
gaccttgccttttggggggt

SEQ ID NO: 24004 - DNA, 20 bp, Corynebacterium falsenii
agaagccatgttgtggtgac

SEQ ID NO: 24005 - DNA, 20 bp, Citrobacter amalonaticus
aatgaacgctgttggcaggc

SEQ ID NO: 24006 - DNA, 20 bp, Streptococcus macacae
acgagatcggtgagtcgcga

SEQ ID NO: 24007 - DNA, 20 bp, Streptococcus macacae
gcaagtgggacgcactgatt

SEQ ID NO: 24008 - DNA, 20 bp, Enterobacter amnigenus
ttgttttctgggtgacgagc

SEQ ID NO: 24009 - DNA, 20 bp, Brevibacillus brevis
tcgagcgaatcttaaggtgc

SEQ ID NO: 24010 - DNA, 20 bp, Corynebacterium pilosum
gtcttccggattagctttgg

SEQ ID NO: 24011 - DNA, 20 bp, Corynebacterium afermentans
gccaccgcttcaggtgttcc

SEQ ID NO: 24012 - DNA, 20 bp, Finegoldia magna
cgaaagccaatcccagttcg

SEQ ID NO: 24013 - DNA, 20 bp, Capnocytophaga sp.
ggtatttcttcggacagttt

SEQ ID NO: 24014 - DNA, 20 bp, Finegoldia magna
tcgaacgggatttagtaaac

SEQ ID NO: 24015 - DNA, 20 bp, Clostridium clostridiiforme
agagcttgagaagcagagag

SEQ ID NO: 24016 - DNA, 20 bp, Anaerococcus tetradius
aataccctataaagttagtc

SEQ ID NO: 24017 - DNA, 20 bp, Bacteroides distasonis
catgaagcaggggccccgca

SEQ ID NO: 24018 - DNA, 20 bp, Kocuria rosea
catgcaagtctgaacgatga

SEQ ID NO: 24019 - DNA, 20 bp, Anaerobiospirillum succiniciproducens
agatgaacgctgttttaggc

SEQ ID NO: 24020 - DNA, 20 bp, Stenotrophomonas maltophilia
atgtgaacgctggcggctag

SEQ ID NO: 24021 - DNA, 20 bp, Citrobacter koseri
gaggaaggtgctgtggttaa

SEQ ID NO: 24022 - DNA, 20 bp, Clostridium clostridiiforme
agcagagatgcgcttttgga

SEQ ID NO: 24023 - DNA, 20 bp, Peptoniphilus asaccharolyticus
atattgaccgctctagagat

SEQ ID NO: 24024 - DNA, 20 bp, Leuconostoc carnosum
ggctcaggagaacgctggtg

SEQ ID NO: 24025 - DNA, 20 bp, Bacteroides capilosus
aggaacctgcctcggagtgg

SEQ ID NO: 24026 - DNA, 20 bp, Vibrio alginolyticus
aaaagaagtaggtagttaac

SEQ ID NO: 24027 - DNA, 20 bp, Streptococcus criceti
acatcccgatgccatcccta

SEQ ID NO: 24028 - DNA, 20 bp, Morganella morganii
tcgggaggaaggtggcaagg

SEQ ID NO: 24029 - DNA, 20 bp, Prevotella melaninogenica
gggtcccagttcgggactgg

SEQ ID NO: 24030 - DNA, 20 bp, Eubacterium moniliforme
gctcaaccccggggttgcac

SEQ ID NO: 24031 - DNA, 20 bp, Corynebacterium cystitidis
atgctgaaacgggggcgcta

SEQ ID NO: 24032 - DNA, 20 bp, Helcococcus kunzii
atcgcatgatgtaaatgtta

SEQ ID NO: 24033 - DNA, 20 bp, Escherichia fergusonii
atcagcttgctgattcgctg

SEQ ID NO: 24034 - DNA, 20 bp, Streptococcus urinalis
tacttcgtgacggtaactaa

SEQ ID NO: 24035 - DNA, 20 bp, Enterobacter gergoviae
gtagccagcctggggagtac

SEQ ID NO: 24036 - DNA, 20 bp, Psychrobacter phenylpyruvicus
gaggtaacctgttggagcca

SEQ ID NO: 24037 - DNA, 20 bp, Proteus vulgaris
gatctctactggctgagaga

SEQ ID NO: 24038 - DNA, 20 bp, Actinomyces naeslundii
gtcccttgtgggtgggttga

SEQ ID NO: 24039 - DNA, 20 bp, Vibrio parahaemolyticus
aatcccaaaaaggcgtcgta

SEQ ID NO: 24040 - DNA, 20 bp, Sphingobacterium multivorum
gttggatattaaatatttat

SEQ ID NO: 24041 - DNA, 20 bp, Aeromonas hydrophila
ctaatacccaccagctgtga

SEQ ID NO: 24042 - DNA, 20 bp, Clostridium clostridiiforme
gaaaagcagagatgcgcttt

SEQ ID NO: 24043 - DNA, 20 bp, Corynebacterium kutscheri
acgaagcttattttgtgacg

SEQ ID NO: 24044 - DNA, 20 bp, Achromobacter xylosoxidans
taaacgatgtcactagctgt

SEQ ID NO: 24045 - DNA, 30 bp, Streptococcus acidominimus
tgataagtcagaagtaaaaggctgtggctc

SEQ ID NO: 24046 - DNA, 20 bp, Arcanobacterium haemolyticum
agatattctgctcttgccgc

SEQ ID NO: 24047 - DNA, 30 bp, Streptococcus criceti
aaagctctgttgtaagagaagaacgttgag

SEQ ID NO: 24048 - DNA, 20 bp, Globicatella sanguinis
ccggtggcctaaccaatagg

SEQ ID NO: 24049 - DNA, 20 bp, Clostridium clostridiiforme
gctcaccaaaccgaagacgg

SEQ ID NO: 24050 - DNA, 20 bp, Brevibacillus brevis
cggtggggtaaccggaaggc

SEQ ID NO: 24051 - DNA, 30 bp, Oligella ureolytica
gctcaacctcggaactgcactattaactat

SEQ ID NO: 24052 - DNA, 20 bp, Empedobacter brevis
gtgcgtgttaatagcacgtg

SEQ ID NO: 24053 - DNA, 20 bp, Leuconostoc lactis
aggacagaatgactagggtg

SEQ ID NO: 24054 - DNA, 20 bp, Anaerococcus tetradius
tgaagagcttatcaaagatt

SEQ ID NO: 24055 - DNA, 20 bp, Clostridium clostridiiforme
gcagtaaacgatgtatgctg

SEQ ID NO: 24056 - DNA, 20 bp, Streptococcus acidominimus
ggaaaatccgctaagtgacg

SEQ ID NO: 24057 - DNA, 20 bp, Paenibacillus alvei
cttgacatctgaatgcaaac

SEQ ID NO: 24058 - DNA, 20 bp, Paenibacillus macerans
gcttttcttcgggagacagg

SEQ ID NO: 24059 - DNA, 20 bp, Pseudomonas fluorescens
cacggatttagcggcggacg

SEQ ID NO: 24060 - DNA, 20 bp, Dolosicoccus paucivorans
cgcgactgtatcaccgcctt

SEQ ID NO: 24061 - DNA, 30 bp, Brevibacterium epidermidis
cgtcggacgcatgtctggtggtggaaagtt

SEQ ID NO: 24062 - DNA, 20 bp, Clostridium barati
gtgtagggggttcaacacct

SEQ ID NO: 24063 - DNA, 20 bp, Bacteroides capillosus
ggcagcatggagggttgctt

SEQ ID NO: 24064 - DNA, 20 bp, Brevibacillus brevis
gaacctgcggttgggatcaa

SEQ ID NO: 24065 - DNA, 20 bp, Corynebacterium jeikeium
ctagggaagaagccttttgg

SEQ ID NO: 24066 - DNA, 20 bp, Prevotella oralis
ggcagttttttaagcgtgct

SEQ ID NO: 24067 - DNA, 20 bp, Propionibacterium avidum
tcgaatcgatgggctcttgc

SEQ ID NO: 24068 - DNA, 20 bp, Eubacterium moniliforme
tttagaggtaaaaggattca

SEQ ID NO: 24069 - DNA, 20 bp, Serratia grimesii
tagcacatcacattgacgtt

SEQ ID NO: 24070 - DNA, 20 bp, Paenibacillus macerans
agagcttttcttcgggagac

SEQ ID NO: 24071 - DNA, 20 bp, Bacteroides capillosus
ctatgtgaccaagcgaaagc

SEQ ID NO: 24072 - DNA, 20 bp, Bacillus mycoides
cgcgaaattgaaaggcggct

SEQ ID NO: 24073 - DNA, 20 bp, Eubacterium moniliforme
ggttgcacttgaaactgtgt

SEQ ID NO: 24074 - DNA, 20 bp, Bacteroides thetaiotaomicron
gccgggggtactgaagtagt

SEQ ID NO: 24075 - DNA, 20 bp, Campylobacter curvus
cctatatattgtttatttat

SEQ ID NO: 24076 - DNA, 20 bp, Pediococcus acidilactici
gctgtctggtctgtactgcg

SEQ ID NO: 24077 - DNA, 20 bp, Streptococcus macacae
ggagcttgctccacgagatc

SEQ ID NO: 24078 - DNA, 30 bp, Enterococcus raffinosus
tttgatcactctggagacagagttttcccc

SEQ ID NO: 24079 - DNA, 20 bp, Corynebacterium pilosum
aaaggccctgccttccaggg

SEQ ID NO: 24080 - DNA, 20 bp, Pseudomonas oryzihabitans
agggcttacagcgaatacct

SEQ ID NO: 24081 - DNA, 20 bp, Enterobacter amnigenus
agagcttgttttcgggtgac

SEQ ID NO: 24082 - DNA, 20 bp, Cardiobacterium hominis
gagacgctggcggcatgctt

SEQ ID NO: 24083 - DNA, 20 bp, Paenibacillus azotofixans
tgaatcgtttagagataggc

SEQ ID NO: 24084 - DNA, 20 bp, Vibrio harveyi
ggtggtggacgacgtcaaag

SEQ ID NO: 24085 - DNA, 20 bp, Campylobacter curvus
ttatatataagtataaatgg

SEQ ID NO: 24086 - DNA, 20 bp, Paenibacillus alvei
attttcctcgcatgagggag

SEQ ID NO: 24087 - DNA, 20 bp, Bacteroides stercoris
tgcagttgatactggcgacc

SEQ ID NO: 24088 - DNA, 20 bp, Bacillus schlegellii
catcccgccgacgggtccag

SEQ ID NO: 24089 - DNA, 20 bp, Dermacoccus nishinomiyaensis
gatatgaccgatctccgcat

SEQ ID NO: 24090 - DNA, 20 bp, Eubacterium moniliforme
gtgagcaatctgccctgcaa

SEQ ID NO: 24091 - DNA, 20 bp, Myroides odoratimimus
ggcaggttactacgtattta

SEQ ID NO: 24092 - DNA, 20 bp, Dolosicoccus paucivorans
ataactgtcggaaacgaccg

SEQ ID NO: 24093 - DNA, 30 bp, Bacteroides capillosus
cttaccagggcttgacatccgactaacgaa

SEQ ID NO: 24094 - DNA, 20 bp, Vibrio harveyi
tagtgggctgcataagaagt

SEQ ID NO: 24095 - DNA, 20 bp, Bacteroides merdae
gcaatagcagattacgaggt

SEQ ID NO: 24096 - DNA, 20 bp, Streptococcus equi
agatgatacgtagcttgcta

SEQ ID NO: 24097 - DNA, 20 bp, Enterobacter hormaechei
agcatgacacgaaggaggtg

SEQ ID NO: 24098 - DNA, 20 bp, Finegoldia magna
cggtcatagatgggctcgcg

SEQ ID NO: 24099 - DNA, 20 bp, Citrobacter freundii
gaagcttggcagagatgcgt

SEQ ID NO: 24100 - DNA, 20 bp, Dolosicoccus paucivorans
tgacaaagatgcttatggta

SEQ ID NO: 24101 - DNA, 20 bp, Anaerococcus prevotii
agcaaaccgtaaggaagcag

SEQ ID NO: 24102 - DNA, 20 bp, Eggerthella lenta
taggtgtggggggctccgcc

SEQ ID NO: 24103 - DNA, 20 bp, Bordetella trematum
cggctaatacctggcgctaa

SEQ ID NO: 24104 - DNA, 20 bp, Psychrobacter phenylpyruvicus
ttttagctgtcgctagagga

SEQ ID NO: 24105 - DNA, 20 bp, Bacillus schlegellii
ttgacatcccgccgacgggt

SEQ ID NO: 24106 - DNA, 20 bp, Aeromonas caviae
tatctgtcaactgtgacgtt

SEQ ID NO: 24107 - DNA, 20 bp, Eremococcus coleocola
gcataacagcaatcatcgcc

SEQ ID NO: 24108 - DNA, 20 bp, Enterococcus dispar
ccgcataacaatagtaaaca

SEQ ID NO: 24109 - DNA, 20 bp, Streptococcus macacae
ttatcgcatgataggagctt

SEQ ID NO: 24110 - DNA, 20 bp, Bacteroides stercoris
tactggtatccttgagtgca

SEQ ID NO: 24111 - DNA, 20 bp, Paenibacillus azotofixans
tctctcattaacttagcggc

SEQ ID NO: 24112 - DNA, 20 bp, Staphylococcus schleiferi
gaacggacaggagcttgctc

SEQ ID NO: 24113 - DNA, 20 bp, Prevotella melaninogenica
ccgggtcccagttcgggact

SEQ ID NO: 24114 - DNA, 20 bp, Actinomyces radingae
tttgtggttgtgtggtgaga

SEQ ID NO: 24115 - DNA, 20 bp, Pseudomonas oryzihabitans
gcttacagcgaatacctgtg

SEQ ID NO: 24116 - DNA, 20 bp, Paenibacillus lautus
atttaagttgggtgtttaac

SEQ ID NO: 24117 - DNA, 30 bp, Bacteroides distasonis
ccttgccactagttactaacaggtaaagct

SEQ ID NO: 24118 - DNA, 20 bp, Porphyromonas gingivalis
tacctgaagggcgtaccgca

SEQ ID NO: 24119 - DNA, 20 bp, Anaerobiospirillum succiniciproducens
acaccatgggagcggatgca

SEQ ID NO: 24120 - DNA, 20 bp, Streptococcus macacae
tcagctattgaaactgtcag

SEQ ID NO: 24121 - DNA, 20 bp, Corynebacterium argentoratense
gaccatcctttagtgtgtga

SEQ ID NO: 24122 - DNA, 20 bp, Corynebacterium group ANF
gttgacatgcactagatgag

SEQ ID NO: 24123 - DNA, 20 bp, Corynebacterium cystitidis
gccatgctgaaacgggggcg

SEQ ID NO: 24124 - DNA, 20 bp, Stenotrophomonas maltophilia
aacggcagcacaggagaggc

SEQ ID NO: 24125 - DNA, 20 bp, Enterobacter hormaechei
aggcctaaaaaagcgttcat

SEQ ID NO: 24126 - DNA, 20 bp, Capnocytophaga sp.
gtttaaatggagactgacgt

SEQ ID NO: 24127 - DNA, 20 bp, Helcococcus kunzii
tacaggaatatcctagagat

SEQ ID NO: 24128 - DNA, 20 bp, Stenotrophomonas maltophilia
actggaaacttacgctaata

SEQ ID NO: 24129 - DNA, 20 bp, Neisseria elongata
aacgtaccgggtaatggggg

SEQ ID NO: 24130 - DNA, 20 bp, Brevibacillus brevis
tgcttgcaccttatggttag

SEQ ID NO: 24131 - DNA, 20 bp, Prevotella melaninogenica
aacgctagagctacaggctt

SEQ ID NO: 24132 - DNA, 20 bp, Corynebacterium pilosum
ttccttcttgtgttggaaag

SEQ ID NO: 24133 - DNA, 20 bp, Bacteroides distasonis
ctattttgtatgtaccttat

SEQ ID NO: 24134 - DNA, 20 bp, Clostridium innocuum
ccgtcgaagtaggaccgatg

SEQ ID NO: 24135 - DNA, 20 bp, Streptococcus macacae
ggagcttaaaaggtgcagct

SEQ ID NO: 24136 - DNA, 20 bp, Dolosicoccus paucivorans
gagtagagtaactgttactc

SEQ ID NO: 24137 - DNA, 20 bp, Prevotella oralis
gccttttttggtcggtggcc

SEQ ID NO: 24138 - DNA, 20 bp, Bacillus licheniformis
gaaggttgttgtttgaccgg

SEQ ID NO: 24139 - DNA, 20 bp, Sphingomonas paucimobilis
gaagtcgtacaagggagccg

SEQ ID NO: 24140 - DNA, 20 bp, Streptococcus infantarius
cgctttcgccccggtgttcc

SEQ ID NO: 24141 - DNA, 20 bp, Bacteroides thetaiotaomicron
gaggggcatcagtttggttt

SEQ ID NO: 24142 - DNA, 20 bp, Bacillus licheniformis
tttgaccggcagggttcaat

SEQ ID NO: 24143 - DNA, 20 bp, Corynebacterium group ANF
tggtaagaagatgaaaggcg

SEQ ID NO: 24144 - DNA, 30 bp, Vibrio harveyi
ccggaagttcggaatcgctagtaatcggga

SEQ ID NO: 24145 - DNA, 20 bp, Campylobacter curvus
gaagtaaataatatataggg

SEQ ID NO: 24146 - DNA, 20 bp, Clostridium tetani
acttgacataccctgaatta

SEQ ID NO: 24147 - DNA, 20 bp, Campylobacter concisus
gatggttggatgccattgtg

SEQ ID NO: 24148 - DNA, 20 bp, Streptococcus macacae
aagcaagttggagagagtgg

SEQ ID NO: 24149 - DNA, 20 bp, Eubacterium moniliforme
ggcagcgacctcgtaagagt

SEQ ID NO: 24150 - DNA, 20 bp, Bacteroides vulgatus
agtcgggtatgcatacccgt

SEQ ID NO: 24151 - DNA, 20 bp, Bacteroides ovatus
aattgcaacagaatatattg

SEQ ID NO: 24152 - DNA, 20 bp, Morganella morganii
tcagtcgggaggaaggtgtc

SEQ ID NO: 24153 - DNA, 30 bp, Eubacterium moniliforme
gtcacaccacggaagttgggagcacccgaa

SEQ ID NO: 24154 - DNA, 30 bp, Bacteroides merdae
agtgtgtttgaggtaggcggaatgcgtggt

SEQ ID NO: 24155 - DNA, 20 bp, Haemophilus paraphrophilus
gttctaagtccggattggag

SEQ ID NO: 24156 - DNA, 20 bp, Prevotella loescheii
ccgggtgctcaacatccggc

SEQ ID NO: 24157 - DNA, 20 bp, Enterococcus dispar
aacaatagtaaacacatgtt

SEQ ID NO: 24158 - DNA, 20 bp, Escherichia hermannii
cgacgtaacaaggtaaccgt

SEQ ID NO: 24159 - DNA, 20 bp, Streptococcus macacae
gataaggattggaaacgata

SEQ ID NO: 24160 - DNA, 20 bp, Campylobacter curvus
tccttgtcgcaaagacggac

SEQ ID NO: 24161 - DNA, 20 bp, Kocuria varians
aaggctgggactggcgatct

SEQ ID NO: 24162 - DNA, 20 bp, Bacteroides ovatus
ctcactagactgtcactgac

SEQ ID NO: 24163 - DNA, 20 bp, Clostridium clostridiiforme
cggatggatttgaaattgac

SEQ ID NO: 24164 - DNA, 20 bp, Moraxella atlantae
gcgatgtgacgcgaatctca

SEQ ID NO: 24165 - DNA, 20 bp, Clostridium clostridiiforme
aggctcaacctcggcgcgca

SEQ ID NO: 24166 - DNA, 20 bp, Finegoldia magna
gatataatgcaaaactcgaa

SEQ ID NO: 24167 - DNA, 20 bp, Streptococcus macacae
ggaagcaagttggagagagt

SEQ ID NO: 24168 - DNA, 20 bp, Enterococcus casseliflavus
cgcgggcattagctagttgg

SEQ ID NO: 24169 - DNA, 20 bp, Streptococcus macacae
gaagaacgggtgtaagagcg

SEQ ID NO: 24170 - DNA, 30 bp, Bacillus badius
agctgtcgcttacagatggacccgcggcgc

SEQ ID NO: 24171 - DNA, 20 bp, Corynebacterium mycetoides
gcgctggcggcgtgcttata

SEQ ID NO: 24172 - DNA, 20 bp, Streptococcus urinalis
ctgaggtcatgtgcttgcac

SEQ ID NO: 24173 - DNA, 20 bp, Finegoldia magna
ggtacagagggaagctatat

SEQ ID NO: 24174 - DNA, 20 bp, Sphingobacterium multivorum
acatatgtgaccggcatcgg

SEQ ID NO: 24175 - DNA, 20 bp, Bacteroides thetaiotaomicron
ttgcaaaccaaagctggcga

SEQ ID NO: 24176 - DNA, 20 bp, Kingella kingae
agcacgagtacttgtacttg

SEQ ID NO: 24177 - DNA, 20 bp, Streptococcus criceti
tcgggagccagccgctaagg

SEQ ID NO: 24178 - DNA, 20 bp, Anaerococcus tetradius
ggatgaaaaatattggatta

SEQ ID NO: 24179 - DNA, 30 bp, Empedobacter brevis
gtcttgagtgatgttgaagtggctggaatg

SEQ ID NO: 24180 - DNA, 20 bp, Clostridium innocuum
cagtatattaaagcgcccat

SEQ ID NO: 24181 - DNA, 20 bp, Bacteroides uniformis
cgtaaccgcaggagcgccct

SEQ ID NO: 24182 - DNA, 20 bp, Anaerococcus tetradius
ttagagatagtttcttaaga

SEQ ID NO: 24183 - DNA, 20 bp, Staphylococcus schleiferi
aaccatttggaagctaagcc

SEQ ID NO: 24184 - DNA, 20 bp, Clostridium barati
ggtgtagggggttcaacacc

SEQ ID NO: 24185 - DNA, 20 bp, Capnocytophaga sp.
tgcaggggaagaataaggag

SEQ ID NO: 24186 - DNA, 20 bp, Bacteroides stercoris
ttgcagttgatactggtatc

SEQ ID NO: 24187 - DNA, 20 bp, Eremococcus coleocola
tcttcggagcatagagacag

SEQ ID NO: 24188 - DNA, 20 bp, Fusobacterium necrogenes
atgccttcgtgccccttcgg

SEQ ID NO: 24189 - DNA, 20 bp, Actinomyces radingae
ggggcttttttaagtttctg

SEQ ID NO: 24190 - DNA, 20 bp, Streptococcus sanguinis
atgatattgaatatcgcatg

SEQ ID NO: 24191 - DNA, 20 bp, Sphingomonas paucimobilis
gcttggcatttgggtggcgc

SEQ ID NO: 24192 - DNA, 20 bp, Clostridium perfringens
taccgcataacgttgaaaga

SEQ ID NO: 24193 - DNA, 20 bp, Corynebacterium group ANF
aaaacgttttctagtggttg

SEQ ID NO: 24194 - DNA, 20 bp, Enterococcus saccharolyticus
tacccgcataacgctttttc

SEQ ID NO: 24195 - DNA, 20 bp, Paenibacillus lautus
caaccctgggtcgcacccaa

SEQ ID NO: 24196 - DNA, 20 bp, Salmonella typhi
gcagcagcttgcttgcttgg

SEQ ID NO: 24197 - DNA, 20 bp, Bacteroides distasonis
aaagtgtgggacgtgtccta

SEQ ID NO: 24198 - DNA, 20 bp, Methylobacterium extorquens
gaccacggaggggtcagcga

SEQ ID NO: 24199 - DNA, 20 bp, Actinomyces radingae
gcttttttaagtttctggag

SEQ ID NO: 24200 - DNA, 20 bp, Haemophilus influenzae
tttgaacgctggcggcaggg

SEQ ID NO: 24201 - DNA, 20 bp, Helcococcus ovis
ggaggcagacgtcgaaggta

SEQ ID NO: 24202 - DNA, 20 bp, Paenibacillus alvei
atgagggagatgagaaaggc

SEQ ID NO: 24203 - DNA, 20 bp, Vibrio parahaemolyticus
ggctgctaaaagaagtaggc

SEQ ID NO: 24204 - DNA, 20 bp, Lactococcus raffinolactis
accaattggtacactgagag

SEQ ID NO: 24205 - DNA, 20 bp, Bacteroides distasonis
ccgcatgaagcaggggcccc

SEQ ID NO: 24206 - DNA, 20 bp, Paenibacillus macerans
agggtgggcactctaacgtg

SEQ ID NO: 24207 - DNA, 20 bp, Sphingobacterium multivorum
cgtccaggcattcatggccc

SEQ ID NO: 24208 - DNA, 20 bp, Streptococcus macacae
tcggtgagtcgcgaacgggt

SEQ ID NO: 24209 - DNA, 20 bp, Anaerococcus prevotii
gcggggtctagagatagact

SEQ ID NO: 24210 - DNA, 20 bp, Anaerococcus prevotii
ccctctctttaagagacatc

SEQ ID NO: 24211 - DNA, 20 bp, Corynebacterium pilosum
ccctgccttccagggtctcc

SEQ ID NO: 24212 - DNA, 20 bp, Streptococcus macacae
tggcttaaccaatgtcagct

SEQ ID NO: 24213 - DNA, 20 bp, Micromonas micros
ttttgtggaaatcctttcgg

SEQ ID NO: 24214 - DNA, 20 bp, Macrococcus caseolyticus
aggggcggtggatcacctcc

SEQ ID NO: 24215 - DNA, 20 bp, Eremococcus coleocola
agtaactggctagggattga

SEQ ID NO: 24216 - DNA, 20 bp, Morganella morganii
caggcctaagcacatgcaag

SEQ ID NO: 24217 - DNA, 20 bp, Clostridium clostridiiforme
gacatcccattgaaaatcat

SEQ ID NO: 24218 - DNA, 20 bp, Alloiococcus otitis
tcttctgccaccttcagaga

SEQ ID NO: 24219 - DNA, 20 bp, Morganella morganii
tggcaaggttaataaccttg

SEQ ID NO: 24220 - DNA, 20 bp, Sphingobacterium multivorum
atatgtgaccggcatcggtt

SEQ ID NO: 24221 - DNA, 20 bp, Bacillus niacini
gagcgaatcttgaggtgctt

SEQ ID NO: 24222 - DNA, 20 bp, Citrobacter youngae
aagcaccggctaactccggc

SEQ ID NO: 24223 - DNA, 20 bp, Actinomyces naeslundii
cgaacggtgaaggcgacctt

SEQ ID NO: 24224 - DNA, 30 bp, Brevibacillus brevis
gatgaacctggagcttgctctagggaatta

SEQ ID NO: 24225 - DNA, 20 bp, Anaerococcus tetradius
ggaatgaaaataagcggatt

SEQ ID NO: 24226 - DNA, 20 bp, Leuconostoc carnosum
aagttaaggtagggaatgac

SEQ ID NO: 24227 - DNA, 20 bp, Oligella ureolytica
gatcatttgacctctcgcta

SEQ ID NO: 24228 - DNA, 20 bp, Sporosarcina pasteurii
ctaacaaaggaagaaacaag

SEQ ID NO: 24229 - DNA, 20 bp, Vibrio hollisae
agattcagaagtgcccgaaa

SEQ ID NO: 24230 - DNA, 20 bp, Streptococcus cristatus
accgcataacattgactatt

SEQ ID NO: 24231 - DNA, 20 bp, Prevotella oralis
agttttttaagcgtgctgtg

SEQ ID NO: 24232 - DNA, 30 bp, Abiotrophia defectiva
ggacatgggatcacatgattccgtgaggaa

SEQ ID NO: 24233 - DNA, 20 bp, Clostridium clostridiiforme
gggacacctgcgggaaaccg

SEQ ID NO: 24234 - DNA, 20 bp, Pseudomonas mendocina
acctaacgtattaggttaca

SEQ ID NO: 24235 - DNA, 20 bp, Paenibacillus macerans
ggtgtttaaggctgtggctc

SEQ ID NO: 24236 - DNA, 30 bp, Bacteroides vulgatus
atggtcttagcttgctaaggccgatggcga

SEQ ID NO: 24237 - DNA, 20 bp, Globicatella sanguinis
taactagaacttgttctggt

SEQ ID NO: 24238 - DNA, 20 bp, Leuconostoc pseudomesenteroides
gaaacttagtgtcgcatgat

SEQ ID NO: 24239 - DNA, 30 bp, Pseudomonas mendocina
cagtctccttagagtgcccccccgacgtgc

SEQ ID NO: 24240 - DNA, 20 bp, Providencia rustigianii
atatcgtcaacgattgacgt

SEQ ID NO: 24241 - DNA, 20 bp, Corynebacterium pilosum
cggaaaggccctgccttcca

SEQ ID NO: 24242 - DNA, 20 bp, Bacteroides stercoris
ggactctacccggactgccg

SEQ ID NO: 24243 - DNA, 20 bp, Dolosicoccus paucivorans
ccgcataaatcaatgattcg

SEQ ID NO: 24244 - DNA, 20 bp, Anaerococcus prevotii
aagcctgcgagcaaaccgta

SEQ ID NO: 24245 - DNA, 30 bp, Bacillus smithii
gcgcaagctgccgcttgcagatgggccccg

SEQ ID NO: 24246 - DNA, 20 bp, Leuconostoc lactis
cgtctaaggcaggacagaat

SEQ ID NO: 24247 - DNA, 20 bp, Salmonella typhi
agcagcttgcttgcttggct

SEQ ID NO: 24248 - DNA, 20 bp, Bacteroides fragilis
gtaccggaggtgcggttgga

SEQ ID NO: 24249 - DNA, 20 bp, Corynebacterium group ANF
ttatcacatggtaagaagat

SEQ ID NO: 24250 - DNA, 20 bp, Bifidobacterium adolescentis
taacctaatactttgctgtt

SEQ ID NO: 24251 - DNA, 20 bp, Dolosicoccus paucivorans
ccgccttctttgaaggcacc

SEQ ID NO: 24252 - DNA, 20 bp, Aeromonas schubertii
tgtctggaaccttgtagaga

SEQ ID NO: 24253 - DNA, 20 bp, Clostridium clostridiiforme
cgataagcataccgcctggg

SEQ ID NO: 24254 - DNA, 20 bp, Corynebacterium group ANF
ggggtgaaggtagtggatcg

SEQ ID NO: 24255 - DNA, 20 bp, Actinomyces radingae
aaggggcttttttaagtttc

SEQ ID NO: 24256 - DNA, 20 bp, Haemophilus segnis
tttgggggttgaactttagg

SEQ ID NO: 24257 - DNA, 20 bp, Lactococcus raffinolactis
acctacctatcagcggggga

SEQ ID NO: 24258 - DNA, 30 bp, Streptococcus iniae
gacactagagtacacatgtacttaagttaa

SEQ ID NO: 24259 - DNA, 20 bp, Vibrio parahaemolyticus
cgcttaccactttgtgggtt

SEQ ID NO: 24260 - DNA, 20 bp, Proteus vulgaris
agcgagcggtaacaggaaaa

SEQ ID NO: 24261 - DNA, 20 bp, Bacteroides thetaiotaomicron
ctagggtaagattggtattg

SEQ ID NO: 24262 - DNA, 20 bp, Bacteroides capillosus
tatacggggataaagttagg

SEQ ID NO: 24263 - DNA, 20 bp, Paenibacillus azotofixans
gcttgctcttgatcaactta

SEQ ID NO: 24264 - DNA, 20 bp, Streptococcus infantarius
tagcaagctaagttttcagc

SEQ ID NO: 24265 - DNA, 20 bp, Leptotrichia buccalis
gcatctaggcggccctgtaa

SEQ ID NO: 24266 - DNA, 20 bp, Corynebacterium jeikeium
cgctagggaagaagcctttt

SEQ ID NO: 24267 - DNA, 20 bp, Brevibacillus brevis
aaccggaaggcagccagccg

SEQ ID NO: 24268 - DNA, 20 bp, Prevotella loescheii
aaggtttggcggtgaaggat

SEQ ID NO: 24269 - DNA, 20 bp, Oligella urethralis
cagatcccgccttggtaggc

SEQ ID NO: 24270 - DNA, 20 bp, Actinomyces radingae
tccgcatggggggtgtggga

SEQ ID NO: 24271 - DNA, 20 bp, Vibrio parahaemolyticus
caaaaaggcgtcgtagtccg

SEQ ID NO: 24272 - DNA, 20 bp, Actinomyces naeslundii
aaagatgcgcctttgggtgt

SEQ ID NO: 24273 - DNA, 20 bp, Arcanobacterium pyogenes
acagaagaagcatttttgtg

SEQ ID NO: 24274 - DNA, 20 bp, Unknown Organism
  oligonucleotide from CDC group VB-3
taaccttccagggggacggt

SEQ ID NO: 24275 - DNA, 20 bp, Campylobacter concisus
gggtgagcgaatcgctatca

SEQ ID NO: 24276 - DNA, 20 bp, Streptococcus constellatus
agaccgcacaggatgcccgt

SEQ ID NO: 24277 - DNA, 20 bp, Prevotella melaninogenica
cttcagttgtccatcaggtt

SEQ ID NO: 24278 - DNA, 20 bp, Anaerococcus tetradius
aaaactgttaggcttgagag

SEQ ID NO: 24279 - DNA, 20 bp, Bacteroides capillosus
atggagggttgcttgcaacc

SEQ ID NO: 24280 - DNA, 20 bp, Peptostreptococcus anaerobius
atgcttgcattgatgaaaga

SEQ ID NO: 24281 - DNA, 20 bp, Eremococcus coleocola
ggacgatacaacgagcagca

SEQ ID NO: 24282 - DNA, 20 bp, Streptococcus macacae
aggtgttaggtcctaagggg

SEQ ID NO: 24283 - DNA, 20 bp, Pediococcus inopinatus
taagctaatcctcttaaaac

SEQ ID NO: 24284 - DNA, 20 bp, Propionibacterium propionicus
ttgtgggttggaaagatttt

SEQ ID NO: 24285 - DNA, 30 bp, Streptococcus ratti
ctctagagatagagttttacttttgtacat

SEQ ID NO: 24286 - DNA, 20 bp, Streptococcus infantarius
aggagctctggcgccgtgct

SEQ ID NO: 24287 - DNA, 20 bp, Citrobacter farmeri
gcatccattgacgttacccg

SEQ ID NO: 24288 - DNA, 20 bp, Gemella morbillorum
ttgctatcgctaccagatgg

SEQ ID NO: 24289 - DNA, 20 bp, Finegoldia magna
atagagatatacccctctct

SEQ ID NO: 24290 - DNA, 20 bp, Oligella urethralis
cagctacagatcccgccttg

SEQ ID NO: 24291 - DNA, 20 bp, Bacteroides fragilis
accggaggtgcggttggatc

SEQ ID NO: 24292 - DNA, 20 bp, Clostridium clostridiiforme
ttcgatgaagttttcggatg

SEQ ID NO: 24293 - DNA, 20 bp, Bacteroides distasonis
aggcaatagccgtttgcgag

SEQ ID NO: 24294 - DNA, 20 bp, Fusobacterium necrogenes
aatggaccataagtctgatc

SEQ ID NO: 24295 - DNA, 20 bp, Shewanella putrefaciens
ttcagagatagcttagtgcc

SEQ ID NO: 24296 - DNA, 20 bp, Geobacillus thermoglucosidasius
ggttacaagtccggaggaag

SEQ ID NO: 24297 - DNA, 20 bp, Bacillus schlegellii
ggagttcacacattaagcac

SEQ ID NO: 24298 - DNA, 20 bp, Finegoldia magna
aacacatgttttaacggtca

SEQ ID NO: 24299 - DNA, 20 bp, Unknown Organism
  oligonucleotide from CDC group EF-4B
gacggttacttaagtcagat

SEQ ID NO: 24300 - DNA, 20 bp, Campylobacter curvus
ggcgcaaccgaaagttgcgg

SEQ ID NO: 24301 - DNA, 20 bp, Anaerococcus tetradius
tcttcgcatgaagagcttat

SEQ ID NO: 24302 - DNA, 20 bp, Bacteroides uniformis
gacgtgatgccaatccctaa

SEQ ID NO: 24303 - DNA, 20 bp, Propionibacterium avidum
acccgcccgtcaagtcatga

SEQ ID NO: 24304 - DNA, 20 bp, Microbacterium hominis
cgggtctggtacacgcgcgc

SEQ ID NO: 24305 - DNA, 20 bp, Bacteroides merdae
tgaccggagtggaaacactc

SEQ ID NO: 24306 - DNA, 20 bp, Dolosicoccus paucivorans
acaaagatgcttatggtatc

SEQ ID NO: 24307 - DNA, 20 bp, Dolosicoccus paucivorans
aatcaatgattcgcatgttt

SEQ ID NO: 24308 - DNA, 20 bp, Alloiococcus otitis
aatgaaaggtggctctgcta

SEQ ID NO: 24309 - DNA, 20 bp, Proteus mirabilis
gttaatacccttgtcaattg

SEQ ID NO: 24310 - DNA, 20 bp, Brevibacillus centrosporus
atattttcttttgtttcatg

SEQ ID NO: 24311 - DNA, 20 bp, Prevotella loescheii
ggcccttcggggccgccgcg

SEQ ID NO: 24312 - DNA, 20 bp, Prevotella disiens
tgttttgcatgtaccattcg

SEQ ID NO: 24313 - DNA, 20 bp, Paenibacillus macerans
cttgtggagtaactgccagg

SEQ ID NO: 24314 - DNA, 20 bp, Prevotella buccae
tagggcaaaaccgggattgg

SEQ ID NO: 24315 - DNA, 20 bp, Moraxella atlantae
ggagaaaggagcttatgggt

SEQ ID NO: 24316 - DNA, 20 bp, Streptococcus infantarius
gtttttttttggtaagttac

SEQ ID NO: 24317 - DNA, 30 bp, Paenibacillus alvei
gagggagatgagaaaggcggagcaatctgc

SEQ ID NO: 24318 - DNA, 20 bp, Staphylococcus sp.
accccgaagccggtggagta

SEQ ID NO: 24319 - DNA, 20 bp, Finegoldia magna
gcggtttaataagtcgaatg

SEQ ID NO: 24320 - DNA, 20 bp, Bacteroides capillosus
gactaataccgtatgatatc

SEQ ID NO: 24321 - DNA, 20 bp, Eubacterium moniliforme
gttgcacttgaaactgtgtg

SEQ ID NO: 24322 - DNA, 20 bp, Oligella ureolytica
ttaactatcaagctagagta

SEQ ID NO: 24323 - DNA, 20 bp, Empedobacter brevis
ggcaacaagatgcgaatctc

SEQ ID NO: 24324 - DNA, 20 bp, Streptococcus thermophilus
ccttcatggtcatagctgtt

SEQ ID NO: 24325 - DNA, 20 bp, Sphingobacterium multivorum
gacgacgtccaggcattcat

SEQ ID NO: 24326 - DNA, 20 bp, Brevibacillus brevis
gagcgaatcttaaggtgctt

SEQ ID NO: 24327 - DNA, 20 bp, Providencia rustigianii
gatgctaatatcatcagcga

SEQ ID NO: 24328 - DNA, 20 bp, Streptococcus equi
cttgctacaattatctgtga

SEQ ID NO: 24329 - DNA, 20 bp, Pseudomonas oryzihabitans
ggcttacagcgaatacctgt

SEQ ID NO: 24330 - DNA, 20 bp, Finegoldia magna
tataatgcaaaactcgaaag

SEQ ID NO: 24331 - DNA, 20 bp, Vibrio harveyi
gagttccggatcggagtctg

SEQ ID NO: 24332 - DNA, 20 bp, Escherichia hermannii
gttggatcacctcctgtcat

SEQ ID NO: 24333 - DNA, 20 bp, Serratia grimesii
acatcacattgacgttactc

SEQ ID NO: 24334 - DNA, 20 bp, Escherichia fergusonii
tcagcttgctgattcgctga

SEQ ID NO: 24335 - DNA, 20 bp, Actinomyces neuii
acgaagtcgtaacaagggta

SEQ ID NO: 24336 - DNA, 20 bp, Finegoldia magna
agtcgaacgggatttagtaa

SEQ ID NO: 24337 - DNA, 20 bp, Clostridium clostridiiforme
cggcgcttcaagtcgtctgt

SEQ ID NO: 24338 - DNA, 20 bp, Streptococcus macacae
gcggtctggaaagtcagtag

SEQ ID NO: 24339 - DNA, 30 bp, Brevibacillus laterosporus
agagttttgcttcgcatgaagcgaaacgga

SEQ ID NO: 24340 - DNA, 20 bp, Empedobacter brevis
tgcaagccgaggggtacgat

SEQ ID NO: 24341 - DNA, 20 bp, Brevibacillus brevis
tgggatcaacctccttcaat

SEQ ID NO: 24342 - DNA, 20 bp, Haemophilus paraphrophilus
tgggacctttgggccacatg

SEQ ID NO: 24343 - DNA, 20 bp, Haemophilus influenzae
aaagtgcgggaccttcaggc

SEQ ID NO: 24344 - DNA, 30 bp, Anaerococcus prevotii
gatctcttcggagtgaccttaagtggatta

SEQ ID NO: 24345 - DNA, 20 bp, Staphylococcus succinus
atcaaactactatctggtcc

SEQ ID NO: 24346 - DNA, 20 bp, Oligella ureolytica
ctatcaagctagagtatgtc

SEQ ID NO: 24347 - DNA, 20 bp, Finegoldia magna
gttgataatacccgaagcct

SEQ ID NO: 24348 - DNA, 20 bp, Anaerococcus tetradius
aactcttcgcatgaagagct

SEQ ID NO: 24349 - DNA, 20 bp, Bacteroides stercoris
tttcccgcatgggatgatta

SEQ ID NO: 24350 - DNA, 20 bp, Micrococcus luteus
gggggggaccagcgattggg

SEQ ID NO: 24351 - DNA, 20 bp, Leuconostoc fallax
tttgaagatgttagagataa

SEQ ID NO: 24352 - DNA, 20 bp, Staphylococcus aureus
tctggctgaactgacgctga

SEQ ID NO: 24353 - DNA, 20 bp, Serratia plymuthica
tagatcagaatgctacggga

SEQ ID NO: 24354 - DNA, 20 bp, Myroides odoratimimus
actgcagagcttgaatagta

SEQ ID NO: 24355 - DNA, 20 bp, Clostridium clostridiiforme
cgggtgctctcaaagccgga

SEQ ID NO: 24356 - DNA, 20 bp, Clostridium clostridiiforme
gagagaagcgagcccgaaag

SEQ ID NO: 24357 - DNA, 20 bp, Anaerococcus tetradius
cacagggaagcgagactgcg

SEQ ID NO: 24358 - DNA, 20 bp, Moraxella atlantae
acccggtgtggtcgatgact

SEQ ID NO: 24359 - DNA, 20 bp, Staphylococcus schleiferi
tggagtaaccatttggaagc

SEQ ID NO: 24360 - DNA, 30 bp, Bacillus psychrosaccharolyticus
cgtagagatgtggaggaacccagtggcgaa

SEQ ID NO: 24361 - DNA, 20 bp, Leuconostoc gelidum
cgcatgatatcaagctctaa

SEQ ID NO: 24362 - DNA, 20 bp, Bacteroides stercoris
gcaacagaggtaggcggaat

SEQ ID NO: 24363 - DNA, 20 bp, Bacteroides stercoris
atcaaagcttgctttgatgg

SEQ ID NO: 24364 - DNA, 20 bp, Streptococcus macacae
gagtggaaagttctccaatt

SEQ ID NO: 24365 - DNA, 30 bp, Peptoniphilus asaccharolyticus
tgatagtaagcgaatctcaaaaagccgatc

SEQ ID NO: 24366 - DNA, 20 bp, Peptoniphilus asaccharolyticus
taataaacttgagtagtgaa

SEQ ID NO: 24367 - DNA, 20 bp, Micrococcus luteus
ctgagagggagaccggccac

SEQ ID NO: 24368 - DNA, 20 bp, Pediococcus acidilactici
tctgtactgcgctgaggctc

SEQ ID NO: 24369 - DNA, 20 bp, Anaerococcus prevotii
aactccaaagccaatcccag

SEQ ID NO: 24370 - DNA, 20 bp, Streptococcus equi
cgtagcttgctacaattatc

SEQ ID NO: 24371 - DNA, 20 bp, Paenibacillus azotofixans
ctctctcattaacttagcgg

SEQ ID NO: 24372 - DNA, 20 bp, Citrobacter freundii
atgccagccacactggaact

SEQ ID NO: 24373 - DNA, 20 bp, Leuconostoc fallax
aagatgttagagataatatt

SEQ ID NO: 24374 - DNA, 20 bp, Micrococcus luteus
tgtggggggagccgcgaggg

SEQ ID NO: 24375 - DNA, 20 bp, Bacteroides merdae
ggtggtgatttaagtcagcg

SEQ ID NO: 24376 - DNA, 20 bp, Leuconostoc lactis
gcaggacagaatgactaggg

SEQ ID NO: 24377 - DNA, 20 bp, Staphylococcus hyicus
ttttgaccagctctagagat

SEQ ID NO: 24378 - DNA, 20 bp, Corynebacterium auris
gtcgaacggaaggctcccgc

SEQ ID NO: 24379 - DNA, 20 bp, Streptococcus ferus
atgcaagtgagaacgcatga

SEQ ID NO: 24380 - DNA, 20 bp, Bacillus smithii
taccggataacatcttcctt

SEQ ID NO: 24381 - DNA, 20 bp, Gemella morbillorum
cgggtgagcacgcgtaggta

SEQ ID NO: 24382 - DNA, 20 bp, Prevotella oralis
ctgtcggccttttttggtcg

SEQ ID NO: 24383 - DNA, 20 bp, Brevibacillus choshinensis
cgagcgagtctccttcgggg

SEQ ID NO: 24384 - DNA, 20 bp, Serratia fonticola
ggaagggttcggtgttaata

SEQ ID NO: 24385 - DNA, 20 bp, Porphyromonas endodontalis
gggcagcattattttagctt

SEQ ID NO: 24386 - DNA, 20 bp, Streptococcus sobrinus
agaagcaacggcttcactat

SEQ ID NO: 24387 - DNA, 20 bp, Aerococcus viridans
cgcataatattttcttccgc

SEQ ID NO: 24388 - DNA, 20 bp, Fusobacterium mortiferum
gtgccccttcgggggaactt

SEQ ID NO: 24389 - DNA, 20 bp, Globicatella sanguinis
ctagaggaaatgttagtaga

SEQ ID NO: 24390 - DNA, 20 bp, Pediococcus acidilactici
ctgtactgcgctgaggctcg

SEQ ID NO: 24391 - DNA, 20 bp, Citrobacter youngae
agcaccggctaactccggcc

SEQ ID NO: 24392 - DNA, 20 bp, Vibrio hollisae
tcggggaggaaatccccagc

SEQ ID NO: 24393 - DNA, 20 bp, Anaerobiospirillum succiniciproducens
agcggatgcaccagaagtag

SEQ ID NO: 24394 - DNA, 20 bp, Propionibacterium avidum
atcgatgggctcttgcttgt

SEQ ID NO: 24395 - DNA, 20 bp, Moraxella atlantae
gctcatgaagccttagtggc

SEQ ID NO: 24396 - DNA, 20 bp, Pediococcus parvulus
ccgcataacaaaattaaccg

SEQ ID NO: 24397 - DNA, 20 bp, Brevibacillus choshinensis
tctccttcgggggctagcgg

SEQ ID NO: 24398 - DNA, 20 bp, Paenibacillus azotofixans
gaatcgtttagagataggcg

SEQ ID NO: 24399 - DNA, 20 bp, Leptotrichia buccalis
gagagctgcaaggcggtaac

SEQ ID NO: 24400 - DNA, 20 bp, Peptoniphilus indolicus
taggtgtcggaggatttcgg

SEQ ID NO: 24401 - DNA, 20 bp, Lactococcus raffinolactis
attggtacactgagagatgg

SEQ ID NO: 24402 - DNA, 30 bp, Bacteroides capillosus
tcgtatgcaaatacgatctaatctttaaaa

SEQ ID NO: 24403 - DNA, 20 bp, Empedobacter brevis
ggggtttcggcttcagtggc

SEQ ID NO: 24404 - DNA, 20 bp, Bacteroides merdae
gttacttgagtgtgtttgag

SEQ ID NO: 24405 - DNA, 20 bp, Streptococcus cristatus
atagtcaattaaaaggtgca

SEQ ID NO: 24406 - DNA, 20 bp, Staphylococcus schleiferi
aagcccgtcgaaagtgggac

SEQ ID NO: 24407 - DNA, 20 bp, Prevotella loescheii
ggggataaaggggcccacgt

SEQ ID NO: 24408 - DNA, 30 bp, Bacteroides stercoris
ggcgatacaatgtcagcggccaagcgaaag

SEQ ID NO: 24409 - DNA, 20 bp, Corynebacterium argentoratense
catcctttagtgtgtgatgg

SEQ ID NO: 24410 - DNA, 20 bp, Myroides odoratimimus
ttaccactcgcgttaaggcg

SEQ ID NO: 24411 - DNA, 20 bp, Citrobacter amalonaticus
agaatgaacgctgttggcag

SEQ ID NO: 24412 - DNA, 20 bp, Bacteroides capillosus
tagtgaggcccttcggggcg

SEQ ID NO: 24413 - DNA, 20 bp, Bacteroides stercoris
tccttgagtgcagcagaggt

SEQ ID NO: 24414 - DNA, 20 bp, Leclercia adecarboxylata
tcaccttccctttttccatt

SEQ ID NO: 24415 - DNA, 20 bp, Moellerella wisconsensis
atggcatctaaaactggtca

SEQ ID NO: 24416 - DNA, 30 bp, Paenibacillus pabuli
ccctctgatcggtacagagatgtatctttc

SEQ ID NO: 24417 - DNA, 30 bp, Streptococcus macacae
attgaaactgtcagacttgagtacagaagg

SEQ ID NO: 24418 - DNA, 20 bp, Kocuria varians
gctgggactggcgatctggg

SEQ ID NO: 24419 - DNA, 20 bp, Stenotrophomonas maltophilia
aaggaaggtgataaggctaa

SEQ ID NO: 24420 - DNA, 20 bp, Streptococcus macacae
tggagagagtggaaagttct

SEQ ID NO: 24421 - DNA, 20 bp, Kingella kingae
gcagcacgagtacttgtact

SEQ ID NO: 24422 - DNA, 20 bp, Bacillus schlegellii
aagcctttgggtggaagcct

SEQ ID NO: 24423 - DNA, 20 bp, Prevotella oralis
ggataaagttggggacgtgt

SEQ ID NO: 24424 - DNA, 20 bp, Prevotella loescheii
gttgtcggccccttgggtcg

SEQ ID NO: 24425 - DNA, 20 bp, Streptococcus macacae
cgcatgacagcttttatcgc

SEQ ID NO: 24426 - DNA, 20 bp, Anaerococcus prevotii
aagcctcggtggaagattac

SEQ ID NO: 24427 - DNA, 20 bp, Stenotrophomonas maltophilia
caaccccgcgagcagcaagc

SEQ ID NO: 24428 - DNA, 20 bp, Peptoniphilus asaccharolyticus
aagggctcaacccttgtaag

SEQ ID NO: 24429 - DNA, 30 bp, Brevibacillus brevis
agaacgccctagaaatagggaactctttgg

SEQ ID NO: 24430 - DNA, 20 bp, Dolosicoccus paucivorans
gcaacgtcgcgagaccaagc

SEQ ID NO: 24431 - DNA, 20 bp, Sporosarcina ureae
agacatgattttcccttcgg

SEQ ID NO: 24432 - DNA, 20 bp, Dolosicoccus paucivorans
agaagcaacgtcgcgagacc

SEQ ID NO: 24433 - DNA, 20 bp, Sphingobacterium multivorum
ggggggacgacgtccaggca

SEQ ID NO: 24434 - DNA, 20 bp, Eubacterium moniliforme
ctgccctgcaatgggggaca

SEQ ID NO: 24435 - DNA, 20 bp, Bacteroides capilosus
gctgagtcgcatgacactgg

SEQ ID NO: 24436 - DNA, 20 bp, Dolosicoccus paucivorans
gattcgcatgtttcattgac

SEQ ID NO: 24437 - DNA, 30 bp, Bacteroides thetaiotaomicron
aaatgaattatggggaaacccataggccgt

SEQ ID NO: 24438 - DNA, 20 bp, Streptococcus criceti
ggcaccactatcagatggac

SEQ ID NO: 24439 - DNA, 20 bp, Eggerthella lenta
gccgaacccgcaggggcgga

SEQ ID NO: 24440 - DNA, 20 bp, Lactococcus raffinolactis
tccagccctaagtgacgcag

SEQ ID NO: 24441 - DNA, 20 bp, Lactococcus raffinolactis
gtaccaattggtacactgag

SEQ ID NO: 24442 - DNA, 20 bp, Brevundimonas vesicularis
cggaataactcagggaaaac

SEQ ID NO: 24443 - DNA, 20 bp, Oligella urethralis
agaggtcttacgatccccct

SEQ ID NO: 24444 - DNA, 20 bp, Corynebacterium pilosum
tattccgggtttttccttct

SEQ ID NO: 24445 - DNA, 20 bp, Enterobacter gergoviae
gttcttgaggccgtggcttc

SEQ ID NO: 24446 - DNA, 20 bp, Paenibacillus macerans
tggtgtttaaggctgtggct

SEQ ID NO: 24447 - DNA, 20 bp, Bacillus schlegellii
cgggcggaagcctttgggtg

SEQ ID NO: 24448 - DNA, 20 bp, Paenibacillus validus
ttccttcgggatagcgttag

SEQ ID NO: 24449 - DNA, 20 bp, Weeksella virosa
tgaagttggcgaccgtaaca

SEQ ID NO: 24450 - DNA, 20 bp, Dolosicoccus paucivorans
gttactcgtttgacggtatc

SEQ ID NO: 24451 - DNA, 20 bp, Corynebacterium jeikeium
gctagggaagaagccttttg

SEQ ID NO: 24452 - DNA, 20 bp, Vibrio vulnificus
caccactttgggtcatgact

SEQ ID NO: 24453 - DNA, 20 bp, Sphingobacterium multivorum
gagtgcagagacgcactcgt

SEQ ID NO: 24454 - DNA, 20 bp, Anaerobiospirillum succiniciproducens
acttttagttgctatcagat

SEQ ID NO: 24455 - DNA, 20 bp, Staphylococcus capitis
ggtggagtatccttttggag

SEQ ID NO: 24456 - DNA, 20 bp, Arcanobacterium pyogenes
cgatgaagccggggcttttt

SEQ ID NO: 24457 - DNA, 20 bp, Anaerobiospirillum succiniciproducens
caccatgggagcggatgcac

SEQ ID NO: 24458 - DNA, 30 bp, Clostridium clostridiiforme
tggctgcatactgacgctgaagcgcgaaag

SEQ ID NO: 24459 - DNA, 20 bp, Bacteroides capilosus
aacctgtggcctgcatttga

SEQ ID NO: 24460 - DNA, 20 bp, Brevibacillus brevis
gtgcgtggaaagaacttcgg

SEQ ID NO: 24461 - DNA, 20 bp, Sporosarcina ureae
ggggttattcccgaataatc

SEQ ID NO: 24462 - DNA, 20 bp, Bacteroides capilosus
gtgtgaaaaccacgggctca

SEQ ID NO: 24463 - DNA, 20 bp, Campylobacter curvus
aaccctatatattgtttatt

SEQ ID NO: 24464 - DNA, 20 bp, Streptococcus ferus
catgcaagtgagaacgcatg

SEQ ID NO: 24465 - DNA, 30 bp, Arcanobacterium haemolyticum
atacgtgagtaacctgcccctttctcttgg

SEQ ID NO: 24466 - DNA, 20 bp, Providencia alcalifaciens
gttcccctgctttgctcctt

SEQ ID NO: 24467 - DNA, 20 bp, Gemella morbillorum
tagaacgctaaggagagctt

SEQ ID NO: 24468 - DNA, 20 bp, Streptococcus criceti
agagatagggagttacttcg

SEQ ID NO: 24469 - DNA, 20 bp, Stenotrophomonas maltophilia
atgcgggatctgcccgatac

SEQ ID NO: 24470 - DNA, 20 bp, Eubacterium moniliforme
gaatctcaaaaagccggccc

SEQ ID NO: 24471 - DNA, 20 bp, Cedecea lapagei
taggcctgcgcgacagcgtt

SEQ ID NO: 24472 - DNA, 20 bp, Bacillus laevolacticus
ggccggcgtgccctaataca

SEQ ID NO: 24473 - DNA, 20 bp, Peptoniphilus indolicus
aagttgagttggattagcgg

SEQ ID NO: 24474 - DNA, 20 bp, Bacteroides stercoris
tgagctggaaacagttcttt

SEQ ID NO: 24475 - DNA, 20 bp, Arcanobacterium pyogenes
tggtgcagctttcggggtgg

SEQ ID NO: 24476 - DNA, 20 bp, Oligella ureolytica
ttaagagattaaagtgtgct

SEQ ID NO: 24477 - DNA, 20 bp, Leptotrichia buccalis
aacctggtgttgtcagactg

SEQ ID NO: 24478 - DNA, 20 bp, Bacteroides stercoris
cgcaacccttgcgggtagtt

SEQ ID NO: 24479 - DNA, 20 bp, Collinsella aerofaciens
cgctggcggcgcgctaacac

SEQ ID NO: 24480 - DNA, 20 bp, Bacillus licheniformis
aaggttgttgtttgaccggc

SEQ ID NO: 24481 - DNA, 20 bp, Anaerobiospirillum succiniciproducens
ttctaaactggctttctaga

SEQ ID NO: 24482 - DNA, 20 bp, Streptococcus suis
aacagtattaaccgcatggt

SEQ ID NO: 24483 - DNA, 20 bp, Leptotrichia buccalis
tttggcagaatctgtgcttg

SEQ ID NO: 24484 - DNA, 20 bp, Granulicatella adiacens
tcgaacgagagcgaccgggc

SEQ ID NO: 24485 - DNA, 20 bp, Anaerococcus prevotii
actccaaagccaatcccagt

SEQ ID NO: 24486 - DNA, 20 bp, Micrococcus luteus
cgagggggggaccagcgatt

SEQ ID NO: 24487 - DNA, 30 bp, Paenibacillus azotofixans
agttgtgatggagcttgctcttgatcaact

SEQ ID NO: 24488 - DNA, 20 bp, Anaerococcus prevotii
accaaatgaaatcacatatg

SEQ ID NO: 24489 - DNA, 20 bp, Streptococcus macacae
agcttgctccacgagatcgg

SEQ ID NO: 24490 - DNA, 30 bp, Bacillus smithii
ttcacgggagccagccgccgaaggtggggc

SEQ ID NO: 24491 - DNA, 20 bp, Sporosarcina ureae
ctgggcggcatgcctaatac

SEQ ID NO: 24492 - DNA, 20 bp, Helcococcus ovis
taggaggcagacgtcgaagg

SEQ ID NO: 24493 - DNA, 20 bp, Propionibacterium granulosum
ttccagagatggttgtgcct

SEQ ID NO: 24494 - DNA, 20 bp, Sporosarcina ureae
gtaactgtcctgtaccttga

SEQ ID NO: 24495 - DNA, 20 bp, Sporosarcina pasteurii
agtttcttccttgttcgctc

SEQ ID NO: 24496 - DNA, 20 bp, Moellerella wisconsensis
cgggaggaaggcgttgatac

SEQ ID NO: 24497 - DNA, 20 bp, Escherichia hermannii
ctgtggtgacgacgtaacaa

SEQ ID NO: 24498 - DNA, 20 bp, Bacteroides uniformis
acacccttatcgatagttac

SEQ ID NO: 24499 - DNA, 20 bp, Cedecea lapagei
ctgcgcgacagcgttcaatc

SEQ ID NO: 24500 - DNA, 20 bp, Vibrio cholerae
cggcggtatcgctgccctct

SEQ ID NO: 24501 - DNA, 20 bp, Bacteroides stercoris
gacaacactgggatagcctt

SEQ ID NO: 24502 - DNA, 20 bp, Peptoniphilus asaccharolyticus
gagaatttcggtgccgcagt

SEQ ID NO: 24503 - DNA, 20 bp, Clostridium clostridiiforme
tattgccggttgctaccaga

SEQ ID NO: 24504 - DNA, 20 bp, Peptostreptococcus anaerobius
gtcgagcgcgtctgttttga

SEQ ID NO: 24505 - DNA, 20 bp, Prevotella oris
aacacgatccaatccttaaa

SEQ ID NO: 24506 - DNA, 20 bp, Propionibacterium propionicus
tatgagcttgcaaggcatct

SEQ ID NO: 24507 - DNA, 30 bp, Salmonella choleraesuis
aggaaggggataaggctaataaccttgttc

SEQ ID NO: 24508 - DNA, 20 bp, Bacteroides thetaiotaomicron
tttgaatattttggaaacag

SEQ ID NO: 24509 - DNA, 20 bp, Haemophilus influenzae
gggaccttcaggccacatgc

SEQ ID NO: 24510 - DNA, 20 bp, Corynebacterium group ANF
cccgaagccgcttgctccac

SEQ ID NO: 24511 - DNA, 20 bp, Streptococcus acidominimus
gcagaaggggggagtggaat

SEQ ID NO: 24512 - DNA, 20 bp, Providencia alcalifaciens
tgatattagcatcaacgcct

SEQ ID NO: 24513 - DNA, 20 bp, Brevibacillus reuszeri
ggtttttggaccgcatggtc

SEQ ID NO: 24514 - DNA, 20 bp, Corynebacterium xerosis
acagggacgaagcgttatgt

SEQ ID NO: 24515 - DNA, 20 bp, Kocuria rosea
atgcagcaacgctgcggtga

SEQ ID NO: 24516 - DNA, 20 bp, Salmonella typhi
ctatcacatgcaagtcgcga

SEQ ID NO: 24517 - DNA, 20 bp, Empedobacter brevis
tcccgcgtgtaggacgactg

SEQ ID NO: 24518 - DNA, 20 bp, Leptotrichia buccalis
gagacgctgcgggagagcct

SEQ ID NO: 24519 - DNA, 20 bp, Streptococcus urinalis
gcacaagaccaaggagttgc

SEQ ID NO: 24520 - DNA, 20 bp, Microbacterium hominis
ggtacacgcgcgcccgtcaa

SEQ ID NO: 24521 - DNA, 20 bp, Streptococcus ratti
cagagacgaacgtgtgtgag

SEQ ID NO: 24522 - DNA, 20 bp, Aeromonas sobria
gatcatggctcagattggaa

SEQ ID NO: 24523 - DNA, 20 bp, Eremococcus coleocola
tgagcgggggataacggtcg

SEQ ID NO: 24524 - DNA, 20 bp, Finegoldia magna
gtaaagcattggaaactgat

SEQ ID NO: 24525 - DNA, 30 bp, Bacteroides capillosus
atacggggataaagttagggacgtgtccct

SEQ ID NO: 24526 - DNA, 20 bp, Clostridium clostridiiforme
gcttttggagagacttgtgt

SEQ ID NO: 24527 - DNA, 20 bp, Streptococcus macacae
ataggagcttaaaaggtgca

SEQ ID NO: 24528 - DNA, 20 bp, Clostridium clostridiiforme
cctcataagccggaaggtga

SEQ ID NO: 24529 - DNA, 20 bp, Anaerococcus tetradius
gatatttagattccttcggg

SEQ ID NO: 24530 - DNA, 20 bp, Brevibacterium casei
tggacagagagaggcgaacc

SEQ ID NO: 24531 - DNA, 20 bp, Proteus mirabilis
tgaaccgtggcttctggagg

SEQ ID NO: 24532 - DNA, 20 bp, Staphylococcus capitis
gtcttgacggacctaatcag

SEQ ID NO: 24533 - DNA, 20 bp, Bacteroides uniformis
ctgggggactctgtcgagac

SEQ ID NO: 24534 - DNA, 20 bp, Streptococcus anginosus
agttttgtcatggttcagga

SEQ ID NO: 24535 - DNA, 20 bp, Haemophilus influenzae
tagtcgagagatgaaagtgc

SEQ ID NO: 24536 - DNA, 20 bp, Clostridium clostridiiforme
tgctctcaaagccggaggcc

SEQ ID NO: 24537 - DNA, 20 bp, Geobacillus thermoglucosidasius
gggggactgcccggttacaa

SEQ ID NO: 24538 - DNA, 20 bp, Gemella morbillorum
ttaaaaggtgcaattgctat

SEQ ID NO: 24539 - DNA, 20 bp, Prevotella melaninogenica
ccaggaatgaacgctagagc

SEQ ID NO: 24540 - DNA, 20 bp, Clostridium clostridiiforme
gtttgctggctgcatactga

SEQ ID NO: 24541 - DNA, 30 bp, Suttonella indologenes
gcagcttgctgcggacctagtggcggacgg

SEQ ID NO: 24542 - DNA, 30 bp, Paenibacillus alvei
cttgggtcgcatccaaaactgcatagcttg

SEQ ID NO: 24543 - DNA, 20 bp, Staphylococcus schleiferi
gcgaacggacaggagcttgc

SEQ ID NO: 24544 - DNA, 20 bp, Bacillus coagulans
cgagcggacttgttagaagc

SEQ ID NO: 24545 - DNA, 20 bp, Streptococcus macacae
ggtacaacagtatcgctaag

SEQ ID NO: 24546 - DNA, 20 bp, Aerococcus urinae
aaaggtcaccgcatggtgac

SEQ ID NO: 24547 - DNA, 20 bp, Arthrobacter globiformis
cgaacgatgaagcccaggct

SEQ ID NO: 24548 - DNA, 20 bp, Streptococcus sanguinis
agggacggctaactccggtg

SEQ ID NO: 24549 - DNA, 20 bp, Bacteroides merdae
cttgagtgtgtttgaggtag

SEQ ID NO: 24550 - DNA, 20 bp, Campylobacter curvus
caaccgaaagttgcggtgtg

SEQ ID NO: 24551 - DNA, 20 bp, Eubacterium moniliforme
agagctgtcgaaggtgagat

SEQ ID NO: 24552 - DNA, 20 bp, Myroides odoratimimus
ctgcagagcttgaataatat

SEQ ID NO: 24553 - DNA, 20 bp, Vibrio metschnikovii
accgcatgatagcctacggc

SEQ ID NO: 24554 - DNA, 20 bp, Granulicatella elegans
agagaaggaaaagaggcttc

SEQ ID NO: 24555 - DNA, 20 bp, Arcanobacterium pyogenes
agaagaagcatttttgtgac

SEQ ID NO: 24556 - DNA, 20 bp, Microbacterium hominis
tggccctccccttgtggagg

SEQ ID NO: 24557 - DNA, 20 bp, Alloiococcus otitis
tatggatagcctcgcggcgc

SEQ ID NO: 24558 - DNA, 20 bp, Achromobacter xylosoxidans
cgtagcttaataccggcata

SEQ ID NO: 24559 - DNA, 20 bp, Anaerobiospirillum succiniciproducens
gtaggaatcttttagagata

SEQ ID NO: 24560 - DNA, 20 bp, Bacteroides thetaiotaomicron
atagccgggggtactgaagt

SEQ ID NO: 24561 - DNA, 20 bp, Salmonella typhi
caggcagcagcttgcttgct

SEQ ID NO: 24562 - DNA, 20 bp, Prevotella loescheii
ttggcggtgaaggatgggga

SEQ ID NO: 24563 - DNA, 20 bp, Anaerococcus prevotii
gaaacacatgtttcaacggt

SEQ ID NO: 24564 - DNA, 20 bp, Eubacterium moniliforme
caggatgagctcgcgtccca

SEQ ID NO: 24565 - DNA, 20 bp, Corynebacterium pseudotuberculosis
gttcgaacggaaaggcccct

SEQ ID NO: 24566 - DNA, 20 bp, Anaerobiospirillum succiniciproducens
caaatcagaatgttgcggga

SEQ ID NO: 24567 - DNA, 20 bp, Vibrio cholerae
tcctcccggaaggtaaacta

SEQ ID NO: 24568 - DNA, 20 bp, Bacteroides thetaiotaomicron
atatttcccgcatgggtttt

SEQ ID NO: 24569 - DNA, 20 bp, Propionibacterium acnes
tcgtacaagataaaagtacc

SEQ ID NO: 24570 - DNA, 20 bp, Finegoldia magna
gaagattactaatgagagtg

SEQ ID NO: 24571 - DNA, 20 bp, Tetragenococcus halophilus
tgatggctggccccgcggtg

SEQ ID NO: 24572 - DNA, 20 bp, Unknown Organism
  oligonucleotide from CDC group EO-2
cacttctactacggaatagc

SEQ ID NO: 24573 - DNA, 20 bp, Prevotella bivia
gactaataccttatgtattc

SEQ ID NO: 24574 - DNA, 20 bp, Myroides odoratus
gctgcctagggtaaaaccta

SEQ ID NO: 24575 - DNA, 20 bp, Haemophilus haemolyticus
acagagggtggcgatgccgc

SEQ ID NO: 24576 - DNA, 20 bp, Streptococcus criceti
taatgacttgaaaggtgcaa

SEQ ID NO: 24577 - DNA, 20 bp, Neisseria subflava
caaggggccgcttaccacgg

SEQ ID NO: 24578 - DNA, 20 bp, Anaerococcus prevotii
cctctctttaagagacatcc

SEQ ID NO: 24579 - DNA, 20 bp, Morganella morganii
tggcaattgacgttaccgac

SEQ ID NO: 24580 - DNA, 20 bp, Microbacterium hominis
cgggtgaaggcccagcttgc

SEQ ID NO: 24581 - DNA, 20 bp, Anaerococcus tetradius
tcgaacgatgaagatattta

SEQ ID NO: 24582 - DNA, 20 bp, Gemella morbillorum
gtgagcacgcgtaggtaccc

SEQ ID NO: 24583 - DNA, 20 bp, Finegoldia magna
acgggatttagtaaacagaa

SEQ ID NO: 24584 - DNA, 20 bp, Kocuria rosea
cccgtcaagtcacgaaaagt

SEQ ID NO: 24585 - DNA, 20 bp, Streptococcus vestibularis
acaataggtgacacatgtca

SEQ ID NO: 24586 - DNA, 20 bp, Anaerococcus prevotii
tacttagttaccagcgaata

SEQ ID NO: 24587 - DNA, 20 bp, Brevibacillus centrosporus
ttttgtttcatggcaaaagc

SEQ ID NO: 24588 - DNA, 20 bp, Corynebacterium coyleae
gaaaggcctctgcttgcaga

SEQ ID NO: 24589 - DNA, 20 bp, Clostridium innocuum
aagtttcaaggaagcttgct

SEQ ID NO: 24590 - DNA, 20 bp, Streptococcus equi
ttatctgtgagtcgcgaacg

SEQ ID NO: 24591 - DNA, 20 bp, Corynebacterium pilosum
ttccagggtctcccaattgc

SEQ ID NO: 24592 - DNA, 20 bp, Prevotella oralis
cttttttggtcggtggccaa

SEQ ID NO: 24593 - DNA, 20 bp, Finegoldia magna
tgatataatgcaaaactcga

SEQ ID NO: 24594 - DNA, 20 bp, Anaerococcus prevotii
gatttagtagacagaagcct

SEQ ID NO: 24595 - DNA, 20 bp, Nocardia asteroides
tacctaaagagagtggacgt

SEQ ID NO: 24596 - DNA, 20 bp, Streptococcus infantarius
agggcgggtggatcacctcc

SEQ ID NO: 24597 - DNA, 20 bp, Bacteroides thetaiotaomicron
tttatattaaagaaattcgg

SEQ ID NO: 24598 - DNA, 20 bp, Stenotrophomonas maltophilia
ctactggaaacttacgctaa

SEQ ID NO: 24599 - DNA, 20 bp, Brevibacillus brevis
caacctccttcaattggttc

SEQ ID NO: 24600 - DNA, 20 bp, Suttonella indologenes
ggcccaatgcttaacacatg

SEQ ID NO: 24601 - DNA, 20 bp, Shewanella putrefaciens
gatcagaatgccacgggaat

SEQ ID NO: 24602 - DNA, 20 bp, Vibrio metschnikovii
agcctacggctcaaagaggg

SEQ ID NO: 24603 - DNA, 20 bp, Moraxella atlantae
aaaggagcttatgggtttct

SEQ ID NO: 24604 - DNA, 20 bp, Dermacoccus nishinomiyaensis
acgaccgatctccgcatgga

SEQ ID NO: 24605 - DNA, 20 bp, Corynebacterium ulcerans
cccttgtggttgtatacagg

SEQ ID NO: 24606 - DNA, 20 bp, Streptococcus macacae
aaagttctccaattgacggt

SEQ ID NO: 24607 - DNA, 20 bp, Corynebacterium group F
gggacgaagcatttttgtga

SEQ ID NO: 24608 - DNA, 20 bp, Clostridium limosum
cataacatcatttcaatgca

SEQ ID NO: 24609 - DNA, 20 bp, Prevotella loescheii
tttggacgaaaggtttggcg

SEQ ID NO: 24610 - DNA, 20 bp, Citrobacter amalonaticus
gtgaatggttaataaccatt

SEQ ID NO: 24611 - DNA, 20 bp, Bacteroides capilosus
ccacgggctcaacctgtggc

SEQ ID NO: 24612 - DNA, 20 bp, Leptotrichia buccalis
gaacgctgacatgtaatgct

SEQ ID NO: 24613 - DNA, 20 bp, Bacteroides thetaiotaomicron
tggtttgcttgcaaaccaaa

SEQ ID NO: 24614 - DNA, 20 bp, Anaerococcus tetradius
ctactgtattacaggtggtg

SEQ ID NO: 24615 - DNA, 20 bp, Streptococcus cristatus
gcatgatagtcaattaaaag

SEQ ID NO: 24616 - DNA, 20 bp, Citrobacter werkmanii
cgctgcgcgcgcagcgccta

SEQ ID NO: 24617 - DNA, 20 bp, Propionibacterium propionicus
cttgcaaggcatcttgtggg

SEQ ID NO: 24618 - DNA, 20 bp, Bacteroides stercoris
catagttttcccgcatggga

SEQ ID NO: 24619 - DNA, 20 bp, Clostridium innocuum
gaagtaggaccgatgactgg

SEQ ID NO: 24620 - DNA, 20 bp, Providencia stuartii
ggcgttgatgttaataccat

SEQ ID NO: 24621 - DNA, 20 bp, Propionibacterium propionicus
cccattttttgggggggagc

SEQ ID NO: 24622 - DNA, 20 bp, Clostridium clostridiiforme
aagagtgtccggtgaggagg

SEQ ID NO: 24623 - DNA, 20 bp, Vibrio hollisae
tgggggatgacagtacctga

SEQ ID NO: 24624 - DNA, 20 bp, Streptococcus macacae
gttaaaagcattggcttaac

SEQ ID NO: 24625 - DNA, 20 bp, Clostridium clostridiiforme
accatccgagtcgggtgctc

SEQ ID NO: 24626 - DNA, 20 bp, Stenotrophomonas maltophilia
tcagcggggaaggaaggtga

SEQ ID NO: 24627 - DNA, 20 bp, Streptococcus macacae
gggggataaggattggaaac

SEQ ID NO: 24628 - DNA, 20 bp, Bacteroides capillosus
gcgggagcaaaactgacgct

SEQ ID NO: 24629 - DNA, 20 bp, Anaerobiospirillum succiniciproducens
ctgttttaggcctaatacat

SEQ ID NO: 24630 - DNA, 20 bp, Aerococcus viridans
tacagcgagtcgcgaacccg

SEQ ID NO: 24631 - DNA, 20 bp, Prevotella melaninogenica
cgggtcccagttcgggactg

SEQ ID NO: 24632 - DNA, 20 bp, Propionibacterium propionicus
gggttggaaagatttttttt

SEQ ID NO: 24633 - DNA, 20 bp, Providencia alcalifaciens
aacggtagctaatccgcaat

SEQ ID NO: 24634 - DNA, 30 bp, Eubacterium moniliforme
tgcgtaggtggccatgtaagtcaggtgtga

SEQ ID NO: 24635 - DNA, 20 bp, Leptotrichia buccalis
tggagtattggagaggtgga

SEQ ID NO: 24636 - DNA, 20 bp, Salmonella typhi
gtcgcgacggtatcaggcag

SEQ ID NO: 24637 - DNA, 20 bp, Abiotrophia defectiva
gcttgcactaggtcaaggtg

SEQ ID NO: 24638 - DNA, 20 bp, Streptococcus macacae
gagagtggaaagttctccaa

SEQ ID NO: 24639 - DNA, 20 bp, Eubacterium moniliforme
tttgtcctatgggacgaaaa

SEQ ID NO: 24640 - DNA, 20 bp, Clostridium clostridiiforme
cggaggcctaaccgcgagga

SEQ ID NO: 24641 - DNA, 20 bp, Propionibacterium propionicus
catcttgtgggttggaaaga

SEQ ID NO: 24642 - DNA, 20 bp, Clostridium clostridiiforme
gtgtccggtgaggagggtga

SEQ ID NO: 24643 - DNA, 20 bp, Peptoniphilus indolicus
ggtgtcggaggatttcggtg

SEQ ID NO: 24644 - DNA, 30 bp, Rothia dentocariosa
cacgccgccagcgtctcatcctgaggccat

SEQ ID NO: 24645 - DNA, 20 bp, Eubacterium moniliforme
atgggacgaaaaaaatgacg

SEQ ID NO: 24646 - DNA, 20 bp, Bacteroides thetaiotaomicron
ttgaatattttggaaacagg

SEQ ID NO: 24647 - DNA, 20 bp, Pediococcus inopinatus
ttcgttgaatgatttagaga

SEQ ID NO: 24648 - DNA, 20 bp, Peptoniphilus indolicus
gtgctaggtgtcggaggatt

SEQ ID NO: 24649 - DNA, 20 bp, Pseudomonas mendocina
gagtgcccccccgacgtgct

SEQ ID NO: 24650 - DNA, 20 bp, Leptotrichia buccalis
ttggcagaatctgtgcttgc

SEQ ID NO: 24651 - DNA, 20 bp, Myroides odoratimimus
tcgaggggtagaaaaagctt

SEQ ID NO: 24652 - DNA, 20 bp, Corynebacterium seminale
tgtggctcatgtacaggtgg

SEQ ID NO: 24653 - DNA, 30 bp, Alloiococcus otitis
atgaaaggtggctctgctaccgcttatgga

SEQ ID NO: 24654 - DNA, 20 bp, Leptotrichia buccalis
tacagggctggagtattgga

SEQ ID NO: 24655 - DNA, 20 bp, Enterococcus dispar
aacgctgtctggcgtgccta

SEQ ID NO: 24656 - DNA, 20 bp, Prevotella loescheii
gggtgctcaacatccggctt

SEQ ID NO: 24657 - DNA, 20 bp, Citrobacter amalonaticus
gaagggtgaatggttaataa

SEQ ID NO: 24658 - DNA, 20 bp, Microbacterium hominis
taatacgatcccgggtctgg

SEQ ID NO: 24659 - DNA, 20 bp, Sphingobacterium multivorum
tcaacagttcgcatgttcgg

SEQ ID NO: 24660 - DNA, 20 bp, Anaerococcus prevotii
atttagtagacagaagcctc

SEQ ID NO: 24661 - DNA, 20 bp, Paenibacillus apiarius
gctgacggagtgcttgcact

SEQ ID NO: 24662 - DNA, 20 bp, Clostridium clostridiiforme
acttatgttgattggaacat

SEQ ID NO: 24663 - DNA, 20 bp, Eremococcus coleocola
agccaagaacacccctagta

SEQ ID NO: 24664 - DNA, 20 bp, Psychrobacter phenylpyruvicus
aataagctattgtctctcat

SEQ ID NO: 24665 - DNA, 20 bp, Brevibacterium linens
gacgaccgaaggcatctttg

SEQ ID NO: 24666 - DNA, 20 bp, Bacteroides capilosus
tgggtttcttagtggcggac

SEQ ID NO: 24667 - DNA, 20 bp, Anaerobiospirillum succiniciproducens
aggaatcttttagagataag

SEQ ID NO: 24668 - DNA, 20 bp, Providencia alcalifaciens
aaggagcaaagcaggggaac

SEQ ID NO: 24669 - DNA, 20 bp, Clostridium clostridiiforme
ggtgagtaaagcacaaggac

SEQ ID NO: 24670 - DNA, 20 bp, Clostridium clostridiiforme
taagccggaaggtgaaaagc

SEQ ID NO: 24671 - DNA, 30 bp, Corynebacterium group F1
ctcgagtggcgacacgggttgagtaacacg

SEQ ID NO: 24672 - DNA, 20 bp, Anaerococcus tetradius
aacgatgaagatatttagat

SEQ ID NO: 24673 - DNA, 20 bp, Bacteroides ovatus
tgctgaggagctctagagag

SEQ ID NO: 24674 - DNA, 20 bp, Leptotrichia buccalis
atacctgatacaattgccag

SEQ ID NO: 24675 - DNA, 20 bp, Campylobacter jejuni
ggcgtgctaatacatgcagt

SEQ ID NO: 24676 - DNA, 20 bp, Oligella urethralis
tctcttgaagcttccgggca

SEQ ID NO: 24677 - DNA, 20 bp, Streptococcus iniae
taatccaaagagttgcgaac

SEQ ID NO: 24678 - DNA, 30 bp, Streptococcus ferus
tatgctttggaaactgtagggcttgagtgc

SEQ ID NO: 24679 - DNA, 20 bp, Paenibacillus alvei
gtcttgacatctgaatgcaa

SEQ ID NO: 24680 - DNA, 20 bp, Eubacterium moniliforme
ccgcatggtttagaggtaaa

SEQ ID NO: 24681 - DNA, 20 bp, Clostridium clostridiiforme
tcctatcaggcagttggtga

SEQ ID NO: 24682 - DNA, 20 bp, Sphingobacterium multivorum
accgcataacatatgtgacc

SEQ ID NO: 24683 - DNA, 20 bp, Bacillus coagulans
ttgcttctatcaagttagcg

SEQ ID NO: 24684 - DNA, 20 bp, Lactococcus raffinolactis
gaaagtaccaattggtacac

SEQ ID NO: 24685 - DNA, 20 bp, Bordetella trematum
aaacggcgccagctaatacc

SEQ ID NO: 24686 - DNA, 20 bp, Bacteroides capilosus
ctcggagtggggaataacag

SEQ ID NO: 24687 - DNA, 30 bp, Streptococcus sanguinis
gtgagagtggaaagttcacactgtgaccgg

SEQ ID NO: 24688 - DNA, 20 bp, Bacillus coagulans
actttcgctcgcatgagcgg

SEQ ID NO: 24689 - DNA, 20 bp, Haemophilus parainfluenzae
ttaccacgggatgattcatg

SEQ ID NO: 24690 - DNA, 20 bp, Leptotrichia buccalis
tacagagagctgcaaggcgg

SEQ ID NO: 24691 - DNA, 20 bp, Unknown Organism
  oligonucleotide from CDC group VB-3
ggggacggttacccggagtg

SEQ ID NO: 24692 - DNA, 20 bp, Capnocytophaga sp.
ctgaggcggtgaaagatgag

SEQ ID NO: 24693 - DNA, 20 bp, Bacteroides merdae
cgtgaaggaagaaggatcta

SEQ ID NO: 24694 - DNA, 20 bp, Brevibacillus laterosporus
ttgcttcgcatgaagcgaaa

SEQ ID NO: 24695 - DNA, 20 bp, Corynebacterium group F1
ctgccctgtacttcgggtat

SEQ ID NO: 24696 - DNA, 20 bp, Bacteroides thetaiotaomicron
caagccatgatagccggggg

SEQ ID NO: 24697 - DNA, 20 bp, Vagococcus fluvialis
tcccgcatgggagaataata

SEQ ID NO: 24698 - DNA, 20 bp, Streptococcus macacae
gttaggtcctaaggggctta

SEQ ID NO: 24699 - DNA, 20 bp, Bacillus licheniformis
ggaaggttgttgtttgaccg

SEQ ID NO: 24700 - DNA, 20 bp, Dolosigranulum pigrum
tagccgttcggaaggtgcgg

SEQ ID NO: 24701 - DNA, 20 bp, Streptococcus ratti
accgcataagagagtttaac

SEQ ID NO: 24702 - DNA, 20 bp, Peptoniphilus asaccharolyticus
aaaatcaaacagaacccttc

SEQ ID NO: 24703 - DNA, 20 bp, Granulicatella elegans
atgacccagagaaggaaaag

SEQ ID NO: 24704 - DNA, 20 bp, Bacillus coagulans
cttctatcaagttagcggcg

SEQ ID NO: 24705 - DNA, 20 bp, Pediococcus acidilactici
gtctgtactgcgctgaggct

SEQ ID NO: 24706 - DNA, 20 bp, Sphingobacterium multivorum
ccgcataacatatgtgaccg

SEQ ID NO: 24707 - DNA, 20 bp, Brevibacillus brevis
tcgagcgagtgtcttcggag

SEQ ID NO: 24708 - DNA, 20 bp, Unknown Organism
  oligonucleotide from CDC group EO-2
tgtgccacttctactacgga

SEQ ID NO: 24709 - DNA, 20 bp, Proteus mirabilis
ccgtggcttctggaggctaa

SEQ ID NO: 24710 - DNA, 20 bp, Paenibacillus pabuli
tccctctgatcggtacagag

SEQ ID NO: 24711 - DNA, 20 bp, Prevotella loescheii
tttatgcggggataaagggg

SEQ ID NO: 24712 - DNA, 20 bp, Streptococcus sobrinus
tttaaaagaagcaacggctt

SEQ ID NO: 24713 - DNA, 20 bp, Clostridium clostridiiforme
tgacatccccctgacgggcc

SEQ ID NO: 24714 - DNA, 20 bp, Eubacterium moniliforme
ctgcaatgggggacaacagt

SEQ ID NO: 24715 - DNA, 20 bp, Edwardsiella tarda
tgctttctctcgctgacgag

SEQ ID NO: 24716 - DNA, 20 bp, Anaerococcus tetradius
aagttagtcaatcgcatggt

SEQ ID NO: 24717 - DNA, 20 bp, Propionibacterium granulosum
ggatcgggagcttccagaga

SEQ ID NO: 24718 - DNA, 20 bp, Clostridium clostridiiforme
gtcgggggacaaagtccttc

SEQ ID NO: 24719 - DNA, 20 bp, Bacteroides thetaiotaomicron
agtaccgcaaggagcgtcta

SEQ ID NO: 24720 - DNA, 20 bp, Streptococcus urinalis
gctgaggtcatgtgcttgca

SEQ ID NO: 24721 - DNA, 20 bp, Eubacterium moniliforme
agcaatctgccctgcaatgg

SEQ ID NO: 24722 - DNA, 20 bp, Sphingobacterium multivorum
acgacgtccaggcattcatg

SEQ ID NO: 24723 - DNA, 20 bp, Ochrobactrum intermedium
atcactagggaataactcag

SEQ ID NO: 24724 - DNA, 20 bp, Peptoniphilus asaccharolyticus
cccttcggggtgaagtttgg

SEQ ID NO: 24725 - DNA, 20 bp, Pediococcus parvulus
cgcactttcgttaattgatt

SEQ ID NO: 24726 - DNA, 20 bp, Oligella urethralis
caaaccagctacagatcccg

SEQ ID NO: 24727 - DNA, 20 bp, Corynebacterium group ANF
ggtgtggtgtcgaaggtggg

SEQ ID NO: 24728 - DNA, 20 bp, Globicatella sanguinis
aaccataactagaacttgtt

SEQ ID NO: 24729 - DNA, 30 bp, Paenibacillus apiarius
atacatgcaagtcgagcggagctgacggag

SEQ ID NO: 24730 - DNA, 20 bp, Moraxella atlantae
agcttatgggtttctgctat

SEQ ID NO: 24731 - DNA, 20 bp, Citrobacter amalonaticus
ctcagaatgaacgctgttgg

SEQ ID NO: 24732 - DNA, 20 bp, Staphylococcus carnosus
gggtgaagtcgtaacaaaat

SEQ ID NO: 24733 - DNA, 20 bp, Pseudomonas mendocina
taccctgcagttttgacgtt

SEQ ID NO: 24734 - DNA, 20 bp, Leptotrichia buccalis
aggcggtaacgccaagcgaa

SEQ ID NO: 24735 - DNA, 20 bp, Enterobacter amnigenus
gttttcgggtgacgagcggc

SEQ ID NO: 24736 - DNA, 20 bp, Brevibacterium linens
accggatatgacgaccgaag

SEQ ID NO: 24737 - DNA, 20 bp, Brevibacterium epidermidis
ccgtcggacgcatgtctggt

SEQ ID NO: 24738 - DNA, 20 bp, Bacteroides capilosus
ggtttcttagtggcggacgg

SEQ ID NO: 24739 - DNA, 20 bp, Streptococcus urinalis
tgttaggaacttaaaaggag

SEQ ID NO: 24740 - DNA, 20 bp, Clostridium innocuum
cgtcgaagtaggaccgatga

SEQ ID NO: 24741 - DNA, 20 bp, Peptoniphilus asaccharolyticus
tcaaacagaacccttcgggg

SEQ ID NO: 24742 - DNA, 20 bp, Vibrio cholerae
aaggtgatccaccgccaggt

SEQ ID NO: 24743 - DNA, 20 bp, Vibrio harveyi
gttccggatcggagtctgca

SEQ ID NO: 24744 - DNA, 20 bp, Prevotella corporis
gtcagaggagcaagctctgt

SEQ ID NO: 24745 - DNA, 30 bp, Leuconostoc fallax
aatacatgcaagtcgaacgctagtcgcgga

SEQ ID NO: 24746 - DNA, 20 bp, Paenibacillus apiarius
tcgagcggagctgacggagt

SEQ ID NO: 24747 - DNA, 20 bp, Enterococcus durans
gtagccgatcggaaggtgcg

SEQ ID NO: 24748 - DNA, 20 bp, Helcococcus kunzii
ggaaaaaggaaagtagcgaa

SEQ ID NO: 24749 - DNA, 20 bp, Bacteroides stercoris
cttaaattgcaactgactga

SEQ ID NO: 24750 - DNA, 20 bp, Neisseria mucosa
ggttggggatccaccctccc

SEQ ID NO: 24751 - DNA, 20 bp, Bacteroides capillosus
gaacgatctagagatagtga

SEQ ID NO: 24752 - DNA, 20 bp, Delftia acidovorans
acccggcggggttcgtgact

SEQ ID NO: 24753 - DNA, 20 bp, Brevibacillus centrosporus
tttcttttgtttcatggcaa

SEQ ID NO: 24754 - DNA, 20 bp, Eubacterium moniliforme
tagaggtaaaaggattcatt

SEQ ID NO: 24755 - DNA, 20 bp, Citrobacter freundii
aagggtaaaccgtaggggga

SEQ ID NO: 24756 - DNA, 20 bp, Gemella sanguinis
acctttggttggacacagat

SEQ ID NO: 24757 - DNA, 20 bp, Enterobacter cancerogenus
aggggaacctgcggttggta

SEQ ID NO: 24758 - DNA, 20 bp, Vibrio cholerae
gaaggtgatccaccgccagg

SEQ ID NO: 24759 - DNA, 20 bp, Klebsiella pneumoniae
gataaggttaataacctcgg

SEQ ID NO: 24760 - DNA, 20 bp, Clostridium clostridiiforme
tcataagccggaaggtgaaa

SEQ ID NO: 24761 - DNA, 20 bp, Streptococcus infantarius
agctctggcgccgtgctctc

SEQ ID NO: 24762 - DNA, 20 bp, Citrobacter youngae
gacgttactcgcagaagcaa

SEQ ID NO: 24763 - DNA, 20 bp, Bacillus coagulans
tttcgctcgcatgagcggat

SEQ ID NO: 24764 - DNA, 20 bp, Providencia stuartii
cgttgatgttaataccatca

SEQ ID NO: 24765 - DNA, 20 bp, Bacillus schlegellii
ccttcgggcggaagcccgtc

SEQ ID NO: 24766 - DNA, 20 bp, Clostridium barati
agggtcagcgattggggtcg

SEQ ID NO: 24767 - DNA, 20 bp, Gemella morbillorum
aaggtgcaattgctatcgct

SEQ ID NO: 24768 - DNA, 20 bp, Leptotrichia buccalis
atgaacgctgacatgtaatg

SEQ ID NO: 24769 - DNA, 20 bp, Streptococcus macacae
tgtaagagcggaaagtttac

SEQ ID NO: 24770 - DNA, 20 bp, Abiotrophia defectiva
tggaatcacatgattccgtg

SEQ ID NO: 24771 - DNA, 20 bp, Streptococcus gallolyticus
tgaagtcgtaacaaaaaacc

SEQ ID NO: 24772 - DNA, 20 bp, Haemophilus paraphrophilus
ggggttgaactttaagtttg

SEQ ID NO: 24773 - DNA, 20 bp, Unknown Organism
  oligonucleotide from CDC group EO-2
caaggtcggaggcgagggac

SEQ ID NO: 24774 - DNA, 20 bp, Dolosicoccus paucivorans
tacaacgagaagcaacgtcg

SEQ ID NO: 24775 - DNA, 20 bp, Citrobacter freundii
tagcagagatgctaacgtgc

SEQ ID NO: 24776 - DNA, 30 bp, Eubacterium moniliforme
gcagcgacctcgtaagagtaagcgaatctc

SEQ ID NO: 24777 - DNA, 20 bp, Bacteroides capillosus
ctaataccgtatgatatcct

SEQ ID NO: 24778 - DNA, 20 bp, Leuconostoc fallax
atgttagagataatattgtt

SEQ ID NO: 24779 - DNA, 20 bp, Campylobacter concisus
gtgagcgaatcgctatcaaa

SEQ ID NO: 24780 - DNA, 20 bp, Bacteroides stercoris
tcgaggggcagcatcatcaa

SEQ ID NO: 24781 - DNA, 20 bp, Porphyromonas endodontalis
ctctatcgagacagccgtgc

SEQ ID NO: 24782 - DNA, 20 bp, Enterobacter amnigenus
cagagagcttgttttcgggt

SEQ ID NO: 24783 - DNA, 20 bp, Alloiococcus otitis
ctaccttcagagatgaaggg

SEQ ID NO: 24784 - DNA, 20 bp, Brevibacillus brevis
gcatcggaagggcgcgtgga

SEQ ID NO: 24785 - DNA, 20 bp, Pseudomonas mendocina
ggttaataccctgcagtttt

SEQ ID NO: 24786 - DNA, 20 bp, Clostridium subterminale
tgtatgagaatcgcatgatt

SEQ ID NO: 24787 - DNA, 20 bp, Gemella morbillorum
gacgcgatagctaatcccgc

SEQ ID NO: 24788 - DNA, 30 bp, Brevibacterium epidermidis
aataccggatacgaccgtcggacgcatgtc

SEQ ID NO: 24789 - DNA, 20 bp, Leptotrichia buccalis
cctggtgttgtcagactgac

SEQ ID NO: 24790 - DNA, 20 bp, Micrococcus luteus
ggagccgcgagggggggacc

SEQ ID NO: 24791 - DNA, 20 bp, Actinomyces naeslundii
cggtgaaggcgaccttgcct

SEQ ID NO: 24792 - DNA, 20 bp, Arthrobacter globiformis
cctttggggcaggttcacag

SEQ ID NO: 24793 - DNA, 30 bp, Oligella urethralis
tctcttgcgagcacactccaatctcttgaa

SEQ ID NO: 24794 - DNA, 20 bp, Microbacterium hominis
gggtgaaggcccagcttgct

SEQ ID NO: 24795 - DNA, 30 bp, Streptococcus sanguinis
atgatattgaatatcgcatgataattaatt

SEQ ID NO: 24796 - DNA, 20 bp, Tetragenococcus halophilus
ataccgcatacggctttttt

SEQ ID NO: 24797 - DNA, 30 bp, Leuconostoc fallax
cggtaagctaatctcttaaagtacgtctca

SEQ ID NO: 24798 - DNA, 20 bp, Clostridium clostridiiforme
ggctgcatactgacgctgaa

SEQ ID NO: 24799 - DNA, 20 bp, Brevibacterium epidermidis
gatacgaccgtcggacgcat

SEQ ID NO: 24800 - DNA, 20 bp, Brevibacterium casei
gctggacagagagaggcgaa

SEQ ID NO: 24801 - DNA, 20 bp, Anaerococcus prevotii
cgagcaaaccgtaaggaagc

SEQ ID NO: 24802 - DNA, 20 bp, Clostridium clostridiiforme
acaaggacttgtccgaaaga

SEQ ID NO: 24803 - DNA, 20 bp, Salmonella paratyphi
atccacagaacaatccagag

SEQ ID NO: 24804 - DNA, 20 bp, Paenibacillus larvae
ctctgaccggtttagagaca

SEQ ID NO: 24805 - DNA, 20 bp, Peptoniphilus asaccharolyticus
taagcatttgaaactaataa

SEQ ID NO: 24806 - DNA, 20 bp, Serratia plymuthica
aatgctacgggaatacgttc

SEQ ID NO: 24807 - DNA, 30 bp, Clostridium limosum
acacgggagtgcccttcggggaacttggtg

SEQ ID NO: 24808 - DNA, 20 bp, Oligella ureolytica
cactattaactatcaagcta

SEQ ID NO: 24809 - DNA, 20 bp, Streptococcus iniae
ctaatccaaagagttgcgaa

SEQ ID NO: 24810 - DNA, 20 bp, Bacteroides uniformis
gtaacaactggcgattgggg

SEQ ID NO: 24811 - DNA, 20 bp, Bacteroides capillosus
gtttgcacaacgttggcgga

SEQ ID NO: 24812 - DNA, 20 bp, Capnocytophaga sp.
ctttgatgacggtactctgc

SEQ ID NO: 24813 - DNA, 20 bp, Anaerococcus tetradius
gagatgaaagggaaagtgga

SEQ ID NO: 24814 - DNA, 20 bp, Pediococcus parvulus
attaaccgcatggttgattt

SEQ ID NO: 24815 - DNA, 20 bp, Proteus vulgaris
gcaacgatctctactggctg

SEQ ID NO: 24816 - DNA, 20 bp, Neisseria polysaccharea
ctcccttcagtggatcacta

SEQ ID NO: 24817 - DNA, 20 bp, Eubacterium moniliforme
aggtagccgtaggagaaacc

SEQ ID NO: 24818 - DNA, 20 bp, Anaerococcus tetradius
cgggatgaaaaatattggat

SEQ ID NO: 24819 - DNA, 30 bp, Dolosicoccus paucivorans
gtgcattagctagttggtaggataaaagcc

SEQ ID NO: 24820 - DNA, 20 bp, Neisseria subflava
ccgcaaggggccgcttacca

SEQ ID NO: 24821 - DNA, 20 bp, Anaerococcus tetradius
ttaggttcttggaataatct

SEQ ID NO: 24822 - DNA, 20 bp, Bacillus thuringiensis
ggcggcgtgcctaatacaat

SEQ ID NO: 24823 - DNA, 20 bp, Geobacillus thermoglucosidasius
ctgcccggttacaagtccgg

SEQ ID NO: 24824 - DNA, 20 bp, Dermacoccus nishinomiyaensis
atatgaccgatctccgcatg

SEQ ID NO: 24825 - DNA, 20 bp, Pediococcus dextrinicus
acgagttttcttttaatgat

SEQ ID NO: 24826 - DNA, 20 bp, Neisseria mucosa
ggaacctgcggttggggatc

SEQ ID NO: 24827 - DNA, 20 bp, Morganella morganii
tcgggcggtaacagggagaa

SEQ ID NO: 24828 - DNA, 20 bp, Microbacterium hominis
aagagtcggtaacaccagca

SEQ ID NO: 24829 - DNA, 20 bp, Myroides odoratimimus
aactaggacactgccattga

SEQ ID NO: 24830 - DNA, 20 bp, Corynebacterium group ANF
gtaagaagatgaaaggcggc

SEQ ID NO: 24831 - DNA, 20 bp, Bacillus laevolacticus
atcatggctcagggccgaac

SEQ ID NO: 24832 - DNA, 20 bp, Paenibacillus azotofixans
atggagcttgctcttgatca

SEQ ID NO: 24833 - DNA, 20 bp, Microbacterium hominis
ggtgtaatacgatcccgggt

SEQ ID NO: 24834 - DNA, 20 bp, Corynebacterium kutscheri
ctagggacgaagcttatttt

SEQ ID NO: 24835 - DNA, 20 bp, Ochrobactrum intermedium
tgtgctaataccctatacga

SEQ ID NO: 24836 - DNA, 20 bp, Citrobacter amalonaticus
gcagagatgccaaagtgcct

SEQ ID NO: 24837 - DNA, 20 bp, Bacteroides distasonis
gtgtcctattttgtatgtac

SEQ ID NO: 24838 - DNA, 20 bp, Clostridium clostridiiforme
cagacgaaactggagagctt

SEQ ID NO: 24839 - DNA, 20 bp, Kocuria rosea
cgagcgaactgacgagagtg

SEQ ID NO: 24840 - DNA, 20 bp, Anaerococcus prevotii
accgtaaggaagcagcagtc

SEQ ID NO: 24841 - DNA, 20 bp, Bacteroides capilosus
cggagtggggaataacagtc

SEQ ID NO: 24842 - DNA, 20 bp, Microbacterium hominis
tcggtaacaccagcaggcgg

SEQ ID NO: 24843 - DNA, 20 bp, Providencia stuartii
ttgatgttaataccatcaac

SEQ ID NO: 24844 - DNA, 20 bp, Weeksella virosa
ctgaagttggcgaccgtaac

SEQ ID NO: 24845 - DNA, 20 bp, Streptococcus criceti
gttactcaagtgacggtatc

SEQ ID NO: 24846 - DNA, 20 bp, Clostridium butyricum
caaggtagccgtaggagtaa

SEQ ID NO: 24847 - DNA, 20 bp, Pediococcus acidilactici
gcggctgtctggtctgtact

SEQ ID NO: 24848 - DNA, 20 bp, Brevibacillus centrosporus
tttgtttcatggcaaaagct

SEQ ID NO: 24849 - DNA, 20 bp, Paenibacillus validus
ctttccttcgggatagcgtt

SEQ ID NO: 24850 - DNA, 20 bp, Eubacterium moniliforme
agaggtaaaaggattcattc

SEQ ID NO: 24851 - DNA, 20 bp, Achromobacter xylosoxidans
tgtcactagctgttggggcc

SEQ ID NO: 24852 - DNA, 20 bp, Capnocytophaga sp.
tgatgacggtactctgcgaa

SEQ ID NO: 24853 - DNA, 30 bp, Bordetella trematum
ttttggcaggaaagaaacggcgccagctaa

SEQ ID NO: 24854 - DNA, 20 bp, Gracilibacillus dipsosauri
gacggctagcctccaaatgg

SEQ ID NO: 24855 - DNA, 20 bp, Propionibacterium propionicus
gcctttttggtcggtttaca

SEQ ID NO: 24856 - DNA, 20 bp, Oligella urethralis
tccaatctcttgaagcttcc

SEQ ID NO: 24857 - DNA, 20 bp, Eschericchia vulneris
tacggttaataaccgtgtcg

SEQ ID NO: 24858 - DNA, 20 bp, Corynebacterium group ANF
tttttatcacatggtaagaa

SEQ ID NO: 24859 - DNA, 20 bp, Alloiococcus otitis
catgctggggaaatgaaagg

SEQ ID NO: 24860 - DNA, 20 bp, Globicatella sanguinis
tactagaggaaatgttagta

SEQ ID NO: 24861 - DNA, 20 bp, Moellerella wisconsensis
taatactatcagcgattgac

SEQ ID NO: 24862 - DNA, 20 bp, Bacteroides merdae
gcatgatttgtagcaataca

SEQ ID NO: 24863 - DNA, 20 bp, Prevotella disiens
aatgttggttgcatgtaaat

SEQ ID NO: 24864 - DNA, 20 bp, Enterococcus dispar
acatgtttattatttgaaag

SEQ ID NO: 24865 - DNA, 20 bp, Gracilibacillus dipsosauri
agcctccaaatggttactcc

SEQ ID NO: 24866 - DNA, 20 bp, Corynebacterium auris
gcgcgtgtgcgatactgtga

SEQ ID NO: 24867 - DNA, 20 bp, Bacteroides stercoris
caacagaggtaggcggaatt

SEQ ID NO: 24868 - DNA, 20 bp, Klebsiella oxytoca
atgaggttaataacctcggc

SEQ ID NO: 24869 - DNA, 20 bp, Anaerobiospirillum succiniciproducens
cactttcagggggaggaaac

SEQ ID NO: 24870 - DNA, 20 bp, Streptococcus bovis
aagtaccaactggtacactg

SEQ ID NO: 24871 - DNA, 20 bp, Myroides odoratimimus
gaataatatggaagtaacta

SEQ ID NO: 24872 - DNA, 20 bp, Pantoea agglomerans
gtcgggcggtagcacagcag

SEQ ID NO: 24873 - DNA, 20 bp, Weissella paramesenteroides
ttgctctgatgtgattttat

SEQ ID NO: 24874 - DNA, 20 bp, Haemophilus paraphrophilus
gttgaactttaagtttggcg

SEQ ID NO: 24875 - DNA, 20 bp, Helcococcus kunzii
cacggttcggtttagaaact

SEQ ID NO: 24876 - DNA, 20 bp, Clostridium clostridiiforme
gggaacgtgaacaggtgctg

SEQ ID NO: 24877 - DNA, 20 bp, Arcanobacterium haemolyticum
attctgctcttgccgcatgg

SEQ ID NO: 24878 - DNA, 20 bp, Capnocytophaga sp.
cttagagataggtatttctt

SEQ ID NO: 24879 - DNA, 20 bp, Anaerococcus prevotii
gaacgatgaagcttaaatga

SEQ ID NO: 24880 - DNA, 20 bp, Proteus vulgaris
cgatctctactggctgagag

SEQ ID NO: 24881 - DNA, 20 bp, Anaerobiospirillum succiniciproducens
ggagggaacccacaaagcgt

SEQ ID NO: 24882 - DNA, 20 bp, Micromonas micros
tttttgtggaaatcctttcg

SEQ ID NO: 24883 - DNA, 20 bp, Clostridium clostridiiforme
atcatggcccatatgtccag

SEQ ID NO: 24884 - DNA, 20 bp, Clostridium clostridiiforme
gaagcagagaggcaaacaga

SEQ ID NO: 24885 - DNA, 20 bp, Eremococcus coleocola
ttcggagcatagagacaggt

SEQ ID NO: 24886 - DNA, 30 bp, Moellerella wisconsensis
ggatctgcctgacagagggggataactact

SEQ ID NO: 24887 - DNA, 20 bp, Eubacterium moniliforme
taaacttttgtcctatggga

SEQ ID NO: 24888 - DNA, 20 bp, Corynebacterium group ANF
gaagccgcttgctccacttt

SEQ ID NO: 24889 - DNA, 20 bp, Neisseria polysaccharea
ttggatcacctcccttcagt

SEQ ID NO: 24890 - DNA, 20 bp, Bacteroides stercoris
aactgactgagctggaaaca

SEQ ID NO: 24891 - DNA, 20 bp, Streptococcus ratti
acggtaactgaccagaaagg

SEQ ID NO: 24892 - DNA, 20 bp, Bacteroides capillosus
ggctatgtgaccaagcgaaa

SEQ ID NO: 24893 - DNA, 20 bp, Dolosicoccus paucivorans
ggatgcatagcttagagata

SEQ ID NO: 24894 - DNA, 20 bp, Brevundimonas vesicularis
gggaaaacttgtgctaatac

SEQ ID NO: 24895 - DNA, 20 bp, Gemella morbillorum
catatcagctagatgttgca

SEQ ID NO: 24896 - DNA, 20 bp, Bacteroides ovatus
gtgctgcatggttgtcgtac

SEQ ID NO: 24897 - DNA, 20 bp, Sporosarcina pasteurii
gaactctgaaagacggcttc

SEQ ID NO: 24898 - DNA, 20 bp, Paenibacillus lautus
catgggagaggaaagaaaga

SEQ ID NO: 24899 - DNA, 20 bp, Providencia stuartii
aggcgttgatgttaatacca

SEQ ID NO: 24900 - DNA, 20 bp, Shewanella putrefaciens
tcagaatgccacgggaatac

SEQ ID NO: 24901 - DNA, 20 bp, Anaerococcus tetradius
gtagactaaccaaagattta

SEQ ID NO: 24902 - DNA, 20 bp, Vibrio harveyi
aagtgcgtcgagttccggat

SEQ ID NO: 24903 - DNA, 20 bp, Empedobacter brevis
aatagcacgtgcaattgacg

SEQ ID NO: 24904 - DNA, 20 bp, Bacteroides stercoris
gggatgattattaaagaatt

SEQ ID NO: 24905 - DNA, 20 bp, Streptococcus equi
gtacaaggtagccgttcgga

SEQ ID NO: 24906 - DNA, 20 bp, Stenotrophomonas maltophilia
ggcttgtctctctgggtggc

SEQ ID NO: 24907 - DNA, 30 bp, Citrobacter youngae
aggaaggcgttgaggttaataaccttagca

SEQ ID NO: 24908 - DNA, 20 bp, Clostridium clostridiiforme
ggtttcgatgaagttttcgg

SEQ ID NO: 24909 - DNA, 20 bp, Porphyromonas endodontalis
aactgatatgctagagagga

SEQ ID NO: 24910 - DNA, 20 bp, Bacillus coagulans
gtcgagcggacttgttagaa

SEQ ID NO: 24911 - DNA, 20 bp, Pseudomonas mendocina
gttacatgctcttcctccca

SEQ ID NO: 24912 - DNA, 20 bp, Campylobacter jejuni
taatacatgcagtcgagcga

SEQ ID NO: 24913 - DNA, 20 bp, Porphyromonas gingivalis
gtacctgaagggcgtaccgc

SEQ ID NO: 24914 - DNA, 20 bp, Unknown Organism
  oligonucleotide from CDC group EO-2
ggaatgtgccacttctacta

SEQ ID NO: 24915 - DNA, 20 bp, Streptococcus macacae
tgaaaggtacaacagtatcg

SEQ ID NO: 24916 - DNA, 20 bp, Anaerococcus tetradius
atatttagattccttcggga

SEQ ID NO: 24917 - DNA, 20 bp, Paenibacillus azotofixans
gatggagcttgctcttgatc

SEQ ID NO: 24918 - DNA, 20 bp, Bacteroides capillosus
cgatggatgcccgttgtatg

SEQ ID NO: 24919 - DNA, 20 bp, Shewanella putrefaciens
agggtgtagtttaatacgct

SEQ ID NO: 24920 - DNA, 20 bp, Streptococcus acidominimus
tgtaagagaagaacgttagc

SEQ ID NO: 24921 - DNA, 20 bp, Dermacoccus nishinomiyaensis
tccgtaacaaggtagcccgt

SEQ ID NO: 24922 - DNA, 20 bp, Streptococcus iniae
tgtacttaagttaaaaggag

SEQ ID NO: 24923 - DNA, 20 bp, Clostridium clostridiiforme
aagccggaggcctaaccgcg

SEQ ID NO: 24924 - DNA, 20 bp, Campylobacter curvus
atatagggtttctcgctatg

SEQ ID NO: 24925 - DNA, 20 bp, Empedobacter brevis
aatactttataacagattga

SEQ ID NO: 24926 - DNA, 20 bp, Streptococcus macacae
gggagcttgctccacgagat

SEQ ID NO: 24927 - DNA, 20 bp, Anaerococcus tetradius
gcttatcaaagatttatcgg

SEQ ID NO: 24928 - DNA, 20 bp, Psychrobacter phenylpyruvicus
tactaaaaggcggcttttag

SEQ ID NO: 24929 - DNA, 20 bp, Eubacterium moniliforme
gcataagaccacgaaaccgc

SEQ ID NO: 24930 - DNA, 20 bp, Prevotella disiens
cattacgtgtaatgttttgc

SEQ ID NO: 24931 - DNA, 20 bp, Corynebacterium kutscheri
acatgtacaggatcgggcta

SEQ ID NO: 24932 - DNA, 30 bp, Eremococcus coleocola
ggtaagcgaatctcttaaagtcgttctcag

SEQ ID NO: 24933 - DNA, 20 bp, Bacteroides distasonis
gcatgaagcaggggccccgc

SEQ ID NO: 24934 - DNA, 20 bp, Serratia marcescens
aagcgaacaaggtaaccgta

SEQ ID NO: 24935 - DNA, 20 bp, Streptococcus macacae
tgttgttaaggaagcaagtt

SEQ ID NO: 24936 - DNA, 20 bp, Sphingobacterium multivorum
cagttcgcatgttcggttga

SEQ ID NO: 24937 - DNA, 20 bp, Bacteroides stercoris
aattgcaactgactgaatcg

SEQ ID NO: 24938 - DNA, 20 bp, Corynebacterium pilosum
cctgccttccagggtctccc

SEQ ID NO: 24939 - DNA, 20 bp, Clostridium sordellii
gccgtatcggtaaggtgcgg

SEQ ID NO: 24940 - DNA, 20 bp, Stenotrophomonas maltophilia
taatgcatgcgggatctgcc

SEQ ID NO: 24941 - DNA, 20 bp, Providencia alcalifaciens
tagctaatccgcaataatct

SEQ ID NO: 24942 - DNA, 20 bp, Bacteroides capillosus
tatggcctttcggctatgtg

SEQ ID NO: 24943 - DNA, 20 bp, Arcanobacterium haemolyticum
ttaacactgaacaaggcgtt

SEQ ID NO: 24944 - DNA, 20 bp, Bacteroides stercoris
gttgatactggtatccttga

SEQ ID NO: 24945 - DNA, 20 bp, Bacillus smithii
gtaacccttcacgggagcca

SEQ ID NO: 24946 - DNA, 30 bp, Brevibacillus laterosporus
tgccatttaaataaggtggcaccttgacgg

SEQ ID NO: 24947 - DNA, 20 bp, Eremococcus coleocola
cttgagcgggggataacggt

SEQ ID NO: 24948 - DNA, 20 bp, Anaerococcus tetradius
acgatgaagatatttagatt

SEQ ID NO: 24949 - DNA, 20 bp, Citrobacter farmeri
ttgtcagagatgaggtagtg

SEQ ID NO: 24950 - DNA, 20 bp, Bacteroides merdae
ctaggagtttgcgatacaat

SEQ ID NO: 24951 - DNA, 20 bp, Eubacterium moniliforme
tgggagcacccgaagccagt

SEQ ID NO: 24952 - DNA, 20 bp, Prevotella oralis
ttttttaagcgtgctgtgaa

SEQ ID NO: 24953 - DNA, 20 bp, Anaerococcus prevotii
taaatgatcaaagctccggc

SEQ ID NO: 24954 - DNA, 20 bp, Myroides odoratimimus
tcctagcttaactaggacac

SEQ ID NO: 24955 - DNA, 20 bp, Prevotella loescheii
cggggataaaggggcccacg

SEQ ID NO: 24956 - DNA, 20 bp, Streptococcus macacae
attggcttaaccaatgtcag

SEQ ID NO: 24957 - DNA, 20 bp, Streptococcus ratti
gtcagagacgaacgtgtgtg

SEQ ID NO: 24958 - DNA, 20 bp, Prevotella loescheii
aggggcccacgtgtgggttt

SEQ ID NO: 24959 - DNA, 20 bp, Bacteroides capillosus
ggcgcctacggaggtgctgc

SEQ ID NO: 24960 - DNA, 20 bp, Mannheimia haemolytica
acataggagtttgctccttg

SEQ ID NO: 24961 - DNA, 20 bp, Finegoldia magna
gaagcttcggtggaagatta

SEQ ID NO: 24962 - DNA, 20 bp, Providencia stuartii
gaattgagcagagatgctga

SEQ ID NO: 24963 - DNA, 20 bp, Prevotella oralis
tgcccgctgtcggccttttt

SEQ ID NO: 24964 - DNA, 20 bp, Alloiococcus otitis
gctggggaaatgaaaggtgg

SEQ ID NO: 24965 - DNA, 20 bp, Streptococcus urinalis
atggaagtaggagtggaaag

SEQ ID NO: 24966 - DNA, 20 bp, Clostridium clostridiiforme
gccggaaggtgaaaagcaga

SEQ ID NO: 24967 - DNA, 20 bp, Bacteroides merdae
ggggcagcatgatttgtagc

SEQ ID NO: 24968 - DNA, 20 bp, Enterobacter hormaechei
atgtgttaggcctaaaaaag

SEQ ID NO: 24969 - DNA, 20 bp, Unknown Organism
  oligonucleotide from CDC group VB-3
ctagtctaaccttccagggg

SEQ ID NO: 24970 - DNA, 20 bp, Pediococcus dextrinicus
ttaattgaaagacggccttt

SEQ ID NO: 24971 - DNA, 20 bp, Bacillus coagulans
taccgaataacactttcgct

SEQ ID NO: 24972 - DNA, 20 bp, Corynebacterium pilosum
tttttccttcttgtgttgga

SEQ ID NO: 24973 - DNA, 20 bp, Enterobacter gergoviae
ggctacgcgttaaggtagcc

SEQ ID NO: 24974 - DNA, 20 bp, Paenibacillus macerans
cttagagatggacctgcggt

SEQ ID NO: 24975 - DNA, 20 bp, Prevotella loescheii
gcggtggataactgcttcat

SEQ ID NO: 24976 - DNA, 20 bp, Vibrio metschnikovii
catgatagcctacggctcaa

SEQ ID NO: 24977 - DNA, 20 bp, Oligella urethralis
agcacactccaatctcttga

SEQ ID NO: 24978 - DNA, 20 bp, Psychrobacter phenylpyruvicus
ttatggttaatacccataga

SEQ ID NO: 24979 - DNA, 20 bp, Prevotella loescheii
ggccccttgggtcggtgacc

SEQ ID NO: 24980 - DNA, 20 bp, Dermacoccus nishinomiyaensis
actggatatgaccgatctcc

SEQ ID NO: 24981 - DNA, 20 bp, Vibrio mimicus
cacggtagcgctaggtggaa

SEQ ID NO: 24982 - DNA, 20 bp, Bacillus licheniformis
gttactctcggggaaccccg

SEQ ID NO: 24983 - DNA, 20 bp, Paenibacillus macerans
cgcatgagggagttgggaaa

SEQ ID NO: 24984 - DNA, 20 bp, Empedobacter brevis
tcttgagtgatgttgaagtg

SEQ ID NO: 24985 - DNA, 20 bp, Burkholderia gladioli
taatccgcatacgatccacg

SEQ ID NO: 24986 - DNA, 20 bp, Sporosarcina pasteurii
gaaacaagtttcttccttgt

SEQ ID NO: 24987 - DNA, 20 bp, Lactococcus raffinolactis
gagagatggacccgcgttgt

SEQ ID NO: 24988 - DNA, 20 bp, Corynebacterium falsenii
aagccatgttgtggtgacgg

SEQ ID NO: 24989 - DNA, 20 bp, Neisseria subflava
taacaaggcagcccgagggg

SEQ ID NO: 24990 - DNA, 20 bp, Dolosicoccus paucivorans
aaatccttcgggacatccag

SEQ ID NO: 24991 - DNA, 20 bp, Leptotrichia buccalis
gactgataaaacctggtgtt

SEQ ID NO: 24992 - DNA, 20 bp, Anaerococcus tetradius
agacttcggtctactgtatt

SEQ ID NO: 24993 - DNA, 20 bp, Vibrio parahaemolyticus
ctaaaagaagtaggctagtt

SEQ ID NO: 24994 - DNA, 20 bp, Arcanobacterium haemolyticum
gttgagttgagggtaggtgt

SEQ ID NO: 24995 - DNA, 20 bp, Eubacterium moniliforme
gcaatgggggacaacagttg

SEQ ID NO: 24996 - DNA, 20 bp, Bacteroides stercoris
aatcggaaacggttcttttc

SEQ ID NO: 24997 - DNA, 20 bp, Eschericchia vulneris
gtctggtctgagaggatgac

SEQ ID NO: 24998 - DNA, 20 bp, Bacteroides uniformis
ggatgacgtcaaatcagccg

SEQ ID NO: 24999 - DNA, 20 bp, Bacteroides ovatus
gctcactagactgtcactga

SEQ ID NO: 25000 - DNA, 20 bp, Bacteroides stercoris
ctacccggactgccgtcgta

SEQ ID NO: 25001 - DNA, 20 bp, Streptococcus infantarius
ggcgccgtgctctcagctcc

SEQ ID NO: 25002 - DNA, 20 bp, Actinomyces naeslundii
aggcgaccttgccttttggg

SEQ ID NO: 25003 - DNA, 20 bp, Lactococcus garvieae
ggtacaaggtagccgtatcg

SEQ ID NO: 25004 - DNA, 20 bp, Paenibacillus pabuli
gttttcttctcctgaagaga

SEQ ID NO: 25005 - DNA, 20 bp, Escherichia hermannii
gacaactgtggtgacgacgt

SEQ ID NO: 25006 - DNA, 20 bp, Cedecea lapagei
ttaaccttattgccttcctc

SEQ ID NO: 25007 - DNA, 20 bp, Geobacillus stearothermophilus
gcttgccttgattcggtcag

SEQ ID NO: 25008 - DNA, 20 bp, Bacillus schlegellii
aagccttcgggcggaagccc

SEQ ID NO: 25009 - DNA, 20 bp, Clostridium clostridiiforme
atggttcgagagacttatgt

SEQ ID NO: 25010 - DNA, 20 bp, Eubacterium moniliforme
ggtaaaaggattcattcgat

SEQ ID NO: 25011 - DNA, 20 bp, Anaerococcus tetradius
taggcttgagagatgaaagg

SEQ ID NO: 25012 - DNA, 20 bp, Paenibacillus alvei
tcgcatccaaaactgcatag

SEQ ID NO: 25013 - DNA, 20 bp, Streptococcus sanguinis
tgtgaccggatcttaccaga

SEQ ID NO: 25014 - DNA, 20 bp, Bacillus fusiformis
ttgcttcatggtgaaagact

SEQ ID NO: 25015 - DNA, 20 bp, Streptococcus urinalis
tgttagagaagaatggaagt

SEQ ID NO: 25016 - DNA, 20 bp, Brevibacterium linens
tgacgaccgaaggcatcttt

SEQ ID NO: 25017 - DNA, 20 bp, Bacteroides stercoris
ttttcccgcatggaataact

SEQ ID NO: 25018 - DNA, 20 bp, Peptoniphilus asaccharolyticus
ggagaatttcggtgccgcag

SEQ ID NO: 25019 - DNA, 20 bp, Neisseria subflava
gagcccgcttacccggtatg

SEQ ID NO: 25020 - DNA, 20 bp, Neisseria elongata
ttaatacccgtttctgctga

SEQ ID NO: 25021 - DNA, 20 bp, Bacillus coagulans
cgctcgcatgagcggatgtt

SEQ ID NO: 25022 - DNA, 20 bp, Myroides odoratus
aggagcttgcttttttgaga

SEQ ID NO: 25023 - DNA, 20 bp, Anaerococcus tetradius
gaacgatgaagatatttaga

SEQ ID NO: 25024 - DNA, 20 bp, Eremococcus coleocola
acgatacaacgagcagcaaa

SEQ ID NO: 25025 - DNA, 20 bp, Bacteroides capilosus
cgggactgcaagtcagggtg

SEQ ID NO: 25026 - DNA, 20 bp, Bacteroides capillosus
gatctagagatagtgaggcc

SEQ ID NO: 25027 - DNA, 20 bp, Clostridium clostridiiforme
gcccgaaaggagaagcagat

SEQ ID NO: 25028 - DNA, 30 bp, Streptococcus criceti
agaagaacgttgagtagagtggaaagttac

SEQ ID NO: 25029 - DNA, 20 bp, Prevotella loescheii
cggccccttgggtcggtgac

SEQ ID NO: 25030 - DNA, 20 bp, Leptotrichia buccalis
aacttgccccgcagacaggg

SEQ ID NO: 25031 - DNA, 20 bp, Streptococcus iniae
ttaagttaaaaggagcaaaa

SEQ ID NO: 25032 - DNA, 20 bp, Dolosicoccus paucivorans
accgatacatcgagtggcga

SEQ ID NO: 25033 - DNA, 20 bp, Streptococcus macacae
atttcacgggagcttgctcc

SEQ ID NO: 25034 - DNA, 20 bp, Oligella urethralis
gcgtcagtaccatcccaggg

SEQ ID NO: 25035 - DNA, 20 bp, Anaerococcus prevotii
atattacggcggggtctaga

SEQ ID NO: 25036 - DNA, 20 bp, Bacteroides capillosus
ttacttgagtttgcacaacg

SEQ ID NO: 25037 - DNA, 20 bp, Leptotrichia buccalis
aactacagggctggagtatt

SEQ ID NO: 25038 - DNA, 20 bp, Fusobacterium mortiferum
tctacttgatcctcggggtg

SEQ ID NO: 25039 - DNA, 20 bp, Bacteroides capillosus
cttgcaacctttgatggcga

SEQ ID NO: 25040 - DNA, 20 bp, Delftia acidovorans
ggagggcgcttacccggcgg

SEQ ID NO: 25041 - DNA, 20 bp, Streptococcus constellatus
tagaccgcacaggatgcccg

SEQ ID NO: 25042 - DNA, 20 bp, Proteus mirabilis
accgtggcttctggaggcta

SEQ ID NO: 25043 - DNA, 20 bp, Eremococcus coleocola
cggagcatagagacaggtgg

SEQ ID NO: 25044 - DNA, 20 bp, Propionibacterium propionicus
ccattttttgggggggagcc

SEQ ID NO: 25045 - DNA, 20 bp, Prevotella intermedia
acggtgcgatgcaaatagca

SEQ ID NO: 25046 - DNA, 20 bp, Aeromonas schubertii
gacatgtctggaaccttgta

SEQ ID NO: 25047 - DNA, 20 bp, Globicatella sanguinis
ctaaccaataggagggagcc

SEQ ID NO: 25048 - DNA, 20 bp, Providencia rustigianii
tgatgctaatatcatcagcg

SEQ ID NO: 25049 - DNA, 20 bp, Dolosicoccus paucivorans
tgtgagagaagaacagcgag

SEQ ID NO: 25050 - DNA, 30 bp, Paenibacillus apiarius
gtcgagcggagctgacggagtgcttgcact

SEQ ID NO: 25051 - DNA, 20 bp, Clostridium clostridiiforme
tagcgatagttccgtgccga

SEQ ID NO: 25052 - DNA, 20 bp, Paenibacillus pabuli
agcttgcttttcttgatact

SEQ ID NO: 25053 - DNA, 20 bp, Staphylococcus succinus
catgatcaaactactatctg

SEQ ID NO: 25054 - DNA, 30 bp, Haemophilus influenzae
taccgcgtagtagtcgagagatgaaagtgc

SEQ ID NO: 25055 - DNA, 20 bp, Paenibacillus azotofixans
gtcctcaagagtaactgcta

SEQ ID NO: 25056 - DNA, 20 bp, Ochrobactrum intermedium
gtgctaataccctatacgac

SEQ ID NO: 25057 - DNA, 20 bp, Sphingomonas paucimobilis
aagggagccgaggggaacct

SEQ ID NO: 25058 - DNA, 20 bp, Clostridium clostridiiforme
cgcctaaagagtgtccggtg

SEQ ID NO: 25059 - DNA, 20 bp, Myroides odoratimimus
ggtagaaagagcttgctttt

SEQ ID NO: 25060 - DNA, 20 bp, Actinomyces naeslundii
tgggtgtgggaaagatgcgc

SEQ ID NO: 25061 - DNA, 20 bp, Paenibacillus macerans
gggagttgggaaaggcggag

SEQ ID NO: 25062 - DNA, 20 bp, Eremococcus coleocola
ttgttctcttaacgtgagtg

SEQ ID NO: 25063 - DNA, 20 bp, Citrobacter freundii
aagttagcagagatgctaac

SEQ ID NO: 25064 - DNA, 20 bp, Microbacterium hominis
gggtctggtacacgcgcgcc

SEQ ID NO: 25065 - DNA, 20 bp, Sphingobacterium multivorum
accgcataacatcaacagtt

SEQ ID NO: 25066 - DNA, 20 bp, Clostridium clostridiiforme
agcgatagttccgtgccgaa

SEQ ID NO: 25067 - DNA, 20 bp, Providencia stuartii
aattgagcagagatgctgaa

SEQ ID NO: 25068 - DNA, 20 bp, Dolosicoccus paucivorans
caccgatacatcgagtggcg

SEQ ID NO: 25069 - DNA, 30 bp, Capnocytophaga sp.
aaggtttaaatggagactgacgtacttaga

SEQ ID NO: 25070 - DNA, 20 bp, Myroides odoratus
ctagagaccggcggatgggt

SEQ ID NO: 25071 - DNA, 20 bp, Arcanobacterium pyogenes
ttttgtgacggtatgtgcag

SEQ ID NO: 25072 - DNA, 20 bp, Prevotella corporis
gctctgtctgttcgctcgac

SEQ ID NO: 25073 - DNA, 20 bp, Streptococcus dysgalactiae
ccatgttaaacatttaaaag

SEQ ID NO: 25074 - DNA, 20 bp, Sporosarcina pasteurii
gtacaggcagttactcctgt

SEQ ID NO: 25075 - DNA, 20 bp, Corynebacterium kutscheri
gtacaggatcgggctagaga

SEQ ID NO: 25076 - DNA, 20 bp, Brevibacillus reuszeri
tttggaccgcatggtccgaa

SEQ ID NO: 25077 - DNA, 20 bp, Streptococcus macacae
tttagagggattgaaaggta

SEQ ID NO: 25078 - DNA, 20 bp, Campylobacter curvus
gttcgtctgcgaagtaaata

SEQ ID NO: 25079 - DNA, 20 bp, Sporosarcina pasteurii
ttcggctgtctctgcaggat

SEQ ID NO: 25080 - DNA, 20 bp, Bacillus coagulans
aataccgaataacactttcg

SEQ ID NO: 25081 - DNA, 20 bp, Finegoldia magna
cggtggaagattactaatga

SEQ ID NO: 25082 - DNA, 20 bp, Bacillus smithii
cgcttgcagatgggccccgc

SEQ ID NO: 25083 - DNA, 20 bp, Actinomyces meyeri
gatgctccagctttgttggg

SEQ ID NO: 25084 - DNA, 20 bp, Vibrio vulnificus
ctttgggtcatgactggggt

SEQ ID NO: 25085 - DNA, 20 bp, Prevotella loescheii
gattcggagacgatgaggcc

SEQ ID NO: 25086 - DNA, 20 bp, Proteus vulgaris
taatggctcacctagcaacg

SEQ ID NO: 25087 - DNA, 20 bp, Haemophilus segnis
tgaactttaggtttggcgcc

SEQ ID NO: 25088 - DNA, 20 bp, Prevotella loescheii
ttcggagacgatgaggccct

SEQ ID NO: 25089 - DNA, 20 bp, Campylobacter curvus
gtcaagggagcgtagctcct

SEQ ID NO: 25090 - DNA, 20 bp, Prevotella oralis
tggggacgtgtccctttttg

SEQ ID NO: 25091 - DNA, 20 bp, Bacteroides capillosus
ccaacctactccttacaacg

SEQ ID NO: 25092 - DNA, 20 bp, Campylobacter curvus
atttatcaaatacctacggc

SEQ ID NO: 25093 - DNA, 20 bp, Prevotella bivia
gaaagttggactaatacctt

SEQ ID NO: 25094 - DNA, 20 bp, Finegoldia magna
ctgataaacttgagtagtgg

SEQ ID NO: 25095 - DNA, 20 bp, Vibrio hollisae
ctgcgtttggaactgtcaga

SEQ ID NO: 25096 - DNA, 20 bp, Paenibacillus alvei
ctcgcatgagggagatgaga

SEQ ID NO: 25097 - DNA, 20 bp, Fusobacterium necrogenes
cagagatgccttcgtgcccc

SEQ ID NO: 25098 - DNA, 20 bp, Streptococcus macacae
agatcggtgagtcgcgaacg

SEQ ID NO: 25099 - DNA, 20 bp, Streptococcus equi
gatacgtagcttgctacaat

SEQ ID NO: 25100 - DNA, 20 bp, Bacillus laevolacticus
aacgctggccggcgtgccct

SEQ ID NO: 25101 - DNA, 20 bp, Dolosicoccus paucivorans
aagatgcttatggtatcgct

SEQ ID NO: 25102 - DNA, 20 bp, Microbacterium hominis
gcaggcggtggccctcccct

SEQ ID NO: 25103 - DNA, 20 bp, Myroides odoratimimus
gtcagtggtgaaatttccta

SEQ ID NO: 25104 - DNA, 20 bp, Propionibacterium propionicus
gcgtgcctttttggtcggtt

SEQ ID NO: 25105 - DNA, 20 bp, Campylobacter concisus
agggagccgaccggaaggtg

SEQ ID NO: 25106 - DNA, 20 bp, Vibrio cholerae
cggaaggtaaactacctgct

SEQ ID NO: 25107 - DNA, 20 bp, Bacteroides capilosus
  misc_feature (12)..(12): n is a, c, g, or t
atgacggtactngatgaata

SEQ ID NO: 25108 - DNA, 20 bp, Anaerobiospirillum succiniciproducens
tcgggggaaagacttttagt

SEQ ID NO: 25109 - DNA, 20 bp, Clostridium clostridiiforme
tttcgatgaagttttcggat

SEQ ID NO: 25110 - DNA, 20 bp, Bacillus schlegellii
ggtggggcgacccatccgtg

SEQ ID NO: 25111 - DNA, 20 bp, Streptococcus macacae
accaatgtcagctattgaaa

SEQ ID NO: 25112 - DNA, 20 bp, Vibrio hollisae
taccgctgggggatgacagt

SEQ ID NO: 25113 - DNA, 20 bp, Anaerococcus tetradius
tattggattagtggcggacg

SEQ ID NO: 25114 - DNA, 30 bp, Pediococcus acidilactici
ggtctgtactgcgctgaggctcgaaagcat

SEQ ID NO: 25115 - DNA, 20 bp, Lactococcus raffinolactis
agtaccaattggtacactga

SEQ ID NO: 25116 - DNA, 20 bp, Paenibacillus azotofixans
gagcttgctcttgatcaact

SEQ ID NO: 25117 - DNA, 20 bp, Shigella sonnei
agaagttttcagagatgaaa

SEQ ID NO: 25118 - DNA, 20 bp, Leptotrichia buccalis
tgcgtatgcccgtgagagcg

SEQ ID NO: 25119 - DNA, 20 bp, Corynebacterium pilosum
aattgccgaccggttagttc

SEQ ID NO: 25120 - DNA, 20 bp, Vibrio cholerae
gcgtcctcccggaaggtaaa

SEQ ID NO: 25121 - DNA, 20 bp, Paenibacillus macerans
acgcaactccttcgcatgag

SEQ ID NO: 25122 - DNA, 30 bp, Bacteroides stercoris
actgactgaatcggaaacggttcttttctt

SEQ ID NO: 25123 - DNA, 20 bp, Peptoniphilus asaccharolyticus
tttggaaggattagcggcgg

SEQ ID NO: 25124 - DNA, 20 bp, Alloiococcus otitis
tctgccaccttcagagatga

SEQ ID NO: 25125 - DNA, 20 bp, Clostridium clostridiiforme
tttggatccatggctcagga

SEQ ID NO: 25126 - DNA, 20 bp, Proteus mirabilis
aaccgtggcttctggaggct

SEQ ID NO: 25127 - DNA, 20 bp, Paenibacillus amylolyticus
cttgatgaggtgcttgcatc

SEQ ID NO: 25128 - DNA, 20 bp, Bacteroides capilosus
cgcatgacactggctgccaa

SEQ ID NO: 25129 - DNA, 20 bp, Paenibacillus glucanolyticus
gcggacttgaaggagtgctt

SEQ ID NO: 25130 - DNA, 20 bp, Brevibacillus centrosporus
aggcgaagacggaaaggcgg

SEQ ID NO: 25131 - DNA, 30 bp, Eubacterium moniliforme
aaaaaaatgacggtaccataggaggaagct

SEQ ID NO: 25132 - DNA, 20 bp, Bacteroides capillosus
atacggggataaagttaggg

SEQ ID NO: 25133 - DNA, 20 bp, Eubacterium moniliforme
tcgaacgaagttgctctttg

SEQ ID NO: 25134 - DNA, 30 bp, Clostridium histolyticum
atcccggggcttaaccccggtgctgcattt

SEQ ID NO: 25135 - DNA, 20 bp, Staphylococcus saccharolyticus
tctctagaggagtcagagga

SEQ ID NO: 25136 - DNA, 20 bp, Sporosarcina ureae
tgagggaatgttgaaagccg

SEQ ID NO: 25137 - DNA, 20 bp, Prevotella loescheii
cgattcggagacgatgaggc

SEQ ID NO: 25138 - DNA, 20 bp, Streptococcus bovis
aggtagccgtcatcggaagg

SEQ ID NO: 25139 - DNA, 20 bp, Bacillus niacini
cgaatcttgaggtgcttgca

SEQ ID NO: 25140 - DNA, 20 bp, Sphingobacterium multivorum
acagttcgcatgttcggttg

SEQ ID NO: 25141 - DNA, 20 bp, Staphylococcus schleiferi
gaaagtgggacacaatgatt

SEQ ID NO: 25142 - DNA, 20 bp, Dolosicoccus paucivorans
agatgcttatggtatcgcta

SEQ ID NO: 25143 - DNA, 20 bp, Bacteroides capillosus
atctaactaggattaaaggt

SEQ ID NO: 25144 - DNA, 20 bp, Eubacterium moniliforme
ctatgggacgaaaaaaatga

SEQ ID NO: 25145 - DNA, 20 bp, Bacteroides ovatus
gatagcatacgaatatcgca

SEQ ID NO: 25146 - DNA, 20 bp, Bacteroides distasonis
actctggtgggactgccagc

SEQ ID NO: 25147 - DNA, 20 bp, Clostridium clostridiiforme
tagagaagcgaaagcggatc

SEQ ID NO: 25148 - DNA, 20 bp, Myroides odoratimimus
aagcagctacctggcaacag

SEQ ID NO: 25149 - DNA, 20 bp, Bacillus niacini
gtgcttgcacctcttggtta

SEQ ID NO: 25150 - DNA, 20 bp, Prevotella melaninogenica
gaatgaacgctagagctaca

SEQ ID NO: 25151 - DNA, 20 bp, Lactococcus lactis
gcttgcaccaatttgaagag

SEQ ID NO: 25152 - DNA, 30 bp, Globicatella sanguinis
ctactagaggaaatgttagtagattgacgg

SEQ ID NO: 25153 - DNA, 30 bp, Enterobacter amnigenus
agcttgttttcgggtgacgagcggcggacg

SEQ ID NO: 25154 - DNA, 20 bp, Capnocytophaga sp.
tggcatcacatttatattaa

SEQ ID NO: 25155 - DNA, 20 bp, Paenibacillus macerans
gaacgcttgtgagagtaact

SEQ ID NO: 25156 - DNA, 20 bp, Leuconostoc carnosum
agttaaggtagggaatgacc

SEQ ID NO: 25157 - DNA, 20 bp, Empedobacter brevis
taagattagttagttggaga

SEQ ID NO: 25158 - DNA, 20 bp, Streptococcus infantarius
aactttagcaagctaagttt

SEQ ID NO: 25159 - DNA, 20 bp, Anaerococcus tetradius
taataccctataaagttagt

SEQ ID NO: 25160 - DNA, 20 bp, Anaerococcus tetradius
ataataccctataaagttag

SEQ ID NO: 25161 - DNA, 20 bp, Lactococcus raffinolactis
ccctaagtgacgcagcaaac

SEQ ID NO: 25162 - DNA, 20 bp, Stenotrophomonas maltophilia
catgcgggatctgcccgata

SEQ ID NO: 25163 - DNA, 20 bp, Eubacterium moniliforme
ccacgaaaccgcatggttta

SEQ ID NO: 25164 - DNA, 20 bp, Brevibacillus centrosporus
gcatgaggcgaagacggaaa

SEQ ID NO: 25165 - DNA, 20 bp, Globicatella sanguinis
agtcgaacgaaccataacta

SEQ ID NO: 25166 - DNA, 20 bp, Alicyclobacillus acidocaldarius
gccccgaagggacccctcat

SEQ ID NO: 25167 - DNA, 20 bp, Corynebacterium group ANF
cttcggggtgaaggtagtgg

SEQ ID NO: 25168 - DNA, 20 bp, Clostridium innocuum
gccgtcgaagtaggaccgat

SEQ ID NO: 25169 - DNA, 20 bp, Peptoniphilus asaccharolyticus
tgaaaatcaaacagaaccct

SEQ ID NO: 25170 - DNA, 20 bp, Anaerococcus prevotii
taccaaatgaaatcacatat

SEQ ID NO: 25171 - DNA, 20 bp, Sporosarcina pasteurii
taggagtaactgcctgtacc

SEQ ID NO: 25172 - DNA, 20 bp, Moraxella osloensis
gattgaaagcaggcggcagg

SEQ ID NO: 25173 - DNA, 20 bp, Achromobacter xylosoxidans
ctggtagtcccgcccctaaa

SEQ ID NO: 25174 - DNA, 20 bp, Streptococcus acidominimus
ttttgagcaggggagacagg

SEQ ID NO: 25175 - DNA, 20 bp, Campylobacter curvus
atagggtttctcgctatggg

SEQ ID NO: 25176 - DNA, 20 bp, Brevibacterium casei
ctcagtttttcggatcgtag

SEQ ID NO: 25177 - DNA, 20 bp, Propionibacterium acnes
ctaagtcgtacaagataaaa

SEQ ID NO: 25178 - DNA, 20 bp, Sphingobacterium multivorum
cataacatcaacagttcgca

SEQ ID NO: 25179 - DNA, 30 bp, Clostridium innocuum
cggataggtatacagagcgcatgctcagta

SEQ ID NO: 25180 - DNA, 20 bp, Eubacterium moniliforme
aaacttttgtcctatgggac

SEQ ID NO: 25181 - DNA, 20 bp, Bacteroides uniformis
acaactggcgattggggcta

SEQ ID NO: 25182 - DNA, 20 bp, Ewingella americana
tcatggctcagattgaacag

SEQ ID NO: 25183 - DNA, 20 bp, Fusobacterium necrogenes
caatggaccataagtctgat

SEQ ID NO: 25184 - DNA, 20 bp, Capnocytophaga sp.
atccggcccttacatcttgg

SEQ ID NO: 25185 - DNA, 20 bp, Actinomyces radingae
gcctttgtggttgtgtggtg

SEQ ID NO: 25186 - DNA, 20 bp, Prevotella melaninogenica
tagggctccaggaatgaacg

SEQ ID NO: 25187 - DNA, 20 bp, Bacillus schlegellii
cggaagcctttgggtggaag

SEQ ID NO: 25188 - DNA, 20 bp, Paenibacillus macerans
gttaattaagtctggtgttt

SEQ ID NO: 25189 - DNA, 20 bp, Fusobacterium necrogenes
tcgtgccccttcgggggaac

SEQ ID NO: 25190 - DNA, 20 bp, Stenotrophomonas maltophilia
aggagaggcttgtctctctg

SEQ ID NO: 25191 - DNA, 20 bp, Bacillus laevolacticus
cggaaacggtagctaagccg

SEQ ID NO: 25192 - DNA, 20 bp, Stenotrophomonas maltophilia
gcggcagcacaagaaagctt

SEQ ID NO: 25193 - DNA, 20 bp, Peptoniphilus asaccharolyticus
aacccttcggggtgaagttt

SEQ ID NO: 25194 - DNA, 20 bp, Clostridium clostridiiforme
gtcttgacatcccattgaaa

SEQ ID NO: 25195 - DNA, 20 bp, Anaerococcus tetradius
agtcgaacgatgaagatatt

SEQ ID NO: 25196 - DNA, 20 bp, Citrobacter amalonaticus
gttaataaccattttcattg

SEQ ID NO: 25197 - DNA, 20 bp, Streptococcus infantarius
cgtagttagccgtttttttt

SEQ ID NO: 25198 - DNA, 20 bp, Streptococcus macacae
tgataggagcttaaaaggtg

SEQ ID NO: 25199 - DNA, 20 bp, Streptococcus iniae
tgcactaatccaaagagttg

SEQ ID NO: 25200 - DNA, 20 bp, Anaerococcus tetradius
tctactgtattacaggtggt

SEQ ID NO: 25201 - DNA, 20 bp, Citrobacter freundii
aagtccgtaaaccaagggta

SEQ ID NO: 25202 - DNA, 20 bp, Empedobacter brevis
tgtaggacgactgccttatg

SEQ ID NO: 25203 - DNA, 20 bp, Streptococcus acidominimus
gtagctgctacatttgaatt

SEQ ID NO: 25204 - DNA, 20 bp, Eubacterium moniliforme
agctgtcgaaggtgagatca

SEQ ID NO: 25205 - DNA, 20 bp, Haemophilus paraphrophilus
gtgttggatccatggctcag

SEQ ID NO: 25206 - DNA, 20 bp, Bacteroides thetaiotaomicron
aagccatgatagccgggggt

SEQ ID NO: 25207 - DNA, 20 bp, Sporosarcina ureae
aagtacaggagtaactgcct

SEQ ID NO: 25208 - DNA, 20 bp, Sphingobacterium multivorum
cgcttcggggctatcacacg

SEQ ID NO: 25209 - DNA, 20 bp, Stenotrophomonas maltophilia
taatacccttatcgatatga

SEQ ID NO: 25210 - DNA, 20 bp, Campylobacter curvus
cggtgtgctttaggtgggtc

SEQ ID NO: 25211 - DNA, 20 bp, Listeria seeligeri
tgggccgcggtgcattagct

SEQ ID NO: 25212 - DNA, 20 bp, Paenibacillus macerans
tctgtcacttagagatggac

SEQ ID NO: 25213 - DNA, 20 bp, Bacteroides capillosus
cggctatgtgaccaagcgaa

SEQ ID NO: 25214 - DNA, 20 bp, Streptococcus acidominimus
gctgctacatttgaattgat

SEQ ID NO: 25215 - DNA, 20 bp, Clostridium clostridiiforme
tacctcataagccggaaggt

SEQ ID NO: 25216 - DNA, 20 bp, Moraxella atlantae
tttctgctataagatgtgcc

SEQ ID NO: 25217 - DNA, 20 bp, Propionibacterium propionicus
ttttttgggggggagccgtc

SEQ ID NO: 25218 - DNA, 30 bp, Granulicatella elegans
tgacccagagaaggaaaagaggcttcggct

SEQ ID NO: 25219 - DNA, 20 bp, Microbacterium hominis
cacgcgcgcccgtcaagtca

SEQ ID NO: 25220 - DNA, 20 bp, Haemophilus paraphrophilus
aaggtaacctagggaatcgc

SEQ ID NO: 25221 - DNA, 20 bp, Prevotella oralis
ggggacgtgtccctttttgc

SEQ ID NO: 25222 - DNA, 20 bp, Haemophilus influenzae
gcagtcgaacggtagcagga

SEQ ID NO: 25223 - DNA, 20 bp, Fusobacterium necrogenes
ccccttcgggggaacctagt

SEQ ID NO: 25224 - DNA, 20 bp, Streptococcus acidominimus
agagatagggcttctctttt

SEQ ID NO: 25225 - DNA, 20 bp, Prevotella disiens
aatgttttgcatgtaccatt

SEQ ID NO: 25226 - DNA, 20 bp, Paenibacillus macerans
ttagagatggacctgcggtg

SEQ ID NO: 25227 - DNA, 30 bp, Micromonas micros
ttttgtggaaatcctttcgggaatggaaat

SEQ ID NO: 25228 - DNA, 20 bp, Escherichia hermannii
tgacgacgtaacaaggtaac

SEQ ID NO: 25229 - DNA, 20 bp, Cedecea lapagei
ttaggcctgcgcgacagcgt

SEQ ID NO: 25230 - DNA, 20 bp, Anaerococcus prevotii
agcttaaatgatctcttcgg

SEQ ID NO: 25231 - DNA, 20 bp, Propionibacterium freudenreichii
aatctcagaaagccggttct

SEQ ID NO: 25232 - DNA, 20 bp, Streptococcus macacae
atctctctaagcctttagag

SEQ ID NO: 25233 - DNA, 20 bp, Pediococcus dextrinicus
gatcaaggtgcttgcaccaa

SEQ ID NO: 25234 - DNA, 20 bp, Brevibacterium linens
ggatatgacgaccgaaggca

SEQ ID NO: 25235 - DNA, 20 bp, Geobacillus thermoglucosidasius
ggactgcccggttacaagtc

SEQ ID NO: 25236 - DNA, 20 bp, Oligella ureolytica
actgcactattaactatcaa

SEQ ID NO: 25237 - DNA, 20 bp, Peptostreptococcus anaerobius
tgatttgatgcttgcattaa

SEQ ID NO: 25238 - DNA, 20 bp, Bacteroides stercoris
tgcgggtagttccatcaggt

SEQ ID NO: 25239 - DNA, 20 bp, Stenotrophomonas maltophilia
agatgtgaacgctggcggct

SEQ ID NO: 25240 - DNA, 20 bp, Leptotrichia buccalis
ggtgttgtcagactgacgca

SEQ ID NO: 25241 - DNA, 20 bp, Clostridium clostridiiforme
ggctcaccaaaccgaagacg

SEQ ID NO: 25242 - DNA, 20 bp, Helcococcus kunzii
gaatgaaacggaaaaaggaa

SEQ ID NO: 25243 - DNA, 20 bp, Bacteroides vulgatus
gggtatgcatacccgtttgc

SEQ ID NO: 25244 - DNA, 20 bp, Moraxella lacunata
ttgaacgctgagcggcaggc

SEQ ID NO: 25245 - DNA, 20 bp, Neisseria mucosa
tgatccatgggctcagattg

SEQ ID NO: 25246 - DNA, 20 bp, Bacteroides merdae
atacaatgtaagctctacag

SEQ ID NO: 25247 - DNA, 20 bp, Moellerella wisconsensis
cgttgatactaatactatca

SEQ ID NO: 25248 - DNA, 20 bp, Bacillus smithii
gtcgtaacaaaaagccgtat

SEQ ID NO: 25249 - DNA, 30 bp, Anaerococcus tetradius
tgaaaataagcggattagtggcgaacgggt

SEQ ID NO: 25250 - DNA, 20 bp, Leuconostoc fallax
ttgcgaaccggcgacggtaa

SEQ ID NO: 25251 - DNA, 20 bp, Anaerobiospirillum succiniciproducens
taggaatcttttagagataa

SEQ ID NO: 25252 - DNA, 30 bp, Corynebacterium kutscheri
ttgacatgtacaggatcgggctagagatag

SEQ ID NO: 25253 - DNA, 20 bp, Eubacterium moniliforme
agcgacctcgtaagagtaag

SEQ ID NO: 25254 - DNA, 30 bp, Bacteroides capillosus
gccataacgagcgcaacccctgttctcagt

SEQ ID NO: 25255 - DNA, 20 bp, Anaerococcus tetradius
tccttcgggatgaaaaatat

SEQ ID NO: 25256 - DNA, 20 bp, Alloiococcus otitis
ttctgccaccttcagagatg

SEQ ID NO: 25257 - DNA, 20 bp, Bacillus cereus
ggcaacgatgcgtagcccga

SEQ ID NO: 25258 - DNA, 20 bp, Clostridium clostridiiforme
agcgaagcggtttcgatgaa

SEQ ID NO: 25259 - DNA, 20 bp, Eremococcus coleocola
acagcaatcatcgcctgatg

SEQ ID NO: 25260 - DNA, 20 bp, Bacillus mycoides
tgcatggcgcgaaattgaaa

SEQ ID NO: 25261 - DNA, 20 bp, Sphingobacterium multivorum
gtgcagagacgcactcgtcc

SEQ ID NO: 25262 - DNA, 20 bp, Eubacterium moniliforme
gcgatagtcctccgtgccga

SEQ ID NO: 25263 - DNA, 20 bp, Leptotrichia buccalis
ctgataaaacctggtgttgt

SEQ ID NO: 25264 - DNA, 20 bp, Weissella paramesenteroides
tttaactgatactgacgagc

SEQ ID NO: 25265 - DNA, 20 bp, Stenotrophomonas maltophilia
gtctctctgggtggcgagtg

SEQ ID NO: 25266 - DNA, 20 bp, Actinomyces naeslundii
gcgaccttgccttttggggg

SEQ ID NO: 25267 - DNA, 20 bp, Vibrio harveyi
taaagtgcgtcgagttccgg

SEQ ID NO: 25268 - DNA, 20 bp, Bacteroides capillosus
tgaactgtaggcgaacgatc

SEQ ID NO: 25269 - DNA, 20 bp, Leuconostoc pseudomesenteroides
ataccgaatgaaacttagtg

SEQ ID NO: 25270 - DNA, 20 bp, Stenotrophomonas maltophilia
actactggaaacttacgcta

SEQ ID NO: 25271 - DNA, 30 bp, Eggerthella lenta
cggccgaacccgcaggggcggaggcgtcga

SEQ ID NO: 25272 - DNA, 20 bp, Bacteroides stercoris
aacagaggtaggcggaattc

SEQ ID NO: 25273 - DNA, 20 bp, Bacteroides stercoris
ggttttttgcatgtaccgta

SEQ ID NO: 25274 - DNA, 20 bp, Brevibacillus centrosporus
tcatggcaaaagcttgaaag

SEQ ID NO: 25275 - DNA, 20 bp, Alicyclobacillus acidocaldarius
agggacccctcatctctgag

SEQ ID NO: 25276 - DNA, 20 bp, Enterobacter gergoviae
ttcttgaggccgtggcttcc

SEQ ID NO: 25277 - DNA, 20 bp, Streptococcus macacae
cacgagatcggtgagtcgcg

SEQ ID NO: 25278 - DNA, 20 bp, Pediococcus parvulus
gattttgagatgcttgcatc

SEQ ID NO: 25279 - DNA, 20 bp, Haemophilus haemolyticus
agagggtggcgatgccgcga

SEQ ID NO: 25280 - DNA, 20 bp, Geobacillus thermoglucosidasius
cggaagcttgcttctgttcg

SEQ ID NO: 25281 - DNA, 20 bp, Yersinia frederiksenii
gtgaagtgattgacgttact

SEQ ID NO: 25282 - DNA, 20 bp, Anaerococcus tetradius
ggaataatctgggtgccgca

SEQ ID NO: 25283 - DNA, 20 bp, Providencia alcalifaciens
caatcgttgatgatattagc

SEQ ID NO: 25284 - DNA, 20 bp, Enterobacter gergoviae
cgttaaggtagccagcctgg

SEQ ID NO: 25285 - DNA, 20 bp, Oligella urethralis
tggcagttaatagtgcagtt

SEQ ID NO: 25286 - DNA, 20 bp, Staphylococcus schleiferi
agctaagcccgtcgaaagtg

SEQ ID NO: 25287 - DNA, 20 bp, Peptostreptococcus anaerobius
gcattgatgaaagatgagcg

SEQ ID NO: 25288 - DNA, 20 bp, Bacteroides stercoris
aactgactgaatcggaaacg

SEQ ID NO: 25289 - DNA, 20 bp, Leptotrichia buccalis
acgactgataaaacctggtg

SEQ ID NO: 25290 - DNA, 20 bp, Streptococcus bovis
gtcatcggaaggtgcggtgg

SEQ ID NO: 25291 - DNA, 20 bp, Peptoniphilus asaccharolyticus
tgaaatttcgacagattcct

SEQ ID NO: 25292 - DNA, 20 bp, Anaerococcus prevotii
aaaactccaaagccaatccc

SEQ ID NO: 25293 - DNA, 20 bp, Corynebacterium group ANF
gtgtggtgtggtgtcgaagg

SEQ ID NO: 25294 - DNA, 20 bp, Leuconostoc pseudomesenteroides
atacgaagttaaaaggcgct

SEQ ID NO: 25295 - DNA, 20 bp, Clostridium glycolicum
attcacatggatttcttatc

SEQ ID NO: 25296 - DNA, 20 bp, Citrobacter freundii
aacggtagcgcagaggagct

SEQ ID NO: 25297 - DNA, 20 bp, Bacillus schlegellii
ggggtgaagctcgtaacagg

SEQ ID NO: 25298 - DNA, 20 bp, Sphingobacterium multivorum
agtgcagagacgcactcgtc

SEQ ID NO: 25299 - DNA, 20 bp, Clostridium clostridiiforme
tgctgggtgtgggactagcg

SEQ ID NO: 25300 - DNA, 20 bp, Campylobacter curvus
tatatataagtataaatggg

SEQ ID NO: 25301 - DNA, 20 bp, Clostridium clostridiiforme
aggcctaaccgcgaggaagg

SEQ ID NO: 25302 - DNA, 30 bp, Globicatella sanguinis
ttagagataagagaaacccttcggggcaag

SEQ ID NO: 25303 - DNA, 20 bp, Paenibacillus macerans
tcgcatgagggagttgggaa

SEQ ID NO: 25304 - DNA, 20 bp, Gemella haemolysans
tgcttgcactggaaaaactt

SEQ ID NO: 25305 - DNA, 20 bp, Haemophilus segnis
gttgaactttaggtttggcg

SEQ ID NO: 25306 - DNA, 30 bp, Haemophilus influenzae
agattaaagtgcgggaccttcaggccacat

SEQ ID NO: 25307 - DNA, 20 bp, Stenotrophomonas maltophilia
atgggagtgggttgcaacaa

SEQ ID NO: 25308 - DNA, 20 bp, Bacteroides stercoris
agttttcccgcatggaataa

SEQ ID NO: 25309 - DNA, 20 bp, Anaerococcus tetradius
cttcttcggaagactgtaat

SEQ ID NO: 25310 - DNA, 20 bp, Burkholderia gladioli
ccggattaatccgcatacga

SEQ ID NO: 25311 - DNA, 20 bp, Sporosarcina ureae
cattctcttctggcatgagg

SEQ ID NO: 25312 - DNA, 20 bp, Leptotrichia buccalis
aggcgagccaaggcggacgg

SEQ ID NO: 25313 - DNA, 20 bp, Paenibacillus pabuli
agaaagcttgcttttcttga

SEQ ID NO: 25314 - DNA, 20 bp, Leuconostoc lactis
gtctaaggcaggacagaatg

SEQ ID NO: 25315 - DNA, 20 bp, Streptococcus ratti
gacgcttgaaagatgcaaga

SEQ ID NO: 25316 - DNA, 20 bp, Sphingobacterium multivorum
ataaacctaaatacgtgtat

SEQ ID NO: 25317 - DNA, 30 bp, Helcococcus kunzii
gttgatttcttcggaatgaaacggaaaaag

SEQ ID NO: 25318 - DNA, 20 bp, Sphingobacterium multivorum
catgttcggttgattaaata

SEQ ID NO: 25319 - DNA, 20 bp, Leuconostoc carnosum
gggaagaaaagttaaggtag

SEQ ID NO: 25320 - DNA, 20 bp, Moraxella atlantae
gagaaaggagcttatgggtt

SEQ ID NO: 25321 - DNA, 20 bp, Citrobacter freundii
caaggtaaccccgtagggga

SEQ ID NO: 25322 - DNA, 20 bp, Streptococcus ratti
cataagagagtttaacacat

SEQ ID NO: 25323 - DNA, 20 bp, Unknown Organism
  oligonucleotide from CDC group EO-2
acgcgtgggaatgtgccact

SEQ ID NO: 25324 - DNA, 20 bp, Anaerobiospirillum succiniciproducens
aatcagaatgttgcgggaat

SEQ ID NO: 25325 - DNA, 20 bp, Providencia alcalifaciens
cgaccggcggcggggtgagt

SEQ ID NO: 25326 - DNA, 20 bp, Moellerella wisconsensis
gcgttgatattaatactatc

SEQ ID NO: 25327 - DNA, 20 bp, Escherichia hermannii
tgtcatggacaactgtggtg

SEQ ID NO: 25328 - DNA, 20 bp, Bacillus psychrosaccharolyticus
gtggaggaacccagtggcga

SEQ ID NO: 25329 - DNA, 20 bp, Campylobacter curvus
tgttcgtctgcgaagtaaat

SEQ ID NO: 25330 - DNA, 20 bp, Streptococcus vestibularis
ccgcataacaataggtgaca

SEQ ID NO: 25331 - DNA, 20 bp, Streptococcus dysgalactiae
ttgcaccggtccaaggagtt

SEQ ID NO: 25332 - DNA, 20 bp, Streptococcus dysgalactiae
actggtgcttgcaccggccc

SEQ ID NO: 25333 - DNA, 20 bp, Streptococcus dysgalactiae
tgcaccggtccaaggagttg

SEQ ID NO: 25334 - DNA, 20 bp, Streptococcus dysgalactiae
tgcaccggcccaaggagttg

SEQ ID NO: 25335 - DNA, 20 bp, Streptococcus dysgalactiae
gactggtgcttgcaccggcc

SEQ ID NO: 25336 - DNA, 20 bp, Streptococcus dysgalactiae
ccggcccaaggagttgcgaa

SEQ ID NO: 25337 - DNA, 20 bp, Streptococcus dysgalactiae
cggcccaaggagttgcgaac

SEQ ID NO: 25338 - DNA, 20 bp, Streptococcus dysgalactiae
tgcttgcaccggcccaagga

SEQ ID NO: 25339 - DNA, 20 bp, Streptococcus dysgalactiae
tggtgcttgcaccggcccaa

SEQ ID NO: 25340 - DNA, 20 bp, Streptococcus dysgalactiae
gcttgcaccggcccaaggag

SEQ ID NO: 25341 - DNA, 20 bp, Streptococcus dysgalactiae
ggactggtgcttgcaccggc

SEQ ID NO: 25342 - DNA, 20 bp, Streptococcus dysgalactiae
ggcccaaggagttgcgaacg

SEQ ID NO: 25343 - DNA, 30 bp, Streptococcus suis
accgccctagagatagggtttctcttcgga

SEQ ID NO: 25344 - DNA, 30 bp, Streptococcus suis
cgccctagagatagggtttctcttcggagc

SEQ ID NO: 25345 - DNA, 20 bp, Streptococcus dysgalactiae
ctggtgcttgcaccggccca

SEQ ID NO: 25346 - DNA, 20 bp, Streptococcus dysgalactiae
ggtgcttgcaccggcccaag

SEQ ID NO: 25347 - DNA, 20 bp, Streptococcus suis
aacgctgaagtctggtgctt

SEQ ID NO: 25348 - DNA, 20 bp, Streptococcus dysgalactiae
gcaccggcccaaggagttgc

SEQ ID NO: 25349 - DNA, 20 bp, Streptococcus dysgalactiae
accggcccaaggagttgcga

SEQ ID NO: 25350 - DNA, 20 bp, Streptococcus dysgalactiae
caccggcccaaggagttgcg

SEQ ID NO: 25351 - DNA, 20 bp, Streptococcus dysgalactiae
gtgcttgcaccggcccaagg

SEQ ID NO: 25352 - DNA, 30 bp, Enterococcus saccharolyticus
gaacttcggttcattggaaaagaggagtgg

SEQ ID NO: 25353 - DNA, 30 bp, Enterococcus saccharolyticus
cgcttcttttccgccgaacttcggttcatt

SEQ ID NO: 25354 - DNA, 30 bp, Lactococcus lactis
agacagtgatgtttagctaatctcttaaaa

SEQ ID NO: 25355 - DNA, 20 bp, Enterococcus saccharolyticus
ttttccgccgaacttcggtt

SEQ ID NO: 25356 - DNA, 20 bp, Haemophilus actinomycetomicans
gtggatagctgaaccgagag

SEQ ID NO: 25357 - DNA, 30 bp, Brevibacillus laterosporus
tagggaagaaacagtgctatttaaataagg

SEQ ID NO: 25358 - DNA, 20 bp, Enterococcus saccharolyticus
gaagaacaaggatgagaaga

SEQ ID NO: 25359 - DNA, 20 bp, Streptococcus suis
cttgcactagacggatgagt

SEQ ID NO: 25360 - DNA, 20 bp, Enterococcus saccharolyticus
tttccgccgaacttcggttc

SEQ ID NO: 25361 - DNA, 30 bp, Streptococcus suis
gaagtctggtgcttgcactagacggatgag

SEQ ID NO: 25362 - DNA, 30 bp, Streptococcus suis
ctgaagtctggtgcttgcactagacggatg

SEQ ID NO: 25363 - DNA, 20 bp, Brevibacillus laterosporus
gaagaaacagtgccatttaa

SEQ ID NO: 25364 - DNA, 30 bp, Lactococcus lactis
acgagtcgcgagacagtgatgtttagctaa

SEQ ID NO: 25365 - DNA, 20 bp, Enterococcus saccharolyticus
tcttttccgccgaacttcgg

SEQ ID NO: 25366 - DNA, 20 bp, Brevibacillus laterosporus
aaacagtgctatttaaataa

SEQ ID NO: 25367 - DNA, 20 bp, Haemophilus actinomycetomicans
ccgagagggtggcgtttacc

SEQ ID NO: 25368 - DNA, 20 bp, Enterococcus saccharolyticus
ccgaacttcggttcattgga

SEQ ID NO: 25369 - DNA, 20 bp, Enterococcus saccharolyticus
ccgccgaacttcggttcatt

SEQ ID NO: 25370 - DNA, 20 bp, Enterococcus saccharolyticus
gaacttcggttcattggaaa

SEQ ID NO: 25371 - DNA, 20 bp, Enterococcus saccharolyticus
acgcttcttttccgccgaac

SEQ ID NO: 25372 - DNA, 30 bp, Brevibacillus laterosporus
gctatttaaataaggtagcaccttgacggt

SEQ ID NO: 25373 - DNA, 20 bp, Enterococcus faecalis
tatgccgcatggcataagag

SEQ ID NO: 25374 - DNA, 20 bp, Brevibacillus laterosporus
atttaaataaggtggcacct

SEQ ID NO: 25375 - DNA, 20 bp, Enterococcus saccharolyticus
ttccgccgaacttcggttca

SEQ ID NO: 25376 - DNA, 30 bp, Brevibacillus laterosporus
cgggatgctacttcgcgagaagatgctaat

SEQ ID NO: 25377 - DNA, 30 bp, Lactococcus lactis
gtacaacgagtcgcgagacagtgatgttta

SEQ ID NO: 25378 - DNA, 30 bp, Lactococcus lactis
gagtcgcgagacagtgatgtttagctaatc

SEQ ID NO: 25379 - DNA, 20 bp, Enterococcus saccharolyticus
cttttccgccgaacttcggt

SEQ ID NO: 25380 - DNA, 20 bp, Enterococcus faecalis
atgccgcatggcataagagt

SEQ ID NO: 25381 - DNA, 30 bp, Brevibacillus laterosporus
atgaagcgaaacggaaagatggcgcaagct

SEQ ID NO: 25382 - DNA, 30 bp, Streptococcus suis
aacgctgaagtctggtgcttgcactagacg

SEQ ID NO: 25383 - DNA, 20 bp, Brevibacillus laterosporus
cagtgccatttaaataaggt

SEQ ID NO: 25384 - DNA, 20 bp, Enterococcus saccharolyticus
cgaacttcggttcattggaa

SEQ ID NO: 25385 - DNA, 20 bp, Enterococcus saccharolyticus
acttcggttcattggaaaag

SEQ ID NO: 25386 - DNA, 30 bp, Streptococcus suis
cgctgaagtctggtgcttgcactagacgga

SEQ ID NO: 25387 - DNA, 20 bp, Haemophilus actinomycetomicans
agctgaaccgagagggtggc

SEQ ID NO: 25388 - DNA, 20 bp, Enterococcus saccharolyticus
cttcggttcattggaaaaga

SEQ ID NO: 25389 - DNA, 20 bp, Enterococcus saccharolyticus
cgccgaacttcggttcattg

SEQ ID NO: 25390 - DNA, 30 bp, Enterococcus saccharolyticus
catgagagaaagctgaaaggcgcttttgcg

SEQ ID NO: 25391 - DNA, 30 bp, Streptococcus suis
tgcactagacggatgagttgcgaacgggtg

SEQ ID NO: 25392 - DNA, 20 bp, Brevibacillus laterosporus
agaaacagtgctatttaaat

SEQ ID NO: 25393 - DNA, 20 bp, Brevibacillus laterosporus
gttagggaagaaacagtgcc

SEQ ID NO: 25394 - DNA, 20 bp, Haemophilus ducreyi
tgcaaaggggagcgaatctc

SEQ ID NO: 25395 - DNA, 20 bp, Haemophilus ducreyi
ggcggcaaacctgcaaaggg

SEQ ID NO: 25396 - DNA, 20 bp, Brevibacillus laterosporus
ggttttgcttcgcctgaagc

SEQ ID NO: 25397 - DNA, 20 bp, Streptococcus suis
ctggtgcttgcactagacgg

SEQ ID NO: 25398 - DNA, 20 bp, Brevibacillus laterosporus
aacagtgctatttaaataag

SEQ ID NO: 25399 - DNA, 20 bp, Brevibacillus laterosporus
gggaagaaacagtgctattt

SEQ ID NO: 25400 - DNA, 20 bp, Streptococcus suis
agtctggtgcttgcactaga

SEQ ID NO: 25401 - DNA, 20 bp, Enterococcus saccharolyticus
acaaggatgagaagagaatg

SEQ ID NO: 25402 - DNA, 30 bp, Haemophilus ducreyi
gtatacagagggcggcaaacctgcaaaggg

SEQ ID NO: 25403 - DNA, 20 bp, Streptococcus suis
tgcttgcactagacggatga

SEQ ID NO: 25404 - DNA, 30 bp, Brevibacillus laterosporus
tgaagcgaaacggaaagatggcgcaagcta

SEQ ID NO: 25405 - DNA, 30 bp, Enterococcus saccharolyticus
atgagaagagaatgttcatcccttgacggt

SEQ ID NO: 25406 - DNA, 20 bp, Enterococcus saccharolyticus
tcggttcattggaaaagagg

SEQ ID NO: 25407 - DNA, 20 bp, Lactococcus lactis
gtgatgtttagctaatctct

SEQ ID NO: 25408 - DNA, 20 bp, Leuconostoc pseudomesenteroides
cttttaggaaggagccgtct

SEQ ID NO: 25409 - DNA, 20 bp, Haemophilus ducreyi
gggcggcaaacctgcaaagg

SEQ ID NO: 25410 - DNA, 20 bp, Lactococcus lactis
gacagtgatgtttagctaat

SEQ ID NO: 25411 - DNA, 30 bp, Enterococcus saccharolyticus
tagagaagaacaaggatgagaagagaatgt

SEQ ID NO: 25412 - DNA, 20 bp, Streptococcus suis
acgctgaagtctggtgcttg

SEQ ID NO: 25413 - DNA, 30 bp, Brevibacillus laterosporus
tgctaataccggatagggttttgcttcgcc

SEQ ID NO: 25414 - DNA, 20 bp, Enterococcus saccharolyticus
gcatgagagaaagctgaaag

SEQ ID NO: 25415 - DNA, 20 bp, Brevibacillus laterosporus
ttcgcctgaagcgaaacgga

SEQ ID NO: 25416 - DNA, 20 bp, Haemophilus actinomycetomicans
accgagagggtggcgtttac

SEQ ID NO: 25417 - DNA, 20 bp, Enterococcus saccharolyticus
cttcttttccgccgaacttc

SEQ ID NO: 25418 - DNA, 20 bp, Streptococcus suis
tggtgcttgcactagacgga

SEQ ID NO: 25419 - DNA, 20 bp, Brevibacillus laterosporus
tttaaataaggtagcacctt

SEQ ID NO: 25420 - DNA, 20 bp, Enterococcus saccharolyticus
ttcattggaaaagaggagtg

SEQ ID NO: 25421 - DNA, 20 bp, Haemophilus actinomycetomicans
tggatagctgaaccgagagg

SEQ ID NO: 25422 - DNA, 30 bp, Streptococcus suis
atacttgaaaggagcaattgcttcactatg

SEQ ID NO: 25423 - DNA, 20 bp, Brevibacillus laterosporus
gatagggttttgcttcgcct

SEQ ID NO: 25424 - DNA, 20 bp, Haemophilus ducreyi
gcaaaggggagcgaatctca

SEQ ID NO: 25425 - DNA, 20 bp, Enterococcus saccharolyticus
ttcggttcattggaaaagag

SEQ ID NO: 25426 - DNA, 30 bp, Streptococcus suis
aataccgcataacagtattaaccgcatggt

SEQ ID NO: 25427 - DNA, 20 bp, Brevibacillus laterosporus
gcatgaagcgaaacggaaag

SEQ ID NO: 25428 - DNA, 20 bp, Brevibacillus laterosporus
ttaaataaggtggcaccttg

SEQ ID NO: 25429 - DNA, 20 bp, Streptococcus suis
gtctggtgcttgcactagac

SEQ ID NO: 25430 - DNA, 20 bp, Brevibacillus laterosporus
atttaaataaggtagcacct

SEQ ID NO: 25431 - DNA, 20 bp, Lactococcus lactis
agacagtgatgtttagctaa

SEQ ID NO: 25432 - DNA, 30 bp, Lactococcus lactis
gtgatgtttagctaatctcttaaaaccatt

SEQ ID NO: 25433 - DNA, 20 bp, Haemophilus ducreyi
ctgcaaaggggagcgaatct

SEQ ID NO: 25434 - DNA, 20 bp, Enterococcus saccharolyticus
aacttcggttcattggaaaa

SEQ ID NO: 25435 - DNA, 20 bp, Brevibacillus laterosporus
ggaagaaacagtgctattta

SEQ ID NO: 25436 - DNA, 30 bp, Eikenella corrodens
cgcgttattcgagcggccgataactgatta

SEQ ID NO: 25437 - DNA, 20 bp, Enterococcus saccharolyticus
ctcgcatgagagaaagctga

SEQ ID NO: 25438 - DNA, 20 bp, Haemophilus ducreyi
caaaggggagcgaatctcac

SEQ ID NO: 25439 - DNA, 20 bp, Aerococcus urinae
gagcagcgaccttgtgaaag

SEQ ID NO: 25440 - DNA, 20 bp, Brevibacillus laterosporus
ttcgcattggaaactgcgta

SEQ ID NO: 25441 - DNA, 20 bp, Brevibacillus laterosporus
ttaaataaggtagcaccttg

SEQ ID NO: 25442 - DNA, 20 bp, Lactococcus lactis
tcgcgagacagtgatgttta

SEQ ID NO: 25443 - DNA, 30 bp, Brevibacillus laterosporus
gggatgctacttcgcgagaagatgctaatc

SEQ ID NO: 25444 - DNA, 20 bp, Brevibacillus laterosporus
aagaaacagtgccatttaaa

SEQ ID NO: 25445 - DNA, 20 bp, Enterococcus saccharolyticus
ttttctcgcatgagagaaag

SEQ ID NO: 25446 - DNA, 20 bp, Enterococcus saccharolyticus
cgcatgagagaaagctgaaa

SEQ ID NO: 25447 - DNA, 30 bp, Brevibacillus laterosporus
tgtaagactgggataacatagggaaactta

SEQ ID NO: 25448 - DNA, 20 bp, Enterococcus saccharolyticus
aaggatgagaagagaatgtt

SEQ ID NO: 25449 - DNA, 20 bp, Brevibacillus laterosporus
agggttttgcttcgcctgaa

SEQ ID NO: 25450 - DNA, 20 bp, Enterococcus saccharolyticus
tctcgcatgagagaaagctg

SEQ ID NO: 25451 - DNA, 20 bp, Brevibacillus laterosporus
taccggatagggttttgctt

SEQ ID NO: 25452 - DNA, 20 bp, Aerococcus urinae
agcagcgaccttgtgaaagc

SEQ ID NO: 25453 - DNA, 20 bp, Brevibacillus laterosporus
gttcgcattggaaactgcgt

SEQ ID NO: 25454 - DNA, 20 bp, Haemophilus ducreyi
gcacgaaggggcttgctcct

SEQ ID NO: 25455 - DNA, 20 bp, Brevibacillus laterosporus
tttaaataaggtggcacctt

SEQ ID NO: 25456 - DNA, 30 bp, Corynebacterium renale
caacgcgtgtgctacttcgtgaggagatgc

SEQ ID NO: 25457 - DNA, 20 bp, Streptococcus suis
tctggtgcttgcactagacg

SEQ ID NO: 25458 - DNA, 20 bp, Enterococcus saccharolyticus
agaagaacaaggatgagaag

SEQ ID NO: 25459 - DNA, 30 bp, Haemophilus ducreyi
caaacctgcaaaggggagcgaatctcacaa

SEQ ID NO: 25460 - DNA, 20 bp, Brevibacillus laterosporus
accggatagggttttgcttc

SEQ ID NO: 25461 - DNA, 20 bp, Enterococcus saccharolyticus
aagaacaaggatgagaagag

SEQ ID NO: 25462 - DNA, 20 bp, Enterococcus saccharolyticus
cgaacgcttcttttccgccg

SEQ ID NO: 25463 - DNA, 20 bp, Aerococcus urinae
cgagcagcgaccttgtgaaa

SEQ ID NO: 25464 - DNA, 20 bp, Haemophilus actinomycetomicans
gatagctgaaccgagagggt

SEQ ID NO: 25465 - DNA, 20 bp, Enterococcus saccharolyticus
agagaatgttcatcccttga

SEQ ID NO: 25466 - DNA, 20 bp, Streptococcus suis
ggtgcttgcactagacggat

SEQ ID NO: 25467 - DNA, 20 bp, Streptococcus suis
ttgcactagacggatgagtt

SEQ ID NO: 25468 - DNA, 20 bp, Enterococcus saccharolyticus
ggttcattggaaaagaggag

SEQ ID NO: 25469 - DNA, 20 bp, Brevibacillus laterosporus
ccggatagggttttgcttcg

SEQ ID NO: 25470 - DNA, 20 bp, Lactococcus lactis
gagacagtgatgtttagcta

SEQ ID NO: 25471 - DNA, 20 bp, Enterococcus saccharolyticus
ttcttttccgccgaacttcg

SEQ ID NO: 25472 - DNA, 20 bp, Brevibacillus laterosporus
tcgcatgaagcgaaacggaa

SEQ ID NO: 25473 - DNA, 20 bp, Brevibacillus laterosporus
atgaagcgaaacggaaagat

SEQ ID NO: 25474 - DNA, 20 bp, Brevibacillus laterosporus
catgaagcgaaacggaaaga

SEQ ID NO: 25475 - DNA, 20 bp, Enterococcus saccharolyticus
ggatgagaagagaatgttca

SEQ ID NO: 25476 - DNA, 20 bp, Streptococcus suis
gcactagacggatgagttgc

SEQ ID NO: 25477 - DNA, 30 bp, Eikenella corrodens
ctcgcgttattcgagcggccgataactgat

SEQ ID NO: 25478 - DNA, 20 bp, Brevibacillus laterosporus
tttgcttcgcctgaagcgaa

SEQ ID NO: 25479 - DNA, 20 bp, Enterococcus saccharolyticus
tttctcgcatgagagaaagc

SEQ ID NO: 25480 - DNA, 20 bp, Aerococcus urinae
acgagcagcgaccttgtgaa

SEQ ID NO: 25481 - DNA, 30 bp, Brevibacillus laterosporus
gggttttgcttcgcctgaagcgaaacggaa

SEQ ID NO: 25482 - DNA, 20 bp, Enterococcus saccharolyticus
gaagagaatgttcatccctt

SEQ ID NO: 25483 - DNA, 20 bp, Brevibacillus laterosporus
aacagtgccatttaaataag

SEQ ID NO: 25484 - DNA, 20 bp, Lactococcus lactis
acagtgatgtttagctaatc

SEQ ID NO: 25485 - DNA, 20 bp, Enterococcus saccharolyticus
gaacgcttcttttccgccga

SEQ ID NO: 25486 - DNA, 20 bp, Haemophilus ducreyi
gagggcggcaaacctgcaaa

SEQ ID NO: 25487 - DNA, 20 bp, Brevibacillus laterosporus
gaaacagtgctatttaaata

SEQ ID NO: 25488 - DNA, 20 bp, Enterococcus saccharolyticus
tcgcatgagagaaagctgaa

SEQ ID NO: 25489 - DNA, 20 bp, Enterococcus saccharolyticus
tccgccgaacttcggttcat

SEQ ID NO: 25490 - DNA, 20 bp, Brevibacillus laterosporus
gttttgcttcgcctgaagcg

SEQ ID NO: 25491 - DNA, 20 bp, Brevibacillus laterosporus
taaataaggtagcaccttga

SEQ ID NO: 25492 - DNA, 20 bp, Enterococcus saccharolyticus
aacgcttcttttccgccgaa

SEQ ID NO: 25493 - DNA, 20 bp, Haemophilus actinomycetomicans
ctgaaccgagagggtggcgt

SEQ ID NO: 25494 - DNA, 20 bp, Lactococcus lactis
gtcgcgagacagtgatgttt

SEQ ID NO: 25495 - DNA, 20 bp, Enterococcus saccharolyticus
agaacaaggatgagaagaga

SEQ ID NO: 25496 - DNA, 30 bp, Brevibacillus laterosporus
gagaagatgctaatctcttaaaaccaatct

SEQ ID NO: 25497 - DNA, 20 bp, Streptococcus suis
gtgcttgcactagacggatg

SEQ ID NO: 25498 - DNA, 20 bp, Brevibacillus laterosporus
gctatttaaataaggtagca

SEQ ID NO: 25499 - DNA, 30 bp, Brevibacillus laterosporus
tggaaactgcgtagcttgagtgcaggagag

SEQ ID NO: 25500 - DNA, 20 bp, Lactococcus lactis
agtgatgtttagctaatctc

SEQ ID NO: 25501 - DNA, 20 bp, Enterococcus saccharolyticus
gagaagagaatgttcatccc

SEQ ID NO: 25502 - DNA, 20 bp, Enterococcus saccharolyticus
catgagagaaagctgaaagg

SEQ ID NO: 25503 - DNA, 30 bp, Haemophilus actinomycetomicans
gaagtggatagctgaaccgagagggtggcg

SEQ ID NO: 25504 - DNA, 20 bp, Lactococcus lactis
cgcgagacagtgatgtttag

SEQ ID NO: 25505 - DNA, 20 bp, Brevibacillus laterosporus
cggatagggttttgcttcgc

SEQ ID NO: 25506 - DNA, 20 bp, Brevibacillus laterosporus
cttcgcctgaagcgaaacgg

SEQ ID NO: 25507 - DNA, 20 bp, Enterococcus saccharolyticus
ttctcgcatgagagaaagct

SEQ ID NO: 25508 - DNA, 30 bp, Streptococcus suis
tgcttgcactagacggatgagttgcgaacg

SEQ ID NO: 25509 - DNA, 20 bp, Haemophilus actinemycetemcomitans
ctgggggtctggagtacttt

SEQ ID NO: 25510 - DNA, 20 bp, Brevibacillus laterosporus
gggttttgcttcgcctgaag

SEQ ID NO: 25511 - DNA, 20 bp, Streptococcus suis
tgcactagacggatgagttg

SEQ ID NO: 25512 - DNA, 20 bp, Haemophilus actinomycetomicans
gaaccgagagggtggcgttt

SEQ ID NO: 25513 - DNA, 30 bp, Brevibacillus centrosporus
cgtaagactgggataacatagggaaactta

SEQ ID NO: 25514 - DNA, 20 bp, Brevibacillus laterosporus
aaataaggtagcaccttgac

SEQ ID NO: 25515 - DNA, 20 bp, Brevibacillus laterosporus
gaagaaacagtgctatttaa

SEQ ID NO: 25516 - DNA, 20 bp, Enterococcus saccharolyticus
cggttcattggaaaagagga

SEQ ID NO: 25517 - DNA, 30 bp, Aerococcus urinae
gagcagcgaccttgtgaaagcaagcgaatc

SEQ ID NO: 25518 - DNA, 30 bp, Aerococcus urinae
acaacgagcagcgaccttgtgaaagcaagc

SEQ ID NO: 25519 - DNA, 20 bp, Enterococcus saccharolyticus
atgagagaaagctgaaaggc

SEQ ID NO: 25520 - DNA, 20 bp, Enterococcus saccharolyticus
cgcttcttttccgccgaact

SEQ ID NO: 25521 - DNA, 20 bp, Brevibacillus laterosporus
acagtgctatttaaataagg

SEQ ID NO: 25522 - DNA, 20 bp, Enterococcus saccharolyticus
caaggatgagaagagaatgt

SEQ ID NO: 25523 - DNA, 20 bp, Lactococcus lactis
cgagacagtgatgtttagct

SEQ ID NO: 25524 - DNA, 20 bp, Enterococcus saccharolyticus
aagagaatgttcatcccttg

SEQ ID NO: 25525 - DNA, 20 bp, Brevibacillus laterosporus
tatttaaataaggtagcacc

SEQ ID NO: 25526 - DNA, 20 bp, Brevibacillus laterosporus
ggatagggttttgcttcgcc

SEQ ID NO: 25527 - DNA, 20 bp, Enterococcus saccharolyticus
gcttcttttccgccgaactt

SEQ ID NO: 25528 - DNA, 20 bp, Haemophilus actinomycetomicans
tagctgaaccgagagggtgg

SEQ ID NO: 25529 - DNA, 20 bp, Lactococcus lactis
agtcgcgagacagtgatgtt

SEQ ID NO: 25530 - DNA, 20 bp, Haemophilus ducreyi
agcacgaaggggcttgctcc

SEQ ID NO: 25531 - DNA, 30 bp, Aerococcus urinae
gaaagcaagcgaatctcttaaagccattct

SEQ ID NO: 25532 - DNA, 20 bp, Brevibacillus laterosporus
acagtgccatttaaataagg

SEQ ID NO: 25533 - DNA, 20 bp, Haemophilus ducreyi
agggcggcaaacctgcaaag

SEQ ID NO: 25534 - DNA, 20 bp, Brevibacillus laterosporus
cagtgctatttaaataaggt

SEQ ID NO: 25535 - DNA, 20 bp, Paenibacillus lautus
acagcattgtggaataatga

SEQ ID NO: 25536 - DNA, 20 bp, Enterococcus saccharolyticus
agaagagaatgttcatccct

SEQ ID NO: 25537 - DNA, 30 bp, Brevibacillus laterosporus
acctcggttcgcattggaaactgtgtagct

SEQ ID NO: 25538 - DNA, 20 bp, Brevibacillus laterosporus
agtgctatttaaataaggta

SEQ ID NO: 25539 - DNA, 30 bp, Streptococcus suis
cttgcactagacggatgagttgcgaacggg

SEQ ID NO: 25540 - DNA, 20 bp, Brevibacillus laterosporus
tcgcattggaaactgcgtag

SEQ ID NO: 25541 - DNA, 20 bp, Lactococcus lactis
tgatgtttagctaatctctt

SEQ ID NO: 25542 - DNA, 20 bp, Brevibacillus laterosporus
ctatttaaataaggtagcac

SEQ ID NO: 25543 - DNA, 30 bp, Brevibacillus laterosporus
aacctcggttcgcattggaaactgcgtagc

SEQ ID NO: 25544 - DNA, 20 bp, Brevibacillus laterosporus
agggaagaaacagtgctatt

SEQ ID NO: 25545 - DNA, 20 bp, Haemophilus actinomycetomicans
atagctgaaccgagagggtg

SEQ ID NO: 25546 - DNA, 20 bp, Brevibacillus laterosporus
ttgcttcgcctgaagcgaaa

SEQ ID NO: 25547 - DNA, 20 bp, Enterococcus saccharolyticus
gccgaacttcggttcattgg

SEQ ID NO: 25548 - DNA, 20 bp, Streptococcus suis
gcttgcactagacggatgag

SEQ ID NO: 25549 - DNA, 20 bp, Lactococcus lactis
cagtgatgtttagctaatct

SEQ ID NO: 25550 - DNA, 20 bp, Brevibacillus laterosporus
agaaacagtgccatttaaat

SEQ ID NO: 25551 - DNA, 30 bp, Brevibacillus laterosporus
cgagaagatgctaatctcttaaaaccaatc

SEQ ID NO: 25552 - DNA, 20 bp, Haemophilus actinomycetomicans
gctgaaccgagagggtggcg

SEQ ID NO: 25553 - DNA, 20 bp, Corynebacterium propinquum
acgctggcggcggcttaaca

SEQ ID NO: 25554 - DNA, 20 bp, Klebsiella pneumoniae
gttgtaaagactttcagcgg

SEQ ID NO: 25555 - DNA, 20 bp, Proteus vulgaris
gccacactgggactgaacac

SEQ ID NO: 25556 - DNA, 20 bp, Bacillus schlegellii
tacacccgcccgtcacacca

SEQ ID NO: 25557 - DNA, 30 bp, Vibrio alginolyticus
tcgactccatgaagcggaatcgctagtaat

SEQ ID NO: 25558 - DNA, 20 bp, Staphylococcus aureus
acgccgaaacgatgagtgct

SEQ ID NO: 25559 - DNA, 20 bp, Bacteroides thetaiotaomicron
atagttcccgggccttgtac

SEQ ID NO: 25560 - DNA, 20 bp, Vibrio alginolyticus
tcgactccatgaagcggaat

SEQ ID NO: 25561 - DNA, 20 bp, Proteus vulgaris
cctaacacatgcaagcgagc

SEQ ID NO: 25562 - DNA, 20 bp, Bacillus schlegellii
aaaccgggctaataccggat

SEQ ID NO: 25563 - DNA, 20 bp, Bacillus schlegellii
ggaaaccgggctaataccgg

SEQ ID NO: 25564 - DNA, 20 bp, Vibrio alginolyticus
ctcgactccatgaagcggaa

SEQ ID NO: 25565 - DNA, 20 bp, Rhizobium radiobacter
gatcatggctcagacgaacg

SEQ ID NO: 25566 - DNA, 20 bp, Bacillus schlegellii
gaaaccgggctaataccgga

SEQ ID NO: 25567 - DNA, 20 bp, Vibrio harveyi
agtaatcgggatcagaatgc

SEQ ID NO: 25568 - DNA, 20 bp, Vibrio alginolyticus
catgaagcggaatcgctagt

SEQ ID NO: 25569 - DNA, 20 bp, Streptococcus equinus
tcatggctcaggcgaacgct

SEQ ID NO: 25570 - DNA, 30 bp, Paenibacillus azotofixans
ttagctcctgctaggaggctgaaaggcgga

SEQ ID NO: 25571 - DNA, 20 bp, Vibrio cholerae
ggtgtgacgggcgggtgtac

SEQ ID NO: 25572 - DNA, 20 bp, Burkholderia gladioli
cgaaagccggattaatccgc

SEQ ID NO: 25573 - DNA, 20 bp, Corynebacterium propinquum
gctggcggcggcttaacaca

SEQ ID NO: 25574 - DNA, 20 bp, Corynebacterium propinquum
aacgctggcggcggcttaac

SEQ ID NO: 25575 - DNA, 20 bp, Rhizobium radiobacter
atcatggctcagacgaacgc

SEQ ID NO: 25576 - DNA, 20 bp, Bacillus schlegellii
aaccgggctaataccggata

SEQ ID NO: 25577 - DNA, 20 bp, Proteus vulgaris
ctgaacacggcccagactcc

SEQ ID NO: 25578 - DNA, 20 bp, Staphylococcus aureus
cacgccgaaacgatgagtgc

SEQ ID NO: 25579 - DNA, 20 bp, Corynebacterium propinquum
gcggcggcttaacacatgca

SEQ ID NO: 25580 - DNA, 30 bp, Pasteurella pneumotropica
ataaggtctaaggacaaaagggggcgtaag

SEQ ID NO: 25581 - DNA, 20 bp, Micrococcus luteus
ggccttgtacacccgcccgt

SEQ ID NO: 25582 - DNA, 20 bp, Vibrio harveyi
atcgggatcagaatgccacg

SEQ ID NO: 25583 - DNA, 20 bp, Leclercia adecarboxylata
gcggtaatacggaggggcaa

SEQ ID NO: 25584 - DNA, 20 bp, Clostridium barati
gtaggagaacctgcggtgga

SEQ ID NO: 25585 - DNA, 20 bp, Bacteroides thetaiotaomicron
cggtgaatagttcccgggcc

SEQ ID NO: 25586 - DNA, 20 bp, Klebsiella pneumoniae
tgtaaagactttcagcgggg

SEQ ID NO: 25587 - DNA, 20 bp, Citrobacter freundii
ctgagaggatgccagccaca

SEQ ID NO: 25588 - DNA, 20 bp, Bacteroides thetaiotaomicron
gtgaatagttcccgggcctt

SEQ ID NO: 25589 - DNA, 30 bp, Paenibacillus larvae
ggaccttgtgtttctttcgggagacgccag

SEQ ID NO: 25590 - DNA, 20 bp, Corynebacterium urealyticum
ccgcaggctaaaactcaaag

SEQ ID NO: 25591 - DNA, 20 bp, Anaerobiospirillum succiniciproducens
ttgacacaccgcccgtcaca

SEQ ID NO: 25592 - DNA, 20 bp, Vibrio harveyi
aatcgggatcagaatgccac

SEQ ID NO: 25593 - DNA, 20 bp, Bacillus schlegellii
ttgtacacccgcccgtcaca

SEQ ID NO: 25594 - DNA, 20 bp, Proteus vulgaris
gactgaacacggcccagact

SEQ ID NO: 25595 - DNA, 20 bp, Vibrio parahaemolyticus
ggtgataaaccggagaaggt

SEQ ID NO: 25596 - DNA, 20 bp, Staphylococcus aureus
ccacgccgaaacgatgagtg

SEQ ID NO: 25597 - DNA, 20 bp, Corynebacterium urealyticum
agtacggccgcaggctaaaa

SEQ ID NO: 25598 - DNA, 20 bp, Corynebacterium propinquum
gaacgctggcggcggcttaa

SEQ ID NO: 25599 - DNA, 20 bp, Vibrio alginolyticus
gaagcggaatcgctagtaat

SEQ ID NO: 25600 - DNA, 20 bp, Vibrio alginolyticus
actcgactccatgaagcgga

SEQ ID NO: 25601 - DNA, 20 bp, Leifsonia aquatica
gaaccttaccaaggctgaca

SEQ ID NO: 25602 - DNA, 20 bp, Staphylococcus aureus
aggattagataccctggagt

SEQ ID NO: 25603 - DNA, 20 bp, Citrobacter freundii
tggtctgagaggatgccagc

SEQ ID NO: 25604 - DNA, 20 bp, Shigella boydii
cccgggaacgtattcccgtg

SEQ ID NO: 25605 - DNA, 20 bp, Bacteroides thetaiotaomicron
tgaatagttcccgggccttg

SEQ ID NO: 25606 - DNA, 20 bp, Shewanella putrefaciens
cacgggaatacgttcccggg

SEQ ID NO: 25607 - DNA, 20 bp, Bacillus badius
gtagtccacgccgaaacgat

SEQ ID NO: 25608 - DNA, 20 bp, Bacteroides thetaiotaomicron
ggtgaatagttcccgggcct

SEQ ID NO: 25609 - DNA, 20 bp, Vibrio parahaemolyticus
ataaaccggagaaggtgggg

SEQ ID NO: 25610 - DNA, 20 bp, Citrobacter freundii
ctggtctgagaggatgccag

SEQ ID NO: 25611 - DNA, 20 bp, Vibrio harveyi
gaatcgctagtaatcgggat

SEQ ID NO: 25612 - DNA, 20 bp, Vibrio parahaemolyticus
aaaggcgtcgtagtccggat

SEQ ID NO: 25613 - DNA, 30 bp, Corynebacterium pilosum
taccggatattcaacttttgttggaaagcc

SEQ ID NO: 25614 - DNA, 20 bp, Citrobacter freundii
agaggatgccagccacactg

SEQ ID NO: 25615 - DNA, 20 bp, Stenotrophomonas maltophilia
tgaacgctggcggaggccta

SEQ ID NO: 25616 - DNA, 20 bp, Leifsonia aquatica
agaaccttaccaaggctgac

SEQ ID NO: 25617 - DNA, 20 bp, Myroides odoratimimus
atcagccatgatccgggaat

SEQ ID NO: 25618 - DNA, 20 bp, Vibrio alginolyticus
gactccatgaagcggaatcg

SEQ ID NO: 25619 - DNA, 20 bp, Vibrio parahaemolyticus
gataaaccggagaaggtggg

SEQ ID NO: 25620 - DNA, 20 bp, Citrobacter freundii
gaggatgccagccacactgg

SEQ ID NO: 25621 - DNA, 20 bp, Vibrio cholerae
tggtgtgacgggcgggtgta

SEQ ID NO: 25622 - DNA, 20 bp, Stenotrophomonas maltophilia
tggcggaggcctaacacatg

SEQ ID NO: 25623 - DNA, 20 bp, Stenotrophomonas maltophilia
gaacgctggcggaggcctaa

SEQ ID NO: 25624 - DNA, 20 bp, Micrococcus luteus
cgggccttgtacacccgccc

SEQ ID NO: 25625 - DNA, 20 bp, Citrobacter freundii
ggtctgagaggatgccagcc

SEQ ID NO: 25626 - DNA, 20 bp, Enterococcus faecium
cacccgaagtcgggaggtaa

SEQ ID NO: 25627 - DNA, 20 bp, Rhizobium radiobacter
tcatggctcagacgaacgct

SEQ ID NO: 25628 - DNA, 20 bp, Streptococcus sp.
aggtaccgtaaggagccagc

SEQ ID NO: 25629 - DNA, 20 bp, Staphylococcus succinus
acggctaccttgtacgactt

SEQ ID NO: 25630 - DNA, 20 bp, Proteus vulgaris
cacactgggactgaacacgg

SEQ ID NO: 25631 - DNA, 20 bp, Vibrio parahaemolyticus
cggtgataaaccggagaagg

SEQ ID NO: 25632 - DNA, 20 bp, Proteus vulgaris
cactgggactgaacacggcc

SEQ ID NO: 25633 - DNA, 20 bp, Streptococcus equi
aagtcgtacaaggtagccgt

SEQ ID NO: 25634 - DNA, 20 bp, Vibrio parahaemolyticus
tgataaaccggagaaggtgg

SEQ ID NO: 25635 - DNA, 20 bp, Proteus vulgaris
gcctaacacatgcaagcgag

SEQ ID NO: 25636 - DNA, 20 bp, Proteus vulgaris
ggactgaacacggcccagac

SEQ ID NO: 25637 - DNA, 20 bp, Vibrio parahaemolyticus
gtgataaaccggagaaggtg

SEQ ID NO: 25638 - DNA, 20 bp, Citrobacter freundii
tctgagaggatgccagccac

SEQ ID NO: 25639 - DNA, 20 bp, Bacteroides thetaiotaomicron
aatagttcccgggccttgta

SEQ ID NO: 25640 - DNA, 20 bp, Proteus vulgaris
actgaacacggcccagactc

SEQ ID NO: 25641 - DNA, 20 bp, Streptococcus infantarius
ttgcatgtattaggccgccg

SEQ ID NO: 25642 - DNA, 20 bp, Vibrio alginolyticus
actccatgaagcggaatcgc

SEQ ID NO: 25643 - DNA, 20 bp, Corynebacterium urealyticum
cgcaggctaaaactcaaagg

SEQ ID NO: 25644 - DNA, 20 bp, Vibrio harveyi
gtaatcgggatcagaatgcc

SEQ ID NO: 25645 - DNA, 20 bp, Stenotrophomonas maltophilia
ggcggaggcctaacacatgc

SEQ ID NO: 25646 - DNA, 20 bp, Anaerobiospirillum succiniciproducens
tacgttcccgggccttgaca

SEQ ID NO: 25647 - DNA, 20 bp, Proteus vulgaris
ccacactgggactgaacacg

SEQ ID NO: 25648 - DNA, 20 bp, Corynebacterium propinquum
ctggcggcggcttaacacat

SEQ ID NO: 25649 - DNA, 20 bp, Neisseria subflava
cgttcccgggtctgtacaca

SEQ ID NO: 25650 - DNA, 20 bp, Micrococcus luteus
gggccttgtacacccgcccg

SEQ ID NO: 25651 - DNA, 20 bp, Vibrio harveyi
gctagtaatcgggatcagaa

SEQ ID NO: 25652 - DNA, 20 bp, Proteus vulgaris
aaacggggctaataccgcat

SEQ ID NO: 25653 - DNA, 20 bp, Vibrio harveyi
atcgctagtaatcgggatca

SEQ ID NO: 25654 - DNA, 20 bp, Haemophilus influenzae
atcatggctcagattgacgc

SEQ ID NO: 25655 - DNA, 20 bp, Haemophilus influenzae
tgcagtcgaacggtagcagg

SEQ ID NO: 25656 - DNA, 20 bp, Enterococcus faecium
acccgaagtcgggaggtaac

SEQ ID NO: 25657 - DNA, 20 bp, Neisseria subflava
gttcccgggtctgtacacac

SEQ ID NO: 25658 - DNA, 20 bp, Proteus vulgaris
ggcctaacacatgcaagcga

SEQ ID NO: 25659 - DNA, 20 bp, Corynebacterium urealyticum
ggccgcaggctaaaactcaa

SEQ ID NO: 25660 - DNA, 20 bp, Streptococcus equinus
tgatcatggctcaggcgaac

SEQ ID NO: 25661 - DNA, 20 bp, Citrobacter freundii
gtctgagaggatgccagcca

SEQ ID NO: 25662 - DNA, 20 bp, Bacillus cereus
acaaggagccgtatcggaag

SEQ ID NO: 25663 - DNA, 20 bp, Stenotrophomonas maltophilia
gcggaggcctaacacatgca

SEQ ID NO: 25664 - DNA, 20 bp, Micrococcus luteus
ccgggccttgtacacccgcc

SEQ ID NO: 25665 - DNA, 20 bp, Leptotrichia buccalis
tcccagctgtaaacgatgat

SEQ ID NO: 25666 - DNA, 30 bp, Fusobacterium mortiferum
ggagaggttaccttcgggtaaccaaaaccg

SEQ ID NO: 25667 - DNA, 20 bp, Vibrio alginolyticus
atgaagcggaatcgctagta

SEQ ID NO: 25668 - DNA, 20 bp, Proteus vulgaris
actgggactgaacacggccc

SEQ ID NO: 25669 - DNA, 20 bp, Leclercia adecarboxylata
cggtaatacggaggggcaag

SEQ ID NO: 25670 - DNA, 20 bp, Corynebacterium urealyticum
gagtacggccgcaggctaaa

SEQ ID NO: 25671 - DNA, 20 bp, Bacteroides uniformis
caaatcagccggcccttacg

SEQ ID NO: 25672 - DNA, 20 bp, Bacillus schlegellii
tgtacacccgcccgtcacac

SEQ ID NO: 25673 - DNA, 20 bp, Stenotrophomonas maltophilia
aacgctggcggaggcctaac

SEQ ID NO: 25674 - DNA, 20 bp, Stenotrophomonas maltophilia
ctggcggaggcctaacacat

SEQ ID NO: 25675 - DNA, 30 bp, Vibrio metschnikovii
aataccgcatgatgcccttgtttataatga

SEQ ID NO: 25676 - DNA, 20 bp, Bacillus schlegellii
gtacacccgcccgtcacacc

SEQ ID NO: 25677 - DNA, 20 bp, Streptococcus constellatus
tcatggctcaggacgacgct

SEQ ID NO: 25678 - DNA, 20 bp, Stenotrophomonas maltophilia
gctggcggaggcctaacaca

SEQ ID NO: 25679 - DNA, 20 bp, Prevotella intermedia
ttaccttccaactagctaat

SEQ ID NO: 25680 - DNA, 20 bp, Streptococcus infantarius
cttgcatgtattaggccgcc

SEQ ID NO: 25681 - DNA, 20 bp, Leclercia adecarboxylata
taatacggaggggcaagcgt

SEQ ID NO: 25682 - DNA, 20 bp, Enterococcus faecium
aacacccgaagtcgggaggt

SEQ ID NO: 25683 - DNA, 20 bp, Bacillus schlegellii
cgggaaaccgggctaatacc

SEQ ID NO: 25684 - DNA, 20 bp, Campylobacter jejuni
catgcagtcgagcgaacaga

SEQ ID NO: 25685 - DNA, 20 bp, Corynebacterium propinquum
cgctggcggcggcttaacac

SEQ ID NO: 25686 - DNA, 20 bp, Bacteroides thetaiotaomicron
gaatagttcccgggccttgt

SEQ ID NO: 25687 - DNA, 20 bp, Unknown Organism
  oligonucleotide from CDC group VB-3
acccggagtgattcatgact

SEQ ID NO: 25688 - DNA, 20 bp, Vibrio alginolyticus
cgactccatgaagcggaatc

SEQ ID NO: 25689 - DNA, 20 bp, Brevibacterium casei
gctacaatggctggacagag

SEQ ID NO: 25690 - DNA, 20 bp, Klebsiella pneumoniae
cgggttgtaaagactttcag

SEQ ID NO: 25691 - DNA, 20 bp, Streptococcus criceti
gccagccgctaaggtgggac

SEQ ID NO: 25692 - DNA, 20 bp, Corynebacterium urealyticum
cggccgcaggctaaaactca

SEQ ID NO: 25693 - DNA, 20 bp, Rhizobium radiobacter
ttgatcatggctcagacgaa

SEQ ID NO: 25694 - DNA, 20 bp, Staphylococcus aureus
cgccgaaacgatgagtgcta

SEQ ID NO: 25695 - DNA, 20 bp, Proteus vulgaris
acactgggactgaacacggc

SEQ ID NO: 25696 - DNA, 20 bp, Corynebacterium urealyticum
gccgcaggctaaaactcaaa

SEQ ID NO: 25697 - DNA, 20 bp, Vibrio alginolyticus
ccatgaagcggaatcgctag

SEQ ID NO: 25698 - DNA, 20 bp, Bacillus badius
tagtccacgccgaaacgatg

SEQ ID NO: 25699 - DNA, 20 bp, Corynebacterium urealyticum
gtacggccgcaggctaaaac

SEQ ID NO: 25700 - DNA, 20 bp, Clostridium clostridiiforme
cagcagccgcggaatacgta

SEQ ID NO: 25701 - DNA, 20 bp, Corynebacterium urealyticum
ggagtacggccgcaggctaa

SEQ ID NO: 25702 - DNA, 20 bp, Enterococcus faecium
cccgaagtcgggaggtaacc

SEQ ID NO: 25703 - DNA, 20 bp, Leuconostoc carnosum
atggctcaggagaacgctgg

SEQ ID NO: 25704 - DNA, 20 bp, Streptococcus dysgalactiae
agagatagactttcccttcg

SEQ ID NO: 25705 - DNA, 20 bp, Leclercia adecarboxylata
gtaatacggaggggcaagcg

SEQ ID NO: 25706 - DNA, 20 bp, Campylobacter jejuni
acatgcagtcgagcgaacag

SEQ ID NO: 25707 - DNA, 20 bp, Bacillus schlegellii
gggaaaccgggctaataccg

SEQ ID NO: 25708 - DNA, 20 bp, Brevibacterium casei
tgctacaatggctggacaga

SEQ ID NO: 25709 - DNA, 20 bp, Myroides odoratimimus
gccatgatccgggaatacgt

SEQ ID NO: 25710 - DNA, 20 bp, Vibrio harveyi
tcgctagtaatcgggatcag

SEQ ID NO: 25711 - DNA, 20 bp, Enterococcus faecium
aagtcgggaggtaacctttt

SEQ ID NO: 25712 - DNA, 20 bp, Neisseria meningitidis
tacggctaccttgtacgact

SEQ ID NO: 25713 - DNA, 20 bp, Rhizobium radiobacter
tttgatcatggctcagacga

SEQ ID NO: 25714 - DNA, 20 bp, Micrococcus luteus
gccttgtacacccgcccgtc

SEQ ID NO: 25715 - DNA, 20 bp, Bacillus schlegellii
ccgggaaaccgggctaatac

SEQ ID NO: 25716 - DNA, 20 bp, Corynebacterium propinquum
cggcggcttaacacatgcaa

SEQ ID NO: 25717 - DNA, 20 bp, Proteus vulgaris
gggactgaacacggcccaga

SEQ ID NO: 25718 - DNA, 20 bp, Staphylococcus aureus
attagataccctggagtcca

SEQ ID NO: 25719 - DNA, 20 bp, Leclercia adecarboxylata
ggtaatacggaggggcaagc

SEQ ID NO: 25720 - DNA, 20 bp, Vibrio alginolyticus
tgaagcggaatcgctagtaa

SEQ ID NO: 25721 - DNA, 20 bp, Vibrio harveyi
aatcgctagtaatcgggatc

SEQ ID NO: 25722 - DNA, 20 bp, Unknown Organism
  oligonucleotide from CDC group VB-3
ttacccggagtgattcatga

SEQ ID NO: 25723 - DNA, 20 bp, Bacteroides uniformis
tcagccggcccttacgtccg

SEQ ID NO: 25724 - DNA, 20 bp, Burkholderia gladioli
aagccggattaatccgcata

SEQ ID NO: 25725 - DNA, 20 bp, Klebsiella pneumoniae
ttgtaaagactttcagcggg

SEQ ID NO: 25726 - DNA, 20 bp, Burkholderia gladioli
gcgaaagccggattaatccg

SEQ ID NO: 25727 - DNA, 20 bp, Enterococcus faecium
acacccgaagtcgggaggta

SEQ ID NO: 25728 - DNA, 20 bp, Vibrio parahaemolyticus
aaaccggagaaggtggggac

SEQ ID NO: 25729 - DNA, 20 bp, Klebsiella pneumoniae
gtaaagactttcagcgggga

SEQ ID NO: 25730 - DNA, 20 bp, Staphylococcus schleiferi
gttgactgccgggacaaacc

SEQ ID NO: 25731 - DNA, 20 bp, Veillonella atypica
agtcgtacaaggtagccgta

SEQ ID NO: 25732 - DNA, 20 bp, Proteus vulgaris
agccacactgggactgaaca

SEQ ID NO: 25733 - DNA, 30 bp, Lactococcus lactis
agattggtgcttgcaccaatttgaagagca

SEQ ID NO: 25734 - DNA, 20 bp, Citrobacter braakii
tcgtacaaggtaaccgtagg

SEQ ID NO: 25735 - DNA, 30 bp, Pseudomonas oryzihabitans
catagcgaatacctgtgagttttgacgtta

SEQ ID NO: 25736 - DNA, 30 bp, Enterococcus saccharolyticus
taatgctttttctcgcatgagagaaagctg

SEQ ID NO: 25737 - DNA, 30 bp, Aerococcus urinae
cgcataggaaaggtcaccgcatggtgacct

SEQ ID NO: 25738 - DNA, 30 bp, Vibrio metschnikovii
ccttgtttataatgaacagggaccaaagag

SEQ ID NO: 25739 - DNA, 30 bp, Enterococcus saccharolyticus
taacgctttttctcgcatgagagaaagctg

SEQ ID NO: 25740 - DNA, 30 bp, Lactococcus lactis
gcgatgaagattggtgcttgcaccaatttg

SEQ ID NO: 25741 - DNA, 30 bp, Paenibacillus alvei
acgtgagctaataccagataggcattttcc

SEQ ID NO: 25742 - DNA, 30 bp, Lactococcus garvieae
cttcactacttgatgatcccgcgttgtatt

SEQ ID NO: 25743 - DNA, 20 bp, Citrobacter braakii
cgtacaaggtaaccgtaggg

SEQ ID NO: 25744 - DNA, 30 bp, Lactococcus garvieae
tacttgatgatcccgcgttgtattagctag

SEQ ID NO: 25745 - DNA, 30 bp, Lactococcus lactis
gcttgcaccaatttgaagagcagcgaacgg

SEQ ID NO: 25746 - DNA, 30 bp, Paenibacillus azotofixans
accggataattcctcttagctcctgctagg

SEQ ID NO: 25747 - DNA, 30 bp, Paenibacillus azotofixans
tcctcttagctcctgctaggaggctgaaag

SEQ ID NO: 25748 - DNA, 30 bp, Aerococcus urinae
accgcatggtgacctttggaaagacggctt

SEQ ID NO: 25749 - DNA, 30 bp, Clostridium botulinum
gaatactaggtgtaggagctgtcatggctt

SEQ ID NO: 25750 - DNA, 30 bp, Corynebacterium cystitidis
gggtgtgtggaaaggttttgtgctggtatg

SEQ ID NO: 25751 - DNA, 30 bp, Aerococcus urinae
aggaaacaccacctcatggtggtgtttgga

SEQ ID NO: 25752 - DNA, 30 bp, Brevibacterium linens
caccagaccgttctggaaacagttcctccc

SEQ ID NO: 25753 - DNA, 30 bp, Sporosarcina ureae
cgaactgttggaagcttgcttccttcagtt

SEQ ID NO: 25754 - DNA, 30 bp, Paenibacillus alvei
agataggcattttcctcgcatgaggggaat

SEQ ID NO: 25755 - DNA, 20 bp, Paenibacillus larvae
tgtgtttctttcgggagacg

SEQ ID NO: 25756 - DNA, 30 bp, Bacteroides thetaiotaomicron
atttgaatattctggaaacaggttagccgc

SEQ ID NO: 25757 - DNA, 30 bp, Fusobacterium mortiferum
atggtatataagagcggcatcgtttttata

SEQ ID NO: 25758 - DNA, 30 bp, Paenibacillus larvae
ggaccttgtgtttccttcgggagacgccag

SEQ ID NO: 25759 - DNA, 30 bp, Corynebacterium cystitidis
atacactggatcgccatggagacatggttt

SEQ ID NO: 25760 - DNA, 20 bp, Capnocytophaga sp.
ttaaatggagactgacgtac

SEQ ID NO: 25761 - DNA, 30 bp, Bacillus firmus
agcggacggatgggagcttgctcccagacc

SEQ ID NO: 25762 - DNA, 30 bp, Actinomyces neuii
ccattagcgcttttgtgtttttggtgagag

SEQ ID NO: 25763 - DNA, 30 bp, Paenibacillus azotofixans
ctaggaggctgaaaggcggagcaatctgtc

SEQ ID NO: 25764 - DNA, 20 bp, Streptococcus uberis
atagggtacacatgtaccct

SEQ ID NO: 25765 - DNA, 30 bp, Listeria grayi
cagctccgcatggagcgggtttgaaaggcg

SEQ ID NO: 25766 - DNA, 30 bp, Paenibacillus azotofixans
aggctgaaaggcggagcaatctgtcaccaa

SEQ ID NO: 25767 - DNA, 30 bp, Bacillus badius
atattctttttcttcgcatgaagaagaatg

SEQ ID NO: 25768 - DNA, 30 bp, Bacillus badius
cgcatgaagaagaatggaaaggcggctttt

SEQ ID NO: 25769 - DNA, 20 bp, Actinomyces neuii
gggatccattagcgcttttg

SEQ ID NO: 25770 - DNA, 20 bp, Actinomyces neuii
ggatccattagcgcttttgt

SEQ ID NO: 25771 - DNA, 30 bp, Clostridium botulinum
gagctgtcatggcttctgtgccgccgctaa

SEQ ID NO: 25772 - DNA, 30 bp, Aerococcus urinae
aacgggtgctaataccgcataggaaaggtc

SEQ ID NO: 25773 - DNA, 30 bp, Prevotella intermedia
agtaaagcggggcacgtgtgcccctttgca

SEQ ID NO: 25774 - DNA, 20 bp, Streptococcus uberis
tagggtacacatgtacccta

SEQ ID NO: 25775 - DNA, 30 bp, Pseudomonas oryzihabitans
ttgggaggaagggctcatagcgaatacctg

SEQ ID NO: 25776 - DNA, 30 bp, Lactococcus garvieae
cgcatgattcttatttaaaagaagcaattg

SEQ ID NO: 25777 - DNA, 20 bp, Pseudomonas oryzihabitans
aagggctcatagcgaatacc

SEQ ID NO: 25778 - DNA, 20 bp, Staphylococcus capitis
tcttgacggacctaatcaga

SEQ ID NO: 25779 - DNA, 30 bp, Aerococcus urinae
gtgctaataccgcataggaaacaccacctc

SEQ ID NO: 25780 - DNA, 20 bp, Paenibacillus larvae
ggaccttgtgtttccttcgg

SEQ ID NO: 25781 - DNA, 20 bp, Streptococcus dysgalactiae
aatggaggacccatgtcttt

SEQ ID NO: 25782 - DNA, 20 bp, Streptococcus dysgalactiae
gcatgacaatggaggaccca

SEQ ID NO: 25783 - DNA, 20 bp, Campylobacter sputorum
ttaactgacactaatgcgtg

SEQ ID NO: 25784 - DNA, 20 bp, Pseudomonas oryzihabitans
atagcgaatacctgtgagtt

SEQ ID NO: 25785 - DNA, 20 bp, Paenibacillus alvei
taactgctcctagggtgacg

SEQ ID NO: 25786 - DNA, 30 bp, Bacteroides ovatus
gggcttaaattgcaacagaatatattggaa

SEQ ID NO: 25787 - DNA, 20 bp, Actinomyces viscosus
atggtcctggagacggggtt

SEQ ID NO: 25788 - DNA, 20 bp, Campylobacter sputorum
ccatagagaggaacaacact

SEQ ID NO: 25789 - DNA, 20 bp, Streptococcus uberis
tgacaatagggtacacatgt

SEQ ID NO: 25790 - DNA, 20 bp, Haemophilus paraphrophilus
gttgttgtgtgaatagcaca

SEQ ID NO: 25791 - DNA, 20 bp, Aerococcus urinae
gtggtgtttggaaagacggc

SEQ ID NO: 25792 - DNA, 20 bp, Paenibacillus azotofixans
tcttagctcctgctaggagg

SEQ ID NO: 25793 - DNA, 20 bp, Paenibacillus glucanolyticus
gaacgtctcatagagtaact

SEQ ID NO: 25794 - DNA, 20 bp, Fusobacterium nucleatum
ttttaacttcgatttgggtg

SEQ ID NO: 25795 - DNA, 20 bp, Aerococcus urinae
taccgcataggaaaggtcac

SEQ ID NO: 25796 - DNA, 20 bp, Paenibacillus glucanolyticus
agaacgtctcatagagtaac

SEQ ID NO: 25797 - DNA, 20 bp, Pseudomonas oryzihabitans
ggaggaagggctcatagcga

SEQ ID NO: 25798 - DNA, 20 bp, Clostridium botulinum
ggagctgtcatggcttctgt

SEQ ID NO: 25799 - DNA, 20 bp, Granulicatella elegans
taggttctttagtcgcatga

SEQ ID NO: 25800 - DNA, 30 bp, Listeria seeligeri
tgataaggagtgacgcatgtcactgctttg

SEQ ID NO: 25801 - DNA, 30 bp, Paenibacillus larvae
agtaactgcccctggagtgacggtacttga

SEQ ID NO: 25802 - DNA, 20 bp, Sporosarcina ureae
gcgaactgttggaagcttgc

SEQ ID NO: 25803 - DNA, 30 bp, Lactococcus garvieae
taaaagaagcaattgcttcactacttgatg

SEQ ID NO: 25804 - DNA, 20 bp, Pasteurella pneumotropica
gtctaaggacaaaagggggc

SEQ ID NO: 25805 - DNA, 20 bp, Citrobacter youngae
ccggccagcagccgcggtaa

SEQ ID NO: 25806 - DNA, 30 bp, Listeria seeligeri
ataaggagtgacgcatgtcactgctttgaa

SEQ ID NO: 25807 - DNA, 30 bp, Lactococcus garvieae
aagcaattgcttcactacttgatgatcccg

SEQ ID NO: 25808 - DNA, 20 bp, Vibrio metschnikovii
gtttataatgaacagggacc

SEQ ID NO: 25809 - DNA, 20 bp, Aerococcus urinae
ataggaaacaccacctcatg

SEQ ID NO: 25810 - DNA, 30 bp, Paenibacillus alvei
cccacggaaacgtgagctaataccagatag

SEQ ID NO: 25811 - DNA, 20 bp, Porphyromonas maccae
ggtcttgggttattgcatga

SEQ ID NO: 25812 - DNA, 20 bp, Prevotella denticola
cgtgtccctatttgcaggta

SEQ ID NO: 25813 - DNA, 30 bp, Actinomyces viscosus
ccggatggtcctggagacggggtttcctcc

SEQ ID NO: 25814 - DNA, 20 bp, Fusobacterium mortiferum
gtcgagggagaggttacctt

SEQ ID NO: 25815 - DNA, 30 bp, Bacillus badius
gatattctttttcttcgcatgaagaagaat

SEQ ID NO: 25816 - DNA, 20 bp, Paenibacillus azotofixans
attcctcttagctcctgcta

SEQ ID NO: 25817 - DNA, 20 bp, Eubacterium limosum
ttcgggtgacattagaactg

SEQ ID NO: 25818 - DNA, 30 bp, Bacteroides ovatus
aaacagtatagccgtaaggctgttgtgaag

SEQ ID NO: 25819 - DNA, 30 bp, Lactococcus garvieae
attcttatttaaaagaagcaattgcttcac

SEQ ID NO: 25820 - DNA, 30 bp, Bacillus lentus
taataccggataacttctttcttctcctgg

SEQ ID NO: 25821 - DNA, 20 bp, Campylobacter sputorum
tattaagagctttcgctatg

SEQ ID NO: 25822 - DNA, 20 bp, Bacillus lentus
cttctttcttctcctggaga

SEQ ID NO: 25823 - DNA, 30 bp, Proteus vulgaris
aggaaggtgttaagattaatactcttagca

SEQ ID NO: 25824 - DNA, 20 bp, Neisseria gonorrhoeae
gtacaaggtaacagtagggg

SEQ ID NO: 25825 - DNA, 20 bp, Pseudomonas oryzihabitans
acagcgaatacctgtgagtt

SEQ ID NO: 25826 - DNA, 20 bp, Vibrio metschnikovii
tgtttataatgaacagggac

SEQ ID NO: 25827 - DNA, 20 bp, Streptococcus uberis
gcatgacaatagggtacaca

SEQ ID NO: 25828 - DNA, 20 bp, Unknown Organism
  oligonucleotide from CDC group VB-3
tagtctaaccttccaggggg

SEQ ID NO: 25829 - DNA, 20 bp, Fusobacterium mortiferum
tcgagggagaggttaccttc

SEQ ID NO: 25830 - DNA, 20 bp, Campylobacter sputorum
acctcatactccaattatac

SEQ ID NO: 25831 - DNA, 20 bp, Aneurinibacillus aneurinilyticus
atcccgctgtccctcctaga

SEQ ID NO: 25832 - DNA, 20 bp, Corynebacterium pilosum
ccggatattcaacttttgtt

SEQ ID NO: 25833 - DNA, 20 bp, Granulicatella elegans
cgatgcttgcattggtcaat

SEQ ID NO: 25834 - DNA, 20 bp, Capnocytophaga ochracea
agggctacgcgtagtttgat

SEQ ID NO: 25835 - DNA, 20 bp, Paenibacillus larvae
gtgtttctttcgggagacgc

SEQ ID NO: 25836 - DNA, 20 bp, Paenibacillus larvae
ccttgtgtttctttcgggag

SEQ ID NO: 25837 - DNA, 20 bp, Granulicatella elegans
agcgaccgatgcttgcattg

SEQ ID NO: 25838 - DNA, 20 bp, Porphyromonas maccae
gtcttgggttattgcatgat

SEQ ID NO: 25839 - DNA, 20 bp, Neisseria gonorrhoeae
gtcgtacaaggtaacagtag

SEQ ID NO: 25840 - DNA, 30 bp, Actinomyces viscosus
gacggggtttcctcctttgggggctggttc

SEQ ID NO: 25841 - DNA, 30 bp, Enterococcus cecorum
taattccatttaccgcatggcagatggatg

SEQ ID NO: 25842 - DNA, 20 bp, Paenibacillus larvae
tgtttctttcgggagacgcc

SEQ ID NO: 25843 - DNA, 20 bp, Pseudomonas oryzihabitans
catagcgaatacctgtgagt

SEQ ID NO: 25844 - DNA, 20 bp, Listeria seeligeri
cgcatgtcactgctttgaaa

SEQ ID NO: 25845 - DNA, 20 bp, Brevibacterium linens
gaaacagttcctcccctttg

SEQ ID NO: 25846 - DNA, 20 bp, Paenibacillus alvei
cgcatgaggggaatgagaaa

SEQ ID NO: 25847 - DNA, 20 bp, Moraxella lacunata
gttaatacctacaagccctg

SEQ ID NO: 25848 - DNA, 20 bp, Bordetella trematum
acggcgccagctaatacctg

SEQ ID NO: 25849 - DNA, 20 bp, Campylobacter sputorum
atacctcatactccaattat

SEQ ID NO: 25850 - DNA, 20 bp, Lactococcus lactis
accaatttgaagagcagcga

SEQ ID NO: 25851 - DNA, 20 bp, Vibrio metschnikovii
atgaacagggaccaaagagg

SEQ ID NO: 25852 - DNA, 20 bp, Streptococcus dysgalactiae
acaatggaggacccatgtct

SEQ ID NO: 25853 - DNA, 20 bp, Actinomyces meyeri
ctaaccggtttttgctgggg

SEQ ID NO: 25854 - DNA, 20 bp, Paenibacillus larvae
tttctttcgggagacgccag

SEQ ID NO: 25855 - DNA, 20 bp, Fusobacterium nucleatum
gggcatcctaggattatgaa

SEQ ID NO: 25856 - DNA, 20 bp, Pediococcus acidilactici
gttaattgatcaggacgtgc

SEQ ID NO: 25857 - DNA, 20 bp, Campylobacter sputorum
cccatagagaggaacaacac

SEQ ID NO: 25858 - DNA, 20 bp, Granulicatella elegans
cgaccgatgcttgcattggt

SEQ ID NO: 25859 - DNA, 30 bp, Actinomyces neuii
caagtcgaacgggatccattagcgcttttg

SEQ ID NO: 25860 - DNA, 20 bp, Capnocytophaga gingivalis
aagccctttcgggggcagaa

SEQ ID NO: 25861 - DNA, 30 bp, Paenibacillus azotofixans
tgtggtcgcactggaaactgggcagcttga

SEQ ID NO: 25862 - DNA, 20 bp, Paenibacillus alvei
tcctcgcatgaggggaatga

SEQ ID NO: 25863 - DNA, 20 bp, Actinomyces meyeri
cctaaccggtttttgctggg

SEQ ID NO: 25864 - DNA, 20 bp, Paenibacillus larvae
gggagtaactgcccctggag

SEQ ID NO: 25865 - DNA, 20 bp, Paenibacillus azotofixans
ctcttagctcctgctaggag

SEQ ID NO: 25866 - DNA, 20 bp, Vibrio harveyi
tcaaagtcatcatggccctt

SEQ ID NO: 25867 - DNA, 20 bp, Granulicatella elegans
gcgaccgatgcttgcattgg

SEQ ID NO: 25868 - DNA, 20 bp, Corynebacterium pseudotuberculosis
gcttaacacatgcaagttcg

SEQ ID NO: 25869 - DNA, 20 bp, Pediococcus acidilactici
gttaattgatcatgacgtgc

SEQ ID NO: 25870 - DNA, 20 bp, Paenibacillus larvae
gaccttgtgtttctttcggg

SEQ ID NO: 25871 - DNA, 20 bp, Prevotella intermedia
acgtgtgcccctttgcattt

SEQ ID NO: 25872 - DNA, 20 bp, Campylobacter sputorum
gacgcgtaggtggatagata

SEQ ID NO: 25873 - DNA, 20 bp, Aerococcus urinae
cgcataggaaacaccacctc

SEQ ID NO: 25874 - DNA, 20 bp, Capnocytophaga gingivalis
agccctttcgggggcagaaa

SEQ ID NO: 25875 - DNA, 30 bp, Bacillus badius
gcatgaagaagaatggaaaggcggctttta

SEQ ID NO: 25876 - DNA, 20 bp, Corynebacterium cystitidis
tttgtgggtgtgtggaaagg

SEQ ID NO: 25877 - DNA, 20 bp, Sporosarcina ureae
gagcgaactgttggaagctt

SEQ ID NO: 25878 - DNA, 30 bp, Listeria grayi
cagctccgcatggagcaggtttgaaaggcg

SEQ ID NO: 25879 - DNA, 20 bp, Paenibacillus alvei
taccagataggcattttcct

SEQ ID NO: 25880 - DNA, 30 bp, Brevibacterium linens
gagatgcgagaccgcgaggttttagcgaat

SEQ ID NO: 25881 - DNA, 20 bp, Vibrio metschnikovii
gcatgatgcccttgtttata

SEQ ID NO: 25882 - DNA, 20 bp, Fusobacterium mortiferum
tcgggtaaccaaaaccggcg

SEQ ID NO: 25883 - DNA, 30 bp, Lactococcus lactis
caagttgagcgatgaagattggtgcttgca

SEQ ID NO: 25884 - DNA, 20 bp, Brevibacillus brevis
acacgagaacgccctagaaa

SEQ ID NO: 25885 - DNA, 20 bp, Enterobacter cloacae
tcgggagggcgcttacccac

SEQ ID NO: 25886 - DNA, 30 bp, Clostridium tetani
tactcgtaactgaggaagtcccttcgggga

SEQ ID NO: 25887 - DNA, 30 bp, Brevibacterium linens
gaggttttagcgaatcccttaaagccagtc

SEQ ID NO: 25888 - DNA, 20 bp, Neisseria lactamica
cgtacaaggtaaaccgtagg

SEQ ID NO: 25889 - DNA, 20 bp, Sporosarcina ureae
ctctcgcatgagggaatgtt

SEQ ID NO: 25890 - DNA, 20 bp, Pasteurella pneumotropica
ataaggtctaaggacaaaag

SEQ ID NO: 25891 - DNA, 20 bp, Prevotella denticola
gggataaagttagggacgtg

SEQ ID NO: 25892 - DNA, 30 bp, Corynebacterium cystitidis
atggagacatggtttcccttttgtggctgg

SEQ ID NO: 25893 - DNA, 20 bp, Streptococcus dysgalactiae
atggaggacccatgtctttc

SEQ ID NO: 25894 - DNA, 20 bp, Pseudomonas luteola
taggggaacctgcgttggat

SEQ ID NO: 25895 - DNA, 20 bp, Bacillus lentus
acttctttcttctcctggag

SEQ ID NO: 25896 - DNA, 20 bp, Paenibacillus azotofixans
tcctcttagctcctgctagg

SEQ ID NO: 25897 - DNA, 20 bp, Brevibacillus brevis
gatatgacgcacggaggcat

SEQ ID NO: 25898 - DNA, 20 bp, Listeria seeligeri
acgcatgtcactgctttgaa

SEQ ID NO: 25899 - DNA, 30 bp, Paenibacillus alvei
cgcctaggagagtaactgctcctagggtga

SEQ ID NO: 25900 - DNA, 20 bp, Prevotella intermedia
cacgtgtgcccctttgcatt

SEQ ID NO: 25901 - DNA, 20 bp, Streptococcus dysgalactiae
gacaatggaggacccatgtc

SEQ ID NO: 25902 - DNA, 20 bp, Streptococcus equinus
tttgatcatggctcaggcga

SEQ ID NO: 25903 - DNA, 20 bp, Porphyromonas maccae
caaccacagtcttgccttcg

SEQ ID NO: 25904 - DNA, 30 bp, Sporosarcina ureae
tctcgcatgagggaatgttgaaagacggtt

SEQ ID NO: 25905 - DNA, 30 bp, Fusobacterium mortiferum
gggtaaccaaaaccggcgcacgggtgcgta

SEQ ID NO: 25906 - DNA, 20 bp, Paenibacillus larvae
tcgagcggaccttgtgtttc

SEQ ID NO: 25907 - DNA, 20 bp, Sporosarcina ureae
actccgggaacccggggtta

SEQ ID NO: 25908 - DNA, 30 bp, Corynebacterium cystitidis
caatggtcggtacagcgcgtggcgatatcg

SEQ ID NO: 25909 - DNA, 20 bp, Aerococcus urinae
tggtgtttggaaagacggct

SEQ ID NO: 25910 - DNA, 20 bp, Eubacterium limosum
tgatggatccttcgggtgac

SEQ ID NO: 25911 - DNA, 20 bp, Leuconostoc mesenteroides
gtcgaacgcatagcgaaagg

SEQ ID NO: 25912 - DNA, 30 bp, Paenibacillus alvei
gcaatgtaagttgggtgtttaaacctaggg

SEQ ID NO: 25913 - DNA, 20 bp, Bacteroides forsythus
cgcatggggctatttgttaa

SEQ ID NO: 25914 - DNA, 20 bp, Actinomyces neuii
atccattagcgcttttgtgt

SEQ ID NO: 25915 - DNA, 20 bp, Aerococcus urinae
taggaaacaccacctcatgg

SEQ ID NO: 25916 - DNA, 20 bp, Brevibacterium linens
ggttttagcgaatcccttaa

SEQ ID NO: 25917 - DNA, 20 bp, Campylobacter sputorum
ggacgcgtaggtggatagat

SEQ ID NO: 25918 - DNA, 20 bp, Lactococcus lactis
attggtgcttgcaccaattt

SEQ ID NO: 25919 - DNA, 20 bp, Paenibacillus azotofixans
cctcttagctcctgctagga

SEQ ID NO: 25920 - DNA, 20 bp, Listeria seeligeri
ggagtgacgcatgtcactgc

SEQ ID NO: 25921 - DNA, 20 bp, Porphyromonas maccae
gaaagtacatatcctgtcac

SEQ ID NO: 25922 - DNA, 20 bp, Paenibacillus validus
gggcaacctatggcttacgg

SEQ ID NO: 25923 - DNA, 20 bp, Aerococcus urinae
aataccgcataggaaaggtc

SEQ ID NO: 25924 - DNA, 20 bp, Neisseria gonorrhoeae
aagaaaaggccgttgccaat

SEQ ID NO: 25925 - DNA, 20 bp, Pediococcus acidilactici
aattgatcaggacgtgcttg

SEQ ID NO: 25926 - DNA, 20 bp, Pasteurella pneumotropica
ccgcataaggtctaaggaca

SEQ ID NO: 25927 - DNA, 30 bp, Paenibacillus larvae
acatgcaagtcgagcggaccttgtgtttct

SEQ ID NO: 25928 - DNA, 20 bp, Streptococcus dysgalactiae
tggaggacccatgtctttca

SEQ ID NO: 25929 - DNA, 20 bp, Bacillus badius
caagtacggaagtaactgtc

SEQ ID NO: 25930 - DNA, 20 bp, Campylobacter sputorum
tgccccatagagaggaacaa

SEQ ID NO: 25931 - DNA, 20 bp, Pseudomonas oryzihabitans
aggaagggctcatagcgaat

SEQ ID NO: 25932 - DNA, 20 bp, Fusobacterium mortiferum
accttcgggtaaccaaaacc

SEQ ID NO: 25933 - DNA, 20 bp, Corynebacterium cystitidis
acgaagcttgtgtgacggta

SEQ ID NO: 25934 - DNA, 20 bp, Corynebacterium propinquum
cggataggactgcactttag

SEQ ID NO: 25935 - DNA, 30 bp, Actinomyces meyeri
ccgaagcccatggcctaaccggtttttgct

SEQ ID NO: 25936 - DNA, 20 bp, Prevotella bivia
gtaaccgtaggggaaccctg

SEQ ID NO: 25937 - DNA, 20 bp, Campylobacter sputorum
tctgccccatagagaggaac

SEQ ID NO: 25938 - DNA, 20 bp, Burkholderia gladioli
cggaatcctagagagatctg

SEQ ID NO: 25939 - DNA, 20 bp, Bacteroides ovatus
atagccgtaaggctgttgtg

SEQ ID NO: 25940 - DNA, 20 bp, Actinomyces meyeri
taaccggtttttgctggggg

SEQ ID NO: 25941 - DNA, 20 bp, Haemophilus ducreyi
ttggtctttaagactggcgc

SEQ ID NO: 25942 - DNA, 20 bp, Paenibacillus validus
tgaaacatggggcaacctat

SEQ ID NO: 25943 - DNA, 20 bp, Streptococcus dysgalactiae
caatggaggacccatgtctt

SEQ ID NO: 25944 - DNA, 20 bp, Streptococcus suis
agtttctcatttgacggtat

SEQ ID NO: 25945 - DNA, 20 bp, Prevotella denticola
cctatttgcaggtaccatac

SEQ ID NO: 25946 - DNA, 30 bp, Bacteroides ovatus
ccgggcttaaattgcaacagaatatattgg

SEQ ID NO: 25947 - DNA, 20 bp, Pseudomonas oryzihabitans
gaagggctcatagcgaatac

SEQ ID NO: 25948 - DNA, 20 bp, Clostridium botulinum
gagctgtcatggcttctgtg

SEQ ID NO: 25949 - DNA, 30 bp, Vibrio hollisae
gggactttcgggcctctcgcgtcaggatgg

SEQ ID NO: 25950 - DNA, 20 bp, Campylobacter sputorum
tccaattatacataagttta

SEQ ID NO: 25951 - DNA, 20 bp, Bacteroides thetaiotaomicron
ttctggaaacaggttagccg

SEQ ID NO: 25952 - DNA, 20 bp, Bacteroides thetaiotaomicron
agattggtattggggtaagt

SEQ ID NO: 25953 - DNA, 20 bp, Haemophilus ducreyi
agcacgaaggacttgctcct

SEQ ID NO: 25954 - DNA, 20 bp, Eikenella corrodens
gtcgtacaaggaaaccgtag

SEQ ID NO: 25955 - DNA, 20 bp, Actinomyces neuii
ccattagcgcttttgtgttt

SEQ ID NO: 25956 - DNA, 20 bp, Haemophilus paraphrophilus
tgtgtgaatagcacaacaaa

SEQ ID NO: 25957 - DNA, 20 bp, Granulicatella elegans
gaccgatgcttgcattggtc

SEQ ID NO: 25958 - DNA, 20 bp, Streptococcus pneumoniae
tccctctgacgactctagag

SEQ ID NO: 25959 - DNA, 20 bp, Listeria seeligeri
tgacgcatgtcactgctttg

SEQ ID NO: 25960 - DNA, 30 bp, Aerococcus urinae
atggtggtgtttggaaagacggctttgctg

SEQ ID NO: 25961 - DNA, 20 bp, Paenibacillus larvae
gcggaccttgtgtttccttc

SEQ ID NO: 25962 - DNA, 20 bp, Paenibacillus validus
ggggcaacctatggcttacg

SEQ ID NO: 25963 - DNA, 20 bp, Paenibacillus larvae
gaccttgtgtttccttcggg

SEQ ID NO: 25964 - DNA, 20 bp, Porphyromonas maccae
tcaaccacagtcttgccttc

SEQ ID NO: 25965 - DNA, 20 bp, Paenibacillus azotofixans
aattcctcttagctcctgct

SEQ ID NO: 25966 - DNA, 20 bp, Lactococcus garvieae
ttcactacttgatgatcccg

SEQ ID NO: 25967 - DNA, 20 bp, Paenibacillus larvae
accttgtgtttccttcggga

SEQ ID NO: 25968 - DNA, 20 bp, Lactococcus garvieae
gttctctgtagcgcagctaa

SEQ ID NO: 25969 - DNA, 20 bp, Burkholderia gladioli
tcggaatcctagagagatct

SEQ ID NO: 25970 - DNA, 20 bp, Paenibacillus alvei
gcaggcggcaatgtaagttg

SEQ ID NO: 25971 - DNA, 20 bp, Lactococcus lactis
caccaatttgaagagcagcg

SEQ ID NO: 25972 - DNA, 20 bp, Pseudomonas oryzihabitans
ggaagggctcatagcgaata

SEQ ID NO: 25973 - DNA, 20 bp, Campylobacter sputorum
ctcatactccaattatacat

SEQ ID NO: 25974 - DNA, 20 bp, Paenibacillus larvae
cggaccttgtgtttctttcg

SEQ ID NO: 25975 - DNA, 20 bp, Clostridium ramosum
gtcgaacgcgagcacttgtg

SEQ ID NO: 25976 - DNA, 20 bp, Campylobacter sputorum
ccccatagagaggaacaaca

SEQ ID NO: 25977 - DNA, 30 bp, Listeria ivanovii
atgtcatcactttgaaagatggtttcggct

SEQ ID NO: 25978 - DNA, 20 bp, Pasteurella pneumotropica
cgcataaggtctaaggacaa

SEQ ID NO: 25979 - DNA, 20 bp, Enterococcus cecorum
aattccatttaccgcatggc

SEQ ID NO: 25980 - DNA, 20 bp, Pseudomonas oryzihabitans
gggaggaagggctcatagcg

SEQ ID NO: 25981 - DNA, 20 bp, Pseudomonas oryzihabitans
agggctcatagcgaatacct

SEQ ID NO: 25982 - DNA, 20 bp, Porphyromonas maccae
acttgcctgatagaaaggga

SEQ ID NO: 25983 - DNA, 20 bp, Paenibacillus larvae
ccttgtgtttccttcgggag

SEQ ID NO: 25984 - DNA, 20 bp, Lactococcus garvieae
cttcactacttgatgatccc

SEQ ID NO: 25985 - DNA, 30 bp, Lactococcus garvieae
cataacaatgagaatcgcatgattcttatt

SEQ ID NO: 25986 - DNA, 20 bp, Pasteurella pneumotropica
tctaaggacaaaagggggcg

SEQ ID NO: 25987 - DNA, 20 bp, Neisseria lactamica
gtacaaggtaaaccgtaggg

SEQ ID NO: 25988 - DNA, 20 bp, Pediococcus acidilactici
ttaattgatcaggacgtgct

SEQ ID NO: 25989 - DNA, 20 bp, Enterobacter hormaechei
gtgggtaagcgccctcccga

SEQ ID NO: 25990 - DNA, 30 bp, Lactococcus garvieae
aatgagaatcgcatgattcttatttaaaag

SEQ ID NO: 25991 - DNA, 20 bp, Streptococcus dysgalactiae
ggaggacccatgtctttcat

SEQ ID NO: 25992 - DNA, 20 bp, Kingella denitrificans
ccactttttgttgacggtac

SEQ ID NO: 25993 - DNA, 20 bp, Citrobacter freundii
gctggtctgagaggatgcca

SEQ ID NO: 25994 - DNA, 20 bp, Eubacterium limosum
tggatccttcgggtgacatt

SEQ ID NO: 25995 - DNA, 20 bp, Campylobacter sputorum
aggacgcgtaggtggataga

SEQ ID NO: 25996 - DNA, 20 bp, Campylobacter sputorum
tagagaggaacaacacttag

SEQ ID NO: 25997 - DNA, 30 bp, Paenibacillus larvae
acatgcaagtcgagcggaccttgtgtttcc

SEQ ID NO: 25998 - DNA, 20 bp, Sporosarcina ureae
gaagcttgcttccttcagtt

SEQ ID NO: 25999 - DNA, 30 bp, Clostridium ramosum
tggtagccgagtgacggtactttattagaa

SEQ ID NO: 26000 - DNA, 20 bp, Streptococcus pneumoniae
ccctctgacgactctagaga

SEQ ID NO: 26001 - DNA, 20 bp, Vibrio metschnikovii
aatgaacagggaccaaagag

SEQ ID NO: 26002 - DNA, 20 bp, Paenibacillus larvae
cccctggagtgacggtactt

SEQ ID NO: 26003 - DNA, 30 bp, Listeria seeligeri
ggagtgacgcatgtcactgctttgaaagat

SEQ ID NO: 26004 - DNA, 20 bp, Fusobacterium mortiferum
agtcgagggagaggttacct

SEQ ID NO: 26005 - DNA, 20 bp, Sporosarcina ureae
agcgaactgttggaagcttg

SEQ ID NO: 26006 - DNA, 20 bp, Streptococcus uberis
agggtacacatgtaccctat

SEQ ID NO: 26007 - DNA, 20 bp, Campylobacter sputorum
cttaactgacactaatgcgt

SEQ ID NO: 26008 - DNA, 30 bp, Lactococcus lactis
ccaatttgaagagcagcgaacgggtgagta

SEQ ID NO: 26009 - DNA, 20 bp, Listeria seeligeri
gacgcatgtcactgctttga

SEQ ID NO: 26010 - DNA, 20 bp, Fusobacterium mortiferum
ctacttgatccttcgggtga

SEQ ID NO: 26011 - DNA, 20 bp, Streptococcus uberis
gcttgcactggtctaaggag

SEQ ID NO: 26012 - DNA, 20 bp, Campylobacter sputorum
cctcatactccaattataca

SEQ ID NO: 26013 - DNA, 20 bp, Pediococcus acidilactici
taattgatcaggacgtgctt

SEQ ID NO: 26014 - DNA, 20 bp, Porphyromonas maccae
aacttgcctgatagaaaggg

SEQ ID NO: 26015 - DNA, 20 bp, Paenibacillus larvae
ttccttcgggagacgccagg

SEQ ID NO: 26016 - DNA, 20 bp, Eubacterium limosum
cttcgggtgacattagaact

SEQ ID NO: 26017 - DNA, 30 bp, Lactococcus garvieae
atcccgcgttgtattagctagttggtagtg

SEQ ID NO: 26018 - DNA, 30 bp, Eubacterium limosum
gatggatccttcgggtgacattagaactgg

SEQ ID NO: 26019 - DNA, 20 bp, Brevibacterium linens
aaacagttcctcccctttgg

SEQ ID NO: 26020 - DNA, 20 bp, Neisseria gonorrhoeae
tcgtacaaggtaacagtagg

SEQ ID NO: 26021 - DNA, 20 bp, Aerococcus urinae
atggtgacctttggaaagac

SEQ ID NO: 26022 - DNA, 30 bp, Vibrio metschnikovii
acagggaccaaagagggggaccttcgggcc

SEQ ID NO: 26023 - DNA, 20 bp, Haemophilus segnis
tgcttctttgatgacgagtg

SEQ ID NO: 26024 - DNA, 20 bp, Aerococcus urinae
cgcatggtgacctttggaaa

SEQ ID NO: 26025 - DNA, 20 bp, Campylobacter sputorum
tataacaataagcttttttg

SEQ ID NO: 26026 - DNA, 20 bp, Turicella otitidis
gtaacaggtacccgtaccgg

SEQ ID NO: 26027 - DNA, 20 bp, Actinomyces viscosus
gatggtcctggagacggggt

SEQ ID NO: 26028 - DNA, 20 bp, Bacillus laevolacticus
ggacctatccttcgggatag

SEQ ID NO: 26029 - DNA, 20 bp, Enterococcus saccharolyticus
acgctttttctcgcatgaga

SEQ ID NO: 26030 - DNA, 20 bp, Paenibacillus larvae
ggagtaactgcccctggagt

SEQ ID NO: 26031 - DNA, 20 bp, Prevotella denticola
ttttgtatggggataaagtt

SEQ ID NO: 26032 - DNA, 20 bp, Aerococcus urinae
gtgacctttggaaagacggc

SEQ ID NO: 26033 - DNA, 20 bp, Bacillus badius
ccggatattctttttcttcg

SEQ ID NO: 26034 - DNA, 20 bp, Capnocytophaga ochracea
aaagctctggtggtgaaaga

SEQ ID NO: 26035 - DNA, 20 bp, Pseudomonas oryzihabitans
tgagttttgacgttaccaac

SEQ ID NO: 26036 - DNA, 20 bp, Listeria grayi
aataccgaataataatcagc

SEQ ID NO: 26037 - DNA, 20 bp, Paenibacillus lautus
tcacagcattgtggaataat

SEQ ID NO: 26038 - DNA, 20 bp, Listeria seeligeri
catgtcactgctttgaaaga

SEQ ID NO: 26039 - DNA, 20 bp, Aneurinibacillus aneurinilyticus
agcggaccaaagaagagctt

SEQ ID NO: 26040 - DNA, 30 bp, Aerococcus urinae
acctgaagtcggtgaggtaacctttggagc

SEQ ID NO: 26041 - DNA, 20 bp, Actinomyces viscosus
tgaaggagccagcttgctgg

SEQ ID NO: 26042 - DNA, 20 bp, Fusobacterium mortiferum
taaccaaaaccggcgcacgg

SEQ ID NO: 26043 - DNA, 20 bp, Pediococcus acidilactici
taattgatcatgacgtgctt

SEQ ID NO: 26044 - DNA, 20 bp, Campylobacter sputorum
gctaatacctcatactccaa

SEQ ID NO: 26045 - DNA, 20 bp, Actinomyces naeslundii
ggggggtgtggatgagtggc

SEQ ID NO: 26046 - DNA, 20 bp, Paenibacillus larvae
tttcgggagacgccaggtta

SEQ ID NO: 26047 - DNA, 20 bp, Clostridium ramosum
aaaggaagaacggcggctac

SEQ ID NO: 26048 - DNA, 20 bp, Bacillus azotoformans
caagtcgagcggatgataaa

SEQ ID NO: 26049 - DNA, 20 bp, Eubacterium limosum
agaaggttttgatggatcct

SEQ ID NO: 26050 - DNA, 20 bp, Corynebacterium cystitidis
acgaagcgtgtgtgacggta

SEQ ID NO: 26051 - DNA, 20 bp, Capnocytophaga gingivalis
cgcaagctgagtggctaagc

SEQ ID NO: 26052 - DNA, 20 bp, Haemophilus ducreyi
cggtagcacgaaggacttgc

SEQ ID NO: 26053 - DNA, 20 bp, Eubacterium limosum
gatggatccttcgggtgaca

SEQ ID NO: 26054 - DNA, 20 bp, Neisseria subflava
cacaaaaccgatcgagtccg

SEQ ID NO: 26055 - DNA, 20 bp, Lactococcus garvieae
atagcttgctatttttatga

SEQ ID NO: 26056 - DNA, 20 bp, Bacillus firmus
ataattcttttcctcacatg

SEQ ID NO: 26057 - DNA, 30 bp, Enterococcus cecorum
taattccatttaccgcatggtagatggatg

SEQ ID NO: 26058 - DNA, 30 bp, Fusobacterium mortiferum
tgcctttgaaactgtcagtcttgaatgatt

SEQ ID NO: 26059 - DNA, 20 bp, Listeria grayi
aatgaccttaggagcttgct

SEQ ID NO: 26060 - DNA, 20 bp, Corynebacterium pilosum
taccggatattcaacttttg

SEQ ID NO: 26061 - DNA, 20 bp, Shigella sonnei
tcagagatgaaaatgtgcct

SEQ ID NO: 26062 - DNA, 20 bp, Aerococcus urinae
ccacctcatggtggtgtttg

SEQ ID NO: 26063 - DNA, 20 bp, Eubacterium limosum
gttattggggaagaagaatg

SEQ ID NO: 26064 - DNA, 30 bp, Bacteroides capillosus
atctaatctttaaaaccggtctcagttcgg

SEQ ID NO: 26065 - DNA, 20 bp, Bacillus badius
attctttttcttcgcatgaa

SEQ ID NO: 26066 - DNA, 20 bp, Bacteroides ovatus
agactgttactgacactgat

SEQ ID NO: 26067 - DNA, 20 bp, Vibrio hollisae
agaatccctggtagcgtagc

SEQ ID NO: 26068 - DNA, 20 bp, Serratia marcescens
cttaatacgttcatcaattg

SEQ ID NO: 26069 - DNA, 20 bp, Paenibacillus validus
tcatgaaacatggggcaacc

SEQ ID NO: 26070 - DNA, 20 bp, Paenibacillus macerans
tgatatggagcgaatcctag

SEQ ID NO: 26071 - DNA, 20 bp, Corynebacterium cystitidis
tggtcggtacagcgcgtggc

SEQ ID NO: 26072 - DNA, 20 bp, Sporosarcina ureae
cgtcatggagacatgatttt

SEQ ID NO: 26073 - DNA, 20 bp, Corynebacterium group ANF
tgggttgtcgtcagctcgtg

SEQ ID NO: 26074 - DNA, 20 bp, Corynebacterium cystitidis
atattcacgtatcttttgtg

SEQ ID NO: 26075 - DNA, 20 bp, Myroides odoratimimus
tttgtacaggaagaaacctc

SEQ ID NO: 26076 - DNA, 20 bp, Bacteroides thetaiotaomicron
gcatggtcttattattaaag

SEQ ID NO: 26077 - DNA, 30 bp, Capnocytophaga gingivalis
catttgataattaaaactgcggtggtgaaa

SEQ ID NO: 26078 - DNA, 20 bp, Campylobacter sputorum
ttttatagcatttaaaaata

SEQ ID NO: 26079 - DNA, 20 bp, Paenibacillus macerans
gcatgggagacttgggaaag

SEQ ID NO: 26080 - DNA, 20 bp, Pseudomonas oryzihabitans
gaggaagggctcatagcgaa

SEQ ID NO: 26081 - DNA, 20 bp, Bacillus badius
aatggaaaggcggcttttag

SEQ ID NO: 26082 - DNA, 30 bp, Lactobacillus acidophilus
gaaccaacagattcacttcggtgatgacgt

SEQ ID NO: 26083 - DNA, 20 bp, Bacillus oleronius
ttcgcatgaaggagaattga

SEQ ID NO: 26084 - DNA, 20 bp, Fusobacterium nucleatum
atgattatagggcatcctag

SEQ ID NO: 26085 - DNA, 20 bp, Bacteroides ovatus
ccgtaaggctgttgtgaagg

SEQ ID NO: 26086 - DNA, 20 bp, Actinomyces viscosus
aaggagccagcttgctggtt

SEQ ID NO: 26087 - DNA, 20 bp, Alcaligenes faecalis
aacaaggtagacgtatcgga

SEQ ID NO: 26088 - DNA, 20 bp, Streptococcus suis
aaccgcatggtagatgcttg

SEQ ID NO: 26089 - DNA, 20 bp, Campylobacter sputorum
aacaataagcttttttgaag

SEQ ID NO: 26090 - DNA, 20 bp, Campylobacter sputorum
agtagcttaactactaaact

SEQ ID NO: 26091 - DNA, 20 bp, Capnocytophaga gingivalis
gcgcaagctgagtggctaag

SEQ ID NO: 26092 - DNA, 30 bp, Sporosarcina ureae
tacatgcaagtcgagcgaactgttggaagc

SEQ ID NO: 26093 - DNA, 20 bp, Kingella denitrificans
ttgtgctatttgagcagcca

SEQ ID NO: 26094 - DNA, 20 bp, Actinobacillus ureae
gcttgggaatttggctcatg

SEQ ID NO: 26095 - DNA, 30 bp, Vibrio cholerae
gaaagccacacctctagggcacaacctcca

SEQ ID NO: 26096 - DNA, 20 bp, Paenibacillus macerans
gttgggaaaggcggagcaat

SEQ ID NO: 26097 - DNA, 20 bp, Paenibacillus larvae
gagtaactgcccctggagtg

SEQ ID NO: 26098 - DNA, 20 bp, Enterococcus cecorum
gcataattccatttaccgca

SEQ ID NO: 26099 - DNA, 20 bp, Paenibacillus alvei
tgctcctagggtgacggtac

SEQ ID NO: 26100 - DNA, 20 bp, Eubacterium limosum
tggggaagaagaatgacggt

SEQ ID NO: 26101 - DNA, 20 bp, Pasteurella pneumotropica
taaggtctaaggacaaaagg

SEQ ID NO: 26102 - DNA, 20 bp, Campylobacter sputorum
tattattaagagctttcgct

SEQ ID NO: 26103 - DNA, 20 bp, Paenibacillus thiaminolyticus
cgggaaaccattagcttagc

SEQ ID NO: 26104 - DNA, 20 bp, Bacteroides capilosus
actgcaagtcagggtgtgaa

SEQ ID NO: 26105 - DNA, 20 bp, Bacillus laevolacticus
cctatccttcgggataggtt

SEQ ID NO: 26106 - DNA, 30 bp, Peptoniphilus indolicus
aacgatgagtgctaggtgtcggagtaattc

SEQ ID NO: 26107 - DNA, 30 bp, Fusobacterium necrophorum
tggaggaatcatgaaagctagatgcgctaa

SEQ ID NO: 26108 - DNA, 20 bp, Paenibacillus azotofixans
taccggataattcctcttag

SEQ ID NO: 26109 - DNA, 20 bp, Campylobacter sputorum
aaggacgcgtaggtggatag

SEQ ID NO: 26110 - DNA, 20 bp, Enterococcus cecorum
tttaccgcatggcagatgga

SEQ ID NO: 26111 - DNA, 20 bp, Pasteurella pneumotropica
taaggacaaaagggggcgta

SEQ ID NO: 26112 - DNA, 30 bp, Paenibacillus azotofixans
ctaataccggataattcctcttagctcctg

SEQ ID NO: 26113 - DNA, 20 bp, Pseudomonas mendocina
catgctcttcctcccaactt

SEQ ID NO: 26114 - DNA, 20 bp, Paenibacillus alvei
gaatgagaaaggcggagcaa

SEQ ID NO: 26115 - DNA, 20 bp, Bacteroides thetaiotaomicron
tgaatattctggaaacaggt

SEQ ID NO: 26116 - DNA, 20 bp, Campylobacter sputorum
ataacaataagcttttttga

SEQ ID NO: 26117 - DNA, 20 bp, Aerococcus urinae
tgacctttggaaagacggct

SEQ ID NO: 26118 - DNA, 20 bp, Paenibacillus macerans
catgggagacttgggaaagg

SEQ ID NO: 26119 - DNA, 20 bp, Streptococcus dysgalactiae
tgttaaacatttaaaaggtg

SEQ ID NO: 26120 - DNA, 20 bp, Fusobacterium necrophorum
cttgcctcttagaccgggac

SEQ ID NO: 26121 - DNA, 20 bp, Campylobacter sputorum
agaaatatcttaatatatat

SEQ ID NO: 26122 - DNA, 20 bp, Bacillus azotoformans
gctgctaagccgcgaggctt

SEQ ID NO: 26123 - DNA, 20 bp, Proteus vulgaris
ggtgttaagattaatactct

SEQ ID NO: 26124 - DNA, 20 bp, Paenibacillus alvei
gatgagaaaggcggagcaat

SEQ ID NO: 26125 - DNA, 20 bp, Pasteurella pneumotropica
aaaagggggcgtaagctctt

SEQ ID NO: 26126 - DNA, 20 bp, Campylobacter sputorum
atagagaggaacaacactta

SEQ ID NO: 26127 - DNA, 20 bp, Shigella flexneri
aggggaacctgcgttggatc

SEQ ID NO: 26128 - DNA, 20 bp, Paenibacillus glucanolyticus
aagaacgtctcatagagtaa

SEQ ID NO: 26129 - DNA, 20 bp, Neisseria subflava
atcgagtccggattgcactc

SEQ ID NO: 26130 - DNA, 20 bp, Paenibacillus azotofixans
ccatgggctcaacctgtggt

SEQ ID NO: 26131 - DNA, 30 bp, Kingella denitrificans
agcaggggatcttcggaccttgtgctattt

SEQ ID NO: 26132 - DNA, 30 bp, Sporosarcina ureae
tgttgaaagacggtttcggctgtcactgaa

SEQ ID NO: 26133 - DNA, 20 bp, Pseudomonas oryzihabitans
gcgaatacctgtgagttttg

SEQ ID NO: 26134 - DNA, 20 bp, Granulicatella elegans
ccgatgcttgcattggtcaa

SEQ ID NO: 26135 - DNA, 20 bp, Paenibacillus alvei
ctgctcctagggtgacggta

SEQ ID NO: 26136 - DNA, 20 bp, Rhizobium radiobacter
gtttgatcatggctcagacg

SEQ ID NO: 26137 - DNA, 20 bp, Shewanella putrefaciens
tggatcagaatgccacggga

SEQ ID NO: 26138 - DNA, 20 bp, Streptococcus uberis
cgcatgacaatagggtacac

SEQ ID NO: 26139 - DNA, 20 bp, Pseudomonas oryzihabitans
cagcgaatacctgtgagttt

SEQ ID NO: 26140 - DNA, 20 bp, Prevotella intermedia
ctttgcatttacccttcgaa

SEQ ID NO: 26141 - DNA, 20 bp, Vibrio mimicus
gaagtcgtcaacacggtagc

SEQ ID NO: 26142 - DNA, 30 bp, Paenibacillus glucanolyticus
taataccggataatttattacatagcatta

SEQ ID NO: 26143 - DNA, 20 bp, Vibrio metschnikovii
aacagggaccaaagaggggg

SEQ ID NO: 26144 - DNA, 20 bp, Myroides odoratimimus
aagaaacctccctacgagta

SEQ ID NO: 26145 - DNA, 20 bp, Campylobacter sputorum
agcttaactactaaactgct

SEQ ID NO: 26146 - DNA, 20 bp, Klebsiella pneumoniae
gccttcgggttgtaaagact

SEQ ID NO: 26147 - DNA, 20 bp, Fusobacterium mortiferum
cagtcttgaatgattgtgaa

SEQ ID NO: 26148 - DNA, 20 bp, Corynebacterium ulcerans
agttttctggggggagtggt

SEQ ID NO: 26149 - DNA, 20 bp, Lactococcus garvieae
actacttgatgatcccgcgt

SEQ ID NO: 26150 - DNA, 20 bp, Paenibacillus amylolyticus
tttattttctctcctgggga

SEQ ID NO: 26151 - DNA, 20 bp, Pasteurella pneumotropica
aggacaaaagggggcgtaag

SEQ ID NO: 26152 - DNA, 20 bp, Capnocytophaga gingivalis
gtttggcgcaagctgagtgg

SEQ ID NO: 26153 - DNA, 20 bp, Paenibacillus azotofixans
gctaggaggctgaaaggcgg

SEQ ID NO: 26154 - DNA, 20 bp, Listeria grayi
tcagctccgcatggagcggg

SEQ ID NO: 26155 - DNA, 20 bp, Campylobacter sputorum
ccaattatacataagtttaa

SEQ ID NO: 26156 - DNA, 20 bp, Kingella denitrificans
tgttaataccactttttgtt

SEQ ID NO: 26157 - DNA, 20 bp, Corynebacterium cystitidis
catggtttcccttttgtggc

SEQ ID NO: 26158 - DNA, 20 bp, Paenibacillus lautus
tttcacagcattgtggaata

SEQ ID NO: 26159 - DNA, 20 bp, Lactobacillus casei
tgaacggtgcttgcactgag

SEQ ID NO: 26160 - DNA, 20 bp, Clostridium botulinum
catagagagggatagccttt

SEQ ID NO: 26161 - DNA, 20 bp, Acinetobacter baumannii
agtcgtacaggtagccgtag

SEQ ID NO: 26162 - DNA, 20 bp, Listeria seeligeri
tcactgctttgaaagatggt

SEQ ID NO: 26163 - DNA, 20 bp, Paenibacillus alvei
ctagggtgacggtacctgag

SEQ ID NO: 26164 - DNA, 20 bp, Fusobacterium mortiferum
gagaggttaccttcgggtaa

SEQ ID NO: 26165 - DNA, 30 bp, Fusobacterium necrophorum
cttagaccgggacaacatctggaaacggat

SEQ ID NO: 26166 - DNA, 20 bp, Campylobacter sputorum
atattattaagagctttcgc

SEQ ID NO: 26167 - DNA, 20 bp, Bacillus azotoformans
agttaactgctggtaccttg

SEQ ID NO: 26168 - DNA, 20 bp, Paenibacillus validus
gagcggacttatccttcggg

SEQ ID NO: 26169 - DNA, 20 bp, Vibrio parahaemolyticus
gctctgcaactcgactccat

SEQ ID NO: 26170 - DNA, 20 bp, Fusobacterium necrophorum
tatgttaccatccttcagtt

SEQ ID NO: 26171 - DNA, 20 bp, Actinomyces viscosus
tgtgccggatggtcctggag

SEQ ID NO: 26172 - DNA, 20 bp, Vibrio metschnikovii
tgcccttgtttataatgaac

SEQ ID NO: 26173 - DNA, 20 bp, Staphylococcus schleiferi
caagtcgagcgaacggacag

SEQ ID NO: 26174 - DNA, 20 bp, Aerococcus urinae
gaaaggtcaccgcatggtga

SEQ ID NO: 26175 - DNA, 20 bp, Haemophilus paraphrophilus
tgttgtgtgaatagcacaac

SEQ ID NO: 26176 - DNA, 20 bp, Proteus vulgaris
agtaggtgagtaatggctca

SEQ ID NO: 26177 - DNA, 20 bp, Lactobacillus acidophilus
tacaacgaggagcaagcctg

SEQ ID NO: 26178 - DNA, 20 bp, Capnocytophaga ochracea
tttttatattaaagctctgg

SEQ ID NO: 26179 - DNA, 20 bp, Campylobacter sputorum
taatctgccccatagagagg

SEQ ID NO: 26180 - DNA, 20 bp, Bacteroides thetaiotaomicron
aatattctggaaacaggtta

SEQ ID NO: 26181 - DNA, 20 bp, Paenibacillus larvae
cttcgcatgaagaagtcatg

SEQ ID NO: 26182 - DNA, 20 bp, Aerococcus urinae
cataggaaaggtcaccgcat

SEQ ID NO: 26183 - DNA, 20 bp, Lactococcus lactis
gcaagttgagcgatgaagat

SEQ ID NO: 26184 - DNA, 20 bp, Clostridium clostridiiforme
ccgaggctcaacctcggcgc

SEQ ID NO: 26185 - DNA, 20 bp, Corynebacterium cystitidis
gatcgccatggagacatggt

SEQ ID NO: 26186 - DNA, 20 bp, Proteus vulgaris
tgataaagttaatacctttg

SEQ ID NO: 26187 - DNA, 20 bp, Campylobacter sputorum
ttaatagtcatttagaaata

SEQ ID NO: 26188 - DNA, 20 bp, Brevibacterium linens
cgaggttttagcgaatccct

SEQ ID NO: 26189 - DNA, 30 bp, Vibrio cholerae
gccacacctctagggcacaacctccaagta

SEQ ID NO: 26190 - DNA, 30 bp, Actinomyces viscosus
aggagccagcttgctggttctggatgagtg

SEQ ID NO: 26191 - DNA, 20 bp, Bacteroides thetaiotaomicron
atattctggaaacaggttag

SEQ ID NO: 26192 - DNA, 20 bp, Bacteroides forsythus
ctttcttcccttcggggcgt

SEQ ID NO: 26193 - DNA, 20 bp, Porphyromonas maccae
tgtcagggtaataccggtga

SEQ ID NO: 26194 - DNA, 20 bp, Paenibacillus alvei
gcatagcttgagtacagaag

SEQ ID NO: 26195 - DNA, 20 bp, Clostridium botulinum
tttcgcatgaaacggcaata

SEQ ID NO: 26196 - DNA, 20 bp, Clostridium ramosum
cgcgagcacttgtgctcgag

SEQ ID NO: 26197 - DNA, 20 bp, Bacteroides thetaiotaomicron
ttgaatattctggaaacagg

SEQ ID NO: 26198 - DNA, 20 bp, Paenibacillus larvae
tttagagatagaccttttcc

SEQ ID NO: 26199 - DNA, 20 bp, Corynebacterium cystitidis
agacatggtttcccttttgt

SEQ ID NO: 26200 - DNA, 20 bp, Paenibacillus larvae
cgagcggaccttgtgtttcc

SEQ ID NO: 26201 - DNA, 20 bp, Serratia ficaria
accagagatggcattggtgc

SEQ ID NO: 26202 - DNA, 20 bp, Corynebacterium pilosum
gatattcaacttttgttgga

SEQ ID NO: 26203 - DNA, 20 bp, Clostridium clostridiiforme
gccgcgtgagggaagacagc

SEQ ID NO: 26204 - DNA, 20 bp, Capnocytophaga ochracea
agaataagggctacgcgtag

SEQ ID NO: 26205 - DNA, 20 bp, Vibrio cholerae
ggcgggtgtactaggcccgg

SEQ ID NO: 26206 - DNA, 20 bp, Aerococcus urinae
aggtcaccgcatggtgacct

SEQ ID NO: 26207 - DNA, 20 bp, Bacillus badius
ggatattctttttcttcgca

SEQ ID NO: 26208 - DNA, 20 bp, Aerococcus urinae
gcataggaaaggtcaccgca

SEQ ID NO: 26209 - DNA, 20 bp, Campylobacter sputorum
gtcatttagaaatatcttaa

SEQ ID NO: 26210 - DNA, 20 bp, Lactococcus garvieae
gaagtcggtacaaggtagcc

SEQ ID NO: 26211 - DNA, 20 bp, Pasteurella pneumotropica
agagatagttttgtgcctta

SEQ ID NO: 26212 - DNA, 20 bp, Clostridium botulinum
tggcttctgtgccgccgcta

SEQ ID NO: 26213 - DNA, 20 bp, Paenibacillus larvae
ccttcgggagacgccaggtt

SEQ ID NO: 26214 - DNA, 20 bp, Lactococcus lactis
gtgcttgcaccaatttgaag

SEQ ID NO: 26215 - DNA, 20 bp, Fusobacterium mortiferum
atataagagcggcatcgttt

SEQ ID NO: 26216 - DNA, 20 bp, Fusobacterium mortiferum
ggagaggttaccttcgggta

SEQ ID NO: 26217 - DNA, 20 bp, Fusobacterium necrophorum
atgttaccatccttcagttg

SEQ ID NO: 26218 - DNA, 30 bp, Paenibacillus azotofixans
gacagcttgagtgcagaagaggaaagtgga

SEQ ID NO: 26219 - DNA, 20 bp, Campylobacter sputorum
acaataagcttttttgaagc

SEQ ID NO: 26220 - DNA, 20 bp, Lactococcus lactis
gcaccaatttgaagagcagc

SEQ ID NO: 26221 - DNA, 20 bp, Paenibacillus thiaminolyticus
gggaaaccattagcttagcg

SEQ ID NO: 26222 - DNA, 20 bp, Actinomyces neuii
cgtttgggtggggactcgtg

SEQ ID NO: 26223 - DNA, 20 bp, Porphyromonas maccae
agtacatatcctgtcacaag

SEQ ID NO: 26224 - DNA, 20 bp, Pediococcus dextrinicus
taagggagctagccgtctaa

SEQ ID NO: 26225 - DNA, 30 bp, Paenibacillus alvei
ctgcccataagactgggataacccacggaa

SEQ ID NO: 26226 - DNA, 20 bp, Eikenella corrodens
tacaaggaaaccgtagggga

SEQ ID NO: 26227 - DNA, 20 bp, Bacillus laevolacticus
caagtcgagcggacctatcc

SEQ ID NO: 26228 - DNA, 20 bp, Paenibacillus glucanolyticus
gccaaggaagaacgtctcat

SEQ ID NO: 26229 - DNA, 20 bp, Bacillus smithii
ggaaggttgaaaggcggcgc

SEQ ID NO: 26230 - DNA, 30 bp, Paenibacillus larvae
cggaaacgtgagctaataccggatagctgg

SEQ ID NO: 26231 - DNA, 20 bp, Paenibacillus alvei
aggcggcaatgtaagttggg

SEQ ID NO: 26232 - DNA, 20 bp, Myroides odoratimimus
tgtacaggaagaaacctccc

SEQ ID NO: 26233 - DNA, 20 bp, Unknown Organism
  oligonucleotide from CDC group VB-3
ggggaaacctgcggttggat

SEQ ID NO: 26234 - DNA, 20 bp, Bacillus badius
aagaatggaaaggcggcttt

SEQ ID NO: 26235 - DNA, 20 bp, Clostridium botulinum
taggagctgtcatggcttct

SEQ ID NO: 26236 - DNA, 30 bp, Paenibacillus azotofixans
aacccttgactttagttgccagcaggtaga

SEQ ID NO: 26237 - DNA, 20 bp, Paenibacillus larvae
caagtcgagcggaccttgtg

SEQ ID NO: 26238 - DNA, 20 bp, Vibrio hollisae
atcctcagaagccggaagag

SEQ ID NO: 26239 - DNA, 20 bp, Fusobacterium nucleatum
attatagggcatcctagaat

SEQ ID NO: 26240 - DNA, 30 bp, Vibrio hollisae
tacctactcttgacatcctcagaagccgga

SEQ ID NO: 26241 - DNA, 30 bp, Bacillus badius
caagtacggaagtaactgtccgtaccttga

SEQ ID NO: 26242 - DNA, 20 bp, Turicella otitidis
taacaggtacccgtaccgga

SEQ ID NO: 26243 - DNA, 30 bp, Fusobacterium mortiferum
ttggattaatacctaatggtatataagagc

SEQ ID NO: 26244 - DNA, 20 bp, Pseudomonas mendocina
acatgctcttcctcccaact

SEQ ID NO: 26245 - DNA, 20 bp, Aerococcus urinae
ccgcataggaaacaccacct

SEQ ID NO: 26246 - DNA, 20 bp, Paenibacillus validus
gggatagcgttagcggcgga

SEQ ID NO: 26247 - DNA, 20 bp, Klebsiella oxytoca
tgaggttaataaccttattc

SEQ ID NO: 26248 - DNA, 20 bp, Bacillus firmus
taattcttttcctcacatga

SEQ ID NO: 26249 - DNA, 20 bp, Corynebacterium cystitidis
ggatattcacgtatcttttg

SEQ ID NO: 26250 - DNA, 20 bp, Actinomyces meyeri
ccatggcctaaccggttttt

SEQ ID NO: 26251 - DNA, 20 bp, Actinomyces viscosus
tggtcctggagacggggttt

SEQ ID NO: 26252 - DNA, 30 bp, Bacteroides capillosus
gggtttcttagtggcggacgggtgagtaac

SEQ ID NO: 26253 - DNA, 20 bp, Sporosarcina ureae
gtcatggagacatgattttc

SEQ ID NO: 26254 - DNA, 20 bp, Paenibacillus larvae
ttcttcgcatgaagaagtca

SEQ ID NO: 26255 - DNA, 20 bp, Pediococcus acidilactici
cgttaattgatcaggacgtg

SEQ ID NO: 26256 - DNA, 20 bp, Fusobacterium mortiferum
ataagagcggcatcgttttt

SEQ ID NO: 26257 - DNA, 20 bp, Paenibacillus glucanolyticus
accggataatttattacata

SEQ ID NO: 26258 - DNA, 20 bp, Capnocytophaga ochracea
taagggctacgcgtagtttg

SEQ ID NO: 26259 - DNA, 20 bp, Streptococcus suis
atggtagatacttgaaagga

SEQ ID NO: 26260 - DNA, 20 bp, Campylobacter sputorum
atctgccccatagagaggaa

SEQ ID NO: 26261 - DNA, 30 bp, Paenibacillus macerans
atcaagtcttccgcatgggagacttgggaa

SEQ ID NO: 26262 - DNA, 20 bp, Eubacterium limosum
ttggggaagaagaatgacgg

SEQ ID NO: 26263 - DNA, 20 bp, Capnocytophaga gingivalis
ggagaagccctttcgggggc

SEQ ID NO: 26264 - DNA, 20 bp, Streptococcus uberis
cacatgtaccctatttaaaa

SEQ ID NO: 26265 - DNA, 20 bp, Collinsella aerofaciens
ccaaccgtcaaggggggagg

SEQ ID NO: 26266 - DNA, 20 bp, Paenibacillus azotofixans
accggataattcctcttagc

SEQ ID NO: 26267 - DNA, 20 bp, Prevotella intermedia
cggggcacgtgtgccccttt

SEQ ID NO: 26268 - DNA, 20 bp, Pseudomonas oryzihabitans
atacctgtgagttttgacgt

SEQ ID NO: 26269 - DNA, 20 bp, Bacteroides capilosus
ttaacagagggaagcaatgc

SEQ ID NO: 26270 - DNA, 20 bp, Fusobacterium mortiferum
cctaatggtatataagagcg

SEQ ID NO: 26271 - DNA, 20 bp, Paenibacillus azotofixans
agagctgggcactctagagt

SEQ ID NO: 26272 - DNA, 20 bp, Paenibacillus lautus
aacgtctcttagagtaactg

SEQ ID NO: 26273 - DNA, 20 bp, Pasteurella multocida
cttgggaatttggcttatgg

SEQ ID NO: 26274 - DNA, 20 bp, Sporosarcina ureae
tgagggaatgttgaaagacg

SEQ ID NO: 26275 - DNA, 20 bp, Campylobacter sputorum
tatagcatttaaaaatacaa

SEQ ID NO: 26276 - DNA, 20 bp, Paenibacillus larvae
tccttcgggagacgccaggt

SEQ ID NO: 26277 - DNA, 20 bp, Citrobacter amalonaticus
ttggcaggcctaacacatgc

SEQ ID NO: 26278 - DNA, 30 bp, Pediococcus acidilactici
gcactgaatgagattttaacacgaagtgag

SEQ ID NO: 26279 - DNA, 20 bp, Fusobacterium necrophorum
ttagaccgggacaacatctg

SEQ ID NO: 26280 - DNA, 20 bp, Streptococcus uberis
taccgcatgacaatagggta

SEQ ID NO: 26281 - DNA, 20 bp, Porphyromonas maccae
aaagtacatatcctgtcaca

SEQ ID NO: 26282 - DNA, 20 bp, Paenibacillus azotofixans
tccctctgaatacgttagag

SEQ ID NO: 26283 - DNA, 30 bp, Bacillus firmus
gggaaagctgaaagatggcatctcgctatc

SEQ ID NO: 26284 - DNA, 20 bp, Aerococcus urinae
accacctcatggtggtgttt

SEQ ID NO: 26285 - DNA, 20 bp, Bacteroides thetaiotaomicron
gggccttgtacgcccgcccg

SEQ ID NO: 26286 - DNA, 20 bp, Corynebacterium cystitidis
ggcctatctttgtgagggag

SEQ ID NO: 26287 - DNA, 20 bp, Bacillus firmus
agcttgctcccagaccgtca

SEQ ID NO: 26288 - DNA, 30 bp, Bacillus lentus
tcgagcgaatggatgggagcttgctcccag

SEQ ID NO: 26289 - DNA, 20 bp, Prevotella corporis
gctgtggcgccactgacgct

SEQ ID NO: 26290 - DNA, 20 bp, Paenibacillus larvae
ctggagtgacggtacttgag

SEQ ID NO: 26291 - DNA, 20 bp, Paenibacillus larvae
ggggcaacctgtcacttaca

SEQ ID NO: 26292 - DNA, 20 bp, Corynebacterium group F
gacatgtagcggatcgccgc

SEQ ID NO: 26293 - DNA, 20 bp, Campylobacter sputorum
cagtcgaacgatgaagtcct

SEQ ID NO: 26294 - DNA, 20 bp, Enterococcus saccharolyticus
tgctttttctcgcatgagag

SEQ ID NO: 26295 - DNA, 20 bp, Bacteroides forsythus
ggggctatttgttaaagatt

SEQ ID NO: 26296 - DNA, 20 bp, Campylobacter sputorum
aaaagcaaagcagttagatt

SEQ ID NO: 26297 - DNA, 20 bp, Myroides odoratimimus
aaggcggggactctagcaag

SEQ ID NO: 26298 - DNA, 20 bp, Paenibacillus glucanolyticus
aggaagaacgtctcatagag

SEQ ID NO: 26299 - DNA, 20 bp, Bacteroides thetaiotaomicron
tagttcccgggccttgtacg

SEQ ID NO: 26300 - DNA, 20 bp, Clostridium botulinum
gaaacggcaataaaaggagc

SEQ ID NO: 26301 - DNA, 20 bp, Streptococcus suis
tattaaccgcatggtagatg

SEQ ID NO: 26302 - DNA, 20 bp, Yokenella regensburgei
agcgaggaggaaggcgatac

SEQ ID NO: 26303 - DNA, 20 bp, Aerococcus urinae
aggaaacaccacctcatggt

SEQ ID NO: 26304 - DNA, 20 bp, Paenibacillus alvei
cataagactgggataaccca

SEQ ID NO: 26305 - DNA, 20 bp, Campylobacter coli
gtacaaggtaaccgtaggag

SEQ ID NO: 26306 - DNA, 20 bp, Bacillus azotoformans
cggatgataaaggagcttgc

SEQ ID NO: 26307 - DNA, 20 bp, Streptococcus uberis
accgcatgacaatagggtac

SEQ ID NO: 26308 - DNA, 20 bp, Eikenella corrodens
tagtgcttgcactactgtcc

SEQ ID NO: 26309 - DNA, 20 bp, Gemella morbillorum
cacgggtgagcacgcgtagg

SEQ ID NO: 26310 - DNA, 20 bp, Serratia ficaria
acttaccagagatggcattg

SEQ ID NO: 26311 - DNA, 20 bp, Stenotrophomonas maltophilia
gccttcgggagcgctgagca

SEQ ID NO: 26312 - DNA, 20 bp, Vibrio hollisae
acatcctcagaagccggaag

SEQ ID NO: 26313 - DNA, 20 bp, Bacteroides thetaiotaomicron
gaatattctggaaacaggtt

SEQ ID NO: 26314 - DNA, 20 bp, Bacillus badius
atattctttttcttcgcatg

SEQ ID NO: 26315 - DNA, 20 bp, Campylobacter sputorum
aaagcagttagatttaataa

SEQ ID NO: 26316 - DNA, 20 bp, Fusobacterium nucleatum
tttttaacttcgatttgggt

SEQ ID NO: 26317 - DNA, 20 bp, Brevibacterium linens
aggttttagcgaatccctta

SEQ ID NO: 26318 - DNA, 20 bp, Bacteroides forsythus
catggggctatttgttaaag

SEQ ID NO: 26319 - DNA, 20 bp, Vibrio metschnikovii
cgcatgatgcccttgtttat

SEQ ID NO: 26320 - DNA, 20 bp, Listeria grayi
ataccgaataataatcagct

SEQ ID NO: 26321 - DNA, 20 bp, Clostridium limosum
cccttcggggaacttggtga

SEQ ID NO: 26322 - DNA, 30 bp, Lactococcus lactis
atacatgcaagttgagcgatgaagattggt

SEQ ID NO: 26323 - DNA, 20 bp, Porphyromonas maccae
tgaaagtacatatcctgtca

SEQ ID NO: 26324 - DNA, 20 bp, Clostridium botulinum
gtcacttcggtgacaggaag

SEQ ID NO: 26325 - DNA, 20 bp, Citrobacter braakii
gtcgtacaaggtaaccgtag

SEQ ID NO: 26326 - DNA, 20 bp, Staphylococcus auricularis
aatacgttcccgggtctttg

SEQ ID NO: 26327 - DNA, 20 bp, Leuconostoc mesenteroides
tcgaacgcatagcgaaaggt

SEQ ID NO: 26328 - DNA, 30 bp, Capnocytophaga gingivalis
tggcgcaagctgagtggctaagcgaaagtg

SEQ ID NO: 26329 - DNA, 20 bp, Enterococcus saccharolyticus
gctttttctcgcatgagaga

SEQ ID NO: 26330 - DNA, 20 bp, Paenibacillus macerans
ttccgcatgggagacttggg

SEQ ID NO: 26331 - DNA, 20 bp, Streptococcus dysgalactiae
cgcatgacaatggaggaccc

SEQ ID NO: 26332 - DNA, 20 bp, Corynebacterium jeikeium
cacccgcccgtcgcgtcatg

SEQ ID NO: 26333 - DNA, 20 bp, Paenibacillus azotofixans
ggataattcctcttagctcc

SEQ ID NO: 26334 - DNA, 30 bp, Streptococcus suis
taccgcatggtagatatttgaaaggagcaa

SEQ ID NO: 26335 - DNA, 20 bp, Bacteroides capilosus
gttaacagagggaagcaatg

SEQ ID NO: 26336 - DNA, 20 bp, Prevotella intermedia
ttggggagtaaagcggggca

SEQ ID NO: 26337 - DNA, 20 bp, Paenibacillus larvae
gtaactgcccctggagtgac

SEQ ID NO: 26338 - DNA, 20 bp, Paenibacillus larvae
aagtcgagcggaccttgtgt

SEQ ID NO: 26339 - DNA, 20 bp, Lactococcus lactis
tgagcgatgaagattggtgc

SEQ ID NO: 26340 - DNA, 20 bp, Streptococcus uberis
catgacaatagggtacacat

SEQ ID NO: 26341 - DNA, 20 bp, Proteus penneri
aagttaatacctttatcaat

SEQ ID NO: 26342 - DNA, 20 bp, Aerococcus urinae
aaacaccacctcatggtggt

SEQ ID NO: 26343 - DNA, 20 bp, Capnocytophaga ochracea
ggaagaataagggctacgcg

SEQ ID NO: 26344 - DNA, 20 bp, Campylobacter sputorum
gtagcttaactactaaactg

SEQ ID NO: 26345 - DNA, 20 bp, Dermabacter hominis
tgaccttggcccgcatgggt

SEQ ID NO: 26346 - DNA, 20 bp, Paenibacillus validus
catggggcaacctatggctt

SEQ ID NO: 26347 - DNA, 20 bp, Capnocytophaga gingivalis
gagaagccctttcgggggca

SEQ ID NO: 26348 - DNA, 30 bp, Bacillus firmus
cgagcggacggatgggagcttgctcccaga

SEQ ID NO: 26349 - DNA, 20 bp, Campylobacter sputorum
aaaaagcaaagcagttagat

SEQ ID NO: 26350 - DNA, 20 bp, Actinomyces viscosus
catgtgccggatggtcctgg

SEQ ID NO: 26351 - DNA, 20 bp, Bacillus firmus
gaaagctgaaagatggcatc

SEQ ID NO: 26352 - DNA, 20 bp, Kingella denitrificans
ggaccttgtgctatttgagc

SEQ ID NO: 26353 - DNA, 20 bp, Corynebacterium cystitidis
gtacagcgcgtggcgatatc

SEQ ID NO: 26354 - DNA, 20 bp, Clostridium ramosum
cgagcacttgtgctcgagtg

SEQ ID NO: 26355 - DNA, 20 bp, Clostridium botulinum
ttcgcatgaaacggcaataa

SEQ ID NO: 26356 - DNA, 20 bp, Stenotrophomonas maltophilia
tacgctaataccgcataatg

SEQ ID NO: 26357 - DNA, 20 bp, Proteus vulgaris
cggggaggaaggtgttaaga

SEQ ID NO: 26358 - DNA, 20 bp, Porphyromonas maccae
atatcctgtcacaaggccgc

SEQ ID NO: 26359 - DNA, 20 bp, Bacteroides forsythus
tttcttcccttcggggcgtc

SEQ ID NO: 26360 - DNA, 20 bp, Paenibacillus validus
ttatccttcgggataggtta

SEQ ID NO: 26361 - DNA, 20 bp, Lactobacillus casei
atgaacggtgcttgcactga

SEQ ID NO: 26362 - DNA, 20 bp, Actinomyces viscosus
cgaacggtgaaggagccagc

SEQ ID NO: 26363 - DNA, 20 bp, Corynebacterium cystitidis
tggcctatctttgtgaggga

SEQ ID NO: 26364 - DNA, 20 bp, Paenibacillus larvae
catgaagaagtcatgaaaga

SEQ ID NO: 26365 - DNA, 20 bp, Campylobacter sputorum
caaagcagttagatttaata

SEQ ID NO: 26366 - DNA, 20 bp, Paenibacillus alvei
gggagatgagaaaggcggag

SEQ ID NO: 26367 - DNA, 20 bp, Enterococcus cecorum
taattccatttaccgcatgg

SEQ ID NO: 26368 - DNA, 30 bp, Bacillus firmus
gagcttgctcccagaccgtcagcggcggac

SEQ ID NO: 26369 - DNA, 20 bp, Lactococcus garvieae
acatactcgtgctatcctta

SEQ ID NO: 26370 - DNA, 20 bp, Aerococcus urinae
ggtgtttggaaagacggctt

SEQ ID NO: 26371 - DNA, 20 bp, Prevotella corporis
gcaagtgcgggcgaatcccc

SEQ ID NO: 26372 - DNA, 20 bp, Clostridium botulinum
gaagtcacttcggtgacagg

SEQ ID NO: 26373 - DNA, 20 bp, Vibrio cholerae
gctccgaaagccacacctct

SEQ ID NO: 26374 - DNA, 30 bp, Listeria ivanovii
tagggtaaccttttaggagccagccgccga

SEQ ID NO: 26375 - DNA, 20 bp, Bacillus azotoformans
aagtcgagcggatgataaag

SEQ ID NO: 26376 - DNA, 20 bp, Capnocytophaga gingivalis
ttggcgcaagctgagtggct

SEQ ID NO: 26377 - DNA, 20 bp, Pseudomonas oryzihabitans
ggctcatagcgaatacctgt

SEQ ID NO: 26378 - DNA, 20 bp, Campylobacter sputorum
taaaaagttataaatataac

SEQ ID NO: 26379 - DNA, 20 bp, Neisseria gonorrhoeae
agaaaaggccgttgccaata

SEQ ID NO: 26380 - DNA, 20 bp, Haemophilus paraphrophilus
ttgttgtgtgaatagcacaa

SEQ ID NO: 26381 - DNA, 20 bp, Capnocytophaga ochracea
tattaaagctctggtggtga

SEQ ID NO: 26382 - DNA, 20 bp, Lactococcus garvieae
cactacttgatgatcccgcg

SEQ ID NO: 26383 - DNA, 30 bp, Pseudomonas oryzihabitans
cttgataagttggatgtgaaatccccgggc

SEQ ID NO: 26384 - DNA, 20 bp, Eikenella corrodens
agtcgtacaaggaaaccgta

SEQ ID NO: 26385 - DNA, 20 bp, Brevibacterium linens
cagaccgttctggaaacagt

SEQ ID NO: 26386 - DNA, 20 bp, Fusobacterium mortiferum
aactgtcagtcttgaatgat

SEQ ID NO: 26387 - DNA, 20 bp, Citrobacter farmeri
acagaacttgtcagagatga

SEQ ID NO: 26388 - DNA, 20 bp, Corynebacterium propinquum
ggataggactgcactttagt

SEQ ID NO: 26389 - DNA, 20 bp, Dermabacter hominis
accttggcccgcatgggttt

SEQ ID NO: 26390 - DNA, 20 bp, Shigella boydii
tcccgtggcattctgatcca

SEQ ID NO: 26391 - DNA, 20 bp, Bacteroides ovatus
gtaaggctgttgtgaaggtg

SEQ ID NO: 26392 - DNA, 20 bp, Actinomyces meyeri
ccggtttttgctggggggag

SEQ ID NO: 26393 - DNA, 20 bp, Paenibacillus larvae
ctgcccctggagtgacggta

SEQ ID NO: 26394 - DNA, 20 bp, Clostridium botulinum
atggcttctgtgccgccgct

SEQ ID NO: 26395 - DNA, 20 bp, Clostridium botulinum
catggcttctgtgccgccgc

SEQ ID NO: 26396 - DNA, 20 bp, Actinomyces naeslundii
tggggggtgtggatgagtgg

SEQ ID NO: 26397 - DNA, 20 bp, Vibrio cholerae
cgggcgggtgtactaggccc

SEQ ID NO: 26398 - DNA, 20 bp, Bacteroides forsythus
tggggctatttgttaaagat

SEQ ID NO: 26399 - DNA, 20 bp, Campylobacter sputorum
taagagctttcgctatggga

SEQ ID NO: 26400 - DNA, 20 bp, Campylobacter sputorum
attatacataagtttaattg

SEQ ID NO: 26401 - DNA, 20 bp, Capnocytophaga gingivalis
actagctgtttggcgcaagc

SEQ ID NO: 26402 - DNA, 20 bp, Campylobacter sputorum
attattaagagctttcgcta

SEQ ID NO: 26403 - DNA, 20 bp, Kingella denitrificans
gtgttaataccactttttgt

SEQ ID NO: 26404 - DNA, 20 bp, Achromobacter xylosoxidans
atacctggtagtcccgcccc

SEQ ID NO: 26405 - DNA, 20 bp, Campylobacter sputorum
tatatattattaagagcttt

SEQ ID NO: 26406 - DNA, 20 bp, Aerococcus urinae
ccgcatggtgacctttggaa

SEQ ID NO: 26407 - DNA, 20 bp, Vibrio hollisae
ctcagaagccggaagagatt

SEQ ID NO: 26408 - DNA, 20 bp, Sporosarcina ureae
cgcatgagggaatgttgaaa

SEQ ID NO: 26409 - DNA, 20 bp, Streptococcus uberis
ataccgcatgacaatagggt

SEQ ID NO: 26410 - DNA, 20 bp, Corynebacterium group F
atgtagcggatcgccgcaga

SEQ ID NO: 26411 - DNA, 20 bp, Proteus vulgaris
aggtgagtaatggctcacct

SEQ ID NO: 26412 - DNA, 20 bp, Streptococcus suis
atggtagatatttgaaagga

SEQ ID NO: 26413 - DNA, 20 bp, Pseudomonas oryzihabitans
cctgtgagttttgacgttac

SEQ ID NO: 26414 - DNA, 20 bp, Corynebacterium cystitidis
cgctagggacgaagcgtgtg

SEQ ID NO: 26415 - DNA, 20 bp, Listeria grayi
agctccgcatggagcgggtt

SEQ ID NO: 26416 - DNA, 20 bp, Campylobacter sputorum
atactccaattatacataag

SEQ ID NO: 26417 - DNA, 20 bp, Haemophilus actinomycetomicans
cgaaagtgcgggaccttagg

SEQ ID NO: 26418 - DNA, 20 bp, Aerococcus urinae
tcaccgcatggtgacctttg

SEQ ID NO: 26419 - DNA, 20 bp, Paenibacillus validus
cggacttatccttcgggata

SEQ ID NO: 26420 - DNA, 20 bp, Lactococcus lactis
caatttgaagagcagcgaac

SEQ ID NO: 26421 - DNA, 30 bp, Salmonella typhi
cttgcttgcttggctgacgagtggcggacg

SEQ ID NO: 26422 - DNA, 20 bp, Paenibacillus larvae
agcggaccttgtgtttcttt

SEQ ID NO: 26423 - DNA, 20 bp, Salmonella typhi
gcttgcttggctgacgagtg

SEQ ID NO: 26424 - DNA, 20 bp, Bacillus smithii
ggcgcaagctgccgcttgca

SEQ ID NO: 26425 - DNA, 20 bp, Paenibacillus alvei
aagaacgcctaggagagtaa

SEQ ID NO: 26426 - DNA, 20 bp, Paenibacillus azotofixans
ataattcctcttagctcctg

SEQ ID NO: 26427 - DNA, 20 bp, Pseudomonas mendocina
cccccgacgtgctggtaact

SEQ ID NO: 26428 - DNA, 20 bp, Paenibacillus alvei
ctaggagagtaactgctcct

SEQ ID NO: 26429 - DNA, 20 bp, Clostridium botulinum
atactaggtgtaggagctgt

SEQ ID NO: 26430 - DNA, 20 bp, Paenibacillus validus
aaacatggggcaacctatgg

SEQ ID NO: 26431 - DNA, 20 bp, Eubacterium limosum
acgagaaggttttgatggat

SEQ ID NO: 26432 - DNA, 20 bp, Sporosarcina ureae
gagggaatgttgaaagacgg

SEQ ID NO: 26433 - DNA, 20 bp, Streptococcus dysgalactiae
tgacaatggaggacccatgt

SEQ ID NO: 26434 - DNA, 20 bp, Vibrio metschnikovii
cttgtttataatgaacaggg

SEQ ID NO: 26435 - DNA, 20 bp, Paenibacillus glucanolyticus
tattacatagcattatgtga

SEQ ID NO: 26436 - DNA, 20 bp, Stenotrophomonas maltophilia
gcttaccactgtgtgactca

SEQ ID NO: 26437 - DNA, 20 bp, Sporosarcina ureae
tcgagcgaactgttggaagc

SEQ ID NO: 26438 - DNA, 30 bp, Fusobacterium mortiferum
cacatgcaagtcgagggagaggttaccttc

SEQ ID NO: 26439 - DNA, 20 bp, Brevibacterium linens
gaggttttagcgaatccctt

SEQ ID NO: 26440 - DNA, 20 bp, Corynebacterium cystitidis
ctggatcgccatggagacat

SEQ ID NO: 26441 - DNA, 20 bp, Prevotella intermedia
gcacgtgtgcccctttgcat

SEQ ID NO: 26442 - DNA, 20 bp, Lactococcus lactis
agcgatgaagattggtgctt

SEQ ID NO: 26443 - DNA, 20 bp, Porphyromonas maccae
gatatttgcaagtaccctat

SEQ ID NO: 26444 - DNA, 20 bp, Prevotella intermedia
gtgtgcccctttgcatttac

SEQ ID NO: 26445 - DNA, 20 bp, Clostridium botulinum
tcgcatgaaacggcaataaa

SEQ ID NO: 26446 - DNA, 30 bp, Vibrio cholerae
aaagccacacctctagggcacaacctccaa

SEQ ID NO: 26447 - DNA, 20 bp, Morganella morganii
atacaaagggaagcgacccc

SEQ ID NO: 26448 - DNA, 30 bp, Brochothrix campestris
gagtaacacgtgggtaacctgcctcacagc

SEQ ID NO: 26449 - DNA, 20 bp, Haemophilus paraphrophilus
gttgtgtgaatagcacaaca

SEQ ID NO: 26450 - DNA, 20 bp, Paenibacillus amylolyticus
tttctctcctggggagataa

SEQ ID NO: 26451 - DNA, 20 bp, Shigella boydii
ccgggaacgtattcccgtgg

SEQ ID NO: 26452 - DNA, 20 bp, Campylobacter rectus
ctctatactccttctttaca

SEQ ID NO: 26453 - DNA, 20 bp, Campylobacter sputorum
aatctagtagcttaactact

SEQ ID NO: 26454 - DNA, 20 bp, Bacillus firmus
gctcccagaccgtcagcggc

SEQ ID NO: 26455 - DNA, 20 bp, Aerococcus urinae
taggaaaggtcaccgcatgg

SEQ ID NO: 26456 - DNA, 20 bp, Bacillus badius
agaatggaaaggcggctttt

SEQ ID NO: 26457 - DNA, 20 bp, Paenibacillus glucanolyticus
ggaagaacgtctcatagagt

SEQ ID NO: 26458 - DNA, 20 bp, Fusobacterium mortiferum
agagcggcatcgtttttata

SEQ ID NO: 26459 - DNA, 20 bp, Campylobacter sputorum
tagtagcttaactactaaac

SEQ ID NO: 26460 - DNA, 20 bp, Lactococcus garvieae
tcactacttgatgatcccgc

SEQ ID NO: 26461 - DNA, 20 bp, Bacillus smithii
cgcaagctgccgcttgcaga

SEQ ID NO: 26462 - DNA, 20 bp, Capnocytophaga ochracea
agctctggtggtgaaagatg

SEQ ID NO: 26463 - DNA, 20 bp, Clostridium botulinum
tgtcatggcttctgtgccgc

SEQ ID NO: 26464 - DNA, 20 bp, Moraxella atlantae
acgaaagagggcgcttaccc

SEQ ID NO: 26465 - DNA, 20 bp, Paenibacillus alvei
gaggggaatgagaaaggcgg

SEQ ID NO: 26466 - DNA, 20 bp, Haemophilus segnis
gcttctttgatgacgagtgg

SEQ ID NO: 26467 - DNA, 30 bp, Clostridium botulinum
tagagagggatagcctttcgaaaggaagat

SEQ ID NO: 26468 - DNA, 20 bp, Aerococcus urinae
gacctttggaaagacggctt

SEQ ID NO: 26469 - DNA, 30 bp, Haemophilus actinomycetomicans
tcgggagacgaaagtgcgggaccttagggc

SEQ ID NO: 26470 - DNA, 20 bp, Myroides odoratimimus
gaagaaacctccctacgagt

SEQ ID NO: 26471 - DNA, 20 bp, Brevibacillus laterosporus
tgcttcgcatgaagcgaaac

SEQ ID NO: 26472 - DNA, 20 bp, Campylobacter sputorum
aataatatatatcaaagata

SEQ ID NO: 26473 - DNA, 20 bp, Enterococcus cecorum
accgcataattccatttacc

SEQ ID NO: 26474 - DNA, 20 bp, Proteus penneri
ataaagttaatacctttatc

SEQ ID NO: 26475 - DNA, 20 bp, Pseudomonas oryzihabitans
tgggaggaagggctcatagc

SEQ ID NO: 26476 - DNA, 30 bp, Porphyromonas maccae
gttattgcatgatgattcaagtaaagatta

SEQ ID NO: 26477 - DNA, 20 bp, Paenibacillus alvei
ctctagagatagagtccctt

SEQ ID NO: 26478 - DNA, 30 bp, Kingella denitrificans
gaccttgtgctatttgagcagccaatatct

SEQ ID NO: 26479 - DNA, 20 bp, Actinomyces viscosus
gaaggagccagcttgctggt

SEQ ID NO: 26480 - DNA, 20 bp, Paenibacillus alvei
aggagagtaactgctcctag

SEQ ID NO: 26481 - DNA, 20 bp, Moraxella osloensis
tgagaatctctcagagatga

SEQ ID NO: 26482 - DNA, 20 bp, Porphyromonas maccae
catatcctgtcacaaggccg

SEQ ID NO: 26483 - DNA, 20 bp, Paenibacillus larvae
aagtcatgaaagacggggca

SEQ ID NO: 26484 - DNA, 20 bp, Campylobacter rectus
ctatactccttctttacata

SEQ ID NO: 26485 - DNA, 20 bp, Aerococcus urinae
taccgcataggaaacaccac

SEQ ID NO: 26486 - DNA, 20 bp, Capnocytophaga ochracea
ctctggtggtgaaagatgag

SEQ ID NO: 26487 - DNA, 20 bp, Achromobacter xylosoxidans
tagcttaataccggcatacg

SEQ ID NO: 26488 - DNA, 20 bp, Bacillus firmus
gcttgctcccagaccgtcag

SEQ ID NO: 26489 - DNA, 20 bp, Bacteroides caccae
aggagcgtctagggtaaaac

SEQ ID NO: 26490 - DNA, 20 bp, Porphyromonas maccae
tcagggtaataccggtgact

SEQ ID NO: 26491 - DNA, 20 bp, Dermabacter hominis
gaccttggcccgcatgggtt

SEQ ID NO: 26492 - DNA, 20 bp, Campylobacter sputorum
actaatatttttaatagtca

SEQ ID NO: 26493 - DNA, 20 bp, Prevotella intermedia
gttggggagtaaagcggggc

SEQ ID NO: 26494 - DNA, 20 bp, Capnocytophaga ochracea
gaataagggctacgcgtagt

SEQ ID NO: 26495 - DNA, 20 bp, Moraxella osloensis
acgatgactctctagcttgc

SEQ ID NO: 26496 - DNA, 20 bp, Lactococcus lactis
cgatgaagattggtgcttgc

SEQ ID NO: 26497 - DNA, 20 bp, Aerococcus urinae
caccacctcatggtggtgtt

SEQ ID NO: 26498 - DNA, 20 bp, Clostridium botulinum
tcatggcttctgtgccgccg

SEQ ID NO: 26499 - DNA, 20 bp, Capnocytophaga gingivalis
ggcgcaagctgagtggctaa

SEQ ID NO: 26500 - DNA, 30 bp, Fusobacterium mortiferum
ggggactgacagaggtagagatacctcctt

SEQ ID NO: 26501 - DNA, 20 bp, Paenibacillus azotofixans
cctgccccttggactgggat

SEQ ID NO: 26502 - DNA, 20 bp, Bacteroides ovatus
taaattgcaacagaatatat

SEQ ID NO: 26503 - DNA, 20 bp, Pediococcus acidilactici
tccgttaattgatcaggacg

SEQ ID NO: 26504 - DNA, 20 bp, Paenibacillus validus
ccttcgggataggttagcgg

SEQ ID NO: 26505 - DNA, 20 bp, Paenibacillus alvei
actgctcctagggtgacggt

SEQ ID NO: 26506 - DNA, 20 bp, Enterococcus saccharolyticus
taccgcataatgctttttct

SEQ ID NO: 26507 - DNA, 20 bp, Aerococcus urinae
acaccacctcatggtggtgt

SEQ ID NO: 26508 - DNA, 20 bp, Pseudomonas oryzihabitans
ctcatagcgaatacctgtga

SEQ ID NO: 26509 - DNA, 20 bp, Eschericchia vulneris
agccacactggaactgagta

SEQ ID NO: 26510 - DNA, 20 bp, Haemophilus paraphrophilus
gtgtgaatagcacaacaaat

SEQ ID NO: 26511 - DNA, 20 bp, Enterococcus cecorum
ataccgcataattccattta

SEQ ID NO: 26512 - DNA, 20 bp, Streptococcus sobrinus
acggcttcactatcagatgg

SEQ ID NO: 26513 - DNA, 20 bp, Aerococcus urinae
aggaaaggtcaccgcatggt

SEQ ID NO: 26514 - DNA, 20 bp, Fusobacterium mortiferum
tatataagagcggcatcgtt

SEQ ID NO: 26515 - DNA, 20 bp, Streptococcus dysgalactiae
atgacaatggaggacccatg

SEQ ID NO: 26516 - DNA, 20 bp, Actinomyces meyeri
gtttttgctggggggagtgg

SEQ ID NO: 26517 - DNA, 20 bp, Bacillus azotoformans
accagttaactgctggtacc

SEQ ID NO: 26518 - DNA, 20 bp, Lactococcus garvieae
ctacttgatgatcccgcgtt

SEQ ID NO: 26519 - DNA, 20 bp, Vibrio parahaemolyticus
tgctaaaagaagtaggctag

SEQ ID NO: 26520 - DNA, 20 bp, Corynebacterium mycetoides
cctatccttgtgggggagct

SEQ ID NO: 26521 - DNA, 30 bp, Pseudomonas oryzihabitans
tgagttttgacgttaccaacagaataagca

SEQ ID NO: 26522 - DNA, 20 bp, Bacillus firmus
tcttttcctcacatgaggaa

SEQ ID NO: 26523 - DNA, 20 bp, Campylobacter rectus
tatactccttctttacataa

SEQ ID NO: 26524 - DNA, 20 bp, Paenibacillus alvei
cattttcctcgcatgagggg

SEQ ID NO: 26525 - DNA, 20 bp, Fusobacterium necrophorum
tgcctcttagaccgggacaa

SEQ ID NO: 26526 - DNA, 30 bp, Bacillus lentus
ctaataccggataacttctttcttctcctg

SEQ ID NO: 26527 - DNA, 20 bp, Streptococcus suis
tggtagatatttgaaaggag

SEQ ID NO: 26528 - DNA, 20 bp, Prevotella corporis
aaagttgcccacgcgtgggt

SEQ ID NO: 26529 - DNA, 20 bp, Paenibacillus azotofixans
tagctcctgctaggaggctg

SEQ ID NO: 26530 - DNA, 20 bp, Proteus penneri
gttaatacctttatcaattg

SEQ ID NO: 26531 - DNA, 20 bp, Leuconostoc gelidum
gtatcgcatgatatcaagct

SEQ ID NO: 26532 - DNA, 20 bp, Corynebacterium pilosum
caacttttgttggaaagcct

SEQ ID NO: 26533 - DNA, 20 bp, Moraxella osloensis
aacgatgactctctagcttg

SEQ ID NO: 26534 - DNA, 20 bp, Corynebacterium pseudotuberculosis
ggcccaaccagtttctgggg

SEQ ID NO: 26535 - DNA, 20 bp, Vibrio metschnikovii
ttgtttataatgaacaggga

SEQ ID NO: 26536 - DNA, 20 bp, Paenibacillus azotofixans
tcttgatcaacttagcggcg

SEQ ID NO: 26537 - DNA, 20 bp, Lactobacillus casei
ggtgcttgcactgagattcg

SEQ ID NO: 26538 - DNA, 20 bp, Fusobacterium necrophorum
ttgcctcttagaccgggaca

SEQ ID NO: 26539 - DNA, 20 bp, Paenibacillus azotofixans
gacatccctctgaatacgtt

SEQ ID NO: 26540 - DNA, 20 bp, Campylobacter curvus
gttgttgctgagctagtctt

SEQ ID NO: 26541 - DNA, 20 bp, Lactococcus lactis
tgcaccaatttgaagagcag

SEQ ID NO: 26542 - DNA, 20 bp, Lactococcus lactis
gagcgatgaagattggtgct

SEQ ID NO: 26543 - DNA, 20 bp, Haemophilus ducreyi
ggacttgctccttgggtgac

SEQ ID NO: 26544 - DNA, 20 bp, Paenibacillus azotofixans
ataccggataattcctctta

SEQ ID NO: 26545 - DNA, 20 bp, Proteus penneri
aaagttaatacctttatcaa

SEQ ID NO: 26546 - DNA, 20 bp, Fusobacterium necrophorum
agaacttgcctcttagaccg

SEQ ID NO: 26547 - DNA, 20 bp, Paenibacillus glucanolyticus
ccggataatttattacatag

SEQ ID NO: 26548 - DNA, 20 bp, Aerococcus urinae
aacaccacctcatggtggtg

SEQ ID NO: 26549 - DNA, 20 bp, Listeria grayi
atgaccttaggagcttgctc

SEQ ID NO: 26550 - DNA, 20 bp, Paenibacillus glucanolyticus
tgccaaggaagaacgtctca

SEQ ID NO: 26551 - DNA, 20 bp, Moraxella lacunata
ggttaatacctacaagccct

SEQ ID NO: 26552 - DNA, 20 bp, Streptococcus suis
taccgcatggtagatatttg

SEQ ID NO: 26553 - DNA, 20 bp, Vibrio metschnikovii
tttataatgaacagggacca

SEQ ID NO: 26554 - DNA, 20 bp, Kingella denitrificans
agggaagtgttaataccact

SEQ ID NO: 26555 - DNA, 20 bp, Campylobacter sputorum
ctaatctgccccatagagag

SEQ ID NO: 26556 - DNA, 20 bp, Paenibacillus validus
tatccttcgggataggttag

SEQ ID NO: 26557 - DNA, 20 bp, Sporosarcina ureae
aagcttgcttccttcagtta

SEQ ID NO: 26558 - DNA, 20 bp, Paenibacillus validus
acttatccttcgggataggt

SEQ ID NO: 26559 - DNA, 20 bp, Clostridium botulinum
actaggtgtaggagctgtca

SEQ ID NO: 26560 - DNA, 20 bp, Paenibacillus validus
tccttcgggatagcgttagc

SEQ ID NO: 26561 - DNA, 20 bp, Campylobacter sputorum
ttatacataagtttaattgg

SEQ ID NO: 26562 - DNA, 20 bp, Campylobacter curvus
agttgttgctgagctagtct

SEQ ID NO: 26563 - DNA, 20 bp, Lactococcus lactis
gcgatgaagattggtgcttg

SEQ ID NO: 26564 - DNA, 20 bp, Campylobacter sputorum
ttaagagctttcgctatggg

SEQ ID NO: 26565 - DNA, 20 bp, Lactobacillus casei
tgagattcgacttaaaacga

SEQ ID NO: 26566 - DNA, 20 bp, Fusobacterium nucleatum
tgattatagggcatcctaga

SEQ ID NO: 26567 - DNA, 20 bp, Streptococcus dysgalactiae
cgcataaaagtgtttaaccc

SEQ ID NO: 26568 - DNA, 20 bp, Enterococcus saccharolyticus
ataccgcataatgctttttc

SEQ ID NO: 26569 - DNA, 20 bp, Paenibacillus larvae
tcgcatgaagaagtcatgaa

SEQ ID NO: 26570 - DNA, 20 bp, Bacteroides forsythus
atggggctatttgttaaaga

SEQ ID NO: 26571 - DNA, 20 bp, Bacteroides forsythus
gttccgcatggggctatttg

SEQ ID NO: 26572 - DNA, 20 bp, Capnocytophaga ochracea
tttatattaaagctctggtg

SEQ ID NO: 26573 - DNA, 20 bp, Actinomyces neuii
cgcttttgtgtttttggtga

SEQ ID NO: 26574 - DNA, 20 bp, Bacillus firmus
gggaaagctgaaagatggca

SEQ ID NO: 26575 - DNA, 20 bp, Fusobacterium necrophorum
tacagagagcagcaaacccg

SEQ ID NO: 26576 - DNA, 20 bp, Capnocytophaga ochracea
atattaaagctctggtggtg

SEQ ID NO: 26577 - DNA, 20 bp, Bacillus smithii
aggaaggttgaaaggcggcg

SEQ ID NO: 26578 - DNA, 20 bp, Actinomyces neuii
tcctttcgcccgcggaaaag

SEQ ID NO: 26579 - DNA, 20 bp, Listeria seeligeri
gtcactgctttgaaagatgg

SEQ ID NO: 26580 - DNA, 20 bp, Fusobacterium mortiferum
tataagagcggcatcgtttt

SEQ ID NO: 26581 - DNA, 20 bp, Vibrio cholerae
gggcgggtgtactaggcccg

SEQ ID NO: 26582 - DNA, 20 bp, Paenibacillus alvei
ggagagtaactgctcctagg

SEQ ID NO: 26583 - DNA, 20 bp, Bordetella trematum
gcgccagctaatacctggcg

SEQ ID NO: 26584 - DNA, 20 bp, Corynebacterium cystitidis
ttttgtgggtgtgtggaaag

SEQ ID NO: 26585 - DNA, 20 bp, Yokenella regensburgei
cgaggaggaaggcgatacgg

SEQ ID NO: 26586 - DNA, 20 bp, Listeria grayi
taataatcagctccgcatgg

SEQ ID NO: 26587 - DNA, 20 bp, Enterococcus saccharolyticus
gtcgaacgcttcttttccgc

SEQ ID NO: 26588 - DNA, 20 bp, Streptococcus suis
ccgcatggtagatatttgaa

SEQ ID NO: 26589 - DNA, 20 bp, Bacillus badius
gatattctttttcttcgcat

SEQ ID NO: 26590 - DNA, 30 bp, Brevibacillus laterosporus
atgctaataccggatagagttttgcttcgc

SEQ ID NO: 26591 - DNA, 20 bp, Bacillus badius
aagtacggaagtaactgtcc

SEQ ID NO: 26592 - DNA, 20 bp, Kingella denitrificans
accttgtgctatttgagcag

SEQ ID NO: 26593 - DNA, 20 bp, Paenibacillus glucanolyticus
tctcatagagtaactgctat

SEQ ID NO: 26594 - DNA, 20 bp, Actinomyces naeslundii
tttggggggtgtggatgagt

SEQ ID NO: 26595 - DNA, 20 bp, Corynebacterium pseudotuberculosis
ccaaccagtttctgggggga

SEQ ID NO: 26596 - DNA, 20 bp, Paenibacillus azotofixans
ctgctaggaggctgaaaggc

SEQ ID NO: 26597 - DNA, 20 bp, Actinomyces neuii
gcgcttttgtgtttttggtg

SEQ ID NO: 26598 - DNA, 20 bp, Achromobacter xylosoxidans
cgggttaatacctcgcgaaa

SEQ ID NO: 26599 - DNA, 20 bp, Aerococcus urinae
gtcaccgcatggtgaccttt

SEQ ID NO: 26600 - DNA, 20 bp, Prevotella denticola
gtccctatttgcaggtacca

SEQ ID NO: 26601 - DNA, 20 bp, Proteus vulgaris
gagcggtaacagaggaaagc

SEQ ID NO: 26602 - DNA, 20 bp, Pasteurella aerogenes
aggccggttaccataagatg

SEQ ID NO: 26603 - DNA, 20 bp, Streptococcus uberis
caatagggtacacatgtacc

SEQ ID NO: 26604 - DNA, 20 bp, Serratia proteamaculans
gcatcacattgacgttactc

SEQ ID NO: 26605 - DNA, 20 bp, Brevibacillus laterosporus
ggaagaaacagtgccattta

SEQ ID NO: 26606 - DNA, 20 bp, Campylobacter sputorum
tctagtagcttaactactaa

SEQ ID NO: 26607 - DNA, 20 bp, Campylobacter sputorum
gccccatagagaggaacaac

SEQ ID NO: 26608 - DNA, 20 bp, Paenibacillus larvae
acagaccttttccttcgggg

SEQ ID NO: 26609 - DNA, 20 bp, Aneurinibacillus aneurinilyticus
catcccgctgtccctcctag

SEQ ID NO: 26610 - DNA, 20 bp, Streptococcus dysgalactiae
ggacccatgtctttcattta

SEQ ID NO: 26611 - DNA, 30 bp, Fusobacterium mortiferum
cagtcttgaatgattgtgaagtagttggaa

SEQ ID NO: 26612 - DNA, 20 bp, Corynebacterium cystitidis
ggattgccatggagacatgg

SEQ ID NO: 26613 - DNA, 20 bp, Brevibacillus laterosporus
taataccggatagagttttg

SEQ ID NO: 26614 - DNA, 20 bp, Enterococcus saccharolyticus
aaacaggtgctaatacccgc

SEQ ID NO: 26615 - DNA, 20 bp, Brevibacterium linens
gcgaggttttagcgaatccc

SEQ ID NO: 26616 - DNA, 20 bp, Bacillus laevolacticus
gacctatccttcgggatagg

SEQ ID NO: 26617 - DNA, 20 bp, Eubacterium moniliforme
acttgaaactgtgtggcttg

SEQ ID NO: 26618 - DNA, 20 bp, Listeria grayi
atcagctccgcatggagcgg

SEQ ID NO: 26619 - DNA, 20 bp, Lactococcus lactis
gattggtgcttgcaccaatt

SEQ ID NO: 26620 - DNA, 20 bp, Paenibacillus glucanolyticus
gctcaacttcaggtcgcact

SEQ ID NO: 26621 - DNA, 20 bp, Pasteurella aerogenes
aaggccggttaccataagat

SEQ ID NO: 26622 - DNA, 20 bp, Actinomyces neuii
aacgggatccattagcgctt

SEQ ID NO: 26623 - DNA, 20 bp, Neisseria lactamica
agtcgtacaaggtaaaccgt

SEQ ID NO: 26624 - DNA, 20 bp, Vibrio cholerae
gaaagccacacctctagggc

SEQ ID NO: 26625 - DNA, 20 bp, Pediococcus pentosaceus
gtacttgtactgattgagat

SEQ ID NO: 26626 - DNA, 20 bp, Lactobacillus casei
gcactgagattcgacttaaa

SEQ ID NO: 26627 - DNA, 20 bp, Paenibacillus lautus
atttatttcacagcattgtg

SEQ ID NO: 26628 - DNA, 20 bp, Virgibacillus pantothenticus
gtgccattcgaataggttgg

SEQ ID NO: 26629 - DNA, 20 bp, Paenibacillus lautus
aagaacgtctcttagagtaa

SEQ ID NO: 26630 - DNA, 20 bp, Paenibacillus larvae
agaagtcatgaaagacgggg

SEQ ID NO: 26631 - DNA, 20 bp, Streptococcus uberis
aataccgcatgacaataggg

SEQ ID NO: 26632 - DNA, 20 bp, Pseudomonas oryzihabitans
tagcgaatacctgtgagttt

SEQ ID NO: 26633 - DNA, 20 bp, Streptococcus infantarius
ttactcacccgttcgcaatc

SEQ ID NO: 26634 - DNA, 20 bp, Staphylococcus succinus
ctgagccatgatcaaactac

SEQ ID NO: 26635 - DNA, 20 bp, Brevibacterium linens
catctttggttgtggaaagt

SEQ ID NO: 26636 - DNA, 20 bp, Streptococcus suis
attaaccgcatggtagatgc

SEQ ID NO: 26637 - DNA, 20 bp, Streptococcus dysgalactiae
taaaagtgtttaacccatgt

SEQ ID NO: 26638 - DNA, 20 bp, Streptococcus dysgalactiae
ccatgtctttcatttaaaag

SEQ ID NO: 26639 - DNA, 20 bp, Paenibacillus azotofixans
ctcctgctaggaggctgaaa

SEQ ID NO: 26640 - DNA, 20 bp, Prevotella intermedia
cccctttgcatttacccttc

SEQ ID NO: 26641 - DNA, 20 bp, Paenibacillus macerans
gtcgtgatatggagcgaatc

SEQ ID NO: 26642 - DNA, 30 bp, Streptococcus suis
gcataacagtattaaccgcatggtagatgc

SEQ ID NO: 26643 - DNA, 20 bp, Paenibacillus amylolyticus
atttattttctctcctgggg

SEQ ID NO: 26644 - DNA, 20 bp, Bacillus laevolacticus
aagtcgagcggacctatcct

SEQ ID NO: 26645 - DNA, 20 bp, Paenibacillus azotofixans
taggaggctgaaaggcggag

SEQ ID NO: 26646 - DNA, 20 bp, Clostridium botulinum
ctaggtgtaggagctgtcat

SEQ ID NO: 26647 - DNA, 20 bp, Porphyromonas maccae
tccattagttggttggtgag

SEQ ID NO: 26648 - DNA, 20 bp, Fusobacterium necrophorum
gatattatggttttttcgca

SEQ ID NO: 26649 - DNA, 20 bp, Actinomyces neuii
cgaacgggatccattagcgc

SEQ ID NO: 26650 - DNA, 20 bp, Bacteroides thetaiotaomicron
atggtataatcagaccgcat

SEQ ID NO: 26651 - DNA, 30 bp, Turicella otitidis
ttttagtgtgatggttggaaagtttttcgg

SEQ ID NO: 26652 - DNA, 20 bp, Campylobacter sputorum
tataaatataacaataagct

SEQ ID NO: 26653 - DNA, 20 bp, Paenibacillus glucanolyticus
aaggaagaacgtctcataga

SEQ ID NO: 26654 - DNA, 20 bp, Brevibacterium linens
tctggaaacagttcctcccc

SEQ ID NO: 26655 - DNA, 20 bp, Bacillus laevolacticus
cggacctatccttcgggata

SEQ ID NO: 26656 - DNA, 20 bp, Lactococcus lactis
aagttgagcgatgaagattg

SEQ ID NO: 26657 - DNA, 20 bp, Bacillus badius
ttcgcatgaagaagaatgga

SEQ ID NO: 26658 - DNA, 30 bp, Vibrio hollisae
ttagaatccctggtagcgtagctaacgcgt

SEQ ID NO: 26659 - DNA, 20 bp, Prevotella denticola
tggggataaagttagggacg

SEQ ID NO: 26660 - DNA, 20 bp, Prevotella intermedia
cctttgcatttacccttcga

SEQ ID NO: 26661 - DNA, 20 bp, Campylobacter concisus
acgaagtcgtaacagggagc

SEQ ID NO: 26662 - DNA, 20 bp, Moellerella wisconsensis
cagcggaactcataaagtgc

SEQ ID NO: 26663 - DNA, 20 bp, Pediococcus acidilactici
ccgttaattgatcaggacgt

SEQ ID NO: 26664 - DNA, 20 bp, Lactobacillus acidophilus
gtgatgacgttgggaacgcg

SEQ ID NO: 26665 - DNA, 20 bp, Streptococcus sobrinus
caacggcttcactatcagat

SEQ ID NO: 26666 - DNA, 20 bp, Paenibacillus glucanolyticus
gtctcatagagtaactgcta

SEQ ID NO: 26667 - DNA, 20 bp, Eubacterium limosum
ggatccttcgggtgacatta

SEQ ID NO: 26668 - DNA, 20 bp, Brevibacillus laterosporus
cttcgcatgaagcgaaacgg

SEQ ID NO: 26669 - DNA, 20 bp, Bacteroides ovatus
tatagccgtaaggctgttgt

SEQ ID NO: 26670 - DNA, 20 bp, Capnocytophaga ochracea
ttttatattaaagctctggt

SEQ ID NO: 26671 - DNA, 20 bp, Corynebacterium pilosum
accggatattcaacttttgt

SEQ ID NO: 26672 - DNA, 20 bp, Corynebacterium cystitidis
agcgcgtggcgatatcgtga

SEQ ID NO: 26673 - DNA, 20 bp, Brevibacillus laterosporus
tagggttttgcttcgcctga

SEQ ID NO: 26674 - DNA, 20 bp, Campylobacter sputorum
aagcagttagatttaataaa

SEQ ID NO: 26675 - DNA, 30 bp, Bacillus azotoformans
ggatgataaaggagcttgctcctttagatt

SEQ ID NO: 26676 - DNA, 20 bp, Bordetella trematum
ggcgccagctaatacctggc

SEQ ID NO: 26677 - DNA, 20 bp, Pasteurella aerogenes
cgcaaggccggttaccataa

SEQ ID NO: 26678 - DNA, 30 bp, Paenibacillus glucanolyticus
aagctctgttgccaaggaagaacgtctcat

SEQ ID NO: 26679 - DNA, 20 bp, Kingella denitrificans
cttgtgctatttgagcagcc

SEQ ID NO: 26680 - DNA, 30 bp, Listeria seeligeri
catgtcactgctttgaaagatggtttcggc

SEQ ID NO: 26681 - DNA, 20 bp, Bacteroides thetaiotaomicron
caggttagccgcaaggcaaa

SEQ ID NO: 26682 - DNA, 30 bp, Paenibacillus larvae
tttcttcgcatgaagaagtcatgaaagacg

SEQ ID NO: 26683 - DNA, 20 bp, Streptococcus uberis
gacaatagggtacacatgta

SEQ ID NO: 26684 - DNA, 20 bp, Eubacterium limosum
aggttttgatggatccttcg

SEQ ID NO: 26685 - DNA, 30 bp, Paenibacillus amylolyticus
ttattttctctcctggggagataatgaaag

SEQ ID NO: 26686 - DNA, 20 bp, Paenibacillus macerans
cttccgcatgggagacttgg

SEQ ID NO: 26687 - DNA, 20 bp, Myroides odoratimimus
acaggaagaaacctccctac

SEQ ID NO: 26688 - DNA, 20 bp, Vibrio cholerae
acgggcgggtgtactaggcc

SEQ ID NO: 26689 - DNA, 20 bp, Sporosarcina ureae
cccagtgaccgtcatggaga

SEQ ID NO: 26690 - DNA, 20 bp, Actinomyces neuii
tagcgcttttgtgtttttgg

SEQ ID NO: 26691 - DNA, 20 bp, Haemophilus actinemycetemcomitans
gatgaggaaggttggtgtgt

SEQ ID NO: 26692 - DNA, 20 bp, Enterobacter hormaechei
tgggtaagcgccctcccgaa

SEQ ID NO: 26693 - DNA, 20 bp, Listeria grayi
aatcagctccgcatggagcg

SEQ ID NO: 26694 - DNA, 30 bp, Paenibacillus alvei
ataagactgggataacccacggaaacgtga

SEQ ID NO: 26695 - DNA, 20 bp, Fusobacterium mortiferum
cgagggagaggttaccttcg

SEQ ID NO: 26696 - DNA, 20 bp, Haemophilus ducreyi
gtagcacgaaggacttgctc

SEQ ID NO: 26697 - DNA, 20 bp, Budvicia aquatica
gggaacctgccggtggatca

SEQ ID NO: 26698 - DNA, 20 bp, Clostridium botulinum
aaacggcaataaaaggagca

SEQ ID NO: 26699 - DNA, 30 bp, Pseudomonas stutzeri
ctttcaaaactggcaagctagagtatggca

SEQ ID NO: 26700 - DNA, 20 bp, Proteus vulgaris
ggtgagtaatggctcaccta

SEQ ID NO: 26701 - DNA, 20 bp, Enterobacter cloacae
ggaaggcgacagggttaata

SEQ ID NO: 26702 - DNA, 20 bp, Bacillus badius
cttcgcatgaagaagaatgg

SEQ ID NO: 26703 - DNA, 20 bp, Listeria grayi
cgcatggagcgggtttgaaa

SEQ ID NO: 26704 - DNA, 20 bp, Actinomyces meyeri
tggcctaaccggtttttgct

SEQ ID NO: 26705 - DNA, 20 bp, Bacillus firmus
ctcccagaccgtcagcggcg

SEQ ID NO: 26706 - DNA, 20 bp, Paenibacillus alvei
gcattttcctcgcatgaggg

SEQ ID NO: 26707 - DNA, 20 bp, Campylobacter sputorum
tagcttaactactaaactgc

SEQ ID NO: 26708 - DNA, 30 bp, Fusobacterium mortiferum
tagagatacctccttcttcggacagttttc

SEQ ID NO: 26709 - DNA, 30 bp, Bacteroides ovatus
aggcagctcactagactgttactgacactg

SEQ ID NO: 26710 - DNA, 20 bp, Vibrio metschnikovii
cagggaccaaagagggggac

SEQ ID NO: 26711 - DNA, 20 bp, Bacteroides capilosus
tggcctgcatttgaaactgt

SEQ ID NO: 26712 - DNA, 20 bp, Pasteurella aerogenes
ccgcaaggccggttaccata

SEQ ID NO: 26713 - DNA, 20 bp, Unknown Organism
  oligonucleotide from CDC group VB-3
ggttacccggagtgattcat

SEQ ID NO: 26714 - DNA, 20 bp, Fusobacterium mortiferum
atacctccttcttcggacag

SEQ ID NO: 26715 - DNA, 30 bp, Porphyromonas maccae
acatatcctgtcacaaggccgctaagtagg

SEQ ID NO: 26716 - DNA, 20 bp, Porphyromonas maccae
ttataggggattaaagttat

SEQ ID NO: 26717 - DNA, 20 bp, Paenibacillus larvae
atgaagaagtcatgaaagac

SEQ ID NO: 26718 - DNA, 20 bp, Fusobacterium necrophorum
gaatcatgaaagctagatgc

SEQ ID NO: 26719 - DNA, 20 bp, Sporosarcina ureae
aactgttggaagcttgcttc

SEQ ID NO: 26720 - DNA, 20 bp, Pasteurella pneumotropica
acaaaagggggcgtaagctc

SEQ ID NO: 26721 - DNA, 20 bp, Enterococcus cecorum
gctacaccgaaagaaaatga

SEQ ID NO: 26722 - DNA, 20 bp, Paenibacillus alvei
caggcggcaatgtaagttgg

SEQ ID NO: 26723 - DNA, 20 bp, Porphyromonas maccae
atcctgtcacaaggccgcta

SEQ ID NO: 26724 - DNA, 20 bp, Kingella denitrificans
tgtgctatttgagcagccaa

SEQ ID NO: 26725 - DNA, 30 bp, Lactococcus garvieae
ggtcttgacatactcgtgctatccttagag

SEQ ID NO: 26726 - DNA, 20 bp, Paenibacillus larvae
cgagcggaccttgtgtttct

SEQ ID NO: 26727 - DNA, 20 bp, Corynebacterium cystitidis
ggatcgccatggagacatgg

SEQ ID NO: 26728 - DNA, 20 bp, Paenibacillus alvei
atgaggggaatgagaaaggc

SEQ ID NO: 26729 - DNA, 20 bp, Paenibacillus lautus
ttcacagcattgtggaataa

SEQ ID NO: 26730 - DNA, 20 bp, Serratia ficaria
aacttaccagagatggcatt

SEQ ID NO: 26731 - DNA, 20 bp, Bacillus azotoformans
taccagttaactgctggtac

SEQ ID NO: 26732 - DNA, 20 bp, Bacteroides ovatus
aacagaatatattggaaaca

SEQ ID NO: 26733 - DNA, 20 bp, Bacillus azotoformans
gatgataaaggagcttgctc

SEQ ID NO: 26734 - DNA, 20 bp, Aerococcus urinae
cacctcatggtggtgtttgg

SEQ ID NO: 26735 - DNA, 20 bp, Paenibacillus azotofixans
cctgctaggaggctgaaagg

SEQ ID NO: 26736 - DNA, 20 bp, Paenibacillus larvae
agacagaccttttccttcgg

SEQ ID NO: 26737 - DNA, 20 bp, Corynebacterium cystitidis
acgtatcttttgtgggtgtg

SEQ ID NO: 26738 - DNA, 20 bp, Paenibacillus glucanolyticus
atagagtaactgctatgaga

SEQ ID NO: 26739 - DNA, 20 bp, Corynebacterium cystitidis
tgtgtggaaaggttttgtgc

SEQ ID NO: 26740 - DNA, 20 bp, Bacillus badius
gaatggaaaggcggctttta

SEQ ID NO: 26741 - DNA, 20 bp, Prevotella denticola
atggggataaagttagggac

SEQ ID NO: 26742 - DNA, 20 bp, Streptococcus uberis
tgcttgcactggtctaagga

SEQ ID NO: 26743 - DNA, 20 bp, Paenibacillus validus
atggggcaacctatggctta

SEQ ID NO: 26744 - DNA, 30 bp, Bacillus firmus
gcttgctcccagaccgtcagcggcggacgg

SEQ ID NO: 26745 - DNA, 20 bp, Fusobacterium nucleatum
gggcatcctagaattatgaa

SEQ ID NO: 26746 - DNA, 20 bp, Bacteroides thetaiotaomicron
tggtataatcagaccgcatg

SEQ ID NO: 26747 - DNA, 20 bp, Corynebacterium mycetoides
ctatccttgtgggggagctg

SEQ ID NO: 26748 - DNA, 20 bp, Bacillus laevolacticus
agtcgagcggacctatcctt

SEQ ID NO: 26749 - DNA, 20 bp, Paenibacillus macerans
acgggaagcgaagtcgtgat

SEQ ID NO: 26750 - DNA, 20 bp, Streptococcus sobrinus
aacggcttcactatcagatg

SEQ ID NO: 26751 - DNA, 20 bp, Enterococcus cecorum
catttaccgcatggcagatg

SEQ ID NO: 26752 - DNA, 20 bp, Lactococcus lactis
ctttaaacataagttttaag

SEQ ID NO: 26753 - DNA, 20 bp, Pediococcus acidilactici
ttaattgatcatgacgtgct

SEQ ID NO: 26754 - DNA, 20 bp, Campylobacter coli
tgaagtcgtacaaggctaac

SEQ ID NO: 26755 - DNA, 20 bp, Paenibacillus macerans
cgcatgggagacttgggaaa

SEQ ID NO: 26756 - DNA, 20 bp, Bacillus badius
agtacggaagtaactgtccg

SEQ ID NO: 26757 - DNA, 30 bp, Bacteroides thetaiotaomicron
aaacaggttagccgcaaggcaaatgtgaag

SEQ ID NO: 26758 - DNA, 30 bp, Paenibacillus alvei
ggagagtaactgctcctagggtgacggtac

SEQ ID NO: 26759 - DNA, 30 bp, Eubacterium limosum
gaacgagaaggttttgatggatccttcggg

SEQ ID NO: 26760 - DNA, 20 bp, Paenibacillus azotofixans
aatctgtcaccaagggatgg

SEQ ID NO: 26761 - DNA, 20 bp, Corynebacterium pseudotuberculosis
ccatggcccaaccagtttct

SEQ ID NO: 26762 - DNA, 30 bp, Pediococcus acidilactici
tcaggacgtgcttgcactgaatgagatttt

SEQ ID NO: 26763 - DNA, 20 bp, Kingella denitrificans
cactttttgttgacggtacc

SEQ ID NO: 26764 - DNA, 20 bp, Enterobacter cloacae
ttcgggagggcgcttaccca

SEQ ID NO: 26765 - DNA, 20 bp, Fusobacterium necrophorum
gaggaatcatgaaagctaga

SEQ ID NO: 26766 - DNA, 20 bp, Paenibacillus azotofixans
gacatccctctgaatcgttt

SEQ ID NO: 26767 - DNA, 20 bp, Campylobacter sputorum
ttattaagagctttcgctat

SEQ ID NO: 26768 - DNA, 30 bp, Enterococcus saccharolyticus
ggtgctaataccgcataatgctttttctcg

SEQ ID NO: 26769 - DNA, 20 bp, Capnocytophaga gingivalis
agaagccctttcgggggcag

SEQ ID NO: 26770 - DNA, 20 bp, Corynebacterium cystitidis
gtggcctatctttgtgaggg

SEQ ID NO: 26771 - DNA, 20 bp, Eubacterium moniliforme
ggaagttgggagcacccgaa

SEQ ID NO: 26772 - DNA, 20 bp, Fusobacterium necrophorum
gaacttgcctcttagaccgg

SEQ ID NO: 26773 - DNA, 20 bp, Leclercia adecarboxylata
cgcggtaatacggaggggca

SEQ ID NO: 26774 - DNA, 20 bp, Corynebacterium cystitidis
tcgccatggagacatggttt

SEQ ID NO: 26775 - DNA, 20 bp, Fusobacterium mortiferum
cagaggtagagatacctcct

SEQ ID NO: 26776 - DNA, 20 bp, Proteus vulgaris
cacctagcaacgatctctac

SEQ ID NO: 26777 - DNA, 20 bp, Clostridium botulinum
tcgaggaagtcacttcggtg

SEQ ID NO: 26778 - DNA, 20 bp, Bacillus azotoformans
agtaccagttaactgctggt

SEQ ID NO: 26779 - DNA, 20 bp, Shigella sonnei
cagagatgaaaatgtgcctt

SEQ ID NO: 26780 - DNA, 20 bp, Enterococcus cecorum
ataattccatttaccgcatg

SEQ ID NO: 26781 - DNA, 20 bp, Paenibacillus validus
gacttatccttcgggatagg

SEQ ID NO: 26782 - DNA, 20 bp, Bacillus badius
accggatattctttttcttc

SEQ ID NO: 26783 - DNA, 20 bp, Streptococcus dysgalactiae
ataaaagtgtttaacccatg

SEQ ID NO: 26784 - DNA, 20 bp, Klebsiella oxytoca
gaggttaataaccttattca

SEQ ID NO: 26785 - DNA, 30 bp, Pediococcus acidilactici
gggtgagagtaactgttcacccagtgacgg

SEQ ID NO: 26786 - DNA, 20 bp, Proteus mirabilis
aagtcgtacaaggcaaccgt

SEQ ID NO: 26787 - DNA, 20 bp, Anaerobiospirillum succiniciproducens
tgacacaccgcccgtcacac

SEQ ID NO: 26788 - DNA, 20 bp, Haemophilus actinemycetemcomitans
tgatgaggaaggttggtgtg

SEQ ID NO: 26789 - DNA, 20 bp, Campylobacter sputorum
aagtttaattgggaaatgta

SEQ ID NO: 26790 - DNA, 20 bp, Campylobacter sputorum
agagaggaacaacacttaga

SEQ ID NO: 26791 - DNA, 20 bp, Campylobacter sputorum
catagagaggaacaacactt

SEQ ID NO: 26792 - DNA, 20 bp, Vibrio hollisae
tcctcagaagccggaagaga

SEQ ID NO: 26793 - DNA, 20 bp, Campylobacter concisus
gacgaagtcgtaacagggag

SEQ ID NO: 26794 - DNA, 20 bp, Staphylococcus aureus
cctggagtccacgccgaaac

SEQ ID NO: 26795 - DNA, 20 bp, Paenibacillus azotofixans
ccggataattcctcttagct

SEQ ID NO: 26796 - DNA, 20 bp, Bacillus smithii
tgaaggaaggttgaaaggcg

SEQ ID NO: 26797 - DNA, 20 bp, Clostridium ramosum
agcacttgtgctcgagtggc

SEQ ID NO: 26798 - DNA, 20 bp, Capnocytophaga gingivalis
tgtttggcgcaagctgagtg

SEQ ID NO: 26799 - DNA, 20 bp, Alcaligenes faecalis
acaaggtagacgtatcggaa

SEQ ID NO: 26800 - DNA, 20 bp, Campylobacter sputorum
atatattattaagagctttc

SEQ ID NO: 26801 - DNA, 20 bp, Corynebacterium cystitidis
tacagcgcgtggcgatatcg

SEQ ID NO: 26802 - DNA, 30 bp, Pasteurella aerogenes
ccgggaccgcaaggccggttaccataagat

SEQ ID NO: 26803 - DNA, 20 bp, Paenibacillus amylolyticus
ttattttctctcctggggag

SEQ ID NO: 26804 - DNA, 20 bp, Brevibacillus laterosporus
cggatagagttttgcttcgc

SEQ ID NO: 26805 - DNA, 20 bp, Capnocytophaga gingivalis
atttgataattaaaactgcg

SEQ ID NO: 26806 - DNA, 20 bp, Campylobacter sputorum
ataagcttttttgaagcttt

SEQ ID NO: 26807 - DNA, 20 bp, Streptococcus dysgalactiae
catgacaatggaggacccat

SEQ ID NO: 26808 - DNA, 20 bp, Clostridium botulinum
taggtgtaggagctgtcatg

SEQ ID NO: 26809 - DNA, 30 bp, Capnocytophaga gingivalis
ttgataattaaaactgcggtggtgaaagat

SEQ ID NO: 26810 - DNA, 20 bp, Corynebacterium cystitidis
atggtttcccttttgtggct

SEQ ID NO: 26811 - DNA, 20 bp, Paenibacillus larvae
taactgcccctggagtgacg

SEQ ID NO: 26812 - DNA, 30 bp, Vibrio hollisae
ggaacctgccctgacgagggggataaccac

SEQ ID NO: 26813 - DNA, 20 bp, Actinomyces viscosus
ggtcctggagacggggtttc

SEQ ID NO: 26814 - DNA, 20 bp, Cedecea davisae
cttgccatcggatgaaccca

SEQ ID NO: 26815 - DNA, 20 bp, Campylobacter concisus
ggggacgaagtcgtaacagg

SEQ ID NO: 26816 - DNA, 20 bp, Capnocytophaga gingivalis
ctagctgtttggcgcaagct

SEQ ID NO: 26817 - DNA, 30 bp, Turicella otitidis
tgggacgaagtcgtaacaggtacccgtacc

SEQ ID NO: 26818 - DNA, 20 bp, Paenibacillus larvae
agtcgagcggaccttgtgtt

SEQ ID NO: 26819 - DNA, 20 bp, Campylobacter coli
aagtcgtacaaggctaaccg

SEQ ID NO: 26820 - DNA, 20 bp, Corynebacterium cystitidis
cggtacagcgcgtggcgata

SEQ ID NO: 26821 - DNA, 20 bp, Campylobacter sputorum
agtcatttagaaatatctta

SEQ ID NO: 26822 - DNA, 20 bp, Campylobacter sputorum
agttagatttaataaatttt

SEQ ID NO: 26823 - DNA, 20 bp, Sporosarcina ureae
cttccttcagttagcggcgg

SEQ ID NO: 26824 - DNA, 30 bp, Paenibacillus glucanolyticus
ggaagaacgtctcatagagtaactgctatg

SEQ ID NO: 26825 - DNA, 20 bp, Aerococcus urinae
taataccgcataggaaaggt

SEQ ID NO: 26826 - DNA, 20 bp, Vibrio metschnikovii
ccttgtttataatgaacagg

SEQ ID NO: 26827 - DNA, 20 bp, Campylobacter lari
ctaacagcttaactgttaaa

SEQ ID NO: 26828 - DNA, 20 bp, Actinomyces viscosus
gtcctggagacggggtttcc

SEQ ID NO: 26829 - DNA, 20 bp, Fusobacterium mortiferum
cctccttcttcggacagttt

SEQ ID NO: 26830 - DNA, 20 bp, Fusobacterium necrophorum
ctcttagaccgggacaacat

SEQ ID NO: 26831 - DNA, 20 bp, Corynebacterium cystitidis
tggtttcccttttgtggctg

SEQ ID NO: 26832 - DNA, 20 bp, Enterococcus saccharolyticus
aatgctttttctcgcatgag

SEQ ID NO: 26833 - DNA, 20 bp, Campylobacter sputorum
ctttatattaataaagcgaa

SEQ ID NO: 26834 - DNA, 20 bp, Pediococcus acidilactici
ttgatcaggacgtgcttgca

SEQ ID NO: 26835 - DNA, 20 bp, Sporosarcina ureae
gaccgtcatggagacatgat

SEQ ID NO: 26836 - DNA, 20 bp, Streptococcus sobrinus
gcaacggcttcactatcaga

SEQ ID NO: 26837 - DNA, 20 bp, Prevotella denticola
cagactaataccgcatagtc

SEQ ID NO: 26838 - DNA, 20 bp, Campylobacter sputorum
gacttaatttttaaatctaa

SEQ ID NO: 26839 - DNA, 20 bp, Enterococcus cecorum
ccatttaccgcatggcagat

SEQ ID NO: 26840 - DNA, 20 bp, Cedecea davisae
tcttgccatcggatgaaccc

SEQ ID NO: 26841 - DNA, 20 bp, Paenibacillus larvae
ctttcgggagacgccaggtt

SEQ ID NO: 26842 - DNA, 20 bp, Enterococcus saccharolyticus
aacgctttttctcgcatgag

SEQ ID NO: 26843 - DNA, 20 bp, Lactobacillus casei
tgcttgcactgagattcgac

SEQ ID NO: 26844 - DNA, 30 bp, Paenibacillus validus
gaaacatggggcaacctatggcttacggat

SEQ ID NO: 26845 - DNA, 20 bp, Bacteroides ovatus
taataccggatagcatacga

SEQ ID NO: 26846 - DNA, 20 bp, Citrobacter amalonaticus
gaacgctgttggcaggccta

SEQ ID NO: 26847 - DNA, 20 bp, Brevibacillus laterosporus
ggggtagataactggggtga

SEQ ID NO: 26848 - DNA, 20 bp, Bacillus firmus
ggaaagctgaaagatggcat

SEQ ID NO: 26849 - DNA, 20 bp, Enterococcus cecorum
ttaccgcatggcagatggat

SEQ ID NO: 26850 - DNA, 30 bp, Corynebacterium group F
tgggcttgacatgtagcggatcgccgcaga

SEQ ID NO: 26851 - DNA, 20 bp, Bacteroides ovatus
cactagactgttactgacac

SEQ ID NO: 26852 - DNA, 20 bp, Bacillus azotoformans
gcggatgataaaggagcttg

SEQ ID NO: 26853 - DNA, 20 bp, Bacteroides fragilis
cgtaccggaggtgcggttgg

SEQ ID NO: 26854 - DNA, 20 bp, Lactobacillus casei
gagattcgacttaaaacgag

SEQ ID NO: 26855 - DNA, 30 bp, Listeria seeligeri
tgtcactgctttgaaagatggtttcggcta

SEQ ID NO: 26856 - DNA, 20 bp, Brevibacillus laterosporus
ttttgcttcgcctgaagcga

SEQ ID NO: 26857 - DNA, 20 bp, Vibrio metschnikovii
gaacagggaccaaagagggg

SEQ ID NO: 26858 - DNA, 20 bp, Bacteroides forsythus
ggggttccgcatggggctat

SEQ ID NO: 26859 - DNA, 20 bp, Brevibacterium linens
cctggtgcttgcaccggggt

SEQ ID NO: 26860 - DNA, 30 bp, Paenibacillus azotofixans
cgaagccgcgaggcggagccaatcttataa

SEQ ID NO: 26861 - DNA, 20 bp, Paenibacillus larvae
tttccttcgggagacgccag

SEQ ID NO: 26862 - DNA, 20 bp, Corynebacterium pseudotuberculosis
atggcccaaccagtttctgg

SEQ ID NO: 26863 - DNA, 20 bp, Haemophilus ducreyi
ggtagcacgaaggacttgct

SEQ ID NO: 26864 - DNA, 20 bp, Clostridium botulinum
aatactaggtgtaggagctg

SEQ ID NO: 26865 - DNA, 20 bp, Capnocytophaga ochracea
gtttttatattaaagctctg

SEQ ID NO: 26866 - DNA, 20 bp, Sporosarcina ureae
tccttcagttagcggcggac

SEQ ID NO: 26867 - DNA, 20 bp, Lactobacillus acidophilus
gtacaacgaggagcaagcct

SEQ ID NO: 26868 - DNA, 20 bp, Corynebacterium cystitidis
atcgccatggagacatggtt

SEQ ID NO: 26869 - DNA, 20 bp, Salmonella typhi
gcttgcttgcttggctgacg

SEQ ID NO: 26870 - DNA, 20 bp, Bacteroides capilosus
gactgcaagtcagggtgtga

SEQ ID NO: 26871 - DNA, 20 bp, Campylobacter rectus
ctccttctttacataagtta

SEQ ID NO: 26872 - DNA, 20 bp, Listeria grayi
gctccgcatggagcgggttt

SEQ ID NO: 26873 - DNA, 20 bp, Paenibacillus validus
atccttcgggataggttagc

SEQ ID NO: 26874 - DNA, 20 bp, Capnocytophaga ochracea
ataagggctacgcgtagttt

SEQ ID NO: 26875 - DNA, 20 bp, Listeria seeligeri
agtgacgcatgtcactgctt

SEQ ID NO: 26876 - DNA, 20 bp, Fusobacterium mortiferum
tcagtcttgaatgattgtga

SEQ ID NO: 26877 - DNA, 20 bp, Kingella denitrificans
gttaataccactttttgttg

SEQ ID NO: 26878 - DNA, 20 bp, Streptococcus infantarius
acttgcatgtattaggccgc

SEQ ID NO: 26879 - DNA, 20 bp, Campylobacter sputorum
gtttaattgggaaatgtagc

SEQ ID NO: 26880 - DNA, 20 bp, Capnocytophaga gingivalis
cgggggcagaaaccggcgca

SEQ ID NO: 26881 - DNA, 20 bp, Fusobacterium necrophorum
ggaggaatcatgaaagctag

SEQ ID NO: 26882 - DNA, 20 bp, Capnocytophaga gingivalis
tcgggggcagaaaccggcgc

SEQ ID NO: 26883 - DNA, 20 bp, Fusobacterium necrophorum
ggaatcatgaaagctagatg

SEQ ID NO: 26884 - DNA, 20 bp, Aerococcus urinae
tggtgacctttggaaagacg

SEQ ID NO: 26885 - DNA, 20 bp, Bacteroides ovatus
agccgtaaggctgttgtgaa

SEQ ID NO: 26886 - DNA, 20 bp, Campylobacter sputorum
gaaatatcttaatatatatt

SEQ ID NO: 26887 - DNA, 20 bp, Campylobacter sputorum
cttaataatatatatcaaag

SEQ ID NO: 26888 - DNA, 20 bp, Clostridium botulinum
ctgtcatggcttctgtgccg

SEQ ID NO: 26889 - DNA, 20 bp, Paenibacillus amylolyticus
tattttctctcctggggaga

SEQ ID NO: 26890 - DNA, 20 bp, Actinomyces viscosus
acatgtgccggatggtcctg

SEQ ID NO: 26891 - DNA, 20 bp, Paenibacillus larvae
tctttcgggagacgccaggt

SEQ ID NO: 26892 - DNA, 20 bp, Lactococcus lactis
ttgaagagcagcgaacgggt

SEQ ID NO: 26893 - DNA, 20 bp, Capnocytophaga gingivalis
tggcgcaagctgagtggcta

SEQ ID NO: 26894 - DNA, 20 bp, Capnocytophaga gingivalis
ctgtttggcgcaagctgagt

SEQ ID NO: 26895 - DNA, 20 bp, Corynebacterium group F
cttgtggtcgctatacaggt

SEQ ID NO: 26896 - DNA, 20 bp, Shewanella putrefaciens
atgccacgggaatacgttcc

SEQ ID NO: 26897 - DNA, 20 bp, Corynebacterium group F
catgtagcggatcgccgcag

SEQ ID NO: 26898 - DNA, 20 bp, Campylobacter sputorum
cataagtttaattgggaaat

SEQ ID NO: 26899 - DNA, 20 bp, Haemophilus actinomycetomicans
ttagggccgcatgccatgag

SEQ ID NO: 26900 - DNA, 20 bp, Fusobacterium mortiferum
gtcttgaatgattgtgaagt

SEQ ID NO: 26901 - DNA, 20 bp, Shewanella putrefaciens
aagggtgtagtttaatacgc

SEQ ID NO: 26902 - DNA, 20 bp, Sporosarcina ureae
aagtcgagcgaactgttgga

SEQ ID NO: 26903 - DNA, 20 bp, Campylobacter sputorum
aaatatcttaatatatatta

SEQ ID NO: 26904 - DNA, 20 bp, Paenibacillus azotofixans
agcggagttgtgatggagct

SEQ ID NO: 26905 - DNA, 20 bp, Pasteurella pneumotropica
aaggtctaaggacaaaaggg

SEQ ID NO: 26906 - DNA, 20 bp, Pseudomonas oryzihabitans
tgtgagttttgacgttaccg

SEQ ID NO: 26907 - DNA, 20 bp, Vibrio metschnikovii
tgaacagggaccaaagaggg

SEQ ID NO: 26908 - DNA, 20 bp, Haemophilus influenzae
gatcatggctcagattgacg

SEQ ID NO: 26909 - DNA, 20 bp, Vibrio parahaemolyticus
tcgtagtccggattggagct

SEQ ID NO: 26910 - DNA, 20 bp, Haemophilus actinomycetomicans
ccttagggccgcatgccatg

SEQ ID NO: 26911 - DNA, 20 bp, Brevibacillus laterosporus
ccggatagagttttgcttcg

SEQ ID NO: 26912 - DNA, 20 bp, Listeria grayi
gcatggagcaggtttgaaag

SEQ ID NO: 26913 - DNA, 20 bp, Corynebacterium mycetoides
gcctatccttgtgggggagc

SEQ ID NO: 26914 - DNA, 20 bp, Prevotella intermedia
gggcacgtgtgcccctttgc

SEQ ID NO: 26915 - DNA, 20 bp, Paenibacillus glucanolyticus
tttattacatagcattatgt

SEQ ID NO: 26916 - DNA, 30 bp, Clostridium botulinum
tcgaggaagtcacttcggtgacaggaagac

SEQ ID NO: 26917 - DNA, 20 bp, Fusobacterium mortiferum
atggtatataagagcggcat

SEQ ID NO: 26918 - DNA, 20 bp, Clostridium botulinum
cacttcggtgacaggaagac

SEQ ID NO: 26919 - DNA, 20 bp, Paenibacillus validus
ggatagcgttagcggcggac

SEQ ID NO: 26920 - DNA, 20 bp, Moraxella atlantae
ggtgacgttacctgcagaat

SEQ ID NO: 26921 - DNA, 20 bp, Bacteroides forsythus
gcatggggctatttgttaaa

SEQ ID NO: 26922 - DNA, 20 bp, Paenibacillus azotofixans
acatccctctgaatacgtta

SEQ ID NO: 26923 - DNA, 20 bp, Paenibacillus larvae
tgaagaagtcatgaaagacg

SEQ ID NO: 26924 - DNA, 20 bp, Prevotella denticola
ccctatttgcaggtaccata

SEQ ID NO: 26925 - DNA, 20 bp, Paenibacillus validus
agcggacttatccttcggga

SEQ ID NO: 26926 - DNA, 20 bp, Paenibacillus thiaminolyticus
tcgggaaaccattagcttag

SEQ ID NO: 26927 - DNA, 20 bp, Paenibacillus alvei
cgcaggcggcaatgtaagtt

SEQ ID NO: 26928 - DNA, 20 bp, Actinomyces meyeri
gcctaaccggtttttgctgg

SEQ ID NO: 26929 - DNA, 20 bp, Clostridium histolyticum
cccttcggggaacggattag

SEQ ID NO: 26930 - DNA, 20 bp, Enterococcus saccharolyticus
ccgcataatgctttttctcg

SEQ ID NO: 26931 - DNA, 20 bp, Prevotella denticola
tgtatggggataaagttagg

SEQ ID NO: 26932 - DNA, 30 bp, Streptococcus suis
tattaaccgcatggtagatacttgaaagga

SEQ ID NO: 26933 - DNA, 20 bp, Corynebacterium cystitidis
agtggcctatctttgtgagg

SEQ ID NO: 26934 - DNA, 30 bp, Pseudomonas oryzihabitans
cctgtgagttttgacgttaccgacagaata

SEQ ID NO: 26935 - DNA, 20 bp, Vibrio mimicus
tgaagtcgtcaacacggtag

SEQ ID NO: 26936 - DNA, 20 bp, Leuconostoc citreum
cgcatgatatcaagttaaaa

SEQ ID NO: 26937 - DNA, 20 bp, Anaerobiospirillum succiniciproducens
cactgacggtacccacagaa

SEQ ID NO: 26938 - DNA, 20 bp, Aerococcus urinae
ggtggtgtttggaaagacgg

SEQ ID NO: 26939 - DNA, 20 bp, Capnocytophaga gingivalis
gctgtttggcgcaagctgag

SEQ ID NO: 26940 - DNA, 20 bp, Actinobacillus ureae
cttgggaatttggctcatgg

SEQ ID NO: 26941 - DNA, 30 bp, Bacillus badius
cggggctaataccggatattctttttcttc

SEQ ID NO: 26942 - DNA, 20 bp, Sporosarcina ureae
gttggaagcttgcttccttc

SEQ ID NO: 26943 - DNA, 20 bp, Clostridium botulinum
tactaggtgtaggagctgtc

SEQ ID NO: 26944 - DNA, 20 bp, Vibrio metschnikovii
cccttgtttataatgaacag

SEQ ID NO: 26945 - DNA, 30 bp, Capnocytophaga gingivalis
tggatactagctgtttggcgcaagctgagt

SEQ ID NO: 26946 - DNA, 20 bp, Prevotella denticola
tccctatttgcaggtaccat

SEQ ID NO: 26947 - DNA, 20 bp, Pseudomonas oryzihabitans
acctgtgagttttgacgtta

SEQ ID NO: 26948 - DNA, 30 bp, Paenibacillus alvei
aagcgcgcgcaggcggcaatgtaagttggg

SEQ ID NO: 26949 - DNA, 20 bp, Streptococcus dysgalactiae
gaggacccatgtctttcatt

SEQ ID NO: 26950 - DNA, 20 bp, Paenibacillus larvae
ttagagatagaccttttcct

SEQ ID NO: 26951 - DNA, 20 bp, Streptococcus dysgalactiae
tctttcatttaaaaggtgca

SEQ ID NO: 26952 - DNA, 20 bp, Paenibacillus larvae
cttgtgtttccttcgggaga

SEQ ID NO: 26953 - DNA, 20 bp, Pediococcus acidilactici
tcaggacgtgcttgcactga

SEQ ID NO: 26954 - DNA, 20 bp, Vibrio metschnikovii
acagggaccaaagaggggga

SEQ ID NO: 26955 - DNA, 20 bp, Lactobacillus casei
acggtgcttgcactgagatt

SEQ ID NO: 26956 - DNA, 20 bp, Lactococcus garvieae
tcggtacaaggtagccgtat

SEQ ID NO: 26957 - DNA, 20 bp, Bacillus laevolacticus
catccctctgaccgcgctac

SEQ ID NO: 26958 - DNA, 30 bp, Vibrio hollisae
gcccagttgggattagctggttggtggggt

SEQ ID NO: 26959 - DNA, 20 bp, Enterococcus saccharolyticus
gtgctaatacccgcataacg

SEQ ID NO: 26960 - DNA, 20 bp, Corynebacterium pseudotuberculosis
catggcccaaccagtttctg

SEQ ID NO: 26961 - DNA, 20 bp, Actinomyces viscosus
aggagccagcttgctggttc

SEQ ID NO: 26962 - DNA, 20 bp, Bacteroides ovatus
acagtatagccgtaaggctg

SEQ ID NO: 26963 - DNA, 20 bp, Serratia ficaria
aatacggcagcgcattgacg

SEQ ID NO: 26964 - DNA, 20 bp, Paenibacillus larvae
gggcaacctgtcacttacag

SEQ ID NO: 26965 - DNA, 20 bp, Lactococcus lactis
ccaatttgaagagcagcgaa

SEQ ID NO: 26966 - DNA, 20 bp, Clostridium clostridiiforme
tgttggggggcaaagccctt

SEQ ID NO: 26967 - DNA, 20 bp, Moraxella osloensis
gtgagaatctctcagagatg

SEQ ID NO: 26968 - DNA, 20 bp, Paenibacillus larvae
cctggagtgacggtacttga

SEQ ID NO: 26969 - DNA, 20 bp, Streptococcus uberis
ggtacacatgtaccctattt

SEQ ID NO: 26970 - DNA, 20 bp, Paenibacillus azotofixans
ctctgaatacgttagagata

SEQ ID NO: 26971 - DNA, 20 bp, Corynebacterium cystitidis
gggtgtgtggaaaggttttg

SEQ ID NO: 26972 - DNA, 20 bp, Paenibacillus alvei
ataggcattttcctcgcatg

SEQ ID NO: 26973 - DNA, 20 bp, Eubacterium moniliforme
cacttgaaactgtgtggctt

SEQ ID NO: 26974 - DNA, 20 bp, Pasteurella pneumotropica
ggtctaaggacaaaaggggg

SEQ ID NO: 26975 - DNA, 20 bp, Streptococcus dysgalactiae
gttaaacatttaaaaggtgc

SEQ ID NO: 26976 - DNA, 20 bp, Fusobacterium mortiferum
tacctccttcttcggacagt

SEQ ID NO: 26977 - DNA, 20 bp, Paenibacillus popilliae
ttgcttctaactaacctagc

SEQ ID NO: 26978 - DNA, 30 bp, Paenibacillus larvae
gggcaacctgtcacttacagatgggcctgc

SEQ ID NO: 26979 - DNA, 20 bp, Stenotrophomonas maltophilia
cgcttaccactgtgtgactc

SEQ ID NO: 26980 - DNA, 30 bp, Pasteurella pneumotropica
agagatagttttgtgccttagggaactttg

SEQ ID NO: 26981 - DNA, 20 bp, Neisseria subflava
gatcgagtccggattgcact

SEQ ID NO: 26982 - DNA, 20 bp, Streptococcus dysgalactiae
aaaagtgtttaacccatgtt

SEQ ID NO: 26983 - DNA, 20 bp, Corynebacterium afermentans
cagcgtcagttcggcccaga

SEQ ID NO: 26984 - DNA, 20 bp, Paenibacillus alvei
tgaggggaatgagaaaggcg

SEQ ID NO: 26985 - DNA, 20 bp, Vibrio metschnikovii
tataatgaacagggaccaaa

SEQ ID NO: 26986 - DNA, 20 bp, Bacillus firmus
ttgctcccagaccgtcagcg

SEQ ID NO: 26987 - DNA, 20 bp, Paenibacillus azotofixans
tgacatccctctgaatcgtt

SEQ ID NO: 26988 - DNA, 20 bp, Vibrio harveyi
caaagtcatcatggccctta

SEQ ID NO: 26989 - DNA, 20 bp, Lactococcus garvieae
tgacatactcgtgctatcct

SEQ ID NO: 26990 - DNA, 20 bp, Bacillus azotoformans
tcgagcggatgataaaggag

SEQ ID NO: 26991 - DNA, 20 bp, Prevotella denticola
gtatggggataaagttaggg

SEQ ID NO: 26992 - DNA, 20 bp, Enterococcus saccharolyticus
cgcataacgctttttctcgc

SEQ ID NO: 26993 - DNA, 20 bp, Anaerococcus prevotii
ttaccagcgaataatgtcgg

SEQ ID NO: 26994 - DNA, 20 bp, Bacillus laevolacticus
atccctctgaccgcgctaca

SEQ ID NO: 26995 - DNA, 20 bp, Granulicatella elegans
accgatgcttgcattggtca

SEQ ID NO: 26996 - DNA, 20 bp, Bacteroides merdae
agtttgcgatacaatgtaag

SEQ ID NO: 26997 - DNA, 20 bp, Sporosarcina ureae
taatccattctctcgcatga

SEQ ID NO: 26998 - DNA, 20 bp, Paenibacillus larvae
ggggagtaactgcccctgga

SEQ ID NO: 26999 - DNA, 20 bp, Lactococcus garvieae
cttgatgatcccgcgttgta

SEQ ID NO: 27000 - DNA, 20 bp, Aerococcus urinae
cgcataggaaaggtcaccgc

SEQ ID NO: 27001 - DNA, 20 bp, Fusobacterium necrophorum
aggaatcatgaaagctagat

SEQ ID NO: 27002 - DNA, 20 bp, Sporosarcina ureae
gaactgttggaagcttgctt

SEQ ID NO: 27003 - DNA, 20 bp, Pseudomonas oryzihabitans
agcgaatacctgtgagtttt

SEQ ID NO: 27004 - DNA, 20 bp, Haemophilus ducreyi
cacgaaggacttgctccttg

SEQ ID NO: 27005 - DNA, 20 bp, Lactobacillus casei
cactgagattcgacttaaaa

SEQ ID NO: 27006 - DNA, 20 bp, Vibrio cholerae
tgtgacgggcgggtgtacta

SEQ ID NO: 27007 - DNA, 20 bp, Collinsella aerofaciens
accgtcaaggggggaggcgc

SEQ ID NO: 27008 - DNA, 20 bp, Paenibacillus azotofixans
cttgatcaacttagcggcgg

SEQ ID NO: 27009 - DNA, 20 bp, Brevibacillus laterosporus
ttagggaagaaacagtgcca

SEQ ID NO: 27010 - DNA, 20 bp, Streptococcus suis
catggtagatacttgaaagg

SEQ ID NO: 27011 - DNA, 20 bp, Actinomyces viscosus
gccggatggtcctggagacg

SEQ ID NO: 27012 - DNA, 20 bp, Bacteroides thetaiotaomicron
aggttagccgcaaggcaaat

SEQ ID NO: 27013 - DNA, 20 bp, Kocuria rosea
catgcagtcgagcgaactga

SEQ ID NO: 27014 - DNA, 20 bp, Achromobacter xylosoxidans
cgcgggttaatacctcgcga

SEQ ID NO: 27015 - DNA, 20 bp, Sporosarcina ureae
gtcgagcgaactgttggaag

SEQ ID NO: 27016 - DNA, 20 bp, Brevibacillus laterosporus
ataccggatagagttttgct

SEQ ID NO: 27017 - DNA, 20 bp, Pseudomonas oryzihabitans
aatacctgtgagttttgacg

SEQ ID NO: 27018 - DNA, 20 bp, Vibrio metschnikovii
ccgcatgatgcccttgttta

SEQ ID NO: 27019 - DNA, 20 bp, Paenibacillus glucanolyticus
ccaaggaagaacgtctcata

SEQ ID NO: 27020 - DNA, 20 bp, Citrobacter amalonaticus
aacgctgttggcaggcctaa

SEQ ID NO: 27021 - DNA, 20 bp, Bordetella trematum
cggcgccggctaatacctgg

SEQ ID NO: 27022 - DNA, 20 bp, Bacteroides forsythus
ggttccgcatggggctattt

SEQ ID NO: 27023 - DNA, 20 bp, Paenibacillus thiaminolyticus
taccggatagtcgatttcct

SEQ ID NO: 27024 - DNA, 20 bp, Aerococcus urinae
gcataggaaacaccacctca

SEQ ID NO: 27025 - DNA, 20 bp, Cellulosimicrobium cellulans
accggatatgagccgtccct

SEQ ID NO: 27026 - DNA, 20 bp, Actinomyces viscosus
tttcctcctttgggggctgg

SEQ ID NO: 27027 - DNA, 20 bp, Vibrio metschnikovii
ataatgaacagggaccaaag

SEQ ID NO: 27028 - DNA, 20 bp, Paenibacillus macerans
atgggagacttgggaaaggc

SEQ ID NO: 27029 - DNA, 20 bp, Clostridium botulinum
aggtgtaggagctgtcatgg

SEQ ID NO: 27030 - DNA, 30 bp, Paenibacillus alvei
tcgcatgaggggaatgagaaaggcggagca

SEQ ID NO: 27031 - DNA, 20 bp, Paenibacillus larvae
aactgcccctggagtgacgg

SEQ ID NO: 27032 - DNA, 20 bp, Haemophilus paraphrophilus
tgtgaatagcacaacaaatt

SEQ ID NO: 27033 - DNA, 20 bp, Actinomyces viscosus
tcgaacggtgaaggagccag

SEQ ID NO: 27034 - DNA, 20 bp, Campylobacter sputorum
gagaggaacaacacttagaa

SEQ ID NO: 27035 - DNA, 20 bp, Fusobacterium mortiferum
acctaatggtatataagagc

SEQ ID NO: 27036 - DNA, 20 bp, Sporosarcina ureae
gtgaccgtcatggagacatg

SEQ ID NO: 27037 - DNA, 20 bp, Moraxella osloensis
cttgctagagatgattagtg

SEQ ID NO: 27038 - DNA, 20 bp, Bacillus azotoformans
cagttaactgctggtacctt

SEQ ID NO: 27039 - DNA, 20 bp, Aerococcus urinae
cctcatggtggtgtttggaa

SEQ ID NO: 27040 - DNA, 20 bp, Corynebacterium cystitidis
tcttttgtgggtgtgtggaa

SEQ ID NO: 27041 - DNA, 20 bp, Dermabacter hominis
ccttggcccgcatgggtttt

SEQ ID NO: 27042 - DNA, 20 bp, Paenibacillus alvei
cctagggtgacggtacctga

SEQ ID NO: 27043 - DNA, 20 bp, Bacteroides ovatus
tcactagactgttactgaca

SEQ ID NO: 27044 - DNA, 20 bp, Actinomyces viscosus
aacggtgaaggagccagctt

SEQ ID NO: 27045 - DNA, 20 bp, Bacteroides ovatus
tagccgtaaggctgttgtga

SEQ ID NO: 27046 - DNA, 20 bp, Vibrio hollisae
tgacatcctcagaagccgga

SEQ ID NO: 27047 - DNA, 20 bp, Fusobacterium mortiferum
tcttgaatgattgtgaagta

SEQ ID NO: 27048 - DNA, 20 bp, Aerococcus urinae
caccgcatggtgacctttgg

SEQ ID NO: 27049 - DNA, 20 bp, Fusobacterium mortiferum
agtctacttgatcctcgggg

SEQ ID NO: 27050 - DNA, 30 bp, Sporosarcina ureae
cttgacatcccagtgaccgtcatggagaca

SEQ ID NO: 27051 - DNA, 20 bp, Campylobacter sputorum
aaaaagttataaatataaca

SEQ ID NO: 27052 - DNA, 20 bp, Prevotella bivia
ggtaaccgtaggggaaccct

SEQ ID NO: 27053 - DNA, 20 bp, Campylobacter sputorum
tcttaataatatatatcaaa

SEQ ID NO: 27054 - DNA, 20 bp, Bacillus firmus
gggagcttgctcccagaccg

SEQ ID NO: 27055 - DNA, 20 bp, Brevibacillus brevis
cacggaggcatctcctgtgc

SEQ ID NO: 27056 - DNA, 20 bp, Lactobacillus acidophilus
gacagtacaacgaggagcaa

SEQ ID NO: 27057 - DNA, 20 bp, Listeria seeligeri
atgtcactgctttgaaagat

SEQ ID NO: 27058 - DNA, 20 bp, Corynebacterium group F
acatgtagcggatcgccgca

SEQ ID NO: 27059 - DNA, 20 bp, Sporosarcina ureae
ccggtttcggctgtcactga

SEQ ID NO: 27060 - DNA, 30 bp, Pasteurella pneumotropica
ggtagctaataccgcataaggtctaaggac

SEQ ID NO: 27061 - DNA, 20 bp, Campylobacter rectus
tctatactccttctttacat

SEQ ID NO: 27062 - DNA, 20 bp, Streptococcus suis
accgcatggtagatatttga

SEQ ID NO: 27063 - DNA, 20 bp, Brevibacillus laterosporus
ataccggatagggttttgct

SEQ ID NO: 27064 - DNA, 20 bp, Haemophilus actinomycetomicans
cgggaccttagggccgcatg

SEQ ID NO: 27065 - DNA, 20 bp, Corynebacterium mycetoides
gtggcctatccttgtggggg

SEQ ID NO: 27066 - DNA, 20 bp, Bacillus azotoformans
ggatgataaaggagcttgct

SEQ ID NO: 27067 - DNA, 30 bp, Actinomyces viscosus
aaggcttgacatgtgccggatggtcctgga

SEQ ID NO: 27068 - DNA, 20 bp, Brevibacillus brevis
gataggggagaagtcgtaac

SEQ ID NO: 27069 - DNA, 20 bp, Moraxella osloensis
gcttgctagagatgattagt

SEQ ID NO: 27070 - DNA, 20 bp, Fusobacterium necrophorum
acttgcctcttagaccggga

SEQ ID NO: 27071 - DNA, 20 bp, Stenotrophomonas maltophilia
gcgcttaccactgtgtgact

SEQ ID NO: 27072 - DNA, 20 bp, Paenibacillus macerans
cgaagtcgtgatatggagcg

SEQ ID NO: 27073 - DNA, 20 bp, Lactobacillus casei
gaacggtgcttgcactgaga

SEQ ID NO: 27074 - DNA, 30 bp, Clostridium ramosum
aaacgatagctaagaccgcataggtacgga

SEQ ID NO: 27075 - DNA, 20 bp, Campylobacter sputorum
acataagtttaattgggaaa

SEQ ID NO: 27076 - DNA, 20 bp, Brevibacillus laterosporus
gcttcgcatgaagcgaaacg

SEQ ID NO: 27077 - DNA, 20 bp, Brevibacillus laterosporus
atagggttttgcttcgcctg

SEQ ID NO: 27078 - DNA, 20 bp, Paenibacillus validus
cttcgggatagcgttagcgg

SEQ ID NO: 27079 - DNA, 20 bp, Stenotrophomonas maltophilia
ccttcgggagcgctgagcac

SEQ ID NO: 27080 - DNA, 30 bp, Prevotella intermedia
gtgtgcccctttgcatttacccttcgaata

SEQ ID NO: 27081 - DNA, 20 bp, Pasteurella aerogenes
gcaaggccggttaccataag

SEQ ID NO: 27082 - DNA, 20 bp, Myroides odoratimimus
aggaagaaacctccctacga

SEQ ID NO: 27083 - DNA, 20 bp, Haemophilus paraphrophilus
ttgtgtgaatagcacaacaa

SEQ ID NO: 27084 - DNA, 20 bp, Propionibacterium avidum
ccggggcttgtacacccgcc

SEQ ID NO: 27085 - DNA, 20 bp, Bacteroides forsythus
ccgcatggggctatttgtta

SEQ ID NO: 27086 - DNA, 20 bp, Facklamia sourekii
cctctagcgggggataacta

SEQ ID NO: 27087 - DNA, 20 bp, Fusobacterium mortiferum
acagaggtagagatacctcc

SEQ ID NO: 27088 - DNA, 20 bp, Haemophilus ducreyi
gcacgaaggacttgctcctt

SEQ ID NO: 27089 - DNA, 20 bp, Citrobacter amalonaticus
acgctgttggcaggcctaac

SEQ ID NO: 27090 - DNA, 20 bp, Corynebacterium cystitidis
tcacgtatcttttgtgggtg

SEQ ID NO: 27091 - DNA, 20 bp, Capnocytophaga ochracea
aagaataagggctacgcgta

SEQ ID NO: 27092 - DNA, 20 bp, Paenibacillus azotofixans
cggataattcctcttagctc

SEQ ID NO: 27093 - DNA, 20 bp, Paenibacillus alvei
gctcctagggtgacggtacc

SEQ ID NO: 27094 - DNA, 20 bp, Paenibacillus larvae
agtaactgcccctggagtga

SEQ ID NO: 27095 - DNA, 20 bp, Vibrio hollisae
gacatcctcagaagccggaa

SEQ ID NO: 27096 - DNA, 20 bp, Pseudomonas oryzihabitans
tcatagcgaatacctgtgag

SEQ ID NO: 27097 - DNA, 20 bp, Paenibacillus glucanolyticus
attacatagcattatgtgat

SEQ ID NO: 27098 - DNA, 20 bp, Paenibacillus larvae
actgcccctggagtgacggt

SEQ ID NO: 27099 - DNA, 20 bp, Bordetella trematum
cggcgccagctaatacctgg

SEQ ID NO: 27100 - DNA, 20 bp, Pasteurella pneumotropica
ctaaggacaaaagggggcgt

SEQ ID NO: 27101 - DNA, 20 bp, Streptococcus dysgalactiae
cataaaagtgtttaacccat

SEQ ID NO: 27102 - DNA, 20 bp, Porphyromonas maccae
tatcctgtcacaaggccgct

SEQ ID NO: 27103 - DNA, 20 bp, Streptococcus uberis
atgacaatagggtacacatg

SEQ ID NO: 27104 - DNA, 20 bp, Fusobacterium mortiferum
ggttaccttcgggtaaccaa

SEQ ID NO: 27105 - DNA, 20 bp, Aerococcus urinae
ctcatggtggtgtttggaaa

SEQ ID NO: 27106 - DNA, 20 bp, Paenibacillus larvae
agcggaccttgtgtttcctt

SEQ ID NO: 27107 - DNA, 20 bp, Paenibacillus larvae
aagaagtcatgaaagacggg

SEQ ID NO: 27108 - DNA, 20 bp, Campylobacter sputorum
aaatgtagctcttaataata

SEQ ID NO: 27109 - DNA, 20 bp, Prevotella buccae
aaccgggattggggctaagt

SEQ ID NO: 27110 - DNA, 30 bp, Paenibacillus azotofixans
accatgggctcaacctgtggtcgcactgga

SEQ ID NO: 27111 - DNA, 20 bp, Streptococcus suis
attaaccgcatggtagatac

SEQ ID NO: 27112 - DNA, 30 bp, Paenibacillus glucanolyticus
cctggggctcaacttcaggtcgcactggaa

SEQ ID NO: 27113 - DNA, 20 bp, Campylobacter sputorum
aatacctcatactccaatta

SEQ ID NO: 27114 - DNA, 20 bp, Listeria grayi
cagctccgcatggagcaggt

SEQ ID NO: 27115 - DNA, 20 bp, Unknown Organism
  oligonucleotide from CDC group VB-3
agtctaaccttccaggggga

SEQ ID NO: 27116 - DNA, 20 bp, Haemophilus influenzae
taactctggcacccgtagct

SEQ ID NO: 27117 - DNA, 20 bp, Campylobacter sputorum
aaagacttaatttttaaatc

SEQ ID NO: 27118 - DNA, 30 bp, Fusobacterium nucleatum
atgattatagggcatcctagaattatgaaa

SEQ ID NO: 27119 - DNA, 30 bp, Proteus vulgaris
gtactttcagcggggaggaaggtgttaaga

SEQ ID NO: 27120 - DNA, 20 bp, Campylobacter sputorum
atctaaatataaattattac

SEQ ID NO: 27121 - DNA, 20 bp, Fusobacterium necrophorum
gaaaatgcggagctcaactc

SEQ ID NO: 27122 - DNA, 20 bp, Fusobacterium necrophorum
ggatattatggttttttcgc

SEQ ID NO: 27123 - DNA, 20 bp, Citrobacter freundii
tgagaggatgccagccacac

SEQ ID NO: 27124 - DNA, 20 bp, Campylobacter sputorum
ctcttaataatatatatcaa

SEQ ID NO: 27125 - DNA, 20 bp, Pseudomonas oryzihabitans
ttgggaggaagggctcatag

SEQ ID NO: 27126 - DNA, 20 bp, Listeria seeligeri
tgtcactgctttgaaagatg

SEQ ID NO: 27127 - DNA, 20 bp, Eubacterium limosum
atggatccttcgggtgacat

SEQ ID NO: 27128 - DNA, 20 bp, Bacillus azotoformans
gtaccagttaactgctggta

SEQ ID NO: 27129 - DNA, 20 bp, Eubacterium limosum
ggttttgatggatccttcgg

SEQ ID NO: 27130 - DNA, 20 bp, Lactococcus garvieae
acttgatgatcccgcgttgt

SEQ ID NO: 27131 - DNA, 20 bp, Listeria grayi
cagctccgcatggagcgggt

SEQ ID NO: 27132 - DNA, 20 bp, Fusobacterium mortiferum
cttcgggtaaccaaaaccgg

SEQ ID NO: 27133 - DNA, 30 bp, Lactobacillus casei
atgaacggtgcttgcactgagattcgactt

SEQ ID NO: 27134 - DNA, 20 bp, Actinomyces meyeri
catggcctaaccggtttttg

SEQ ID NO: 27135 - DNA, 20 bp, Campylobacter sputorum
aagcaaagcagttagattta

SEQ ID NO: 27136 - DNA, 20 bp, Prevotella intermedia
gcccctttgcatttaccctt

SEQ ID NO: 27137 - DNA, 20 bp, Bacillus badius
ttctttttcttcgcatgaag

SEQ ID NO: 27138 - DNA, 20 bp, Brevibacterium linens
tgcgagaccgcgaggtttta

SEQ ID NO: 27139 - DNA, 20 bp, Granulicatella elegans
gagcgaccgatgcttgcatt

SEQ ID NO: 27140 - DNA, 20 bp, Haemophilus actinomycetomicans
gcgggaccttagggccgcat

SEQ ID NO: 27141 - DNA, 30 bp, Pediococcus acidilactici
gtgggtgagagtaactgttcacccagtgac

SEQ ID NO: 27142 - DNA, 20 bp, Enterococcus cecorum
gtcgaacgcattttctttca

SEQ ID NO: 27143 - DNA, 20 bp, Pseudomonas mendocina
ccccgacgtgctggtaacta

SEQ ID NO: 27144 - DNA, 20 bp, Campylobacter sputorum
tacataagtttaattgggaa

SEQ ID NO: 27145 - DNA, 20 bp, Streptococcus uberis
aatagggtacacatgtaccc

SEQ ID NO: 27146 - DNA, 20 bp, Sporosarcina ureae
ccgtcatggagacatgattt

SEQ ID NO: 27147 - DNA, 20 bp, Prevotella intermedia
cgtgtgcccctttgcattta

SEQ ID NO: 27148 - DNA, 20 bp, Bacteroides ovatus
aataccggatagcatacgaa

SEQ ID NO: 27149 - DNA, 30 bp, Brevibacillus laterosporus
ttagggaagaaacagtgccatttaaataag

SEQ ID NO: 27150 - DNA, 20 bp, Eubacterium limosum
aaggttttgatggatccttc

SEQ ID NO: 27151 - DNA, 20 bp, Bacteroides ovatus
attgcaacagaatatattgg

SEQ ID NO: 27152 - DNA, 20 bp, Campylobacter sputorum
taagtttaattgggaaatgt

SEQ ID NO: 27153 - DNA, 20 bp, Corynebacterium cystitidis
acatggtttcccttttgtgg

SEQ ID NO: 27154 - DNA, 20 bp, Staphylococcus succinus
ccgaacggctaccttgtacg

SEQ ID NO: 27155 - DNA, 20 bp, Haemophilus ducreyi
gacttgctccttgggtgacg

SEQ ID NO: 27156 - DNA, 20 bp, Cellulosimicrobium cellulans
ccggatatgagccgtccctc

SEQ ID NO: 27157 - DNA, 20 bp, Lactobacillus casei
gatgaacggtgcttgcactg

SEQ ID NO: 27158 - DNA, 20 bp, Propionibacterium avidum
gggcttgtacacccgcccgt

SEQ ID NO: 27159 - DNA, 20 bp, Sporosarcina ureae
accgtcatggagacatgatt

SEQ ID NO: 27160 - DNA, 20 bp, Bacillus firmus
gagcttgctcccagaccgtc

SEQ ID NO: 27161 - DNA, 20 bp, Enterococcus dispar
cgaacgctgtctggcgtgcc

SEQ ID NO: 27162 - DNA, 20 bp, Fusobacterium mortiferum
ctgtcagtcttgaatgattg

SEQ ID NO: 27163 - DNA, 20 bp, Sporosarcina ureae
cagtgaccgtcatggagaca

SEQ ID NO: 27164 - DNA, 20 bp, Bacillus firmus
cccagaccgtcagcggcgga

SEQ ID NO: 27165 - DNA, 20 bp, Citrobacter braakii
gtacaaggtaaccgtagggg

SEQ ID NO: 27166 - DNA, 20 bp, Campylobacter sputorum
aaaaaaagcaaagcagttag

SEQ ID NO: 27167 - DNA, 20 bp, Lactobacillus casei
cttgcactgagattcgactt

SEQ ID NO: 27168 - DNA, 20 bp, Listeria grayi
ataataatcagctccgcatg

SEQ ID NO: 27169 - DNA, 20 bp, Unknown Organism
  oligonucleotide from CDC group VB-3
tcggggggacggttacccgg

SEQ ID NO: 27170 - DNA, 20 bp, Paenibacillus alvei
catagcttgagtacagaaga

SEQ ID NO: 27171 - DNA, 30 bp, Paenibacillus azotofixans
gcggctgtttaagtctggtgtttaaaccat

SEQ ID NO: 27172 - DNA, 30 bp, Paenibacillus azotofixans
aggcggagccaatcttataaagccggtctc

SEQ ID NO: 27173 - DNA, 20 bp, Corynebacterium group F
tgtagcggatcgccgcagag

SEQ ID NO: 27174 - DNA, 20 bp, Fusobacterium necrophorum
aatcatgaaagctagatgcg

SEQ ID NO: 27175 - DNA, 20 bp, Clostridium clostridiiforme
gaaattgacttagcggcgga

SEQ ID NO: 27176 - DNA, 20 bp, Vibrio parahaemolyticus
gtgggctgctaaaagaagta

SEQ ID NO: 27177 - DNA, 20 bp, Streptococcus uberis
ggtaacctaataggagccag

SEQ ID NO: 27178 - DNA, 20 bp, Campylobacter lari
tctaacagcttaactgttaa

SEQ ID NO: 27179 - DNA, 20 bp, Bacteroides thetaiotaomicron
cccgggccttgtacgcccgc

SEQ ID NO: 27180 - DNA, 20 bp, Virgibacillus pantothenticus
agtgccattcgaataggttg

SEQ ID NO: 27181 - DNA, 20 bp, Listeria grayi
gcatggagcgggtttgaaag

SEQ ID NO: 27182 - DNA, 20 bp, Brevibacillus laterosporus
ttttgcttcgcatgaagcga

SEQ ID NO: 27183 - DNA, 20 bp, Paenibacillus azotofixans
agctcctgctaggaggctga

SEQ ID NO: 27184 - DNA, 20 bp, Pediococcus acidilactici
atcaggacgtgcttgcactg

SEQ ID NO: 27185 - DNA, 20 bp, Actinomyces neuii
tcgaacgggatccattagcg

SEQ ID NO: 27186 - DNA, 20 bp, Paenibacillus lautus
gtctcttagagtaactgcta

SEQ ID NO: 27187 - DNA, 20 bp, Paenibacillus macerans
cgggaagcgaagtcgtgata

SEQ ID NO: 27188 - DNA, 20 bp, Aerococcus urinae
ggaaaggtcaccgcatggtg

SEQ ID NO: 27189 - DNA, 20 bp, Campylobacter sputorum
gctttatattaataaagcga

SEQ ID NO: 27190 - DNA, 20 bp, Vibrio metschnikovii
accgcatgatgcccttgttt

SEQ ID NO: 27191 - DNA, 30 bp, Paenibacillus macerans
tgggagacttgggaaaggcggagcaatctg

SEQ ID NO: 27192 - DNA, 20 bp, Brevibacillus laterosporus
agggaagaaacagtgccatt

SEQ ID NO: 27193 - DNA, 20 bp, Enterococcus saccharolyticus
gcataacgctttttctcgca

SEQ ID NO: 27194 - DNA, 20 bp, Campylobacter sputorum
taattgggaaatgtagctct

SEQ ID NO: 27195 - DNA, 20 bp, Lactococcus garvieae
atttaaaagaagcaattgct

SEQ ID NO: 27196 - DNA, 30 bp, Corynebacterium mycetoides
tgggggagctgtcgaaggtggggatcggcg

SEQ ID NO: 27197 - DNA, 20 bp, Actinomyces viscosus
cctcctttgggggctggttc

SEQ ID NO: 27198 - DNA, 20 bp, Vibrio cholerae
tccgaaagccacacctctag

SEQ ID NO: 27199 - DNA, 20 bp, Paenibacillus validus
cttcgggataggttagcggc

SEQ ID NO: 27200 - DNA, 20 bp, Proteus vulgaris
taactactggaaacggggct

SEQ ID NO: 27201 - DNA, 20 bp, Pasteurella pneumotropica
aaggacaaaagggggcgtaa

SEQ ID NO: 27202 - DNA, 20 bp, Paenibacillus larvae
ttgtgtttccttcgggagac

SEQ ID NO: 27203 - DNA, 20 bp, Paenibacillus lautus
gaaagaaagacggagcaatc

SEQ ID NO: 27204 - DNA, 20 bp, Campylobacter sputorum
aatacaaaagacttaatttt

SEQ ID NO: 27205 - DNA, 20 bp, Capnocytophaga gingivalis
gggagaagccctttcggggg

SEQ ID NO: 27206 - DNA, 30 bp, Bacillus badius
ccggggctaataccggatattctttttctt

SEQ ID NO: 27207 - DNA, 20 bp, Pasteurella aerogenes
caaggccggttaccataaga

SEQ ID NO: 27208 - DNA, 20 bp, Campylobacter sputorum
agcatttaaaaatacaaaag

SEQ ID NO: 27209 - DNA, 20 bp, Clostridium botulinum
catgaaacggcaataaaagg

SEQ ID NO: 27210 - DNA, 20 bp, Vibrio cholerae
ctccgaaagccacacctcta

SEQ ID NO: 27211 - DNA, 20 bp, Paenibacillus larvae
gtttctttcgggagacgcca

SEQ ID NO: 27212 - DNA, 20 bp, Capnocytophaga gingivalis
tttggcgcaagctgagtggc

SEQ ID NO: 27213 - DNA, 30 bp, Haemophilus paraphrophilus
gaaggttgttgtgtgaatagcacaacaaat

SEQ ID NO: 27214 - DNA, 20 bp, Granulicatella elegans
agagcgaccgatgcttgcat

SEQ ID NO: 27215 - DNA, 20 bp, Paenibacillus popilliae
tgcttctaactaacctagcg

SEQ ID NO: 27216 - DNA, 30 bp, Paenibacillus azotofixans
tggtgtttaaaccatgggctcaacctgtgg

SEQ ID NO: 27217 - DNA, 20 bp, Kocuria rosea
tcgctagtaatcgcagatgc

SEQ ID NO: 27218 - DNA, 30 bp, Granulicatella elegans
gtcgaacgagagcgaccgatgcttgcattg

SEQ ID NO: 27219 - DNA, 30 bp, Capnocytophaga gingivalis
caagtcgagggagaagccctttcgggggca

SEQ ID NO: 27220 - DNA, 20 bp, Enterococcus cecorum
tccatttaccgcatggcaga

SEQ ID NO: 27221 - DNA, 20 bp, Streptococcus uberis
tacacatgtaccctatttaa

SEQ ID NO: 27222 - DNA, 20 bp, Bacillus lentus
taacttctttcttctcctgg

SEQ ID NO: 27223 - DNA, 20 bp, Proteus vulgaris
aggtgttaagattaatactc

SEQ ID NO: 27224 - DNA, 20 bp, Enterococcus cecorum
tgctacaccgaaagaaaatg

SEQ ID NO: 27225 - DNA, 20 bp, Aerococcus urinae
ccgcataggaaaggtcaccg

SEQ ID NO: 27226 - DNA, 30 bp, Bacteroides ovatus
gactgtcactgacactgatgctcgaaagtg

SEQ ID NO: 27227 - DNA, 20 bp, Corynebacterium group F
gtagcggatcgccgcagaga

SEQ ID NO: 27228 - DNA, 20 bp, Citrobacter amalonaticus
gctgttggcaggcctaacac

SEQ ID NO: 27229 - DNA, 20 bp, Actinomyces neuii
tccattagcgcttttgtgtt

SEQ ID NO: 27230 - DNA, 30 bp, Streptococcus dysgalactiae
accgcatgacaatggaggacccatgtcttt

SEQ ID NO: 27231 - DNA, 20 bp, Lactococcus lactis
ttggtgcttgcaccaatttg

SEQ ID NO: 27232 - DNA, 30 bp, Paenibacillus alvei
ctagggtgacggtacctgagaagaaagccc

SEQ ID NO: 27233 - DNA, 20 bp, Brevibacillus laterosporus
tagggaagaaacagtgccat

SEQ ID NO: 27234 - DNA, 30 bp, Pasteurella aerogenes
cgagagacgaaagaccgggaccgcaaggcc

SEQ ID NO: 27235 - DNA, 20 bp, Kingella denitrificans
ccttgtgctatttgagcagc

SEQ ID NO: 27236 - DNA, 30 bp, Paenibacillus larvae
aagaacggccaggggagtaactgcccctgg

SEQ ID NO: 27237 - DNA, 20 bp, Bacteroides ovatus
caacagaatatattggaaac

SEQ ID NO: 27238 - DNA, 20 bp, Campylobacter sputorum
aagagctttcgctatgggat

SEQ ID NO: 27239 - DNA, 20 bp, Porphyromonas maccae
gtacatatcctgtcacaagg

SEQ ID NO: 27240 - DNA, 20 bp, Haemophilus ducreyi
cgaaggacttgctccttggg

SEQ ID NO: 27241 - DNA, 20 bp, Brevibacillus brevis
ataggggagaagtcgtaaca

SEQ ID NO: 27242 - DNA, 20 bp, Paenibacillus alvei
taggcattttcctcgcatga

SEQ ID NO: 27243 - DNA, 20 bp, Bacillus badius
tctttttcttcgcatgaaga

SEQ ID NO: 27244 - DNA, 20 bp, Clostridium botulinum
acttcggtgacaggaagaca

SEQ ID NO: 27245 - DNA, 20 bp, Proteus vulgaris
gtgttaagattaatactctt

SEQ ID NO: 27246 - DNA, 20 bp, Campylobacter sputorum
taaatataacaataagcttt

SEQ ID NO: 27247 - DNA, 20 bp, Actinomyces viscosus
ggtgaaggagccagcttgct

SEQ ID NO: 27248 - DNA, 20 bp, Paenibacillus thiaminolyticus
ggaaaccattagcttagcgg

SEQ ID NO: 27249 - DNA, 20 bp, Campylobacter rectus
actccttctttacataagtt

SEQ ID NO: 27250 - DNA, 20 bp, Corynebacterium pilosum
acttttgttggaaagccttt

SEQ ID NO: 27251 - DNA, 20 bp, Proteus vulgaris
gaaggtgttaagattaatac

SEQ ID NO: 27252 - DNA, 30 bp, Paenibacillus larvae
cagaccttttccttcggggacagaggagac

SEQ ID NO: 27253 - DNA, 20 bp, Campylobacter sputorum
aaatctagtagcttaactac

SEQ ID NO: 27254 - DNA, 20 bp, Haemophilus parainfluenzae
acggtaacatgaagaagctt

SEQ ID NO: 27255 - DNA, 30 bp, Paenibacillus amylolyticus
tttattttctctcctggggagataatgaaa

SEQ ID NO: 27256 - DNA, 20 bp, Campylobacter sputorum
catttagaaatatcttaata

SEQ ID NO: 27257 - DNA, 30 bp, Fusobacterium necrophorum
gaaaatgcggagctcaactccgtatggcgt

SEQ ID NO: 27258 - DNA, 30 bp, Paenibacillus alvei
aaactgcatagcttgagtacagaagaggaa

SEQ ID NO: 27259 - DNA, 20 bp, Clostridium botulinum
acggcaataaaaggagcaat

SEQ ID NO: 27260 - DNA, 20 bp, Campylobacter curvus
tccttttcttggggaagaaa

SEQ ID NO: 27261 - DNA, 20 bp, Actinomyces viscosus
ttcctcctttgggggctggt

SEQ ID NO: 27262 - DNA, 20 bp, Campylobacter sputorum
ttaataatatatatcaaaga

SEQ ID NO: 27263 - DNA, 20 bp, Actinomyces viscosus
ggatggtcctggagacgggg

SEQ ID NO: 27264 - DNA, 20 bp, Clostridium botulinum
cggcaataaaaggagcaatc

SEQ ID NO: 27265 - DNA, 20 bp, Actinomyces neuii
gtttgggtggggactcgtga

SEQ ID NO: 27266 - DNA, 20 bp, Fusobacterium mortiferum
acctccttcttcggacagtt

SEQ ID NO: 27267 - DNA, 20 bp, Clostridium botulinum
gaggaagtcacttcggtgac

SEQ ID NO: 27268 - DNA, 20 bp, Corynebacterium group ANF
gcttgagtgttgtaggggag

SEQ ID NO: 27269 - DNA, 20 bp, Vibrio harveyi
tcgggatcagaatgccacgg

SEQ ID NO: 27270 - DNA, 20 bp, Campylobacter sputorum
aattatacataagtttaatt

SEQ ID NO: 27271 - DNA, 20 bp, Lactobacillus casei
ttgcactgagattcgactta

SEQ ID NO: 27272 - DNA, 30 bp, Paenibacillus azotofixans
ttgccagcaggtagagctgggcactctaga

SEQ ID NO: 27273 - DNA, 20 bp, Brevibacillus brevis
cacgagaacgccctagaaat

SEQ ID NO: 27274 - DNA, 20 bp, Bacillus azotoformans
ggctgctaagccgcgaggct

SEQ ID NO: 27275 - DNA, 20 bp, Lactococcus lactis
tttgaagagcagcgaacggg

SEQ ID NO: 27276 - DNA, 20 bp, Vibrio hollisae
cctcagaagccggaagagat

SEQ ID NO: 27277 - DNA, 20 bp, Haemophilus ducreyi
acgaaggacttgctccttgg

SEQ ID NO: 27278 - DNA, 20 bp, Bacillus firmus
gaaaagctgaaagatggcat

SEQ ID NO: 27279 - DNA, 20 bp, Sporosarcina ureae
agtgaccgtcatggagacat

SEQ ID NO: 27280 - DNA, 30 bp, Vibrio hollisae
agagattctggtgtgccttcgggaactgag

SEQ ID NO: 27281 - DNA, 20 bp, Corynebacterium cystitidis
cacgtatcttttgtgggtgt

SEQ ID NO: 27282 - DNA, 20 bp, Paenibacillus validus
cgggatagcgttagcggcgg

SEQ ID NO: 27283 - DNA, 20 bp, Bordetella trematum
gaaacggcgccagctaatac

SEQ ID NO: 27284 - DNA, 20 bp, Enterococcus faecium
gtcgggaggtaaccttttgg

SEQ ID NO: 27285 - DNA, 20 bp, Corynebacterium pilosum
ttcaacttttgttggaaagc

SEQ ID NO: 27286 - DNA, 20 bp, Pasteurella multocida
gcttgggaatttggcttatg

SEQ ID NO: 27287 - DNA, 20 bp, Streptococcus dysgalactiae
atgtctttcatttaaaaggt

SEQ ID NO: 27288 - DNA, 20 bp, Paenibacillus lautus
cacagcattgtggaataatg

SEQ ID NO: 27289 - DNA, 20 bp, Bacillus lentus
aacttctttcttctcctgga

SEQ ID NO: 27290 - DNA, 20 bp, Vibrio metschnikovii
taccgcatgatgcccttgtt

SEQ ID NO: 27291 - DNA, 20 bp, Listeria seeligeri
aggagtgacgcatgtcactg

SEQ ID NO: 27292 - DNA, 20 bp, Capnocytophaga gingivalis
tttgataattaaaactgcgg

SEQ ID NO: 27293 - DNA, 20 bp, Dermabacter hominis
cttggcccgcatgggttttg

SEQ ID NO: 27294 - DNA, 20 bp, Granulicatella elegans
ataggttctttagtcgcatg

SEQ ID NO: 27295 - DNA, 30 bp, Brevibacillus brevis
cggatatgacgcacggaggcatctcctgtg

SEQ ID NO: 27296 - DNA, 20 bp, Corynebacterium cystitidis
ccagtggcctatctttgtga

SEQ ID NO: 27297 - DNA, 20 bp, Porphyromonas maccae
aagtacatatcctgtcacaa

SEQ ID NO: 27298 - DNA, 20 bp, Corynebacterium pilosum
ggatattcaacttttgttgg

SEQ ID NO: 27299 - DNA, 20 bp, Bacteroides capilosus
gctaataccgcataatgcag

SEQ ID NO: 27300 - DNA, 20 bp, Lactococcus garvieae
ttctctgtagcgcagctaac

SEQ ID NO: 27301 - DNA, 20 bp, Prevotella denticola
ctatttgcaggtaccatacg

SEQ ID NO: 27302 - DNA, 20 bp, Paenibacillus larvae
ttcgcatgaagaagtcatga

SEQ ID NO: 27303 - DNA, 20 bp, Corynebacterium group F
tgacatgtagcggatcgccg

SEQ ID NO: 27304 - DNA, 20 bp, Neisseria subflava
acaaaaccgatcgagtccgg

SEQ ID NO: 27305 - DNA, 20 bp, Lactococcus garvieae
gcttcactacttgatgatcc

SEQ ID NO: 27306 - DNA, 20 bp, Paenibacillus azotofixans
gctcaacctgtggtcgcact

SEQ ID NO: 27307 - DNA, 20 bp, Clostridium innocuum
aaggaagcttgcttccaaag

SEQ ID NO: 27308 - DNA, 20 bp, Vibrio metschnikovii
taatgaacagggaccaaaga

SEQ ID NO: 27309 - DNA, 20 bp, Lactococcus garvieae
aatgagaatcgcatgattct

SEQ ID NO: 27310 - DNA, 20 bp, Corynebacterium cystitidis
ggtcggtacagcgcgtggcg

SEQ ID NO: 27311 - DNA, 20 bp, Paenibacillus azotofixans
aaccatgggctcaacctgtg

SEQ ID NO: 27312 - DNA, 20 bp, Actinomyces viscosus
tgccggatggtcctggagac

SEQ ID NO: 27313 - DNA, 30 bp, Corynebacterium cystitidis
tctaataccggatattcacgtatcttttgt

SEQ ID NO: 27314 - DNA, 20 bp, Burkholderia gladioli
ggattaatccgcatacgatc

SEQ ID NO: 27315 - DNA, 30 bp, Corynebacterium cystitidis
cgcgtggcgatatcgtgaggtggagctaat

SEQ ID NO: 27316 - DNA, 20 bp, Gemella morbillorum
gcaagtagaacgctaaggag

SEQ ID NO: 27317 - DNA, 20 bp, Enterococcus cecorum
cgcataattccatttaccgc

SEQ ID NO: 27318 - DNA, 20 bp, Lactococcus garvieae
agcaattgcttcactacttg

SEQ ID NO: 27319 - DNA, 20 bp, Enterococcus dispar
acgctgtctggcgtgcctaa

SEQ ID NO: 27320 - DNA, 20 bp, Porphyromonas maccae
aggggcgtgtcagggtaata

SEQ ID NO: 27321 - DNA, 20 bp, Enterobacter hormaechei
acgaaggaggtgatccaccc

SEQ ID NO: 27322 - DNA, 20 bp, Leifsonia aquatica
aggctgacatatacgagaac

SEQ ID NO: 27323 - DNA, 20 bp, Capnocytophaga ochracea
aagggctacgcgtagtttga

SEQ ID NO: 27324 - DNA, 20 bp, Aerococcus urinae
accgcataggaaaggtcacc

SEQ ID NO: 27325 - DNA, 20 bp, Paenibacillus azotofixans
catccctctgaatacgttag

SEQ ID NO: 27326 - DNA, 20 bp, Staphylococcus aureus
cgaaacgatgagtgctaagt

SEQ ID NO: 27327 - DNA, 20 bp, Haemophilus ducreyi
tagcacgaaggacttgctcc

SEQ ID NO: 27328 - DNA, 20 bp, Clostridium botulinum
ggtgtaggagctgtcatggc

SEQ ID NO: 27329 - DNA, 20 bp, Haemophilus influenzae
aactctggcacccgtagcta

SEQ ID NO: 27330 - DNA, 20 bp, Corynebacterium pseudotuberculosis
accagtttctggggggagtg

SEQ ID NO: 27331 - DNA, 20 bp, Enterococcus saccharolyticus
cataatgctttttctcgcat

SEQ ID NO: 27332 - DNA, 30 bp, Clostridium botulinum
aaacggcaataaaaggagcaatccgctatg

SEQ ID NO: 27333 - DNA, 20 bp, Corynebacterium pseudotuberculosis
ccagtttctggggggagtgg

SEQ ID NO: 27334 - DNA, 20 bp, Corynebacterium pseudotuberculosis
agtttctggggggagtggtc

SEQ ID NO: 27335 - DNA, 20 bp, Enterococcus saccharolyticus
tttttctcgcatgagagaaa

SEQ ID NO: 27336 - DNA, 20 bp, Neisseria lactamica
tacaaggtaaaccgtagggg

SEQ ID NO: 27337 - DNA, 30 bp, Streptococcus uberis
atgacaatagggtacacatgtaccctattt

SEQ ID NO: 27338 - DNA, 20 bp, Haemophilus paraphrophilus
gaatagcacaacaaattgac

SEQ ID NO: 27339 - DNA, 20 bp, Paenibacillus azotofixans
ctaggaggctgaaaggcgga

SEQ ID NO: 27340 - DNA, 20 bp, Corynebacterium cystitidis
tattcacgtatcttttgtgg

SEQ ID NO: 27341 - DNA, 20 bp, Sporosarcina ureae
ctgttggaagcttgcttcct

SEQ ID NO: 27342 - DNA, 20 bp, Paenibacillus macerans
tcttccgcatgggagacttg

SEQ ID NO: 27343 - DNA, 20 bp, Propionibacterium avidum
ggcttgtacacccgcccgtc

SEQ ID NO: 27344 - DNA, 20 bp, Eikenella corrodens
gtacaaggaaaccgtagggg

SEQ ID NO: 27345 - DNA, 20 bp, Corynebacterium cystitidis
attgccatggagacatggtt

SEQ ID NO: 27346 - DNA, 20 bp, Listeria seeligeri
gtgacgcatgtcactgcttt

SEQ ID NO: 27347 - DNA, 20 bp, Paenibacillus larvae
gaagtcatgaaagacggggc

SEQ ID NO: 27348 - DNA, 20 bp, Fusobacterium mortiferum
ggtatataagagcggcatcg

SEQ ID NO: 27349 - DNA, 20 bp, Paenibacillus azotofixans
acatccctctgaatcgttta

SEQ ID NO: 27350 - DNA, 20 bp, Clostridium ramosum
aacgcgagcacttgtgctcg

SEQ ID NO: 27351 - DNA, 20 bp, Bacillus badius
tcgcatgaagaagaatggaa

SEQ ID NO: 27352 - DNA, 20 bp, Clostridium tetani
actcgtaactgaggaagtcc

SEQ ID NO: 27353 - DNA, 20 bp, Paenibacillus alvei
gagtaactgctcctagggtg

SEQ ID NO: 27354 - DNA, 20 bp, Clostridium botulinum
cgaggaagtcacttcggtga

SEQ ID NO: 27355 - DNA, 20 bp, Bacillus laevolacticus
gcggacctatccttcgggat

SEQ ID NO: 27356 - DNA, 20 bp, Lactococcus lactis
caagttgagcgatgaagatt

SEQ ID NO: 27357 - DNA, 20 bp, Enterococcus cecorum
attccatttaccgcatggca

SEQ ID NO: 27358 - DNA, 20 bp, Campylobacter sputorum
ctccaattatacataagttt

SEQ ID NO: 27359 - DNA, 20 bp, Brevibacterium linens
ccagaccgttctggaaacag

SEQ ID NO: 27360 - DNA, 20 bp, Bacillus badius
gcatgaagaagaatggaaag

SEQ ID NO: 27361 - DNA, 20 bp, Capnocytophaga ochracea
aagctctggtggtgaaagat

SEQ ID NO: 27362 - DNA, 20 bp, Sporosarcina ureae
cgaataatccattctctcgc

SEQ ID NO: 27363 - DNA, 20 bp, Streptococcus suis
tattaaccgcatggtagata

SEQ ID NO: 27364 - DNA, 20 bp, Prevotella intermedia
aagcggggcacgtgtgcccc

SEQ ID NO: 27365 - DNA, 20 bp, Bacillus firmus
ggagcttgctcccagaccgt

SEQ ID NO: 27366 - DNA, 20 bp, Paenibacillus lautus
ggaagaacgtctcttagagt

SEQ ID NO: 27367 - DNA, 20 bp, Paenibacillus azotofixans
aaaccatgggctcaacctgt

SEQ ID NO: 27368 - DNA, 20 bp, Paenibacillus azotofixans
ctcaacctgtggtcgcactg

SEQ ID NO: 27369 - DNA, 20 bp, Streptococcus dysgalactiae
aagtgtttaacccatgttaa

SEQ ID NO: 27370 - DNA, 20 bp, Shewanella algae
gaatacgttcccgggccctt

SEQ ID NO: 27371 - DNA, 20 bp, Paenibacillus alvei
ggggaatgagaaaggcggag

SEQ ID NO: 27372 - DNA, 20 bp, Pseudomonas oryzihabitans
gggctcatagcgaatacctg

SEQ ID NO: 27373 - DNA, 20 bp, Bacillus laevolacticus
ctatccttcgggataggtta

SEQ ID NO: 27374 - DNA, 20 bp, Lactococcus lactis
aatttgaagagcagcgaacg

SEQ ID NO: 27375 - DNA, 20 bp, Myroides odoratimimus
agaaacctccctacgagtag

SEQ ID NO: 27376 - DNA, 20 bp, Vibrio cholerae
cgaaagccacacctctaggg

SEQ ID NO: 27377 - DNA, 20 bp, Bacillus azotoformans
agcggatgataaaggagctt

SEQ ID NO: 27378 - DNA, 20 bp, Actinomyces naeslundii
ttttggggggtgtggatgag

SEQ ID NO: 27379 - DNA, 20 bp, Vibrio metschnikovii
gatgcccttgtttataatga

SEQ ID NO: 27380 - DNA, 20 bp, Paenibacillus larvae
gtcatgaaagacggggcaac

SEQ ID NO: 27381 - DNA, 20 bp, Campylobacter sputorum
tactccaattatacataagt

SEQ ID NO: 27382 - DNA, 20 bp, Paenibacillus larvae
gcggaccttgtgtttctttc

SEQ ID NO: 27383 - DNA, 30 bp, Corynebacterium mycetoides
agtggcctatccttgtgggggagctgtcga

SEQ ID NO: 27384 - DNA, 20 bp, Citrobacter farmeri
agatgaggtagtgccttcgg

SEQ ID NO: 27385 - DNA, 20 bp, Campylobacter sputorum
agcaaagcagttagatttaa

SEQ ID NO: 27386 - DNA, 20 bp, Bacillus badius
acaagtacggaagtaactgt

SEQ ID NO: 27387 - DNA, 30 bp, Bacillus badius
aagtacggaagtaactgtccgtaccttgac

SEQ ID NO: 27388 - DNA, 20 bp, Unknown Organism
  oligonucleotide from CDC group EO-2
aacacatgcaaggtcggagg

SEQ ID NO: 27389 - DNA, 20 bp, Capnocytophaga ochracea
attaaagctctggtggtgaa

SEQ ID NO: 27390 - DNA, 20 bp, Bacteroides thetaiotaomicron
acaggttagccgcaaggcaa

SEQ ID NO: 27391 - DNA, 20 bp, Bacillus badius
cggatattctttttcttcgc

SEQ ID NO: 27392 - DNA, 20 bp, Streptococcus suis
ggtagatatttgaaaggagc

SEQ ID NO: 27393 - DNA, 20 bp, Paenibacillus macerans
tgggagacttgggaaaggcg

SEQ ID NO: 27394 - DNA, 20 bp, Lactococcus garvieae
aaagatagcttgctattttt

SEQ ID NO: 27395 - DNA, 20 bp, Brevibacterium linens
accagaccgttctggaaaca

SEQ ID NO: 27396 - DNA, 20 bp, Lactococcus lactis
ttgagcgatgaagattggtg

SEQ ID NO: 27397 - DNA, 20 bp, Collinsella aerofaciens
aaccgtcaaggggggaggcg

SEQ ID NO: 27398 - DNA, 20 bp, Capnocytophaga gingivalis
ttgataattaaaactgcggt

SEQ ID NO: 27399 - DNA, 20 bp, Clostridium ramosum
gcgagcacttgtgctcgagt

SEQ ID NO: 27400 - DNA, 20 bp, Enterococcus cecorum
atttaccgcatggcagatgg

SEQ ID NO: 27401 - DNA, 30 bp, Fusobacterium necrophorum
gtaaagaacttgcctcttagaccgggacaa

SEQ ID NO: 27402 - DNA, 20 bp, Pseudomonas oryzihabitans
tacctgtgagttttgacgtt

SEQ ID NO: 27403 - DNA, 30 bp, Eikenella corrodens
ggcagcggggtagtgcttgcactactgtcc

SEQ ID NO: 27404 - DNA, 20 bp, Enterococcus cecorum
taccgcataattccatttac

SEQ ID NO: 27405 - DNA, 20 bp, Campylobacter sputorum
atacaaaagacttaattttt

SEQ ID NO: 27406 - DNA, 20 bp, Campylobacter coli
agtcgtacaaggctaaccgt

SEQ ID NO: 27407 - DNA, 20 bp, Campylobacter sputorum
cagttagatttaataaattt

SEQ ID NO: 27408 - DNA, 20 bp, Streptococcus dysgalactiae
aaagtgtttaacccatgtta

SEQ ID NO: 27409 - DNA, 30 bp, Bacillus laevolacticus
ggtcttgacatccctctgaccgcgctacag

SEQ ID NO: 27410 - DNA, 20 bp, Capnocytophaga ochracea
ggctacgcgtagtttgatga

SEQ ID NO: 27411 - DNA, 20 bp, Capnocytophaga gingivalis
gccctttcgggggcagaaac

SEQ ID NO: 27412 - DNA, 20 bp, Propionibacterium granulosum
tggaaagctccggcggttgt

SEQ ID NO: 27413 - DNA, 30 bp, Clostridium ramosum
caagtcgaacgcgagcacttgtgctcgagt

SEQ ID NO: 27414 - DNA, 20 bp, Fusobacterium mortiferum
tgcaagtctacttgatcctt

SEQ ID NO: 27415 - DNA, 20 bp, Paenibacillus thiaminolyticus
aaaccattagcttagcggcg

SEQ ID NO: 27416 - DNA, 30 bp, Lactococcus garvieae
tgtagcgcagctaacgcattaagcactccg

SEQ ID NO: 27417 - DNA, 20 bp, Prevotella denticola
ggataaagttagggacgtgt

SEQ ID NO: 27418 - DNA, 20 bp, Bacteroides thetaiotaomicron
gtaccgcaaggagcgtctag

SEQ ID NO: 27419 - DNA, 20 bp, Paenibacillus alvei
agtaactgctcctagggtga

SEQ ID NO: 27420 - DNA, 20 bp, Pasteurella pneumotropica
cataaggtctaaggacaaaa

SEQ ID NO: 27421 - DNA, 20 bp, Clostridium botulinum
atgaaacggcaataaaagga

SEQ ID NO: 27422 - DNA, 20 bp, Neisseria gonorrhoeae
tacaaggtaacagtagggga

SEQ ID NO: 27423 - DNA, 20 bp, Paenibacillus larvae
tgtgtttccttcgggagacg

SEQ ID NO: 27424 - DNA, 20 bp, Veillonella atypica
gtacaaggtagccgtatcgg

SEQ ID NO: 27425 - DNA, 20 bp, Paenibacillus azotofixans
taattcctcttagctcctgc

SEQ ID NO: 27426 - DNA, 20 bp, Vibrio cholerae
gacgggcgggtgtactaggc

SEQ ID NO: 27427 - DNA, 20 bp, Campylobacter coli
gtgaagtcgtacaaggctaa

SEQ ID NO: 27428 - DNA, 20 bp, Paenibacillus alvei
gtaactgctcctagggtgac

SEQ ID NO: 27429 - DNA, 20 bp, Actinomyces viscosus
cggtgaaggagccagcttgc

SEQ ID NO: 27430 - DNA, 20 bp, Corynebacterium cystitidis
gtgtggaaaggttttgtgct

SEQ ID NO: 27431 - DNA, 20 bp, Enterococcus cecorum
cataattccatttaccgcat

SEQ ID NO: 27432 - DNA, 20 bp, Proteus penneri
taaagttaatacctttatca

SEQ ID NO: 27433 - DNA, 20 bp, Corynebacterium pseudotuberculosis
gcccaaccagtttctggggg

SEQ ID NO: 27434 - DNA, 20 bp, Campylobacter sputorum
agagctttcgctatgggatg

SEQ ID NO: 27435 - DNA, 20 bp, Vibrio hollisae
tagaatccctggtagcgtag

SEQ ID NO: 27436 - DNA, 20 bp, Veillonella atypica
cgtacaaggtagccgtatcg

SEQ ID NO: 27437 - DNA, 20 bp, Fusobacterium necrophorum
gagctcaactccgtatggcg

SEQ ID NO: 27438 - DNA, 20 bp, Enterococcus cecorum
ccgcataattccatttaccg

SEQ ID NO: 27439 - DNA, 30 bp, Sporosarcina ureae
ttgcttccttcagttagcggcggacgggtg

SEQ ID NO: 27440 - DNA, 20 bp, Eubacterium limosum
tttgatggatccttcgggtg

SEQ ID NO: 27441 - DNA, 20 bp, Paenibacillus alvei
attttcctcgcatgagggga

SEQ ID NO: 27442 - DNA, 20 bp, Paenibacillus alvei
agagtaactgctcctagggt

SEQ ID NO: 27443 - DNA, 20 bp, Pseudomonas oryzihabitans
gttgggaggaagggctcata

SEQ ID NO: 27444 - DNA, 20 bp, Campylobacter sputorum
atctagtagcttaactacta

SEQ ID NO: 27445 - DNA, 20 bp, Paenibacillus azotofixans
accatgggctcaacctgtgg

SEQ ID NO: 27446 - DNA, 20 bp, Eubacterium moniliforme
gaagttgggagcacccgaag

SEQ ID NO: 27447 - DNA, 20 bp, Corynebacterium cystitidis
gtcggtacagcgcgtggcga

SEQ ID NO: 27448 - DNA, 30 bp, Paenibacillus alvei
gcgcaggcggcaatgtaagttgggtgttta

SEQ ID NO: 27449 - DNA, 20 bp, Bacteroides forsythus
aggggttccgcatggggcta

SEQ ID NO: 27450 - DNA, 20 bp, Bacteroides thetaiotaomicron
gttagccgcaaggcaaatgt

SEQ ID NO: 27451 - DNA, 20 bp, Bacillus laevolacticus
tccctctgaccgcgctacag

SEQ ID NO: 27452 - DNA, 20 bp, Actinomyces naeslundii
ttggggggtgtggatgagtg

SEQ ID NO: 27453 - DNA, 30 bp, Lactobacillus acidophilus
acaatggacagtacaacgaggagcaagcct

SEQ ID NO: 27454 - DNA, 20 bp, Leuconostoc citreum
gcatgatatcaagttaaaag

SEQ ID NO: 27455 - DNA, 20 bp, Paenibacillus azotofixans
tgctaggaggctgaaaggcg

SEQ ID NO: 27456 - DNA, 20 bp, Campylobacter sputorum
caataagcttttttgaagct

SEQ ID NO: 27457 - DNA, 20 bp, Prevotella intermedia
gcggggcacgtgtgcccctt

SEQ ID NO: 27458 - DNA, 20 bp, Paenibacillus validus
catgaaacatggggcaacct

SEQ ID NO: 27459 - DNA, 20 bp, Paenibacillus macerans
aagtcgtgatatggagcgaa

SEQ ID NO: 27460 - DNA, 20 bp, Bacillus laevolacticus
ccctctgaccgcgctacaga

SEQ ID NO: 27461 - DNA, 20 bp, Pseudomonas oryzihabitans
gctcatagcgaatacctgtg

SEQ ID NO: 27462 - DNA, 20 bp, Bacillus lentus
cggataacttctttcttctc

SEQ ID NO: 27463 - DNA, 20 bp, Brevibacterium linens
ctggtgcttgcaccggggtg

SEQ ID NO: 27464 - DNA, 20 bp, Pseudomonas oryzihabitans
ctgtgagttttgacgttacc

SEQ ID NO: 27465 - DNA, 20 bp, Stenotrophomonas maltophilia
tttgatcatggctcagatgt

SEQ ID NO: 27466 - DNA, 20 bp, Fusobacterium mortiferum
ggtagagatacctccttctt

SEQ ID NO: 27467 - DNA, 20 bp, Corynebacterium cystitidis
cagtggcctatctttgtgag

SEQ ID NO: 27468 - DNA, 20 bp, Pediococcus acidilactici
aattgatcatgacgtgcttg

SEQ ID NO: 27469 - DNA, 20 bp, Corynebacterium cystitidis
gcgtgtgtgacggtacctag

SEQ ID NO: 27470 - DNA, 20 bp, Sporosarcina ureae
actgttggaagcttgcttcc

SEQ ID NO: 27471 - DNA, 20 bp, Myroides odoratimimus
caggaagaaacctccctacg

SEQ ID NO: 27472 - DNA, 20 bp, Eikenella corrodens
gtgaagtcgtacaaggaaac

SEQ ID NO: 27473 - DNA, 20 bp, Serratia ficaria
taatacggcagcgcattgac

SEQ ID NO: 27474 - DNA, 20 bp, Pasteurella pneumotropica
gacaaaagggggcgtaagct

SEQ ID NO: 27475 - DNA, 20 bp, Sporosarcina ureae
atcccagtgaccgtcatgga

SEQ ID NO: 27476 - DNA, 20 bp, Paenibacillus alvei
ggcattttcctcgcatgagg

SEQ ID NO: 27477 - DNA, 20 bp, Campylobacter sputorum
tttaattgggaaatgtagct

SEQ ID NO: 27478 - DNA, 20 bp, Bacillus mycoides
ggtgaagtcgtacaaggata

SEQ ID NO: 27479 - DNA, 20 bp, Corynebacterium cystitidis
tggatcgccatggagacatg

SEQ ID NO: 27480 - DNA, 20 bp, Paenibacillus glucanolyticus
gaagaacgtctcatagagta

SEQ ID NO: 27481 - DNA, 20 bp, Bacteroides thetaiotaomicron
ctggaaacaggttagccgca

SEQ ID NO: 27482 - DNA, 20 bp, Campylobacter sputorum
gctaatctgccccatagaga

SEQ ID NO: 27483 - DNA, 20 bp, Paenibacillus lautus
ttatttcacagcattgtgga

SEQ ID NO: 27484 - DNA, 20 bp, Bacillus firmus
cagaccgtcagcggcggacg

SEQ ID NO: 27485 - DNA, 20 bp, Paenibacillus larvae
cggaccttgtgtttccttcg

SEQ ID NO: 27486 - DNA, 20 bp, Citrobacter amalonaticus
cgctgttggcaggcctaaca

SEQ ID NO: 27487 - DNA, 20 bp, Paenibacillus larvae
ggaccttgtgtttctttcgg

SEQ ID NO: 27488 - DNA, 20 bp, Paenibacillus macerans
tccgcatgggagacttggga

SEQ ID NO: 27489 - DNA, 20 bp, Campylobacter concisus
ggacgaagtcgtaacaggga

SEQ ID NO: 27490 - DNA, 20 bp, Actinomyces naeslundii
gggggtgtggatgagtggcg

SEQ ID NO: 27491 - DNA, 20 bp, Paenibacillus alvei
gcatgaggggaatgagaaag

SEQ ID NO: 27492 - DNA, 20 bp, Paenibacillus validus
cttatccttcgggataggtt

SEQ ID NO: 27493 - DNA, 20 bp, Paenibacillus glucanolyticus
caaggaagaacgtctcatag

SEQ ID NO: 27494 - DNA, 20 bp, Actinomyces viscosus
ggtttcctcctttgggggct

SEQ ID NO: 27495 - DNA, 20 bp, Bacteroides fragilis
atacccgatggcataatgat

SEQ ID NO: 27496 - DNA, 20 bp, Paenibacillus larvae
gagcggaccttgtgtttctt

SEQ ID NO: 27497 - DNA, 20 bp, Clostridium botulinum
tcacttcggtgacaggaaga

SEQ ID NO: 27498 - DNA, 20 bp, Paenibacillus azotofixans
tcctgctaggaggctgaaag

SEQ ID NO: 27499 - DNA, 30 bp, Streptococcus uberis
gatagctaataccgcatgacaatagggtac

SEQ ID NO: 27500 - DNA, 20 bp, Corynebacterium cystitidis
gatattcacgtatcttttgt

SEQ ID NO: 27501 - DNA, 20 bp, Bacillus firmus
tgggagcttgctcccagacc

SEQ ID NO: 27502 - DNA, 20 bp, Corynebacterium group F
ttgacatgtagcggatcgcc

SEQ ID NO: 27503 - DNA, 20 bp, Campylobacter sputorum
tttaatagtcatttagaaat

SEQ ID NO: 27504 - DNA, 20 bp, Paenibacillus azotofixans
cttagctcctgctaggaggc

SEQ ID NO: 27505 - DNA, 20 bp, Paenibacillus glucanolyticus
gcattatgtgataatgaaag

SEQ ID NO: 27506 - DNA, 20 bp, Vibrio vulnificus
tacgttccccgggccttgac

SEQ ID NO: 27507 - DNA, 30 bp, Vibrio cholerae
taacgcgttagctccgaaagccacacctct

SEQ ID NO: 27508 - DNA, 30 bp, Vibrio cholerae
gcgttagctccgaaagccacacctctaggg

SEQ ID NO: 27509 - DNA, 20 bp, Bacteroides forsythus
ggctatttgttaaagattta

SEQ ID NO: 27510 - DNA, 20 bp, Sporosarcina ureae
tgaccgtcatggagacatga

SEQ ID NO: 27511 - DNA, 30 bp, Paenibacillus macerans
gggaagcgaagtcgtgatatggagcgaatc

SEQ ID NO: 27512 - DNA, 20 bp, Dermabacter hominis
accttggcccgcatgggttg

SEQ ID NO: 27513 - DNA, 20 bp, Campylobacter sputorum
caattatacataagtttaat

SEQ ID NO: 27514 - DNA, 20 bp, Proteus vulgaris
taaagttaatacctttgtca

SEQ ID NO: 27515 - DNA, 20 bp, Streptococcus suis
aagtttctcatttgacggta

SEQ ID NO: 27516 - DNA, 30 bp, Vibrio hollisae
tcctcagaagccggaagagattctggtgtg

SEQ ID NO: 27517 - DNA, 20 bp, Campylobacter sputorum
agaggaacaacacttagaaa

SEQ ID NO: 27518 - DNA, 20 bp, Fusobacterium mortiferum
agggagaggttaccttcggg

SEQ ID NO: 27519 - DNA, 20 bp, Corynebacterium pilosum
cttttgttggaaagcctttg

SEQ ID NO: 27520 - DNA, 20 bp, Clostridium clostridiiforme
gtttggatccatggctcagg

SEQ ID NO: 27521 - DNA, 20 bp, Brevibacterium linens
ttctggaaacagttcctccc

SEQ ID NO: 27522 - DNA, 20 bp, Clostridium botulinum
ggaagtcacttcggtgacag

SEQ ID NO: 27523 - DNA, 20 bp, Brevibacillus laterosporus
gggaagaaacagtgccattt

SEQ ID NO: 27524 - DNA, 20 bp, Pasteurella pneumotropica
accgcataaggtctaaggac

SEQ ID NO: 27525 - DNA, 20 bp, Lactococcus garvieae
tagcttgctatttttatgaa

SEQ ID NO: 27526 - DNA, 20 bp, Campylobacter sputorum
aagacttaatttttaaatct

SEQ ID NO: 27527 - DNA, 20 bp, Bacteroides ovatus
ttaataccggatagcatacg

SEQ ID NO: 27528 - DNA, 20 bp, Bacillus sp
agtttggatccatggctcag

SEQ ID NO: 27529 - DNA, 20 bp, Bacillus azotoformans
gttaactgctggtaccttga

SEQ ID NO: 27530 - DNA, 20 bp, Paenibacillus azotofixans
gcggagcaatctgtcaccaa

SEQ ID NO: 27531 - DNA, 20 bp, Fusobacterium mortiferum
tgtcagtcttgaatgattgt

SEQ ID NO: 27532 - DNA, 20 bp, Anaerobiospirillum succiniciproducens
atacgttcccgggccttgac

SEQ ID NO: 27533 - DNA, 20 bp, Actinomyces viscosus
gacatgtgccggatggtcct

SEQ ID NO: 27534 - DNA, 30 bp, Bacillus azotoformans
gaacaagtaccagttaactgctggtacctt

SEQ ID NO: 27535 - DNA, 30 bp, Clostridium ramosum
atgcaagtcgaacgcgagcacttgtgctcg

SEQ ID NO: 27536 - DNA, 30 bp, Vibrio cholerae
aacgcgttagctccgaaagccacacctcta

SEQ ID NO: 27537 - DNA, 20 bp, Bacteroides ovatus
gcttaaattgcaacagaata

SEQ ID NO: 27538 - DNA, 20 bp, Paenibacillus alvei
ctgcatagcttgagtacaga

SEQ ID NO: 27539 - DNA, 20 bp, Eikenella corrodens
aagtcgtacaaggaaaccgt

SEQ ID NO: 27540 - DNA, 20 bp, Paenibacillus larvae
ttctttcgggagacgccagg

SEQ ID NO: 27541 - DNA, 20 bp, Prevotella denticola
tatggggataaagttaggga

SEQ ID NO: 27542 - DNA, 20 bp, Paenibacillus azotofixans
tccctctgaatcgtttagag

SEQ ID NO: 27543 - DNA, 20 bp, Campylobacter sputorum
actccaattatacataagtt

SEQ ID NO: 27544 - DNA, 20 bp, Brochothrix campestris
gggtaacctgcctcacagct

SEQ ID NO: 27545 - DNA, 20 bp, Capnocytophaga ochracea
cgtttttatattaaagctct

SEQ ID NO: 27546 - DNA, 30 bp, Pasteurella pneumotropica
tccagagaagagactagagatagttttgtg

SEQ ID NO: 27547 - DNA, 20 bp, Paenibacillus validus
gaaacatggggcaacctatg

SEQ ID NO: 27548 - DNA, 30 bp, Pediococcus acidilactici
acttccgttaattgatcaggacgtgcttgc

SEQ ID NO: 27549 - DNA, 20 bp, Bacillus firmus
aaaagctgaaagatggcatc

SEQ ID NO: 27550 - DNA, 20 bp, Helcococcus ovis
cgagctaaccgttaggaggc

SEQ ID NO: 27551 - DNA, 20 bp, Capnocytophaga gingivalis
agctgtttggcgcaagctga

SEQ ID NO: 27552 - DNA, 20 bp, Corynebacterium pilosum
cttgtgttggaaaggccttt

SEQ ID NO: 27553 - DNA, 20 bp, Streptococcus dysgalactiae
catgtctttcatttaaaagg

SEQ ID NO: 27554 - DNA, 20 bp, Campylobacter sputorum
agctcttaataatatatatc

SEQ ID NO: 27555 - DNA, 30 bp, Paenibacillus glucanolyticus
tattacatagcattatgtgataatgaaaga

SEQ ID NO: 27556 - DNA, 20 bp, Paenibacillus validus
atgaaacatggggcaaccta

SEQ ID NO: 27557 - DNA, 20 bp, Macrococcus caseolyticus
ggggcggtggatcacctcct

SEQ ID NO: 27558 - DNA, 30 bp, Pasteurella aerogenes
tcgagagacgaaagaccgggaccgcaaggc

SEQ ID NO: 27559 - DNA, 30 bp, Sporosarcina ureae
gttgaaagccggtttcggctgtcactgaag

SEQ ID NO: 27560 - DNA, 20 bp, Proteus mirabilis
gtgaagtcgtacaaggcaac

SEQ ID NO: 27561 - DNA, 20 bp, Lactococcus garvieae
attgcttcactacttgatga

SEQ ID NO: 27562 - DNA, 20 bp, Propionibacterium avidum
cggggcttgtacacccgccc

SEQ ID NO: 27563 - DNA, 20 bp, Anaerococcus tetradius
agactaaccaaagatttatc

SEQ ID NO: 27564 - DNA, 20 bp, Paenibacillus lautus
gaagaacgtctcttagagta

SEQ ID NO: 27565 - DNA, 20 bp, Clostridium botulinum
atcgaggaagtcacttcggt

SEQ ID NO: 27566 - DNA, 20 bp, Bordetella trematum
agaaacggcgccagctaata

SEQ ID NO: 27567 - DNA, 20 bp, Proteus vulgaris
ataaagttaatacctttgtc

SEQ ID NO: 27568 - DNA, 20 bp, Paenibacillus larvae
gtgtttccttcgggagacgc

SEQ ID NO: 27569 - DNA, 20 bp, Streptococcus dysgalactiae
ttaaacatttaaaaggtgca

SEQ ID NO: 27570 - DNA, 20 bp, Streptococcus dysgalactiae
tgtctttcatttaaaaggtg

SEQ ID NO: 27571 - DNA, 30 bp, Streptococcus uberis
ggactggtgcttgcactggtctaaggagtt

SEQ ID NO: 27572 - DNA, 20 bp, Fusobacterium mortiferum
aggtagagatacctccttct

SEQ ID NO: 27573 - DNA, 20 bp, Campylobacter sputorum
aatctgccccatagagagga

SEQ ID NO: 27574 - DNA, 20 bp, Prevotella corporis
tgcaagtgcgggcgaatccc

SEQ ID NO: 27575 - DNA, 20 bp, Eubacterium moniliforme
cttgaaactgtgtggcttga

SEQ ID NO: 27576 - DNA, 20 bp, Paenibacillus alvei
gtgagctaataccagatagg

SEQ ID NO: 27577 - DNA, 20 bp, Clostridium botulinum
aagtcacttcggtgacagga

SEQ ID NO: 27578 - DNA, 20 bp, Lactococcus garvieae
aagcaattgcttcactactt

SEQ ID NO: 27579 - DNA, 20 bp, Campylobacter sputorum
gttagatttaataaattttt

SEQ ID NO: 27580 - DNA, 20 bp, Clostridium botulinum
gtaggagctgtcatggcttc

SEQ ID NO: 27581 - DNA, 20 bp, Aerococcus urinae
cataggaaacaccacctcat

SEQ ID NO: 27582 - DNA, 20 bp, Paenibacillus glucanolyticus
aacgtctcatagagtaactg

SEQ ID NO: 27583 - DNA, 20 bp, Lactobacillus casei
ctgagattcgacttaaaacg

SEQ ID NO: 27584 - DNA, 20 bp, Campylobacter sputorum
gttataaatataacaataag

SEQ ID NO: 27585 - DNA, 20 bp, Bacteroides stercoris
ccacgtgtggctttttgtat

SEQ ID NO: 27586 - DNA, 20 bp, Bacillus firmus
tgctcccagaccgtcagcgg

SEQ ID NO: 27587 - DNA, 20 bp, Campylobacter sputorum
tatattattaagagctttcg

SEQ ID NO: 27588 - DNA, 20 bp, Bacillus firmus
tcccagaccgtcagcggcgg

SEQ ID NO: 27589 - DNA, 20 bp, Paenibacillus lautus
acgtctcttagagtaactgc

SEQ ID NO: 27590 - DNA, 20 bp, Lactococcus lactis
atttgaagagcagcgaacgg

SEQ ID NO: 27591 - DNA, 20 bp, Actinomyces neuii
agcgcttttgtgtttttggt

SEQ ID NO: 27592 - DNA, 20 bp, Collinsella aerofaciens
aacgctggcggcgcgctaac

SEQ ID NO: 27593 - DNA, 20 bp, Clostridium botulinum
ggcttctgtgccgccgctaa

SEQ ID NO: 27594 - DNA, 20 bp, Campylobacter sputorum
aattgggaaatgtagctctt

SEQ ID NO: 27595 - DNA, 30 bp, Corynebacterium group F
gcggatcgccgcagagatgtggtttccctt

SEQ ID NO: 27596 - DNA, 20 bp, Bacillus laevolacticus
agcggacctatccttcggga

SEQ ID NO: 27597 - DNA, 20 bp, Streptococcus dysgalactiae
ccgcatgacaatggaggacc

SEQ ID NO: 27598 - DNA, 20 bp, Aerococcus urinae
ataggaaaggtcaccgcatg

SEQ ID NO: 27599 - DNA, 20 bp, Actinomyces meyeri
atggcctaaccggtttttgc

SEQ ID NO: 27600 - DNA, 20 bp, Actinomyces viscosus
gagccagcttgctggttctg

SEQ ID NO: 27601 - DNA, 30 bp, Capnocytophaga gingivalis
cgatggatactagctgtttggcgcaagctg

SEQ ID NO: 27602 - DNA, 20 bp, Paenibacillus glucanolyticus
cgtctcatagagtaactgct

SEQ ID NO: 27603 - DNA, 20 bp, Paenibacillus lautus
tatttcacagcattgtggaa

SEQ ID NO: 27604 - DNA, 20 bp, Corynebacterium pseudotuberculosis
cagtttctggggggagtggt

SEQ ID NO: 27605 - DNA, 20 bp, Bacillus lentus
ccggataacttctttcttct

SEQ ID NO: 27606 - DNA, 20 bp, Haemophilus paraphrophilus
gtgaatagcacaacaaattg

SEQ ID NO: 27607 - DNA, 20 bp, Clostridium innocuum
gcttccaaagagacttagtg

SEQ ID NO: 27608 - DNA, 20 bp, Streptococcus dysgalactiae
gtctttcatttaaaaggtgc

SEQ ID NO: 27609 - DNA, 20 bp, Bacillus laevolacticus
gtcgagcggacctatccttc

SEQ ID NO: 27610 - DNA, 20 bp, Eubacterium moniliforme
agaaacctgcggttggatca

SEQ ID NO: 27611 - DNA, 20 bp, Listeria grayi
cgcatggagcaggtttgaaa

SEQ ID NO: 27612 - DNA, 20 bp, Paenibacillus larvae
agtcatgaaagacggggcaa

SEQ ID NO: 27613 - DNA, 20 bp, Corynebacterium pilosum
atattcaacttttgttggaa

SEQ ID NO: 27614 - DNA, 30 bp, Eggerthella lenta
tgcacccgaagccgccggccgaacccgcag

SEQ ID NO: 27615 - DNA, 20 bp, Campylobacter sputorum
ctaatacctcatactccaat

SEQ ID NO: 27616 - DNA, 20 bp, Fusobacterium nucleatum
tatagggcatcctagaatta

SEQ ID NO: 27617 - DNA, 20 bp, Paenibacillus larvae
cagaccttttccttcgggga

SEQ ID NO: 27618 - DNA, 20 bp, Paenibacillus macerans
agtcgtgatatggagcgaat

SEQ ID NO: 27619 - DNA, 30 bp, Bacteroides thetaiotaomicron
ccgggcttaaattgcatttgaatattctgg

SEQ ID NO: 27620 - DNA, 20 bp, Neisseria lactamica
gtcgtacaaggtaaaccgta

SEQ ID NO: 27621 - DNA, 20 bp, Streptococcus suis
ttaccgcatggtagatattt

SEQ ID NO: 27622 - DNA, 20 bp, Paenibacillus larvae
acgccaggttagcggcggac

SEQ ID NO: 27623 - DNA, 20 bp, Campylobacter sputorum
attgggaaatgtagctctta

SEQ ID NO: 27624 - DNA, 30 bp, Fusobacterium necrophorum
tcgactcgagtcttcggacttgggtggcgc

SEQ ID NO: 27625 - DNA, 20 bp, Paenibacillus azotofixans
gagcggagttgtgatggagc

SEQ ID NO: 27626 - DNA, 20 bp, Lactococcus lactis
gttgagcgatgaagattggt

SEQ ID NO: 27627 - DNA, 30 bp, Lactococcus garvieae
gttctctgtagcgcagctaacgcattaagc

SEQ ID NO: 27628 - DNA, 20 bp, Brevibacillus laterosporus
aataccggatagagttttgc

SEQ ID NO: 27629 - DNA, 30 bp, Eubacterium limosum
attggggaagaagaatgacggtacccaatg

SEQ ID NO: 27630 - DNA, 20 bp, Shigella flexneri
ggggaacctgcgttggatca

SEQ ID NO: 27631 - DNA, 20 bp, Bordetella trematum
acggcgccggctaatacctg

SEQ ID NO: 27632 - DNA, 20 bp, Enterobacter hormaechei
cgaaggaggtgatccacccg

SEQ ID NO: 27633 - DNA, 20 bp, Vibrio harveyi
aaaccggaggaaggtggtgg

SEQ ID NO: 27634 - DNA, 20 bp, Pediococcus acidilactici
acttccgttaattgatcagg

SEQ ID NO: 27635 - DNA, 20 bp, Paenibacillus amylolyticus
attttctctcctggggagat

SEQ ID NO: 27636 - DNA, 20 bp, Actinomyces neuii
acgtttgggtggggactcgt

SEQ ID NO: 27637 - DNA, 30 bp, Porphyromonas maccae
actatgtatgaaagtacatatcctgtcaca

SEQ ID NO: 27638 - DNA, 20 bp, Paenibacillus alvei
aggcattttcctcgcatgag

SEQ ID NO: 27639 - DNA, 20 bp, Clostridium botulinum
tgaaacggcaataaaaggag

SEQ ID NO: 27640 - DNA, 20 bp, Clostridium botulinum
aacggcaataaaaggagcaa

SEQ ID NO: 27641 - DNA, 20 bp, Pasteurella pneumotropica
caaaagggggcgtaagctct

SEQ ID NO: 27642 - DNA, 20 bp, Streptococcus suis
gcatggtagatatttgaaag

SEQ ID NO: 27643 - DNA, 20 bp, Bacillus firmus
cttgctcccagaccgtcagc

SEQ ID NO: 27644 - DNA, 20 bp, Fusobacterium mortiferum
ctccttcttcggacagtttt

SEQ ID NO: 27645 - DNA, 20 bp, Vibrio vulnificus
gtccggaatcgctagtaatc

SEQ ID NO: 27646 - DNA, 20 bp, Campylobacter sputorum
aaaatacaaaagacttaatt

SEQ ID NO: 27647 - DNA, 20 bp, Fusobacterium necrophorum
tagaccgggacaacatctgg

SEQ ID NO: 27648 - DNA, 20 bp, Capnocytophaga gingivalis
gaagccctttcgggggcaga

SEQ ID NO: 27649 - DNA, 20 bp, Suttonella indologenes
ccaatgcttaacacatgcaa

SEQ ID NO: 27650 - DNA, 20 bp, Serratia ficaria
taccagagatggcattggtg

SEQ ID NO: 27651 - DNA, 20 bp, Paenibacillus amylolyticus
ttttctctcctggggagata

SEQ ID NO: 27652 - DNA, 20 bp, Neisseria lactamica
tcgtacaaggtaaaccgtag

SEQ ID NO: 27653 - DNA, 20 bp, Bacillus badius
ctttttcttcgcatgaagaa

SEQ ID NO: 27654 - DNA, 20 bp, Streptococcus uberis
acaatagggtacacatgtac

SEQ ID NO: 27655 - DNA, 20 bp, Achromobacter xylosoxidans
gcgggttaatacctcgcgaa

SEQ ID NO: 27656 - DNA, 20 bp, Myroides odoratimimus
ggaagaaacctccctacgag

SEQ ID NO: 27657 - DNA, 20 bp, Vibrio metschnikovii
atgcccttgtttataatgaa

SEQ ID NO: 27658 - DNA, 20 bp, Bacteroides thetaiotaomicron
gcatttgaatattctggaaa

SEQ ID NO: 27659 - DNA, 20 bp, Bacteroides capilosus
ggactgcaagtcagggtgtg

SEQ ID NO: 27660 - DNA, 20 bp, Pseudomonas oryzihabitans
aagttgggaggaagggctca

SEQ ID NO: 27661 - DNA, 20 bp, Fusobacterium mortiferum
tacttgatccttcgggtgat

SEQ ID NO: 27662 - DNA, 20 bp, Pseudomonas mendocina
ccccccgacgtgctggtaac

SEQ ID NO: 27663 - DNA, 20 bp, Paenibacillus lautus
cgtctcttagagtaactgct

SEQ ID NO: 27664 - DNA, 20 bp, Lactococcus lactis
ggtgcttgcaccaatttgaa

SEQ ID NO: 27665 - DNA, 20 bp, Paenibacillus azotofixans
ctcttgatcaacttagcggc

SEQ ID NO: 27666 - DNA, 20 bp, Streptococcus suis
aaccgcatggtagatacttg

SEQ ID NO: 27667 - DNA, 20 bp, Actinomyces viscosus
gtgccggatggtcctggaga

SEQ ID NO: 27668 - DNA, 30 bp, Listeria ivanovii
gtagggtaaccttttaggagccagccgccg

SEQ ID NO: 27669 - DNA, 20 bp, Aerococcus urinae
tggtggtgtttggaaagacg

SEQ ID NO: 27670 - DNA, 20 bp, Paenibacillus larvae
ccctggagtgacggtacttg

SEQ ID NO: 27671 - DNA, 20 bp, Capnocytophaga gingivalis
tagctgtttggcgcaagctg

SEQ ID NO: 27672 - DNA, 20 bp, Lactobacillus casei
actgagattcgacttaaaac

SEQ ID NO: 27673 - DNA, 20 bp, Sporosarcina ureae
cgagcgaactgttggaagct

SEQ ID NO: 27674 - DNA, 20 bp, Aerococcus urinae
ggtgacctttggaaagacgg

SEQ ID NO: 27675 - DNA, 20 bp, Pasteurella aerogenes
cgggaccgcaaggccggttg

SEQ ID NO: 27676 - DNA, 20 bp, Bordetella trematum
aagaaacggcgccagctaat

SEQ ID NO: 27677 - DNA, 20 bp, Lactobacillus acidophilus
acagtacaacgaggagcaag

SEQ ID NO: 27678 - DNA, 20 bp, Campylobacter sputorum
ataagtttaattgggaaatg

SEQ ID NO: 27679 - DNA, 20 bp, Bacillus badius
cgcatgaagaagaatggaaa

SEQ ID NO: 27680 - DNA, 30 bp, Actinomyces viscosus
caagtcgaacggtgaaggagccagcttgct

SEQ ID NO: 27681 - DNA, 20 bp, Porphyromonas maccae
gtcagggtaataccggtgac

SEQ ID NO: 27682 - DNA, 20 bp, Actinomyces neuii
gatccattagcgcttttgtg

SEQ ID NO: 27683 - DNA, 20 bp, Clostridium botulinum
gtgtaggagctgtcatggct

SEQ ID NO: 27684 - DNA, 20 bp, Sporosarcina ureae
ccagtgaccgtcatggagac

SEQ ID NO: 27685 - DNA, 20 bp, Paenibacillus azotofixans
gcggagccaatcttataaag

SEQ ID NO: 27686 - DNA, 20 bp, Sporosarcina ureae
gcttgcttccttcagttagc

SEQ ID NO: 27687 - DNA, 20 bp, Paenibacillus alvei
tcgcatgaggggaatgagaa

SEQ ID NO: 27688 - DNA, 20 bp, Vibrio cholerae
aaagccacacctctagggca

SEQ ID NO: 27689 - DNA, 20 bp, Lactobacillus casei
gtgcttgcactgagattcga

SEQ ID NO: 27690 - DNA, 20 bp, Vibrio harveyi
gttcggaatcgctagtaatc

SEQ ID NO: 27691 - DNA, 20 bp, Streptococcus uberis
acacatgtaccctatttaaa

SEQ ID NO: 27692 - DNA, 20 bp, Campylobacter sputorum
atataacaataagctttttt

SEQ ID NO: 27693 - DNA, 20 bp, Corynebacterium cystitidis
ttgtgggtgtgtggaaaggt

SEQ ID NO: 27694 - DNA, 20 bp, Clostridium botulinum
cgcatgaaacggcaataaaa

SEQ ID NO: 27695 - DNA, 20 bp, Campylobacter rectus
actctatactccttctttac

SEQ ID NO: 27696 - DNA, 20 bp, Enterococcus saccharolyticus
cgcataatgctttttctcgc

SEQ ID NO: 27697 - DNA, 20 bp, Paenibacillus alvei
ctcgcatgaggggaatgaga

SEQ ID NO: 27698 - DNA, 20 bp, Actinomyces viscosus
atgtgccggatggtcctgga

SEQ ID NO: 27699 - DNA, 20 bp, Actinomyces neuii
cattagcgcttttgtgtttt

SEQ ID NO: 27700 - DNA, 20 bp, Pediococcus acidilactici
attgatcaggacgtgcttgc

SEQ ID NO: 27701 - DNA, 20 bp, Corynebacterium pseudotuberculosis
caaccagtttctggggggag

SEQ ID NO: 27702 - DNA, 30 bp, Granulicatella elegans
ccgatgcttgcattggtcaatctagtggcg

SEQ ID NO: 27703 - DNA, 20 bp, Proteus vulgaris
gcggtaacagaggaaagctt

SEQ ID NO: 27704 - DNA, 20 bp, Unknown Organism
  oligonucleotide from CDC group VB-3
aggtagccgtaggggaaacc

SEQ ID NO: 27705 - DNA, 20 bp, Yokenella regensburgei
gaggaggaaggcgatacggt

SEQ ID NO: 27706 - DNA, 20 bp, Paenibacillus validus
tggggcaacctatggcttac

SEQ ID NO: 27707 - DNA, 20 bp, Prevotella intermedia
ggcacgtgtgcccctttgca

SEQ ID NO: 27708 - DNA, 20 bp, Bacteroides ovatus
cagtatagccgtaaggctgt

SEQ ID NO: 27709 - DNA, 20 bp, Paenibacillus larvae
gacgccaggttagcggcgga

SEQ ID NO: 27710 - DNA, 20 bp, Enterococcus saccharolyticus
cgctttttctcgcatgagag

SEQ ID NO: 27711 - DNA, 30 bp, Enterococcus cecorum
acggcctaccaaggctgcgatgcatagccg

SEQ ID NO: 27712 - DNA, 20 bp, Lactobacillus casei
aacggtgcttgcactgagat

SEQ ID NO: 27713 - DNA, 20 bp, Bacteroides forsythus
agtgagagctttcttccctt

SEQ ID NO: 27714 - DNA, 20 bp, Bacillus badius
tcttcgcatgaagaagaatg

SEQ ID NO: 27715 - DNA, 20 bp, Campylobacter sputorum
gcatttaaaaatacaaaaga

SEQ ID NO: 27716 - DNA, 30 bp, Actinomyces meyeri
taaccggtttttgctggggggagtggtcga

SEQ ID NO: 27717 - DNA, 20 bp, Lactobacillus casei
tgcactgagattcgacttaa

SEQ ID NO: 27718 - DNA, 30 bp, Paenibacillus thiaminolyticus
gaaaccattagcttagcggcggacgggtga

SEQ ID NO: 27719 - DNA, 20 bp, Fusobacterium mortiferum
aggttaccttcgggtaacca

SEQ ID NO: 27720 - DNA, 20 bp, Eubacterium limosum
tattggggaagaagaatgac

SEQ ID NO: 27721 - DNA, 20 bp, Bacteroides ovatus
cgtaaggctgttgtgaaggt

SEQ ID NO: 27722 - DNA, 20 bp, Enterococcus casseliflavus
gatggatggacccgcgggca

SEQ ID NO: 27723 - DNA, 30 bp, Proteus vulgaris
ttaatactcttagcaattgacgttacccgc

SEQ ID NO: 27724 - DNA, 20 bp, Capnocytophaga gingivalis
ccctttcgggggcagaaacc

SEQ ID NO: 27725 - DNA, 20 bp, Corynebacterium pseudotuberculosis
tggcccaaccagtttctggg

SEQ ID NO: 27726 - DNA, 20 bp, Corynebacterium urealyticum
gcaggctaaaactcaaagga

SEQ ID NO: 27727 - DNA, 30 bp, Paenibacillus thiaminolyticus
gacggtttccttcgggaaaccattagctta

SEQ ID NO: 27728 - DNA, 20 bp, Clostridium ramosum
acgcgagcacttgtgctcga

SEQ ID NO: 27729 - DNA, 20 bp, Clostridium ramosum
gaacgcgagcacttgtgctc

SEQ ID NO: 27730 - DNA, 20 bp, Staphylococcus delphini
aggtacccgtatcggaaagg

SEQ ID NO: 27731 - DNA, 20 bp, Porphyromonas maccae
acatatcctgtcacaaggcc

SEQ ID NO: 27732 - DNA, 20 bp, Corynebacterium cystitidis
gacatggtttcccttttgtg

SEQ ID NO: 27733 - DNA, 20 bp, Paenibacillus amylolyticus
aatttattttctctcctggg

SEQ ID NO: 27734 - DNA, 20 bp, Lactococcus garvieae
tatttaaaagaagcaattgc

SEQ ID NO: 27735 - DNA, 20 bp, Yokenella regensburgei
gtgtcgattgacgttactcg

SEQ ID NO: 27736 - DNA, 20 bp, Campylobacter sputorum
attaagagctttcgctatgg

SEQ ID NO: 27737 - DNA, 20 bp, Eubacterium limosum
ttattggggaagaagaatga

SEQ ID NO: 27738 - DNA, 20 bp, Brevibacillus laterosporus
tggggtagataactggggtg

SEQ ID NO: 27739 - DNA, 20 bp, Streptococcus equi
cgtacaaggtagccgttcgg

SEQ ID NO: 27740 - DNA, 20 bp, Sporosarcina ureae
gaataatccattctctcgca

SEQ ID NO: 27741 - DNA, 20 bp, Capnocytophaga ochracea
aataagggctacgcgtagtt

SEQ ID NO: 27742 - DNA, 20 bp, Campylobacter sputorum
tagtcatttagaaatatctt

SEQ ID NO: 27743 - DNA, 20 bp, Geobacillus thermoglucosidasius
gtccggaggaaggtggggat

SEQ ID NO: 27744 - DNA, 20 bp, Kingella denitrificans
cttcggaccttgtgctattt

SEQ ID NO: 27745 - DNA, 20 bp, Paenibacillus thiaminolyticus
gaaaccattagcttagcggc

SEQ ID NO: 27746 - DNA, 20 bp, Streptococcus uberis
gggtacacatgtaccctatt

SEQ ID NO: 27747 - DNA, 20 bp, Paenibacillus validus
acatggggcaacctatggct

SEQ ID NO: 27748 - DNA, 20 bp, Vibrio cholerae
ccgaaagccacacctctagg

SEQ ID NO: 27749 - DNA, 20 bp, Campylobacter sputorum
aaatacaaaagacttaattt

SEQ ID NO: 27750 - DNA, 20 bp, Listeria seeligeri
gcatgtcactgctttgaaag

SEQ ID NO: 27751 - DNA, 20 bp, Bacillus smithii
atgaaggaaggttgaaaggc

SEQ ID NO: 27752 - DNA, 20 bp, Paenibacillus azotofixans
gctcttgatcaacttagcgg

SEQ ID NO: 27753 - DNA, 20 bp, Bacteroides ureolyticus
acctaactgacgctgaggcg

SEQ ID NO: 27754 - DNA, 20 bp, Vibrio hollisae
cagcgacatgaacaatcctt

SEQ ID NO: 27755 - DNA, 20 bp, Eubacterium limosum
gagaaggttttgatggatcc

SEQ ID NO: 27756 - DNA, 20 bp, Sporosarcina ureae
tctcgcatgagggaatgttg

SEQ ID NO: 27757 - DNA, 20 bp, Corynebacterium pilosum
aacttttgttggaaagcctt

SEQ ID NO: 27758 - DNA, 20 bp, Paenibacillus macerans
gagttgggaaaggcggagca

SEQ ID NO: 27759 - DNA, 20 bp, Streptococcus dysgalactiae
ccgcataaaagtgtttaacc

SEQ ID NO: 27760 - DNA, 20 bp, Paenibacillus larvae
accttgtgtttctttcggga

SEQ ID NO: 27761 - DNA, 20 bp, Corynebacterium cystitidis
gcgcgtggcgatatcgtgag

SEQ ID NO: 27762 - DNA, 20 bp, Corynebacterium cystitidis
cgtgtgtgacggtacctaga

SEQ ID NO: 27763 - DNA, 20 bp, Paenibacillus larvae
tgcccctggagtgacggtac

SEQ ID NO: 27764 - DNA, 20 bp, Campylobacter sputorum
catactccaattatacataa

SEQ ID NO: 27765 - DNA, 20 bp, Bacillus firmus
agctgaaagatggcatctcg

SEQ ID NO: 27766 - DNA, 20 bp, Proteus vulgaris
agttaatacctttgtcaatt

SEQ ID NO: 27767 - DNA, 20 bp, Streptococcus dysgalactiae
aggacccatgtctttcattt

SEQ ID NO: 27768 - DNA, 20 bp, Fusobacterium necrophorum
tgaaagctagatgcgctaag

SEQ ID NO: 27769 - DNA, 20 bp, Clostridium botulinum
tgtaggagctgtcatggctt

SEQ ID NO: 27770 - DNA, 20 bp, Listeria grayi
agctccgcatggagcaggtt

SEQ ID NO: 27771 - DNA, 20 bp, Campylobacter sputorum
gctcttaataatatatatca

SEQ ID NO: 27772 - DNA, 20 bp, Campylobacter coli
gaagtcgtacaaggctaacc

SEQ ID NO: 27773 - DNA, 20 bp, Corynebacterium coyleae
ggaaaggcctctgcttgcag

SEQ ID NO: 27774 - DNA, 20 bp, Bacillus azotoformans
agtcgagcggatgataaagg

SEQ ID NO: 27775 - DNA, 20 bp, Vibrio metschnikovii
gcctacggctcaaagagggg

SEQ ID NO: 27776 - DNA, 20 bp, Corynebacterium cystitidis
ctagggacgaagcgtgtgtg

SEQ ID NO: 27777 - DNA, 20 bp, Paenibacillus alvei
ttttcctcgcatgaggggaa

SEQ ID NO: 27778 - DNA, 20 bp, Paenibacillus larvae
tgtttccttcgggagacgcc

SEQ ID NO: 27779 - DNA, 20 bp, Paenibacillus macerans
ccgcatgggagacttgggaa

SEQ ID NO: 27780 - DNA, 20 bp, Clostridium clostridiiforme
agttttcggatggatttgaa

SEQ ID NO: 27781 - DNA, 20 bp, Enterococcus saccharolyticus
tcgaacgcttcttttccgcc

SEQ ID NO: 27782 - DNA, 30 bp, Capnocytophaga gingivalis
gtttggcgcaagctgagtggctaagcgaaa

SEQ ID NO: 27783 - DNA, 20 bp, Paenibacillus larvae
tcttcgcatgaagaagtcat

SEQ ID NO: 27784 - DNA, 20 bp, Corynebacterium cystitidis
gattgccatggagacatggt

SEQ ID NO: 27785 - DNA, 20 bp, Vibrio metschnikovii
catgatgcccttgtttataa

SEQ ID NO: 27786 - DNA, 30 bp, Clostridium botulinum
ttgtagtttcgcatgaaacggcaataaaag

SEQ ID NO: 27787 - DNA, 20 bp, Myroides odoratimimus
aaagcttgcttttttgagac

SEQ ID NO: 27788 - DNA, 20 bp, Stenotrophomonas maltophilia
cttaccactgtgtgactcat

SEQ ID NO: 27789 - DNA, 20 bp, Proteus vulgaris
agcggtaacagaggaaagct

SEQ ID NO: 27790 - DNA, 20 bp, Clostridium botulinum
agtcacttcggtgacaggaa

SEQ ID NO: 27791 - DNA, 30 bp, Serratia odorifera
ctcttgacatccacggaacttgccagagat

SEQ ID NO: 27792 - DNA, 20 bp, Capnocytophaga gingivalis
catttgataattaaaactgc

SEQ ID NO: 27793 - DNA, 20 bp, Paenibacillus larvae
gacagaccttttccttcggg

SEQ ID NO: 27794 - DNA, 20 bp, Corynebacterium mycetoides
cagtggcctatccttgtggg

SEQ ID NO: 27795 - DNA, 20 bp, Pseudomonas oryzihabitans
gtgagttttgacgttaccaa

SEQ ID NO: 27796 - DNA, 20 bp, Paenibacillus azotofixans
gataattcctcttagctcct

SEQ ID NO: 27797 - DNA, 20 bp, Pseudomonas oryzihabitans
cgaatacctgtgagttttga

SEQ ID NO: 27798 - DNA, 30 bp, Bacteroides ovatus
ctgttactgacactgatgctcgaaagtgtg

SEQ ID NO: 27799 - DNA, 20 bp, Actinomyces viscosus
gggtttcctcctttgggggc

SEQ ID NO: 27800 - DNA, 20 bp, Haemophilus actinomycetomicans
gacgaaagtgcgggacctta

SEQ ID NO: 27801 - DNA, 20 bp, Paenibacillus larvae
gcccctggagtgacggtact

SEQ ID NO: 27802 - DNA, 20 bp, Myroides odoratimimus
aggcggggactctagcaaga

SEQ ID NO: 27803 - DNA, 20 bp, Micrococcus luteus
ccttgtggggggagccgcga

SEQ ID NO: 27804 - DNA, 20 bp, Bacteroides ovatus
ggcttaaattgcaacagaat

SEQ ID NO: 27805 - DNA, 20 bp, Campylobacter sputorum
taatacctcatactccaatt

SEQ ID NO: 27806 - DNA, 20 bp, Paenibacillus glucanolyticus
ctcaacttcaggtcgcactg

SEQ ID NO: 27807 - DNA, 20 bp, Bacillus laevolacticus
acctatccttcgggataggt

SEQ ID NO: 27808 - DNA, 30 bp, Paenibacillus larvae
tgaccggtttagagatagaccttttccttc

SEQ ID NO: 27809 - DNA, 20 bp, Salmonella typhi
cttgcttgcttggctgacga

SEQ ID NO: 27810 - DNA, 20 bp, Paenibacillus azotofixans
gctcctgctaggaggctgaa

SEQ ID NO: 27811 - DNA, 20 bp, Paenibacillus amylolyticus
tcctctgatgcttagcggcg

SEQ ID NO: 27812 - DNA, 20 bp, Corynebacterium mycetoides
atccttgtgggggagctgtc

SEQ ID NO: 27813 - DNA, 20 bp, Campylobacter sputorum
taatagtcatttagaaatat

SEQ ID NO: 27814 - DNA, 20 bp, Neisseria gonorrhoeae
agtcgtacaaggtaacagta

SEQ ID NO: 27815 - DNA, 20 bp, Lactococcus garvieae
gcaattgcttcactacttga

SEQ ID NO: 27816 - DNA, 20 bp, Porphyromonas maccae
agtaaagattaattgctatc

SEQ ID NO: 27817 - DNA, 20 bp, Actinomyces viscosus
ctcctttgggggctggttca

SEQ ID NO: 27818 - DNA, 20 bp, Streptococcus suis
taaccgcatggtagatactt

SEQ ID NO: 27819 - DNA, 20 bp, Paenibacillus lautus
tttatttcacagcattgtgg

SEQ ID NO: 27820 - DNA, 20 bp, Paenibacillus azotofixans
catccctctgaatcgtttag

SEQ ID NO: 27821 - DNA, 20 bp, Paenibacillus larvae
tggagtgacggtacttgaga

SEQ ID NO: 27822 - DNA, 20 bp, Fusobacterium mortiferum
aaccaaaaccggcgcacggg

SEQ ID NO: 27823 - DNA, 20 bp, Haemophilus paraphrophilus
tgaatagcacaacaaattga

SEQ ID NO: 27824 - DNA, 20 bp, Brevibacterium linens
gaaggcatctttggttgtgg

SEQ ID NO: 27825 - DNA, 20 bp, Salmonella typhi
ttgcttgcttggctgacgag

SEQ ID NO: 27826 - DNA, 20 bp, Streptococcus suis
cgcatggtagatatttgaaa

SEQ ID NO: 27827 - DNA, 20 bp, Enterococcus saccharolyticus
taacgctttttctcgcatga

SEQ ID NO: 27828 - DNA, 20 bp, Capnocytophaga ochracea
ttaaagctctggtggtgaaa

SEQ ID NO: 27829 - DNA, 20 bp, Actinomyces neuii
ttagcgcttttgtgtttttg

SEQ ID NO: 27830 - DNA, 30 bp, Streptococcus dysgalactiae
aggacccatgtctttcatttaaaaggtgca

SEQ ID NO: 27831 - DNA, 20 bp, Campylobacter sputorum
gagctttcgctatgggatga

SEQ ID NO: 27832 - DNA, 20 bp, Campylobacter sputorum
tttatagcatttaaaaatac

SEQ ID NO: 27833 - DNA, 20 bp, Prevotella intermedia
tgtgcccctttgcatttacc

SEQ ID NO: 27834 - DNA, 20 bp, Lactococcus lactis
gaagattggtgcttgcacca

SEQ ID NO: 27835 - DNA, 20 bp, Bacteroides thetaiotaomicron
cgggccttgtacgcccgccc

SEQ ID NO: 27836 - DNA, 20 bp, Campylobacter sputorum
ctagtagcttaactactaaa

SEQ ID NO: 27837 - DNA, 20 bp, Corynebacterium mycetoides
ggcctatccttgtgggggag

SEQ ID NO: 27838 - DNA, 20 bp, Paenibacillus macerans
agttgggaaaggcggagcaa

SEQ ID NO: 27839 - DNA, 20 bp, Brevibacterium linens
gttttagcgaatcccttaaa

SEQ ID NO: 27840 - DNA, 20 bp, Collinsella aerofaciens
caaggggggaggcgccgaag

SEQ ID NO: 27841 - DNA, 20 bp, Staphylococcus schleiferi
taagttgactgccgggacaa

SEQ ID NO: 27842 - DNA, 20 bp, Fusobacterium necrophorum
aacttgcctcttagaccggg

SEQ ID NO: 27843 - DNA, 20 bp, Bacillus azotoformans
ccagttaactgctggtacct

SEQ ID NO: 27844 - DNA, 30 bp, Paenibacillus azotofixans
aactgggcagcttgagtgcagaagaggaaa

SEQ ID NO: 27845 - DNA, 20 bp, Actinomyces viscosus
gaacggtgaaggagccagct

SEQ ID NO: 27846 - DNA, 20 bp, Prevotella intermedia
gtgcccctttgcatttaccc

SEQ ID NO: 27847 - DNA, 20 bp, Bacteroides thetaiotaomicron
tctggaaacaggttagccgc

SEQ ID NO: 27848 - DNA, 30 bp, Lactobacillus casei
actgagattcgacttaaaacgagtggcgga

SEQ ID NO: 27849 - DNA, 20 bp, Lactobacillus casei
agattcgacttaaaacgagt

SEQ ID NO: 27850 - DNA, 20 bp, Pasteurella pneumotropica
gcataaggtctaaggacaaa

SEQ ID NO: 27851 - DNA, 30 bp, Haemophilus paraphrophilus
gacgaggaaggttgttgtgtgaatagcaca

SEQ ID NO: 27852 - DNA, 20 bp, Actinomyces meyeri
aaccggtttttgctgggggg

SEQ ID NO: 27853 - DNA, 20 bp, Lactococcus lactis
ttgcaccaatttgaagagca

SEQ ID NO: 27854 - DNA, 20 bp, Paenibacillus lautus
atttcacagcattgtggaat

SEQ ID NO: 27855 - DNA, 20 bp, Paenibacillus azotofixans
ttcctcttagctcctgctag

SEQ ID NO: 27856 - DNA, 20 bp, Aneurinibacillus aneurinilyticus
gcggaccaaagaagagcttg

SEQ ID NO: 27857 - DNA, 20 bp, Actinomyces viscosus
tcctcctttgggggctggtt

SEQ ID NO: 27858 - DNA, 20 bp, Porphyromonas maccae
gtaaagattaattgctatca

SEQ ID NO: 27859 - DNA, 20 bp, Bacteroides forsythus
gggttccgcatggggctatt

SEQ ID NO: 27860 - DNA, 20 bp, Campylobacter sputorum
atagcatttaaaaatacaaa

SEQ ID NO: 27861 - DNA, 20 bp, Paenibacillus glucanolyticus
acgtctcatagagtaactgc

SEQ ID NO: 27862 - DNA, 20 bp, Burkholderia stabilis
cagggtagccgtatcggagg

SEQ ID NO: 27863 - DNA, 20 bp, Bacteroides capilosus
gggactgcaagtcagggtgt

SEQ ID NO: 27864 - DNA, 20 bp, Haemophilus ducreyi
gttggtctttaagactggcg

SEQ ID NO: 27865 - DNA, 20 bp, Sporosarcina ureae
agcttgcttccttcagttag

SEQ ID NO: 27866 - DNA, 20 bp, Yokenella regensburgei
aggaggaaggcgatacggtt

SEQ ID NO: 27867 - DNA, 20 bp, Fusobacterium necrophorum
tggaggaatcatgaaagcta

SEQ ID NO: 27868 - DNA, 20 bp, Yersinia ruckeri
ccgaggggaacctgcgggtg

SEQ ID NO: 27869 - DNA, 20 bp, Capnocytophaga ochracea
gaagaataagggctacgcgt

SEQ ID NO: 27870 - DNA, 20 bp, Campylobacter sputorum
ttaattgggaaatgtagctc

SEQ ID NO: 27871 - DNA, 20 bp, Campylobacter rectus
tactctatactccttcttta

SEQ ID NO: 27872 - DNA, 20 bp, Bacillus badius
tattctttttcttcgcatga

SEQ ID NO: 27873 - DNA, 20 bp, Porphyromonas maccae
tacatatcctgtcacaaggc

SEQ ID NO: 27874 - DNA, 20 bp, Campylobacter sputorum
atatatcaaagataatttat

SEQ ID NO: 27875 - DNA, 20 bp, Aerococcus urinae
accgcatggtgacctttgga

SEQ ID NO: 27876 - DNA, 20 bp, Lactobacillus casei
gcttgcactgagattcgact

SEQ ID NO: 27877 - DNA, 20 bp, Kingella denitrificans
ttcggaccttgtgctatttg

SEQ ID NO: 27878 - DNA, 20 bp, Actinomyces neuii
attagcgcttttgtgttttt

SEQ ID NO: 27879 - DNA, 20 bp, Anaerococcus prevotii
taccagcgaataatgtcggg

SEQ ID NO: 27880 - DNA, 20 bp, Sporosarcina ureae
ggaagcttgcttccttcagt

SEQ ID NO: 27881 - DNA, 30 bp, Capnocytophaga gingivalis
gccctttcgggggcagaaaccggcgcacgg

SEQ ID NO: 27882 - DNA, 20 bp, Sporosarcina ureae
tgttggaagcttgcttcctt

SEQ ID NO: 27883 - DNA, 20 bp, Bacteroides ovatus
gggcttaaattgcaacagaa

SEQ ID NO: 27884 - DNA, 20 bp, Shewanella putrefaciens
ccacgggaatacgttcccgg

SEQ ID NO: 27885 - DNA, 30 bp, Capnocytophaga gingivalis
gaagccctttcgggggcagaaaccggcgca

SEQ ID NO: 27886 - DNA, 20 bp, Gemella morbillorum
acgggtgagcacgcgtaggt

SEQ ID NO: 27887 - DNA, 20 bp, Corynebacterium cystitidis
cgcgtggcgatatcgtgagg

SEQ ID NO: 27888 - DNA, 30 bp, Paenibacillus larvae
aagtcatgaaagacggggcaacctgtcact

SEQ ID NO: 27889 - DNA, 20 bp, Paenibacillus alvei
catgaggggaatgagaaagg

SEQ ID NO: 27890 - DNA, 20 bp, Actinomyces meyeri
accggtttttgctgggggga

SEQ ID NO: 27891 - DNA, 20 bp, Myroides odoratimimus
gaaacctccctacgagtagg

SEQ ID NO: 27892 - DNA, 20 bp, Campylobacter sputorum
ctgccccatagagaggaaca

SEQ ID NO: 27893 - DNA, 20 bp, Corynebacterium mycetoides
ccagtggcctatccttgtgg

SEQ ID NO: 27894 - DNA, 20 bp, Vibrio hollisae
catcctcagaagccggaaga

SEQ ID NO: 27895 - DNA, 20 bp, Bacteroides capilosus
gggaagcaatgccgcgaggt

SEQ ID NO: 27896 - DNA, 20 bp, Clostridium innocuum
gtgagccgtcgaagtaggac

SEQ ID NO: 27897 - DNA, 20 bp, Paenibacillus alvei
cctaggagagtaactgctcc

SEQ ID NO: 27898 - DNA, 20 bp, Paenibacillus alvei
aactgctcctagggtgacgg

SEQ ID NO: 27899 - DNA, 20 bp, Bacteroides ovatus
cttaaattgcaacagaatat

SEQ ID NO: 27900 - DNA, 20 bp, Paenibacillus validus
ccttcgggatagcgttagcg

SEQ ID NO: 27901 - DNA, 20 bp, Actinomyces neuii
cgggatccattagcgctttt

SEQ ID NO: 27902 - DNA, 20 bp, Pasteurella pneumotropica
ggacaaaagggggcgtaagc

SEQ ID NO: 27903 - DNA, 20 bp, Actinomyces viscosus
gtcgaacggtgaaggagcca

SEQ ID NO: 27904 - DNA, 20 bp, Fusobacterium nucleatum
gattatagggcatcctagaa

SEQ ID NO: 27905 - DNA, 20 bp, Eubacterium limosum
attggggaagaagaatgacg

SEQ ID NO: 27906 - DNA, 30 bp, Enterococcus cecorum
ggtgctaataccgcataattccatttaccg

SEQ ID NO: 27907 - DNA, 20 bp, Bacteroides forsythus
agctttcttcccttcggggc

SEQ ID NO: 27908 - DNA, 20 bp, Lactococcus garvieae
taaagatagcttgctatttt

SEQ ID NO: 27909 - DNA, 30 bp, Paenibacillus azotofixans
cttgacatccctctgaatacgttagagata

SEQ ID NO: 27910 - DNA, 20 bp, Campylobacter sputorum
tcatactccaattatacata

SEQ ID NO: 27911 - DNA, 20 bp, Haemophilus actinomycetomicans
tagggccgcatgccatgaga

SEQ ID NO: 27912 - DNA, 30 bp, Haemophilus paraphrophilus
tgtgtgaatagcacaacaaattgacgttaa

SEQ ID NO: 27913 - DNA, 20 bp, Paenibacillus alvei
cctcgcatgaggggaatgag

SEQ ID NO: 27914 - DNA, 20 bp, Actinomyces neuii
gtcgaacgggatccattagc

SEQ ID NO: 27915 - DNA, 20 bp, Vibrio metschnikovii
gcccttgtttataatgaaca

SEQ ID NO: 27916 - DNA, 20 bp, Stenotrophomonas maltophilia
ggcgcttaccactgtgtgac

SEQ ID NO: 27917 - DNA, 20 bp, Aerococcus urinae
ataccgcataggaaaggtca

SEQ ID NO: 27918 - DNA, 20 bp, Corynebacterium xerosis
cgttatgtgacggtacctgt

SEQ ID NO: 27919 - DNA, 20 bp, Bacillus smithii
gcgcaagctgccgcttgcag

SEQ ID NO: 27920 - DNA, 20 bp, Fusobacterium necrophorum
atgaaagctagatgcgctaa

SEQ ID NO: 27921 - DNA, 20 bp, Corynebacterium cystitidis
tggattgccatggagacatg

SEQ ID NO: 27922 - DNA, 20 bp, Paenibacillus larvae
gtcgagcggaccttgtgttt

SEQ ID NO: 27923 - DNA, 20 bp, Eubacterium limosum
aacgagaaggttttgatgga

SEQ ID NO: 27924 - DNA, 20 bp, Shigella boydii
ggaacgtattcccgtggcat

SEQ ID NO: 27925 - DNA, 20 bp, Campylobacter sputorum
acaaaagacttaatttttaa

SEQ ID NO: 27926 - DNA, 20 bp, Pasteurella pneumotropica
aggtctaaggacaaaagggg

SEQ ID NO: 27927 - DNA, 20 bp, Bacteroides thetaiotaomicron
ggttagccgcaaggcaaatg

SEQ ID NO: 27928 - DNA, 20 bp, Kingella denitrificans
aagggaagtgttaataccac

SEQ ID NO: 27929 - DNA, 20 bp, Enterococcus saccharolyticus
accgcataatgctttttctc

SEQ ID NO: 27930 - DNA, 30 bp, Corynebacterium group F1
tgtagcggatcgccgcagagatgtggtttc

SEQ ID NO: 27931 - DNA, 20 bp, Enterococcus faecium
cgggaggtaaccttttggag

SEQ ID NO: 27932 - DNA, 20 bp, Enterococcus cecorum
aattccatttaccgcatggt

SEQ ID NO: 27933 - DNA, 20 bp, Capnocytophaga ochracea
gctacgcgtagtttgatgac

SEQ ID NO: 27934 - DNA, 20 bp, Bacteroides forsythus
tccgcatggggctatttgtt

SEQ ID NO: 27935 - DNA, 20 bp, Haemophilus ducreyi
acggtagcacgaaggacttg

SEQ ID NO: 27936 - DNA, 20 bp, Campylobacter concisus
tggggacgaagtcgtaacag

SEQ ID NO: 27937 - DNA, 20 bp, Aerococcus urinae
ctaataccgcataggaaagg

SEQ ID NO: 27938 - DNA, 30 bp, Pasteurella pneumotropica
aaaagggggcgtaagctcttgccataagat

SEQ ID NO: 27939 - DNA, 20 bp, Corynebacterium cystitidis
attcacgtatcttttgtggg

SEQ ID NO: 27940 - DNA, 20 bp, Actinomyces viscosus
cctggagacggggtttcctc

SEQ ID NO: 27941 - DNA, 20 bp, Actinomyces viscosus
acggtgaaggagccagcttg

SEQ ID NO: 27942 - DNA, 20 bp, Haemophilus actinomycetomicans
gcatgccaacttgacgttaa

SEQ ID NO: 27943 - DNA, 20 bp, Clostridium botulinum
agctgtcatggcttctgtgc

SEQ ID NO: 27944 - DNA, 20 bp, Campylobacter sputorum
aaagcaaagcagttagattt

SEQ ID NO: 27945 - DNA, 30 bp, Paenibacillus larvae
gccttgacatccctctgaccggtttagaga

SEQ ID NO: 27946 - DNA, 20 bp, Paenibacillus larvae
gccaggggagtaactgcccc

SEQ ID NO: 27947 - DNA, 20 bp, Paenibacillus larvae
gagcggaccttgtgtttcct

SEQ ID NO: 27948 - DNA, 20 bp, Lactococcus garvieae
caattgcttcactacttgat

SEQ ID NO: 27949 - DNA, 20 bp, Actinomyces radingae
ggagtacggccgcaaggcct

SEQ ID NO: 27950 - DNA, 20 bp, Pediococcus acidilactici
ttccgttaattgatcaggac

SEQ ID NO: 27951 - DNA, 20 bp, Achromobacter piechaudii
gtagttagcctaaccgccaa

SEQ ID NO: 27952 - DNA, 20 bp, Collinsella aerofaciens
caaccgtcaaggggggaggc

SEQ ID NO: 27953 - DNA, 20 bp, Paenibacillus larvae
gtttccttcgggagacgcca

SEQ ID NO: 27954 - DNA, 20 bp, Pseudomonas oryzihabitans
gaatacctgtgagttttgac

SEQ ID NO: 27955 - DNA, 30 bp, Corynebacterium group F1
tacctgggcttgacatgtagcggatcgccg

SEQ ID NO: 27956 - DNA, 20 bp, Paenibacillus alvei
ggagatgagaaaggcggagc

SEQ ID NO: 27957 - DNA, 20 bp, Enterococcus saccharolyticus
ctttttctcgcatgagagaa

SEQ ID NO: 27958 - DNA, 20 bp, Neisseria lactamica
aagtcgtacaaggtaaaccg

SEQ ID NO: 27959 - DNA, 20 bp, Neisseria subflava
acgagcgcaaccccttgtac

SEQ ID NO: 27960 - DNA, 20 bp, Paenibacillus macerans
gggagacttgggaaaggcgg

SEQ ID NO: 27961 - DNA, 20 bp, Lactobacillus acidophilus
ggacagtacaacgaggagca

SEQ ID NO: 27962 - DNA, 20 bp, Enterococcus saccharolyticus
ccgcataacgctttttctcg

SEQ ID NO: 27963 - DNA, 20 bp, Corynebacterium pilosum
cggatattcaacttttgttg

SEQ ID NO: 27964 - DNA, 20 bp, Lactococcus garvieae
ttgatgatcccgcgttgtat

SEQ ID NO: 27965 - DNA, 20 bp, Prevotella intermedia
tgcccctttgcatttaccct

SEQ ID NO: 27966 - DNA, 20 bp, Paenibacillus alvei
ataagactgggataacccac

SEQ ID NO: 27967 - DNA, 20 bp, Corynebacterium cystitidis
cggatattcacgtatctttt

SEQ ID NO: 27968 - DNA, 20 bp, Paenibacillus alvei
tgcatagcttgagtacagaa

SEQ ID NO: 27969 - DNA, 20 bp, Streptococcus sobrinus
agcaacggcttcactatcag

SEQ ID NO: 27970 - DNA, 20 bp, Vibrio metschnikovii
ttataatgaacagggaccaa

SEQ ID NO: 27971 - DNA, 20 bp, Bacillus firmus
ccagaccgtcagcggcggac

SEQ ID NO: 27972 - DNA, 20 bp, Collinsella aerofaciens
ccgtcaaggggggaggcgcc

SEQ ID NO: 27973 - DNA, 20 bp, Brevibacillus brevis
gcacggaggcatctcctgtg

SEQ ID NO: 27974 - DNA, 20 bp, Brevibacterium linens
aaggcatctttggttgtgga

SEQ ID NO: 27975 - DNA, 20 bp, Paenibacillus larvae
gagacagaccttttccttcg

SEQ ID NO: 27976 - DNA, 20 bp, Paenibacillus alvei
agctaataccagataggcat

SEQ ID NO: 27977 - DNA, 20 bp, Lactococcus garvieae
aattgcttcactacttgatg

SEQ ID NO: 27978 - DNA, 30 bp, Haemophilus actinomycetomicans
gcgggaccttagggccgcatgccatgagat

SEQ ID NO: 27979 - DNA, 20 bp, Campylobacter sputorum
tagaaatatcttaatatata

SEQ ID NO: 27980 - DNA, 20 bp, Paenibacillus alvei
ttcctcgcatgaggggaatg

SEQ ID NO: 27981 - DNA, 20 bp, Brevibacillus laterosporus
gttttgcttcgcatgaagcg

SEQ ID NO: 27982 - DNA, 20 bp, Propionibacterium avidum
cccggggcttgtacacccgc

SEQ ID NO: 27983 - DNA, 20 bp, Paenibacillus alvei
tgagctaataccagataggc

SEQ ID NO: 27984 - DNA, 20 bp, Sporosarcina ureae
gaatgttgaaagccggtttc

SEQ ID NO: 27985 - DNA, 20 bp, Paenibacillus alvei
gagagtaactgctcctaggg

SEQ ID NO: 27986 - DNA, 20 bp, Listeria grayi
aggagcttgctcctttggtc

SEQ ID NO: 27987 - DNA, 20 bp, Paenibacillus azotofixans
cctctgaatacgttagagat

SEQ ID NO: 27988 - DNA, 20 bp, Corynebacterium cystitidis
gacgaagcttgtgtgacggt

SEQ ID NO: 27989 - DNA, 30 bp, Pediococcus pentosaceus
acagtctaagagattagaggttcccttcgg

SEQ ID NO: 27990 - DNA, 20 bp, Eubacterium limosum
gttttgatggatccttcggg

SEQ ID NO: 27991 - DNA, 20 bp, Paenibacillus azotofixans
ggcggagcaatctgtcacca

SEQ ID NO: 27992 - DNA, 20 bp, Sporosarcina ureae
agtcgagcgaactgttggaa

SEQ ID NO: 27993 - DNA, 20 bp, Sporosarcina ureae
tcccagtgaccgtcatggag

SEQ ID NO: 27994 - DNA, 20 bp, Prevotella intermedia
ccctttgcatttacccttcg

SEQ ID NO: 27995 - DNA, 20 bp, Clostridium botulinum
gctgtcatggcttctgtgcc

SEQ ID NO: 27996 - DNA, 20 bp, Bacteroides thetaiotaomicron
ccgggccttgtacgcccgcc

SEQ ID NO: 27997 - DNA, 20 bp, Actinomyces neuii
cgtgcggcgtgcttaacaca

SEQ ID NO: 27998 - DNA, 30 bp, Enterococcus cecorum
cgaggctaagccaatctcttaaagctcttc

SEQ ID NO: 27999 - DNA, 20 bp, Paenibacillus macerans
gaagtcgtgatatggagcga

SEQ ID NO: 28000 - DNA, 20 bp, Bacteroides capilosus
gggtttcttagtggcggacg

SEQ ID NO: 28001 - DNA, 20 bp, Campylobacter sputorum
tacctcatactccaattata

SEQ ID NO: 28002 - DNA, 20 bp, Haemophilus actinomycetomicans
acgaaagtgcgggaccttag

SEQ ID NO: 28003 - DNA, 20 bp, Enterococcus cecorum
ttccatttaccgcatggcag

SEQ ID NO: 28004 - DNA, 30 bp, Vibrio hollisae
gacatcctcagaagccggaagagattctgg

SEQ ID NO: 28005 - DNA, 20 bp, Bacteroides capilosus
accacgggctcaacctgtgg

SEQ ID NO: 28006 - DNA, 20 bp, Pediococcus acidilactici
caggacgtgcttgcactgaa

SEQ ID NO: 28007 - DNA, 20 bp, Corynebacterium cystitidis
gctagggacgaagcgtgtgt

SEQ ID NO: 28008 - DNA, 20 bp, Bacillus laevolacticus
gagcggacctatccttcggg

SEQ ID NO: 28009 - DNA, 20 bp, Lactococcus garvieae
tacttgatgatcccgcgttg

SEQ ID NO: 28010 - DNA, 20 bp, Bacteroides thetaiotaomicron
attctggaaacaggttagcc

SEQ ID NO: 28011 - DNA, 20 bp, Streptococcus suis
taaccgcatggtagatgctt

SEQ ID NO: 28012 - DNA, 20 bp, Dolosigranulum pigrum
agcgcaggcggtctgtttag

SEQ ID NO: 28013 - DNA, 30 bp, Paenibacillus azotofixans
caggtcttgacatccctctgaatcgtttag

SEQ ID NO: 28014 - DNA, 20 bp, Proteus vulgaris
cgagcggtaacagaggaaag

SEQ ID NO: 28015 - DNA, 20 bp, Yokenella regensburgei
gcgaggaggaaggcgatacg

SEQ ID NO: 28016 - DNA, 20 bp, Capnocytophaga ochracea
tatattaaagctctggtggt

SEQ ID NO: 28017 - DNA, 20 bp, Aerococcus urinae
ggtcaccgcatggtgacctt

SEQ ID NO: 28018 - DNA, 30 bp, Bacillus azotoformans
tgctacaatggatggacaaagggctgctaa

SEQ ID NO: 28019 - DNA, 20 bp, Campylobacter sputorum
ttttaatagtcatttagaaa

SEQ ID NO: 28020 - DNA, 20 bp, Campylobacter sputorum
tttatattaataaagcgaaa

SEQ ID NO: 28021 - DNA, 20 bp, Corynebacterium cystitidis
cttttgtgggtgtgtggaaa

SEQ ID NO: 28022 - DNA, 20 bp, Kocuria rosea
tgcggtgaatacgcttcccc

SEQ ID NO: 28023 - DNA, 20 bp, Paenibacillus alvei
gcaatgtaagttgggtgttt

SEQ ID NO: 28024 - DNA, 30 bp, Paenibacillus alvei
ctgctcctagggtgacggtacctgagaaga

SEQ ID NO: 28025 - DNA, 20 bp, Bacteroides ovatus
taaggctgttgtgaaggtgc

SEQ ID NO: 28026 - DNA, 20 bp, Eubacterium limosum
cgagaaggttttgatggatc

SEQ ID NO: 28027 - DNA, 20 bp, Clostridium botulinum
atagagagggatagcctttc

SEQ ID NO: 28028 - DNA, 20 bp, Campylobacter sputorum
tcatttagaaatatcttaat

SEQ ID NO: 28029 - DNA, 20 bp, Lactococcus lactis
agttgagcgatgaagattgg

SEQ ID NO: 28030 - DNA, 20 bp, Paenibacillus validus
aacatggggcaacctatggc

SEQ ID NO: 28031 - DNA, 20 bp, Paenibacillus validus
ggacttatccttcgggatag

SEQ ID NO: 28032 - DNA, 30 bp, Corynebacterium cystitidis
cgaagccagtggcctatctttgtgagggag

SEQ ID NO: 28033 - DNA, 20 bp, Streptococcus suis
gtagatatttgaaaggagca

SEQ ID NO: 28034 - DNA, 20 bp, Bacteroides forsythus
gggctatttgttaaagattt

SEQ ID NO: 28035 - DNA, 20 bp, Bacillus badius
atggaaaggcggcttttagc

SEQ ID NO: 28036 - DNA, 20 bp, Enterococcus saccharolyticus
gcataatgctttttctcgca

SEQ ID NO: 28037 - DNA, 20 bp, Fusobacterium necrophorum
aagaacttgcctcttagacc

SEQ ID NO: 28038 - DNA, 20 bp, Haemophilus actinomycetomicans
cttagggccgcatgccatga

SEQ ID NO: 28039 - DNA, 20 bp, Capnocytophaga ochracea
taaagctctggtggtgaaag

SEQ ID NO: 28040 - DNA, 20 bp, Serratia marcescens
gcttaatacgttcatcaatt

SEQ ID NO: 28041 - DNA, 20 bp, Campylobacter coli
gtcgtacaaggctaaccgta

SEQ ID NO: 28042 - DNA, 20 bp, Clostridium botulinum
aggaagtcacttcggtgaca

SEQ ID NO: 28043 - DNA, 20 bp, Capnocytophaga ochracea
gggctacgcgtagtttgatg

SEQ ID NO: 28044 - DNA, 30 bp, Brevibacterium linens
gaaacagttcctcccctttggggttggtgt

SEQ ID NO: 28045 - DNA, 20 bp, Capnocytophaga ochracea
gggaagaataagggctacgc

SEQ ID NO: 28046 - DNA, 20 bp, Unknown Organism
  oligonucleotide from CDC group VB-3
gtctaaccttccagggggac

SEQ ID NO: 28047 - DNA, 20 bp, Eubacterium limosum
aagaatgacggtacccaatg

SEQ ID NO: 28048 - DNA, 20 bp, Streptococcus suis
ttaaccgcatggtagatgct

SEQ ID NO: 28049 - DNA, 20 bp, Eubacterium limosum
ttttgatggatccttcgggt

SEQ ID NO: 28050 - DNA, 20 bp, Paenibacillus azotofixans
atccctctgaatacgttaga

SEQ ID NO: 28051 - DNA, 20 bp, Campylobacter sputorum
aatgtagctcttaataatat

SEQ ID NO: 28052 - DNA, 20 bp, Bacteroides ovatus
gccgtaaggctgttgtgaag

SEQ ID NO: 28053 - DNA, 20 bp, Paenibacillus polymyxa
gtcttgtacacaccgccccg

SEQ ID NO: 28054 - DNA, 20 bp, Clostridium botulinum
aggagctgtcatggcttctg

SEQ ID NO: 28055 - DNA, 30 bp, Paenibacillus lautus
tttcacagcattgtggaataatgaaagacg

SEQ ID NO: 28056 - DNA, 20 bp, Paenibacillus macerans
gggaagcgaagtcgtgatat

SEQ ID NO: 28057 - DNA, 20 bp, Paenibacillus alvei
aggggaatgagaaaggcgga

SEQ ID NO: 28058 - DNA, 20 bp, Corynebacterium cystitidis
ttcacgtatcttttgtgggt

SEQ ID NO: 28059 - DNA, 20 bp, Streptococcus uberis
ccgcatgacaatagggtaca

SEQ ID NO: 28060 - DNA, 20 bp, Lactococcus lactis
cttgcaccaatttgaagagc

SEQ ID NO: 28061 - DNA, 30 bp, Salmonella paratyphi
cagaacaatccagagatggattggtgcctt

SEQ ID NO: 28062 - DNA, 20 bp, Porphyromonas maccae
ggggcgtgtcagggtaatac

SEQ ID NO: 28063 - DNA, 20 bp, Bacteroides forsythus
ttccgcatggggctatttgt

SEQ ID NO: 28064 - DNA, 20 bp, Campylobacter sputorum
tctaaatataaattattact

SEQ ID NO: 28065 - DNA, 20 bp, Streptococcus suis
ttaaccgcatggtagatact

SEQ ID NO: 28066 - DNA, 20 bp, Bacteroides forsythus
gctttcttcccttcggggcg

SEQ ID NO: 28067 - DNA, 20 bp, Streptococcus suis
tttaccgcatggtagatatt

SEQ ID NO: 28068 - DNA, 20 bp, Sporosarcina ureae
cgaactgttggaagcttgct

SEQ ID NO: 28069 - DNA, 20 bp, Corynebacterium pilosum
tcaacttttgttggaaagcc

SEQ ID NO: 28070 - DNA, 20 bp, Streptococcus suis
catggtagatatttgaaagg

SEQ ID NO: 28071 - DNA, 20 bp, Gemella bergeri
agacaacacagatacaggtg

SEQ ID NO: 28072 - DNA, 20 bp, Bacteroides capilosus
atcgctctgagatggcctcg

SEQ ID NO: 28073 - DNA, 20 bp, Anaerococcus prevotii
ataagatggattagcggcgg

SEQ ID NO: 28074 - DNA, 20 bp, Bacteroides fragilis
ttatatgaataaggatcggc

SEQ ID NO: 28075 - DNA, 20 bp, Prevotella denticola
cactacatctctgcagcaat

SEQ ID NO: 28076 - DNA, 20 bp, Tetragenococcus halophilus
aaagtcggtgcggcaaccct

SEQ ID NO: 28077 - DNA, 20 bp, Eubacterium moniliforme
gcgtaagcggggcagcgacc

SEQ ID NO: 28078 - DNA, 20 bp, Brochothrix campestris
acagctggggataacatcga

SEQ ID NO: 28079 - DNA, 20 bp, Corynebacterium group F
taagtccacagcttaactgt

SEQ ID NO: 28080 - DNA, 20 bp, Brevibacillus choshinensis
ggaccaatgaagagcttgct

SEQ ID NO: 28081 - DNA, 20 bp, Tetragenococcus halophilus
caacgagcaagccaagccgc

SEQ ID NO: 28082 - DNA, 20 bp, Anaerococcus prevotii
aggcgacttactgggctcat

SEQ ID NO: 28083 - DNA, 20 bp, Capnocytophaga ochracea
gtggtgaaagatgagtatgc

SEQ ID NO: 28084 - DNA, 20 bp, Bacteroides uniformis
ggttatgctggggactctgt

SEQ ID NO: 28085 - DNA, 20 bp, Morganella morganii
aattgcatctgatactggtc

SEQ ID NO: 28086 - DNA, 20 bp, Moraxella osloensis
ggttaatacccattagatta

SEQ ID NO: 28087 - DNA, 20 bp, Streptococcus constellatus
accgtattctgtgagttgcg

SEQ ID NO: 28088 - DNA, 20 bp, Streptococcus thermophilus
caagtagaacgctgaagaga

SEQ ID NO: 28089 - DNA, 20 bp, Haemophilus segnis
ggtagcgaggaaggcattta

SEQ ID NO: 28090 - DNA, 20 bp, Corynebacterium propinquum
cttttggggtttctgtgccg

SEQ ID NO: 28091 - DNA, 20 bp, Anaerococcus prevotii
gatataccctcttcttcgga

SEQ ID NO: 28092 - DNA, 20 bp, Corynebacterium amycolatum
atggtgtggatgctgtggtg

SEQ ID NO: 28093 - DNA, 20 bp, Arcanobacterium bernardiae
gaacaaggcctttttggttg

SEQ ID NO: 28094 - DNA, 20 bp, Weeksella virosa
cggataattgagagcggcgt

SEQ ID NO: 28095 - DNA, 20 bp, Acinetobacter haemolyticus
gaagggtagcttgctaccta

SEQ ID NO: 28096 - DNA, 20 bp, Alcaligenes faecalis
agaaaaggtacctcctaata

SEQ ID NO: 28097 - DNA, 20 bp, Streptococcus thermophilus
ttgctcttcttggatgagtt

SEQ ID NO: 28098 - DNA, 20 bp, Serratia proteamaculans
ttaatagcacattgcattga

SEQ ID NO: 28099 - DNA, 20 bp, Eikenella corrodens
ggttgtaaagtacttttgtt

SEQ ID NO: 28100 - DNA, 20 bp, Streptococcus parasanguinis
tgcatcactaagagatggac

SEQ ID NO: 28101 - DNA, 20 bp, Atopobium parvulum
ggcaatgatgggtagctggg

SEQ ID NO: 28102 - DNA, 20 bp, Pseudomonas fluorescens
gggaggaagggtacttacct

SEQ ID NO: 28103 - DNA, 20 bp, Acinetobacter johnsonii
gaggctacttggattaatac

SEQ ID NO: 28104 - DNA, 20 bp, Tetragenococcus halophilus
gaggaaatgctttttctatg

SEQ ID NO: 28105 - DNA, 20 bp, Clostridium butyricum
gtacagcaattaaaggagta

SEQ ID NO: 28106 - DNA, 20 bp, Pediococcus acidilactici
gttaaagaagaacgtgggtg

SEQ ID NO: 28107 - DNA, 20 bp, Enterobacter cloacae
gaggaaggcgacagggttaa

SEQ ID NO: 28108 - DNA, 20 bp, Helcococcus ovis
acgtaggcggtaatttaagt

SEQ ID NO: 28109 - DNA, 20 bp, Prevotella melaninogenica
gacgggagcgcaactgacgc

SEQ ID NO: 28110 - DNA, 20 bp, Anaerococcus tetradius
cgtaggcggataagcaagtt

SEQ ID NO: 28111 - DNA, 20 bp, Dermabacter hominis
gaggcttaaccttgggcgtg

SEQ ID NO: 28112 - DNA, 20 bp, Pseudomonas luteola
cgtaaagcactttaagctgg

SEQ ID NO: 28113 - DNA, 20 bp, Bacteroides thetaiotaomicron
cccttatcttcagttactaa

SEQ ID NO: 28114 - DNA, 20 bp, Kingella kingae
gcggccaataactgattagc

SEQ ID NO: 28115 - DNA, 20 bp, Lactococcus lactis
cgggagttgggagtacccga

SEQ ID NO: 28116 - DNA, 20 bp, Alcaligenes faecalis
tacctcctaatacgaggtac

SEQ ID NO: 28117 - DNA, 20 bp, Bacillus licheniformis
cgggagcttgctcccttagg

SEQ ID NO: 28118 - DNA, 20 bp, Corynebacterium xerosis
accggataggaccgcaccgt

SEQ ID NO: 28119 - DNA, 20 bp, Facklamia languida
aaggatggctccgcggtgca

SEQ ID NO: 28120 - DNA, 20 bp, Collinsella aerofaciens
acgctaggtgtggggggacg

SEQ ID NO: 28121 - DNA, 20 bp, Tissierella praeacuta
tttaagtcaaagcgtaaagc

SEQ ID NO: 28122 - DNA, 20 bp, Corynebacterium striatum
gacagctgtttagtgtcagt

SEQ ID NO: 28123 - DNA, 20 bp, Gemella haemolysans
gacacaagagattgtgttgt

SEQ ID NO: 28124 - DNA, 20 bp, Photobacterium damselae
agaagcttgaagagattcga

SEQ ID NO: 28125 - DNA, 20 bp, Streptococcus suis
aaagtttctcacttgacggt

SEQ ID NO: 28126 - DNA, 20 bp, Turicella otitidis
aggagccatttttagtgtga

SEQ ID NO: 28127 - DNA, 20 bp, Arcanobacterium haemolyticum
aacaaggcgaaagttgaggg

SEQ ID NO: 28128 - DNA, 20 bp, Corynebacterium afermentans
tctttccagctactgaccat

SEQ ID NO: 28129 - DNA, 20 bp, Serratia marcescens
gctcatcaattgacgttact

SEQ ID NO: 28130 - DNA, 20 bp, Streptococcus agalactiae
tacactagactgatgagttg

SEQ ID NO: 28131 - DNA, 20 bp, Cardiobacterium hominis
gaggaaaggtgcgtagttaa

SEQ ID NO: 28132 - DNA, 20 bp, Bacteroides vulgatus
ccgctaccacgcgagtggat

SEQ ID NO: 28133 - DNA, 20 bp, Atopobium parvulum
accacccgagtcgattgcac

SEQ ID NO: 28134 - DNA, 20 bp, Cardiobacterium hominis
gaacggaaacgatggagctt

SEQ ID NO: 28135 - DNA, 20 bp, Brevibacterium epidermidis
cgtgagggtaagcgaatccc

SEQ ID NO: 28136 - DNA, 20 bp, Campylobacter lari
agttgttgctgtgctagtca

SEQ ID NO: 28137 - DNA, 20 bp, Leuconostoc argentinum
aatgattctagttcgacggt

SEQ ID NO: 28138 - DNA, 20 bp, Burkholderia gladioli
gggctaatatccttcgggga

SEQ ID NO: 28139 - DNA, 20 bp, Streptococcus suis
taagagaagaactgtgagaa

SEQ ID NO: 28140 - DNA, 20 bp, Actinomyces bovis
acataccgcgcaaaagcaca

SEQ ID NO: 28141 - DNA, 20 bp, Paenibacillus amylolyticus
taactgctatcggagtgacg

SEQ ID NO: 28142 - DNA, 20 bp, Prevotella loescheii
acgatggatgctcgttgtcg

SEQ ID NO: 28143 - DNA, 20 bp, Haemophilus influenzae
gaagcgaagctgcgaggtgg

SEQ ID NO: 28144 - DNA, 20 bp, Streptococcus infantarius
accgcataacagcatttaac

SEQ ID NO: 28145 - DNA, 20 bp, Facklamia ignava
tgtagagtaactgttatagg

SEQ ID NO: 28146 - DNA, 20 bp, Chromobacterium violaceum
ggaacggcattggagactgc

SEQ ID NO: 28147 - DNA, 20 bp, Corynebacterium propinquum
ctgtgaaattccacagctta

SEQ ID NO: 28148 - DNA, 20 bp, Bacillus flexus
agtcgagcgaactgattaga

SEQ ID NO: 28149 - DNA, 20 bp, Serratia proteamaculans
tagcacattgcattgacgtt

SEQ ID NO: 28150 - DNA, 20 bp, Turicella otitidis
ttttagtgtgatggttggaa

SEQ ID NO: 28151 - DNA, 20 bp, Bacillus alcalophilus
gtgccgttcgaataggtcgg

SEQ ID NO: 28152 - DNA, 20 bp, Burkholderia cepacia
ccttggctctaatacagccg

SEQ ID NO: 28153 - DNA, 20 bp, Weeksella virosa
cttaaatgcataatgacaga

SEQ ID NO: 28154 - DNA, 20 bp, Enterococcus cecorum
cttaaagctcttctcagttc

SEQ ID NO: 28155 - DNA, 20 bp, Pseudoramibacter alactolyticus
actggaaagtggcgaacggg

SEQ ID NO: 28156 - DNA, 20 bp, Bacillus schlegellii
cgaaggcagcgcactggcct

SEQ ID NO: 28157 - DNA, 20 bp, Pasteurella multocida
tagcatcattgacgttaatt

SEQ ID NO: 28158 - DNA, 20 bp, Microbacterium terregens
ggtgaaagagagcttgctct

SEQ ID NO: 28159 - DNA, 20 bp, Aeromonas schubertii
taaaactgtccgactagagt

SEQ ID NO: 28160 - DNA, 20 bp, Helcococcus kunzii
cgatttcttcggaatgaaac

SEQ ID NO: 28161 - DNA, 20 bp, Brevibacillus thermoruber
gctaccacttgcggatgggc

SEQ ID NO: 28162 - DNA, 20 bp, Staphylococcus carnosus
aactatgcgcaccttgacgg

SEQ ID NO: 28163 - DNA, 20 bp, Bacillus sp
gaagagcttgcttttgatca

SEQ ID NO: 28164 - DNA, 20 bp, Alicyclobacillus acidocaldarius
tgctcgaccgcctacgcacc

SEQ ID NO: 28165 - DNA, 20 bp, Prevotella denticola
gaattgcagcgcatactggt

SEQ ID NO: 28166 - DNA, 20 bp, Anaerococcus tetradius
gaaataatatagctcaacta

SEQ ID NO: 28167 - DNA, 20 bp, Corynebacterium falsenii
gctagggaagaagccacttg

SEQ ID NO: 28168 - DNA, 20 bp, Gemella haemolysans
acacaagagattgtgttgtt

SEQ ID NO: 28169 - DNA, 20 bp, Paenibacillus apiarius
tgggaaagacggagcaatct

SEQ ID NO: 28170 - DNA, 20 bp, Oligella urethralis
gttgagaaaagtggtttaca

SEQ ID NO: 28171 - DNA, 20 bp, Micrococcus luteus
cttgacatgttctcgatcgc

SEQ ID NO: 28172 - DNA, 20 bp, Photobacterium damselae
aaggtagtgtagttaacacc

SEQ ID NO: 28173 - DNA, 20 bp, Peptoniphilus indolicus
cacggggatagccaccggaa

SEQ ID NO: 28174 - DNA, 20 bp, Anaerococcus tetradius
gctcaactatagtaagcttt

SEQ ID NO: 28175 - DNA, 20 bp, Anaerococcus prevotii
gtaccataagaaaaagcccc

SEQ ID NO: 28176 - DNA, 20 bp, Brevibacillus choshinensis
gagcttgctcttcggcggtt

SEQ ID NO: 28177 - DNA, 20 bp, Bacteroides uniformis
agctacacggcgacgtgatg

SEQ ID NO: 28178 - DNA, 20 bp, Bacillus cereus
ataacattttgaactgcatg

SEQ ID NO: 28179 - DNA, 20 bp, Geobacillus thermoglucosidasius
agtcggtgaggtaaccccgt

SEQ ID NO: 28180 - DNA, 20 bp, Proteus penneri
ttaatacctttatcaattga

SEQ ID NO: 28181 - DNA, 20 bp, Gemella haemolysans
catagactgggacaactatt

SEQ ID NO: 28182 - DNA, 20 bp, Micrococcus luteus
aggagcgcccaccgcatggt

SEQ ID NO: 28183 - DNA, 20 bp, Paenibacillus amylolyticus
aggcggtcacttaagtctgg

SEQ ID NO: 28184 - DNA, 20 bp, Clostridium sordellii
aatatgagagtcgcatggct

SEQ ID NO: 28185 - DNA, 20 bp, Alicyclobacillus acidocaldarius
ctcactcggtaccgtctcgc

SEQ ID NO: 28186 - DNA, 20 bp, Anaerococcus prevotii
aaggcgacttactgggctca

SEQ ID NO: 28187 - DNA, 20 bp, Fusobacterium nucleatum
agtgtcccttcggggaaacc

SEQ ID NO: 28188 - DNA, 20 bp, Bacteroides merdae
cttatcactagttactaaca

SEQ ID NO: 28189 - DNA, 20 bp, Corynebacterium glucuronolyticum
tgggtctaataccctatagg

SEQ ID NO: 28190 - DNA, 20 bp, Kytococcus sedentarius
tcagggcttaaccctggacg

SEQ ID NO: 28191 - DNA, 20 bp, Bacteroides forsythus
gaaagtcggactaatacctc

SEQ ID NO: 28192 - DNA, 20 bp, Porphyromonas levii
accaaggtttaaatggggac

SEQ ID NO: 28193 - DNA, 20 bp, Fusobacterium mortiferum
aacttgccctgcagtctggg

SEQ ID NO: 28194 - DNA, 20 bp, Bacteroides thetaiotaomicron
agaaagattaatatccgata

SEQ ID NO: 28195 - DNA, 20 bp, Brevibacillus choshinensis
taggtgttggggactccaat

SEQ ID NO: 28196 - DNA, 20 bp, Moraxella osloensis
gtaggtacagagggttgcta

SEQ ID NO: 28197 - DNA, 20 bp, Prevotella intermedia
tttctggcttgaaagaccgc

SEQ ID NO: 28198 - DNA, 20 bp, Brevibacillus parabrevis
gagcgagggttttcggaccc

SEQ ID NO: 28199 - DNA, 20 bp, Eremococcus coleocola
ctcttaaagtcgttctcagt

SEQ ID NO: 28200 - DNA, 20 bp, Fusobacterium mortiferum
ttcatatgaaagctatatgc

SEQ ID NO: 28201 - DNA, 20 bp, Anaerococcus tetradius
gggtacgtaggcggataagc

SEQ ID NO: 28202 - DNA, 20 bp, Anaerobiospirillum succiniciproducens
gaacctacagacaggtgctg

SEQ ID NO: 28203 - DNA, 20 bp, Brevibacillus choshinensis
cgaaaagaaaaggcggcttc

SEQ ID NO: 28204 - DNA, 20 bp, Sporosarcina pasteurii
gctgaccggtatagagatat

SEQ ID NO: 28205 - DNA, 20 bp, Citrobacter sedlakii
cggttgtgccttcgggagcc

SEQ ID NO: 28206 - DNA, 20 bp, Leptotrichia buccalis
gatgaagatagttcactgga

SEQ ID NO: 28207 - DNA, 20 bp, Clostridium tetani
cgcatgaaactttaaccaaa

SEQ ID NO: 28208 - DNA, 20 bp, Fusobacterium nucleatum
tataattatgaaagctataa

SEQ ID NO: 28209 - DNA, 20 bp, Brevundimonas diminuta
cgccacggagacgtggcttt

SEQ ID NO: 28210 - DNA, 20 bp, Listeria innocua
gtggcgcatgccacgctctt

SEQ ID NO: 28211 - DNA, 20 bp, Unknown Organism
  oligonucleotide from CDC group EF-4B
gataactgtccgaaaggatg

SEQ ID NO: 28212 - DNA, 20 bp, Bacteroides capilosus
tcggaattccgtgtgtagcg

SEQ ID NO: 28213 - DNA, 20 bp, Moraxella bovis
tcgggagcttggatacaggt

SEQ ID NO: 28214 - DNA, 20 bp, Facklamia ignava
aacggcctaccgtggctttg

SEQ ID NO: 28215 - DNA, 20 bp, Bacillus sp
ctgtaagtgacagcttgcgc

SEQ ID NO: 28216 - DNA, 20 bp, Empedobacter brevis
aggcggattaatcagtcagt

SEQ ID NO: 28217 - DNA, 20 bp, Clostridium clostridiiforme
atactaggtgtcgggggaca

SEQ ID NO: 28218 - DNA, 20 bp, Haemophilus influenzae
tattgaggaaggttgatgtg

SEQ ID NO: 28219 - DNA, 20 bp, Geobacillus thermoglucosidasius
aaccctggagacagggcgtt

SEQ ID NO: 28220 - DNA, 20 bp, Actinomyces naeslundii
tttgtgggggctggttcaca

SEQ ID NO: 28221 - DNA, 20 bp, Mannheimia haemolytica
catttggccacctgccataa

SEQ ID NO: 28222 - DNA, 20 bp, Corynebacterium urealyticum
tttttcacgatttccgtgcc

SEQ ID NO: 28223 - DNA, 20 bp, Prevotella intermedia
agcctttcactttctggctt

SEQ ID NO: 28224 - DNA, 20 bp, Neisseria sicca
gttgggcagcatgactgctt

SEQ ID NO: 28225 - DNA, 20 bp, Brevibacterium linens
ctggtacagagagatgcgag

SEQ ID NO: 28226 - DNA, 20 bp, Citrobacter sedlakii
ccacggaagactgcagagat

SEQ ID NO: 28227 - DNA, 20 bp, Lactococcus raffinolactis
actcgtgctattcctagaga

SEQ ID NO: 28228 - DNA, 20 bp, Bacteroides capilosus
gcgtgaggaacctgcctcgg

SEQ ID NO: 28229 - DNA, 20 bp, Listeria monocytogenes
cacgcttttgaaagatggtt

SEQ ID NO: 28230 - DNA, 20 bp, Alicyclobacillus acidocaldarius
agtttccaaagccatcccat

SEQ ID NO: 28231 - DNA, 20 bp, Bacteroides uniformis
ccgcaaggcagttgtgaagg

SEQ ID NO: 28232 - DNA, 20 bp, Aerococcus christensenii
aggaacctaccgataagcgg

SEQ ID NO: 28233 - DNA, 20 bp, Prevotella oris
gattcagagatgatgaggcc

SEQ ID NO: 28234 - DNA, 20 bp, Aneurinibacillus aneurinilyticus
ccgcatggtctgaaagagaa

SEQ ID NO: 28235 - DNA, 20 bp, Actinomyces odontolyticus
acatgcacggcggcactgca

SEQ ID NO: 28236 - DNA, 20 bp, Bacillus oleronius
gcatgagggagaattgaaag

SEQ ID NO: 28237 - DNA, 20 bp, Acinetobacter genospecies 3
gaggtagcttgctactgatc

SEQ ID NO: 28238 - DNA, 20 bp, Leptotrichia buccalis
cctgatacaattgccagcac

SEQ ID NO: 28239 - DNA, 20 bp, Bacillus lentus
cgccgctaaccaacaaaaag

SEQ ID NO: 28240 - DNA, 20 bp, Clostridium butyricum
agcaaaactataaaaccgat

SEQ ID NO: 28241 - DNA, 20 bp, Peptostreptococcus anaerobius
cggcatcgtagatatatcaa

SEQ ID NO: 28242 - DNA, 20 bp, Streptococcus porcinus
ataccgcatgaaagtagaag

SEQ ID NO: 28243 - DNA, 20 bp, Veillonella dispar
aatcgggacgaaaggccttc

SEQ ID NO: 28244 - DNA, 20 bp, Actinomyces naeslundii
cgggatattctgggtctgtc

SEQ ID NO: 28245 - DNA, 20 bp, Peptoniphilus indolicus
cttcggggacagtattacag

SEQ ID NO: 28246 - DNA, 20 bp, Campylobacter curvus
ggatagggctatatcgtatc

SEQ ID NO: 28247 - DNA, 20 bp, Serratia marcescens
gaaggtggtgagcttaatac

SEQ ID NO: 28248 - DNA, 20 bp, Clostridium butyricum
gagagtgagcaaaactataa

SEQ ID NO: 28249 - DNA, 20 bp, Capnocytophaga ochracea
agtttgatgacggtacctta

SEQ ID NO: 28250 - DNA, 20 bp, Aneurinibacillus aneurinilyticus
tggtctgaaagagaaagacc

SEQ ID NO: 28251 - DNA, 20 bp, Clostridium sordellii
ttggaactgtaggacttgag

SEQ ID NO: 28252 - DNA, 20 bp, Actinomyces neuii
gcatggggttgttgggaaag

SEQ ID NO: 28253 - DNA, 20 bp, Actinomyces neuii
attgggatgggctcgcggct

SEQ ID NO: 28254 - DNA, 20 bp, Leuconostoc pseudomesenteroides
tagaatagggaatgatttta

SEQ ID NO: 28255 - DNA, 20 bp, Bacteroides eggerthii
caggatgctaatcccgaaaa

SEQ ID NO: 28256 - DNA, 20 bp, Streptococcus parasanguinis
ttgacttgaaaggtgcaaat

SEQ ID NO: 28257 - DNA, 20 bp, Peptoniphilus indolicus
ggtcaaagatggactcgcgt

SEQ ID NO: 28258 - DNA, 20 bp, Alcaligenes faecalis
cagagaagaaaaggtacctc

SEQ ID NO: 28259 - DNA, 20 bp, Streptococcus porcinus
gcctagagataggctttctc

SEQ ID NO: 28260 - DNA, 20 bp, Acinetobacter haemolyticus
tgtagcttgctacattacct

SEQ ID NO: 28261 - DNA, 20 bp, Anaerobiospirillum succiniciproducens
tggcccttacggcagggcta

SEQ ID NO: 28262 - DNA, 20 bp, Lactococcus lactis
taccgactggatgagcagcg

SEQ ID NO: 28263 - DNA, 20 bp, Clostridium ramosum
acttctgttataaaggaaga

SEQ ID NO: 28264 - DNA, 20 bp, Bacillus badius
gtcgcttacagatggacccg

SEQ ID NO: 28265 - DNA, 20 bp, Tetragenococcus halophilus
gtgcattagccagttggtga

SEQ ID NO: 28266 - DNA, 20 bp, Bacteroides thetaiotaomicron
gtcttgagtgcagtagaggt

SEQ ID NO: 28267 - DNA, 20 bp, Prevotella intermedia
ctggcgttagcggctaagcg

SEQ ID NO: 28268 - DNA, 20 bp, Rothia mucilaginosa
cctacctttaactctgggat

SEQ ID NO: 28269 - DNA, 20 bp, Peptostreptococcus anaerobius
tcaaccgtagttagcctccg

SEQ ID NO: 28270 - DNA, 20 bp, Brevibacterium casei
gagagaggcgaacccgtgag

SEQ ID NO: 28271 - DNA, 20 bp, Propionibacterium avidum
gggtttgacatggactggga

SEQ ID NO: 28272 - DNA, 20 bp, Staphylococcus carnosus
tgcgcaccttgacggtacct

SEQ ID NO: 28273 - DNA, 20 bp, Gemella haemolysans
ccggtcacggtgggacagat

SEQ ID NO: 28274 - DNA, 20 bp, Facklamia ignava
cgcggtgcattagctagacg

SEQ ID NO: 28275 - DNA, 20 bp, Facklamia ignava
gtaaagcactgttatcagag

SEQ ID NO: 28276 - DNA, 20 bp, Corynebacterium propinquum
gtttagggagccgtcgaagg

SEQ ID NO: 28277 - DNA, 20 bp, Enterococcus raffinosus
tctatttgaaaggcgctttt

SEQ ID NO: 28278 - DNA, 20 bp, Peptostreptococcus anaerobius
atcaaagtgttagcggtata

SEQ ID NO: 28279 - DNA, 20 bp, Neisseria sicca
gccgcttgccacggtatgct

SEQ ID NO: 28280 - DNA, 20 bp, Streptococcus canis
aataccgcataaaagtgctt

SEQ ID NO: 28281 - DNA, 20 bp, Campylobacter lari
cggagtattaagagagcttg

SEQ ID NO: 28282 - DNA, 20 bp, Dermabacter hominis
gatgaagctgtgcttgcaca

SEQ ID NO: 28283 - DNA, 20 bp, Streptococcus gallolyticus
taacacatgttagagacttg

SEQ ID NO: 28284 - DNA, 20 bp, Paenibacillus validus
acgcctcggagagtaactgc

SEQ ID NO: 28285 - DNA, 20 bp, Veillonella atypica
ctatcactgaaggaggggat

SEQ ID NO: 28286 - DNA, 20 bp, Anaerococcus prevotii
agtagaggtaagtggaattt

SEQ ID NO: 28287 - DNA, 20 bp, Bacteroides merdae
ccaaaccatgtctcagttcg

SEQ ID NO: 28288 - DNA, 20 bp, Bacteroides merdae
gaaactgggttacttgagtg

SEQ ID NO: 28289 - DNA, 20 bp, Anaerococcus tetradius
tacgtaggcggataagcaag

SEQ ID NO: 28290 - DNA, 20 bp, Acinetobacter genospecies 3
atgtcgggaactttaaggat

SEQ ID NO: 28291 - DNA, 20 bp, Streptococcus canis
aggtgcttgcactagtctaa

SEQ ID NO: 28292 - DNA, 20 bp, Anaerococcus prevotii
agcgatgaaatcttgacaga

SEQ ID NO: 28293 - DNA, 20 bp, Streptococcus thoraltensis
aaaaggtgcaacagcatcac

SEQ ID NO: 28294 - DNA, 20 bp, Streptococcus dysgalactiae
ctggtgcttgcaccggttca

SEQ ID NO: 28295 - DNA, 20 bp, Bacteroides distasonis
atcccgcatgggaatatttg

SEQ ID NO: 28296 - DNA, 20 bp, Tetragenococcus halophilus
aagaggaaatgctttttcta

SEQ ID NO: 28297 - DNA, 20 bp, Sphingomonas paucimobilis
gccaacctagcaataggaag

SEQ ID NO: 28298 - DNA, 20 bp, Oligella ureolytica
agaaaagtcttaggctaata

SEQ ID NO: 28299 - DNA, 20 bp, Porphyromonas endodontalis
atactagatttttgcgatat

SEQ ID NO: 28300 - DNA, 20 bp, Paenibacillus amylolyticus
ggccaaggctcaaccttggt

SEQ ID NO: 28301 - DNA, 20 bp, Fusobacterium nucleatum
cctgatattatgattttaag

SEQ ID NO: 28302 - DNA, 20 bp, Burkholderia multivorans
cctggctctaatacagtcgg

SEQ ID NO: 28303 - DNA, 20 bp, Helcococcus ovis
ttttttaattaatttcttcg

SEQ ID NO: 28304 - DNA, 20 bp, Streptococcus iniae
caagtagaacgctgaggatt

SEQ ID NO: 28305 - DNA, 20 bp, Anaerococcus prevotii
tcattctgacgctgaggaac

SEQ ID NO: 28306 - DNA, 20 bp, Streptococcus porcinus
gctaataccgcatgaaagta

SEQ ID NO: 28307 - DNA, 20 bp, Streptococcus equi
tgttaaccatttaaaaggag

SEQ ID NO: 28308 - DNA, 20 bp, Peptoniphilus indolicus
gggcaagctagcgatagcaa

SEQ ID NO: 28309 - DNA, 20 bp, Paenibacillus validus
ttgccaaggaagaacgcctc

SEQ ID NO: 28310 - DNA, 20 bp, Brevibacillus agri
gcttttcgctatcactggga

SEQ ID NO: 28311 - DNA, 20 bp, Actinomyces odontolyticus
cccttctttgggataacgcc

SEQ ID NO: 28312 - DNA, 20 bp, Peptostreptococcus anaerobius
aagtgttagcggtataggat

SEQ ID NO: 28313 - DNA, 20 bp, Actinomyces bovis
ttatcaagtttatggttaaa

SEQ ID NO: 28314 - DNA, 20 bp, Acinetobacter junii
gctactgagactaatactct

SEQ ID NO: 28315 - DNA, 20 bp, Arcanobacterium bernardiae
ctggatagggatgggctcac

SEQ ID NO: 28316 - DNA, 20 bp, Corynebacterium striatum
tcctcccttgtggtttgtat

SEQ ID NO: 28317 - DNA, 20 bp, Moraxella osloensis
gcggacgggtgagtaacatt

SEQ ID NO: 28318 - DNA, 20 bp, Streptococcus mitis
gttgcatgacatttgcttaa

SEQ ID NO: 28319 - DNA, 20 bp, Campylobacter lari
cctgcttaacacaagttgag

SEQ ID NO: 28320 - DNA, 20 bp, Bacteroides vulgatus
gagggccgctaccacgcgag

SEQ ID NO: 28321 - DNA, 20 bp, Facklamia hominis
cgcagatcgcatgatcaacg

SEQ ID NO: 28322 - DNA, 20 bp, Facklamia languida
ttgttagagaagaacgaccg

SEQ ID NO: 28323 - DNA, 20 bp, Eggerthella lenta
tccgagggctcaacccccgg

SEQ ID NO: 28324 - DNA, 20 bp, Anaerococcus prevotii
agcatttgaaactgcatatc

SEQ ID NO: 28325 - DNA, 20 bp, Nocardia asteroides
gaggttgcttcggtaactga

SEQ ID NO: 28326 - DNA, 20 bp, Bacillus pallidus
ttttagctgtcactgcagga

SEQ ID NO: 28327 - DNA, 20 bp, Leuconostoc argentinum
taacttgagtgttgtagagg

SEQ ID NO: 28328 - DNA, 20 bp, Bacteroides merdae
cgcatgggaatatttgttaa

SEQ ID NO: 28329 - DNA, 20 bp, Streptococcus salivarius
gttgtaagtcaagaacgagt

SEQ ID NO: 28330 - DNA, 20 bp, Finegoldia magna
aataccgcataaaatcgtag

SEQ ID NO: 28331 - DNA, 20 bp, Propionibacterium granulosum
tcgtccactgttgccagcaa

SEQ ID NO: 28332 - DNA, 20 bp, Eggerthella lenta
cagggaagaaattcgacggt

SEQ ID NO: 28333 - DNA, 20 bp, Kocuria kristinae
ctggtggtggaaagggttat

SEQ ID NO: 28334 - DNA, 20 bp, Brevibacillus agri
tggcttttcgctatcactgg

SEQ ID NO: 28335 - DNA, 20 bp, Bacteroides fragilis
gcataatgattccgcatggt

SEQ ID NO: 28336 - DNA, 20 bp, Weeksella virosa
tattggacaatgggttagcg

SEQ ID NO: 28337 - DNA, 20 bp, Vibrio cholerae
caagcgtcctcccgaaggta

SEQ ID NO: 28338 - DNA, 20 bp, Bacillus fusiformis
agggagctaatccgataaag

SEQ ID NO: 28339 - DNA, 20 bp, Prevotella melaninogenica
ttccttgagtacgcacaacg

SEQ ID NO: 28340 - DNA, 20 bp, Corynebacterium group F
cggataggacaactttttgg

SEQ ID NO: 28341 - DNA, 20 bp, Acinetobacter haemolyticus
agcttgctacattacctagc

SEQ ID NO: 28342 - DNA, 20 bp, Abiotrophia defectiva
aacagcgcatagagtaactg

SEQ ID NO: 28343 - DNA, 20 bp, Tissierella praeacuta
gcgtaaagcggtaaaagatg

SEQ ID NO: 28344 - DNA, 20 bp, Propionibacterium propionicus
tttggaaagttctggcggtg

SEQ ID NO: 28345 - DNA, 20 bp, Clostridium septicum
ggaggtatcaactccttccg

SEQ ID NO: 28346 - DNA, 20 bp, Bacillus lentus
tagccatctttccttatctc

SEQ ID NO: 28347 - DNA, 20 bp, Clostridium limosum
ggggctcaaccccggtgctg

SEQ ID NO: 28348 - DNA, 20 bp, Rothia mucilaginosa
cgaccaatctccgcatgggg

SEQ ID NO: 28349 - DNA, 20 bp, Alcaligenes faecalis
cgaacggcagcgcgagagag

SEQ ID NO: 28350 - DNA, 20 bp, Streptococcus hyovaginalis
tcccagtgaccatcctagag

SEQ ID NO: 28351 - DNA, 20 bp, Corynebacterium glucuronolyticum
tcagggacgaagtttttttg

SEQ ID NO: 28352 - DNA, 20 bp, Microbacterium hominis
ggactctttggacactggtg

SEQ ID NO: 28353 - DNA, 20 bp, Clostridium clostridiiforme
gaagtgaaaacccagggctc

SEQ ID NO: 28354 - DNA, 20 bp, Veillonella parvula
caggcggatcagtcagtctg

SEQ ID NO: 28355 - DNA, 20 bp, Acinetobacter lwoffii
aggaggaggctaccgagatt

SEQ ID NO: 28356 - DNA, 20 bp, Prevotella corporis
ccctctccgcagttgccatc

SEQ ID NO: 28357 - DNA, 20 bp, Prevotella melaninogenica
tatccaacctacccattact

SEQ ID NO: 28358 - DNA, 20 bp, Prevotella corporis
cgccactgacgctgaggctc

SEQ ID NO: 28359 - DNA, 20 bp, Campylobacter lari
accaaggctttgacgcataa

SEQ ID NO: 28360 - DNA, 20 bp, Chromobacterium violaceum
gatcgaaagacctcgcgtta

SEQ ID NO: 28361 - DNA, 20 bp, Pseudoramibacter alactolyticus
tccttcgggtgaaattagaa

SEQ ID NO: 28362 - DNA, 20 bp, Bacillus simplex
ataccggatacgttcttttc

SEQ ID NO: 28363 - DNA, 20 bp, Neisseria gonorrhoeae
gggaagcttgcttctcgggt

SEQ ID NO: 28364 - DNA, 20 bp, Arcanobacterium bernardiae
gagatggtgcagccttcggg

SEQ ID NO: 28365 - DNA, 20 bp, Streptococcus pyogenes
ctgagaactggtgcttgcac

SEQ ID NO: 28366 - DNA, 20 bp, Neisseria meningitidis
cctgctttctctctcaagac

SEQ ID NO: 28367 - DNA, 20 bp, Leptotrichia buccalis
tgtgcacgaagaaggttttc

SEQ ID NO: 28368 - DNA, 20 bp, Pasteurella trehalosi
tagacaaagcaattgacgtt

SEQ ID NO: 28369 - DNA, 20 bp, Streptococcus dysgalactiae
aaaatccaccatgtgacggt

SEQ ID NO: 28370 - DNA, 20 bp, Kingella denitrificans
acatattggaatgtaccgag

SEQ ID NO: 28371 - DNA, 20 bp, Vibrio cholerae
cgtcaaatgattaaggtatt

SEQ ID NO: 28372 - DNA, 20 bp, Streptococcus thermophilus
accgcataacaatggatgac

SEQ ID NO: 28373 - DNA, 20 bp, Clostridium ramosum
gtgaagcaaaacccataaaa

SEQ ID NO: 28374 - DNA, 20 bp, Lactococcus lactis
gaacgttggtgagagtggaa

SEQ ID NO: 28375 - DNA, 20 bp, Prevotella melaninogenica
actgcttttgtatggggata

SEQ ID NO: 28376 - DNA, 20 bp, Bacteroides distasonis
cacgcagaaccccgattgcg

SEQ ID NO: 28377 - DNA, 20 bp, Bacteroides uniformis
gcaactgaatgatgtggaga

SEQ ID NO: 28378 - DNA, 20 bp, Stenotrophomonas maltophilia
ctggttaatacccggttggg

SEQ ID NO: 28379 - DNA, 20 bp, Peptostreptococcus anaerobius
acccgaagccgattatccaa

SEQ ID NO: 28380 - DNA, 20 bp, Prevotella denticola
attgcagcgcatactggttt

SEQ ID NO: 28381 - DNA, 20 bp, Moraxella bovis
ggagcttggatacaggtgct

SEQ ID NO: 28382 - DNA, 20 bp, Bacteroides uniformis
gacgcttaagtcagttgtga

SEQ ID NO: 28383 - DNA, 20 bp, Morganella morganii
ggcggttgattgagtcagat

SEQ ID NO: 28384 - DNA, 20 bp, Clostridium innocuum
cagtaatacccgaagccggt

SEQ ID NO: 28385 - DNA, 20 bp, Bacteroides forsythus
tcttgagtatagatgaagta

SEQ ID NO: 28386 - DNA, 20 bp, Staphylococcus auricularis
gaacaaatgcgtaagtaact

SEQ ID NO: 28387 - DNA, 20 bp, Proteus vulgaris
gaactgtggcttctggagct

SEQ ID NO: 28388 - DNA, 20 bp, Gemella sanguinis
tagacggggacaactattgg

SEQ ID NO: 28389 - DNA, 20 bp, Corynebacterium coyleae
gataggaccacattttggat

SEQ ID NO: 28390 - DNA, 20 bp, Anaerococcus prevotii
tttcaacggtcaaagattta

SEQ ID NO: 28391 - DNA, 20 bp, Paenibacillus amylolyticus
tcctggggagataatgaaag

SEQ ID NO: 28392 - DNA, 20 bp, Campylobacter sputorum
tagagatagaagtttcccct

SEQ ID NO: 28393 - DNA, 20 bp, Globicatella sanguinis
taaaggatggccccgcggtg

SEQ ID NO: 28394 - DNA, 20 bp, Comamonas terrigena
ttgaaagcaggggatcgcaa

SEQ ID NO: 28395 - DNA, 20 bp, Anaerococcus tetradius
gccgcgtgatttagaaggcc

SEQ ID NO: 28396 - DNA, 20 bp, Brevibacillus choshinensis
gaaaagaaaaggcggcttcg

SEQ ID NO: 28397 - DNA, 20 bp, Staphylococcus condimenti
atgcggaaccgcatggttct

SEQ ID NO: 28398 - DNA, 20 bp, Streptococcus parasanguinis
gcttgcaccgagcggaggag

SEQ ID NO: 28399 - DNA, 20 bp, Moraxella osloensis
ctagcttgctagagatgatt

SEQ ID NO: 28400 - DNA, 20 bp, Granulicatella adiacens
ccggaaacggatgctaaaac

SEQ ID NO: 28401 - DNA, 20 bp, Actinomyces meyeri
tgcgtgcatttggttggggg

SEQ ID NO: 28402 - DNA, 20 bp, Unknown Organism
  oligonucleotide from CDC group EF-4B
catacactttgagaaggaaa

SEQ ID NO: 28403 - DNA, 20 bp, Campylobacter curvus
tgttgctaagctagtcttgg

SEQ ID NO: 28404 - DNA, 20 bp, Porphyromonas endodontalis
cttttgtagaggaataatgg

SEQ ID NO: 28405 - DNA, 20 bp, Oligella urethralis
cgtcagcatcttaaggtatt

SEQ ID NO: 28406 - DNA, 20 bp, Methylobacterium extorquens
ttcgggtgtcagtggcagac

SEQ ID NO: 28407 - DNA, 20 bp, Neisseria subflava
ttctgaactgggtgactcga

SEQ ID NO: 28408 - DNA, 20 bp, Campylobacter concisus
ccggataggacgatggttgg

SEQ ID NO: 28409 - DNA, 20 bp, Tetragenococcus halophilus
aggcctagcgaatctctgaa

SEQ ID NO: 28410 - DNA, 20 bp, Prevotella melaninogenica
tcaaatcttgaaagccggtc

SEQ ID NO: 28411 - DNA, 20 bp, Bacteroides thetaiotaomicron
gctgtcttgagtacagtaga

SEQ ID NO: 28412 - DNA, 20 bp, Moraxella lacunata
atttaagtcgggaactctaa

SEQ ID NO: 28413 - DNA, 20 bp, Bacillus coagulans
gaagctaatctcataaaatc

SEQ ID NO: 28414 - DNA, 20 bp, Streptococcus thoraltensis
aaatgagtcgcgaacgggtg

SEQ ID NO: 28415 - DNA, 20 bp, Chromobacterium violaceum
aactagctgttgggggtttg

SEQ ID NO: 28416 - DNA, 20 bp, Streptococcus constellatus
ccgtattctgtgagttgcga

SEQ ID NO: 28417 - DNA, 20 bp, Pediococcus dextrinicus
aatggctagtacaacgagtt

SEQ ID NO: 28418 - DNA, 20 bp, Clostridium tetani
atactaggtgtaggagggtc

SEQ ID NO: 28419 - DNA, 20 bp, Tissierella praeacuta
ttcgggtacaggggacacag

SEQ ID NO: 28420 - DNA, 20 bp, Virgibacillus pantothenticus
ggcggcatatgctgtcactt

SEQ ID NO: 28421 - DNA, 20 bp, Staphylococcus carnosus
aaccgcatggttctgcaatg

SEQ ID NO: 28422 - DNA, 20 bp, Leuconostoc lactis
aactgatcaggtagtgacgg

SEQ ID NO: 28423 - DNA, 20 bp, Anaerococcus prevotii
tcttcttcggaagcctcaat

SEQ ID NO: 28424 - DNA, 20 bp, Campylobacter lari
cttttgtgaaatctaacagc

SEQ ID NO: 28425 - DNA, 20 bp, Fusobacterium nucleatum
cctgatattatgattttagg

SEQ ID NO: 28426 - DNA, 20 bp, Lactococcus lactis
gatgaagattggtgcttgca

SEQ ID NO: 28427 - DNA, 20 bp, Corynebacterium auris
taagtccatggcttaactgt

SEQ ID NO: 28428 - DNA, 20 bp, Kytococcus sedentarius
attcagggcttaaccctgga

SEQ ID NO: 28429 - DNA, 20 bp, Micrococcus luteus
tgacatgttctcgatcgccg

SEQ ID NO: 28430 - DNA, 20 bp, Porphyromonas levii
agctcaactgagcaactgcc

SEQ ID NO: 28431 - DNA, 20 bp, Pseudoramibacter alactolyticus
aactgtaagacttgagtact

SEQ ID NO: 28432 - DNA, 20 bp, Ochrobactrum intermedium
gaatctacccatcactaggg

SEQ ID NO: 28433 - DNA, 20 bp, Granulicatella elegans
tcggcttctgctgatggatg

SEQ ID NO: 28434 - DNA, 20 bp, Haemophilus segnis
aggtgattgacgttaactac

SEQ ID NO: 28435 - DNA, 20 bp, Actinomyces bovis
cgcaggcggtttatcaagtt

SEQ ID NO: 28436 - DNA, 20 bp, Brevibacillus choshinensis
ccgcatggtctgaaagggaa

SEQ ID NO: 28437 - DNA, 20 bp, Brochothrix campestris
gttcaagtgaaagacggttt

SEQ ID NO: 28438 - DNA, 20 bp, Eggerthella lenta
gcccgcgatgggtagccggg

SEQ ID NO: 28439 - DNA, 20 bp, Streptococcus agalactiae
attaacacatgttagttatt

SEQ ID NO: 28440 - DNA, 20 bp, Weeksella virosa
tcttcggacagaatgcaagg

SEQ ID NO: 28441 - DNA, 20 bp, Pseudomonas luteola
gctgggaggaagggttgtaa

SEQ ID NO: 28442 - DNA, 20 bp, Facklamia ignava
cgtaaagcactgttatcaga

SEQ ID NO: 28443 - DNA, 20 bp, Photobacterium damselae
gcagcgacttaactgaacct

SEQ ID NO: 28444 - DNA, 20 bp, Bacteroides fragilis
agttgatactgtcagtcttg

SEQ ID NO: 28445 - DNA, 20 bp, Haemophilus actinemycetemcomitans
ggacggtagcaggtaagtac

SEQ ID NO: 28446 - DNA, 20 bp, Propionibacterium freudenreichii
cccctttcggggggtacacg

SEQ ID NO: 28447 - DNA, 20 bp, Leptotrichia buccalis
agatagttcactggacggta

SEQ ID NO: 28448 - DNA, 20 bp, Paenibacillus thiaminolyticus
agtaactgttccataggtga

SEQ ID NO: 28449 - DNA, 20 bp, Dermabacter hominis
tttatgcggggagtcgtcga

SEQ ID NO: 28450 - DNA, 20 bp, Plesiomonas shigelloides
cggaccaaagtgggggctct

SEQ ID NO: 28451 - DNA, 20 bp, Methylobacterium mesophilicum
gttatggggagagattccca

SEQ ID NO: 28452 - DNA, 20 bp, Pediococcus pentosaceus
agattttaacacgaagtgag

SEQ ID NO: 28453 - DNA, 20 bp, Bacteroides merdae
ggtgagactgccagcgtaag

SEQ ID NO: 28454 - DNA, 20 bp, Porphyromonas endodontalis
ggaaagatttattgattaca

SEQ ID NO: 28455 - DNA, 20 bp, Suttonella indologenes
acataacacttacgagtcaa

SEQ ID NO: 28456 - DNA, 20 bp, Fusobacterium mortiferum
aaattcatatgaaagctata

SEQ ID NO: 28457 - DNA, 20 bp, Leuconostoc lactis
taaacatttgagtgagtggc

SEQ ID NO: 28458 - DNA, 20 bp, Fusobacterium nucleatum
acttgaacttcggtttgggt

SEQ ID NO: 28459 - DNA, 20 bp, Bacteroides uniformis
catgtcagccgcaaggcagt

SEQ ID NO: 28460 - DNA, 20 bp, Comamonas terrigena
ccttgtgctactagagcggc

SEQ ID NO: 28461 - DNA, 20 bp, Campylobacter concisus
acatacaccggaccgggcca

SEQ ID NO: 28462 - DNA, 20 bp, Vibrio cholerae
ctctaccgggcaatttccca

SEQ ID NO: 28463 - DNA, 20 bp, Lactococcus lactis
ccgcataaaaactttaaaca

SEQ ID NO: 28464 - DNA, 20 bp, Pasteurella aerogenes
tgcatacagagagcgacgag

SEQ ID NO: 28465 - DNA, 20 bp, Brevibacillus agri
gggacgaacacgtaccgttc

SEQ ID NO: 28466 - DNA, 20 bp, Clostridium ramosum
ggacactgcatggtgaccgt

SEQ ID NO: 28467 - DNA, 20 bp, Paenibacillus amylolyticus
caaccttggttcgcactgga

SEQ ID NO: 28468 - DNA, 20 bp, Eremococcus coleocola
caatggacgatacaacgagc

SEQ ID NO: 28469 - DNA, 20 bp, Bacteroides forsythus
agtcgaggggcagcgatggt

SEQ ID NO: 28470 - DNA, 20 bp, Alicyclobacillus acidocaldarius
agccgggggcttcctcactc

SEQ ID NO: 28471 - DNA, 20 bp, Bacillus pumilus
tggttcaaggatgaaagacg

SEQ ID NO: 28472 - DNA, 20 bp, Streptococcus infantarius
actttagcttgctaaagttt

SEQ ID NO: 28473 - DNA, 20 bp, Staphylococcus capitis
gctgtttagtgtcagttgtg

SEQ ID NO: 28474 - DNA, 20 bp, Bacteroides distasonis
cggcacagcgaaagcgttaa

SEQ ID NO: 28475 - DNA, 20 bp, Anaerococcus prevotii
atattaaaaagaataccggt

SEQ ID NO: 28476 - DNA, 20 bp, Wolinella succinogenes
tccaaactggttatctagag

SEQ ID NO: 28477 - DNA, 20 bp, Bacillus coagulans
cggcgccttgacggtacccg

SEQ ID NO: 28478 - DNA, 20 bp, Bacteroides vulgatus
cgaggagcgccctagggtaa

SEQ ID NO: 28479 - DNA, 20 bp, Bacteroides ureolyticus
atactcctatttaacataag

SEQ ID NO: 28480 - DNA, 20 bp, Pseudoramibacter alactolyticus
gggtgaaattagaactggaa

SEQ ID NO: 28481 - DNA, 20 bp, Gemella morbillorum
gctcgcgagagtcagccaac

SEQ ID NO: 28482 - DNA, 20 bp, Streptococcus parasanguinis
aaaagtcgacattgcatgat

SEQ ID NO: 28483 - DNA, 20 bp, Aerococcus viridans
ttgaaagacggctctgctgt

SEQ ID NO: 28484 - DNA, 20 bp, Paenibacillus lautus
cttagttgccagcaggtaag

SEQ ID NO: 28485 - DNA, 20 bp, Leuconostoc fallax
gtggaatggctttggaaact

SEQ ID NO: 28486 - DNA, 20 bp, Escherichia vulneris
ttcctcgggtgacgagtggc

SEQ ID NO: 28487 - DNA, 20 bp, Clostridium ramosum
tgcaagtcgaacgcgagcac

SEQ ID NO: 28488 - DNA, 20 bp, Streptococcus acidominimus
ggtttgataagtcagaagta

SEQ ID NO: 28489 - DNA, 20 bp, Bacillus halodurans
tcgagcggaccaaagggagc

SEQ ID NO: 28490 - DNA, 20 bp, Paenibacillus lautus
cttctctcgcatgggagagg

SEQ ID NO: 28491 - DNA, 20 bp, Corynebacterium coyleae
catacaccagatcgccgtag

SEQ ID NO: 28492 - DNA, 20 bp, Streptococcus thoraltensis
gtacaacgagttgcgagctg

SEQ ID NO: 28493 - DNA, 20 bp, Gemella haemolysans
cgagcgaagtttttctggtg

SEQ ID NO: 28494 - DNA, 20 bp, Aerococcus viridans
cataatatcttcttccgcat

SEQ ID NO: 28495 - DNA, 20 bp, Brevibacillus brevis
cttttcctctcatgaggaaa

SEQ ID NO: 28496 - DNA, 20 bp, Photobacterium damselae
gcattatttgacgttaccta

SEQ ID NO: 28497 - DNA, 20 bp, Bacteroides uniformis
atacccgatggcatagttct

SEQ ID NO: 28498 - DNA, 20 bp, Bacteroides eggerthii
tgctaatcccgaaaacctct

SEQ ID NO: 28499 - DNA, 20 bp, Tissierella praeacuta
cgataagatgctaatctctt

SEQ ID NO: 28500 - DNA, 20 bp, Veillonella atypica
acccgagaaacactctctca

SEQ ID NO: 28501 - DNA, 20 bp, Budvicia aquatica
aagaccaaagcgggggacct

SEQ ID NO: 28502 - DNA, 20 bp, Aeromonas schubertii
aaactgtccgactagagtct

SEQ ID NO: 28503 - DNA, 20 bp, Clostridium tetani
gcgaaggcggtttcctggac

SEQ ID NO: 28504 - DNA, 20 bp, Cardiobacterium hominis
ttgggtgggaactgtaagga

SEQ ID NO: 28505 - DNA, 20 bp, Oligella urethralis
gatggctcgatcagggttcc

SEQ ID NO: 28506 - DNA, 20 bp, Anaerococcus tetradius
gactttctggccataaactg

SEQ ID NO: 28507 - DNA, 20 bp, Pseudoramibacter alactolyticus
agcagtcgaaggtggggcta

SEQ ID NO: 28508 - DNA, 20 bp, Actinomyces meyeri
gcggagacgtgcgtgcattt

SEQ ID NO: 28509 - DNA, 20 bp, Photobacterium damselae
cttgaagagattcgagtgtg

SEQ ID NO: 28510 - DNA, 20 bp, Leptotrichia buccalis
atgatgaagatagttcactg

SEQ ID NO: 28511 - DNA, 20 bp, Actinomyces viscosus
gtttgttccggtgggggatg

SEQ ID NO: 28512 - DNA, 20 bp, Tissierella praeacuta
tttttaaagaagatttcttc

SEQ ID NO: 28513 - DNA, 20 bp, Alicyclobacillus acidocaldarius
tctcgcatggggctttccat

SEQ ID NO: 28514 - DNA, 20 bp, Bacteroides capilosus
gtttcttagtggcggacggg

SEQ ID NO: 28515 - DNA, 20 bp, Arcanobacterium haemolyticum
tgaacaaggcgaaagttgag

SEQ ID NO: 28516 - DNA, 20 bp, Granulicatella adiacens
tgaggtaaccatttggagcc

SEQ ID NO: 28517 - DNA, 20 bp, Prevotella disiens
agagtgcttgcacactttgg

SEQ ID NO: 28518 - DNA, 20 bp, Clostridium cadaveris
tttcgatacctctgtgccgc

SEQ ID NO: 28519 - DNA, 20 bp, Paenibacillus lautus
gaacgtcttctagagtaact

SEQ ID NO: 28520 - DNA, 20 bp, Leptotrichia buccalis
cgagagttgtttgcacctga

SEQ ID NO: 28521 - DNA, 20 bp, Micrococcus luteus
acatgttctcgatcgccgta

SEQ ID NO: 28522 - DNA, 20 bp, Proteus vulgaris
aacacatgcaagcgagcggt

SEQ ID NO: 28523 - DNA, 20 bp, Aerococcus christensenii
acgggcagcgagctcgcgag

SEQ ID NO: 28524 - DNA, 20 bp, Oligella ureolytica
ttaagatgctgacggtagtt

SEQ ID NO: 28525 - DNA, 20 bp, Aerococcus urinae
tgctaataccgcataggaaa

SEQ ID NO: 28526 - DNA, 20 bp, Proteus vulgaris
catctgaaactggttggcta

SEQ ID NO: 28527 - DNA, 20 bp, Fusobacterium varium
agtacagagagctgcaaacc

SEQ ID NO: 28528 - DNA, 20 bp, Propionibacterium acnes
aaccgttgtgggggagccgt

SEQ ID NO: 28529 - DNA, 20 bp, Anaerococcus prevotii
cattctgacgctgaggaacg

SEQ ID NO: 28530 - DNA, 20 bp, Prevotella melaninogenica
ttgagtacgcacaacgttgg

SEQ ID NO: 28531 - DNA, 20 bp, Weeksella virosa
gcatcatttagttttgaaag

SEQ ID NO: 28532 - DNA, 20 bp, Prevotella intermedia
ccccgttgaaagacggccta

SEQ ID NO: 28533 - DNA, 20 bp, Campylobacter rectus
acggagattaagtagcttgc

SEQ ID NO: 28534 - DNA, 20 bp, Comamonas testosteroni
gaaaagcctggggctaatat

SEQ ID NO: 28535 - DNA, 20 bp, Bacillus cereus
agcttgctctcaagaagtta

SEQ ID NO: 28536 - DNA, 20 bp, Leptotrichia buccalis
ggtgtgggcatgaagagtgt

SEQ ID NO: 28537 - DNA, 20 bp, Moraxella lacunata
ataccgcatacgtcttacga

SEQ ID NO: 28538 - DNA, 20 bp, Alcaligenes faecalis
ggccgtgctcgcaagagaac

SEQ ID NO: 28539 - DNA, 20 bp, Kingella denitrificans
agtgttaataccactttttg

SEQ ID NO: 28540 - DNA, 20 bp, Campylobacter curvus
gatacgggaaagtttttcgg

SEQ ID NO: 28541 - DNA, 20 bp, Streptococcus constellatus
gtgcaagagcatcactacca

SEQ ID NO: 28542 - DNA, 20 bp, Bacillus alcalophilus
tctgatgtgaaatatcgggg

SEQ ID NO: 28543 - DNA, 20 bp, Dermabacter hominis
cccaagctttatgcggggag

SEQ ID NO: 28544 - DNA, 20 bp, Peptostreptococcus anaerobius
gtgcgtaggtggtctttcaa

SEQ ID NO: 28545 - DNA, 20 bp, Ralstonia paucula
tcggaacgtaccctgttgtg

SEQ ID NO: 28546 - DNA, 20 bp, Bacteroides forsythus
tgtcgcttaacgataaaatt

SEQ ID NO: 28547 - DNA, 20 bp, Chromobacterium violaceum
ctgggaacggcattggagac

SEQ ID NO: 28548 - DNA, 20 bp, Bacillus lentus
gttttctgggattcgctcat

SEQ ID NO: 28549 - DNA, 20 bp, Moraxella  catarrhalis
ggtgagaggggagtagaatt

SEQ ID NO: 28550 - DNA, 20 bp, Bacillus pallidus
cggcttttagctgtcactgc

SEQ ID NO: 28551 - DNA, 20 bp, Tissierella praeacuta
ccgtggtaagcatttgaaac

SEQ ID NO: 28552 - DNA, 20 bp, Oligella ureolytica
agatgctgacggtagttgag

SEQ ID NO: 28553 - DNA, 20 bp, Actinomyces odontolyticus
tagttggtcgtgtgcaggtg

SEQ ID NO: 28554 - DNA, 20 bp, Corynebacterium afermentans
accatgcggtcgcagctcgt

SEQ ID NO: 28555 - DNA, 20 bp, Brochothrix campestris
taacctgcctcacagctggg

SEQ ID NO: 28556 - DNA, 20 bp, Clostridium tetani
atctagagtacaggagaggg

SEQ ID NO: 28557 - DNA, 20 bp, Facklamia sourekii
gatggtacagcgagcagcga

SEQ ID NO: 28558 - DNA, 20 bp, Corynebacterium accolens
tgtgagggtctttctacgac

SEQ ID NO: 28559 - DNA, 20 bp, Arcanobacterium bernardiae
gtggtaggggtaattggaat

SEQ ID NO: 28560 - DNA, 20 bp, Rahnella aquatilis
atcacacttaatacgtgtgg

SEQ ID NO: 28561 - DNA, 20 bp, Pseudomonas luteola
ccaaaactgcctggctagag

SEQ ID NO: 28562 - DNA, 20 bp, Facklamia sourekii
ggtggcctaaccattggagg

SEQ ID NO: 28563 - DNA, 20 bp, Bacteroides thetaiotaomicron
caaggcaaatgtgaaggtgc

SEQ ID NO: 28564 - DNA, 20 bp, Bacteroides ovatus
tattggaaacagtatagccg

SEQ ID NO: 28565 - DNA, 20 bp, Streptococcus bovis
tactttagcttgctagagta

SEQ ID NO: 28566 - DNA, 20 bp, Campylobacter lari
cttatagagatatgagggtg

SEQ ID NO: 28567 - DNA, 20 bp, Globicatella sanguinis
catatcttagagataagaga

SEQ ID NO: 28568 - DNA, 20 bp, Haemophilus paraphrophilus
tagcgcaacaaattgacgtt

SEQ ID NO: 28569 - DNA, 20 bp, Tetragenococcus halophilus
tttttctatgacggtagctg

SEQ ID NO: 28570 - DNA, 20 bp, Lactococcus lactis
gactggatgagcagcgaacg

SEQ ID NO: 28571 - DNA, 20 bp, Fusobacterium varium
ctcttcggaggaacttggtg

SEQ ID NO: 28572 - DNA, 20 bp, Bacillus pallidus
atctcgcggctcaaccgcga

SEQ ID NO: 28573 - DNA, 20 bp, Leptotrichia buccalis
gctggagaggtggacggaac

SEQ ID NO: 28574 - DNA, 20 bp, Paenibacillus macerans
actgggataacattcggaaa

SEQ ID NO: 28575 - DNA, 20 bp, Streptococcus thermophilus
gttggatcctttccgggatt

SEQ ID NO: 28576 - DNA, 20 bp, Prevotella bivia
ctagtgttagcggctaagcg

SEQ ID NO: 28577 - DNA, 20 bp, Anaerococcus prevotii
aaaagtctttcccagttcgg

SEQ ID NO: 28578 - DNA, 20 bp, Bacillus fusiformis
ctgtttcacctcatggtgaa

SEQ ID NO: 28579 - DNA, 20 bp, Eikenella corrodens
gggaagtgctaataccactt

SEQ ID NO: 28580 - DNA, 20 bp, Clostridium clostridiiforme
actgttttgctagagtgtcg

SEQ ID NO: 28581 - DNA, 20 bp, Lactococcus lactis
ataagttttaagtttgaaag

SEQ ID NO: 28582 - DNA, 20 bp, Leptotrichia buccalis
cggctcaaccgcaagcctgc

SEQ ID NO: 28583 - DNA, 20 bp, Streptococcus equi
gggtgaagtcgtacaaggta

SEQ ID NO: 28584 - DNA, 20 bp, Bacteroides ovatus
tgaaggctctatgggtcgta

SEQ ID NO: 28585 - DNA, 20 bp, Cardiobacterium hominis
tcaactaggcgtcgggttgt

SEQ ID NO: 28586 - DNA, 20 bp, Aerococcus christensenii
aaagtgcttgcactttcaaa

SEQ ID NO: 28587 - DNA, 20 bp, Brevibacillus choshinensis
gcttgctcttcggcggttag

SEQ ID NO: 28588 - DNA, 20 bp, Bacteroides forsythus
ataaaacaggggttccgcat

SEQ ID NO: 28589 - DNA, 20 bp, Bacillus alcalophilus
gccgttcgaataggtcggca

SEQ ID NO: 28590 - DNA, 20 bp, Bacteroides forsythus
accaagccatcgatggttag

SEQ ID NO: 28591 - DNA, 20 bp, Corynebacterium glucuronolyticum
caggcgatacgggcattgct

SEQ ID NO: 28592 - DNA, 20 bp, Corynebacterium amycolatum
gggtttctgacggtagatgg

SEQ ID NO: 28593 - DNA, 20 bp, Kytococcus sedentarius
cctggacgtgcagtgggtac

SEQ ID NO: 28594 - DNA, 20 bp, Corynebacterium propinquum
gtacaatgcgcagcgagcct

SEQ ID NO: 28595 - DNA, 20 bp, Peptoniphilus indolicus
cggaacaaagagcgggcaag

SEQ ID NO: 28596 - DNA, 20 bp, Facklamia ignava
catagttgttccagtcgcat

SEQ ID NO: 28597 - DNA, 20 bp, Virgibacillus pantothenticus
tgaaaggcggcatatgctgt

SEQ ID NO: 28598 - DNA, 20 bp, Chromobacterium violaceum
cggaatgtaccgtgtaatgg

SEQ ID NO: 28599 - DNA, 20 bp, Gemella bergeri
ttgtaacacctgaagacggt

SEQ ID NO: 28600 - DNA, 20 bp, Moraxella  catarrhalis
gtcgaacgaagttaggaagc

SEQ ID NO: 28601 - DNA, 20 bp, Bacillus mycoides
actgcatagttcgaaattga

SEQ ID NO: 28602 - DNA, 20 bp, Paenibacillus peoriae
ttgtttagaagcttgcttct

SEQ ID NO: 28603 - DNA, 20 bp, Paenibacillus thiaminolyticus
gctatggagagtaactgttc

SEQ ID NO: 28604 - DNA, 20 bp, Alicyclobacillus acidocaldarius
catggggctttccatccccc

SEQ ID NO: 28605 - DNA, 20 bp, Alicyclobacillus acidocaldarius
caagcagtttccaaagccat

SEQ ID NO: 28606 - DNA, 20 bp, Neisseria polysaccharea
gggtaggataaccgcaaggg

SEQ ID NO: 28607 - DNA, 20 bp, Abiotrophia defectiva
atagagtaactgttatgcgt

SEQ ID NO: 28608 - DNA, 20 bp, Streptococcus equi
ggagcaacagctccactatg

SEQ ID NO: 28609 - DNA, 20 bp, Alcaligenes faecalis
gaagaaaaggtacctcctaa

SEQ ID NO: 28610 - DNA, 20 bp, Streptococcus parasanguinis
cttgaaaggtgcaaatgcat

SEQ ID NO: 28611 - DNA, 20 bp, Paenibacillus thiaminolyticus
ctcacggaaacgtgggctaa

SEQ ID NO: 28612 - DNA, 20 bp, Gemella morbillorum
taaaagttggttatgctaac

SEQ ID NO: 28613 - DNA, 20 bp, Dolosigranulum pigrum
gagcgggggacaacattcgg

SEQ ID NO: 28614 - DNA, 20 bp, Pediococcus pentosaceus
taccgtataacagagaaaac

SEQ ID NO: 28615 - DNA, 20 bp, Atopobium parvulum
ggcggccttctgggccataa

SEQ ID NO: 28616 - DNA, 20 bp, Leptotrichia buccalis
gacagggataacagacggaa

SEQ ID NO: 28617 - DNA, 20 bp, Eggerthella lenta
agttcggtagaggcaggcgg

SEQ ID NO: 28618 - DNA, 20 bp, Prevotella melaninogenica
aaggcagactaataccgcat

SEQ ID NO: 28619 - DNA, 20 bp, Streptococcus agalactiae
taagagtaattaacacatgt

SEQ ID NO: 28620 - DNA, 20 bp, Bacillus alcalophilus
aaagggagcttgctcccaga

SEQ ID NO: 28621 - DNA, 20 bp, Clostridium clostridiiforme
cgcatggtctggtgcgaaaa

SEQ ID NO: 28622 - DNA, 20 bp, Propionibacterium granulosum
tcggtaacactcgaagccgg

SEQ ID NO: 28623 - DNA, 20 bp, Leptotrichia buccalis
ggtgtggatagtgattgggg

SEQ ID NO: 28624 - DNA, 20 bp, Gemella morbillorum
aaggagggagccggtcacgg

SEQ ID NO: 28625 - DNA, 20 bp, Bacillus cereus
tggattgagagcttgctctc

SEQ ID NO: 28626 - DNA, 20 bp, Tissierella praeacuta
tacttagcgataagatgcta

SEQ ID NO: 28627 - DNA, 20 bp, Prevotella intermedia
tagcctttcactttctggct

SEQ ID NO: 28628 - DNA, 20 bp, Abiotrophia defectiva
agaacagcgcatagagtaac

SEQ ID NO: 28629 - DNA, 20 bp, Leptotrichia buccalis
agacggaaacgactgataat

SEQ ID NO: 28630 - DNA, 20 bp, Streptococcus parasanguinis
caccgagcggaggagttgcg

SEQ ID NO: 28631 - DNA, 20 bp, Fusobacterium nucleatum
agagatatttcagtgtccct

SEQ ID NO: 28632 - DNA, 20 bp, Bacteroides uniformis
tggtagaactattaaagaat

SEQ ID NO: 28633 - DNA, 20 bp, Anaerococcus prevotii
tcgagcgatgaaatcttgac

SEQ ID NO: 28634 - DNA, 20 bp, Actinomyces neuii
ctaacctttttggggggagt

SEQ ID NO: 28635 - DNA, 20 bp, Aerococcus viridans
taccgcataatatcttcttc

SEQ ID NO: 28636 - DNA, 20 bp, Clostridium subterminale
ggttgtaaagttctgtcata

SEQ ID NO: 28637 - DNA, 20 bp, Mannheimia haemolytica
ggactaaagggtgggaccat

SEQ ID NO: 28638 - DNA, 20 bp, Lactococcus lactis
gagagtggaaagctcatcaa

SEQ ID NO: 28639 - DNA, 20 bp, Staphylococcus sp.
acttacacgtatgttcttcc

SEQ ID NO: 28640 - DNA, 20 bp, Eggerthella lenta
aagagcgcgtaggcggcctc

SEQ ID NO: 28641 - DNA, 20 bp, Facklamia ignava
gaaatcctacgggacaagaa

SEQ ID NO: 28642 - DNA, 20 bp, Facklamia ignava
ggctttgatgcatagccgac

SEQ ID NO: 28643 - DNA, 20 bp, Bacteroides uniformis
acgtgatgctaatccctaaa

SEQ ID NO: 28644 - DNA, 20 bp, Pediococcus pentosaceus
ttccgttaattgattatgac

SEQ ID NO: 28645 - DNA, 20 bp, Clostridium ramosum
aacttctgttataaaggaag

SEQ ID NO: 28646 - DNA, 20 bp, Actinomyces meyeri
cactggtcttcgcatggggg

SEQ ID NO: 28647 - DNA, 20 bp, Shewanella algae
tttgcccatttgtgggggat

SEQ ID NO: 28648 - DNA, 20 bp, Actinomyces naeslundii
cgccagtgaagcaggcctgc

SEQ ID NO: 28649 - DNA, 20 bp, Streptococcus canis
aagaacttaaaaggggcaac

SEQ ID NO: 28650 - DNA, 20 bp, Pseudoramibacter alactolyticus
tattatggttttgtcgcatg

SEQ ID NO: 28651 - DNA, 20 bp, Methylobacterium mesophilicum
atcctttgacatggcgtgtt

SEQ ID NO: 28652 - DNA, 20 bp, Actinomyces neuii
tctgatgcagcgacgtcgtg

SEQ ID NO: 28653 - DNA, 20 bp, Facklamia ignava
gccgagaagggaacttgttc

SEQ ID NO: 28654 - DNA, 20 bp, Clostridium ramosum
gacactgcatggtgaccgta

SEQ ID NO: 28655 - DNA, 20 bp, Helcococcus ovis
ctttctggaatctaactgac

SEQ ID NO: 28656 - DNA, 20 bp, Corynebacterium xerosis
tgtttagtgtcagttgtgga

SEQ ID NO: 28657 - DNA, 20 bp, Bacteroides ureolyticus
gctaatacctcatactccta

SEQ ID NO: 28658 - DNA, 20 bp, Vibrio hollisae
cttcgggcctcacgctattc

SEQ ID NO: 28659 - DNA, 20 bp, Lactococcus lactis
ctggatgagcagcgaacggg

SEQ ID NO: 28660 - DNA, 20 bp, Corynebacterium xerosis
cccagcttgctggggtacac

SEQ ID NO: 28661 - DNA, 20 bp, Streptococcus parauberis
agttaaaggccgtggctcaa

SEQ ID NO: 28662 - DNA, 20 bp, Bacteroides merdae
tcatcgctgatagataggca

SEQ ID NO: 28663 - DNA, 20 bp, Acinetobacter johnsonii
ggattaatactctaggatag

SEQ ID NO: 28664 - DNA, 20 bp, Actinomyces naeslundii
cgccagtgaagcaggcctgt

SEQ ID NO: 28665 - DNA, 20 bp, Streptococcus constellatus
cgcacaggatgcaccgtagt

SEQ ID NO: 28666 - DNA, 20 bp, Bacteroides ovatus
ggatgaaggctctatgggtc

SEQ ID NO: 28667 - DNA, 20 bp, Peptoniphilus indolicus
taccagggcttgacataata

SEQ ID NO: 28668 - DNA, 20 bp, Prevotella intermedia
aagccatgcgactctcatat

SEQ ID NO: 28669 - DNA, 20 bp, Acinetobacter junii
atgaggtgcttgcaccttat

SEQ ID NO: 28670 - DNA, 20 bp, Moraxella osloensis
agcttgctagagatgattag

SEQ ID NO: 28671 - DNA, 20 bp, Paenibacillus apiarius
ctcaaccttgggtcgcatcc

SEQ ID NO: 28672 - DNA, 20 bp, Alcaligenes faecalis
cgaggtactgctgacggtat

SEQ ID NO: 28673 - DNA, 20 bp, Propionibacterium acnes
gatgggtgtgcctcttttgg

SEQ ID NO: 28674 - DNA, 20 bp, Porphyromonas endodontalis
cgcgtcgatagttactaaca

SEQ ID NO: 28675 - DNA, 20 bp, Gemella bergeri
aagatggctttgcggagcat

SEQ ID NO: 28676 - DNA, 20 bp, Streptococcus constellatus
actaccccgtattctgtgag

SEQ ID NO: 28677 - DNA, 20 bp, Enterococcus casseliflavus
gaagaaagttgaaaggcgct

SEQ ID NO: 28678 - DNA, 20 bp, Oligella urethralis
gtgcttattcctcaactacc

SEQ ID NO: 28679 - DNA, 20 bp, Helcococcus ovis
actttctggaatctaactga

SEQ ID NO: 28680 - DNA, 20 bp, Corynebacterium glucuronolyticum
cgaagtttttttgacggtac

SEQ ID NO: 28681 - DNA, 20 bp, Campylobacter curvus
taccaaaccggttatggtcc

SEQ ID NO: 28682 - DNA, 20 bp, Campylobacter rectus
gcttgctatttaatcttagt

SEQ ID NO: 28683 - DNA, 20 bp, Corynebacterium glucuronolyticum
atctgccctgcactggggga

SEQ ID NO: 28684 - DNA, 20 bp, Helcococcus kunzii
ttaaagaatttcggtgaaag

SEQ ID NO: 28685 - DNA, 20 bp, Aerococcus viridans
tcttcttccgcatggaagaa

SEQ ID NO: 28686 - DNA, 20 bp, Brevundimonas vesicularis
gaaggcgacacactggctca

SEQ ID NO: 28687 - DNA, 20 bp, Pseudoramibacter alactolyticus
accgcaaggactcagcagtc

SEQ ID NO: 28688 - DNA, 20 bp, Capnocytophaga gingivalis
tggtgaaagatgggcatgcg

SEQ ID NO: 28689 - DNA, 20 bp, Streptococcus gordonii
gtttataccgtagcttgcta

SEQ ID NO: 28690 - DNA, 20 bp, Bacteroides stercoris
gctaatcccaaaaacctctc

SEQ ID NO: 28691 - DNA, 20 bp, Streptococcus bovis
tgcaagtagaacgctgacta

SEQ ID NO: 28692 - DNA, 20 bp, Moraxella osloensis
cgagtgtaggtggctcatta

SEQ ID NO: 28693 - DNA, 20 bp, Oligella ureolytica
ttaggctaataccttaagat

SEQ ID NO: 28694 - DNA, 20 bp, Aerococcus viridans
atatcttcttccgcatggaa

SEQ ID NO: 28695 - DNA, 20 bp, Vibrio cholerae
agtttcaaatgcgattccta

SEQ ID NO: 28696 - DNA, 20 bp, Veillonella atypica
cttcttcggaagccagaaaa

SEQ ID NO: 28697 - DNA, 20 bp, Fusobacterium nucleatum
catcttagaattatgaaagc

SEQ ID NO: 28698 - DNA, 20 bp, Campylobacter lari
ctatactcctgcttaacaca

SEQ ID NO: 28699 - DNA, 20 bp, Facklamia ignava
aaacctacccttcagcgggg

SEQ ID NO: 28700 - DNA, 20 bp, Oligella urethralis
taagacttttcttcgttgag

SEQ ID NO: 28701 - DNA, 20 bp, Prevotella melaninogenica
tgcagaggaaggatttagag

SEQ ID NO: 28702 - DNA, 20 bp, Pasteurella multocida
ttctctgaggaggaaagggt

SEQ ID NO: 28703 - DNA, 20 bp, Bacillus pallidus
ggcttttagctgtcactgca

SEQ ID NO: 28704 - DNA, 20 bp, Eggerthella lenta
cagggcttgacatggacgtg

SEQ ID NO: 28705 - DNA, 20 bp, Pasteurella multocida
ttggggattgggctatatgc

SEQ ID NO: 28706 - DNA, 20 bp, Clostridium glycolicum
ttcttatcaaagctccggcg

SEQ ID NO: 28707 - DNA, 20 bp, Lactococcus garvieae
gagttccttcgggacacggg

SEQ ID NO: 28708 - DNA, 20 bp, Lactococcus garvieae
gtcttgacatactcgtgcta

SEQ ID NO: 28709 - DNA, 20 bp, Actinomyces bovis
taccgcgcaaaagcacagag

SEQ ID NO: 28710 - DNA, 20 bp, Streptococcus parasanguinis
ttgcatgatgttgacttgaa

SEQ ID NO: 28711 - DNA, 20 bp, Prevotella bivia
tccttcgggacatctgtgaa

SEQ ID NO: 28712 - DNA, 20 bp, Facklamia ignava
atagcctgtagagtaactgt

SEQ ID NO: 28713 - DNA, 20 bp, Campylobacter lari
ggtgctagtcatctcagtaa

SEQ ID NO: 28714 - DNA, 20 bp, Alcaligenes faecalis
ggggccgttaggccttagta

SEQ ID NO: 28715 - DNA, 20 bp, Cardiobacterium hominis
gggttgttaaagactcggtg

SEQ ID NO: 28716 - DNA, 20 bp, Bacteroides uniformis
cagccgcaaggcagttgtga

SEQ ID NO: 28717 - DNA, 20 bp, Burkholderia gladioli
atatccttcggggatgacgg

SEQ ID NO: 28718 - DNA, 20 bp, Gemella morbillorum
atgagttgcgcacgggtgag

SEQ ID NO: 28719 - DNA, 20 bp, Pseudoramibacter alactolyticus
tgtcgcatggcaagatcatg

SEQ ID NO: 28720 - DNA, 20 bp, Brevundimonas diminuta
accgccacggagacgtggct

SEQ ID NO: 28721 - DNA, 20 bp, Anaerococcus prevotii
ggcggaaatgcaagtcaggt

SEQ ID NO: 28722 - DNA, 20 bp, Bacteroides eggerthii
aattgcagttgatactgggc

SEQ ID NO: 28723 - DNA, 20 bp, Gemella haemolysans
aagagattgtgttgttctga

SEQ ID NO: 28724 - DNA, 20 bp, Haemophilus actinemycetemcomitans
ggaaggttggtgtgttaata

SEQ ID NO: 28725 - DNA, 20 bp, Gemella haemolysans
gaacaaagagaagcgagctc

SEQ ID NO: 28726 - DNA, 20 bp, Capnocytophaga ochracea
atggggactgacagaggtag

SEQ ID NO: 28727 - DNA, 20 bp, Gemella morbillorum
gttatgctaacactatgaga

SEQ ID NO: 28728 - DNA, 20 bp, Helcococcus kunzii
aaggcttgacatatacaggg

SEQ ID NO: 28729 - DNA, 20 bp, Bacteroides forsythus
cataaaacaggggttccgca

SEQ ID NO: 28730 - DNA, 20 bp, Oligella urethralis
cagcatcttaaggtattagc

SEQ ID NO: 28731 - DNA, 20 bp, Prevotella denticola
gcaaattgcatccaatcttg

SEQ ID NO: 28732 - DNA, 20 bp, Moraxella  catarrhalis
ctgatacttagtggcggacg

SEQ ID NO: 28733 - DNA, 20 bp, Helcococcus ovis
cgaagccgtcgagctaaccg

SEQ ID NO: 28734 - DNA, 20 bp, Peptostreptococcus anaerobius
aaggtggcgtcgataactgg

SEQ ID NO: 28735 - DNA, 20 bp, Oligella urethralis
atcttaaggtattagcctaa

SEQ ID NO: 28736 - DNA, 20 bp, Brochothrix campestris
gatgctaataccgaatgtgc

SEQ ID NO: 28737 - DNA, 20 bp, Eggerthella lenta
ccagacggcaagggatgggg

SEQ ID NO: 28738 - DNA, 20 bp, Anaerococcus prevotii
ctctagcaatactgccggtg

SEQ ID NO: 28739 - DNA, 20 bp, Enterococcus cecorum
gtggaaagttcatcccttga

SEQ ID NO: 28740 - DNA, 20 bp, Alcaligenes faecalis
cctcctaatacgaggtactg

SEQ ID NO: 28741 - DNA, 20 bp, Oligella ureolytica
ttttctcaacgaagaaaagt

SEQ ID NO: 28742 - DNA, 20 bp, Staphylococcus condimenti
taatatgcggaaccgcatgg

SEQ ID NO: 28743 - DNA, 20 bp, Helcococcus kunzii
gagagcaagcgaatcgcata

SEQ ID NO: 28744 - DNA, 20 bp, Pediococcus inopinatus
gtcggacgcactttcgttga

SEQ ID NO: 28745 - DNA, 20 bp, Neisseria lactamica
cggggaagaaaaggtcgggg

SEQ ID NO: 28746 - DNA, 20 bp, Corynebacterium propinquum
caatgcgcagcgagcctgtg

SEQ ID NO: 28747 - DNA, 20 bp, Dolosicoccus paucivorans
gcatagcttagagataagtg

SEQ ID NO: 28748 - DNA, 20 bp, Paenibacillus larvae
accgggataacttgcggaaa

SEQ ID NO: 28749 - DNA, 20 bp, Anaerobiospirillum succiniciproducens
tgggttccgcagctaacgcg

SEQ ID NO: 28750 - DNA, 20 bp, Aneurinibacillus aneurinilyticus
aagagaaagacctttggtca

SEQ ID NO: 28751 - DNA, 20 bp, Actinomyces turicensis
gcagctttgggttgtggtga

SEQ ID NO: 28752 - DNA, 20 bp, Tissierella praeacuta
ttaccttcgggtacagggga

SEQ ID NO: 28753 - DNA, 20 bp, Neisseria meningitidis
tccctctgacacactcgagt

SEQ ID NO: 28754 - DNA, 20 bp, Prevotella melaninogenica
atactggtttccttgagtac

SEQ ID NO: 28755 - DNA, 20 bp, Actinomyces viscosus
tgacatgtgccggatggtcc

SEQ ID NO: 28756 - DNA, 20 bp, Fusobacterium mortiferum
gaggagctgtttagggtaaa

SEQ ID NO: 28757 - DNA, 20 bp, Brevundimonas diminuta
cacggagacgtggctttccc

SEQ ID NO: 28758 - DNA, 20 bp, Staphylococcus carnosus
ctgcaatgaaagacggtttt

SEQ ID NO: 28759 - DNA, 20 bp, Haemophilus ducreyi
gcaaacctgcaaaggggagc

SEQ ID NO: 28760 - DNA, 20 bp, Aerococcus viridans
cacttatagatgaccttgcg

SEQ ID NO: 28761 - DNA, 20 bp, Veillonella parvula
ggatcagtcagtctgtctta

SEQ ID NO: 28762 - DNA, 20 bp, Peptoniphilus indolicus
ttactggtcacaaactgacg

SEQ ID NO: 28763 - DNA, 20 bp, Campylobacter rectus
ctttacataagttaagtcgg

SEQ ID NO: 28764 - DNA, 20 bp, Prevotella melaninogenica
tgcccgctgttggtacctgg

SEQ ID NO: 28765 - DNA, 20 bp, Empedobacter brevis
aaggtaccagaagaataagc

SEQ ID NO: 28766 - DNA, 20 bp, Haemophilus paraphrophilus
ttgtgttaatagcgcaacaa

SEQ ID NO: 28767 - DNA, 20 bp, Facklamia ignava
agaagaatagcctgtagagt

SEQ ID NO: 28768 - DNA, 20 bp, Propionibacterium granulosum
agcagggacgaagctttttg

SEQ ID NO: 28769 - DNA, 20 bp, Campylobacter concisus
ccaagcttgcttgggtactc

SEQ ID NO: 28770 - DNA, 20 bp, Facklamia ignava
ataggtttgacggtaactga

SEQ ID NO: 28771 - DNA, 20 bp, Clostridium butyricum
ttgtagtaccgcatggtaca

SEQ ID NO: 28772 - DNA, 20 bp, Mannheimia haemolytica
gattggggtttaactctggt

SEQ ID NO: 28773 - DNA, 20 bp, Prevotella corporis
gtctgggcggccaagcgaaa

SEQ ID NO: 28774 - DNA, 20 bp, Corynebacterium urealyticum
ggaccaatctttagtgtggt

SEQ ID NO: 28775 - DNA, 20 bp, Paenibacillus peoriae
gttgtttagaagcttgcttc

SEQ ID NO: 28776 - DNA, 20 bp, Corynebacterium glucuronolyticum
actgggggataagcttggga

SEQ ID NO: 28777 - DNA, 20 bp, Anaerococcus prevotii
ttaactactgtaagcatttg

SEQ ID NO: 28778 - DNA, 20 bp, Achromobacter piechaudii
cgtcatgggttaataccccg

SEQ ID NO: 28779 - DNA, 20 bp, Globicatella sanguinis
caatctctaaaagccattct

SEQ ID NO: 28780 - DNA, 20 bp, Bacteroides capilosus
aacagtccgaaaggactgct

SEQ ID NO: 28781 - DNA, 20 bp, Actinomyces bovis
gacataccgcgcaaaagcac

SEQ ID NO: 28782 - DNA, 20 bp, Bacillus lentus
cggaaagataatctatccgg

SEQ ID NO: 28783 - DNA, 20 bp, Prevotella melaninogenica
ttgcactcaatggacgtcga

SEQ ID NO: 28784 - DNA, 20 bp, Anaerococcus tetradius
gaaacgacgaataataccct

SEQ ID NO: 28785 - DNA, 20 bp, Clostridium sordellii
taagcttttggaactgtagg

SEQ ID NO: 28786 - DNA, 20 bp, Bacteroides fragilis
gggcttaaattgcagtggaa

SEQ ID NO: 28787 - DNA, 20 bp, Finegoldia magna
cctgcctatgacagtgggat

SEQ ID NO: 28788 - DNA, 20 bp, Paenibacillus glucanolyticus
catccctctgaatctgctag

SEQ ID NO: 28789 - DNA, 20 bp, Corynebacterium jeikeium
tgcaaggggtactcgagtgg

SEQ ID NO: 28790 - DNA, 20 bp, Dolosigranulum pigrum
tagtctaatgtgaaagccca

SEQ ID NO: 28791 - DNA, 20 bp, Helcococcus kunzii
cgcataaaacagatctcagt

SEQ ID NO: 28792 - DNA, 20 bp, Corynebacterium afermentans
acgtttcctctatatgtcaa

SEQ ID NO: 28793 - DNA, 20 bp, Alcaligenes faecalis
ttggccgtgctcgcaagaga

SEQ ID NO: 28794 - DNA, 20 bp, Geobacillus thermoglucosidasius
tccgcttggttagcggcgga

SEQ ID NO: 28795 - DNA, 20 bp, Clostridium glycolicum
gcctcatacacatggataac

SEQ ID NO: 28796 - DNA, 20 bp, Pseudoramibacter alactolyticus
tagaactggaaagtggcgaa

SEQ ID NO: 28797 - DNA, 20 bp, Moraxella osloensis
cctggcataatattgacact

SEQ ID NO: 28798 - DNA, 20 bp, Collinsella aerofaciens
cgctaggtgtggggggacga

SEQ ID NO: 28799 - DNA, 20 bp, Paenibacillus pabuli
gctgtgaagccgcgaggtgg

SEQ ID NO: 28800 - DNA, 20 bp, Facklamia hominis
cgaccgctagagtaactgtt

SEQ ID NO: 28801 - DNA, 20 bp, Tissierella praeacuta
ttaaagaagatttcttcgga

SEQ ID NO: 28802 - DNA, 20 bp, Bacillus coagulans
gttgccggggaagaacaagt

SEQ ID NO: 28803 - DNA, 20 bp, Alcaligenes faecalis
tgctctcttggcggcgagtg

SEQ ID NO: 28804 - DNA, 20 bp, Bacteroides fragilis
gtggactggtaagtcagttg

SEQ ID NO: 28805 - DNA, 20 bp, Prevotella melaninogenica
gtatcagcggctaagcgaaa

SEQ ID NO: 28806 - DNA, 20 bp, Suttonella indologenes
gcagccttctggggcaatac

SEQ ID NO: 28807 - DNA, 20 bp, Neisseria sicca
tcgggccttgcgctgtttga

SEQ ID NO: 28808 - DNA, 20 bp, Moraxella osloensis
tagatgagcctaaatcagat

SEQ ID NO: 28809 - DNA, 20 bp, Clostridium ramosum
gcttaacttcagtaagccat

SEQ ID NO: 28810 - DNA, 20 bp, Listeria monocytogenes
cgcttttgaaagatggtttc

SEQ ID NO: 28811 - DNA, 20 bp, Enterococcus cecorum
tctagcgagactgccgcaga

SEQ ID NO: 28812 - DNA, 20 bp, Pseudoramibacter alactolyticus
tatattatggttttgtcgca

SEQ ID NO: 28813 - DNA, 20 bp, Delftia acidovorans
gtcttcggacgctgacgagt

SEQ ID NO: 28814 - DNA, 20 bp, Streptococcus suis
taacagtatttaccgcatgg

SEQ ID NO: 28815 - DNA, 20 bp, Clostridium innocuum
gaaggcggtcgcctggtctg

SEQ ID NO: 28816 - DNA, 20 bp, Leptotrichia buccalis
ggcatctaggcggccagaca

SEQ ID NO: 28817 - DNA, 20 bp, Propionibacterium granulosum
gtttgacatggatcgggagc

SEQ ID NO: 28818 - DNA, 20 bp, Porphyromonas levii
atacctttttcttcggacag

SEQ ID NO: 28819 - DNA, 20 bp, Propionibacterium freudenreichii
agaatggaactctcggtgga

SEQ ID NO: 28820 - DNA, 20 bp, Bacteroides uniformis
ccgatgactcggggatagcc

SEQ ID NO: 28821 - DNA, 20 bp, Empedobacter brevis
atactgttagtcttgagtga

SEQ ID NO: 28822 - DNA, 20 bp, Moraxella atlantae
tatagagggggatagctcgg

SEQ ID NO: 28823 - DNA, 20 bp, Brevibacterium epidermidis
ctggaaacagttcttctctt

SEQ ID NO: 28824 - DNA, 20 bp, Prevotella intermedia
cctacagttccaaaagctta

SEQ ID NO: 28825 - DNA, 20 bp, Alloiococcus otitis
gtggaacggcattggaaact

SEQ ID NO: 28826 - DNA, 20 bp, Haemophilus actinemycetemcomitans
gccccttggggatgtactga

SEQ ID NO: 28827 - DNA, 20 bp, Anaerococcus tetradius
agactgtaatacaggtggtg

SEQ ID NO: 28828 - DNA, 20 bp, Enterococcus casseliflavus
accgtataacactattttcc

SEQ ID NO: 28829 - DNA, 20 bp, Prevotella loescheii
gtaccggaagtgcggtggat

SEQ ID NO: 28830 - DNA, 20 bp, Anaerobiospirillum succiniciproducens
ggcggtctcctgggcaaata

SEQ ID NO: 28831 - DNA, 20 bp, Clostridium cadaveris
agccagcggcctaaggtagg

SEQ ID NO: 28832 - DNA, 20 bp, Pediococcus inopinatus
gttttcttttaaaagatggc

SEQ ID NO: 28833 - DNA, 20 bp, Bacillus alcalophilus
ctcccagaggttagcggcgg

SEQ ID NO: 28834 - DNA, 20 bp, Kingella kingae
aaggcgacgatcagtagtgg

SEQ ID NO: 28835 - DNA, 20 bp, Eggerthella lenta
gcgtaggcggcctctcaagc

SEQ ID NO: 28836 - DNA, 20 bp, Peptoniphilus indolicus
aagagcgggcaagctagcga

SEQ ID NO: 28837 - DNA, 20 bp, Cardiobacterium hominis
caggtagcttaacttaggag

SEQ ID NO: 28838 - DNA, 20 bp, Facklamia ignava
actgttataggtttgacggt

SEQ ID NO: 28839 - DNA, 20 bp, Actinomyces neuii
gggtttgcgttgggtacggg

SEQ ID NO: 28840 - DNA, 20 bp, Bacteroides ureolyticus
aaaatagctaccttccacag

SEQ ID NO: 28841 - DNA, 20 bp, Corynebacterium accolens
ccggataggaaccatcttta

SEQ ID NO: 28842 - DNA, 20 bp, Alicyclobacillus acidocaldarius
ctcaacgcgctggtaacaca

SEQ ID NO: 28843 - DNA, 20 bp, Anaerococcus tetradius
gttaggtgtctggaataatc

SEQ ID NO: 28844 - DNA, 20 bp, Finegoldia magna
tgacagtgggatagcctcgg

SEQ ID NO: 28845 - DNA, 20 bp, Bacillus oleronius
agggagaattgaaagatggc

SEQ ID NO: 28846 - DNA, 20 bp, Propionibacterium acnes
cctcttttggggtcggttca

SEQ ID NO: 28847 - DNA, 20 bp, Paenibacillus macerans
aatctgtcacttagagatgg

SEQ ID NO: 28848 - DNA, 20 bp, Corynebacterium coyleae
ggtgtgctaatcgctgaaag

SEQ ID NO: 28849 - DNA, 20 bp, Pasteurella multocida
gttaaatagatagcatcatt

SEQ ID NO: 28850 - DNA, 20 bp, Veillonella atypica
tgggagttaatagacggaag

SEQ ID NO: 28851 - DNA, 20 bp, Actinomyces neuii
gttgatggtagtgggtaaag

SEQ ID NO: 28852 - DNA, 20 bp, Streptococcus sanguinis
attaattgaaaggtgcaatt

SEQ ID NO: 28853 - DNA, 20 bp, Streptococcus constellatus
aacatttactgcatggtaga

SEQ ID NO: 28854 - DNA, 20 bp, Streptococcus porcinus
acatccttctgaccggccta

SEQ ID NO: 28855 - DNA, 20 bp, Streptococcus hyovaginalis
tataagcgaagaacgggagt

SEQ ID NO: 28856 - DNA, 20 bp, Helcococcus ovis
gaaacttgtatacaggtggt

SEQ ID NO: 28857 - DNA, 20 bp, Brevibacillus choshinensis
ggatacttctttcagaccgc

SEQ ID NO: 28858 - DNA, 20 bp, Anaerococcus tetradius
gccgttggaaacgacgaata

SEQ ID NO: 28859 - DNA, 20 bp, Paenibacillus peoriae
taaacaacctagcggcggac

SEQ ID NO: 28860 - DNA, 20 bp, Corynebacterium propinquum
gagctaatcgcttaaagctg

SEQ ID NO: 28861 - DNA, 20 bp, Actinomyces odontolyticus
aggcttgacatgcacggcgg

SEQ ID NO: 28862 - DNA, 20 bp, Lactococcus garvieae
gggcgcttcctaaggtaaga

SEQ ID NO: 28863 - DNA, 20 bp, Weissella paramesenteroides
catggttgttggttgaaaga

SEQ ID NO: 28864 - DNA, 20 bp, Haemophilus influenzae
aatagcacatcaaattgacg

SEQ ID NO: 28865 - DNA, 20 bp, Neisseria meningitidis
tcgaatagcgcaaggcccaa

SEQ ID NO: 28866 - DNA, 20 bp, Paenibacillus lautus
attgtggaataatgaaagac

SEQ ID NO: 28867 - DNA, 20 bp, Veillonella atypica
tcctcttcttcggaagccag

SEQ ID NO: 28868 - DNA, 20 bp, Campylobacter curvus
agaaatttgacggtacccaa

SEQ ID NO: 28869 - DNA, 20 bp, Clostridium clostridiiforme
ggtgttggggggcaaagccc

SEQ ID NO: 28870 - DNA, 20 bp, Granulicatella adiacens
tgctagagtaactgttagcg

SEQ ID NO: 28871 - DNA, 20 bp, Leuconostoc argentinum
tgagtgttgtagaggtaagt

SEQ ID NO: 28872 - DNA, 20 bp, Prevotella melaninogenica
gtgtgattgtttgcaggtac

SEQ ID NO: 28873 - DNA, 20 bp, Streptococcus infantis
gagcttgctcttctggatga

SEQ ID NO: 28874 - DNA, 20 bp, Clostridium ramosum
ccgagtgacggtactttatt

SEQ ID NO: 28875 - DNA, 20 bp, Bacteroides vulgatus
agggccgctaccacgcgagt

SEQ ID NO: 28876 - DNA, 20 bp, Streptococcus infantis
ttgctcttctggatgagttg

SEQ ID NO: 28877 - DNA, 20 bp, Geobacillus thermoglucosidasius
ggagacagggcgttcctccc

SEQ ID NO: 28878 - DNA, 20 bp, Fusobacterium necrophorum
gacaacatctggaaacggat

SEQ ID NO: 28879 - DNA, 20 bp, Streptococcus gordonii
gcttgctacaccatagactg

SEQ ID NO: 28880 - DNA, 20 bp, Corynebacterium glucuronolyticum
gtcagggacgaagttttttt

SEQ ID NO: 28881 - DNA, 20 bp, Campylobacter rectus
tatttaatcttagtggcgca

SEQ ID NO: 28882 - DNA, 20 bp, Bacteroides forsythus
caatctccaaaccctgtctc

SEQ ID NO: 28883 - DNA, 20 bp, Fusobacterium varium
tattgcgttggaaactgcta

SEQ ID NO: 28884 - DNA, 20 bp, Actinomyces meyeri
gcaactgtgggttgtggtga

SEQ ID NO: 28885 - DNA, 20 bp, Prevotella intermedia
ttagcgcctggcgttagcgg

SEQ ID NO: 28886 - DNA, 20 bp, Kingella denitrificans
gtaacatattggaatgtacc

SEQ ID NO: 28887 - DNA, 20 bp, Gemella haemolysans
caagagattgtgttgttctg

SEQ ID NO: 28888 - DNA, 20 bp, Facklamia hominis
agtaactgttagcggagtga

SEQ ID NO: 28889 - DNA, 20 bp, Delftia acidovorans
tgggaattagttttctcagt

SEQ ID NO: 28890 - DNA, 20 bp, Pseudoramibacter alactolyticus
tttgtcgcatggcaagatca

SEQ ID NO: 28891 - DNA, 20 bp, Dolosicoccus paucivorans
ttagagataagtgaaatcct

SEQ ID NO: 28892 - DNA, 20 bp, Moraxella  catarrhalis
tcttttaaagacttagtgac

SEQ ID NO: 28893 - DNA, 20 bp, Corynebacterium amycolatum
ggaccatggtgtggatgctg

SEQ ID NO: 28894 - DNA, 20 bp, Veillonella parvula
aggcggatcagtcagtctgt

SEQ ID NO: 28895 - DNA, 20 bp, Prevotella intermedia
cgaactggcggacttgagtg

SEQ ID NO: 28896 - DNA, 20 bp, Prevotella intermedia
tttcactttctggcttgaaa

SEQ ID NO: 28897 - DNA, 20 bp, Enterobacter cloacae
acagggttaataaccctgtc

SEQ ID NO: 28898 - DNA, 20 bp, Acinetobacter baumannii
tgctactggacctagcggcg

SEQ ID NO: 28899 - DNA, 20 bp, Arcanobacterium bernardiae
gggtttctggatagggatgg

SEQ ID NO: 28900 - DNA, 20 bp, Facklamia sourekii
acccctcagtgctggcgtta

SEQ ID NO: 28901 - DNA, 20 bp, Acinetobacter johnsonii
gcttgctacctgacctagcg

SEQ ID NO: 28902 - DNA, 20 bp, Facklamia ignava
agtcgcatgactggaatggg

SEQ ID NO: 28903 - DNA, 20 bp, Streptococcus parasanguinis
tgcaaatgcatcactaagag

SEQ ID NO: 28904 - DNA, 20 bp, Enterococcus cecorum
gagtggaaagttcatccctt

SEQ ID NO: 28905 - DNA, 20 bp, Capnocytophaga gingivalis
cttgaatatctgtgaagttc

SEQ ID NO: 28906 - DNA, 20 bp, Alicyclobacillus acidocaldarius
cctgaaaggcagattaccca

SEQ ID NO: 28907 - DNA, 20 bp, Oligella urethralis
cacacgcgagatggctcgat

SEQ ID NO: 28908 - DNA, 20 bp, Prevotella oralis
cggtgatgtgcagcgcgaac

SEQ ID NO: 28909 - DNA, 20 bp, Moraxella atlantae
cgtgtgtgaagaaggtcata

SEQ ID NO: 28910 - DNA, 20 bp, Prevotella denticola
tgtaatgcaaattgcatcca

SEQ ID NO: 28911 - DNA, 20 bp, Peptostreptococcus anaerobius
ggataacatactgaaaagtt

SEQ ID NO: 28912 - DNA, 20 bp, Dermabacter hominis
gatggcccaagctttatgcg

SEQ ID NO: 28913 - DNA, 20 bp, Actinomyces bovis
accccgtgatgccatagaaa

SEQ ID NO: 28914 - DNA, 20 bp, Tissierella praeacuta
gtctcgcgtcccattagtta

SEQ ID NO: 28915 - DNA, 20 bp, Prevotella disiens
atcggtataggatggggatg

SEQ ID NO: 28916 - DNA, 20 bp, Corynebacterium auris
gtgtgagcctcttccacggg

SEQ ID NO: 28917 - DNA, 20 bp, Staphylococcus condimenti
ccggataatatgcggaaccg

SEQ ID NO: 28918 - DNA, 20 bp, Bacteroides distasonis
ctaataccgcatgaagcagg

SEQ ID NO: 28919 - DNA, 20 bp, Paenibacillus lautus
ctaggagagtgacggtactt

SEQ ID NO: 28920 - DNA, 20 bp, Fusobacterium necrophorum
cgtctaggcggcaaggaaag

SEQ ID NO: 28921 - DNA, 20 bp, Pseudoramibacter alactolyticus
tgaaattagaactggaaagt

SEQ ID NO: 28922 - DNA, 20 bp, Bacteroides uniformis
acccttatcgatagttacca

SEQ ID NO: 28923 - DNA, 20 bp, Gemella haemolysans
acagcattaactgcatggtt

SEQ ID NO: 28924 - DNA, 20 bp, Weissella paramesenteroides
ataccaacaaccgcatggtt

SEQ ID NO: 28925 - DNA, 20 bp, Streptococcus equinus
ataacagcatttaacacatg

SEQ ID NO: 28926 - DNA, 20 bp, Prevotella intermedia
atgcccgctgttagcgcctg

SEQ ID NO: 28927 - DNA, 20 bp, Morganella morganii
cctcgcaccatcagatgaac

SEQ ID NO: 28928 - DNA, 20 bp, Tissierella praeacuta
acaacgagcagctacttagc

SEQ ID NO: 28929 - DNA, 20 bp, Oligella ureolytica
taataccttaagatgctgac

SEQ ID NO: 28930 - DNA, 20 bp, Chryseobacterium meningosepticum
gcttttatctggggataaac

SEQ ID NO: 28931 - DNA, 20 bp, Bacillus cereus
aacattttgaactgcatggt

SEQ ID NO: 28932 - DNA, 20 bp, Actinomyces bovis
ccgcgcaaaagcacagagat

SEQ ID NO: 28933 - DNA, 20 bp, Streptococcus anginosus
tgtgagaatggaaagttcat

SEQ ID NO: 28934 - DNA, 20 bp, Listeria monocytogenes
acgcttttgaaagatggttt

SEQ ID NO: 28935 - DNA, 20 bp, Staphylococcus pulvereri
taaccttttattaggagcta

SEQ ID NO: 28936 - DNA, 20 bp, Providencia rettgeri
gttgttccctagaggagtgg

SEQ ID NO: 28937 - DNA, 20 bp, Microbacterium hominis
gtagaaatacgggactcttt

SEQ ID NO: 28938 - DNA, 20 bp, Clostridium limosum
gggtttcaatacttcggtgc

SEQ ID NO: 28939 - DNA, 20 bp, Bacteroides uniformis
tacccgatggcatagttctt

SEQ ID NO: 28940 - DNA, 20 bp, Clostridium butyricum
attgtagtaccgcatggtac

SEQ ID NO: 28941 - DNA, 20 bp, Arcanobacterium bernardiae
ggaaagggtttctggatagg

SEQ ID NO: 28942 - DNA, 20 bp, Weissella paramesenteroides
gtataataccaacaaccgca

SEQ ID NO: 28943 - DNA, 20 bp, Weeksella virosa
ttcttcggacagaatgcaag

SEQ ID NO: 28944 - DNA, 20 bp, Actinomyces radingae
aaggcttgacatgcgccctg

SEQ ID NO: 28945 - DNA, 20 bp, Wolinella succinogenes
ccaaactggttatctagagt

SEQ ID NO: 28946 - DNA, 20 bp, Bacillus sp
gccgtgaggccaagcaaatc

SEQ ID NO: 28947 - DNA, 20 bp, Anaerococcus tetradius
gtaagcttttaaaactgctc

SEQ ID NO: 28948 - DNA, 20 bp, Bacteroides uniformis
ggtagaactattaaagaatt

SEQ ID NO: 28949 - DNA, 20 bp, Bacillus lentus
ggttttctgggattcgctca

SEQ ID NO: 28950 - DNA, 20 bp, Alcaligenes faecalis
atacgaggtactgctgacgg

SEQ ID NO: 28951 - DNA, 20 bp, Bacillus licheniformis
agtcgagcggaccgacggga

SEQ ID NO: 28952 - DNA, 20 bp, Myroides odoratus
gaaattcggattaatgctcc

SEQ ID NO: 28953 - DNA, 20 bp, Corynebacterium glucuronolyticum
agattgggctagagatagtt

SEQ ID NO: 28954 - DNA, 20 bp, Dermacoccus nishinomiyaensis
catacaccggaatcatgcag

SEQ ID NO: 28955 - DNA, 20 bp, Streptococcus constellatus
aggtgcaagagcatcactac

SEQ ID NO: 28956 - DNA, 20 bp, Aerococcus christensenii
cgggcagcgagctcgcgaga

SEQ ID NO: 28957 - DNA, 20 bp, Prevotella oris
agggagcgtaggccgtggat

SEQ ID NO: 28958 - DNA, 20 bp, Anaerobiospirillum succiniciproducens
gaggcgaaggcggtctcctg

SEQ ID NO: 28959 - DNA, 20 bp, Prevotella disiens
gtgtaggcggttggttaagc

SEQ ID NO: 28960 - DNA, 20 bp, Arcanobacterium bernardiae
ttggttgagggtatgtgcag

SEQ ID NO: 28961 - DNA, 20 bp, Oligella urethralis
ttaaggtattagcctaagac

SEQ ID NO: 28962 - DNA, 20 bp, Leptotrichia buccalis
gcttaacacatgcaagtctt

SEQ ID NO: 28963 - DNA, 20 bp, Chryseobacterium meningosepticum
aaacctacttacgtgtaagt

SEQ ID NO: 28964 - DNA, 20 bp, Bacillus lentus
tggatgggagcttgctccca

SEQ ID NO: 28965 - DNA, 20 bp, Actinomyces bovis
aaccccgtgatgccatagaa

SEQ ID NO: 28966 - DNA, 20 bp, Bacteroides thetaiotaomicron
gaggggcagcatttcagttt

SEQ ID NO: 28967 - DNA, 20 bp, Streptococcus parauberis
tacgtaggtctcgagcgttg

SEQ ID NO: 28968 - DNA, 20 bp, Leptotrichia buccalis
taaggtgtggatagtgattg

SEQ ID NO: 28969 - DNA, 20 bp, Streptococcus infantarius
atctaacatgggttaaatgc

SEQ ID NO: 28970 - DNA, 20 bp, Anaerobiospirillum succiniciproducens
gcttgaacttcggtttgggt

SEQ ID NO: 28971 - DNA, 20 bp, Moraxella osloensis
gtaggtagcctaacgaaaga

SEQ ID NO: 28972 - DNA, 20 bp, Peptoniphilus indolicus
aacttgagtagtgaagaggt

SEQ ID NO: 28973 - DNA, 20 bp, Chromobacterium violaceum
atcgaaagacctcgcgttat

SEQ ID NO: 28974 - DNA, 20 bp, Prevotella denticola
gggataacctgccgaaaggc

SEQ ID NO: 28975 - DNA, 20 bp, Corynebacterium hoagii
atggcgggggttggaaaggt

SEQ ID NO: 28976 - DNA, 20 bp, Fusobacterium mortiferum
atcctaagaaattagcagag

SEQ ID NO: 28977 - DNA, 20 bp, Bacillus mycoides
atattttgaactgcatagtt

SEQ ID NO: 28978 - DNA, 20 bp, Capnocytophaga ochracea
ccgcgaggagctgtttaggg

SEQ ID NO: 28979 - DNA, 20 bp, Kocuria kristinae
gtgcttgcaccgggtggatg

SEQ ID NO: 28980 - DNA, 20 bp, Corynebacterium urealyticum
gatacagtgggttgcgatgc

SEQ ID NO: 28981 - DNA, 20 bp, Campylobacter rectus
gtcgaggcagtaatgcacct

SEQ ID NO: 28982 - DNA, 20 bp, Chromobacterium violaceum
gagtttcaccagaagtgggt

SEQ ID NO: 28983 - DNA, 20 bp, Porphyromonas endodontalis
acttcttttgtagaggaata

SEQ ID NO: 28984 - DNA, 20 bp, Eggerthella lenta
ccggatcccgaactgggagg

SEQ ID NO: 28985 - DNA, 20 bp, Actinomyces meyeri
gacgtgcgtgcatttggttg

SEQ ID NO: 28986 - DNA, 20 bp, Fusobacterium nucleatum
ctgcctacgatgagtaggag

SEQ ID NO: 28987 - DNA, 20 bp, Veillonella atypica
gatggaagcttgcttctatc

SEQ ID NO: 28988 - DNA, 20 bp, Weeksella virosa
caaggcttaaatgcataatg

SEQ ID NO: 28989 - DNA, 20 bp, Bacteroides fragilis
aaattgcagtggaatgatgt

SEQ ID NO: 28990 - DNA, 20 bp, Paenibacillus macerans
gtttaagtctggtgtataat

SEQ ID NO: 28991 - DNA, 20 bp, Fusobacterium varium
gttttcgtgcctcttcggag

SEQ ID NO: 28992 - DNA, 20 bp, Haemophilus influenzae
gaggccgcatgccataggat

SEQ ID NO: 28993 - DNA, 20 bp, Peptoniphilus indolicus
gcctttgacacggggatagc

SEQ ID NO: 28994 - DNA, 20 bp, Shewanella putrefaciens
aatacgctatatctgtgacg

SEQ ID NO: 28995 - DNA, 20 bp, Haemophilus actinemycetemcomitans
tatacagagggtaaccaacc

SEQ ID NO: 28996 - DNA, 20 bp, Brevibacillus choshinensis
acctcgcgaggggacgccaa

SEQ ID NO: 28997 - DNA, 20 bp, Pasteurella trehalosi
ttaatagacaaagcaattga

SEQ ID NO: 28998 - DNA, 20 bp, Aeromonas hydrophila
ggttgatgcctaatacgtat

SEQ ID NO: 28999 - DNA, 20 bp, Chromobacterium violaceum
ggatcgaaagacctcgcgtt

SEQ ID NO: 29000 - DNA, 20 bp, Haemophilus actinemycetemcomitans
ggcacgtaggcggaccttta

SEQ ID NO: 29001 - DNA, 20 bp, Streptococcus canis
cactagtctaaggagttgcg

SEQ ID NO: 29002 - DNA, 20 bp, Collinsella aerofaciens
cgatccccccgtgccgcagc

SEQ ID NO: 29003 - DNA, 20 bp, Corynebacterium group F
cacaaagccggccttagttc

SEQ ID NO: 29004 - DNA, 20 bp, Propionibacterium freudenreichii
ggacggtaaggcccctttcg

SEQ ID NO: 29005 - DNA, 20 bp, Helcococcus ovis
gaagagattaaagaaggaaa

SEQ ID NO: 29006 - DNA, 20 bp, Streptococcus hyovaginalis
tgttataagcgaagaacggg

SEQ ID NO: 29007 - DNA, 20 bp, Morganella morganii
agggaagcgaccccgcgagg

SEQ ID NO: 29008 - DNA, 20 bp, Bacillus lentus
ggcggaaagataatctatcc

SEQ ID NO: 29009 - DNA, 20 bp, Prevotella intermedia
acgtatgcggaattcatggt

SEQ ID NO: 29010 - DNA, 20 bp, Aerococcus christensenii
ggtgatgatgcatagccgac

SEQ ID NO: 29011 - DNA, 20 bp, Arcanobacterium bernardiae
atgtgccagagatggtgcag

SEQ ID NO: 29012 - DNA, 20 bp, Clostridium barati
acttgacatcctctgcatta

SEQ ID NO: 29013 - DNA, 20 bp, Prevotella intermedia
tctgttaagcgtgttgtgaa

SEQ ID NO: 29014 - DNA, 20 bp, Facklamia sourekii
ccacccctcagtgctggcgt

SEQ ID NO: 29015 - DNA, 20 bp, Actinomyces bovis
gtgttggagaaattcagtgc

SEQ ID NO: 29016 - DNA, 20 bp, Virgibacillus pantothenticus
ctaataccggatgatacata

SEQ ID NO: 29017 - DNA, 20 bp, Moraxella osloensis
tagacgttacctgcagaata

SEQ ID NO: 29018 - DNA, 20 bp, Brevibacterium casei
cttgacatacaccagaccgt

SEQ ID NO: 29019 - DNA, 20 bp, Lactococcus lactis
gaatctgcctttgagcgggg

SEQ ID NO: 29020 - DNA, 20 bp, Helcococcus ovis
tcttcggaaacttgtataca

SEQ ID NO: 29021 - DNA, 20 bp, Moraxella  catarrhalis
cttatggttaatacccataa

SEQ ID NO: 29022 - DNA, 20 bp, Photobacterium damselae
cattatttgacgttacctac

SEQ ID NO: 29023 - DNA, 20 bp, Corynebacterium afermentans
tttccagctactgaccatgc

SEQ ID NO: 29024 - DNA, 20 bp, Vibrio cholerae
cttaaccaccttcctcccta

SEQ ID NO: 29025 - DNA, 20 bp, Corynebacterium coyleae
tgtgctaatcgctgaaagcc

SEQ ID NO: 29026 - DNA, 20 bp, Arcanobacterium pyogenes
aactcctttcagtacagaag

SEQ ID NO: 29027 - DNA, 20 bp, Atopobium parvulum
gattaaagcaccttcgggtg

SEQ ID NO: 29028 - DNA, 20 bp, Comamonas terrigena
cttcgggttaataccctgga

SEQ ID NO: 29029 - DNA, 20 bp, Gemella haemolysans
tcgagcgaagtttttctggt

SEQ ID NO: 29030 - DNA, 20 bp, Prevotella intermedia
gttgtgaaatttaggtgctc

SEQ ID NO: 29031 - DNA, 20 bp, Prevotella oris
tggtccacttgagtgtgcgc

SEQ ID NO: 29032 - DNA, 20 bp, Alcaligenes faecalis
ctcttggcggcgagtggcgg

SEQ ID NO: 29033 - DNA, 20 bp, Providencia stuartii
agactggttagctagagtct

SEQ ID NO: 29034 - DNA, 20 bp, Corynebacterium afermentans
ggttgggccaccgcttcagg

SEQ ID NO: 29035 - DNA, 20 bp, Atopobium parvulum
gcggtctgttaggtcgggag

SEQ ID NO: 29036 - DNA, 20 bp, Morganella morganii
caggcggttgattgagtcag

SEQ ID NO: 29037 - DNA, 20 bp, Corynebacterium glucuronolyticum
ctttcgtcagggacgaagtt

SEQ ID NO: 29038 - DNA, 20 bp, Streptococcus suis
ctagacggatgagttgcgaa

SEQ ID NO: 29039 - DNA, 20 bp, Anaerococcus tetradius
cgggttgtaaaaatcttttt

SEQ ID NO: 29040 - DNA, 20 bp, Prevotella disiens
gttgaggtccttcgggactc

SEQ ID NO: 29041 - DNA, 20 bp, Pseudoramibacter alactolyticus
atggcaagatcatgaaaact

SEQ ID NO: 29042 - DNA, 20 bp, Rothia dentocariosa
ctgttagcatcgaagaagcg

SEQ ID NO: 29043 - DNA, 20 bp, Streptococcus gallolyticus
gtttaacacatgttagagac

SEQ ID NO: 29044 - DNA, 20 bp, Haemophilus actinomycetomicans
tcagaaagtgcgtctaagtt

SEQ ID NO: 29045 - DNA, 20 bp, Haemophilus haemolyticus
cgtagtgtcgagagacgaaa

SEQ ID NO: 29046 - DNA, 20 bp, Bacteroides fragilis
ttttatataagaataaagtg

SEQ ID NO: 29047 - DNA, 20 bp, Aneurinibacillus aneurinilyticus
aaagagaaagacctttggtc

SEQ ID NO: 29048 - DNA, 20 bp, Prevotella bivia
ccgctgttagcacctagtgt

SEQ ID NO: 29049 - DNA, 20 bp, Brevibacillus choshinensis
caatcctcagtgccgcagct

SEQ ID NO: 29050 - DNA, 20 bp, Kingella kingae
atacgctttgagaaggaaag

SEQ ID NO: 29051 - DNA, 20 bp, Moraxella bovis
tagggaggaaaagcttgtgg

SEQ ID NO: 29052 - DNA, 20 bp, Paenibacillus validus
gttcgcactgaaaactggga

SEQ ID NO: 29053 - DNA, 20 bp, Aeromonas sobria
gaaaggttggcagctaatat

SEQ ID NO: 29054 - DNA, 20 bp, Streptococcus macacae
acctgcctcttagaggggga

SEQ ID NO: 29055 - DNA, 20 bp, Corynebacterium amycolatum
gctaatcccgcaaagccggt

SEQ ID NO: 29056 - DNA, 20 bp, Facklamia ignava
agagaagaatagcctgtaga

SEQ ID NO: 29057 - DNA, 20 bp, Fusobacterium mortiferum
acatgcaagtctacttgatc

SEQ ID NO: 29058 - DNA, 20 bp, Neisseria lactamica
gcctgactgcttggtagcga

SEQ ID NO: 29059 - DNA, 20 bp, Veillonella atypica
attgatggacagaactagag

SEQ ID NO: 29060 - DNA, 20 bp, Leuconostoc citreum
gtatgggaagaaatgctaaa

SEQ ID NO: 29061 - DNA, 20 bp, Enterococcus cecorum
gctacaatggagagtacaac

SEQ ID NO: 29062 - DNA, 20 bp, Pediococcus dextrinicus
agctaatctctaaaagctag

SEQ ID NO: 29063 - DNA, 20 bp, Prevotella intermedia
gtcctacagttccaaaagct

SEQ ID NO: 29064 - DNA, 20 bp, Prevotella oris
ggataaagtgagggacgtgt

SEQ ID NO: 29065 - DNA, 20 bp, Streptococcus constellatus
ccgtagtttactaccccgta

SEQ ID NO: 29066 - DNA, 20 bp, Alloiococcus otitis
aacggcattggaaactggcg

SEQ ID NO: 29067 - DNA, 20 bp, Brevundimonas diminuta
gggcgcgtaggcggatcgtt

SEQ ID NO: 29068 - DNA, 20 bp, Acinetobacter radioresistens
ctacctagattaatacttta

SEQ ID NO: 29069 - DNA, 20 bp, Achromobacter xylosoxidans
ccccgcggaactgacggtac

SEQ ID NO: 29070 - DNA, 20 bp, Haemophilus paraphrophilus
aatagcgcaacaaattgacg

SEQ ID NO: 29071 - DNA, 20 bp, Streptococcus equi
cgcgtaggtaacctagctta

SEQ ID NO: 29072 - DNA, 20 bp, Tetragenococcus halophilus
tttttcacctgaaagaaagc

SEQ ID NO: 29073 - DNA, 20 bp, Lactococcus raffinolactis
tctggactgtcactgacact

SEQ ID NO: 29074 - DNA, 20 bp, Streptococcus dysgalactiae
gtggaaaatccaccatgtga

SEQ ID NO: 29075 - DNA, 20 bp, Lactococcus raffinolactis
ttaataagtctgatgtaaaa

SEQ ID NO: 29076 - DNA, 20 bp, Streptococcus bovis
tagagtagaaggagttgcga

SEQ ID NO: 29077 - DNA, 20 bp, Streptococcus thermophilus
taaaagtcgatatcgcatga

SEQ ID NO: 29078 - DNA, 20 bp, Dolosicoccus paucivorans
cttagagataagtgaaatcc

SEQ ID NO: 29079 - DNA, 20 bp, Staphylococcus condimenti
ggaaccgcatggttctgcaa

SEQ ID NO: 29080 - DNA, 20 bp, Corynebacterium glucuronolyticum
gcactgggggataagcttgg

SEQ ID NO: 29081 - DNA, 20 bp, Pediococcus dextrinicus
gctagtacaacgagttgcga

SEQ ID NO: 29082 - DNA, 20 bp, Helcococcus kunzii
tcatgccctatatgtcttgg

SEQ ID NO: 29083 - DNA, 20 bp, Brevibacterium linens
accgttctggaaacagttcc

SEQ ID NO: 29084 - DNA, 20 bp, Bacillus alcalophilus
agtgccgttcgaataggtcg

SEQ ID NO: 29085 - DNA, 20 bp, Clostridium ramosum
tgaagcttaacttcagtaag

SEQ ID NO: 29086 - DNA, 20 bp, Bacillus marinus
tagggaagaacacgtacgag

SEQ ID NO: 29087 - DNA, 20 bp, Helcococcus kunzii
taaagaatttcggtgaaaga

SEQ ID NO: 29088 - DNA, 20 bp, Propionibacterium acnes
atgggtgtgcctcttttggg

SEQ ID NO: 29089 - DNA, 20 bp, Vibrio cholerae
tgctttgctcttgcgaggtt

SEQ ID NO: 29090 - DNA, 20 bp, Neisseria cinerea
cgcaaggggtccgcttacca

SEQ ID NO: 29091 - DNA, 20 bp, Budvicia aquatica
aggttgtgggcatgacccgt

SEQ ID NO: 29092 - DNA, 20 bp, Bacillus schlegellii
aggcggcctgttaagtctgc

SEQ ID NO: 29093 - DNA, 20 bp, Bacteroides thetaiotaomicron
tttgcttgcaaactggagat

SEQ ID NO: 29094 - DNA, 20 bp, Prevotella corporis
ggaagcgggcggaattcgtg

SEQ ID NO: 29095 - DNA, 20 bp, Bacteroides ureolyticus
tgctttgctagtcaaggcag

SEQ ID NO: 29096 - DNA, 20 bp, Anaerococcus tetradius
agatagttccttacttcttc

SEQ ID NO: 29097 - DNA, 20 bp, Streptococcus gordonii
ctacaccatagactgtgagt

SEQ ID NO: 29098 - DNA, 20 bp, Pediococcus inopinatus
aagtaaaccgcatggttttc

SEQ ID NO: 29099 - DNA, 20 bp, Bacteroides thetaiotaomicron
gtgacaggatgctaatccca

SEQ ID NO: 29100 - DNA, 20 bp, Gemella bergeri
aactatacacaaaacagacg

SEQ ID NO: 29101 - DNA, 20 bp, Clostridium cadaveris
ccagcggcctaaggtagggt

SEQ ID NO: 29102 - DNA, 20 bp, Corynebacterium afermentans
agacgtttcctctatatgtc

SEQ ID NO: 29103 - DNA, 20 bp, Weeksella virosa
ttaaatgcataatgacagat

SEQ ID NO: 29104 - DNA, 20 bp, Kytococcus sedentarius
taatactggatacgaccgac

SEQ ID NO: 29105 - DNA, 20 bp, Shewanella algae
ctgatggataagcccaggtg

SEQ ID NO: 29106 - DNA, 20 bp, Enterococcus cecorum
ctttcaccgtagcttgctac

SEQ ID NO: 29107 - DNA, 20 bp, Prevotella bivia
acctacccataactaaggga

SEQ ID NO: 29108 - DNA, 20 bp, Streptococcus bovis
agtagaaggagttgcgaacg

SEQ ID NO: 29109 - DNA, 20 bp, Bacteroides uniformis
aatacccgatggcatagttc

SEQ ID NO: 29110 - DNA, 20 bp, Fusobacterium mortiferum
cggatattatgtgagtttcg

SEQ ID NO: 29111 - DNA, 20 bp, Propionibacterium freudenreichii
acgtcggaagtgaaattcca

SEQ ID NO: 29112 - DNA, 20 bp, Prevotella bivia
agtgttagcggctaagcgaa

SEQ ID NO: 29113 - DNA, 20 bp, Facklamia hominis
cggcctaccatggcaatgat

SEQ ID NO: 29114 - DNA, 20 bp, Bacteroides merdae
gggaatatttgttaaagatt

SEQ ID NO: 29115 - DNA, 20 bp, Gemella morbillorum
caacctcataaaactattct

SEQ ID NO: 29116 - DNA, 20 bp, Leuconostoc carnosum
ttaaggtagggaatgacctt

SEQ ID NO: 29117 - DNA, 20 bp, Actinomyces bovis
cgaagtgaagaggagcttgc

SEQ ID NO: 29118 - DNA, 20 bp, Paenibacillus amylolyticus
tccggtagagtaactgctac

SEQ ID NO: 29119 - DNA, 20 bp, Acinetobacter junii
caagtcgagcggagatgagg

SEQ ID NO: 29120 - DNA, 20 bp, Clostridium clostridiiforme
catggtctggtgcgaaaaac

SEQ ID NO: 29121 - DNA, 20 bp, Campylobacter coli
ctctgctagtcagggcagta

SEQ ID NO: 29122 - DNA, 20 bp, Providencia alcalifaciens
cccctgctttgctccttaga

SEQ ID NO: 29123 - DNA, 20 bp, Capnocytophaga ochracea
acggttaccgcgaggagctg

SEQ ID NO: 29124 - DNA, 20 bp, Streptococcus infantarius
aaagtttgaagagttgcgaa

SEQ ID NO: 29125 - DNA, 20 bp, Clostridium ramosum
tgccctagacagggggataa

SEQ ID NO: 29126 - DNA, 20 bp, Bacillus sp
tgaggccaagcaaatcccac

SEQ ID NO: 29127 - DNA, 20 bp, Brevibacillus choshinensis
ataggagctctcttcggagc

SEQ ID NO: 29128 - DNA, 20 bp, Paenibacillus amylolyticus
tccggtagagtaactgctat

SEQ ID NO: 29129 - DNA, 20 bp, Bacteroides stercoris
tacacggcgacgtggtgcta

SEQ ID NO: 29130 - DNA, 20 bp, Paenibacillus pabuli
cgggctgtgaagccgcgagg

SEQ ID NO: 29131 - DNA, 20 bp, Proteus vulgaris
taacttgggaattgcatctg

SEQ ID NO: 29132 - DNA, 20 bp, Bacteroides merdae
gcatggacaaagggcagcta

SEQ ID NO: 29133 - DNA, 20 bp, Photobacterium damselae
tatacagagggcagcaagac

SEQ ID NO: 29134 - DNA, 20 bp, Weeksella virosa
taagtctatattgacgctga

SEQ ID NO: 29135 - DNA, 20 bp, Staphylococcus capitis
cgtcctcccttgtggtttgt

SEQ ID NO: 29136 - DNA, 20 bp, Serratia marcescens
ttaatacgctcatcaattga

SEQ ID NO: 29137 - DNA, 20 bp, Fusobacterium mortiferum
tttgacatcctaagaaatta

SEQ ID NO: 29138 - DNA, 20 bp, Anaerococcus tetradius
tgctcatcttgaggtatgga

SEQ ID NO: 29139 - DNA, 20 bp, Bacteroides merdae
agaaggatctatggtttgta

SEQ ID NO: 29140 - DNA, 20 bp, Helcococcus ovis
acccgaagccgtcgagctaa

SEQ ID NO: 29141 - DNA, 20 bp, Fusobacterium mortiferum
aagccagcccactggacaga

SEQ ID NO: 29142 - DNA, 20 bp, Haemophilus actinemycetemcomitans
tgggtttgtgccttagggag

SEQ ID NO: 29143 - DNA, 20 bp, Cardiobacterium hominis
ggcagctttctgggtcgata

SEQ ID NO: 29144 - DNA, 20 bp, Prevotella melaninogenica
aaggcagctgacgggagcgc

SEQ ID NO: 29145 - DNA, 20 bp, Proteus vulgaris
ggaccaaagcaggggctctt

SEQ ID NO: 29146 - DNA, 20 bp, Anaerococcus prevotii
aactactgtaagcatttgaa

SEQ ID NO: 29147 - DNA, 20 bp, Tissierella praeacuta
aaggctcaccaagacagcga

SEQ ID NO: 29148 - DNA, 20 bp, Bacteroides merdae
atgggaatatttgttaaaga

SEQ ID NO: 29149 - DNA, 20 bp, Bacteroides fragilis
ttattaaaggattccggtaa

SEQ ID NO: 29150 - DNA, 20 bp, Veillonella atypica
tcgaacgaagagcgatggaa

SEQ ID NO: 29151 - DNA, 20 bp, Pasteurella multocida
ggtaatgaggaagggatgtt

SEQ ID NO: 29152 - DNA, 20 bp, Paenibacillus lautus
agaacgtcttctagagtaac

SEQ ID NO: 29153 - DNA, 20 bp, Streptococcus pyogenes
caagtagaacgctgagaact

SEQ ID NO: 29154 - DNA, 20 bp, Veillonella atypica
atggttcctcttcttcggaa

SEQ ID NO: 29155 - DNA, 20 bp, Corynebacterium falsenii
ctaggtgtggggatctttct

SEQ ID NO: 29156 - DNA, 20 bp, Rothia mucilaginosa
gcatcagagatggtgtttcc

SEQ ID NO: 29157 - DNA, 20 bp, Campylobacter sputorum
aaaggacgcgtaggtggata

SEQ ID NO: 29158 - DNA, 20 bp, Haemophilus ducreyi
tgaggaaggcagttttgtta

SEQ ID NO: 29159 - DNA, 20 bp, Corynebacterium ulcerans
tacaacgcgttgcgagcctg

SEQ ID NO: 29160 - DNA, 20 bp, Leuconostoc argentinum
agtatcgcatgatacaaagt

SEQ ID NO: 29161 - DNA, 20 bp, Brevibacillus choshinensis
gagggccacttgaaactggg

SEQ ID NO: 29162 - DNA, 20 bp, Serratia marcescens
agcttaatacgctcatcaat

SEQ ID NO: 29163 - DNA, 20 bp, Actinomyces meyeri
tggatattcactggtcttcg

SEQ ID NO: 29164 - DNA, 20 bp, Bacillus sp
gcgcaagctgtcacttacag

SEQ ID NO: 29165 - DNA, 20 bp, Prevotella bivia
gagtgcgcacaacgtaggcg

SEQ ID NO: 29166 - DNA, 20 bp, Brevibacillus borstelensis
agcgagtcccttcgggggct

SEQ ID NO: 29167 - DNA, 20 bp, Streptococcus constellatus
cgcataagaacatttactgc

SEQ ID NO: 29168 - DNA, 20 bp, Sporosarcina pasteurii
tcaaggtacaggcagttact

SEQ ID NO: 29169 - DNA, 20 bp, Aeromonas hydrophila
aggttgatgcctaatacgta

SEQ ID NO: 29170 - DNA, 20 bp, Anaerococcus prevotii
cttactgggctcattctgac

SEQ ID NO: 29171 - DNA, 20 bp, Prevotella melaninogenica
tgcatcaaatcttgaaagcc

SEQ ID NO: 29172 - DNA, 20 bp, Bacteroides vulgatus
gccaatccccaaaacctctc

SEQ ID NO: 29173 - DNA, 20 bp, Streptococcus thoraltensis
aacgagttgcgagctggtga

SEQ ID NO: 29174 - DNA, 20 bp, Corynebacterium argentoratense
tacaacgcgctgcgagcctg

SEQ ID NO: 29175 - DNA, 20 bp, Dermabacter hominis
gaagccgatggcccaagctt

SEQ ID NO: 29176 - DNA, 20 bp, Leuconostoc pseudomesenteroides
tcgcatgacacaaagttaaa

SEQ ID NO: 29177 - DNA, 20 bp, Pantoea agglomerans
atggggttaataaccttatc

SEQ ID NO: 29178 - DNA, 20 bp, Gemella haemolysans
cacagtagagacggtaccta

SEQ ID NO: 29179 - DNA, 20 bp, Alcaligenes faecalis
ttaggccttagtagcgcagc

SEQ ID NO: 29180 - DNA, 20 bp, Gemella haemolysans
gattgtgttgttctgacctt

SEQ ID NO: 29181 - DNA, 20 bp, Fusobacterium mortiferum
agtttcgcatgaaattcata

SEQ ID NO: 29182 - DNA, 20 bp, Porphyromonas levii
ctgtttagggtaaaactagt

SEQ ID NO: 29183 - DNA, 20 bp, Tissierella praeacuta
tacaacgagcagctacttag

SEQ ID NO: 29184 - DNA, 20 bp, Acinetobacter radioresistens
ggaggctacctagattaata

SEQ ID NO: 29185 - DNA, 20 bp, Streptococcus ratti
gtttaacacatgttagacgc

SEQ ID NO: 29186 - DNA, 20 bp, Clostridium subterminale
tacaatggttggtacaataa

SEQ ID NO: 29187 - DNA, 20 bp, Paenibacillus peoriae
cttgcttctaaacaacctag

SEQ ID NO: 29188 - DNA, 20 bp, Clostridium innocuum
agggtgcgtaggtggcgtac

SEQ ID NO: 29189 - DNA, 20 bp, Peptoniphilus indolicus
tgagtagtgaagaggtaagt

SEQ ID NO: 29190 - DNA, 20 bp, Weeksella virosa
acgatagaactgccattgat

SEQ ID NO: 29191 - DNA, 20 bp, Bacillus sp
tccacatgcgtcacccccga

SEQ ID NO: 29192 - DNA, 20 bp, Haemophilus actinemycetemcomitans
ggattggggtttagccctgg

SEQ ID NO: 29193 - DNA, 20 bp, Empedobacter brevis
ctgaaggtaccagaagaata

SEQ ID NO: 29194 - DNA, 20 bp, Gemella sanguinis
aaagagaagctaactcgcga

SEQ ID NO: 29195 - DNA, 20 bp, Burkholderia gladioli
atcctgagggctaatatcct

SEQ ID NO: 29196 - DNA, 20 bp, Listeria monocytogenes
gtgtggcgcatgccacgctt

SEQ ID NO: 29197 - DNA, 20 bp, Pasteurella multocida
ggggattgggctatatgctt

SEQ ID NO: 29198 - DNA, 20 bp, Microbacterium hominis
gatcgcatggtcagtagctg

SEQ ID NO: 29199 - DNA, 20 bp, Prevotella melaninogenica
gacttgcagcgcatactggt

SEQ ID NO: 29200 - DNA, 20 bp, Fusobacterium mortiferum
gggggaacttagtgacaggt

SEQ ID NO: 29201 - DNA, 20 bp, Streptococcus sanguinis
aattaattgaaaggtgcaat

SEQ ID NO: 29202 - DNA, 20 bp, Morganella morganii
tgcatctgatactggtcagc

SEQ ID NO: 29203 - DNA, 20 bp, Campylobacter sputorum
cacttagaaatgagtgctaa

SEQ ID NO: 29204 - DNA, 20 bp, Bacteroides capilosus
gtgtggggggactgaccccc

SEQ ID NO: 29205 - DNA, 20 bp, Campylobacter lari
cttagagataagagagtgct

SEQ ID NO: 29206 - DNA, 20 bp, Ewingella americana
gaggttgtgggcttgacccg

SEQ ID NO: 29207 - DNA, 20 bp, Lactococcus lactis
catcaagtgacggtaactac

SEQ ID NO: 29208 - DNA, 20 bp, Haemophilus haemolyticus
gcgtagtgtcgagagacgaa

SEQ ID NO: 29209 - DNA, 20 bp, Tissierella praeacuta
ttagttgctaacagataagc

SEQ ID NO: 29210 - DNA, 20 bp, Tissierella praeacuta
agatttcttcggaatgaaac

SEQ ID NO: 29211 - DNA, 20 bp, Prevotella melaninogenica
cctgccgaaaggcagactaa

SEQ ID NO: 29212 - DNA, 20 bp, Facklamia ignava
taactgttataggtttgacg

SEQ ID NO: 29213 - DNA, 20 bp, Eggerthella lenta
gcccagacggcaagggatgg

SEQ ID NO: 29214 - DNA, 20 bp, Campylobacter sputorum
cttgtgaaatctagtagctt

SEQ ID NO: 29215 - DNA, 20 bp, Facklamia ignava
gagtaactgttataggtttg

SEQ ID NO: 29216 - DNA, 20 bp, Pseudoramibacter alactolyticus
gagaaccgcaaggactcagc

SEQ ID NO: 29217 - DNA, 20 bp, Leptotrichia buccalis
aagggcatctaggcggccag

SEQ ID NO: 29218 - DNA, 20 bp, Streptococcus acidominimus
tttaaaaggagcaacagctt

SEQ ID NO: 29219 - DNA, 20 bp, Sporosarcina pasteurii
gttccttcgcatgaaggaac

SEQ ID NO: 29220 - DNA, 20 bp, Corynebacterium group F
cgcgtttgctaccttgtgag

SEQ ID NO: 29221 - DNA, 20 bp, Bacteroides thetaiotaomicron
cagttaagtcagttgtgaaa

SEQ ID NO: 29222 - DNA, 20 bp, Clostridium ramosum
gcactggtagaggatggact

SEQ ID NO: 29223 - DNA, 20 bp, Neisseria cinerea
taaccgcaaggggtccgctt

SEQ ID NO: 29224 - DNA, 20 bp, Acinetobacter lwoffii
gaggctaccgagattaatac

SEQ ID NO: 29225 - DNA, 20 bp, Pseudoramibacter alactolyticus
tggcaagatcatgaaaactc

SEQ ID NO: 29226 - DNA, 20 bp, Gemella morbillorum
tgcactagaaaaacttagcg

SEQ ID NO: 29227 - DNA, 20 bp, Yersinia ruckeri
gcactgaacattgacgttac

SEQ ID NO: 29228 - DNA, 20 bp, Streptococcus infantarius
tagcttgctaaagtttgaag

SEQ ID NO: 29229 - DNA, 20 bp, Propionibacterium freudenreichii
ggaactctcggtggagcggt

SEQ ID NO: 29230 - DNA, 20 bp, Listeria innocua
atgatagagtgtggcgcatg

SEQ ID NO: 29231 - DNA, 20 bp, Leptotrichia buccalis
tcttgacatcctacgaatgc

SEQ ID NO: 29232 - DNA, 20 bp, Corynebacterium urealyticum
gatctgcccttcacttcggg

SEQ ID NO: 29233 - DNA, 20 bp, Anaerococcus tetradius
aaactcaaaaagcctgtccc

SEQ ID NO: 29234 - DNA, 20 bp, Bacteroides fragilis
ggcataatgattccgcatgg

SEQ ID NO: 29235 - DNA, 20 bp, Streptococcus thermophilus
ctccactacaagatggacct

SEQ ID NO: 29236 - DNA, 20 bp, Moraxella osloensis
tggtgctagaatatgtgaga

SEQ ID NO: 29237 - DNA, 20 bp, Clostridium clostridiiforme
tgttttgctagagtgtcgga

SEQ ID NO: 29238 - DNA, 20 bp, Bacteroides fragilis
acgtatccaacctgcccttt

SEQ ID NO: 29239 - DNA, 20 bp, Clostridium innocuum
aacatggatggacctgcgac

SEQ ID NO: 29240 - DNA, 20 bp, Bacillus badius
aactgtccgtaccttgacgg

SEQ ID NO: 29241 - DNA, 20 bp, Neisseria flavescens
tgttgctaatatcgacagct

SEQ ID NO: 29242 - DNA, 20 bp, Enterococcus cecorum
ccaatctcttaaagctcttc

SEQ ID NO: 29243 - DNA, 20 bp, Haemophilus influenzae
acatcaaattgacgttaaat

SEQ ID NO: 29244 - DNA, 20 bp, Paenibacillus macerans
caatctgtcacttagagatg

SEQ ID NO: 29245 - DNA, 20 bp, Gemella morbillorum
tatgtagtaactatacatgt

SEQ ID NO: 29246 - DNA, 20 bp, Anaerococcus prevotii
aggaccggtatagagatata

SEQ ID NO: 29247 - DNA, 20 bp, Lactococcus raffinolactis
gcagtgatgtcaagctaatc

SEQ ID NO: 29248 - DNA, 20 bp, Prevotella melaninogenica
cttcgatgacggcatcagat

SEQ ID NO: 29249 - DNA, 20 bp, Streptococcus constellatus
caccgtattctgtgagttgc

SEQ ID NO: 29250 - DNA, 20 bp, Streptococcus thoraltensis
ttgcgagctggtgacagtaa

SEQ ID NO: 29251 - DNA, 20 bp, Dermabacter hominis
tgtgcttgcacagtggatta

SEQ ID NO: 29252 - DNA, 20 bp, Veillonella atypica
tgttaatcgggacgaatggt

SEQ ID NO: 29253 - DNA, 20 bp, Corynebacterium accolens
gaaccatctttagtgtggtg

SEQ ID NO: 29254 - DNA, 20 bp, Haemophilus influenzae
ttgatgtgttaatagcacat

SEQ ID NO: 29255 - DNA, 20 bp, Pseudoramibacter alactolyticus
aaacatgacggtacccaatg

SEQ ID NO: 29256 - DNA, 20 bp, Morganella morganii
ggaccaaagcgggggacctc

SEQ ID NO: 29257 - DNA, 20 bp, Peptoniphilus indolicus
gaagtcgtcgagctaaccgc

SEQ ID NO: 29258 - DNA, 20 bp, Leptotrichia buccalis
gaagccgccggtccaaccgt

SEQ ID NO: 29259 - DNA, 20 bp, Actinomyces bovis
taactggcctgtaactgacg

SEQ ID NO: 29260 - DNA, 20 bp, Bacillus simplex
gaagatggaaagacggttta

SEQ ID NO: 29261 - DNA, 20 bp, Gemella bergeri
aatggatagggacaaagaga

SEQ ID NO: 29262 - DNA, 20 bp, Clostridium glycolicum
taagctcttgaaactgggaa

SEQ ID NO: 29263 - DNA, 20 bp, Bacteroides fragilis
cttaaattgcagtggaatga

SEQ ID NO: 29264 - DNA, 20 bp, Clostridium subterminale
cccctgaattacctgtaatg

SEQ ID NO: 29265 - DNA, 20 bp, Bacteroides thetaiotaomicron
gggagcgtaggtggacagtt

SEQ ID NO: 29266 - DNA, 20 bp, Campylobacter rectus
gaaagaattatgacggtacc

SEQ ID NO: 29267 - DNA, 20 bp, Prevotella denticola
actaaaggcagttcatatcc

SEQ ID NO: 29268 - DNA, 20 bp, Corynebacterium coyleae
accggataggaccacatttt

SEQ ID NO: 29269 - DNA, 20 bp, Turicella otitidis
tttagtgtgatggttggaaa

SEQ ID NO: 29270 - DNA, 20 bp, Gemella morbillorum
tttaaaagttggttatgcta

SEQ ID NO: 29271 - DNA, 20 bp, Clostridium glycolicum
taagctcttgaaactgggag

SEQ ID NO: 29272 - DNA, 20 bp, Anaerococcus prevotii
taagtggaatttttagtgta

SEQ ID NO: 29273 - DNA, 20 bp, Bacteroides thetaiotaomicron
cgatggtataatcagaccgc

SEQ ID NO: 29274 - DNA, 20 bp, Corynebacterium jeikeium
tgtgggggttttatttacga

SEQ ID NO: 29275 - DNA, 20 bp, Streptococcus hyovaginalis
agagataggatttcccttcg

SEQ ID NO: 29276 - DNA, 20 bp, Neisseria meningitidis
ctcgagtcacccagttcaga

SEQ ID NO: 29277 - DNA, 20 bp, Streptococcus hyovaginalis
ccaccattaatcatgagtcg

SEQ ID NO: 29278 - DNA, 20 bp, Haemophilus ducreyi
ggaaggcagttttgttaata

SEQ ID NO: 29279 - DNA, 20 bp, Haemophilus segnis
ttagtttaatagactaggtg

SEQ ID NO: 29280 - DNA, 20 bp, Collinsella aerofaciens
taggtgtggggggacgatcc

SEQ ID NO: 29281 - DNA, 20 bp, Paenibacillus macerans
gcttgcactcctgagagtta

SEQ ID NO: 29282 - DNA, 20 bp, Pseudoramibacter alactolyticus
ctcagcagtcgaaggtgggg

SEQ ID NO: 29283 - DNA, 20 bp, Corynebacterium glucuronolyticum
aatggctggtacagtgcgtg

SEQ ID NO: 29284 - DNA, 20 bp, Leptotrichia buccalis
acggaaacgactgataatac

SEQ ID NO: 29285 - DNA, 20 bp, Aerococcus viridans
cggtatcttatcagaaagcc

SEQ ID NO: 29286 - DNA, 20 bp, Achromobacter xylosoxidans
gaatgccgaagagatttggc

SEQ ID NO: 29287 - DNA, 20 bp, Facklamia ignava
tgttataggtttgacggtaa

SEQ ID NO: 29288 - DNA, 20 bp, Bacillus alcalophilus
ggctcaaccccgaggggtca

SEQ ID NO: 29289 - DNA, 20 bp, Oligella urethralis
tcttaaggtattagcctaag

SEQ ID NO: 29290 - DNA, 20 bp, Actinomyces bovis
ggctaactggcctgtaactg

SEQ ID NO: 29291 - DNA, 20 bp, Prevotella oralis
ctgtgaaatgtaccggctca

SEQ ID NO: 29292 - DNA, 20 bp, Clostridium botulinum
tatcaactccccctgtgccg

SEQ ID NO: 29293 - DNA, 20 bp, Streptococcus dysgalactiae
agtggctcaaccactgtacg

SEQ ID NO: 29294 - DNA, 20 bp, Enterococcus raffinosus
agtgaaagatggccttgcta

SEQ ID NO: 29295 - DNA, 20 bp, Gemella haemolysans
ttgtgtagtaactatacaca

SEQ ID NO: 29296 - DNA, 20 bp, Clostridium botulinum
ggggtatcaactccccctgt

SEQ ID NO: 29297 - DNA, 20 bp, Fusobacterium mortiferum
tgacatcctaagaaattagc

SEQ ID NO: 29298 - DNA, 20 bp, Pseudomonas oryzihabitans
cttgataagttggatgtgaa

SEQ ID NO: 29299 - DNA, 20 bp, Bacillus schlegellii
ggcaacctgccctaaagacc

SEQ ID NO: 29300 - DNA, 20 bp, Bacteroides thetaiotaomicron
ttgttattaaagaatttcgg

SEQ ID NO: 29301 - DNA, 20 bp, Prevotella melaninogenica
gtgcttgcactcaatggacg

SEQ ID NO: 29302 - DNA, 20 bp, Streptococcus thoraltensis
gtaaagctctgttataagcg

SEQ ID NO: 29303 - DNA, 20 bp, Lactobacillus acidophilus
gtgcaatccgtagagatacg

SEQ ID NO: 29304 - DNA, 20 bp, Lactobacillus acidophilus
gggaacctgccccatagtct

SEQ ID NO: 29305 - DNA, 20 bp, Chromobacterium violaceum
gcggttgtgcaagtctgatg

SEQ ID NO: 29306 - DNA, 20 bp, Anaerococcus prevotii
agaggtaagtggaattttta

SEQ ID NO: 29307 - DNA, 20 bp, Campylobacter sputorum
tgacccttctagagatagaa

SEQ ID NO: 29308 - DNA, 20 bp, Achromobacter piechaudii
gaagtgctcgcaagagaact

SEQ ID NO: 29309 - DNA, 20 bp, Bacteroides thetaiotaomicron
atagccgtaaggcaaatgtg

SEQ ID NO: 29310 - DNA, 20 bp, Aerococcus christensenii
gaacctaccgataagcgggg

SEQ ID NO: 29311 - DNA, 20 bp, Lactococcus lactis
cgttggtgagagtggaaagc

SEQ ID NO: 29312 - DNA, 20 bp, Streptococcus hyovaginalis
atgttaatgatttaaaagga

SEQ ID NO: 29313 - DNA, 20 bp, Facklamia sourekii
ttaagtgttggggggcttcc

SEQ ID NO: 29314 - DNA, 20 bp, Turicella otitidis
tgtgagggtcttttcacgac

SEQ ID NO: 29315 - DNA, 20 bp, Bacillus coagulans
gcgccttgacggtacccggc

SEQ ID NO: 29316 - DNA, 20 bp, Gemella bergeri
tgtgtagtaactatacacaa

SEQ ID NO: 29317 - DNA, 20 bp, Pasteurella multocida
cttgattgacgttaatcaca

SEQ ID NO: 29318 - DNA, 20 bp, Actinomyces bovis
cgcgcaaaagcacagagatg

SEQ ID NO: 29319 - DNA, 20 bp, Ralstonia paucula
cgaaaggcctcgcgcagcag

SEQ ID NO: 29320 - DNA, 20 bp, Pediococcus inopinatus
tgcttgcatcgaagatgatt

SEQ ID NO: 29321 - DNA, 20 bp, Bacteroides forsythus
atgccaatctccaaaccctg

SEQ ID NO: 29322 - DNA, 20 bp, Dermabacter hominis
agccgatggcccaagcttta

SEQ ID NO: 29323 - DNA, 20 bp, Plesiomonas shigelloides
ggaccaaagtgggggctctt

SEQ ID NO: 29324 - DNA, 20 bp, Propionibacterium freudenreichii
ctccaggaaactggtggtaa

SEQ ID NO: 29325 - DNA, 20 bp, Streptococcus dysgalactiae
accatgtgacggtaactaac

SEQ ID NO: 29326 - DNA, 20 bp, Clostridium cadaveris
gtttcgatacctctgtgccg

SEQ ID NO: 29327 - DNA, 20 bp, Actinomyces neuii
gagcgaatctcttaaagggc

SEQ ID NO: 29328 - DNA, 20 bp, Myroides odoratus
gagaaattcggattaatgct

SEQ ID NO: 29329 - DNA, 20 bp, Bordetella bronchiseptica
gaaacggcacgggctaatat

SEQ ID NO: 29330 - DNA, 20 bp, Streptococcus porcinus
ataggctttctcttcggagc

SEQ ID NO: 29331 - DNA, 20 bp, Tetragenococcus halophilus
tagcgaatctctgaaagctt

SEQ ID NO: 29332 - DNA, 20 bp, Corynebacterium coyleae
ggataggaccacattttgga

SEQ ID NO: 29333 - DNA, 20 bp, Streptococcus dysgalactiae
tgttagagaagaatgatggt

SEQ ID NO: 29334 - DNA, 20 bp, Veillonella atypica
tcttgacattgatggacaga

SEQ ID NO: 29335 - DNA, 20 bp, Serratia marcescens
agcttaatacgttcatcaat

SEQ ID NO: 29336 - DNA, 20 bp, Serratia marcescens
gcttaatacgctcatcaatt

SEQ ID NO: 29337 - DNA, 20 bp, Bacteroides thetaiotaomicron
ttgcttgcaaactggagatg

SEQ ID NO: 29338 - DNA, 20 bp, Pediococcus dextrinicus
taatctctaaaagctagtct

SEQ ID NO: 29339 - DNA, 20 bp, Enterobacter gergoviae
ctacttggaggctgtggtcc

SEQ ID NO: 29340 - DNA, 20 bp, Streptococcus suis
agtggaaagtttctcacttg

SEQ ID NO: 29341 - DNA, 20 bp, Neisseria meningitidis
tgacacactcgagtcaccca

SEQ ID NO: 29342 - DNA, 20 bp, Aneurinibacillus aneurinilyticus
agagtgcgccaatcccttaa

SEQ ID NO: 29343 - DNA, 20 bp, Proteus vulgaris
tcttgaactgtggcttctgg

SEQ ID NO: 29344 - DNA, 20 bp, Moraxella osloensis
agtgtaggtggctcattaag

SEQ ID NO: 29345 - DNA, 20 bp, Bacteroides fragilis
tatgtattatatgaataagg

SEQ ID NO: 29346 - DNA, 20 bp, Streptococcus anginosus
agaatggaaagttcatactg

SEQ ID NO: 29347 - DNA, 20 bp, Oligella ureolytica
gaaccctgatcgagccatcc

SEQ ID NO: 29348 - DNA, 20 bp, Bacillus flexus
actgattagaagcttgcttc

SEQ ID NO: 29349 - DNA, 20 bp, Streptococcus thoraltensis
atcacttaaagatggacctg

SEQ ID NO: 29350 - DNA, 19 bp, Neisseria weaveri
acctgcgggtggatcacct

SEQ ID NO: 29351 - DNA, 20 bp, Clostridium butyricum
gagcaaaactataaaaccga

SEQ ID NO: 29352 - DNA, 20 bp, Veillonella parvula
gcgcgcaggcggatcagtca

SEQ ID NO: 29353 - DNA, 20 bp, Streptococcus thermophilus
tgcttgcaccgagcggatga

SEQ ID NO: 29354 - DNA, 20 bp, Bacteroides uniformis
gtacagaaggcagctacacg

SEQ ID NO: 29355 - DNA, 20 bp, Anaerococcus prevotii
cggatggggactctaaagag

SEQ ID NO: 29356 - DNA, 20 bp, Fusobacterium nucleatum
tcagttgggaagaaagaaat

SEQ ID NO: 29357 - DNA, 20 bp, Aerococcus christensenii
taagcgggggacaacatccg

SEQ ID NO: 29358 - DNA, 20 bp, Staphylococcus sp.
tttcactatcgaaccatgcg

SEQ ID NO: 29359 - DNA, 20 bp, Fusobacterium mortiferum
catgaaattcatatgaaagc

SEQ ID NO: 29360 - DNA, 20 bp, Prevotella intermedia
acggcattatgtgcttgcac

SEQ ID NO: 29361 - DNA, 20 bp, Prevotella intermedia
tatgtgcttgcacattctgg

SEQ ID NO: 29362 - DNA, 20 bp, Granulicatella adiacens
ggtcaatctagtggcgaacg

SEQ ID NO: 29363 - DNA, 20 bp, Bacteroides merdae
gaaggatctatggtttgtaa

SEQ ID NO: 29364 - DNA, 20 bp, Sphingobacterium multivorum
aggggtgaaatacggtggct

SEQ ID NO: 29365 - DNA, 20 bp, Prevotella melaninogenica
gtatggggataaagtcaatc

SEQ ID NO: 29366 - DNA, 20 bp, Oligella urethralis
cgcgagatggctcgatcagg

SEQ ID NO: 29367 - DNA, 20 bp, Brevibacillus agri
catgatctgaaaagaaaaga

SEQ ID NO: 29368 - DNA, 20 bp, Alicyclobacillus acidocaldarius
cccgcctcaacgcgctggta

SEQ ID NO: 29369 - DNA, 20 bp, Anaerococcus prevotii
cgcaggcggaaatgcaagtc

SEQ ID NO: 29370 - DNA, 20 bp, Sporosarcina pasteurii
actctgaaagacggcttcgg

SEQ ID NO: 29371 - DNA, 20 bp, Propionibacterium freudenreichii
atagctccaggaaactggtg

SEQ ID NO: 29372 - DNA, 20 bp, Bacteroides ovatus
gagcgtaggtggattgttaa

SEQ ID NO: 29373 - DNA, 20 bp, Photobacterium damselae
cgagcggcagcgacttaact

SEQ ID NO: 29374 - DNA, 20 bp, Myroides odoratus
ttttcggactgagtggctaa

SEQ ID NO: 29375 - DNA, 20 bp, Corynebacterium group F
cttgacatgtagcggatcgc

SEQ ID NO: 29376 - DNA, 20 bp, Proteus vulgaris
gtgataaagttaataccttt

SEQ ID NO: 29377 - DNA, 20 bp, Vagococcus fluvialis
tgggcccgcgctgcattagt

SEQ ID NO: 29378 - DNA, 20 bp, Leptotrichia buccalis
gtctaaggtgtggatagtga

SEQ ID NO: 29379 - DNA, 20 bp, Fusobacterium nucleatum
tcagtgtcccttcggggaaa

SEQ ID NO: 29380 - DNA, 20 bp, Moraxella bovis
tgctagatatgattagtggc

SEQ ID NO: 29381 - DNA, 20 bp, Myroides odoratus
gttgatactgcttgacttga

SEQ ID NO: 29382 - DNA, 20 bp, Corynebacterium urealyticum
aggtgtggggatttttcacg

SEQ ID NO: 29383 - DNA, 20 bp, Citrobacter sedlakii
gcggggaggaagggattgtg

SEQ ID NO: 29384 - DNA, 20 bp, Pseudoramibacter alactolyticus
catgaaaactccggtgccat

SEQ ID NO: 29385 - DNA, 20 bp, Serratia proteamaculans
gaagggtagtgtgttaatag

SEQ ID NO: 29386 - DNA, 20 bp, Peptostreptococcus anaerobius
gtggtctttcaagtcggtgg

SEQ ID NO: 29387 - DNA, 20 bp, Aneurinibacillus thermoaerophilus
ctcaaccgtggagggccatc

SEQ ID NO: 29388 - DNA, 20 bp, Gemella morbillorum
ggttatgctaacactatgag

SEQ ID NO: 29389 - DNA, 20 bp, Staphylococcus muscae
cgaggtgcttgcacctctga

SEQ ID NO: 29390 - DNA, 20 bp, Corynebacterium afermentans
caagggttgggccaccgctt

SEQ ID NO: 29391 - DNA, 20 bp, Atopobium parvulum
agaccgaccagccagattgg

SEQ ID NO: 29392 - DNA, 20 bp, Bacillus coagulans
agttttttcctccgcatgga

SEQ ID NO: 29393 - DNA, 20 bp, Helcococcus kunzii
aagttgaacgagaatttttc

SEQ ID NO: 29394 - DNA, 20 bp, Campylobacter curvus
gctagtcttggcagtaatgc

SEQ ID NO: 29395 - DNA, 20 bp, Brochothrix campestris
gccggtttggtaaccttcgg

SEQ ID NO: 29396 - DNA, 20 bp, Burkholderia multivorans
aatacagtcgggggatgacg

SEQ ID NO: 29397 - DNA, 20 bp, Clostridium glycolicum
agtaagctcttgaaactggg

SEQ ID NO: 29398 - DNA, 20 bp, Comamonas terrigena
ttgtgctactagagcggccg

SEQ ID NO: 29399 - DNA, 20 bp, Tetragenococcus halophilus
ctgttgtcagcaaagaacag

SEQ ID NO: 29400 - DNA, 20 bp, Enterococcus gallinarum
agagtaaaacgttcatccct

SEQ ID NO: 29401 - DNA, 20 bp, Vibrio cholerae
aaggcactccagcgtctccg

SEQ ID NO: 29402 - DNA, 20 bp, Haemophilus actinemycetemcomitans
ggtttagccctggtgcccga

SEQ ID NO: 29403 - DNA, 20 bp, Fusobacterium varium
gagatgttttcgtgcctctt

SEQ ID NO: 29404 - DNA, 20 bp, Citrobacter sedlakii
gcagtcattgacgttacccg

SEQ ID NO: 29405 - DNA, 20 bp, Delftia acidovorans
tcctaatacgagaggcccat

SEQ ID NO: 29406 - DNA, 20 bp, Moraxella osloensis
gctagaatatgtgagaggga

SEQ ID NO: 29407 - DNA, 20 bp, Streptococcus uberis
ctaataccgcatgacaatag

SEQ ID NO: 29408 - DNA, 20 bp, Porphyromonas levii
aaggtttaaatggggactga

SEQ ID NO: 29409 - DNA, 20 bp, Bacillus coagulans
gatgttaaaagacggtttcg

SEQ ID NO: 29410 - DNA, 20 bp, Bacteroides stercoris
gtgatgctaatcccaaaaac

SEQ ID NO: 29411 - DNA, 20 bp, Bacteroides uniformis
gaatgatgtggagacatgtc

SEQ ID NO: 29412 - DNA, 20 bp, Peptostreptococcus anaerobius
cctccgaaactggaagactt

SEQ ID NO: 29413 - DNA, 20 bp, Campylobacter rectus
ctaacggcttaaccgttaaa

SEQ ID NO: 29414 - DNA, 20 bp, Peptoniphilus asaccharolyticus
gcttgacataatattgaccg

SEQ ID NO: 29415 - DNA, 20 bp, Bacillus flexus
caagtcgagcgaactgatta

SEQ ID NO: 29416 - DNA, 20 bp, Helcococcus ovis
taaagttctgtccttagtga

SEQ ID NO: 29417 - DNA, 20 bp, Gemella haemolysans
accggataacagcattaact

SEQ ID NO: 29418 - DNA, 20 bp, Microbacterium testaceum
gccaagcttgcttggtggat

SEQ ID NO: 29419 - DNA, 20 bp, Streptococcus thoraltensis
aagagtggaaagtttactct

SEQ ID NO: 29420 - DNA, 20 bp, Pasteurella multocida
tgggaccttagggccacctg

SEQ ID NO: 29421 - DNA, 20 bp, Propionibacterium freudenreichii
tgatcacgtcggaagtgaaa

SEQ ID NO: 29422 - DNA, 20 bp, Anaerococcus tetradius
tgttaggtgtctggaataat

SEQ ID NO: 29423 - DNA, 20 bp, Propionibacterium freudenreichii
taggcggttgatcacgtcgg

SEQ ID NO: 29424 - DNA, 20 bp, Yersinia ruckeri
tgaacattgacgttactcgc

SEQ ID NO: 29425 - DNA, 20 bp, Paenibacillus glucanolyticus
ataaaagccagtctcagttc

SEQ ID NO: 29426 - DNA, 20 bp, Paenibacillus lautus
tctgaccggtatagagatat

SEQ ID NO: 29427 - DNA, 20 bp, Salmonella enteritidis
agaatccagagatggatttg

SEQ ID NO: 29428 - DNA, 20 bp, Fusobacterium mortiferum
cttgccctgcagtctgggac

SEQ ID NO: 29429 - DNA, 20 bp, Atopobium parvulum
gccttctgggccataactga

SEQ ID NO: 29430 - DNA, 20 bp, Sporosarcina pasteurii
gaaaggtatatctctatacc

SEQ ID NO: 29431 - DNA, 20 bp, Clostridium botulinum
attttcttatcaaagattta

SEQ ID NO: 29432 - DNA, 20 bp, Listeria innocua
taccgaatgatagagtgtgg

SEQ ID NO: 29433 - DNA, 20 bp, Anaerococcus prevotii
gggtgaagataagatggatt

SEQ ID NO: 29434 - DNA, 20 bp, Bacteroides ureolyticus
ttgctttgctagtcaaggca

SEQ ID NO: 29435 - DNA, 20 bp, Brevibacillus brevis
gaaaagctgaaagtcggttt

SEQ ID NO: 29436 - DNA, 20 bp, Prevotella melaninogenica
acgcccttcggggtctctgt

SEQ ID NO: 29437 - DNA, 20 bp, Peptostreptococcus anaerobius
gcatcgtagatatatcaaag

SEQ ID NO: 29438 - DNA, 20 bp, Arcanobacterium bernardiae
gatgtgccagagatggtgca

SEQ ID NO: 29439 - DNA, 20 bp, Haemophilus influenzae
aggaaggttgatgtgttaat

SEQ ID NO: 29440 - DNA, 20 bp, Anaerococcus tetradius
atataaagcttttaaaactg

SEQ ID NO: 29441 - DNA, 20 bp, Staphylococcus capitis
gataggacagctgtttagtg

SEQ ID NO: 29442 - DNA, 20 bp, Actinomyces meyeri
ctggatattcactggtcttc

SEQ ID NO: 29443 - DNA, 20 bp, Campylobacter curvus
gttgctgagctagtcttggc

SEQ ID NO: 29444 - DNA, 20 bp, Prevotella melaninogenica
gtacgcacaacgttggcgga

SEQ ID NO: 29445 - DNA, 20 bp, Fusobacterium nucleatum
atattatgattttaaggcat

SEQ ID NO: 29446 - DNA, 20 bp, Anaerococcus prevotii
ctgggctcattctgacgctg

SEQ ID NO: 29447 - DNA, 20 bp, Citrobacter koseri
agagatgagactgtgccttc

SEQ ID NO: 29448 - DNA, 20 bp, Streptococcus pyogenes
ggagtggaaaatccaccaag

SEQ ID NO: 29449 - DNA, 20 bp, Corynebacterium group F
actttttggatattgttgtg

SEQ ID NO: 29450 - DNA, 20 bp, Prevotella loescheii
aacgatggatgctcgttgtc

SEQ ID NO: 29451 - DNA, 20 bp, Campylobacter curvus
ctataaaatacgtcccagtt

SEQ ID NO: 29452 - DNA, 20 bp, Prevotella intermedia
accgccggagctttgataca

SEQ ID NO: 29453 - DNA, 20 bp, Enterococcus raffinosus
tgcgtaagtaactgtgcgca

SEQ ID NO: 29454 - DNA, 20 bp, Bacteroides merdae
catcgctgatagataggcat

SEQ ID NO: 29455 - DNA, 20 bp, Helcococcus ovis
taggcggtaatttaagtctg

SEQ ID NO: 29456 - DNA, 20 bp, Methylobacterium mesophilicum
tttgacatggcgtgttaccc

SEQ ID NO: 29457 - DNA, 20 bp, Propionibacterium avidum
gaaagcttcggcggttttgg

SEQ ID NO: 29458 - DNA, 20 bp, Brevibacillus agri
tcgctatcactgggagatgg

SEQ ID NO: 29459 - DNA, 20 bp, Propionibacterium freudenreichii
ccaatgttgccagcagttcg

SEQ ID NO: 29460 - DNA, 20 bp, Moraxella osloensis
ggtaggtacagagggttgct

SEQ ID NO: 29461 - DNA, 20 bp, Brochothrix campestris
taagatgttcaagtgaaaga

SEQ ID NO: 29462 - DNA, 20 bp, Pseudoramibacter alactolyticus
aacagagggccgcgaagccg

SEQ ID NO: 29463 - DNA, 20 bp, Campylobacter lari
ccttatagagatatgagggt

SEQ ID NO: 29464 - DNA, 20 bp, Helcococcus kunzii
cagctacctcgtgagagcaa

SEQ ID NO: 29465 - DNA, 20 bp, Bacillus simplex
cttttctcgcatgagagaag

SEQ ID NO: 29466 - DNA, 20 bp, Leptotrichia buccalis
gaagatagttcactggacgg

SEQ ID NO: 29467 - DNA, 20 bp, Bacteroides stercoris
aatcccgaaagcctctctca

SEQ ID NO: 29468 - DNA, 20 bp, Bacteroides uniformis
gtggagacatgtcagccgca

SEQ ID NO: 29469 - DNA, 20 bp, Staphylococcus capitis
ggcctgcagcttgctgcggg

SEQ ID NO: 29470 - DNA, 20 bp, Gemella haemolysans
ttctgacctttggttagaca

SEQ ID NO: 29471 - DNA, 20 bp, Granulicatella elegans
cgagcgcaggcggtcaatta

SEQ ID NO: 29472 - DNA, 20 bp, Campylobacter lari
tgttggggtgctagtcatct

SEQ ID NO: 29473 - DNA, 20 bp, Streptococcus thermophilus
ggatgacacatgtcatttat

SEQ ID NO: 29474 - DNA, 20 bp, Yersinia ruckeri
atagcactgaacattgacgt

SEQ ID NO: 29475 - DNA, 20 bp, Alicyclobacillus acidocaldarius
gcctcctcgcgggcgtatcc

SEQ ID NO: 29476 - DNA, 20 bp, Acinetobacter johnsonii
cgaggaggaggctacttgga

SEQ ID NO: 29477 - DNA, 20 bp, Acinetobacter lwoffii
aggaggctaccgagattaat

SEQ ID NO: 29478 - DNA, 20 bp, Vibrio cholerae
ggcatatccggtagcgcaag

SEQ ID NO: 29479 - DNA, 20 bp, Acinetobacter junii
gcggagatgaggtgcttgca

SEQ ID NO: 29480 - DNA, 20 bp, Fusobacterium nucleatum
atgattttaaggcatcttag

SEQ ID NO: 29481 - DNA, 20 bp, Haemophilus haemolyticus
atacagagggtggcgaaact

SEQ ID NO: 29482 - DNA, 20 bp, Acinetobacter haemolyticus
ggcggctgattaagtcggat

SEQ ID NO: 29483 - DNA, 20 bp, Streptococcus parasanguinis
gcatgatgttgacttgaaag

SEQ ID NO: 29484 - DNA, 20 bp, Prevotella bivia
tgcttttatatggggataaa

SEQ ID NO: 29485 - DNA, 20 bp, Bacteroides fragilis
acctgccctttactcgggga

SEQ ID NO: 29486 - DNA, 20 bp, Acinetobacter calcoaceticus
agcggagtgatggtgcttgc

SEQ ID NO: 29487 - DNA, 20 bp, Acinetobacter radioresistens
cgtgcgtaggcggccaatta

SEQ ID NO: 29488 - DNA, 20 bp, Peptostreptococcus anaerobius
tttacggcatcgtagatata

SEQ ID NO: 29489 - DNA, 20 bp, Delftia acidovorans
gaaaaagcttctcctaatac

SEQ ID NO: 29490 - DNA, 20 bp, Alcaligenes faecalis
ggttgtaaagtacttttggc

SEQ ID NO: 29491 - DNA, 20 bp, Paenibacillus lautus
aggaagaacgtcttctagag

SEQ ID NO: 29492 - DNA, 20 bp, Veillonella parvula
gcaggcggatcagtcagtct

SEQ ID NO: 29493 - DNA, 20 bp, Brevibacterium epidermidis
acactggaccgttctggaaa

SEQ ID NO: 29494 - DNA, 20 bp, Fusobacterium nucleatum
tttaacttagatttgggtgg

SEQ ID NO: 29495 - DNA, 20 bp, Staphylococcus carnosus
cgtaggtaactatgcgcacc

SEQ ID NO: 29496 - DNA, 20 bp, Kingella denitrificans
aaaagggaagtgttaatacc

SEQ ID NO: 29497 - DNA, 20 bp, Empedobacter brevis
tttatctggggataaaccta

SEQ ID NO: 29498 - DNA, 20 bp, Streptococcus dysgalactiae
cggttcaaggagttgcgaac

SEQ ID NO: 29499 - DNA, 20 bp, Streptococcus anginosus
atactgtgacggtacttaac

SEQ ID NO: 29500 - DNA, 20 bp, Bacteroides uniformis
gctaatccctaaagcctctc

SEQ ID NO: 29501 - DNA, 20 bp, Paenibacillus pabuli
ggcaacctgccctcaagttt

SEQ ID NO: 29502 - DNA, 20 bp, Brevibacillus choshinensis
accgcatggtctgaaaggga

SEQ ID NO: 29503 - DNA, 20 bp, Haemophilus influenzae
cttttggagggcgtttacca

SEQ ID NO: 29504 - DNA, 20 bp, Methylobacterium mesophilicum
ctctggttcggaataactca

SEQ ID NO: 29505 - DNA, 20 bp, Fusobacterium mortiferum
agttgggacgaagtaagtga

SEQ ID NO: 29506 - DNA, 20 bp, Helcococcus ovis
caaatctcggtgacgcagct

SEQ ID NO: 29507 - DNA, 20 bp, Fusobacterium mortiferum
cttcgggtgatggtggcgga

SEQ ID NO: 29508 - DNA, 20 bp, Veillonella atypica
cgtactacaatgggagttaa

SEQ ID NO: 29509 - DNA, 20 bp, Corynebacterium xerosis
ccgtgagggtgtggtggaaa

SEQ ID NO: 29510 - DNA, 20 bp, Propionibacterium acnes
tacagagagtggcgagcctg

SEQ ID NO: 29511 - DNA, 20 bp, Clostridium innocuum
gaacatggatggacctgcga

SEQ ID NO: 29512 - DNA, 20 bp, Facklamia ignava
gatggtacagcgagaagcga

SEQ ID NO: 29513 - DNA, 20 bp, Paenibacillus thiaminolyticus
gagagtaactgttccatagg

SEQ ID NO: 29514 - DNA, 20 bp, Porphyromonas endodontalis
gaggactctatcgagacagc

SEQ ID NO: 29515 - DNA, 20 bp, Veillonella atypica
ttaattcgacgcaacgcgaa

SEQ ID NO: 29516 - DNA, 20 bp, Prevotella bivia
tgtgaaatgtaggagctcaa

SEQ ID NO: 29517 - DNA, 20 bp, Abiotrophia defectiva
ctgttatgcgtgtgacggta

SEQ ID NO: 29518 - DNA, 20 bp, Eggerthella lenta
cgccctccgtgccgcagcca

SEQ ID NO: 29519 - DNA, 20 bp, Aerococcus christensenii
tctgctatcacttatcgatg

SEQ ID NO: 29520 - DNA, 20 bp, Shewanella algae
gaggaggaaagggtgtaagt

SEQ ID NO: 29521 - DNA, 20 bp, Bacillus sp
tttgatcagttagcggcgga

SEQ ID NO: 29522 - DNA, 20 bp, Clostridium subterminale
aagttctgtcatatgggaag

SEQ ID NO: 29523 - DNA, 20 bp, Peptoniphilus indolicus
tagcggtcaaagatggactc

SEQ ID NO: 29524 - DNA, 20 bp, Campylobacter lari
tagggaagaaccatgacggt

SEQ ID NO: 29525 - DNA, 20 bp, Campylobacter lari
taatactctatactcctgct

SEQ ID NO: 29526 - DNA, 20 bp, Gemella bergeri
tggtctcaaaagagatcagt

SEQ ID NO: 29527 - DNA, 20 bp, Streptococcus dysgalactiae
tagagaagaatgatggtggg

SEQ ID NO: 29528 - DNA, 20 bp, Propionibacterium acnes
taaccgttgtgggggagccg

SEQ ID NO: 29529 - DNA, 20 bp, Campylobacter curvus
cccaaataccaaaccggtta

SEQ ID NO: 29530 - DNA, 20 bp, Wolinella succinogenes
tcattcaaccaaaggagcaa

SEQ ID NO: 29531 - DNA, 20 bp, Prevotella melaninogenica
cgcccttcggggtctctgtg

SEQ ID NO: 29532 - DNA, 20 bp, Anaerococcus prevotii
tactgggctcattctgacgc

SEQ ID NO: 29533 - DNA, 20 bp, Eggerthella lenta
gaaaccgccctcgggcggac

SEQ ID NO: 29534 - DNA, 20 bp, Enterococcus casseliflavus
ccgcatggaagaaagttgaa

SEQ ID NO: 29535 - DNA, 20 bp, Facklamia languida
gcgaactcgcaagggcaagc

SEQ ID NO: 29536 - DNA, 20 bp, Alicyclobacillus acidocaldarius
atggactttcactccagact

SEQ ID NO: 29537 - DNA, 20 bp, Bacteroides ovatus
aaggatgaaggctctatggg

SEQ ID NO: 29538 - DNA, 20 bp, Moraxella osloensis
gcttcctggcataatattga

SEQ ID NO: 29539 - DNA, 20 bp, Enterococcus casseliflavus
tataacactattttccgcat

SEQ ID NO: 29540 - DNA, 20 bp, Neisseria meningitidis
acgtcttgagagagaaagca

SEQ ID NO: 29541 - DNA, 20 bp, Corynebacterium auris
ctaggtgtgagcctcttcca

SEQ ID NO: 29542 - DNA, 20 bp, Pediococcus pentosaceus
ataccgtataacagagaaaa

SEQ ID NO: 29543 - DNA, 20 bp, Brevundimonas diminuta
ggaccgccacggagacgtgg

SEQ ID NO: 29544 - DNA, 20 bp, Bacteroides distasonis
agccattactgacgctgatg

SEQ ID NO: 29545 - DNA, 20 bp, Atopobium parvulum
acaccacccgagtcgattgc

SEQ ID NO: 29546 - DNA, 20 bp, Vibrio vulnificus
agtgttaatagcactatcat

SEQ ID NO: 29547 - DNA, 20 bp, Methylobacterium mesophilicum
agtccacttcggtggcgcgc

SEQ ID NO: 29548 - DNA, 20 bp, Aerococcus viridans
attgaaagacggctctgctg

SEQ ID NO: 29549 - DNA, 20 bp, Listeria innocua
acgctcttgaaagatggttt

SEQ ID NO: 29550 - DNA, 20 bp, Corynebacterium auris
ggtacagcgcgtgtgcgata

SEQ ID NO: 29551 - DNA, 20 bp, Fusobacterium mortiferum
atgcgctgcaggagagcttt

SEQ ID NO: 29552 - DNA, 20 bp, Oligella urethralis
ttagctgcgctactaagccg

SEQ ID NO: 29553 - DNA, 20 bp, Cellulosimicrobium cellulans
catgcacgagaagccaccag

SEQ ID NO: 29554 - DNA, 20 bp, Bacillus oleronius
cgcatgagggagaattgaaa

SEQ ID NO: 29555 - DNA, 20 bp, Paenibacillus azotofixans
tcgcactggaaactggacag

SEQ ID NO: 29556 - DNA, 20 bp, Gemella haemolysans
aacagcattaactgcatggt

SEQ ID NO: 29557 - DNA, 20 bp, Aerococcus viridans
atcttcttccgcatggaaga

SEQ ID NO: 29558 - DNA, 20 bp, Campylobacter rectus
attaagtagcttgctattta

SEQ ID NO: 29559 - DNA, 20 bp, Anaerococcus tetradius
tctgaagcgaaactcacaaa

SEQ ID NO: 29560 - DNA, 20 bp, Corynebacterium group F
gggatgctaatcgcacaaag

SEQ ID NO: 29561 - DNA, 20 bp, Propionibacterium freudenreichii
ttttggctggtacacaggtg

SEQ ID NO: 29562 - DNA, 20 bp, Chromobacterium violaceum
gaatccttggtagcgtagct

SEQ ID NO: 29563 - DNA, 20 bp, Enterococcus dispar
cttttgcgtcacttgaggat

SEQ ID NO: 29564 - DNA, 20 bp, Gemella sanguinis
atatacagtagagacggtac

SEQ ID NO: 29565 - DNA, 20 bp, Anaerococcus tetradius
taggcggcctagtaagttag

SEQ ID NO: 29566 - DNA, 20 bp, Clostridium glycolicum
gtagtaagctcttgaaactg

SEQ ID NO: 29567 - DNA, 20 bp, Actinomyces odontolyticus
ctcatggtcaagccgcaaca

SEQ ID NO: 29568 - DNA, 20 bp, Fusobacterium nucleatum
aggaatgagacagagatgtt

SEQ ID NO: 29569 - DNA, 20 bp, Haemophilus haemolyticus
cgagagacgaaagtgcggga

SEQ ID NO: 29570 - DNA, 20 bp, Veillonella dispar
tcgggacgaaaggccttctt

SEQ ID NO: 29571 - DNA, 20 bp, Streptococcus parauberis
ctcaaccatggttcgctttg

SEQ ID NO: 29572 - DNA, 20 bp, Morganella morganii
tgcaagtcgggcggtaacag

SEQ ID NO: 29573 - DNA, 20 bp, Campylobacter lari
agaaccatgacggtacctaa

SEQ ID NO: 29574 - DNA, 20 bp, Pseudoramibacter alactolyticus
tctgttattggggaagaagc

SEQ ID NO: 29575 - DNA, 20 bp, Bacteroides ureolyticus
atagtctagagtaggggaga

SEQ ID NO: 29576 - DNA, 20 bp, Serratia marcescens
aggtggtgagcttaatacgc

SEQ ID NO: 29577 - DNA, 20 bp, Peptostreptococcus anaerobius
ctatacacatggataacata

SEQ ID NO: 29578 - DNA, 20 bp, Prevotella melaninogenica
gcatactggtttccttgagt

SEQ ID NO: 29579 - DNA, 20 bp, Prevotella oris
gcgggagcacaactgacgct

SEQ ID NO: 29580 - DNA, 20 bp, Facklamia ignava
acagcgagaagcgacgtcgc

SEQ ID NO: 29581 - DNA, 20 bp, Bacteroides fragilis
tccgcatggtttcattatta

SEQ ID NO: 29582 - DNA, 20 bp, Bacteroides merdae
tcgctgatagataggcatgc

SEQ ID NO: 29583 - DNA, 20 bp, Arcanobacterium pyogenes
gtcgaacgatgaagccgggg

SEQ ID NO: 29584 - DNA, 20 bp, Helcococcus ovis
caatacccgaagccgtcgag

SEQ ID NO: 29585 - DNA, 20 bp, Serratia marcescens
aggtggtgagcttaatacgt

SEQ ID NO: 29586 - DNA, 20 bp, Pseudoramibacter alactolyticus
gtaaggtaagggcttaccaa

SEQ ID NO: 29587 - DNA, 20 bp, Arcanobacterium bernardiae
agagatggtgcagccttcgg

SEQ ID NO: 29588 - DNA, 20 bp, Prevotella intermedia
tcactttctggcttgaaaga

SEQ ID NO: 29589 - DNA, 20 bp, Corynebacterium auris
ggtgtgagcctcttccacgg

SEQ ID NO: 29590 - DNA, 20 bp, Peptostreptococcus anaerobius
ccaaccgcaaggaggaagtc

SEQ ID NO: 29591 - DNA, 20 bp, Neisseria lactamica
gttgggcagcctgactgctt

SEQ ID NO: 29592 - DNA, 20 bp, Corynebacterium falsenii
agtttcccttgtggtctgta

SEQ ID NO: 29593 - DNA, 20 bp, Acinetobacter johnsonii
aggtagcttgctacctaacc

SEQ ID NO: 29594 - DNA, 20 bp, Propionibacterium avidum
ctaacctgtgtgggggtagc

SEQ ID NO: 29595 - DNA, 20 bp, Peptoniphilus indolicus
ttcggggacagtattacagg

SEQ ID NO: 29596 - DNA, 20 bp, Arthrobacter globiformis
ccaaggcttgacatgttcct

SEQ ID NO: 29597 - DNA, 20 bp, Campylobacter lari
atatcctaagaaccttatag

SEQ ID NO: 29598 - DNA, 20 bp, Corynebacterium amycolatum
ctcgtaagaaactgccgggg

SEQ ID NO: 29599 - DNA, 20 bp, Anaerobiospirillum succiniciproducens
catcatggcccttacggcag

SEQ ID NO: 29600 - DNA, 20 bp, Clostridium butyricum
atgcaacctcgcgagagtga

SEQ ID NO: 29601 - DNA, 20 bp, Porphyromonas endodontalis
tggtgaaaagctgcagctca

SEQ ID NO: 29602 - DNA, 20 bp, Granulicatella adiacens
tcaatctagtggcgaacggg

SEQ ID NO: 29603 - DNA, 20 bp, Arthrobacter globiformis
tattggtcttggatggactc

SEQ ID NO: 29604 - DNA, 20 bp, Clostridium cadaveris
agactgccgtggttaacgcg

SEQ ID NO: 29605 - DNA, 20 bp, Leuconostoc lactis
tctgatagtaactgatcagg

SEQ ID NO: 29606 - DNA, 20 bp, Serratia marcescens
cgaggaggaaggtggtgagc

SEQ ID NO: 29607 - DNA, 20 bp, Capnocytophaga sp.
gaatctataaagacgatcac

SEQ ID NO: 29608 - DNA, 20 bp, Eikenella corrodens
aaccttccagagacggaagg

SEQ ID NO: 29609 - DNA, 20 bp, Prevotella disiens
tgagtacacacaacgtaggc

SEQ ID NO: 29610 - DNA, 20 bp, Gemella morbillorum
gaagaatggatatgtagtaa

SEQ ID NO: 29611 - DNA, 20 bp, Helcococcus ovis
ctggaatctaactgacgctg

SEQ ID NO: 29612 - DNA, 20 bp, Bordetella bronchiseptica
cgggctaatatcctgtgcaa

SEQ ID NO: 29613 - DNA, 20 bp, Pseudoramibacter alactolyticus
ccttatattatggttttgtc

SEQ ID NO: 29614 - DNA, 20 bp, Facklamia ignava
gagttggggactctagttag

SEQ ID NO: 29615 - DNA, 20 bp, Veillonella atypica
atgggagttaatagacggaa

SEQ ID NO: 29616 - DNA, 20 bp, Peptostreptococcus anaerobius
aagccgattatccaaccgca

SEQ ID NO: 29617 - DNA, 20 bp, Brevibacterium linens
ttttagcgaatcccttaaag

SEQ ID NO: 29618 - DNA, 20 bp, Corynebacterium auris
gtcggtacagcgcgtgtgcg

SEQ ID NO: 29619 - DNA, 20 bp, Campylobacter curvus
aagggacaacagttggaaac

SEQ ID NO: 29620 - DNA, 20 bp, Prevotella bivia
cagcgcgaactgtcagactt

SEQ ID NO: 29621 - DNA, 20 bp, Streptococcus suis
tggtagatgcttgaaaggag

SEQ ID NO: 29622 - DNA, 20 bp, Leptotrichia buccalis
gacggaactgcacgagtaga

SEQ ID NO: 29623 - DNA, 20 bp, Brevibacillus choshinensis
ggactccaatcctcagtgcc

SEQ ID NO: 29624 - DNA, 20 bp, Bacillus schlegellii
aggagaggtgcgcggaattc

SEQ ID NO: 29625 - DNA, 20 bp, Leptotrichia buccalis
ccagcacgcatgtgcccggc

SEQ ID NO: 29626 - DNA, 20 bp, Paenibacillus validus
tgagggtgacggtacttgag

SEQ ID NO: 29627 - DNA, 20 bp, Streptococcus dysgalactiae
agaacgctgaggactggtgc

SEQ ID NO: 29628 - DNA, 20 bp, Propionibacterium avidum
ggtggcctaacctgtgtggg

SEQ ID NO: 29629 - DNA, 20 bp, Leuconostoc lactis
atggtgtagggttgaaagat

SEQ ID NO: 29630 - DNA, 20 bp, Chromobacterium violaceum
ggcggttgtgcaagtctgat

SEQ ID NO: 29631 - DNA, 20 bp, Facklamia ignava
gtggctttgatgcatagccg

SEQ ID NO: 29632 - DNA, 20 bp, Streptococcus pyogenes
caccaagtgacggtaactaa

SEQ ID NO: 29633 - DNA, 20 bp, Alicyclobacillus acidocaldarius
agccatggactttcactcca

SEQ ID NO: 29634 - DNA, 20 bp, Bacteroides forsythus
tgttaaagatttattggttg

SEQ ID NO: 29635 - DNA, 20 bp, Streptococcus porcinus
tgcttgcaccagtctaatga

SEQ ID NO: 29636 - DNA, 20 bp, Pseudoramibacter alactolyticus
cttatattatggttttgtcg

SEQ ID NO: 29637 - DNA, 20 bp, Methylobacterium extorquens
gggtgtcagtggcagacggg

SEQ ID NO: 29638 - DNA, 20 bp, Fusobacterium nucleatum
taggaatgagacagagatgt

SEQ ID NO: 29639 - DNA, 20 bp, Leptotrichia buccalis
tttaaagccggtccaagttc

SEQ ID NO: 29640 - DNA, 20 bp, Acinetobacter baumannii
gtagcttgctactggaccta

SEQ ID NO: 29641 - DNA, 20 bp, Campylobacter lari
aacggagtattaagagagct

SEQ ID NO: 29642 - DNA, 20 bp, Bacteroides caccae
caaggcatttgtgaaggtgc

SEQ ID NO: 29643 - DNA, 20 bp, Aerococcus christensenii
acttagaaagatggctctgc

SEQ ID NO: 29644 - DNA, 20 bp, Anaerococcus tetradius
aagcttttaaaactgctcat

SEQ ID NO: 29645 - DNA, 20 bp, Corynebacterium falsenii
ccacttgtggtgacggtacc

SEQ ID NO: 29646 - DNA, 20 bp, Campylobacter curvus
tcttggggaagaaatttgac

SEQ ID NO: 29647 - DNA, 20 bp, Anaerococcus tetradius
gactgcgaagttaagcaaaa

SEQ ID NO: 29648 - DNA, 20 bp, Clostridium glycolicum
atacacatggataacatacc

SEQ ID NO: 29649 - DNA, 20 bp, Streptococcus thoraltensis
taaaaggtgcaacagcatca

SEQ ID NO: 29650 - DNA, 20 bp, Alcaligenes faecalis
gttgtaaagtacttttggca

SEQ ID NO: 29651 - DNA, 20 bp, Bacteroides capilosus
gaacacccgaagtccgtagc

SEQ ID NO: 29652 - DNA, 20 bp, Anaerococcus prevotii
catcaaagatttatcggtgt

SEQ ID NO: 29653 - DNA, 20 bp, Morganella morganii
caccatcagatgaacccata

SEQ ID NO: 29654 - DNA, 20 bp, Neisseria subflava
tgactcgagtgtgtcagagg

SEQ ID NO: 29655 - DNA, 20 bp, Chromobacterium violaceum
aacggcattggagactgcac

SEQ ID NO: 29656 - DNA, 20 bp, Prevotella loescheii
gcttgcaatccccgatggcg

SEQ ID NO: 29657 - DNA, 20 bp, Clostridium cadaveris
gtaggggtttcgatacctct

SEQ ID NO: 29658 - DNA, 20 bp, Clostridium clostridiiforme
tcttcggagcaatggagaca

SEQ ID NO: 29659 - DNA, 20 bp, Virgibacillus pantothenticus
atgttgaaaggcggcatatg

SEQ ID NO: 29660 - DNA, 20 bp, Weissella paramesenteroides
agaacggcactgagagtaac

SEQ ID NO: 29661 - DNA, 20 bp, Finegoldia magna
tggaaactgataaacttgag

SEQ ID NO: 29662 - DNA, 20 bp, Streptococcus constellatus
gatgtttaaaaggtgcaaga

SEQ ID NO: 29663 - DNA, 20 bp, Tissierella praeacuta
ttgctaacagataagctgag

SEQ ID NO: 29664 - DNA, 20 bp, Methylobacterium extorquens
tcgagagatcggggatcctc

SEQ ID NO: 29665 - DNA, 20 bp, Neisseria meningitidis
aggtaccgtcatcagccgct

SEQ ID NO: 29666 - DNA, 20 bp, Paenibacillus larvae
tgtaagaccgggataacttg

SEQ ID NO: 29667 - DNA, 20 bp, Tetragenococcus halophilus
gaaagaaagctcaaaggcgc

SEQ ID NO: 29668 - DNA, 20 bp, Chromobacterium violaceum
gggggtttgaatccttggta

SEQ ID NO: 29669 - DNA, 20 bp, Helcococcus kunzii
caagcgaatcgcataaaaca

SEQ ID NO: 29670 - DNA, 20 bp, Tissierella praeacuta
gaagatttcttcggaatgaa

SEQ ID NO: 29671 - DNA, 20 bp, Haemophilus haemolyticus
agtgcgggaccgcaaggccg

SEQ ID NO: 29672 - DNA, 20 bp, Lactococcus lactis
acatgcaagttgagcgctga

SEQ ID NO: 29673 - DNA, 20 bp, Bacillus pallidus
caaaaaaccactctcagttc

SEQ ID NO: 29674 - DNA, 20 bp, Citrobacter sedlakii
actgcagagatgcggttgtg

SEQ ID NO: 29675 - DNA, 20 bp, Neisseria gonorrhoeae
gcggccgatgacggtacctg

SEQ ID NO: 29676 - DNA, 20 bp, Methylobacterium mesophilicum
ccttttggggaaaggcttgc

SEQ ID NO: 29677 - DNA, 20 bp, Campylobacter rectus
ccattgcgaaagcgatctgc

SEQ ID NO: 29678 - DNA, 20 bp, Streptococcus canis
gttaagaacttaaaaggggc

SEQ ID NO: 29679 - DNA, 20 bp, Enterococcus cecorum
ctagcgagactgccgcagac

SEQ ID NO: 29680 - DNA, 20 bp, Bacteroides ovatus
tgaaggatgaaggctctatg

SEQ ID NO: 29681 - DNA, 20 bp, Enterococcus raffinosus
gatggccttgctatcactta

SEQ ID NO: 29682 - DNA, 20 bp, Corynebacterium xerosis
cggataggaccgcaccgtga

SEQ ID NO: 29683 - DNA, 20 bp, Neisseria meningitidis
cacactcgagtcacccagtt

SEQ ID NO: 29684 - DNA, 20 bp, Methylobacterium mesophilicum
gcgtgttatggggagagatt

SEQ ID NO: 29685 - DNA, 20 bp, Prevotella melaninogenica
ttggtacctggtatcagcgg

SEQ ID NO: 29686 - DNA, 20 bp, Enterococcus casseliflavus
cgtataacactattttccgc

SEQ ID NO: 29687 - DNA, 20 bp, Pseudoramibacter alactolyticus
aagcctgtgagagaaccgca

SEQ ID NO: 29688 - DNA, 20 bp, Arcanobacterium bernardiae
tgtgccagagatggtgcagc

SEQ ID NO: 29689 - DNA, 20 bp, Bacillus cereus
tgctctcaagaagttagcgg

SEQ ID NO: 29690 - DNA, 20 bp, Peptostreptococcus anaerobius
atgcaagtcgagcgcgtctg

SEQ ID NO: 29691 - DNA, 20 bp, Achromobacter xylosoxidans
aacgtcgcgggttaataccc

SEQ ID NO: 29692 - DNA, 20 bp, Comamonas terrigena
gagaactgaggttgaaagca

SEQ ID NO: 29693 - DNA, 20 bp, Geobacillus thermoglucosidasius
gaagtgccgttcgaacaggg

SEQ ID NO: 29694 - DNA, 20 bp, Fusobacterium nucleatum
taggaatgagatagagatat

SEQ ID NO: 29695 - DNA, 20 bp, Facklamia ignava
ccatcggaaacgatgactaa

SEQ ID NO: 29696 - DNA, 20 bp, Acinetobacter genospecies 3
gctactgatcttagcggcgg

SEQ ID NO: 29697 - DNA, 20 bp, Streptococcus dysgalactiae
tgatggtgggagtggaaaat

SEQ ID NO: 29698 - DNA, 20 bp, Leuconostoc lactis
gtatctgatagtaactgatc

SEQ ID NO: 29699 - DNA, 20 bp, Veillonella atypica
ataagctatcactgaaggag

SEQ ID NO: 29700 - DNA, 20 bp, Corynebacterium afermentans
cgtttcctctatatgtcaag

SEQ ID NO: 29701 - DNA, 20 bp, Bacillus lentus
aagaccctgtctccagggcg

SEQ ID NO: 29702 - DNA, 20 bp, Achromobacter xylosoxidans
aacgtcgcgggttaatacct

SEQ ID NO: 29703 - DNA, 20 bp, Clostridium ramosum
tggtagaggatggacttatg

SEQ ID NO: 29704 - DNA, 20 bp, Pediococcus inopinatus
gattttaactataaagtgag

SEQ ID NO: 29705 - DNA, 20 bp, Prevotella loescheii
aagtcgcggggcagcatggg

SEQ ID NO: 29706 - DNA, 20 bp, Microbacterium hominis
atcgcatggtcagtagctgg

SEQ ID NO: 29707 - DNA, 20 bp, Empedobacter brevis
gagtagctgaaggtaccaga

SEQ ID NO: 29708 - DNA, 20 bp, Helcococcus kunzii
aacttgagtagatgagggga

SEQ ID NO: 29709 - DNA, 20 bp, Achromobacter xylosoxidans
gtctggaatgccgaagagat

SEQ ID NO: 29710 - DNA, 20 bp, Facklamia ignava
cagtcgcatgactggaatgg

SEQ ID NO: 29711 - DNA, 20 bp, Microbacterium terregens
cgaacggtgaaagagagctt

SEQ ID NO: 29712 - DNA, 20 bp, Sporosarcina pasteurii
agtgacagcatagccgtctt

SEQ ID NO: 29713 - DNA, 20 bp, Weissella paramesenteroides
gagcttgctctgatttgatt

SEQ ID NO: 29714 - DNA, 20 bp, Bacillus sp
tctgacctccctagagatag

SEQ ID NO: 29715 - DNA, 20 bp, Cardiobacterium hominis
tatgaaagaggaaagcggaa

SEQ ID NO: 29716 - DNA, 20 bp, Stenotrophomonas maltophilia
gcgactagaatgtggtagag

SEQ ID NO: 29717 - DNA, 20 bp, Aneurinibacillus thermoaerophilus
ccgccgggatgacctcccgg

SEQ ID NO: 29718 - DNA, 20 bp, Clostridium ramosum
agggagcaggcggcagcaag

SEQ ID NO: 29719 - DNA, 20 bp, Methylobacterium mesophilicum
tgacatggcgtgttatgggg

SEQ ID NO: 29720 - DNA, 20 bp, Cardiobacterium hominis
tacctgcgcaattgacgtta

SEQ ID NO: 29721 - DNA, 20 bp, Bacillus oleronius
acatcctcttgacctcccta

SEQ ID NO: 29722 - DNA, 20 bp, Propionibacterium avidum
ctgggagtgctcagagatgg

SEQ ID NO: 29723 - DNA, 20 bp, Moraxella osloensis
gcgcaagctcttgctattag

SEQ ID NO: 29724 - DNA, 20 bp, Moraxella  catarrhalis
cttgcttctgatacttagtg

SEQ ID NO: 29725 - DNA, 20 bp, Propionibacterium freudenreichii
ttaactctgggcttgctttc

SEQ ID NO: 29726 - DNA, 20 bp, Streptococcus constellatus
accccgtattctgtgagttg

SEQ ID NO: 29727 - DNA, 20 bp, Stenotrophomonas maltophilia
ccagctggttaatacccggt

SEQ ID NO: 29728 - DNA, 20 bp, Granulicatella adiacens
ctgctgatggatggacccgc

SEQ ID NO: 29729 - DNA, 20 bp, Comamonas terrigena
cgaaaagcttcgggttaata

SEQ ID NO: 29730 - DNA, 20 bp, Plesiomonas shigelloides
acggaccaaagtgggggctc

SEQ ID NO: 29731 - DNA, 20 bp, Tissierella praeacuta
aactttaattatcttagcgg

SEQ ID NO: 29732 - DNA, 20 bp, Clostridium limosum
tagcaagactgcctgggtaa

SEQ ID NO: 29733 - DNA, 20 bp, Comamonas testosteroni
acatggcaggaacttaccag

SEQ ID NO: 29734 - DNA, 20 bp, Pediococcus acidilactici
taacacgaagtgagtggcgg

SEQ ID NO: 29735 - DNA, 20 bp, Clostridium tetani
ggtttcgcatgaaactttaa

SEQ ID NO: 29736 - DNA, 20 bp, Microbacterium hominis
gatatgagctgcgatcgcat

SEQ ID NO: 29737 - DNA, 20 bp, Corynebacterium glucuronolyticum
cgtaagtgatctgccctgca

SEQ ID NO: 29738 - DNA, 20 bp, Oligella urethralis
aaggtattagcctaagactt

SEQ ID NO: 29739 - DNA, 20 bp, Streptococcus uberis
ggtctaaggagttgcgaacg

SEQ ID NO: 29740 - DNA, 20 bp, Actinomyces naeslundii
agacggggtttcctcctttg

SEQ ID NO: 29741 - DNA, 20 bp, Bacteroides thetaiotaomicron
ggcaaatgtgaaggtgctgc

SEQ ID NO: 29742 - DNA, 20 bp, Dermabacter hominis
ggcttaaccttgggcgtgcg

SEQ ID NO: 29743 - DNA, 20 bp, Streptococcus suis
gcataacagtatttaccgca

SEQ ID NO: 29744 - DNA, 20 bp, Tetragenococcus halophilus
gggtcattggaaactggatc

SEQ ID NO: 29745 - DNA, 20 bp, Vibrio hollisae
cgccagaagtgggtagggta

SEQ ID NO: 29746 - DNA, 20 bp, Bacteroides forsythus
ctggcgggactgccggcgta

SEQ ID NO: 29747 - DNA, 20 bp, Aerococcus christensenii
gtgatgatgcatagccgacc

SEQ ID NO: 29748 - DNA, 20 bp, Bacillus schlegellii
gcggcctgttaagtctgctg

SEQ ID NO: 29749 - DNA, 20 bp, Bacillus fusiformis
gacatcccgttgaccactgt

SEQ ID NO: 29750 - DNA, 20 bp, Aerococcus christensenii
cctaccgataagcgggggac

SEQ ID NO: 29751 - DNA, 20 bp, Corynebacterium urealyticum
ttttcacgatttccgtgccg

SEQ ID NO: 29752 - DNA, 20 bp, Corynebacterium propinquum
ggtacaatgcgcagcgagcc

SEQ ID NO: 29753 - DNA, 20 bp, Campylobacter sputorum
agatagaagtttccccttcg

SEQ ID NO: 29754 - DNA, 20 bp, Pasteurella multocida
tctctgaggaggaaagggtg

SEQ ID NO: 29755 - DNA, 20 bp, Streptococcus constellatus
tacaccgtattctgtgagtt

SEQ ID NO: 29756 - DNA, 20 bp, Enterococcus dispar
tatttgaaaggcgcttttgc

SEQ ID NO: 29757 - DNA, 20 bp, Lactococcus garvieae
ggtagtgtaaaggactacca

SEQ ID NO: 29758 - DNA, 20 bp, Bacteroides capilosus
cgtgtaggcgggactgcaag

SEQ ID NO: 29759 - DNA, 20 bp, Streptococcus hyointestinalis
ggggcaactgctccactatc

SEQ ID NO: 29760 - DNA, 20 bp, Porphyromonas endodontalis
actgtagtcttgccgttgaa

SEQ ID NO: 29761 - DNA, 20 bp, Helcococcus ovis
tttctggaatctaactgacg

SEQ ID NO: 29762 - DNA, 20 bp, Bacteroides capilosus
gtagttcttgagtgctggag

SEQ ID NO: 29763 - DNA, 20 bp, Gemella haemolysans
cggtcacggtgggacagatg

SEQ ID NO: 29764 - DNA, 20 bp, Bacteroides uniformis
gcttgaattgcaactgaatg

SEQ ID NO: 29765 - DNA, 20 bp, Acinetobacter radioresistens
aatactttaggatagtggac

SEQ ID NO: 29766 - DNA, 20 bp, Bacteroides forsythus
ccgtaaccgcgaggatcggc

SEQ ID NO: 29767 - DNA, 20 bp, Bacteroides uniformis
atgtcagccgcaaggcagtt

SEQ ID NO: 29768 - DNA, 20 bp, Prevotella denticola
tgaattgcagcgcatactgg

SEQ ID NO: 29769 - DNA, 20 bp, Veillonella atypica
tcttcggaagccagaaaaca

SEQ ID NO: 29770 - DNA, 20 bp, Campylobacter lari
gaactgcttgggaaactggt

SEQ ID NO: 29771 - DNA, 20 bp, Moraxella lacunata
cgtcttacgagagaaagggg

SEQ ID NO: 29772 - DNA, 20 bp, Bacillus sp
gatgaagagcttgcttttga

SEQ ID NO: 29773 - DNA, 20 bp, Neisseria flavescens
aatatcgacagctgatgacg

SEQ ID NO: 29774 - DNA, 20 bp, Clostridium cadaveris
aacccctatagttagttgct

SEQ ID NO: 29775 - DNA, 20 bp, Streptococcus dysgalactiae
tcctgaccggtctagagata

SEQ ID NO: 29776 - DNA, 20 bp, Anaerococcus prevotii
agagatataccctcttcttc

SEQ ID NO: 29777 - DNA, 20 bp, Peptoniphilus indolicus
aagatgggaactctaaaggg

SEQ ID NO: 29778 - DNA, 20 bp, Actinomyces meyeri
cttctttgggataacgcccg

SEQ ID NO: 29779 - DNA, 20 bp, Bacillus alcalophilus
aggaatcacatggttctttt

SEQ ID NO: 29780 - DNA, 20 bp, Corynebacterium glucuronolyticum
ctggtacagtgcgtgtgcga

SEQ ID NO: 29781 - DNA, 20 bp, Staphylococcus piscifermentans
cgcaatgaaagacggttttg

SEQ ID NO: 29782 - DNA, 20 bp, Veillonella dispar
gaaggattgacggtaccgga

SEQ ID NO: 29783 - DNA, 20 bp, Facklamia ignava
accatcggaaacgatgacta

SEQ ID NO: 29784 - DNA, 20 bp, Bacillus lentus
ctgggattcgctcatgcgtc

SEQ ID NO: 29785 - DNA, 20 bp, Acinetobacter junii
gatgaggtgcttgcacctta

SEQ ID NO: 29786 - DNA, 20 bp, Brevibacillus choshinensis
gtggagggccacttgaaact

SEQ ID NO: 29787 - DNA, 20 bp, Anaerococcus prevotii
gcggaaatgcaagtcaggtg

SEQ ID NO: 29788 - DNA, 20 bp, Corynebacterium falsenii
cacttgtggtgacggtacct

SEQ ID NO: 29789 - DNA, 20 bp, Acinetobacter junii
cttgcaccttatcttagcgg

SEQ ID NO: 29790 - DNA, 20 bp, Pseudoramibacter alactolyticus
gggagtaaagccttatatta

SEQ ID NO: 29791 - DNA, 20 bp, Leuconostoc lactis
ataaaacctaacaccgcatg

SEQ ID NO: 29792 - DNA, 20 bp, Porphyromonas endodontalis
gacgcgaggaaggggcggat

SEQ ID NO: 29793 - DNA, 20 bp, Bacteroides fragilis
aacatgtcagtgagcaatca

SEQ ID NO: 29794 - DNA, 20 bp, Cellulosimicrobium cellulans
tgacttcgggataactccgg

SEQ ID NO: 29795 - DNA, 20 bp, Bacteroides merdae
aggggtcccgcatgggaata

SEQ ID NO: 29796 - DNA, 20 bp, Granulicatella elegans
atgctaaaaccgcataggtt

SEQ ID NO: 29797 - DNA, 20 bp, Pasteurella multocida
aatgaggaagggatgttgtt

SEQ ID NO: 29798 - DNA, 20 bp, Propionibacterium freudenreichii
ctggtggtaatcccgaatat

SEQ ID NO: 29799 - DNA, 20 bp, Fusobacterium nucleatum
cccttcggggaaacctaaag

SEQ ID NO: 29800 - DNA, 20 bp, Paenibacillus lautus
aaggaagaacgtcttctaga

SEQ ID NO: 29801 - DNA, 20 bp, Anaerobiospirillum succiniciproducens
aaggcggtctcctgggcaaa

SEQ ID NO: 29802 - DNA, 20 bp, Paenibacillus larvae
acggggcaacctgtcactta

SEQ ID NO: 29803 - DNA, 20 bp, Tissierella praeacuta
ggcttgacatgcccctgacc

SEQ ID NO: 29804 - DNA, 20 bp, Arcanobacterium bernardiae
gatattctgctttcatcgca

SEQ ID NO: 29805 - DNA, 20 bp, Brevibacillus laterosporus
gctacttcgcgagaagatgc

SEQ ID NO: 29806 - DNA, 20 bp, Weissella paramesenteroides
gacgagcttgctctgatttg

SEQ ID NO: 29807 - DNA, 20 bp, Clostridium clostridiiforme
agctgccgaaggcggggcag

SEQ ID NO: 29808 - DNA, 20 bp, Alicyclobacillus acidocaldarius
ctttcactccagacttgctc

SEQ ID NO: 29809 - DNA, 20 bp, Peptoniphilus indolicus
taacgatcaaagtgaattag

SEQ ID NO: 29810 - DNA, 20 bp, Streptococcus infantarius
gatgccattcctagagatag

SEQ ID NO: 29811 - DNA, 20 bp, Corynebacterium jeikeium
gtgtgggggttttatttacg

SEQ ID NO: 29812 - DNA, 20 bp, Empedobacter brevis
ctatcattagttgccagcgt

SEQ ID NO: 29813 - DNA, 20 bp, Actinomyces radingae
cagaaatgggtgctaatact

SEQ ID NO: 29814 - DNA, 20 bp, Corynebacterium glucuronolyticum
gtgtgtcgcgtcgtctgtgt

SEQ ID NO: 29815 - DNA, 20 bp, Paenibacillus thiaminolyticus
agcaatctgccacttatgga

SEQ ID NO: 29816 - DNA, 20 bp, Clostridium ramosum
tgcaggagaggatcgtggaa

SEQ ID NO: 29817 - DNA, 20 bp, Brochothrix campestris
aacacccaaagccggtttgg

SEQ ID NO: 29818 - DNA, 20 bp, Propionibacterium avidum
gtatgcctccttgtggggct

SEQ ID NO: 29819 - DNA, 20 bp, Gemella haemolysans
agtttttctggtgcttgcac

SEQ ID NO: 29820 - DNA, 20 bp, Facklamia ignava
tcaaccgtggagttgcattg

SEQ ID NO: 29821 - DNA, 20 bp, Turicella otitidis
gagccatttttagtgtgatg

SEQ ID NO: 29822 - DNA, 20 bp, Pediococcus dextrinicus
tacaatggctagtacaacga

SEQ ID NO: 29823 - DNA, 20 bp, Bacteroides stercoris
acacggcgacgtggtgctaa

SEQ ID NO: 29824 - DNA, 20 bp, Campylobacter lari
taactgttaaactgcttgag

SEQ ID NO: 29825 - DNA, 20 bp, Paenibacillus apiarius
ggtgtttaaacctagggctc

SEQ ID NO: 29826 - DNA, 20 bp, Facklamia sourekii
tcgtgaggccaagcgaatct

SEQ ID NO: 29827 - DNA, 20 bp, Pseudomonas fluorescens
aatacgtgagtattttgacg

SEQ ID NO: 29828 - DNA, 20 bp, Streptococcus dysgalactiae
ggagtggaaaatccaccatg

SEQ ID NO: 29829 - DNA, 20 bp, Leuconostoc carnosum
caggttaaaaggcgctacgg

SEQ ID NO: 29830 - DNA, 20 bp, Prevotella corporis
ggtgtcggctcaagtgccat

SEQ ID NO: 29831 - DNA, 20 bp, Mannheimia haemolytica
taactctggtgcccgtagct

SEQ ID NO: 29832 - DNA, 20 bp, Ewingella americana
ttgtgggcttgacccgtggc

SEQ ID NO: 29833 - DNA, 20 bp, Prevotella loescheii
atgatacgcgaggaacctta

SEQ ID NO: 29834 - DNA, 20 bp, Leptotrichia buccalis
agccaaggcggacgggtgag

SEQ ID NO: 29835 - DNA, 20 bp, Aerococcus viridans
cgcataatatcttcttccgc

SEQ ID NO: 29836 - DNA, 20 bp, Pasteurella multocida
atgaggaagggatgttgtta

SEQ ID NO: 29837 - DNA, 20 bp, Actinomyces radingae
ggtgggcggtcacattggga

SEQ ID NO: 29838 - DNA, 20 bp, Streptococcus parauberis
gaagactggtgcttgcacta

SEQ ID NO: 29839 - DNA, 20 bp, Streptococcus parasanguinis
cgagcggaggagttgcgaac

SEQ ID NO: 29840 - DNA, 20 bp, Bacteroides fragilis
atgtcagtgagcaatcaccg

SEQ ID NO: 29841 - DNA, 20 bp, Peptostreptococcus anaerobius
ataatatatatttacggcat

SEQ ID NO: 29842 - DNA, 20 bp, Clostridium butyricum
tctgtaatggaggaagccac

SEQ ID NO: 29843 - DNA, 20 bp, Prevotella oris
ttatgcggggataaagtgag

SEQ ID NO: 29844 - DNA, 20 bp, Actinomyces naeslundii
ttgtgggtgggttgacggta

SEQ ID NO: 29845 - DNA, 20 bp, Gemella haemolysans
gaagaatgattgtgtagtaa

SEQ ID NO: 29846 - DNA, 20 bp, Oligella urethralis
gaggtcttacgatccccctc

SEQ ID NO: 29847 - DNA, 20 bp, Clostridium ramosum
ctggtagaggatggacttat

SEQ ID NO: 29848 - DNA, 20 bp, Rothia mucilaginosa
acctacctttaactctggga

SEQ ID NO: 29849 - DNA, 20 bp, Alcaligenes faecalis
ttaactgccgagctagagta

SEQ ID NO: 29850 - DNA, 20 bp, Pseudoramibacter alactolyticus
gaacgagaaggttttgaatg

SEQ ID NO: 29851 - DNA, 20 bp, Clostridium paraputrificum
gaagtagcaattaaaggagc

SEQ ID NO: 29852 - DNA, 20 bp, Paenibacillus validus
gcatgggggaatcatgaaac

SEQ ID NO: 29853 - DNA, 20 bp, Brevibacillus laterosporus
aagatgctaatctcttaaaa

SEQ ID NO: 29854 - DNA, 20 bp, Fusobacterium necrogenes
gcagagatgccttcgtgccc

SEQ ID NO: 29855 - DNA, 20 bp, Fusobacterium mortiferum
agctatatgcgctgcaggag

SEQ ID NO: 29856 - DNA, 20 bp, Weeksella virosa
ggtgaaatcctatcgcttaa

SEQ ID NO: 29857 - DNA, 20 bp, Bacillus flexus
ttgcttctatgacgttagcg

SEQ ID NO: 29858 - DNA, 20 bp, Sporosarcina pasteurii
gtgacagcatagccgtcttt

SEQ ID NO: 29859 - DNA, 20 bp, Clostridium tetani
ggagggtccaaccttctgtg

SEQ ID NO: 29860 - DNA, 20 bp, Bacillus pumilus
ttgaaccgcatggttcaagg

SEQ ID NO: 29861 - DNA, 20 bp, Bacteroides merdae
tgggaatatttgttaaagat

SEQ ID NO: 29862 - DNA, 20 bp, Corynebacterium group F
aactttttggatattgttgt

SEQ ID NO: 29863 - DNA, 20 bp, Brochothrix campestris
gtttggtaaccttcgggagc

SEQ ID NO: 29864 - DNA, 20 bp, Facklamia ignava
tggctttgatgcatagccga

SEQ ID NO: 29865 - DNA, 20 bp, Bacteroides fragilis
tataagaataaagtgcagta

SEQ ID NO: 29866 - DNA, 20 bp, Anaerococcus prevotii
cgacttactgggctcattct

SEQ ID NO: 29867 - DNA, 20 bp, Streptococcus constellatus
gagcatcactaccagatgga

SEQ ID NO: 29868 - DNA, 20 bp, Prevotella oris
cgtggattaagcgtgttgtg

SEQ ID NO: 29869 - DNA, 20 bp, Alicyclobacillus acidocaldarius
aactacgagcggctttttgg

SEQ ID NO: 29870 - DNA, 20 bp, Actinomyces neuii
tcctcgcatggggttgttgg

SEQ ID NO: 29871 - DNA, 20 bp, Campylobacter concisus
cccttgtggggctggtgtac

SEQ ID NO: 29872 - DNA, 20 bp, Streptococcus parasanguinis
acattgcatgatgttgactt

SEQ ID NO: 29873 - DNA, 20 bp, Anaerococcus prevotii
gtcaggtgtaaaaggcagta

SEQ ID NO: 29874 - DNA, 20 bp, Corynebacterium glucuronolyticum
cgatacgggcattgcttgag

SEQ ID NO: 29875 - DNA, 20 bp, Edwardsiella hoshinae
tcagtagggaggaaggtgta

SEQ ID NO: 29876 - DNA, 20 bp, Pseudomonas luteola
ggaggaagggttgtaaccta

SEQ ID NO: 29877 - DNA, 20 bp, Weeksella virosa
ggcatcatttagttttgaaa

SEQ ID NO: 29878 - DNA, 20 bp, Corynebacterium urealyticum
accgcccgtcgcgtcatgaa

SEQ ID NO: 29879 - DNA, 20 bp, Corynebacterium jeikeium
ggcataactagagtgctgta

SEQ ID NO: 29880 - DNA, 20 bp, Paenibacillus popilliae
aggaggaaaggcggagcaat

SEQ ID NO: 29881 - DNA, 20 bp, Shewanella algae
ccttgcgctgatggataagc

SEQ ID NO: 29882 - DNA, 20 bp, Anaerococcus tetradius
agcgacgccgcgtgatttag

SEQ ID NO: 29883 - DNA, 20 bp, Dermabacter hominis
tggcccgcatgggttttggt

SEQ ID NO: 29884 - DNA, 20 bp, Raoultella terrigena
gtagcacagaagagcttgct

SEQ ID NO: 29885 - DNA, 20 bp, Clostridium histolyticum
tcccgagaatcctgtggaaa

SEQ ID NO: 29886 - DNA, 20 bp, Burkholderia multivorans
tctgttaagacagatgtgaa

SEQ ID NO: 29887 - DNA, 20 bp, Bacillus oleronius
catgagggagaattgaaaga

SEQ ID NO: 29888 - DNA, 20 bp, Campylobacter sputorum
acccttctagagatagaagt

SEQ ID NO: 29889 - DNA, 20 bp, Alcaligenes faecalis
ggcagcgcgagagagcttgc

SEQ ID NO: 29890 - DNA, 20 bp, Sporosarcina pasteurii
tataccggtcagcgggatgt

SEQ ID NO: 29891 - DNA, 20 bp, Bacillus oleronius
ttcgcatgagggagaattga

SEQ ID NO: 29892 - DNA, 20 bp, Moraxella osloensis
ggctcattaagtcacatgtg

SEQ ID NO: 29893 - DNA, 20 bp, Eggerthella lenta
ggcagcctgctgggccgcaa

SEQ ID NO: 29894 - DNA, 20 bp, Pasteurella multocida
tggggattgggctatatgct

SEQ ID NO: 29895 - DNA, 20 bp, Bacteroides merdae
ggatgctaatctccaaacca

SEQ ID NO: 29896 - DNA, 20 bp, Anaerobiospirillum succiniciproducens
aaactgcctttctagagtat

SEQ ID NO: 29897 - DNA, 20 bp, Brochothrix campestris
acacccaaagccggtttggt

SEQ ID NO: 29898 - DNA, 20 bp, Acinetobacter haemolyticus
cggggaagtgtagcttgcta

SEQ ID NO: 29899 - DNA, 20 bp, Chromobacterium violaceum
gctgttgggggtttgaatcc

SEQ ID NO: 29900 - DNA, 20 bp, Lactococcus lactis
aaactttaaacacaagtttt

SEQ ID NO: 29901 - DNA, 20 bp, Facklamia hominis
cgtggagaacctaccctttt

SEQ ID NO: 29902 - DNA, 20 bp, Leptotrichia buccalis
gtgtgggcatgaagagtgtc

SEQ ID NO: 29903 - DNA, 20 bp, Clostridium botulinum
tacaatggtaggtacaataa

SEQ ID NO: 29904 - DNA, 20 bp, Fusobacterium varium
taataccggatattatgact

SEQ ID NO: 29905 - DNA, 20 bp, Pasteurella multocida
gattgggctatatgcttggt

SEQ ID NO: 29906 - DNA, 20 bp, Clostridium paraputrificum
agcttcgcatgaagtagcaa

SEQ ID NO: 29907 - DNA, 20 bp, Streptococcus agalactiae
ttacactagactgatgagtt

SEQ ID NO: 29908 - DNA, 20 bp, Leptotrichia buccalis
gaacttgccctgcagacagg

SEQ ID NO: 29909 - DNA, 20 bp, Aerococcus christensenii
cgataagcgggggacaacat

SEQ ID NO: 29910 - DNA, 20 bp, Acinetobacter lwoffii
ggaggctaccgagattaata

SEQ ID NO: 29911 - DNA, 20 bp, Anaerobiospirillum succiniciproducens
atcatggcccttacggcagg

SEQ ID NO: 29912 - DNA, 20 bp, Haemophilus aegyptius
gagacgaaagtgcgggactg

SEQ ID NO: 29913 - DNA, 20 bp, Dermacoccus nishinomiyaensis
agtgaaagatggctctgcta

SEQ ID NO: 29914 - DNA, 20 bp, Haemophilus actinemycetemcomitans
agatgggtttgtgccttagg

SEQ ID NO: 29915 - DNA, 20 bp, Bacteroides fragilis
cgaggggcatcaggaagaaa

SEQ ID NO: 29916 - DNA, 20 bp, Rhodococcus equi
cccatggcccaaccagtttc

SEQ ID NO: 29917 - DNA, 20 bp, Streptococcus equinus
taacagcatttaacacatgt

SEQ ID NO: 29918 - DNA, 20 bp, Moraxella lacunata
gtcttacgagagaaaggggg

SEQ ID NO: 29919 - DNA, 20 bp, Staphylococcus auricularis
tgcgtaagtaactgtgcgcg

SEQ ID NO: 29920 - DNA, 20 bp, Staphylococcus carnosus
aggtaactatgcgcaccttg

SEQ ID NO: 29921 - DNA, 20 bp, Bacillus coagulans
agtgaagaaggccttcgggt

SEQ ID NO: 29922 - DNA, 20 bp, Helcococcus ovis
aaagttctgtccttagtgaa

SEQ ID NO: 29923 - DNA, 20 bp, Prevotella bivia
ccgtttggtaagcgtgttgt

SEQ ID NO: 29924 - DNA, 20 bp, Bacteroides ovatus
atatattggaaacagtatag

SEQ ID NO: 29925 - DNA, 20 bp, Paenibacillus thiaminolyticus
tggagagtaactgttccata

SEQ ID NO: 29926 - DNA, 20 bp, Bacteroides thetaiotaomicron
caaactggagatggcgaccg

SEQ ID NO: 29927 - DNA, 20 bp, Prevotella disiens
tacacacaacgtaggcggaa

SEQ ID NO: 29928 - DNA, 20 bp, Weeksella virosa
agccgagcggtagattatct

SEQ ID NO: 29929 - DNA, 20 bp, Acinetobacter calcoaceticus
taccttcagatagtggacgt

SEQ ID NO: 29930 - DNA, 20 bp, Fusobacterium mortiferum
ctatatgcgctgcaggagag

SEQ ID NO: 29931 - DNA, 20 bp, Bacillus oleronius
tccctgatgattagcggcgg

SEQ ID NO: 29932 - DNA, 20 bp, Bacillus halodurans
aagactgggataacatcgag

SEQ ID NO: 29933 - DNA, 20 bp, Streptococcus anginosus
gttaaggaagaacgagtgtg

SEQ ID NO: 29934 - DNA, 20 bp, Peptoniphilus indolicus
gtcggaacaaagagcgggca

SEQ ID NO: 29935 - DNA, 20 bp, Atopobium parvulum
ctgttaggtcgggagttaaa

SEQ ID NO: 29936 - DNA, 20 bp, Pediococcus pentosaceus
cgaacttccgttaattgatt

SEQ ID NO: 29937 - DNA, 20 bp, Bacillus pumilus
ataccggatagttccttgaa

SEQ ID NO: 29938 - DNA, 20 bp, Brochothrix campestris
tgaacatcataagatgttca

SEQ ID NO: 29939 - DNA, 20 bp, Bacillus flexus
gaagcttgcttctatgacgt

SEQ ID NO: 29940 - DNA, 20 bp, Bacteroides vulgatus
atgccaatccccaaaacctc

SEQ ID NO: 29941 - DNA, 20 bp, Pseudoramibacter alactolyticus
agaaggttttgaatgatcct

SEQ ID NO: 29942 - DNA, 20 bp, Streptococcus parauberis
ctaaatttaaaaggagcaat

SEQ ID NO: 29943 - DNA, 20 bp, Oligella ureolytica
ccttaagatgctgacggtag

SEQ ID NO: 29944 - DNA, 20 bp, Bacillus lentus
ttcttattggttcgctcgac

SEQ ID NO: 29945 - DNA, 20 bp, Serratia marcescens
taatacgttcatcaattgac

SEQ ID NO: 29946 - DNA, 20 bp, Corynebacterium accolens
cggataggaaccatctttag

SEQ ID NO: 29947 - DNA, 20 bp, Facklamia ignava
gttataggtttgacggtaac

SEQ ID NO: 29948 - DNA, 20 bp, Actinomyces meyeri
tcatggtcaagccgcaactg

SEQ ID NO: 29949 - DNA, 20 bp, Comamonas terrigena
gatcgcaagaccttgcgcaa

SEQ ID NO: 29950 - DNA, 20 bp, Leptotrichia buccalis
cgcaagcctgccctggaaac

SEQ ID NO: 29951 - DNA, 20 bp, Prevotella intermedia
gcacgcaacgtatgcggaat

SEQ ID NO: 29952 - DNA, 20 bp, Moraxella osloensis
caccatgggagtctattgca

SEQ ID NO: 29953 - DNA, 20 bp, Streptococcus dysgalactiae
tgcaccggttcaaggagttg

SEQ ID NO: 29954 - DNA, 20 bp, Prevotella loescheii
aatccccgatggcgaccggc

SEQ ID NO: 29955 - DNA, 20 bp, Turicella otitidis
taggagccatttttagtgtg

SEQ ID NO: 29956 - DNA, 20 bp, Prevotella corporis
gggcttgaattgcaggagaa

SEQ ID NO: 29957 - DNA, 20 bp, Gemella haemolysans
cgaagtttttctggtgcttg

SEQ ID NO: 29958 - DNA, 20 bp, Clostridium innocuum
catgggagtcagtaataccc

SEQ ID NO: 29959 - DNA, 20 bp, Weissella paramesenteroides
actgaggaatggctttggaa

SEQ ID NO: 29960 - DNA, 20 bp, Bacillus pallidus
aaggtgactgccggctaaaa

SEQ ID NO: 29961 - DNA, 20 bp, Corynebacterium afermentans
gtttccagacgtttcctcta

SEQ ID NO: 29962 - DNA, 20 bp, Anaerococcus tetradius
ggtcatcatctgacgctgag

SEQ ID NO: 29963 - DNA, 20 bp, Weeksella virosa
agtctatattgacgctgatg

SEQ ID NO: 29964 - DNA, 20 bp, Corynebacterium urealyticum
agtgtggttggtggaaagtt

SEQ ID NO: 29965 - DNA, 20 bp, Brochothrix campestris
acccaaagccggtttggtaa

SEQ ID NO: 29966 - DNA, 20 bp, Enterococcus cecorum
tcttaaagctcttctcagtt

SEQ ID NO: 29967 - DNA, 20 bp, Prevotella melaninogenica
gtaaagatttatcggtaatg

SEQ ID NO: 29968 - DNA, 20 bp, Chryseobacterium meningosepticum
gggcagctacctagcgatag

SEQ ID NO: 29969 - DNA, 20 bp, Facklamia sourekii
ggcgttaacgcaataaacac

SEQ ID NO: 29970 - DNA, 20 bp, Corynebacterium glucuronolyticum
ggacgaagtttttttgacgg

SEQ ID NO: 29971 - DNA, 20 bp, Aneurinibacillus thermoaerophilus
agggaagaaccgccgggatg

SEQ ID NO: 29972 - DNA, 20 bp, Streptococcus ratti
cataatattaattattgcat

SEQ ID NO: 29973 - DNA, 20 bp, Facklamia sourekii
actttctggtctgacactga

SEQ ID NO: 29974 - DNA, 20 bp, Veillonella atypica
ggagcaaacccgagaaacac

SEQ ID NO: 29975 - DNA, 20 bp, Enterococcus dispar
cgtcacttgaggatggaccc

SEQ ID NO: 29976 - DNA, 20 bp, Leptotrichia buccalis
agagtgtccgtgccgaagct

SEQ ID NO: 29977 - DNA, 20 bp, Paenibacillus thiaminolyticus
gtcgcatcggaaactgtgtg

SEQ ID NO: 29978 - DNA, 20 bp, Pasteurella multocida
gaggaagggatgttgttaaa

SEQ ID NO: 29979 - DNA, 20 bp, Anaerococcus tetradius
agtaacctgccttacacaag

SEQ ID NO: 29980 - DNA, 20 bp, Helcococcus ovis
aagttctgtccttagtgaag

SEQ ID NO: 29981 - DNA, 20 bp, Bacteroides distasonis
tatttgctaaagattcatcg

SEQ ID NO: 29982 - DNA, 20 bp, Acinetobacter lwoffii
agttaatacctagggatagt

SEQ ID NO: 29983 - DNA, 20 bp, Anaerococcus prevotii
aaaagaataccggtggcgaa

SEQ ID NO: 29984 - DNA, 20 bp, Methylobacterium mesophilicum
ctttgacatggcgtgttacc

SEQ ID NO: 29985 - DNA, 20 bp, Alcaligenes faecalis
tgctgacggtatctgcagaa

SEQ ID NO: 29986 - DNA, 20 bp, Campylobacter lari
aacggctgctaatactctat

SEQ ID NO: 29987 - DNA, 20 bp, Bacteroides ovatus
gaaggatgaaggctctatgg

SEQ ID NO: 29988 - DNA, 20 bp, Bacteroides distasonis
gcacagcgaaagcgttaagt

SEQ ID NO: 29989 - DNA, 20 bp, Peptostreptococcus anaerobius
taatatatatttacggcatc

SEQ ID NO: 29990 - DNA, 20 bp, Anaerobiospirillum succiniciproducens
gggaaacgataccgtgaggt

SEQ ID NO: 29991 - DNA, 20 bp, Shewanella algae
atttgtgggggataacagtt

SEQ ID NO: 29992 - DNA, 20 bp, Peptoniphilus indolicus
agtgaattagcggtcaaaga

SEQ ID NO: 29993 - DNA, 20 bp, Corynebacterium auris
tcggtacagcgcgtgtgcga

SEQ ID NO: 29994 - DNA, 20 bp, Propionibacterium propionicus
gtctagagataggcgccccg

SEQ ID NO: 29995 - DNA, 20 bp, Lactobacillus acidophilus
catctagtgcaatccgtaga

SEQ ID NO: 29996 - DNA, 20 bp, Tetragenococcus halophilus
agcgagcgcaggcggtgatt

SEQ ID NO: 29997 - DNA, 20 bp, Bacillus pallidus
tctaaggtgactgccggcta

SEQ ID NO: 29998 - DNA, 20 bp, Weissella paramesenteroides
gaagaacggcactgagagta

SEQ ID NO: 29999 - DNA, 20 bp, Prevotella bivia
cttcgggacatctgtgaagg

SEQ ID NO: 30000 - DNA, 20 bp, Methylobacterium mesophilicum
cacttcggtggcgcgcacac

SEQ ID NO: 30001 - DNA, 20 bp, Gemella bergeri
aaacagacggtacctaacca

SEQ ID NO: 30002 - DNA, 20 bp, Pseudoramibacter alactolyticus
gatcatgaaaactccggtgc

SEQ ID NO: 30003 - DNA, 20 bp, Leptotrichia buccalis
ccgaagctaatgcgataagt

SEQ ID NO: 30004 - DNA, 20 bp, Bacteroides merdae
aggcatgcgttccattaggc

SEQ ID NO: 30005 - DNA, 20 bp, Citrobacter koseri
ccggggagggcgcttaccac

SEQ ID NO: 30006 - DNA, 20 bp, Facklamia ignava
agcctgtagagtaactgtta

SEQ ID NO: 30007 - DNA, 20 bp, Cardiobacterium hominis
tagagtatgaaagaggaaag

SEQ ID NO: 30008 - DNA, 20 bp, Nocardia asteroides
gtcgagcgggggaggttgct

SEQ ID NO: 30009 - DNA, 20 bp, Bacteroides thetaiotaomicron
ccgtaaggcaaatgtgaagg

SEQ ID NO: 30010 - DNA, 20 bp, Streptococcus hyovaginalis
tactctgtgacggtagctta

SEQ ID NO: 30011 - DNA, 20 bp, Atopobium parvulum
cggcagacttgagtttggta

SEQ ID NO: 30012 - DNA, 20 bp, Gemella haemolysans
accggaaaaacttagcggcg

SEQ ID NO: 30013 - DNA, 20 bp, Gemella haemolysans
gcgaagtttttctggtgctt

SEQ ID NO: 30014 - DNA, 20 bp, Leptotrichia buccalis
gagaggtggacggaactgca

SEQ ID NO: 30015 - DNA, 20 bp, Prevotella bivia
taggccgtttggtaagcgtg

SEQ ID NO: 30016 - DNA, 20 bp, Clostridium clostridiiforme
agggagcgtagacggttaag

SEQ ID NO: 30017 - DNA, 20 bp, Prevotella intermedia
tgcgactctcatatgttatc

SEQ ID NO: 30018 - DNA, 20 bp, Corynebacterium xerosis
aggacagctgtttagtgtca

SEQ ID NO: 30019 - DNA, 20 bp, Alcaligenes faecalis
gtgtaggcggttcggaaaga

SEQ ID NO: 30020 - DNA, 20 bp, Pseudoramibacter alactolyticus
gttttgtcgcatggcaagat

SEQ ID NO: 30021 - DNA, 20 bp, Campylobacter sputorum
ctcttgtgaaatctagtagc

SEQ ID NO: 30022 - DNA, 20 bp, Campylobacter coli
tgctctgctagtcagggcag

SEQ ID NO: 30023 - DNA, 20 bp, Pseudoramibacter alactolyticus
actgtaagacttgagtactg

SEQ ID NO: 30024 - DNA, 20 bp, Bacteroides capilosus
acatccgactaacgaagcag

SEQ ID NO: 30025 - DNA, 20 bp, Anaerococcus tetradius
cgacgccgcgtgatttagaa

SEQ ID NO: 30026 - DNA, 20 bp, Corynebacterium auris
caagtcgaacggaaggctcc

SEQ ID NO: 30027 - DNA, 20 bp, Streptococcus anginosus
ttagaaaagtctgaagtgaa

SEQ ID NO: 30028 - DNA, 20 bp, Sporosarcina ureae
aagggaagaacaagtacagg

SEQ ID NO: 30029 - DNA, 20 bp, Tissierella praeacuta
actttaattatcttagcggc

SEQ ID NO: 30030 - DNA, 20 bp, Bacteroides thetaiotaomicron
aaatgtgaaggtgctgcatg

SEQ ID NO: 30031 - DNA, 20 bp, Budvicia aquatica
atttggaggttgtgggcatg

SEQ ID NO: 30032 - DNA, 20 bp, Clostridium barati
agttccttcgggaacagagt

SEQ ID NO: 30033 - DNA, 20 bp, Empedobacter brevis
atggatacttgctgttgggg

SEQ ID NO: 30034 - DNA, 20 bp, Anaerococcus prevotii
aagcatttgaaactgcatat

SEQ ID NO: 30035 - DNA, 20 bp, Streptococcus sanguinis
gataattaattgaaaggtgc

SEQ ID NO: 30036 - DNA, 20 bp, Gemella haemolysans
gtgaggacacaagagattgt

SEQ ID NO: 30037 - DNA, 20 bp, Bacteroides uniformis
accaagccttcgatggatag

SEQ ID NO: 30038 - DNA, 20 bp, Helcococcus ovis
gaattttttaattaatttct

SEQ ID NO: 30039 - DNA, 20 bp, Bacillus coagulans
ccggggaagaacaagtgccg

SEQ ID NO: 30040 - DNA, 20 bp, Clostridium botulinum
atttattgctttgagatgga

SEQ ID NO: 30041 - DNA, 20 bp, Streptococcus infantarius
agcttgctaaagttggaaga

SEQ ID NO: 30042 - DNA, 20 bp, Brevibacterium epidermidis
acagttcttctctttggagc

SEQ ID NO: 30043 - DNA, 20 bp, Anaerococcus tetradius
atagctcaactatataaagc

SEQ ID NO: 30044 - DNA, 20 bp, Facklamia languida
agccggtggcctaacttagg

SEQ ID NO: 30045 - DNA, 20 bp, Eggerthella lenta
agggatggggtcgcggccca

SEQ ID NO: 30046 - DNA, 20 bp, Gemella haemolysans
taggagggagccggtcacgg

SEQ ID NO: 30047 - DNA, 20 bp, Sporosarcina pasteurii
tcccgctgaccggtatagag

SEQ ID NO: 30048 - DNA, 20 bp, Acinetobacter baumannii
gaaggtagcttgctaccgga

SEQ ID NO: 30049 - DNA, 20 bp, Actinomyces neuii
aaagggcatcttggttcgga

SEQ ID NO: 30050 - DNA, 20 bp, Propionibacterium avidum
ttcggcggttttggatggac

SEQ ID NO: 30051 - DNA, 20 bp, Prevotella loescheii
ggtcggtgaccaagcgaaag

SEQ ID NO: 30052 - DNA, 20 bp, Peptostreptococcus anaerobius
gtggttaaaggctacggctc

SEQ ID NO: 30053 - DNA, 20 bp, Actinomyces bovis
acagagatgtgtaatagtta

SEQ ID NO: 30054 - DNA, 20 bp, Kytococcus sedentarius
tgacatgcactggatcgcct

SEQ ID NO: 30055 - DNA, 20 bp, Aerococcus viridans
gctgtcacttatagatgacc

SEQ ID NO: 30056 - DNA, 20 bp, Brevibacillus choshinensis
gatggaacaacgggcagcca

SEQ ID NO: 30057 - DNA, 20 bp, Serratia marcescens
gtggtgagcttaatacgctc

SEQ ID NO: 30058 - DNA, 20 bp, Gemella bergeri
ggttgtgtagtaactataca

SEQ ID NO: 30059 - DNA, 20 bp, Pseudoramibacter alactolyticus
agcctgtgagagaaccgcaa

SEQ ID NO: 30060 - DNA, 20 bp, Streptococcus parasanguinis
attgcatgatgttgacttga

SEQ ID NO: 30061 - DNA, 20 bp, Pediococcus dextrinicus
tctaaaagctagtctcagtt

SEQ ID NO: 30062 - DNA, 20 bp, Fusobacterium mortiferum
gcgtttgacatcctaagaaa

SEQ ID NO: 30063 - DNA, 20 bp, Streptococcus agalactiae
aataccgcataagagtaatt

SEQ ID NO: 30064 - DNA, 20 bp, Aerococcus viridans
aagaagattgaaagacggct

SEQ ID NO: 30065 - DNA, 20 bp, Actinomyces turicensis
ggagcgaatcacttaaagcc

SEQ ID NO: 30066 - DNA, 20 bp, Weeksella virosa
aagccgagcggtagattatc

SEQ ID NO: 30067 - DNA, 20 bp, Bacillus lentus
tttctgggattcgctcatgc

SEQ ID NO: 30068 - DNA, 20 bp, Moraxella bovis
gtagggaggaaaagcttgtg

SEQ ID NO: 30069 - DNA, 20 bp, Bacteroides forsythus
gcagctaccgggcgaccgga

SEQ ID NO: 30070 - DNA, 20 bp, Moraxella osloensis
ccatgggagtctattgcacc

SEQ ID NO: 30071 - DNA, 20 bp, Moraxella osloensis
acatttaggaatctacctag

SEQ ID NO: 30072 - DNA, 20 bp, Moraxella lacunata
ttgtggttaatacctacaag

SEQ ID NO: 30073 - DNA, 20 bp, Pediococcus pentosaceus
ttttaacacgaagtgagtgg

SEQ ID NO: 30074 - DNA, 20 bp, Campylobacter sputorum
tagaagtttccccttcgggg

SEQ ID NO: 30075 - DNA, 20 bp, Clostridium ramosum
ccctagacagggggataact

SEQ ID NO: 30076 - DNA, 20 bp, Moraxella  catarrhalis
gcaagtcgaacgaagttagg

SEQ ID NO: 30077 - DNA, 20 bp, Paenibacillus larvae
ccgggataacttgcggaaac

SEQ ID NO: 30078 - DNA, 20 bp, Neisseria meningitidis
cgcatacgtcttgagagaga

SEQ ID NO: 30079 - DNA, 20 bp, Clostridium limosum
atcctgtggaaacacgggag

SEQ ID NO: 30080 - DNA, 20 bp, Leptotrichia buccalis
catctaggcggccagacaag

SEQ ID NO: 30081 - DNA, 20 bp, Corynebacterium ulcerans
gagggtcttccacgactttc

SEQ ID NO: 30082 - DNA, 20 bp, Haemophilus ducreyi
atgaggaaggcagttttgtt

SEQ ID NO: 30083 - DNA, 20 bp, Bacteroides uniformis
gcagcatgaacttagcttgc

SEQ ID NO: 30084 - DNA, 20 bp, Leptotrichia buccalis
cagtgccttcgggaacgtag

SEQ ID NO: 30085 - DNA, 20 bp, Serratia proteamaculans
atagcactgtgcattgacgt

SEQ ID NO: 30086 - DNA, 20 bp, Cardiobacterium hominis
aggtagcttaacttaggagg

SEQ ID NO: 30087 - DNA, 20 bp, Providencia stuartii
aagactggttagctagagtc

SEQ ID NO: 30088 - DNA, 20 bp, Streptococcus thoraltensis
agtaagagtggaaagtttac

SEQ ID NO: 30089 - DNA, 20 bp, Streptococcus parasanguinis
tgatgttgacttgaaaggtg

SEQ ID NO: 30090 - DNA, 20 bp, Haemophilus paraphrophilus
tgaaagtgtgggacctttgg

SEQ ID NO: 30091 - DNA, 20 bp, Methylobacterium mesophilicum
acttcggtggcgcgcacaca

SEQ ID NO: 30092 - DNA, 20 bp, Propionibacterium freudenreichii
ccttgacttcggtatagctc

SEQ ID NO: 30093 - DNA, 20 bp, Streptococcus constellatus
ttactgcatggtagatgttt

SEQ ID NO: 30094 - DNA, 20 bp, Fusobacterium varium
agaagttaacagagatgttt

SEQ ID NO: 30095 - DNA, 20 bp, Streptococcus ratti
ctaataccgcataagagagt

SEQ ID NO: 30096 - DNA, 20 bp, Vibrio cholerae
acagtactctagcttgtcag

SEQ ID NO: 30097 - DNA, 20 bp, Clostridium butyricum
gtaccgcatggtacagcaat

SEQ ID NO: 30098 - DNA, 20 bp, Veillonella dispar
aggatagatgaaaggtggcc

SEQ ID NO: 30099 - DNA, 20 bp, Prevotella disiens
tggggataacccgttgaaag

SEQ ID NO: 30100 - DNA, 20 bp, Bacteroides ovatus
gaaacagtatagccgtaagg

SEQ ID NO: 30101 - DNA, 20 bp, Peptostreptococcus anaerobius
gatcgtaaagttctgttgca

SEQ ID NO: 30102 - DNA, 20 bp, Prevotella melaninogenica
ggggaaacggcattgagtgc

SEQ ID NO: 30103 - DNA, 20 bp, Clostridium clostridiiforme
ctgctttggaaactgttttg

SEQ ID NO: 30104 - DNA, 20 bp, Weeksella virosa
ataattgagagcggcgtacg

SEQ ID NO: 30105 - DNA, 20 bp, Streptococcus infantarius
ctaaagtttgaagagttgcg

SEQ ID NO: 30106 - DNA, 20 bp, Alcaligenes faecalis
gaacggcagcgcgagagagc

SEQ ID NO: 30107 - DNA, 20 bp, Bacillus sp
acggccctagagatagggag

SEQ ID NO: 30108 - DNA, 20 bp, Acinetobacter lwoffii
attaatactcttggatagtg

SEQ ID NO: 30109 - DNA, 20 bp, Alicyclobacillus acidocaldarius
cagtttccaaagccatccca

SEQ ID NO: 30110 - DNA, 20 bp, Bacillus flexus
cttgcttctatgacgttagc

SEQ ID NO: 30111 - DNA, 20 bp, Corynebacterium propinquum
tgcgcagcgagcctgtgagg

SEQ ID NO: 30112 - DNA, 20 bp, Prevotella melaninogenica
ctggtttccttgagtacgca

SEQ ID NO: 30113 - DNA, 20 bp, Staphylococcus condimenti
cggataatatgcggaaccgc

SEQ ID NO: 30114 - DNA, 20 bp, Campylobacter sputorum
tttcgctatgggatgaggct

SEQ ID NO: 30115 - DNA, 20 bp, Dolosigranulum pigrum
tcttccacaatgggtgcaaa

SEQ ID NO: 30116 - DNA, 20 bp, Lactococcus lactis
catgcaagttgagcgctgaa

SEQ ID NO: 30117 - DNA, 20 bp, Tissierella praeacuta
aagaagatttcttcggaatg

SEQ ID NO: 30118 - DNA, 20 bp, Bacteroides stercoris
gtcgaggggcagcatcatca

SEQ ID NO: 30119 - DNA, 20 bp, Finegoldia magna
acctgcctatgacagtggga

SEQ ID NO: 30120 - DNA, 20 bp, Finegoldia magna
gcattggaaactgataaact

SEQ ID NO: 30121 - DNA, 20 bp, Streptococcus pyogenes
taataccgcataagagagac

SEQ ID NO: 30122 - DNA, 20 bp, Propionibacterium freudenreichii
ttatgcggtcagggatcgtc

SEQ ID NO: 30123 - DNA, 20 bp, Prevotella loescheii
gcgagggtcggcctagggtg

SEQ ID NO: 30124 - DNA, 20 bp, Anaerococcus tetradius
tagctcaactatagtaagct

SEQ ID NO: 30125 - DNA, 20 bp, Clostridium botulinum
gcaaaacttataaaacctat

SEQ ID NO: 30126 - DNA, 20 bp, Morganella morganii
gaccccgcgagggcaagcgg

SEQ ID NO: 30127 - DNA, 20 bp, Anaerococcus prevotii
atactgaggaccggtataga

SEQ ID NO: 30128 - DNA, 20 bp, Moraxella atlantae
actgccttatagagggggat

SEQ ID NO: 30129 - DNA, 20 bp, Fusobacterium nucleatum
tttagaaatgaatgctaata

SEQ ID NO: 30130 - DNA, 20 bp, Streptococcus constellatus
acacagtgacggtacttaac

SEQ ID NO: 30131 - DNA, 20 bp, Haemophilus haemolyticus
tgtcgagagacgaaagtgcg

SEQ ID NO: 30132 - DNA, 20 bp, Campylobacter sputorum
tctttgggaagaataatgac

SEQ ID NO: 30133 - DNA, 20 bp, Corynebacterium falsenii
acatatgcaggatcgctgca

SEQ ID NO: 30134 - DNA, 20 bp, Eggerthella lenta
ttcagcagggaagaaattcg

SEQ ID NO: 30135 - DNA, 20 bp, Haemophilus paraphrophilus
gttaatagcgcaacaaattg

SEQ ID NO: 30136 - DNA, 20 bp, Helcococcus kunzii
aagcgcagctacctcgtgag

SEQ ID NO: 30137 - DNA, 20 bp, Streptococcus dysgalactiae
ggtgcttgcaccggttcaag

SEQ ID NO: 30138 - DNA, 20 bp, Burkholderia multivorans
atccctggctctaatacagt

SEQ ID NO: 30139 - DNA, 20 bp, Anaerococcus tetradius
ggtgtctggaataatctggg

SEQ ID NO: 30140 - DNA, 20 bp, Campylobacter concisus
gcgtcgtttgtgtaagcccg

SEQ ID NO: 30141 - DNA, 20 bp, Vibrio cholerae
acttaaccaccttcctccct

SEQ ID NO: 30142 - DNA, 20 bp, Fusobacterium nucleatum
agggacaacatttagaaatg

SEQ ID NO: 30143 - DNA, 20 bp, Peptostreptococcus anaerobius
aggtggtctttcaagtcggt

SEQ ID NO: 30144 - DNA, 20 bp, Bacteroides fragilis
caccgctgtgaaggtgctgc

SEQ ID NO: 30145 - DNA, 20 bp, Tetragenococcus halophilus
cacccaaagtcggtgcggca

SEQ ID NO: 30146 - DNA, 20 bp, Virgibacillus pantothenticus
ggcatatgctgtcacttaca

SEQ ID NO: 30147 - DNA, 20 bp, Tetragenococcus halophilus
aagtcggtgcggcaaccctt

SEQ ID NO: 30148 - DNA, 20 bp, Campylobacter curvus
taacaaatcatctagagata

SEQ ID NO: 30149 - DNA, 20 bp, Geobacillus thermoglucosidasius
tgcgggaggacagggtgaca

SEQ ID NO: 30150 - DNA, 20 bp, Paenibacillus pabuli
agagaactggaaagacggag

SEQ ID NO: 30151 - DNA, 20 bp, Bacillus oleronius
ataacttttttcttcgcatg

SEQ ID NO: 30152 - DNA, 20 bp, Bacillus schlegellii
caacctgccctaaagaccgg

SEQ ID NO: 30153 - DNA, 20 bp, Mannheimia haemolytica
gggaccatttggccacctgc

SEQ ID NO: 30154 - DNA, 20 bp, Bacteroides vulgatus
ccacgcgagtggatgccaat

SEQ ID NO: 30155 - DNA, 20 bp, Brevibacterium epidermidis
tacagagagaggcgaacccg

SEQ ID NO: 30156 - DNA, 20 bp, Methylobacterium mesophilicum
ggggaaaggcttgctgccgg

SEQ ID NO: 30157 - DNA, 20 bp, Veillonella atypica
cgatggaagcttgcttctat

SEQ ID NO: 30158 - DNA, 20 bp, Peptostreptococcus anaerobius
cggtaccctgtgaggaagcc

SEQ ID NO: 30159 - DNA, 20 bp, Porphyromonas endodontalis
catgtactctacgaataagt

SEQ ID NO: 30160 - DNA, 20 bp, Facklamia sourekii
ctggcgttaacgcaataaac

SEQ ID NO: 30161 - DNA, 20 bp, Prevotella melaninogenica
ctgacgggagcgcaactgac

SEQ ID NO: 30162 - DNA, 20 bp, Corynebacterium propinquum
tacaatgcgcagcgagcctg

SEQ ID NO: 30163 - DNA, 20 bp, Bacillus coagulans
aataccagatagttttttcc

SEQ ID NO: 30164 - DNA, 20 bp, Dermacoccus nishinomiyaensis
ggctctgctatcacttatag

SEQ ID NO: 30165 - DNA, 20 bp, Pediococcus inopinatus
catggttttcttttaaaaga

SEQ ID NO: 30166 - DNA, 20 bp, Corynebacterium falsenii
tttcggtacaagatgagccc

SEQ ID NO: 30167 - DNA, 20 bp, Veillonella atypica
tgctgatctagagtatcgga

SEQ ID NO: 30168 - DNA, 20 bp, Bacteroides thetaiotaomicron
gtataatcagaccgcatggt

SEQ ID NO: 30169 - DNA, 20 bp, Lactococcus garvieae
gtgcgctaatctcttaaaac

SEQ ID NO: 30170 - DNA, 20 bp, Acinetobacter junii
ctgagactaatactcttgga

SEQ ID NO: 30171 - DNA, 20 bp, Veillonella sp.
atggagcaaacccgagaaac

SEQ ID NO: 30172 - DNA, 20 bp, Moraxella osloensis
gcatgtgatactggtggtgc

SEQ ID NO: 30173 - DNA, 20 bp, Vibrio cholerae
gtaacgtcaaatgattaagg

SEQ ID NO: 30174 - DNA, 20 bp, Enterobacter gergoviae
agggagtgaggttaataacc

SEQ ID NO: 30175 - DNA, 20 bp, Corynebacterium glucuronolyticum
gttggtgtggtggaaaggtt

SEQ ID NO: 30176 - DNA, 20 bp, Fusobacterium mortiferum
tgcaggagagctttgcgtcc

SEQ ID NO: 30177 - DNA, 20 bp, Streptococcus thermophilus
ctttccgggattcagtgccg

SEQ ID NO: 30178 - DNA, 20 bp, Streptococcus salivarius
aagtcaagaacgagtgtgag

SEQ ID NO: 30179 - DNA, 20 bp, Oligella ureolytica
atgctgacggtagttgagga

SEQ ID NO: 30180 - DNA, 20 bp, Brochothrix campestris
gaacatcataagatgttcaa

SEQ ID NO: 30181 - DNA, 20 bp, Tissierella praeacuta
actgaaaggcttgagttaag

SEQ ID NO: 30182 - DNA, 20 bp, Methylobacterium mesophilicum
accatcctttgacatggcgt

SEQ ID NO: 30183 - DNA, 20 bp, Eubacterium moniliforme
gtcacaccacggaagttggg

SEQ ID NO: 30184 - DNA, 20 bp, Pediococcus inopinatus
gcttgcatcgaagatgattt

SEQ ID NO: 30185 - DNA, 20 bp, Anaerococcus prevotii
atataccctcttcttcggaa

SEQ ID NO: 30186 - DNA, 20 bp, Anaerococcus tetradius
ctcatcttgaggtatggaag

SEQ ID NO: 30187 - DNA, 20 bp, Prevotella intermedia
tgcacattctggacgtcgac

SEQ ID NO: 30188 - DNA, 20 bp, Streptococcus dysgalactiae
aatccaccatgtgacggtaa

SEQ ID NO: 30189 - DNA, 20 bp, Gemella haemolysans
ggaaaaacttagcggcgaac

SEQ ID NO: 30190 - DNA, 20 bp, Brevibacillus laterosporus
gagcgagggtcttcggaccc

SEQ ID NO: 30191 - DNA, 20 bp, Anaerococcus prevotii
cggaagcctcaatacaggtg

SEQ ID NO: 30192 - DNA, 20 bp, Kocuria rosea
ggtggtggaaagggttttac

SEQ ID NO: 30193 - DNA, 20 bp, Bacillus sp
ctctagggccgtcagaggat

SEQ ID NO: 30194 - DNA, 20 bp, Corynebacterium group F
agcgcgtttgctaccttgtg

SEQ ID NO: 30195 - DNA, 20 bp, Arcanobacterium bernardiae
catacactgcgatgtgccag

SEQ ID NO: 30196 - DNA, 20 bp, Anaerococcus prevotii
cagtagcttaactactgtaa

SEQ ID NO: 30197 - DNA, 20 bp, Lactococcus garvieae
agttccttcgggacacggga

SEQ ID NO: 30198 - DNA, 20 bp, Lactococcus lactis
agaacgttggtgagagtgga

SEQ ID NO: 30199 - DNA, 20 bp, Micrococcus luteus
catgttctcgatcgccgtag

SEQ ID NO: 30200 - DNA, 20 bp, Oligella urethralis
tcttcgttgagaaaagtggt

SEQ ID NO: 30201 - DNA, 20 bp, Anaerobiospirillum succiniciproducens
gcgaaggcggtctcctgggc

SEQ ID NO: 30202 - DNA, 20 bp, Brevibacillus choshinensis
aacgggcagccaactcgcga

SEQ ID NO: 30203 - DNA, 20 bp, Moraxella bovis
tagcttgctagatatgatta

SEQ ID NO: 30204 - DNA, 20 bp, Arcanobacterium bernardiae
gtaggggtaattggaattcc

SEQ ID NO: 30205 - DNA, 20 bp, Streptococcus gordonii
tacaccatagactgtgagtt

SEQ ID NO: 30206 - DNA, 20 bp, Nocardia asteroides
ttcggtaactgacctagcgg

SEQ ID NO: 30207 - DNA, 20 bp, Oligella ureolytica
tgtaaaccacttttctcaac

SEQ ID NO: 30208 - DNA, 20 bp, Bacillus lentus
gtaccggcatttcctccgat

SEQ ID NO: 30209 - DNA, 20 bp, Tissierella praeacuta
cttcgggtacaggggacaca

SEQ ID NO: 30210 - DNA, 20 bp, Leuconostoc pseudomesenteroides
aaggcgctttggcgtcacct

SEQ ID NO: 30211 - DNA, 20 bp, Fusobacterium varium
ccggatattatgactgagtc

SEQ ID NO: 30212 - DNA, 20 bp, Enterococcus cecorum
caatctcttaaagctcttct

SEQ ID NO: 30213 - DNA, 20 bp, Bacillus coagulans
tgccggggaagaacaagtgc

SEQ ID NO: 30214 - DNA, 20 bp, Granulicatella adiacens
ttagcgccttgacggtatct

SEQ ID NO: 30215 - DNA, 20 bp, Vibrio cholerae
gtcccctgctttgctcttgc

SEQ ID NO: 30216 - DNA, 20 bp, Bacillus sp
taatactggataacttttct

SEQ ID NO: 30217 - DNA, 20 bp, Actinomyces meyeri
gatattcactggtcttcgca

SEQ ID NO: 30218 - DNA, 20 bp, Helcococcus ovis
agatactggattacttgagt

SEQ ID NO: 30219 - DNA, 20 bp, Proteus vulgaris
cttgggaattgcatctgaaa

SEQ ID NO: 30220 - DNA, 20 bp, Leuconostoc lactis
agtaactgatcaggtagtga

SEQ ID NO: 30221 - DNA, 20 bp, Veillonella dispar
tcggcatcgaggatagatga

SEQ ID NO: 30222 - DNA, 20 bp, Pseudoramibacter alactolyticus
aaccgcaaggactcagcagt

SEQ ID NO: 30223 - DNA, 20 bp, Alicyclobacillus acidocaldarius
gccatggactttcactccag

SEQ ID NO: 30224 - DNA, 20 bp, Cardiobacterium hominis
ttgctgggggataacgtagg

SEQ ID NO: 30225 - DNA, 20 bp, Actinomyces bovis
gcctgggataacagagggaa

SEQ ID NO: 30226 - DNA, 20 bp, Pseudoramibacter alactolyticus
gcaaggactcagcagtcgaa

SEQ ID NO: 30227 - DNA, 20 bp, Streptococcus ratti
cgcataatattaattattgc

SEQ ID NO: 30228 - DNA, 20 bp, Veillonella dispar
ggcatcgaggatagatgaaa

SEQ ID NO: 30229 - DNA, 20 bp, Campylobacter curvus
aagcccaaataccaaaccgg

SEQ ID NO: 30230 - DNA, 20 bp, Bacillus sp
gcttttgatcagttagcggc

SEQ ID NO: 30231 - DNA, 20 bp, Anaerococcus prevotii
agacattgggatagcctcgg

SEQ ID NO: 30232 - DNA, 20 bp, Tissierella praeacuta
tagttgctaacagataagct

SEQ ID NO: 30233 - DNA, 20 bp, Pseudomonas fluorescens
gtacttacctaatacgtgag

SEQ ID NO: 30234 - DNA, 20 bp, Vibrio cholerae
gattaaggtattaacttaac

SEQ ID NO: 30235 - DNA, 20 bp, Lactococcus garvieae
tcttgacatactcgtgctat

SEQ ID NO: 30236 - DNA, 20 bp, Campylobacter lari
gttaatctgccctacacaag

SEQ ID NO: 30237 - DNA, 20 bp, Neisseria meningitidis
taccgtcatcagccgctgat

SEQ ID NO: 30238 - DNA, 20 bp, Bacteroides uniformis
caacctgccgatgactcggg

SEQ ID NO: 30239 - DNA, 20 bp, Gemella haemolysans
atgattgtgtagtaactata

SEQ ID NO: 30240 - DNA, 20 bp, Corynebacterium urealyticum
ataccggataggaccaatct

SEQ ID NO: 30241 - DNA, 20 bp, Bacteroides forsythus
agtgtaagctctacagcgaa

SEQ ID NO: 30242 - DNA, 20 bp, Corynebacterium propinquum
aatcgcttaaagctggtctt

SEQ ID NO: 30243 - DNA, 20 bp, Bacillus firmus
acatgaggaaaagctgaaag

SEQ ID NO: 30244 - DNA, 20 bp, Tissierella praeacuta
acttagcgataagatgctaa

SEQ ID NO: 30245 - DNA, 20 bp, Prevotella disiens
tgccctttacttggggataa

SEQ ID NO: 30246 - DNA, 20 bp, Pseudoramibacter alactolyticus
ttttgaatgatccttcgggt

SEQ ID NO: 30247 - DNA, 20 bp, Bacteroides ovatus
gtagcgtgaaggatgaaggc

SEQ ID NO: 30248 - DNA, 20 bp, Aerococcus christensenii
cacttatcgatggccttgcg

SEQ ID NO: 30249 - DNA, 20 bp, Peptoniphilus indolicus
gagcgggcaagctagcgata

SEQ ID NO: 30250 - DNA, 20 bp, Veillonella parvula
tctcggcatcgaggatagat

SEQ ID NO: 30251 - DNA, 20 bp, Corynebacterium propinquum
attgggacgaagtcgtaaac

SEQ ID NO: 30252 - DNA, 20 bp, Oligella ureolytica
cttttctcaacgaagaaaag

SEQ ID NO: 30253 - DNA, 20 bp, Delftia acidovorans
aatacgagaggcccatgacg

SEQ ID NO: 30254 - DNA, 20 bp, Alicyclobacillus acidocaldarius
ctccagacttgctcgaccgc

SEQ ID NO: 30255 - DNA, 20 bp, Prevotella intermedia
ggcgttagcggctaagcgaa

SEQ ID NO: 30256 - DNA, 20 bp, Enterobacter gergoviae
gaagggagtgaggttaataa

SEQ ID NO: 30257 - DNA, 20 bp, Bacillus coagulans
atcctctgacctccctggag

SEQ ID NO: 30258 - DNA, 20 bp, Propionibacterium propionicus
gtgacggtagcagtagaaga

SEQ ID NO: 30259 - DNA, 20 bp, Actinomyces turicensis
atggtcaagccgcagctttg

SEQ ID NO: 30260 - DNA, 20 bp, Acinetobacter junii
actaatactcttggatagtg

SEQ ID NO: 30261 - DNA, 20 bp, Veillonella atypica
acaatgggagttaatagacg

SEQ ID NO: 30262 - DNA, 20 bp, Bacteroides forsythus
acgataaaattgccgttgaa

SEQ ID NO: 30263 - DNA, 20 bp, Prevotella melaninogenica
tcacgtgtgattgtttgcag

SEQ ID NO: 30264 - DNA, 20 bp, Campylobacter lari
ggagtattaagagagcttgc

SEQ ID NO: 30265 - DNA, 20 bp, Corynebacterium macginleyi
ccggtggcctaaacgtgtta

SEQ ID NO: 30266 - DNA, 20 bp, Fusobacterium nucleatum
aattatgaaagctataagca

SEQ ID NO: 30267 - DNA, 20 bp, Methylobacterium mesophilicum
gccagctgttggggtgcttg

SEQ ID NO: 30268 - DNA, 20 bp, Pseudoramibacter alactolyticus
agatcatgaaaactccggtg

SEQ ID NO: 30269 - DNA, 20 bp, Alcaligenes faecalis
aacggcagcgcgagagagct

SEQ ID NO: 30270 - DNA, 20 bp, Lactococcus garvieae
cattgtgtgcattggaaact

SEQ ID NO: 30271 - DNA, 20 bp, Bacteroides uniformis
tgtcagccgcaaggcagttg

SEQ ID NO: 30272 - DNA, 20 bp, Prevotella intermedia
cctggcgttagcggctaagc

SEQ ID NO: 30273 - DNA, 20 bp, Fusobacterium nucleatum
aattatgaaagctataagcg

SEQ ID NO: 30274 - DNA, 20 bp, Brevibacillus choshinensis
ccacttgaaactgggaagct

SEQ ID NO: 30275 - DNA, 20 bp, Peptostreptococcus anaerobius
atcccttagaccggtgttta

SEQ ID NO: 30276 - DNA, 20 bp, Gemella morbillorum
cgagagtcagccaacctcat

SEQ ID NO: 30277 - DNA, 20 bp, Pasteurella multocida
ttgggctatatgcttggtgc

SEQ ID NO: 30278 - DNA, 20 bp, Paenibacillus larvae
cttgcggaaacgtgagctaa

SEQ ID NO: 30279 - DNA, 20 bp, Corynebacterium group F
gcacaaagccggccttagtt

SEQ ID NO: 30280 - DNA, 20 bp, Clostridium subterminale
aataccgcataatgtatgag

SEQ ID NO: 30281 - DNA, 20 bp, Clostridium tetani
ggtgtaggagggtccaacct

SEQ ID NO: 30282 - DNA, 20 bp, Alicyclobacillus acidocaldarius
cctcctcgcgggcgtatccg

SEQ ID NO: 30283 - DNA, 20 bp, Clostridium clostridiiforme
gcatggtctggtgcgaaaaa

SEQ ID NO: 30284 - DNA, 20 bp, Streptococcus sobrinus
aacgtgtgtaagagtggaaa

SEQ ID NO: 30285 - DNA, 20 bp, Propionibacterium freudenreichii
tgcccttgacttcggtatag

SEQ ID NO: 30286 - DNA, 20 bp, Clostridium tetani
taaccaaaggagtaatctgc

SEQ ID NO: 30287 - DNA, 20 bp, Enterococcus dispar
gcttttgcgtcacttgagga

SEQ ID NO: 30288 - DNA, 20 bp, Bacillus coagulans
tcggacctcacgccaccgga

SEQ ID NO: 30289 - DNA, 20 bp, Chromobacterium violaceum
ggggtttgaatccttggtag

SEQ ID NO: 30290 - DNA, 20 bp, Peptoniphilus indolicus
acatgtcataacgatcaaag

SEQ ID NO: 30291 - DNA, 20 bp, Burkholderia gladioli
tatccttcggggatgacggt

SEQ ID NO: 30292 - DNA, 20 bp, Oligella ureolytica
aagaaaagtcttaggctaat

SEQ ID NO: 30293 - DNA, 20 bp, Fusobacterium varium
ttaacagagatgttttcgtg

SEQ ID NO: 30294 - DNA, 20 bp, Acinetobacter genospecies 3
tactgatcttagcggcggac

SEQ ID NO: 30295 - DNA, 20 bp, Bacteroides stercoris
gtgtggctttttgtatgtac

SEQ ID NO: 30296 - DNA, 20 bp, Kocuria kristinae
agatggttcttcccttttgg

SEQ ID NO: 30297 - DNA, 20 bp, Rothia mucilaginosa
actggaccgcatcagagatg

SEQ ID NO: 30298 - DNA, 20 bp, Cardiobacterium hominis
gcgactagagtatgaaagag

SEQ ID NO: 30299 - DNA, 20 bp, Campylobacter rectus
tagttgttgcttcgctagtc

SEQ ID NO: 30300 - DNA, 20 bp, Brevibacillus choshinensis
tagagataggagctctcttc

SEQ ID NO: 30301 - DNA, 20 bp, Streptococcus canis
ggacaggtgcttgcactagt

SEQ ID NO: 30302 - DNA, 20 bp, Paenibacillus azotofixans
ccagcaggtagagctgggca

SEQ ID NO: 30303 - DNA, 20 bp, Facklamia sourekii
ggcctaaccattggagggag

SEQ ID NO: 30304 - DNA, 20 bp, Clostridium tetani
gatcgtaaaaccctgttttc

SEQ ID NO: 30305 - DNA, 20 bp, Eggerthella lenta
ctgggaggctcgagttcggt

SEQ ID NO: 30306 - DNA, 20 bp, Corynebacterium xerosis
gggcttgacatatacgggac

SEQ ID NO: 30307 - DNA, 20 bp, Kytococcus sedentarius
acatacgtgtaagtaactat

SEQ ID NO: 30308 - DNA, 20 bp, Actinomyces viscosus
tggtgggcctgggaaaggtt

SEQ ID NO: 30309 - DNA, 20 bp, Weeksella virosa
attggacaatgggttagcgc

SEQ ID NO: 30310 - DNA, 20 bp, Yersinia intermedia
catgacctcgtaagagcaaa

SEQ ID NO: 30311 - DNA, 20 bp, Comamonas testosteroni
ggccttgtgctactagagcg

SEQ ID NO: 30312 - DNA, 20 bp, Vibrio fluvialis
agcgacaacattgaaccttc

SEQ ID NO: 30313 - DNA, 20 bp, Campylobacter rectus
tgggaaagaattatgacggt

SEQ ID NO: 30314 - DNA, 20 bp, Leuconostoc lactis
atttgagtgagtggcggacg

SEQ ID NO: 30315 - DNA, 20 bp, Weissella paramesenteroides
gttggttgaaagatggttct

SEQ ID NO: 30316 - DNA, 20 bp, Prevotella loescheii
ccagacggcggggtaacggc

SEQ ID NO: 30317 - DNA, 20 bp, Burkholderia multivorans
aaatccttggctctaataca

SEQ ID NO: 30318 - DNA, 20 bp, Clostridium paraputrificum
catgaagtagcaattaaagg

SEQ ID NO: 30319 - DNA, 20 bp, Lactococcus lactis
ggggaatctgcctttgagcg

SEQ ID NO: 30320 - DNA, 20 bp, Methylobacterium mesophilicum
ccagagagatttggggtcca

SEQ ID NO: 30321 - DNA, 20 bp, Bacteroides distasonis
agtaagcggcacagcgaaag

SEQ ID NO: 30322 - DNA, 20 bp, Actinomyces bovis
tcttgacataccgcgcaaaa

SEQ ID NO: 30323 - DNA, 20 bp, Prevotella melaninogenica
atccaatcttgaaagccggg

SEQ ID NO: 30324 - DNA, 20 bp, Atopobium parvulum
acgtcgtggccgaaaggagc

SEQ ID NO: 30325 - DNA, 20 bp, Bacteroides stercoris
tccaacctgccgataactcc

SEQ ID NO: 30326 - DNA, 20 bp, Bacillus alcalophilus
ccgaggggtcattggaaact

SEQ ID NO: 30327 - DNA, 20 bp, Methylobacterium mesophilicum
ctttgacatggcgtgttatg

SEQ ID NO: 30328 - DNA, 20 bp, Actinomyces naeslundii
ttcttctggataaccgcatg

SEQ ID NO: 30329 - DNA, 20 bp, Campylobacter lari
taagaaccttatagagatat

SEQ ID NO: 30330 - DNA, 20 bp, Peptostreptococcus anaerobius
tcggtggttaaaggctacgg

SEQ ID NO: 30331 - DNA, 20 bp, Vibrio mimicus
gggaaattgcccggtagagg

SEQ ID NO: 30332 - DNA, 20 bp, Bacillus pallidus
agtgttagagggtatccacc

SEQ ID NO: 30333 - DNA, 20 bp, Burkholderia multivorans
gctctaatacagtcggggga

SEQ ID NO: 30334 - DNA, 20 bp, Corynebacterium argentoratense
agtgatctgccctcaacttc

SEQ ID NO: 30335 - DNA, 20 bp, Arcanobacterium haemolyticum
tttccatgggttctgtaccg

SEQ ID NO: 30336 - DNA, 20 bp, Anaerobiospirillum succiniciproducens
cttcgggaacctacagacag

SEQ ID NO: 30337 - DNA, 20 bp, Corynebacterium glucuronolyticum
cgtggttggtgtggtggaaa

SEQ ID NO: 30338 - DNA, 20 bp, Brochothrix campestris
tcactgtgagatggacccgc

SEQ ID NO: 30339 - DNA, 20 bp, Anaerobiospirillum succiniciproducens
gtaagtaggatgtgaaatac

SEQ ID NO: 30340 - DNA, 20 bp, Peptostreptococcus anaerobius
tatatttacggcatcgtaga

SEQ ID NO: 30341 - DNA, 20 bp, Bordetella avium
tggcaggaaagaaaaggcgc

SEQ ID NO: 30342 - DNA, 20 bp, Bacteroides forsythus
gctctacagcgaaagcgtta

SEQ ID NO: 30343 - DNA, 20 bp, Prevotella melaninogenica
tgcttgcactcaatggacgt

SEQ ID NO: 30344 - DNA, 20 bp, Anaerococcus prevotii
cgatgaaatcttgacagaac

SEQ ID NO: 30345 - DNA, 20 bp, Geobacillus thermoglucosidasius
caaccctggagacagggcgt

SEQ ID NO: 30346 - DNA, 20 bp, Anaerococcus prevotii
tacaaagggaagcgaaatag

SEQ ID NO: 30347 - DNA, 20 bp, Pseudoramibacter alactolyticus
ttatattatggttttgtcgc

SEQ ID NO: 30348 - DNA, 20 bp, Cardiobacterium hominis
ggtagcttaacttaggaggg

SEQ ID NO: 30349 - DNA, 20 bp, Veillonella parvula
ataccgcatacgatctaacc

SEQ ID NO: 30350 - DNA, 20 bp, Corynebacterium group F
gtttgctaccttgtgagggg

SEQ ID NO: 30351 - DNA, 20 bp, Streptococcus hyovaginalis
gaacgggagtaagagtggaa

SEQ ID NO: 30352 - DNA, 20 bp, Achromobacter xylosoxidans
tgccgaagagatttggcagt

SEQ ID NO: 30353 - DNA, 20 bp, Helcococcus kunzii
gtagccggattgagaggttg

SEQ ID NO: 30354 - DNA, 20 bp, Haemophilus influenzae
ggaaggttgatgtgttaata

SEQ ID NO: 30355 - DNA, 20 bp, Acinetobacter lwoffii
ctaccgagattaatactctt

SEQ ID NO: 30356 - DNA, 20 bp, Clostridium paraputrificum
tagcttcgcatgaagtagca

SEQ ID NO: 30357 - DNA, 20 bp, Acinetobacter junii
agactaatactcttggatag

SEQ ID NO: 30358 - DNA, 20 bp, Morganella morganii
aggcaagcggaactcataaa

SEQ ID NO: 30359 - DNA, 20 bp, Helcococcus ovis
taataccttatgacacttag

SEQ ID NO: 30360 - DNA, 20 bp, Capnocytophaga gingivalis
attaaaactgcggtggtgaa

SEQ ID NO: 30361 - DNA, 20 bp, Bordetella bronchiseptica
tatcctgtgcaactgacggt

SEQ ID NO: 30362 - DNA, 20 bp, Bacteroides fragilis
ccgcatggtttcattattaa

SEQ ID NO: 30363 - DNA, 20 bp, Haemophilus segnis
tttagtttaatagactaggt

SEQ ID NO: 30364 - DNA, 20 bp, Bacillus pallidus
gatagggcgttcccctttcg

SEQ ID NO: 30365 - DNA, 20 bp, Citrobacter sedlakii
cacggaagactgcagagatg

SEQ ID NO: 30366 - DNA, 20 bp, Clostridium limosum
tgtcggggtttcaatacttc

SEQ ID NO: 30367 - DNA, 20 bp, Weissella paramesenteroides
ctaataccgtataataccaa

SEQ ID NO: 30368 - DNA, 20 bp, Alcaligenes faecalis
atttttaactgccgagctag

SEQ ID NO: 30369 - DNA, 20 bp, Ewingella americana
ggaggttgtgggcttgaccc

SEQ ID NO: 30370 - DNA, 20 bp, Veillonella atypica
cttctatcaatcttagtggc

SEQ ID NO: 30371 - DNA, 20 bp, Aerococcus viridans
aggaatctacctataagcgg

SEQ ID NO: 30372 - DNA, 20 bp, Anaerococcus prevotii
gtagatattaaaaagaatac

SEQ ID NO: 30373 - DNA, 20 bp, Cardiobacterium hominis
aatctgccttttgctggggg

SEQ ID NO: 30374 - DNA, 20 bp, Brochothrix campestris
ttcaagtgaaagacggtttc

SEQ ID NO: 30375 - DNA, 20 bp, Campylobacter sputorum
gaagtcctagcttgctagga

SEQ ID NO: 30376 - DNA, 20 bp, Streptococcus dysgalactiae
agaatgatggtgggagtgga

SEQ ID NO: 30377 - DNA, 20 bp, Klebsiella pneumoniae
ctgcggtggatcacctcctt

SEQ ID NO: 30378 - DNA, 20 bp, Gordonia bronchialis
agatgtggtttgccttgtgc

SEQ ID NO: 30379 - DNA, 20 bp, Photobacterium damselae
agtagggaggaaggtagtgt

SEQ ID NO: 30380 - DNA, 20 bp, Lactococcus garvieae
tctgtagcgcagctaacgca

SEQ ID NO: 30381 - DNA, 20 bp, Bacillus cereus
ttgctctcaagaagttagcg

SEQ ID NO: 30382 - DNA, 20 bp, Fusobacterium nucleatum
cgatactgcctacgatgagt

SEQ ID NO: 30383 - DNA, 20 bp, Facklamia languida
atgcataacctagagatagg

SEQ ID NO: 30384 - DNA, 20 bp, Leuconostoc lactis
ccgcataaaacctaacaccg

SEQ ID NO: 30385 - DNA, 20 bp, Bacillus sp
ttcgggggtgacgcatgtgg

SEQ ID NO: 30386 - DNA, 20 bp, Leptotrichia buccalis
gtgggcatgaagagtgtccg

SEQ ID NO: 30387 - DNA, 20 bp, Sphingobacterium multivorum
cgatgttggcgatagacagc

SEQ ID NO: 30388 - DNA, 20 bp, Suttonella indologenes
aactagagtatgtcagagga

SEQ ID NO: 30389 - DNA, 20 bp, Clostridium tetani
aactttaaccaaaggagtaa

SEQ ID NO: 30390 - DNA, 20 bp, Vibrio cholerae
taggtaacgtcaaatgatta

SEQ ID NO: 30391 - DNA, 20 bp, Streptococcus sp.
taccgcataaaattgattat

SEQ ID NO: 30392 - DNA, 20 bp, Neisseria polysaccharea
gataaccgcaaggggtccgc

SEQ ID NO: 30393 - DNA, 20 bp, Corynebacterium group F
tcggtacagcgcgtttgcta

SEQ ID NO: 30394 - DNA, 20 bp, Peptostreptococcus anaerobius
tagcggtataggatggaccc

SEQ ID NO: 30395 - DNA, 20 bp, Alcaligenes faecalis
aggtacctcctaatacgagg

SEQ ID NO: 30396 - DNA, 20 bp, Moraxella osloensis
cttcctggcataatattgac

SEQ ID NO: 30397 - DNA, 20 bp, Leptotrichia buccalis
gcctgccctggaaactgttt

SEQ ID NO: 30398 - DNA, 20 bp, Prevotella corporis
gaagcgggcggaattcgtgg

SEQ ID NO: 30399 - DNA, 20 bp, Leuconostoc citreum
caagtcgaacgcgcagcgag

SEQ ID NO: 30400 - DNA, 20 bp, Bacillus coagulans
tcctctgacctccctggaga

SEQ ID NO: 30401 - DNA, 20 bp, Clostridium tetani
actgaggaagtcccttcggg

SEQ ID NO: 30402 - DNA, 20 bp, Veillonella atypica
tgatgggatggaaactgctg

SEQ ID NO: 30403 - DNA, 20 bp, Prevotella bivia
tagcacctagtgttagcggc

SEQ ID NO: 30404 - DNA, 20 bp, Bacillus simplex
tcgcatgagagaagatggaa

SEQ ID NO: 30405 - DNA, 20 bp, Campylobacter concisus
ccccttgtggggctggtgta

SEQ ID NO: 30406 - DNA, 20 bp, Clostridium clostridiiforme
ttgaaattgacttagcggcg

SEQ ID NO: 30407 - DNA, 20 bp, Paenibacillus thiaminolyticus
atgtaagtctggtgtttaaa

SEQ ID NO: 30408 - DNA, 20 bp, Proteus vulgaris
ggaggaaggtgataaagtta

SEQ ID NO: 30409 - DNA, 20 bp, Pediococcus pentosaceus
gtcgaacgaacttccgttaa

SEQ ID NO: 30410 - DNA, 20 bp, Peptoniphilus indolicus
aacaaagagcgggcaagcta

SEQ ID NO: 30411 - DNA, 20 bp, Delftia acidovorans
ttgggaattagttttctcag

SEQ ID NO: 30412 - DNA, 20 bp, Chromobacterium violaceum
ttatacgagcagccgacgtc

SEQ ID NO: 30413 - DNA, 20 bp, Paenibacillus lautus
tggaataatgaaagacggag

SEQ ID NO: 30414 - DNA, 20 bp, Actinomyces naeslundii
cgcatggtgggcctgggaaa

SEQ ID NO: 30415 - DNA, 20 bp, Alcaligenes faecalis
tcctaatacgaggtactgct

SEQ ID NO: 30416 - DNA, 20 bp, Gemella bergeri
cgcaggtggtttagaaagtc

SEQ ID NO: 30417 - DNA, 20 bp, Bacteroides ovatus
agaaggcggctacctggcga

SEQ ID NO: 30418 - DNA, 20 bp, Staphylococcus succinus
gatgcgcacagttacttacg

SEQ ID NO: 30419 - DNA, 20 bp, Kingella kingae
gaagaaaaggttgatgctaa

SEQ ID NO: 30420 - DNA, 20 bp, Peptoniphilus indolicus
acttgagtagtgaagaggta

SEQ ID NO: 30421 - DNA, 20 bp, Gemella bergeri
gacggtgacctaaccgaaag

SEQ ID NO: 30422 - DNA, 20 bp, Streptococcus porcinus
gacatccttctgaccggcct

SEQ ID NO: 30423 - DNA, 20 bp, Aeromonas schubertii
aactgtccgactagagtctt

SEQ ID NO: 30424 - DNA, 20 bp, Streptococcus constellatus
tactgcatggtagatgttta

SEQ ID NO: 30425 - DNA, 20 bp, Clostridium botulinum
gggggtatcaactccccctg

SEQ ID NO: 30426 - DNA, 20 bp, Fusobacterium nucleatum
gggacaacatttagaaatga

SEQ ID NO: 30427 - DNA, 20 bp, Arthrobacter globiformis
ggaccggaccgccgcagaaa

SEQ ID NO: 30428 - DNA, 20 bp, Campylobacter rectus
atccagagatggaagagtgt

SEQ ID NO: 30429 - DNA, 20 bp, Enterococcus cecorum
aggatgagagtggaaagttc

SEQ ID NO: 30430 - DNA, 20 bp, Prevotella intermedia
ttgtgaaatttaggtgctca

SEQ ID NO: 30431 - DNA, 20 bp, Bacillus oleronius
ggagaattgaaagatggctt

SEQ ID NO: 30432 - DNA, 20 bp, Bacillus circulans
gaggaaaagctgaaagacgg

SEQ ID NO: 30433 - DNA, 20 bp, Paenibacillus amylolyticus
ttaaggccaaggctcaacct

SEQ ID NO: 30434 - DNA, 20 bp, Prevotella oralis
aaccggtgatgtgcagcgcg

SEQ ID NO: 30435 - DNA, 20 bp, Prevotella loescheii
atggcgcatacagagagtcg

SEQ ID NO: 30436 - DNA, 20 bp, Neisseria polysaccharea
ggctgttgctaatatcagcg

SEQ ID NO: 30437 - DNA, 20 bp, Wolinella succinogenes
tggtacagagagatgcaata

SEQ ID NO: 30438 - DNA, 20 bp, Cardiobacterium hominis
agcttaacttaggagggcgc

SEQ ID NO: 30439 - DNA, 20 bp, Paenibacillus peoriae
tctaaacaacctagcggcgg

SEQ ID NO: 30440 - DNA, 20 bp, Bacillus flexus
cttctatgacgttagcggcg

SEQ ID NO: 30441 - DNA, 20 bp, Kocuria rosea
atagatggacccgcggtgta

SEQ ID NO: 30442 - DNA, 20 bp, Atopobium parvulum
gattgcacccgaagtcgtcg

SEQ ID NO: 30443 - DNA, 20 bp, Paenibacillus macerans
taatgaaaggcggagcaatc

SEQ ID NO: 30444 - DNA, 20 bp, Acinetobacter genospecies 3
cttgctactgatcttagcgg

SEQ ID NO: 30445 - DNA, 20 bp, Facklamia hominis
ataccgcatagaatcgcaga

SEQ ID NO: 30446 - DNA, 20 bp, Corynebacterium falsenii
gtgtggggatctttctacga

SEQ ID NO: 30447 - DNA, 20 bp, Clostridium clostridiiforme
tcaccaaaccgaagacgggt

SEQ ID NO: 30448 - DNA, 20 bp, Aerococcus viridans
tcgagcgaacagatgaagtg

SEQ ID NO: 30449 - DNA, 20 bp, Salmonella enteritidis
catccacagaagaatccaga

SEQ ID NO: 30450 - DNA, 20 bp, Prevotella melaninogenica
gagataatgacgcccttcgg

SEQ ID NO: 30451 - DNA, 20 bp, Propionibacterium freudenreichii
gacggtaaggcccctttcgg

SEQ ID NO: 30452 - DNA, 20 bp, Streptococcus suis
gatacttgaaaggagcaatt

SEQ ID NO: 30453 - DNA, 20 bp, Propionibacterium freudenreichii
tatagctccaggaaactggt

SEQ ID NO: 30454 - DNA, 20 bp, Collinsella aerofaciens
cggcccaccgtgccgacaac

SEQ ID NO: 30455 - DNA, 20 bp, Tetragenococcus halophilus
aaggcgctttacagcgtcac

SEQ ID NO: 30456 - DNA, 20 bp, Paenibacillus pabuli
cctcaagtttgggacaacta

SEQ ID NO: 30457 - DNA, 20 bp, Bacteroides merdae
aggcagcttactaaaccata

SEQ ID NO: 30458 - DNA, 20 bp, Gemella bergeri
aaggttgtgtagtaactata

SEQ ID NO: 30459 - DNA, 20 bp, Streptococcus parasanguinis
cgacattgcatgatgttgac

SEQ ID NO: 30460 - DNA, 20 bp, Peptostreptococcus anaerobius
gtagatatatcaaagtgtta

SEQ ID NO: 30461 - DNA, 20 bp, Gemella bergeri
agggaggagccggtcacggt

SEQ ID NO: 30462 - DNA, 20 bp, Corynebacterium falsenii
tgacatatgcaggatcgctg

SEQ ID NO: 30463 - DNA, 20 bp, Anaerobiospirillum succiniciproducens
tcgggaacctacagacaggt

SEQ ID NO: 30464 - DNA, 20 bp, Haemophilus influenzae
gttggggtttaactctggca

SEQ ID NO: 30465 - DNA, 20 bp, Haemophilus actinemycetemcomitans
ggtgatgaggaaggttggtg

SEQ ID NO: 30466 - DNA, 20 bp, Leuconostoc fallax
actgtggaatggctttggaa

SEQ ID NO: 30467 - DNA, 20 bp, Paenibacillus amylolyticus
agtctggtgtttaaggccaa

SEQ ID NO: 30468 - DNA, 20 bp, Bacteroides capilosus
ttcgataattggggtgaagt

SEQ ID NO: 30469 - DNA, 20 bp, Haemophilus influenzae
gttggggtttaactctggcg

SEQ ID NO: 30470 - DNA, 20 bp, Anaerococcus tetradius
cgccgcgtgatttagaaggc

SEQ ID NO: 30471 - DNA, 20 bp, Shewanella algae
cctgggaatttgcccatttg

SEQ ID NO: 30472 - DNA, 20 bp, Morganella morganii
catctgatactggtcagcta

SEQ ID NO: 30473 - DNA, 20 bp, Facklamia ignava
tgaaatcctacgggacaaga

SEQ ID NO: 30474 - DNA, 20 bp, Actinomyces neuii
ttgggaaaggttttttctgg

SEQ ID NO: 30475 - DNA, 20 bp, Clostridium butyricum
atggaggaagccacttcggt

SEQ ID NO: 30476 - DNA, 20 bp, Moraxella lacunata
ttaatacccacaagccctga

SEQ ID NO: 30477 - DNA, 20 bp, Bacteroides distasonis
gtgttacaatggcgtggaca

SEQ ID NO: 30478 - DNA, 20 bp, Fusobacterium nucleatum
aatacctaatattatgataa

SEQ ID NO: 30479 - DNA, 20 bp, Gemella bergeri
atagggacaaagagaagcga

SEQ ID NO: 30480 - DNA, 20 bp, Bacteroides uniformis
cctttttgtatgtaccgtat

SEQ ID NO: 30481 - DNA, 20 bp, Propionibacterium propionicus
ctgactagaggaaggtaggg

SEQ ID NO: 30482 - DNA, 20 bp, Cardiobacterium hominis
gctgggggataacgtaggga

SEQ ID NO: 30483 - DNA, 20 bp, Bacillus sp
gccgctcgttccacatgcgt

SEQ ID NO: 30484 - DNA, 20 bp, Paenibacillus pabuli
gaagagaactggaaagacgg

SEQ ID NO: 30485 - DNA, 20 bp, Chromobacterium violaceum
tcggaatgtaccgtgtaatg

SEQ ID NO: 30486 - DNA, 20 bp, Staphylococcus capitis
tgcagcttgctgcgggtact

SEQ ID NO: 30487 - DNA, 20 bp, Facklamia languida
cgaactcgcaagggcaagcg

SEQ ID NO: 30488 - DNA, 20 bp, Clostridium clostridiiforme
agcgtagacggttaagcaag

SEQ ID NO: 30489 - DNA, 20 bp, Streptococcus infantarius
ggttaaatgctgttatgcgg

SEQ ID NO: 30490 - DNA, 20 bp, Bacteroides fragilis
ctcaccaagccttcgatgga

SEQ ID NO: 30491 - DNA, 20 bp, Anaerococcus prevotii
tgtaaaaggcagtagcttaa

SEQ ID NO: 30492 - DNA, 20 bp, Clostridium tetani
actttaaccaaaggagtaat

SEQ ID NO: 30493 - DNA, 20 bp, Porphyromonas endodontalis
tattgattacagatgggcat

SEQ ID NO: 30494 - DNA, 20 bp, Bacteroides fragilis
gcttaaattgcagtggaatg

SEQ ID NO: 30495 - DNA, 20 bp, Peptoniphilus indolicus
gggacagtattacaggtggt

SEQ ID NO: 30496 - DNA, 20 bp, Bacteroides forsythus
cctgactgtcagttgctaac

SEQ ID NO: 30497 - DNA, 20 bp, Actinomyces neuii
tggtgcttgcacttttggtg

SEQ ID NO: 30498 - DNA, 20 bp, Bacteroides forsythus
gtcggactaatacctcataa

SEQ ID NO: 30499 - DNA, 20 bp, Corynebacterium urealyticum
ggtgtggggatttttcacga

SEQ ID NO: 30500 - DNA, 20 bp, Pasteurella multocida
ggtgatgaggaaggcaggta

SEQ ID NO: 30501 - DNA, 20 bp, Corynebacterium glucuronolyticum
gtgtaatccaggggcttaac

SEQ ID NO: 30502 - DNA, 20 bp, Fusobacterium nucleatum
acaacatttagaaatgaatg

SEQ ID NO: 30503 - DNA, 20 bp, Prevotella melaninogenica
cgtctgacttgcagcgcata

SEQ ID NO: 30504 - DNA, 20 bp, Methylobacterium mesophilicum
tgctgccggaggatcggccc

SEQ ID NO: 30505 - DNA, 20 bp, Bacteroides thetaiotaomicron
tgcatttgaatattttggaa

SEQ ID NO: 30506 - DNA, 20 bp, Pasteurella multocida
acctcttggccacctgccat

SEQ ID NO: 30507 - DNA, 20 bp, Corynebacterium accolens
gtgtgagggtctttctacga

SEQ ID NO: 30508 - DNA, 20 bp, Atopobium parvulum
ttaaagcaccttcgggtgtg

SEQ ID NO: 30509 - DNA, 20 bp, Propionibacterium avidum
gattgcgtcggaagtgaaaa

SEQ ID NO: 30510 - DNA, 20 bp, Pasteurella multocida
gggatgttgttaaatagata

SEQ ID NO: 30511 - DNA, 20 bp, Bacillus sp
gaatggttttgtgggatttg

SEQ ID NO: 30512 - DNA, 20 bp, Pasteurella multocida
gggatgttgttaaatagatg

SEQ ID NO: 30513 - DNA, 20 bp, Propionibacterium avidum
atggactgggagtgctcaga

SEQ ID NO: 30514 - DNA, 20 bp, Clostridium butyricum
aatgagatgcaacctcgcga

SEQ ID NO: 30515 - DNA, 20 bp, Moraxella osloensis
gaaagggggcgcaagctctt

SEQ ID NO: 30516 - DNA, 20 bp, Granulicatella elegans
ccggtgcttgcactggtcaa

SEQ ID NO: 30517 - DNA, 20 bp, Haemophilus segnis
catttagtttaatagactag

SEQ ID NO: 30518 - DNA, 20 bp, Campylobacter lari
tgccctacacaagaggacaa

SEQ ID NO: 30519 - DNA, 20 bp, Oligella urethralis
tcaactaccgtcagcatctt

SEQ ID NO: 30520 - DNA, 20 bp, Haemophilus haemolyticus
gtcgagagacgaaagtgcgg

SEQ ID NO: 30521 - DNA, 20 bp, Pasteurella multocida
aagggatgttgttaaataga

SEQ ID NO: 30522 - DNA, 20 bp, Anaerococcus prevotii
cctcttcttcggaagcctca

SEQ ID NO: 30523 - DNA, 20 bp, Actinomyces bovis
agccggtggcctaacctagt

SEQ ID NO: 30524 - DNA, 20 bp, Unknown Organism
  oligonucleotide from CDC group EF-4B
ataccgcatacactttgaga

SEQ ID NO: 30525 - DNA, 20 bp, Eikenella corrodens
ataccactttttgctgacgg

SEQ ID NO: 30526 - DNA, 20 bp, Acinetobacter genospecies 3
agcttgctactgatcttagc

SEQ ID NO: 30527 - DNA, 20 bp, Bacillus simplex
aagatggaaagacggtttac

SEQ ID NO: 30528 - DNA, 20 bp, Corynebacterium glucuronolyticum
cattgcttgagtgctgtagg

SEQ ID NO: 30529 - DNA, 20 bp, Moraxella osloensis
cagggaggagaggctaatgg

SEQ ID NO: 30530 - DNA, 20 bp, Rhizobium radiobacter
attcggggtttgggcagtgg

SEQ ID NO: 30531 - DNA, 20 bp, Tetragenococcus halophilus
ttttccatgacggtagctga

SEQ ID NO: 30532 - DNA, 20 bp, Lactococcus lactis
gcataaaaactttaaacaca

SEQ ID NO: 30533 - DNA, 20 bp, Corynebacterium glucuronolyticum
ggaccgcatcgtggttggtg

SEQ ID NO: 30534 - DNA, 20 bp, Bacteroides thetaiotaomicron
gcccaccaagactacgatgg

SEQ ID NO: 30535 - DNA, 20 bp, Brevibacillus parabrevis
gtcagggacgaacacgtgcc

SEQ ID NO: 30536 - DNA, 20 bp, Streptococcus agalactiae
acactagactgatgagttgc

SEQ ID NO: 30537 - DNA, 20 bp, Bacillus sp
gatttgcttggcctcacggc

SEQ ID NO: 30538 - DNA, 20 bp, Paenibacillus apiarius
tttaaacctagggctcaacc

SEQ ID NO: 30539 - DNA, 20 bp, Chryseobacterium meningosepticum
cgaaggcaggtcactaagtc

SEQ ID NO: 30540 - DNA, 20 bp, Campylobacter sputorum
ttttctttgggaagaataat

SEQ ID NO: 30541 - DNA, 20 bp, Virgibacillus pantothenticus
agatctccttcgggggtgac

SEQ ID NO: 30542 - DNA, 20 bp, Streptococcus dysgalactiae
tgcaactgcatcactatgag

SEQ ID NO: 30543 - DNA, 20 bp, Bacillus alcalophilus
tcgaataggtcggcaccttg

SEQ ID NO: 30544 - DNA, 20 bp, Haemophilus influenzae
aaccttttggagggcgttta

SEQ ID NO: 30545 - DNA, 20 bp, Streptococcus porcinus
aggctttctcttcggagcag

SEQ ID NO: 30546 - DNA, 20 bp, Paenibacillus thiaminolyticus
ccacttatggatggacctac

SEQ ID NO: 30547 - DNA, 20 bp, Fusobacterium varium
tcccaagaagttaacagaga

SEQ ID NO: 30548 - DNA, 20 bp, Campylobacter rectus
gccctacactagaggacaac

SEQ ID NO: 30549 - DNA, 20 bp, Campylobacter curvus
agatacgggaaagtttttcg

SEQ ID NO: 30550 - DNA, 20 bp, Tetragenococcus halophilus
atccatcagcgggggataac

SEQ ID NO: 30551 - DNA, 20 bp, Empedobacter brevis
attaatcagtcagtggtgaa

SEQ ID NO: 30552 - DNA, 20 bp, Alcaligenes faecalis
acggcagcgcgagagagctt

SEQ ID NO: 30553 - DNA, 20 bp, Bacteroides forsythus
tcggactaatacctcataaa

SEQ ID NO: 30554 - DNA, 20 bp, Listeria monocytogenes
ggctaataccgaatgataaa

SEQ ID NO: 30555 - DNA, 20 bp, Bacteroides thetaiotaomicron
atttcagtttgcttgcaaac

SEQ ID NO: 30556 - DNA, 20 bp, Corynebacterium glucuronolyticum
atagttcgtcccttgtggct

SEQ ID NO: 30557 - DNA, 20 bp, Acinetobacter lwoffii
gctaccgagattaatactct

SEQ ID NO: 30558 - DNA, 20 bp, Oligella urethralis
tattcctcaactaccgtcag

SEQ ID NO: 30559 - DNA, 20 bp, Propionibacterium freudenreichii
gggtcccttccacggggtcc

SEQ ID NO: 30560 - DNA, 20 bp, Gemella bergeri
tgttgttagggaagaaaggt

SEQ ID NO: 30561 - DNA, 20 bp, Alcaligenes faecalis
ggaaagccgaagagatttgg

SEQ ID NO: 30562 - DNA, 20 bp, Granulicatella elegans
ggcttcggcttctgctgatg

SEQ ID NO: 30563 - DNA, 20 bp, Granulicatella elegans
gagaaggaaaagaggcttcg

SEQ ID NO: 30564 - DNA, 20 bp, Bacteroides vulgatus
tgccaatcccaaaaacctct

SEQ ID NO: 30565 - DNA, 20 bp, Pseudoramibacter alactolyticus
agccttatattatggttttg

SEQ ID NO: 30566 - DNA, 20 bp, Lactococcus lactis
aagctcatcaagtgacggta

SEQ ID NO: 30567 - DNA, 20 bp, Campylobacter curvus
cttttcttggggaagaaatt

SEQ ID NO: 30568 - DNA, 20 bp, Brevibacillus choshinensis
tccaatcctcagtgccgcag

SEQ ID NO: 30569 - DNA, 20 bp, Tetragenococcus halophilus
gtgctaataccgcatatggc

SEQ ID NO: 30570 - DNA, 20 bp, Aneurinibacillus thermoaerophilus
ctcctcagtgccgcagctaa

SEQ ID NO: 30571 - DNA, 20 bp, Bacillus pallidus
accgaagggagcttgctcct

SEQ ID NO: 30572 - DNA, 20 bp, Achromobacter xylosoxidans
taataccccgcggaactgac

SEQ ID NO: 30573 - DNA, 20 bp, Bacteroides fragilis
gttccattaggttgttggtg

SEQ ID NO: 30574 - DNA, 20 bp, Actinomyces bovis
ggagaaattcagtgctgtag

SEQ ID NO: 30575 - DNA, 20 bp, Alcaligenes faecalis
ccgaagagatttggccgtgc

SEQ ID NO: 30576 - DNA, 20 bp, Aerococcus christensenii
caacgggcagcgagctcgcg

SEQ ID NO: 30577 - DNA, 20 bp, Moraxella  catarrhalis
tctgatacttagtggcggac

SEQ ID NO: 30578 - DNA, 20 bp, Bacillus pallidus
agggagcttgctcctttagg

SEQ ID NO: 30579 - DNA, 20 bp, Staphylococcus carnosus
gtgcgtaggtaactatgcgc

SEQ ID NO: 30580 - DNA, 20 bp, Pasteurella multocida
taaagggtgggacctcttgg

SEQ ID NO: 30581 - DNA, 20 bp, Prevotella oris
ggattaagcgtgttgtgaaa

SEQ ID NO: 30582 - DNA, 20 bp, Acinetobacter junii
agcggagatgaggtgcttgc

SEQ ID NO: 30583 - DNA, 20 bp, Moraxella osloensis
gggagtctattgcaccagaa

SEQ ID NO: 30584 - DNA, 20 bp, Leptotrichia buccalis
aactgtttggctagagtgct

SEQ ID NO: 30585 - DNA, 20 bp, Campylobacter lari
ctgttaaactgcttgagaaa

SEQ ID NO: 30586 - DNA, 20 bp, Bacillus schlegellii
tgttgtcggggaagaagggc

SEQ ID NO: 30587 - DNA, 20 bp, Campylobacter rectus
cgtatacaataagacgcaat

SEQ ID NO: 30588 - DNA, 20 bp, Prevotella disiens
tttatcggtataggatgggg

SEQ ID NO: 30589 - DNA, 20 bp, Acinetobacter junii
gagatgaggtgcttgcacct

SEQ ID NO: 30590 - DNA, 20 bp, Enterococcus cecorum
atggagagtacaacgagtcg

SEQ ID NO: 30591 - DNA, 20 bp, Anaerococcus prevotii
aggtaagtggaatttttagt

SEQ ID NO: 30592 - DNA, 20 bp, Eggerthella lenta
ctccgccctccgtgccgcag

SEQ ID NO: 30593 - DNA, 20 bp, Anaerococcus prevotii
tgggctcattctgacgctga

SEQ ID NO: 30594 - DNA, 20 bp, Bacillus lentus
ccaggcggaaagataatcta

SEQ ID NO: 30595 - DNA, 20 bp, Prevotella bivia
aaggcagcttacgggagcgc

SEQ ID NO: 30596 - DNA, 20 bp, Clostridium botulinum
gtagggggtatcaactcccc

SEQ ID NO: 30597 - DNA, 20 bp, Dermacoccus nishinomiyaensis
tacgaccgatctccgcatgg

SEQ ID NO: 30598 - DNA, 20 bp, Streptococcus hyovaginalis
gacatcccagtgaccatcct

SEQ ID NO: 30599 - DNA, 20 bp, Peptoniphilus indolicus
ccagggcttgacataatatt

SEQ ID NO: 30600 - DNA, 20 bp, Proteus mirabilis
ccttgcactatcggatgaac

SEQ ID NO: 30601 - DNA, 20 bp, Bacteroides fragilis
tttcattattaaaggattcc

SEQ ID NO: 30602 - DNA, 20 bp, Tissierella praeacuta
agcggtaaaagatggtctcg

SEQ ID NO: 30603 - DNA, 20 bp, Streptococcus thermophilus
cttgcaccgagcggatgagt

SEQ ID NO: 30604 - DNA, 20 bp, Staphylococcus capitis
cctgcagcttgctgcgggta

SEQ ID NO: 30605 - DNA, 20 bp, Tetragenococcus halophilus
caagtcgaacgctgcttaag

SEQ ID NO: 30606 - DNA, 20 bp, Weissella paramesenteroides
cgtataataccaacaaccgc

SEQ ID NO: 30607 - DNA, 20 bp, Gemella bergeri
acaaaacagacggtacctaa

SEQ ID NO: 30608 - DNA, 20 bp, Mannheimia haemolytica
acagtcgattgacgttaatc

SEQ ID NO: 30609 - DNA, 20 bp, Actinomyces bovis
cttgacataccgcgcaaaag

SEQ ID NO: 30610 - DNA, 20 bp, Bacteroides stercoris
atggagactgccgtcgtaag

SEQ ID NO: 30611 - DNA, 20 bp, Granulicatella elegans
agaaggaaaagaggcttcgg

SEQ ID NO: 30612 - DNA, 20 bp, Paenibacillus larvae
cggagccaatcctcaaaagc

SEQ ID NO: 30613 - DNA, 20 bp, Bacteroides fragilis
gggagcgtaggtggactggt

SEQ ID NO: 30614 - DNA, 20 bp, Streptococcus thermophilus
catgtcatttatttgaaagg

SEQ ID NO: 30615 - DNA, 20 bp, Arcanobacterium bernardiae
ggtttctggatagggatggg

SEQ ID NO: 30616 - DNA, 20 bp, Tissierella praeacuta
atcacggctcaaccgtggta

SEQ ID NO: 30617 - DNA, 20 bp, Photobacterium damselae
agcttgaagagattcgagtg

SEQ ID NO: 30618 - DNA, 20 bp, Corynebacterium jeikeium
tgcttgcaaggggtactcga

SEQ ID NO: 30619 - DNA, 20 bp, Corynebacterium afermentans
gctcctcagcgtcagttcgg

SEQ ID NO: 30620 - DNA, 20 bp, Arcanobacterium bernardiae
tgcgatgtgccagagatggt

SEQ ID NO: 30621 - DNA, 20 bp, Microbacterium hominis
aatacgggactctttggaca

SEQ ID NO: 30622 - DNA, 20 bp, Actinobacillus ureae
agacgctggcggcaggctta

SEQ ID NO: 30623 - DNA, 20 bp, Prevotella bivia
tgttagcacctagtgttagc

SEQ ID NO: 30624 - DNA, 20 bp, Cardiobacterium hominis
atgtcaactaggcgtcgggt

SEQ ID NO: 30625 - DNA, 20 bp, Tissierella praeacuta
gagatttaagtcaaagcgta

SEQ ID NO: 30626 - DNA, 20 bp, Gemella haemolysans
gttctgacctttggttagac

SEQ ID NO: 30627 - DNA, 20 bp, Budvicia aquatica
gaggttgtgggcatgacccg

SEQ ID NO: 30628 - DNA, 20 bp, Peptostreptococcus anaerobius
tacacatggataacatactg

SEQ ID NO: 30629 - DNA, 20 bp, Bacillus fusiformis
catcccgttgaccactgtag

SEQ ID NO: 30630 - DNA, 20 bp, Corynebacterium accolens
aagagtagatgttgcatgac

SEQ ID NO: 30631 - DNA, 20 bp, Streptococcus hyovaginalis
cattaatcatgagtcgcgaa

SEQ ID NO: 30632 - DNA, 20 bp, Eggerthella lenta
cccccggccggatcccgaac

SEQ ID NO: 30633 - DNA, 20 bp, Streptococcus pyogenes
gaaaatccaccaagtgacgg

SEQ ID NO: 30634 - DNA, 20 bp, Tetragenococcus halophilus
ccaagccgcaaggcctagcg

SEQ ID NO: 30635 - DNA, 20 bp, Chromobacterium violaceum
tgggaacggcattggagact

SEQ ID NO: 30636 - DNA, 20 bp, Alicyclobacillus acidocaldarius
ggccttcccccgcaagaaga

SEQ ID NO: 30637 - DNA, 20 bp, Fusobacterium nucleatum
acagagagtcgcaaagctgt

SEQ ID NO: 30638 - DNA, 20 bp, Actinomyces meyeri
taatactggatattcactgg

SEQ ID NO: 30639 - DNA, 20 bp, Clostridium ramosum
ctatatgagatacaggtggt

SEQ ID NO: 30640 - DNA, 20 bp, Anaerococcus tetradius
agcaaaactcaaaaagcctg

SEQ ID NO: 30641 - DNA, 20 bp, Bacteroides thetaiotaomicron
tgcagttgatactggctgtc

SEQ ID NO: 30642 - DNA, 20 bp, Bacteroides distasonis
ctaaagattcatcgctgata

SEQ ID NO: 30643 - DNA, 20 bp, Tetragenococcus halophilus
agctcaactggggagggtca

SEQ ID NO: 30644 - DNA, 20 bp, Paenibacillus thiaminolyticus
ttaaacccggggctcaactc

SEQ ID NO: 30645 - DNA, 20 bp, Anaerobiospirillum succiniciproducens
gttccgcagctaacgcgata

SEQ ID NO: 30646 - DNA, 20 bp, Arcanobacterium bernardiae
tgcgcctgctgtgaaagacc

SEQ ID NO: 30647 - DNA, 20 bp, Streptococcus thermophilus
gagcttgctcttcttggatg

SEQ ID NO: 30648 - DNA, 20 bp, Bacillus badius
taactgtccgtaccttgacg

SEQ ID NO: 30649 - DNA, 20 bp, Paenibacillus pabuli
caacctgccctcaagtttgg

SEQ ID NO: 30650 - DNA, 20 bp, Bacteroides forsythus
taaacttcttttacagggga

SEQ ID NO: 30651 - DNA, 20 bp, Streptococcus anginosus
gcggttagaaaagtctgaag

SEQ ID NO: 30652 - DNA, 20 bp, Fusobacterium mortiferum
gcagagatgcttttgtgccc

SEQ ID NO: 30653 - DNA, 20 bp, Bacillus flexus
gcttgcttctatgacgttag

SEQ ID NO: 30654 - DNA, 20 bp, Facklamia sourekii
cgaagtcgtgaggccaagcg

SEQ ID NO: 30655 - DNA, 20 bp, Staphylococcus carnosus
acaagtgcgtaggtaactat

SEQ ID NO: 30656 - DNA, 20 bp, Facklamia sourekii
gcaagtcgaacgaaccgacg

SEQ ID NO: 30657 - DNA, 20 bp, Streptococcus agalactiae
ttggtgtttacactagactg

SEQ ID NO: 30658 - DNA, 20 bp, Kingella denitrificans
cggaccttgcgctatttgag

SEQ ID NO: 30659 - DNA, 20 bp, Streptococcus equinus
cataacagcatttaacacat

SEQ ID NO: 30660 - DNA, 20 bp, Neisseria lactamica
aacgtaccgggcagtggggg

SEQ ID NO: 30661 - DNA, 20 bp, Arcanobacterium haemolyticum
ttttccatgggttctgtacc

SEQ ID NO: 30662 - DNA, 20 bp, Anaerococcus tetradius
gcgactttctggccataaac

SEQ ID NO: 30663 - DNA, 20 bp, Vibrio cholerae
ggtaacgtcaaatgattaag

SEQ ID NO: 30664 - DNA, 20 bp, Corynebacterium auris
tgacatgcactggatcgggc

SEQ ID NO: 30665 - DNA, 20 bp, Clostridium ramosum
aggagaggatcgtggaattc

SEQ ID NO: 30666 - DNA, 20 bp, Gemella bergeri
caagccaatctcataaaact

SEQ ID NO: 30667 - DNA, 20 bp, Brevibacillus choshinensis
tttggtcacgtacagatggg

SEQ ID NO: 30668 - DNA, 20 bp, Bacillus lentus
gcggtcaggagatgtcaaga

SEQ ID NO: 30669 - DNA, 20 bp, Paenibacillus azotofixans
gcactggaaactggacagct

SEQ ID NO: 30670 - DNA, 20 bp, Eggerthella lenta
tttcagcagggaagaaattc

SEQ ID NO: 30671 - DNA, 20 bp, Bacillus sp
gtcgagcgaactgatgaaga

SEQ ID NO: 30672 - DNA, 20 bp, Bacteroides uniformis
ggcgacgtgatgctaatccc

SEQ ID NO: 30673 - DNA, 20 bp, Providencia alcalifaciens
gaagttcccctgctttgctc

SEQ ID NO: 30674 - DNA, 20 bp, Streptococcus agalactiae
agtagaacgctgaggtttgg

SEQ ID NO: 30675 - DNA, 20 bp, Bacteroides uniformis
gagtacagtagaggcaggcg

SEQ ID NO: 30676 - DNA, 20 bp, Corynebacterium afermentans
cggtcgcagctcgtatccgg

SEQ ID NO: 30677 - DNA, 20 bp, Anaerococcus prevotii
aggcggaaatgcaagtcagg

SEQ ID NO: 30678 - DNA, 20 bp, Anaerococcus prevotii
gtatagagatataccctctt

SEQ ID NO: 30679 - DNA, 20 bp, Cardiobacterium hominis
agcttgctccaggcgtcgag

SEQ ID NO: 30680 - DNA, 20 bp, Actinomyces neuii
gtcgtgtgggggatgaaggc

SEQ ID NO: 30681 - DNA, 20 bp, Neisseria polysaccharea
aaccgcaaggggtccgctta

SEQ ID NO: 30682 - DNA, 20 bp, Peptoniphilus indolicus
taaagatgggaactctaaag

SEQ ID NO: 30683 - DNA, 20 bp, Paenibacillus peoriae
agtcgagcggggttgtttag

SEQ ID NO: 30684 - DNA, 20 bp, Eschericchia vulneris
caagcagtggggaatattgc

SEQ ID NO: 30685 - DNA, 20 bp, Eggerthella lenta
agccgccggccgaacccgca

SEQ ID NO: 30686 - DNA, 20 bp, Streptococcus pneumoniae
ggatgttgcatgacatttgc

SEQ ID NO: 30687 - DNA, 20 bp, Fusobacterium nucleatum
ggaatgagacagagatgttt

SEQ ID NO: 30688 - DNA, 20 bp, Anaerococcus prevotii
ttcgcaggcggaaatgcaag

SEQ ID NO: 30689 - DNA, 20 bp, Corynebacterium glucuronolyticum
tccagcttgctggagtgctc

SEQ ID NO: 30690 - DNA, 20 bp, Eikenella corrodens
taccactttttgctgacggt

SEQ ID NO: 30691 - DNA, 20 bp, Haemophilus segnis
tacagagggcgacgaagccg

SEQ ID NO: 30692 - DNA, 20 bp, Alicyclobacillus acidocaldarius
gtgtccccccaacacctagc

SEQ ID NO: 30693 - DNA, 20 bp, Eggerthella lenta
gatgaaaccgccctcgggcg

SEQ ID NO: 30694 - DNA, 20 bp, Clostridium tetani
ttcgcatgaaactttaacca

SEQ ID NO: 30695 - DNA, 20 bp, Veillonella atypica
caatgggagttaatagacgg

SEQ ID NO: 30696 - DNA, 20 bp, Listeria monocytogenes
ataaagtgtggcgcatgcca

SEQ ID NO: 30697 - DNA, 20 bp, Gemella haemolysans
gtctcataagagatcagtgc

SEQ ID NO: 30698 - DNA, 20 bp, Eggerthella lenta
gaaggcagcctgctgggccg

SEQ ID NO: 30699 - DNA, 20 bp, Brevibacillus choshinensis
tgctcttcggcggttagcgg

SEQ ID NO: 30700 - DNA, 20 bp, Clostridium innocuum
cggtagctaaaaccggatag

SEQ ID NO: 30701 - DNA, 20 bp, Clostridium histolyticum
cagagagaagcaagaccgtg

SEQ ID NO: 30702 - DNA, 20 bp, Burkholderia gladioli
gaaagaaatcctgagggcta

SEQ ID NO: 30703 - DNA, 20 bp, Clostridium limosum
cggggctcaaccccggtgct

SEQ ID NO: 30704 - DNA, 20 bp, Tetragenococcus halophilus
tccatcagcgggggataaca

SEQ ID NO: 30705 - DNA, 20 bp, Prevotella melaninogenica
agagataatgacgcccttcg

SEQ ID NO: 30706 - DNA, 20 bp, Globicatella sanguinis
tatcttagagataagagaaa

SEQ ID NO: 30707 - DNA, 20 bp, Fusobacterium mortiferum
cctaagaaattagcagagat

SEQ ID NO: 30708 - DNA, 20 bp, Anaerobiospirillum succiniciproducens
agagcttgctctttggctga

SEQ ID NO: 30709 - DNA, 20 bp, Fusobacterium mortiferum
acagagagtcgcaaacctgc

SEQ ID NO: 30710 - DNA, 20 bp, Clostridium innocuum
tgctggagtgcagaagaggg

SEQ ID NO: 30711 - DNA, 20 bp, Bacillus sp
tctagggccgtcagaggatg

SEQ ID NO: 30712 - DNA, 20 bp, Yersinia ruckeri
aagtgttaatagcactgaac

SEQ ID NO: 30713 - DNA, 20 bp, Corynebacterium argentoratense
gtacaacgcgctgcgagcct

SEQ ID NO: 30714 - DNA, 20 bp, Collinsella aerofaciens
gacggcccaccgtgccgaca

SEQ ID NO: 30715 - DNA, 20 bp, Weeksella virosa
gttgccagcgtttaaagacg

SEQ ID NO: 30716 - DNA, 20 bp, Eggerthella lenta
cctctcaagcgggatctcta

SEQ ID NO: 30717 - DNA, 20 bp, Paenibacillus pabuli
aacgaatcctaaaaagccgg

SEQ ID NO: 30718 - DNA, 20 bp, Myroides odoratus
cctagtaactagggctaagt

SEQ ID NO: 30719 - DNA, 20 bp, Dermacoccus nishinomiyaensis
atcatgcagagatgtgtgcg

SEQ ID NO: 30720 - DNA, 20 bp, Actinomyces viscosus
cttgtgggtgggttgacggt

SEQ ID NO: 30721 - DNA, 20 bp, Gemella bergeri
agtaactatacacaaaacag

SEQ ID NO: 30722 - DNA, 20 bp, Bacteroides uniformis
atggcatagttcttccgcat

SEQ ID NO: 30723 - DNA, 20 bp, Bacillus megaterium
tctccttcatgggagatgat

SEQ ID NO: 30724 - DNA, 20 bp, Bacillus coagulans
aaaggaaaggcggcttcggc

SEQ ID NO: 30725 - DNA, 20 bp, Tetragenococcus halophilus
ggggaacctatccatcagcg

SEQ ID NO: 30726 - DNA, 20 bp, Vibrio cholerae
cagtttcaaatgcgattcct

SEQ ID NO: 30727 - DNA, 20 bp, Vibrio mimicus
tgacctagagtcgtggcttt

SEQ ID NO: 30728 - DNA, 20 bp, Microbacterium hominis
atacgggactctttggacac

SEQ ID NO: 30729 - DNA, 20 bp, Gemella haemolysans
tgaggacacaagagattgtg

SEQ ID NO: 30730 - DNA, 20 bp, Veillonella atypica
ttgatggacagaactagaga

SEQ ID NO: 30731 - DNA, 20 bp, Corynebacterium group F
gcgtttgctaccttgtgagg

SEQ ID NO: 30732 - DNA, 20 bp, Alicyclobacillus acidocaldarius
gtgtcagagggatgtcaagc

SEQ ID NO: 30733 - DNA, 20 bp, Arcanobacterium bernardiae
ggttactgggccaccactga

SEQ ID NO: 30734 - DNA, 20 bp, Bacillus sp
acttttctctccgcatggag

SEQ ID NO: 30735 - DNA, 20 bp, Anaerobiospirillum succiniciproducens
ggcgaaggcggtctcctggg

SEQ ID NO: 30736 - DNA, 20 bp, Paenibacillus thiaminolyticus
cgctatggagagtaactgtt

SEQ ID NO: 30737 - DNA, 20 bp, Acinetobacter johnsonii
aggaggctacttggattaat

SEQ ID NO: 30738 - DNA, 20 bp, Corynebacterium accolens
gtctttctacgactttcgtg

SEQ ID NO: 30739 - DNA, 20 bp, Leptotrichia buccalis
tgggcatgaagagtgtccgt

SEQ ID NO: 30740 - DNA, 20 bp, Moraxella osloensis
tgatactggtggtgctagaa

SEQ ID NO: 30741 - DNA, 20 bp, Leuconostoc argentinum
gttaacttgagtgttgtaga

SEQ ID NO: 30742 - DNA, 20 bp, Gemella morbillorum
ttgttagggaagaatggata

SEQ ID NO: 30743 - DNA, 20 bp, Tetragenococcus halophilus
aggtgctaataccgcatatg

SEQ ID NO: 30744 - DNA, 20 bp, Brevibacillus choshinensis
agcttgctcttcggcggtta

SEQ ID NO: 30745 - DNA, 20 bp, Stenotrophomonas maltophilia
tgggcgactagaatgtggta

SEQ ID NO: 30746 - DNA, 20 bp, Bacillus halodurans
aagtcgagcggaccaaaggg

SEQ ID NO: 30747 - DNA, 20 bp, Corynebacterium urealyticum
gctaggtgtggggatttttc

SEQ ID NO: 30748 - DNA, 20 bp, Pseudomonas fluorescens
gttgggaggaagggtactta

SEQ ID NO: 30749 - DNA, 20 bp, Leuconostoc pseudomesenteroides
acacaaagttaaaaggcgct

SEQ ID NO: 30750 - DNA, 20 bp, Moraxella  catarrhalis
accagtcgttgggtctttta

SEQ ID NO: 30751 - DNA, 20 bp, Helcococcus kunzii
atttcggtgaaagatggtct

SEQ ID NO: 30752 - DNA, 20 bp, Sporosarcina ureae
tgacatcccagtgaccgtca

SEQ ID NO: 30753 - DNA, 20 bp, Bacillus schlegellii
ggcggcctgttaagtctgct

SEQ ID NO: 30754 - DNA, 20 bp, Prevotella melaninogenica
atgacggcatcagatttgaa

SEQ ID NO: 30755 - DNA, 20 bp, Lactococcus garvieae
ccttagagataaggagttcc

SEQ ID NO: 30756 - DNA, 20 bp, Bacteroides forsythus
ggttgcggatgggcatgcgt

SEQ ID NO: 30757 - DNA, 20 bp, Propionibacterium freudenreichii
aactctgggcttgctttcga

SEQ ID NO: 30758 - DNA, 20 bp, Corynebacterium glucuronolyticum
tttcgtcagggacgaagttt

SEQ ID NO: 30759 - DNA, 20 bp, Anaerococcus prevotii
gacatactgaggaccggtat

SEQ ID NO: 30760 - DNA, 20 bp, Staphylococcus condimenti
ggataatatgcggaaccgca

SEQ ID NO: 30761 - DNA, 20 bp, Abiotrophia defectiva
cgtgtgacggtatctaacca

SEQ ID NO: 30762 - DNA, 20 bp, Actinomyces neuii
gttttggccttgttgatggt

SEQ ID NO: 30763 - DNA, 20 bp, Anaerococcus prevotii
gtcttgacatattacggcgg

SEQ ID NO: 30764 - DNA, 20 bp, Bacillus fusiformis
acaagtacagtagtaactgg

SEQ ID NO: 30765 - DNA, 20 bp, Bacteroides thetaiotaomicron
gacaggatgccaatcccaaa

SEQ ID NO: 30766 - DNA, 20 bp, Pasteurella multocida
taaatagatagcatcattga

SEQ ID NO: 30767 - DNA, 20 bp, Moraxella atlantae
gagtaacatttaggaaactg

SEQ ID NO: 30768 - DNA, 20 bp, Porphyromonas endodontalis
cagtggtgaaaagctgcagc

SEQ ID NO: 30769 - DNA, 20 bp, Fusobacterium mortiferum
tcatatgaaagctatatgcg

SEQ ID NO: 30770 - DNA, 20 bp, Streptococcus gordonii
caccatagactgtgagttgc

SEQ ID NO: 30771 - DNA, 20 bp, Dolosicoccus paucivorans
tagcttagagataagtgaaa

SEQ ID NO: 30772 - DNA, 20 bp, Listeria welshimeri
gccacggctttgaaagatgg

SEQ ID NO: 30773 - DNA, 20 bp, Eggerthella lenta
ctcctcgcccccctcctggg

SEQ ID NO: 30774 - DNA, 20 bp, Finegoldia magna
atgacagtgggatagcctcg

SEQ ID NO: 30775 - DNA, 20 bp, Bacillus megaterium
gagatgattgaaagatggtt

SEQ ID NO: 30776 - DNA, 20 bp, Neisseria elongata
tcagagacggaagggtgcct

SEQ ID NO: 30777 - DNA, 20 bp, Bacillus pallidus
atccaccctttagtgctgca

SEQ ID NO: 30778 - DNA, 20 bp, Porphyromonas endodontalis
tcagtggtgaaaagctgcag

SEQ ID NO: 30779 - DNA, 20 bp, Anaerococcus prevotii
gcttgacatactgaggaccg

SEQ ID NO: 30780 - DNA, 20 bp, Prevotella melaninogenica
ttgcatcaaatcttgaaagc

SEQ ID NO: 30781 - DNA, 20 bp, Shewanella algae
taagttaataccttacatct

SEQ ID NO: 30782 - DNA, 20 bp, Leuconostoc pseudomesenteroides
gcgctttggcgtcacctaga

SEQ ID NO: 30783 - DNA, 20 bp, Prevotella melaninogenica
tgacttgcagcgcatactgg

SEQ ID NO: 30784 - DNA, 20 bp, Gemella haemolysans
agattgtgttgttctgacct

SEQ ID NO: 30785 - DNA, 20 bp, Paenibacillus macerans
ggagcaatctgtcacttaga

SEQ ID NO: 30786 - DNA, 20 bp, Cardiobacterium hominis
tttgggtgggaactgtaagg

SEQ ID NO: 30787 - DNA, 20 bp, Facklamia hominis
gcagatcgcatgatcaacga

SEQ ID NO: 30788 - DNA, 20 bp, Bacillus alcalophilus
cgaggggtcattggaaactg

SEQ ID NO: 30789 - DNA, 20 bp, Bacillus marinus
tctagaggggtcagaggatg

SEQ ID NO: 30790 - DNA, 20 bp, Alicyclobacillus acidocaldarius
ggctcctctctcagcggccc

SEQ ID NO: 30791 - DNA, 20 bp, Propionibacterium freudenreichii
cttgtaggcggttgatcacg

SEQ ID NO: 30792 - DNA, 20 bp, Facklamia ignava
atgactggaatgggaaagac

SEQ ID NO: 30793 - DNA, 20 bp, Bacteroides ureolyticus
gtctagagtaggggagaggt

SEQ ID NO: 30794 - DNA, 20 bp, Bacteroides merdae
ggggtcccgcatgggaatat

SEQ ID NO: 30795 - DNA, 20 bp, Aerococcus christensenii
ctaccgataagcgggggaca

SEQ ID NO: 30796 - DNA, 20 bp, Propionibacterium acnes
tttgacatggatcgggagtg

SEQ ID NO: 30797 - DNA, 20 bp, Bacillus lentus
gcggaaagataatctatccg

SEQ ID NO: 30798 - DNA, 20 bp, Prevotella intermedia
acattctggacgtcgaccgg

SEQ ID NO: 30799 - DNA, 20 bp, Alcaligenes faecalis
taggccttagtagcgcagct

SEQ ID NO: 30800 - DNA, 20 bp, Staphylococcus succinus
accttgtacgacttcacccc

SEQ ID NO: 30801 - DNA, 20 bp, Prevotella loescheii
cggcccaccgtggctacgat

SEQ ID NO: 30802 - DNA, 20 bp, Arcanobacterium bernardiae
cgatgtgccagagatggtgc

SEQ ID NO: 30803 - DNA, 20 bp, Burkholderia multivorans
atccttggctctaatacagt

SEQ ID NO: 30804 - DNA, 20 bp, Neisseria cinerea
caaggggtccgcttaccacg

SEQ ID NO: 30805 - DNA, 20 bp, Clostridium septicum
gcagcttcgcatggagcagc

SEQ ID NO: 30806 - DNA, 20 bp, Tissierella praeacuta
atgtgaaagatcacggctca

SEQ ID NO: 30807 - DNA, 20 bp, Gemella haemolysans
aagtttttctggtgcttgca

SEQ ID NO: 30808 - DNA, 20 bp, Facklamia ignava
ttcctttcaacgcgagtggc

SEQ ID NO: 30809 - DNA, 20 bp, Facklamia ignava
ggtttgacggtaactgatca

SEQ ID NO: 30810 - DNA, 20 bp, Clostridium innocuum
gaagagggcgatggaattcc

SEQ ID NO: 30811 - DNA, 20 bp, Veillonella atypica
cattgatggacagaactaga

SEQ ID NO: 30812 - DNA, 20 bp, Bacteroides uniformis
gccgatgactcggggatagc

SEQ ID NO: 30813 - DNA, 20 bp, Unknown Organism
  oligonucleotide from CDC group EF-4B
gaaggaaagcaggggctctt

SEQ ID NO: 30814 - DNA, 20 bp, Clostridium limosum
aagaatcctgtggaaacacg

SEQ ID NO: 30815 - DNA, 20 bp, Arcanobacterium bernardiae
gttactgggccaccactgac

SEQ ID NO: 30816 - DNA, 20 bp, Prevotella oralis
aacttttgatggcgaccggc

SEQ ID NO: 30817 - DNA, 20 bp, Kingella denitrificans
actttttgttgacggtacct

SEQ ID NO: 30818 - DNA, 20 bp, Streptococcus anginosus
agtatgtaacacatgttaga

SEQ ID NO: 30819 - DNA, 20 bp, Haemophilus segnis
ggcatttagtttaatagact

SEQ ID NO: 30820 - DNA, 20 bp, Oligella urethralis
ccgccactcgccatcaagag

SEQ ID NO: 30821 - DNA, 20 bp, Chromobacterium violaceum
atgtaccgtgtaatggggga

SEQ ID NO: 30822 - DNA, 20 bp, Oligella urethralis
agcatcttaaggtattagcc

SEQ ID NO: 30823 - DNA, 20 bp, Eggerthella lenta
tcgacggtacctgcagaaga

SEQ ID NO: 30824 - DNA, 20 bp, Facklamia languida
aactcgcaagggcaagcgaa

SEQ ID NO: 30825 - DNA, 20 bp, Gemella bergeri
gcgcgcgcaggtggtttaga

SEQ ID NO: 30826 - DNA, 20 bp, Actinomyces turicensis
aatactggatattcactcat

SEQ ID NO: 30827 - DNA, 20 bp, Prevotella bivia
gaagttcgtgaccgtaagga

SEQ ID NO: 30828 - DNA, 20 bp, Chromobacterium violaceum
cgagcagccgacgtctgatt

SEQ ID NO: 30829 - DNA, 20 bp, Clostridium clostridiiforme
aagatggaggaaggtgggga

SEQ ID NO: 30830 - DNA, 20 bp, Peptostreptococcus anaerobius
acatactgaaaagtttacta

SEQ ID NO: 30831 - DNA, 20 bp, Weissella paramesenteroides
tgttggttgaaagatggttc

SEQ ID NO: 30832 - DNA, 20 bp, Vibrio cholerae
cacctgggcatatccggtag

SEQ ID NO: 30833 - DNA, 20 bp, Unknown Organism
  oligonucleotide from CDC group VB-3
agcggatgaggggagcttgc

SEQ ID NO: 30834 - DNA, 20 bp, Bacteroides thetaiotaomicron
tgtggaattttgtatgtacc

SEQ ID NO: 30835 - DNA, 20 bp, Neisseria meningitidis
ctctcaagacgtatgcggta

SEQ ID NO: 30836 - DNA, 20 bp, Brevibacillus choshinensis
cgagagtgcgcgaatccctt

SEQ ID NO: 30837 - DNA, 20 bp, Bacillus coagulans
acctcacgccaccggatgtg

SEQ ID NO: 30838 - DNA, 20 bp, Corynebacterium group F
ctgggcttgacatgtagcgg

SEQ ID NO: 30839 - DNA, 20 bp, Bacteroides uniformis
cgcttaagtcagttgtgaaa

SEQ ID NO: 30840 - DNA, 20 bp, Prevotella bivia
ccaacctacccataactaag

SEQ ID NO: 30841 - DNA, 20 bp, Acinetobacter junii
cgagcggagatgaggtgctt

SEQ ID NO: 30842 - DNA, 20 bp, Prevotella oralis
accggtgatgtgcagcgcga

SEQ ID NO: 30843 - DNA, 20 bp, Bacillus sp
gttaaaaggcggcgcaagct

SEQ ID NO: 30844 - DNA, 20 bp, Corynebacterium glucuronolyticum
cctttcgtcagggacgaagt

SEQ ID NO: 30845 - DNA, 20 bp, Prevotella oralis
tacccgggcttgaactgcca

SEQ ID NO: 30846 - DNA, 20 bp, Staphylococcus sciuri
taatacaaagggcagcgaat

SEQ ID NO: 30847 - DNA, 20 bp, Acinetobacter haemolyticus
ttgctacattacctagcggc

SEQ ID NO: 30848 - DNA, 20 bp, Oligella ureolytica
gatgctgacggtagttgagg

SEQ ID NO: 30849 - DNA, 20 bp, Leptotrichia buccalis
ttcgtagatatgtgcaggaa

SEQ ID NO: 30850 - DNA, 20 bp, Prevotella corporis
cgaaaggcagactaatacct

SEQ ID NO: 30851 - DNA, 20 bp, Lactococcus lactis
acgggagttgggagtacccg

SEQ ID NO: 30852 - DNA, 20 bp, Actinomyces odontolyticus
gtggtggcatttagttggtc

SEQ ID NO: 30853 - DNA, 20 bp, Facklamia sourekii
tagaggatggtcccgcggtg

SEQ ID NO: 30854 - DNA, 20 bp, Gemella sanguinis
ttagggaagaatgattgtat

SEQ ID NO: 30855 - DNA, 20 bp, Collinsella aerofaciens
ggtgtggggggacgatcccc

SEQ ID NO: 30856 - DNA, 20 bp, Campylobacter gracilis
atcctctgacccctctagag

SEQ ID NO: 30857 - DNA, 20 bp, Neisseria polysaccharea
tgattgcttggtagcgtagc

SEQ ID NO: 30858 - DNA, 20 bp, Lactococcus raffinolactis
tgtgtgcattggaaactgtt

SEQ ID NO: 30859 - DNA, 20 bp, Leptotrichia buccalis
tgcacctgaagccgccggtc

SEQ ID NO: 30860 - DNA, 20 bp, Prevotella intermedia
cactcaagtcctacagttcc

SEQ ID NO: 30861 - DNA, 20 bp, Moraxella  catarrhalis
gtgagaatcttgcagagatg

SEQ ID NO: 30862 - DNA, 20 bp, Vibrio cholerae
tattaacttaaccaccttcc

SEQ ID NO: 30863 - DNA, 20 bp, Granulicatella adiacens
cggatgctaaaaccgcatag

SEQ ID NO: 30864 - DNA, 20 bp, Clostridium ramosum
ctagagtgcaggagaggatc

SEQ ID NO: 30865 - DNA, 20 bp, Clostridium ramosum
cgaaggcgacgatctggcct

SEQ ID NO: 30866 - DNA, 20 bp, Streptococcus equi
ttcttagagataagaagtta

SEQ ID NO: 30867 - DNA, 20 bp, Anaerobiospirillum succiniciproducens
ttagagataagagagtgcct

SEQ ID NO: 30868 - DNA, 20 bp, Neisseria subflava
aaaaggatagggttaatacc

SEQ ID NO: 30869 - DNA, 20 bp, Porphyromonas endodontalis
gagtctaagcgaaagcgata

SEQ ID NO: 30870 - DNA, 20 bp, Staphylococcus sp.
gcatagttacttacacgtat

SEQ ID NO: 30871 - DNA, 20 bp, Bacteroides uniformis
tcttgagtacagtagaggca

SEQ ID NO: 30872 - DNA, 20 bp, Streptococcus agalactiae
tgcttcactgtgagatggac

SEQ ID NO: 30873 - DNA, 20 bp, Eubacterium moniliforme
tccttcgggaacagaatgac

SEQ ID NO: 30874 - DNA, 20 bp, Bacillus alcalophilus
ggaatcacatggttcttttg

SEQ ID NO: 30875 - DNA, 20 bp, Aerococcus christensenii
agcgactttctggtctgtca

SEQ ID NO: 30876 - DNA, 20 bp, Serratia marcescens
acgctcatcaattgacgtta

SEQ ID NO: 30877 - DNA, 20 bp, Streptococcus parasanguinis
tcgacattgcatgatgttga

SEQ ID NO: 30878 - DNA, 20 bp, Yersinia intermedia
aatagcacggttgattgacg

SEQ ID NO: 30879 - DNA, 20 bp, Moraxella atlantae
gtgagtaacatttaggaaac

SEQ ID NO: 30880 - DNA, 20 bp, Neisseria meningitidis
cgtcttgagagagaaagcag

SEQ ID NO: 30881 - DNA, 20 bp, Actinomyces naeslundii
ggcttgacatgtgccggtct

SEQ ID NO: 30882 - DNA, 20 bp, Haemophilus actinemycetemcomitans
cggacggtagcaggtaagta

SEQ ID NO: 30883 - DNA, 20 bp, Paenibacillus amylolyticus
gtgtttaaggccaaggctca

SEQ ID NO: 30884 - DNA, 20 bp, Photobacterium damselae
agagaagcttgaagagattc

SEQ ID NO: 30885 - DNA, 20 bp, Citrobacter sedlakii
cggggaggaagggattgtgg

SEQ ID NO: 30886 - DNA, 20 bp, Bacillus lentus
taccggcatttcctccgata

SEQ ID NO: 30887 - DNA, 20 bp, Propionibacterium avidum
ttgtggggctggttcacagg

SEQ ID NO: 30888 - DNA, 20 bp, Neisseria meningitidis
tctctcaagacgtatgcggt

SEQ ID NO: 30889 - DNA, 20 bp, Streptococcus agalactiae
agtaattaacacatgttagt

SEQ ID NO: 30890 - DNA, 20 bp, Haemophilus influenzae
atagcacatcaaattgacgt

SEQ ID NO: 30891 - DNA, 20 bp, Photobacterium damselae
tagggaggaaggtagtgtag

SEQ ID NO: 30892 - DNA, 20 bp, Peptoniphilus indolicus
cctgcctttgacacggggat

SEQ ID NO: 30893 - DNA, 20 bp, Veillonella dispar
atagttcctcttcttcggaa

SEQ ID NO: 30894 - DNA, 20 bp, Anaerococcus prevotii
aaccgggattaataccaaat

SEQ ID NO: 30895 - DNA, 20 bp, Clostridium ramosum
aagcttaacttcagtaagcc

SEQ ID NO: 30896 - DNA, 20 bp, Micromonas micros
ataccgcatgagaccacaga

SEQ ID NO: 30897 - DNA, 20 bp, Streptococcus constellatus
tgttaaggaagaacgtgtgt

SEQ ID NO: 30898 - DNA, 20 bp, Kingella kingae
tacttggtggcgagtggcga

SEQ ID NO: 30899 - DNA, 20 bp, Prevotella intermedia
acgggagtgttactgacgct

SEQ ID NO: 30900 - DNA, 20 bp, Veillonella dispar
taatcgggacgaaaggcctt

SEQ ID NO: 30901 - DNA, 20 bp, Streptococcus sp.
gattattgcatgataattaa

SEQ ID NO: 30902 - DNA, 20 bp, Helcococcus kunzii
aagaagcaagccctggctaa

SEQ ID NO: 30903 - DNA, 20 bp, Clostridium tetani
accaaaggagtaatctgctt

SEQ ID NO: 30904 - DNA, 19 bp, Corynebacterium coyleae
cgaagccagtggcctgtca

SEQ ID NO: 30905 - DNA, 20 bp, Bacillus coagulans
ctgttgccggggaagaacaa

SEQ ID NO: 30906 - DNA, 20 bp, Dolosigranulum pigrum
tatgggaggcagccgtcgaa

SEQ ID NO: 30907 - DNA, 20 bp, Neisseria lactamica
gggcagtgggggataactga

SEQ ID NO: 30908 - DNA, 20 bp, Shewanella algae
gctgatggataagcccaggt

SEQ ID NO: 30909 - DNA, 20 bp, Staphylococcus aureus
tgtggttaattcgaagcaac

SEQ ID NO: 30910 - DNA, 20 bp, Listeria innocua
tgatagagtgtggcgcatgc

SEQ ID NO: 30911 - DNA, 20 bp, Bacillus oleronius
tcttgacctccctagagata

SEQ ID NO: 30912 - DNA, 20 bp, Lactococcus lactis
tcactcaaagatgatcccgc

SEQ ID NO: 30913 - DNA, 20 bp, Methylobacterium mesophilicum
ggaaaggcttgctgccggag

SEQ ID NO: 30914 - DNA, 20 bp, Brevibacillus laterosporus
cgcaagctatcacttacaga

SEQ ID NO: 30915 - DNA, 20 bp, Campylobacter concisus
tgcgaaggtgggatcggcga

SEQ ID NO: 30916 - DNA, 20 bp, Bacillus schlegellii
ggcctgttaagtctgctgtg

SEQ ID NO: 30917 - DNA, 20 bp, Enterococcus durans
gctaacaaggtagccgtatc

SEQ ID NO: 30918 - DNA, 20 bp, Fusobacterium mortiferum
ttcagttgggacgaagtaag

SEQ ID NO: 30919 - DNA, 20 bp, Brevibacillus agri
atgatctgaaaagaaaagat

SEQ ID NO: 30920 - DNA, 20 bp, Morganella morganii
gcaccatcagatgaacccat

SEQ ID NO: 30921 - DNA, 20 bp, Prevotella loescheii
atgcaagtcgcggggcagca

SEQ ID NO: 30922 - DNA, 20 bp, Bacteroides stercoris
tgattattaaagaatttcgg

SEQ ID NO: 30923 - DNA, 20 bp, Alicyclobacillus acidocaldarius
tccaaagccatcccatggtt

SEQ ID NO: 30924 - DNA, 20 bp, Bacteroides eggerthii
caccaagtcaacgatggata

SEQ ID NO: 30925 - DNA, 20 bp, Fusobacterium mortiferum
cgcatgaaattcatatgaaa

SEQ ID NO: 30926 - DNA, 20 bp, Facklamia sourekii
ataggtgaaatcctacggga

SEQ ID NO: 30927 - DNA, 20 bp, Microbacterium terregens
tgaaagagagcttgctctct

SEQ ID NO: 30928 - DNA, 20 bp, Alcaligenes faecalis
ctgccgagctagagtatgtc

SEQ ID NO: 30929 - DNA, 20 bp, Paenibacillus thiaminolyticus
ctgttccataggtgacggta

SEQ ID NO: 30930 - DNA, 20 bp, Streptococcus equi
aataccgcataaaagtggtt

SEQ ID NO: 30931 - DNA, 20 bp, Propionibacterium acnes
aagtgtaatcttggggctta

SEQ ID NO: 30932 - DNA, 20 bp, Paenibacillus pabuli
ttgttttcttcgcctgaaga

SEQ ID NO: 30933 - DNA, 20 bp, Bacteroides capilosus
atccgactaacgaagcagag

SEQ ID NO: 30934 - DNA, 20 bp, Acinetobacter genospecies 3
actgcaaagagggcggttac

SEQ ID NO: 30935 - DNA, 20 bp, Bacillus cereus
gaactgcatggttcgaaatt

SEQ ID NO: 30936 - DNA, 20 bp, Streptococcus salivarius
tcaagaacgagtgtgagagt

SEQ ID NO: 30937 - DNA, 20 bp, Prevotella disiens
gagtgtaggcggttggttaa

SEQ ID NO: 30938 - DNA, 20 bp, Peptoniphilus indolicus
gaattagcggtcaaagatgg

SEQ ID NO: 30939 - DNA, 20 bp, Vibrio hollisae
ggagtggaatccgccagaag

SEQ ID NO: 30940 - DNA, 20 bp, Helcococcus kunzii
gagtagatgaggggaaagtg

SEQ ID NO: 30941 - DNA, 20 bp, Bacillus badius
agtaactgtccgtaccttga

SEQ ID NO: 30942 - DNA, 20 bp, Bacteroides thetaiotaomicron
cagttgatactggctgtctt

SEQ ID NO: 30943 - DNA, 20 bp, Gemella haemolysans
taacactatgagatggcttt

SEQ ID NO: 30944 - DNA, 20 bp, Vibrio mimicus
ggaaggtggttaagttaata

SEQ ID NO: 30945 - DNA, 20 bp, Streptococcus thermophilus
cacatgtcatttatttgaaa

SEQ ID NO: 30946 - DNA, 20 bp, Corynebacterium propinquum
tcgtctgtgaaattccacag

SEQ ID NO: 30947 - DNA, 20 bp, Streptococcus thermophilus
gcataaaagtcgatatcgca

SEQ ID NO: 30948 - DNA, 20 bp, Moraxella osloensis
gaggagaggctaatggttaa

SEQ ID NO: 30949 - DNA, 20 bp, Eubacterium moniliforme
cttaatcggggaagttcctt

SEQ ID NO: 30950 - DNA, 20 bp, Staphylococcus succinus
gcgcacagttacttacgcat

SEQ ID NO: 30951 - DNA, 20 bp, Streptococcus infantarius
cataacagcatttaacccat

SEQ ID NO: 30952 - DNA, 20 bp, Bacteroides capilosus
tgctggagaggcaatcggaa

SEQ ID NO: 30953 - DNA, 20 bp, Listeria innocua
tagagtgtggcgcatgccac

SEQ ID NO: 30954 - DNA, 20 bp, Haemophilus paraphrophilus
gaaagtgtgggacctttggg

SEQ ID NO: 30955 - DNA, 20 bp, Corynebacterium jeikeium
ggaaaggccctttgcttgca

SEQ ID NO: 30956 - DNA, 20 bp, Kingella denitrificans
gtgcttgcacctgccggcga

SEQ ID NO: 30957 - DNA, 20 bp, Eubacterium moniliforme
ggaaggtgcggtggatcacc

SEQ ID NO: 30958 - DNA, 20 bp, Bacillus coagulans
gcgtgagtgaagaaggcctt

SEQ ID NO: 30959 - DNA, 20 bp, Helcococcus ovis
tctgtccttagtgaagataa

SEQ ID NO: 30960 - DNA, 20 bp, Alcaligenes faecalis
tacttttggcagagaagaaa

SEQ ID NO: 30961 - DNA, 20 bp, Acinetobacter johnsonii
gaggaggctacttggattaa

SEQ ID NO: 30962 - DNA, 20 bp, Bacillus pallidus
ctgcagactgggataacttc

SEQ ID NO: 30963 - DNA, 20 bp, Actinomyces neuii
gtttttggtgagagtggcga

SEQ ID NO: 30964 - DNA, 20 bp, Campylobacter curvus
caaataccaaaccggttatg

SEQ ID NO: 30965 - DNA, 20 bp, Campylobacter curvus
ttttcttggggaagaaattt

SEQ ID NO: 30966 - DNA, 20 bp, Bacillus alcalophilus
gaatcacatggttcttttgt

SEQ ID NO: 30967 - DNA, 20 bp, Corynebacterium xerosis
ccttgtggctcgtatacagg

SEQ ID NO: 30968 - DNA, 20 bp, Moraxella lacunata
tgggtctcttgaagacttag

SEQ ID NO: 30969 - DNA, 20 bp, Kytococcus sedentarius
ggaagaacatacgtgtaagt

SEQ ID NO: 30970 - DNA, 20 bp, Anaerococcus prevotii
gcctcaatacaggtggtgca

SEQ ID NO: 30971 - DNA, 20 bp, Clostridium botulinum
tggtaggtacaataagacgc

SEQ ID NO: 30972 - DNA, 20 bp, Weeksella virosa
aggcggatcaataagtcagt

SEQ ID NO: 30973 - DNA, 20 bp, Propionibacterium acnes
ttttgtggggtgctcgagtg

SEQ ID NO: 30974 - DNA, 20 bp, Bacteroides fragilis
ctttctttgctggcgaccgg

SEQ ID NO: 30975 - DNA, 20 bp, Bacteroides uniformis
gggaataaagtgaggcacgt

SEQ ID NO: 30976 - DNA, 20 bp, Veillonella dispar
ttaatcgggacgaaaggcct

SEQ ID NO: 30977 - DNA, 20 bp, Corynebacterium auris
gaggtggagctaatcgctag

SEQ ID NO: 30978 - DNA, 20 bp, Propionibacterium acnes
tgcctcttttggggtcggtt

SEQ ID NO: 30979 - DNA, 20 bp, Clostridium limosum
agcatgcgtaggcggatact

SEQ ID NO: 30980 - DNA, 20 bp, Staphylococcus aureus
gtcgagcgaacggacgagaa

SEQ ID NO: 30981 - DNA, 20 bp, Methylobacterium extorquens
ccttcgggtgtcagtggcag

SEQ ID NO: 30982 - DNA, 20 bp, Facklamia sourekii
tgttattagagaagaacagt

SEQ ID NO: 30983 - DNA, 20 bp, Facklamia ignava
ggaacttgttcctttcaacg

SEQ ID NO: 30984 - DNA, 20 bp, Haemophilus ducreyi
tgatgaggaaggcagttttg

SEQ ID NO: 30985 - DNA, 20 bp, Campylobacter sputorum
ggcagtaatccacctaacgg

SEQ ID NO: 30986 - DNA, 20 bp, Alcaligenes faecalis
tggggccgttaggccttagt

SEQ ID NO: 30987 - DNA, 20 bp, Bacillus lentus
gaacaagtatcggagtaact

SEQ ID NO: 30988 - DNA, 20 bp, Microbacterium hominis
tatgagctgcgatcgcatgg

SEQ ID NO: 30989 - DNA, 20 bp, Campylobacter curvus
tagctaatctgccccatagt

SEQ ID NO: 30990 - DNA, 20 bp, Streptococcus thermophilus
acatgtcatttatttgaaag

SEQ ID NO: 30991 - DNA, 20 bp, Prevotella intermedia
accccgttgaaagacggcct

SEQ ID NO: 30992 - DNA, 20 bp, Prevotella intermedia
aaagccatgcgactctcata

SEQ ID NO: 30993 - DNA, 20 bp, Moraxella osloensis
tagcttgctagagatgatta

SEQ ID NO: 30994 - DNA, 20 bp, Clostridium innocuum
acccttgtcgcatgttacca

SEQ ID NO: 30995 - DNA, 20 bp, Bacillus sp
tgatgaagagcttgcttttg

SEQ ID NO: 30996 - DNA, 20 bp, Bacillus alcalophilus
aaggaatcacatggttcttt

SEQ ID NO: 30997 - DNA, 20 bp, Campylobacter lari
tatcctaagaaccttataga

SEQ ID NO: 30998 - DNA, 20 bp, Bacteroides fragilis
cctgccctttactcggggat

SEQ ID NO: 30999 - DNA, 20 bp, Prevotella corporis
cccctctccgcagttgccat

SEQ ID NO: 31000 - DNA, 20 bp, Facklamia ignava
agtgctggcgcaaacgcaat

SEQ ID NO: 31001 - DNA, 20 bp, Staphylococcus aureus
aggcgactttctggctgaac

SEQ ID NO: 31002 - DNA, 20 bp, Bacteroides uniformis
caactgaatgatgtggagac

SEQ ID NO: 31003 - DNA, 20 bp, Burkholderia gladioli
ccggaaagaaatcctgaggg

SEQ ID NO: 31004 - DNA, 20 bp, Peptostreptococcus anaerobius
aaacacccgaagccgattat

SEQ ID NO: 31005 - DNA, 20 bp, Atopobium parvulum
taggtcgggagttaaatccg

SEQ ID NO: 31006 - DNA, 20 bp, Streptococcus salivarius
agtcaagaacgagtgtgaga

SEQ ID NO: 31007 - DNA, 20 bp, Gemella haemolysans
tagagacggtacctaaccag

SEQ ID NO: 31008 - DNA, 20 bp, Yersinia intermedia
taatagcacggttgattgac

SEQ ID NO: 31009 - DNA, 20 bp, Neisseria lactamica
tcagctaataccgcatattt

SEQ ID NO: 31010 - DNA, 20 bp, Fusobacterium nucleatum
gaaagctataagcgctgtga

SEQ ID NO: 31011 - DNA, 20 bp, Clostridium limosum
tcaatacttcggtgccgcag

SEQ ID NO: 31012 - DNA, 20 bp, Bacteroides distasonis
gcggcacagcgaaagcgtta

SEQ ID NO: 31013 - DNA, 20 bp, Clostridium glycolicum
cttaagtcaggagtgaaagg

SEQ ID NO: 31014 - DNA, 20 bp, Prevotella corporis
ggacactgccgccgcaaggt

SEQ ID NO: 31015 - DNA, 20 bp, Tissierella praeacuta
agatgtgaaagatcacggct

SEQ ID NO: 31016 - DNA, 20 bp, Corynebacterium amycolatum
agggtttctgacggtagatg

SEQ ID NO: 31017 - DNA, 20 bp, Chromobacterium violaceum
tacgagcagccgacgtctga

SEQ ID NO: 31018 - DNA, 20 bp, Vibrio cholerae
gtcagtttcaaatgcgattc

SEQ ID NO: 31019 - DNA, 20 bp, Unknown Organism
  oligonucleotide from CDC group EF-4B
atacactttgagaaggaaag

SEQ ID NO: 31020 - DNA, 20 bp, Alcaligenes faecalis
catgtctggaaagccgaaga

SEQ ID NO: 31021 - DNA, 20 bp, Corynebacterium glucuronolyticum
aatccaggggcttaactttt

SEQ ID NO: 31022 - DNA, 20 bp, Facklamia sourekii
aatcctacgggacaaggaga

SEQ ID NO: 31023 - DNA, 20 bp, Bacteroides vulgatus
accacgcgagtggatgccaa

SEQ ID NO: 31024 - DNA, 20 bp, Helcococcus ovis
gatatactagagatagtata

SEQ ID NO: 31025 - DNA, 20 bp, Gemella bergeri
gttgtgtagtaactatacac

SEQ ID NO: 31026 - DNA, 20 bp, Sporosarcina pasteurii
ccccttagtgctggagcaaa

SEQ ID NO: 31027 - DNA, 20 bp, Streptococcus constellatus
taagaacatttactgcatgg

SEQ ID NO: 31028 - DNA, 20 bp, Streptococcus hyovaginalis
tagagataggatttcccttc

SEQ ID NO: 31029 - DNA, 20 bp, Gemella haemolysans
ggagccggtcacggtgggac

SEQ ID NO: 31030 - DNA, 20 bp, Actinomyces bovis
gatactaagtgttggagaaa

SEQ ID NO: 31031 - DNA, 20 bp, Corynebacterium urealyticum
ctttagtgtggttggtggaa

SEQ ID NO: 31032 - DNA, 20 bp, Propionibacterium granulosum
gtccactgttgccagcaatt

SEQ ID NO: 31033 - DNA, 20 bp, Streptococcus constellatus
taataccgtataagaacatt

SEQ ID NO: 31034 - DNA, 20 bp, Bacteroides uniformis
acgcttaagtcagttgtgaa

SEQ ID NO: 31035 - DNA, 20 bp, Acinetobacter genospecies 3
agctagcctaactgcaaaga

SEQ ID NO: 31036 - DNA, 20 bp, Actinomyces bovis
gttgtaagggaagaacgata

SEQ ID NO: 31037 - DNA, 20 bp, Bacteroides fragilis
aggcagctagcgggtgaccg

SEQ ID NO: 31038 - DNA, 20 bp, Moraxella osloensis
gaatatgtgagagggaagta

SEQ ID NO: 31039 - DNA, 20 bp, Bacillus cereus
ctcaagaagttagcggcgga

SEQ ID NO: 31040 - DNA, 20 bp, Campylobacter sputorum
agatggacctgcgccgtatt

SEQ ID NO: 31041 - DNA, 20 bp, Brevibacillus laterosporus
ggaaagatggcgcaagctat

SEQ ID NO: 31042 - DNA, 20 bp, Paenibacillus validus
cgcactgaaaactgggagac

SEQ ID NO: 31043 - DNA, 20 bp, Prevotella bivia
cgaaagttggactaatacct

SEQ ID NO: 31044 - DNA, 20 bp, Turicella otitidis
agggtcttttcacgactttc

SEQ ID NO: 31045 - DNA, 20 bp, Staphylococcus condimenti
atatgcggaaccgcatggtt

SEQ ID NO: 31046 - DNA, 20 bp, Brevibacillus parabrevis
agcgagggttttcggaccct

SEQ ID NO: 31047 - DNA, 20 bp, Kingella kingae
accgcatacgctttgagaag

SEQ ID NO: 31048 - DNA, 20 bp, Pediococcus pentosaceus
tacccagtgacggtatttaa

SEQ ID NO: 31049 - DNA, 20 bp, Corynebacterium confusum
tgcgttgcgacactgtgagg

SEQ ID NO: 31050 - DNA, 20 bp, Nocardia asteroides
ggttgcttcggtaactgacc

SEQ ID NO: 31051 - DNA, 20 bp, Acinetobacter baumannii
ttgctactggacctagcggc

SEQ ID NO: 31052 - DNA, 20 bp, Tissierella praeacuta
tttagttgctaacagataag

SEQ ID NO: 31053 - DNA, 20 bp, Peptoniphilus indolicus
gaaggcgacttactggtcac

SEQ ID NO: 31054 - DNA, 20 bp, Gemella bergeri
atacacaaaacagacggtac

SEQ ID NO: 31055 - DNA, 20 bp, Staphylococcus capitis
ctgtttagtgtcagttgtgg

SEQ ID NO: 31056 - DNA, 20 bp, Prevotella melaninogenica
tccttgagtacgcacaacgt

SEQ ID NO: 31057 - DNA, 20 bp, Streptococcus dysgalactiae
tggtgggagtggaaaatcca

SEQ ID NO: 31058 - DNA, 20 bp, Neisseria meningitidis
gcatacgtcttgagagagaa

SEQ ID NO: 31059 - DNA, 20 bp, Bacillus lentus
atgcgtcgccgcttcgctgc

SEQ ID NO: 31060 - DNA, 20 bp, Eggerthella lenta
gggaagaaattcgacggtac

SEQ ID NO: 31061 - DNA, 20 bp, Acinetobacter calcoaceticus
gaggaggctactgaagttaa

SEQ ID NO: 31062 - DNA, 20 bp, Burkholderia gladioli
atcctggagagatctgggag

SEQ ID NO: 31063 - DNA, 20 bp, Oligella ureolytica
ggtagttgaggaataagcac

SEQ ID NO: 31064 - DNA, 20 bp, Helcococcus ovis
gagtcaaatctcggtgacgc

SEQ ID NO: 31065 - DNA, 20 bp, Streptococcus dysgalactiae
tcctcctgaccggtctagag

SEQ ID NO: 31066 - DNA, 20 bp, Peptostreptococcus anaerobius
gcttgacatcccttagaccg

SEQ ID NO: 31067 - DNA, 20 bp, Rhizobium radiobacter
cattcggggtttgggcagtg

SEQ ID NO: 31068 - DNA, 20 bp, Corynebacterium mycetoides
cggaaaggccgaagcttgct

SEQ ID NO: 31069 - DNA, 20 bp, Campylobacter curvus
tcgctatgggatgaggctat

SEQ ID NO: 31070 - DNA, 20 bp, Eikenella corrodens
tttttgctgacggtacctaa

SEQ ID NO: 31071 - DNA, 20 bp, Paenibacillus validus
tcttttaagtttggtgttta

SEQ ID NO: 31072 - DNA, 20 bp, Staphylococcus aureus
gatccgcgctgcattagcta

SEQ ID NO: 31073 - DNA, 20 bp, Stenotrophomonas maltophilia
gatactgggcgactagaatg

SEQ ID NO: 31074 - DNA, 20 bp, Actinomyces bovis
agcgaagcagcgatgcggag

SEQ ID NO: 31075 - DNA, 20 bp, Corynebacterium group F
tttgctaccttgtgagggga

SEQ ID NO: 31076 - DNA, 20 bp, Aerococcus viridans
tgaaagacggctctgctgtc

SEQ ID NO: 31077 - DNA, 20 bp, Burkholderia cepacia
ggctctaatacagccggggg

SEQ ID NO: 31078 - DNA, 20 bp, Gemella bergeri
ttagggaagaaaggttgtgt

SEQ ID NO: 31079 - DNA, 20 bp, Corynebacterium glucuronolyticum
gggcttaacttttggttggc

SEQ ID NO: 31080 - DNA, 20 bp, Neisseria meningitidis
accgtcatcagccgctgata

SEQ ID NO: 31081 - DNA, 20 bp, Corynebacterium propinquum
ttttggggtttctgtgccgt

SEQ ID NO: 31082 - DNA, 20 bp, Clostridium tetani
ctgaggaagtcccttcgggg

SEQ ID NO: 31083 - DNA, 20 bp, Leptotrichia buccalis
cagacggaaacgactgataa

SEQ ID NO: 31084 - DNA, 20 bp, Chromobacterium violaceum
aatgtaccgtgtaatggggg

SEQ ID NO: 31085 - DNA, 20 bp, Pasteurella multocida
ggaaagggtgggaccttagg

SEQ ID NO: 31086 - DNA, 20 bp, Alicyclobacillus acidocaldarius
gcactggggtgtgtcccccc

SEQ ID NO: 31087 - DNA, 20 bp, Prevotella intermedia
catgcgactctcatatgtta

SEQ ID NO: 31088 - DNA, 20 bp, Bacteroides eggerthii
gccgctgtgaaggtgctgca

SEQ ID NO: 31089 - DNA, 20 bp, Fusobacterium mortiferum
gtacagagagtcgcaaacct

SEQ ID NO: 31090 - DNA, 20 bp, Alicyclobacillus acidocaldarius
gcgttattccggcctgaaag

SEQ ID NO: 31091 - DNA, 20 bp, Streptococcus equinus
agcatttaacacatgttaga

SEQ ID NO: 31092 - DNA, 20 bp, Peptoniphilus indolicus
gtaacctgcctttgacacgg

SEQ ID NO: 31093 - DNA, 20 bp, Chryseobacterium meningosepticum
acagatttagaaatagatcc

SEQ ID NO: 31094 - DNA, 20 bp, Actinomyces neuii
gtttcatggtttccgcgccg

SEQ ID NO: 31095 - DNA, 20 bp, Actinomyces bovis
ccatagaaactggtagacta

SEQ ID NO: 31096 - DNA, 20 bp, Aerococcus viridans
tctacctataagcgggggat

SEQ ID NO: 31097 - DNA, 20 bp, Peptostreptococcus anaerobius
tccgaaactggaagacttga

SEQ ID NO: 31098 - DNA, 20 bp, Vibrio cholerae
taaccaccttcctccctact

SEQ ID NO: 31099 - DNA, 20 bp, Campylobacter curvus
tctagagatagaagagtgtc

SEQ ID NO: 31100 - DNA, 20 bp, Propionibacterium propionicus
aagttatgttggggactcgt

SEQ ID NO: 31101 - DNA, 20 bp, Clostridium limosum
gcttgacatcccaagaatcc

SEQ ID NO: 31102 - DNA, 20 bp, Eggerthella lenta
ggatggggtcgcggcccatt

SEQ ID NO: 31103 - DNA, 20 bp, Arcanobacterium haemolyticum
actgaacaaggcgaaagttg

SEQ ID NO: 31104 - DNA, 20 bp, Anaerococcus tetradius
taggcggataagcaagttag

SEQ ID NO: 31105 - DNA, 20 bp, Neisseria elongata
gttgggcagcttgactgctt

SEQ ID NO: 31106 - DNA, 20 bp, Brevundimonas diminuta
acggagacgtggctttccct

SEQ ID NO: 31107 - DNA, 20 bp, Bacillus azotoformans
aaggagcttgctcctttaga

SEQ ID NO: 31108 - DNA, 20 bp, Fusobacterium nucleatum
aggaatgagatagagatatt

SEQ ID NO: 31109 - DNA, 20 bp, Corynebacterium mycetoides
acaacgcgtgtgcgacactg

SEQ ID NO: 31110 - DNA, 20 bp, Bacteroides uniformis
tgctaatccctaaagcctct

SEQ ID NO: 31111 - DNA, 20 bp, Atopobium parvulum
aggcggccttctgggccata

SEQ ID NO: 31112 - DNA, 20 bp, Enterococcus durans
tgcaagtcgtacgcttcttt

SEQ ID NO: 31113 - DNA, 20 bp, Corynebacterium glucuronolyticum
acgggcattgcttgagtgct

SEQ ID NO: 31114 - DNA, 20 bp, Peptostreptococcus anaerobius
tgaaaagtttactaatacat

SEQ ID NO: 31115 - DNA, 20 bp, Lactococcus lactis
ctgcctttgagcgggggaca

SEQ ID NO: 31116 - DNA, 20 bp, Gemella morbillorum
tatgctaacactatgagatg

SEQ ID NO: 31117 - DNA, 20 bp, Oligella urethralis
cccgccttggtaggccgtta

SEQ ID NO: 31118 - DNA, 20 bp, Comamonas terrigena
tgtgctactagagcggccga

SEQ ID NO: 31119 - DNA, 20 bp, Dermabacter hominis
caagctttatgcggggagtc

SEQ ID NO: 31120 - DNA, 20 bp, Bacillus schlegellii
gctgtgaaaggccacggctc

SEQ ID NO: 31121 - DNA, 20 bp, Corynebacterium glucuronolyticum
cgtctgtgtaatccaggggc

SEQ ID NO: 31122 - DNA, 20 bp, Campylobacter concisus
acggtttccctttgtggttg

SEQ ID NO: 31123 - DNA, 20 bp, Clostridium glycolicum
cctgcctcatacacatggat

SEQ ID NO: 31124 - DNA, 20 bp, Actinomyces bovis
gtatgcgcgcaagcgtaaaa

SEQ ID NO: 31125 - DNA, 20 bp, Pediococcus inopinatus
attttaactataaagtgagt

SEQ ID NO: 31126 - DNA, 20 bp, Prevotella intermedia
agcatccaatcttgaaagcc

SEQ ID NO: 31127 - DNA, 20 bp, Bacteroides merdae
tttgaggtaggcggaatgcg

SEQ ID NO: 31128 - DNA, 20 bp, Fusobacterium varium
gtgcctcttcggaggaactt

SEQ ID NO: 31129 - DNA, 20 bp, Prevotella oris
ggtccacttgagtgtgcgca

SEQ ID NO: 31130 - DNA, 20 bp, Peptostreptococcus anaerobius
acctgccctatacacatgga

SEQ ID NO: 31131 - DNA, 20 bp, Staphylococcus capitis
agccagtggctcaaactcgt

SEQ ID NO: 31132 - DNA, 20 bp, Chromobacterium violaceum
tgagtttcaccagaagtggg

SEQ ID NO: 31133 - DNA, 20 bp, Lactococcus raffinolactis
gacatactcgtgctattcct

SEQ ID NO: 31134 - DNA, 20 bp, Capnocytophaga sp.
tgtgaagtagttggaatgtg

SEQ ID NO: 31135 - DNA, 20 bp, Macrococcus caseolyticus
gttagtaactgaacgtacct

SEQ ID NO: 31136 - DNA, 20 bp, Cardiobacterium hominis
gtcaactaggcgtcgggttg

SEQ ID NO: 31137 - DNA, 20 bp, Moraxella osloensis
ataatattgacactgagatt

SEQ ID NO: 31138 - DNA, 20 bp, Alcaligenes faecalis
tcttggcggcgagtggcgga

SEQ ID NO: 31139 - DNA, 20 bp, Bacillus sp
tcgggggtgacgcatgtgga

SEQ ID NO: 31140 - DNA, 20 bp, Actinomyces bovis
gataggaagagggaatgctt

SEQ ID NO: 31141 - DNA, 20 bp, Arcanobacterium bernardiae
aagggtttctggatagggat

SEQ ID NO: 31142 - DNA, 20 bp, Prevotella melaninogenica
ctcaatggacgtcgaccggc

SEQ ID NO: 31143 - DNA, 20 bp, Corynebacterium glucuronolyticum
taacttttggttggcaggcg

SEQ ID NO: 31144 - DNA, 20 bp, Acinetobacter haemolyticus
gctactctagttaataccta

SEQ ID NO: 31145 - DNA, 20 bp, Leptotrichia buccalis
cctgccctggaaactgtttg

SEQ ID NO: 31146 - DNA, 20 bp, Capnocytophaga gingivalis
taacggcaccccaaggctac

SEQ ID NO: 31147 - DNA, 20 bp, Streptococcus parasanguinis
gttgacttgaaaggtgcaaa

SEQ ID NO: 31148 - DNA, 20 bp, Bacillus coagulans
tgagtgaagaaggccttcgg

SEQ ID NO: 31149 - DNA, 20 bp, Bacillus coagulans
cttggaggctgttcccctga

SEQ ID NO: 31150 - DNA, 20 bp, Leuconostoc argentinum
ttctagttcgacggtaccat

SEQ ID NO: 31151 - DNA, 20 bp, Brevibacillus brevis
taatccttttcctctcatga

SEQ ID NO: 31152 - DNA, 20 bp, Arcanobacterium bernardiae
atacactgcgatgtgccaga

SEQ ID NO: 31153 - DNA, 20 bp, Leuconostoc lactis
agggttgaaagatggtttcg

SEQ ID NO: 31154 - DNA, 20 bp, Prevotella bivia
gcccgctgttagcacctagt

SEQ ID NO: 31155 - DNA, 20 bp, Serratia proteamaculans
aggaggaagggtagtgtgtt

SEQ ID NO: 31156 - DNA, 20 bp, Fusobacterium nucleatum
gagagttgcaaagccgtgag

SEQ ID NO: 31157 - DNA, 20 bp, Propionibacterium avidum
tttgacatggactgggagtg

SEQ ID NO: 31158 - DNA, 20 bp, Eikenella corrodens
aataccactttttgctgacg

SEQ ID NO: 31159 - DNA, 20 bp, Eggerthella lenta
agggcttgacatggacgtga

SEQ ID NO: 31160 - DNA, 20 bp, Streptococcus acidominimus
ttaaaaggagcaacagcttc

SEQ ID NO: 31161 - DNA, 20 bp, Enterococcus raffinosus
atagaaaccgcatggtttct

SEQ ID NO: 31162 - DNA, 20 bp, Abiotrophia defectiva
tgttagagaagaacagcgca

SEQ ID NO: 31163 - DNA, 20 bp, Pantoea agglomerans
tggggttaataaccttatcg

SEQ ID NO: 31164 - DNA, 20 bp, Acinetobacter genospecies 3
gcggagagaggtagcttgct

SEQ ID NO: 31165 - DNA, 20 bp, Pasteurella multocida
tgaggaagggatgttgttaa

SEQ ID NO: 31166 - DNA, 20 bp, Porphyromonas endodontalis
cggaaagatttattgattac

SEQ ID NO: 31167 - DNA, 20 bp, Alcaligenes faecalis
ccgtgctcgcaagagaaccg

SEQ ID NO: 31168 - DNA, 20 bp, Corynebacterium urealyticum
ggatttttcacgatttccgt

SEQ ID NO: 31169 - DNA, 20 bp, Bacteroides fragilis
aacttcttttatataagaat

SEQ ID NO: 31170 - DNA, 20 bp, Serratia marcescens
aatacgttcatcaattgacg

SEQ ID NO: 31171 - DNA, 20 bp, Corynebacterium group F
tggatattgttgtggaaagc

SEQ ID NO: 31172 - DNA, 20 bp, Staphylococcus succinus
cgcacagttacttacgcatt

SEQ ID NO: 31173 - DNA, 20 bp, Pediococcus inopinatus
ccaccaaggctgtgatacgt

SEQ ID NO: 31174 - DNA, 20 bp, Bacteroides capilosus
tgagagtcgggaacacccga

SEQ ID NO: 31175 - DNA, 20 bp, Propionibacterium freudenreichii
ttcagagatgggcgtgcctt

SEQ ID NO: 31176 - DNA, 20 bp, Corynebacterium amycolatum
acgaagggtttctgacggta

SEQ ID NO: 31177 - DNA, 20 bp, Bacteroides uniformis
tgctggggactctgtcgaga

SEQ ID NO: 31178 - DNA, 20 bp, Tetragenococcus halophilus
cgtggggaacctatccatca

SEQ ID NO: 31179 - DNA, 20 bp, Corynebacterium urealyticum
tttttcggtggaggatgagc

SEQ ID NO: 31180 - DNA, 20 bp, Streptococcus porcinus
aaagtagaagacccatgtca

SEQ ID NO: 31181 - DNA, 20 bp, Acinetobacter lwoffii
ttaatactcttggatagtgg

SEQ ID NO: 31182 - DNA, 20 bp, Enterococcus cecorum
aatggagagtacaacgagtc

SEQ ID NO: 31183 - DNA, 20 bp, Helcococcus ovis
ttcggaaacttgtatacagg

SEQ ID NO: 31184 - DNA, 20 bp, Methylobacterium extorquens
gaacgggcaccttcgggtgt

SEQ ID NO: 31185 - DNA, 20 bp, Lactococcus garvieae
atgatcccgcgttgtattag

SEQ ID NO: 31186 - DNA, 20 bp, Corynebacterium afermentans
aagggttgggccaccgcttc

SEQ ID NO: 31187 - DNA, 20 bp, Leptotrichia buccalis
tggggtgaaaacttgcggct

SEQ ID NO: 31188 - DNA, 20 bp, Clostridium innocuum
ctacaatggcgaccacaaag

SEQ ID NO: 31189 - DNA, 20 bp, Helcococcus ovis
cgtaggcggtaatttaagtc

SEQ ID NO: 31190 - DNA, 20 bp, Propionibacterium freudenreichii
ccaggaaactggtggtaatc

SEQ ID NO: 31191 - DNA, 20 bp, Rothia mucilaginosa
agaagagagattgacggtac

SEQ ID NO: 31192 - DNA, 20 bp, Burkholderia multivorans
gaaatccttggctctaatac

SEQ ID NO: 31193 - DNA, 20 bp, Streptococcus ratti
atattaattattgcatgata

SEQ ID NO: 31194 - DNA, 20 bp, Propionibacterium freudenreichii
aacgtgcccttgacttcggt

SEQ ID NO: 31195 - DNA, 20 bp, Campylobacter curvus
ataccaaaccggttatggtc

SEQ ID NO: 31196 - DNA, 20 bp, Streptococcus bovis
ttgctagagtagaaggagtt

SEQ ID NO: 31197 - DNA, 20 bp, Campylobacter sputorum
tgaaatctagtagcttaact

SEQ ID NO: 31198 - DNA, 20 bp, Neisseria lactamica
gcagcctgactgcttggtag

SEQ ID NO: 31199 - DNA, 20 bp, Tissierella praeacuta
agtttttaaagaagatttct

SEQ ID NO: 31200 - DNA, 20 bp, Campylobacter curvus
ccttttcttggggaagaaat

SEQ ID NO: 31201 - DNA, 20 bp, Clostridium paraputrificum
taatgtgggaagtcccttcg

SEQ ID NO: 31202 - DNA, 20 bp, Clostridium glycolicum
ggtggtttcttaagtcagga

SEQ ID NO: 31203 - DNA, 20 bp, Anaerococcus prevotii
aagtcttgacatattacggc

SEQ ID NO: 31204 - DNA, 20 bp, Citrobacter farmeri
tagccattgacgttacccgc

SEQ ID NO: 31205 - DNA, 20 bp, Corynebacterium glucuronolyticum
ctaataccctataggaccgc

SEQ ID NO: 31206 - DNA, 20 bp, Rothia mucilaginosa
catcagagatggtgtttccc

SEQ ID NO: 31207 - DNA, 20 bp, Serratia marcescens
acgttcatcaattgacgtta

SEQ ID NO: 31208 - DNA, 20 bp, Clostridium cadaveris
gagccagcggcctaaggtag

SEQ ID NO: 31209 - DNA, 20 bp, Veillonella parvula
tctaacctcggcatcgagga

SEQ ID NO: 31210 - DNA, 20 bp, Propionibacterium acnes
agagagtggcgagcctgtga

SEQ ID NO: 31211 - DNA, 20 bp, Bacillus schlegellii
tccgtgccggagttcacaca

SEQ ID NO: 31212 - DNA, 20 bp, Actinomyces naeslundii
gtgggggctggttcacaggt

SEQ ID NO: 31213 - DNA, 20 bp, Streptococcus infantarius
ttaaatgctgttatgcggta

SEQ ID NO: 31214 - DNA, 20 bp, Corynebacterium amycolatum
cggataggaccatggtgtgg

SEQ ID NO: 31215 - DNA, 20 bp, Corynebacterium group F
attgttgtggaaagcttttg

SEQ ID NO: 31216 - DNA, 20 bp, Pediococcus parvulus
ttctgccaatctaagagatt

SEQ ID NO: 31217 - DNA, 20 bp, Paenibacillus macerans
gtcgcactggaaactggacg

SEQ ID NO: 31218 - DNA, 20 bp, Porphyromonas endodontalis
aatactagatttttgcgata

SEQ ID NO: 31219 - DNA, 20 bp, Clostridium ramosum
agctaagaccgcataggtac

SEQ ID NO: 31220 - DNA, 20 bp, Atopobium parvulum
cgagtcgattgcacccgaag

SEQ ID NO: 31221 - DNA, 20 bp, Delftia acidovorans
gttgttgggaattagttttc

SEQ ID NO: 31222 - DNA, 20 bp, Clostridium subterminale
ttataaaaccaatcccagtt

SEQ ID NO: 31223 - DNA, 20 bp, Anaerococcus tetradius
tagagatagttccttacttc

SEQ ID NO: 31224 - DNA, 20 bp, Bacteroides thetaiotaomicron
ggcagcatttcagtttgctt

SEQ ID NO: 31225 - DNA, 20 bp, Brevibacterium epidermidis
ctggaccgttctggaaacag

SEQ ID NO: 31226 - DNA, 20 bp, Campylobacter lari
tttgtgaaatctaacagctt

SEQ ID NO: 31227 - DNA, 20 bp, Tissierella praeacuta
cgtaaagcggtaaaagatgg

SEQ ID NO: 31228 - DNA, 20 bp, Streptococcus thermophilus
gcaattgctccactacaaga

SEQ ID NO: 31229 - DNA, 20 bp, Bacteroides thetaiotaomicron
gagcgtaggtggacagttaa

SEQ ID NO: 31230 - DNA, 20 bp, Peptostreptococcus anaerobius
cgattatccaaccgcaagga

SEQ ID NO: 31231 - DNA, 20 bp, Bacteroides uniformis
atgactcggggatagccttt

SEQ ID NO: 31232 - DNA, 20 bp, Prevotella intermedia
gtgcttgcacattctggacg

SEQ ID NO: 31233 - DNA, 20 bp, Weissella paramesenteroides
acaaccgcatggttgttggt

SEQ ID NO: 31234 - DNA, 20 bp, Bacillus alcalophilus
gtagactgggataacatcga

SEQ ID NO: 31235 - DNA, 20 bp, Brevibacillus choshinensis
ggagggccacttgaaactgg

SEQ ID NO: 31236 - DNA, 20 bp, Moraxella osloensis
agaagtaggtagcctaacga

SEQ ID NO: 31237 - DNA, 20 bp, Prevotella melaninogenica
gcacaacgttggcggaattc

SEQ ID NO: 31238 - DNA, 20 bp, Tetragenococcus halophilus
cgagcaagccaagccgcaag

SEQ ID NO: 31239 - DNA, 20 bp, Paenibacillus glucanolyticus
tgaatctgctagagatagca

SEQ ID NO: 31240 - DNA, 20 bp, Prevotella oris
agcgcgaactggtccacttg

SEQ ID NO: 31241 - DNA, 20 bp, Methylobacterium mesophilicum
tgcttgcacctcagtagcgc

SEQ ID NO: 31242 - DNA, 20 bp, Corynebacterium glucuronolyticum
ctagagatagttcgtccctt

SEQ ID NO: 31243 - DNA, 20 bp, Oligella ureolytica
taggctaataccttaagatg

SEQ ID NO: 31244 - DNA, 20 bp, Bacteroides distasonis
gcgatacacagtaagcggca

SEQ ID NO: 31245 - DNA, 20 bp, Clostridium clostridiiforme
aagtcgagcgaagcggtttc

SEQ ID NO: 31246 - DNA, 20 bp, Clostridium subterminale
gcgtgcctaacacatgcaag

SEQ ID NO: 31247 - DNA, 20 bp, Streptococcus constellatus
acagtgacggtacttaacca

SEQ ID NO: 31248 - DNA, 20 bp, Clostridium tetani
agtacaggagagggaaacgg

SEQ ID NO: 31249 - DNA, 20 bp, Anaerococcus prevotii
gtgctaggtatcggaataat

SEQ ID NO: 31250 - DNA, 20 bp, Globicatella sanguinis
gactgctaataccgcataga

SEQ ID NO: 31251 - DNA, 20 bp, Peptostreptococcus anaerobius
aaggaggaagtcgtcgaagg

SEQ ID NO: 31252 - DNA, 20 bp, Actinomyces neuii
aaggcgggttactgggccgt

SEQ ID NO: 31253 - DNA, 20 bp, Ewingella americana
aggttgtgggcttgacccgt

SEQ ID NO: 31254 - DNA, 20 bp, Tetragenococcus halophilus
aggaaatgctttttccatga

SEQ ID NO: 31255 - DNA, 20 bp, Corynebacterium auris
gcgtgtgcgatactgtgagg

SEQ ID NO: 31256 - DNA, 20 bp, Paenibacillus larvae
aaagacggggcaacctgtca

SEQ ID NO: 31257 - DNA, 20 bp, Actinomyces turicensis
agctttgggttgtggtgagg

SEQ ID NO: 31258 - DNA, 20 bp, Rothia mucilaginosa
accgcatcagagatggtgtt

SEQ ID NO: 31259 - DNA, 20 bp, Bacillus pallidus
tatccaccctttagtgctgc

SEQ ID NO: 31260 - DNA, 20 bp, Pseudoramibacter alactolyticus
aggccttgacatcctctgag

SEQ ID NO: 31261 - DNA, 20 bp, Campylobacter lari
gaacggagtattaagagagc

SEQ ID NO: 31262 - DNA, 20 bp, Bacteroides merdae
cggtgaaagtttgtggctca

SEQ ID NO: 31263 - DNA, 20 bp, Paenibacillus glucanolyticus
ccaatcctataaaagccagt

SEQ ID NO: 31264 - DNA, 20 bp, Arcanobacterium bernardiae
ccagagatggtgcagccttc

SEQ ID NO: 31265 - DNA, 20 bp, Tetragenococcus halophilus
ccaaagtcggtgcggcaacc

SEQ ID NO: 31266 - DNA, 20 bp, Corynebacterium glucuronolyticum
aagtgatctgccctgcactg

SEQ ID NO: 31267 - DNA, 20 bp, Fusobacterium nucleatum
ggattatgaaagctatatgc

SEQ ID NO: 31268 - DNA, 20 bp, Anaerococcus tetradius
tcttgaggtatggaagggaa

SEQ ID NO: 31269 - DNA, 20 bp, Alicyclobacillus acidocaldarius
gcctcaacgcgctggtaaca

SEQ ID NO: 31270 - DNA, 20 bp, Aneurinibacillus aneurinilyticus
aagaagagcttgctcttcgg

SEQ ID NO: 31271 - DNA, 20 bp, Facklamia hominis
agagtaactgttagcggagt

SEQ ID NO: 31272 - DNA, 20 bp, Geobacillus thermoglucosidasius
ccgcttggttagcggcggac

SEQ ID NO: 31273 - DNA, 20 bp, Tetragenococcus halophilus
tctgttgtcagcaaagaaca

SEQ ID NO: 31274 - DNA, 20 bp, Peptostreptococcus anaerobius
gccgattatccaaccgcaag

SEQ ID NO: 31275 - DNA, 20 bp, Brevibacillus choshinensis
agagtgcgcgaatcccttaa

SEQ ID NO: 31276 - DNA, 20 bp, Bacillus azotoformans
aaaggagcttgctcctttag

SEQ ID NO: 31277 - DNA, 20 bp, Actinomyces turicensis
ggtgtgggggccacccgtgg

SEQ ID NO: 31278 - DNA, 20 bp, Pediococcus parvulus
gctataaagtgagtggcgaa

SEQ ID NO: 31279 - DNA, 20 bp, Prevotella denticola
atacaggtaccgtcacttac

SEQ ID NO: 31280 - DNA, 20 bp, Pseudoramibacter alactolyticus
atgatccttcgggtgaaatt

SEQ ID NO: 31281 - DNA, 20 bp, Facklamia ignava
ggcctaccgtggctttgatg

SEQ ID NO: 31282 - DNA, 20 bp, Bacteroides uniformis
aactgaatgatgtggagaca

SEQ ID NO: 31283 - DNA, 20 bp, Prevotella loescheii
gggtttttgcaggtaccgca

SEQ ID NO: 31284 - DNA, 20 bp, Anaerobiospirillum succiniciproducens
gggagggaacccacaaagcg

SEQ ID NO: 31285 - DNA, 20 bp, Peptoniphilus indolicus
agtgaagaggtaagtggaat

SEQ ID NO: 31286 - DNA, 20 bp, Anaerobiospirillum succiniciproducens
tagagtattgcagagggaga

SEQ ID NO: 31287 - DNA, 20 bp, Propionibacterium freudenreichii
gttcggctggggactcattg

SEQ ID NO: 31288 - DNA, 20 bp, Bacillus oleronius
gaattgaaagatggcttcgg

SEQ ID NO: 31289 - DNA, 20 bp, Paenibacillus macerans
cgagcggacctgatggagtg

SEQ ID NO: 31290 - DNA, 20 bp, Bacteroides uniformis
gcaaggagcgccctagggta

SEQ ID NO: 31291 - DNA, 20 bp, Bacillus coagulans
cctctgacctccctggagac

SEQ ID NO: 31292 - DNA, 20 bp, Paenibacillus amylolyticus
ggagataatgaaagacggag

SEQ ID NO: 31293 - DNA, 20 bp, Anaerococcus tetradius
gaaaatgacagtaccatacg

SEQ ID NO: 31294 - DNA, 20 bp, Lactococcus lactis
aagtttgaaagatgcaattg

SEQ ID NO: 31295 - DNA, 20 bp, Peptostreptococcus anaerobius
tgttagcggtataggatgga

SEQ ID NO: 31296 - DNA, 20 bp, Virgibacillus pantothenticus
gcccctagagatagggagtt

SEQ ID NO: 31297 - DNA, 20 bp, Streptococcus anginosus
gacgcacagtttataccgta

SEQ ID NO: 31298 - DNA, 20 bp, Streptococcus suis
taggatttttcttcggaaca

SEQ ID NO: 31299 - DNA, 20 bp, Bacillus lentus
ctctccaggcggaaagataa

SEQ ID NO: 31300 - DNA, 20 bp, Shewanella algae
ccatttgtgggggataacag

SEQ ID NO: 31301 - DNA, 20 bp, Veillonella parvula
atcagtcagtctgtcttaaa

SEQ ID NO: 31302 - DNA, 20 bp, Vibrio cholerae
ggtcccctgctttgctcttg

SEQ ID NO: 31303 - DNA, 20 bp, Veillonella atypica
taagctatcactgaaggagg

SEQ ID NO: 31304 - DNA, 20 bp, Actinomyces meyeri
cgcaactgtgggttgtggtg

SEQ ID NO: 31305 - DNA, 20 bp, Tetragenococcus halophilus
tatccatcagcgggggataa

SEQ ID NO: 31306 - DNA, 20 bp, Porphyromonas endodontalis
gctcaactgtagtcttgccg

SEQ ID NO: 31307 - DNA, 20 bp, Acinetobacter calcoaceticus
gcggagtgatggtgcttgca

SEQ ID NO: 31308 - DNA, 20 bp, Arcanobacterium bernardiae
acagaacaaggcctttttgg

SEQ ID NO: 31309 - DNA, 20 bp, Leptotrichia buccalis
ggccagacaagtctggggtg

SEQ ID NO: 31310 - DNA, 20 bp, Serratia proteamaculans
taatagcacattgcattgac

SEQ ID NO: 31311 - DNA, 20 bp, Prevotella loescheii
tgaaaccggtgattggggct

SEQ ID NO: 31312 - DNA, 20 bp, Fusobacterium nucleatum
tgatattatgattttaaggc

SEQ ID NO: 31313 - DNA, 20 bp, Abiotrophia defectiva
tatgcgtgtgacggtatcta

SEQ ID NO: 31314 - DNA, 20 bp, Alcaligenes faecalis
gccgagctagagtatgtcag

SEQ ID NO: 31315 - DNA, 20 bp, Haemophilus ducreyi
gatttgggggttggtcttta

SEQ ID NO: 31316 - DNA, 20 bp, Campylobacter curvus
acaaatcatctagagataga

SEQ ID NO: 31317 - DNA, 20 bp, Streptococcus suis
ggtagatgcttgaaaggagc

SEQ ID NO: 31318 - DNA, 20 bp, Weeksella virosa
gcgtaagccgcgaggaaggt

SEQ ID NO: 31319 - DNA, 20 bp, Proteus penneri
cgtggcttctggagctaacg

SEQ ID NO: 31320 - DNA, 20 bp, Corynebacterium amycolatum
cgccagagatggtgtttccc

SEQ ID NO: 31321 - DNA, 20 bp, Clostridium botulinum
cgcatgattttcttatcaaa

SEQ ID NO: 31322 - DNA, 20 bp, Listeria innocua
catgccacgctcttgaaaga

SEQ ID NO: 31323 - DNA, 20 bp, Gemella bergeri
cacctgaagacggtgaccta

SEQ ID NO: 31324 - DNA, 20 bp, Oligella ureolytica
acgaagaaaagtcttaggct

SEQ ID NO: 31325 - DNA, 20 bp, Bacillus sp
ccgcatggagagagattgaa

SEQ ID NO: 31326 - DNA, 20 bp, Lactococcus lactis
taaaaactttaaacacaagt

SEQ ID NO: 31327 - DNA, 20 bp, Facklamia ignava
aaccgtggagttgcattgga

SEQ ID NO: 31328 - DNA, 20 bp, Propionibacterium avidum
tcagagatgggtatgcctcc

SEQ ID NO: 31329 - DNA, 20 bp, Budvicia aquatica
ctaataccgcgtaacgtcga

SEQ ID NO: 31330 - DNA, 20 bp, Streptococcus suis
atggtagatgcttgaaagga

SEQ ID NO: 31331 - DNA, 20 bp, Moellerella wisconsensis
tgtcggatgaacccatatgg

SEQ ID NO: 31332 - DNA, 20 bp, Eggerthella lenta
ggctcgagttcggtagaggc

SEQ ID NO: 31333 - DNA, 20 bp, Budvicia aquatica
ctaataccgcgtaacgtcgc

SEQ ID NO: 31334 - DNA, 20 bp, Paenibacillus larvae
agaccgggataacttgcgga

SEQ ID NO: 31335 - DNA, 20 bp, Clostridium innocuum
ggtcgcctggtctgtaactg

SEQ ID NO: 31336 - DNA, 20 bp, Bacillus sp
cgagcgcgggaagcaagtag

SEQ ID NO: 31337 - DNA, 20 bp, Alcaligenes faecalis
cttttggcagagaagaaaag

SEQ ID NO: 31338 - DNA, 20 bp, Lactococcus lactis
ttttaagtttgaaagatgca

SEQ ID NO: 31339 - DNA, 20 bp, Ewingella americana
tggaggttgtgggcttgacc

SEQ ID NO: 31340 - DNA, 20 bp, Corynebacterium jeikeium
ggttttatttacgattcccg

SEQ ID NO: 31341 - DNA, 20 bp, Streptococcus infantarius
ctaacatgggttaaatgctg

SEQ ID NO: 31342 - DNA, 20 bp, Pseudoramibacter alactolyticus
taaagccttatattatggtt

SEQ ID NO: 31343 - DNA, 20 bp, Rothia mucilaginosa
gaagagagattgacggtacc

SEQ ID NO: 31344 - DNA, 20 bp, Alicyclobacillus acidocaldarius
caacgcgctggtaacacagg

SEQ ID NO: 31345 - DNA, 20 bp, Citrobacter farmeri
ttagccattgacgttacccg

SEQ ID NO: 31346 - DNA, 20 bp, Comamonas terrigena
ctactagagcggccgatggc

SEQ ID NO: 31347 - DNA, 20 bp, Campylobacter curvus
atgggatgaggctatatcgt

SEQ ID NO: 31348 - DNA, 20 bp, Actinomyces bovis
atagaaactggtagactaga

SEQ ID NO: 31349 - DNA, 20 bp, Bacteroides stercoris
cagctacacggcgacgtggt

SEQ ID NO: 31350 - DNA, 20 bp, Weeksella virosa
taattgagagcggcgtacgg

SEQ ID NO: 31351 - DNA, 20 bp, Pasteurella multocida
acggactaaagggtgggact

SEQ ID NO: 31352 - DNA, 20 bp, Streptococcus parauberis
tactaaatttaaaaggagca

SEQ ID NO: 31353 - DNA, 20 bp, Propionibacterium freudenreichii
ctggaagcgttcagagatgg

SEQ ID NO: 31354 - DNA, 20 bp, Corynebacterium glucuronolyticum
atcgcgaaagccagtctcag

SEQ ID NO: 31355 - DNA, 20 bp, Bacillus coagulans
acagggcggcgccttgacgg

SEQ ID NO: 31356 - DNA, 20 bp, Bacillus oleronius
cggataacttttttcttcgc

SEQ ID NO: 31357 - DNA, 20 bp, Brevundimonas diminuta
tggaccgccacggagacgtg

SEQ ID NO: 31358 - DNA, 20 bp, Paenibacillus amylolyticus
tttaaggccaaggctcaacc

SEQ ID NO: 31359 - DNA, 20 bp, Propionibacterium acnes
ctcttttggggtcggttcac

SEQ ID NO: 31360 - DNA, 20 bp, Streptococcus infantarius
acatgggttaaatgctgtta

SEQ ID NO: 31361 - DNA, 20 bp, Helcococcus ovis
actaagaagcaagccctggc

SEQ ID NO: 31362 - DNA, 20 bp, Corynebacterium group F
tgaggggatgctaatcgcac

SEQ ID NO: 31363 - DNA, 20 bp, Tissierella praeacuta
gacagcgatgggtagccggc

SEQ ID NO: 31364 - DNA, 20 bp, Bacillus lentus
ccggcatttcctccgatact

SEQ ID NO: 31365 - DNA, 20 bp, Actinomyces bovis
aagtgaagaggagcttgctc

SEQ ID NO: 31366 - DNA, 20 bp, Gemella haemolysans
tcataagagatcagtgctgc

SEQ ID NO: 31367 - DNA, 20 bp, Fusobacterium varium
atgttttcgtgcctcttcgg

SEQ ID NO: 31368 - DNA, 20 bp, Streptococcus equi
catcatgtgacggtaactaa

SEQ ID NO: 31369 - DNA, 20 bp, Campylobacter concisus
gtacaacgcgcatgcgagcc

SEQ ID NO: 31370 - DNA, 20 bp, Streptococcus thoraltensis
cacttaaagatggacctgcg

SEQ ID NO: 31371 - DNA, 20 bp, Propionibacterium avidum
ttggaaagcttcggcggttt

SEQ ID NO: 31372 - DNA, 20 bp, Brevibacillus agri
ttcgctatcactgggagatg

SEQ ID NO: 31373 - DNA, 20 bp, Clostridium paraputrificum
tgtaatgtgggaagtccctt

SEQ ID NO: 31374 - DNA, 20 bp, Bacteroides thetaiotaomicron
gggcagcatttcagtttgct

SEQ ID NO: 31375 - DNA, 20 bp, Veillonella atypica
aagcttgcttctatcaatct

SEQ ID NO: 31376 - DNA, 20 bp, Delftia acidovorans
agcttctcctaatacgagag

SEQ ID NO: 31377 - DNA, 20 bp, Citrobacter sedlakii
agcggggaggaagggattgt

SEQ ID NO: 31378 - DNA, 20 bp, Bacteroides forsythus
aagtcggactaatacctcat

SEQ ID NO: 31379 - DNA, 20 bp, Eggerthella lenta
ccggccggatcccgaactgg

SEQ ID NO: 31380 - DNA, 20 bp, Streptococcus equi
aaccatttaaaaggagcaac

SEQ ID NO: 31381 - DNA, 20 bp, Lactococcus lactis
ttgtaccgactggatgagca

SEQ ID NO: 31382 - DNA, 20 bp, Alicyclobacillus acidocaldarius
ggcactggggtgtgtccccc

SEQ ID NO: 31383 - DNA, 20 bp, Anaerococcus prevotii
tattaagcaaacctcaaaaa

SEQ ID NO: 31384 - DNA, 20 bp, Campylobacter sputorum
atataaattattactaatat

SEQ ID NO: 31385 - DNA, 20 bp, Paenibacillus larvae
ataccggatagctggtttct

SEQ ID NO: 31386 - DNA, 20 bp, Corynebacterium glucuronolyticum
taccctataggaccgcatcg

SEQ ID NO: 31387 - DNA, 20 bp, Corynebacterium argentoratense
tgatctgccctcaacttcgg

SEQ ID NO: 31388 - DNA, 20 bp, Peptoniphilus indolicus
gacacatgtcataacgatca

SEQ ID NO: 31389 - DNA, 20 bp, Campylobacter concisus
atgccattgtggaaagtttt

SEQ ID NO: 31390 - DNA, 20 bp, Prevotella intermedia
ctcccttcggggcgtctgtg

SEQ ID NO: 31391 - DNA, 20 bp, Bacteroides fragilis
tcagtgagcaatcaccgctg

SEQ ID NO: 31392 - DNA, 20 bp, Facklamia languida
cctaccatggcaatgatgca

SEQ ID NO: 31393 - DNA, 20 bp, Eikenella corrodens
agcaggtagggtaaccgcaa

SEQ ID NO: 31394 - DNA, 20 bp, Lactococcus lactis
caagttttaagtttgaaaga

SEQ ID NO: 31395 - DNA, 20 bp, Staphylococcus aureus
agctaatgcagcgcggatcc

SEQ ID NO: 31396 - DNA, 20 bp, Propionibacterium granulosum
tcggttggggactcagtgga

SEQ ID NO: 31397 - DNA, 20 bp, Bacillus megaterium
taccggataggatcttctcc

SEQ ID NO: 31398 - DNA, 20 bp, Anaerobiospirillum succiniciproducens
gagagcttgctctttggctg

SEQ ID NO: 31399 - DNA, 20 bp, Leuconostoc lactis
taactgatcaggtagtgacg

SEQ ID NO: 31400 - DNA, 20 bp, Haemophilus haemolyticus
tcgagagacgaaagtgcggg

SEQ ID NO: 31401 - DNA, 20 bp, Aerococcus christensenii
ccttgcggtgcattaactag

SEQ ID NO: 31402 - DNA, 20 bp, Brevibacillus parabrevis
gccaatctctgaaaaccaat

SEQ ID NO: 31403 - DNA, 20 bp, Burkholderia gladioli
ctgagggctaatatccttcg

SEQ ID NO: 31404 - DNA, 20 bp, Haemophilus segnis
cggctatttaagtgaggtgt

SEQ ID NO: 31405 - DNA, 20 bp, Enterococcus casseliflavus
gtataacactattttccgca

SEQ ID NO: 31406 - DNA, 20 bp, Paenibacillus azotofixans
ctgaaaggcggagcaatctg

SEQ ID NO: 31407 - DNA, 20 bp, Rhizobium radiobacter
gtttgggcagtggagacatt

SEQ ID NO: 31408 - DNA, 19 bp, Streptococcus alactolyticus
gcgggtggatcacctcctt

SEQ ID NO: 31409 - DNA, 20 bp, Peptostreptococcus anaerobius
cctgccctatacacatggat

SEQ ID NO: 31410 - DNA, 20 bp, Facklamia sourekii
taaccattggagggagccgt

SEQ ID NO: 31411 - DNA, 20 bp, Bacteroides stercoris
cggactgccgtcgtaagatg

SEQ ID NO: 31412 - DNA, 20 bp, Actinomyces neuii
ctcttaaagggcatcttggt

SEQ ID NO: 31413 - DNA, 20 bp, Veillonella dispar
gttagaaggattgacggtac

SEQ ID NO: 31414 - DNA, 20 bp, Granulicatella elegans
gaacgagagcgaccggtgct

SEQ ID NO: 31415 - DNA, 20 bp, Granulicatella elegans
gagcgaccggtgcttgcact

SEQ ID NO: 31416 - DNA, 20 bp, Weeksella virosa
atcattagttgccagcgttt

SEQ ID NO: 31417 - DNA, 20 bp, Propionibacterium propionicus
tacaaagagctgcgagcctg

SEQ ID NO: 31418 - DNA, 20 bp, Fusobacterium mortiferum
gtactttgatgacggtacct

SEQ ID NO: 31419 - DNA, 20 bp, Streptococcus porcinus
accgcatgaaagtagaagac

SEQ ID NO: 31420 - DNA, 20 bp, Corynebacterium glucuronolyticum
cgcatcgtggttggtgtggt

SEQ ID NO: 31421 - DNA, 20 bp, Propionibacterium granulosum
actgttgccagcaattcggt

SEQ ID NO: 31422 - DNA, 20 bp, Aerococcus viridans
gcgacattctggtctgttac

SEQ ID NO: 31423 - DNA, 20 bp, Acinetobacter genospecies 3
taactgcaaagagggcggtt

SEQ ID NO: 31424 - DNA, 20 bp, Facklamia sourekii
tcttgacgtgagtggcggac

SEQ ID NO: 31425 - DNA, 20 bp, Clostridium ramosum
tggtgaaagcctgaagctta

SEQ ID NO: 31426 - DNA, 20 bp, Eggerthella lenta
ggaagaaattcgacggtacc

SEQ ID NO: 31427 - DNA, 20 bp, Prevotella oris
cggggaagcttgcttccccg

SEQ ID NO: 31428 - DNA, 20 bp, Salmonella choleraesuis
tagtccggactggagtctgc

SEQ ID NO: 31429 - DNA, 20 bp, Campylobacter concisus
tacgacatgtcaccgcatgg

SEQ ID NO: 31430 - DNA, 20 bp, Proteus vulgaris
gcggggaggaaggtgataaa

SEQ ID NO: 31431 - DNA, 20 bp, Haemophilus actinemycetemcomitans
gtatacagagggtaaccaac

SEQ ID NO: 31432 - DNA, 20 bp, Leuconostoc lactis
ctgatagtaactgatcaggt

SEQ ID NO: 31433 - DNA, 20 bp, Peptostreptococcus anaerobius
cgtagttagcctccgaaact

SEQ ID NO: 31434 - DNA, 20 bp, Streptococcus constellatus
ttcacacagtgacggtactt

SEQ ID NO: 31435 - DNA, 20 bp, Leuconostoc carnosum
ggttaaaaggcgctacggcg

SEQ ID NO: 31436 - DNA, 20 bp, Aerococcus christensenii
acacgtaaggaacctaccga

SEQ ID NO: 31437 - DNA, 20 bp, Streptococcus porcinus
catccttctgaccggcctag

SEQ ID NO: 31438 - DNA, 20 bp, Corynebacterium falsenii
gacatatgcaggatcgctgc

SEQ ID NO: 31439 - DNA, 20 bp, Methylobacterium mesophilicum
gggtgcttgcaccgcagtag

SEQ ID NO: 31440 - DNA, 20 bp, Weeksella virosa
gcaggttactaagtctatat

SEQ ID NO: 31441 - DNA, 20 bp, Propionibacterium freudenreichii
gcccctttcggggggtacac

SEQ ID NO: 31442 - DNA, 20 bp, Moraxella  catarrhalis
gtgagaggggagtagaattc

SEQ ID NO: 31443 - DNA, 20 bp, Brevibacillus choshinensis
gttagggaagaaccgccggg

SEQ ID NO: 31444 - DNA, 20 bp, Methylobacterium mesophilicum
ggcttgctgccggaggatcg

SEQ ID NO: 31445 - DNA, 20 bp, Actinomyces bovis
ataccgcgcaaaagcacaga

SEQ ID NO: 31446 - DNA, 20 bp, Corynebacterium propinquum
aatgcgcagcgagcctgtga

SEQ ID NO: 31447 - DNA, 20 bp, Pasteurella multocida
ggaggaaagggtgggacctt

SEQ ID NO: 31448 - DNA, 20 bp, Corynebacterium coyleae
cattttggatggtgtggtgg

SEQ ID NO: 31449 - DNA, 20 bp, Streptococcus anginosus
ataacagtatgtaacacatg

SEQ ID NO: 31450 - DNA, 20 bp, Bacillus alcalophilus
gctcccagaggttagcggcg

SEQ ID NO: 31451 - DNA, 20 bp, Helcococcus kunzii
tgatttcttcggaatgaaac

SEQ ID NO: 31452 - DNA, 20 bp, Tetragenococcus halophilus
ttccatgacggtagctgacc

SEQ ID NO: 31453 - DNA, 20 bp, Haemophilus haemolyticus
ccatggaattctgtagagat

SEQ ID NO: 31454 - DNA, 20 bp, Ignavigranum ruoffiae
ctgacactgacactgaggct

SEQ ID NO: 31455 - DNA, 20 bp, Facklamia ignava
ctgttatcagagaagaatag

SEQ ID NO: 31456 - DNA, 20 bp, Streptococcus constellatus
tttaaaaggtgcaagagcat

SEQ ID NO: 31457 - DNA, 20 bp, Corynebacterium falsenii
tagggaagaagccacttgtg

SEQ ID NO: 31458 - DNA, 20 bp, Prevotella corporis
aaggcttcgatcggtagggg

SEQ ID NO: 31459 - DNA, 20 bp, Burkholderia gladioli
ctaatatccttcggggatga

SEQ ID NO: 31460 - DNA, 20 bp, Streptococcus ratti
ttagagataggaagttactt

SEQ ID NO: 31461 - DNA, 20 bp, Oligella urethralis
aggtcttacgatccccctct

SEQ ID NO: 31462 - DNA, 20 bp, Prevotella corporis
aagggataacctgccgaaag

SEQ ID NO: 31463 - DNA, 20 bp, Haemophilus haemolyticus
agagacgaaagtgcgggacc

SEQ ID NO: 31464 - DNA, 20 bp, Dermacoccus nishinomiyaensis
ttgtggtgggggatggactc

SEQ ID NO: 31465 - DNA, 20 bp, Actinomyces bovis
ggagcgcaggcggtttatca

SEQ ID NO: 31466 - DNA, 20 bp, Aeromonas hydrophila
tgcctaatacgtatcaactg

SEQ ID NO: 31467 - DNA, 20 bp, Moraxella lacunata
ctgggtgactagagtaggtg

SEQ ID NO: 31468 - DNA, 20 bp, Ewingella americana
ggttgtgggcttgacccgtg

SEQ ID NO: 31469 - DNA, 20 bp, Actinomyces bovis
gaatgcttcttatatgacgg

SEQ ID NO: 31470 - DNA, 20 bp, Streptococcus agalactiae
aggtttggtgtttacactag

SEQ ID NO: 31471 - DNA, 20 bp, Leuconostoc lactis
gcataaaacctaacaccgca

SEQ ID NO: 31472 - DNA, 20 bp, Tissierella praeacuta
gatgtgaaagatcacggctc

SEQ ID NO: 31473 - DNA, 20 bp, Lactobacillus acidophilus
cgcatgatcagcttataaaa

SEQ ID NO: 31474 - DNA, 20 bp, Clostridium clostridiiforme
acggttaagcaagtctgaag

SEQ ID NO: 31475 - DNA, 20 bp, Neisseria polysaccharea
tcttgagagggaaagcaggg

SEQ ID NO: 31476 - DNA, 20 bp, Campylobacter rectus
ttgctatttaatcttagtgg

SEQ ID NO: 31477 - DNA, 20 bp, Dolosicoccus paucivorans
gcttagagataagtgaaatc

SEQ ID NO: 31478 - DNA, 20 bp, Actinomyces neuii
aggcgggttactgggccgtt

SEQ ID NO: 31479 - DNA, 20 bp, Listeria welshimeri
ggcgcatgccacggctttga

SEQ ID NO: 31480 - DNA, 20 bp, Microbacterium hominis
tttggacactggtgaacagg

SEQ ID NO: 31481 - DNA, 20 bp, Weeksella virosa
cgtttaaagacggggactct

SEQ ID NO: 31482 - DNA, 20 bp, Actinobacillus ureae
gtaatatcttaggattaaag

SEQ ID NO: 31483 - DNA, 20 bp, Bacillus flexus
agcttgcttctatgacgtta

SEQ ID NO: 31484 - DNA, 20 bp, Corynebacterium confusum
tcgcggcagagatgtcgttt

SEQ ID NO: 31485 - DNA, 20 bp, Bacteroides uniformis
ctgccgatgactcggggata

SEQ ID NO: 31486 - DNA, 20 bp, Wolinella succinogenes
ctggtacagagagatgcaat

SEQ ID NO: 31487 - DNA, 20 bp, Bacillus megaterium
atgggagatgattgaaagat

SEQ ID NO: 31488 - DNA, 20 bp, Moraxella osloensis
ttagattagacgttacctgc

SEQ ID NO: 31489 - DNA, 20 bp, Anaerococcus tetradius
tacgtaggcggcctagtaag

SEQ ID NO: 31490 - DNA, 20 bp, Gemella bergeri
ctcaaaagagatcagtgctg

SEQ ID NO: 31491 - DNA, 20 bp, Neisseria subflava
aaggatagggttaatacccc

SEQ ID NO: 31492 - DNA, 20 bp, Neisseria subflava
gaactgggtgactcgagtgt

SEQ ID NO: 31493 - DNA, 20 bp, Bacteroides fragilis
cagtatgtatactgttttgt

SEQ ID NO: 31494 - DNA, 20 bp, Propionibacterium freudenreichii
aatggaactctcggtggagc

SEQ ID NO: 31495 - DNA, 20 bp, Kingella kingae
agaaggaaagcaggggatct

SEQ ID NO: 31496 - DNA, 20 bp, Cardiobacterium hominis
tgctgggggataacgtaggg

SEQ ID NO: 31497 - DNA, 20 bp, Helcococcus kunzii
catgcaagttgaacgagaat

SEQ ID NO: 31498 - DNA, 20 bp, Leuconostoc mesenteroides
tagtgtcgcatgacacaaag

SEQ ID NO: 31499 - DNA, 20 bp, Campylobacter concisus
agccagtggcctgtcaaagg

SEQ ID NO: 31500 - DNA, 20 bp, Campylobacter lari
gggaagaaccatgacggtac

SEQ ID NO: 31501 - DNA, 20 bp, Corynebacterium propinquum
gcttaaagctggtcttagtt

SEQ ID NO: 31502 - DNA, 20 bp, Moraxella osloensis
gtctattgcaccagaagtag

SEQ ID NO: 31503 - DNA, 20 bp, Acinetobacter lwoffii
gcgcgcgtaggtggccaatt

SEQ ID NO: 31504 - DNA, 20 bp, Staphylococcus carnosus
tggttctgcaatgaaagacg

SEQ ID NO: 31505 - DNA, 20 bp, Serratia marcescens
gagcttaatacgttcatcaa

SEQ ID NO: 31506 - DNA, 20 bp, Cardiobacterium hominis
agcaggtagcttaacttagg

SEQ ID NO: 31507 - DNA, 20 bp, Campylobacter lari
taccaaggctttgacgcata

SEQ ID NO: 31508 - DNA, 20 bp, Actinomyces neuii
aaggttttttctggattggg

SEQ ID NO: 31509 - DNA, 20 bp, Granulicatella elegans
gagcgcaggcggtcaattaa

SEQ ID NO: 31510 - DNA, 20 bp, Corynebacterium afermentans
ctactgaccatgcggtcgca

SEQ ID NO: 31511 - DNA, 20 bp, Anaerococcus tetradius
taatatagctcaactatata

SEQ ID NO: 31512 - DNA, 20 bp, Bacteroides capilosus
tgtagttcttgagtgctgga

SEQ ID NO: 31513 - DNA, 20 bp, Corynebacterium striatum
gcctgcagcttgctgcgggt

SEQ ID NO: 31514 - DNA, 20 bp, Streptococcus ratti
ttaattattgcatgataatt

SEQ ID NO: 31515 - DNA, 20 bp, Facklamia hominis
aaaggatggctccgcggtgc

SEQ ID NO: 31516 - DNA, 20 bp, Streptococcus infantarius
gcatctaacatgggttaaat

SEQ ID NO: 31517 - DNA, 20 bp, Bacillus megaterium
atcttctccttcatgggaga

SEQ ID NO: 31518 - DNA, 20 bp, Macrococcus caseolyticus
agtaactgaacgtaccttga

SEQ ID NO: 31519 - DNA, 20 bp, Paenibacillus validus
ggtttctccgcatgggggaa

SEQ ID NO: 31520 - DNA, 20 bp, Burkholderia gladioli
aagaaatcctgagggctaat

SEQ ID NO: 31521 - DNA, 20 bp, Leuconostoc fallax
tcaactgtggaatggctttg

SEQ ID NO: 31522 - DNA, 20 bp, Peptostreptococcus anaerobius
atacatgataatatatattt

SEQ ID NO: 31523 - DNA, 20 bp, Clostridium clostridiiforme
aaattgacttagcggcggac

SEQ ID NO: 31524 - DNA, 20 bp, Corynebacterium xerosis
gataggaccgcaccgtgagg

SEQ ID NO: 31525 - DNA, 20 bp, Helcococcus kunzii
agtagatgaggggaaagtgg

SEQ ID NO: 31526 - DNA, 20 bp, Brevibacillus choshinensis
agagataggagctctcttcg

SEQ ID NO: 31527 - DNA, 20 bp, Cardiobacterium hominis
ggaacctagagacaggtgtt

SEQ ID NO: 31528 - DNA, 20 bp, Veillonella atypica
gatgggatggaaactgctga

SEQ ID NO: 31529 - DNA, 20 bp, Haemophilus haemolyticus
agacgaaagtgcgggaccgc

SEQ ID NO: 31530 - DNA, 20 bp, Haemophilus influenzae
gatttgggggttggggttta

SEQ ID NO: 31531 - DNA, 20 bp, Corynebacterium ulcerans
ttgacatatacaagatcggc

SEQ ID NO: 31532 - DNA, 20 bp, Aneurinibacillus thermoaerophilus
cgccgggatgacctcccggt

SEQ ID NO: 31533 - DNA, 20 bp, Clostridium botulinum
ttttcttatcaaagatttat

SEQ ID NO: 31534 - DNA, 20 bp, Gemella bergeri
gtctcaaaagagatcagtgc

SEQ ID NO: 31535 - DNA, 20 bp, Bacteroides merdae
gattcatcgctgatagatag

SEQ ID NO: 31536 - DNA, 20 bp, Providencia alcalifaciens
cttagatgccattcccaggt

SEQ ID NO: 31537 - DNA, 20 bp, Anaerococcus tetradius
ttttaaaactgctcatcttg

SEQ ID NO: 31538 - DNA, 20 bp, Propionibacterium freudenreichii
tgagcctggcctgcatgggt

SEQ ID NO: 31539 - DNA, 20 bp, Nocardia asteroides
tacctcgcgagaggatgcta

SEQ ID NO: 31540 - DNA, 20 bp, Bacteroides vulgatus
gctaccacgcgagtggatgc

SEQ ID NO: 31541 - DNA, 20 bp, Pediococcus pentosaceus
atggctctgctatcacttct

SEQ ID NO: 31542 - DNA, 20 bp, Bacteroides forsythus
taagctgtgaggaaggttgg

SEQ ID NO: 31543 - DNA, 20 bp, Lactococcus garvieae
gtagggagctataagttctc

SEQ ID NO: 31544 - DNA, 20 bp, Streptococcus agalactiae
accgcataagagtaattaac

SEQ ID NO: 31545 - DNA, 20 bp, Weeksella virosa
ttagcgcctgatccagccat

SEQ ID NO: 31546 - DNA, 20 bp, Tetragenococcus halophilus
gcgtcactgatggctggtcc

SEQ ID NO: 31547 - DNA, 20 bp, Tissierella praeacuta
agcgtaaagcggtaaaagat

SEQ ID NO: 31548 - DNA, 20 bp, Bacteroides fragilis
gagcgtaggtggactggtaa

SEQ ID NO: 31549 - DNA, 20 bp, Fusobacterium mortiferum
attatgtgagtttcgcatga

SEQ ID NO: 31550 - DNA, 20 bp, Porphyromonas endodontalis
agggggactgagaggttgac

SEQ ID NO: 31551 - DNA, 20 bp, Eikenella corrodens
agacggttatttaagcagga

SEQ ID NO: 31552 - DNA, 20 bp, Actinomyces bovis
ggttaaagttcggggcttaa

SEQ ID NO: 31553 - DNA, 20 bp, Bacillus schlegellii
ctgctgtgaaaggccacggc

SEQ ID NO: 31554 - DNA, 20 bp, Leptotrichia buccalis
actgtttggctagagtgctg

SEQ ID NO: 31555 - DNA, 20 bp, Unknown Organism
  oligonucleotide from CDC group EF-4B
ttgagaaggaaagcaggggc

SEQ ID NO: 31556 - DNA, 20 bp, Pasteurella aerogenes
gtgatgaggaaggcggttag

SEQ ID NO: 31557 - DNA, 20 bp, Eikenella corrodens
gtccggcgagtggcgaacgg

SEQ ID NO: 31558 - DNA, 20 bp, Streptococcus thermophilus
gggcaattgctccactacaa

SEQ ID NO: 31559 - DNA, 20 bp, Gemella bergeri
ggaagaaaggttgtgtagta

SEQ ID NO: 31560 - DNA, 20 bp, Tetragenococcus halophilus
atgacggtagctgaccagaa

SEQ ID NO: 31561 - DNA, 20 bp, Vibrio hollisae
aatccgccagaagtgggtag

SEQ ID NO: 31562 - DNA, 20 bp, Actinomyces odontolyticus
gatgtggtggcatttagttg

SEQ ID NO: 31563 - DNA, 20 bp, Listeria monocytogenes
gcatgccacgcttttgaaag

SEQ ID NO: 31564 - DNA, 20 bp, Eggerthella lenta
gggggctccgccctccgtgc

SEQ ID NO: 31565 - DNA, 20 bp, Tissierella praeacuta
tcaaagcgtaaagcggtaaa

SEQ ID NO: 31566 - DNA, 20 bp, Alcaligenes faecalis
acatgtctggaaagccgaag

SEQ ID NO: 31567 - DNA, 20 bp, Alcaligenes faecalis
cctaatacgaggtactgctg

SEQ ID NO: 31568 - DNA, 20 bp, Yersinia ruckeri
ttaagtgttaatagcactga

SEQ ID NO: 31569 - DNA, 20 bp, Clostridium botulinum
tttattgctttgagatggac

SEQ ID NO: 31570 - DNA, 20 bp, Alicyclobacillus acidocaldarius
agatgcctcctcgcgggcgt

SEQ ID NO: 31571 - DNA, 20 bp, Streptococcus dysgalactiae
acccatgttaaacatttaaa

SEQ ID NO: 31572 - DNA, 20 bp, Clostridium limosum
agcaagactgcctgggtaac

SEQ ID NO: 31573 - DNA, 20 bp, Peptostreptococcus anaerobius
aatatatatttacggcatcg

SEQ ID NO: 31574 - DNA, 20 bp, Turicella otitidis
catacactggatcgggctag

SEQ ID NO: 31575 - DNA, 20 bp, Paenibacillus thiaminolyticus
gtcgagcggagcgacggttt

SEQ ID NO: 31576 - DNA, 20 bp, Fusobacterium mortiferum
gaacttgccctgcagtctgg

SEQ ID NO: 31577 - DNA, 20 bp, Suttonella indologenes
taacgtatggaaacgtacgc

SEQ ID NO: 31578 - DNA, 20 bp, Bacillus cereus
ggattgagagcttgctctca

SEQ ID NO: 31579 - DNA, 20 bp, Bacteroides thetaiotaomicron
ggaataaagttttccacgtg

SEQ ID NO: 31580 - DNA, 20 bp, Paenibacillus amylolyticus
cggtagagtaactgctatcg

SEQ ID NO: 31581 - DNA, 20 bp, Cardiobacterium hominis
agctttctgggtcgatactg

SEQ ID NO: 31582 - DNA, 20 bp, Clostridium ramosum
agtaacctgccctagacagg

SEQ ID NO: 31583 - DNA, 20 bp, Bacillus pallidus
taacaccgaaaaccgcatgg

SEQ ID NO: 31584 - DNA, 20 bp, Neisseria lactamica
aagaaaaggtcggggttaat

SEQ ID NO: 31585 - DNA, 20 bp, Acinetobacter genospecies 3
gctagcctaactgcaaagag

SEQ ID NO: 31586 - DNA, 20 bp, Burkholderia gladioli
cggaatcctggagagatctg

SEQ ID NO: 31587 - DNA, 20 bp, Proteus vulgaris
aattgcatctgaaactggtt

SEQ ID NO: 31588 - DNA, 20 bp, Clostridium glycolicum
ctgcctcatacacatggata

SEQ ID NO: 31589 - DNA, 20 bp, Haemophilus actinemycetemcomitans
cgtatacagagggtaaccaa

SEQ ID NO: 31590 - DNA, 20 bp, Proteus penneri
cggtaacagaagaaagcttg

SEQ ID NO: 31591 - DNA, 20 bp, Weissella paramesenteroides
atggttgttggttgaaagat

SEQ ID NO: 31592 - DNA, 20 bp, Alicyclobacillus acidocaldarius
tgcctcctcgcgggcgtatc

SEQ ID NO: 31593 - DNA, 20 bp, Staphylococcus capitis
gccagtggctcaaactcgtt

SEQ ID NO: 31594 - DNA, 20 bp, Anaerococcus tetradius
atgggaagaaaatgacagta

SEQ ID NO: 31595 - DNA, 20 bp, Wolinella succinogenes
ataccgcataatgttgaaag

SEQ ID NO: 31596 - DNA, 20 bp, Alicyclobacillus acidocaldarius
gggggcttcctcactcggta

SEQ ID NO: 31597 - DNA, 20 bp, Atopobium parvulum
ccttttaggagggagacgcc

SEQ ID NO: 31598 - DNA, 20 bp, Helcococcus ovis
gactttctggaatctaactg

SEQ ID NO: 31599 - DNA, 20 bp, Facklamia ignava
tggtcaacttgagtacagaa

SEQ ID NO: 31600 - DNA, 20 bp, Streptococcus equi
tcggtacattggagacaggt

SEQ ID NO: 31601 - DNA, 20 bp, Bacteroides fragilis
taagaataaagtgcagtatg

SEQ ID NO: 31602 - DNA, 20 bp, Methylobacterium extorquens
gcaccttcgggtgtcagtgg

SEQ ID NO: 31603 - DNA, 20 bp, Burkholderia multivorans
ccttggctctaatacagtcg

SEQ ID NO: 31604 - DNA, 20 bp, Staphylococcus simulans
gttattagggaagaacaagg

SEQ ID NO: 31605 - DNA, 20 bp, Helcococcus ovis
ggaaacttgtatacaggtgg

SEQ ID NO: 31606 - DNA, 20 bp, Bacillus coagulans
tgttgccggggaagaacaag

SEQ ID NO: 31607 - DNA, 20 bp, Prevotella intermedia
tgaaagacggcctaataccc

SEQ ID NO: 31608 - DNA, 20 bp, Streptococcus sobrinus
tttttcttcggaacatcgga

SEQ ID NO: 31609 - DNA, 20 bp, Campylobacter lari
tgcttaacacaagttgagta

SEQ ID NO: 31610 - DNA, 20 bp, Fusobacterium mortiferum
gtttgacatcctaagaaatt

SEQ ID NO: 31611 - DNA, 20 bp, Bacteroides fragilis
gtatactgttttgtatgtat

SEQ ID NO: 31612 - DNA, 20 bp, Campylobacter sputorum
gataatatttcgaaccgcat

SEQ ID NO: 31613 - DNA, 20 bp, Peptostreptococcus anaerobius
ctcaaccgtagttagcctcc

SEQ ID NO: 31614 - DNA, 20 bp, Veillonella atypica
actacaatgggagttaatag

SEQ ID NO: 31615 - DNA, 20 bp, Actinomyces meyeri
tattcactggtcttcgcatg

SEQ ID NO: 31616 - DNA, 20 bp, Neisseria subflava
ggctgttgctaacatcagcg

SEQ ID NO: 31617 - DNA, 20 bp, Tetragenococcus halophilus
ttgtcagcaaagaacaggag

SEQ ID NO: 31618 - DNA, 20 bp, Bacillus lentus
taaccaacaaaaagcaagct

SEQ ID NO: 31619 - DNA, 20 bp, Campylobacter lari
ctctatactcctgcttaaca

SEQ ID NO: 31620 - DNA, 20 bp, Anaerobiospirillum succiniciproducens
cggtctcctgggcaaatact

SEQ ID NO: 31621 - DNA, 20 bp, Serratia proteamaculans
atagcacattgcattgacgt

SEQ ID NO: 31622 - DNA, 20 bp, Gemella haemolysans
tctcataagagatcagtgct

SEQ ID NO: 31623 - DNA, 20 bp, Leptotrichia buccalis
tagccaatctttaaagccgg

SEQ ID NO: 31624 - DNA, 20 bp, Bacillus coagulans
ggctaataccagatagtttt

SEQ ID NO: 31625 - DNA, 20 bp, Moraxella osloensis
tcctggcataatattgacac

SEQ ID NO: 31626 - DNA, 20 bp, Facklamia languida
aggcctaccatggcaatgat

SEQ ID NO: 31627 - DNA, 20 bp, Prevotella loescheii
atgccgggcactctggagat

SEQ ID NO: 31628 - DNA, 20 bp, Streptococcus porcinus
atgtcatctacttaaaaggg

SEQ ID NO: 31629 - DNA, 20 bp, Propionibacterium freudenreichii
actggtggtaatcccgaata

SEQ ID NO: 31630 - DNA, 20 bp, Lactococcus lactis
ggaaagctcatcaagtgacg

SEQ ID NO: 31631 - DNA, 20 bp, Bacillus coagulans
tagttttttcctccgcatgg

SEQ ID NO: 31632 - DNA, 20 bp, Brevibacillus thermoruber
gagggtaagccaatctctta

SEQ ID NO: 31633 - DNA, 20 bp, Gemella haemolysans
ggttgatgtttaaaagttgg

SEQ ID NO: 31634 - DNA, 20 bp, Chromobacterium violaceum
gggtttgaatccttggtagc

SEQ ID NO: 31635 - DNA, 20 bp, Helcococcus ovis
gcaatacccgaagccgtcga

SEQ ID NO: 31636 - DNA, 20 bp, Prevotella bivia
gagcgtaggccgtttggtaa

SEQ ID NO: 31637 - DNA, 20 bp, Methylobacterium mesophilicum
cttcggtggcgcgcacacag

SEQ ID NO: 31638 - DNA, 20 bp, Anaerococcus prevotii
ttcaacggtcaaagatttat

SEQ ID NO: 31639 - DNA, 20 bp, Tissierella praeacuta
tgacacttaaatgtcgcatg

SEQ ID NO: 31640 - DNA, 20 bp, Chromobacterium violaceum
ggtgcttgcaccgctgacga

SEQ ID NO: 31641 - DNA, 20 bp, Paenibacillus azotofixans
cattaacttagcggcggacg

SEQ ID NO: 31642 - DNA, 20 bp, Oligella urethralis
ggtgcttattcctcaactac

SEQ ID NO: 31643 - DNA, 20 bp, Prevotella oris
cattgcaggtaccgcatgaa

SEQ ID NO: 31644 - DNA, 20 bp, Anaerococcus tetradius
ggaaacgacgaataataccc

SEQ ID NO: 31645 - DNA, 20 bp, Leuconostoc citreum
aaatgctaaaatagggaatg

SEQ ID NO: 31646 - DNA, 20 bp, Bacteroides merdae
tttgtaaacttcttttatag

SEQ ID NO: 31647 - DNA, 20 bp, Pediococcus damnosus
tttttaaaagatggcttcgg

SEQ ID NO: 31648 - DNA, 20 bp, Burkholderia multivorans
acagtcgggggatgacggta

SEQ ID NO: 31649 - DNA, 20 bp, Leptotrichia buccalis
ggagaggtggacggaactgc

SEQ ID NO: 31650 - DNA, 20 bp, Tetragenococcus halophilus
acttcggttttttcttaagc

SEQ ID NO: 31651 - DNA, 20 bp, Lactococcus raffinolactis
tgacatactcgtgctattcc

SEQ ID NO: 31652 - DNA, 20 bp, Corynebacterium amycolatum
aggaccatggtgtggatgct

SEQ ID NO: 31653 - DNA, 20 bp, Prevotella disiens
gatgctcaacatctgacttg

SEQ ID NO: 31654 - DNA, 20 bp, Campylobacter lari
agtcgaacggagtattaaga

SEQ ID NO: 31655 - DNA, 20 bp, Bacteroides fragilis
gaaacatgtcagtgagcaat

SEQ ID NO: 31656 - DNA, 20 bp, Facklamia ignava
ttgttcctttcaacgcgagt

SEQ ID NO: 31657 - DNA, 20 bp, Moraxella osloensis
tggctcattaagtcacatgt

SEQ ID NO: 31658 - DNA, 20 bp, Campylobacter curvus
gaaacgactgctaatacctt

SEQ ID NO: 31659 - DNA, 20 bp, Oligella urethralis
actaccgtcagcatcttaag

SEQ ID NO: 31660 - DNA, 20 bp, Burkholderia gladioli
ggaaagaaatcctgagggct

SEQ ID NO: 31661 - DNA, 20 bp, Paenibacillus larvae
aagacggggcaacctgtcac

SEQ ID NO: 31662 - DNA, 20 bp, Pseudoramibacter alactolyticus
agcctagagataggaagttt

SEQ ID NO: 31663 - DNA, 20 bp, Oligella urethralis
ttttcttcgttgagaaaagt

SEQ ID NO: 31664 - DNA, 20 bp, Paenibacillus larvae
gacggggcaacctgtcactt

SEQ ID NO: 31665 - DNA, 20 bp, Weissella paramesenteroides
taccaacaaccgcatggttg

SEQ ID NO: 31666 - DNA, 20 bp, Facklamia ignava
ctggtcaacttgagtacaga

SEQ ID NO: 31667 - DNA, 20 bp, Clostridium tetani
gtgagatgtgaaatacctaa

SEQ ID NO: 31668 - DNA, 20 bp, Actinomyces neuii
cctgtggcctaacctttttg

SEQ ID NO: 31669 - DNA, 20 bp, Anaerococcus tetradius
gtaggcggcctagtaagtta

SEQ ID NO: 31670 - DNA, 20 bp, Streptococcus dysgalactiae
accggttcaaggagttgcga

SEQ ID NO: 31671 - DNA, 20 bp, Haemophilus actinemycetemcomitans
gtaaccaaccagcgatgggg

SEQ ID NO: 31672 - DNA, 20 bp, Tetragenococcus halophilus
cacctgaaagaaagctcaaa

SEQ ID NO: 31673 - DNA, 20 bp, Bacteroides thetaiotaomicron
tggagatggcgaccggcgca

SEQ ID NO: 31674 - DNA, 20 bp, Bacteroides thetaiotaomicron
gggcttaaattgcatttgaa

SEQ ID NO: 31675 - DNA, 20 bp, Bacillus firmus
aagatggcatctcgctatca

SEQ ID NO: 31676 - DNA, 20 bp, Tissierella praeacuta
aggctcaccaagacagcgat

SEQ ID NO: 31677 - DNA, 20 bp, Prevotella melaninogenica
tttagagataatgacgccct

SEQ ID NO: 31678 - DNA, 20 bp, Bacillus pallidus
agcttgctcctttaggttag

SEQ ID NO: 31679 - DNA, 20 bp, Veillonella atypica
ggttcctcttcttcggaagc

SEQ ID NO: 31680 - DNA, 20 bp, Prevotella bivia
gcacctagtgttagcggcta

SEQ ID NO: 31681 - DNA, 20 bp, Actinomyces bovis
agcacagagatgtgtaatag

SEQ ID NO: 31682 - DNA, 20 bp, Eggerthella lenta
cccgaactgggaggctcgag

SEQ ID NO: 31683 - DNA, 20 bp, Actinomyces neuii
tttcatggtttccgcgccgt

SEQ ID NO: 31684 - DNA, 20 bp, Eubacterium moniliforme
taggcggattcttaagtggg

SEQ ID NO: 31685 - DNA, 20 bp, Haemophilus actinemycetemcomitans
accaaccagcgatggggagt

SEQ ID NO: 31686 - DNA, 20 bp, Bacteroides fragilis
gtatgtatactgttttgtat

SEQ ID NO: 31687 - DNA, 20 bp, Brevibacillus brevis
gcaagtcgagcgaatcttaa

SEQ ID NO: 31688 - DNA, 20 bp, Gemella sanguinis
aaacctcataaaactattct

SEQ ID NO: 31689 - DNA, 20 bp, Rhodococcus equi
cgttttcccttgtggtttgt

SEQ ID NO: 31690 - DNA, 20 bp, Tissierella praeacuta
agcatttgaaactgaaaggc

SEQ ID NO: 31691 - DNA, 20 bp, Bacillus coagulans
ctaataccagatagtttttt

SEQ ID NO: 31692 - DNA, 20 bp, Clostridium glycolicum
catacacatggataacatac

SEQ ID NO: 31693 - DNA, 20 bp, Bacillus cereus
tgaactgcatggttcgaaat

SEQ ID NO: 31694 - DNA, 20 bp, Fusobacterium mortiferum
gtgagtttcgcatgaaattc

SEQ ID NO: 31695 - DNA, 20 bp, Pediococcus dextrinicus
atggctagtacaacgagttg

SEQ ID NO: 31696 - DNA, 20 bp, Actinomyces viscosus
gtgaagcaggcctgctcctt

SEQ ID NO: 31697 - DNA, 20 bp, Tetragenococcus halophilus
ctttttctatgacggtagct

SEQ ID NO: 31698 - DNA, 20 bp, Bacteroides vulgatus
ccgcaaggcatctgtgaagg

SEQ ID NO: 31699 - DNA, 20 bp, Bacillus schlegellii
tgctgtgaaaggccacggct

SEQ ID NO: 31700 - DNA, 20 bp, Veillonella atypica
cactgaaggaggggattgcg

SEQ ID NO: 31701 - DNA, 20 bp, Bacteroides forsythus
tttgtcgcttaacgataaaa

SEQ ID NO: 31702 - DNA, 20 bp, Gemella haemolysans
actatacacagtagagacgg

SEQ ID NO: 31703 - DNA, 20 bp, Geobacillus thermoglucosidasius
gcttgcttccgcttggttag

SEQ ID NO: 31704 - DNA, 20 bp, Propionibacterium acnes
tgtaaaccgctttcgcctgt

SEQ ID NO: 31705 - DNA, 20 bp, Leptotrichia buccalis
gcctgtgagaacaggcagtg

SEQ ID NO: 31706 - DNA, 20 bp, Arcanobacterium bernardiae
ggtgcagccttcggggtggt

SEQ ID NO: 31707 - DNA, 20 bp, Bacteroides fragilis
ggaatgatgtggaaacatgt

SEQ ID NO: 31708 - DNA, 20 bp, Weeksella virosa
tggacaatgggttagcgcct

SEQ ID NO: 31709 - DNA, 20 bp, Chryseobacterium meningosepticum
tctggggataaacctactta

SEQ ID NO: 31710 - DNA, 20 bp, Streptococcus constellatus
aacgcacaggatgcaccgta

SEQ ID NO: 31711 - DNA, 20 bp, Pseudoramibacter alactolyticus
aaggactcagcagtcgaagg

SEQ ID NO: 31712 - DNA, 20 bp, Chromobacterium violaceum
tttgaatccttggtagcgta

SEQ ID NO: 31713 - DNA, 20 bp, Bacillus schlegellii
ttgacatcccgctgccgggt

SEQ ID NO: 31714 - DNA, 20 bp, Anaerococcus tetradius
gtaggcggataagcaagtta

SEQ ID NO: 31715 - DNA, 20 bp, Gemella morbillorum
tgttgttagggaagaatgga

SEQ ID NO: 31716 - DNA, 20 bp, Staphylococcus pulvereri
ttattaggagctagccgtcg

SEQ ID NO: 31717 - DNA, 20 bp, Collinsella aerofaciens
cgctttcagcagggaagagt

SEQ ID NO: 31718 - DNA, 20 bp, Leptotrichia buccalis
tcaaccgcaagcctgccctg

SEQ ID NO: 31719 - DNA, 20 bp, Pediococcus inopinatus
tggttttcttttaaaagatg

SEQ ID NO: 31720 - DNA, 20 bp, Bacteroides caccae
ccgcaaggcatttgtgaagg

SEQ ID NO: 31721 - DNA, 20 bp, Haemophilus influenzae
tcggtattgaggaaggttga

SEQ ID NO: 31722 - DNA, 20 bp, Alcaligenes faecalis
gcttgctctcttggcggcga

SEQ ID NO: 31723 - DNA, 20 bp, Cellulosimicrobium cellulans
cttgacatgcacgagaagcc

SEQ ID NO: 31724 - DNA, 20 bp, Clostridium glycolicum
ggtttcttaagtcaggagtg

SEQ ID NO: 31725 - DNA, 20 bp, Alicyclobacillus acidocaldarius
gagctttacaacccgaaggc

SEQ ID NO: 31726 - DNA, 20 bp, Campylobacter concisus
gcccaagcttgcttgggtac

SEQ ID NO: 31727 - DNA, 20 bp, Photobacterium damselae
gaagcttgaagagattcgag

SEQ ID NO: 31728 - DNA, 20 bp, Cardiobacterium hominis
tcgaacggaaacgatggagc

SEQ ID NO: 31729 - DNA, 20 bp, Staphylococcus aureus
gagaagcaagcttctcgtcc

SEQ ID NO: 31730 - DNA, 20 bp, Moraxella osloensis
taggtagcctaacgaaagag

SEQ ID NO: 31731 - DNA, 20 bp, Bacillus megaterium
cggataggatcttctccttc

SEQ ID NO: 31732 - DNA, 20 bp, Pasteurella multocida
aaagggtgggacctcttggc

SEQ ID NO: 31733 - DNA, 20 bp, Helcococcus kunzii
aaagtcgaggactctagaga

SEQ ID NO: 31734 - DNA, 20 bp, Prevotella intermedia
tcctacagttccaaaagctt

SEQ ID NO: 31735 - DNA, 20 bp, Streptococcus gordonii
gtagaacgcacagtttatac

SEQ ID NO: 31736 - DNA, 20 bp, Clostridium botulinum
tcaaagatttattgctttga

SEQ ID NO: 31737 - DNA, 20 bp, Alloiococcus otitis
cacgtgaggaacttgcccat

SEQ ID NO: 31738 - DNA, 20 bp, Actinomyces neuii
ggttgttgggaaaggttttt

SEQ ID NO: 31739 - DNA, 20 bp, Gemella haemolysans
atgtttaaaagttggttttg

SEQ ID NO: 31740 - DNA, 20 bp, Streptococcus constellatus
gttcacacagtgacggtact

SEQ ID NO: 31741 - DNA, 20 bp, Prevotella intermedia
ctcaagtcctacagttccaa

SEQ ID NO: 31742 - DNA, 20 bp, Prevotella melaninogenica
aggaaggatttagagataat

SEQ ID NO: 31743 - DNA, 20 bp, Cardiobacterium hominis
ttgacatcctaggaacttgg

SEQ ID NO: 31744 - DNA, 20 bp, Acinetobacter johnsonii
accatgggaatttgttgcac

SEQ ID NO: 31745 - DNA, 20 bp, Streptococcus infantarius
ctttagcttgctaaagtttg

SEQ ID NO: 31746 - DNA, 20 bp, Facklamia ignava
cgcccctcagtgctggcgca

SEQ ID NO: 31747 - DNA, 20 bp, Helcococcus ovis
agtcaaatctcggtgacgca

SEQ ID NO: 31748 - DNA, 20 bp, Alcaligenes faecalis
gccgttaggccttagtagcg

SEQ ID NO: 31749 - DNA, 20 bp, Brevibacterium epidermidis
cgaacccgtgagggtaagcg

SEQ ID NO: 31750 - DNA, 20 bp, Bacteroides fragilis
ataaagtgcagtatgtatac

SEQ ID NO: 31751 - DNA, 20 bp, Corynebacterium group F
ttgtgaggggatgctaatcg

SEQ ID NO: 31752 - DNA, 20 bp, Anaerococcus prevotii
gataagatggattagcggcg

SEQ ID NO: 31753 - DNA, 20 bp, Streptococcus constellatus
gaacgcacaggatgcaccgt

SEQ ID NO: 31754 - DNA, 20 bp, Kingella kingae
actgatgacggtacctaaag

SEQ ID NO: 31755 - DNA, 20 bp, Bacillus pallidus
agatagggcgttcccctttc

SEQ ID NO: 31756 - DNA, 20 bp, Helcococcus kunzii
tgagagcaagcgaatcgcat

SEQ ID NO: 31757 - DNA, 20 bp, Prevotella melaninogenica
ccgctgttggtacctggtat

SEQ ID NO: 31758 - DNA, 20 bp, Leptotrichia buccalis
acgagagttgtttgcacctg

SEQ ID NO: 31759 - DNA, 20 bp, Propionibacterium avidum
tggcctaacctgtgtggggg

SEQ ID NO: 31760 - DNA, 20 bp, Leptotrichia buccalis
aaggcggacgggtgagtaac

SEQ ID NO: 31761 - DNA, 20 bp, Arcanobacterium bernardiae
gttgagggtatgtgcagaag

SEQ ID NO: 31762 - DNA, 20 bp, Anaerococcus tetradius
taggtgtctggaataatctg

SEQ ID NO: 31763 - DNA, 20 bp, Methylobacterium mesophilicum
gcgtgttacccagagagatt

SEQ ID NO: 31764 - DNA, 20 bp, Actinomyces viscosus
agtgaagcaggcctgctcct

SEQ ID NO: 31765 - DNA, 20 bp, Tetragenococcus halophilus
ttctatgacggtagctgacc

SEQ ID NO: 31766 - DNA, 20 bp, Helcococcus ovis
tccttagtgaagataatgac

SEQ ID NO: 31767 - DNA, 20 bp, Tissierella praeacuta
aaagttctgtcctaagggac

SEQ ID NO: 31768 - DNA, 20 bp, Dermabacter hominis
tgcttgcacagtggattagt

SEQ ID NO: 31769 - DNA, 20 bp, Stenotrophomonas maltophilia
aactgcagtggatactggat

SEQ ID NO: 31770 - DNA, 20 bp, Bacteroides thetaiotaomicron
aggatgccaatcccaaaaac

SEQ ID NO: 31771 - DNA, 20 bp, Dietzia maris
aaaaccgtagagatacggtc

SEQ ID NO: 31772 - DNA, 20 bp, Paenibacillus peoriae
gggttgtttagaagcttgct

SEQ ID NO: 31773 - DNA, 20 bp, Anaerococcus tetradius
ggcggcctagtaagttagaa

SEQ ID NO: 31774 - DNA, 20 bp, Veillonella atypica
acgaagagcgatggaagctt

SEQ ID NO: 31775 - DNA, 20 bp, Fusobacterium varium
gttgggaagaagtcagtgac

SEQ ID NO: 31776 - DNA, 20 bp, Burkholderia gladioli
gagggctaatatccttcggg

SEQ ID NO: 31777 - DNA, 20 bp, Brevibacillus choshinensis
cctcgcgaggggacgccaat

SEQ ID NO: 31778 - DNA, 20 bp, Facklamia sourekii
tcctacgggacaaggagaca

SEQ ID NO: 31779 - DNA, 20 bp, Paenibacillus peoriae
gcaagtcgagcggggttgtt

SEQ ID NO: 31780 - DNA, 20 bp, Anaerococcus prevotii
accctcttcttcggaagcct

SEQ ID NO: 31781 - DNA, 20 bp, Streptococcus criceti
tccctagagatagggagtta

SEQ ID NO: 31782 - DNA, 20 bp, Alicyclobacillus acidocaldarius
caagtcaagcagtttccaaa

SEQ ID NO: 31783 - DNA, 20 bp, Peptostreptococcus anaerobius
aagcttgacatcccttagac

SEQ ID NO: 31784 - DNA, 20 bp, Actinomyces viscosus
ttgacatgtgccggatggtc

SEQ ID NO: 31785 - DNA, 20 bp, Anaerococcus prevotii
gaggaccggtatagagatat

SEQ ID NO: 31786 - DNA, 20 bp, Neisseria subflava
tcgagtgtgtcagagggagg

SEQ ID NO: 31787 - DNA, 20 bp, Bacillus sp
ggccgtcagaggatgtcaag

SEQ ID NO: 31788 - DNA, 20 bp, Actinomyces odontolyticus
ttggtcgtgtgcaggtggtg

SEQ ID NO: 31789 - DNA, 20 bp, Fusobacterium varium
gatttggttatgaaagctat

SEQ ID NO: 31790 - DNA, 20 bp, Kingella denitrificans
aagtgttaataccacttttt

SEQ ID NO: 31791 - DNA, 20 bp, Kocuria kristinae
tactggtcttagatgggctc

SEQ ID NO: 31792 - DNA, 20 bp, Helcococcus kunzii
tatatgtcttgggctacaca

SEQ ID NO: 31793 - DNA, 20 bp, Anaerococcus prevotii
ggggtgaagataagatggat

SEQ ID NO: 31794 - DNA, 20 bp, Bacteroides merdae
aacccttatcactagttact

SEQ ID NO: 31795 - DNA, 20 bp, Cardiobacterium hominis
ttaggagggcgcttgccacg

SEQ ID NO: 31796 - DNA, 20 bp, Veillonella parvula
taccgcatacgatctaacct

SEQ ID NO: 31797 - DNA, 20 bp, Paenibacillus validus
gctctgagggtgacggtact

SEQ ID NO: 31798 - DNA, 20 bp, Porphyromonas endodontalis
ggactctatcgagacagccg

SEQ ID NO: 31799 - DNA, 20 bp, Vibrio fluvialis
agcggcagcgacaacattga

SEQ ID NO: 31800 - DNA, 20 bp, Actinomyces neuii
gggcttaacccgggtttgcg

SEQ ID NO: 31801 - DNA, 20 bp, Veillonella atypica
aaactgctgatctagagtat

SEQ ID NO: 31802 - DNA, 20 bp, Shewanella algae
gggaatttgcccatttgtgg

SEQ ID NO: 31803 - DNA, 20 bp, Streptococcus thermophilus
attgctccactacaagatgg

SEQ ID NO: 31804 - DNA, 20 bp, Actinomyces turicensis
gccgcagctttgggttgtgg

SEQ ID NO: 31805 - DNA, 20 bp, Dermabacter hominis
acgatgaagctgtgcttgca

SEQ ID NO: 31806 - DNA, 20 bp, Bacillus coagulans
gtaaaactctgttgccgggg

SEQ ID NO: 31807 - DNA, 20 bp, Corynebacterium falsenii
tcgctagggaagaagccact

SEQ ID NO: 31808 - DNA, 20 bp, Bacillus sp
ccacatgcgtcacccccgaa

SEQ ID NO: 31809 - DNA, 20 bp, Lactococcus lactis
caccacgggagttgggagta

SEQ ID NO: 31810 - DNA, 20 bp, Alicyclobacillus acidocaldarius
caaagccatcccatggttga

SEQ ID NO: 31811 - DNA, 20 bp, Fusobacterium mortiferum
gtcgcaaacctgcgaggggg

SEQ ID NO: 31812 - DNA, 20 bp, Pasteurella multocida
aagggtgggacctcttggcc

SEQ ID NO: 31813 - DNA, 20 bp, Gemella haemolysans
ttttgctaacactatgagat

SEQ ID NO: 31814 - DNA, 20 bp, Corynebacterium afermentans
actgaccatgcggtcgcagc

SEQ ID NO: 31815 - DNA, 20 bp, Corynebacterium glucuronolyticum
ttggttggcaggcgatacgg

SEQ ID NO: 31816 - DNA, 20 bp, Peptoniphilus indolicus
gcgacttactggtcacaaac

SEQ ID NO: 31817 - DNA, 20 bp, Bacillus lentus
ccttatctctccaggcggaa

SEQ ID NO: 31818 - DNA, 20 bp, Oligella urethralis
tcccacacgcgagatggctc

SEQ ID NO: 31819 - DNA, 20 bp, Kytococcus sedentarius
ccctggacgtgcagtgggta

SEQ ID NO: 31820 - DNA, 20 bp, Streptococcus infantarius
tgggttaaatgctgttatgc

SEQ ID NO: 31821 - DNA, 20 bp, Aeromonas schubertii
ttgcatttaaaactgtccga

SEQ ID NO: 31822 - DNA, 20 bp, Leptotrichia buccalis
tctaggcggccagacaagtc

SEQ ID NO: 31823 - DNA, 20 bp, Anaerococcus prevotii
gcgatgaaatcttgacagaa

SEQ ID NO: 31824 - DNA, 20 bp, Bacteroides thetaiotaomicron
taaggcaaatgtgaaggtgc

SEQ ID NO: 31825 - DNA, 20 bp, Vibrio cholerae
gcatatccggtagcgcaagg

SEQ ID NO: 31826 - DNA, 20 bp, Eggerthella lenta
acccccggccggatcccgaa

SEQ ID NO: 31827 - DNA, 20 bp, Paenibacillus amylolyticus
ccggagtgacggtacctgag

SEQ ID NO: 31828 - DNA, 20 bp, Photobacterium damselae
aagagattcgagtgtgcctt

SEQ ID NO: 31829 - DNA, 20 bp, Streptococcus dysgalactiae
taccgcatgacaatggagga

SEQ ID NO: 31830 - DNA, 20 bp, Leuconostoc lactis
atagtaactgatcaggtagt

SEQ ID NO: 31831 - DNA, 20 bp, Lactococcus lactis
aataccgcataacaacttta

SEQ ID NO: 31832 - DNA, 20 bp, Clostridium subterminale
cgaggtggagctaaacttat

SEQ ID NO: 31833 - DNA, 20 bp, Bacteroides thetaiotaomicron
ataaagttttccacgtgtgg

SEQ ID NO: 31834 - DNA, 20 bp, Haemophilus actinemycetemcomitans
ggttggtgtgttaatagcat

SEQ ID NO: 31835 - DNA, 20 bp, Delftia acidovorans
gagaggcccatgacggtacc

SEQ ID NO: 31836 - DNA, 20 bp, Bacillus badius
ctgtcgcttacagatggacc

SEQ ID NO: 31837 - DNA, 20 bp, Haemophilus actinemycetemcomitans
ctgtaaacggtgtcgatttg

SEQ ID NO: 31838 - DNA, 20 bp, Leptotrichia buccalis
tgaaattcgtagatatgtgc

SEQ ID NO: 31839 - DNA, 20 bp, Corynebacterium coyleae
gtgtgctaatcgctgaaagc

SEQ ID NO: 31840 - DNA, 20 bp, Corynebacterium group F
cagtgcttgcactggtactc

SEQ ID NO: 31841 - DNA, 20 bp, Campylobacter rectus
gtatacaataagacgcaata

SEQ ID NO: 31842 - DNA, 20 bp, Vibrio mimicus
ttaatcatttgacgttacct

SEQ ID NO: 31843 - DNA, 20 bp, Bacteroides uniformis
ggcatagttcttccgcatgg

SEQ ID NO: 31844 - DNA, 20 bp, Campylobacter rectus
tttacataagttaagtcggg

SEQ ID NO: 31845 - DNA, 20 bp, Haemophilus influenzae
ccttttggagggcgtttacc

SEQ ID NO: 31846 - DNA, 20 bp, Collinsella aerofaciens
gctaggtgtggggggacgat

SEQ ID NO: 31847 - DNA, 20 bp, Streptococcus sanguinis
tgataattaattgaaaggtg

SEQ ID NO: 31848 - DNA, 20 bp, Actinomyces neuii
ggcggtttgtcgcgtctagc

SEQ ID NO: 31849 - DNA, 20 bp, Kingella kingae
tttgagaaggaaagcagggg

SEQ ID NO: 31850 - DNA, 20 bp, Bacillus pallidus
gagggtatccaccctttagt

SEQ ID NO: 31851 - DNA, 20 bp, Paenibacillus amylolyticus
aagtctggtgtttaaggcca

SEQ ID NO: 31852 - DNA, 20 bp, Prevotella melaninogenica
aatgacgcccttcggggtct

SEQ ID NO: 31853 - DNA, 20 bp, Helcococcus kunzii
gcttgacatatacagggata

SEQ ID NO: 31854 - DNA, 20 bp, Peptostreptococcus anaerobius
acacatggataacatactga

SEQ ID NO: 31855 - DNA, 20 bp, Paenibacillus amylolyticus
cagggaagaacgtccggtag

SEQ ID NO: 31856 - DNA, 20 bp, Paenibacillus peoriae
aacaacctagcggcggacgg

SEQ ID NO: 31857 - DNA, 20 bp, Tissierella praeacuta
taaagcggtaaaagatggtc

SEQ ID NO: 31858 - DNA, 20 bp, Corynebacterium glucuronolyticum
aaaggctccagcttgctgga

SEQ ID NO: 31859 - DNA, 20 bp, Fusobacterium nucleatum
tgtttcagtgtcccttcggg

SEQ ID NO: 31860 - DNA, 20 bp, Arcanobacterium haemolyticum
acaaggcgaaagttgagggt

SEQ ID NO: 31861 - DNA, 20 bp, Nocardia asteroides
tcggtaactgacctagcggc

SEQ ID NO: 31862 - DNA, 20 bp, Dietzia maris
tttgtgaaaacccggggctc

SEQ ID NO: 31863 - DNA, 20 bp, Bacteroides stercoris
gatactggcgaccttgagtg

SEQ ID NO: 31864 - DNA, 20 bp, Propionibacterium freudenreichii
tgtaggcggttgatcacgtc

SEQ ID NO: 31865 - DNA, 20 bp, Dermabacter hominis
atgtggttttctttggactg

SEQ ID NO: 31866 - DNA, 20 bp, Alicyclobacillus acidocaldarius
ctcgcgggcgtatccggcat

SEQ ID NO: 31867 - DNA, 20 bp, Prevotella melaninogenica
tgacgcccttcggggtctct

SEQ ID NO: 31868 - DNA, 20 bp, Bacteroides merdae
tttgtggctcaaccataaaa

SEQ ID NO: 31869 - DNA, 20 bp, Bacillus sp
ttctctccgcatggagagag

SEQ ID NO: 31870 - DNA, 20 bp, Anaerobiospirillum succiniciproducens
cagaggcgaaggcggtctcc

SEQ ID NO: 31871 - DNA, 20 bp, Anaerobiospirillum succiniciproducens
taaagctgggaactcaaagg

SEQ ID NO: 31872 - DNA, 20 bp, Clostridium subterminale
gttgtaaagttctgtcatat

SEQ ID NO: 31873 - DNA, 20 bp, Veillonella dispar
acctcggcatcgaggataga

SEQ ID NO: 31874 - DNA, 20 bp, Sporosarcina pasteurii
ctctataccggtcagcggga

SEQ ID NO: 31875 - DNA, 20 bp, Pseudoramibacter alactolyticus
taggaagtttccttcgggaa

SEQ ID NO: 31876 - DNA, 20 bp, Bacillus alcalophilus
ctccggctatcactacggga

SEQ ID NO: 31877 - DNA, 20 bp, Weeksella virosa
tcattagttgccagcgttta

SEQ ID NO: 31878 - DNA, 20 bp, Brevibacillus agri
cgaacacgtaccgttcgaac

SEQ ID NO: 31879 - DNA, 20 bp, Gemella bergeri
caagtcgagcgaagaatttc

SEQ ID NO: 31880 - DNA, 20 bp, Campylobacter lari
aagaaccttatagagatatg

SEQ ID NO: 31881 - DNA, 20 bp, Vibrio cholerae
acctgggcatatccggtagc

SEQ ID NO: 31882 - DNA, 20 bp, Veillonella atypica
ccgagaaacactctctcagt

SEQ ID NO: 31883 - DNA, 20 bp, Staphylococcus auricularis
aagtcggtagagtaaccttt

SEQ ID NO: 31884 - DNA, 20 bp, Lactococcus lactis
agaagaacgttggtgagagt

SEQ ID NO: 31885 - DNA, 20 bp, Streptococcus uberis
gaggactggtgcttgcactg

SEQ ID NO: 31886 - DNA, 20 bp, Streptococcus constellatus
tcacacagtgacggtactta

SEQ ID NO: 31887 - DNA, 20 bp, Anaerococcus prevotii
cttaactactgtaagcattt

SEQ ID NO: 31888 - DNA, 20 bp, Aerococcus christensenii
tagaaagatggctctgctat

SEQ ID NO: 31889 - DNA, 20 bp, Propionibacterium freudenreichii
gggcgtgcctttttggctgg

SEQ ID NO: 31890 - DNA, 20 bp, Streptococcus pyogenes
tagaacgctgagaactggtg

SEQ ID NO: 31891 - DNA, 20 bp, Veillonella atypica
gcgcgcaggcggatcagtct

SEQ ID NO: 31892 - DNA, 20 bp, Campylobacter concisus
ccttgtggggctggtgtaca

SEQ ID NO: 31893 - DNA, 20 bp, Vibrio cholerae
cgccacccaaggaacaagtt

SEQ ID NO: 31894 - DNA, 20 bp, Moraxella lacunata
catacgtcttacgagagaaa

SEQ ID NO: 31895 - DNA, 20 bp, Acinetobacter calcoaceticus
tcagatagtggacgttactc

SEQ ID NO: 31896 - DNA, 20 bp, Brevibacillus agri
gaaaagatggcttttcgcta

SEQ ID NO: 31897 - DNA, 20 bp, Anaerococcus prevotii
tactgaggaccggtatagag

SEQ ID NO: 31898 - DNA, 20 bp, Streptococcus thoraltensis
gttgcgagctggtgacagta

SEQ ID NO: 31899 - DNA, 20 bp, Clostridium botulinum
agggggtatcaactccccct

SEQ ID NO: 31900 - DNA, 20 bp, Bacteroides fragilis
ttccattaggttgttggtga

SEQ ID NO: 31901 - DNA, 20 bp, Leptotrichia buccalis
aaagaacttgccctgcagac

SEQ ID NO: 31902 - DNA, 20 bp, Corynebacterium propinquum
tctgtgaaattccacagctt

SEQ ID NO: 31903 - DNA, 20 bp, Eggerthella lenta
ggcggcctctcaagcgggat

SEQ ID NO: 31904 - DNA, 20 bp, Streptococcus thoraltensis
tttaaaaggtgcaacagcat

SEQ ID NO: 31905 - DNA, 20 bp, Streptococcus thermophilus
taccgcataaaagtcgatat

SEQ ID NO: 31906 - DNA, 20 bp, Bacillus sp
agagcttgcttttgatcagt

SEQ ID NO: 31907 - DNA, 20 bp, Photobacterium damselae
gtcgagcggcagcgacttaa

SEQ ID NO: 31908 - DNA, 20 bp, Streptococcus suis
cgcataacagtatttaccgc

SEQ ID NO: 31909 - DNA, 20 bp, Prevotella intermedia
cgggtgagtatcgcgtatcc

SEQ ID NO: 31910 - DNA, 20 bp, Bacillus circulans
ttcctctcatgaggaaaagc

SEQ ID NO: 31911 - DNA, 20 bp, Propionibacterium freudenreichii
tcacgtcggaagtgaaattc

SEQ ID NO: 31912 - DNA, 20 bp, Gemella bergeri
agatcagtgctgcagcaaac

SEQ ID NO: 31913 - DNA, 20 bp, Methylobacterium extorquens
ttacctcgagagatcgggga

SEQ ID NO: 31914 - DNA, 20 bp, Bacteroides distasonis
ctagctgtttgcgatacaca

SEQ ID NO: 31915 - DNA, 20 bp, Prevotella melaninogenica
atgcccgctgttggtacctg

SEQ ID NO: 31916 - DNA, 20 bp, Gemella haemolysans
taggaacaaagagaagcgag

SEQ ID NO: 31917 - DNA, 20 bp, Bacillus lentus
aagcaagcttcttattggtt

SEQ ID NO: 31918 - DNA, 20 bp, Actinomyces naeslundii
tgtgggtgggttgacggtag

SEQ ID NO: 31919 - DNA, 20 bp, Neisseria gonorrhoeae
cttacctggttttgacatgt

SEQ ID NO: 31920 - DNA, 20 bp, Bacillus alcalophilus
ccggataatcaaaggaatca

SEQ ID NO: 31921 - DNA, 20 bp, Brevibacillus choshinensis
acttctttcagaccgcatgg

SEQ ID NO: 31922 - DNA, 20 bp, Eggerthella lenta
agaaattcgacggtacctgc

SEQ ID NO: 31923 - DNA, 20 bp, Bacteroides distasonis
ctagctgtttgcgatacact

SEQ ID NO: 31924 - DNA, 20 bp, Kocuria kristinae
gtctaatacccggatgcgac

SEQ ID NO: 31925 - DNA, 20 bp, Leptotrichia buccalis
gagtgtccgtgccgaagcta

SEQ ID NO: 31926 - DNA, 20 bp, Propionibacterium avidum
acctgtgtgggggtagccgt

SEQ ID NO: 31927 - DNA, 20 bp, Staphylococcus capitis
tacgtcctcccttgtggttt

SEQ ID NO: 31928 - DNA, 20 bp, Unknown Organism
  oligonucleotide from CDC group EF-4B
aaggaaagcaggggctcttc

SEQ ID NO: 31929 - DNA, 20 bp, Neisseria sicca
cgggccttgcgctgtttgag

SEQ ID NO: 31930 - DNA, 20 bp, Acinetobacter haemolyticus
gggtagcttgctacctaacc

SEQ ID NO: 31931 - DNA, 20 bp, Actinomyces neuii
ctttcgcctgcggaaaaggc

SEQ ID NO: 31932 - DNA, 20 bp, Mannheimia haemolytica
ctaaagggtgggaccatttg

SEQ ID NO: 31933 - DNA, 20 bp, Anaerococcus tetradius
ataagcaagttagaagtgaa

SEQ ID NO: 31934 - DNA, 20 bp, Acinetobacter johnsonii
ttggattaatactctaggat

SEQ ID NO: 31935 - DNA, 20 bp, Streptococcus constellatus
cacaggatgcaccgtagttt

SEQ ID NO: 31936 - DNA, 20 bp, Bacteroides fragilis
tggtttcattattaaaggat

SEQ ID NO: 31937 - DNA, 20 bp, Chromobacterium violaceum
ggaatgtaccgtgtaatggg

SEQ ID NO: 31938 - DNA, 20 bp, Brevibacillus choshinensis
cggaccaatgaagagcttgc

SEQ ID NO: 31939 - DNA, 20 bp, Eikenella corrodens
accactttttgctgacggta

SEQ ID NO: 31940 - DNA, 20 bp, Clostridium paraputrificum
aaagttggtgatctaacccg

SEQ ID NO: 31941 - DNA, 20 bp, Brevibacillus reuszeri
gaaaagaaaagatggcttcg

SEQ ID NO: 31942 - DNA, 20 bp, Veillonella dispar
acggaagcaataccgcgagg

SEQ ID NO: 31943 - DNA, 20 bp, Oligella urethralis
agacttttcttcgttgagaa

SEQ ID NO: 31944 - DNA, 20 bp, Bacillus badius
ctgtccgtaccttgacggta

SEQ ID NO: 31945 - DNA, 20 bp, Bacteroides ovatus
aaggcggctacctggcgaca

SEQ ID NO: 31946 - DNA, 20 bp, Dermabacter hominis
aggcttaaccttgggcgtgc

SEQ ID NO: 31947 - DNA, 20 bp, Actinomyces meyeri
tggtcaagccgcaactgtgg

SEQ ID NO: 31948 - DNA, 20 bp, Tetragenococcus halophilus
actgatggctggtcccgcgg

SEQ ID NO: 31949 - DNA, 20 bp, Fusobacterium nucleatum
atactgcctacgatgagtag

SEQ ID NO: 31950 - DNA, 20 bp, Arcanobacterium bernardiae
acaaggcctttttggttgag

SEQ ID NO: 31951 - DNA, 20 bp, Fusobacterium mortiferum
tcgcatgaaattcatatgaa

SEQ ID NO: 31952 - DNA, 20 bp, Anaerococcus prevotii
tgctaggtatcggaataatt

SEQ ID NO: 31953 - DNA, 20 bp, Streptococcus thermophilus
tatttgaaaggggcaattgc

SEQ ID NO: 31954 - DNA, 20 bp, Bacteroides fragilis
atataagaataaagtgcagt

SEQ ID NO: 31955 - DNA, 20 bp, Neisseria lactamica
ggcagcctgactgcttggta

SEQ ID NO: 31956 - DNA, 20 bp, Tetragenococcus halophilus
gcctagcgaatctctgaaag

SEQ ID NO: 31957 - DNA, 20 bp, Fusobacterium nucleatum
gagtcgcaaagccgtgaggt

SEQ ID NO: 31958 - DNA, 20 bp, Brevundimonas diminuta
ggagacgtggctttcccttc

SEQ ID NO: 31959 - DNA, 20 bp, Aerococcus christensenii
cgtaaggaacctaccgataa

SEQ ID NO: 31960 - DNA, 20 bp, Clostridium innocuum
agtcagtaatacccgaagcc

SEQ ID NO: 31961 - DNA, 20 bp, Alicyclobacillus acidocaldarius
gagccatggactttcactcc

SEQ ID NO: 31962 - DNA, 20 bp, Neisseria sicca
gacatgtacggaaccttccg

SEQ ID NO: 31963 - DNA, 20 bp, Oligella urethralis
cgccatcaagagagcaagct

SEQ ID NO: 31964 - DNA, 20 bp, Tissierella praeacuta
taaaagatggtctcgcgtcc

SEQ ID NO: 31965 - DNA, 20 bp, Streptococcus equinus
gcttgaaagaagcaattgct

SEQ ID NO: 31966 - DNA, 20 bp, Anaerococcus prevotii
ggaaatgcaagtcaggtgta

SEQ ID NO: 31967 - DNA, 20 bp, Anaerococcus tetradius
tggtcatcatctgacgctga

SEQ ID NO: 31968 - DNA, 20 bp, Helcococcus kunzii
gatatcctagagataggata

SEQ ID NO: 31969 - DNA, 20 bp, Chryseobacterium meningosepticum
cttacgtgtaagtagctgaa

SEQ ID NO: 31970 - DNA, 20 bp, Bacillus alcalophilus
ataccggataatcaaaggaa

SEQ ID NO: 31971 - DNA, 20 bp, Brevibacillus agri
gaaaagaaaagatggctttt

SEQ ID NO: 31972 - DNA, 20 bp, Haemophilus actinemycetemcomitans
gggaatctgtcttatggagg

SEQ ID NO: 31973 - DNA, 20 bp, Acinetobacter radioresistens
ctttaggatagtggacgtta

SEQ ID NO: 31974 - DNA, 20 bp, Fusobacterium mortiferum
agagagtcgcaaacctgcga

SEQ ID NO: 31975 - DNA, 20 bp, Clostridium botulinum
aataagacgcaagaccgtga

SEQ ID NO: 31976 - DNA, 20 bp, Anaerococcus prevotii
acctcaaaaagtctttccca

SEQ ID NO: 31977 - DNA, 20 bp, Pseudoramibacter alactolyticus
ccgatagatgggcccgcgtc

SEQ ID NO: 31978 - DNA, 20 bp, Prevotella loescheii
tactgccaccgcaaggtgcg

SEQ ID NO: 31979 - DNA, 20 bp, Corynebacterium ulcerans
tacaagatcggcgtagagat

SEQ ID NO: 31980 - DNA, 20 bp, Enterococcus raffinosus
aaaccgcatggtttctattt

SEQ ID NO: 31981 - DNA, 20 bp, Enterococcus raffinosus
agaaaccgcatggtttctat

SEQ ID NO: 31982 - DNA, 20 bp, Actinomyces viscosus
tttgttccggtgggggatgg

SEQ ID NO: 31983 - DNA, 20 bp, Prevotella denticola
accaaccacaagggacacta

SEQ ID NO: 31984 - DNA, 20 bp, Campylobacter rectus
ttgggaaagaattatgacgg

SEQ ID NO: 31985 - DNA, 20 bp, Peptostreptococcus anaerobius
gtttactaatacatgataat

SEQ ID NO: 31986 - DNA, 20 bp, Vibrio metschnikovii
ggtattctttgacgttagcg

SEQ ID NO: 31987 - DNA, 20 bp, Streptococcus constellatus
catggtagatgtttaaaagg

SEQ ID NO: 31988 - DNA, 20 bp, Gemella morbillorum
atggatatgtagtaactata

SEQ ID NO: 31989 - DNA, 20 bp, Brevibacterium casei
agagaggcgaacccgtgagg

SEQ ID NO: 31990 - DNA, 20 bp, Streptococcus mitis
tttgcttaaaaggtgcaatt

SEQ ID NO: 31991 - DNA, 20 bp, Dermacoccus nishinomiyaensis
gcaccagcttgctggtgtgg

SEQ ID NO: 31992 - DNA, 20 bp, Lactococcus raffinolactis
gcaagtgacggtatctaacc

SEQ ID NO: 31993 - DNA, 20 bp, Bacteroides forsythus
gaaagtttgtcgcttaacga

SEQ ID NO: 31994 - DNA, 20 bp, Acinetobacter haemolyticus
gcaagtcgagcggggaagtg

SEQ ID NO: 31995 - DNA, 20 bp, Streptococcus parauberis
tggttcgctttggaaactgg

SEQ ID NO: 31996 - DNA, 20 bp, Alcaligenes faecalis
aaagccgaagagatttggcc

SEQ ID NO: 31997 - DNA, 20 bp, Propionibacterium freudenreichii
tcagagatgggcgtgccttt

SEQ ID NO: 31998 - DNA, 20 bp, Alicyclobacillus acidocaldarius
tccgggcgttattccggcct

SEQ ID NO: 31999 - DNA, 20 bp, Clostridium clostridiiforme
agtcgaacgaagcaattaag

SEQ ID NO: 32000 - DNA, 20 bp, Eubacterium moniliforme
ttccttcgggaacagaatga

SEQ ID NO: 32001 - DNA, 20 bp, Tissierella praeacuta
gctacttagcgataagatgc

SEQ ID NO: 32002 - DNA, 20 bp, Neisseria polysaccharea
ctgttgctaatatcagcggc

SEQ ID NO: 32003 - DNA, 20 bp, Veillonella atypica
gcgatggaagcttgcttcta

SEQ ID NO: 32004 - DNA, 20 bp, Anaerococcus tetradius
gcaaaactcaaaaagcctgt

SEQ ID NO: 32005 - DNA, 20 bp, Gemella morbillorum
gttggttatgctaacactat

SEQ ID NO: 32006 - DNA, 20 bp, Neisseria polysaccharea
tcagcggctgatgacggtac

SEQ ID NO: 32007 - DNA, 20 bp, Alicyclobacillus acidocaldarius
tctccagcactcaagtcaag

SEQ ID NO: 32008 - DNA, 20 bp, Lactococcus raffinolactis
tgtgcattggaaactgttag

SEQ ID NO: 32009 - DNA, 20 bp, Actinomyces meyeri
ggagacgtgcgtgcatttgg

SEQ ID NO: 32010 - DNA, 20 bp, Brevibacillus choshinensis
gatacttctttcagaccgca

SEQ ID NO: 32011 - DNA, 20 bp, Rothia mucilaginosa
cttgacatatactggaccgc

SEQ ID NO: 32012 - DNA, 20 bp, Bacteroides vulgatus
ctaccacgcgagtggatgcc

SEQ ID NO: 32013 - DNA, 20 bp, Paenibacillus thiaminolyticus
tgccagggaagaacgctatg

SEQ ID NO: 32014 - DNA, 20 bp, Eggerthella lenta
taggcggcctctcaagcggg

SEQ ID NO: 32015 - DNA, 20 bp, Oligella urethralis
ccttcgtcccacacgcgaga

SEQ ID NO: 32016 - DNA, 20 bp, Bacteroides merdae
tgtatgtaccctatgaataa

SEQ ID NO: 32017 - DNA, 20 bp, Campylobacter lari
gcttaacacaagttgagtag

SEQ ID NO: 32018 - DNA, 20 bp, Clostridium innocuum
cccttgtcgcatgttaccag

SEQ ID NO: 32019 - DNA, 20 bp, Cardiobacterium hominis
gtcggtacagacggtagcga

SEQ ID NO: 32020 - DNA, 20 bp, Facklamia ignava
tggcgcaaacgcaataaaca

SEQ ID NO: 32021 - DNA, 20 bp, Moraxella osloensis
ctttaagcagggaggagagg

SEQ ID NO: 32022 - DNA, 20 bp, Bacteroides thetaiotaomicron
tcaccaaaccttcgatggat

SEQ ID NO: 32023 - DNA, 20 bp, Leptotrichia buccalis
gtggatagtgattggggtga

SEQ ID NO: 32024 - DNA, 20 bp, Staphylococcus pulvereri
cttttattaggagctagccg

SEQ ID NO: 32025 - DNA, 20 bp, Prevotella oris
cgtaggccgtggattaagcg

SEQ ID NO: 32026 - DNA, 20 bp, Tissierella praeacuta
ttaattatcttagcggcgga

SEQ ID NO: 32027 - DNA, 20 bp, Alicyclobacillus acidocaldarius
cctcactcggtaccgtctcg

SEQ ID NO: 32028 - DNA, 20 bp, Oligella ureolytica
gccatcccgcgtgtgggacg

SEQ ID NO: 32029 - DNA, 20 bp, Bacteroides capilosus
acgaaataaatgacggtact

SEQ ID NO: 32030 - DNA, 20 bp, Haemophilus haemolyticus
gtatacagagggtggcgaaa

SEQ ID NO: 32031 - DNA, 20 bp, Streptococcus dysgalactiae
ggtgcaactgcatcactatg

SEQ ID NO: 32032 - DNA, 20 bp, Corynebacterium glucuronolyticum
gggacgaagtttttttgacg

SEQ ID NO: 32033 - DNA, 20 bp, Helcococcus ovis
gagaattttttaattaattt

SEQ ID NO: 32034 - DNA, 20 bp, Campylobacter lari
ccatgacggtacctaacgaa

SEQ ID NO: 32035 - DNA, 20 bp, Campylobacter coli
agttgttgctctgctagtca

SEQ ID NO: 32036 - DNA, 20 bp, Leptotrichia buccalis
acagggataacagacggaaa

SEQ ID NO: 32037 - DNA, 20 bp, Oligella ureolytica
ttctctacggaggaaagggg

SEQ ID NO: 32038 - DNA, 20 bp, Fusobacterium nucleatum
ctgatattatgattttaagg

SEQ ID NO: 32039 - DNA, 20 bp, Pediococcus inopinatus
ttttaactataaagtgagtg

SEQ ID NO: 32040 - DNA, 20 bp, Paenibacillus thiaminolyticus
aactgttccataggtgacgg

SEQ ID NO: 32041 - DNA, 20 bp, Streptococcus uberis
aaaggggcaaatgcttcact

SEQ ID NO: 32042 - DNA, 20 bp, Granulicatella elegans
agtcgaacgagagcgaccga

SEQ ID NO: 32043 - DNA, 20 bp, Alloiococcus otitis
acgtgaggaacttgcccata

SEQ ID NO: 32044 - DNA, 20 bp, Moraxella lacunata
ttagttaccagcgatttaag

SEQ ID NO: 32045 - DNA, 20 bp, Anaerococcus prevotii
tagtgatattaagcaaacct

SEQ ID NO: 32046 - DNA, 20 bp, Tissierella praeacuta
gtaagcatttgaaactgaaa

SEQ ID NO: 32047 - DNA, 20 bp, Haemophilus segnis
gcatttagtttaatagacta

SEQ ID NO: 32048 - DNA, 20 bp, Peptoniphilus indolicus
aggcggtttagaaagtcaga

SEQ ID NO: 32049 - DNA, 20 bp, Gemella morbillorum
gggaagaatggatatgtagt

SEQ ID NO: 32050 - DNA, 20 bp, Streptococcus macacae
tgcctcttagagggggataa

SEQ ID NO: 32051 - DNA, 20 bp, Leptotrichia buccalis
tgtgcaggaatgccgatgat

SEQ ID NO: 32052 - DNA, 20 bp, Bacillus pallidus
caccgaaaaccgcatggttt

SEQ ID NO: 32053 - DNA, 20 bp, Anaerococcus prevotii
gaagataagatggattagcg

SEQ ID NO: 32054 - DNA, 20 bp, Leuconostoc argentinum
ttgtagaggtaagtggaact

SEQ ID NO: 32055 - DNA, 20 bp, Fusobacterium mortiferum
tgagtttcgcatgaaattca

SEQ ID NO: 32056 - DNA, 20 bp, Eikenella corrodens
ggaagtgctaataccacttt

SEQ ID NO: 32057 - DNA, 20 bp, Granulicatella adiacens
gctagagtaactgttagcgc

SEQ ID NO: 32058 - DNA, 20 bp, Campylobacter rectus
tagcttgctatttaatctta

SEQ ID NO: 32059 - DNA, 20 bp, Bacteroides fragilis
ctgttttgtatgtattatat

SEQ ID NO: 32060 - DNA, 20 bp, Bacteroides ovatus
tgcagttgaaactggcagtc

SEQ ID NO: 32061 - DNA, 20 bp, Actinomyces bovis
tcttatatgacggtacctta

SEQ ID NO: 32062 - DNA, 20 bp, Dermabacter hominis
gctgtgcttgcacagtggat

SEQ ID NO: 32063 - DNA, 20 bp, Brochothrix campestris
aatggataatacaaagggtc

SEQ ID NO: 32064 - DNA, 20 bp, Haemophilus ducreyi
gccagcatgtagtgatggga

SEQ ID NO: 32065 - DNA, 20 bp, Corynebacterium xerosis
ccccagcttgctggggtaca

SEQ ID NO: 32066 - DNA, 20 bp, Bacteroides fragilis
agaaggcagctagcgggtga

SEQ ID NO: 32067 - DNA, 20 bp, Corynebacterium glucuronolyticum
tacaatggctggtacagtgc

SEQ ID NO: 32068 - DNA, 20 bp, Campylobacter curvus
tggggaagaaatttgacggt

SEQ ID NO: 32069 - DNA, 20 bp, Pseudoramibacter alactolyticus
gtaaagccttatattatggt

SEQ ID NO: 32070 - DNA, 20 bp, Campylobacter lari
ctgcttaacacaagttgagt

SEQ ID NO: 32071 - DNA, 20 bp, Gemella haemolysans
ctcataagagatcagtgctg

SEQ ID NO: 32072 - DNA, 20 bp, Budvicia aquatica
gcgccatcagatgaacccag

SEQ ID NO: 32073 - DNA, 20 bp, Prevotella bivia
tgcgcacaacgtaggcggaa

SEQ ID NO: 32074 - DNA, 20 bp, Neisseria meningitidis
ggtcccctgctttctctctc

SEQ ID NO: 32075 - DNA, 20 bp, Anaerococcus tetradius
ggataagcaagttagaagtg

SEQ ID NO: 32076 - DNA, 20 bp, Bacteroides uniformis
ggacgcttaagtcagttgtg

SEQ ID NO: 32077 - DNA, 20 bp, Dermabacter hominis
cctccactttgggataactc

SEQ ID NO: 32078 - DNA, 20 bp, Virgibacillus pantothenticus
cccctagagatagggagttc

SEQ ID NO: 32079 - DNA, 20 bp, Haemophilus actinemycetemcomitans
caaccagcgatggggagtga

SEQ ID NO: 32080 - DNA, 20 bp, Geobacillus thermoglucosidasius
agacagggcgttcctccctt

SEQ ID NO: 32081 - DNA, 20 bp, Paenibacillus glucanolyticus
tgacatccctctgaatctgc

SEQ ID NO: 32082 - DNA, 20 bp, Bacteroides vulgatus
gcgaggagcgccctagggta

SEQ ID NO: 32083 - DNA, 20 bp, Brevibacterium epidermidis
gacatacactggaccgttct

SEQ ID NO: 32084 - DNA, 20 bp, Acinetobacter baumannii
ggtagcttgctactggacct

SEQ ID NO: 32085 - DNA, 20 bp, Prevotella oris
gggagcgtaggccgtggatt

SEQ ID NO: 32086 - DNA, 20 bp, Alicyclobacillus acidocaldarius
gggcgttattccggcctgaa

SEQ ID NO: 32087 - DNA, 20 bp, Haemophilus segnis
cggtagcgaggaaggcattt

SEQ ID NO: 32088 - DNA, 20 bp, Finegoldia magna
cgtgagcaacctgcctatga

SEQ ID NO: 32089 - DNA, 20 bp, Bacteroides fragilis
gtgagcaatcaccgctgtga

SEQ ID NO: 32090 - DNA, 20 bp, Actinomyces naeslundii
gacggggtttcctcctttgt

SEQ ID NO: 32091 - DNA, 20 bp, Peptostreptococcus anaerobius
accggtgtttaatcacacct

SEQ ID NO: 32092 - DNA, 20 bp, Bacillus alcalophilus
tcacatggttcttttgtaaa

SEQ ID NO: 32093 - DNA, 20 bp, Bacteroides distasonis
agtcggactaataccgcatg

SEQ ID NO: 32094 - DNA, 20 bp, Weeksella virosa
aagacggggactctaatgag

SEQ ID NO: 32095 - DNA, 20 bp, Lactococcus lactis
ttgagcgggggacaacattt

SEQ ID NO: 32096 - DNA, 20 bp, Lactococcus garvieae
gaagcaattgcttcactact

SEQ ID NO: 32097 - DNA, 20 bp, Eikenella corrodens
aagtgctaataccacttttt

SEQ ID NO: 32098 - DNA, 20 bp, Enterococcus cecorum
tggagagtacaacgagtcgc

SEQ ID NO: 32099 - DNA, 20 bp, Streptococcus equi
atgctattcttagagataag

SEQ ID NO: 32100 - DNA, 20 bp, Streptococcus equi
acccatgttaaccatttaaa

SEQ ID NO: 32101 - DNA, 20 bp, Paenibacillus apiarius
acgtaggtaacctgcctgtg

SEQ ID NO: 32102 - DNA, 20 bp, Streptococcus dysgalactiae
taataccgcatgacaatgga

SEQ ID NO: 32103 - DNA, 20 bp, Bacteroides merdae
cccttatcactagttactaa

SEQ ID NO: 32104 - DNA, 20 bp, Bacillus megaterium
atgattgaaagatggtttcg

SEQ ID NO: 32105 - DNA, 20 bp, Mannheimia haemolytica
gggtgggaccatttggccac

SEQ ID NO: 32106 - DNA, 20 bp, Aerococcus viridans
aaggaatctacctataagcg

SEQ ID NO: 32107 - DNA, 20 bp, Weeksella virosa
tggatgcgaatctctaaagc

SEQ ID NO: 32108 - DNA, 20 bp, Geobacillus thermoglucosidasius
gagcggaccgggcgggagct

SEQ ID NO: 32109 - DNA, 20 bp, Finegoldia magna
tgagtagtggagaggaaagt

SEQ ID NO: 32110 - DNA, 20 bp, Acinetobacter lwoffii
tagttaatacctagggatag

SEQ ID NO: 32111 - DNA, 19 bp, Atopobium parvulum
taggagggagacgccgaag

SEQ ID NO: 32112 - DNA, 20 bp, Paenibacillus apiarius
tgggtgtttaaacctagggc

SEQ ID NO: 32113 - DNA, 20 bp, Bacillus sp
ctaatactggataacttttc

SEQ ID NO: 32114 - DNA, 20 bp, Bacillus lentus
tgcgtcgccgcttcgctgcc

SEQ ID NO: 32115 - DNA, 20 bp, Acinetobacter haemolyticus
ggggaagtgtagcttgctac

SEQ ID NO: 32116 - DNA, 20 bp, Campylobacter sputorum
gcatggttcgatagtgaaag

SEQ ID NO: 32117 - DNA, 20 bp, Propionibacterium acnes
gtgtaatcttggggcttaac

SEQ ID NO: 32118 - DNA, 20 bp, Gemella bergeri
agacggtgacctaaccgaaa

SEQ ID NO: 32119 - DNA, 20 bp, Streptococcus mitis
acatttgcttaaaaggtgca

SEQ ID NO: 32120 - DNA, 20 bp, Neisseria elongata
ggtaatgggggataaccaat

SEQ ID NO: 32121 - DNA, 20 bp, Streptococcus gallolyticus
gagacttgaaagatgcaatt

SEQ ID NO: 32122 - DNA, 20 bp, Leptotrichia buccalis
atctttaaagccggtccaag

SEQ ID NO: 32123 - DNA, 20 bp, Bacillus lentus
aaggtaccggcatttcctcc

SEQ ID NO: 32124 - DNA, 20 bp, Clostridium sordellii
tagtaagcttttggaactgt

SEQ ID NO: 32125 - DNA, 20 bp, Moraxella lacunata
cgagcgtaggtggtcattta

SEQ ID NO: 32126 - DNA, 20 bp, Kingella kingae
ccgcatacgctttgagaagg

SEQ ID NO: 32127 - DNA, 20 bp, Arcanobacterium bernardiae
taccggatattctgctttca

SEQ ID NO: 32128 - DNA, 20 bp, Veillonella atypica
gaagagcgatggaagcttgc

SEQ ID NO: 32129 - DNA, 20 bp, Arcanobacterium bernardiae
gaaagggtttctggataggg

SEQ ID NO: 32130 - DNA, 20 bp, Alicyclobacillus acidocaldarius
actcaagtcaagcagtttcc

SEQ ID NO: 32131 - DNA, 20 bp, Clostridium botulinum
tccccctgtgccgcagttaa

SEQ ID NO: 32132 - DNA, 20 bp, Helcococcus ovis
agttctgtccttagtgaaga

SEQ ID NO: 32133 - DNA, 20 bp, Pseudomonas luteola
agggttgtaacctaatacgt

SEQ ID NO: 32134 - DNA, 20 bp, Tetragenococcus halophilus
gtggggaacctatccatcag

SEQ ID NO: 32135 - DNA, 20 bp, Prevotella disiens
gaggtccttcgggactccta

SEQ ID NO: 32136 - DNA, 20 bp, Bacillus mycoides
aactgcatagttcgaaattg

SEQ ID NO: 32137 - DNA, 20 bp, Unknown Organism
  oligonucleotide from CDC group EO-2
ggttgggctacacacgtgct

SEQ ID NO: 32138 - DNA, 20 bp, Gemella morbillorum
gaatggatatgtagtaacta

SEQ ID NO: 32139 - DNA, 20 bp, Helcococcus ovis
tagtgaagataatgactgta

SEQ ID NO: 32140 - DNA, 20 bp, Streptococcus infantarius
gaaaactttagcttgctaaa

SEQ ID NO: 32141 - DNA, 20 bp, Gemella haemolysans
agaatgattgtgtagtaact

SEQ ID NO: 32142 - DNA, 20 bp, Streptococcus mitis
agatgttgcatgacatttgc

SEQ ID NO: 32143 - DNA, 20 bp, Prevotella melaninogenica
tgacggcatcagatttgaag

SEQ ID NO: 32144 - DNA, 20 bp, Bacteroides ovatus
ggctctatgggtcgtaaact

SEQ ID NO: 32145 - DNA, 20 bp, Pseudoramibacter alactolyticus
ggcaagatcatgaaaactcc

SEQ ID NO: 32146 - DNA, 20 bp, Propionibacterium avidum
aaccctcgttcactgttgcc

SEQ ID NO: 32147 - DNA, 20 bp, Prevotella melaninogenica
taatgacgcccttcggggtc

SEQ ID NO: 32148 - DNA, 20 bp, Cardiobacterium hominis
catttgaaactgggcgacta

SEQ ID NO: 32149 - DNA, 20 bp, Bacillus simplex
cgttcttttctcgcatgaga

SEQ ID NO: 32150 - DNA, 20 bp, Anaerococcus prevotii
atcttgacagaacccttcgg

SEQ ID NO: 32151 - DNA, 20 bp, Prevotella oris
tggattaagcgtgttgtgaa

SEQ ID NO: 32152 - DNA, 20 bp, Clostridium subterminale
cataacataagagaatcgca

SEQ ID NO: 32153 - DNA, 20 bp, Microbacterium hominis
agtcgaacgggtgaaggccc

SEQ ID NO: 32154 - DNA, 20 bp, Arcanobacterium haemolyticum
caaggcgaaagttgagggta

SEQ ID NO: 32155 - DNA, 20 bp, Bacteroides ureolyticus
aaactgatagtctagagtag

SEQ ID NO: 32156 - DNA, 20 bp, Streptococcus thermophilus
atgacacatgtcatttattt

SEQ ID NO: 32157 - DNA, 20 bp, Comamonas testosteroni
ttgacatggcaggaacttac

SEQ ID NO: 32158 - DNA, 20 bp, Actinomyces odontolyticus
gagatgtggtggcatttagt

SEQ ID NO: 32159 - DNA, 20 bp, Ochrobactrum intermedium
aatctacccatcactaggga

SEQ ID NO: 32160 - DNA, 20 bp, Streptococcus porcinus
tgcaccagtctaatgagttg

SEQ ID NO: 32161 - DNA, 20 bp, Prevotella melaninogenica
atggatgcccgctgttggta

SEQ ID NO: 32162 - DNA, 20 bp, Propionibacterium avidum
tgattgcgtcggaagtgaaa

SEQ ID NO: 32163 - DNA, 20 bp, Campylobacter curvus
atagggctatatcgtatcag

SEQ ID NO: 32164 - DNA, 20 bp, Clostridium limosum
ggcgtaaagcatgcgtaggc

SEQ ID NO: 32165 - DNA, 20 bp, Pseudoramibacter alactolyticus
gcagtcgaaggtggggctag

SEQ ID NO: 32166 - DNA, 20 bp, Streptococcus equi
ccatcatgtgacggtaacta

SEQ ID NO: 32167 - DNA, 20 bp, Bacillus sp
gtgggatttgcttggcctca

SEQ ID NO: 32168 - DNA, 20 bp, Tetragenococcus halophilus
cgcatatggctttttttcac

SEQ ID NO: 32169 - DNA, 20 bp, Vagococcus fluvialis
caagtgggagagtaactgtt

SEQ ID NO: 32170 - DNA, 20 bp, Bordetella bronchiseptica
aatatcctgtgcaactgacg

SEQ ID NO: 32171 - DNA, 20 bp, Peptoniphilus indolicus
aggcgacttactggtcacaa

SEQ ID NO: 32172 - DNA, 20 bp, Anaerococcus prevotii
gaataattcggtgccgcagt

SEQ ID NO: 32173 - DNA, 20 bp, Propionibacterium freudenreichii
ttcggtatagctccaggaaa

SEQ ID NO: 32174 - DNA, 20 bp, Bacillus lentus
aaaagcaagcttcttattgg

SEQ ID NO: 32175 - DNA, 20 bp, Porphyromonas endodontalis
gactctatcgagacagccgt

SEQ ID NO: 32176 - DNA, 20 bp, Brevibacterium epidermidis
aacagttcttctctttggag

SEQ ID NO: 32177 - DNA, 20 bp, Paenibacillus pabuli
tcctgaagagaactggaaag

SEQ ID NO: 32178 - DNA, 20 bp, Bacillus simplex
gtaccagagtaactgctggt

SEQ ID NO: 32179 - DNA, 20 bp, Pseudoramibacter alactolyticus
actcagcagtcgaaggtggg

SEQ ID NO: 32180 - DNA, 20 bp, Staphylococcus felis
tgccggataatatgttgaac

SEQ ID NO: 32181 - DNA, 20 bp, Gemella haemolysans
gggaagaatgattgtgtagt

SEQ ID NO: 32182 - DNA, 20 bp, Oligella urethralis
gcgagatggctcgatcaggg

SEQ ID NO: 32183 - DNA, 20 bp, Tetragenococcus halophilus
tcggtgcggcaacccttagg

SEQ ID NO: 32184 - DNA, 20 bp, Bacillus sp
catcctctgacggccctaga

SEQ ID NO: 32185 - DNA, 20 bp, Staphylococcus pulvereri
gtaaccttttattaggagct

SEQ ID NO: 32186 - DNA, 20 bp, Corynebacterium accolens
gcttctctggatgagttgcg

SEQ ID NO: 32187 - DNA, 20 bp, Oligella urethralis
gtagttatcccccactaccg

SEQ ID NO: 32188 - DNA, 20 bp, Streptococcus gallolyticus
tgtttaacacatgttagaga

SEQ ID NO: 32189 - DNA, 20 bp, Bacillus marinus
cagttgaaagatggtttcgg

SEQ ID NO: 32190 - DNA, 20 bp, Bacteroides uniformis
tgatgtggagacatgtcagc

SEQ ID NO: 32191 - DNA, 20 bp, Haemophilus haemolyticus
ccgcaaggccgcatgccatg

SEQ ID NO: 32192 - DNA, 20 bp, Anaerococcus prevotii
gtgaagataagatggattag

SEQ ID NO: 32193 - DNA, 20 bp, Bacteroides thetaiotaomicron
ggctcaccaaaccttcgatg

SEQ ID NO: 32194 - DNA, 20 bp, Tissierella praeacuta
gataagatgctaatctctta

SEQ ID NO: 32195 - DNA, 20 bp, Anaerobiospirillum succiniciproducens
aggcgaaggcggtctcctgg

SEQ ID NO: 32196 - DNA, 20 bp, Bacteroides capilosus
ggcgcggccgaaggtgggtt

SEQ ID NO: 32197 - DNA, 20 bp, Bacteroides merdae
ccgcatgggaatatttgtta

SEQ ID NO: 32198 - DNA, 20 bp, Anaerococcus prevotii
acccttcggggtgaagataa

SEQ ID NO: 32199 - DNA, 20 bp, Bacteroides merdae
aagattcatcgctgatagat

SEQ ID NO: 32200 - DNA, 20 bp, Prevotella loescheii
ggtttttgcaggtaccgcat

SEQ ID NO: 32201 - DNA, 20 bp, Streptococcus equi
attcttagagataagaagtt

SEQ ID NO: 32202 - DNA, 20 bp, Kingella denitrificans
gtagtgggggataaccaatc

SEQ ID NO: 32203 - DNA, 20 bp, Brevibacterium epidermidis
cttgacatacactggaccgt

SEQ ID NO: 32204 - DNA, 20 bp, Pseudomonas citronellolis
agggagcttgcttctggatt

SEQ ID NO: 32205 - DNA, 20 bp, Campylobacter lari
gggaaactggtaatctagag

SEQ ID NO: 32206 - DNA, 20 bp, Streptococcus hyovaginalis
tcggggcactggtgacaggt

SEQ ID NO: 32207 - DNA, 20 bp, Streptococcus suis
ccagtgaccgtcctagagat

SEQ ID NO: 32208 - DNA, 20 bp, Arthrobacter globiformis
gaacgatgatccggtgcttg

SEQ ID NO: 32209 - DNA, 20 bp, Leptotrichia buccalis
aacacatgcaagtctttggc

SEQ ID NO: 32210 - DNA, 20 bp, Haemophilus actinemycetemcomitans
tggggtttagccctggtgcc

SEQ ID NO: 32211 - DNA, 20 bp, Leuconostoc argentinum
ttactggacaacaactgacg

SEQ ID NO: 32212 - DNA, 20 bp, Streptococcus pyogenes
aatccaccaagtgacggtaa

SEQ ID NO: 32213 - DNA, 20 bp, Corynebacterium afermentans
tccagctactgaccatgcgg

SEQ ID NO: 32214 - DNA, 20 bp, Clostridium tetani
atgaaactttaaccaaagga

SEQ ID NO: 32215 - DNA, 20 bp, Bacillus flexus
attagaagcttgcttctatg

SEQ ID NO: 32216 - DNA, 20 bp, Plesiomonas shigelloides
tcgagcggtaacacagagga

SEQ ID NO: 32217 - DNA, 20 bp, Kingella kingae
gtagatagggtaaccgcaag

SEQ ID NO: 32218 - DNA, 20 bp, Propionibacterium freudenreichii
cttaactctgggcttgcttt

SEQ ID NO: 32219 - DNA, 20 bp, Leptotrichia buccalis
ctgcagacagggataacaga

SEQ ID NO: 32220 - DNA, 20 bp, Weissella paramesenteroides
aataccgtataataccaaca

SEQ ID NO: 32221 - DNA, 20 bp, Prevotella intermedia
actggcggacttgagtgcac

SEQ ID NO: 32222 - DNA, 20 bp, Lactobacillus casei
agtaactgttgtcggcgtga

SEQ ID NO: 32223 - DNA, 20 bp, Gemella haemolysans
tgttctgacctttggttaga

SEQ ID NO: 32224 - DNA, 20 bp, Rhizobium radiobacter
ttcggggtttgggcagtgga

SEQ ID NO: 32225 - DNA, 20 bp, Alicyclobacillus acidocaldarius
gcctccctttgttccgccca

SEQ ID NO: 32226 - DNA, 20 bp, Bacteroides fragilis
tgaccgtatgctaatcccaa

SEQ ID NO: 32227 - DNA, 20 bp, Gemella haemolysans
gagctcgcgagagtaagcaa

SEQ ID NO: 32228 - DNA, 20 bp, Pseudoramibacter alactolyticus
tgacgagcctagagatagga

SEQ ID NO: 32229 - DNA, 20 bp, Alcaligenes faecalis
tgtaaagtacttttggcaga

SEQ ID NO: 32230 - DNA, 20 bp, Acinetobacter baumannii
cttgctactggacctagcgg

SEQ ID NO: 32231 - DNA, 20 bp, Weissella paramesenteroides
tgttataagagaagaacggc

SEQ ID NO: 32232 - DNA, 20 bp, Alcaligenes faecalis
agcttgctctcttggcggcg

SEQ ID NO: 32233 - DNA, 20 bp, Neisseria weaveri
gggaagaaaaggttgtggct

SEQ ID NO: 32234 - DNA, 20 bp, Chromobacterium violaceum
cctgggaacggcattggaga

SEQ ID NO: 32235 - DNA, 20 bp, Leptotrichia buccalis
cctgtgagaacaggcagtgc

SEQ ID NO: 32236 - DNA, 20 bp, Streptococcus macacae
attgaaactgtcagacttga

SEQ ID NO: 32237 - DNA, 20 bp, Moraxella bovis
ttcgggagcttggatacagg

SEQ ID NO: 32238 - DNA, 20 bp, Prevotella bivia
atccaacctacccataacta

SEQ ID NO: 32239 - DNA, 20 bp, Streptococcus uberis
ggggcaaatgcttcactatg

SEQ ID NO: 32240 - DNA, 20 bp, Anaerococcus prevotii
gaacccttcggggtgaagat

SEQ ID NO: 32241 - DNA, 20 bp, Bacteroides uniformis
ccaacctgccgatgactcgg

SEQ ID NO: 32242 - DNA, 20 bp, Peptostreptococcus anaerobius
gtgttagcggtataggatgg

SEQ ID NO: 32243 - DNA, 20 bp, Brevibacillus borstelensis
cgagtcccttcgggggctag

SEQ ID NO: 32244 - DNA, 20 bp, Leuconostoc argentinum
caaagttgaaaggcgctacg

SEQ ID NO: 32245 - DNA, 20 bp, Streptococcus dysgalactiae
tgaggactggtgcttgcacc

SEQ ID NO: 32246 - DNA, 20 bp, Anaerococcus prevotii
cttcggggtgaagataagat

SEQ ID NO: 32247 - DNA, 20 bp, Sporosarcina pasteurii
gtttgctccagcactaaggg

SEQ ID NO: 32248 - DNA, 20 bp, Gordonia bronchialis
atgtggtttgccttgtgcct

SEQ ID NO: 32249 - DNA, 20 bp, Prevotella melaninogenica
tatggggataaagtcaatca

SEQ ID NO: 32250 - DNA, 20 bp, Vibrio cholerae
gcttgtcagtttcaaatgcg

SEQ ID NO: 32251 - DNA, 20 bp, Paenibacillus lautus
cattgtggaataatgaaaga

SEQ ID NO: 32252 - DNA, 20 bp, Ralstonia paucula
aattgctctggctaatacct

SEQ ID NO: 32253 - DNA, 20 bp, Facklamia hominis
atgatcaacgaaggaaagac

SEQ ID NO: 32254 - DNA, 20 bp, Anaerococcus prevotii
ataccctcttcttcggaagc

SEQ ID NO: 32255 - DNA, 20 bp, Ralstonia paucula
acctggggtagatgacggta

SEQ ID NO: 32256 - DNA, 20 bp, Corynebacterium coyleae
attttggatggtgtggtgga

SEQ ID NO: 32257 - DNA, 20 bp, Bacteroides forsythus
gtaagctctacagcgaaagc

SEQ ID NO: 32258 - DNA, 20 bp, Helcococcus kunzii
ggcggttaattaagtctgaa

SEQ ID NO: 32259 - DNA, 20 bp, Neisseria meningitidis
ctacgctaccaagcaatcag

SEQ ID NO: 32260 - DNA, 20 bp, Eggerthella lenta
cagacggcaagggatggggt

SEQ ID NO: 32261 - DNA, 20 bp, Streptococcus acidominimus
gagcaacagcttcactatga

SEQ ID NO: 32262 - DNA, 20 bp, Anaerobiospirillum succiniciproducens
gcagagagcttgctctttgg

SEQ ID NO: 32263 - DNA, 20 bp, Haemophilus haemolyticus
tacagagggtggcgaaactg

SEQ ID NO: 32264 - DNA, 20 bp, Bacillus sp
ttttgatcagttagcggcgg

SEQ ID NO: 32265 - DNA, 20 bp, Turicella otitidis
ggagccatttttagtgtgat

SEQ ID NO: 32266 - DNA, 20 bp, Fusobacterium varium
tggttatgaaagctatatgc

SEQ ID NO: 32267 - DNA, 20 bp, Helcococcus ovis
gaagccgtcgagctaaccgt

SEQ ID NO: 32268 - DNA, 20 bp, Paenibacillus amylolyticus
gtaactgctatcggagtgac

SEQ ID NO: 32269 - DNA, 20 bp, Facklamia sourekii
gctggcgttaacgcaataaa

SEQ ID NO: 32270 - DNA, 20 bp, Helcococcus ovis
gtaggcggtaatttaagtct

SEQ ID NO: 32271 - DNA, 20 bp, Clostridium botulinum
gggtatcaactccccctgtg

SEQ ID NO: 32272 - DNA, 20 bp, Clostridium butyricum
agatgcaacctcgcgagagt

SEQ ID NO: 32273 - DNA, 20 bp, Bacillus schlegellii
gcaggagaggtgcgcggaat

SEQ ID NO: 32274 - DNA, 20 bp, Aneurinibacillus aneurinilyticus
gaccgcatggtctgaaagag

SEQ ID NO: 32275 - DNA, 20 bp, Bacteroides fragilis
caatgggcgctagcctgaac

SEQ ID NO: 32276 - DNA, 20 bp, Fusobacterium nucleatum
aggtagggacaacatttgga

SEQ ID NO: 32277 - DNA, 20 bp, Acinetobacter baumannii
tagcttgctactggacctag

SEQ ID NO: 32278 - DNA, 20 bp, Virgibacillus pantothenticus
gcagatctccttcgggggtg

SEQ ID NO: 32279 - DNA, 20 bp, Bacteroides stercoris
accgacgatggataggggtt

SEQ ID NO: 32280 - DNA, 20 bp, Bacteroides fragilis
tgtattatatgaataaggat

SEQ ID NO: 32281 - DNA, 20 bp, Arcanobacterium bernardiae
ttgcgcctgctgtgaaagac

SEQ ID NO: 32282 - DNA, 20 bp, Nocardia asteroides
ctttagttaatacctaaaga

SEQ ID NO: 32283 - DNA, 20 bp, Acinetobacter haemolyticus
ggctactctagttaatacct

SEQ ID NO: 32284 - DNA, 20 bp, Bacillus oleronius
aacttttttcttcgcatgaa

SEQ ID NO: 32285 - DNA, 20 bp, Gemella haemolysans
tagacacagatacaggtggt

SEQ ID NO: 32286 - DNA, 20 bp, Peptostreptococcus anaerobius
actaatacatgataatatat

SEQ ID NO: 32287 - DNA, 20 bp, Lactococcus lactis
cacaccacgggagttgggag

SEQ ID NO: 32288 - DNA, 20 bp, Bacillus oleronius
aacttttttcttcgcatgag

SEQ ID NO: 32289 - DNA, 20 bp, Cellulosimicrobium cellulans
ttgacatgcacgagaagcca

SEQ ID NO: 32290 - DNA, 20 bp, Peptoniphilus indolicus
gatagcaagcgaatctcaaa

SEQ ID NO: 32291 - DNA, 20 bp, Vibrio cholerae
atatccggtagcgcaaggcc

SEQ ID NO: 32292 - DNA, 20 bp, Anaerococcus tetradius
gactgtaatacaggtggtgc

SEQ ID NO: 32293 - DNA, 20 bp, Arcanobacterium bernardiae
atggtgcagccttcggggtg

SEQ ID NO: 32294 - DNA, 20 bp, Staphylococcus carnosus
atgcgcaccttgacggtacc

SEQ ID NO: 32295 - DNA, 20 bp, Clostridium tetani
taactgaggaagtcccttcg

SEQ ID NO: 32296 - DNA, 20 bp, Actinomyces naeslundii
gtcgcatggtgggcctggga

SEQ ID NO: 32297 - DNA, 20 bp, Streptococcus dysgalactiae
catttaaaaggtgcaactgc

SEQ ID NO: 32298 - DNA, 20 bp, Prevotella bivia
caacctacccataactaagg

SEQ ID NO: 32299 - DNA, 20 bp, Brochothrix campestris
cacccaaagccggtttggta

SEQ ID NO: 32300 - DNA, 20 bp, Brevibacillus choshinensis
acgggcagccaactcgcgag

SEQ ID NO: 32301 - DNA, 20 bp, Clostridium clostridiiforme
tctgaagtgaaaacccaggg

SEQ ID NO: 32302 - DNA, 20 bp, Weeksella virosa
catgcgtaagattagatagt

SEQ ID NO: 32303 - DNA, 20 bp, Brevibacterium epidermidis
acatacactggaccgttctg

SEQ ID NO: 32304 - DNA, 20 bp, Bacillus alcalophilus
cggggctcaaccccgagggg

SEQ ID NO: 32305 - DNA, 20 bp, Tetragenococcus halophilus
gccaagccgcaaggcctagc

SEQ ID NO: 32306 - DNA, 20 bp, Streptococcus ratti
ctgttgtaagtcaagaacgt

SEQ ID NO: 32307 - DNA, 20 bp, Citrobacter freundii
agctggtctgagaggatgcc

SEQ ID NO: 32308 - DNA, 20 bp, Methylobacterium extorquens
cagccgttggcctgcttgca

SEQ ID NO: 32309 - DNA, 20 bp, Pediococcus acidilactici
aagaacgtgggtgagagtaa

SEQ ID NO: 32310 - DNA, 20 bp, Bacillus circulans
ctcatgaggaaaagctgaaa

SEQ ID NO: 32311 - DNA, 20 bp, Prevotella corporis
aaaggcagactaatacctta

SEQ ID NO: 32312 - DNA, 20 bp, Clostridium tertium
caagtacaaagagatgcgat

SEQ ID NO: 32313 - DNA, 20 bp, Bacteroides thetaiotaomicron
cctcatactcggggatagcc

SEQ ID NO: 32314 - DNA, 20 bp, Alicyclobacillus acidocaldarius
gatgcctcctcgcgggcgta

SEQ ID NO: 32315 - DNA, 20 bp, Bacillus sp
cttgcttttgatcagttagc

SEQ ID NO: 32316 - DNA, 20 bp, Gemella morbillorum
gtcagccaacctcataaaac

SEQ ID NO: 32317 - DNA, 20 bp, Anaerococcus tetradius
aggtatggaagggaaagtgg

SEQ ID NO: 32318 - DNA, 20 bp, Actinomyces odontolyticus
tgcacggcggcactgcagag

SEQ ID NO: 32319 - DNA, 20 bp, Pediococcus pentosaceus
gtataacagagaaaaccgca

SEQ ID NO: 32320 - DNA, 20 bp, Bacillus coagulans
aaaaaggaaaggcggcttcg

SEQ ID NO: 32321 - DNA, 20 bp, Corynebacterium afermentans
tatagagaccttgcggggcg

SEQ ID NO: 32322 - DNA, 20 bp, Actinomyces radingae
ggagatgggctcgcggctta

SEQ ID NO: 32323 - DNA, 20 bp, Brevibacterium casei
ttgacatacaccagaccgtc

SEQ ID NO: 32324 - DNA, 20 bp, Paenibacillus amylolyticus
agggaagaacgtccggtaga

SEQ ID NO: 32325 - DNA, 20 bp, Streptococcus suis
gacggatgagttgcgaacgg

SEQ ID NO: 32326 - DNA, 20 bp, Weissella paramesenteroides
caacaaccgcatggttgttg

SEQ ID NO: 32327 - DNA, 20 bp, Bacteroides thetaiotaomicron
tcttgttattaaagaatttc

SEQ ID NO: 32328 - DNA, 20 bp, Paenibacillus lautus
tgccaaggaagaacgtcttc

SEQ ID NO: 32329 - DNA, 20 bp, Campylobacter rectus
cttttcttgggaaagaatta

SEQ ID NO: 32330 - DNA, 20 bp, Campylobacter lari
gttgctgtgctagtcacggc

SEQ ID NO: 32331 - DNA, 20 bp, Leptotrichia buccalis
actgggtgtgggcatgaaga

SEQ ID NO: 32332 - DNA, 20 bp, Helcococcus ovis
tgtaaagttctgtccttagt

SEQ ID NO: 32333 - DNA, 20 bp, Brevibacillus choshinensis
atggaacaacgggcagccaa

SEQ ID NO: 32334 - DNA, 20 bp, Staphylococcus carnosus
gaacaagtgcgtaggtaact

SEQ ID NO: 32335 - DNA, 20 bp, Gemella haemolysans
acatactgtgaggacacaag

SEQ ID NO: 32336 - DNA, 20 bp, Alcaligenes faecalis
tgccgagctagagtatgtca

SEQ ID NO: 32337 - DNA, 20 bp, Oligella ureolytica
agccatcccgcgtgtgggac

SEQ ID NO: 32338 - DNA, 20 bp, Prevotella melaninogenica
cactcaatggacgtcgaccg

SEQ ID NO: 32339 - DNA, 20 bp, Fusobacterium mortiferum
tatatgcgctgcaggagagc

SEQ ID NO: 32340 - DNA, 20 bp, Methylobacterium mesophilicum
tcggtggcgcgcacacaggt

SEQ ID NO: 32341 - DNA, 20 bp, Prevotella melaninogenica
ttgagtgcttgcactcaatg

SEQ ID NO: 32342 - DNA, 20 bp, Campylobacter rectus
aaagaattatgacggtaccc

SEQ ID NO: 32343 - DNA, 20 bp, Macrococcus caseolyticus
ttagtaactgaacgtacctt

SEQ ID NO: 32344 - DNA, 20 bp, Gemella bergeri
tcaaaagagatcagtgctgc

SEQ ID NO: 32345 - DNA, 20 bp, Propionibacterium avidum
atgggtatgcctccttgtgg

SEQ ID NO: 32346 - DNA, 20 bp, Enterococcus gallinarum
gagagtagaacgttcatccc

SEQ ID NO: 32347 - DNA, 20 bp, Arcanobacterium haemolyticum
acactgaacaaggcgaaagt

SEQ ID NO: 32348 - DNA, 20 bp, Campylobacter sputorum
gctagaacttaactgacact

SEQ ID NO: 32349 - DNA, 20 bp, Corynebacterium glucuronolyticum
ttaacttttggttggcaggc

SEQ ID NO: 32350 - DNA, 20 bp, Prevotella loescheii
taccggaagtgcggtggata

SEQ ID NO: 32351 - DNA, 20 bp, Streptococcus uberis
ctatttaaaaggggcaaatg

SEQ ID NO: 32352 - DNA, 20 bp, Myroides odoratus
ggtgaaatcttatagcttaa

SEQ ID NO: 32353 - DNA, 20 bp, Corynebacterium macginleyi
cggtggcctaaacgtgttag

SEQ ID NO: 32354 - DNA, 20 bp, Lactococcus lactis
tttgagcgggggacaacatt

SEQ ID NO: 32355 - DNA, 20 bp, Lactococcus garvieae
tcaaccattgtgtgcattgg

SEQ ID NO: 32356 - DNA, 20 bp, Brevibacillus parabrevis
agggacgaacacgtgccgtt

SEQ ID NO: 32357 - DNA, 20 bp, Clostridium septicum
ttgcagcttcgcatggagca

SEQ ID NO: 32358 - DNA, 20 bp, Actinomyces viscosus
cagtgaagcaggcctgctcc

SEQ ID NO: 32359 - DNA, 20 bp, Anaerococcus prevotii
agtcgtaaagttcttttata

SEQ ID NO: 32360 - DNA, 20 bp, Weeksella virosa
gatggatacttgctgttggg

SEQ ID NO: 32361 - DNA, 20 bp, Eggerthella lenta
cccagacggcaagggatggg

SEQ ID NO: 32362 - DNA, 20 bp, Alicyclobacillus acidocaldarius
cgtttccgggcgttattccg

SEQ ID NO: 32363 - DNA, 20 bp, Aerococcus urinae
gtacaacgagcagcgacctt

SEQ ID NO: 32364 - DNA, 20 bp, Acinetobacter genospecies 3
gaagtagctagcctaactgc

SEQ ID NO: 32365 - DNA, 20 bp, Bacillus sp
ggataacttttctctccgca

SEQ ID NO: 32366 - DNA, 20 bp, Facklamia ignava
gttccagtcgcatgactgga

SEQ ID NO: 32367 - DNA, 20 bp, Campylobacter lari
ttgtgaaatccaacggctta

SEQ ID NO: 32368 - DNA, 20 bp, Facklamia sourekii
tggtacagcgagcagcgaag

SEQ ID NO: 32369 - DNA, 20 bp, Alcaligenes faecalis
ggataatactgacgctcaga

SEQ ID NO: 32370 - DNA, 20 bp, Aneurinibacillus thermoaerophilus
cccgctgacccctccagaga

SEQ ID NO: 32371 - DNA, 20 bp, Bacteroides vulgatus
acagagggccgctaccacgc

SEQ ID NO: 32372 - DNA, 20 bp, Myroides odoratus
ttacaggggaatagcccgga

SEQ ID NO: 32373 - DNA, 20 bp, Campylobacter sputorum
cttgctaggatggattagtg

SEQ ID NO: 32374 - DNA, 20 bp, Bacillus licheniformis
atggttcaatcataaaaggt

SEQ ID NO: 32375 - DNA, 20 bp, Suttonella indologenes
taacacttacgagtcaaagc

SEQ ID NO: 32376 - DNA, 20 bp, Actinomyces neuii
gtcgaacgggatccattggt

SEQ ID NO: 32377 - DNA, 20 bp, Anaerococcus prevotii
agcaaacctcaaaaagtctt

SEQ ID NO: 32378 - DNA, 20 bp, Atopobium parvulum
gcggaaacgtcgtggccgaa

SEQ ID NO: 32379 - DNA, 20 bp, Bacillus coagulans
taccagatagttttttcctc

SEQ ID NO: 32380 - DNA, 20 bp, Fusobacterium nucleatum
gaatgagacagagatgtttc

SEQ ID NO: 32381 - DNA, 20 bp, Actinomyces naeslundii
atggtgggcctgggaaagat

SEQ ID NO: 32382 - DNA, 20 bp, Actinomyces bovis
ttatggttaaagttcggggc

SEQ ID NO: 32383 - DNA, 20 bp, Streptococcus constellatus
acatttactgcatggtagat

SEQ ID NO: 32384 - DNA, 20 bp, Arthrobacter globiformis
ttgacatgttcctgaccgcc

SEQ ID NO: 32385 - DNA, 20 bp, Campylobacter rectus
taggatgaggctatatcgta

SEQ ID NO: 32386 - DNA, 20 bp, Staphylococcus aureus
cttctcgtccgttcgctcga

SEQ ID NO: 32387 - DNA, 20 bp, Bacteroides uniformis
aatccctaaagcctctctca

SEQ ID NO: 32388 - DNA, 20 bp, Prevotella melaninogenica
aaggatttagagataatgac

SEQ ID NO: 32389 - DNA, 20 bp, Bacillus sp
ctatctctagggccgtcaga

SEQ ID NO: 32390 - DNA, 20 bp, Brevibacillus choshinensis
tcctagagataggagctctc

SEQ ID NO: 32391 - DNA, 20 bp, Leptotrichia buccalis
tatgtgcaggaatgccgatg

SEQ ID NO: 32392 - DNA, 20 bp, Prevotella loescheii
tgtgaaatccgggtgctcaa

SEQ ID NO: 32393 - DNA, 20 bp, Corynebacterium auris
cgtttgtgtaagtccatggc

SEQ ID NO: 32394 - DNA, 20 bp, Fusobacterium nucleatum
cagagatgtttcagtgtccc

SEQ ID NO: 32395 - DNA, 20 bp, Peptostreptococcus anaerobius
agcttgacatcccttagacc

SEQ ID NO: 32396 - DNA, 20 bp, Dermabacter hominis
ttttctttggactggtgcac

SEQ ID NO: 32397 - DNA, 20 bp, Streptococcus agalactiae
gtttacactagactgatgag

SEQ ID NO: 32398 - DNA, 20 bp, Corynebacterium afermentans
gcggtcgcagctcgtatccg

SEQ ID NO: 32399 - DNA, 20 bp, Actinomyces naeslundii
ggggccttttccgggtcttc

SEQ ID NO: 32400 - DNA, 20 bp, Paenibacillus macerans
cattgtggaataatgaaagg

SEQ ID NO: 32401 - DNA, 20 bp, Bacillus lentus
gtcgccgcttcgctgccctt

SEQ ID NO: 32402 - DNA, 20 bp, Streptococcus pyogenes
gctgagaactggtgcttgca

SEQ ID NO: 32403 - DNA, 20 bp, Helcococcus kunzii
tcgcataaaacagatctcag

SEQ ID NO: 32404 - DNA, 20 bp, Leptotrichia buccalis
gtgtggatagtgattggggt

SEQ ID NO: 32405 - DNA, 20 bp, Prevotella melaninogenica
gaaggcagctgacgggagcg

SEQ ID NO: 32406 - DNA, 20 bp, Leptotrichia buccalis
agacagggataacagacgga

SEQ ID NO: 32407 - DNA, 20 bp, Streptococcus anginosus
acagtatgtaacacatgtta

SEQ ID NO: 32408 - DNA, 20 bp, Kingella denitrificans
tttttgttgacggtacctaa

SEQ ID NO: 32409 - DNA, 20 bp, Campylobacter rectus
ctatttaatcttagtggcgc

SEQ ID NO: 32410 - DNA, 20 bp, Helcococcus ovis
gaaggcgactttctggaatc

SEQ ID NO: 32411 - DNA, 20 bp, Actinomyces bovis
gtttatcaagtttatggtta

SEQ ID NO: 32412 - DNA, 20 bp, Facklamia sourekii
ctcttgacgtgagtggcgga

SEQ ID NO: 32413 - DNA, 20 bp, Anaerococcus tetradius
tgtatgggaagaaaatgaca

SEQ ID NO: 32414 - DNA, 20 bp, Oligella urethralis
gccactcgccatcaagagag

SEQ ID NO: 32415 - DNA, 20 bp, Neisseria sicca
ttgcgttctgaactgggtgg

SEQ ID NO: 32416 - DNA, 20 bp, Aerococcus christensenii
atgaacaaacttagaaagat

SEQ ID NO: 32417 - DNA, 20 bp, Bacillus coagulans
tccgcatggaggaaaaagga

SEQ ID NO: 32418 - DNA, 20 bp, Facklamia hominis
tcaacgaaggaaagacggct

SEQ ID NO: 32419 - DNA, 20 bp, Facklamia ignava
ggtgcattagctagacggtg

SEQ ID NO: 32420 - DNA, 20 bp, Corynebacterium mycetoides
ggatgagcgctggcggcgtg

SEQ ID NO: 32421 - DNA, 20 bp, Cardiobacterium hominis
taatacctgcgcaattgacg

SEQ ID NO: 32422 - DNA, 20 bp, Clostridium tetani
cggatcgtaaaaccctgttt

SEQ ID NO: 32423 - DNA, 20 bp, Helcococcus kunzii
aatacccgaagtcgtcgagc

SEQ ID NO: 32424 - DNA, 20 bp, Bacillus sp
atcctctgacggccctagag

SEQ ID NO: 32425 - DNA, 20 bp, Brevibacillus choshinensis
gcttcggctgtcactgggag

SEQ ID NO: 32426 - DNA, 20 bp, Morganella morganii
ggttgattgagtcagatgtg

SEQ ID NO: 32427 - DNA, 20 bp, Ewingella americana
gggcttgacccgtggcttcc

SEQ ID NO: 32428 - DNA, 20 bp, Clostridium glycolicum
caagtcgtgaggccgagcta

SEQ ID NO: 32429 - DNA, 20 bp, Facklamia ignava
aagggaacttgttcctttca

SEQ ID NO: 32430 - DNA, 20 bp, Anaerococcus tetradius
acgtaggcggataagcaagt

SEQ ID NO: 32431 - DNA, 20 bp, Porphyromonas endodontalis
aagagtctaagcgaaagcga

SEQ ID NO: 32432 - DNA, 20 bp, Tetragenococcus halophilus
gcaagccaagccgcaaggcc

SEQ ID NO: 32433 - DNA, 20 bp, Corynebacterium accolens
cgaagctttgtgtgacggta

SEQ ID NO: 32434 - DNA, 20 bp, Corynebacterium propinquum
tcgcttaaagctggtcttag

SEQ ID NO: 32435 - DNA, 20 bp, Anaerococcus tetradius
agctcaactatagtaagctt

SEQ ID NO: 32436 - DNA, 20 bp, Chryseobacterium meningosepticum
agggcagctacctagcgata

SEQ ID NO: 32437 - DNA, 20 bp, Anaerococcus prevotii
cttcttcggaagcctcaata

SEQ ID NO: 32438 - DNA, 20 bp, Clostridium innocuum
gtactacaatggcgaccaca

SEQ ID NO: 32439 - DNA, 20 bp, Facklamia ignava
atagttgttccagtcgcatg

SEQ ID NO: 32440 - DNA, 20 bp, Bacillus coagulans
cttttaaaagcttgctttta

SEQ ID NO: 32441 - DNA, 20 bp, Acinetobacter genospecies 3
ggcggctaattaagtcaaat

SEQ ID NO: 32442 - DNA, 20 bp, Alicyclobacillus acidocaldarius
acgagcggctttttgggttt

SEQ ID NO: 32443 - DNA, 20 bp, Campylobacter coli
cactagttgttggggtgcta

SEQ ID NO: 32444 - DNA, 20 bp, Acinetobacter lwoffii
tctaaccttaggggggacgc

SEQ ID NO: 32445 - DNA, 20 bp, Tissierella praeacuta
accttcgggtacaggggaca

SEQ ID NO: 32446 - DNA, 20 bp, Actinomyces bovis
agggaagaacgataggaaga

SEQ ID NO: 32447 - DNA, 20 bp, Citrobacter farmeri
cttagccattgacgttaccc

SEQ ID NO: 32448 - DNA, 20 bp, Actinomyces neuii
cgtcgtgtgggggatgaagg

SEQ ID NO: 32449 - DNA, 20 bp, Sporosarcina pasteurii
ggtatagagatatacctttc

SEQ ID NO: 32450 - DNA, 20 bp, Prevotella corporis
gacactgccgccgcaaggtg

SEQ ID NO: 32451 - DNA, 20 bp, Actinomyces turicensis
gcagagatgtggtggcattt

SEQ ID NO: 32452 - DNA, 20 bp, Leptotrichia buccalis
agaacttgccctgcagacag

SEQ ID NO: 32453 - DNA, 20 bp, Burkholderia multivorans
tccctggctctaatacagtc

SEQ ID NO: 32454 - DNA, 20 bp, Kocuria kristinae
gagtgacctgcctttgactc

SEQ ID NO: 32455 - DNA, 20 bp, Haemophilus actinemycetemcomitans
accagcgatggggagtgaat

SEQ ID NO: 32456 - DNA, 20 bp, Weeksella virosa
agatttttcttcggacagaa

SEQ ID NO: 32457 - DNA, 20 bp, Propionibacterium propionicus
gatgggcgtgcctttttggt

SEQ ID NO: 32458 - DNA, 20 bp, Helcococcus kunzii
ggtatgtaggcggttaatta

SEQ ID NO: 32459 - DNA, 20 bp, Clostridium clostridiiforme
gagacaggtggtgcatggtt

SEQ ID NO: 32460 - DNA, 20 bp, Paenibacillus thiaminolyticus
agagtaactgttccataggt

SEQ ID NO: 32461 - DNA, 20 bp, Kingella denitrificans
agtaacatattggaatgtac

SEQ ID NO: 32462 - DNA, 20 bp, Burkholderia multivorans
gtctgttaagacagatgtga

SEQ ID NO: 32463 - DNA, 20 bp, Gemella bergeri
ctgaagacggtgacctaacc

SEQ ID NO: 32464 - DNA, 20 bp, Anaerococcus prevotii
taacctgccttagacattgg

SEQ ID NO: 32465 - DNA, 20 bp, Streptococcus infantarius
aagtttgaagagttgcgaac

SEQ ID NO: 32466 - DNA, 20 bp, Campylobacter rectus
agcttgctatttaatcttag

SEQ ID NO: 32467 - DNA, 20 bp, Acinetobacter calcoaceticus
tgaagttaataccttcagat

SEQ ID NO: 32468 - DNA, 20 bp, Prevotella melaninogenica
aacctgccgaaaggcagact

SEQ ID NO: 32469 - DNA, 20 bp, Morganella morganii
gattgagtcagatgtgaaat

SEQ ID NO: 32470 - DNA, 20 bp, Porphyromonas endodontalis
gactgagaggttgacccccc

SEQ ID NO: 32471 - DNA, 20 bp, Bacteroides fragilis
cctttactcggggatagcct

SEQ ID NO: 32472 - DNA, 20 bp, Haemophilus actinemycetemcomitans
tggggattggggtttagccc

SEQ ID NO: 32473 - DNA, 20 bp, Leptotrichia buccalis
cagacagggataacagacgg

SEQ ID NO: 32474 - DNA, 20 bp, Streptococcus bovis
ctagagtagaaggagttgcg

SEQ ID NO: 32475 - DNA, 20 bp, Lactococcus lactis
gcaagttgagcgctgaaggt

SEQ ID NO: 32476 - DNA, 20 bp, Tetragenococcus halophilus
cggctttttttcacctgaaa

SEQ ID NO: 32477 - DNA, 20 bp, Streptococcus constellatus
tgcatggtagatgtttaaaa

SEQ ID NO: 32478 - DNA, 20 bp, Clostridium septicum
gtgggaggtatcaactcctt

SEQ ID NO: 32479 - DNA, 20 bp, Bacteroides vulgatus
tacagagggccgctaccacg

SEQ ID NO: 32480 - DNA, 20 bp, Fusobacterium nucleatum
agtcgcaaagccgtgaggtg

SEQ ID NO: 32481 - DNA, 20 bp, Campylobacter curvus
aagaaatttgacggtaccca

SEQ ID NO: 32482 - DNA, 20 bp, Comamonas terrigena
gccgcaaggttgaaactcaa

SEQ ID NO: 32483 - DNA, 20 bp, Cardiobacterium hominis
ctccaggcgtcgagtggcgg

SEQ ID NO: 32484 - DNA, 20 bp, Turicella otitidis
acatacactggatcgggcta

SEQ ID NO: 32485 - DNA, 20 bp, Eggerthella lenta
tcgcggcccattaggtagta

SEQ ID NO: 32486 - DNA, 20 bp, Capnocytophaga ochracea
aagacggttaccgcgaggag

SEQ ID NO: 32487 - DNA, 20 bp, Fusobacterium varium
agttgggaagaagtcagtga

SEQ ID NO: 32488 - DNA, 20 bp, Campylobacter curvus
ggggaagaaatttgacggta

SEQ ID NO: 32489 - DNA, 20 bp, Bacillus alcalophilus
ccggctatcactacgggatg

SEQ ID NO: 32490 - DNA, 20 bp, Microbacterium terregens
gtgaaagagagcttgctctc

SEQ ID NO: 32491 - DNA, 20 bp, Campylobacter rectus
cttgctatttaatcttagtg

SEQ ID NO: 32492 - DNA, 20 bp, Leuconostoc citreum
atgggaagaaatgctaaaat

SEQ ID NO: 32493 - DNA, 20 bp, Proteus vulgaris
ttgggaattgcatctgaaac

SEQ ID NO: 32494 - DNA, 20 bp, Campylobacter lari
tgtgctagtcacggcagtaa

SEQ ID NO: 32495 - DNA, 20 bp, Moraxella osloensis
catgtgatactggtggtgct

SEQ ID NO: 32496 - DNA, 20 bp, Bacillus badius
aagtaactgtccgtaccttg

SEQ ID NO: 32497 - DNA, 20 bp, Clostridium butyricum
cgcatggtacagcaattaaa

SEQ ID NO: 32498 - DNA, 20 bp, Gemella haemolysans
gccggtcacggtgggacaga

SEQ ID NO: 32499 - DNA, 20 bp, Bacteroides fragilis
cgggcttaaattgcagtgga

SEQ ID NO: 32500 - DNA, 20 bp, Bacteroides stercoris
cagaggtaggcggaattcgt

SEQ ID NO: 32501 - DNA, 20 bp, Corynebacterium urealyticum
gtgtggggatttttcacgat

SEQ ID NO: 32502 - DNA, 20 bp, Brevibacillus choshinensis
gataggagctctcttcggag

SEQ ID NO: 32503 - DNA, 20 bp, Bacillus sp
gacatcctctgacggcccta

SEQ ID NO: 32504 - DNA, 20 bp, Campylobacter lari
atcctaagaaccttatagag

SEQ ID NO: 32505 - DNA, 20 bp, Chryseobacterium meningosepticum
gaaggcaggtcactaagtct

SEQ ID NO: 32506 - DNA, 20 bp, Anaerobiospirillum succiniciproducens
cttgaacttcggtttgggtt

SEQ ID NO: 32507 - DNA, 20 bp, Moraxella osloensis
ggtgctagaatatgtgagag

SEQ ID NO: 32508 - DNA, 20 bp, Bacteroides eggerthii
aggatgctaatcccgaaaac

SEQ ID NO: 32509 - DNA, 20 bp, Lactococcus raffinolactis
atactcgtgctattcctaga

SEQ ID NO: 32510 - DNA, 20 bp, Prevotella oris
gtgaccaagcgaaagcatta

SEQ ID NO: 32511 - DNA, 20 bp, Eggerthella lenta
aggcggcctctcaagcggga

SEQ ID NO: 32512 - DNA, 20 bp, Oligella urethralis
cctctttcctccgtagagaa

SEQ ID NO: 32513 - DNA, 20 bp, Bacteroides merdae
tatgtaccctatgaataagc

SEQ ID NO: 32514 - DNA, 20 bp, Vibrio fluvialis
gggatttgttgggcggcgag

SEQ ID NO: 32515 - DNA, 20 bp, Bacillus oleronius
catcctcttgacctccctag

SEQ ID NO: 32516 - DNA, 20 bp, Acinetobacter radioresistens
gttggggcccttgaggcttt

SEQ ID NO: 32517 - DNA, 20 bp, Clostridium ramosum
aggcgacgatctggcctgca

SEQ ID NO: 32518 - DNA, 20 bp, Streptococcus sp.
cgcataaaattgattattgc

SEQ ID NO: 32519 - DNA, 20 bp, Clostridium tetani
gtgtaggagggtccaacctt

SEQ ID NO: 32520 - DNA, 20 bp, Alicyclobacillus acidocaldarius
agcactcaagtcaagcagtt

SEQ ID NO: 32521 - DNA, 20 bp, Prevotella intermedia
tgttagcgcctggcgttagc

SEQ ID NO: 32522 - DNA, 20 bp, Geobacillus thermoglucosidasius
ccctgacaaccctggagaca

SEQ ID NO: 32523 - DNA, 20 bp, Bacteroides uniformis
gttccattaggttgttggcg

SEQ ID NO: 32524 - DNA, 20 bp, Weissella paramesenteroides
cttgctctgatttgatttta

SEQ ID NO: 32525 - DNA, 20 bp, Bacillus badius
tgtcgcttacagatggaccc

SEQ ID NO: 32526 - DNA, 20 bp, Brevibacillus choshinensis
aataccggatacttctttca

SEQ ID NO: 32527 - DNA, 20 bp, Leuconostoc argentinum
cgcatgatacaaagttgaaa

SEQ ID NO: 32528 - DNA, 20 bp, Pediococcus pentosaceus
gttaaagaagaacgtgggta

SEQ ID NO: 32529 - DNA, 20 bp, Bacillus sp
ctcgttccacatgcgtcacc

SEQ ID NO: 32530 - DNA, 20 bp, Clostridium tetani
actaggtgtaggagggtcca

SEQ ID NO: 32531 - DNA, 20 bp, Comamonas terrigena
ggttaataccctggagtcat

SEQ ID NO: 32532 - DNA, 20 bp, Moraxella osloensis
aggtagcctaacgaaagagg

SEQ ID NO: 32533 - DNA, 20 bp, Anaerococcus prevotii
gtaacctgccttagacattg

SEQ ID NO: 32534 - DNA, 20 bp, Fusobacterium nucleatum
gacaacatttagaaatgaat

SEQ ID NO: 32535 - DNA, 20 bp, Streptococcus dysgalactiae
ggttcaaggagttgcgaacg

SEQ ID NO: 32536 - DNA, 20 bp, Bacillus thuringiensis
catcctctgaaaaccctaga

SEQ ID NO: 32537 - DNA, 20 bp, Bacteroides fragilis
gggtgaccgtatgctaatcc

SEQ ID NO: 32538 - DNA, 20 bp, Pseudoramibacter alactolyticus
aggttttgaatgatccttcg

SEQ ID NO: 32539 - DNA, 20 bp, Leptotrichia buccalis
tgaagccgccggtccaaccg

SEQ ID NO: 32540 - DNA, 20 bp, Aerococcus christensenii
aagcgggggacaacatccgg

SEQ ID NO: 32541 - DNA, 20 bp, Tissierella praeacuta
gtcagatgtgaaagatcacg

SEQ ID NO: 32542 - DNA, 20 bp, Acinetobacter radioresistens
gctacctagattaatacttt

SEQ ID NO: 32543 - DNA, 20 bp, Bacteroides caccae
cgccgcaaggcatttgtgaa

SEQ ID NO: 32544 - DNA, 20 bp, Peptostreptococcus anaerobius
tactaatacatgataatata

SEQ ID NO: 32545 - DNA, 20 bp, Corynebacterium jeikeium
gggggttttatttacgattc

SEQ ID NO: 32546 - DNA, 20 bp, Facklamia hominis
aactgttagcggagtgacgg

SEQ ID NO: 32547 - DNA, 20 bp, Campylobacter curvus
aacaaatcatctagagatag

SEQ ID NO: 32548 - DNA, 20 bp, Prevotella melaninogenica
gcagcgcatactggtttcct

SEQ ID NO: 32549 - DNA, 20 bp, Leptotrichia buccalis
gggcatgaagagtgtccgtg

SEQ ID NO: 32550 - DNA, 20 bp, Bacteroides capilosus
cgaaggtgggttcgataatt

SEQ ID NO: 32551 - DNA, 20 bp, Bacteroides forsythus
ttaacgataaaattgccgtt

SEQ ID NO: 32552 - DNA, 20 bp, Actinomyces neuii
cgaatctcttaaagggcatc

SEQ ID NO: 32553 - DNA, 20 bp, Tetragenococcus halophilus
ggtgcggcaacccttagggg

SEQ ID NO: 32554 - DNA, 20 bp, Shewanella algae
ctgggaatttgcccatttgt

SEQ ID NO: 32555 - DNA, 20 bp, Corynebacterium argentoratense
ttgacatatacaggatcgct

SEQ ID NO: 32556 - DNA, 20 bp, Moraxella lacunata
tactgggtgactagagtagg

SEQ ID NO: 32557 - DNA, 20 bp, Corynebacterium macginleyi
ccgcactttagtgtgtgtgg

SEQ ID NO: 32558 - DNA, 20 bp, Brochothrix campestris
taataccgaatgtgctgaac

SEQ ID NO: 32559 - DNA, 20 bp, Kytococcus sedentarius
gcgaacagacaaggagcttg

SEQ ID NO: 32560 - DNA, 20 bp, Moraxella osloensis
actgcatgtgatactggtgg

SEQ ID NO: 32561 - DNA, 20 bp, Staphylococcus carnosus
cgcatggttctgcaatgaaa

SEQ ID NO: 32562 - DNA, 20 bp, Prevotella intermedia
aagtcctacagttccaaaag

SEQ ID NO: 32563 - DNA, 20 bp, Arcanobacterium bernardiae
ttttccacgggttctgcgcc

SEQ ID NO: 32564 - DNA, 20 bp, Paenibacillus pabuli
gccctcaagtttgggacaac

SEQ ID NO: 32565 - DNA, 20 bp, Bacteroides forsythus
agctctacagcgaaagcgtt

SEQ ID NO: 32566 - DNA, 20 bp, Campylobacter sputorum
aacacttagaaatgagtgct

SEQ ID NO: 32567 - DNA, 20 bp, Streptococcus agalactiae
gtgtttacactagactgatg

SEQ ID NO: 32568 - DNA, 20 bp, Pediococcus dextrinicus
atgcattggaaactgggaaa

SEQ ID NO: 32569 - DNA, 20 bp, Bacteroides forsythus
agtcggactaatacctcata

SEQ ID NO: 32570 - DNA, 20 bp, Bacteroides distasonis
aaggttctatggatcgtaaa

SEQ ID NO: 32571 - DNA, 20 bp, Gemella sanguinis
aataccggataacagcataa

SEQ ID NO: 32572 - DNA, 20 bp, Rothia mucilaginosa
agggaagaagagagattgac

SEQ ID NO: 32573 - DNA, 20 bp, Facklamia sourekii
agtgttggggggcttccacc

SEQ ID NO: 32574 - DNA, 20 bp, Pseudoramibacter alactolyticus
attatggttttgtcgcatgg

SEQ ID NO: 32575 - DNA, 20 bp, Brochothrix campestris
tgctaataccgaatgtgctg

SEQ ID NO: 32576 - DNA, 20 bp, Pseudoramibacter alactolyticus
aaactccggtgccataggat

SEQ ID NO: 32577 - DNA, 20 bp, Fusobacterium mortiferum
tacagagagtcgcaaacctg

SEQ ID NO: 32578 - DNA, 20 bp, Geobacillus thermoglucosidasius
agggaagaagaagtgccgtt

SEQ ID NO: 32579 - DNA, 20 bp, Burkholderia gladioli
gattgacgctggcggcatgc

SEQ ID NO: 32580 - DNA, 20 bp, Gemella haemolysans
taactgcatggttgatgttt

SEQ ID NO: 32581 - DNA, 20 bp, Staphylococcus carnosus
gaagaacaagtgcgtaggta

SEQ ID NO: 32582 - DNA, 20 bp, Bacillus badius
caagaccgcaaggtttagcc

SEQ ID NO: 32583 - DNA, 20 bp, Finegoldia magna
caacctgcctatgacagtgg

SEQ ID NO: 32584 - DNA, 20 bp, Streptococcus dysgalactiae
agtggaaaatccaccatgtg

SEQ ID NO: 32585 - DNA, 20 bp, Turicella otitidis
agccatttttagtgtgatgg

SEQ ID NO: 32586 - DNA, 20 bp, Moraxella bovis
gggagcttggatacaggtgc

SEQ ID NO: 32587 - DNA, 20 bp, Enterobacter cloacae
gggaggaaggcgacagggtt

SEQ ID NO: 32588 - DNA, 20 bp, Prevotella intermedia
cattatgtgcttgcacattc

SEQ ID NO: 32589 - DNA, 20 bp, Nocardia asteroides
agtcgagcgggggaggttgc

SEQ ID NO: 32590 - DNA, 20 bp, Neisseria sicca
accctccagagacggagggg

SEQ ID NO: 32591 - DNA, 20 bp, Prevotella bivia
gcctgaagttcgtgaccgta

SEQ ID NO: 32592 - DNA, 20 bp, Prevotella melaninogenica
agtaaagatttatcggtaat

SEQ ID NO: 32593 - DNA, 20 bp, Campylobacter lari
atactctatactcctgctta

SEQ ID NO: 32594 - DNA, 20 bp, Bacillus coagulans
gccttgacggtacccggcca

SEQ ID NO: 32595 - DNA, 20 bp, Pediococcus acidilactici
gggtaacctgcccagaagca

SEQ ID NO: 32596 - DNA, 20 bp, Streptococcus parauberis
tagaacgctgaagactggtg

SEQ ID NO: 32597 - DNA, 20 bp, Capnocytophaga gingivalis
acagacaattgacgctgaga

SEQ ID NO: 32598 - DNA, 20 bp, Streptococcus mitis
tgacatttgcttaaaaggtg

SEQ ID NO: 32599 - DNA, 20 bp, Streptococcus canis
acccattatgtgacggtaac

SEQ ID NO: 32600 - DNA, 20 bp, Campylobacter rectus
gaacggagattaagtagctt

SEQ ID NO: 32601 - DNA, 20 bp, Campylobacter sputorum
tatgggatgaggctatattg

SEQ ID NO: 32602 - DNA, 20 bp, Fusobacterium nucleatum
gagttgcaaagccgtgaggt

SEQ ID NO: 32603 - DNA, 20 bp, Prevotella bivia
cgaataaagatttatcggtt

SEQ ID NO: 32604 - DNA, 20 bp, Suttonella indologenes
cttagatgagcctatattgg

SEQ ID NO: 32605 - DNA, 20 bp, Burkholderia gladioli
tcggaatcctggagagatct

SEQ ID NO: 32606 - DNA, 20 bp, Actinomyces bovis
ggatactaagtgttggagaa

SEQ ID NO: 32607 - DNA, 20 bp, Acinetobacter haemolyticus
cggctgattaagtcggatgt

SEQ ID NO: 32608 - DNA, 20 bp, Gemella haemolysans
acctttggttagacacagat

SEQ ID NO: 32609 - DNA, 20 bp, Clostridium ramosum
attgtaaacttctgttataa

SEQ ID NO: 32610 - DNA, 20 bp, Proteus vulgaris
aactggttggctagagtctt

SEQ ID NO: 32611 - DNA, 20 bp, Prevotella oris
gtaggccgtggattaagcgt

SEQ ID NO: 32612 - DNA, 20 bp, Actinomyces turicensis
tcatggtcaagccgcagctt

SEQ ID NO: 32613 - DNA, 20 bp, Prevotella denticola
ctcaacgtctgaattgcagc

SEQ ID NO: 32614 - DNA, 20 bp, Streptococcus agalactiae
tggtgtttacactagactga

SEQ ID NO: 32615 - DNA, 20 bp, Anaerococcus tetradius
aataaggtccggctaaatac

SEQ ID NO: 32616 - DNA, 20 bp, Streptococcus agalactiae
cactagactgatgagttgcg

SEQ ID NO: 32617 - DNA, 20 bp, Propionibacterium acnes
tcttttggggtcggttcaca

SEQ ID NO: 32618 - DNA, 20 bp, Prevotella bivia
acgatctaatccttaaaacc

SEQ ID NO: 32619 - DNA, 20 bp, Fusobacterium varium
gggtagtacagagagctgca

SEQ ID NO: 32620 - DNA, 20 bp, Actinomyces bovis
aggcggtttatcaagtttat

SEQ ID NO: 32621 - DNA, 20 bp, Bacillus alcalophilus
aagggagcttgctcccagag

SEQ ID NO: 32622 - DNA, 20 bp, Gemella morbillorum
ttggttatgctaacactatg

SEQ ID NO: 32623 - DNA, 20 bp, Prevotella disiens
gtacacacaacgtaggcgga

SEQ ID NO: 32624 - DNA, 20 bp, Neisseria subflava
ggatagggttaatacccctg

SEQ ID NO: 32625 - DNA, 20 bp, Atopobium parvulum
cgaagtcgtcggcctaacct

SEQ ID NO: 32626 - DNA, 20 bp, Facklamia sourekii
tagagataggtgaaatccta

SEQ ID NO: 32627 - DNA, 20 bp, Eggerthella lenta
tcccgaactgggaggctcga

SEQ ID NO: 32628 - DNA, 20 bp, Actinobacillus ureae
aatctggctcatggaggggg

SEQ ID NO: 32629 - DNA, 20 bp, Paenibacillus apiarius
cctagggctcaaccttgggt

SEQ ID NO: 32630 - DNA, 20 bp, Streptococcus dysgalactiae
ctaataccgcatgacaatgg

SEQ ID NO: 32631 - DNA, 20 bp, Prevotella intermedia
atgtgcttgcacattctgga

SEQ ID NO: 32632 - DNA, 20 bp, Finegoldia magna
gcaacctgcctatgacagtg

SEQ ID NO: 32633 - DNA, 20 bp, Corynebacterium amycolatum
cgacgaagggtttctgacgg

SEQ ID NO: 32634 - DNA, 20 bp, Acinetobacter junii
agtcgagcggagatgaggtg

SEQ ID NO: 32635 - DNA, 20 bp, Bacteroides fragilis
taatgattccgcatggtttc

SEQ ID NO: 32636 - DNA, 20 bp, Bacillus alcalophilus
tgatgtgaaatatcggggct

SEQ ID NO: 32637 - DNA, 20 bp, Corynebacterium striatum
cttgacatatacaagacagg

SEQ ID NO: 32638 - DNA, 20 bp, Anaerococcus tetradius
ctgaagcgaaactcacaaag

SEQ ID NO: 32639 - DNA, 20 bp, Alcaligenes faecalis
taactgccgagctagagtat

SEQ ID NO: 32640 - DNA, 20 bp, Bacillus badius
gaagaacaagtacggaagta

SEQ ID NO: 32641 - DNA, 20 bp, Dermacoccus nishinomiyaensis
tttgtggtgggggatggact

SEQ ID NO: 32642 - DNA, 20 bp, Clostridium subterminale
ttaataccgcataatgtatg

SEQ ID NO: 32643 - DNA, 20 bp, Proteus vulgaris
tctgaaactggttggctaga

SEQ ID NO: 32644 - DNA, 20 bp, Bacillus pallidus
ccgcatggttttcggttgaa

SEQ ID NO: 32645 - DNA, 20 bp, Moraxella lacunata
ccagtcgttgggtctcttga

SEQ ID NO: 32646 - DNA, 20 bp, Paenibacillus alvei
atagcttgagtacagaagag

SEQ ID NO: 32647 - DNA, 20 bp, Kingella kingae
gctttgagaaggaaagcagg

SEQ ID NO: 32648 - DNA, 20 bp, Paenibacillus thiaminolyticus
aagaacgctatggagagtaa

SEQ ID NO: 32649 - DNA, 20 bp, Prevotella denticola
gtagacgctcaacgtctgaa

SEQ ID NO: 32650 - DNA, 20 bp, Fusobacterium mortiferum
cgctgcaggagagctttgcg

SEQ ID NO: 32651 - DNA, 20 bp, Brochothrix campestris
gtgctgaacatcataagatg

SEQ ID NO: 32652 - DNA, 20 bp, Streptococcus intermedius
atgtttaaaaggtgcaaatg

SEQ ID NO: 32653 - DNA, 20 bp, Bacillus lentus
caaaaagcaagcttcttatt

SEQ ID NO: 32654 - DNA, 20 bp, Clostridium glycolicum
tcgaaggtgaaatcaataac

SEQ ID NO: 32655 - DNA, 20 bp, Bacteroides vulgatus
gccaatcccaaaaacctctc

SEQ ID NO: 32656 - DNA, 20 bp, Leuconostoc lactis
aggctcaccaagaccgtgat

SEQ ID NO: 32657 - DNA, 20 bp, Actinomyces naeslundii
atgaaagtgtggctaatacg

SEQ ID NO: 32658 - DNA, 20 bp, Acinetobacter haemolyticus
gaggaggctactctagttaa

SEQ ID NO: 32659 - DNA, 19 bp, Finegoldia magna
cccgaagcctgtgacctaa

SEQ ID NO: 32660 - DNA, 20 bp, Campylobacter concisus
ccagagatggtctttccccc

SEQ ID NO: 32661 - DNA, 20 bp, Corynebacterium glucuronolyticum
tatgtgagattgggctagag

SEQ ID NO: 32662 - DNA, 20 bp, Staphylococcus pulvereri
catcctttgatcgctctaga

SEQ ID NO: 32663 - DNA, 20 bp, Campylobacter lari
acggagtattaagagagctt

SEQ ID NO: 32664 - DNA, 20 bp, Prevotella melaninogenica
cttttgtatggggataaagt

SEQ ID NO: 32665 - DNA, 20 bp, Peptostreptococcus anaerobius
aaagtttactaatacatgat

SEQ ID NO: 32666 - DNA, 20 bp, Paenibacillus lautus
agcattgtggaataatgaaa

SEQ ID NO: 32667 - DNA, 20 bp, Clostridium butyricum
tgagatgcaacctcgcgaga

SEQ ID NO: 32668 - DNA, 20 bp, Staphylococcus muscae
gcactagagatagtgttttc

SEQ ID NO: 32669 - DNA, 20 bp, Corynebacterium afermentans
aattctttccagctactgac

SEQ ID NO: 32670 - DNA, 20 bp, Prevotella intermedia
cgcgtatccaaccttccctc

SEQ ID NO: 32671 - DNA, 20 bp, Clostridium septicum
aactccttccgtgccgccgt

SEQ ID NO: 32672 - DNA, 20 bp, Prevotella melaninogenica
gcaaattgcatcaaatcttg

SEQ ID NO: 32673 - DNA, 20 bp, Anaerococcus tetradius
aggcgactttctggtcatca

SEQ ID NO: 32674 - DNA, 20 bp, Streptococcus thermophilus
aggagcttgctcttcttgga

SEQ ID NO: 32675 - DNA, 20 bp, Empedobacter brevis
tatctggggataaacctact

SEQ ID NO: 32676 - DNA, 20 bp, Acinetobacter calcoaceticus
gagtgatggtgcttgcacta

SEQ ID NO: 32677 - DNA, 20 bp, Atopobium parvulum
gcggccttctgggccataac

SEQ ID NO: 32678 - DNA, 20 bp, Rothia mucilaginosa
acctgcagagaaagcgccgg

SEQ ID NO: 32679 - DNA, 20 bp, Pseudoramibacter alactolyticus
gttttgaatgatccttcggg

SEQ ID NO: 32680 - DNA, 20 bp, Atopobium parvulum
ccacccgagtcgattgcacc

SEQ ID NO: 32681 - DNA, 20 bp, Weeksella virosa
aaagacggggactctaatga

SEQ ID NO: 32682 - DNA, 20 bp, Actinomyces bovis
atggttaaagttcggggctt

SEQ ID NO: 32683 - DNA, 20 bp, Streptococcus acidominimus
aaacatttaaaaggtgcaac

SEQ ID NO: 32684 - DNA, 20 bp, Corynebacterium xerosis
ggataggaccgcaccgtgag

SEQ ID NO: 32685 - DNA, 20 bp, Haemophilus paraphrophilus
ataggatgaacccaagtggg

SEQ ID NO: 32686 - DNA, 20 bp, Bacteroides thetaiotaomicron
cttgttattaaagaatttcg

SEQ ID NO: 32687 - DNA, 20 bp, Streptococcus infantarius
agcaattgctcctttcaagc

SEQ ID NO: 32688 - DNA, 20 bp, Corynebacterium argentoratense
gtgatctgccctcaacttcg

SEQ ID NO: 32689 - DNA, 20 bp, Corynebacterium group F
gataggacaactttttggat

SEQ ID NO: 32690 - DNA, 20 bp, Delftia acidovorans
acgaaaaagcttctcctaat

SEQ ID NO: 32691 - DNA, 20 bp, Streptococcus infantarius
agcttgctaaagtttgaaga

SEQ ID NO: 32692 - DNA, 20 bp, Ochrobactrum intermedium
ttagtcttgagtatggtaga

SEQ ID NO: 32693 - DNA, 20 bp, Tissierella praeacuta
tggtaagcatttgaaactga

SEQ ID NO: 32694 - DNA, 20 bp, Bacteroides fragilis
cttcttttatataagaataa

SEQ ID NO: 32695 - DNA, 20 bp, Gemella haemolysans
ctaacactatgagatggctt

SEQ ID NO: 32696 - DNA, 20 bp, Propionibacterium freudenreichii
cgaatatgagcctggcctgc

SEQ ID NO: 32697 - DNA, 20 bp, Corynebacterium glucuronolyticum
ctgtgtaatccaggggctta

SEQ ID NO: 32698 - DNA, 20 bp, Brevibacillus agri
aagatggcttttcgctatca

SEQ ID NO: 32699 - DNA, 20 bp, Prevotella melaninogenica
tgtatggggataaagtcaat

SEQ ID NO: 32700 - DNA, 20 bp, Streptococcus infantarius
tcttcaaactttagcaagct

SEQ ID NO: 32701 - DNA, 20 bp, Morganella morganii
atctgatactggtcagctag

SEQ ID NO: 32702 - DNA, 20 bp, Gemella haemolysans
tggttttgctaacactatga

SEQ ID NO: 32703 - DNA, 20 bp, Prevotella loescheii
ccgtcttcagttgccatcgg

SEQ ID NO: 32704 - DNA, 20 bp, Atopobium parvulum
tcgggtgtgtataaagtggc

SEQ ID NO: 32705 - DNA, 20 bp, Actinomyces neuii
cggtttgtcgcgtctagcgt

SEQ ID NO: 32706 - DNA, 20 bp, Moraxella lacunata
gctctcgctaatagatgagc

SEQ ID NO: 32707 - DNA, 20 bp, Eikenella corrodens
gggaagaaaagggaagtgct

SEQ ID NO: 32708 - DNA, 20 bp, Facklamia languida
ggcctaccatggcaatgatg

SEQ ID NO: 32709 - DNA, 20 bp, Lactococcus garvieae
cttgacatactcgtgctatc

SEQ ID NO: 32710 - DNA, 20 bp, Micromonas micros
aggtagggttaatgactggg

SEQ ID NO: 32711 - DNA, 20 bp, Paenibacillus apiarius
actgcatgacttgagtacag

SEQ ID NO: 32712 - DNA, 20 bp, Streptococcus porcinus
taccgcatgaaagtagaaga

SEQ ID NO: 32713 - DNA, 20 bp, Bacteroides forsythus
acctgaagtccgtaaccgcg

SEQ ID NO: 32714 - DNA, 20 bp, Streptococcus acidominimus
aggagcaacagcttcactat

SEQ ID NO: 32715 - DNA, 20 bp, Bacteroides thetaiotaomicron
ttatatgggaataaagtttt

SEQ ID NO: 32716 - DNA, 20 bp, Prevotella intermedia
ataccccgttgaaagacggc

SEQ ID NO: 32717 - DNA, 20 bp, Leptotrichia buccalis
cagatcttgacatcctacga

SEQ ID NO: 32718 - DNA, 20 bp, Corynebacterium afermentans
ccgaaattctttccagctac

SEQ ID NO: 32719 - DNA, 20 bp, Campylobacter lari
agttgagacaggtgctgcac

SEQ ID NO: 32720 - DNA, 20 bp, Lactococcus lactis
cgactggatgagcagcgaac

SEQ ID NO: 32721 - DNA, 20 bp, Fusobacterium mortiferum
taagttgggcactcatgcga

SEQ ID NO: 32722 - DNA, 20 bp, Gemella sanguinis
gttgttctgacctttggttg

SEQ ID NO: 32723 - DNA, 20 bp, Campylobacter curvus
caaatcatctagagatagaa

SEQ ID NO: 32724 - DNA, 20 bp, Facklamia sourekii
agagataggtgaaatcctac

SEQ ID NO: 32725 - DNA, 20 bp, Anaerococcus tetradius
gggtacgtaggcggcctagt

SEQ ID NO: 32726 - DNA, 20 bp, Serratia marcescens
ggtgagcttaatacgctcat

SEQ ID NO: 32727 - DNA, 20 bp, Pseudoramibacter alactolyticus
ttgaatgatccttcgggtga

SEQ ID NO: 32728 - DNA, 20 bp, Neisseria polysaccharea
tgctaatatcagcggctgat

SEQ ID NO: 32729 - DNA, 20 bp, Tetragenococcus halophilus
ggctttttttcacctgaaag

SEQ ID NO: 32730 - DNA, 20 bp, Anaerococcus tetradius
actatataaagcttttaaaa

SEQ ID NO: 32731 - DNA, 20 bp, Bacteroides fragilis
acccgggcttaaattgcagt

SEQ ID NO: 32732 - DNA, 20 bp, Clostridium botulinum
agaatcgcatgattttctta

SEQ ID NO: 32733 - DNA, 20 bp, Empedobacter brevis
cgtaggcggattaatcagtc

SEQ ID NO: 32734 - DNA, 20 bp, Erysipelothrix rhusiopathiae
tccctaccggaaggtgcggt

SEQ ID NO: 32735 - DNA, 20 bp, Staphylococcus capitis
cagctgtttagtgtcagttg

SEQ ID NO: 32736 - DNA, 20 bp, Gemella sanguinis
gttagggaagaatgattgta

SEQ ID NO: 32737 - DNA, 20 bp, Aerococcus viridans
gtaaggaatctacctataag

SEQ ID NO: 32738 - DNA, 20 bp, Actinomyces meyeri
atggtcaagccgcaactgtg

SEQ ID NO: 32739 - DNA, 20 bp, Veillonella dispar
agaaggattgacggtaccgg

SEQ ID NO: 32740 - DNA, 20 bp, Ralstonia paucula
gaaattgctctggctaatac

SEQ ID NO: 32741 - DNA, 20 bp, Bacteroides fragilis
gctaatcccaaaatcctctc

SEQ ID NO: 32742 - DNA, 20 bp, Propionibacterium freudenreichii
tcggggggtacacgagtggc

SEQ ID NO: 32743 - DNA, 20 bp, Haemophilus actinomycetomicans
agaaagtgcgtctaagttcg

SEQ ID NO: 32744 - DNA, 20 bp, Methylobacterium mesophilicum
ttggggtgcttgcacctcag

SEQ ID NO: 32745 - DNA, 20 bp, Corynebacterium falsenii
tatgcaggatcgctgcagag

SEQ ID NO: 32746 - DNA, 20 bp, Bacillus cereus
gaatggattgagagcttgct

SEQ ID NO: 32747 - DNA, 20 bp, Moraxella atlantae
cctaacgcaagagggcgctt

SEQ ID NO: 32748 - DNA, 20 bp, Paenibacillus thiaminolyticus
atggagagtaactgttccat

SEQ ID NO: 32749 - DNA, 20 bp, Lactobacillus casei
tggttcttggctgaaagatg

SEQ ID NO: 32750 - DNA, 20 bp, Morganella morganii
cgctggcggcaggcctaagc

SEQ ID NO: 32751 - DNA, 20 bp, Paenibacillus thiaminolyticus
cgcatcggaaactgtgtgac

SEQ ID NO: 32752 - DNA, 20 bp, Bacillus coagulans
ttagggaagaacaagtatga

SEQ ID NO: 32753 - DNA, 20 bp, Streptococcus dysgalactiae
gttcaaggagttgcgaacgg

SEQ ID NO: 32754 - DNA, 20 bp, Stenotrophomonas maltophilia
cagctggctaatacccggtt

SEQ ID NO: 32755 - DNA, 20 bp, Anaerobiospirillum succiniciproducens
atggcccttacggcagggct

SEQ ID NO: 32756 - DNA, 20 bp, Pasteurella multocida
atacagagggcagcgagagt

SEQ ID NO: 32757 - DNA, 20 bp, Staphylococcus saccharolyticus
agcgattccatcttcatata

SEQ ID NO: 32758 - DNA, 20 bp, Bacteroides uniformis
tgtatgtaccgtatgaataa

SEQ ID NO: 32759 - DNA, 20 bp, Propionibacterium granulosum
cggtaacactcgaagccggt

SEQ ID NO: 32760 - DNA, 20 bp, Bacillus niacini
ataatccttttcctctcatg

SEQ ID NO: 32761 - DNA, 20 bp, Porphyromonas endodontalis
ggtgaaaagctgcagctcaa

SEQ ID NO: 32762 - DNA, 20 bp, Tissierella praeacuta
taagatgctaatctcttaaa

SEQ ID NO: 32763 - DNA, 20 bp, Microbacterium terregens
aacggtgaaagagagcttgc

SEQ ID NO: 32764 - DNA, 20 bp, Paenibacillus validus
gcctcggagagtaactgctc

SEQ ID NO: 32765 - DNA, 20 bp, Corynebacterium falsenii
aggcccttgcttgcaggggt

SEQ ID NO: 32766 - DNA, 20 bp, Anaerococcus tetradius
aatgacagtaccatacgaat

SEQ ID NO: 32767 - DNA, 20 bp, Leuconostoc argentinum
ttagtatcgcatgatacaaa

SEQ ID NO: 32768 - DNA, 20 bp, Corynebacterium accolens
gggtctttctacgactttcg

SEQ ID NO: 32769 - DNA, 20 bp, Peptostreptococcus anaerobius
gttagcggtataggatggac

SEQ ID NO: 32770 - DNA, 20 bp, Brevibacterium epidermidis
ttgacatacactggaccgtt

SEQ ID NO: 32771 - DNA, 20 bp, Tissierella praeacuta
taaatgtcgcatgagattta

SEQ ID NO: 32772 - DNA, 20 bp, Propionibacterium acnes
ttgtaaaccgctttcgcctg

SEQ ID NO: 32773 - DNA, 20 bp, Moraxella lacunata
tcgttgggtctcttgaagac

SEQ ID NO: 32774 - DNA, 20 bp, Alloiococcus otitis
tagctaatctcccaaagcca

SEQ ID NO: 32775 - DNA, 20 bp, Anaerococcus prevotii
atagagatataccctcttct

SEQ ID NO: 32776 - DNA, 20 bp, Leuconostoc lactis
gtcgaacgcactctcgttta

SEQ ID NO: 32777 - DNA, 20 bp, Rothia mucilaginosa
tggggtgttggtggaaagcg

SEQ ID NO: 32778 - DNA, 20 bp, Streptococcus sp.
taattaattgaaagatgcaa

SEQ ID NO: 32779 - DNA, 20 bp, Weissella paramesenteroides
gctctgatttgattttatct

SEQ ID NO: 32780 - DNA, 20 bp, Bacillus cereus
gcttgctctcaagaagttag

SEQ ID NO: 32781 - DNA, 20 bp, Erysipelothrix rhusiopathiae
aggaagagggaatgcttctt

SEQ ID NO: 32782 - DNA, 20 bp, Campylobacter sputorum
gatagaagtttccccttcgg

SEQ ID NO: 32783 - DNA, 20 bp, Corynebacterium ulcerans
actggataggaccgcacttt

SEQ ID NO: 32784 - DNA, 20 bp, Actinomyces meyeri
tcttctttgggataacgccc

SEQ ID NO: 32785 - DNA, 20 bp, Clostridium septicum
ctccttccgtgccgccgtta

SEQ ID NO: 32786 - DNA, 20 bp, Corynebacterium propinquum
tgtgaaattccacagcttaa

SEQ ID NO: 32787 - DNA, 20 bp, Nocardia asteroides
ccttgacatactaagaactt

SEQ ID NO: 32788 - DNA, 20 bp, Atopobium parvulum
tgggttgagagaccgaccag

SEQ ID NO: 32789 - DNA, 20 bp, Anaerococcus tetradius
aaactgctcatcttgaggta

SEQ ID NO: 32790 - DNA, 20 bp, Bacteroides uniformis
gtgtcttgagtacagtagag

SEQ ID NO: 32791 - DNA, 20 bp, Burkholderia multivorans
tccttggctctaatacagtc

SEQ ID NO: 32792 - DNA, 20 bp, Leptotrichia buccalis
gtctggggtgaaaacttgcg

SEQ ID NO: 32793 - DNA, 20 bp, Bacteroides ureolyticus
aaatagctaccttccacagt

SEQ ID NO: 32794 - DNA, 20 bp, Yersinia mollaretii
taatagcacgattgattgac

SEQ ID NO: 32795 - DNA, 20 bp, Streptococcus thoraltensis
agttgcgagctggtgacagt

SEQ ID NO: 32796 - DNA, 20 bp, Clostridium ramosum
agagtgcaggagaggatcgt

SEQ ID NO: 32797 - DNA, 20 bp, Methylobacterium mesophilicum
gaatgccagctgttggggtg

SEQ ID NO: 32798 - DNA, 20 bp, Fusobacterium nucleatum
ttaggaatgagatagagata

SEQ ID NO: 32799 - DNA, 20 bp, Streptococcus gallolyticus
ttaacacatgttagagactt

SEQ ID NO: 32800 - DNA, 20 bp, Cardiobacterium hominis
tggagccaatctgagaaagc

SEQ ID NO: 32801 - DNA, 20 bp, Anaerococcus tetradius
gttgtaaaaatcttttttat

SEQ ID NO: 32802 - DNA, 20 bp, Helcococcus ovis
ctgtggctcaaccatagtaa

SEQ ID NO: 32803 - DNA, 20 bp, Microbacterium terregens
gaaagagagcttgctctctg

SEQ ID NO: 32804 - DNA, 20 bp, Alcaligenes faecalis
agagagcttgctctcttggc

SEQ ID NO: 32805 - DNA, 20 bp, Prevotella bivia
gctgttagcacctagtgtta

SEQ ID NO: 32806 - DNA, 20 bp, Lactococcus lactis
ttaaacacaagttttaagtt

SEQ ID NO: 32807 - DNA, 20 bp, Corynebacterium auris
tagaaagccggtcgtagttc

SEQ ID NO: 32808 - DNA, 20 bp, Actinomyces bovis
gttatggcggatacaggtgg

SEQ ID NO: 32809 - DNA, 20 bp, Veillonella atypica
cccgagaaacactctctcag

SEQ ID NO: 32810 - DNA, 20 bp, Tetragenococcus halophilus
taggggagccagccgcctaa

SEQ ID NO: 32811 - DNA, 20 bp, Tissierella praeacuta
gggtacaggggacacaggtg

SEQ ID NO: 32812 - DNA, 20 bp, Bacteroides eggerthii
cgacaggatgctaatcccga

SEQ ID NO: 32813 - DNA, 20 bp, Fusobacterium nucleatum
tagggacaacatttagaaat

SEQ ID NO: 32814 - DNA, 20 bp, Dermabacter hominis
gaagctgtgcttgcacagtg

SEQ ID NO: 32815 - DNA, 20 bp, Dermabacter hominis
tggcccaagctttatgcggg

SEQ ID NO: 32816 - DNA, 20 bp, Gemella haemolysans
agacacagatacaggtggtg

SEQ ID NO: 32817 - DNA, 20 bp, Weeksella virosa
taaagacggggactctaatg

SEQ ID NO: 32818 - DNA, 20 bp, Photobacterium damselae
gtgtagttaacacctgcatt

SEQ ID NO: 32819 - DNA, 20 bp, Moraxella  catarrhalis
tcgaacgaagttaggaagct

SEQ ID NO: 32820 - DNA, 20 bp, Fusobacterium nucleatum
agttgcaaagccgtgaggtg

SEQ ID NO: 32821 - DNA, 20 bp, Aerococcus urinae
gtaagagaagaacaaattgg

SEQ ID NO: 32822 - DNA, 20 bp, Campylobacter lari
aaccatgacggtacctaacg

SEQ ID NO: 32823 - DNA, 20 bp, Delftia acidovorans
ctcctaatacgagaggccca

SEQ ID NO: 32824 - DNA, 20 bp, Bacteroides ovatus
aaagattaataccggatagc

SEQ ID NO: 32825 - DNA, 20 bp, Pseudomonas fluorescens
ggaggaagggtacttaccta

SEQ ID NO: 32826 - DNA, 20 bp, Leptotrichia buccalis
gcaagcctgccctggaaact

SEQ ID NO: 32827 - DNA, 20 bp, Corynebacterium coyleae
cgtttgtgtaagcccgcagc

SEQ ID NO: 32828 - DNA, 20 bp, Eggerthella lenta
gatggggtcgcggcccatta

SEQ ID NO: 32829 - DNA, 20 bp, Methylobacterium mesophilicum
aaaggcttgctgccggagga

SEQ ID NO: 32830 - DNA, 20 bp, Moraxella bovis
tagatatgattagtggcgaa

SEQ ID NO: 32831 - DNA, 20 bp, Pediococcus inopinatus
taaaccgcatggttttcttt

SEQ ID NO: 32832 - DNA, 20 bp, Tissierella praeacuta
taaaggctcaccaagacagc

SEQ ID NO: 32833 - DNA, 20 bp, Veillonella dispar
catcgaggatagatgaaagg

SEQ ID NO: 32834 - DNA, 20 bp, Clostridium ramosum
ggcgacgatctggcctgcaa

SEQ ID NO: 32835 - DNA, 20 bp, Gemella morbillorum
gcttgcactagaaaaactta

SEQ ID NO: 32836 - DNA, 20 bp, Streptococcus thoraltensis
taagagtggaaagtttactc

SEQ ID NO: 32837 - DNA, 20 bp, Lactococcus lactis
aaagctcatcaagtgacggt

SEQ ID NO: 32838 - DNA, 20 bp, Neisseria gonorrhoeae
cttgcttctcgggtggcgag

SEQ ID NO: 32839 - DNA, 20 bp, Clostridium butyricum
agagtgagcaaaactataaa

SEQ ID NO: 32840 - DNA, 20 bp, Neisseria cinerea
aaggggtccgcttaccacgg

SEQ ID NO: 32841 - DNA, 20 bp, Bacteroides capilosus
gtgaggaacctgcctcggag

SEQ ID NO: 32842 - DNA, 20 bp, Campylobacter curvus
ctgagctagtcttggcagta

SEQ ID NO: 32843 - DNA, 20 bp, Serratia proteamaculans
agcacattgcattgacgtta

SEQ ID NO: 32844 - DNA, 20 bp, Vagococcus fluvialis
gtgggagagtaactgttccc

SEQ ID NO: 32845 - DNA, 20 bp, Granulicatella adiacens
atgctaaaaccgcataggtc

SEQ ID NO: 32846 - DNA, 20 bp, Leuconostoc argentinum
atgattctagttcgacggta

SEQ ID NO: 32847 - DNA, 20 bp, Kingella denitrificans
gggtgcttgcacctgccggc

SEQ ID NO: 32848 - DNA, 20 bp, Leptotrichia buccalis
gcatgtgcccggcaatgaaa

SEQ ID NO: 32849 - DNA, 20 bp, Anaerococcus tetradius
taagcaagttagaagtgaaa

SEQ ID NO: 32850 - DNA, 20 bp, Leptotrichia buccalis
caagtctggggtgaaaactt

SEQ ID NO: 32851 - DNA, 20 bp, Leuconostoc argentinum
atacaaagttgaaaggcgct

SEQ ID NO: 32852 - DNA, 20 bp, Acinetobacter genospecies 3
agaggtagcttgctactgat

SEQ ID NO: 32853 - DNA, 20 bp, Alicyclobacillus acidocaldarius
gcgggcgtatccggcattag

SEQ ID NO: 32854 - DNA, 20 bp, Sporosarcina pasteurii
aactctgaaagacggcttcg

SEQ ID NO: 32855 - DNA, 20 bp, Myroides odoratus
ttatagcttaactataaaat

SEQ ID NO: 32856 - DNA, 20 bp, Bacteroides merdae
gtgagactgccagcgtaagc

SEQ ID NO: 32857 - DNA, 20 bp, Unknown Organism
  oligonucleotide from CDC group EF-4B
agaaggaaagcaggggctct

SEQ ID NO: 32858 - DNA, 20 bp, Streptococcus constellatus
ttaaaaggtgcaagagcatc

SEQ ID NO: 32859 - DNA, 20 bp, Myroides odoratus
aatagcccggagaaattcgg

SEQ ID NO: 32860 - DNA, 20 bp, Tissierella praeacuta
agatgctaatctcttaaagc

SEQ ID NO: 32861 - DNA, 20 bp, Brochothrix campestris
taccgaatgtgctgaacatc

SEQ ID NO: 32862 - DNA, 20 bp, Acinetobacter radioresistens
taatactttaggatagtgga

SEQ ID NO: 32863 - DNA, 20 bp, Staphylococcus pulvereri
tggagtaaccttttattagg

SEQ ID NO: 32864 - DNA, 20 bp, Brevibacillus choshinensis
gtcgagcggaccaatgaaga

SEQ ID NO: 32865 - DNA, 20 bp, Streptococcus hyovaginalis
gagcaattgcttcactatca

SEQ ID NO: 32866 - DNA, 20 bp, Propionibacterium avidum
agcttcggcggttttggatg

SEQ ID NO: 32867 - DNA, 20 bp, Methylobacterium mesophilicum
gtccacttcggtggcgcgca

SEQ ID NO: 32868 - DNA, 20 bp, Granulicatella elegans
cggcttctgctgatggatgg

SEQ ID NO: 32869 - DNA, 20 bp, Corynebacterium group F
aggacaactttttggatatt

SEQ ID NO: 32870 - DNA, 20 bp, Neisseria meningitidis
gagagaaagcaggggacttt

SEQ ID NO: 32871 - DNA, 20 bp, Alcaligenes faecalis
ctaatacgaggtactgctga

SEQ ID NO: 32872 - DNA, 20 bp, Bacteroides distasonis
aattgccgttgaaactgggg

SEQ ID NO: 32873 - DNA, 20 bp, Methylobacterium mesophilicum
agctgttggggtgcttgcac

SEQ ID NO: 32874 - DNA, 20 bp, Staphylococcus carnosus
ttctgcaatgaaagacggtt

SEQ ID NO: 32875 - DNA, 20 bp, Streptococcus thermophilus
taggtgttggatcctttccg

SEQ ID NO: 32876 - DNA, 20 bp, Sporosarcina pasteurii
atcccgctgaccggtataga

SEQ ID NO: 32877 - DNA, 20 bp, Campylobacter rectus
ctccttttcttgggaaagaa

SEQ ID NO: 32878 - DNA, 20 bp, Prevotella disiens
agtacacacaacgtaggcgg

SEQ ID NO: 32879 - DNA, 20 bp, Rothia mucilaginosa
ggggctggtatacaggtggt

SEQ ID NO: 32880 - DNA, 20 bp, Photobacterium damselae
gcttgaagagattcgagtgt

SEQ ID NO: 32881 - DNA, 20 bp, Oligella ureolytica
tttctcaacgaagaaaagtc

SEQ ID NO: 32882 - DNA, 20 bp, Salmonella enteritidis
tgacatccacagaagaatcc

SEQ ID NO: 32883 - DNA, 20 bp, Clostridium difficile
ggaatcaataactggggtga

SEQ ID NO: 32884 - DNA, 20 bp, Tissierella praeacuta
cctgccttttacaaagggat

SEQ ID NO: 32885 - DNA, 20 bp, Alicyclobacillus acidocaldarius
gtaccgtctcgcatggggct

SEQ ID NO: 32886 - DNA, 20 bp, Anaerobiospirillum succiniciproducens
ttgggttccgcagctaacgc

SEQ ID NO: 32887 - DNA, 20 bp, Streptococcus pyogenes
gaactggtgcttgcaccggt

SEQ ID NO: 32888 - DNA, 20 bp, Alicyclobacillus acidocaldarius
gctcctctctcagcggccca

SEQ ID NO: 32889 - DNA, 20 bp, Brevibacillus brevis
ttttcctctcatgaggaaaa

SEQ ID NO: 32890 - DNA, 20 bp, Bacteroides merdae
ggtcccgcatgggaatattt

SEQ ID NO: 32891 - DNA, 20 bp, Bacteroides uniformis
cggcgacgtgatgctaatcc

SEQ ID NO: 32892 - DNA, 20 bp, Prevotella denticola
gcattgagtgcttgcactct

SEQ ID NO: 32893 - DNA, 20 bp, Clostridium botulinum
ataagacgcaagaccgtgag

SEQ ID NO: 32894 - DNA, 20 bp, Enterococcus cecorum
atgagagtggaaagttcatc

SEQ ID NO: 32895 - DNA, 20 bp, Haemophilus actinemycetemcomitans
ccaaccagcgatggggagtg

SEQ ID NO: 32896 - DNA, 20 bp, Clostridium sordellii
gcttttatatcaaagctttt

SEQ ID NO: 32897 - DNA, 20 bp, Bacteroides fragilis
tgcagtggaatgatgtggaa

SEQ ID NO: 32898 - DNA, 20 bp, Neisseria polysaccharea
gcggctgatgacggtacctg

SEQ ID NO: 32899 - DNA, 20 bp, Propionibacterium acnes
ttgtggggtgctcgagtggc

SEQ ID NO: 32900 - DNA, 20 bp, Actinomyces meyeri
gggttggtggaaagggtttt

SEQ ID NO: 32901 - DNA, 20 bp, Acinetobacter genospecies 3
gagagaggtagcttgctact

SEQ ID NO: 32902 - DNA, 20 bp, Streptococcus thoraltensis
aaagctctgttataagcgaa

SEQ ID NO: 32903 - DNA, 20 bp, Eubacterium moniliforme
gtaggggtttcaacacctct

SEQ ID NO: 32904 - DNA, 20 bp, Prevotella melaninogenica
ctgtgggataacctgccgaa

SEQ ID NO: 32905 - DNA, 20 bp, Pseudomonas citronellolis
cataactgcctgactagagt

SEQ ID NO: 32906 - DNA, 20 bp, Moraxella lacunata
taatacctacaagccctgac

SEQ ID NO: 32907 - DNA, 20 bp, Prevotella melaninogenica
tggtatcagcggctaagcga

SEQ ID NO: 32908 - DNA, 20 bp, Bacillus lentus
tcttattggttcgctcgact

SEQ ID NO: 32909 - DNA, 20 bp, Comamonas terrigena
taccgcatgagaactgaggt

SEQ ID NO: 32910 - DNA, 20 bp, Porphyromonas endodontalis
tgtaagagtctaagcgaaag

SEQ ID NO: 32911 - DNA, 20 bp, Campylobacter concisus
gatgccattgtggaaagttt

SEQ ID NO: 32912 - DNA, 20 bp, Streptococcus hyovaginalis
ctgtgacggtagcttatcag

SEQ ID NO: 32913 - DNA, 20 bp, Proteus mirabilis
gcactatcggatgaacccat

SEQ ID NO: 32914 - DNA, 20 bp, Propionibacterium freudenreichii
gaaagctttatgcggtcagg

SEQ ID NO: 32915 - DNA, 20 bp, Campylobacter rectus
gagatcaagaagaataccca

SEQ ID NO: 32916 - DNA, 20 bp, Bacteroides uniformis
cctgccgatgactcggggat

SEQ ID NO: 32917 - DNA, 20 bp, Porphyromonas endodontalis
gaaaagctgcagctcaactg

SEQ ID NO: 32918 - DNA, 20 bp, Alicyclobacillus acidocaldarius
tgtgtccccccaacacctag

SEQ ID NO: 32919 - DNA, 20 bp, Corynebacterium auris
cgcgtgtgcgatactgtgag

SEQ ID NO: 32920 - DNA, 20 bp, Tetragenococcus halophilus
aagctctgttgtcagcaaag

SEQ ID NO: 32921 - DNA, 20 bp, Aerococcus viridans
gtcacttatagatgaccttg

SEQ ID NO: 32922 - DNA, 20 bp, Eggerthella lenta
aaattcgacggtacctgcag

SEQ ID NO: 32923 - DNA, 20 bp, Neisseria lactamica
aaggtcggggttaataccct

SEQ ID NO: 32924 - DNA, 20 bp, Bacillus lentus
tgggattcgctcatgcgtcg

SEQ ID NO: 32925 - DNA, 20 bp, Haemophilus actinemycetemcomitans
ggcgtatacagagggtaacc

SEQ ID NO: 32926 - DNA, 20 bp, Bacillus marinus
tagaggggtcagaggatgtc

SEQ ID NO: 32927 - DNA, 20 bp, Prevotella oralis
caaccggtgatgtgcagcgc

SEQ ID NO: 32928 - DNA, 20 bp, Bacteroides uniformis
cggacgcttaagtcagttgt

SEQ ID NO: 32929 - DNA, 20 bp, Weeksella virosa
ggacagaatgcaaggtgctg

SEQ ID NO: 32930 - DNA, 20 bp, Clostridium butyricum
ccacttcggtggcaggaaga

SEQ ID NO: 32931 - DNA, 20 bp, Streptococcus infantarius
agcatttaacccatgttaga

SEQ ID NO: 32932 - DNA, 20 bp, Listeria monocytogenes
taataccgaatgataaagtg

SEQ ID NO: 32933 - DNA, 20 bp, Prevotella disiens
ataggatggggatgcgtctg

SEQ ID NO: 32934 - DNA, 20 bp, Peptostreptococcus anaerobius
tagttagcctccgaaactgg

SEQ ID NO: 32935 - DNA, 20 bp, Anaerococcus prevotii
taccataagaaaaagccccg

SEQ ID NO: 32936 - DNA, 20 bp, Brevibacillus reuszeri
ggtatgccaatctcttaaaa

SEQ ID NO: 32937 - DNA, 20 bp, Bacillus cereus
gagagcttgctctcaagaag

SEQ ID NO: 32938 - DNA, 20 bp, Propionibacterium freudenreichii
ccgaatatgagcctggcctg

SEQ ID NO: 32939 - DNA, 20 bp, Facklamia hominis
agagaagaacgaccgctaga

SEQ ID NO: 32940 - DNA, 20 bp, Actinomyces turicensis
gctgcagagatgtggtggca

SEQ ID NO: 32941 - DNA, 20 bp, Photobacterium damselae
tgaagagattcgagtgtgcc

SEQ ID NO: 32942 - DNA, 20 bp, Sphingobacterium multivorum
agtgggcggaataagacaag

SEQ ID NO: 32943 - DNA, 20 bp, Bacteroides thetaiotaomicron
aaagttttccacgtgtggaa

SEQ ID NO: 32944 - DNA, 20 bp, Weeksella virosa
taatgacagatttagaaata

SEQ ID NO: 32945 - DNA, 20 bp, Facklamia ignava
cttgttcctttcaacgcgag

SEQ ID NO: 32946 - DNA, 20 bp, Campylobacter rectus
ccagagatggaagagtgtct

SEQ ID NO: 32947 - DNA, 20 bp, Clostridium tetani
aaactttaaccaaaggagta

SEQ ID NO: 32948 - DNA, 20 bp, Prevotella melaninogenica
gcgtaggccggagattaagt

SEQ ID NO: 32949 - DNA, 20 bp, Oligella urethralis
ccactcgccatcaagagagc

SEQ ID NO: 32950 - DNA, 20 bp, Acinetobacter radioresistens
ttaatactttaggatagtgg

SEQ ID NO: 32951 - DNA, 20 bp, Clostridium ramosum
cttcagtaagccatagaaac

SEQ ID NO: 32952 - DNA, 20 bp, Bacteroides thetaiotaomicron
agttttccacgtgtggaatt

SEQ ID NO: 32953 - DNA, 20 bp, Oligella ureolytica
ggctaataccttaagatgct

SEQ ID NO: 32954 - DNA, 20 bp, Brevibacillus agri
ggcttttcgctatcactggg

SEQ ID NO: 32955 - DNA, 20 bp, Streptococcus equi
gcgtaggtaacctagcttat

SEQ ID NO: 32956 - DNA, 20 bp, Propionibacterium granulosum
tcgaagccggtggcctaaca

SEQ ID NO: 32957 - DNA, 20 bp, Eggerthella lenta
gcctctcaagcgggatctct

SEQ ID NO: 32958 - DNA, 20 bp, Veillonella atypica
ctacaatgggagttaataga

SEQ ID NO: 32959 - DNA, 20 bp, Myroides odoratus
ttatttgacggtaccgtaag

SEQ ID NO: 32960 - DNA, 20 bp, Pediococcus pentosaceus
aacgaacttccgttaattga

SEQ ID NO: 32961 - DNA, 20 bp, Pediococcus pentosaceus
cgaacgaacttccgttaatt

SEQ ID NO: 32962 - DNA, 20 bp, Streptococcus ratti
attaattattgcatgataat

SEQ ID NO: 32963 - DNA, 20 bp, Proteus penneri
acctttatcaattgacgtta

SEQ ID NO: 32964 - DNA, 20 bp, Bacteroides ovatus
aagtagcgtgaaggatgaag

SEQ ID NO: 32965 - DNA, 20 bp, Prevotella melaninogenica
agactaataccgcatagtct

SEQ ID NO: 32966 - DNA, 20 bp, Facklamia ignava
gtagagtaactgttataggt

SEQ ID NO: 32967 - DNA, 20 bp, Clostridium botulinum
ttatcaaagatttattgctt

SEQ ID NO: 32968 - DNA, 20 bp, Veillonella atypica
gtcggaagtgcccaaagccg

SEQ ID NO: 32969 - DNA, 20 bp, Morganella morganii
gcgaaggcaagcggaactca

SEQ ID NO: 32970 - DNA, 20 bp, Campylobacter curvus
gaaatttgacggtacccaag

SEQ ID NO: 32971 - DNA, 20 bp, Myroides odoratus
ggaatagcccggagaaattc

SEQ ID NO: 32972 - DNA, 20 bp, Proteus vulgaris
cggggaggaaggtgataaag

SEQ ID NO: 32973 - DNA, 20 bp, Aerococcus christensenii
gcttgcactttcaaagttag

SEQ ID NO: 32974 - DNA, 20 bp, Bacillus pallidus
tgttagagggtatccaccct

SEQ ID NO: 32975 - DNA, 20 bp, Bacillus megaterium
tgggagatgattgaaagatg

SEQ ID NO: 32976 - DNA, 20 bp, Lactococcus lactis
cacaagttttaagtttgaaa

SEQ ID NO: 32977 - DNA, 20 bp, Aerococcus urinae
attggagagtaactgctcca

SEQ ID NO: 32978 - DNA, 20 bp, Vibrio cholerae
ttcaaatgcgattcctaggt

SEQ ID NO: 32979 - DNA, 20 bp, Bacillus cereus
tctcaagaagttagcggcgg

SEQ ID NO: 32980 - DNA, 20 bp, Prevotella bivia
tgtgcaaatacgatctaatc

SEQ ID NO: 32981 - DNA, 20 bp, Gemella bergeri
aaccgaaagggaggagccgg

SEQ ID NO: 32982 - DNA, 20 bp, Facklamia ignava
cgcatgactggaatgggaaa

SEQ ID NO: 32983 - DNA, 20 bp, Streptococcus equi
tccatcatgtgacggtaact

SEQ ID NO: 32984 - DNA, 20 bp, Neisseria elongata
gggtaatgggggataaccaa

SEQ ID NO: 32985 - DNA, 20 bp, Facklamia hominis
cgctagagtaactgttagcg

SEQ ID NO: 32986 - DNA, 20 bp, Paenibacillus amylolyticus
ggtgtttaaggccaaggctc

SEQ ID NO: 32987 - DNA, 20 bp, Bacteroides capilosus
ggaagcaatgccgcgaggtg

SEQ ID NO: 32988 - DNA, 20 bp, Bacteroides distasonis
aggttctatggatcgtaaac

SEQ ID NO: 32989 - DNA, 20 bp, Clostridium subterminale
ggcgtgcctaacacatgcaa

SEQ ID NO: 32990 - DNA, 20 bp, Aerococcus viridans
acattctggtctgttactga

SEQ ID NO: 32991 - DNA, 20 bp, Corynebacterium propinquum
gtcgtctgtgaaattccaca

SEQ ID NO: 32992 - DNA, 20 bp, Anaerococcus prevotii
cttagacattgggatagcct

SEQ ID NO: 32993 - DNA, 20 bp, Helcococcus ovis
ccgaagccgtcgagctaacc

SEQ ID NO: 32994 - DNA, 20 bp, Corynebacterium amycolatum
acaggatcgcgccagagatg

SEQ ID NO: 32995 - DNA, 20 bp, Tetragenococcus halophilus
acacgtggggaacctatcca

SEQ ID NO: 32996 - DNA, 20 bp, Streptococcus thermophilus
gcaccgagcggatgagttgc

SEQ ID NO: 32997 - DNA, 20 bp, Streptococcus bovis
agcttgctagagtagaagga

SEQ ID NO: 32998 - DNA, 20 bp, Veillonella parvula
gcggatcagtcagtctgtct

SEQ ID NO: 32999 - DNA, 20 bp, Enterococcus raffinosus
gaaagaaaaggagtggcgaa

SEQ ID NO: 33000 - DNA, 20 bp, Haemophilus influenzae
tttcggtattgaggaaggtt

SEQ ID NO: 33001 - DNA, 20 bp, Lactococcus lactis
tgcaagttgagcgctgaagg

SEQ ID NO: 33002 - DNA, 20 bp, Streptococcus anginosus
gagtgtgagaatggaaagtt

SEQ ID NO: 33003 - DNA, 20 bp, Bacillus coagulans
caatcccagaaaaccattcc

SEQ ID NO: 33004 - DNA, 20 bp, Bacteroides uniformis
acggcgacgtgatgctaatc

SEQ ID NO: 33005 - DNA, 20 bp, Facklamia ignava
gcatgactggaatgggaaag

SEQ ID NO: 33006 - DNA, 20 bp, Oligella urethralis
acttttcttcgttgagaaaa

SEQ ID NO: 33007 - DNA, 20 bp, Alicyclobacillus acidocaldarius
gccgggggcttcctcactcg

SEQ ID NO: 33008 - DNA, 20 bp, Cardiobacterium hominis
aacctagagacaggtgttgc

SEQ ID NO: 33009 - DNA, 20 bp, Corynebacterium urealyticum
gggatttttcacgatttccg

SEQ ID NO: 33010 - DNA, 20 bp, Prevotella oris
cggggataaagtgagggacg

SEQ ID NO: 33011 - DNA, 20 bp, Haemophilus segnis
agactaggtgattgacgtta

SEQ ID NO: 33012 - DNA, 20 bp, Granulicatella adiacens
gcttctgctgatggatggac

SEQ ID NO: 33013 - DNA, 20 bp, Prevotella loescheii
attagccagacggcggggta

SEQ ID NO: 33014 - DNA, 20 bp, Clostridium botulinum
aacttataaaacctatctca

SEQ ID NO: 33015 - DNA, 20 bp, Pseudomonas citronellolis
taggtggtttggtaagatgg

SEQ ID NO: 33016 - DNA, 20 bp, Leptotrichia buccalis
gtgctggagaggtggacgga

SEQ ID NO: 33017 - DNA, 20 bp, Aerococcus viridans
gagcgaacagatgaagtgct

SEQ ID NO: 33018 - DNA, 20 bp, Photobacterium damselae
ttaagggcggcgagcggcgg

SEQ ID NO: 33019 - DNA, 20 bp, Haemophilus actinemycetemcomitans
taggcggacctttaagtgag

SEQ ID NO: 33020 - DNA, 20 bp, Streptococcus canis
ggagtggaaaacccattatg

SEQ ID NO: 33021 - DNA, 20 bp, Porphyromonas endodontalis
atgaatactagatttttgcg

SEQ ID NO: 33022 - DNA, 20 bp, Streptococcus agalactiae
aagtagaacgctgaggtttg

SEQ ID NO: 33023 - DNA, 20 bp, Bacteroides fragilis
ggtggactggtaagtcagtt

SEQ ID NO: 33024 - DNA, 20 bp, Bacteroides stercoris
cgtggtgctaatcccgaaag

SEQ ID NO: 33025 - DNA, 20 bp, Propionibacterium avidum
atgcctccttgtggggctgg

SEQ ID NO: 33026 - DNA, 20 bp, Campylobacter rectus
ttgttgcttcgctagtcgag

SEQ ID NO: 33027 - DNA, 20 bp, Anaerococcus tetradius
gaggtatggaagggaaagtg

SEQ ID NO: 33028 - DNA, 20 bp, Microbacterium hominis
cttgacatacaccagaacac

SEQ ID NO: 33029 - DNA, 20 bp, Abiotrophia defectiva
tgttatgcgtgtgacggtat

SEQ ID NO: 33030 - DNA, 20 bp, Atopobium parvulum
ttcttccgtgccgcagctaa

SEQ ID NO: 33031 - DNA, 20 bp, Weeksella virosa
tagcgcctgatccagccatc

SEQ ID NO: 33032 - DNA, 20 bp, Clostridium limosum
gtcggggtttcaatacttcg

SEQ ID NO: 33033 - DNA, 20 bp, Enterobacter sakazakii
tggtcagcttgagtctcgta

SEQ ID NO: 33034 - DNA, 20 bp, Facklamia languida
gcagcgaactcgcaagggca

SEQ ID NO: 33035 - DNA, 20 bp, Prevotella melaninogenica
caaatcttgaaagccggtcc

SEQ ID NO: 33036 - DNA, 20 bp, Bacteroides merdae
ggtcaatggccgagaggctg

SEQ ID NO: 33037 - DNA, 20 bp, Propionibacterium freudenreichii
gtactggaagcgttcagaga

SEQ ID NO: 33038 - DNA, 20 bp, Propionibacterium freudenreichii
gtgaggaacgtgcccttgac

SEQ ID NO: 33039 - DNA, 20 bp, Gemella haemolysans
tcttgacatactgtgaggac

SEQ ID NO: 33040 - DNA, 20 bp, Bacteroides distasonis
gaattgccgttgaaactggg

SEQ ID NO: 33041 - DNA, 20 bp, Tetragenococcus halophilus
cagctcaactggggagggtc

SEQ ID NO: 33042 - DNA, 20 bp, Kingella denitrificans
ggggtgcttgcacctgccgg

SEQ ID NO: 33043 - DNA, 20 bp, Listeria monocytogenes
atgccacgcttttgaaagat

SEQ ID NO: 33044 - DNA, 20 bp, Atopobium parvulum
tgttaggtcgggagttaaat

SEQ ID NO: 33045 - DNA, 20 bp, Bacteroides fragilis
ttctttgctggcgaccggcg

SEQ ID NO: 33046 - DNA, 20 bp, Microbacterium hominis
tgcgatcgcatggtcagtag

SEQ ID NO: 33047 - DNA, 20 bp, Neisseria elongata
ttgggcagcttgactgctta

SEQ ID NO: 33048 - DNA, 20 bp, Paenibacillus peoriae
ttagaagcttgcttctaaac

SEQ ID NO: 33049 - DNA, 20 bp, Bacillus pallidus
cgagcggaccgaagggagct

SEQ ID NO: 33050 - DNA, 20 bp, Veillonella atypica
acattgatggacagaaccag

SEQ ID NO: 33051 - DNA, 20 bp, Facklamia ignava
tgagttggggactctagtta

SEQ ID NO: 33052 - DNA, 20 bp, Paenibacillus thiaminolyticus
gggaagaacgctatggagag

SEQ ID NO: 33053 - DNA, 20 bp, Oligella urethralis
gacttttcttcgttgagaaa

SEQ ID NO: 33054 - DNA, 20 bp, Bacteroides uniformis
cgtgatgctaatccctaaag

SEQ ID NO: 33055 - DNA, 20 bp, Burkholderia gladioli
aatcctgagggctaatatcc

SEQ ID NO: 33056 - DNA, 20 bp, Vibrio cholerae
gcactccagcgtctccgcta

SEQ ID NO: 33057 - DNA, 20 bp, Helcococcus ovis
ataccttatgacacttagat

SEQ ID NO: 33058 - DNA, 20 bp, Corynebacterium macginleyi
cggataggaccgcactttag

SEQ ID NO: 33059 - DNA, 20 bp, Arcanobacterium bernardiae
cttcggggttgcagtgggta

SEQ ID NO: 33060 - DNA, 20 bp, Listeria welshimeri
cgcatgccacggctttgaaa

SEQ ID NO: 33061 - DNA, 20 bp, Haemophilus actinemycetemcomitans
gccctggtgcccgaagctaa

SEQ ID NO: 33062 - DNA, 20 bp, Prevotella intermedia
ctctcatatgttatcccgta

SEQ ID NO: 33063 - DNA, 20 bp, Anaerococcus tetradius
tagctcaactatataaagct

SEQ ID NO: 33064 - DNA, 20 bp, Anaerococcus prevotii
atcggaataattcggtgccg

SEQ ID NO: 33065 - DNA, 20 bp, Streptococcus pyogenes
aaaatccaccaagtgacggt

SEQ ID NO: 33066 - DNA, 20 bp, Burkholderia gladioli
cctgagggctaatatccttc

SEQ ID NO: 33067 - DNA, 20 bp, Arcanobacterium pyogenes
tcgaacgatgaagccggggc

SEQ ID NO: 33068 - DNA, 20 bp, Corynebacterium group F
gtacagcgcgtttgctacct

SEQ ID NO: 33069 - DNA, 20 bp, Serratia proteamaculans
gtgttaatagcacattgcat

SEQ ID NO: 33070 - DNA, 20 bp, Leuconostoc lactis
aacctaacaccgcatggtgt

SEQ ID NO: 33071 - DNA, 20 bp, Paenibacillus validus
cttttaagtttggtgtttaa

SEQ ID NO: 33072 - DNA, 20 bp, Bacillus simplex
tggaaagacggtttacgctg

SEQ ID NO: 33073 - DNA, 20 bp, Lactococcus garvieae
ccttcgggacacgggataca

SEQ ID NO: 33074 - DNA, 20 bp, Rahnella aquatilis
ccagagatggcttagtgcct

SEQ ID NO: 33075 - DNA, 20 bp, Pasteurella multocida
agcatcattgacgttaatta

SEQ ID NO: 33076 - DNA, 20 bp, Haemophilus actinemycetemcomitans
ttggggattggggtttagcc

SEQ ID NO: 33077 - DNA, 20 bp, Propionibacterium freudenreichii
atgcggtcagggatcgtctc

SEQ ID NO: 33078 - DNA, 20 bp, Acinetobacter johnsonii
tggattaatactctaggata

SEQ ID NO: 33079 - DNA, 20 bp, Corynebacterium jeikeium
tacgattcccgtgccgtagc

SEQ ID NO: 33080 - DNA, 20 bp, Prevotella melaninogenica
ccggagattaagtgtgttgt

SEQ ID NO: 33081 - DNA, 20 bp, Campylobacter rectus
gaattatgacggtacccaag

SEQ ID NO: 33082 - DNA, 20 bp, Bacteroides fragilis
ggcttaaattgcagtggaat

SEQ ID NO: 33083 - DNA, 20 bp, Streptococcus parauberis
actcatgtactaaatttaaa

SEQ ID NO: 33084 - DNA, 20 bp, Prevotella intermedia
tacgggagtgttactgacgc

SEQ ID NO: 33085 - DNA, 20 bp, Prevotella oris
tgaaatgcaggtgctcaacg

SEQ ID NO: 33086 - DNA, 20 bp, Arcanobacterium bernardiae
cctttttggttgagggtatg

SEQ ID NO: 33087 - DNA, 20 bp, Paenibacillus thiaminolyticus
ccagggaagaacgctatgga

SEQ ID NO: 33088 - DNA, 20 bp, Corynebacterium glucuronolyticum
atccaggggcttaacttttg

SEQ ID NO: 33089 - DNA, 20 bp, Streptococcus porcinus
tagaagacccatgtcatcta

SEQ ID NO: 33090 - DNA, 20 bp, Morganella morganii
cccgggaattgcatctgata

SEQ ID NO: 33091 - DNA, 20 bp, Actinomyces naeslundii
ggccttttccgggtcttccg

SEQ ID NO: 33092 - DNA, 20 bp, Propionibacterium acnes
gtgcctcttttggggtcggt

SEQ ID NO: 33093 - DNA, 20 bp, Proteus vulgaris
ctacggaccaaagcaggggc

SEQ ID NO: 33094 - DNA, 20 bp, Brevibacillus borstelensis
taggcaacctgcccgtaagc

SEQ ID NO: 33095 - DNA, 20 bp, Corynebacterium urealyticum
taggaccaatctttagtgtg

SEQ ID NO: 33096 - DNA, 20 bp, Photobacterium damselae
aagcttgaagagattcgagt

SEQ ID NO: 33097 - DNA, 20 bp, Streptococcus infantarius
ataacagcatttaacccatg

SEQ ID NO: 33098 - DNA, 20 bp, Helcococcus kunzii
cctcgtgagagcaagcgaat

SEQ ID NO: 33099 - DNA, 20 bp, Streptococcus sp.
catgataattaattgaaaga

SEQ ID NO: 33100 - DNA, 20 bp, Myroides odoratus
ttcggactgagtggctaagc

SEQ ID NO: 33101 - DNA, 20 bp, Cellulosimicrobium cellulans
ttgacttcgggataactccg

SEQ ID NO: 33102 - DNA, 20 bp, Acinetobacter haemolyticus
agggtagcttgctacctaac

SEQ ID NO: 33103 - DNA, 20 bp, Bacillus sp
tactggataacttttctctc

SEQ ID NO: 33104 - DNA, 20 bp, Methylobacterium mesophilicum
ggggtgcttgcaccgcagta

SEQ ID NO: 33105 - DNA, 20 bp, Pseudoramibacter alactolyticus
tcaaccggtgaagtgcattg

SEQ ID NO: 33106 - DNA, 20 bp, Clostridium ramosum
gcatggtgaccgtattaaaa

SEQ ID NO: 33107 - DNA, 20 bp, Pasteurella aerogenes
taatcgattgacgttaatca

SEQ ID NO: 33108 - DNA, 20 bp, Bacteroides uniformis
tatacgggaataaagtgagg

SEQ ID NO: 33109 - DNA, 20 bp, Porphyromonas endodontalis
gatgaatactagatttttgc

SEQ ID NO: 33110 - DNA, 20 bp, Streptococcus suis
tggaaagtttctcacttgac

SEQ ID NO: 33111 - DNA, 20 bp, Aeromonas schubertii
acgagggtgccttcgggaat

SEQ ID NO: 33112 - DNA, 20 bp, Prevotella corporis
actcctgtgaaggtgctgca

SEQ ID NO: 33113 - DNA, 20 bp, Burkholderia gladioli
aatcctggagagatctggga

SEQ ID NO: 33114 - DNA, 20 bp, Bacteroides fragilis
ggagcgtaggtggactggta

SEQ ID NO: 33115 - DNA, 20 bp, Prevotella intermedia
agccatgcgactctcatatg

SEQ ID NO: 33116 - DNA, 20 bp, Propionibacterium freudenreichii
aaactggtggtaatcccgaa

SEQ ID NO: 33117 - DNA, 20 bp, Anaerococcus tetradius
cttttaaaactgctcatctt

SEQ ID NO: 33118 - DNA, 20 bp, Corynebacterium renale
tacaccagaccgggccagag

SEQ ID NO: 33119 - DNA, 20 bp, Facklamia ignava
gttgcattggaaactggtca

SEQ ID NO: 33120 - DNA, 20 bp, Leuconostoc lactis
aacaccgcatggtgtagggt

SEQ ID NO: 33121 - DNA, 20 bp, Bacillus pallidus
gcgaatcccaaaaaaccact

SEQ ID NO: 33122 - DNA, 20 bp, Staphylococcus sp.
catgcggttcgaaatattat

SEQ ID NO: 33123 - DNA, 20 bp, Fusobacterium varium
aaacctgcgagggtaagcta

SEQ ID NO: 33124 - DNA, 20 bp, Anaerococcus tetradius
tataaagcttttaaaactgt

SEQ ID NO: 33125 - DNA, 20 bp, Tetragenococcus halophilus
agcgtcactgatggctggtc

SEQ ID NO: 33126 - DNA, 20 bp, Moraxella osloensis
ttgacatagtgagaatcttt

SEQ ID NO: 33127 - DNA, 20 bp, Bacillus pallidus
ccgaagggagcttgctcctt

SEQ ID NO: 33128 - DNA, 20 bp, Bacteroides thetaiotaomicron
ccaccaagactacgatggat

SEQ ID NO: 33129 - DNA, 20 bp, Bacillus coagulans
accagatagttttttcctcc

SEQ ID NO: 33130 - DNA, 20 bp, Streptococcus dysgalactiae
agaagaatgatggtgggagt

SEQ ID NO: 33131 - DNA, 20 bp, Tissierella praeacuta
ggtacaggggacacaggtgg

SEQ ID NO: 33132 - DNA, 20 bp, Anaerococcus tetradius
cggataagcaagttagaagt

SEQ ID NO: 33133 - DNA, 20 bp, Clostridium tetani
atcgtaaaaccctgttttct

SEQ ID NO: 33134 - DNA, 20 bp, Brevibacillus brevis
aatccttttcctctcatgag

SEQ ID NO: 33135 - DNA, 20 bp, Veillonella dispar
ttagaaggattgacggtacc

SEQ ID NO: 33136 - DNA, 20 bp, Streptococcus porcinus
tctacttaaaaggggcaact

SEQ ID NO: 33137 - DNA, 20 bp, Acinetobacter lwoffii
tactctagttaatacctagg

SEQ ID NO: 33138 - DNA, 20 bp, Clostridium innocuum
ggagtgcagaagagggcgat

SEQ ID NO: 33139 - DNA, 20 bp, Staphylococcus hyicus
ggaggacaaaatgacaggtg

SEQ ID NO: 33140 - DNA, 20 bp, Fusobacterium mortiferum
agtcgcaaacctgcgagggg

SEQ ID NO: 33141 - DNA, 20 bp, Streptococcus canis
tagtctaaggagttgcgaac

SEQ ID NO: 33142 - DNA, 20 bp, Anaerococcus tetradius
acgccgcgtgatttagaagg

SEQ ID NO: 33143 - DNA, 20 bp, Ignavigranum ruoffiae
tgccctttagcgggggataa

SEQ ID NO: 33144 - DNA, 20 bp, Streptococcus pyogenes
acgctgagaactggtgcttg

SEQ ID NO: 33145 - DNA, 20 bp, Corynebacterium afermentans
cgctcctcagcgtcagttcg

SEQ ID NO: 33146 - DNA, 20 bp, Campylobacter sputorum
aaataaaaagttataaatat

SEQ ID NO: 33147 - DNA, 20 bp, Myroides odoratus
agaaattcggattaatgctc

SEQ ID NO: 33148 - DNA, 20 bp, Dermacoccus nishinomiyaensis
gaaagtttttgtggtggggg

SEQ ID NO: 33149 - DNA, 20 bp, Prevotella loescheii
cgtcttcagttgccatcggg

SEQ ID NO: 33150 - DNA, 20 bp, Moraxella  catarrhalis
cttttaaagacttagtgacg

SEQ ID NO: 33151 - DNA, 20 bp, Methylobacterium mesophilicum
ggtccacttcggtggcgcgc

SEQ ID NO: 33152 - DNA, 19 bp, Chryseobacterium meningosepticum
taaaactagtaactagggc

SEQ ID NO: 33153 - DNA, 20 bp, Staphylococcus succinus
gttacttacgcatttgttct

SEQ ID NO: 33154 - DNA, 20 bp, Propionibacterium freudenreichii
aatatgagcctggcctgcat

SEQ ID NO: 33155 - DNA, 20 bp, Clostridium tetani
tttcctggactgtaactgac

SEQ ID NO: 33156 - DNA, 20 bp, Helcococcus kunzii
atacccgaagtcgtcgagct

SEQ ID NO: 33157 - DNA, 20 bp, Facklamia ignava
aatcctacgggacaagaaga

SEQ ID NO: 33158 - DNA, 20 bp, Clostridium innocuum
ttccaaaaagacttagtggc

SEQ ID NO: 33159 - DNA, 20 bp, Chryseobacterium meningosepticum
taaacctacttacgtgtaag

SEQ ID NO: 33160 - DNA, 20 bp, Bacillus schlegellii
atgggcctttcccgcgaggg

SEQ ID NO: 33161 - DNA, 20 bp, Actinomyces neuii
gggaaaggttttttctggat

SEQ ID NO: 33162 - DNA, 20 bp, Bacillus smithii
ctaatcccaaaaaaccattc

SEQ ID NO: 33163 - DNA, 20 bp, Anaerococcus prevotii
aggtgtaaaaggcagtagct

SEQ ID NO: 33164 - DNA, 20 bp, Actinomyces naeslundii
taaccgcatgaaagtgtggc

SEQ ID NO: 33165 - DNA, 20 bp, Prevotella intermedia
gactctcatatgttatcccg

SEQ ID NO: 33166 - DNA, 20 bp, Campylobacter sputorum
gggatgaggctatattgtat

SEQ ID NO: 33167 - DNA, 20 bp, Leptotrichia buccalis
tgctggagaggtggacggaa

SEQ ID NO: 33168 - DNA, 20 bp, Actinomyces bovis
agaacgataggaagagggaa

SEQ ID NO: 33169 - DNA, 20 bp, Atopobium parvulum
attgcacccgaagtcgtcgg

SEQ ID NO: 33170 - DNA, 20 bp, Bacteroides thetaiotaomicron
acagaaggccgctacctggt

SEQ ID NO: 33171 - DNA, 20 bp, Weeksella virosa
ccaaggcttaaatgcataat

SEQ ID NO: 33172 - DNA, 20 bp, Leptotrichia buccalis
aagaacttgccctgcagaca

SEQ ID NO: 33173 - DNA, 20 bp, Peptostreptococcus anaerobius
aaccgtagttagcctccgaa

SEQ ID NO: 33174 - DNA, 20 bp, Granulicatella adiacens
tctgctgatggatggacccg

SEQ ID NO: 33175 - DNA, 20 bp, Prevotella corporis
ggtcatgccgggcactctgc

SEQ ID NO: 33176 - DNA, 20 bp, Clostridium paraputrificum
ttaccatgtaatgtgggaag

SEQ ID NO: 33177 - DNA, 20 bp, Clostridium ramosum
aaagagggagcaggcggcag

SEQ ID NO: 33178 - DNA, 20 bp, Bacillus pumilus
accgcatggttcaaggatga

SEQ ID NO: 33179 - DNA, 20 bp, Corynebacterium group F
cgtttgtgtaagtccacagc

SEQ ID NO: 33180 - DNA, 20 bp, Methylobacterium mesophilicum
ccacttcggtggcgcgcaca

SEQ ID NO: 33181 - DNA, 20 bp, Tissierella praeacuta
gcctttagttgctaacagat

SEQ ID NO: 33182 - DNA, 20 bp, Clostridium botulinum
caataagacgcaagaccgtg

SEQ ID NO: 33183 - DNA, 20 bp, Aerococcus viridans
acgtaaggaatctacctata

SEQ ID NO: 33184 - DNA, 20 bp, Moraxella osloensis
taagcagggaggagaggcta

SEQ ID NO: 33185 - DNA, 20 bp, Facklamia sourekii
aagcactgttattagagaag

SEQ ID NO: 33186 - DNA, 20 bp, Bacillus alcalophilus
tcttttgtaaaagatggctc

SEQ ID NO: 33187 - DNA, 20 bp, Peptostreptococcus anaerobius
aagtcgtcgaaggtggcgtc

SEQ ID NO: 33188 - DNA, 20 bp, Anaerococcus tetradius
gcggcctagtaagttagaag

SEQ ID NO: 33189 - DNA, 20 bp, Anaerococcus tetradius
aggcggcctagtaagttaga

SEQ ID NO: 33190 - DNA, 20 bp, Alicyclobacillus acidocaldarius
tccagacttgctcgaccgcc

SEQ ID NO: 33191 - DNA, 20 bp, Bacteroides vulgatus
cagagggccgctaccacgcg

SEQ ID NO: 33192 - DNA, 20 bp, Campylobacter curvus
aataccaaaccggttatggt

SEQ ID NO: 33193 - DNA, 20 bp, Nocardia asteroides
tgcttcggtaactgacctag

SEQ ID NO: 33194 - DNA, 20 bp, Propionibacterium freudenreichii
ggaagtgaaattccagggct

SEQ ID NO: 33195 - DNA, 20 bp, Bacillus sp
aataccggataatacgtttt

SEQ ID NO: 33196 - DNA, 20 bp, Streptococcus dysgalactiae
gagaagaatgatggtgggag

SEQ ID NO: 33197 - DNA, 20 bp, Yersinia ruckeri
taatagcactgaacattgac

SEQ ID NO: 33198 - DNA, 20 bp, Bacteroides uniformis
tgggtgtcttgagtacagta

SEQ ID NO: 33199 - DNA, 20 bp, Staphylococcus succinus
agccatgatcaaactactat

SEQ ID NO: 33200 - DNA, 20 bp, Bacteroides stercoris
acggcgacgtggtgctaatc

SEQ ID NO: 33201 - DNA, 20 bp, Clostridium butyricum
agtgagcaaaactataaaac

SEQ ID NO: 33202 - DNA, 20 bp, Listeria monocytogenes
gataaagtgtggcgcatgcc

SEQ ID NO: 33203 - DNA, 20 bp, Finegoldia magna
cgtaaagcattggaaactga

SEQ ID NO: 33204 - DNA, 20 bp, Pasteurella multocida
cctcttggccacctgccata

SEQ ID NO: 33205 - DNA, 20 bp, Lactococcus lactis
gtggaaagctcatcaagtga

SEQ ID NO: 33206 - DNA, 20 bp, Kocuria kristinae
cggatcgttccagagatggt

SEQ ID NO: 33207 - DNA, 20 bp, Atopobium parvulum
cgggggctcaacccccgctc

SEQ ID NO: 33208 - DNA, 20 bp, Anaerococcus prevotii
agatataccctcttcttcgg

SEQ ID NO: 33209 - DNA, 20 bp, Budvicia aquatica
gatttggaggttgtgggcat

SEQ ID NO: 33210 - DNA, 20 bp, Pseudoramibacter alactolyticus
tacccaatgaggaagtcccg

SEQ ID NO: 33211 - DNA, 20 bp, Bacteroides fragilis
tttatataagaataaagtgc

SEQ ID NO: 33212 - DNA, 20 bp, Brevibacillus choshinensis
gagagtgcgcgaatccctta

SEQ ID NO: 33213 - DNA, 20 bp, Haemophilus ducreyi
tttgggggttggtctttaag

SEQ ID NO: 33214 - DNA, 20 bp, Paenibacillus macerans
tgtttaagtctggtgtataa

SEQ ID NO: 33215 - DNA, 20 bp, Delftia acidovorans
tgttgggaattagttttctc

SEQ ID NO: 33216 - DNA, 20 bp, Facklamia ignava
tgggaaagacggcttcggct

SEQ ID NO: 33217 - DNA, 20 bp, Cardiobacterium hominis
tttctgggtcgatactgacg

SEQ ID NO: 33218 - DNA, 20 bp, Clostridium ramosum
aagagggagcaggcggcagc

SEQ ID NO: 33219 - DNA, 20 bp, Haemophilus haemolyticus
cgtatacagagggtggcgat

SEQ ID NO: 33220 - DNA, 20 bp, Clostridium glycolicum
tcatacacatggataacata

SEQ ID NO: 33221 - DNA, 20 bp, Acinetobacter lwoffii
aatacctagggatagtggac

SEQ ID NO: 33222 - DNA, 20 bp, Campylobacter curvus
ttgttgctaagctagtcttg

SEQ ID NO: 33223 - DNA, 20 bp, Bacillus lentus
gcttcttattggttcgctcg

SEQ ID NO: 33224 - DNA, 20 bp, Campylobacter rectus
gaggcagtaatgcacctaac

SEQ ID NO: 33225 - DNA, 20 bp, Chryseobacterium meningosepticum
acgtgtaagtagctgaaggt

SEQ ID NO: 33226 - DNA, 20 bp, Gemella sanguinis
ggaagaatgattgtatagta

SEQ ID NO: 33227 - DNA, 20 bp, Leptotrichia buccalis
tgccgaagctaatgcgataa

SEQ ID NO: 33228 - DNA, 20 bp, Paenibacillus macerans
cttgcactcctgagagttag

SEQ ID NO: 33229 - DNA, 20 bp, Corynebacterium auris
gtgagcctcttccacggggt

SEQ ID NO: 33230 - DNA, 20 bp, Ochrobactrum intermedium
tccagccatgccgcgtgagt

SEQ ID NO: 33231 - DNA, 20 bp, Brevundimonas vesicularis
cttgagtatgagagaggtgt

SEQ ID NO: 33232 - DNA, 20 bp, Anaerococcus tetradius
tatataaagcttttaaaact

SEQ ID NO: 33233 - DNA, 20 bp, Peptoniphilus indolicus
ggcgacttactggtcacaaa

SEQ ID NO: 33234 - DNA, 20 bp, Weissella paramesenteroides
aagaacggcactgagagtaa

SEQ ID NO: 33235 - DNA, 20 bp, Corynebacterium afermentans
ggtcgcagctcgtatccggt

SEQ ID NO: 33236 - DNA, 20 bp, Bacteroides stercoris
cacgtgtggctttttgtatg

SEQ ID NO: 33237 - DNA, 20 bp, Peptoniphilus indolicus
agaacatgaagtcggagttg

SEQ ID NO: 33238 - DNA, 20 bp, Leptotrichia buccalis
ctgtgcttgcacagcctagc

SEQ ID NO: 33239 - DNA, 20 bp, Streptococcus hyovaginalis
gaaagtttactctgtgacgg

SEQ ID NO: 33240 - DNA, 20 bp, Prevotella bivia
agggataacccagcgaaagt

SEQ ID NO: 33241 - DNA, 20 bp, Oligella urethralis
taaggtattagcctaagact

SEQ ID NO: 33242 - DNA, 20 bp, Tissierella praeacuta
ttaataccttatgacactta

SEQ ID NO: 33243 - DNA, 20 bp, Leclercia adecarboxylata
ctggaactgagacacggcca

SEQ ID NO: 33244 - DNA, 20 bp, Corynebacterium afermentans
ttctttccagctactgacca

SEQ ID NO: 33245 - DNA, 20 bp, Ralstonia paucula
ccgaaaggcctcgcgcagca

SEQ ID NO: 33246 - DNA, 20 bp, Actinomyces bovis
agtttactaggagggagccg

SEQ ID NO: 33247 - DNA, 20 bp, Leuconostoc argentinum
atcgcatgatacaaagttga

SEQ ID NO: 33248 - DNA, 20 bp, Veillonella atypica
atggaagcttgcttctatca

SEQ ID NO: 33249 - DNA, 20 bp, Paenibacillus glucanolyticus
gccaatcctataaaagccag

SEQ ID NO: 33250 - DNA, 20 bp, Chromobacterium violaceum
cggtaacagggtgcttgcac

SEQ ID NO: 33251 - DNA, 20 bp, Shewanella algae
cttgcgctgatggataagcc

SEQ ID NO: 33252 - DNA, 20 bp, Aerococcus viridans
tggaagaagattgaaagacg

SEQ ID NO: 33253 - DNA, 20 bp, Streptococcus gordonii
gtagcttgctacaccataga

SEQ ID NO: 33254 - DNA, 20 bp, Brevibacillus agri
aaagatggcttttcgctatc

SEQ ID NO: 33255 - DNA, 20 bp, Paenibacillus larvae
aacttgcggaaacgtgagct

SEQ ID NO: 33256 - DNA, 20 bp, Corynebacterium urealyticum
caatggtcgatacagtgggt

SEQ ID NO: 33257 - DNA, 20 bp, Facklamia ignava
gaacttgttcctttcaacgc

SEQ ID NO: 33258 - DNA, 20 bp, Campylobacter sputorum
agtcctagcttgctaggatg

SEQ ID NO: 33259 - DNA, 20 bp, Weissella paramesenteroides
taagagaagaacggcactga

SEQ ID NO: 33260 - DNA, 20 bp, Acinetobacter genospecies 3
gtagcttgctactgatctta

SEQ ID NO: 33261 - DNA, 20 bp, Bacteroides fragilis
agggagcgtaggtggactgg

SEQ ID NO: 33262 - DNA, 20 bp, Pediococcus inopinatus
gcaagtcggacgcactttcg

SEQ ID NO: 33263 - DNA, 20 bp, Pediococcus dextrinicus
taaacgagtggcggacgggt

SEQ ID NO: 33264 - DNA, 20 bp, Campylobacter curvus
ttcttggggaagaaatttga

SEQ ID NO: 33265 - DNA, 20 bp, Corynebacterium urealyticum
tagtgtggttggtggaaagt

SEQ ID NO: 33266 - DNA, 20 bp, Neisseria lactamica
gggcagcctgactgcttggt

SEQ ID NO: 33267 - DNA, 20 bp, Pediococcus pentosaceus
cttccgttaattgattatga

SEQ ID NO: 33268 - DNA, 20 bp, Streptococcus constellatus
aaaaggtgcaagagcatcac

SEQ ID NO: 33269 - DNA, 20 bp, Bacillus fusiformis
tcccgttgaccactgtagag

SEQ ID NO: 33270 - DNA, 20 bp, Fusobacterium mortiferum
ttcgcatgaaattcatatga

SEQ ID NO: 33271 - DNA, 20 bp, Anaerococcus prevotii
agtcaggtgtaaaaggcagt

SEQ ID NO: 33272 - DNA, 20 bp, Clostridium clostridiiforme
atgaaactcaaaggaattga

SEQ ID NO: 33273 - DNA, 20 bp, Anaerococcus tetradius
gatttagaaggccttcgggt

SEQ ID NO: 33274 - DNA, 20 bp, Helcococcus kunzii
ggcaatacccgaagtcgtcg

SEQ ID NO: 33275 - DNA, 20 bp, Corynebacterium coyleae
ggaccacattttggatggtg

SEQ ID NO: 33276 - DNA, 20 bp, Bacillus sp
gacggccctagagataggga

SEQ ID NO: 33277 - DNA, 20 bp, Moraxella lacunata
aagcgagcgtaggtggtcat

SEQ ID NO: 33278 - DNA, 20 bp, Abiotrophia defectiva
gcgcatagagtaactgttat

SEQ ID NO: 33279 - DNA, 20 bp, Brochothrix campestris
aataccgaatgtgctgaaca

SEQ ID NO: 33280 - DNA, 20 bp, Methylobacterium mesophilicum
aggcttgctgccggaggatc

SEQ ID NO: 33281 - DNA, 20 bp, Unknown Organism
  oligonucleotide from CDC group EF-4B
tacactttgagaaggaaagc

SEQ ID NO: 33282 - DNA, 20 bp, Bacteroides stercoris
gtgctaatcccgaaagcctc

SEQ ID NO: 33283 - DNA, 20 bp, Corynebacterium coyleae
ggtgagctaatcgctgtaaa

SEQ ID NO: 33284 - DNA, 20 bp, Dermabacter hominis
ggcccaagctttatgcgggg

SEQ ID NO: 33285 - DNA, 20 bp, Bacillus fusiformis
aagtacagtagtaactggct

SEQ ID NO: 33286 - DNA, 20 bp, Streptococcus canis
gtggaaaacccattatgtga

SEQ ID NO: 33287 - DNA, 20 bp, Alicyclobacillus acidocaldarius
ggcgttattccggcctgaaa

SEQ ID NO: 33288 - DNA, 20 bp, Bacillus flexus
acaagagtaactgcttgtac

SEQ ID NO: 33289 - DNA, 20 bp, Haemophilus ducreyi
aaaggggagcgaatctcaca

SEQ ID NO: 33290 - DNA, 20 bp, Vibrio cholerae
agcgtctccgctagattctc

SEQ ID NO: 33291 - DNA, 20 bp, Peptostreptococcus anaerobius
aggtggcgtcgataactggg

SEQ ID NO: 33292 - DNA, 20 bp, Kocuria kristinae
gatggttcttcccttttggg

SEQ ID NO: 33293 - DNA, 20 bp, Bacteroides distasonis
aagccacctggcgacaggga

SEQ ID NO: 33294 - DNA, 20 bp, Gemella morbillorum
acggtggcctaacctttaag

SEQ ID NO: 33295 - DNA, 20 bp, Pantoea agglomerans
gaaggcgatggggttaataa

SEQ ID NO: 33296 - DNA, 20 bp, Prevotella corporis
gcttcgatcggtaggggttc

SEQ ID NO: 33297 - DNA, 20 bp, Bacteroides fragilis
gcatcaggaagaaagcttgc

SEQ ID NO: 33298 - DNA, 20 bp, Prevotella intermedia
cgtagcctttcactttctgg

SEQ ID NO: 33299 - DNA, 20 bp, Bacillus oleronius
ttttcttcgcatgagggaga

SEQ ID NO: 33300 - DNA, 20 bp, Streptococcus canis
aaacccattatgtgacggta

SEQ ID NO: 33301 - DNA, 20 bp, Paenibacillus apiarius
aagttgggtgtttaaaccta

SEQ ID NO: 33302 - DNA, 20 bp, Vibrio cholerae
actccagcgtctccgctaga

SEQ ID NO: 33303 - DNA, 20 bp, Peptostreptococcus anaerobius
tagcctccgaaactggaaga

SEQ ID NO: 33304 - DNA, 20 bp, Prevotella oris
ggggaagcttgcttccccgg

SEQ ID NO: 33305 - DNA, 20 bp, Prevotella melaninogenica
gagtacgcacaacgttggcg

SEQ ID NO: 33306 - DNA, 20 bp, Campylobacter lari
ctaagaaccttatagagata

SEQ ID NO: 33307 - DNA, 20 bp, Fusobacterium nucleatum
tgcctacgatgagtaggagg

SEQ ID NO: 33308 - DNA, 20 bp, Prevotella bivia
gttgtgaaatgtaggagctc

SEQ ID NO: 33309 - DNA, 20 bp, Bacteroides forsythus
tctggcgggactgccggcgt

SEQ ID NO: 33310 - DNA, 20 bp, Facklamia hominis
ccggtggcctaactttatga

SEQ ID NO: 33311 - DNA, 20 bp, Pseudoramibacter alactolyticus
cgcatggcaagatcatgaaa

SEQ ID NO: 33312 - DNA, 20 bp, Facklamia ignava
cgcatagttgttccagtcgc

SEQ ID NO: 33313 - DNA, 20 bp, Campylobacter curvus
tgggatgaggctatatcgta

SEQ ID NO: 33314 - DNA, 20 bp, Prevotella loescheii
gtgggtttttgcaggtaccg

SEQ ID NO: 33315 - DNA, 20 bp, Campylobacter sputorum
tcgatagtgaaagatggctt

SEQ ID NO: 33316 - DNA, 20 bp, Aerococcus viridans
ttccgcatggaagaagattg

SEQ ID NO: 33317 - DNA, 20 bp, Clostridium histolyticum
acatcccgagaatcctgtgg

SEQ ID NO: 33318 - DNA, 20 bp, Clostridium butyricum
taccgcatggtacagcaatt

SEQ ID NO: 33319 - DNA, 20 bp, Bacillus mycoides
ataatattttgaactgcata

SEQ ID NO: 33320 - DNA, 20 bp, Gemella sanguinis
gataggaacaaagagaagct

SEQ ID NO: 33321 - DNA, 20 bp, Pediococcus pentosaceus
tggctctgctatcacttctg

SEQ ID NO: 33322 - DNA, 20 bp, Budvicia aquatica
gttgtagttaatagctgcaa

SEQ ID NO: 33323 - DNA, 20 bp, Streptococcus infantarius
gcataacagcatttaaccca

SEQ ID NO: 33324 - DNA, 20 bp, Streptococcus agalactiae
tatttaaaaggagcaattgc

SEQ ID NO: 33325 - DNA, 20 bp, Streptococcus dysgalactiae
aggtgcaactgcatcactat

SEQ ID NO: 33326 - DNA, 20 bp, Helcococcus kunzii
tctgaacaaagcgcagctac

SEQ ID NO: 33327 - DNA, 20 bp, Helcococcus ovis
gtatagtttcttcggaaact

SEQ ID NO: 33328 - DNA, 20 bp, Prevotella melaninogenica
gagtgcttgcactcaatgga

SEQ ID NO: 33329 - DNA, 20 bp, Prevotella intermedia
ggatgcccgctgttagcgcc

SEQ ID NO: 33330 - DNA, 20 bp, Streptococcus suis
agacggatgagttgcgaacg

SEQ ID NO: 33331 - DNA, 20 bp, Eggerthella lenta
tccgccctccgtgccgcagc

SEQ ID NO: 33332 - DNA, 20 bp, Moraxella osloensis
ggaggagaggctaatggtta

SEQ ID NO: 33333 - DNA, 20 bp, Staphylococcus carnosus
ggtaactatgcgcaccttga

SEQ ID NO: 33334 - DNA, 20 bp, Pasteurella trehalosi
aaacgatgttgatttgggga

SEQ ID NO: 33335 - DNA, 20 bp, Leptotrichia buccalis
cctggaaactgtttggctag

SEQ ID NO: 33336 - DNA, 19 bp, Kocuria varians
aggcagccgtaccggaagg

SEQ ID NO: 33337 - DNA, 20 bp, Paenibacillus larvae
taacttgcggaaacgtgagc

SEQ ID NO: 33338 - DNA, 20 bp, Bacillus pumilus
gaaccgcatggttcaaggat

SEQ ID NO: 33339 - DNA, 20 bp, Bacteroides thetaiotaomicron
tcatactcggggatagcctt

SEQ ID NO: 33340 - DNA, 20 bp, Bacteroides thetaiotaomicron
gacagttaagtcagttgtga

SEQ ID NO: 33341 - DNA, 20 bp, Streptococcus constellatus
caggatgcaccgtagtttac

SEQ ID NO: 33342 - DNA, 20 bp, Tissierella praeacuta
gttgctaacagataagctga

SEQ ID NO: 33343 - DNA, 20 bp, Clostridium botulinum
ggtacaataagacgcaagac

SEQ ID NO: 33344 - DNA, 20 bp, Gemella sanguinis
aagagaagctaactcgcgag

SEQ ID NO: 33345 - DNA, 20 bp, Clostridium cadaveris
ttcgatacctctgtgccgcc

SEQ ID NO: 33346 - DNA, 20 bp, Paenibacillus thiaminolyticus
gggaatcgggaaaggcggag

SEQ ID NO: 33347 - DNA, 20 bp, Bacteroides forsythus
aatgcatagagatcacgcag

SEQ ID NO: 33348 - DNA, 20 bp, Propionibacterium acnes
gagatgggtgtgcctctttt

SEQ ID NO: 33349 - DNA, 20 bp, Streptococcus hyovaginalis
taggatttcccttcggggca

SEQ ID NO: 33350 - DNA, 20 bp, Paenibacillus glucanolyticus
atgagagtgacggtacttga

SEQ ID NO: 33351 - DNA, 20 bp, Acinetobacter calcoaceticus
gatggtgcttgcactatcac

SEQ ID NO: 33352 - DNA, 20 bp, Fusobacterium varium
gacatcccaagaagttaaca

SEQ ID NO: 33353 - DNA, 20 bp, Clostridium ramosum
cactggtagaggatggactt

SEQ ID NO: 33354 - DNA, 20 bp, Paenibacillus amylolyticus
ctcaaccttggttcgcactg

SEQ ID NO: 33355 - DNA, 20 bp, Lactococcus lactis
gagaagaacgttggtgagag

SEQ ID NO: 33356 - DNA, 20 bp, Helcococcus kunzii
taagtctgaatttaaaggct

SEQ ID NO: 33357 - DNA, 20 bp, Brevibacillus parabrevis
ctctcagaccgggataacat

SEQ ID NO: 33358 - DNA, 20 bp, Providencia alcalifaciens
gaccagtcttagatgccatt

SEQ ID NO: 33359 - DNA, 20 bp, Bacteroides capilosus
cgtgaggaacctgcctcgga

SEQ ID NO: 33360 - DNA, 20 bp, Campylobacter lari
aaacggctgctaatactcta

SEQ ID NO: 33361 - DNA, 20 bp, Corynebacterium accolens
ccatctttagtgtggtggtt

SEQ ID NO: 33362 - DNA, 20 bp, Corynebacterium group F
gaggggatgctaatcgcaca

SEQ ID NO: 33363 - DNA, 20 bp, Lactococcus lactis
atctgcctttgagcggggga

SEQ ID NO: 33364 - DNA, 20 bp, Enterobacter gergoviae
tctacttggaggctgtggtc

SEQ ID NO: 33365 - DNA, 20 bp, Vagococcus fluvialis
agaacaagtgggagagtaac

SEQ ID NO: 33366 - DNA, 20 bp, Bacteroides vulgatus
aacctctctcagttcggact

SEQ ID NO: 33367 - DNA, 20 bp, Brochothrix campestris
cagctggggataacatcgag

SEQ ID NO: 33368 - DNA, 20 bp, Clostridium butyricum
agtaccgcatggtacagcaa

SEQ ID NO: 33369 - DNA, 20 bp, Weissella paramesenteroides
ataataccaacaaccgcatg

SEQ ID NO: 33370 - DNA, 20 bp, Streptococcus agalactiae
taccaagtgacggtaactaa

SEQ ID NO: 33371 - DNA, 20 bp, Anaerococcus prevotii
tggcaacgagcgcaacccct

SEQ ID NO: 33372 - DNA, 20 bp, Pediococcus pentosaceus
ttcttttaaaagatggctct

SEQ ID NO: 33373 - DNA, 20 bp, Bacillus flexus
agaagcttgcttctatgacg

SEQ ID NO: 33374 - DNA, 20 bp, Enterobacter gergoviae
tctacttggaggctgtggtt

SEQ ID NO: 33375 - DNA, 20 bp, Streptococcus parasanguinis
cataaaagtcgacattgcat

SEQ ID NO: 33376 - DNA, 20 bp, Facklamia sourekii
gcgactttctggtctgacac

SEQ ID NO: 33377 - DNA, 20 bp, Brevibacterium epidermidis
aggcgaacccgtgagggtaa

SEQ ID NO: 33378 - DNA, 20 bp, Listeria welshimeri
acggctttgaaagatggttt

SEQ ID NO: 33379 - DNA, 20 bp, Leptotrichia buccalis
ggtgaaaacttgcggctcaa

SEQ ID NO: 33380 - DNA, 20 bp, Acinetobacter genospecies 3
gacaacatttcgaaaggaat

SEQ ID NO: 33381 - DNA, 20 bp, Veillonella parvula
aagatgaaaggtggcctcta

SEQ ID NO: 33382 - DNA, 20 bp, Eggerthella lenta
gcctgctgggccgcaactga

SEQ ID NO: 33383 - DNA, 20 bp, Bacteroides fragilis
aggatggggatgcgttccat

SEQ ID NO: 33384 - DNA, 20 bp, Clostridium glycolicum
tttcttaagtcaggagtgaa

SEQ ID NO: 33385 - DNA, 20 bp, Corynebacterium group F
tgtgtaagtccacagcttaa

SEQ ID NO: 33386 - DNA, 20 bp, Achromobacter xylosoxidans
gccgaagagatttggcagtg

SEQ ID NO: 33387 - DNA, 20 bp, Pseudoramibacter alactolyticus
aagaaaacatgacggtaccc

SEQ ID NO: 33388 - DNA, 20 bp, Bacteroides thetaiotaomicron
acagttaagtcagttgtgaa

SEQ ID NO: 33389 - DNA, 20 bp, Rothia dentocariosa
cggatacgaccaatctctgc

SEQ ID NO: 33390 - DNA, 20 bp, Virgibacillus pantothenticus
ggggtgacgcttgtggaacg

SEQ ID NO: 33391 - DNA, 20 bp, Virgibacillus pantothenticus
ttgaaaggcggcatatgctg

SEQ ID NO: 33392 - DNA, 20 bp, Prevotella intermedia
gttagcgcctggcgttagcg

SEQ ID NO: 33393 - DNA, 20 bp, Paenibacillus lautus
aggagagtgacggtacttga

SEQ ID NO: 33394 - DNA, 20 bp, Chromobacterium violaceum
gggaacggcattggagactg

SEQ ID NO: 33395 - DNA, 20 bp, Paenibacillus macerans
cactcctgagagttagcggc

SEQ ID NO: 33396 - DNA, 20 bp, Campylobacter concisus
cgcgcatgcgagcctgtgag

SEQ ID NO: 33397 - DNA, 20 bp, Bacillus sp
acatgcgtcacccccgaagg

SEQ ID NO: 33398 - DNA, 20 bp, Vibrio cholerae
aggtaacgtcaaatgattaa

SEQ ID NO: 33399 - DNA, 20 bp, Haemophilus ducreyi
atttgggggttggtctttaa

SEQ ID NO: 33400 - DNA, 20 bp, Propionibacterium freudenreichii
tggtggtaatcccgaatatg

SEQ ID NO: 33401 - DNA, 20 bp, Fusobacterium varium
gcgtctaggcggtttagtaa

SEQ ID NO: 33402 - DNA, 20 bp, Delftia acidovorans
cggaacgaaaaagcttctcc

SEQ ID NO: 33403 - DNA, 20 bp, Neisseria polysaccharea
cgtcttgagagggaaagcag

SEQ ID NO: 33404 - DNA, 20 bp, Brevibacillus borstelensis
gtcccttcgggggctagcgg

SEQ ID NO: 33405 - DNA, 20 bp, Budvicia aquatica
gggcatgacccgtggcttcc

SEQ ID NO: 33406 - DNA, 20 bp, Brochothrix campestris
aagccggtttggtaaccttc

SEQ ID NO: 33407 - DNA, 20 bp, Alloiococcus otitis
aaccgtggaacggcattgga

SEQ ID NO: 33408 - DNA, 20 bp, Pseudoramibacter alactolyticus
aactggaaagtggcgaacgg

SEQ ID NO: 33409 - DNA, 20 bp, Prevotella oris
cgaactggtccacttgagtg

SEQ ID NO: 33410 - DNA, 20 bp, Lactococcus lactis
cgcataaaaactttaaacac

SEQ ID NO: 33411 - DNA, 20 bp, Tissierella praeacuta
tcggaatgaaactttaatta

SEQ ID NO: 33412 - DNA, 20 bp, Capnocytophaga gingivalis
gttcttggaatgtgtagtgt

SEQ ID NO: 33413 - DNA, 20 bp, Leuconostoc pseudomesenteroides
cagtgtcgcatgacacaaag

SEQ ID NO: 33414 - DNA, 20 bp, Collinsella aerofaciens
cgggtaataccggatacccc

SEQ ID NO: 33415 - DNA, 20 bp, Photobacterium damselae
aggtagtgtagttaacacct

SEQ ID NO: 33416 - DNA, 20 bp, Bacteroides fragilis
gaaggcagctagcgggtgac

SEQ ID NO: 33417 - DNA, 20 bp, Corynebacterium group F
acagcgcgtttgctaccttg

SEQ ID NO: 33418 - DNA, 20 bp, Anaerobiospirillum succiniciproducens
ctagagtattgcagagggag

SEQ ID NO: 33419 - DNA, 20 bp, Moraxella atlantae
tgctataagatgtgcctaaa

SEQ ID NO: 33420 - DNA, 20 bp, Burkholderia multivorans
ccggaaagaaatccctggct

SEQ ID NO: 33421 - DNA, 20 bp, Prevotella melaninogenica
cttgcagcgcatactggttt

SEQ ID NO: 33422 - DNA, 20 bp, Propionibacterium avidum
ggactgggagtgctcagaga

SEQ ID NO: 33423 - DNA, 20 bp, Gemella morbillorum
agggaagaatggatatgtag

SEQ ID NO: 33424 - DNA, 20 bp, Moraxella osloensis
agtaggtagcctaacgaaag

SEQ ID NO: 33425 - DNA, 20 bp, Bacillus simplex
tgagagaagatggaaagacg

SEQ ID NO: 33426 - DNA, 20 bp, Bacillus cereus
cttgctctcaagaagttagc

SEQ ID NO: 33427 - DNA, 20 bp, Eggerthella lenta
cagcagggaagaaattcgac

SEQ ID NO: 33428 - DNA, 20 bp, Brochothrix campestris
tcggctgtcactgtgagatg

SEQ ID NO: 33429 - DNA, 20 bp, Tissierella praeacuta
tcgagcgaagtttttaaaga

SEQ ID NO: 33430 - DNA, 20 bp, Clostridium ramosum
taacttcagtaagccataga

SEQ ID NO: 33431 - DNA, 20 bp, Prevotella denticola
cactaaaggcagttcatatc

SEQ ID NO: 33432 - DNA, 20 bp, Vibrio cholerae
gtcaaatgattaaggtatta

SEQ ID NO: 33433 - DNA, 20 bp, Dermabacter hominis
tgaagctgtgcttgcacagt

SEQ ID NO: 33434 - DNA, 20 bp, Prevotella melaninogenica
ttgtatggggataaagtcaa

SEQ ID NO: 33435 - DNA, 20 bp, Anaerococcus tetradius
ttacacaaggggatagcctt

SEQ ID NO: 33436 - DNA, 20 bp, Arcanobacterium bernardiae
ttaacttcggggttgcagtg

SEQ ID NO: 33437 - DNA, 20 bp, Corynebacterium glucuronolyticum
ctccagcttgctggagtgct

SEQ ID NO: 33438 - DNA, 20 bp, Chryseobacterium meningosepticum
aagtagctgaaggtaccaga

SEQ ID NO: 33439 - DNA, 20 bp, Bacteroides uniformis
atcgatagttaccatcaggt

SEQ ID NO: 33440 - DNA, 20 bp, Arcanobacterium bernardiae
ttactgggccaccactgacg

SEQ ID NO: 33441 - DNA, 20 bp, Moraxella osloensis
gctagagatgattagtggcg

SEQ ID NO: 33442 - DNA, 20 bp, Arcanobacterium bernardiae
aggttactgggccaccactg

SEQ ID NO: 33443 - DNA, 20 bp, Paenibacillus thiaminolyticus
gtaactgttccataggtgac

SEQ ID NO: 33444 - DNA, 20 bp, Brochothrix campestris
tcacagctggggataacatc

SEQ ID NO: 33445 - DNA, 20 bp, Prevotella melaninogenica
gatttagagataatgacgcc

SEQ ID NO: 33446 - DNA, 20 bp, Neisseria subflava
aacatcagcggctgatgacg

SEQ ID NO: 33447 - DNA, 20 bp, Corynebacterium coyleae
gtaaagccggtcgtagttcg

SEQ ID NO: 33448 - DNA, 20 bp, Streptococcus dysgalactiae
gatggtgggagtggaaaatc

SEQ ID NO: 33449 - DNA, 20 bp, Prevotella oris
acccgtcgaaagtcggccta

SEQ ID NO: 33450 - DNA, 20 bp, Clostridium tetani
gagtacaggagagggaaacg

SEQ ID NO: 33451 - DNA, 20 bp, Gemella bergeri
taagatggctttgcggagca

SEQ ID NO: 33452 - DNA, 20 bp, Propionibacterium propionicus
accggaaacgtctagagata

SEQ ID NO: 33453 - DNA, 20 bp, Brevibacillus choshinensis
caatgaagagcttgctcttc

SEQ ID NO: 33454 - DNA, 20 bp, Streptococcus acidominimus
taaaaggagcaacagcttca

SEQ ID NO: 33455 - DNA, 20 bp, Prevotella loescheii
gtcggtgaccaagcgaaagc

SEQ ID NO: 33456 - DNA, 20 bp, Bacteroides fragilis
gattccgcatggtttcatta

SEQ ID NO: 33457 - DNA, 20 bp, Brochothrix campestris
ggtttggtaaccttcgggag

SEQ ID NO: 33458 - DNA, 20 bp, Bacteroides merdae
ggtgcgtaggtggtgattta

SEQ ID NO: 33459 - DNA, 20 bp, Bacteroides fragilis
gtggaaacatgtcagtgagc

SEQ ID NO: 33460 - DNA, 20 bp, Anaerococcus prevotii
agcttaactactgtaagcat

SEQ ID NO: 33461 - DNA, 20 bp, Aerococcus christensenii
tggctctgctatcacttatc

SEQ ID NO: 33462 - DNA, 20 bp, Alcaligenes faecalis
taatacgaggtactgctgac

SEQ ID NO: 33463 - DNA, 20 bp, Paenibacillus pabuli
tcaagtttgggacaactacc

SEQ ID NO: 33464 - DNA, 20 bp, Corynebacterium glucuronolyticum
acgtaagtgatctgccctgc

SEQ ID NO: 33465 - DNA, 20 bp, Nocardia asteroides
acctcgcgagaggatgctaa

SEQ ID NO: 33466 - DNA, 20 bp, Bacillus oleronius
ttttttcttcgcatgaggga

SEQ ID NO: 33467 - DNA, 20 bp, Helcococcus ovis
ttcgggaagagattaaagaa

SEQ ID NO: 33468 - DNA, 20 bp, Lactococcus lactis
gtcgtaacaggtagccgtat

SEQ ID NO: 33469 - DNA, 20 bp, Achromobacter xylosoxidans
ttaataccccgcggaactga

SEQ ID NO: 33470 - DNA, 20 bp, Rothia mucilaginosa
ccgcatcagagatggtgttt

SEQ ID NO: 33471 - DNA, 20 bp, Prevotella bivia
ttgtgaaatgtaggagctca

SEQ ID NO: 33472 - DNA, 20 bp, Acinetobacter calcoaceticus
ctatcacttagcggcggacg

SEQ ID NO: 33473 - DNA, 20 bp, Paenibacillus macerans
taagtctggtgtttaaggct

SEQ ID NO: 33474 - DNA, 20 bp, Bacteroides forsythus
ggcgaccggatgccaatctc

SEQ ID NO: 33475 - DNA, 20 bp, Weeksella virosa
gtcagtggtgaaatcctatc

SEQ ID NO: 33476 - DNA, 20 bp, Campylobacter curvus
tagttgttgctaagctagtc

SEQ ID NO: 33477 - DNA, 20 bp, Streptococcus canis
gcttgcactagtctaaggag

SEQ ID NO: 33478 - DNA, 20 bp, Bacillus lentus
ccggcagtcgctctagagtg

SEQ ID NO: 33479 - DNA, 20 bp, Alicyclobacillus acidocaldarius
ttgctcgaccgcctacgcac

SEQ ID NO: 33480 - DNA, 20 bp, Campylobacter sputorum
atagaagtttccccttcggg

SEQ ID NO: 33481 - DNA, 20 bp, Cardiobacterium hominis
caggcggttgcccaagtcag

SEQ ID NO: 33482 - DNA, 20 bp, Prevotella oralis
ctatcggtaatggatgggga

SEQ ID NO: 33483 - DNA, 20 bp, Bacteroides uniformis
atccctaaagcctctctcag

SEQ ID NO: 33484 - DNA, 20 bp, Corynebacterium coyleae
gaccacattttggatggtgt

SEQ ID NO: 33485 - DNA, 20 bp, Bacillus thuringiensis
gaaccgcatggttcgaaatt

SEQ ID NO: 33486 - DNA, 20 bp, Alicyclobacillus acidocaldarius
tcaagcagtttccaaagcca

SEQ ID NO: 33487 - DNA, 20 bp, Brevibacillus parabrevis
tgtcagggacgaacacgtgc

SEQ ID NO: 33488 - DNA, 20 bp, Prevotella loescheii
gaggaatattggtcaatggg

SEQ ID NO: 33489 - DNA, 20 bp, Arcanobacterium bernardiae
tgtggtaggggtaattggaa

SEQ ID NO: 33490 - DNA, 20 bp, Tissierella praeacuta
aagatttcttcggaatgaaa

SEQ ID NO: 33491 - DNA, 20 bp, Prevotella melaninogenica
catcaaatcttgaaagccgg

SEQ ID NO: 33492 - DNA, 20 bp, Bacillus pallidus
taagtgttagagggtatcca

SEQ ID NO: 33493 - DNA, 20 bp, Moraxella  catarrhalis
gtcttttaaagacttagtga

SEQ ID NO: 33494 - DNA, 20 bp, Acinetobacter genospecies 3
ctactgatcttagcggcgga

SEQ ID NO: 33495 - DNA, 20 bp, Chromobacterium violaceum
gtttgaatccttggtagcgt

SEQ ID NO: 33496 - DNA, 20 bp, Streptococcus canis
ttaagaacttaaaaggggca

SEQ ID NO: 33497 - DNA, 20 bp, Helcococcus kunzii
ggcttgacatatacagggat

SEQ ID NO: 33498 - DNA, 20 bp, Prevotella bivia
gataacccagcgaaagttgg

SEQ ID NO: 33499 - DNA, 20 bp, Streptococcus parasanguinis
agtcgacattgcatgatgtt

SEQ ID NO: 33500 - DNA, 20 bp, Corynebacterium group F
accggataggacaacttttt

SEQ ID NO: 33501 - DNA, 20 bp, Haemophilus actinemycetemcomitans
ggggattggggtttagccct

SEQ ID NO: 33502 - DNA, 20 bp, Paenibacillus larvae
ggataacttgcggaaacgtg

SEQ ID NO: 33503 - DNA, 20 bp, Neisseria sicca
acttgattgcttggtagcga

SEQ ID NO: 33504 - DNA, 20 bp, Morganella morganii
gaagcgaccccgcgagggca

SEQ ID NO: 33505 - DNA, 20 bp, Bacillus fusiformis
caacctaccttatagtttgg

SEQ ID NO: 33506 - DNA, 20 bp, Bacteroides vulgatus
tgaggactctgacaagactg

SEQ ID NO: 33507 - DNA, 20 bp, Anaerococcus prevotii
gcacaaggggatagccgttg

SEQ ID NO: 33508 - DNA, 20 bp, Bacteroides vulgatus
agtggatgccaatcccaaaa

SEQ ID NO: 33509 - DNA, 20 bp, Eubacterium moniliforme
caacacctctgtgccgccgc

SEQ ID NO: 33510 - DNA, 20 bp, Bacillus alcalophilus
cccgaggggtcattggaaac

SEQ ID NO: 33511 - DNA, 20 bp, Clostridium paraputrificum
ctgaattaccatgtaatgtg

SEQ ID NO: 33512 - DNA, 20 bp, Gordonia bronchialis
agaggatcgccgcagagatg

SEQ ID NO: 33513 - DNA, 20 bp, Anaerobiospirillum succiniciproducens
ttacctgaccttgacatcgt

SEQ ID NO: 33514 - DNA, 20 bp, Chryseobacterium meningosepticum
cgataggatgcaaatctcga

SEQ ID NO: 33515 - DNA, 20 bp, Fusobacterium nucleatum
gagtcgcaaagctgtgaagt

SEQ ID NO: 33516 - DNA, 20 bp, Pseudoramibacter alactolyticus
gcaagatcatgaaaactccg

SEQ ID NO: 33517 - DNA, 20 bp, Anaerobiospirillum succiniciproducens
cagagggaaacgataccggg

SEQ ID NO: 33518 - DNA, 20 bp, Helcococcus kunzii
aaaggaaagtagcgaacggg

SEQ ID NO: 33519 - DNA, 20 bp, Lactococcus lactis
atgtagggagctataagttc

SEQ ID NO: 33520 - DNA, 20 bp, Bacteroides merdae
gaaggcagcttactaaacca

SEQ ID NO: 33521 - DNA, 20 bp, Streptococcus thoraltensis
tgacagtaagctaatctctt

SEQ ID NO: 33522 - DNA, 20 bp, Streptococcus constellatus
aaaggtgcaagagcatcact

SEQ ID NO: 33523 - DNA, 20 bp, Streptococcus anginosus
aacagtatgtaacacatgtt

SEQ ID NO: 33524 - DNA, 20 bp, Leuconostoc pseudomesenteroides
tttggcgtcacctagagatg

SEQ ID NO: 33525 - DNA, 20 bp, Abiotrophia defectiva
gcatagagtaactgttatgc

SEQ ID NO: 33526 - DNA, 20 bp, Staphylococcus capitis
acgtagagatacgtcctccc

SEQ ID NO: 33527 - DNA, 20 bp, Leptotrichia buccalis
ttactgggtgtgggcatgaa

SEQ ID NO: 33528 - DNA, 20 bp, Vibrio cholerae
ttaaccaccttcctccctac

SEQ ID NO: 33529 - DNA, 20 bp, Moraxella osloensis
tggttaatacccattagatt

SEQ ID NO: 33530 - DNA, 20 bp, Prevotella bivia
atggatgcccgctgttagca

SEQ ID NO: 33531 - DNA, 20 bp, Arcanobacterium pyogenes
aacgatgaagccggggcttt

SEQ ID NO: 33532 - DNA, 20 bp, Streptococcus agalactiae
agttatttaaaaggagcaat

SEQ ID NO: 33533 - DNA, 20 bp, Streptococcus hyovaginalis
ttaacacatgttaatgattt

SEQ ID NO: 33534 - DNA, 20 bp, Bacteroides merdae
ttgtggctcaaccataaaat

SEQ ID NO: 33535 - DNA, 20 bp, Corynebacterium macginleyi
accgcactttagtgtgtgtg

SEQ ID NO: 33536 - DNA, 20 bp, Prevotella loescheii
ggcccaccgtggctacgatc

SEQ ID NO: 33537 - DNA, 20 bp, Actinomyces odontolyticus
cggcactgcagagatgtggt

SEQ ID NO: 33538 - DNA, 20 bp, Acinetobacter calcoaceticus
aggaggaggctactgaagtt

SEQ ID NO: 33539 - DNA, 20 bp, Brevibacillus choshinensis
ccggatacttctttcagacc

SEQ ID NO: 33540 - DNA, 20 bp, Acinetobacter calcoaceticus
gcgaggaggaggctactgaa

SEQ ID NO: 33541 - DNA, 20 bp, Clostridium sordellii
tgagagtcgcatggcttttg

SEQ ID NO: 33542 - DNA, 20 bp, Corynebacterium urealyticum
gatttttcacgatttccgtg

SEQ ID NO: 33543 - DNA, 20 bp, Bacillus coagulans
ccgcgtgagtgaagaaggcc

SEQ ID NO: 33544 - DNA, 20 bp, Weeksella virosa
cctatcgcttaacgatagaa

SEQ ID NO: 33545 - DNA, 20 bp, Microbacterium hominis
gagctgcgatcgcatggtca

SEQ ID NO: 33546 - DNA, 20 bp, Lactococcus garvieae
gcgctaatctcttaaaacca

SEQ ID NO: 33547 - DNA, 20 bp, Bacillus lentus
gaccctgtctccagggcggt

SEQ ID NO: 33548 - DNA, 20 bp, Propionibacterium acnes
gtaatcttggggcttaaccc

SEQ ID NO: 33549 - DNA, 20 bp, Bacteroides capilosus
tgggttcgataattggggtg

SEQ ID NO: 33550 - DNA, 20 bp, Bacillus pallidus
gtatccaccctttagtgctg

SEQ ID NO: 33551 - DNA, 20 bp, Actinomyces meyeri
attcactggtcttcgcatgg

SEQ ID NO: 33552 - DNA, 20 bp, Bacteroides fragilis
tgctttctttgctggcgacc

SEQ ID NO: 33553 - DNA, 20 bp, Vibrio cholerae
tcgccacccaaggaacaagt

SEQ ID NO: 33554 - DNA, 20 bp, Corynebacterium hoagii
gcgggggttggaaaggttta

SEQ ID NO: 33555 - DNA, 20 bp, Tissierella praeacuta
cgggtacaggggacacaggt

SEQ ID NO: 33556 - DNA, 20 bp, Propionibacterium acnes
tcggaagtgtaatcttgggg

SEQ ID NO: 33557 - DNA, 20 bp, Prevotella oris
tggccggtacagagagttga

SEQ ID NO: 33558 - DNA, 20 bp, Facklamia hominis
tagagtaactgttagcggag

SEQ ID NO: 33559 - DNA, 20 bp, Chromobacterium violaceum
ggtttgaatccttggtagcg

SEQ ID NO: 33560 - DNA, 20 bp, Paenibacillus pabuli
acgggctgtgaagccgcgag

SEQ ID NO: 33561 - DNA, 20 bp, Propionibacterium acnes
cccttgttcactgttgccag

SEQ ID NO: 33562 - DNA, 20 bp, Bacteroides capilosus
gggttcgataattggggtga

SEQ ID NO: 33563 - DNA, 20 bp, Pediococcus pentosaceus
tgttaaagaagaacgtgggt

SEQ ID NO: 33564 - DNA, 20 bp, Fusobacterium varium
gttaacagagatgttttcgt

SEQ ID NO: 33565 - DNA, 20 bp, Gemella haemolysans
ttaactgcatggttgatgtt

SEQ ID NO: 33566 - DNA, 20 bp, Weeksella virosa
cttcggacagaatgcaaggt

SEQ ID NO: 33567 - DNA, 20 bp, Streptococcus alactolyticus
agtttttcttcggaacactg

SEQ ID NO: 33568 - DNA, 20 bp, Prevotella loescheii
ggggagtacgccggcaacgg

SEQ ID NO: 33569 - DNA, 20 bp, Rothia mucilaginosa
atcagagatggtgtttccct

SEQ ID NO: 33570 - DNA, 20 bp, Paenibacillus larvae
ctaataccggatagctggtt

SEQ ID NO: 33571 - DNA, 20 bp, Bacillus pallidus
ccgaaaaccgcatggttttc

SEQ ID NO: 33572 - DNA, 20 bp, Campylobacter lari
cttaacacaagttgagtagg

SEQ ID NO: 33573 - DNA, 20 bp, Neisseria flavescens
gctaatatcgacagctgatg

SEQ ID NO: 33574 - DNA, 20 bp, Streptococcus anginosus
tgttaaggaagaacgagtgt

SEQ ID NO: 33575 - DNA, 20 bp, Aneurinibacillus aneurinilyticus
catggtctgaaagagaaaga

SEQ ID NO: 33576 - DNA, 20 bp, Anaerococcus prevotii
tgaaactgcatatcttgaga

SEQ ID NO: 33577 - DNA, 20 bp, Peptoniphilus indolicus
gtcaaagatggactcgcgtc

SEQ ID NO: 33578 - DNA, 20 bp, Facklamia ignava
aagcgacgtcgcgaggccaa

SEQ ID NO: 33579 - DNA, 20 bp, Ignavigranum ruoffiae
gccctttagcgggggataac

SEQ ID NO: 33580 - DNA, 20 bp, Weeksella virosa
cggatcaataagtcagtggt

SEQ ID NO: 33581 - DNA, 20 bp, Corynebacterium ulcerans
tgacatatacaagatcggcg

SEQ ID NO: 33582 - DNA, 20 bp, Eggerthella lenta
tcaagcgggatctctaatcc

SEQ ID NO: 33583 - DNA, 20 bp, Paenibacillus pabuli
gtgaagccgcgaggtggaac

SEQ ID NO: 33584 - DNA, 20 bp, Staphylococcus capitis
agatacgtcctcccttgtgg

SEQ ID NO: 33585 - DNA, 20 bp, Cardiobacterium hominis
ttgctccaggcgtcgagtgg

SEQ ID NO: 33586 - DNA, 20 bp, Bacteroides forsythus
agtccgcggtgaaagtttgt

SEQ ID NO: 33587 - DNA, 20 bp, Actinomyces bovis
ccggtggcctaacctagttt

SEQ ID NO: 33588 - DNA, 20 bp, Moraxella osloensis
atggttaatacccattagat

SEQ ID NO: 33589 - DNA, 20 bp, Listeria monocytogenes
aataccgaatgataaagtgt

SEQ ID NO: 33590 - DNA, 20 bp, Campylobacter rectus
atactagttgttgcttcgct

SEQ ID NO: 33591 - DNA, 20 bp, Haemophilus segnis
gcgaggaaggcatttagttt

SEQ ID NO: 33592 - DNA, 20 bp, Fusobacterium mortiferum
atgaaattcatatgaaagct

SEQ ID NO: 33593 - DNA, 20 bp, Actinomyces odontolyticus
tgacatgcacggcggcactg

SEQ ID NO: 33594 - DNA, 20 bp, Streptococcus anginosus
gaaagttcatactgtgacgg

SEQ ID NO: 33595 - DNA, 20 bp, Bacillus pumilus
taccggatagttccttgaac

SEQ ID NO: 33596 - DNA, 20 bp, Prevotella intermedia
atgcgactctcatatgttat

SEQ ID NO: 33597 - DNA, 20 bp, Streptococcus thermophilus
tgttggatcctttccgggat

SEQ ID NO: 33598 - DNA, 20 bp, Weeksella virosa
agacggggactctaatgaga

SEQ ID NO: 33599 - DNA, 20 bp, Pseudoramibacter alactolyticus
atggttttgtcgcatggcaa

SEQ ID NO: 33600 - DNA, 20 bp, Bacteroides merdae
aaggcagcttactaaaccat

SEQ ID NO: 33601 - DNA, 20 bp, Prevotella melaninogenica
tatcagcggctaagcgaaag

SEQ ID NO: 33602 - DNA, 20 bp, Aerococcus viridans
gaacagatgaagtgcttgca

SEQ ID NO: 33603 - DNA, 20 bp, Virgibacillus pantothenticus
atctccttcgggggtgacgc

SEQ ID NO: 33604 - DNA, 20 bp, Campylobacter lari
ttggggtgctagtcatctca

SEQ ID NO: 33605 - DNA, 20 bp, Acinetobacter lwoffii
gcgcgtaggtggccaattaa

SEQ ID NO: 33606 - DNA, 20 bp, Comamonas testosteroni
tttgacatggcaggaactta

SEQ ID NO: 33607 - DNA, 20 bp, Veillonella atypica
gagttaatagacggaagcga

SEQ ID NO: 33608 - DNA, 20 bp, Bacteroides forsythus
gcttactaaggtataactga

SEQ ID NO: 33609 - DNA, 20 bp, Streptococcus thermophilus
gcataacaatggatgacaca

SEQ ID NO: 33610 - DNA, 20 bp, Tissierella praeacuta
ataagatgctaatctcttaa

SEQ ID NO: 33611 - DNA, 20 bp, Enterococcus cecorum
caccgtagcttgctacaccg

SEQ ID NO: 33612 - DNA, 20 bp, Brochothrix campestris
gctggggataacatcgagaa

SEQ ID NO: 33613 - DNA, 20 bp, Staphylococcus saprophyticus
ataacatttggaaccgcatg

SEQ ID NO: 33614 - DNA, 20 bp, Veillonella atypica
agcaaacccgagaaacactc

SEQ ID NO: 33615 - DNA, 20 bp, Bacteroides forsythus
ggattgaaatgtagacgacg

SEQ ID NO: 33616 - DNA, 20 bp, Brevibacillus parabrevis
ccaatctctgaaaaccaatc

SEQ ID NO: 33617 - DNA, 20 bp, Alicyclobacillus acidocaldarius
accgtctcgcatggggcttt

SEQ ID NO: 33618 - DNA, 20 bp, Mannheimia haemolytica
cagtcgattgacgttaatca

SEQ ID NO: 33619 - DNA, 20 bp, Bacillus mycoides
tgcatagttcgaaattgaaa

SEQ ID NO: 33620 - DNA, 20 bp, Prevotella oris
actggtccacttgagtgtgc

SEQ ID NO: 33621 - DNA, 20 bp, Corynebacterium glucuronolyticum
ggtggagctaatcgcgaaag

SEQ ID NO: 33622 - DNA, 20 bp, Prevotella oris
aagtctgtgaccgcaaggaa

SEQ ID NO: 33623 - DNA, 20 bp, Bacteroides capilosus
ttattgttagttgctacgca

SEQ ID NO: 33624 - DNA, 20 bp, Leuconostoc pseudomesenteroides
gacacaaagttaaaaggcgc

SEQ ID NO: 33625 - DNA, 20 bp, Dermacoccus nishinomiyaensis
aatactggatacgaccgatc

SEQ ID NO: 33626 - DNA, 20 bp, Cardiobacterium hominis
atgggaatctgccttttgct

SEQ ID NO: 33627 - DNA, 20 bp, Helcococcus ovis
ggcaatacccgaagccgtcg

SEQ ID NO: 33628 - DNA, 20 bp, Bacteroides merdae
ggaatatttgttaaagattc

SEQ ID NO: 33629 - DNA, 20 bp, Bacteroides ovatus
aaacagtatagccgtaaggc

SEQ ID NO: 33630 - DNA, 20 bp, Bacteroides fragilis
gaataaagtgcagtatgtat

SEQ ID NO: 33631 - DNA, 20 bp, Bacteroides fragilis
tggactggtaagtcagttgt

SEQ ID NO: 33632 - DNA, 20 bp, Corynebacterium jeikeium
ggaaaggctccttgcttgca

SEQ ID NO: 33633 - DNA, 20 bp, Paenibacillus apiarius
ttgggtgtttaaacctaggg

SEQ ID NO: 33634 - DNA, 20 bp, Pasteurella multocida
agggatgttgttaaatagat

SEQ ID NO: 33635 - DNA, 20 bp, Campylobacter rectus
aattatgacggtacccaagg

SEQ ID NO: 33636 - DNA, 20 bp, Clostridium botulinum
gtatcaactccccctgtgcc

SEQ ID NO: 33637 - DNA, 20 bp, Clostridium tetani
gcttaacttaggggctgcat

SEQ ID NO: 33638 - DNA, 20 bp, Granulicatella adiacens
gatgctaaaaccgcataggt

SEQ ID NO: 33639 - DNA, 20 bp, Budvicia aquatica
ttgtagttaatagctgcaac

SEQ ID NO: 33640 - DNA, 20 bp, Corynebacterium glucuronolyticum
aacttttggttggcaggcga

SEQ ID NO: 33641 - DNA, 20 bp, Pasteurella trehalosi
gtttaatagacaaagcaatt

SEQ ID NO: 33642 - DNA, 20 bp, Clostridium tetani
agtgagatgtgaaataccta

SEQ ID NO: 33643 - DNA, 20 bp, Brevibacillus choshinensis
ggagctctcttcggagcagc

SEQ ID NO: 33644 - DNA, 20 bp, Leuconostoc lactis
aataccgcataaaacctaac

SEQ ID NO: 33645 - DNA, 20 bp, Campylobacter sputorum
tctatctagagtaagggaga

SEQ ID NO: 33646 - DNA, 20 bp, Corynebacterium jeikeium
ggtgtgggggttttatttac

SEQ ID NO: 33647 - DNA, 20 bp, Actinomyces naeslundii
ccttttccgggtcttccgcg

SEQ ID NO: 33648 - DNA, 20 bp, Bacteroides fragilis
ggtgaccgtatgctaatccc

SEQ ID NO: 33649 - DNA, 20 bp, Bacillus sp
gccaagcaaatcccacaaaa

SEQ ID NO: 33650 - DNA, 20 bp, Facklamia sourekii
tcactagaggatggtcccgc

SEQ ID NO: 33651 - DNA, 20 bp, Prevotella denticola
caaccaccacactaaaggca

SEQ ID NO: 33652 - DNA, 20 bp, Streptococcus parauberis
ggccgtggctcaaccatggt

SEQ ID NO: 33653 - DNA, 20 bp, Campylobacter curvus
gaagcccaaataccaaaccg

SEQ ID NO: 33654 - DNA, 20 bp, Citrobacter koseri
agactgtgccttcgggagcc

SEQ ID NO: 33655 - DNA, 20 bp, Corynebacterium group F
cgcacaaagccggccttagt

SEQ ID NO: 33656 - DNA, 20 bp, Listeria welshimeri
cggctttgaaagatggtttc

SEQ ID NO: 33657 - DNA, 20 bp, Gemella bergeri
gaggagccggtcacggtggg

SEQ ID NO: 33658 - DNA, 20 bp, Lactococcus garvieae
tcgggacacgggatacaggt

SEQ ID NO: 33659 - DNA, 20 bp, Corynebacterium amycolatum
aagggtttctgacggtagat

SEQ ID NO: 33660 - DNA, 20 bp, Proteus vulgaris
attgcatctgaaactggttg

SEQ ID NO: 33661 - DNA, 20 bp, Haemophilus influenzae
aagcgaagctgcgaggtgga

SEQ ID NO: 33662 - DNA, 20 bp, Campylobacter sputorum
gatagtgaaagatggctttg

SEQ ID NO: 33663 - DNA, 20 bp, Campylobacter curvus
agtcttggcagtaatgcacc

SEQ ID NO: 33664 - DNA, 20 bp, Actinomyces neuii
aagggcatcttggttcggat

SEQ ID NO: 33665 - DNA, 20 bp, Listeria welshimeri
atgccacggctttgaaagat

SEQ ID NO: 33666 - DNA, 20 bp, Myroides odoratus
attgccgttgatactgcttg

SEQ ID NO: 33667 - DNA, 20 bp, Porphyromonas endodontalis
agtcttgccgttgaaactga

SEQ ID NO: 33668 - DNA, 20 bp, Campylobacter lari
ctcctgcttaacacaagttg

SEQ ID NO: 33669 - DNA, 20 bp, Vibrio metschnikovii
acatctacaggatcctgcgg

SEQ ID NO: 33670 - DNA, 20 bp, Prevotella oris
tcagagatgatgaggccctt

SEQ ID NO: 33671 - DNA, 20 bp, Clostridium ramosum
tgcaactgacgctcagtccc

SEQ ID NO: 33672 - DNA, 20 bp, Listeria welshimeri
gtggcgcatgccacggcttt

SEQ ID NO: 33673 - DNA, 20 bp, Prevotella disiens
gagtgcttgcacactttgga

SEQ ID NO: 33674 - DNA, 20 bp, Eggerthella lenta
gaaattcgacggtacctgca

SEQ ID NO: 33675 - DNA, 20 bp, Campylobacter lari
gaaccttatagagatatgag

SEQ ID NO: 33676 - DNA, 20 bp, Clostridium paraputrificum
aattaccatgtaatgtggga

SEQ ID NO: 33677 - DNA, 20 bp, Pseudoramibacter alactolyticus
gtcgaaggtggggctagtaa

SEQ ID NO: 33678 - DNA, 20 bp, Bacteroides merdae
gtcccgcatgggaatatttg

SEQ ID NO: 33679 - DNA, 20 bp, Corynebacterium xerosis
accgcaccgtgagggtgtgg

SEQ ID NO: 33680 - DNA, 20 bp, Comamonas testosteroni
catggcaggaacttaccaga

SEQ ID NO: 33681 - DNA, 20 bp, Corynebacterium urealyticum
caatctttagtgtggttggt

SEQ ID NO: 33682 - DNA, 20 bp, Anaerococcus tetradius
ttctggtcatcatctgacgc

SEQ ID NO: 33683 - DNA, 20 bp, Eggerthella lenta
ccgccctccgtgccgcagcc

SEQ ID NO: 33684 - DNA, 20 bp, Corynebacterium glucuronolyticum
gtaagtgatctgccctgcac

SEQ ID NO: 33685 - DNA, 20 bp, Atopobium parvulum
aggagcctaaacaggtggtg

SEQ ID NO: 33686 - DNA, 20 bp, Peptoniphilus indolicus
acacatgtcataacgatcaa

SEQ ID NO: 33687 - DNA, 20 bp, Pasteurella multocida
gcatcattgacgttaattac

SEQ ID NO: 33688 - DNA, 20 bp, Bacillus fusiformis
atccgataaagtcgttctca

SEQ ID NO: 33689 - DNA, 20 bp, Tetragenococcus halophilus
aagaaacttcggttttttct

SEQ ID NO: 33690 - DNA, 20 bp, Haemophilus segnis
agtcgaacggtaacataaag

SEQ ID NO: 33691 - DNA, 20 bp, Campylobacter curvus
gggctatatcgtatcagcta

SEQ ID NO: 33692 - DNA, 20 bp, Listeria innocua
accgaatgatagagtgtggc

SEQ ID NO: 33693 - DNA, 20 bp, Lactococcus lactis
ccacgggagttgggagtacc

SEQ ID NO: 33694 - DNA, 20 bp, Staphylococcus auricularis
tcggtagagtaaccttttgg

SEQ ID NO: 33695 - DNA, 20 bp, Helcococcus kunzii
atcgcataaaacagatctca

SEQ ID NO: 33696 - DNA, 20 bp, Geobacillus thermoglucosidasius
cccctgacaaccctggagac

SEQ ID NO: 33697 - DNA, 20 bp, Clostridium clostridiiforme
aagggagcgtagacggttaa

SEQ ID NO: 33698 - DNA, 20 bp, Tissierella praeacuta
cgtggtaagcatttgaaact

SEQ ID NO: 33699 - DNA, 20 bp, Prevotella melaninogenica
cacgtgtgattgtttgcagg

SEQ ID NO: 33700 - DNA, 20 bp, Prevotella melaninogenica
tgtttgcaggtaccatacga

SEQ ID NO: 33701 - DNA, 20 bp, Anaerococcus prevotii
ggtaccataagaaaaagccc

SEQ ID NO: 33702 - DNA, 20 bp, Tissierella praeacuta
aacagataagctgagcactc

SEQ ID NO: 33703 - DNA, 20 bp, Propionibacterium avidum
aaagcttcggcggttttgga

SEQ ID NO: 33704 - DNA, 20 bp, Serratia proteamaculans
ggaggaagggtagtgtgtta

SEQ ID NO: 33705 - DNA, 20 bp, Bordetella bronchiseptica
ctgtgcaactgacggtacct

SEQ ID NO: 33706 - DNA, 20 bp, Tissierella praeacuta
cttaaatgtcgcatgagatt

SEQ ID NO: 33707 - DNA, 20 bp, Actinomyces bovis
tatggcggatacaggtggtg

SEQ ID NO: 33708 - DNA, 20 bp, Gemella morbillorum
gccaacctcataaaactatt

SEQ ID NO: 33709 - DNA, 20 bp, Clostridium clostridiiforme
cctgcctcacactgggggat

SEQ ID NO: 33710 - DNA, 20 bp, Bacteroides thetaiotaomicron
aggggcagcatttcagtttg

SEQ ID NO: 33711 - DNA, 20 bp, Gemella haemolysans
gtgttgttctgacctttggt

SEQ ID NO: 33712 - DNA, 20 bp, Vibrio cholerae
ctaccgggcaatttcccagg

SEQ ID NO: 33713 - DNA, 20 bp, Bacillus simplex
ttttctcgcatgagagaaga

SEQ ID NO: 33714 - DNA, 20 bp, Pseudoramibacter alactolyticus
gatccttcgggtgaaattag

SEQ ID NO: 33715 - DNA, 20 bp, Prevotella denticola
accacactaaaggcagttca

SEQ ID NO: 33716 - DNA, 20 bp, Brevibacterium epidermidis
ccgttctggaaacagttctt

SEQ ID NO: 33717 - DNA, 20 bp, Haemophilus influenzae
ggttggggtttaactctggc

SEQ ID NO: 33718 - DNA, 20 bp, Bacteroides ureolyticus
tcctatttaacataagttaa

SEQ ID NO: 33719 - DNA, 20 bp, Bacteroides forsythus
aatctccaaaccctgtctca

SEQ ID NO: 33720 - DNA, 20 bp, Paenibacillus amylolyticus
tctcctggggagataatgaa

SEQ ID NO: 33721 - DNA, 20 bp, Campylobacter concisus
ctttcagcacggaagaagcg

SEQ ID NO: 33722 - DNA, 20 bp, Yersinia ruckeri
ggaagggttaagtgttaata

SEQ ID NO: 33723 - DNA, 20 bp, Paenibacillus glucanolyticus
ccctctgaatctgctagaga

SEQ ID NO: 33724 - DNA, 20 bp, Campylobacter rectus
taacggcttaaccgttaaac

SEQ ID NO: 33725 - DNA, 20 bp, Veillonella parvula
accgcatacgatctaacctc

SEQ ID NO: 33726 - DNA, 20 bp, Weissella paramesenteroides
taataccaacaaccgcatgg

SEQ ID NO: 33727 - DNA, 20 bp, Gemella haemolysans
aaaagttggttttgctaaca

SEQ ID NO: 33728 - DNA, 20 bp, Campylobacter concisus
atacgacatgtcaccgcatg

SEQ ID NO: 33729 - DNA, 20 bp, Leptotrichia buccalis
cggccagacaagtctggggt

SEQ ID NO: 33730 - DNA, 20 bp, Fusobacterium nucleatum
tcgcaaagctgtgaagtgga

SEQ ID NO: 33731 - DNA, 20 bp, Fusobacterium varium
accggatattatgactgagt

SEQ ID NO: 33732 - DNA, 20 bp, Microbacterium hominis
gcttgacatacaccagaaca

SEQ ID NO: 33733 - DNA, 20 bp, Staphylococcus chromogenes
ctaatgccggataacatatc

SEQ ID NO: 33734 - DNA, 20 bp, Neisseria sicca
aaccctccagagacggaggg

SEQ ID NO: 33735 - DNA, 20 bp, Ewingella americana
ggcttgacccgtggcttccg

SEQ ID NO: 33736 - DNA, 20 bp, Corynebacterium propinquum
acaatgcgcagcgagcctgt

SEQ ID NO: 33737 - DNA, 20 bp, Vibrio cholerae
cggttatcaccggcagtctc

SEQ ID NO: 33738 - DNA, 20 bp, Micromonas micros
aggttttcgaatcgtaaagc

SEQ ID NO: 33739 - DNA, 20 bp, Cellulomonas turbata
ctgcatggggagtgtctgga

SEQ ID NO: 33740 - DNA, 20 bp, Eggerthella lenta
aggcagcctgctgggccgca

SEQ ID NO: 33741 - DNA, 20 bp, Bacteroides thetaiotaomicron
cttgcaaactggagatggcg

SEQ ID NO: 33742 - DNA, 20 bp, Eggerthella lenta
aagggatggggtcgcggccc

SEQ ID NO: 33743 - DNA, 20 bp, Corynebacterium urealyticum
tgtagtttcccttcggggct

SEQ ID NO: 33744 - DNA, 20 bp, Brevibacillus choshinensis
gagataggagctctcttcgg

SEQ ID NO: 33745 - DNA, 20 bp, Chromobacterium violaceum
tcaccagaagtgggtaggct

SEQ ID NO: 33746 - DNA, 20 bp, Neisseria gonorrhoeae
gcttgcttctcgggtggcga

SEQ ID NO: 33747 - DNA, 20 bp, Moraxella osloensis
tctattgcaccagaagtagg

SEQ ID NO: 33748 - DNA, 20 bp, Prevotella melaninogenica
tggtacctggtatcagcggc

SEQ ID NO: 33749 - DNA, 20 bp, Tetragenococcus halophilus
gaacctatccatcagcgggg

SEQ ID NO: 33750 - DNA, 20 bp, Haemophilus segnis
tagtttaatagactaggtga

SEQ ID NO: 33751 - DNA, 20 bp, Leptotrichia buccalis
gtgcaggaatgccgatgatg

SEQ ID NO: 33752 - DNA, 20 bp, Bacteroides forsythus
ccaatctccaaaccctgtct

SEQ ID NO: 33753 - DNA, 20 bp, Bordetella bronchiseptica
tcctgtgcaactgacggtac

SEQ ID NO: 33754 - DNA, 20 bp, Alicyclobacillus acidocaldarius
ttcccccgcaagaagatgcc

SEQ ID NO: 33755 - DNA, 20 bp, Prevotella oris
ataacccgtcgaaagtcggc

SEQ ID NO: 33756 - DNA, 20 bp, Lactococcus lactis
cctttgagcgggggacaaca

SEQ ID NO: 33757 - DNA, 20 bp, Veillonella dispar
ggagttaatagacggaagca

SEQ ID NO: 33758 - DNA, 20 bp, Streptococcus equi
tgttaactatttaaaaggag

SEQ ID NO: 33759 - DNA, 20 bp, Vagococcus fluvialis
tggatgggcccgcgctgcat

SEQ ID NO: 33760 - DNA, 20 bp, Acinetobacter calcoaceticus
aggctactgaagttaatacc

SEQ ID NO: 33761 - DNA, 20 bp, Neisseria lactamica
tacccggttttgacatgtac

SEQ ID NO: 33762 - DNA, 20 bp, Lactococcus lactis
tacttgtaccgactggatga

SEQ ID NO: 33763 - DNA, 20 bp, Prevotella loescheii
gatgatacgcgaggaacctt

SEQ ID NO: 33764 - DNA, 20 bp, Paenibacillus validus
actgctctgagggtgacggt

SEQ ID NO: 33765 - DNA, 20 bp, Gemella morbillorum
tttaaggagggagccggtca

SEQ ID NO: 33766 - DNA, 20 bp, Prevotella melaninogenica
gaggaaggatttagagataa

SEQ ID NO: 33767 - DNA, 20 bp, Gemella haemolysans
gttagacacagatacaggtg

SEQ ID NO: 33768 - DNA, 20 bp, Actinomyces odontolyticus
ggcttgacatgcacggcggc

SEQ ID NO: 33769 - DNA, 20 bp, Alcaligenes faecalis
tttttaactgccgagctaga

SEQ ID NO: 33770 - DNA, 20 bp, Prevotella melaninogenica
ttttgtatggggataaagtc

SEQ ID NO: 33771 - DNA, 20 bp, Campylobacter coli
tctgctagtcagggcagtaa

SEQ ID NO: 33772 - DNA, 20 bp, Haemophilus ducreyi
gatgaggaaggcagttttgt

SEQ ID NO: 33773 - DNA, 20 bp, Brevibacterium epidermidis
gaaacagttcttctctttgg

SEQ ID NO: 33774 - DNA, 20 bp, Pediococcus inopinatus
agccggtggagtaaccttcg

SEQ ID NO: 33775 - DNA, 20 bp, Corynebacterium amycolatum
taggaccatggtgtggatgc

SEQ ID NO: 33776 - DNA, 20 bp, Clostridium sordellii
cggtctttcaagccagaagt

SEQ ID NO: 33777 - DNA, 20 bp, Staphylococcus saccharolyticus
aaaactctatctctagagga

SEQ ID NO: 33778 - DNA, 20 bp, Leptotrichia buccalis
gaagagtgtccgtgccgaag

SEQ ID NO: 33779 - DNA, 20 bp, Paenibacillus larvae
gatcttagttgccagcacgc

SEQ ID NO: 33780 - DNA, 20 bp, Prevotella corporis
cgcgtatccaaccttcccgc

SEQ ID NO: 33781 - DNA, 20 bp, Eikenella corrodens
agggaagaaaagggaagtgc

SEQ ID NO: 33782 - DNA, 20 bp, Staphylococcus condimenti
gccggataatatgcggaacc

SEQ ID NO: 33783 - DNA, 20 bp, Streptococcus equi
tcatgtgacggtaactaacc

SEQ ID NO: 33784 - DNA, 20 bp, Sporosarcina ureae
caaaatcgttcccagttcgg

SEQ ID NO: 33785 - DNA, 20 bp, Bacteroides ureolyticus
gaataatgacggtacctgat

SEQ ID NO: 33786 - DNA, 20 bp, Anaerobiospirillum succiniciproducens
cagagggaaacgataccgtg

SEQ ID NO: 33787 - DNA, 20 bp, Streptococcus pyogenes
gtagaacgctgagaactggt

SEQ ID NO: 33788 - DNA, 20 bp, Bacteroides vulgatus
ggcaagcggccaagcgaaag

SEQ ID NO: 33789 - DNA, 20 bp, Bacteroides stercoris
caccaaacctacgatggata

SEQ ID NO: 33790 - DNA, 20 bp, Gemella haemolysans
ttctggtgcttgcaccggaa

SEQ ID NO: 33791 - DNA, 20 bp, Prevotella intermedia
cttgcacattctggacgtcg

SEQ ID NO: 33792 - DNA, 20 bp, Bacteroides capilosus
aaccacgggctcaacctgtg

SEQ ID NO: 33793 - DNA, 20 bp, Bacteroides uniformis
ccgatggcatagttcttccg

SEQ ID NO: 33794 - DNA, 20 bp, Bacteroides vulgatus
cgcaaggcatctgtgaaggt

SEQ ID NO: 33795 - DNA, 20 bp, Actinomyces bovis
cttaaccccgtgatgccata

SEQ ID NO: 33796 - DNA, 20 bp, Prevotella intermedia
attctggacgtcgaccggcg

SEQ ID NO: 33797 - DNA, 20 bp, Fusobacterium mortiferum
catatgaaagctatatgcgc

SEQ ID NO: 33798 - DNA, 20 bp, Corynebacterium glucuronolyticum
gtggttggtgtggtggaaag

SEQ ID NO: 33799 - DNA, 20 bp, Pseudoramibacter alactolyticus
cctgtgagagaaccgcaagg

SEQ ID NO: 33800 - DNA, 20 bp, Turicella otitidis
tgacatacactggatcgggc

SEQ ID NO: 33801 - DNA, 20 bp, Vibrio parahaemolyticus
aggtggtagtgttaatagcg

SEQ ID NO: 33802 - DNA, 20 bp, Atopobium parvulum
ggcttgacatttaggtgaag

SEQ ID NO: 33803 - DNA, 20 bp, Corynebacterium auris
aggtggagctaatcgctaga

SEQ ID NO: 33804 - DNA, 20 bp, Acinetobacter junii
gtcgagcggagatgaggtgc

SEQ ID NO: 33805 - DNA, 20 bp, Leuconostoc pseudomesenteroides
ctttggcgtcacctagagat

SEQ ID NO: 33806 - DNA, 20 bp, Bacillus alcalophilus
taggtcggcaccttgacgga

SEQ ID NO: 33807 - DNA, 20 bp, Anaerococcus prevotii
ggtgaagataagatggatta

SEQ ID NO: 33808 - DNA, 20 bp, Brevibacillus thermoruber
gtggcgcaagctaccacttg

SEQ ID NO: 33809 - DNA, 20 bp, Microbacterium hominis
aaatacgggactctttggac

SEQ ID NO: 33810 - DNA, 20 bp, Pediococcus dextrinicus
tctagcgccaatcctagaga

SEQ ID NO: 33811 - DNA, 20 bp, Streptococcus porcinus
tcggagcagaagtgacaggt

SEQ ID NO: 33812 - DNA, 20 bp, Bacteroides ovatus
gtgaaggatgaaggctctat

SEQ ID NO: 33813 - DNA, 20 bp, Propionibacterium freudenreichii
tcagggatcgtctcgcggcc

SEQ ID NO: 33814 - DNA, 20 bp, Actinomyces meyeri
caactgtgggttgtggtgag

SEQ ID NO: 33815 - DNA, 20 bp, Streptococcus constellatus
ctgcatggtagatgtttaaa

SEQ ID NO: 33816 - DNA, 20 bp, Vibrio cholerae
gcttaaccaccttcctccct

SEQ ID NO: 33817 - DNA, 20 bp, Methylobacterium mesophilicum
cctttgacatggcgtgttac

SEQ ID NO: 33818 - DNA, 20 bp, Streptococcus infantarius
aaaactttagcttgctaaag

SEQ ID NO: 33819 - DNA, 20 bp, Aerococcus viridans
cgacattctggtctgttact

SEQ ID NO: 33820 - DNA, 20 bp, Weissella paramesenteroides
cgagcttgctctgatttgat

SEQ ID NO: 33821 - DNA, 20 bp, Oligella urethralis
aactaccgtcagcatcttaa

SEQ ID NO: 33822 - DNA, 20 bp, Leuconostoc lactis
gataaacatttgagtgagtg

SEQ ID NO: 33823 - DNA, 20 bp, Leuconostoc lactis
ataaacatttgagtgagtgg

SEQ ID NO: 33824 - DNA, 20 bp, Eggerthella lenta
gcaagggatggggtcgcggc

SEQ ID NO: 33825 - DNA, 20 bp, Suttonella indologenes
ttgcatttgaaactgggtaa

SEQ ID NO: 33826 - DNA, 20 bp, Prevotella bivia
aaatacgatctaatccttaa

SEQ ID NO: 33827 - DNA, 20 bp, Bacteroides ovatus
ggaaacagtatagccgtaag

SEQ ID NO: 33828 - DNA, 20 bp, Chromobacterium violaceum
gtgcttgcaccgctgacgag

SEQ ID NO: 33829 - DNA, 20 bp, Methylobacterium mesophilicum
cctttgacatggcgtgttat

SEQ ID NO: 33830 - DNA, 20 bp, Citrobacter sedlakii
atccacggaagactgcagag

SEQ ID NO: 33831 - DNA, 20 bp, Clostridium clostridiiforme
tgatgtggagcaaatcccaa

SEQ ID NO: 33832 - DNA, 20 bp, Streptococcus macacae
aggaagttacttcggtacac

SEQ ID NO: 33833 - DNA, 20 bp, Tetragenococcus halophilus
tgaaagaaagctcaaaggcg

SEQ ID NO: 33834 - DNA, 20 bp, Brevibacterium epidermidis
tcccaacccttttgggaggg

SEQ ID NO: 33835 - DNA, 20 bp, Prevotella bivia
gcagcgcgaactgtcagact

SEQ ID NO: 33836 - DNA, 20 bp, Brevibacillus choshinensis
atacttctttcagaccgcat

SEQ ID NO: 33837 - DNA, 20 bp, Gemella morbillorum
ggaagaatggatatgtagta

SEQ ID NO: 33838 - DNA, 20 bp, Enterococcus casseliflavus
actattttccgcatggaaga

SEQ ID NO: 33839 - DNA, 20 bp, Corynebacterium jeikeium
ttatttacgattcccgtgcc

SEQ ID NO: 33840 - DNA, 20 bp, Gemella haemolysans
tagggaagaatgattgtgta

SEQ ID NO: 33841 - DNA, 20 bp, Corynebacterium glucuronolyticum
agtgcgtgtgcgacaccgtg

SEQ ID NO: 33842 - DNA, 20 bp, Streptococcus canis
taccgcataaaagtgcttaa

SEQ ID NO: 33843 - DNA, 20 bp, Facklamia ignava
agaagggaacttgttccttt

SEQ ID NO: 33844 - DNA, 20 bp, Aerococcus viridans
aggcgacattctggtctgtt

SEQ ID NO: 33845 - DNA, 20 bp, Neisseria meningitidis
ctcgaatagcgcaaggccca

SEQ ID NO: 33846 - DNA, 20 bp, Bacillus alcalophilus
atgtgaaatatcggggctca

SEQ ID NO: 33847 - DNA, 20 bp, Leptotrichia buccalis
ggctagagtgctggagaggt

SEQ ID NO: 33848 - DNA, 20 bp, Microbacterium hominis
ttggacactggtgaacaggt

SEQ ID NO: 33849 - DNA, 20 bp, Comamonas testosteroni
tgctactagagcggctgatg

SEQ ID NO: 33850 - DNA, 20 bp, Brevibacillus brevis
taacctccggaaacggaagc

SEQ ID NO: 33851 - DNA, 20 bp, Clostridium botulinum
atggtaggtacaataagacg

SEQ ID NO: 33852 - DNA, 20 bp, Alicyclobacillus acidocaldarius
tccttcggcactggggtgtg

SEQ ID NO: 33853 - DNA, 20 bp, Finegoldia magna
tagtggagaggaaagtggaa

SEQ ID NO: 33854 - DNA, 20 bp, Myroides odoratus
gctacctggcaacaggatgc

SEQ ID NO: 33855 - DNA, 20 bp, Propionibacterium avidum
tgacatggactgggagtgct

SEQ ID NO: 33856 - DNA, 20 bp, Bacillus alcalophilus
gtaaaagatggctccggcta

SEQ ID NO: 33857 - DNA, 20 bp, Proteus penneri
cgatttagaggttgtggtct

SEQ ID NO: 33858 - DNA, 20 bp, Corynebacterium confusum
gacccttccacgggttttgt

SEQ ID NO: 33859 - DNA, 20 bp, Clostridium botulinum
cttatcaaagatttattgct

SEQ ID NO: 33860 - DNA, 20 bp, Moraxella osloensis
cctaacgaaagagggcgctt

SEQ ID NO: 33861 - DNA, 20 bp, Gemella haemolysans
ctttggttagacacagatac

SEQ ID NO: 33862 - DNA, 20 bp, Weeksella virosa
aggcttaaatgcataatgac

SEQ ID NO: 33863 - DNA, 20 bp, Streptococcus infantarius
gcatttaacccatgttagat

SEQ ID NO: 33864 - DNA, 20 bp, Facklamia ignava
agggaacttgttcctttcaa

SEQ ID NO: 33865 - DNA, 20 bp, Staphylococcus chromogenes
atatcgaaccgcatggttcg

SEQ ID NO: 33866 - DNA, 20 bp, Leptotrichia buccalis
attattgggcataaagggca

SEQ ID NO: 33867 - DNA, 20 bp, Propionibacterium freudenreichii
cgttcagagatgggcgtgcc

SEQ ID NO: 33868 - DNA, 20 bp, Alicyclobacillus acidocaldarius
gcctgaaaggcagattaccc

SEQ ID NO: 33869 - DNA, 20 bp, Gemella haemolysans
gagattgtgttgttctgacc

SEQ ID NO: 33870 - DNA, 20 bp, Tissierella praeacuta
gctcaaccgtggtaagcatt

SEQ ID NO: 33871 - DNA, 20 bp, Acinetobacter radioresistens
acctagattaatactttagg

SEQ ID NO: 33872 - DNA, 20 bp, Corynebacterium afermentans
tttccagacgtttcctctat

SEQ ID NO: 33873 - DNA, 20 bp, Bacteroides fragilis
gatgtggaaacatgtcagtg

SEQ ID NO: 33874 - DNA, 20 bp, Facklamia sourekii
agcactgttattagagaaga

SEQ ID NO: 33875 - DNA, 20 bp, Atopobium parvulum
cggaaacgtcgtggccgaaa

SEQ ID NO: 33876 - DNA, 20 bp, Neisseria polysaccharea
aagtgggtaggataaccgca

SEQ ID NO: 33877 - DNA, 20 bp, Cardiobacterium hominis
cagtagggaggaaaggtgcg

SEQ ID NO: 33878 - DNA, 20 bp, Brevibacillus reuszeri
taccggataggtttttggac

SEQ ID NO: 33879 - DNA, 20 bp, Clostridium tetani
gtttcgcatgaaactttaac

SEQ ID NO: 33880 - DNA, 20 bp, Streptococcus anginosus
ggaagaacgagtgtgagaat

SEQ ID NO: 33881 - DNA, 20 bp, Pasteurella multocida
agatagcatcattgacgtta

SEQ ID NO: 33882 - DNA, 20 bp, Nocardia asteroides
tcgagcgggggaggttgctt

SEQ ID NO: 33883 - DNA, 20 bp, Streptococcus canis
cttgcactagtctaaggagt

SEQ ID NO: 33884 - DNA, 20 bp, Lactococcus lactis
cgtggggaatctgcctttga

SEQ ID NO: 33885 - DNA, 20 bp, Clostridium ramosum
acactgcatggtgaccgtat

SEQ ID NO: 33886 - DNA, 20 bp, Actinomyces neuii
taaagggcatcttggttcgg

SEQ ID NO: 33887 - DNA, 20 bp, Haemophilus ducreyi
tgacatccatagaagaactc

SEQ ID NO: 33888 - DNA, 20 bp, Weeksella virosa
tcggacagaatgcaaggtgc

SEQ ID NO: 33889 - DNA, 20 bp, Haemophilus haemolyticus
gagggtggcgaaactgcgag

SEQ ID NO: 33890 - DNA, 20 bp, Kingella kingae
tagatagggtaaccgcaagg

SEQ ID NO: 33891 - DNA, 20 bp, Bacteroides stercoris
gctttttgtatgtaccgtat

SEQ ID NO: 33892 - DNA, 20 bp, Pseudoramibacter alactolyticus
cacccgaagcctgtgagaga

SEQ ID NO: 33893 - DNA, 20 bp, Leptotrichia buccalis
accgcaagcctgccctggaa

SEQ ID NO: 33894 - DNA, 20 bp, Rothia mucilaginosa
agtggttatagatgggctca

SEQ ID NO: 33895 - DNA, 20 bp, Veillonella atypica
ctcttcttcggaagccagaa

SEQ ID NO: 33896 - DNA, 20 bp, Atopobium parvulum
gagtcgattgcacccgaagt

SEQ ID NO: 33897 - DNA, 20 bp, Acinetobacter genospecies 3
tgcaaagagggcggttacca

SEQ ID NO: 33898 - DNA, 20 bp, Turicella otitidis
ggtgtgagggtcttttcacg

SEQ ID NO: 33899 - DNA, 20 bp, Acinetobacter calcoaceticus
ttaataccttcagatagtgg

SEQ ID NO: 33900 - DNA, 20 bp, Bacteroides ovatus
attggaaacagtatagccgt

SEQ ID NO: 33901 - DNA, 20 bp, Eggerthella lenta
cctcgcccccctcctggggg

SEQ ID NO: 33902 - DNA, 20 bp, Vibrio mimicus
ggttaagttaataccttaat

SEQ ID NO: 33903 - DNA, 20 bp, Streptococcus anginosus
taaggaagaacgagtgtgag

SEQ ID NO: 33904 - DNA, 20 bp, Paenibacillus larvae
ctcaaaagccgatctcagtt

SEQ ID NO: 33905 - DNA, 20 bp, Fusobacterium nucleatum
atagtgaaaggcggctttgc

SEQ ID NO: 33906 - DNA, 20 bp, Propionibacterium avidum
catggactgggagtgctcag

SEQ ID NO: 33907 - DNA, 20 bp, Streptococcus constellatus
acaggatgcaccgtagttta

SEQ ID NO: 33908 - DNA, 20 bp, Weeksella virosa
tctatattgacgctgatgga

SEQ ID NO: 33909 - DNA, 20 bp, Campylobacter sputorum
tttgggaagaataatgacgg

SEQ ID NO: 33910 - DNA, 20 bp, Pseudoramibacter alactolyticus
tggttttgtcgcatggcaag

SEQ ID NO: 33911 - DNA, 20 bp, Veillonella atypica
gttaatcgggacgaatggtt

SEQ ID NO: 33912 - DNA, 20 bp, Bacillus coagulans
ggcgccttgacggtacccgg

SEQ ID NO: 33913 - DNA, 20 bp, Chromobacterium violaceum
agcagccgacgtctgattag

SEQ ID NO: 33914 - DNA, 20 bp, Cardiobacterium hominis
cttaggagggcgcttgccac

SEQ ID NO: 33915 - DNA, 20 bp, Staphylococcus aureus
gtctttcacttttgaaccat

SEQ ID NO: 33916 - DNA, 20 bp, Chromobacterium violaceum
agggtgcttgcaccgctgac

SEQ ID NO: 33917 - DNA, 20 bp, Bacillus alcalophilus
tttgtaaaagatggctccgg

SEQ ID NO: 33918 - DNA, 20 bp, Bacteroides uniformis
gggcagcatgaacttagctt

SEQ ID NO: 33919 - DNA, 20 bp, Neisseria meningitidis
aaaggtcccctgctttctct

SEQ ID NO: 33920 - DNA, 20 bp, Corynebacterium falsenii
aggtgtggggatctttctac

SEQ ID NO: 33921 - DNA, 20 bp, Leptotrichia buccalis
tgtggatagtgattggggtg

SEQ ID NO: 33922 - DNA, 20 bp, Acinetobacter lwoffii
ctagttaatacctagggata

SEQ ID NO: 33923 - DNA, 20 bp, Anaerococcus prevotii
gagatgttcagttaagtctg

SEQ ID NO: 33924 - DNA, 20 bp, Tissierella praeacuta
cgaagtttttaaagaagatt

SEQ ID NO: 33925 - DNA, 20 bp, Ewingella americana
ttggaggttgtgggcttgac

SEQ ID NO: 33926 - DNA, 20 bp, Arcanobacterium haemolyticum
aggcgaaagttgagggtagg

SEQ ID NO: 33927 - DNA, 20 bp, Anaerococcus tetradius
aaccaaagatttatcggtgt

SEQ ID NO: 33928 - DNA, 20 bp, Propionibacterium freudenreichii
atgggcgtgcctttttggct

SEQ ID NO: 33929 - DNA, 20 bp, Veillonella atypica
aagagcgatggaagcttgct

SEQ ID NO: 33930 - DNA, 20 bp, Bacillus pallidus
aaccgcatggttttcggttg

SEQ ID NO: 33931 - DNA, 20 bp, Streptococcus infantarius
ttcgcaactcttcaaacttt

SEQ ID NO: 33932 - DNA, 20 bp, Corynebacterium afermentans
attctttccagctactgacc

SEQ ID NO: 33933 - DNA, 20 bp, Granulicatella adiacens
cttctgctgatggatggacc

SEQ ID NO: 33934 - DNA, 20 bp, Veillonella dispar
atagatgaaaggtggcctct

SEQ ID NO: 33935 - DNA, 20 bp, Clostridium paraputrificum
gtagcttcgcatgaagtagc

SEQ ID NO: 33936 - DNA, 20 bp, Corynebacterium glucuronolyticum
cgcgaaagccagtctcagtt

SEQ ID NO: 33937 - DNA, 20 bp, Clostridium butyricum
gagtgagcaaaactataaaa

SEQ ID NO: 33938 - DNA, 20 bp, Arcanobacterium haemolyticum
cttgggataagccttggaaa

SEQ ID NO: 33939 - DNA, 20 bp, Acinetobacter haemolyticus
gtagcttgctacattaccta

SEQ ID NO: 33940 - DNA, 20 bp, Fusobacterium varium
gagctgcaaacctgcgaggg

SEQ ID NO: 33941 - DNA, 20 bp, Brevibacillus choshinensis
ctagagataggagctctctt

SEQ ID NO: 33942 - DNA, 20 bp, Bacillus alcalophilus
aatcacatggttcttttgta

SEQ ID NO: 33943 - DNA, 20 bp, Pseudomonas citronellolis
tgaagggagcttgcttctgg

SEQ ID NO: 33944 - DNA, 20 bp, Actinomyces turicensis
ctgcagagatgtggtggcat

SEQ ID NO: 33945 - DNA, 20 bp, Prevotella corporis
agcgggcggaattcgtggtg

SEQ ID NO: 33946 - DNA, 20 bp, Prevotella denticola
attgcatccaatcttgaaag

SEQ ID NO: 33947 - DNA, 20 bp, Brochothrix campestris
ccaaagccggtttggtaacc

SEQ ID NO: 33948 - DNA, 20 bp, Sporosarcina pasteurii
cccttagtgctggagcaaac

SEQ ID NO: 33949 - DNA, 20 bp, Corynebacterium urealyticum
accggataggaccaatcttt

SEQ ID NO: 33950 - DNA, 20 bp, Corynebacterium glucuronolyticum
gcgatacgggcattgcttga

SEQ ID NO: 33951 - DNA, 20 bp, Tetragenococcus halophilus
ctaataccgcatatggcttt

SEQ ID NO: 33952 - DNA, 20 bp, Tissierella praeacuta
ctgtcgaaggtagggtcaat

SEQ ID NO: 33953 - DNA, 20 bp, Aerococcus viridans
ccgcataatatcttcttccg

SEQ ID NO: 33954 - DNA, 20 bp, Aneurinibacillus aneurinilyticus
gagagtgcgccaatccctta

SEQ ID NO: 33955 - DNA, 20 bp, Brevibacillus brevis
ggaaaagctgaaagtcggtt

SEQ ID NO: 33956 - DNA, 20 bp, Corynebacterium group ANF
gatgaaaggcggcgcaagct

SEQ ID NO: 33957 - DNA, 20 bp, Bacillus schlegellii
gaagtcgtacaaggtaccgt

SEQ ID NO: 33958 - DNA, 20 bp, Pseudoramibacter alactolyticus
gaaccgcaaggactcagcag

SEQ ID NO: 33959 - DNA, 20 bp, Bacillus subtilis
catggttcagacataaaagg

SEQ ID NO: 33960 - DNA, 20 bp, Gemella bergeri
tgtaacacctgaagacggtg

SEQ ID NO: 33961 - DNA, 20 bp, Photobacterium damselae
gagcggcagcgacttaactg

SEQ ID NO: 33962 - DNA, 20 bp, Bacteroides thetaiotaomicron
cgaggggcagcatttcagtt

SEQ ID NO: 33963 - DNA, 20 bp, Corynebacterium glucuronolyticum
caggggcttaacttttggtt

SEQ ID NO: 33964 - DNA, 20 bp, Corynebacterium group F
tttgtgtaagtccacagctt

SEQ ID NO: 33965 - DNA, 20 bp, Propionibacterium acnes
ggtacagagagtggcgagcc

SEQ ID NO: 33966 - DNA, 20 bp, Cardiobacterium hominis
cttgctccaggcgtcgagtg

SEQ ID NO: 33967 - DNA, 20 bp, Clostridium botulinum
tgacggtactagaggaggaa

SEQ ID NO: 33968 - DNA, 20 bp, Bacillus sp
tctacttgcttcccgcgctc

SEQ ID NO: 33969 - DNA, 20 bp, Eggerthella lenta
tcagcagggaagaaattcga

SEQ ID NO: 33970 - DNA, 20 bp, Corynebacterium coyleae
ttgtacacaccgcccgtaca

SEQ ID NO: 33971 - DNA, 20 bp, Pseudomonas luteola
gaggaagggttgtaacctaa

SEQ ID NO: 33972 - DNA, 20 bp, Bacteroides thetaiotaomicron
tatgggaataaagttttcca

SEQ ID NO: 33973 - DNA, 20 bp, Prevotella melaninogenica
cagcgcatactggtttcctt

SEQ ID NO: 33974 - DNA, 20 bp, Clostridium limosum
ggtttcaatacttcggtgcc

SEQ ID NO: 33975 - DNA, 20 bp, Streptococcus hyovaginalis
agcgaagaacgggagtaaga

SEQ ID NO: 33976 - DNA, 20 bp, Paenibacillus peoriae
tcgagcggggttgtttagaa

SEQ ID NO: 33977 - DNA, 20 bp, Bacteroides uniformis
cctgaagtgcgtaaccgcag

SEQ ID NO: 33978 - DNA, 20 bp, Lactococcus lactis
gttttaagtttgaaagatgc

SEQ ID NO: 33979 - DNA, 20 bp, Anaerococcus prevotii
agaacccttcggggtgaaga

SEQ ID NO: 33980 - DNA, 20 bp, Anaerococcus tetradius
cctatagctcaactatagta

SEQ ID NO: 33981 - DNA, 20 bp, Geobacillus thermoglucosidasius
ccttgcgggaggacagggtg

SEQ ID NO: 33982 - DNA, 20 bp, Chryseobacterium meningosepticum
gcgacgatctttagggggcc

SEQ ID NO: 33983 - DNA, 20 bp, Chromobacterium violaceum
tttcaccagaagtgggtagg

SEQ ID NO: 33984 - DNA, 20 bp, Bacteroides fragilis
aaggatggggatgcgttcca

SEQ ID NO: 33985 - DNA, 20 bp, Facklamia ignava
tagttgttccagtcgcatga

SEQ ID NO: 33986 - DNA, 20 bp, Arcanobacterium haemolyticum
aactccggggctgcagtggg

SEQ ID NO: 33987 - DNA, 20 bp, Lactococcus lactis
actctgttggtagagaagaa

SEQ ID NO: 33988 - DNA, 20 bp, Gemella bergeri
cacaaaacagacggtaccta

SEQ ID NO: 33989 - DNA, 20 bp, Bacillus flexus
ttagaagcttgcttctatga

SEQ ID NO: 33990 - DNA, 20 bp, Comamonas terrigena
ccgcatgagaactgaggttg

SEQ ID NO: 33991 - DNA, 20 bp, Morganella morganii
cgggcctcgcaccatcagat

SEQ ID NO: 33992 - DNA, 20 bp, Anaerobiospirillum succiniciproducens
taccgcatactcccttcggg

SEQ ID NO: 33993 - DNA, 20 bp, Campylobacter sputorum
gtgaaatctagtagcttaac

SEQ ID NO: 33994 - DNA, 20 bp, Corynebacterium group F
gacaactttttggatattgt

SEQ ID NO: 33995 - DNA, 20 bp, Capnocytophaga gingivalis
actaacagacaattgacgct

SEQ ID NO: 33996 - DNA, 20 bp, Clostridium tetani
cgaaggcggtttcctggact

SEQ ID NO: 33997 - DNA, 20 bp, Listeria innocua
agtgtggcgcatgccacgct

SEQ ID NO: 33998 - DNA, 20 bp, Propionibacterium propionicus
tgacggtagcagtagaagaa

SEQ ID NO: 33999 - DNA, 20 bp, Corynebacterium pilosum
tcgtctgtggaagtccgggg

SEQ ID NO: 34000 - DNA, 20 bp, Staphylococcus aureus
tcgagcgaacggacgagaag

SEQ ID NO: 34001 - DNA, 20 bp, Prevotella melaninogenica
gagggatggtgtaatgcaaa

SEQ ID NO: 34002 - DNA, 20 bp, Bacteroides stercoris
aatgtcagcggccaagcgaa

SEQ ID NO: 34003 - DNA, 20 bp, Pasteurella multocida
tgacgctcatatgcgaaagc

SEQ ID NO: 34004 - DNA, 20 bp, Clostridium bifermentans
gacatcccactgacctctcc

SEQ ID NO: 34005 - DNA, 20 bp, Oligella urethralis
ctctctcatgctgccgttcg

SEQ ID NO: 34006 - DNA, 20 bp, Prevotella corporis
cggatggggatgcgtccgat

SEQ ID NO: 34007 - DNA, 20 bp, Acinetobacter junii
gaggaggctactgagactaa

SEQ ID NO: 34008 - DNA, 20 bp, Comamonas terrigena
tgctactagagcggccgatg

SEQ ID NO: 34009 - DNA, 20 bp, Fusobacterium varium
gcctcttcggaggaacttgg

SEQ ID NO: 34010 - DNA, 20 bp, Campylobacter lari
tgctgtgctagtcacggcag

SEQ ID NO: 34011 - DNA, 20 bp, Gemella bergeri
gcatgggagatgtttaaaag

SEQ ID NO: 34012 - DNA, 20 bp, Haemophilus haemolyticus
agtgtcgagagacgaaagtg

SEQ ID NO: 34013 - DNA, 20 bp, Corynebacterium afermentans
ttccagctactgaccatgcg

SEQ ID NO: 34014 - DNA, 20 bp, Anaerococcus tetradius
tcctatagctcaactatagt

SEQ ID NO: 34015 - DNA, 20 bp, Bacteroides uniformis
gcgtaaccgcaaggagcgcc

SEQ ID NO: 34016 - DNA, 20 bp, Bacteroides thetaiotaomicron
tttccacgtgtggaattttg

SEQ ID NO: 34017 - DNA, 20 bp, Microbacterium terregens
tcgaacggtgaaagagagct

SEQ ID NO: 34018 - DNA, 20 bp, Proteus vulgaris
ccaaagcaggggctcttcgg

SEQ ID NO: 34019 - DNA, 20 bp, Campylobacter lari
tggggtgctagtcatctcag

SEQ ID NO: 34020 - DNA, 20 bp, Clostridium histolyticum
gacatcccgagaatcctgtg

SEQ ID NO: 34021 - DNA, 20 bp, Paenibacillus thiaminolyticus
ggaatcgggaaaggcggagc

SEQ ID NO: 34022 - DNA, 20 bp, Weeksella virosa
gatcaataagtcagtggtga

SEQ ID NO: 34023 - DNA, 20 bp, Eikenella corrodens
aagaaaagggaagtgctaat

SEQ ID NO: 34024 - DNA, 20 bp, Corynebacterium xerosis
ggaaaggcctgcagcttgct

SEQ ID NO: 34025 - DNA, 20 bp, Actinomyces turicensis
caaggcttgacatgcaccct

SEQ ID NO: 34026 - DNA, 20 bp, Streptococcus hyovaginalis
tgtgacggtagcttatcaga

SEQ ID NO: 34027 - DNA, 20 bp, Bacteroides forsythus
gaccggatgccaatctccaa

SEQ ID NO: 34028 - DNA, 20 bp, Streptococcus dysgalactiae
tggtgcttgcaccggttcaa

SEQ ID NO: 34029 - DNA, 20 bp, Fusobacterium nucleatum
gtcccttcggggaaacctaa

SEQ ID NO: 34030 - DNA, 20 bp, Clostridium clostridiiforme
agtctgaagtgaaaacccag

SEQ ID NO: 34031 - DNA, 20 bp, Corynebacterium falsenii
cgctagggaagaagccactt

SEQ ID NO: 34032 - DNA, 20 bp, Leuconostoc lactis
tagggttgaaagatggtttc

SEQ ID NO: 34033 - DNA, 20 bp, Clostridium limosum
aagcatgcgtaggcggatac

SEQ ID NO: 34034 - DNA, 20 bp, Stenotrophomonas maltophilia
tgcagtggaaactggacgac

SEQ ID NO: 34035 - DNA, 20 bp, Prevotella loescheii
gctactgacgctgatgctcg

SEQ ID NO: 34036 - DNA, 20 bp, Bacillus psychrosaccharolyticus
gagaagatggaaagacggtc

SEQ ID NO: 34037 - DNA, 20 bp, Enterobacter gergoviae
gggagtgaggttaataacct

SEQ ID NO: 34038 - DNA, 20 bp, Streptococcus thermophilus
ggcaattgctccactacaag

SEQ ID NO: 34039 - DNA, 20 bp, Clostridium clostridiiforme
gcgaagcaagtctgaagtga

SEQ ID NO: 34040 - DNA, 20 bp, Prevotella melaninogenica
gaaacggcattgagtgcttg

SEQ ID NO: 34041 - DNA, 20 bp, Clostridium paraputrificum
ttcgcatgaagtagcaatta

SEQ ID NO: 34042 - DNA, 20 bp, Streptococcus porcinus
gcttgcaccagtctaatgag

SEQ ID NO: 34043 - DNA, 20 bp, Streptococcus porcinus
gcaccagtctaatgagttgc

SEQ ID NO: 34044 - DNA, 20 bp, Aneurinibacillus thermoaerophilus
agaaccgccgggatgacctc

SEQ ID NO: 34045 - DNA, 20 bp, Clostridium botulinum
gagcaaaacttataaaacct

SEQ ID NO: 34046 - DNA, 20 bp, Pediococcus inopinatus
aagtcggacgcactttcgtt

SEQ ID NO: 34047 - DNA, 20 bp, Bacteroides merdae
ttggtcaatggccgagaggc

SEQ ID NO: 34048 - DNA, 20 bp, Porphyromonas levii
gggtacctgaagacggttac

SEQ ID NO: 34049 - DNA, 20 bp, Peptostreptococcus anaerobius
aaccgcaaggaggaagtcgt

SEQ ID NO: 34050 - DNA, 20 bp, Enterococcus faecalis
ttggaaagaggagtggcgga

SEQ ID NO: 34051 - DNA, 20 bp, Clostridium botulinum
gcatgattttcttatcaaag

SEQ ID NO: 34052 - DNA, 20 bp, Bacteroides fragilis
tggaatgatgtggaaacatg

SEQ ID NO: 34053 - DNA, 20 bp, Bacteroides ovatus
cgtgaaggatgaaggctcta

SEQ ID NO: 34054 - DNA, 20 bp, Streptococcus equi
ttagagataagaagttactt

SEQ ID NO: 34055 - DNA, 20 bp, Prevotella melaninogenica
atttgaagtaaagatttatc

SEQ ID NO: 34056 - DNA, 20 bp, Campylobacter rectus
tgctatttaatcttagtggc

SEQ ID NO: 34057 - DNA, 20 bp, Propionibacterium avidum
gctttcagcaggggcgaagc

SEQ ID NO: 34058 - DNA, 20 bp, Stenotrophomonas maltophilia
ggatgactagaatgtggtag

SEQ ID NO: 34059 - DNA, 20 bp, Lactococcus garvieae
ctaaggtaagaccgatgact

SEQ ID NO: 34060 - DNA, 20 bp, Prevotella bivia
agcacctagtgttagcggct

SEQ ID NO: 34061 - DNA, 20 bp, Eggerthella lenta
gcagcctgctgggccgcaac

SEQ ID NO: 34062 - DNA, 20 bp, Facklamia languida
gaagccggtggcctaactta

SEQ ID NO: 34063 - DNA, 20 bp, Bacteroides forsythus
ccgggcgaccggatgccaat

SEQ ID NO: 34064 - DNA, 20 bp, Serratia marcescens
atacgttcatcaattgacgt

SEQ ID NO: 34065 - DNA, 20 bp, Neisseria subflava
gactcgagtgtgtcagaggg

SEQ ID NO: 34066 - DNA, 20 bp, Corynebacterium hoagii
ctgtcgcatggcgggggttg

SEQ ID NO: 34067 - DNA, 20 bp, Clostridium paraputrificum
tgaattaccatgtaatgtgg

SEQ ID NO: 34068 - DNA, 20 bp, Peptostreptococcus anaerobius
taatacatgataatatatat

SEQ ID NO: 34069 - DNA, 20 bp, Cardiobacterium hominis
cgcacgcaggcggttgccca

SEQ ID NO: 34070 - DNA, 20 bp, Corynebacterium group F
tgctaccttgtgaggggatg

SEQ ID NO: 34071 - DNA, 20 bp, Actinomyces odontolyticus
gcatttagttggtcgtgtgc

SEQ ID NO: 34072 - DNA, 20 bp, Bacillus lentus
aagataatctatccggtatt

SEQ ID NO: 34073 - DNA, 20 bp, Propionibacterium freudenreichii
agagatgggcgtgccttttt

SEQ ID NO: 34074 - DNA, 20 bp, Prevotella intermedia
gttaccttccaactagctaa

SEQ ID NO: 34075 - DNA, 20 bp, Pediococcus acidilactici
gcccagaagcaggggataac

SEQ ID NO: 34076 - DNA, 20 bp, Aneurinibacillus aneurinilyticus
atggtctgaaagagaaagac

SEQ ID NO: 34077 - DNA, 20 bp, Paenibacillus apiarius
ttgccagggaagaacgccag

SEQ ID NO: 34078 - DNA, 20 bp, Clostridium subterminale
agctaaacttataaaaccaa

SEQ ID NO: 34079 - DNA, 20 bp, Facklamia sourekii
agtgttaagtgttggggggc

SEQ ID NO: 34080 - DNA, 20 bp, Anaerococcus tetradius
cttggaataatctgggagcc

SEQ ID NO: 34081 - DNA, 20 bp, Cardiobacterium hominis
atgaaagaggaaagcggaat

SEQ ID NO: 34082 - DNA, 20 bp, Tetragenococcus halophilus
gagcaagccaagccgcaagg

SEQ ID NO: 34083 - DNA, 20 bp, Streptococcus hyovaginalis
aatgatttaaaaggagcaat

SEQ ID NO: 34084 - DNA, 20 bp, Actinomyces neuii
gcagcgacgtcgtgtggggg

SEQ ID NO: 34085 - DNA, 20 bp, Brevibacillus choshinensis
gaccctcctagagataggag

SEQ ID NO: 34086 - DNA, 20 bp, Alicyclobacillus acidocaldarius
tcctcgcgggcgtatccggc

SEQ ID NO: 34087 - DNA, 20 bp, Acinetobacter haemolyticus
gaggctactctagttaatac

SEQ ID NO: 34088 - DNA, 20 bp, Clostridium ramosum
caggtcttgacatactcata

SEQ ID NO: 34089 - DNA, 20 bp, Stenotrophomonas maltophilia
agctggctaatacccggttg

SEQ ID NO: 34090 - DNA, 20 bp, Brevibacillus laterosporus
tgctacttcgcgagaagatg

SEQ ID NO: 34091 - DNA, 20 bp, Kingella kingae
catacgctttgagaaggaaa

SEQ ID NO: 34092 - DNA, 20 bp, Clostridium clostridiiforme
tagacggttaagcaagtctg

SEQ ID NO: 34093 - DNA, 20 bp, Bacillus circulans
cctctcatgaggaaaagctg

SEQ ID NO: 34094 - DNA, 20 bp, Corynebacterium xerosis
cttgtggctcgtatacaggt

SEQ ID NO: 34095 - DNA, 20 bp, Anaerococcus prevotii
tataccctcttcttcggaag

SEQ ID NO: 34096 - DNA, 20 bp, Eschericchia vulneris
cggttaataaccgtgtcgat

SEQ ID NO: 34097 - DNA, 20 bp, Gemella bergeri
gctaagtgttggtctcaaaa

SEQ ID NO: 34098 - DNA, 20 bp, Cellulosimicrobium cellulans
cttcgggataactccgggaa

SEQ ID NO: 34099 - DNA, 20 bp, Gemella haemolysans
gaacctgcctcatagactgg

SEQ ID NO: 34100 - DNA, 20 bp, Actinomyces radingae
ctcgtgaaggtggagtcgct

SEQ ID NO: 34101 - DNA, 20 bp, Enterococcus raffinosus
agatggccttgctatcactt

SEQ ID NO: 34102 - DNA, 20 bp, Pasteurella multocida
cagcgagagtgcgagcttga

SEQ ID NO: 34103 - DNA, 20 bp, Gemella bergeri
caaaagagatcagtgctgca

SEQ ID NO: 34104 - DNA, 20 bp, Propionibacterium freudenreichii
aaggcccctttcggggggta

SEQ ID NO: 34105 - DNA, 20 bp, Streptococcus gordonii
attgcatgataattaattga

SEQ ID NO: 34106 - DNA, 20 bp, Globicatella sanguinis
tgcaagtcgaacgaaccaca

SEQ ID NO: 34107 - DNA, 20 bp, Anaerococcus prevotii
ctaggtatcggaataattcg

SEQ ID NO: 34108 - DNA, 20 bp, Paenibacillus lautus
gtggaataatgaaagacgga

SEQ ID NO: 34109 - DNA, 20 bp, Prevotella loescheii
gggtgaaaccggtgattggg

SEQ ID NO: 34110 - DNA, 20 bp, Pseudoramibacter alactolyticus
caaggactcagcagtcgaag

SEQ ID NO: 34111 - DNA, 20 bp, Streptococcus uberis
aggggcaaatgcttcactat

SEQ ID NO: 34112 - DNA, 20 bp, Anaerococcus prevotii
tatagagatataccctcttc

SEQ ID NO: 34113 - DNA, 20 bp, Anaerococcus tetradius
tcatcatctgacgctgaggt

SEQ ID NO: 34114 - DNA, 20 bp, Prevotella melaninogenica
gtacctggtatcagcggcta

SEQ ID NO: 34115 - DNA, 20 bp, Stenotrophomonas maltophilia
gctaatacccggttgggatg

SEQ ID NO: 34116 - DNA, 20 bp, Cardiobacterium hominis
acctgcgcaattgacgttac

SEQ ID NO: 34117 - DNA, 20 bp, Staphylococcus auricularis
cagtgaaaggcggctttgct

SEQ ID NO: 34118 - DNA, 20 bp, Acinetobacter calcoaceticus
tgcttgcactatcacttagc

SEQ ID NO: 34119 - DNA, 20 bp, Moraxella lacunata
tggttaatacctacaagccc

SEQ ID NO: 34120 - DNA, 20 bp, Propionibacterium acnes
tggtacagagagtggcgagc

SEQ ID NO: 34121 - DNA, 20 bp, Corynebacterium xerosis
ttttctgacggtagatggag

SEQ ID NO: 34122 - DNA, 20 bp, Fusobacterium nucleatum
gcctcacagatagggacaac

SEQ ID NO: 34123 - DNA, 20 bp, Tissierella praeacuta
gatttcttcggaatgaaact

SEQ ID NO: 34124 - DNA, 20 bp, Clostridium barati
aagttccttcgggaacagag

SEQ ID NO: 34125 - DNA, 20 bp, Pediococcus pentosaceus
acccagtgacggtatttaac

SEQ ID NO: 34126 - DNA, 20 bp, Moraxella lacunata
cttacgagagaaagggggct

SEQ ID NO: 34127 - DNA, 20 bp, Alicyclobacillus acidocaldarius
ctcctcgcgggcgtatccgg

SEQ ID NO: 34128 - DNA, 20 bp, Corynebacterium amycolatum
cgaagggtttctgacggtag

SEQ ID NO: 34129 - DNA, 20 bp, Streptococcus agalactiae
tgaggtttggtgtttacact

SEQ ID NO: 34130 - DNA, 20 bp, Prevotella melaninogenica
gcccttcggggtctctgtga

SEQ ID NO: 34131 - DNA, 20 bp, Streptococcus infantarius
cagcatttaacccatgttag

SEQ ID NO: 34132 - DNA, 20 bp, Helcococcus ovis
aaggcgactttctggaatct

SEQ ID NO: 34133 - DNA, 20 bp, Bacillus pumilus
ccggatagttccttgaaccg

SEQ ID NO: 34134 - DNA, 20 bp, Brevibacillus choshinensis
aagagcttgctcttcggcgg

SEQ ID NO: 34135 - DNA, 20 bp, Bacteroides fragilis
taggtggactggtaagtcag

SEQ ID NO: 34136 - DNA, 20 bp, Vibrio hollisae
accatgggagtggaatccgc

SEQ ID NO: 34137 - DNA, 20 bp, Kingella kingae
gcatacgctttgagaaggaa

SEQ ID NO: 34138 - DNA, 20 bp, Clostridium glycolicum
gtaagctcttgaaactggga

SEQ ID NO: 34139 - DNA, 20 bp, Pseudomonas fluorescens
acgtgagtattttgacgtta

SEQ ID NO: 34140 - DNA, 20 bp, Lactococcus raffinolactis
ttgttagagaagaacgttgc

SEQ ID NO: 34141 - DNA, 20 bp, Gordonia bronchialis
gaggatcgccgcagagatgt

SEQ ID NO: 34142 - DNA, 20 bp, Anaerococcus prevotii
attaataccaaatgaaatca

SEQ ID NO: 34143 - DNA, 20 bp, Clostridium botulinum
caactccccctgtgccgcag

SEQ ID NO: 34144 - DNA, 20 bp, Prevotella loescheii
ctggggagtacgccggcaac

SEQ ID NO: 34145 - DNA, 20 bp, Corynebacterium auris
cggtacagcgcgtgtgcgat

SEQ ID NO: 34146 - DNA, 20 bp, Cardiobacterium hominis
cgcaggcggttgcccaagtc

SEQ ID NO: 34147 - DNA, 20 bp, Propionibacterium freudenreichii
gtcagggatcgtctcgcggc

SEQ ID NO: 34148 - DNA, 20 bp, Propionibacterium freudenreichii
gcgttcagagatgggcgtgc

SEQ ID NO: 34149 - DNA, 20 bp, Pediococcus pentosaceus
cccagtgacggtatttaacc

SEQ ID NO: 34150 - DNA, 20 bp, Streptococcus ratti
ccgcataatattaattattg

SEQ ID NO: 34151 - DNA, 20 bp, Actinomyces meyeri
ttgggataacgcccggaaat

SEQ ID NO: 34152 - DNA, 20 bp, Moraxella osloensis
agtctattgcaccagaagta

SEQ ID NO: 34153 - DNA, 20 bp, Bacteroides merdae
caggggtcccgcatgggaat

SEQ ID NO: 34154 - DNA, 20 bp, Gemella haemolysans
agggagccggtcacggtggg

SEQ ID NO: 34155 - DNA, 20 bp, Brevundimonas vesicularis
atgagagaggtgtgtggaac

SEQ ID NO: 34156 - DNA, 20 bp, Bacillus sp
ctctccgcatggagagagat

SEQ ID NO: 34157 - DNA, 20 bp, Shewanella algae
atggataagcccaggtggga

SEQ ID NO: 34158 - DNA, 20 bp, Gemella haemolysans
ctgacctttggttagacaca

SEQ ID NO: 34159 - DNA, 20 bp, Fusobacterium varium
tttggttatgaaagctatat

SEQ ID NO: 34160 - DNA, 20 bp, Corynebacterium afermentans
actgtttccagacgtttcct

SEQ ID NO: 34161 - DNA, 20 bp, Brevibacterium epidermidis
tctggaaacagttcttctct

SEQ ID NO: 34162 - DNA, 20 bp, Providencia stuartii
gactggttagctagagtctt

SEQ ID NO: 34163 - DNA, 20 bp, Bacteroides capilosus
gccgaaggtgggttcgataa

SEQ ID NO: 34164 - DNA, 20 bp, Leuconostoc pseudomesenteroides
ctaaccttttaggaaggagc

SEQ ID NO: 34165 - DNA, 20 bp, Facklamia ignava
tcaacttgagtacagaagag

SEQ ID NO: 34166 - DNA, 20 bp, Alcaligenes faecalis
tttggccgtgctcgcaagag

SEQ ID NO: 34167 - DNA, 20 bp, Prevotella melaninogenica
tggtttccttgagtacgcac

SEQ ID NO: 34168 - DNA, 20 bp, Fusobacterium mortiferum
gagtttcgcatgaaattcat

SEQ ID NO: 34169 - DNA, 20 bp, Microbacterium hominis
tacgggactctttggacact

SEQ ID NO: 34170 - DNA, 20 bp, Fusobacterium nucleatum
gttgcaaagccgtgaggtga

SEQ ID NO: 34171 - DNA, 20 bp, Citrobacter braakii
gaagtcgtacaaggtaaccg

SEQ ID NO: 34172 - DNA, 20 bp, Streptococcus porcinus
ccatgtcatctacttaaaag

SEQ ID NO: 34173 - DNA, 20 bp, Vibrio hollisae
tggaatccgccagaagtggg

SEQ ID NO: 34174 - DNA, 20 bp, Burkholderia multivorans
ctggctctaatacagtcggg

SEQ ID NO: 34175 - DNA, 20 bp, Alcaligenes faecalis
tctcttggcggcgagtggcg

SEQ ID NO: 34176 - DNA, 20 bp, Alcaligenes faecalis
cttggcggcgagtggcggac

SEQ ID NO: 34177 - DNA, 20 bp, Clostridium tetani
tgagatgggcccgcgcccca

SEQ ID NO: 34178 - DNA, 20 bp, Gemella haemolysans
ataacagcattaactgcatg

SEQ ID NO: 34179 - DNA, 20 bp, Bacillus lentus
ctaaccaacaaaaagcaagc

SEQ ID NO: 34180 - DNA, 20 bp, Brevibacillus choshinensis
aaagacctttggtcacgtac

SEQ ID NO: 34181 - DNA, 20 bp, Prevotella bivia
ataaagtggggaacgtgttc

SEQ ID NO: 34182 - DNA, 20 bp, Lactococcus garvieae
gtgagtaacgcgtgggaaat

SEQ ID NO: 34183 - DNA, 20 bp, Cardiobacterium hominis
ttttgctgggggataacgta

SEQ ID NO: 34184 - DNA, 20 bp, Bacteroides ureolyticus
agttgttgctttgctagtca

SEQ ID NO: 34185 - DNA, 20 bp, Anaerococcus tetradius
ataaggtccggctaaatacg

SEQ ID NO: 34186 - DNA, 20 bp, Abiotrophia defectiva
acagcgcatagagtaactgc

SEQ ID NO: 34187 - DNA, 20 bp, Prevotella disiens
ccaacctgccctttacttgg

SEQ ID NO: 34188 - DNA, 20 bp, Paenibacillus larvae
gaccgggataacttgcggaa

SEQ ID NO: 34189 - DNA, 20 bp, Bacteroides fragilis
cccgggcttaaattgcagtg

SEQ ID NO: 34190 - DNA, 20 bp, Clostridium clostridiiforme
ttgattgactgagtggcgga

SEQ ID NO: 34191 - DNA, 20 bp, Weeksella virosa
agttttgaaagatttatcgc

SEQ ID NO: 34192 - DNA, 20 bp, Bacteroides forsythus
taccattaggtagttggtga

SEQ ID NO: 34193 - DNA, 20 bp, Lactococcus lactis
aatctgcctttgagcggggg

SEQ ID NO: 34194 - DNA, 20 bp, Bacillus pallidus
gagcttgctcctttaggtta

SEQ ID NO: 34195 - DNA, 20 bp, Prevotella melaninogenica
ggagcgtaggccggagatta

SEQ ID NO: 34196 - DNA, 20 bp, Suttonella indologenes
aaggcagccttctggggcaa

SEQ ID NO: 34197 - DNA, 20 bp, Abiotrophia defectiva
acagcgcatagagtaactgt

SEQ ID NO: 34198 - DNA, 20 bp, Weeksella virosa
gatagaactgccattgatac

SEQ ID NO: 34199 - DNA, 20 bp, Streptococcus anginosus
ccgcataacagtatgtaaca

SEQ ID NO: 34200 - DNA, 20 bp, Corynebacterium glucuronolyticum
ggtctaataccctataggac

SEQ ID NO: 34201 - DNA, 20 bp, Vibrio mimicus
gaatctagcggagacgctgg

SEQ ID NO: 34202 - DNA, 20 bp, Pseudoramibacter alactolyticus
cagtcgaaggtggggctagt

SEQ ID NO: 34203 - DNA, 20 bp, Bacteroides distasonis
gtttgcgaggtgctgcatgg

SEQ ID NO: 34204 - DNA, 20 bp, Moraxella osloensis
tgctagaatatgtgagaggg

SEQ ID NO: 34205 - DNA, 20 bp, Streptococcus agalactiae
agagtaattaacacatgtta

SEQ ID NO: 34206 - DNA, 20 bp, Streptococcus agalactiae
ggtgtttacactagactgat

SEQ ID NO: 34207 - DNA, 20 bp, Moraxella osloensis
gcagcttcctggcataatat

SEQ ID NO: 34208 - DNA, 20 bp, Prevotella denticola
tctctgcagcaatctggtgt

SEQ ID NO: 34209 - DNA, 20 bp, Tissierella praeacuta
tcaccaagacagcgatgggt

SEQ ID NO: 34210 - DNA, 20 bp, Anaerococcus prevotii
gttcagttaagtctggcaac

SEQ ID NO: 34211 - DNA, 20 bp, Facklamia ignava
gagaagcgacgtcgcgaggc

SEQ ID NO: 34212 - DNA, 20 bp, Gemella haemolysans
tgagatggctttgcggtgca

SEQ ID NO: 34213 - DNA, 20 bp, Pediococcus pentosaceus
taacacgaagtgagtggcga

SEQ ID NO: 34214 - DNA, 20 bp, Campylobacter curvus
ctaataccttatactccgta

SEQ ID NO: 34215 - DNA, 20 bp, Actinomyces bovis
tttatggttaaagttcgggg

SEQ ID NO: 34216 - DNA, 20 bp, Streptococcus bovis
tagaacgctgactactttag

SEQ ID NO: 34217 - DNA, 20 bp, Mannheimia haemolytica
ccatttggccacctgccata

SEQ ID NO: 34218 - DNA, 20 bp, Streptococcus hyovaginalis
tccaccattaatcatgagtc

SEQ ID NO: 34219 - DNA, 20 bp, Turicella otitidis
gagggtcttttcacgacttt

SEQ ID NO: 34220 - DNA, 20 bp, Gemella bergeri
aaattcttagcggcgaacgg

SEQ ID NO: 34221 - DNA, 20 bp, Corynebacterium falsenii
atatgcaggatcgctgcaga

SEQ ID NO: 34222 - DNA, 20 bp, Enterococcus casseliflavus
tccgcatggaagaaagttga

SEQ ID NO: 34223 - DNA, 20 bp, Bacillus simplex
gatacgttcttttctcgcat

SEQ ID NO: 34224 - DNA, 20 bp, Gemella bergeri
actatacacaaaacagacgg

SEQ ID NO: 34225 - DNA, 20 bp, Bacteroides fragilis
agctagcgggtgaccgtatg

SEQ ID NO: 34226 - DNA, 20 bp, Clostridium tetani
catgaaactttaaccaaagg

SEQ ID NO: 34227 - DNA, 20 bp, Streptococcus dysgalactiae
gcttgcaccggttcaaggag

SEQ ID NO: 34228 - DNA, 20 bp, Vibrio mimicus
tgctaccggatatgcccagg

SEQ ID NO: 34229 - DNA, 20 bp, Vibrio fluvialis
ggggatttgttgggcggcga

SEQ ID NO: 34230 - DNA, 20 bp, Pasteurella aerogenes
gcatacagagagcgacgaga

SEQ ID NO: 34231 - DNA, 20 bp, Clostridium ramosum
gtggtgaaagcctgaagctt

SEQ ID NO: 34232 - DNA, 20 bp, Nocardia asteroides
ggccttgacatactaagaac

SEQ ID NO: 34233 - DNA, 20 bp, Veillonella atypica
atcactgaaggaggggattg

SEQ ID NO: 34234 - DNA, 20 bp, Yersinia ruckeri
ttaatagcactgaacattga

SEQ ID NO: 34235 - DNA, 20 bp, Capnocytophaga ochracea
gtcgagccctctaatgggac

SEQ ID NO: 34236 - DNA, 20 bp, Bacillus sp
agggccgtcagaggatgtca

SEQ ID NO: 34237 - DNA, 20 bp, Lactococcus garvieae
tgatgtaaaaggcagtggct

SEQ ID NO: 34238 - DNA, 20 bp, Clostridium tetani
ggtttcctggactgtaactg

SEQ ID NO: 34239 - DNA, 20 bp, Anaerobiospirillum succiniciproducens
agagggaaacgataccggga

SEQ ID NO: 34240 - DNA, 20 bp, Gemella bergeri
aaagggaggagccggtcacg

SEQ ID NO: 34241 - DNA, 20 bp, Clostridium clostridiiforme
acgcagtaagcattccacct

SEQ ID NO: 34242 - DNA, 20 bp, Paenibacillus macerans
ggctgtttaagtctggtgta

SEQ ID NO: 34243 - DNA, 20 bp, Haemophilus ducreyi
cgtatacagagggcggcaaa

SEQ ID NO: 34244 - DNA, 20 bp, Paenibacillus popilliae
agaacgccttgtagagtaac

SEQ ID NO: 34245 - DNA, 20 bp, Moraxella osloensis
tgggagtctattgcaccaga

SEQ ID NO: 34246 - DNA, 20 bp, Weissella paramesenteroides
ctgacgagcttgctctgatt

SEQ ID NO: 34247 - DNA, 20 bp, Cardiobacterium hominis
cggttgcccaagtcagatgt

SEQ ID NO: 34248 - DNA, 20 bp, Bacteroides uniformis
ctgggtgtcttgagtacagt

SEQ ID NO: 34249 - DNA, 20 bp, Oligella ureolytica
ctgacggtagttgaggaata

SEQ ID NO: 34250 - DNA, 20 bp, Bacillus simplex
gagaagatggaaagacggtt

SEQ ID NO: 34251 - DNA, 20 bp, Acinetobacter calcoaceticus
gcttgcactatcacttagcg

SEQ ID NO: 34252 - DNA, 20 bp, Bacillus sp
ttttgtgggatttgcttggc

SEQ ID NO: 34253 - DNA, 20 bp, Vibrio cholerae
atccccctctaccgggcaat

SEQ ID NO: 34254 - DNA, 20 bp, Abiotrophia defectiva
aactgttatgcgtgtgacgg

SEQ ID NO: 34255 - DNA, 20 bp, Helcococcus ovis
tttttaattaatttcttcgg

SEQ ID NO: 34256 - DNA, 20 bp, Vibrio cholerae
tctagcttgtcagtttcaaa

SEQ ID NO: 34257 - DNA, 20 bp, Veillonella atypica
tggttcctcttcttcggaag

SEQ ID NO: 34258 - DNA, 20 bp, Corynebacterium glucuronolyticum
agatagttcgtcccttgtgg

SEQ ID NO: 34259 - DNA, 20 bp, Pasteurella multocida
gggacctcttggccacctgc

SEQ ID NO: 34260 - DNA, 20 bp, Prevotella melaninogenica
gcgcatactggtttccttga

SEQ ID NO: 34261 - DNA, 20 bp, Propionibacterium freudenreichii
ggtaatcccgaatatgagcc

SEQ ID NO: 34262 - DNA, 20 bp, Leptotrichia buccalis
acgactgataatacctgata

SEQ ID NO: 34263 - DNA, 20 bp, Veillonella atypica
tggaaactgctgatctagag

SEQ ID NO: 34264 - DNA, 20 bp, Pasteurella trehalosi
tacagagggtagcgagccag

SEQ ID NO: 34265 - DNA, 20 bp, Prevotella bivia
tgaaatgtaggagctcaact

SEQ ID NO: 34266 - DNA, 20 bp, Kocuria kristinae
tgcttgcaccgggtggatga

SEQ ID NO: 34267 - DNA, 20 bp, Bacillus coagulans
ccgcatggaggaaaaaggaa

SEQ ID NO: 34268 - DNA, 20 bp, Streptococcus suis
ttcggaacactggtgacagg

SEQ ID NO: 34269 - DNA, 20 bp, Clostridium glycolicum
gtttcttaagtcaggagtga

SEQ ID NO: 34270 - DNA, 20 bp, Tetragenococcus halophilus
aataccgcatatggcttttt

SEQ ID NO: 34271 - DNA, 20 bp, Corynebacterium glucuronolyticum
tcgtctgtgtaatccagggg

SEQ ID NO: 34272 - DNA, 20 bp, Fusobacterium mortiferum
tgggacgaagtaagtgacgg

SEQ ID NO: 34273 - DNA, 20 bp, Shewanella algae
ctatccttacttgccagcgg

SEQ ID NO: 34274 - DNA, 20 bp, Bacillus sp
tgacatcctctgacggccct

SEQ ID NO: 34275 - DNA, 20 bp, Paenibacillus pabuli
ctcaagtttgggacaactac

SEQ ID NO: 34276 - DNA, 20 bp, Brevibacillus borstelensis
acggaaaggtggcgcaagct

SEQ ID NO: 34277 - DNA, 20 bp, Prevotella bivia
ttgcagcgcgaactgtcaga

SEQ ID NO: 34278 - DNA, 20 bp, Actinobacillus ureae
gaatctggctcatggagggg

SEQ ID NO: 34279 - DNA, 20 bp, Oligella ureolytica
aggctaataccttaagatgc

SEQ ID NO: 34280 - DNA, 20 bp, Corynebacterium accolens
catctttagtgtggtggttg

SEQ ID NO: 34281 - DNA, 20 bp, Virgibacillus pantothenticus
ctccttcgggggtgacgctt

SEQ ID NO: 34282 - DNA, 20 bp, Bacillus fusiformis
gcgaacagagaaggagcttg

SEQ ID NO: 34283 - DNA, 20 bp, Streptococcus porcinus
ccgcatgaaagtagaagacc

SEQ ID NO: 34284 - DNA, 20 bp, Acinetobacter junii
ggagatgaggtgcttgcacc

SEQ ID NO: 34285 - DNA, 20 bp, Streptococcus dysgalactiae
cggtctagagataggctttc

SEQ ID NO: 34286 - DNA, 20 bp, Moraxella  catarrhalis
agtcgaacgaagttaggaag

SEQ ID NO: 34287 - DNA, 20 bp, Anaerobiospirillum succiniciproducens
tccgcagctaacgcgataaa

SEQ ID NO: 34288 - DNA, 20 bp, Clostridium histolyticum
cccgagaatcctgtggaaac

SEQ ID NO: 34289 - DNA, 20 bp, Pediococcus pentosaceus
ctaataccgtataacagaga

SEQ ID NO: 34290 - DNA, 20 bp, Mannheimia haemolytica
gactaaagggtgggaccatt

SEQ ID NO: 34291 - DNA, 20 bp, Veillonella atypica
caaacccgagaaacactctc

SEQ ID NO: 34292 - DNA, 20 bp, Corynebacterium accolens
ctgaaggaggagcttgcttc

SEQ ID NO: 34293 - DNA, 20 bp, Propionibacterium granulosum
gtgctaatactggatatgtg

SEQ ID NO: 34294 - DNA, 20 bp, Oligella urethralis
cgttgagaaaagtggtttac

SEQ ID NO: 34295 - DNA, 20 bp, Neisseria subflava
tctgaactgggtgactcgag

SEQ ID NO: 34296 - DNA, 20 bp, Staphylococcus sp.
catagttacttacacgtatg

SEQ ID NO: 34297 - DNA, 20 bp, Eubacterium moniliforme
cgcgtaagcggggcagcgac

SEQ ID NO: 34298 - DNA, 20 bp, Clostridium septicum
caactccttccgtgccgccg

SEQ ID NO: 34299 - DNA, 20 bp, Oligella urethralis
gccttcgtcccacacgcgag

SEQ ID NO: 34300 - DNA, 20 bp, Vagococcus fluvialis
gggagagtaactgttcccac

SEQ ID NO: 34301 - DNA, 20 bp, Empedobacter brevis
ggattaatcagtcagtggtg

SEQ ID NO: 34302 - DNA, 20 bp, Ochrobactrum intermedium
atccagccatgccgcgtgag

SEQ ID NO: 34303 - DNA, 20 bp, Bacillus megaterium
tcttctccttcatgggagat

SEQ ID NO: 34304 - DNA, 20 bp, Pasteurella multocida
gtaatgaggaagggatgttg

SEQ ID NO: 34305 - DNA, 20 bp, Methylobacterium mesophilicum
tgacatggcgtgttacccag

SEQ ID NO: 34306 - DNA, 20 bp, Bacteroides stercoris
gttgatactggcgaccttga

SEQ ID NO: 34307 - DNA, 20 bp, Streptococcus thoraltensis
gcgagctggtgacagtaagc

SEQ ID NO: 34308 - DNA, 20 bp, Facklamia sourekii
gggagcgcaggcggtttgtt

SEQ ID NO: 34309 - DNA, 20 bp, Alicyclobacillus acidocaldarius
ctctccccgagcaacagagc

SEQ ID NO: 34310 - DNA, 20 bp, Pseudomonas fluorescens
ggtacttacctaatacgtga

SEQ ID NO: 34311 - DNA, 20 bp, Actinomyces bovis
agagatgtgtaatagttatg

SEQ ID NO: 34312 - DNA, 20 bp, Neisseria polysaccharea
ctgggtgactcgagtgtgtc

SEQ ID NO: 34313 - DNA, 20 bp, Burkholderia gladioli
aatatccttcggggatgacg

SEQ ID NO: 34314 - DNA, 20 bp, Staphylococcus condimenti
gataatatgcggaaccgcat

SEQ ID NO: 34315 - DNA, 20 bp, Streptococcus sobrinus
ctacctaggcaacgatacat

SEQ ID NO: 34316 - DNA, 20 bp, Pasteurella aerogenes
gtgcatacagagagcgacga

SEQ ID NO: 34317 - DNA, 20 bp, Streptococcus agalactiae
caagtagaacgctgaggttt

SEQ ID NO: 34318 - DNA, 20 bp, Brevibacterium epidermidis
ttctggaaacagttcttctc

SEQ ID NO: 34319 - DNA, 20 bp, Bacillus azotoformans
ttaactgctggtaccttgac

SEQ ID NO: 34320 - DNA, 20 bp, Brochothrix campestris
tgttcaagtgaaagacggtt

SEQ ID NO: 34321 - DNA, 20 bp, Cellulosimicrobium cellulans
ggcttgacatgcacgagaag

SEQ ID NO: 34322 - DNA, 20 bp, Propionibacterium granulosum
gctaatactggatatgtgct

SEQ ID NO: 34323 - DNA, 20 bp, Aneurinibacillus aneurinilyticus
ctgaaagagaaagacctttg

SEQ ID NO: 34324 - DNA, 20 bp, Streptococcus porcinus
gaaagtagaagacccatgtc

SEQ ID NO: 34325 - DNA, 20 bp, Streptococcus constellatus
tagatgtttaaaaggtgcaa

SEQ ID NO: 34326 - DNA, 20 bp, Corynebacterium jeikeium
aacggaaaggccctttgctt

SEQ ID NO: 34327 - DNA, 20 bp, Bacteroides merdae
catggacaaagggcagctac

SEQ ID NO: 34328 - DNA, 20 bp, Anaerococcus tetradius
gacgccgcgtgatttagaag

SEQ ID NO: 34329 - DNA, 20 bp, Gemella morbillorum
gtgcttgcactagaaaaact

SEQ ID NO: 34330 - DNA, 20 bp, Neisseria subflava
atagggttaatacccctgtc

SEQ ID NO: 34331 - DNA, 20 bp, Brevibacterium epidermidis
catacactggaccgttctgg

SEQ ID NO: 34332 - DNA, 20 bp, Micrococcus luteus
tttatcggttttggatggac

SEQ ID NO: 34333 - DNA, 20 bp, Pediococcus pentosaceus
gattttaacacgaagtgagt

SEQ ID NO: 34334 - DNA, 20 bp, Fusobacterium mortiferum
acttgccctgcagtctggga

SEQ ID NO: 34335 - DNA, 20 bp, Tissierella praeacuta
taccttcgggtacaggggac

SEQ ID NO: 34336 - DNA, 20 bp, Facklamia ignava
tagcctgtagagtaactgtt

SEQ ID NO: 34337 - DNA, 20 bp, Geobacillus thermoglucosidasius
agcttgcttccgcttggtta

SEQ ID NO: 34338 - DNA, 20 bp, Streptococcus constellatus
tcaggacgacgctggcggcg

SEQ ID NO: 34339 - DNA, 20 bp, Helcococcus kunzii
aggcttgacatatacaggga

SEQ ID NO: 34340 - DNA, 20 bp, Paenibacillus validus
tctgagggtgacggtacttg

SEQ ID NO: 34341 - DNA, 20 bp, Morganella morganii
ggcctcgcaccatcagatga

SEQ ID NO: 34342 - DNA, 20 bp, Clostridium limosum
gcaagactgcctgggtaacc

SEQ ID NO: 34343 - DNA, 20 bp, Prevotella bivia
gattgcagcgcgaactgtca

SEQ ID NO: 34344 - DNA, 20 bp, Leuconostoc lactis
ttggagaagaatgtatctga

SEQ ID NO: 34345 - DNA, 20 bp, Staphylococcus succinus
agttacttacgcatttgttc

SEQ ID NO: 34346 - DNA, 20 bp, Prevotella oris
caagtcgaggggaaacgacg

SEQ ID NO: 34347 - DNA, 20 bp, Tissierella praeacuta
atttcttcggaatgaaactt

SEQ ID NO: 34348 - DNA, 20 bp, Corynebacterium auris
ggcgctaggtgtgagcctct

SEQ ID NO: 34349 - DNA, 20 bp, Stenotrophomonas maltophilia
gctggctaatacccggttgg

SEQ ID NO: 34350 - DNA, 20 bp, Atopobium parvulum
gaaacgtcgtggccgaaagg

SEQ ID NO: 34351 - DNA, 20 bp, Ewingella americana
gcttgacccgtggcttccgg

SEQ ID NO: 34352 - DNA, 20 bp, Arcanobacterium haemolyticum
attctgcttctgccgcatgg

SEQ ID NO: 34353 - DNA, 20 bp, Leuconostoc lactis
ttaggatggacccgcggtgc

SEQ ID NO: 34354 - DNA, 20 bp, Streptococcus constellatus
tttactaccccgtattctgt

SEQ ID NO: 34355 - DNA, 20 bp, Actinomyces bovis
gcagcgaagcagcgatgcgg

SEQ ID NO: 34356 - DNA, 20 bp, Bacillus alcalophilus
atggttcttttgtaaaagat

SEQ ID NO: 34357 - DNA, 20 bp, Helcococcus kunzii
caagccctggctaaatacgt

SEQ ID NO: 34358 - DNA, 20 bp, Propionibacterium acnes
tgggttaagtcccgcaagcg

SEQ ID NO: 34359 - DNA, 20 bp, Bacteroides fragilis
gtttcattattaaaggattc

SEQ ID NO: 34360 - DNA, 20 bp, Bacillus oleronius
acttttttcttcgcatgagg

SEQ ID NO: 34361 - DNA, 20 bp, Corynebacterium falsenii
taggtgtggggatctttcta

SEQ ID NO: 34362 - DNA, 20 bp, Collinsella aerofaciens
ctaggtgtggggggacgatc

SEQ ID NO: 34363 - DNA, 20 bp, Streptococcus parasanguinis
ataaaagtcgacattgcatg

SEQ ID NO: 34364 - DNA, 20 bp, Tissierella praeacuta
ttcggaatgaaactttaatt

SEQ ID NO: 34365 - DNA, 20 bp, Leuconostoc citreum
gggaagaaatgctaaaatag

SEQ ID NO: 34366 - DNA, 20 bp, Rothia mucilaginosa
aagaagagagattgacggta

SEQ ID NO: 34367 - DNA, 20 bp, Enterococcus cecorum
ttcaccgtagcttgctacac

SEQ ID NO: 34368 - DNA, 20 bp, Streptococcus macacae
tatcgctaagagatggacct

SEQ ID NO: 34369 - DNA, 20 bp, Actinomyces bovis
atgccatagaaactggtaga

SEQ ID NO: 34370 - DNA, 20 bp, Bacteroides uniformis
tccaacctgccgatgactcg

SEQ ID NO: 34371 - DNA, 20 bp, Prevotella bivia
agggagcgtaggccgtttgg

SEQ ID NO: 34372 - DNA, 20 bp, Leptotrichia buccalis
tgtccgtgccgaagctaatg

SEQ ID NO: 34373 - DNA, 20 bp, Veillonella sp.
gagaaggattgacggtaccg

SEQ ID NO: 34374 - DNA, 20 bp, Anaerococcus prevotii
cgagtcgtaaagttctttta

SEQ ID NO: 34375 - DNA, 20 bp, Bacteroides thetaiotaomicron
tataatcagaccgcatggtc

SEQ ID NO: 34376 - DNA, 20 bp, Clostridium limosum
gtttcaatacttcggtgccg

SEQ ID NO: 34377 - DNA, 20 bp, Arthrobacter globiformis
gaccggaccgccgcagaaat

SEQ ID NO: 34378 - DNA, 20 bp, Acinetobacter lwoffii
taggtggccaattaagtcaa

SEQ ID NO: 34379 - DNA, 20 bp, Gemella haemolysans
ggataacagcattaactgca

SEQ ID NO: 34380 - DNA, 20 bp, Clostridium paraputrificum
atgaagtagcaattaaagga

SEQ ID NO: 34381 - DNA, 20 bp, Leptotrichia buccalis
ttgccagcacgcatgtgccc

SEQ ID NO: 34382 - DNA, 20 bp, Actinomyces odontolyticus
tttagttggtcgtgtgcagg

SEQ ID NO: 34383 - DNA, 20 bp, Actinomyces neuii
gaatctcttaaagggcatct

SEQ ID NO: 34384 - DNA, 20 bp, Facklamia ignava
cactgttatcagagaagaat

SEQ ID NO: 34385 - DNA, 20 bp, Corynebacterium accolens
ggtgtgagggtctttctacg

SEQ ID NO: 34386 - DNA, 20 bp, Brevibacillus brevis
gataatccttttcctctcat

SEQ ID NO: 34387 - DNA, 20 bp, Paenibacillus larvae
acttgcggaaacgtgagcta

SEQ ID NO: 34388 - DNA, 20 bp, Bacteroides merdae
actagttactaacaggtgaa

SEQ ID NO: 34389 - DNA, 20 bp, Anaerococcus prevotii
tatcttgagaagagtagagg

SEQ ID NO: 34390 - DNA, 20 bp, Neisseria gonorrhoeae
agggaagcttgcttctcggg

SEQ ID NO: 34391 - DNA, 20 bp, Turicella otitidis
tttttagtgtgatggttgga

SEQ ID NO: 34392 - DNA, 20 bp, Actinomyces bovis
gggcttatggcgcattagtt

SEQ ID NO: 34393 - DNA, 20 bp, Acinetobacter genospecies 3
ctagcctaactgcaaagagg

SEQ ID NO: 34394 - DNA, 20 bp, Propionibacterium freudenreichii
gtaaggcccctttcgggggg

SEQ ID NO: 34395 - DNA, 20 bp, Bacillus smithii
aaggttgaaaggcggcgcaa

SEQ ID NO: 34396 - DNA, 20 bp, Actinomyces neuii
gatgcagcgacgtcgtgtgg

SEQ ID NO: 34397 - DNA, 20 bp, Facklamia ignava
accgcatagttgttccagtc

SEQ ID NO: 34398 - DNA, 20 bp, Paenibacillus thiaminolyticus
aatcgggaaaggcggagcaa

SEQ ID NO: 34399 - DNA, 20 bp, Campylobacter lari
gggtgctagtcatctcagta

SEQ ID NO: 34400 - DNA, 20 bp, Ochrobactrum intermedium
ctgttagtcttgagtatgga

SEQ ID NO: 34401 - DNA, 20 bp, Paenibacillus thiaminolyticus
tccataggtgacggtacctg

SEQ ID NO: 34402 - DNA, 20 bp, Corynebacterium coyleae
ctcctgcttgcaggggtact

SEQ ID NO: 34403 - DNA, 20 bp, Propionibacterium avidum
agagatgggtatgcctcctt

SEQ ID NO: 34404 - DNA, 20 bp, Arcanobacterium bernardiae
aaactcctttcagtacagaa

SEQ ID NO: 34405 - DNA, 20 bp, Methylobacterium mesophilicum
gttggggtgcttgcacctca

SEQ ID NO: 34406 - DNA, 20 bp, Streptococcus constellatus
agagcatcactaccagatgg

SEQ ID NO: 34407 - DNA, 20 bp, Listeria monocytogenes
aaagtgtggcgcatgccacg

SEQ ID NO: 34408 - DNA, 20 bp, Alloiococcus otitis
gctaatctcccaaagccatt

SEQ ID NO: 34409 - DNA, 20 bp, Brevibacillus choshinensis
taccggatacttctttcaga

SEQ ID NO: 34410 - DNA, 20 bp, Corynebacterium glucuronolyticum
gtgtgcgacaccgtgaggtg

SEQ ID NO: 34411 - DNA, 20 bp, Streptococcus agalactiae
ttgcttcactgtgagatgga

SEQ ID NO: 34412 - DNA, 20 bp, Bacillus sphaericus
ttgaccactgtagagatatg

SEQ ID NO: 34413 - DNA, 20 bp, Pseudoramibacter alactolyticus
ggactcagcagtcgaaggtg

SEQ ID NO: 34414 - DNA, 20 bp, Tissierella praeacuta
gagcgaagtttttaaagaag

SEQ ID NO: 34415 - DNA, 20 bp, Corynebacterium accolens
ctaggtgtgagggtctttct

SEQ ID NO: 34416 - DNA, 20 bp, Ochrobactrum intermedium
ctgttagtcttgagtatggt

SEQ ID NO: 34417 - DNA, 20 bp, Facklamia hominis
tgatcaacgaaggaaagacg

SEQ ID NO: 34418 - DNA, 20 bp, Prevotella intermedia
gcgactctcatatgttatcc

SEQ ID NO: 34419 - DNA, 20 bp, Myroides odoratus
ttatcggtaaaagatgggca

SEQ ID NO: 34420 - DNA, 20 bp, Oligella urethralis
gccggtgcttattcctcaac

SEQ ID NO: 34421 - DNA, 20 bp, Gemella haemolysans
aagtcgagcgaagtttttct

SEQ ID NO: 34422 - DNA, 20 bp, Kingella denitrificans
ggaccttgcgctatttgagc

SEQ ID NO: 34423 - DNA, 20 bp, Corynebacterium glucuronolyticum
gcgtgtgcgacaccgtgagg

SEQ ID NO: 34424 - DNA, 20 bp, Streptococcus dysgalactiae
atccaccatgtgacggtaac

SEQ ID NO: 34425 - DNA, 20 bp, Alicyclobacillus acidocaldarius
atctctgagggtgtcagagg

SEQ ID NO: 34426 - DNA, 20 bp, Leptotrichia buccalis
gcatgaagagtgtccgtgcc

SEQ ID NO: 34427 - DNA, 20 bp, Fusobacterium varium
cgtttgacatcccaagaagt

SEQ ID NO: 34428 - DNA, 20 bp, Peptoniphilus indolicus
actggtcacaaactgacgct

SEQ ID NO: 34429 - DNA, 20 bp, Paenibacillus validus
ttcgggataggttagcggcg

SEQ ID NO: 34430 - DNA, 20 bp, Acinetobacter genospecies 3
agcctaactgcaaagagggc

SEQ ID NO: 34431 - DNA, 20 bp, Eikenella corrodens
tttgctgacggtacctaaag

SEQ ID NO: 34432 - DNA, 20 bp, Prevotella loescheii
ttcagttgccatcgggttat

SEQ ID NO: 34433 - DNA, 20 bp, Enterococcus cecorum
tctttcaccgtagcttgcta

SEQ ID NO: 34434 - DNA, 20 bp, Pseudoramibacter alactolyticus
gtcgaacgagaaggttttga

SEQ ID NO: 34435 - DNA, 20 bp, Prevotella loescheii
taattcgatgatacgcgagg

SEQ ID NO: 34436 - DNA, 20 bp, Anaerococcus tetradius
ataatatagctcaactatat

SEQ ID NO: 34437 - DNA, 20 bp, Bacillus schlegellii
cctgttgtcggggaagaagg

SEQ ID NO: 34438 - DNA, 20 bp, Leptotrichia buccalis
agtctggggtgaaaacttgc

SEQ ID NO: 34439 - DNA, 20 bp, Prevotella melaninogenica
ggatttagagataatgacgc

SEQ ID NO: 34440 - DNA, 20 bp, Prevotella bivia
ctagattgcagcgcgaactg

SEQ ID NO: 34441 - DNA, 20 bp, Lactococcus lactis
gtacaacgagtcgcgagaca

SEQ ID NO: 34442 - DNA, 20 bp, Clostridium septicum
aggggagtttcttcggaaac

SEQ ID NO: 34443 - DNA, 20 bp, Propionibacterium avidum
taacctgtgtgggggtagcc

SEQ ID NO: 34444 - DNA, 20 bp, Leptotrichia buccalis
gtgagaacaggcagtgcctt

SEQ ID NO: 34445 - DNA, 20 bp, Corynebacterium amycolatum
gtttctgacggtagatggag

SEQ ID NO: 34446 - DNA, 20 bp, Acinetobacter calcoaceticus
gtgcttgcactatcacttag

SEQ ID NO: 34447 - DNA, 20 bp, Anaerococcus prevotii
aaagctccggcggtctaaga

SEQ ID NO: 34448 - DNA, 20 bp, Corynebacterium coyleae
aaggctcctgcttgcagggg

SEQ ID NO: 34449 - DNA, 20 bp, Actinomyces turicensis
ctttgggataacggtcggaa

SEQ ID NO: 34450 - DNA, 20 bp, Actinomyces naeslundii
aggtgtggggggccttttcc

SEQ ID NO: 34451 - DNA, 20 bp, Streptococcus porcinus
tagagataggctttctcttc

SEQ ID NO: 34452 - DNA, 20 bp, Anaerococcus tetradius
gttaagcaaaactcaaaaag

SEQ ID NO: 34453 - DNA, 20 bp, Leuconostoc carnosum
agaacgctggtggcgtgcct

SEQ ID NO: 34454 - DNA, 20 bp, Corynebacterium group F
tattgttgtggaaagctttt

SEQ ID NO: 34455 - DNA, 20 bp, Corynebacterium accolens
taggaaccatctttagtgtg

SEQ ID NO: 34456 - DNA, 20 bp, Proteus mirabilis
tgcactatcggatgaaccca

SEQ ID NO: 34457 - DNA, 20 bp, Stenotrophomonas maltophilia
ttacgctaataccgcataat

SEQ ID NO: 34458 - DNA, 20 bp, Pseudoramibacter alactolyticus
tcctctgacgagcctagaga

SEQ ID NO: 34459 - DNA, 20 bp, Haemophilus actinemycetemcomitans
agcatgccaaattgacgtta

SEQ ID NO: 34460 - DNA, 20 bp, Lactococcus lactis
ttggtgagagtggaaagctc

SEQ ID NO: 34461 - DNA, 20 bp, Gemella bergeri
tagggaagaaaggttgtgta

SEQ ID NO: 34462 - DNA, 20 bp, Propionibacterium freudenreichii
aggaaactggtggtaatccc

SEQ ID NO: 34463 - DNA, 20 bp, Lactococcus lactis
aacgttggtgagagtggaaa

SEQ ID NO: 34464 - DNA, 20 bp, Vibrio cholerae
tcaaatgcgattcctaggtt

SEQ ID NO: 34465 - DNA, 20 bp, Pasteurella multocida
tgggacctcttggccacctg

SEQ ID NO: 34466 - DNA, 20 bp, Anaerococcus prevotii
ttcggaagcctcaatacagg

SEQ ID NO: 34467 - DNA, 20 bp, Leuconostoc lactis
atctgatagtaactgatcag

SEQ ID NO: 34468 - DNA, 20 bp, Facklamia sourekii
ggagcgcaggcggtttgtta

SEQ ID NO: 34469 - DNA, 20 bp, Microbacterium terregens
tgctgtgaaaccccgaggct

SEQ ID NO: 34470 - DNA, 20 bp, Leuconostoc argentinum
agggaatgattctagttcga

SEQ ID NO: 34471 - DNA, 20 bp, Leptotrichia buccalis
tgtgggcatgaagagtgtcc

SEQ ID NO: 34472 - DNA, 20 bp, Brevibacillus choshinensis
ctaggtgttggggactccaa

SEQ ID NO: 34473 - DNA, 20 bp, Brevibacillus choshinensis
ccgaaaagaaaaggcggctt

SEQ ID NO: 34474 - DNA, 20 bp, Propionibacterium avidum
cggtggcctaacctgtgtgg

SEQ ID NO: 34475 - DNA, 20 bp, Anaerococcus prevotii
actctagcaatactgccggt

SEQ ID NO: 34476 - DNA, 20 bp, Morganella morganii
aacccgggaattgcatctga

SEQ ID NO: 34477 - DNA, 20 bp, Dermacoccus nishinomiyaensis
tagtgaaagatggctctgct

SEQ ID NO: 34478 - DNA, 20 bp, Kingella denitrificans
tcctgagggggaaagcaggg

SEQ ID NO: 34479 - DNA, 20 bp, Clostridium paraputrificum
agtagcaattaaaggagcaa

SEQ ID NO: 34480 - DNA, 20 bp, Streptococcus agalactiae
tagttatttaaaaggagcaa

SEQ ID NO: 34481 - DNA, 20 bp, Bacillus sp
actccctatctctagggccg

SEQ ID NO: 34482 - DNA, 20 bp, Prevotella melaninogenica
cccgctgttggtacctggta

SEQ ID NO: 34483 - DNA, 20 bp, Dermacoccus nishinomiyaensis
cgatagtgaaagatggctct

SEQ ID NO: 34484 - DNA, 20 bp, Bacteroides thetaiotaomicron
catgctgaggactctggaga

SEQ ID NO: 34485 - DNA, 20 bp, Facklamia ignava
aatgggaaagacggcttcgg

SEQ ID NO: 34486 - DNA, 20 bp, Cellulomonas turbata
ggagtgtctggaaagattta

SEQ ID NO: 34487 - DNA, 20 bp, Streptococcus suis
catggtagatgcttgaaagg

SEQ ID NO: 34488 - DNA, 20 bp, Neisseria lactamica
cccggttttgacatgtacgg

SEQ ID NO: 34489 - DNA, 20 bp, Arcanobacterium bernardiae
tagagtgtggtaggggtaat

SEQ ID NO: 34490 - DNA, 20 bp, Veillonella dispar
gttaatcgggacgaaaggcc

SEQ ID NO: 34491 - DNA, 20 bp, Staphylococcus auricularis
gtcggtagagtaaccttttg

SEQ ID NO: 34492 - DNA, 20 bp, Actinomyces naeslundii
cctttgtgggggctggttca

SEQ ID NO: 34493 - DNA, 20 bp, Wolinella succinogenes
ccccttatgtgtagggctac

SEQ ID NO: 34494 - DNA, 20 bp, Bacillus sp
gggggtgacgcatgtggaac

SEQ ID NO: 34495 - DNA, 20 bp, Fusobacterium mortiferum
cgcgtctaggcggtttggta

SEQ ID NO: 34496 - DNA, 20 bp, Prevotella oris
taggccgtggattaagcgtg

SEQ ID NO: 34497 - DNA, 20 bp, Acinetobacter lwoffii
ggaggaggctaccgagatta

SEQ ID NO: 34498 - DNA, 20 bp, Bacteroides ovatus
gaaggctctatgggtcgtaa

SEQ ID NO: 34499 - DNA, 20 bp, Corynebacterium confusum
acggaaaggcttcagcttgc

SEQ ID NO: 34500 - DNA, 20 bp, Bacteroides capilosus
cgcggccgaaggtgggttcg

SEQ ID NO: 34501 - DNA, 20 bp, Gemella morbillorum
aaaagttggttatgctaaca

SEQ ID NO: 34502 - DNA, 20 bp, Cardiobacterium hominis
atacctgcgcaattgacgtt

SEQ ID NO: 34503 - DNA, 20 bp, Dolosicoccus paucivorans
acggtgcaatgccgcgtgtg

SEQ ID NO: 34504 - DNA, 20 bp, Clostridium tetani
ccaaccttctgtgccgcagt

SEQ ID NO: 34505 - DNA, 20 bp, Facklamia ignava
gcccctcagtgctggcgcaa

SEQ ID NO: 34506 - DNA, 20 bp, Bacillus sp
tctccgcatggagagagatt

SEQ ID NO: 34507 - DNA, 20 bp, Brevibacillus choshinensis
atgatccgaaaagaaaaggc

SEQ ID NO: 34508 - DNA, 20 bp, Kocuria kristinae
ttccagagatggttcttccc

SEQ ID NO: 34509 - DNA, 20 bp, Campylobacter concisus
tctttcagcacggaagaagc

SEQ ID NO: 34510 - DNA, 20 bp, Alcaligenes faecalis
gttaggccttagtagcgcag

SEQ ID NO: 34511 - DNA, 20 bp, Tissierella praeacuta
cagataagctgagcactcta

SEQ ID NO: 34512 - DNA, 20 bp, Dermabacter hominis
ttatgcggggagtcgtcgaa

SEQ ID NO: 34513 - DNA, 20 bp, Prevotella bivia
gtgcgcacaacgtaggcgga

SEQ ID NO: 34514 - DNA, 20 bp, Peptoniphilus indolicus
aaagtgaattagcggtcaaa

SEQ ID NO: 34515 - DNA, 20 bp, Methylobacterium mesophilicum
gtgcttgcaccgcagtagcg

SEQ ID NO: 34516 - DNA, 20 bp, Alicyclobacillus acidocaldarius
gggccttcccccgcaagaag

SEQ ID NO: 34517 - DNA, 20 bp, Corynebacterium auris
gagctaatcgctagaaagcc

SEQ ID NO: 34518 - DNA, 20 bp, Streptococcus equi
aagaagttacttcggtacat

SEQ ID NO: 34519 - DNA, 20 bp, Weeksella virosa
agttgccagcgtttaaagac

SEQ ID NO: 34520 - DNA, 20 bp, Campylobacter lari
ttaagagagcttgctctttt

SEQ ID NO: 34521 - DNA, 20 bp, Weeksella virosa
taaatgcataatgacagatt

SEQ ID NO: 34522 - DNA, 20 bp, Streptococcus canis
acaggtgcttgcactagtct

SEQ ID NO: 34523 - DNA, 20 bp, Arcanobacterium bernardiae
gcagccttcggggtggtgta

SEQ ID NO: 34524 - DNA, 20 bp, Streptococcus pyogenes
gagtggaaaatccaccaagt

SEQ ID NO: 34525 - DNA, 20 bp, Pasteurella multocida
gaggaggaaagggtgggacc

SEQ ID NO: 34526 - DNA, 20 bp, Bacillus coagulans
gagtgaagaaggccttcggg

SEQ ID NO: 34527 - DNA, 20 bp, Dermacoccus nishinomiyaensis
acaccggaatcatgcagaga

SEQ ID NO: 34528 - DNA, 20 bp, Peptostreptococcus anaerobius
cttagaccggtgtttaatca

SEQ ID NO: 34529 - DNA, 20 bp, Streptococcus agalactiae
taacacatgttagttattta

SEQ ID NO: 34530 - DNA, 20 bp, Clostridium ramosum
tgcatggtgaccgtattaaa

SEQ ID NO: 34531 - DNA, 20 bp, Clostridium ramosum
cgatctggcctgcaactgac

SEQ ID NO: 34532 - DNA, 20 bp, Cardiobacterium hominis
gcactttgggtgggaactgt

SEQ ID NO: 34533 - DNA, 20 bp, Actinomyces turicensis
gttggtacagagtgttgcga

SEQ ID NO: 34534 - DNA, 20 bp, Facklamia ignava
gactggaatgggaaagacgg

SEQ ID NO: 34535 - DNA, 20 bp, Eggerthella lenta
ccccggccggatcccgaact

SEQ ID NO: 34536 - DNA, 20 bp, Propionibacterium freudenreichii
ccgctttcatccatgacgaa

SEQ ID NO: 34537 - DNA, 20 bp, Streptococcus canis
acatgttaagaacttaaaag

SEQ ID NO: 34538 - DNA, 20 bp, Fusobacterium nucleatum
ttaaggcatcttagaattat

SEQ ID NO: 34539 - DNA, 20 bp, Streptococcus parauberis
gtactaaatttaaaaggagc

SEQ ID NO: 34540 - DNA, 20 bp, Brevibacillus choshinensis
gaaagacctttggtcacgta

SEQ ID NO: 34541 - DNA, 20 bp, Gemella bergeri
aaaagagatcagtgctgcag

SEQ ID NO: 34542 - DNA, 20 bp, Bacteroides fragilis
actgttttgtatgtattata

SEQ ID NO: 34543 - DNA, 20 bp, Budvicia aquatica
ttggaggttgtgggcatgac

SEQ ID NO: 34544 - DNA, 20 bp, Bacillus alcalophilus
agcttgctcccagaggttag

SEQ ID NO: 34545 - DNA, 20 bp, Actinomyces odontolyticus
catgcacggcggcactgcag

SEQ ID NO: 34546 - DNA, 20 bp, Actinomyces bovis
ctaactggcctgtaactgac

SEQ ID NO: 34547 - DNA, 20 bp, Streptococcus constellatus
actacaccgtattctgtgag

SEQ ID NO: 34548 - DNA, 20 bp, Helcococcus kunzii
gatgaggggaaagtggaatt

SEQ ID NO: 34549 - DNA, 20 bp, Campylobacter sputorum
gacccttctagagatagaag

SEQ ID NO: 34550 - DNA, 20 bp, Peptostreptococcus anaerobius
tatatcaaagtgttagcggt

SEQ ID NO: 34551 - DNA, 20 bp, Paenibacillus thiaminolyticus
taactcacggaaacgtgggc

SEQ ID NO: 34552 - DNA, 20 bp, Pasteurella multocida
agggtgggacctcttggcca

SEQ ID NO: 34553 - DNA, 20 bp, Pseudomonas fluorescens
taatacgtgagtattttgac

SEQ ID NO: 34554 - DNA, 20 bp, Fusobacterium varium
tgcctcttcggaggaacttg

SEQ ID NO: 34555 - DNA, 20 bp, Facklamia sourekii
cttgacgtgagtggcggacg

SEQ ID NO: 34556 - DNA, 20 bp, Nocardia asteroides
aagtcgagcgggggaggttg

SEQ ID NO: 34557 - DNA, 20 bp, Bacillus alcalophilus
gataatcaaaggaatcacat

SEQ ID NO: 34558 - DNA, 20 bp, Alcaligenes faecalis
gtacttttggcagagaagaa

SEQ ID NO: 34559 - DNA, 20 bp, Salmonella typhi
gcaggcctatcacatgcaag

SEQ ID NO: 34560 - DNA, 20 bp, Brevundimonas diminuta
gccacggagacgtggctttc

SEQ ID NO: 34561 - DNA, 20 bp, Proteus vulgaris
cggaccaaagcaggggctct

SEQ ID NO: 34562 - DNA, 20 bp, Vibrio cholerae
acgtcaaatgattaaggtat

SEQ ID NO: 34563 - DNA, 20 bp, Bacillus coagulans
atcttcggacctcacgccac

SEQ ID NO: 34564 - DNA, 20 bp, Acinetobacter genospecies 3
taggcggctaattaagtcaa

SEQ ID NO: 34565 - DNA, 20 bp, Streptococcus sobrinus
tatgctttggaaactgttag

SEQ ID NO: 34566 - DNA, 20 bp, Leptotrichia buccalis
cctgaagccgccggtccaac

SEQ ID NO: 34567 - DNA, 20 bp, Tissierella praeacuta
gtacaacgagcagctactta

SEQ ID NO: 34568 - DNA, 20 bp, Campylobacter sputorum
agctaatctgccccatagag

SEQ ID NO: 34569 - DNA, 20 bp, Kocuria kristinae
ctgcccgcatgggctggtgg

SEQ ID NO: 34570 - DNA, 20 bp, Clostridium tetani
caaactgggcatctagagta

SEQ ID NO: 34571 - DNA, 20 bp, Prevotella melaninogenica
agcgtaggccggagattaag

SEQ ID NO: 34572 - DNA, 20 bp, Enterococcus dispar
tgaggatggacccgcggtgc

SEQ ID NO: 34573 - DNA, 20 bp, Granulicatella adiacens
gcgccttgacggtatctaac

SEQ ID NO: 34574 - DNA, 20 bp, Bacteroides fragilis
aggtggactggtaagtcagt

SEQ ID NO: 34575 - DNA, 20 bp, Brochothrix campestris
ctggggataacatcgagaaa

SEQ ID NO: 34576 - DNA, 20 bp, Facklamia hominis
agcggagtgacggtatctaa

SEQ ID NO: 34577 - DNA, 20 bp, Morganella morganii
cgaaggcaagcggaactcat

SEQ ID NO: 34578 - DNA, 20 bp, Eubacterium moniliforme
gaacaattaaaggagcaatc

SEQ ID NO: 34579 - DNA, 20 bp, Haemophilus actinemycetemcomitans
gggattggggtttagccctg

SEQ ID NO: 34580 - DNA, 20 bp, Methylobacterium extorquens
cttcgggtgtcagtggcaga

SEQ ID NO: 34581 - DNA, 20 bp, Peptoniphilus indolicus
ataacgatcaaagtgaatta

SEQ ID NO: 34582 - DNA, 20 bp, Corynebacterium group ANF
ctttcccttgtggattgcgg

SEQ ID NO: 34583 - DNA, 20 bp, Kingella denitrificans
agccaatatctgattagcta

SEQ ID NO: 34584 - DNA, 20 bp, Clostridium ramosum
agagggagcaggcggcagca

SEQ ID NO: 34585 - DNA, 20 bp, Empedobacter brevis
agtagctgaaggtaccagaa

SEQ ID NO: 34586 - DNA, 20 bp, Bacteroides merdae
gatctatggtttgtaaactt

SEQ ID NO: 34587 - DNA, 20 bp, Corynebacterium glucuronolyticum
ggggcttaacttttggttgg

SEQ ID NO: 34588 - DNA, 20 bp, Prevotella bivia
gtgcaaatacgatctaatcc

SEQ ID NO: 34589 - DNA, 20 bp, Aerococcus urinae
tgcattagctcgttggtggg

SEQ ID NO: 34590 - DNA, 20 bp, Clostridium botulinum
tagggggtatcaactccccc

SEQ ID NO: 34591 - DNA, 20 bp, Actinomyces bovis
gtttatggttaaagttcggg

SEQ ID NO: 34592 - DNA, 20 bp, Clostridium septicum
cattgcagcttcgcatggag

SEQ ID NO: 34593 - DNA, 20 bp, Tissierella praeacuta
ttaagtcaaagcgtaaagcg

SEQ ID NO: 34594 - DNA, 20 bp, Peptostreptococcus anaerobius
cttgacatcccttagaccgg

SEQ ID NO: 34595 - DNA, 20 bp, Peptostreptococcus anaerobius
cacatggataacatactgaa

SEQ ID NO: 34596 - DNA, 20 bp, Pseudomonas luteola
tgggaggaagggttgtaacc

SEQ ID NO: 34597 - DNA, 20 bp, Bacteroides distasonis
gtttgcgatacacagtaagc

SEQ ID NO: 34598 - DNA, 20 bp, Moraxella bovis
atgactatctagcttgctag

SEQ ID NO: 34599 - DNA, 20 bp, Prevotella melaninogenica
agaggaaggatttagagata

SEQ ID NO: 34600 - DNA, 20 bp, Anaerococcus prevotii
ataagaaaaagccccggcta

SEQ ID NO: 34601 - DNA, 20 bp, Brevibacterium epidermidis
agttcttctctttggagctg

SEQ ID NO: 34602 - DNA, 20 bp, Propionibacterium freudenreichii
cagggatcgtctcgcggcct

SEQ ID NO: 34603 - DNA, 20 bp, Aneurinibacillus aneurinilyticus
agaaagacctttggtcacgt

SEQ ID NO: 34604 - DNA, 20 bp, Veillonella dispar
tcgaggatagatgaaaggtg

SEQ ID NO: 34605 - DNA, 20 bp, Kocuria rosea
tatagatggacccgcggtgt

SEQ ID NO: 34606 - DNA, 20 bp, Bacteroides stercoris
ggtgctaatcccgaaagcct

SEQ ID NO: 34607 - DNA, 20 bp, Geobacillus thermoglucosidasius
cttgcttccgcttggttagc

SEQ ID NO: 34608 - DNA, 20 bp, Bacillus alcalophilus
tggctccggctatcactacg

SEQ ID NO: 34609 - DNA, 20 bp, Paenibacillus validus
aacgcctcggagagtaactg

SEQ ID NO: 34610 - DNA, 20 bp, Bacteroides forsythus
atgcatagagatcacgcaga

SEQ ID NO: 34611 - DNA, 20 bp, Anaerococcus prevotii
gaaatgcaagtcaggtgtaa

SEQ ID NO: 34612 - DNA, 20 bp, Actinomyces odontolyticus
acggcggcactgcagagatg

SEQ ID NO: 34613 - DNA, 20 bp, Comamonas testosteroni
gtgctactagagcggctgat

SEQ ID NO: 34614 - DNA, 20 bp, Streptococcus salivarius
ccgcataacaatggatgact

SEQ ID NO: 34615 - DNA, 20 bp, Bacillus pumilus
taataccggatagttccttg

SEQ ID NO: 34616 - DNA, 20 bp, Haemophilus actinemycetemcomitans
ccgacgatcgctagctggtc

SEQ ID NO: 34617 - DNA, 20 bp, Prevotella melaninogenica
agcgcatactggtttccttg

SEQ ID NO: 34618 - DNA, 20 bp, Streptococcus infantarius
catctaacatgggttaaatg

SEQ ID NO: 34619 - DNA, 20 bp, Streptococcus thermophilus
gcttgcaccgagcggatgag

SEQ ID NO: 34620 - DNA, 20 bp, Acinetobacter genospecies 3
ctactttagttaatacctag

SEQ ID NO: 34621 - DNA, 20 bp, Geobacillus thermoglucosidasius
ccctggagacagggcgttcc

SEQ ID NO: 34622 - DNA, 20 bp, Bacteroides fragilis
ccgctgtgaaggtgctgcat

SEQ ID NO: 34623 - DNA, 20 bp, Chromobacterium violaceum
acagggtgcttgcaccgctg

SEQ ID NO: 34624 - DNA, 20 bp, Bacillus coagulans
ttttttcctccgcatggagg

SEQ ID NO: 34625 - DNA, 20 bp, Streptococcus thermophilus
cataaaagtcgatatcgcat

SEQ ID NO: 34626 - DNA, 20 bp, Bacteroides merdae
aattgccgttgaaactgggt

SEQ ID NO: 34627 - DNA, 20 bp, Acinetobacter radioresistens
tactttaggatagtggacgt

SEQ ID NO: 34628 - DNA, 20 bp, Corynebacterium amycolatum
tggtgtggatgctgtggtgg

SEQ ID NO: 34629 - DNA, 20 bp, Corynebacterium group F
tgcactggtactcgagtggc

SEQ ID NO: 34630 - DNA, 20 bp, Providencia rettgeri
acctgggaatggcatctaag

SEQ ID NO: 34631 - DNA, 20 bp, Bacillus pumilus
cgcatggttcaaggatgaaa

SEQ ID NO: 34632 - DNA, 20 bp, Anaerococcus prevotii
tagagatataccctcttctt

SEQ ID NO: 34633 - DNA, 20 bp, Leptotrichia buccalis
aaggtgtggatagtgattgg

SEQ ID NO: 34634 - DNA, 20 bp, Oligella urethralis
tcgttgagaaaagtggttta

SEQ ID NO: 34635 - DNA, 20 bp, Leuconostoc argentinum
cttgagtgttgtagaggtaa

SEQ ID NO: 34636 - DNA, 20 bp, Bacteroides merdae
tgctaatctccaaaccatgt

SEQ ID NO: 34637 - DNA, 20 bp, Anaerobiospirillum succiniciproducens
ggaacccacaaagcgtcccg

SEQ ID NO: 34638 - DNA, 20 bp, Bacteroides uniformis
atgtggagacatgtcagccg

SEQ ID NO: 34639 - DNA, 20 bp, Campylobacter concisus
ccagatcgccgcagagatac

SEQ ID NO: 34640 - DNA, 20 bp, Paenibacillus thiaminolyticus
tgttccataggtgacggtac

SEQ ID NO: 34641 - DNA, 20 bp, Fusobacterium varium
tgggaagaagtcagtgacgg

SEQ ID NO: 34642 - DNA, 20 bp, Achromobacter xylosoxidans
gagatttggcagtgctcgca

SEQ ID NO: 34643 - DNA, 20 bp, Prevotella oris
aacccgtcgaaagtcggcct

SEQ ID NO: 34644 - DNA, 20 bp, Pediococcus dextrinicus
tgacatctagcgccaatcct

SEQ ID NO: 34645 - DNA, 20 bp, Prevotella disiens
gcactctgaggatactgcca

SEQ ID NO: 34646 - DNA, 20 bp, Streptococcus constellatus
gtagaacgcacaggatgcac

SEQ ID NO: 34647 - DNA, 20 bp, Moraxella osloensis
tcgaacgatgactctctagc

SEQ ID NO: 34648 - DNA, 20 bp, Streptococcus gallolyticus
taccgcataatagtgtttaa

SEQ ID NO: 34649 - DNA, 20 bp, Moraxella osloensis
tgactctctagcttgctaga

SEQ ID NO: 34650 - DNA, 20 bp, Alicyclobacillus acidocaldarius
tcggtaccgtctcgcatggg

SEQ ID NO: 34651 - DNA, 20 bp, Campylobacter sputorum
tttctttgggaagaataatg

SEQ ID NO: 34652 - DNA, 20 bp, Peptoniphilus indolicus
gacacggggatagccaccgg

SEQ ID NO: 34653 - DNA, 20 bp, Acinetobacter calcoaceticus
aagtcgagcggagtgatggt

SEQ ID NO: 34654 - DNA, 20 bp, Bacillus sp
cgccgctcgttccacatgcg

SEQ ID NO: 34655 - DNA, 20 bp, Bacillus coagulans
cagggccttccccttcgggg

SEQ ID NO: 34656 - DNA, 20 bp, Cardiobacterium hominis
tagcttaacttaggagggcg

SEQ ID NO: 34657 - DNA, 20 bp, Bacteroides fragilis
aattgcagtggaatgatgtg

SEQ ID NO: 34658 - DNA, 20 bp, Campylobacter curvus
tataaaatacgtcccagttc

SEQ ID NO: 34659 - DNA, 20 bp, Prevotella bivia
cgctgttagcacctagtgtt

SEQ ID NO: 34660 - DNA, 20 bp, Pasteurella trehalosi
atagacaaagcaattgacgt

SEQ ID NO: 34661 - DNA, 20 bp, Bacillus lentus
ggcggtcaggagatgtcaag

SEQ ID NO: 34662 - DNA, 20 bp, Eggerthella lenta
aagcccagacggcaagggat

SEQ ID NO: 34663 - DNA, 20 bp, Bacteroides thetaiotaomicron
agttgatactggctgtcttg

SEQ ID NO: 34664 - DNA, 20 bp, Oligella urethralis
gagagcaagctctctcatgc

SEQ ID NO: 34665 - DNA, 20 bp, Anaerococcus tetradius
caacccctatatttagttac

SEQ ID NO: 34666 - DNA, 20 bp, Campylobacter curvus
catctagagatagaagagtg

SEQ ID NO: 34667 - DNA, 20 bp, Weissella paramesenteroides
gttataagagaagaacggca

SEQ ID NO: 34668 - DNA, 20 bp, Helcococcus kunzii
ttcggtgaaagatggtctcg

SEQ ID NO: 34669 - DNA, 20 bp, Microbacterium hominis
gtcagtagctggaaagattt

SEQ ID NO: 34670 - DNA, 20 bp, Haemophilus haemolyticus
ccgcgtagtgtcgagagacg

SEQ ID NO: 34671 - DNA, 20 bp, Aerococcus viridans
cttccgcatggaagaagatt

SEQ ID NO: 34672 - DNA, 20 bp, Kingella denitrificans
ggacggcagcgggggtgctt

SEQ ID NO: 34673 - DNA, 20 bp, Streptococcus ratti
taatattaattattgcatga

SEQ ID NO: 34674 - DNA, 20 bp, Clostridium ramosum
gacgatctggcctgcaactg

SEQ ID NO: 34675 - DNA, 20 bp, Prevotella bivia
tgcaaatacgatctaatcct

SEQ ID NO: 34676 - DNA, 20 bp, Streptococcus canis
agaacttaaaaggggcaact

SEQ ID NO: 34677 - DNA, 20 bp, Bacillus coagulans
cgcgtgagtgaagaaggcct

SEQ ID NO: 34678 - DNA, 20 bp, Arcanobacterium pyogenes
agctttcggggtggtgtaca

SEQ ID NO: 34679 - DNA, 20 bp, Atopobium parvulum
gtctgttaggtcgggagtta

SEQ ID NO: 34680 - DNA, 20 bp, Burkholderia multivorans
tacagtcgggggatgacggt

SEQ ID NO: 34681 - DNA, 20 bp, Gordonia bronchialis
tgtggtttgccttgtgcctt

SEQ ID NO: 34682 - DNA, 20 bp, Moraxella  catarrhalis
agcttgcttctgatacttag

SEQ ID NO: 34683 - DNA, 20 bp, Paenibacillus macerans
tgtggctcaaccacagttcg

SEQ ID NO: 34684 - DNA, 20 bp, Haemophilus haemolyticus
tagtgtcgagagacgaaagt

SEQ ID NO: 34685 - DNA, 20 bp, Clostridium histolyticum
atcccgagaatcctgtggaa

SEQ ID NO: 34686 - DNA, 20 bp, Actinomyces meyeri
gagacgtgcgtgcatttggt

SEQ ID NO: 34687 - DNA, 20 bp, Alicyclobacillus acidocaldarius
cagcactcaagtcaagcagt

SEQ ID NO: 34688 - DNA, 20 bp, Dolosigranulum pigrum
cgagcagcgatcccgcaagg

SEQ ID NO: 34689 - DNA, 20 bp, Globicatella sanguinis
aaaggatggccccgcggtgc

SEQ ID NO: 34690 - DNA, 20 bp, Fusobacterium varium
gaaactgctaaactagagta

SEQ ID NO: 34691 - DNA, 20 bp, Bacteroides fragilis
ttgcagtggaatgatgtgga

SEQ ID NO: 34692 - DNA, 20 bp, Streptococcus hyovaginalis
ccattaatcatgagtcgcga

SEQ ID NO: 34693 - DNA, 20 bp, Oligella urethralis
gagatggctcgatcagggtt

SEQ ID NO: 34694 - DNA, 20 bp, Prevotella oris
tcattgcaggtaccgcatga

SEQ ID NO: 34695 - DNA, 20 bp, Oligella urethralis
ttcctcaactaccgtcagca

SEQ ID NO: 34696 - DNA, 20 bp, Clostridium glycolicum
gtcgagcgattcacttcggt

SEQ ID NO: 34697 - DNA, 20 bp, Neisseria flavescens
acagctgatgacggtacctg

SEQ ID NO: 34698 - DNA, 20 bp, Facklamia sourekii
tttctcttgacgtgagtggc

SEQ ID NO: 34699 - DNA, 20 bp, Arcanobacterium bernardiae
aaagggtttctggataggga

SEQ ID NO: 34700 - DNA, 20 bp, Granulicatella adiacens
gtcgaacgagagcgaccggg

SEQ ID NO: 34701 - DNA, 20 bp, Brochothrix campestris
aagatgttcaagtgaaagac

SEQ ID NO: 34702 - DNA, 20 bp, Lactococcus lactis
aagaacgttggtgagagtgg

SEQ ID NO: 34703 - DNA, 20 bp, Kingella denitrificans
gcgggggtgcttgcacctgc

SEQ ID NO: 34704 - DNA, 20 bp, Bacteroides fragilis
tactgtcagtcttgagtaca

SEQ ID NO: 34705 - DNA, 20 bp, Streptococcus parasanguinis
gcttggtgcttgcaccgagc

SEQ ID NO: 34706 - DNA, 20 bp, Acinetobacter haemolyticus
ggaagggtagcttgctacct

SEQ ID NO: 34707 - DNA, 20 bp, Streptococcus parasanguinis
catgatgttgacttgaaagg

SEQ ID NO: 34708 - DNA, 20 bp, Anaerococcus tetradius
ctttctggtcatcatctgac

SEQ ID NO: 34709 - DNA, 20 bp, Proteus vulgaris
tgaactgtggcttctggagc

SEQ ID NO: 34710 - DNA, 20 bp, Lactococcus lactis
taagttttaagtttgaaaga

SEQ ID NO: 34711 - DNA, 20 bp, Arcanobacterium bernardiae
ttctggatagggatgggctc

SEQ ID NO: 34712 - DNA, 20 bp, Stenotrophomonas maltophilia
ggaaagaaatccagctggtt

SEQ ID NO: 34713 - DNA, 20 bp, Actinomyces bovis
gcaggcggtttatcaagttt

SEQ ID NO: 34714 - DNA, 20 bp, Brevibacterium epidermidis
actggaccgttctggaaaca

SEQ ID NO: 34715 - DNA, 20 bp, Enterococcus casseliflavus
tttccgcatggaagaaagtt

SEQ ID NO: 34716 - DNA, 20 bp, Serratia proteamaculans
agggtagtgtgttaatagca

SEQ ID NO: 34717 - DNA, 20 bp, Granulicatella elegans
attcccttcggggacaaaga

SEQ ID NO: 34718 - DNA, 20 bp, Bacteroides stercoris
ccaccaaacctacgatggat

SEQ ID NO: 34719 - DNA, 20 bp, Tetragenococcus halophilus
ctgatggctggtcccgcggt

SEQ ID NO: 34720 - DNA, 20 bp, Facklamia ignava
agaagcgacgtcgcgaggcc

SEQ ID NO: 34721 - DNA, 20 bp, Neisseria meningitidis
tctcaagacgtatgcggtat

SEQ ID NO: 34722 - DNA, 20 bp, Pseudoramibacter alactolyticus
aagccttatattatggtttt

SEQ ID NO: 34723 - DNA, 20 bp, Pasteurella multocida
aatagatagcatcattgacg

SEQ ID NO: 34724 - DNA, 20 bp, Corynebacterium confusum
acctgggcttgacatattta

SEQ ID NO: 34725 - DNA, 20 bp, Streptococcus thermophilus
cgcataaaagtcgatatcgc

SEQ ID NO: 34726 - DNA, 20 bp, Streptococcus constellatus
gtagtttactacaccgtatt

SEQ ID NO: 34727 - DNA, 20 bp, Bacteroides uniformis
agttgatactgggtgtcttg

SEQ ID NO: 34728 - DNA, 20 bp, Helcococcus ovis
atatcgcatgataattaagt

SEQ ID NO: 34729 - DNA, 20 bp, Corynebacterium amycolatum
catggtgtggatgctgtggt

SEQ ID NO: 34730 - DNA, 20 bp, Lactococcus lactis
ataaaaactttaaacacaag

SEQ ID NO: 34731 - DNA, 20 bp, Streptococcus canis
gacaggtgcttgcactagtc

SEQ ID NO: 34732 - DNA, 20 bp, Bacteroides ureolyticus
gcgtaaactccttttatcag

SEQ ID NO: 34733 - DNA, 20 bp, Streptococcus suis
gtagatgcttgaaaggagca

SEQ ID NO: 34734 - DNA, 20 bp, Staphylococcus saprophyticus
gataacatttggaaccgcat

SEQ ID NO: 34735 - DNA, 20 bp, Acinetobacter johnsonii
ctacttggattaatactcta

SEQ ID NO: 34736 - DNA, 20 bp, Eikenella corrodens
actttttgctgacggtacct

SEQ ID NO: 34737 - DNA, 20 bp, Bacillus coagulans
atagttttttcctccgcatg

SEQ ID NO: 34738 - DNA, 20 bp, Alcaligenes faecalis
ggtacctcctaatacgaggt

SEQ ID NO: 34739 - DNA, 20 bp, Oligella ureolytica
aagatgctgacggtagttga

SEQ ID NO: 34740 - DNA, 20 bp, Bacillus pumilus
agttccttgaaccgcatggt

SEQ ID NO: 34741 - DNA, 20 bp, Campylobacter rectus
tgtaggatgaggctatatcg

SEQ ID NO: 34742 - DNA, 20 bp, Peptostreptococcus anaerobius
tctttcaagtcggtggttaa

SEQ ID NO: 34743 - DNA, 20 bp, Peptoniphilus indolicus
gagtagtgaagaggtaagtg

SEQ ID NO: 34744 - DNA, 20 bp, Bacteroides thetaiotaomicron
gcagctcactggactgcaac

SEQ ID NO: 34745 - DNA, 20 bp, Prevotella bivia
tccaacctacccataactaa

SEQ ID NO: 34746 - DNA, 20 bp, Brevibacillus agri
atctgaaaagaaaagatggc

SEQ ID NO: 34747 - DNA, 20 bp, Prevotella oris
gatgaggcccttcggggcgt

SEQ ID NO: 34748 - DNA, 20 bp, Streptococcus infantarius
taccgcataacagcatttaa

SEQ ID NO: 34749 - DNA, 20 bp, Bacillus pallidus
ttagctgtcactgcaggatg

SEQ ID NO: 34750 - DNA, 20 bp, Finegoldia magna
agtagtggagaggaaagtgg

SEQ ID NO: 34751 - DNA, 20 bp, Streptococcus mitis
gacatttgcttaaaaggtgc

SEQ ID NO: 34752 - DNA, 20 bp, Bacillus sp
cgggggtgacgcatgtggaa

SEQ ID NO: 34753 - DNA, 20 bp, Peptostreptococcus anaerobius
tttcaagtcggtggttaaag

SEQ ID NO: 34754 - DNA, 20 bp, Anaerococcus prevotii
tcgagtcgtaaagttctttt

SEQ ID NO: 34755 - DNA, 20 bp, Veillonella dispar
atcgaggatagatgaaaggt

SEQ ID NO: 34756 - DNA, 20 bp, Corynebacterium afermentans
tagagaccttgcggggcgac

SEQ ID NO: 34757 - DNA, 20 bp, Pediococcus dextrinicus
atctagcgccaatcctagag

SEQ ID NO: 34758 - DNA, 20 bp, Prevotella bivia
cctacccataactaagggat

SEQ ID NO: 34759 - DNA, 20 bp, Clostridium botulinum
cctgttttctaggacgataa

SEQ ID NO: 34760 - DNA, 20 bp, Prevotella bivia
tgcccgctgttagcacctag

SEQ ID NO: 34761 - DNA, 20 bp, Actinomyces viscosus
ttgttccggtgggggatggg

SEQ ID NO: 34762 - DNA, 20 bp, Chryseobacterium meningosepticum
cgtgtaagtagctgaaggta

SEQ ID NO: 34763 - DNA, 20 bp, Vibrio cholerae
cggtagcgcaaggcccgaag

SEQ ID NO: 34764 - DNA, 20 bp, Dietzia maris
ggtctctgggaaacaactga

SEQ ID NO: 34765 - DNA, 20 bp, Morganella morganii
cagtcgggaggaaggtgtta

SEQ ID NO: 34766 - DNA, 20 bp, Leptotrichia buccalis
cgaagctaatgcgataagta

SEQ ID NO: 34767 - DNA, 20 bp, Moraxella lacunata
tgtggttaatacctacaagc

SEQ ID NO: 34768 - DNA, 20 bp, Bacteroides thetaiotaomicron
ggtcttgttattaaagaatt

SEQ ID NO: 34769 - DNA, 20 bp, Bacteroides merdae
tcactagttactaacaggtg

SEQ ID NO: 34770 - DNA, 20 bp, Vibrio cholerae
ggcggtatcgctgccctctg

SEQ ID NO: 34771 - DNA, 20 bp, Bacillus oleronius
tcgcatgagggagaattgaa

SEQ ID NO: 34772 - DNA, 20 bp, Streptococcus gordonii
taccgtagcttgctacacca

SEQ ID NO: 34773 - DNA, 20 bp, Pediococcus pentosaceus
caagtcgaacgaacttccgt

SEQ ID NO: 34774 - DNA, 20 bp, Veillonella atypica
gtcgtacaaggtagccgtat

SEQ ID NO: 34775 - DNA, 20 bp, Streptococcus bovis
gctgactactttagcttgct

SEQ ID NO: 34776 - DNA, 20 bp, Peptostreptococcus anaerobius
atcgtagatatatcaaagtg

SEQ ID NO: 34777 - DNA, 20 bp, Prevotella oris
attcagagatgatgaggccc

SEQ ID NO: 34778 - DNA, 20 bp, Tetragenococcus halophilus
tgttgtcagcaaagaacagg

SEQ ID NO: 34779 - DNA, 20 bp, Porphyromonas levii
ctcaactgagcaactgcctt

SEQ ID NO: 34780 - DNA, 20 bp, Acinetobacter calcoaceticus
tactgaagttaataccttca

SEQ ID NO: 34781 - DNA, 20 bp, Eggerthella lenta
ccgagggctcaacccccggc

SEQ ID NO: 34782 - DNA, 20 bp, Vagococcus fluvialis
ttggatgggcccgcgctgca

SEQ ID NO: 34783 - DNA, 20 bp, Clostridium glycolicum
gtatgctaatacaggataac

SEQ ID NO: 34784 - DNA, 20 bp, Bacillus schlegellii
gcctgttaagtctgctgtga

SEQ ID NO: 34785 - DNA, 20 bp, Methylobacterium mesophilicum
cttgcacctcagtagcgcag

SEQ ID NO: 34786 - DNA, 20 bp, Porphyromonas endodontalis
tactagatttttgcgatata

SEQ ID NO: 34787 - DNA, 20 bp, Facklamia languida
agcagcgaactcgcaagggc

SEQ ID NO: 34788 - DNA, 20 bp, Anaerococcus tetradius
tagtaagcttttaaaactgc

SEQ ID NO: 34789 - DNA, 20 bp, Microbacterium hominis
gcatggtcagtagctggaaa

SEQ ID NO: 34790 - DNA, 20 bp, Streptococcus hyovaginalis
ctccaccattaatcatgagt

SEQ ID NO: 34791 - DNA, 20 bp, Pseudomonas luteola
gggaggaagggttgtaacct

SEQ ID NO: 34792 - DNA, 20 bp, Methylobacterium mesophilicum
atggcgtgttatggggagag

SEQ ID NO: 34793 - DNA, 20 bp, Paenibacillus lautus
caaggaagaacgtcttctag

SEQ ID NO: 34794 - DNA, 20 bp, Paenibacillus azotofixans
tgactttagttgccagcagg

SEQ ID NO: 34795 - DNA, 20 bp, Empedobacter brevis
tgaaggtaccagaagaataa

SEQ ID NO: 34796 - DNA, 20 bp, Anaerococcus prevotii
tcttgacagaacccttcggg

SEQ ID NO: 34797 - DNA, 20 bp, Pasteurella multocida
atatgcttggtgcccgaagc

SEQ ID NO: 34798 - DNA, 20 bp, Clostridium glycolicum
gtatgctaatacaggataat

SEQ ID NO: 34799 - DNA, 20 bp, Bacteroides ovatus
agcgtgaaggatgaaggctc

SEQ ID NO: 34800 - DNA, 20 bp, Stenotrophomonas maltophilia
ctggatgactagaatgtggt

SEQ ID NO: 34801 - DNA, 20 bp, Leptotrichia buccalis
aacttgccctgcagacaggg

SEQ ID NO: 34802 - DNA, 20 bp, Peptoniphilus indolicus
atgacacatgtcataacgat

SEQ ID NO: 34803 - DNA, 20 bp, Fusobacterium varium
tttgacatcccaagaagtta

SEQ ID NO: 34804 - DNA, 20 bp, Pseudoramibacter alactolyticus
tcatgaaaactccggtgcca

SEQ ID NO: 34805 - DNA, 20 bp, Moraxella bovis
gagcttggatacaggtgctg

SEQ ID NO: 34806 - DNA, 20 bp, Corynebacterium amycolatum
taagaaactgccggggttaa

SEQ ID NO: 34807 - DNA, 20 bp, Propionibacterium freudenreichii
ggaacgtgcccttgacttcg

SEQ ID NO: 34808 - DNA, 20 bp, Pseudoramibacter alactolyticus
gtcgcatggcaagatcatga

SEQ ID NO: 34809 - DNA, 20 bp, Anaerobiospirillum succiniciproducens
ttcgggaacctacagacagg

SEQ ID NO: 34810 - DNA, 20 bp, Peptostreptococcus anaerobius
ttacggcatcgtagatatat

SEQ ID NO: 34811 - DNA, 20 bp, Veillonella atypica
atggaaactgctgatctaga

SEQ ID NO: 34812 - DNA, 20 bp, Clostridium butyricum
tagtaccgcatggtacagca

SEQ ID NO: 34813 - DNA, 20 bp, Fusobacterium varium
acctgaagtaacaggcctaa

SEQ ID NO: 34814 - DNA, 20 bp, Helcococcus ovis
agttgtcgggagtcaaatct

SEQ ID NO: 34815 - DNA, 20 bp, Fusobacterium mortiferum
cgaagtaagtgacggtacca

SEQ ID NO: 34816 - DNA, 20 bp, Campylobacter concisus
cccaagcttgcttgggtact

SEQ ID NO: 34817 - DNA, 20 bp, Campylobacter concisus
aagcttgcttgggtactcga

SEQ ID NO: 34818 - DNA, 20 bp, Paenibacillus alvei
gagctaataccagataggca

SEQ ID NO: 34819 - DNA, 20 bp, Moraxella lacunata
cttgtggttaatacctacaa

SEQ ID NO: 34820 - DNA, 20 bp, Bacteroides vulgatus
atgccaatcccaaaaacctc

SEQ ID NO: 34821 - DNA, 20 bp, Pseudoramibacter alactolyticus
agtcgaaggtggggctagta

SEQ ID NO: 34822 - DNA, 20 bp, Actinomyces turicensis
catggtcaagccgcagcttt

SEQ ID NO: 34823 - DNA, 20 bp, Actinomyces turicensis
ttgacttgagtgcggtaggg

SEQ ID NO: 34824 - DNA, 20 bp, Brevibacillus thermoruber
ctaccacttgcggatgggcc

SEQ ID NO: 34825 - DNA, 20 bp, Fusobacterium nucleatum
tttaaggcatcttagaatta

SEQ ID NO: 34826 - DNA, 20 bp, Bacillus flexus
tacaagagtaactgcttgta

SEQ ID NO: 34827 - DNA, 20 bp, Anaerococcus prevotii
ttcggatggggactctaaag

SEQ ID NO: 34828 - DNA, 20 bp, Streptococcus hyovaginalis
acatgttaatgatttaaaag

SEQ ID NO: 34829 - DNA, 20 bp, Prevotella bivia
tgttgtgaaatgtaggagct

SEQ ID NO: 34830 - DNA, 20 bp, Leptotrichia buccalis
taacagacggaaacgactga

SEQ ID NO: 34831 - DNA, 20 bp, Corynebacterium falsenii
acttgtggtgacggtacctg

SEQ ID NO: 34832 - DNA, 20 bp, Moraxella osloensis
tgcatgtgatactggtggtg

SEQ ID NO: 34833 - DNA, 20 bp, Arcanobacterium bernardiae
tggtgcagccttcggggtgg

SEQ ID NO: 34834 - DNA, 20 bp, Bacteroides fragilis
gaccgtatgctaatcccaaa

SEQ ID NO: 34835 - DNA, 20 bp, Facklamia ignava
ccgcccctcagtgctggcgc

SEQ ID NO: 34836 - DNA, 20 bp, Helcococcus ovis
ataatgactgtaactaagaa

SEQ ID NO: 34837 - DNA, 20 bp, Pseudoramibacter alactolyticus
ccgaagcctgtgagagaacc

SEQ ID NO: 34838 - DNA, 20 bp, Neisseria polysaccharea
agcggctgatgacggtacct

SEQ ID NO: 34839 - DNA, 20 bp, Gemella haemolysans
gctaagtgttggtctcataa

SEQ ID NO: 34840 - DNA, 20 bp, Budvicia aquatica
tgggcatgacccgtggcttc

SEQ ID NO: 34841 - DNA, 20 bp, Atopobium parvulum
cgggtgtgtataaagtggcg

SEQ ID NO: 34842 - DNA, 20 bp, Bacillus simplex
accggatacgttcttttctc

SEQ ID NO: 34843 - DNA, 20 bp, Brevibacillus choshinensis
ccgctgaccctcctagagat

SEQ ID NO: 34844 - DNA, 20 bp, Peptostreptococcus anaerobius
catcccttagaccggtgttt

SEQ ID NO: 34845 - DNA, 20 bp, Bacillus coagulans
aaaaggttagcggcggacgg

SEQ ID NO: 34846 - DNA, 20 bp, Prevotella bivia
tgcagcgcgaactgtcagac

SEQ ID NO: 34847 - DNA, 20 bp, Shewanella algae
gatggataagcccaggtggg

SEQ ID NO: 34848 - DNA, 20 bp, Veillonella dispar
gagatagttcctcttcttcg

SEQ ID NO: 34849 - DNA, 20 bp, Gemella bergeri
tggtttagaaagtctgatgt

SEQ ID NO: 34850 - DNA, 20 bp, Pediococcus pentosaceus
ttaacacgaagtgagtggcg

SEQ ID NO: 34851 - DNA, 20 bp, Facklamia sourekii
ggggggcttccacccctcag

SEQ ID NO: 34852 - DNA, 20 bp, Tetragenococcus halophilus
caaggcctagcgaatctctg

SEQ ID NO: 34853 - DNA, 20 bp, Campylobacter curvus
ttgctaagctagtcttggca

SEQ ID NO: 34854 - DNA, 20 bp, Prevotella denticola
cacactaaaggcagttcata

SEQ ID NO: 34855 - DNA, 20 bp, Tetragenococcus halophilus
caaagtcggtgcggcaaccc

SEQ ID NO: 34856 - DNA, 20 bp, Lactococcus garvieae
ttcctaaggtaagaccgatg

SEQ ID NO: 34857 - DNA, 20 bp, Micrococcus luteus
gagcgcccaccgcatggtgg

SEQ ID NO: 34858 - DNA, 20 bp, Facklamia hominis
gaagaacgaccgctagagta

SEQ ID NO: 34859 - DNA, 20 bp, Actinomyces bovis
aggcggctaactggcctgta

SEQ ID NO: 34860 - DNA, 20 bp, Weeksella virosa
ttagttttgaaagatttatc

SEQ ID NO: 34861 - DNA, 20 bp, Veillonella atypica
tcactgaaggaggggattgc

SEQ ID NO: 34862 - DNA, 20 bp, Streptococcus constellatus
aataccgcataagaacattt

SEQ ID NO: 34863 - DNA, 20 bp, Fusobacterium nucleatum
taatattatgataatagggc

SEQ ID NO: 34864 - DNA, 20 bp, Streptococcus dysgalactiae
gtgggagtggaaaatccacc

SEQ ID NO: 34865 - DNA, 20 bp, Kocuria kristinae
gttactgggctgttactgac

SEQ ID NO: 34866 - DNA, 20 bp, Streptococcus agalactiae
gcaagtagaacgctgaggtt

SEQ ID NO: 34867 - DNA, 20 bp, Bacteroides capilosus
gtccgaaaggactgctaata

SEQ ID NO: 34868 - DNA, 20 bp, Prevotella denticola
acactaaaggcagttcatat

SEQ ID NO: 34869 - DNA, 20 bp, Actinomyces neuii
cattggtgcttgcacttttg

SEQ ID NO: 34870 - DNA, 20 bp, Streptococcus agalactiae
ccaagtgacggtaactaacc

SEQ ID NO: 34871 - DNA, 20 bp, Gemella bergeri
ttgacatactgtgaggacat

SEQ ID NO: 34872 - DNA, 20 bp, Acinetobacter radioresistens
tacctagattaatactttag

SEQ ID NO: 34873 - DNA, 20 bp, Cardiobacterium hominis
tgggtgggaactgtaaggag

SEQ ID NO: 34874 - DNA, 20 bp, Cellulosimicrobium cellulans
acatgcacgagaagccacca

SEQ ID NO: 34875 - DNA, 20 bp, Neisseria polysaccharea
gtgggtaggataaccgcaag

SEQ ID NO: 34876 - DNA, 20 bp, Acinetobacter haemolyticus
tcgagcggggaagtgtagct

SEQ ID NO: 34877 - DNA, 20 bp, Proteus penneri
acgtctacggaccaaagcag

SEQ ID NO: 34878 - DNA, 20 bp, Corynebacterium glucuronolyticum
tacgggcattgcttgagtgc

SEQ ID NO: 34879 - DNA, 20 bp, Acinetobacter johnsonii
gctacttggattaatactct

SEQ ID NO: 34880 - DNA, 20 bp, Abiotrophia defectiva
tgcgtgtgacggtatctaac

SEQ ID NO: 34881 - DNA, 20 bp, Anaerococcus tetradius
accaaagatttatcggtgta

SEQ ID NO: 34882 - DNA, 20 bp, Campylobacter concisus
cccccttgtggggctggtgt

SEQ ID NO: 34883 - DNA, 20 bp, Pediococcus pentosaceus
accgtataacagagaaaacc

SEQ ID NO: 34884 - DNA, 20 bp, Corynebacterium group F
agtgcttgcactggtactcg

SEQ ID NO: 34885 - DNA, 20 bp, Paenibacillus macerans
ttgcactcctgagagttagc

SEQ ID NO: 34886 - DNA, 20 bp, Clostridium innocuum
ctggagtgcagaagagggcg

SEQ ID NO: 34887 - DNA, 20 bp, Rhizobium radiobacter
tgggcggcaggcttaacaca

SEQ ID NO: 34888 - DNA, 20 bp, Burkholderia gladioli
ctggagagatctgggagtgc

SEQ ID NO: 34889 - DNA, 20 bp, Shewanella algae
gagactgccggtgataaccg

SEQ ID NO: 34890 - DNA, 20 bp, Bacillus halodurans
agtcgagcggaccaaaggga

SEQ ID NO: 34891 - DNA, 20 bp, Streptococcus sp.
ataccgcataaaattgatta

SEQ ID NO: 34892 - DNA, 20 bp, Brevibacillus choshinensis
ctttcagaccgcatggtctg

SEQ ID NO: 34893 - DNA, 20 bp, Staphylococcus carnosus
aacaagtgcgtaggtaacta

SEQ ID NO: 34894 - DNA, 20 bp, Leptotrichia buccalis
tgccctgcagacagggataa

SEQ ID NO: 34895 - DNA, 20 bp, Anaerococcus tetradius
ttacggagggaattagagat

SEQ ID NO: 34896 - DNA, 20 bp, Bacillus lentus
agcttcttattggttcgctc

SEQ ID NO: 34897 - DNA, 20 bp, Prevotella bivia
agataatgaggtccttcggg

SEQ ID NO: 34898 - DNA, 20 bp, Serratia proteamaculans
aatagcacattgcattgacg

SEQ ID NO: 34899 - DNA, 20 bp, Bacteroides thetaiotaomicron
aatgggcgcaggcctgaacc

SEQ ID NO: 34900 - DNA, 20 bp, Leuconostoc lactis
aaacatttgagtgagtggcg

SEQ ID NO: 34901 - DNA, 20 bp, Virgibacillus pantothenticus
atcctctgacgcccctagag

SEQ ID NO: 34902 - DNA, 20 bp, Bacteroides stercoris
taactattaaagaatttcgg

SEQ ID NO: 34903 - DNA, 20 bp, Streptococcus dysgalactiae
catcctcctgaccggtctag

SEQ ID NO: 34904 - DNA, 20 bp, Bacteroides eggerthii
gctaatcccgaaaacctctc

SEQ ID NO: 34905 - DNA, 20 bp, Prevotella bivia
gaacgatttagagataatga

SEQ ID NO: 34906 - DNA, 20 bp, Listeria innocua
atagagtgtggcgcatgcca

SEQ ID NO: 34907 - DNA, 20 bp, Bacteroides fragilis
ttcttttatataagaataaa

SEQ ID NO: 34908 - DNA, 20 bp, Brevibacterium epidermidis
gaccgttctggaaacagttc

SEQ ID NO: 34909 - DNA, 20 bp, Abiotrophia defectiva
agagtaactgttatgcgtgt

SEQ ID NO: 34910 - DNA, 20 bp, Anaerobiospirillum succiniciproducens
ggtctcctgggcaaatactg

SEQ ID NO: 34911 - DNA, 20 bp, Neisseria subflava
gtgactcgagtgtgtcagag

SEQ ID NO: 34912 - DNA, 20 bp, Burkholderia gladioli
agggctaatatccttcgggg

SEQ ID NO: 34913 - DNA, 20 bp, Corynebacterium glucuronolyticum
gttcgtcccttgtggctcat

SEQ ID NO: 34914 - DNA, 20 bp, Campylobacter sputorum
gaaatgagtgctaatacctc

SEQ ID NO: 34915 - DNA, 20 bp, Veillonella atypica
acactctctcagttcggatc

SEQ ID NO: 34916 - DNA, 20 bp, Paenibacillus macerans
atgctaataccggatacgca

SEQ ID NO: 34917 - DNA, 20 bp, Streptococcus constellatus
acatgcaagtagaccgcaca

SEQ ID NO: 34918 - DNA, 20 bp, Bacteroides fragilis
atgtggaaacatgtcagtga

SEQ ID NO: 34919 - DNA, 20 bp, Leptotrichia buccalis
ccgcaagcctgccctggaaa

SEQ ID NO: 34920 - DNA, 20 bp, Moraxella osloensis
aggctaatggttaataccca

SEQ ID NO: 34921 - DNA, 20 bp, Corynebacterium ulcerans
gtacaacgcgttgcgagcct

SEQ ID NO: 34922 - DNA, 20 bp, Propionibacterium avidum
gccggtggcctaacctgtgt

SEQ ID NO: 34923 - DNA, 20 bp, Achromobacter xylosoxidans
ataccccgcggaactgacgg

SEQ ID NO: 34924 - DNA, 20 bp, Streptococcus parauberis
agtagaacgctgaagactgg

SEQ ID NO: 34925 - DNA, 20 bp, Neisseria meningitidis
tttcgggccttgcgctattc

SEQ ID NO: 34926 - DNA, 20 bp, Anaerococcus tetradius
acgaagaataataccctata

SEQ ID NO: 34927 - DNA, 20 bp, Tissierella praeacuta
agtcgagcgaagtttttaaa

SEQ ID NO: 34928 - DNA, 20 bp, Peptostreptococcus anaerobius
cttcggggctgaggtgacag

SEQ ID NO: 34929 - DNA, 20 bp, Unknown Organism
  oligonucleotide from CDC group EF-4B
aaactgggtgactagagtat

SEQ ID NO: 34930 - DNA, 20 bp, Acinetobacter haemolyticus
gaggaggaggctactctagt

SEQ ID NO: 34931 - DNA, 20 bp, Suttonella indologenes
gaaggcagccttctggggca

SEQ ID NO: 34932 - DNA, 20 bp, Anaerococcus prevotii
gagtagaggtaagtggaatt

SEQ ID NO: 34933 - DNA, 20 bp, Arcanobacterium bernardiae
cactgcgatgtgccagagat

SEQ ID NO: 34934 - DNA, 20 bp, Proteus vulgaris
taatactcttagcaattgac

SEQ ID NO: 34935 - DNA, 20 bp, Campylobacter rectus
gctatttaatcttagtggcg

SEQ ID NO: 34936 - DNA, 20 bp, Prevotella corporis
gtgtcggctcaagtgccata

SEQ ID NO: 34937 - DNA, 20 bp, Anaerococcus prevotii
caaagggaagcgaaatagtg

SEQ ID NO: 34938 - DNA, 20 bp, Corynebacterium falsenii
cttgcttgcaggggtactcg

SEQ ID NO: 34939 - DNA, 20 bp, Brochothrix campestris
cccaaagccggtttggtaac

SEQ ID NO: 34940 - DNA, 20 bp, Bacillus circulans
gctgaaagacggtttacgct

SEQ ID NO: 34941 - DNA, 20 bp, Eubacterium moniliforme
cttaacctgagtgctgcatt

SEQ ID NO: 34942 - DNA, 20 bp, Fusobacterium varium
gtttgacatcccaagaagtt

SEQ ID NO: 34943 - DNA, 20 bp, Moraxella osloensis
aggtacagagggttgctaca

SEQ ID NO: 34944 - DNA, 20 bp, Leptotrichia buccalis
tccaaccgtaaggaggaagg

SEQ ID NO: 34945 - DNA, 20 bp, Alloiococcus otitis
acatgcaagtcgaacgccaa

SEQ ID NO: 34946 - DNA, 20 bp, Prevotella melaninogenica
aaatgtagacgctcaacgtc

SEQ ID NO: 34947 - DNA, 20 bp, Bacteroides uniformis
gggtgtcttgagtacagtag

SEQ ID NO: 34948 - DNA, 20 bp, Cellulomonas turbata
gcccctgcatggggagtgtc

SEQ ID NO: 34949 - DNA, 20 bp, Actinomyces naeslundii
ctgtcgcatggtgggcctgg

SEQ ID NO: 34950 - DNA, 20 bp, Prevotella bivia
ttatgtcggcgaccggcgca

SEQ ID NO: 34951 - DNA, 20 bp, Peptoniphilus indolicus
ctgcctttgacacggggata

SEQ ID NO: 34952 - DNA, 20 bp, Vibrio hollisae
gtggaatccgccagaagtgg

SEQ ID NO: 34953 - DNA, 20 bp, Arcanobacterium bernardiae
gccttttccacgggttctgc

SEQ ID NO: 34954 - DNA, 20 bp, Cardiobacterium hominis
gcaggtagcttaacttagga

SEQ ID NO: 34955 - DNA, 20 bp, Vibrio cholerae
ctgggcatatccggtagcgc

SEQ ID NO: 34956 - DNA, 20 bp, Dermacoccus nishinomiyaensis
tcatgcagagatgtgtgcgt

SEQ ID NO: 34957 - DNA, 20 bp, Prevotella intermedia
gacggcctaatacccgatgt

SEQ ID NO: 34958 - DNA, 20 bp, Comamonas testosteroni
acgaaaagcctggggctaat

SEQ ID NO: 34959 - DNA, 20 bp, Tetragenococcus halophilus
tccatgacggtagctgacca

SEQ ID NO: 34960 - DNA, 20 bp, Fusobacterium nucleatum
gaacagagagtcgcaaagct

SEQ ID NO: 34961 - DNA, 20 bp, Brevibacillus reuszeri
cgaataagtaccgttcgaat

SEQ ID NO: 34962 - DNA, 20 bp, Actinomyces bovis
gagcgcaggcggtttatcaa

SEQ ID NO: 34963 - DNA, 20 bp, Fusobacterium nucleatum
gatatttcagtgtcccttcg

SEQ ID NO: 34964 - DNA, 20 bp, Leuconostoc lactis
tgatagtaactgatcaggta

SEQ ID NO: 34965 - DNA, 20 bp, Campylobacter lari
taacacaagttgagtaggga

SEQ ID NO: 34966 - DNA, 20 bp, Brevibacillus reuszeri
tatgccaatctcttaaaacc

SEQ ID NO: 34967 - DNA, 20 bp, Bacillus circulans
ctctcatgaggaaaagctga

SEQ ID NO: 34968 - DNA, 20 bp, Corynebacterium glucuronolyticum
acttttggttggcaggcgat

SEQ ID NO: 34969 - DNA, 20 bp, Gemella bergeri
agccaatctcataaaactat

SEQ ID NO: 34970 - DNA, 20 bp, Gemella bergeri
aacactataagatggctttg

SEQ ID NO: 34971 - DNA, 20 bp, Arcanobacterium bernardiae
taggggtaattggaattcct

SEQ ID NO: 34972 - DNA, 20 bp, Tissierella praeacuta
aaagcggtaaaagatggtct

SEQ ID NO: 34973 - DNA, 20 bp, Acinetobacter lwoffii
gaggaggctaccgagattaa

SEQ ID NO: 34974 - DNA, 20 bp, Lactococcus lactis
tgcatcactcaaagatgatc

SEQ ID NO: 34975 - DNA, 20 bp, Lactococcus lactis
agttgggagtacccgaagta

SEQ ID NO: 34976 - DNA, 20 bp, Moraxella osloensis
ctcattaagtcacatgtgaa

SEQ ID NO: 34977 - DNA, 20 bp, Proteus vulgaris
agaggttgtggtcttgaact

SEQ ID NO: 34978 - DNA, 20 bp, Clostridium clostridiiforme
gggagcgtagacggttaagc

SEQ ID NO: 34979 - DNA, 20 bp, Anaerobiospirillum succiniciproducens
tgccttcgggaacctacaga

SEQ ID NO: 34980 - DNA, 20 bp, Bacillus pallidus
agagggtatccaccctttag

SEQ ID NO: 34981 - DNA, 20 bp, Lactococcus garvieae
taagtctgatgtaaaaggca

SEQ ID NO: 34982 - DNA, 20 bp, Kingella denitrificans
aaagggaagtgttaatacca

SEQ ID NO: 34983 - DNA, 20 bp, Streptococcus constellatus
ctacaccgtattctgtgagt

SEQ ID NO: 34984 - DNA, 20 bp, Pediococcus damnosus
gctaataccgcataataaaa

SEQ ID NO: 34985 - DNA, 20 bp, Propionibacterium freudenreichii
cctttttggctggtacacag

SEQ ID NO: 34986 - DNA, 20 bp, Prevotella melaninogenica
gatgacggcatcagatttga

SEQ ID NO: 34987 - DNA, 20 bp, Delftia acidovorans
tctcctaatacgagaggccc

SEQ ID NO: 34988 - DNA, 20 bp, Anaerococcus prevotii
gcgacttactgggctcattc

SEQ ID NO: 34989 - DNA, 20 bp, Prevotella loescheii
gcctagggtgaaaccggtga

SEQ ID NO: 34990 - DNA, 20 bp, Clostridium clostridiiforme
gttaagcaagtctgaagtga

SEQ ID NO: 34991 - DNA, 20 bp, Campylobacter rectus
catccagagatggaagagtg

SEQ ID NO: 34992 - DNA, 20 bp, Bacillus coagulans
gtcgtaaaactctgttgccg

SEQ ID NO: 34993 - DNA, 20 bp, Clostridium butyricum
aacctcgcgagagtgagcaa

SEQ ID NO: 34994 - DNA, 20 bp, Corynebacterium xerosis
caccgtgagggtgtggtgga

SEQ ID NO: 34995 - DNA, 20 bp, Peptoniphilus indolicus
aacgatcaaagtgaattagc

SEQ ID NO: 34996 - DNA, 20 bp, Prevotella loescheii
cccgggcttgaactgcggcg

SEQ ID NO: 34997 - DNA, 20 bp, Moraxella  catarrhalis
tcgttgggtcttttaaagac

SEQ ID NO: 34998 - DNA, 20 bp, Suttonella indologenes
gccttctggggcaatactga

SEQ ID NO: 34999 - DNA, 20 bp, Brevibacillus choshinensis
ctcttcggcggttagcggcg

SEQ ID NO: 35000 - DNA, 20 bp, Campylobacter gracilis
catcctctgacccctctaga

SEQ ID NO: 35001 - DNA, 20 bp, Bacteroides fragilis
tgttttgtatgtattatatg

SEQ ID NO: 35002 - DNA, 20 bp, Bacillus alcalophilus
cttttgtaaaagatggctcc

SEQ ID NO: 35003 - DNA, 20 bp, Moraxella  catarrhalis
ttttaaagacttagtgacgc

SEQ ID NO: 35004 - DNA, 20 bp, Corynebacterium matruchotii
cttgacatacaccagattgg

SEQ ID NO: 35005 - DNA, 20 bp, Myroides odoratus
aacaggatgcgaatctccaa

SEQ ID NO: 35006 - DNA, 20 bp, Moraxella bovis
gaacgatgactatctagctt

SEQ ID NO: 35007 - DNA, 20 bp, Achromobacter xylosoxidans
ccgcggaactgacggtacct

SEQ ID NO: 35008 - DNA, 20 bp, Helcococcus kunzii
gcgaatcgcataaaacagat

SEQ ID NO: 35009 - DNA, 20 bp, Streptococcus macacae
gtatcgctaagagatggacc

SEQ ID NO: 35010 - DNA, 20 bp, Leuconostoc argentinum
gggaatgattctagttcgac

SEQ ID NO: 35011 - DNA, 20 bp, Pseudoramibacter alactolyticus
ggagcgaatctcataaaaca

SEQ ID NO: 35012 - DNA, 20 bp, Dermabacter hominis
cgaggcttaaccttgggcgt

SEQ ID NO: 35013 - DNA, 20 bp, Fusobacterium mortiferum
ttgcgttggaaactgccaaa

SEQ ID NO: 35014 - DNA, 20 bp, Bacillus alcalophilus
ctcaaccccgaggggtcatt

SEQ ID NO: 35015 - DNA, 20 bp, Corynebacterium coyleae
cggaaaggctcctgcttgca

SEQ ID NO: 35016 - DNA, 20 bp, Campylobacter concisus
gttggatgccattgtggaaa

SEQ ID NO: 35017 - DNA, 20 bp, Bacillus megaterium
tccttcatgggagatgattg

SEQ ID NO: 35018 - DNA, 20 bp, Listeria monocytogenes
aatgataaagtgtggcgcat

SEQ ID NO: 35019 - DNA, 20 bp, Staphylococcus succinus
taccttgtacgacttcaccc

SEQ ID NO: 35020 - DNA, 20 bp, Oligella urethralis
cggtgcttattcctcaacta

SEQ ID NO: 35021 - DNA, 20 bp, Acinetobacter genospecies 3
ggctaattaagtcaaatgtg

SEQ ID NO: 35022 - DNA, 20 bp, Streptococcus parasanguinis
aaatgcatcactaagagatg

SEQ ID NO: 35023 - DNA, 20 bp, Aneurinibacillus thermoaerophilus
gacccctccagagatggagg

SEQ ID NO: 35024 - DNA, 20 bp, Bacillus alcalophilus
accaaagggagcttgctccc

SEQ ID NO: 35025 - DNA, 20 bp, Pseudoramibacter alactolyticus
accggtgacgtgcatttgaa

SEQ ID NO: 35026 - DNA, 20 bp, Peptoniphilus indolicus
catgtcataacgatcaaagt

SEQ ID NO: 35027 - DNA, 20 bp, Campylobacter concisus
acgcgcatgcgagcctgtga

SEQ ID NO: 35028 - DNA, 20 bp, Bacteroides thetaiotaomicron
tacccgatggtataatcaga

SEQ ID NO: 35029 - DNA, 20 bp, Prevotella melaninogenica
cttgagtacgcacaacgttg

SEQ ID NO: 35030 - DNA, 20 bp, Bacteroides fragilis
attgcagttgatactgtcag

SEQ ID NO: 35031 - DNA, 20 bp, Morganella morganii
ccgggaattgcatctgatac

SEQ ID NO: 35032 - DNA, 20 bp, Rothia mucilaginosa
gggaagaagagagattgacg

SEQ ID NO: 35033 - DNA, 20 bp, Enterococcus cecorum
ggaaagttcatcccttgacg

SEQ ID NO: 35034 - DNA, 20 bp, Bacteroides stercoris
gcccaccaaaccgacgatgg

SEQ ID NO: 35035 - DNA, 20 bp, Bacteroides stercoris
ggcgacgtggtgctaatccc

SEQ ID NO: 35036 - DNA, 20 bp, Methylobacterium extorquens
ggtgtcagtggcagacgggt

SEQ ID NO: 35037 - DNA, 20 bp, Proteus mirabilis
gcgggcaggcctaacacatg

SEQ ID NO: 35038 - DNA, 20 bp, Bacteroides uniformis
gggggactctgtcgagactg

SEQ ID NO: 35039 - DNA, 20 bp, Fusobacterium nucleatum
ttaacttaggtttgggtggc

SEQ ID NO: 35040 - DNA, 20 bp, Tetragenococcus halophilus
ctgaaagaaagctcaaaggc

SEQ ID NO: 35041 - DNA, 20 bp, Vibrio fluvialis
acaacattgaaccttcgggg

SEQ ID NO: 35042 - DNA, 20 bp, Facklamia sourekii
aacctaccctctagcggggg

SEQ ID NO: 35043 - DNA, 20 bp, Acinetobacter junii
agatgaggtgcttgcacctt

SEQ ID NO: 35044 - DNA, 20 bp, Streptococcus thermophilus
ggatcctttccgggattcag

SEQ ID NO: 35045 - DNA, 20 bp, Paenibacillus pabuli
acaacgggctgtgaagccgc

SEQ ID NO: 35046 - DNA, 20 bp, Myroides odoratus
gtaaaagatgggcatgcgta

SEQ ID NO: 35047 - DNA, 20 bp, Actinomyces meyeri
ggatattcactggtcttcgc

SEQ ID NO: 35048 - DNA, 20 bp, Peptostreptococcus anaerobius
acatcccttagaccggtgtt

SEQ ID NO: 35049 - DNA, 20 bp, Porphyromonas endodontalis
aacttcttttgtagaggaat

SEQ ID NO: 35050 - DNA, 20 bp, Sporosarcina pasteurii
atatctctataccggtcagc

SEQ ID NO: 35051 - DNA, 20 bp, Corynebacterium mycetoides
tgtgcgacactgtgaggtgg

SEQ ID NO: 35052 - DNA, 20 bp, Proteus vulgaris
ctgtggcttctggagctaac

SEQ ID NO: 35053 - DNA, 20 bp, Bacteroides distasonis
agcggcacagcgaaagcgtt

SEQ ID NO: 35054 - DNA, 20 bp, Weeksella virosa
gaaattcggattaataccgt

SEQ ID NO: 35055 - DNA, 20 bp, Mannheimia haemolytica
ttaactctggtgcccgtagc

SEQ ID NO: 35056 - DNA, 20 bp, Propionibacterium propionicus
tgacgaagcttttttgtgac

SEQ ID NO: 35057 - DNA, 20 bp, Haemophilus segnis
agactgggtagctagagtac

SEQ ID NO: 35058 - DNA, 20 bp, Kingella denitrificans
gcagcgggggtgcttgcacc

SEQ ID NO: 35059 - DNA, 20 bp, Acinetobacter junii
actgagactaatactcttgg

SEQ ID NO: 35060 - DNA, 20 bp, Peptoniphilus indolicus
ttgacacggggatagccacc

SEQ ID NO: 35061 - DNA, 20 bp, Actinomyces radingae
gagggtgggcggtcacattg

SEQ ID NO: 35062 - DNA, 20 bp, Anaerobiospirillum succiniciproducens
gagggaaacgataccgggag

SEQ ID NO: 35063 - DNA, 20 bp, Fusobacterium mortiferum
gcagtctgggacaacatttg

SEQ ID NO: 35064 - DNA, 20 bp, Weeksella virosa
atcatttagttttgaaagat

SEQ ID NO: 35065 - DNA, 20 bp, Gemella haemolysans
tggtctcataagagatcagt

SEQ ID NO: 35066 - DNA, 20 bp, Corynebacterium group ANF
cccaacttgggtataagcct

SEQ ID NO: 35067 - DNA, 20 bp, Paenibacillus lautus
accggataatttatttcaca

SEQ ID NO: 35068 - DNA, 20 bp, Comamonas testosteroni
ccgggtcatgacggtaccgt

SEQ ID NO: 35069 - DNA, 20 bp, Finegoldia magna
tcatagatgggctcgcgtct

SEQ ID NO: 35070 - DNA, 20 bp, Corynebacterium glucuronolyticum
tggttggcaggcgatacggg

SEQ ID NO: 35071 - DNA, 20 bp, Prevotella melaninogenica
tacgcacaacgttggcggaa

SEQ ID NO: 35072 - DNA, 20 bp, Vagococcus fluvialis
aatggcctaccaagaccgtg

SEQ ID NO: 35073 - DNA, 20 bp, Campylobacter rectus
ctaatactctatactccttc

SEQ ID NO: 35074 - DNA, 20 bp, Bacteroides eggerthii
gcgacaggatgctaatcccg

SEQ ID NO: 35075 - DNA, 20 bp, Facklamia ignava
acgcgccgagaagggaactt

SEQ ID NO: 35076 - DNA, 20 bp, Bacillus lentus
tcgctcatgcgtcgccgctt

SEQ ID NO: 35077 - DNA, 20 bp, Bacillus lentus
accctgtctccagggcggtc

SEQ ID NO: 35078 - DNA, 20 bp, Bacillus coagulans
aaactctgttgccggggaag

SEQ ID NO: 35079 - DNA, 20 bp, Streptococcus thermophilus
agcggatgagttgcgaacgg

SEQ ID NO: 35080 - DNA, 20 bp, Lactococcus lactis
tttaaacataagttttaagt

SEQ ID NO: 35081 - DNA, 20 bp, Streptococcus bovis
tgactactttagcttgctag

SEQ ID NO: 35082 - DNA, 20 bp, Streptococcus hyovaginalis
gtggaaagtttactctgtga

SEQ ID NO: 35083 - DNA, 20 bp, Moraxella lacunata
acgagagaaagggggctttt

SEQ ID NO: 35084 - DNA, 20 bp, Brevibacillus borstelensis
tgctaataccggatagggtc

SEQ ID NO: 35085 - DNA, 20 bp, Brevibacillus choshinensis
cctttggtcacgtacagatg

SEQ ID NO: 35086 - DNA, 20 bp, Staphylococcus capitis
taggacagctgtttagtgtc

SEQ ID NO: 35087 - DNA, 20 bp, Prevotella bivia
tggatgcccgctgttagcac

SEQ ID NO: 35088 - DNA, 20 bp, Actinomyces bovis
aatgcttcttatatgacggt

SEQ ID NO: 35089 - DNA, 20 bp, Campylobacter lari
tagttgctaacacttcgggt

SEQ ID NO: 35090 - DNA, 20 bp, Staphylococcus chromogenes
cgagcgaactgacgaggagc

SEQ ID NO: 35091 - DNA, 20 bp, Listeria innocua
cgcatgccacgctcttgaaa

SEQ ID NO: 35092 - DNA, 20 bp, Moraxella lacunata
ggtctcttgaagacttagtg

SEQ ID NO: 35093 - DNA, 20 bp, Streptococcus infantarius
aacagcatttaacccatgtt

SEQ ID NO: 35094 - DNA, 20 bp, Tissierella praeacuta
ttgacatgcccctgaccgtc

SEQ ID NO: 35095 - DNA, 20 bp, Clostridium ramosum
ggtcttgacatactcataaa

SEQ ID NO: 35096 - DNA, 20 bp, Streptococcus agalactiae
catgttagttatttaaaagg

SEQ ID NO: 35097 - DNA, 20 bp, Propionibacterium propionicus
tggaaagttctggcggtggg

SEQ ID NO: 35098 - DNA, 20 bp, Neisseria meningitidis
tgatattagcaacagccttt

SEQ ID NO: 35099 - DNA, 20 bp, Granulicatella adiacens
agcgccttgacggtatctaa

SEQ ID NO: 35100 - DNA, 20 bp, Granulicatella adiacens
agtcgaacgagagcgaccgg

SEQ ID NO: 35101 - DNA, 20 bp, Streptococcus porcinus
gacccatgtcatctacttaa

SEQ ID NO: 35102 - DNA, 20 bp, Moraxella osloensis
tgtaggtggctcattaagtc

SEQ ID NO: 35103 - DNA, 20 bp, Staphylococcus aureus
ttctcgtccgttcgctcgac

SEQ ID NO: 35104 - DNA, 20 bp, Arcanobacterium pyogenes
cgaacgatgaagccggggct

SEQ ID NO: 35105 - DNA, 20 bp, Neisseria meningitidis
atacgtcttgagagagaaag

SEQ ID NO: 35106 - DNA, 20 bp, Gemella bergeri
cgcgcgcaggtggtttagaa

SEQ ID NO: 35107 - DNA, 20 bp, Neisseria cinerea
aggggtccgcttaccacggt

SEQ ID NO: 35108 - DNA, 20 bp, Paenibacillus pabuli
tgaagccgcgaggtggaacg

SEQ ID NO: 35109 - DNA, 20 bp, Serratia marcescens
cgttcatcaattgacgttac

SEQ ID NO: 35110 - DNA, 20 bp, Lactococcus garvieae
atgcaagtcgagcgatgatt

SEQ ID NO: 35111 - DNA, 20 bp, Clostridium tetani
taggagggtccaaccttctg

SEQ ID NO: 35112 - DNA, 20 bp, Vagococcus fluvialis
caagtcgaacgctttgattt

SEQ ID NO: 35113 - DNA, 20 bp, Bacillus fusiformis
tttcacctcatggtgaaaca

SEQ ID NO: 35114 - DNA, 20 bp, Bacteroides capilosus
  misc_feature (1)..(1): n is a, c, g, or t
ngatgaataagccacggcta

SEQ ID NO: 35115 - DNA, 20 bp, Eggerthella lenta
gatcccgaactgggaggctc

SEQ ID NO: 35116 - DNA, 20 bp, Pasteurella trehalosi
tttgtttaatagacaaagca

SEQ ID NO: 35117 - DNA, 20 bp, Stenotrophomonas maltophilia
tggctaatacccggttggga

SEQ ID NO: 35118 - DNA, 20 bp, Gemella bergeri
gcgcaggtggtttagaaagt

SEQ ID NO: 35119 - DNA, 20 bp, Gemella haemolysans
gggagccggtcacggtggga

SEQ ID NO: 35120 - DNA, 20 bp, Gemella morbillorum
gttgttagggaagaatggat

SEQ ID NO: 35121 - DNA, 20 bp, Bacteroides merdae
caatggccgagaggctgaac

SEQ ID NO: 35122 - DNA, 20 bp, Globicatella sanguinis
caacgagtcgctaactcgca

SEQ ID NO: 35123 - DNA, 20 bp, Anaerococcus tetradius
ttgtaaaaatcttttgtatg

SEQ ID NO: 35124 - DNA, 20 bp, Suttonella indologenes
ggaaacgtacgctaatacca

SEQ ID NO: 35125 - DNA, 20 bp, Campylobacter sputorum
gaaatctagtagcttaacta

SEQ ID NO: 35126 - DNA, 20 bp, Shewanella algae
aaagggtgtaagttaatacc

SEQ ID NO: 35127 - DNA, 20 bp, Corynebacterium hoagii
tggcgggggttggaaaggtt

SEQ ID NO: 35128 - DNA, 20 bp, Dermabacter hominis
ccctccactttgggataact

SEQ ID NO: 35129 - DNA, 20 bp, Bacillus pallidus
aaaaccgcatggttttcggt

SEQ ID NO: 35130 - DNA, 20 bp, Bacteroides capilosus
tccgactaacgaagcagaga

SEQ ID NO: 35131 - DNA, 20 bp, Acinetobacter genospecies 3
ttgctactgatcttagcggc

SEQ ID NO: 35132 - DNA, 20 bp, Finegoldia magna
acatccatacaggtggtgca

SEQ ID NO: 35133 - DNA, 20 bp, Bacillus schlegellii
cgcactggcctgtaactgac

SEQ ID NO: 35134 - DNA, 20 bp, Lactococcus lactis
gaagtaggttgcctaaccgc

SEQ ID NO: 35135 - DNA, 20 bp, Bacillus lentus
catttcctccgatacttgtt

SEQ ID NO: 35136 - DNA, 20 bp, Bacteroides thetaiotaomicron
catttgaatattttggaaac

SEQ ID NO: 35137 - DNA, 20 bp, Dermacoccus nishinomiyaensis
tggagtgttggtggaaagtt

SEQ ID NO: 35138 - DNA, 20 bp, Brevibacillus borstelensis
tcccttcgggggctagcggc

SEQ ID NO: 35139 - DNA, 20 bp, Fusobacterium mortiferum
tattatgtgagtttcgcatg

SEQ ID NO: 35140 - DNA, 20 bp, Clostridium cadaveris
aggggtttcgatacctctgt

SEQ ID NO: 35141 - DNA, 20 bp, Weeksella virosa
gggttagcgcctgatccagc

SEQ ID NO: 35142 - DNA, 20 bp, Streptococcus sp.
aaattgattattgcatgata

SEQ ID NO: 35143 - DNA, 20 bp, Bacteroides stercoris
cgacgtgatgctaatcccaa

SEQ ID NO: 35144 - DNA, 20 bp, Actinomyces bovis
gccatagaaactggtagact

SEQ ID NO: 35145 - DNA, 20 bp, Corynebacterium coyleae
taatcgctgtaaagccggtc

SEQ ID NO: 35146 - DNA, 20 bp, Weeksella virosa
tgcgaatctctaaagccggt

SEQ ID NO: 35147 - DNA, 20 bp, Oligella urethralis
cttcgttgagaaaagtggtt

SEQ ID NO: 35148 - DNA, 20 bp, Haemophilus ducreyi
aacggtagcacgaaggactt

SEQ ID NO: 35149 - DNA, 20 bp, Bacillus lentus
cgctcatgcgtcgccgcttc

SEQ ID NO: 35150 - DNA, 20 bp, Moraxella bovis
ctatctagcttgctagatat

SEQ ID NO: 35151 - DNA, 20 bp, Acinetobacter haemolyticus
aggaggaggctactctagtt

SEQ ID NO: 35152 - DNA, 20 bp, Corynebacterium glucuronolyticum
aactgggtctaataccctat

SEQ ID NO: 35153 - DNA, 20 bp, Bacteroides forsythus
acgagcgcaaccctgactgt

SEQ ID NO: 35154 - DNA, 20 bp, Prevotella melaninogenica
attgcatcaaatcttgaaag

SEQ ID NO: 35155 - DNA, 20 bp, Bacillus pumilus
acagaacaaagggctgcgag

SEQ ID NO: 35156 - DNA, 20 bp, Corynebacterium group F
ttgtgtaagtccacagctta

SEQ ID NO: 35157 - DNA, 20 bp, Corynebacterium glucuronolyticum
gcaggcgatacgggcattgc

SEQ ID NO: 35158 - DNA, 20 bp, Streptococcus dysgalactiae
aaatccaccatgtgacggta

SEQ ID NO: 35159 - DNA, 20 bp, Paenibacillus azotofixans
actggaaactggacagcttg

SEQ ID NO: 35160 - DNA, 20 bp, Brevibacterium epidermidis
ttgggagggggccgtctaag

SEQ ID NO: 35161 - DNA, 20 bp, Paenibacillus peoriae
ctaaacaacctagcggcgga

SEQ ID NO: 35162 - DNA, 20 bp, Bacteroides uniformis
ggcggacgcttaagtcagtt

SEQ ID NO: 35163 - DNA, 20 bp, Leuconostoc citreum
aatgctaaaatagggaatga

SEQ ID NO: 35164 - DNA, 20 bp, Bacteroides fragilis
ggtacagaaggcagctagcg

SEQ ID NO: 35165 - DNA, 20 bp, Streptococcus agalactiae
aacacatgttagttatttaa

SEQ ID NO: 35166 - DNA, 20 bp, Gemella bergeri
aggtggtttagaaagtctga

SEQ ID NO: 35167 - DNA, 20 bp, Alicyclobacillus acidocaldarius
gggctcctctctcagcggcc

SEQ ID NO: 35168 - DNA, 20 bp, Kingella kingae
acgctttgagaaggaaagca

SEQ ID NO: 35169 - DNA, 20 bp, Facklamia sourekii
gcctagagataggtgaaatc

SEQ ID NO: 35170 - DNA, 20 bp, Brevibacillus choshinensis
agagcttgctcttcggcggt

SEQ ID NO: 35171 - DNA, 20 bp, Campylobacter lari
aactgttaaactgcttgaga

SEQ ID NO: 35172 - DNA, 20 bp, Dermabacter hominis
tgcggggagtcgtcgaaggt

SEQ ID NO: 35173 - DNA, 20 bp, Prevotella oris
gaaggcagcttgcgggagca

SEQ ID NO: 35174 - DNA, 20 bp, Clostridium subterminale
acctgtaatgagggaagccc

SEQ ID NO: 35175 - DNA, 20 bp, Leuconostoc fallax
caactgtggaatggctttgg

SEQ ID NO: 35176 - DNA, 20 bp, Bacteroides thetaiotaomicron
tactggctgtcttgagtaca

SEQ ID NO: 35177 - DNA, 20 bp, Corynebacterium ulcerans
atacaagatcggcgtagaga

SEQ ID NO: 35178 - DNA, 20 bp, Staphylococcus capitis
gcttgacatatacaagacag

SEQ ID NO: 35179 - DNA, 20 bp, Actinomyces meyeri
ccgcaactgtgggttgtggt

SEQ ID NO: 35180 - DNA, 20 bp, Peptostreptococcus anaerobius
aggaggaagtcgtcgaaggt

SEQ ID NO: 35181 - DNA, 20 bp, Leuconostoc argentinum
gcatgatacaaagttgaaag

SEQ ID NO: 35182 - DNA, 20 bp, Capnocytophaga ochracea
cagaggtagagatacctttt

SEQ ID NO: 35183 - DNA, 20 bp, Streptococcus dysgalactiae
gaacgctgaggactggtgct

SEQ ID NO: 35184 - DNA, 20 bp, Enterococcus raffinosus
atggccttgctatcacttat

SEQ ID NO: 35185 - DNA, 20 bp, Streptococcus anginosus
ggcggttagaaaagtctgaa

SEQ ID NO: 35186 - DNA, 20 bp, Tetragenococcus halophilus
caagccgcaaggcctagcga

SEQ ID NO: 35187 - DNA, 20 bp, Pediococcus acidilactici
cacgaagtgagtggcggacg

SEQ ID NO: 35188 - DNA, 20 bp, Campylobacter rectus
atctagagtaagggagaggc

SEQ ID NO: 35189 - DNA, 20 bp, Leptotrichia buccalis
tctgtgcttgcacagcctag

SEQ ID NO: 35190 - DNA, 20 bp, Neisseria meningitidis
gctttctctctcaagacgta

SEQ ID NO: 35191 - DNA, 20 bp, Fusobacterium mortiferum
ataccggatattatgtgagt

SEQ ID NO: 35192 - DNA, 20 bp, Finegoldia magna
gtagtggagaggaaagtgga

SEQ ID NO: 35193 - DNA, 20 bp, Bacteroides forsythus
aagtccgcggtgaaagtttg

SEQ ID NO: 35194 - DNA, 20 bp, Vagococcus fluvialis
gagcttgctccaccgaaaat

SEQ ID NO: 35195 - DNA, 20 bp, Facklamia ignava
accgtggctttgatgcatag

SEQ ID NO: 35196 - DNA, 20 bp, Tetragenococcus halophilus
ctttttttcacctgaaagaa

SEQ ID NO: 35197 - DNA, 20 bp, Corynebacterium auris
gtttgtgtaagtccatggct

SEQ ID NO: 35198 - DNA, 20 bp, Virgibacillus pantothenticus
taataccggatgatacatat

SEQ ID NO: 35199 - DNA, 20 bp, Clostridium butyricum
caatgagatgcaacctcgcg

SEQ ID NO: 35200 - DNA, 20 bp, Peptostreptococcus anaerobius
gtggcgtcgataactggggt

SEQ ID NO: 35201 - DNA, 20 bp, Pediococcus inopinatus
cgcatggttttcttttaaaa

SEQ ID NO: 35202 - DNA, 20 bp, Bacteroides capilosus
ttgttagttgctacgcaaga

SEQ ID NO: 35203 - DNA, 20 bp, Turicella otitidis
gccatttttagtgtgatggt

SEQ ID NO: 35204 - DNA, 20 bp, Budvicia aquatica
aaagaccaaagcgggggacc

SEQ ID NO: 35205 - DNA, 20 bp, Streptococcus hyovaginalis
cttcggggcactggtgacag

SEQ ID NO: 35206 - DNA, 20 bp, Vibrio cholerae
aaccaccttcctccctactg

SEQ ID NO: 35207 - DNA, 20 bp, Campylobacter concisus
tttcccccttgtggggctgg

SEQ ID NO: 35208 - DNA, 20 bp, Brevibacillus brevis
tccttttcctctcatgagga

SEQ ID NO: 35209 - DNA, 20 bp, Myroides odoratimimus
atggaagtaactagaatatg

SEQ ID NO: 35210 - DNA, 20 bp, Moraxella osloensis
ctattgcaccagaagtaggt

SEQ ID NO: 35211 - DNA, 20 bp, Burkholderia cepacia
cttggctctaatacagccgg

SEQ ID NO: 35212 - DNA, 20 bp, Fusobacterium varium
ttgggaagaagtcagtgacg

SEQ ID NO: 35213 - DNA, 20 bp, Haemophilus segnis
agtttaatagactaggtgat

SEQ ID NO: 35214 - DNA, 20 bp, Campylobacter sputorum
ttcgaaccgcatggttcgat

SEQ ID NO: 35215 - DNA, 20 bp, Staphylococcus sp.
tatcgaaccatgcggttcga

SEQ ID NO: 35216 - DNA, 20 bp, Paenibacillus macerans
gagtgcttgcactcctgaga

SEQ ID NO: 35217 - DNA, 20 bp, Photobacterium damselae
gcatatacagagggcagcaa

SEQ ID NO: 35218 - DNA, 20 bp, Alcaligenes faecalis
gacatgtctggaaagccgaa

SEQ ID NO: 35219 - DNA, 20 bp, Paenibacillus macerans
aggtaacctgcctctaagac

SEQ ID NO: 35220 - DNA, 20 bp, Leptotrichia buccalis
gcaggaatgccgatgatgaa

SEQ ID NO: 35221 - DNA, 20 bp, Prevotella intermedia
ccgctgttagcgcctggcgt

SEQ ID NO: 35222 - DNA, 20 bp, Prevotella oralis
tggtggaggtgctgcatggt

SEQ ID NO: 35223 - DNA, 20 bp, Facklamia ignava
ttgttccagtcgcatgactg

SEQ ID NO: 35224 - DNA, 20 bp, Bacteroides forsythus
tggttgcggatgggcatgcg

SEQ ID NO: 35225 - DNA, 20 bp, Acinetobacter haemolyticus
tggtcagctagagtatggga

SEQ ID NO: 35226 - DNA, 20 bp, Weissella paramesenteroides
gcgctaatctcttaaagtat

SEQ ID NO: 35227 - DNA, 20 bp, Fusobacterium varium
agcgcgtctaggcggtttag

SEQ ID NO: 35228 - DNA, 20 bp, Methylobacterium mesophilicum
gacatggcgtgttatgggga

SEQ ID NO: 35229 - DNA, 20 bp, Haemophilus actinemycetemcomitans
gatgtactgacgctgatgtg

SEQ ID NO: 35230 - DNA, 20 bp, Arcanobacterium bernardiae
agatggtgcagccttcgggg

SEQ ID NO: 35231 - DNA, 20 bp, Bacteroides thetaiotaomicron
caaatgtgaaggtgctgcat

SEQ ID NO: 35232 - DNA, 20 bp, Methylobacterium mesophilicum
ccatcctttgacatggcgtg

SEQ ID NO: 35233 - DNA, 20 bp, Comamonas terrigena
gttgggtcttaactgactca

SEQ ID NO: 35234 - DNA, 20 bp, Bacillus megaterium
ggatcttctccttcatggga

SEQ ID NO: 35235 - DNA, 20 bp, Prevotella bivia
gtgttgtgaaatgtaggagc

SEQ ID NO: 35236 - DNA, 20 bp, Clostridium botulinum
aatcgcatgattttcttatc

SEQ ID NO: 35237 - DNA, 20 bp, Bacillus pallidus
cgaagggagcttgctccttt

SEQ ID NO: 35238 - DNA, 20 bp, Corynebacterium glucuronolyticum
ttgcttgagtgctgtagggg

SEQ ID NO: 35239 - DNA, 20 bp, Paenibacillus thiaminolyticus
gaatcgggaaaggcggagca

SEQ ID NO: 35240 - DNA, 20 bp, Chromobacterium violaceum
gcgttatacgagcagccgac

SEQ ID NO: 35241 - DNA, 20 bp, Corynebacterium amycolatum
atcgacgaagggtttctgac

SEQ ID NO: 35242 - DNA, 20 bp, Vibrio cholerae
taaggtattaacttaaccac

SEQ ID NO: 35243 - DNA, 20 bp, Brochothrix campestris
gctgaacatcataagatgtt

SEQ ID NO: 35244 - DNA, 20 bp, Bacteroides eggerthii
cgataactcggggatagcct

SEQ ID NO: 35245 - DNA, 20 bp, Bacteroides uniformis
ttatgctggggactctgtcg

SEQ ID NO: 35246 - DNA, 20 bp, Clostridium ramosum
gtgaccgtattaaaagtgcc

SEQ ID NO: 35247 - DNA, 20 bp, Campylobacter sputorum
atcctttgacccttctagag

SEQ ID NO: 35248 - DNA, 20 bp, Corynebacterium afermentans
ctcagcgtcagttcggccca

SEQ ID NO: 35249 - DNA, 20 bp, Burkholderia multivorans
taatacagtcgggggatgac

SEQ ID NO: 35250 - DNA, 20 bp, Cellulomonas turbata
cctgcatggggagtgtctgg

SEQ ID NO: 35251 - DNA, 20 bp, Anaerococcus prevotii
agttaagtctggcaacgagc

SEQ ID NO: 35252 - DNA, 20 bp, Corynebacterium urealyticum
ccggataggaccaatcttta

SEQ ID NO: 35253 - DNA, 20 bp, Acinetobacter calcoaceticus
gcactatcacttagcggcgg

SEQ ID NO: 35254 - DNA, 20 bp, Streptococcus constellatus
aggaagaacgtgtgtgagag

SEQ ID NO: 35255 - DNA, 20 bp, Pseudoramibacter alactolyticus
cgggtgaaattagaactgga

SEQ ID NO: 35256 - DNA, 20 bp, Proteus mirabilis
ataaggttaatacccttatc

SEQ ID NO: 35257 - DNA, 20 bp, Weissella paramesenteroides
gcactgagagtaactgttca

SEQ ID NO: 35258 - DNA, 20 bp, Pasteurella pneumotropica
aaggtgataaggttaatacc

SEQ ID NO: 35259 - DNA, 20 bp, Gemella haemolysans
gttgttagggaagaatgatt

SEQ ID NO: 35260 - DNA, 20 bp, Arthrobacter globiformis
gacttctcaccgcatggtgg

SEQ ID NO: 35261 - DNA, 20 bp, Pediococcus inopinatus
ttaactataaagtgagtggc

SEQ ID NO: 35262 - DNA, 20 bp, Micromonas micros
aataccgcatgagaccacag

SEQ ID NO: 35263 - DNA, 20 bp, Gemella haemolysans
ctgcctcatagactgggaca

SEQ ID NO: 35264 - DNA, 20 bp, Bacteroides fragilis
accgctgtgaaggtgctgca

SEQ ID NO: 35265 - DNA, 20 bp, Bacillus fusiformis
gcaacctaccttatagtttg

SEQ ID NO: 35266 - DNA, 20 bp, Clostridium botulinum
cgatgaagcttcttcggaag

SEQ ID NO: 35267 - DNA, 20 bp, Propionibacterium acnes
gacatggatcgggagtgctc

SEQ ID NO: 35268 - DNA, 20 bp, Bacteroides fragilis
attgcagtggaatgatgtgg

SEQ ID NO: 35269 - DNA, 20 bp, Clostridium glycolicum
taacctgcctcatacacatg

SEQ ID NO: 35270 - DNA, 20 bp, Arcanobacterium bernardiae
ctgcgatgtgccagagatgg

SEQ ID NO: 35271 - DNA, 20 bp, Acinetobacter junii
gcaccttatcttagcggcgg

SEQ ID NO: 35272 - DNA, 20 bp, Leuconostoc argentinum
gattctagttcgacggtacc

SEQ ID NO: 35273 - DNA, 20 bp, Pseudoramibacter alactolyticus
aaggtggggctagtaattgg

SEQ ID NO: 35274 - DNA, 20 bp, Clostridium innocuum
cgaaggcggtcgcctggtct

SEQ ID NO: 35275 - DNA, 20 bp, Corynebacterium xerosis
ttctgacggtagatggagaa

SEQ ID NO: 35276 - DNA, 20 bp, Fusobacterium varium
tttcagttgggaagaagtca

SEQ ID NO: 35277 - DNA, 20 bp, Cardiobacterium hominis
ccttttgctgggggataacg

SEQ ID NO: 35278 - DNA, 20 bp, Cardiobacterium hominis
tttgctgggggataacgtag

SEQ ID NO: 35279 - DNA, 20 bp, Streptococcus equi
atgttaaccatttaaaagga

SEQ ID NO: 35280 - DNA, 20 bp, Atopobium parvulum
ttttaggagggagacgccga

SEQ ID NO: 35281 - DNA, 20 bp, Chryseobacterium meningosepticum
tggggataaacctacttacg

SEQ ID NO: 35282 - DNA, 20 bp, Bacteroides capilosus
  misc_feature (7)..(7): n is a, c, g, or t
ggtactngatgaataagcca

SEQ ID NO: 35283 - DNA, 20 bp, Moraxella atlantae
actgacactcagacccgaaa

SEQ ID NO: 35284 - DNA, 20 bp, Oligella urethralis
agctctctcatgctgccgtt

SEQ ID NO: 35285 - DNA, 20 bp, Prevotella loescheii
ggggatgcgtccgattagcc

SEQ ID NO: 35286 - DNA, 20 bp, Leptotrichia buccalis
ataaagggcatctaggcggc

SEQ ID NO: 35287 - DNA, 20 bp, Anaerococcus tetradius
gtatggaagggaaagtggaa

SEQ ID NO: 35288 - DNA, 20 bp, Streptococcus sobrinus
tagtgccgacgctaacgcat

SEQ ID NO: 35289 - DNA, 20 bp, Streptococcus sobrinus
acttagtgccgacgctaacg

SEQ ID NO: 35290 - DNA, 20 bp, Corynebacterium group F
atgctaatcgcacaaagccg

SEQ ID NO: 35291 - DNA, 20 bp, Propionibacterium freudenreichii
aatgtaggggagaatggaac

SEQ ID NO: 35292 - DNA, 20 bp, Anaerobiospirillum succiniciproducens
aggcggtctcctgggcaaat

SEQ ID NO: 35293 - DNA, 20 bp, Acinetobacter calcoaceticus
cggagtgatggtgcttgcac

SEQ ID NO: 35294 - DNA, 20 bp, Aerococcus viridans
cgagcgaacagatgaagtgc

SEQ ID NO: 35295 - DNA, 20 bp, Streptococcus peroris
aaagttcacgctgtgacggt

SEQ ID NO: 35296 - DNA, 20 bp, Citrobacter koseri
gagactgtgccttcgggagc

SEQ ID NO: 35297 - DNA, 20 bp, Yersinia intermedia
atgacctcgtaagagcaaag

SEQ ID NO: 35298 - DNA, 20 bp, Moraxella lacunata
ttaccagcgatttaagtcgg

SEQ ID NO: 35299 - DNA, 20 bp, Corynebacterium glucuronolyticum
tggtacagtgcgtgtgcgac

SEQ ID NO: 35300 - DNA, 20 bp, Veillonella atypica
gcaaacccgagaaacactct

SEQ ID NO: 35301 - DNA, 20 bp, Porphyromonas endodontalis
tagtcttgccgttgaaactg

SEQ ID NO: 35302 - DNA, 20 bp, Propionibacterium avidum
gcctccttgtggggctggtt

SEQ ID NO: 35303 - DNA, 20 bp, Corynebacterium group F
tttttggatattgttgtgga

SEQ ID NO: 35304 - DNA, 20 bp, Haemophilus actinemycetemcomitans
gctgtaaacggtgtcgattt

SEQ ID NO: 35305 - DNA, 20 bp, Anaerococcus prevotii
acaaagggaagcgaaatagt

SEQ ID NO: 35306 - DNA, 20 bp, Oligella ureolytica
aaagtcttaggctaatacct

SEQ ID NO: 35307 - DNA, 20 bp, Neisseria subflava
accagaagtaggtaggatac

SEQ ID NO: 35308 - DNA, 20 bp, Bacteroides forsythus
gttgtaaacttcttttacag

SEQ ID NO: 35309 - DNA, 20 bp, Helcococcus kunzii
cgtgagagcaagcgaatcgc

SEQ ID NO: 35310 - DNA, 20 bp, Stenotrophomonas maltophilia
tccagctggttaatacccgg

SEQ ID NO: 35311 - DNA, 20 bp, Haemophilus actinemycetemcomitans
acagagggtaaccaaccagc

SEQ ID NO: 35312 - DNA, 20 bp, Staphylococcus succinus
atgcgcacagttacttacgc

SEQ ID NO: 35313 - DNA, 20 bp, Acinetobacter lwoffii
cgagattaatactcttggat

SEQ ID NO: 35314 - DNA, 20 bp, Prevotella melaninogenica
taacctgccgaaaggcagac

SEQ ID NO: 35315 - DNA, 20 bp, Prevotella oralis
atccaaccttcccattacta

SEQ ID NO: 35316 - DNA, 20 bp, Turicella otitidis
cggataggagccatttttag

SEQ ID NO: 35317 - DNA, 20 bp, Acinetobacter genospecies 3
agagaggtagcttgctactg

SEQ ID NO: 35318 - DNA, 20 bp, Weeksella virosa
cttaacgatagaactgccat

SEQ ID NO: 35319 - DNA, 20 bp, Eikenella corrodens
gtgctaataccactttttgc

SEQ ID NO: 35320 - DNA, 20 bp, Oligella ureolytica
accctgatcgagccatcccg

SEQ ID NO: 35321 - DNA, 20 bp, Clostridium ramosum
cactgcatggtgaccgtatt

SEQ ID NO: 35322 - DNA, 20 bp, Bacteroides ureolyticus
gagcgtaaactccttttatc

SEQ ID NO: 35323 - DNA, 20 bp, Clostridium clostridiiforme
tgagatggatccgcgtctga

SEQ ID NO: 35324 - DNA, 20 bp, Actinomyces bovis
aagcacagagatgtgtaata

SEQ ID NO: 35325 - DNA, 20 bp, Collinsella aerofaciens
gggacgatccccccgtgccg

SEQ ID NO: 35326 - DNA, 20 bp, Alcaligenes faecalis
ttggcagagaagaaaaggta

SEQ ID NO: 35327 - DNA, 20 bp, Streptococcus sobrinus
cttcactatcagatggacct

SEQ ID NO: 35328 - DNA, 20 bp, Eikenella corrodens
aagggaagtgctaataccac

SEQ ID NO: 35329 - DNA, 20 bp, Fusobacterium varium
tctaggcggtttagtaagtc

SEQ ID NO: 35330 - DNA, 20 bp, Proteus mirabilis
tacccttatcaattgacgtt

SEQ ID NO: 35331 - DNA, 20 bp, Actinomyces naeslundii
tgggtctgtcgcatggtggg

SEQ ID NO: 35332 - DNA, 20 bp, Pseudoramibacter alactolyticus
aaaacatgacggtacccaat

SEQ ID NO: 35333 - DNA, 20 bp, Propionibacterium freudenreichii
aaagctttatgcggtcaggg

SEQ ID NO: 35334 - DNA, 20 bp, Bacillus sp
cttttgatcagttagcggcg

SEQ ID NO: 35335 - DNA, 20 bp, Moraxella bovis
agtagggaggaaaagcttgt

SEQ ID NO: 35336 - DNA, 20 bp, Moraxella lacunata
ccagcgatttaagtcgggaa

SEQ ID NO: 35337 - DNA, 20 bp, Gemella morbillorum
gagagtcagccaacctcata

SEQ ID NO: 35338 - DNA, 20 bp, Streptococcus ratti
aaagatgcaagagcatcact

SEQ ID NO: 35339 - DNA, 20 bp, Weeksella virosa
ggttagcgcctgatccagcc

SEQ ID NO: 35340 - DNA, 20 bp, Tissierella praeacuta
gtcgagcgaagtttttaaag

SEQ ID NO: 35341 - DNA, 20 bp, Neisseria polysaccharea
gaagtgggtaggataaccgc

SEQ ID NO: 35342 - DNA, 20 bp, Tissierella praeacuta
atttaagtcaaagcgtaaag

SEQ ID NO: 35343 - DNA, 20 bp, Facklamia sourekii
gaaatcctacgggacaagga

SEQ ID NO: 35344 - DNA, 20 bp, Campylobacter sputorum
ctttgacccttctagagata

SEQ ID NO: 35345 - DNA, 20 bp, Atopobium parvulum
tcgtggccgaaaggagccta

SEQ ID NO: 35346 - DNA, 20 bp, Kocuria kristinae
tggaaagggttatgtactgg

SEQ ID NO: 35347 - DNA, 20 bp, Propionibacterium avidum
atccttgctgcatggtgggg

SEQ ID NO: 35348 - DNA, 20 bp, Alcaligenes faecalis
aaggtacctcctaatacgag

SEQ ID NO: 35349 - DNA, 20 bp, Aerococcus christensenii
aacagagaaagtgcttgcac

SEQ ID NO: 35350 - DNA, 20 bp, Cardiobacterium hominis
gtacagacggtagcgaagcc

SEQ ID NO: 35351 - DNA, 20 bp, Comamonas terrigena
gcttcgggttaataccctgg

SEQ ID NO: 35352 - DNA, 20 bp, Eikenella corrodens
ccactttttgctgacggtac

SEQ ID NO: 35353 - DNA, 20 bp, Prevotella melaninogenica
aacggcattgagtgcttgca

SEQ ID NO: 35354 - DNA, 20 bp, Bacillus coagulans
ctccgcatggaggaaaaagg

SEQ ID NO: 35355 - DNA, 20 bp, Neisseria meningitidis
ggtaccgtcatcagccgctg

SEQ ID NO: 35356 - DNA, 20 bp, Brevundimonas diminuta
cctggaccgccacggagacg

SEQ ID NO: 35357 - DNA, 20 bp, Propionibacterium freudenreichii
cacgtcggaagtgaaattcc

SEQ ID NO: 35358 - DNA, 20 bp, Moraxella atlantae
tactgacactcagacccgaa

SEQ ID NO: 35359 - DNA, 20 bp, Pseudoramibacter alactolyticus
caaccggtgaagtgcattgg

SEQ ID NO: 35360 - DNA, 20 bp, Lactobacillus casei
ttgttggagaagaatggtcg

SEQ ID NO: 35361 - DNA, 20 bp, Actinomyces meyeri
gtgcggagacgtgcgtgcat

SEQ ID NO: 35362 - DNA, 20 bp, Oligella urethralis
tcttacgatccccctctttc

SEQ ID NO: 35363 - DNA, 20 bp, Aerococcus viridans
accgcataatatcttcttcc

SEQ ID NO: 35364 - DNA, 20 bp, Actinomyces naeslundii
catggtgggcctgggaaaga

SEQ ID NO: 35365 - DNA, 20 bp, Anaerococcus tetradius
atgagtgttaggtgtctgga

SEQ ID NO: 35366 - DNA, 20 bp, Corynebacterium macginleyi
ccggataggaccgcacttta

SEQ ID NO: 35367 - DNA, 20 bp, Prevotella intermedia
ctttcactttctggcttgaa

SEQ ID NO: 35368 - DNA, 20 bp, Anaerococcus prevotii
ttgaaactgcatatcttgag

SEQ ID NO: 35369 - DNA, 20 bp, Leuconostoc citreum
tgtatgggaagaaatgctaa

SEQ ID NO: 35370 - DNA, 20 bp, Haemophilus ducreyi
actggcgcccgaagctaacg

SEQ ID NO: 35371 - DNA, 20 bp, Pediococcus inopinatus
caccaaggctgtgatacgta

SEQ ID NO: 35372 - DNA, 20 bp, Prevotella melaninogenica
acctggtatcagcggctaag

SEQ ID NO: 35373 - DNA, 20 bp, Actinomyces bovis
ctaacctagtttactaggag

SEQ ID NO: 35374 - DNA, 20 bp, Cardiobacterium hominis
actcggtgccggagctaacg

SEQ ID NO: 35375 - DNA, 20 bp, Neisseria elongata
tctgctgacggtacctaaag

SEQ ID NO: 35376 - DNA, 20 bp, Clostridium ramosum
agaggatggacttatggcgc

SEQ ID NO: 35377 - DNA, 20 bp, Streptococcus intermedius
agatgtttaaaaggtgcaaa

SEQ ID NO: 35378 - DNA, 20 bp, Bacillus mycoides
ctgcatagttcgaaattgaa

SEQ ID NO: 35379 - DNA, 20 bp, Bacteroides uniformis
ctttttgtatgtaccgtatg

SEQ ID NO: 35380 - DNA, 20 bp, Campylobacter lari
ttttgtgaaatctaacagct

SEQ ID NO: 35381 - DNA, 20 bp, Actinomyces neuii
acccgaagcctgtggcctaa

SEQ ID NO: 35382 - DNA, 20 bp, Chromobacterium violaceum
caggcggttgtgcaagtctg

SEQ ID NO: 35383 - DNA, 20 bp, Pseudoramibacter alactolyticus
aatgatccttcgggtgaaat

SEQ ID NO: 35384 - DNA, 20 bp, Lactococcus lactis
acaccacgggagttgggagt

SEQ ID NO: 35385 - DNA, 20 bp, Streptococcus gordonii
agcttgctacaccatagact

SEQ ID NO: 35386 - DNA, 20 bp, Gemella morbillorum
gcactagaaaaacttagcgg

SEQ ID NO: 35387 - DNA, 20 bp, Bacteroides forsythus
cggtgaaagtttgtcgctta

SEQ ID NO: 35388 - DNA, 20 bp, Bacillus simplex
gatggaaagacggtttacgc

SEQ ID NO: 35389 - DNA, 20 bp, Brevibacillus agri
agatggcttttcgctatcac

SEQ ID NO: 35390 - DNA, 20 bp, Staphylococcus gallinarum
atagaaccgcatggttctat

SEQ ID NO: 35391 - DNA, 20 bp, Corynebacterium urealyticum
tgtggggatttttcacgatt

SEQ ID NO: 35392 - DNA, 20 bp, Bacillus pallidus
ggttgaaaggcggcttttag

SEQ ID NO: 35393 - DNA, 20 bp, Actinomyces naeslundii
gctccggagacggggtttcc

SEQ ID NO: 35394 - DNA, 20 bp, Cardiobacterium hominis
agccaatctgagaaagccga

SEQ ID NO: 35395 - DNA, 20 bp, Proteus mirabilis
gggaggaaggtgataaggtt

SEQ ID NO: 35396 - DNA, 20 bp, Helcococcus kunzii
ggagacttgtatacaggtgg

SEQ ID NO: 35397 - DNA, 20 bp, Tissierella praeacuta
aactgaaaggcttgagttaa

SEQ ID NO: 35398 - DNA, 20 bp, Prevotella oris
aaggcagcttgcgggagcac

SEQ ID NO: 35399 - DNA, 20 bp, Bacillus lentus
catgcgtcgccgcttcgctg

SEQ ID NO: 35400 - DNA, 20 bp, Vibrio vulnificus
aacttgtttctcgggtggcg

SEQ ID NO: 35401 - DNA, 20 bp, Propionibacterium freudenreichii
tgcggtcagggatcgtctcg

SEQ ID NO: 35402 - DNA, 20 bp, Propionibacterium avidum
ggtttgacatggactgggag

SEQ ID NO: 35403 - DNA, 20 bp, Corynebacterium falsenii
gggcataactggagtgctgt

SEQ ID NO: 35404 - DNA, 20 bp, Staphylococcus carnosus
ggaagaacaagtgcgtaggt

SEQ ID NO: 35405 - DNA, 20 bp, Facklamia sourekii
gactttctggtctgacactg

SEQ ID NO: 35406 - DNA, 20 bp, Haemophilus ducreyi
gaggaaggcagttttgttaa

SEQ ID NO: 35407 - DNA, 20 bp, Acinetobacter calcoaceticus
agtcgagcggagtgatggtg

SEQ ID NO: 35408 - DNA, 20 bp, Bacteroides distasonis
agccacctggcgacagggag

SEQ ID NO: 35409 - DNA, 20 bp, Aeromonas sobria
aaaactgtccggctagagtc

SEQ ID NO: 35410 - DNA, 20 bp, Dietzia maris
gtctctgggaaacaactgac

SEQ ID NO: 35411 - DNA, 20 bp, Bacillus fusiformis
tgacatcccgttgaccactg

SEQ ID NO: 35412 - DNA, 20 bp, Propionibacterium freudenreichii
aatgttgccagcagttcggc

SEQ ID NO: 35413 - DNA, 20 bp, Aerococcus viridans
taaggaatctacctataagc

SEQ ID NO: 35414 - DNA, 20 bp, Bacillus alcalophilus
ttgctcccagaggttagcgg

SEQ ID NO: 35415 - DNA, 20 bp, Moraxella lacunata
gtcgttgggtctcttgaaga

SEQ ID NO: 35416 - DNA, 20 bp, Corynebacterium coyleae
ttgtgtaagcccgcagctta

SEQ ID NO: 35417 - DNA, 20 bp, Acinetobacter junii
ggaggctactgagactaata

SEQ ID NO: 35418 - DNA, 20 bp, Anaerococcus prevotii
gacattgggatagcctcggg

SEQ ID NO: 35419 - DNA, 20 bp, Bacillus lentus
caaggtaccggcatttcctc

SEQ ID NO: 35420 - DNA, 20 bp, Lactococcus garvieae
ggcgcttcctaaggtaagac

SEQ ID NO: 35421 - DNA, 20 bp, Moraxella bovis
gtgccttcgggagcttggat

SEQ ID NO: 35422 - DNA, 20 bp, Peptostreptococcus anaerobius
accgtagttagcctccgaaa

SEQ ID NO: 35423 - DNA, 20 bp, Clostridium clostridiiforme
agtagccagcaggtaaagcc

SEQ ID NO: 35424 - DNA, 20 bp, Streptococcus ratti
acgacggccagtagagtttg

SEQ ID NO: 35425 - DNA, 20 bp, Aerococcus christensenii
ataagcgggggacaacatcc

SEQ ID NO: 35426 - DNA, 20 bp, Streptococcus thoraltensis
aagctctgttataagcgaag

SEQ ID NO: 35427 - DNA, 20 bp, Streptococcus mitis
acttaaaaggtgcaattgca

SEQ ID NO: 35428 - DNA, 20 bp, Alicyclobacillus acidocaldarius
gcgtatccggcattagcgcc

SEQ ID NO: 35429 - DNA, 20 bp, Staphylococcus aureus
tctcgtccgttcgctcgact

SEQ ID NO: 35430 - DNA, 20 bp, Stenotrophomonas maltophilia
tggttaatacccggttggga

SEQ ID NO: 35431 - DNA, 20 bp, Paenibacillus validus
tcgcactgaaaactgggaga

SEQ ID NO: 35432 - DNA, 20 bp, Propionibacterium freudenreichii
cttcggtatagctccaggaa

SEQ ID NO: 35433 - DNA, 20 bp, Bacillus coagulans
aagctaatctcataaaatca

SEQ ID NO: 35434 - DNA, 20 bp, Campylobacter curvus
cttggggaagaaatttgacg

SEQ ID NO: 35435 - DNA, 20 bp, Clostridium tetani
aggagggtccaaccttctgt

SEQ ID NO: 35436 - DNA, 20 bp, Capnocytophaga gingivalis
cccataatattattggatgg

SEQ ID NO: 35437 - DNA, 20 bp, Facklamia hominis
gttagcggagtgacggtatc

SEQ ID NO: 35438 - DNA, 20 bp, Propionibacterium propionicus
gccatgacgaagcttttgtg

SEQ ID NO: 35439 - DNA, 20 bp, Leptotrichia buccalis
cgtgccgaagctaatgcgat

SEQ ID NO: 35440 - DNA, 20 bp, Bacillus flexus
agcgaactgattagaagctt

SEQ ID NO: 35441 - DNA, 20 bp, Lactococcus lactis
agttttaagtttgaaagatg

SEQ ID NO: 35442 - DNA, 20 bp, Lactococcus garvieae
gttccttcgggacacgggat

SEQ ID NO: 35443 - DNA, 20 bp, Peptostreptococcus anaerobius
gaagtcgtcgaaggtggcgt

SEQ ID NO: 35444 - DNA, 20 bp, Actinomyces odontolyticus
cttgacatgcacggcggcac

SEQ ID NO: 35445 - DNA, 20 bp, Haemophilus actinemycetemcomitans
aaccaaccagcgatggggag

SEQ ID NO: 35446 - DNA, 20 bp, Corynebacterium amycolatum
ggtttctgacggtagatgga

SEQ ID NO: 35447 - DNA, 20 bp, Actinomyces bovis
tatggttaaagttcggggct

SEQ ID NO: 35448 - DNA, 20 bp, Paenibacillus thiaminolyticus
tatggagagtaactgttcca

SEQ ID NO: 35449 - DNA, 20 bp, Streptococcus canis
taataccgcataaaagtgct

SEQ ID NO: 35450 - DNA, 20 bp, Moraxella osloensis
gtgagtaacatttaggaatc

SEQ ID NO: 35451 - DNA, 20 bp, Virgibacillus pantothenticus
ggctaataccggatgataca

SEQ ID NO: 35452 - DNA, 20 bp, Actinomyces bovis
gaagagggaatgcttcttat

SEQ ID NO: 35453 - DNA, 20 bp, Kingella denitrificans
gaaaagggaagtgttaatac

SEQ ID NO: 35454 - DNA, 20 bp, Streptococcus equi
taataccgcataaaagtggt

SEQ ID NO: 35455 - DNA, 20 bp, Pasteurella trehalosi
aatagacaaagcaattgacg

SEQ ID NO: 35456 - DNA, 20 bp, Fusobacterium nucleatum
gcgcccaagcaaacgcgata

SEQ ID NO: 35457 - DNA, 20 bp, Campylobacter concisus
aaaggcccaagcttgcttgg

SEQ ID NO: 35458 - DNA, 20 bp, Tissierella praeacuta
agtcagatgtgaaagatcac

SEQ ID NO: 35459 - DNA, 20 bp, Tetragenococcus halophilus
gaggaaatgctttttccatg

SEQ ID NO: 35460 - DNA, 20 bp, Dietzia maris
gcagcatgcatgtgttgtgg

SEQ ID NO: 35461 - DNA, 20 bp, Arcanobacterium bernardiae
ctgctttcatcgcatggtgg

SEQ ID NO: 35462 - DNA, 20 bp, Aerococcus christensenii
catgaacaaacttagaaaga

SEQ ID NO: 35463 - DNA, 20 bp, Streptococcus anginosus
cgcataacagtatgtaacac

SEQ ID NO: 35464 - DNA, 20 bp, Neisseria polysaccharea
gtaggataaccgcaaggggt

SEQ ID NO: 35465 - DNA, 20 bp, Dermacoccus nishinomiyaensis
caccggaatcatgcagagat

SEQ ID NO: 35466 - DNA, 20 bp, Anaerococcus tetradius
gagtaacctgccttacacaa

SEQ ID NO: 35467 - DNA, 20 bp, Pseudoramibacter alactolyticus
aggactcagcagtcgaaggt

SEQ ID NO: 35468 - DNA, 20 bp, Empedobacter brevis
gagagggtgaacccccacac

SEQ ID NO: 35469 - DNA, 20 bp, Granulicatella elegans
cgagagcgaccggtgcttgc

SEQ ID NO: 35470 - DNA, 20 bp, Tetragenococcus halophilus
gctttttctatgacggtagc

SEQ ID NO: 35471 - DNA, 20 bp, Facklamia ignava
cggtgcattagctagacggt

SEQ ID NO: 35472 - DNA, 20 bp, Brevibacillus brevis
ataacctccggaaacggaag

SEQ ID NO: 35473 - DNA, 20 bp, Prevotella oris
cccgtcgaaagtcggcctaa

SEQ ID NO: 35474 - DNA, 20 bp, Clostridium glycolicum
tcgtgaggccgagctaatcc

SEQ ID NO: 35475 - DNA, 20 bp, Streptococcus constellatus
gttaaggaagaacgtgtgtg

SEQ ID NO: 35476 - DNA, 20 bp, Anaerobiospirillum succiniciproducens
gccttcgggaacctacagac

SEQ ID NO: 35477 - DNA, 20 bp, Streptococcus sp.
tgataattaattgaaagatg

SEQ ID NO: 35478 - DNA, 20 bp, Neisseria flavescens
ggctgttgctaatatcgaca

SEQ ID NO: 35479 - DNA, 20 bp, Prevotella loescheii
tgcaagtcgcggggcagcat

SEQ ID NO: 35480 - DNA, 20 bp, Paenibacillus validus
cactgaaaactgggagactt

SEQ ID NO: 35481 - DNA, 20 bp, Bacteroides thetaiotaomicron
tacagaaggccgctacctgg

SEQ ID NO: 35482 - DNA, 20 bp, Neisseria sicca
aaccgcaagggggccgcttg

SEQ ID NO: 35483 - DNA, 20 bp, Streptococcus alactolyticus
gagtttttcttcggaacact

SEQ ID NO: 35484 - DNA, 20 bp, Paenibacillus pabuli
agcttgcttctctgatggtt

SEQ ID NO: 35485 - DNA, 20 bp, Bacillus sp
ccttcgggggtgacgcatgt

SEQ ID NO: 35486 - DNA, 20 bp, Brevibacillus borstelensis
gagtcccttcgggggctagc

SEQ ID NO: 35487 - DNA, 20 bp, Campylobacter rectus
taaactccttttcttgggaa

SEQ ID NO: 35488 - DNA, 20 bp, Bacteroides distasonis
aagctgaggactctggtggg

SEQ ID NO: 35489 - DNA, 20 bp, Corynebacterium falsenii
ttttcggtacaagatgagcc

SEQ ID NO: 35490 - DNA, 20 bp, Campylobacter concisus
accggataggacgatggttg

SEQ ID NO: 35491 - DNA, 20 bp, Eubacterium moniliforme
aggggtttcaacacctctgt

SEQ ID NO: 35492 - DNA, 20 bp, Actinomyces bovis
tcagaaagtacgtctcagtt

SEQ ID NO: 35493 - DNA, 20 bp, Gemella haemolysans
tgctaagtgttggtctcata

SEQ ID NO: 35494 - DNA, 20 bp, Granulicatella elegans
gaccggtgcttgcactggtc

SEQ ID NO: 35495 - DNA, 20 bp, Bacillus lentus
acaaaaagcaagcttcttat

SEQ ID NO: 35496 - DNA, 20 bp, Cardiobacterium hominis
tgggcgactagagtatgaaa

SEQ ID NO: 35497 - DNA, 20 bp, Bacteroides merdae
tatcactagttactaacagg

SEQ ID NO: 35498 - DNA, 20 bp, Bacteroides fragilis
gcagttgatactgtcagtct

SEQ ID NO: 35499 - DNA, 20 bp, Shewanella algae
gaaagggtgtaagttaatac

SEQ ID NO: 35500 - DNA, 20 bp, Moraxella osloensis
cattagattagacgttacct

SEQ ID NO: 35501 - DNA, 20 bp, Vibrio fluvialis
cagcgacaacattgaacctt

SEQ ID NO: 35502 - DNA, 20 bp, Propionibacterium freudenreichii
ctgggcttgctttcgatacg

SEQ ID NO: 35503 - DNA, 20 bp, Clostridium limosum
gcatgcgtaggcggatactt

SEQ ID NO: 35504 - DNA, 20 bp, Anaerococcus prevotii
ggtatcggaataattcggtg

SEQ ID NO: 35505 - DNA, 20 bp, Vagococcus fluvialis
aagtgggagagtaactgttc

SEQ ID NO: 35506 - DNA, 20 bp, Gemella haemolysans
tgttgttagggaagaatgat

SEQ ID NO: 35507 - DNA, 20 bp, Bacillus alcalophilus
gttcttttgtaaaagatggc

SEQ ID NO: 35508 - DNA, 20 bp, Proteus vulgaris
aatactcttagcaattgacg

SEQ ID NO: 35509 - DNA, 20 bp, Aneurinibacillus thermoaerophilus
aagaaccgccgggatgacct

SEQ ID NO: 35510 - DNA, 20 bp, Atopobium parvulum
cacaccacccgagtcgattg

SEQ ID NO: 35511 - DNA, 20 bp, Campylobacter sputorum
aaatataaattattactaat

SEQ ID NO: 35512 - DNA, 20 bp, Pasteurella trehalosi
atatcgagagattaaagggt

SEQ ID NO: 35513 - DNA, 20 bp, Actinomyces odontolyticus
ggggttggtggaaaggtttg

SEQ ID NO: 35514 - DNA, 20 bp, Brevibacterium casei
gacagagagaggcgaacccg

SEQ ID NO: 35515 - DNA, 20 bp, Chromobacterium violaceum
ttgggggtttgaatccttgg

SEQ ID NO: 35516 - DNA, 20 bp, Brevibacillus laterosporus
gcaagctatcacttacagat

SEQ ID NO: 35517 - DNA, 20 bp, Alcaligenes faecalis
atgtctggaaagccgaagag

SEQ ID NO: 35518 - DNA, 20 bp, Empedobacter brevis
cttttatctggggataaacc

SEQ ID NO: 35519 - DNA, 20 bp, Brevibacillus choshinensis
tgctaggtgttggggactcc

SEQ ID NO: 35520 - DNA, 20 bp, Pasteurella trehalosi
gttttgtttaatagacaaag

SEQ ID NO: 35521 - DNA, 20 bp, Prevotella corporis
tccgcagttgccatcgggtc

SEQ ID NO: 35522 - DNA, 20 bp, Actinomyces turicensis
ctcatggtcaagccgcagct

SEQ ID NO: 35523 - DNA, 20 bp, Bordetella bronchiseptica
acggcacgggctaatatcct

SEQ ID NO: 35524 - DNA, 20 bp, Dermabacter hominis
ctccactttgggataactcc

SEQ ID NO: 35525 - DNA, 20 bp, Bacteroides vulgatus
ggccgctaccacgcgagtgg

SEQ ID NO: 35526 - DNA, 20 bp, Tissierella praeacuta
acagataagctgagcactct

SEQ ID NO: 35527 - DNA, 20 bp, Prevotella melaninogenica
cgcaactgacgcttaagctc

SEQ ID NO: 35528 - DNA, 20 bp, Corynebacterium glucuronolyticum
cgcgtcgtctgtgtaatcca

SEQ ID NO: 35529 - DNA, 20 bp, Plesiomonas shigelloides
gtttgagagaatgaccagtc

SEQ ID NO: 35530 - DNA, 20 bp, Fusobacterium mortiferum
tctaggcggtttggtaagtc

SEQ ID NO: 35531 - DNA, 20 bp, Bacteroides fragilis
agtcgaggggcatcaggaag

SEQ ID NO: 35532 - DNA, 20 bp, Alcaligenes faecalis
gttggggccgttaggcctta

SEQ ID NO: 35533 - DNA, 20 bp, Actinomyces bovis
cgtgatgccatagaaactgg

SEQ ID NO: 35534 - DNA, 20 bp, Facklamia ignava
tataggtttgacggtaactg

SEQ ID NO: 35535 - DNA, 20 bp, Facklamia languida
acacgtggagaacctaccct

SEQ ID NO: 35536 - DNA, 20 bp, Actinomyces neuii
gcgaatctcttaaagggcat

SEQ ID NO: 35537 - DNA, 20 bp, Corynebacterium propinquum
acgtcgtctgtgaaattcca

SEQ ID NO: 35538 - DNA, 20 bp, Weissella paramesenteroides
ttccgcccttgagtgtcgca

SEQ ID NO: 35539 - DNA, 20 bp, Propionibacterium acnes
gcctcttttggggtcggttc

SEQ ID NO: 35540 - DNA, 20 bp, Haemophilus haemolyticus
gtgtcgagagacgaaagtgc

SEQ ID NO: 35541 - DNA, 20 bp, Fusobacterium nucleatum
gattttaaggcatcttagaa

SEQ ID NO: 35542 - DNA, 20 bp, Prevotella intermedia
ttatgtgcttgcacattctg

SEQ ID NO: 35543 - DNA, 20 bp, Prevotella bivia
gtatccaacctacccataac

SEQ ID NO: 35544 - DNA, 20 bp, Propionibacterium freudenreichii
gtaggggagaatggaactct

SEQ ID NO: 35545 - DNA, 20 bp, Fusobacterium nucleatum
aatattatgataatagggca

SEQ ID NO: 35546 - DNA, 20 bp, Sphingobacterium multivorum
tgataactcgatgttggcga

SEQ ID NO: 35547 - DNA, 20 bp, Dermacoccus nishinomiyaensis
ggaaagtttttgtggtgggg

SEQ ID NO: 35548 - DNA, 20 bp, Peptostreptococcus anaerobius
caaccgtagttagcctccga

SEQ ID NO: 35549 - DNA, 20 bp, Actinomyces neuii
aatctcttaaagggcatctt

SEQ ID NO: 35550 - DNA, 20 bp, Listeria innocua
tgtggcgcatgccacgctct

SEQ ID NO: 35551 - DNA, 20 bp, Streptococcus suis
ttctcacttgacggtatctt

SEQ ID NO: 35552 - DNA, 20 bp, Streptococcus sobrinus
gagtttttcttcggaacatc

SEQ ID NO: 35553 - DNA, 20 bp, Streptococcus thermophilus
ttatttgaaaggggcaattg

SEQ ID NO: 35554 - DNA, 20 bp, Streptococcus suis
ctcaccaaggcttcgataca

SEQ ID NO: 35555 - DNA, 20 bp, Prevotella melaninogenica
tttgaagtaaagatttatcg

SEQ ID NO: 35556 - DNA, 20 bp, Anaerobiospirillum succiniciproducens
tggaacccacaaagcgtccc

SEQ ID NO: 35557 - DNA, 20 bp, Gemella bergeri
gaaaggttgtgtagtaacta

SEQ ID NO: 35558 - DNA, 20 bp, Clostridium ramosum
tatatgagatacaggtggtg

SEQ ID NO: 35559 - DNA, 20 bp, Bacteroides uniformis
cttgaattgcaactgaatga

SEQ ID NO: 35560 - DNA, 20 bp, Anaerococcus prevotii
accgggattaataccaaatg

SEQ ID NO: 35561 - DNA, 20 bp, Bacteroides fragilis
aagaataaagtgcagtatgt

SEQ ID NO: 35562 - DNA, 20 bp, Propionibacterium freudenreichii
ctttatgcggtcagggatcg

SEQ ID NO: 35563 - DNA, 20 bp, Campylobacter lari
tccttttgttagggaagaac

SEQ ID NO: 35564 - DNA, 20 bp, Bacteroides thetaiotaomicron
gcatttcagtttgcttgcaa

SEQ ID NO: 35565 - DNA, 20 bp, Actinomyces bovis
taacctagtttactaggagg

SEQ ID NO: 35566 - DNA, 20 bp, Propionibacterium freudenreichii
cgtgcctttttggctggtac

SEQ ID NO: 35567 - DNA, 20 bp, Helcococcus ovis
gatatcgcatgataattaag

SEQ ID NO: 35568 - DNA, 20 bp, Microbacterium hominis
cgatcgcatggtcagtagct

SEQ ID NO: 35569 - DNA, 20 bp, Streptococcus constellatus
atggtagatgtttaaaaggt

SEQ ID NO: 35570 - DNA, 20 bp, Anaerococcus tetradius
agggtacgtaggcggataag

SEQ ID NO: 35571 - DNA, 20 bp, Prevotella disiens
ttaaagatttatcggtatag

SEQ ID NO: 35572 - DNA, 20 bp, Bacteroides forsythus
tgcatgtaccttgtgaataa

SEQ ID NO: 35573 - DNA, 20 bp, Alloiococcus otitis
acacgtgaggaacttgccca

SEQ ID NO: 35574 - DNA, 20 bp, Streptococcus bovis
agagtagaaggagttgcgaa

SEQ ID NO: 35575 - DNA, 20 bp, Clostridium botulinum
cttataaaacctatctcagt

SEQ ID NO: 35576 - DNA, 20 bp, Leptotrichia buccalis
gtccaaccgtaaggaggaag

SEQ ID NO: 35577 - DNA, 20 bp, Ralstonia paucula
gctaatacctggggtagatg

SEQ ID NO: 35578 - DNA, 20 bp, Haemophilus haemolyticus
gagacgaaagtgcgggaccg

SEQ ID NO: 35579 - DNA, 20 bp, Prevotella melaninogenica
atggggataaagtcaatcac

SEQ ID NO: 35580 - DNA, 20 bp, Streptococcus porcinus
accagtctaatgagttgcga

SEQ ID NO: 35581 - DNA, 20 bp, Dermacoccus nishinomiyaensis
tctccgcatggagtgttggt

SEQ ID NO: 35582 - DNA, 20 bp, Clostridium ramosum
tacataagtaacctgcccta

SEQ ID NO: 35583 - DNA, 20 bp, Dermacoccus nishinomiyaensis
acatacaccggaatcatgca

SEQ ID NO: 35584 - DNA, 20 bp, Atopobium parvulum
aacgtcgtggccgaaaggag

SEQ ID NO: 35585 - DNA, 20 bp, Actinomyces odontolyticus
ggcatttagttggtcgtgtg

SEQ ID NO: 35586 - DNA, 20 bp, Streptococcus ratti
aacgacggccagtagagttt

SEQ ID NO: 35587 - DNA, 20 bp, Actinomyces bovis
agatgtgtaatagttatggc

SEQ ID NO: 35588 - DNA, 20 bp, Eubacterium moniliforme
gagtaagcgaatctcaaaaa

SEQ ID NO: 35589 - DNA, 20 bp, Neisseria sicca
ttcgggccttgcgctgtttg

SEQ ID NO: 35590 - DNA, 20 bp, Streptococcus parasanguinis
gtgcaaatgcatcactaaga

SEQ ID NO: 35591 - DNA, 20 bp, Fusobacterium mortiferum
cagagagtcgcaaacctgca

SEQ ID NO: 35592 - DNA, 20 bp, Dermabacter hominis
ccactttgggataactccga

SEQ ID NO: 35593 - DNA, 20 bp, Streptococcus dysgalactiae
cgctgaggactggtgcttgc

SEQ ID NO: 35594 - DNA, 20 bp, Sphingobacterium multivorum
aaggagcgtgttagggtaaa

SEQ ID NO: 35595 - DNA, 20 bp, Bacillus pumilus
ccgcatggttcaaggatgaa

SEQ ID NO: 35596 - DNA, 20 bp, Anaerococcus tetradius
gtcatcatctgacgctgagg

SEQ ID NO: 35597 - DNA, 20 bp, Clostridium ramosum
gatggtgcagagggaagcga

SEQ ID NO: 35598 - DNA, 20 bp, Corynebacterium xerosis
ataggaccgcaccgtgaggg

SEQ ID NO: 35599 - DNA, 20 bp, Fusobacterium mortiferum
cagagagtcgcaaacctgcg

SEQ ID NO: 35600 - DNA, 20 bp, Prevotella melaninogenica
tgtgattgtttgcaggtacc

SEQ ID NO: 35601 - DNA, 20 bp, Vibrio cholerae
taacgtcaaatgattaaggt

SEQ ID NO: 35602 - DNA, 20 bp, Bacillus badius
tgtccgtaccttgacggtac

SEQ ID NO: 35603 - DNA, 20 bp, Streptococcus hyointestinalis
tgtacgctttggaaactgtg

SEQ ID NO: 35604 - DNA, 20 bp, Peptostreptococcus anaerobius
ccttcggggctgaggtgaca

SEQ ID NO: 35605 - DNA, 20 bp, Prevotella disiens
tacagagatgttgaggtcct

SEQ ID NO: 35606 - DNA, 20 bp, Clostridium butyricum
ctgtaatggaggaagccact

SEQ ID NO: 35607 - DNA, 20 bp, Bacteroides vulgatus
cgcgagtggatgccaatccc

SEQ ID NO: 35608 - DNA, 20 bp, Corynebacterium amycolatum
tcgcgccagagatggtgttt

SEQ ID NO: 35609 - DNA, 20 bp, Veillonella atypica
atgggatggaaactgctgat

SEQ ID NO: 35610 - DNA, 20 bp, Micrococcus luteus
ataccggataggagcgccca

SEQ ID NO: 35611 - DNA, 20 bp, Anaerococcus prevotii
agatgttcagttaagtctgg

SEQ ID NO: 35612 - DNA, 20 bp, Bacillus coagulans
taacctgcctgtaagatggg

SEQ ID NO: 35613 - DNA, 20 bp, Haemophilus haemolyticus
gtagcaggaggaagcttgct

SEQ ID NO: 35614 - DNA, 20 bp, Propionibacterium avidum
ggaaagcttcggcggttttg

SEQ ID NO: 35615 - DNA, 20 bp, Cardiobacterium hominis
gaatctgccttttgctgggg

SEQ ID NO: 35616 - DNA, 20 bp, Delftia acidovorans
gaattagttttctcagtaac

SEQ ID NO: 35617 - DNA, 20 bp, Corynebacterium mycetoides
acgcgtgtgcgacactgtga

SEQ ID NO: 35618 - DNA, 20 bp, Gemella haemolysans
atggttgatgtttaaaagtt

SEQ ID NO: 35619 - DNA, 20 bp, Brevibacillus brevis
cggataatccttttcctctc

SEQ ID NO: 35620 - DNA, 20 bp, Gemella sanguinis
aagaacctgcctcatagacg

SEQ ID NO: 35621 - DNA, 20 bp, Moraxella osloensis
aagcgagtgtaggtggctca

SEQ ID NO: 35622 - DNA, 20 bp, Propionibacterium avidum
agcaggggcgaagcttttgt

SEQ ID NO: 35623 - DNA, 20 bp, Corynebacterium falsenii
gcaggatcgctgcagagatg

SEQ ID NO: 35624 - DNA, 20 bp, Haemophilus influenzae
agcacatcaaattgacgtta

SEQ ID NO: 35625 - DNA, 20 bp, Geobacillus thermoglucosidasius
gcaagtcgagcggaccgggc

SEQ ID NO: 35626 - DNA, 20 bp, Brevibacillus choshinensis
aatgaagagcttgctcttcg

SEQ ID NO: 35627 - DNA, 20 bp, Campylobacter concisus
caagcttgcttgggtactcg

SEQ ID NO: 35628 - DNA, 20 bp, Actinomyces odontolyticus
gcttgacatgcacggcggca

SEQ ID NO: 35629 - DNA, 20 bp, Fusobacterium nucleatum
cttgaacttcggtttgggtg

SEQ ID NO: 35630 - DNA, 20 bp, Arthrobacter globiformis
ttattggtcttggatggact

SEQ ID NO: 35631 - DNA, 20 bp, Kocuria kristinae
cttttgggctggtgtacagg

SEQ ID NO: 35632 - DNA, 20 bp, Providencia stuartii
actttgtgatccatgactgg

SEQ ID NO: 35633 - DNA, 20 bp, Delftia acidovorans
cctaatacgagaggcccatg

SEQ ID NO: 35634 - DNA, 20 bp, Actinomyces bovis
caggtcttgacataccgcgc

SEQ ID NO: 35635 - DNA, 20 bp, Methylobacterium mesophilicum
catcctttgacatggcgtgt

SEQ ID NO: 35636 - DNA, 20 bp, Bacillus lentus
ggattcgctcatgcgtcgcc

SEQ ID NO: 35637 - DNA, 20 bp, Fusobacterium mortiferum
gagagtcgcaaacctgcgag

SEQ ID NO: 35638 - DNA, 20 bp, Listeria monocytogenes
accgaatgataaagtgtggc

SEQ ID NO: 35639 - DNA, 20 bp, Campylobacter curvus
gttgctaagctagtcttggc

SEQ ID NO: 35640 - DNA, 20 bp, Kingella denitrificans
gtgagtaacatattggaatg

SEQ ID NO: 35641 - DNA, 20 bp, Kingella denitrificans
ggtgagtaacatattggaat

SEQ ID NO: 35642 - DNA, 20 bp, Streptococcus constellatus
cacagtgacggtacttaacc

SEQ ID NO: 35643 - DNA, 20 bp, Corynebacterium glucuronolyticum
ttttggttggcaggcgatac

SEQ ID NO: 35644 - DNA, 20 bp, Comamonas terrigena
gatcgcaagaccttgtgcta

SEQ ID NO: 35645 - DNA, 20 bp, Leptotrichia buccalis
tgattactgggtgtgggcat

SEQ ID NO: 35646 - DNA, 20 bp, Enterococcus raffinosus
atggtttctatttgaaaggc

SEQ ID NO: 35647 - DNA, 20 bp, Tissierella praeacuta
gataagctgagcactctaga

SEQ ID NO: 35648 - DNA, 20 bp, Oligella urethralis
cgtagttatcccccactacc

SEQ ID NO: 35649 - DNA, 20 bp, Campylobacter sputorum
aggaacaacacttagaaatg

SEQ ID NO: 35650 - DNA, 20 bp, Alicyclobacillus acidocaldarius
aagccatcccatggttgagc

SEQ ID NO: 35651 - DNA, 20 bp, Kingella denitrificans
tgagtaacatattggaatgt

SEQ ID NO: 35652 - DNA, 20 bp, Leuconostoc lactis
aatgtatctgatagtaactg

SEQ ID NO: 35653 - DNA, 20 bp, Prevotella denticola
ctaaaggcagttcatatccg

SEQ ID NO: 35654 - DNA, 20 bp, Corynebacterium xerosis
aactcctttcaccatcgacg

SEQ ID NO: 35655 - DNA, 20 bp, Propionibacterium freudenreichii
cttgaggaatgtaggggaga

SEQ ID NO: 35656 - DNA, 20 bp, Bacteroides fragilis
aatgatgtggaaacatgtca

SEQ ID NO: 35657 - DNA, 20 bp, Eubacterium moniliforme
ccctgacccagcaacgccgc

SEQ ID NO: 35658 - DNA, 20 bp, Weeksella virosa
ttgccagcgtttaaagacgg

SEQ ID NO: 35659 - DNA, 20 bp, Streptococcus equinus
gcataacagcatttaacaca

SEQ ID NO: 35660 - DNA, 20 bp, Paenibacillus larvae
gcgatccggagccaatcctc

SEQ ID NO: 35661 - DNA, 20 bp, Streptococcus sp.
atgataattaattgaaagat

SEQ ID NO: 35662 - DNA, 20 bp, Bacillus cereus
tcaagaagttagcggcggac

SEQ ID NO: 35663 - DNA, 20 bp, Staphylococcus capitis
gaaaggcctgcagcttgctg

SEQ ID NO: 35664 - DNA, 20 bp, Prevotella oris
acggcctagggcaaaaccgg

SEQ ID NO: 35665 - DNA, 20 bp, Bacillus coagulans
ttttcctccgcatggaggaa

SEQ ID NO: 35666 - DNA, 20 bp, Dietzia maris
aaaccgtagagatacggtcc

SEQ ID NO: 35667 - DNA, 20 bp, Propionibacterium freudenreichii
ggtatagctccaggaaactg

SEQ ID NO: 35668 - DNA, 20 bp, Anaerococcus tetradius
tagccgttggaaacgacgaa

SEQ ID NO: 35669 - DNA, 20 bp, Acinetobacter haemolyticus
ggtcagctagagtatgggag

SEQ ID NO: 35670 - DNA, 20 bp, Photobacterium damselae
agtgtagttaacacctgcat

SEQ ID NO: 35671 - DNA, 20 bp, Pediococcus parvulus
ctaataccgcataacaaagt

SEQ ID NO: 35672 - DNA, 20 bp, Weeksella virosa
ctaagtctatattgacgctg

SEQ ID NO: 35673 - DNA, 20 bp, Clostridium clostridiiforme
cagtgtgtgaaaaactccgg

SEQ ID NO: 35674 - DNA, 20 bp, Alcaligenes faecalis
cttgacatgtctggaaagcc

SEQ ID NO: 35675 - DNA, 20 bp, Brevibacillus laterosporus
tacttcgcgagaagatgcta

SEQ ID NO: 35676 - DNA, 20 bp, Prevotella oris
gcgtaggccgtggattaagc

SEQ ID NO: 35677 - DNA, 20 bp, Pasteurella multocida
ggacctcttggccacctgcc

SEQ ID NO: 35678 - DNA, 20 bp, Geobacillus thermoglucosidasius
gacaaccctggagacagggc

SEQ ID NO: 35679 - DNA, 20 bp, Staphylococcus aureus
agcgaacggacgagaagctt

SEQ ID NO: 35680 - DNA, 20 bp, Proteus vulgaris
aggaaggtgataaagttaat

SEQ ID NO: 35681 - DNA, 20 bp, Leuconostoc fallax
aactgtggaatggctttgga

SEQ ID NO: 35682 - DNA, 20 bp, Brevibacillus borstelensis
ggcgcaagctaccacttacg

SEQ ID NO: 35683 - DNA, 20 bp, Streptococcus dysgalactiae
caccatgtgacggtaactaa

SEQ ID NO: 35684 - DNA, 20 bp, Cardiobacterium hominis
gtggagccaatctgagaaag

SEQ ID NO: 35685 - DNA, 20 bp, Actinomyces bovis
ccttcgggttgtaaagctct

SEQ ID NO: 35686 - DNA, 20 bp, Prevotella denticola
aaaggcagttcatatccggt

SEQ ID NO: 35687 - DNA, 20 bp, Leptotrichia buccalis
tgaagatagttcactggacg

SEQ ID NO: 35688 - DNA, 20 bp, Streptococcus pyogenes
ccaccaagtgacggtaacta

SEQ ID NO: 35689 - DNA, 20 bp, Corynebacterium urealyticum
gaccaatctttagtgtggtt

SEQ ID NO: 35690 - DNA, 20 bp, Actinomyces bovis
acgataggaagagggaatgc

SEQ ID NO: 35691 - DNA, 20 bp, Pasteurella multocida
gggattgggctatatgcttg

SEQ ID NO: 35692 - DNA, 20 bp, Arcanobacterium pyogenes
gtgccagagatggtgcagct

SEQ ID NO: 35693 - DNA, 20 bp, Neisseria subflava
ctcgagtgtgtcagagggag

SEQ ID NO: 35694 - DNA, 20 bp, Fusobacterium varium
atttggttatgaaagctata

SEQ ID NO: 35695 - DNA, 20 bp, Streptococcus anginosus
ttcatactgtgacggtactt

SEQ ID NO: 35696 - DNA, 20 bp, Streptococcus hyovaginalis
tctgttataagcgaagaacg

SEQ ID NO: 35697 - DNA, 20 bp, Corynebacterium urealyticum
ccaatctttagtgtggttgg

SEQ ID NO: 35698 - DNA, 20 bp, Clostridium subterminale
taacataagagaatcgcatg

SEQ ID NO: 35699 - DNA, 20 bp, Prevotella bivia
gccgtttggtaagcgtgttg

SEQ ID NO: 35700 - DNA, 20 bp, Anaerococcus prevotii
cttgacagaacccttcgggg

SEQ ID NO: 35701 - DNA, 20 bp, Prevotella denticola
aaccaccacactaaaggcag

SEQ ID NO: 35702 - DNA, 20 bp, Prevotella disiens
caacctgccctttacttggg

SEQ ID NO: 35703 - DNA, 20 bp, Neisseria lactamica
ttgggcagcctgactgcttg

SEQ ID NO: 35704 - DNA, 20 bp, Gemella haemolysans
ttgttagggaagaatgattg

SEQ ID NO: 35705 - DNA, 20 bp, Paenibacillus pabuli
ggtacaacgggctgtgaagc

SEQ ID NO: 35706 - DNA, 20 bp, Lactococcus lactis
atgaagattggtgcttgcac

SEQ ID NO: 35707 - DNA, 20 bp, Brochothrix campestris
acgaacggataaggagcttg

SEQ ID NO: 35708 - DNA, 20 bp, Alicyclobacillus acidocaldarius
ccatggactttcactccaga

SEQ ID NO: 35709 - DNA, 20 bp, Prevotella bivia
taaagtggggaacgtgttcc

SEQ ID NO: 35710 - DNA, 20 bp, Clostridium subterminale
gttggtacaataagatgcaa

SEQ ID NO: 35711 - DNA, 20 bp, Micrococcus luteus
tgttctcgatcgccgtagag

SEQ ID NO: 35712 - DNA, 20 bp, Veillonella atypica
atctagagtatcggagagga

SEQ ID NO: 35713 - DNA, 20 bp, Corynebacterium accolens
tctttctacgactttcgtgc

SEQ ID NO: 35714 - DNA, 20 bp, Bacillus alcalophilus
accccgaggggtcattggaa

SEQ ID NO: 35715 - DNA, 20 bp, Streptococcus mitis
ttgcttaaaaggtgcaattg

SEQ ID NO: 35716 - DNA, 20 bp, Tetragenococcus halophilus
tttttccatgacggtagctg

SEQ ID NO: 35717 - DNA, 20 bp, Fusobacterium nucleatum
agatgtttcagtgtcccttc

SEQ ID NO: 35718 - DNA, 20 bp, Actinomyces naeslundii
ggatattctgggtctgtcgc

SEQ ID NO: 35719 - DNA, 20 bp, Fusobacterium mortiferum
tgaagacggtcaccgcgagg

SEQ ID NO: 35720 - DNA, 20 bp, Eggerthella lenta
ggatctctaatccgagggct

SEQ ID NO: 35721 - DNA, 20 bp, Propionibacterium freudenreichii
aatcccgaatatgagcctgg

SEQ ID NO: 35722 - DNA, 20 bp, Bacillus pumilus
aagtcgagcgaacagaaggg

SEQ ID NO: 35723 - DNA, 20 bp, Micrococcus luteus
ggcttgacatgttctcgatc

SEQ ID NO: 35724 - DNA, 20 bp, Cardiobacterium hominis
tgaaagaggaaagcggaatt

SEQ ID NO: 35725 - DNA, 20 bp, Staphylococcus sp.
tagttacttacacgtatgtt

SEQ ID NO: 35726 - DNA, 20 bp, Clostridium ramosum
gcgagactgccagtgacaag

SEQ ID NO: 35727 - DNA, 20 bp, Citrobacter koseri
gtctcagagatgagactgtg

SEQ ID NO: 35728 - DNA, 20 bp, Aerococcus christensenii
gcattaactagttggcgagg

SEQ ID NO: 35729 - DNA, 20 bp, Bacillus flexus
tgcttctatgacgttagcgg

SEQ ID NO: 35730 - DNA, 20 bp, Bordetella bronchiseptica
ggcacgggctaatatcctgt

SEQ ID NO: 35731 - DNA, 20 bp, Bacteroides thetaiotaomicron
gcaaactggagatggcgacc

SEQ ID NO: 35732 - DNA, 20 bp, Campylobacter lari
cgttgaactgcttgggaaac

SEQ ID NO: 35733 - DNA, 20 bp, Haemophilus influenzae
tgtgttaatagcacatcaaa

SEQ ID NO: 35734 - DNA, 20 bp, Brevibacterium epidermidis
tcttctctttggagctggtg

SEQ ID NO: 35735 - DNA, 20 bp, Bacillus alcalophilus
tggttcttttgtaaaagatg

SEQ ID NO: 35736 - DNA, 20 bp, Corynebacterium coyleae
agggtgagctaatcgctgta

SEQ ID NO: 35737 - DNA, 20 bp, Prevotella corporis
cgcagttgccatcgggtcat

SEQ ID NO: 35738 - DNA, 20 bp, Chromobacterium violaceum
ggttgtgcaagtctgatgtg

SEQ ID NO: 35739 - DNA, 20 bp, Bacteroides merdae
taaagattcatcgctgatag

SEQ ID NO: 35740 - DNA, 20 bp, Serratia marcescens
gtgagcttaatacgttcatc

SEQ ID NO: 35741 - DNA, 20 bp, Bacteroides forsythus
aaagtcggactaatacctca

SEQ ID NO: 35742 - DNA, 20 bp, Atopobium parvulum
aaacgtcgtggccgaaagga

SEQ ID NO: 35743 - DNA, 20 bp, Neisseria lactamica
gaagaaaaggtcggggttaa

SEQ ID NO: 35744 - DNA, 20 bp, Fusobacterium nucleatum
tgcctcacaggtagggacaa

SEQ ID NO: 35745 - DNA, 20 bp, Peptostreptococcus anaerobius
cctaagcttgacatccctta

SEQ ID NO: 35746 - DNA, 20 bp, Anaerococcus tetradius
tatagctcaactatataaag

SEQ ID NO: 35747 - DNA, 20 bp, Weeksella virosa
aagtctatattgacgctgat

SEQ ID NO: 35748 - DNA, 20 bp, Corynebacterium xerosis
cttcccttgtggctcgtata

SEQ ID NO: 35749 - DNA, 20 bp, Helcococcus kunzii
agaatctaactgacgctgag

SEQ ID NO: 35750 - DNA, 20 bp, Corynebacterium coyleae
cggataggaccacattttgg

SEQ ID NO: 35751 - DNA, 20 bp, Streptococcus salivarius
ttgtaagtcaagaacgagtg

SEQ ID NO: 35752 - DNA, 20 bp, Salmonella enteritidis
cagaagaatccagagatgga

SEQ ID NO: 35753 - DNA, 20 bp, Acinetobacter calcoaceticus
ttgcactatcacttagcggc

SEQ ID NO: 35754 - DNA, 20 bp, Peptostreptococcus anaerobius
ccgaagccgattatccaacc

SEQ ID NO: 35755 - DNA, 20 bp, Delftia acidovorans
tacggaacgaaaaagcttct

SEQ ID NO: 35756 - DNA, 20 bp, Pseudomonas fluorescens
gagtattttgacgttaccga

SEQ ID NO: 35757 - DNA, 20 bp, Leptotrichia buccalis
gaatgccgatgatgaagata

SEQ ID NO: 35758 - DNA, 20 bp, Prevotella melaninogenica
gtgggataacctgccgaaag

SEQ ID NO: 35759 - DNA, 20 bp, Veillonella atypica
cttgcttctatcaatcttag

SEQ ID NO: 35760 - DNA, 20 bp, Campylobacter sputorum
cttagaaatgagtgctaata

SEQ ID NO: 35761 - DNA, 20 bp, Lactococcus lactis
ttggtagagaagaacgttgg

SEQ ID NO: 35762 - DNA, 20 bp, Leuconostoc pseudomesenteroides
taggaaggagccgtctaagg

SEQ ID NO: 35763 - DNA, 20 bp, Clostridium paraputrificum
ccgtaagggaggaagccacc

SEQ ID NO: 35764 - DNA, 20 bp, Leuconostoc argentinum
tcgcatgatacaaagttgaa

SEQ ID NO: 35765 - DNA, 20 bp, Pseudoramibacter alactolyticus
cgaagcctgtgagagaaccg

SEQ ID NO: 35766 - DNA, 20 bp, Acinetobacter haemolyticus
ctactctagttaatacctag

SEQ ID NO: 35767 - DNA, 20 bp, Brevibacillus choshinensis
aatcctcagtgccgcagcta

SEQ ID NO: 35768 - DNA, 20 bp, Corynebacterium glucuronolyticum
gtgtcgcgtcgtctgtgtaa

SEQ ID NO: 35769 - DNA, 20 bp, Actinomyces neuii
tgtttttggtgagagtggcg

SEQ ID NO: 35770 - DNA, 20 bp, Rothia mucilaginosa
gctgtgaaaggccggggctt

SEQ ID NO: 35771 - DNA, 20 bp, Bacteroides capilosus
gaaggcggattgctggacag

SEQ ID NO: 35772 - DNA, 20 bp, Clostridium clostridiiforme
ggataacctgcctcacactg

SEQ ID NO: 35773 - DNA, 20 bp, Mannheimia haemolytica
gaacggtagcacataggagt

SEQ ID NO: 35774 - DNA, 20 bp, Prevotella melaninogenica
ggtttccttgagtacgcaca

SEQ ID NO: 35775 - DNA, 20 bp, Proteus vulgaris
cctttgtcaattgacgttac

SEQ ID NO: 35776 - DNA, 20 bp, Staphylococcus pulvereri
aaccttttattaggagctag

SEQ ID NO: 35777 - DNA, 20 bp, Prevotella intermedia
gccatgcgactctcatatgt

SEQ ID NO: 35778 - DNA, 20 bp, Paenibacillus apiarius
ttaaacctagggctcaacct

SEQ ID NO: 35779 - DNA, 20 bp, Kingella denitrificans
gagtagtgggggataaccaa

SEQ ID NO: 35780 - DNA, 20 bp, Peptoniphilus indolicus
gagaacatgaagtcggagtt

SEQ ID NO: 35781 - DNA, 20 bp, Bacillus alcalophilus
taataccggataatcaaagg

SEQ ID NO: 35782 - DNA, 20 bp, Bacteroides forsythus
aagctctacagcgaaagcgt

SEQ ID NO: 35783 - DNA, 20 bp, Clostridium ramosum
ttctgttataaaggaagaac

SEQ ID NO: 35784 - DNA, 20 bp, Tissierella praeacuta
aagttctgtcctaagggacg

SEQ ID NO: 35785 - DNA, 20 bp, Sphingobacterium multivorum
atggtacagcgggcagctac

SEQ ID NO: 35786 - DNA, 20 bp, Prevotella melaninogenica
gccgaaaggcagactaatac

SEQ ID NO: 35787 - DNA, 20 bp, Tetragenococcus halophilus
tggctttttttcacctgaaa

SEQ ID NO: 35788 - DNA, 20 bp, Propionibacterium freudenreichii
gatcacgtcggaagtgaaat

SEQ ID NO: 35789 - DNA, 20 bp, Fusobacterium mortiferum
ctgcagtctgggacaacatt

SEQ ID NO: 35790 - DNA, 20 bp, Streptococcus constellatus
aagagcatcactaccagatg

SEQ ID NO: 35791 - DNA, 20 bp, Bacteroides capilosus
tattgttagttgctacgcaa

SEQ ID NO: 35792 - DNA, 20 bp, Enterobacter amnigenus
ttttctgggtgacgagcggc

SEQ ID NO: 35793 - DNA, 20 bp, Prevotella disiens
ttgaggtccttcgggactcc

SEQ ID NO: 35794 - DNA, 20 bp, Haemophilus actinemycetemcomitans
ttgacatccgaagaagaact

SEQ ID NO: 35795 - DNA, 20 bp, Bacteroides stercoris
gctaatcccgaaagcctctc

SEQ ID NO: 35796 - DNA, 20 bp, Kocuria kristinae
ggtctaatacccggatgcga

SEQ ID NO: 35797 - DNA, 20 bp, Leuconostoc citreum
gaaatgctaaaatagggaat

SEQ ID NO: 35798 - DNA, 20 bp, Streptococcus mitis
tgcatgacatttgcttaaaa

SEQ ID NO: 35799 - DNA, 20 bp, Propionibacterium freudenreichii
aggcggttgatcacgtcgga

SEQ ID NO: 35800 - DNA, 20 bp, Myroides odoratus
tataagatgggcatgcgtat

SEQ ID NO: 35801 - DNA, 20 bp, Prevotella melaninogenica
tgacgggagcgcaactgacg

SEQ ID NO: 35802 - DNA, 20 bp, Anaerococcus tetradius
ggcgactttctggtcatcat

SEQ ID NO: 35803 - DNA, 20 bp, Clostridium clostridiiforme
ctggtgcgaaaaactccggt

SEQ ID NO: 35804 - DNA, 20 bp, Bacillus pallidus
acctgccctgcagactggga

SEQ ID NO: 35805 - DNA, 20 bp, Acinetobacter junii
tcgagcggagatgaggtgct

SEQ ID NO: 35806 - DNA, 20 bp, Campylobacter concisus
tcccccttgtggggctggtg

SEQ ID NO: 35807 - DNA, 20 bp, Dermacoccus nishinomiyaensis
gatagtgaaagatggctctg

SEQ ID NO: 35808 - DNA, 20 bp, Campylobacter concisus
aagggttttactggttttgg

SEQ ID NO: 35809 - DNA, 20 bp, Rothia mucilaginosa
gtggttatagatgggctcac

SEQ ID NO: 35810 - DNA, 20 bp, Clostridium sordellii
tttcaagccagaagtgaaag

SEQ ID NO: 35811 - DNA, 20 bp, Streptococcus infantarius
gggttaaatgctgttatgcg

SEQ ID NO: 35812 - DNA, 20 bp, Actinomyces bovis
aatagttatggcggatacag

SEQ ID NO: 35813 - DNA, 20 bp, Brevibacillus borstelensis
gcgagtcccttcgggggcta

SEQ ID NO: 35814 - DNA, 20 bp, Campylobacter curvus
tatgggatgaggctatatcg

SEQ ID NO: 35815 - DNA, 20 bp, Abiotrophia defectiva
cgcatagagtaactgttatg

SEQ ID NO: 35816 - DNA, 20 bp, Micrococcus luteus
cgcccaccgcatggtgggtg

SEQ ID NO: 35817 - DNA, 20 bp, Campylobacter rectus
aagttaagtcgggaaagttt

SEQ ID NO: 35818 - DNA, 20 bp, Bacteroides thetaiotaomicron
aatacccgatggtataatca

SEQ ID NO: 35819 - DNA, 20 bp, Aerococcus christensenii
gctcaccaaggtgatgatgc

SEQ ID NO: 35820 - DNA, 20 bp, Staphylococcus capitis
ataccggataggacagctgt

SEQ ID NO: 35821 - DNA, 20 bp, Leptotrichia buccalis
cacgcatgtgcccggcaatg

SEQ ID NO: 35822 - DNA, 20 bp, Prevotella intermedia
tctcatatgttatcccgtat

SEQ ID NO: 35823 - DNA, 20 bp, Peptostreptococcus anaerobius
tagatatatcaaagtgttag

SEQ ID NO: 35824 - DNA, 20 bp, Leuconostoc pseudomesenteroides
cacaaagttaaaaggcgctt

SEQ ID NO: 35825 - DNA, 20 bp, Anaerococcus prevotii
accagcatttcggatgggga

SEQ ID NO: 35826 - DNA, 20 bp, Bacteroides fragilis
gcgggtgaccgtatgctaat

SEQ ID NO: 35827 - DNA, 20 bp, Campylobacter concisus
ttcccccttgtggggctggt

SEQ ID NO: 35828 - DNA, 20 bp, Bacteroides vulgatus
acctgaagtgcgtaaccgcg

SEQ ID NO: 35829 - DNA, 20 bp, Anaerococcus tetradius
aatatagctcaactatataa

SEQ ID NO: 35830 - DNA, 20 bp, Haemophilus actinemycetemcomitans
gggcacgtaggcggaccttt

SEQ ID NO: 35831 - DNA, 20 bp, Campylobacter curvus
gctaagctagtcttggcagt

SEQ ID NO: 35832 - DNA, 20 bp, Clostridium botulinum
tcgcatgattttcttatcaa

SEQ ID NO: 35833 - DNA, 20 bp, Campylobacter rectus
tacaatggcgtatacaataa

SEQ ID NO: 35834 - DNA, 20 bp, Facklamia ignava
ctacgggacaagaagacagg

SEQ ID NO: 35835 - DNA, 20 bp, Campylobacter lari
cgaacggagtattaagagag

SEQ ID NO: 35836 - DNA, 20 bp, Clostridium clostridiiforme
tctggtgcgaaaaactccgg

SEQ ID NO: 35837 - DNA, 20 bp, Gemella haemolysans
attgtgtagtaactatacac

SEQ ID NO: 35838 - DNA, 20 bp, Porphyromonas endodontalis
cttcttttgtagaggaataa

SEQ ID NO: 35839 - DNA, 20 bp, Veillonella atypica
ttctatcaatcttagtggcg

SEQ ID NO: 35840 - DNA, 20 bp, Lactococcus lactis
tcaaagatgatcccgcgttg

SEQ ID NO: 35841 - DNA, 20 bp, Cardiobacterium hominis
cttttgctgggggataacgt

SEQ ID NO: 35842 - DNA, 20 bp, Alicyclobacillus acidocaldarius
atgccgctctccccgagcaa

SEQ ID NO: 35843 - DNA, 20 bp, Eggerthella lenta
atctctaatccgagggctca

SEQ ID NO: 35844 - DNA, 20 bp, Ochrobactrum intermedium
ccagccatgccgcgtgagtg

SEQ ID NO: 35845 - DNA, 20 bp, Pediococcus pentosaceus
gcaagtcgaacgaacttccg

SEQ ID NO: 35846 - DNA, 20 bp, Campylobacter concisus
acgacatgtcaccgcatggt

SEQ ID NO: 35847 - DNA, 20 bp, Anaerococcus tetradius
actcaaaaagcctgtcccag

SEQ ID NO: 35848 - DNA, 20 bp, Staphylococcus capitis
gtttagtgtcagttgtggaa

SEQ ID NO: 35849 - DNA, 20 bp, Paenibacillus validus
ctgagggtgacggtacttga

SEQ ID NO: 35850 - DNA, 20 bp, Peptostreptococcus anaerobius
agtcgtcgaaggtggcgtcg

SEQ ID NO: 35851 - DNA, 20 bp, Facklamia sourekii
cttccacccctcagtgctgg

SEQ ID NO: 35852 - DNA, 20 bp, Clostridium botulinum
atcgcatgattttcttatca

SEQ ID NO: 35853 - DNA, 20 bp, Anaerococcus prevotii
cataagaaaaagccccggct

SEQ ID NO: 35854 - DNA, 20 bp, Paenibacillus glucanolyticus
ctgaatctgctagagatagc

SEQ ID NO: 35855 - DNA, 20 bp, Corynebacterium urealyticum
ttagtgtggttggtggaaag

SEQ ID NO: 35856 - DNA, 20 bp, Weeksella virosa
gcaagccgagcggtagatta

SEQ ID NO: 35857 - DNA, 20 bp, Helcococcus ovis
tacttgagtagatgagggga

SEQ ID NO: 35858 - DNA, 20 bp, Prevotella intermedia
gtaggcggtctgttaagcgt

SEQ ID NO: 35859 - DNA, 20 bp, Streptococcus porcinus
ttgcaccagtctaatgagtt

SEQ ID NO: 35860 - DNA, 20 bp, Bacteroides fragilis
ctagcgggtgaccgtatgct

SEQ ID NO: 35861 - DNA, 20 bp, Leptotrichia buccalis
tgcaggaatgccgatgatga

SEQ ID NO: 35862 - DNA, 20 bp, Clostridium innocuum
acatggatggacctgcgacg

SEQ ID NO: 35863 - DNA, 20 bp, Weeksella virosa
aaggcttaaatgcataatga

SEQ ID NO: 35864 - DNA, 20 bp, Haemophilus segnis
ttaatagactaggtgattga

SEQ ID NO: 35865 - DNA, 20 bp, Corynebacterium group F
ctaatcgcacaaagccggcc

SEQ ID NO: 35866 - DNA, 20 bp, Clostridium septicum
ggtgtgggaggtatcaactc

SEQ ID NO: 35867 - DNA, 20 bp, Corynebacterium afermentans
tgcggtcgcagctcgtatcc

SEQ ID NO: 35868 - DNA, 20 bp, Pediococcus pentosaceus
tccgttaattgattatgacg

SEQ ID NO: 35869 - DNA, 20 bp, Actinomyces turicensis
gctttgggttgtggtgaggg

SEQ ID NO: 35870 - DNA, 20 bp, Clostridium ramosum
atggtgcagagggaagcgaa

SEQ ID NO: 35871 - DNA, 20 bp, Photobacterium damselae
tagtgtagttaacacctgca

SEQ ID NO: 35872 - DNA, 20 bp, Clostridium subterminale
agttctgtcatatgggaaga

SEQ ID NO: 35873 - DNA, 20 bp, Fusobacterium mortiferum
gcaggagagctttgcgtcct

SEQ ID NO: 35874 - DNA, 20 bp, Corynebacterium accolens
accatctttagtgtggtggt

SEQ ID NO: 35875 - DNA, 20 bp, Bacteroides thetaiotaomicron
agggagcgtaggtggacagt

SEQ ID NO: 35876 - DNA, 20 bp, Leuconostoc argentinum
aacttgagtgttgtagaggt

SEQ ID NO: 35877 - DNA, 20 bp, Corynebacterium glucuronolyticum
cactgggggataagcttggg

SEQ ID NO: 35878 - DNA, 20 bp, Streptococcus sobrinus
tagagtttttcttcggaaca

SEQ ID NO: 35879 - DNA, 20 bp, Granulicatella elegans
cgaccggtgcttgcactggt

SEQ ID NO: 35880 - DNA, 20 bp, Chromobacterium violaceum
ctcttgacatgtacggaact

SEQ ID NO: 35881 - DNA, 20 bp, Clostridium ramosum
tcttgacatactcataaagg

SEQ ID NO: 35882 - DNA, 20 bp, Lactococcus garvieae
gagctataagttctctgtag

SEQ ID NO: 35883 - DNA, 20 bp, Stenotrophomonas maltophilia
ctgcagtggaaactggacga

SEQ ID NO: 35884 - DNA, 20 bp, Fusobacterium nucleatum
agagtcgcaaagccgtgagg

SEQ ID NO: 35885 - DNA, 20 bp, Corynebacterium amycolatum
accggataggaccatggtgt

SEQ ID NO: 35886 - DNA, 20 bp, Acinetobacter genospecies 3
gcttgctactgatcttagcg

SEQ ID NO: 35887 - DNA, 20 bp, Oligella urethralis
ttcgttgagaaaagtggttt

SEQ ID NO: 35888 - DNA, 20 bp, Actinomyces odontolyticus
gtggcatttagttggtcgtg

SEQ ID NO: 35889 - DNA, 20 bp, Dermabacter hominis
atgcggggagtcgtcgaagg

SEQ ID NO: 35890 - DNA, 20 bp, Alicyclobacillus acidocaldarius
tttccttcggcactggggtg

SEQ ID NO: 35891 - DNA, 20 bp, Bacteroides thetaiotaomicron
gcatttgaatattttggaaa

SEQ ID NO: 35892 - DNA, 20 bp, Clostridium subterminale
tacctgtaatgagggaagcc

SEQ ID NO: 35893 - DNA, 20 bp, Aerococcus christensenii
cttatcgatggccttgcggt

SEQ ID NO: 35894 - DNA, 20 bp, Bacteroides fragilis
gcagtggaatgatgtggaaa

SEQ ID NO: 35895 - DNA, 20 bp, Paenibacillus amylolyticus
ccttggttcgcactggaaac

SEQ ID NO: 35896 - DNA, 20 bp, Campylobacter coli
taagaaccttttagagataa

SEQ ID NO: 35897 - DNA, 20 bp, Helcococcus kunzii
gttaaagaatttcggtgaaa

SEQ ID NO: 35898 - DNA, 20 bp, Corynebacterium glucuronolyticum
gaggagcgagagcatgggta

SEQ ID NO: 35899 - DNA, 20 bp, Tissierella praeacuta
gtcaaagcgtaaagcggtaa

SEQ ID NO: 35900 - DNA, 20 bp, Propionibacterium propionicus
agcttttgtgacggtagtgg

SEQ ID NO: 35901 - DNA, 20 bp, Streptococcus bovis
tagcttgctagagtagaagg

SEQ ID NO: 35902 - DNA, 20 bp, Bacillus oleronius
ctcttgacctccctagagat

SEQ ID NO: 35903 - DNA, 20 bp, Chryseobacterium meningosepticum
acctacttacgtgtaagtag

SEQ ID NO: 35904 - DNA, 20 bp, Streptococcus infantarius
aactttagcttgctaaagtt

SEQ ID NO: 35905 - DNA, 20 bp, Pseudoramibacter alactolyticus
gaactggaaagtggcgaacg

SEQ ID NO: 35906 - DNA, 20 bp, Actinomyces viscosus
gaaaggtttgttccggtggg

SEQ ID NO: 35907 - DNA, 20 bp, Prevotella denticola
cattgagtgcttgcactctt

SEQ ID NO: 35908 - DNA, 20 bp, Bacillus lentus
aagggaagaccctgtctcca

SEQ ID NO: 35909 - DNA, 20 bp, Bacteroides fragilis
tatataagaataaagtgcag

SEQ ID NO: 35910 - DNA, 20 bp, Bacillus oleronius
ccggataacttttttcttcg

SEQ ID NO: 35911 - DNA, 20 bp, Sporosarcina pasteurii
tttgctccagcactaagggg

SEQ ID NO: 35912 - DNA, 20 bp, Dietzia maris
gtttgtgaaaacccggggct

SEQ ID NO: 35913 - DNA, 20 bp, Clostridium tetani
ggatcgtaaaaccctgtttt

SEQ ID NO: 35914 - DNA, 20 bp, Microbacterium hominis
agaacaccgtagaaatacgg

SEQ ID NO: 35915 - DNA, 20 bp, Propionibacterium freudenreichii
gaacgtgcccttgacttcgg

SEQ ID NO: 35916 - DNA, 20 bp, Propionibacterium granulosum
cactgttgccagcaattcgg

SEQ ID NO: 35917 - DNA, 20 bp, Veillonella atypica
acgtactacaatgggagtta

SEQ ID NO: 35918 - DNA, 20 bp, Pseudoramibacter alactolyticus
gtagacttgagtattggaga

SEQ ID NO: 35919 - DNA, 20 bp, Tetragenococcus halophilus
accgcatatggctttttttc

SEQ ID NO: 35920 - DNA, 20 bp, Moraxella osloensis
taatacccattagattagac

SEQ ID NO: 35921 - DNA, 20 bp, Corynebacterium coyleae
aggaccacattttggatggt

SEQ ID NO: 35922 - DNA, 20 bp, Streptococcus thermophilus
gaggagcttgctcttcttgg

SEQ ID NO: 35923 - DNA, 20 bp, Peptoniphilus indolicus
ttgagtagtgaagaggtaag

SEQ ID NO: 35924 - DNA, 20 bp, Bacteroides ureolyticus
aataatgacggtacctgatg

SEQ ID NO: 35925 - DNA, 20 bp, Corynebacterium glucuronolyticum
gtcgtctgtgtaatccaggg

SEQ ID NO: 35926 - DNA, 20 bp, Weissella paramesenteroides
tggttgaaagatggttctgc

SEQ ID NO: 35927 - DNA, 20 bp, Tetragenococcus halophilus
atatggctttttttcacctg

SEQ ID NO: 35928 - DNA, 20 bp, Bacillus lentus
ttattggttcgctcgacttg

SEQ ID NO: 35929 - DNA, 20 bp, Staphylococcus carnosus
gcgtaggtaactatgcgcac

SEQ ID NO: 35930 - DNA, 20 bp, Eggerthella lenta
ccccatgttgccagcattag

SEQ ID NO: 35931 - DNA, 20 bp, Prevotella loescheii
ctagggtgaaaccggtgatt

SEQ ID NO: 35932 - DNA, 20 bp, Pediococcus dextrinicus
tggctgtcacttaaggatgg

SEQ ID NO: 35933 - DNA, 20 bp, Bacteroides forsythus
gtgaaagtttgtcgcttaac

SEQ ID NO: 35934 - DNA, 20 bp, Facklamia ignava
tagagtaactgttataggtt

SEQ ID NO: 35935 - DNA, 20 bp, Moraxella osloensis
gaggctaatggttaataccc

SEQ ID NO: 35936 - DNA, 20 bp, Prevotella loescheii
tgggtttttgcaggtaccgc

SEQ ID NO: 35937 - DNA, 20 bp, Fusobacterium varium
tacagactgggacaacattt

SEQ ID NO: 35938 - DNA, 20 bp, Alicyclobacillus acidocaldarius
gcccgtttccgggcgttatt

SEQ ID NO: 35939 - DNA, 20 bp, Leptotrichia buccalis
cggaactgcacgagtagagg

SEQ ID NO: 35940 - DNA, 20 bp, Bacteroides ureolyticus
tgttgctttgctagtcaagg

SEQ ID NO: 35941 - DNA, 20 bp, Leptotrichia buccalis
tgcctgcgaagagcaggagg

SEQ ID NO: 35942 - DNA, 20 bp, Cardiobacterium hominis
ttaatacctgcgcaattgac

SEQ ID NO: 35943 - DNA, 20 bp, Streptococcus anginosus
gttcatactgtgacggtact

SEQ ID NO: 35944 - DNA, 20 bp, Bacillus pumilus
tccttgaaccgcatggttca

SEQ ID NO: 35945 - DNA, 20 bp, Prevotella bivia
tgagtgcgcacaacgtaggc

SEQ ID NO: 35946 - DNA, 20 bp, Actinomyces bovis
aactggcctgtaactgacgc

SEQ ID NO: 35947 - DNA, 20 bp, Weeksella virosa
aatcctatcgcttaacgata

SEQ ID NO: 35948 - DNA, 20 bp, Gemella haemolysans
taacagcattaactgcatgg

SEQ ID NO: 35949 - DNA, 20 bp, Streptococcus pyogenes
agtggaaaatccaccaagtg

SEQ ID NO: 35950 - DNA, 20 bp, Weissella paramesenteroides
agtcgaacgctttgtcttta

SEQ ID NO: 35951 - DNA, 20 bp, Helcococcus ovis
gtcgggagtcaaatctcggt

SEQ ID NO: 35952 - DNA, 20 bp, Corynebacterium amycolatum
ggcgagctaatcccgcaaag

SEQ ID NO: 35953 - DNA, 20 bp, Gemella bergeri
taactatacacaaaacagac

SEQ ID NO: 35954 - DNA, 20 bp, Prevotella intermedia
aggggaaacggcattatgtg

SEQ ID NO: 35955 - DNA, 20 bp, Peptostreptococcus anaerobius
gaagccgattatccaaccgc

SEQ ID NO: 35956 - DNA, 20 bp, Prevotella melaninogenica
ttgtttgcaggtaccatacg

SEQ ID NO: 35957 - DNA, 20 bp, Oligella ureolytica
tcccgcgtgtgggacgaagg

SEQ ID NO: 35958 - DNA, 20 bp, Vibrio mimicus
aggttgtgacctagagtcgt

SEQ ID NO: 35959 - DNA, 20 bp, Streptococcus peroris
tttaaaaggtgcaattgcac

SEQ ID NO: 35960 - DNA, 20 bp, Aeromonas schubertii
aaaactgtccgactagagtc

SEQ ID NO: 35961 - DNA, 20 bp, Corynebacterium hoagii
ctcctgtcgcatggcggggg

SEQ ID NO: 35962 - DNA, 20 bp, Staphylococcus capitis
accggataggacagctgttt

SEQ ID NO: 35963 - DNA, 20 bp, Brevibacillus choshinensis
ttgctcttcggcggttagcg

SEQ ID NO: 35964 - DNA, 20 bp, Rhizobium radiobacter
tgggcagtggagacattgtc

SEQ ID NO: 35965 - DNA, 20 bp, Propionibacterium avidum
ttgattgcgtcggaagtgaa

SEQ ID NO: 35966 - DNA, 20 bp, Peptostreptococcus anaerobius
agcctccgaaactggaagac

SEQ ID NO: 35967 - DNA, 20 bp, Peptostreptococcus anaerobius
ggtggttaaaggctacggct

SEQ ID NO: 35968 - DNA, 20 bp, Clostridium paraputrificum
atgtaatgtgggaagtccct

SEQ ID NO: 35969 - DNA, 20 bp, Campylobacter sputorum
cgcatggttcgatagtgaaa

SEQ ID NO: 35970 - DNA, 20 bp, Pasteurella multocida
ttgttaaatagatagcatca

SEQ ID NO: 35971 - DNA, 20 bp, Paenibacillus validus
gatagctggtttctccgcat

SEQ ID NO: 35972 - DNA, 20 bp, Oligella ureolytica
tctcaacgaagaaaagtctt

SEQ ID NO: 35973 - DNA, 20 bp, Tissierella praeacuta
taaagaagatttcttcggaa

SEQ ID NO: 35974 - DNA, 20 bp, Campylobacter concisus
acaccggaccgggccagaga

SEQ ID NO: 35975 - DNA, 20 bp, Campylobacter curvus
ctagtcttggcagtaatgca

SEQ ID NO: 35976 - DNA, 20 bp, Bacteroides thetaiotaomicron
aagttttccacgtgtggaat

SEQ ID NO: 35977 - DNA, 20 bp, Haemophilus segnis
aggcatttagtttaatagac

SEQ ID NO: 35978 - DNA, 20 bp, Lactobacillus casei
gcataaatccaagaaccgca

SEQ ID NO: 35979 - DNA, 20 bp, Citrobacter sedlakii
ggggaggaagggattgtggt

SEQ ID NO: 35980 - DNA, 20 bp, Actinomyces naeslundii
catgaaagtgtggctaatac

SEQ ID NO: 35981 - DNA, 20 bp, Bacteroides ureolyticus
tcatactcctatttaacata

SEQ ID NO: 35982 - DNA, 20 bp, Moraxella  catarrhalis
gcttatggttaatacccata

SEQ ID NO: 35983 - DNA, 20 bp, Lactococcus garvieae
ctgtagggagctataagttc

SEQ ID NO: 35984 - DNA, 20 bp, Neisseria meningitidis
cagccgctgatattagcaac

SEQ ID NO: 35985 - DNA, 20 bp, Anaerococcus tetradius
agcaagttagaagtgaaatc

SEQ ID NO: 35986 - DNA, 20 bp, Moraxella osloensis
tggtggtgctagaatatgtg

SEQ ID NO: 35987 - DNA, 20 bp, Brevibacillus borstelensis
tgccaatctcttaaaaccag

SEQ ID NO: 35988 - DNA, 20 bp, Anaerobiospirillum succiniciproducens
gaggtggagtggaacccaca

SEQ ID NO: 35989 - DNA, 20 bp, Clostridium tetani
gtttcctggactgtaactga

SEQ ID NO: 35990 - DNA, 20 bp, Peptoniphilus indolicus
gacttactggtcacaaactg

SEQ ID NO: 35991 - DNA, 20 bp, Fusobacterium mortiferum
agcgcgtctaggcggtttgg

SEQ ID NO: 35992 - DNA, 20 bp, Staphylococcus equorum
ttctaaagtaaaagatggtt

SEQ ID NO: 35993 - DNA, 20 bp, Tissierella praeacuta
aaactttaattatcttagcg

SEQ ID NO: 35994 - DNA, 20 bp, Haemophilus actinemycetemcomitans
ttagccctggtgcccgaagc

SEQ ID NO: 35995 - DNA, 20 bp, Fusobacterium mortiferum
tcgcaaacctgcgaggggga

SEQ ID NO: 35996 - DNA, 20 bp, Clostridium clostridiiforme
agtgtgtgaaaaactccggt

SEQ ID NO: 35997 - DNA, 20 bp, Leptotrichia buccalis
tcgtagatatgtgcaggaat

SEQ ID NO: 35998 - DNA, 20 bp, Clostridium innocuum
gcatcaagttggggactcat

SEQ ID NO: 35999 - DNA, 20 bp, Myroides odoratus
gagtaagtcagtggtgaaat

SEQ ID NO: 36000 - DNA, 20 bp, Arcanobacterium bernardiae
acttcggggttgcagtgggt

SEQ ID NO: 36001 - DNA, 20 bp, Tetragenococcus halophilus
aacctatccatcagcggggg

SEQ ID NO: 36002 - DNA, 20 bp, Neisseria meningitidis
ctgctttctctctcaagacg

SEQ ID NO: 36003 - DNA, 20 bp, Alcaligenes faecalis
gcgtgtgtaggcggttcgga

SEQ ID NO: 36004 - DNA, 20 bp, Weeksella virosa
tttagttttgaaagatttat

SEQ ID NO: 36005 - DNA, 20 bp, Eggerthella lenta
gcagggaagaaattcgacgg

SEQ ID NO: 36006 - DNA, 20 bp, Clostridium butyricum
gcgagagtgagcaaaactat

SEQ ID NO: 36007 - DNA, 20 bp, Corynebacterium afermentans
ccagctactgaccatgcggt

SEQ ID NO: 36008 - DNA, 20 bp, Corynebacterium glucuronolyticum
cacgtaagtgatctgccctg

SEQ ID NO: 36009 - DNA, 20 bp, Acinetobacter radioresistens
atactttaggatagtggacg

SEQ ID NO: 36010 - DNA, 20 bp, Staphylococcus warneri
ttcaatagtgaaagacggcc

SEQ ID NO: 36011 - DNA, 20 bp, Alicyclobacillus acidocaldarius
tgagtccccgcctcaacgcg

SEQ ID NO: 36012 - DNA, 20 bp, Helcococcus kunzii
acaaagcgcagctacctcgt

SEQ ID NO: 36013 - DNA, 20 bp, Bacillus circulans
tttcctctcatgaggaaaag

SEQ ID NO: 36014 - DNA, 20 bp, Clostridium septicum
ggggagtttcttcggaaaca

SEQ ID NO: 36015 - DNA, 20 bp, Lactococcus lactis
gagtggaaagctcatcaagt

SEQ ID NO: 36016 - DNA, 20 bp, Bacteroides thetaiotaomicron
taatacccgatggcataatt

SEQ ID NO: 36017 - DNA, 20 bp, Paenibacillus validus
ggcggtcttttaagtttggt

SEQ ID NO: 36018 - DNA, 20 bp, Brevibacillus choshinensis
ggggactccaatcctcagtg

SEQ ID NO: 36019 - DNA, 20 bp, Gemella bergeri
atagactgccagtgacaaac

SEQ ID NO: 36020 - DNA, 20 bp, Fusobacterium mortiferum
cttcgggggaacttagtgac

SEQ ID NO: 36021 - DNA, 20 bp, Anaerococcus prevotii
ctactgtaagcatttgaaac

SEQ ID NO: 36022 - DNA, 20 bp, Capnocytophaga ochracea
acaattaattgacgctgatg

SEQ ID NO: 36023 - DNA, 20 bp, Methylobacterium mesophilicum
gcttgcaccgcagtagcgca

SEQ ID NO: 36024 - DNA, 20 bp, Clostridium histolyticum
aagcatgcgtaggcggatat

SEQ ID NO: 36025 - DNA, 20 bp, Propionibacterium acnes
tcagagatgggtgtgcctct

SEQ ID NO: 36026 - DNA, 20 bp, Campylobacter rectus
ttaagtagcttgctatttaa

SEQ ID NO: 36027 - DNA, 20 bp, Porphyromonas endodontalis
agtggtgaaaagctgcagct

SEQ ID NO: 36028 - DNA, 20 bp, Bacteroides ureolyticus
tttgctagtcaaggcagtaa

SEQ ID NO: 36029 - DNA, 20 bp, Actinomyces neuii
atgcagcgacgtcgtgtggg

SEQ ID NO: 36030 - DNA, 20 bp, Tetragenococcus halophilus
cgagcgcaggcggtgattta

SEQ ID NO: 36031 - DNA, 20 bp, Anaerococcus prevotii
gcaaaccgtaaggaagcagc

SEQ ID NO: 36032 - DNA, 20 bp, Micromonas micros
aaatctcggtgccgaagtta

SEQ ID NO: 36033 - DNA, 20 bp, Suttonella indologenes
ccttctggggcaatactgac

SEQ ID NO: 36034 - DNA, 20 bp, Campylobacter lari
tgtgaaatccaacggcttaa

SEQ ID NO: 36035 - DNA, 20 bp, Prevotella disiens
ttacgggagtgttactgacg

SEQ ID NO: 36036 - DNA, 20 bp, Corynebacterium glucuronolyticum
gacatatgtgagattgggct

SEQ ID NO: 36037 - DNA, 20 bp, Anaerococcus prevotii
ggaagcctcaatacaggtgg

SEQ ID NO: 36038 - DNA, 20 bp, Peptoniphilus indolicus
gggcttgacataatattgac

SEQ ID NO: 36039 - DNA, 20 bp, Clostridium clostridiiforme
gacggttaagcaagtctgaa

SEQ ID NO: 36040 - DNA, 20 bp, Alicyclobacillus acidocaldarius
ttccaaagccatcccatggt

SEQ ID NO: 36041 - DNA, 20 bp, Listeria monocytogenes
tgataaagtgtggcgcatgc

SEQ ID NO: 36042 - DNA, 20 bp, Peptostreptococcus anaerobius
atatcaaagtgttagcggta

SEQ ID NO: 36043 - DNA, 20 bp, Ochrobactrum intermedium
ttagtcttgagtatggaaga

SEQ ID NO: 36044 - DNA, 20 bp, Neisseria meningitidis
ctttctctctcaagacgtat

SEQ ID NO: 36045 - DNA, 20 bp, Aneurinibacillus aneurinilyticus
agaccgcatggtctgaaaga

SEQ ID NO: 36046 - DNA, 20 bp, Anaerococcus prevotii
taccagcatttcggatgggg

SEQ ID NO: 36047 - DNA, 20 bp, Methylobacterium mesophilicum
ctgttggggtgcttgcaccg

SEQ ID NO: 36048 - DNA, 20 bp, Clostridium clostridiiforme
tgggagtcagcaacgcccga

(The sequence listing continues in the following parts.)
